United States Patent Application Publication US 2014/0004565 A1 - sequence listing, part 121

SEQ ID NO: 3036500 - RNA, 19 nt, Artificial Sequence
  Description of Artificial Sequence: Synthetic oligonucleotide
ccagcuguugcccaacaag

SEQ ID NO: 3036501 - RNA, 19 nt, Artificial Sequence
  Description of Artificial Sequence: Synthetic oligonucleotide
acaacccagcuguugccca

SEQ ID NO: 3036502 - RNA, 19 nt, Artificial Sequence
  Description of Artificial Sequence: Synthetic oligonucleotide
cacaacccagcuguugccc

SEQ ID NO: 3036503 - RNA, 19 nt, Artificial Sequence
  Description of Artificial Sequence: Synthetic oligonucleotide
caaacaucacaacccagcu

SEQ ID NO: 3036504 - RNA, 19 nt, Artificial Sequence
  Description of Artificial Sequence: Synthetic oligonucleotide
caucacaacccagcuguug

SEQ ID NO: 3036505 - RNA, 19 nt, Artificial Sequence
  Description of Artificial Sequence: Synthetic oligonucleotide
agcuguugcccaacaagca

SEQ ID NO: 3036506 - RNA, 19 nt, Artificial Sequence
  Description of Artificial Sequence: Synthetic oligonucleotide
cacagugaauaacuccaaa

SEQ ID NO: 3036507 - RNA, 19 nt, Artificial Sequence
  Description of Artificial Sequence: Synthetic oligonucleotide
acccagcuguugcccaaca

SEQ ID NO: 3036508 - RNA, 19 nt, Artificial Sequence
  Description of Artificial Sequence: Synthetic oligonucleotide
caacccagcuguugcccaa

SEQ ID NO: 3036509 - RNA, 19 nt, Artificial Sequence
  Description of Artificial Sequence: Synthetic oligonucleotide
gcacagugaauaacuccaa

SEQ ID NO: 3036510 - RNA, 19 nt, Artificial Sequence
  Description of Artificial Sequence: Synthetic oligonucleotide
guugcccaacaagcagcaa

SEQ ID NO: 3036511 - RNA, 19 nt, Artificial Sequence
  Description of Artificial Sequence: Synthetic oligonucleotide
cccagcuguugcccaacaa

SEQ ID NO: 3036512 - RNA, 19 nt, Artificial Sequence
  Description of Artificial Sequence: Synthetic oligonucleotide
uuauguuuuacuuuaaucg

SEQ ID NO: 3036513 - RNA, 19 nt, Artificial Sequence
  Description of Artificial Sequence: Synthetic oligonucleotide
aauaaauacaugauuaggc

SEQ ID NO: 3036514 - RNA, 19 nt, Artificial Sequence
  Description of Artificial Sequence: Synthetic oligonucleotide
aauaagugaauucauguca

SEQ ID NO: 3036515 - RNA, 19 nt, Artificial Sequence
  Description of Artificial Sequence: Synthetic oligonucleotide
aaugacaauaagugaauuc

SEQ ID NO: 3036516 - RNA, 19 nt, Artificial Sequence
  Description of Artificial Sequence: Synthetic oligonucleotide
ucugaaauagccuuucggg

SEQ ID NO: 3036517 - RNA, 19 nt, Artificial Sequence
  Description of Artificial Sequence: Synthetic oligonucleotide
uuuuguuucucacacacug

SEQ ID NO: 3036518 - RNA, 19 nt, Artificial Sequence
  Description of Artificial Sequence: Synthetic oligonucleotide
uuaaucgaggaauaaauac

SEQ ID NO: 3036519 - RNA, 19 nt, Artificial Sequence
  Description of Artificial Sequence: Synthetic oligonucleotide
gaaaacagcauagaagacg

SEQ ID NO: 3036520 - RNA, 19 nt, Artificial Sequence
  Description of Artificial Sequence: Synthetic oligonucleotide
uguuuuacuuuaaucgagg

SEQ ID NO: 3036521 - RNA, 19 nt, Artificial Sequence
  Description of Artificial Sequence: Synthetic oligonucleotide
guuccagucacauugaccc

SEQ ID NO: 3036522 - RNA, 19 nt, Artificial Sequence
  Description of Artificial Sequence: Synthetic oligonucleotide
uuuacuuuaaucgaggaau

SEQ ID NO: 3036523 - RNA, 19 nt, Artificial Sequence
  Description of Artificial Sequence: Synthetic oligonucleotide
gaauaaauacaugauuagg

SEQ ID NO: 3036524 - RNA, 19 nt, Artificial Sequence
  Description of Artificial Sequence: Synthetic oligonucleotide
ucgaggaauaaauacauga

SEQ ID NO: 3036525 - RNA, 19 nt, Artificial Sequence
  Description of Artificial Sequence: Synthetic oligonucleotide
uaaucgaggaauaaauaca

SEQ ID NO: 3036526 - RNA, 19 nt, Artificial Sequence
  Description of Artificial Sequence: Synthetic oligonucleotide
aaaguguaaugcuucccac

SEQ ID NO: 3036527 - RNA, 19 nt, Artificial Sequence
  Description of Artificial Sequence: Synthetic oligonucleotide
auaaauacaugauuaggca

SEQ ID NO: 3036528 - RNA, 19 nt, Artificial Sequence
  Description of Artificial Sequence: Synthetic oligonucleotide
uauguuuuacuuuaaucga

SEQ ID NO: 3036529 - RNA, 19 nt, Artificial Sequence
  Description of Artificial Sequence: Synthetic oligonucleotide
uguaaugcuucccacuuag

SEQ ID NO: 3036530 - RNA, 19 nt, Artificial Sequence
  Description of Artificial Sequence: Synthetic oligonucleotide
ucaauguacaugauuuugc

SEQ ID NO: 3036531 - RNA, 19 nt, Artificial Sequence
  Description of Artificial Sequence: Synthetic oligonucleotide
acaauaagugaauucaugu

SEQ ID NO: 3036532 - RNA, 19 nt, Artificial Sequence
  Description of Artificial Sequence: Synthetic oligonucleotide
aaaugugugugacauuuug

SEQ ID NO: 3036533 - RNA, 19 nt, Artificial Sequence
  Description of Artificial Sequence: Synthetic oligonucleotide
agugaauucaugucaaugu

SEQ ID NO: 3036534 - RNA, 19 nt, Artificial Sequence
  Description of Artificial Sequence: Synthetic oligonucleotide
auuaggcaaaguguaaugc

SEQ ID NO: 3036535 - RNA, 19 nt, Artificial Sequence
  Description of Artificial Sequence: Synthetic oligonucleotide
cagaaaacagcauagaaga

SEQ ID NO: 3036536 - RNA, 19 nt, Artificial Sequence
  Description of Artificial Sequence: Synthetic oligonucleotide
guuucucacacacuggccg

SEQ ID NO: 3036537 - RNA, 19 nt, Artificial Sequence
  Description of Artificial Sequence: Synthetic oligonucleotide
aacagaaaacagcauagaa

SEQ ID NO: 3036538 - RNA, 19 nt, Artificial Sequence
  Description of Artificial Sequence: Synthetic oligonucleotide
cagaguuccagucacauug

SEQ ID NO: 3036539 - RNA, 19 nt, Artificial Sequence
  Description of Artificial Sequence: Synthetic oligonucleotide
aaaacagcauagaagacgu

SEQ ID NO: 3036540 - RNA, 19 nt, Artificial Sequence
  Description of Artificial Sequence: Synthetic oligonucleotide
uaggugaccacacaugucu

SEQ ID NO: 3036541 - RNA, 19 nt, Artificial Sequence
  Description of Artificial Sequence: Synthetic oligonucleotide
uuugccauuugcaggauga

SEQ ID NO: 3036542 - RNA, 19 nt, Artificial Sequence
  Description of Artificial Sequence: Synthetic oligonucleotide
aacagcauagaagacguug

SEQ ID NO: 3036543 - RNA, 19 nt, Artificial Sequence
  Description of Artificial Sequence: Synthetic oligonucleotide
ugaaauagccuuucgggga

SEQ ID NO: 3036544 - RNA, 19 nt, Artificial Sequence
  Description of Artificial Sequence: Synthetic oligonucleotide
cauuuuguuucucacacac

SEQ ID NO: 3036545 - RNA, 19 nt, Artificial Sequence
  Description of Artificial Sequence: Synthetic oligonucleotide
gucacauugaccccaacag

SEQ ID NO: 3036546 - RNA, 19 nt, Artificial Sequence
  Description of Artificial Sequence: Synthetic oligonucleotide
gaugagcccagguaugugg

SEQ ID NO: 3036547 - RNA, 19 nt, Artificial Sequence
  Description of Artificial Sequence: Synthetic oligonucleotide
cugaaauagccuuucgggg

SEQ ID NO: 3036548 - RNA, 19 nt, Artificial Sequence
  Description of Artificial Sequence: Synthetic oligonucleotide
gauuuugccauuugcagga

SEQ ID NO: 3036549 - RNA, 19 nt, Artificial Sequence
  Description of Artificial Sequence: Synthetic oligonucleotide
uggaacaccaggaaugaca

SEQ ID NO: 3036550 - RNA, 19 nt, Artificial Sequence
  Description of Artificial Sequence: Synthetic oligonucleotide
uuguuucucacacacuggc

SEQ ID NO: 3036551 - RNA, 19 nt, Artificial Sequence
  Description of Artificial Sequence: Synthetic oligonucleotide
auagaagacguugagcagg

SEQ ID NO: 3036552 - RNA, 19 nt, Artificial Sequence
  Description of Artificial Sequence: Synthetic oligonucleotide
ugaauucaugucaauguac

SEQ ID NO: 3036553 - RNA, 19 nt, Artificial Sequence
  Description of Artificial Sequence: Synthetic oligonucleotide
aaugcuucccacuuagaaa

SEQ ID NO: 3036554 - RNA, 19 nt, Artificial Sequence
  Description of Artificial Sequence: Synthetic oligonucleotide
auguacaugauuuugccau

SEQ ID NO: 3036555 - RNA, 19 nt, Artificial Sequence
  Description of Artificial Sequence: Synthetic oligonucleotide
augacaauaagugaauuca

SEQ ID NO: 3036556 - RNA, 19 nt, Artificial Sequence
  Description of Artificial Sequence: Synthetic oligonucleotide
uucccacuuagaaauagcc

SEQ ID NO: 3036557 - RNA, 19 nt, Artificial Sequence
  Description of Artificial Sequence: Synthetic oligonucleotide
cuuagaaauagcccgcccc

SEQ ID NO: 3036558 - RNA, 19 nt, Artificial Sequence
  Description of Artificial Sequence: Synthetic oligonucleotide
aagugcuccccagaguucc

SEQ ID NO: 3036559 - RNA, 19 nt, Artificial Sequence
  Description of Artificial Sequence: Synthetic oligonucleotide
uuuaaucgaggaauaaaua

SEQ ID NO: 3036560 - RNA, 19 nt, Artificial Sequence
  Description of Artificial Sequence: Synthetic oligonucleotide
gauuaggcaaaguguaaug

SEQ ID NO: 3036561 - RNA, 19 nt, Artificial Sequence
  Description of Artificial Sequence: Synthetic oligonucleotide
uuuuacuuuaaucgaggaa

SEQ ID NO: 3036562 - RNA, 19 nt, Artificial Sequence
  Description of Artificial Sequence: Synthetic oligonucleotide
aagugaauucaugucaaug

SEQ ID NO: 3036563 - RNA, 19 nt, Artificial Sequence
  Description of Artificial Sequence: Synthetic oligonucleotide
uaaugcuucccacuuagaa

SEQ ID NO: 3036564 - RNA, 19 nt, Artificial Sequence
  Description of Artificial Sequence: Synthetic oligonucleotide
aauacaugauuaggcaaag

SEQ ID NO: 3036565 - RNA, 19 nt, Artificial Sequence
  Description of Artificial Sequence: Synthetic oligonucleotide
aaauacaugauuaggcaaa

SEQ ID NO: 3036566 - RNA, 19 nt, Artificial Sequence
  Description of Artificial Sequence: Synthetic oligonucleotide
ucuuaggugaccacacaug

SEQ ID NO: 3036567 - RNA, 19 nt, Artificial Sequence
  Description of Artificial Sequence: Synthetic oligonucleotide
uuaggcaaaguguaaugcu

SEQ ID NO: 3036568 - RNA, 19 nt, Artificial Sequence
  Description of Artificial Sequence: Synthetic oligonucleotide
aacaccaggaaugacaaua

SEQ ID NO: 3036569 - RNA, 19 nt, Artificial Sequence
  Description of Artificial Sequence: Synthetic oligonucleotide
ggaauaaauacaugauuag

SEQ ID NO: 3036570 - RNA, 19 nt, Artificial Sequence
  Description of Artificial Sequence: Synthetic oligonucleotide
ugugacauuuuguuucuca

SEQ ID NO: 3036571 - RNA, 19 nt, Artificial Sequence
  Description of Artificial Sequence: Synthetic oligonucleotide
acuuagaaauagcccgccc

SEQ ID NO: 3036572 - RNA, 19 nt, Artificial Sequence
  Description of Artificial Sequence: Synthetic oligonucleotide
cucugaaauagccuuucgg

SEQ ID NO: 3036573 - RNA, 19 nt, Artificial Sequence
  Description of Artificial Sequence: Synthetic oligonucleotide
caauaagugaauucauguc

SEQ ID NO: 3036574 - RNA, 19 nt, Artificial Sequence
  Description of Artificial Sequence: Synthetic oligonucleotide
agcauagaagacguugagc

SEQ ID NO: 3036575 - RNA, 19 nt, Artificial Sequence
  Description of Artificial Sequence: Synthetic oligonucleotide
aaguguaaugcuucccacu

SEQ ID NO: 3036576 - RNA, 19 nt, Artificial Sequence
  Description of Artificial Sequence: Synthetic oligonucleotide
aaucgaggaauaaauacau

SEQ ID NO: 3036577 - RNA, 19 nt, Artificial Sequence
  Description of Artificial Sequence: Synthetic oligonucleotide
cccacuuagaaauagcccg

SEQ ID NO: 3036578 - RNA, 19 nt, Artificial Sequence
  Description of Artificial Sequence: Synthetic oligonucleotide
ccaggaaugacaauaagug

SEQ ID NO: 3036579 - RNA, 19 nt, Artificial Sequence
  Description of Artificial Sequence: Synthetic oligonucleotide
gaacauggcucucacagca

SEQ ID NO: 3036580 - RNA, 19 nt, Artificial Sequence
  Description of Artificial Sequence: Synthetic oligonucleotide
gacaauaagugaauucaug

SEQ ID NO: 3036581 - RNA, 19 nt, Artificial Sequence
  Description of Artificial Sequence: Synthetic oligonucleotide
ucccacuuagaaauagccc

SEQ ID NO: 3036582 - RNA, 19 nt, Artificial Sequence
  Description of Artificial Sequence: Synthetic oligonucleotide
gaauucaugucaauguaca

SEQ ID NO: 3036583 - RNA, 19 nt, Artificial Sequence
  Description of Artificial Sequence: Synthetic oligonucleotide
aggaauaaauacaugauua

SEQ ID NO: 3036584 - RNA, 19 nt, Artificial Sequence
  Description of Artificial Sequence: Synthetic oligonucleotide
caugauuuugccauuugca

SEQ ID NO: 3036585 - RNA, 19 nt, Artificial Sequence
  Description of Artificial Sequence: Synthetic oligonucleotide
uuucucacacacuggccgg

SEQ ID NO: 3036586 - RNA, 19 nt, Artificial Sequence
  Description of Artificial Sequence: Synthetic oligonucleotide
uucggggacucuuagguga

SEQ ID NO: 3036587 - RNA, 19 nt, Artificial Sequence
  Description of Artificial Sequence: Synthetic oligonucleotide
ugucaggaggcagagaaca

SEQ ID NO: 3036588 - RNA, 19 nt, Artificial Sequence
  Description of Artificial Sequence: Synthetic oligonucleotide
aauucaugucaauguacau

SEQ ID NO: 3036589 - RNA, 19 nt, Artificial Sequence
  Description of Artificial Sequence: Synthetic oligonucleotide
ugacauuuuguuucucaca

SEQ ID NO: 3036590 - RNA, 19 nt, Artificial Sequence
  Description of Artificial Sequence: Synthetic oligonucleotide
agcaggagucacuaaaugu

SEQ ID NO: 3036591 - RNA, 19 nt, Artificial Sequence
  Description of Artificial Sequence: Synthetic oligonucleotide
gcauagaagacguugagca

SEQ ID NO: 3036592 - RNA, 19 nt, Artificial Sequence
  Description of Artificial Sequence: Synthetic oligonucleotide
aggaaugacaauaagugaa

SEQ ID NO: 3036593 - RNA, 19 nt, Artificial Sequence
  Description of Artificial Sequence: Synthetic oligonucleotide
gaaauagccuuucggggac

SEQ ID NO: 3036594 - RNA, 19 nt, Artificial Sequence
  Description of Artificial Sequence: Synthetic oligonucleotide
ucacauugaccccaacaga

SEQ ID NO: 3036595 - RNA, 19 nt, Artificial Sequence
  Description of Artificial Sequence: Synthetic oligonucleotide
uagaagacguugagcaggc

SEQ ID NO: 3036596 - RNA, 19 nt, Artificial Sequence
  Description of Artificial Sequence: Synthetic oligonucleotide
agucacauugaccccaaca

SEQ ID NO: 3036597 - RNA, 19 nt, Artificial Sequence
  Description of Artificial Sequence: Synthetic oligonucleotide
uguuucucacacacuggcc

SEQ ID NO: 3036598 - RNA, 19 nt, Artificial Sequence
  Description of Artificial Sequence: Synthetic oligonucleotide
gaccacacaugucuccugg

SEQ ID NO: 3036599 - RNA, 19 nt, Artificial Sequence
  Description of Artificial Sequence: Synthetic oligonucleotide
aguuccagucacauugacc

SEQ ID NO: 3036600 - RNA, 19 nt, Artificial Sequence
  Description of Artificial Sequence: Synthetic oligonucleotide
caugauuaggcaaagugua

SEQ ID NO: 3036601 - RNA, 19 nt, Artificial Sequence
  Description of Artificial Sequence: Synthetic oligonucleotide
ugacaauaagugaauucau

SEQ ID NO: 3036602 - RNA, 19 nt, Artificial Sequence
  Description of Artificial Sequence: Synthetic oligonucleotide
gucaauguacaugauuuug

SEQ ID NO: 3036603 - RNA, 19 nt, Artificial Sequence
  Description of Artificial Sequence: Synthetic oligonucleotide
acauggcucucacagcagg

SEQ ID NO: 3036604 - RNA, 19 nt, Artificial Sequence
  Description of Artificial Sequence: Synthetic oligonucleotide
uuacuuuaaucgaggaaua

SEQ ID NO: 3036605 - RNA, 19 nt, Artificial Sequence
  Description of Artificial Sequence: Synthetic oligonucleotide
acaugauuaggcaaagugu

SEQ ID NO: 3036606 - RNA, 19 nt, Artificial Sequence
  Description of Artificial Sequence: Synthetic oligonucleotide
auguuuuacuuuaaucgag

SEQ ID NO: 3036607 - RNA, 19 nt, Artificial Sequence
  Description of Artificial Sequence: Synthetic oligonucleotide
aaugugugugacauuuugu

SEQ ID NO: 3036608 - RNA, 19 nt, Artificial Sequence
  Description of Artificial Sequence: Synthetic oligonucleotide
aagacguugagcaggcgug

SEQ ID NO: 3036609 - RNA, 19 nt, Artificial Sequence
  Description of Artificial Sequence: Synthetic oligonucleotide
cauagaagacguugagcag

SEQ ID NO: 3036610 - RNA, 19 nt, Artificial Sequence
  Description of Artificial Sequence: Synthetic oligonucleotide
auugaccccaacagaaaac

SEQ ID NO: 3036611 - RNA, 19 nt, Artificial Sequence
  Description of Artificial Sequence: Synthetic oligonucleotide
aguguaaugcuucccacuu

SEQ ID NO: 3036612 - RNA, 19 nt, Artificial Sequence
  Description of Artificial Sequence: Synthetic oligonucleotide
ccaacagaaaacagcauag

SEQ ID NO: 3036613 - RNA, 19 nt, Artificial Sequence
  Description of Artificial Sequence: Synthetic oligonucleotide
uacaugauuuugccauuug

SEQ ID NO: 3036614 - RNA, 19 nt, Artificial Sequence
  Description of Artificial Sequence: Synthetic oligonucleotide
augugugugacauuuuguu

SEQ ID NO: 3036615 - RNA, 19 nt, Artificial Sequence
  Description of Artificial Sequence: Synthetic oligonucleotide
uaggcaaaguguaaugcuu

SEQ ID NO: 3036616 - RNA, 19 nt, Artificial Sequence
  Description of Artificial Sequence: Synthetic oligonucleotide
gagucacuaaaugugugug

SEQ ID NO: 3036617 - RNA, 19 nt, Artificial Sequence
  Description of Artificial Sequence: Synthetic oligonucleotide
gaccccaacagaaaacagc

SEQ ID NO: 3036618 - RNA, 19 nt, Artificial Sequence
  Description of Artificial Sequence: Synthetic oligonucleotide
agaaaacagcauagaagac

SEQ ID NO: 3036619 - RNA, 19 nt, Artificial Sequence
  Description of Artificial Sequence: Synthetic oligonucleotide
cuuuaaucgaggaauaaau

SEQ ID NO: 3036620 - RNA, 19 nt, Artificial Sequence
  Description of Artificial Sequence: Synthetic oligonucleotide
caaaguguaaugcuuccca

SEQ ID NO: 3036621 - RNA, 19 nt, Artificial Sequence
  Description of Artificial Sequence: Synthetic oligonucleotide
uuuugccauuugcaggaug

SEQ ID NO: 3036622 - RNA, 19 nt, Artificial Sequence
  Description of Artificial Sequence: Synthetic oligonucleotide
ugauuaggcaaaguguaau

SEQ ID NO: 3036623 - RNA, 19 nt, Artificial Sequence
  Description of Artificial Sequence: Synthetic oligonucleotide
gugacauuuuguuucucac

SEQ ID NO: 3036624 - RNA, 19 nt, Artificial Sequence
  Description of Artificial Sequence: Synthetic oligonucleotide
guguggaacaccaggaaug

SEQ ID NO: 3036625 - RNA, 19 nt, Artificial Sequence
  Description of Artificial Sequence: Synthetic oligonucleotide
acacaugucuccuggugug

SEQ ID NO: 3036626 - RNA, 19 nt, Artificial Sequence
  Description of Artificial Sequence: Synthetic oligonucleotide
cuucccacuuagaaauagc

SEQ ID NO: 3036627 - RNA, 19 nt, Artificial Sequence
  Description of Artificial Sequence: Synthetic oligonucleotide
guuuuacuuuaaucgagga

SEQ ID NO: 3036628 - RNA, 19 nt, Artificial Sequence
  Description of Artificial Sequence: Synthetic oligonucleotide
accaggaaugacaauaagu

SEQ ID NO: 3036629 - RNA, 19 nt, Artificial Sequence
  Description of Artificial Sequence: Synthetic oligonucleotide
agucacuaaauguguguga

SEQ ID NO: 3036630 - RNA, 19 nt, Artificial Sequence
  Description of Artificial Sequence: Synthetic oligonucleotide
gucacuaaaugugugugac

SEQ ID NO: 3036631 - RNA, 19 nt, Artificial Sequence
  Description of Artificial Sequence: Synthetic oligonucleotide
gaggcagagaacauggcuc

SEQ ID NO: 3036632 - RNA, 19 nt, Artificial Sequence
  Description of Artificial Sequence: Synthetic oligonucleotide
aauagccuuucggggacuc

SEQ ID NO: 3036633 - RNA, 19 nt, Artificial Sequence
  Description of Artificial Sequence: Synthetic oligonucleotide
uguggaacaccaggaauga

SEQ ID NO: 3036634 - RNA, 19 nt, Artificial Sequence
  Description of Artificial Sequence: Synthetic oligonucleotide
acuuuaaucgaggaauaaa

SEQ ID NO: 3036635 - RNA, 19 nt, Artificial Sequence
  Description of Artificial Sequence: Synthetic oligonucleotide
ugugugugacauuuuguuu

SEQ ID NO: 3036636 - RNA, 19 nt, Artificial Sequence
  Description of Artificial Sequence: Synthetic oligonucleotide
ucaggaggcagagaacaug

SEQ ID NO: 3036637 - RNA, 19 nt, Artificial Sequence
  Description of Artificial Sequence: Synthetic oligonucleotide
ucacuaaaugugugugaca

SEQ ID NO: 3036638 - RNA, 19 nt, Artificial Sequence
  Description of Artificial Sequence: Synthetic oligonucleotide
gccauuugcaggaugagcc

SEQ ID NO: 3036639 - RNA, 19 nt, Artificial Sequence
  Description of Artificial Sequence: Synthetic oligonucleotide
auaagugaauucaugucaa

SEQ ID NO: 3036640 - RNA, 19 nt, Artificial Sequence
  Description of Artificial Sequence: Synthetic oligonucleotide
accccaacagaaaacagca

SEQ ID NO: 3036641 - RNA, 19 nt, Artificial Sequence
  Description of Artificial Sequence: Synthetic oligonucleotide
uggccggucucucugaaau

SEQ ID NO: 3036642 - RNA, 19 nt, Artificial Sequence
  Description of Artificial Sequence: Synthetic oligonucleotide
aggcaaaguguaaugcuuc

SEQ ID NO: 3036643 - RNA, 19 nt, Artificial Sequence
  Description of Artificial Sequence: Synthetic oligonucleotide
ugagcaggcgugucaggag

SEQ ID NO: 3036644 - RNA, 19 nt, Artificial Sequence
  Description of Artificial Sequence: Synthetic oligonucleotide
gaggaauaaauacaugauu

SEQ ID NO: 3036645 - RNA, 19 nt, Artificial Sequence
  Description of Artificial Sequence: Synthetic oligonucleotide
uccagucacauugacccca

SEQ ID NO: 3036646 - RNA, 19 nt, Artificial Sequence
  Description of Artificial Sequence: Synthetic oligonucleotide
uuaggugaccacacauguc

SEQ ID NO: 3036647 - RNA, 19 nt, Artificial Sequence
  Description of Artificial Sequence: Synthetic oligonucleotide
uuucggggacucuuaggug

SEQ ID NO: 3036648 - RNA, 19 nt, Artificial Sequence
  Description of Artificial Sequence: Synthetic oligonucleotide
aggcagagaacauggcucu

SEQ ID NO: 3036649 - RNA, 19 nt, Artificial Sequence
  Description of Artificial Sequence: Synthetic oligonucleotide
gcaggagucacuaaaugug

SEQ ID NO: 3036650 - RNA, 19 nt, Artificial Sequence
  Description of Artificial Sequence: Synthetic oligonucleotide
uugagcaggcgugucagga

SEQ ID NO: 3036651 - RNA, 19 nt, Artificial Sequence
  Description of Artificial Sequence: Synthetic oligonucleotide
caggaaugacaauaaguga

SEQ ID NO: 3036652 - RNA, 19 nt, Artificial Sequence
  Description of Artificial Sequence: Synthetic oligonucleotide
acauuuuguuucucacaca

SEQ ID NO: 3036653 - RNA, 19 nt, Artificial Sequence
  Description of Artificial Sequence: Synthetic oligonucleotide
gaagacguugagcaggcgu

SEQ ID NO: 3036654 - RNA, 19 nt, Artificial Sequence
  Description of Artificial Sequence: Synthetic oligonucleotide
ugucuccugguguggaaca

SEQ ID NO: 3036655 - RNA, 19 nt, Artificial Sequence
  Description of Artificial Sequence: Synthetic oligonucleotide
gacucuuaggugaccacac

SEQ ID NO: 3036656 - RNA, 19 nt, Artificial Sequence
  Description of Artificial Sequence: Synthetic oligonucleotide
acagcauagaagacguuga

SEQ ID NO: 3036657 - RNA, 19 nt, Artificial Sequence
  Description of Artificial Sequence: Synthetic oligonucleotide
augucuccugguguggaac

SEQ ID NO: 3036658 - RNA, 19 nt, Artificial Sequence
  Description of Artificial Sequence: Synthetic oligonucleotide
uaagugaauucaugucaau

SEQ ID NO: 3036659 - RNA, 19 nt, Artificial Sequence
  Description of Artificial Sequence: Synthetic oligonucleotide
gugaauucaugucaaugua

SEQ ID NO: 3036660 - RNA, 19 nt, Artificial Sequence
  Description of Artificial Sequence: Synthetic oligonucleotide
uacuuuaaucgaggaauaa

SEQ ID NO: 3036661 - RNA, 19 nt, Artificial Sequence
  Description of Artificial Sequence: Synthetic oligonucleotide
ugguguggaacaccaggaa

SEQ ID NO: 3036662 - RNA, 19 nt, Artificial Sequence
  Description of Artificial Sequence: Synthetic oligonucleotide
cagcauagaagacguugag

SEQ ID NO: 3036663 - RNA, 19 nt, Artificial Sequence
  Description of Artificial Sequence: Synthetic oligonucleotide
uguacaugauuuugccauu

SEQ ID NO: 3036664 - RNA, 19 nt, Artificial Sequence
  Description of Artificial Sequence: Synthetic oligonucleotide
ccugguguggaacaccagg

SEQ ID NO: 3036665 - RNA, 19 nt, Artificial Sequence
  Description of Artificial Sequence: Synthetic oligonucleotide
uuugcaggaugagcccagg

SEQ ID NO: 3036666 - RNA, 19 nt, Artificial Sequence
  Description of Artificial Sequence: Synthetic oligonucleotide
uaaaugugugugacauuuu

SEQ ID NO: 3036667 - RNA, 19 nt, Artificial Sequence
  Description of Artificial Sequence: Synthetic oligonucleotide
cuuaggugaccacacaugu

SEQ ID NO: 3036668 - RNA, 19 nt, Artificial Sequence
  Description of Artificial Sequence: Synthetic oligonucleotide
ucucucugaaauagccuuu

SEQ ID NO: 3036669 - RNA, 19 nt, Artificial Sequence
  Description of Artificial Sequence: Synthetic oligonucleotide
cuuucggggacucuuaggu

SEQ ID NO: 3036670 - RNA, 19 nt, Artificial Sequence
  Description of Artificial Sequence: Synthetic oligonucleotide
ggcaaaguguaaugcuucc

SEQ ID NO: 3036671 - RNA, 19 nt, Artificial Sequence
  Description of Artificial Sequence: Synthetic oligonucleotide
uggcucucacagcaggagu

SEQ ID NO: 3036672 - RNA, 19 nt, Artificial Sequence
  Description of Artificial Sequence: Synthetic oligonucleotide
aacauggcucucacagcag

SEQ ID NO: 3036673 - RNA, 19 nt, Artificial Sequence
  Description of Artificial Sequence: Synthetic oligonucleotide
cacuuagaaauagcccgcc

SEQ ID NO: 3036674 - RNA, 19 nt, Artificial Sequence
  Description of Artificial Sequence: Synthetic oligonucleotide
cuaaaugugugugacauuu

SEQ ID NO: 3036675 - RNA, 19 nt, Artificial Sequence
  Description of Artificial Sequence: Synthetic oligonucleotide
cauugaccccaacagaaaa

SEQ ID NO: 3036676 - RNA, 19 nt, Artificial Sequence
  Description of Artificial Sequence: Synthetic oligonucleotide
cagcaggagucacuaaaug

SEQ ID NO: 3036677 - RNA, 19 nt, Artificial Sequence
  Description of Artificial Sequence: Synthetic oligonucleotide
cugguguggaacaccagga

SEQ ID NO: 3036678 - RNA, 19 nt, Artificial Sequence
  Description of Artificial Sequence: Synthetic oligonucleotide
ccagguauguggaaugcac

SEQ ID NO: 3036679 - RNA, 19 nt, Artificial Sequence
  Description of Artificial Sequence: Synthetic oligonucleotide
ugaccacacaugucuccug

SEQ ID NO: 3036680 - RNA, 19 nt, Artificial Sequence
  Description of Artificial Sequence: Synthetic oligonucleotide
acacuggccggucucucug

SEQ ID NO: 3036681 - RNA, 19 nt, Artificial Sequence
  Description of Artificial Sequence: Synthetic oligonucleotide
caggaugagcccagguaug

SEQ ID NO: 3036682 - RNA, 19 nt, Artificial Sequence
  Description of Artificial Sequence: Synthetic oligonucleotide
acucuuaggugaccacaca

SEQ ID NO: 3036683 - RNA, 19 nt, Artificial Sequence
  Description of Artificial Sequence: Synthetic oligonucleotide
gaguuccagucacauugac

SEQ ID NO: 3036684 - RNA, 19 nt, Artificial Sequence
  Description of Artificial Sequence: Synthetic oligonucleotide
ucacacacuggccggucuc

SEQ ID NO: 3036685 - RNA, 19 nt, Artificial Sequence
  Description of Artificial Sequence: Synthetic oligonucleotide
cacagcaggagucacuaaa

SEQ ID NO: 3036686 - RNA, 19 nt, Artificial Sequence
  Description of Artificial Sequence: Synthetic oligonucleotide
auuugcaggaugagcccag

SEQ ID NO: 3036687 - RNA, 19 nt, Artificial Sequence
  Description of Artificial Sequence: Synthetic oligonucleotide
guugagcaggcgugucagg

SEQ ID NO: 3036688 - RNA, 19 nt, Artificial Sequence
  Description of Artificial Sequence: Synthetic oligonucleotide
ucuccugguguggaacacc

SEQ ID NO: 3036689 - RNA, 19 nt, Artificial Sequence
  Description of Artificial Sequence: Synthetic oligonucleotide
ggugaccacacaugucucc

SEQ ID NO: 3036690 - RNA, 19 nt, Artificial Sequence
  Description of Artificial Sequence: Synthetic oligonucleotide
ccacuuagaaauagcccgc

SEQ ID NO: 3036691 - RNA, 19 nt, Artificial Sequence
  Description of Artificial Sequence: Synthetic oligonucleotide
acuaaaugugugugacauu

SEQ ID NO: 3036692 - RNA, 19 nt, Artificial Sequence
  Description of Artificial Sequence: Synthetic oligonucleotide
uugccauuugcaggaugag

SEQ ID NO: 3036693 - RNA, 19 nt, Artificial Sequence
  Description of Artificial Sequence: Synthetic oligonucleotide
auuuuguuucucacacacu

SEQ ID NO: 3036694 - RNA, 19 nt, Artificial Sequence
  Description of Artificial Sequence: Synthetic oligonucleotide
aucgaggaauaaauacaug

SEQ ID NO: 3036695 - RNA, 19 nt, Artificial Sequence
  Description of Artificial Sequence: Synthetic oligonucleotide
cucucugaaauagccuuuc

SEQ ID NO: 3036696 - RNA, 19 nt, Artificial Sequence
  Description of Artificial Sequence: Synthetic oligonucleotide
ucaugucaauguacaugau

SEQ ID NO: 3036697 - RNA, 19 nt, Artificial Sequence
  Description of Artificial Sequence: Synthetic oligonucleotide
uugcaggaugagcccaggu

SEQ ID NO: 3036698 - RNA, 19 nt, Artificial Sequence
  Description of Artificial Sequence: Synthetic oligonucleotide
acguugagcaggcguguca

SEQ ID NO: 3036699 - RNA, 19 nt, Artificial Sequence
  Description of Artificial Sequence: Synthetic oligonucleotide
aggagucacuaaaugugug

SEQ ID NO: 3036700 - RNA, 19 nt, Artificial Sequence
  Description of Artificial Sequence: Synthetic oligonucleotide
agcaggcgugucaggaggc

SEQ ID NO: 3036701 - RNA, 19 nt, Artificial Sequence
  Description of Artificial Sequence: Synthetic oligonucleotide
uccugguguggaacaccag

SEQ ID NO: 3036702 - RNA, 19 nt, Artificial Sequence
  Description of Artificial Sequence: Synthetic oligonucleotide
ucggggacucuuaggugac

SEQ ID NO: 3036703 - RNA, 19 nt, Artificial Sequence
  Description of Artificial Sequence: Synthetic oligonucleotide
aaauagccuuucggggacu

SEQ ID NO: 3036704 - RNA, 19 nt, Artificial Sequence
  Description of Artificial Sequence: Synthetic oligonucleotide
gucucucugaaauagccuu

SEQ ID NO: 3036705 - RNA, 19 nt, Artificial Sequence
  Description of Artificial Sequence: Synthetic oligonucleotide
auacaugauuaggcaaagu

SEQ ID NO: 3036706 - RNA, 19 nt, Artificial Sequence
  Description of Artificial Sequence: Synthetic oligonucleotide
cacuaaaugugugugacau

SEQ ID NO: 3036707 - RNA, 19 nt, Artificial Sequence
  Description of Artificial Sequence: Synthetic oligonucleotide
cacaugucuccuggugugg

SEQ ID NO: 3036708 - RNA, 19 nt, Artificial Sequence
  Description of Artificial Sequence: Synthetic oligonucleotide
augauuaggcaaaguguaa

SEQ ID NO: 3036709 - RNA, 19 nt, Artificial Sequence
  Description of Artificial Sequence: Synthetic oligonucleotide
cuccugguguggaacacca

SEQ ID NO: 3036710 - RNA, 19 nt, Artificial Sequence
  Description of Artificial Sequence: Synthetic oligonucleotide
aggaugagcccagguaugu

SEQ ID NO: 3036711 - RNA, 19 nt, Artificial Sequence
  Description of Artificial Sequence: Synthetic oligonucleotide
ccauuugcaggaugagccc

SEQ ID NO: 3036712 - RNA, 19 nt, Artificial Sequence
  Description of Artificial Sequence: Synthetic oligonucleotide
gcuucccacuuagaaauag

SEQ ID NO: 3036713 - RNA, 19 nt, Artificial Sequence
  Description of Artificial Sequence: Synthetic oligonucleotide
gccggucucucugaaauag

SEQ ID NO: 3036714 - RNA, 19 nt, Artificial Sequence
  Description of Artificial Sequence: Synthetic oligonucleotide
ggaacaccaggaaugacaa

SEQ ID NO: 3036715 - RNA, 19 nt, Artificial Sequence
  Description of Artificial Sequence: Synthetic oligonucleotide
acaccaggaaugacaauaa

SEQ ID NO: 3036716 - RNA, 19 nt, Artificial Sequence
  Description of Artificial Sequence: Synthetic oligonucleotide
cauuugcaggaugagccca

SEQ ID NO: 3036717 - RNA, 19 nt, Artificial Sequence
  Description of Artificial Sequence: Synthetic oligonucleotide
caagugcuccccagaguuc

SEQ ID NO: 3036718 - RNA, 19 nt, Artificial Sequence
  Description of Artificial Sequence: Synthetic oligonucleotide
accacacaugucuccuggu

SEQ ID NO: 3036719 - RNA, 19 nt, Artificial Sequence
  Description of Artificial Sequence: Synthetic oligonucleotide
aggugaccacacaugucuc

SEQ ID NO: 3036720 - RNA, 19 nt, Artificial Sequence
  Description of Artificial Sequence: Synthetic oligonucleotide
ugagcccagguauguggaa

SEQ ID NO: 3036721 - RNA, 19 nt, Artificial Sequence
  Description of Artificial Sequence: Synthetic oligonucleotide
cggucucucugaaauagcc

SEQ ID NO: 3036722 - RNA, 19 nt, Artificial Sequence
  Description of Artificial Sequence: Synthetic oligonucleotide
agaguuccagucacauuga

SEQ ID NO: 3036723 - RNA, 19 nt, Artificial Sequence
  Description of Artificial Sequence: Synthetic oligonucleotide
gcaaaguguaaugcuuccc

SEQ ID NO: 3036724 - RNA, 19 nt, Artificial Sequence
  Description of Artificial Sequence: Synthetic oligonucleotide
caugucaauguacaugauu

SEQ ID NO: 3036725 - RNA, 19 nt, Artificial Sequence
  Description of Artificial Sequence: Synthetic oligonucleotide
uucucacacacuggccggu

SEQ ID NO: 3036726 - RNA, 19 nt, Artificial Sequence
  Description of Artificial Sequence: Synthetic oligonucleotide
ggagucacuaaaugugugu

SEQ ID NO: 3036727 - RNA, 19 nt, Artificial Sequence
  Description of Artificial Sequence: Synthetic oligonucleotide
ugcuucccacuuagaaaua

SEQ ID NO: 3036728 - RNA, 19 nt, Artificial Sequence
  Description of Artificial Sequence: Synthetic oligonucleotide
acaugucuccuggugugga

SEQ ID NO: 3036729 - RNA, 19 nt, Artificial Sequence
  Description of Artificial Sequence: Synthetic oligonucleotide
augagcccagguaugugga

SEQ ID NO: 3036730 - RNA, 19 nt, Artificial Sequence
  Description of Artificial Sequence: Synthetic oligonucleotide
acauugaccccaacagaaa

SEQ ID NO: 3036731 - RNA, 19 nt, Artificial Sequence
  Description of Artificial Sequence: Synthetic oligonucleotide
gaaugacaauaagugaauu

SEQ ID NO: 3036732 - RNA, 19 nt, Artificial Sequence
  Description of Artificial Sequence: Synthetic oligonucleotide
ccuuucggggacucuuagg

SEQ ID NO: 3036733 - RNA, 19 nt, Artificial Sequence
  Description of Artificial Sequence: Synthetic oligonucleotide
ugcuccccagaguuccagu

SEQ ID NO: 3036734 - RNA, 19 nt, Artificial Sequence
  Description of Artificial Sequence: Synthetic oligonucleotide
cacacaugucuccuggugu

SEQ ID NO: 3036735 - RNA, 19 nt, Artificial Sequence
  Description of Artificial Sequence: Synthetic oligonucleotide
uagccuuucggggacucuu

SEQ ID NO: 3036736 - RNA, 19 nt, Artificial Sequence
  Description of Artificial Sequence: Synthetic oligonucleotide
cucacagcaggagucacua

SEQ ID NO: 3036737 - RNA, 19 nt, Artificial Sequence
  Description of Artificial Sequence: Synthetic oligonucleotide
ggaggcagagaacauggcu

SEQ ID NO: 3036738 - RNA, 19 nt, Artificial Sequence
  Description of Artificial Sequence: Synthetic oligonucleotide
cccaacagaaaacagcaua

SEQ ID NO: 3036739 - RNA, 19 nt, Artificial Sequence
  Description of Artificial Sequence: Synthetic oligonucleotide
agacguugagcaggcgugu

SEQ ID NO: 3036740 - RNA, 19 nt, Artificial Sequence
  Description of Artificial Sequence: Synthetic oligonucleotide
cucuuaggugaccacacau

SEQ ID NO: 3036741 - RNA, 19 nt, Artificial Sequence
  Description of Artificial Sequence: Synthetic oligonucleotide
ucacagcaggagucacuaa

SEQ ID NO: 3036742 - RNA, 19 nt, Artificial Sequence
  Description of Artificial Sequence: Synthetic oligonucleotide
ggacucuuaggugaccaca

SEQ ID NO: 3036743 - RNA, 19 nt, Artificial Sequence
  Description of Artificial Sequence: Synthetic oligonucleotide
gcaggaugagcccagguau

SEQ ID NO: 3036744 - RNA, 19 nt, Artificial Sequence
  Description of Artificial Sequence: Synthetic oligonucleotide
cgugucaggaggcagagaa

SEQ ID NO: 3036745 - RNA, 19 nt, Artificial Sequence
  Description of Artificial Sequence: Synthetic oligonucleotide
ccacacaugucuccuggug

SEQ ID NO: 3036746 - RNA, 19 nt, Artificial Sequence
  Description of Artificial Sequence: Synthetic oligonucleotide
caggcgugucaggaggcag

SEQ ID NO: 3036747 - RNA, 19 nt, Artificial Sequence
  Description of Artificial Sequence: Synthetic oligonucleotide
ggcucucacagcaggaguc

SEQ ID NO: 3036748 - RNA, 19 nt, Artificial Sequence
  Description of Artificial Sequence: Synthetic oligonucleotide
guguaaugcuucccacuua

SEQ ID NO: 3036749 - RNA, 19 nt, Artificial Sequence
  Description of Artificial Sequence: Synthetic oligonucleotide
ucucacacacuggccgguc

SEQ ID NO: 3036750 - RNA, 19 nt, Artificial Sequence
  Description of Artificial Sequence: Synthetic oligonucleotide
guaaugcuucccacuuaga

SEQ ID NO: 3036751 - RNA, 19 nt, Artificial Sequence
  Description of Artificial Sequence: Synthetic oligonucleotide
gccuuucggggacucuuag

SEQ ID NO: 3036752 - RNA, 19 nt, Artificial Sequence
  Description of Artificial Sequence: Synthetic oligonucleotide
gguguggaacaccaggaau

SEQ ID NO: 3036753 - RNA, 19 nt, Artificial Sequence
  Description of Artificial Sequence: Synthetic oligonucleotide
gacguugagcaggcguguc

SEQ ID NO: 3036754 - RNA, 19 nt, Artificial Sequence
  Description of Artificial Sequence: Synthetic oligonucleotide
ggaaugacaauaagugaau

SEQ ID NO: 3036755 - RNA, 19 nt, Artificial Sequence
  Description of Artificial Sequence: Synthetic oligonucleotide
auagccuuucggggacucu

SEQ ID NO: 3036756 - RNA, 19 nt, Artificial Sequence
  Description of Artificial Sequence: Synthetic oligonucleotide
gugucaggaggcagagaac

SEQ ID NO: 3036757 - RNA, 19 nt, Artificial Sequence
  Description of Artificial Sequence: Synthetic oligonucleotide
auuuugccauuugcaggau

SEQ ID NO: 3036758 - RNA, 19 nt, Artificial Sequence
  Description of Artificial Sequence: Synthetic oligonucleotide
caugucuccugguguggaa

SEQ ID NO: 3036759 - RNA, 19 nt, Artificial Sequence
  Description of Artificial Sequence: Synthetic oligonucleotide
aggcgugucaggaggcaga

SEQ ID NO: 3036760 - RNA, 19 nt, Artificial Sequence
  Description of Artificial Sequence: Synthetic oligonucleotide
gcuccccagaguuccaguc

SEQ ID NO: 3036761 - RNA, 19 nt, Artificial Sequence
  Description of Artificial Sequence: Synthetic oligonucleotide
guggaacaccaggaaugac

SEQ ID NO: 3036762 - RNA, 19 nt, Artificial Sequence
  Description of Artificial Sequence: Synthetic oligonucleotide
gggacucuuaggugaccac

SEQ ID NO: 3036763 - RNA, 19 nt, Artificial Sequence
  Description of Artificial Sequence: Synthetic oligonucleotide
gugaccacacaugucuccu

SEQ ID NO: 3036764 - RNA, 19 nt, Artificial Sequence
  Description of Artificial Sequence: Synthetic oligonucleotide
ggcgugucaggaggcagag

SEQ ID NO: 3036765 - RNA, 19 nt, Artificial Sequence
  Description of Artificial Sequence: Synthetic oligonucleotide
gucuccugguguggaacac

SEQ ID NO: 3036766 - RNA, 19 nt, Artificial Sequence
  Description of Artificial Sequence: Synthetic oligonucleotide
gugcuccccagaguuccag

SEQ ID NO: 3036767 - RNA, 19 nt, Artificial Sequence
  Description of Artificial Sequence: Synthetic oligonucleotide
ccccaagugcuccccagag

SEQ ID NO: 3036768 - RNA, 19 nt, Artificial Sequence
  Description of Artificial Sequence: Synthetic oligonucleotide
ccggucucucugaaauagc

SEQ ID NO: 3036769 - RNA, 19 nt, Artificial Sequence
  Description of Artificial Sequence: Synthetic oligonucleotide
ggaugagcccagguaugug

SEQ ID NO: 3036770 - RNA, 19 nt, Artificial Sequence
  Description of Artificial Sequence: Synthetic oligonucleotide
ggggacucuuaggugacca

SEQ ID NO: 3036771 - RNA, 19 nt, Artificial Sequence
  Description of Artificial Sequence: Synthetic oligonucleotide
cguugagcaggcgugucag

SEQ ID NO: 3036772 - RNA, 19 nt, Artificial Sequence
  Description of Artificial Sequence: Synthetic oligonucleotide
guacaugauuuugccauuu

SEQ ID NO: 3036773 - RNA, 19 nt, Artificial Sequence
  Description of Artificial Sequence: Synthetic oligonucleotide
cagucacauugaccccaac

SEQ ID NO: 3036774 - RNA, 19 nt, Artificial Sequence
  Description of Artificial Sequence: Synthetic oligonucleotide
gagcccagguauguggaau

SEQ ID NO: 3036775 - RNA, 19 nt, Artificial Sequence
  Description of Artificial Sequence: Synthetic oligonucleotide
gaacaccaggaaugacaau

SEQ ID NO: 3036776 - RNA, 19 nt, Artificial Sequence
  Description of Artificial Sequence: Synthetic oligonucleotide
gcccagguauguggaaugc

SEQ ID NO: 3036777 - RNA, 19 nt, Artificial Sequence
  Description of Artificial Sequence: Synthetic oligonucleotide
ccaagugcuccccagaguu

SEQ ID NO: 3036778 - RNA, 19 nt, Artificial Sequence
  Description of Artificial Sequence: Synthetic oligonucleotide
ggucucucugaaauagccu

SEQ ID NO: 3036779 - RNA, 19 nt, Artificial Sequence
  Description of Artificial Sequence: Synthetic oligonucleotide
cacuggccggucucucuga

SEQ ID NO: 3036780 - RNA, 19 nt, Artificial Sequence
  Description of Artificial Sequence: Synthetic oligonucleotide
agugcuccccagaguucca

SEQ ID NO: 3036781 - RNA, 19 nt, Artificial Sequence
  Description of Artificial Sequence: Synthetic oligonucleotide
cucacacacuggccggucu

SEQ ID NO: 3036782 - RNA, 19 nt, Artificial Sequence
  Description of Artificial Sequence: Synthetic oligonucleotide
cacacuggccggucucucu

SEQ ID NO: 3036783 - RNA, 19 nt, Artificial Sequence
  Description of Artificial Sequence: Synthetic oligonucleotide
agccuuucggggacucuua

SEQ ID NO: 3036784 - RNA, 19 nt, Artificial Sequence
  Description of Artificial Sequence: Synthetic oligonucleotide
cuggccggucucucugaaa

SEQ ID NO: 3036785 - RNA, 19 nt, Artificial Sequence
  Description of Artificial Sequence: Synthetic oligonucleotide
ggcagagaacauggcucuc

SEQ ID NO: 3036786 - RNA, 19 nt, Artificial Sequence
  Description of Artificial Sequence: Synthetic oligonucleotide
ccagucacauugaccccaa

SEQ ID NO: 3036787 - RNA, 19 nt, Artificial Sequence
  Description of Artificial Sequence: Synthetic oligonucleotide
cccagguauguggaaugca

SEQ ID NO: 3036788 - RNA, 19 nt, Artificial Sequence
  Description of Artificial Sequence: Synthetic oligonucleotide
gcaggcgugucaggaggca

SEQ ID NO: 3036789 - RNA, 19 nt, Artificial Sequence
  Description of Artificial Sequence: Synthetic oligonucleotide
ggccggucucucugaaaua

SEQ ID NO: 3036790 - RNA, 19 nt, Artificial Sequence
  Description of Artificial Sequence: Synthetic oligonucleotide
ccccagaguuccagucaca

SEQ ID NO: 3036791 - RNA, 19 nt, Artificial Sequence
  Description of Artificial Sequence: Synthetic oligonucleotide
cccagaguuccagucacau

SEQ ID NO: 3036792 - RNA, 19 nt, Artificial Sequence
  Description of Artificial Sequence: Synthetic oligonucleotide
cccaagugcuccccagagu

SEQ ID NO: 3036793 - RNA, 19 nt, Artificial Sequence
  Description of Artificial Sequence: Synthetic oligonucleotide
cggggacucuuaggugacc

SEQ ID NO: 3036794 - RNA, 19 nt, Artificial Sequence
  Description of Artificial Sequence: Synthetic oligonucleotide
ccccaacagaaaacagcau

SEQ ID NO: 3036795 - RNA, 19 nt, Artificial Sequence
  Description of Artificial Sequence: Synthetic oligonucleotide
gcgugucaggaggcagaga

SEQ ID NO: 3036796 - RNA, 19 nt, Artificial Sequence
  Description of Artificial Sequence: Synthetic oligonucleotide
uuuaauccucaccagagcc

SEQ ID NO: 3036797 - RNA, 19 nt, Artificial Sequence
  Description of Artificial Sequence: Synthetic oligonucleotide
uuagucuugagguugagcu

SEQ ID NO: 3036798 - RNA, 19 nt, Artificial Sequence
  Description of Artificial Sequence: Synthetic oligonucleotide
uugagguugagcuggaacg

SEQ ID NO: 3036799 - RNA, 19 nt, Artificial Sequence
  Description of Artificial Sequence: Synthetic oligonucleotide
uguuuaauccucaccagag

SEQ ID NO: 3036800 - RNA, 19 nt, Artificial Sequence
  Description of Artificial Sequence: Synthetic oligonucleotide
uccuguuuaauccucacca

SEQ ID NO: 3036801 - RNA, 19 nt, Artificial Sequence
  Description of Artificial Sequence: Synthetic oligonucleotide
gauuccugcagcuucaggc

SEQ ID NO: 3036802 - RNA, 19 nt, Artificial Sequence
  Description of Artificial Sequence: Synthetic oligonucleotide
aaccguguuagucuugagg

SEQ ID NO: 3036803 - RNA, 19 nt, Artificial Sequence
  Description of Artificial Sequence: Synthetic oligonucleotide
acucuuagauuccugcagc

SEQ ID NO: 3036804 - RNA, 19 nt, Artificial Sequence
  Description of Artificial Sequence: Synthetic oligonucleotide
uccccuaccauccaggggc

SEQ ID NO: 3036805 - RNA, 19 nt, Artificial Sequence
  Description of Artificial Sequence: Synthetic oligonucleotide
aggacucuuagauuccugc

SEQ ID NO: 3036806 - RNA, 19 nt, Artificial Sequence
  Description of Artificial Sequence: Synthetic oligonucleotide
ugagucagggcucuucggg

SEQ ID NO: 3036807 - RNA, 19 nt, Artificial Sequence
  Description of Artificial Sequence: Synthetic oligonucleotide
uugauaaccguguuagucu

SEQ ID NO: 3036808 - RNA, 19 nt, Artificial Sequence
  Description of Artificial Sequence: Synthetic oligonucleotide
uaguuguggaaccaguuga

SEQ ID NO: 3036809 - RNA, 19 nt, Artificial Sequence
  Description of Artificial Sequence: Synthetic oligonucleotide
ucuggauccccuaccaucc

SEQ ID NO: 3036810 - RNA, 19 nt, Artificial Sequence
  Description of Artificial Sequence: Synthetic oligonucleotide
ucugagucagggcucuucg

SEQ ID NO: 3036811 - RNA, 19 nt, Artificial Sequence
  Description of Artificial Sequence: Synthetic oligonucleotide
uuaauccucaccagagccc

SEQ ID NO: 3036812 - RNA, 19 nt, Artificial Sequence
  Description of Artificial Sequence: Synthetic oligonucleotide
accguguuagucuugaggu

SEQ ID NO: 3036813 - RNA, 19 nt, Artificial Sequence
  Description of Artificial Sequence: Synthetic oligonucleotide
gacucuuagauuccugcag

SEQ ID NO: 3036814 - RNA, 19 nt, Artificial Sequence
  Description of Artificial Sequence: Synthetic oligonucleotide
agucuugagguugagcugg

SEQ ID NO: 3036815 - RNA, 19 nt, Artificial Sequence
  Description of Artificial Sequence: Synthetic oligonucleotide
caguugauaaccguguuag

SEQ ID NO: 3036816 - RNA, 19 nt, Artificial Sequence
  Description of Artificial Sequence: Synthetic oligonucleotide
cuuagauuccugcagcuuc

SEQ ID NO: 3036817 - RNA, 19 nt, Artificial Sequence
  Description of Artificial Sequence: Synthetic oligonucleotide
uucaggcucuucauugggg

SEQ ID NO: 3036818 - RNA, 19 nt, Artificial Sequence
  Description of Artificial Sequence: Synthetic oligonucleotide
uugagcuggaacgacagca

SEQ ID NO: 3036819 - RNA, 19 nt, Artificial Sequence
  Description of Artificial Sequence: Synthetic oligonucleotide
uguggaaccaguugauaac

SEQ ID NO: 3036820 - RNA, 19 nt, Artificial Sequence
  Description of Artificial Sequence: Synthetic oligonucleotide
uuguggaaccaguugauaa

SEQ ID NO: 3036821 - RNA, 19 nt, Artificial Sequence
  Description of Artificial Sequence: Synthetic oligonucleotide
uuagauuccugcagcuuca

SEQ ID NO: 3036822 - RNA, 19 nt, Artificial Sequence
  Description of Artificial Sequence: Synthetic oligonucleotide
aagucugugucauccugug

SEQ ID NO: 3036823 - RNA, 19 nt, Artificial Sequence
  Description of Artificial Sequence: Synthetic oligonucleotide
uguggguguggccuggugc

SEQ ID NO: 3036824 - RNA, 19 nt, Artificial Sequence
  Description of Artificial Sequence: Synthetic oligonucleotide
guugauaaccguguuaguc

SEQ ID NO: 3036825 - RNA, 19 nt, Artificial Sequence
  Description of Artificial Sequence: Synthetic oligonucleotide
guaguuguggaaccaguug

SEQ ID NO: 3036826 - RNA, 19 nt, Artificial Sequence
  Description of Artificial Sequence: Synthetic oligonucleotide
ucugucuggauccccuacc

SEQ ID NO: 3036827 - RNA, 19 nt, Artificial Sequence
  Description of Artificial Sequence: Synthetic oligonucleotide
cugucuggggcaucuaggg

SEQ ID NO: 3036828 - RNA, 19 nt, Artificial Sequence
  Description of Artificial Sequence: Synthetic oligonucleotide
ucacgacgcauccuggacc

SEQ ID NO: 3036829 - RNA, 19 nt, Artificial Sequence
  Description of Artificial Sequence: Synthetic oligonucleotide
guuuaauccucaccagagc

SEQ ID NO: 3036830 - RNA, 19 nt, Artificial Sequence
  Description of Artificial Sequence: Synthetic oligonucleotide
gaaccaguugauaaccgug

SEQ ID NO: 3036831 - RNA, 19 nt, Artificial Sequence
  Description of Artificial Sequence: Synthetic oligonucleotide
agcgucucacgacgcaucc

SEQ ID NO: 3036832 - RNA, 19 nt, Artificial Sequence
  Description of Artificial Sequence: Synthetic oligonucleotide
ugucuggggcaucuagggg

SEQ ID NO: 3036833 - RNA, 19 nt, Artificial Sequence
  Description of Artificial Sequence: Synthetic oligonucleotide
cuugagguugagcuggaac

SEQ ID NO: 3036834 - RNA, 19 nt, Artificial Sequence
  Description of Artificial Sequence: Synthetic oligonucleotide
gagucagggcucuucgggg

SEQ ID NO: 3036835 - RNA, 19 nt, Artificial Sequence
  Description of Artificial Sequence: Synthetic oligonucleotide
gugcaggacucuuagauuc

SEQ ID NO: 3036836 - RNA, 19 nt, Artificial Sequence
  Description of Artificial Sequence: Synthetic oligonucleotide
gauccccuaccauccaggg

SEQ ID NO: 3036837 - RNA, 19 nt, Artificial Sequence
  Description of Artificial Sequence: Synthetic oligonucleotide
uguaguuguggaaccaguu

SEQ ID NO: 3036838 - RNA, 19 nt, Artificial Sequence
  Description of Artificial Sequence: Synthetic oligonucleotide
ucauccugugcucccucgg

SEQ ID NO: 3036839 - RNA, 19 nt, Artificial Sequence
  Description of Artificial Sequence: Synthetic oligonucleotide
uguauccuccuccuguuua

SEQ ID NO: 3036840 - RNA, 19 nt, Artificial Sequence
  Description of Artificial Sequence: Synthetic oligonucleotide
ugugcucccucgguaagcg

SEQ ID NO: 3036841 - RNA, 19 nt, Artificial Sequence
  Description of Artificial Sequence: Synthetic oligonucleotide
agucugugucauccugugc

SEQ ID NO: 3036842 - RNA, 19 nt, Artificial Sequence
  Description of Artificial Sequence: Synthetic oligonucleotide
aaccaguugauaaccgugu

SEQ ID NO: 3036843 - RNA, 19 nt, Artificial Sequence
  Description of Artificial Sequence: Synthetic oligonucleotide
cuucaggcucuucauuggg

SEQ ID NO: 3036844 - RNA, 19 nt, Artificial Sequence
  Description of Artificial Sequence: Synthetic oligonucleotide
ugugucauccugugcuccc

SEQ ID NO: 3036845 - RNA, 19 nt, Artificial Sequence
  Description of Artificial Sequence: Synthetic oligonucleotide
uaauccucaccagagcccu

SEQ ID NO: 3036846 - RNA, 19 nt, Artificial Sequence
  Description of Artificial Sequence: Synthetic oligonucleotide
uagucuugagguugagcug

SEQ ID NO: 3036847 - RNA, 19 nt, Artificial Sequence
  Description of Artificial Sequence: Synthetic oligonucleotide
ucuauguggguguggccug

SEQ ID NO: 3036848 - RNA, 19 nt, Artificial Sequence
  Description of Artificial Sequence: Synthetic oligonucleotide
gggcuuuugguccucagcc

SEQ ID NO: 3036849 - RNA, 19 nt, Artificial Sequence
  Description of Artificial Sequence: Synthetic oligonucleotide
ucaccagagcccugucugg

SEQ ID NO: 3036850 - RNA, 19 nt, Artificial Sequence
  Description of Artificial Sequence: Synthetic oligonucleotide
ugcaggacucuuagauucc

SEQ ID NO: 3036851 - RNA, 19 nt, Artificial Sequence
  Description of Artificial Sequence: Synthetic oligonucleotide
ugauaaccguguuagucuu

SEQ ID NO: 3036852 - RNA, 19 nt, Artificial Sequence
  Description of Artificial Sequence: Synthetic oligonucleotide
guggaaccaguugauaacc

SEQ ID NO: 3036853 - RNA, 19 nt, Artificial Sequence
  Description of Artificial Sequence: Synthetic oligonucleotide
uggauccccuaccauccag

SEQ ID NO: 3036854 - RNA, 19 nt, Artificial Sequence
  Description of Artificial Sequence: Synthetic oligonucleotide
cuccuguuuaauccucacc

SEQ ID NO: 3036855 - RNA, 19 nt, Artificial Sequence
  Description of Artificial Sequence: Synthetic oligonucleotide
agauuccugcagcuucagg

SEQ ID NO: 3036856 - RNA, 19 nt, Artificial Sequence
  Description of Artificial Sequence: Synthetic oligonucleotide
auaaccguguuagucuuga

SEQ ID NO: 3036857 - RNA, 19 nt, Artificial Sequence
  Description of Artificial Sequence: Synthetic oligonucleotide
uccucguccaccucuguau

SEQ ID NO: 3036858 - RNA, 19 nt, Artificial Sequence
  Description of Artificial Sequence: Synthetic oligonucleotide
gucuggauccccuaccauc

SEQ ID NO: 3036859 - RNA, 19 nt, Artificial Sequence
  Description of Artificial Sequence: Synthetic oligonucleotide
ugcucccucgguaagcguc

SEQ ID NO: 3036860 - RNA, 19 nt, Artificial Sequence
  Description of Artificial Sequence: Synthetic oligonucleotide
guggguguggccuggugcc

SEQ ID NO: 3036861 - RNA, 19 nt, Artificial Sequence
  Description of Artificial Sequence: Synthetic oligonucleotide
ucgguaagcgucucacgac

SEQ ID NO: 3036862 - RNA, 19 nt, Artificial Sequence
  Description of Artificial Sequence: Synthetic oligonucleotide
cuguuuaauccucaccaga

SEQ ID NO: 3036863 - RNA, 19 nt, Artificial Sequence
  Description of Artificial Sequence: Synthetic oligonucleotide
uccuccuguuuaauccuca

SEQ ID NO: 3036864 - RNA, 19 nt, Artificial Sequence
  Description of Artificial Sequence: Synthetic oligonucleotide
uucgggguggggucuaugu

SEQ ID NO: 3036865 - RNA, 19 nt, Artificial Sequence
  Description of Artificial Sequence: Synthetic oligonucleotide
cuuguccucugucuggauc

SEQ ID NO: 3036866 - RNA, 19 nt, Artificial Sequence
  Description of Artificial Sequence: Synthetic oligonucleotide
cucgguaagcgucucacga

SEQ ID NO: 3036867 - RNA, 19 nt, Artificial Sequence
  Description of Artificial Sequence: Synthetic oligonucleotide
ucucacgacgcauccugga

SEQ ID NO: 3036868 - RNA, 19 nt, Artificial Sequence
  Description of Artificial Sequence: Synthetic oligonucleotide
guuagucuugagguugagc

SEQ ID NO: 3036869 - RNA, 19 nt, Artificial Sequence
  Description of Artificial Sequence: Synthetic oligonucleotide
aagcgucucacgacgcauc

SEQ ID NO: 3036870 - RNA, 19 nt, Artificial Sequence
  Description of Artificial Sequence: Synthetic oligonucleotide
auccccuaccauccagggg

SEQ ID NO: 3036871 - RNA, 19 nt, Artificial Sequence
  Description of Artificial Sequence: Synthetic oligonucleotide
ucuguauccuccuccuguu

SEQ ID NO: 3036872 - RNA, 19 nt, Artificial Sequence
  Description of Artificial Sequence: Synthetic oligonucleotide
aguugauaaccguguuagu

SEQ ID NO: 3036873 - RNA, 19 nt, Artificial Sequence
  Description of Artificial Sequence: Synthetic oligonucleotide
gucauccugugcucccucg

SEQ ID NO: 3036874 - RNA, 19 nt, Artificial Sequence
  Description of Artificial Sequence: Synthetic oligonucleotide
cugagucagggcucuucgg

SEQ ID NO: 3036875 - RNA, 19 nt, Artificial Sequence
  Description of Artificial Sequence: Synthetic oligonucleotide
uggaccuguaguuguggaa

SEQ ID NO: 3036876 - RNA, 19 nt, Artificial Sequence
  Description of Artificial Sequence: Synthetic oligonucleotide
ucgggguggggucuaugug

SEQ ID NO: 3036877 - RNA, 19 nt, Artificial Sequence
  Description of Artificial Sequence: Synthetic oligonucleotide
ugguccucagccucugagu

SEQ ID NO: 3036878 - RNA, 19 nt, Artificial Sequence
  Description of Artificial Sequence: Synthetic oligonucleotide
cuggguccaagucuguguc

SEQ ID NO: 3036879 - RNA, 19 nt, Artificial Sequence
  Description of Artificial Sequence: Synthetic oligonucleotide
uccugcagcuucaggcucu

SEQ ID NO: 3036880 - RNA, 19 nt, Artificial Sequence
  Description of Artificial Sequence: Synthetic oligonucleotide
ggugccaggacaccggaac

SEQ ID NO: 3036881 - RNA, 19 nt, Artificial Sequence
  Description of Artificial Sequence: Synthetic oligonucleotide
cucguccaccucuguaucc

SEQ ID NO: 3036882 - RNA, 19 nt, Artificial Sequence
  Description of Artificial Sequence: Synthetic oligonucleotide
agucagggcucuucggggu

SEQ ID NO: 3036883 - RNA, 19 nt, Artificial Sequence
  Description of Artificial Sequence: Synthetic oligonucleotide
uccuggaccuguaguugug

SEQ ID NO: 3036884 - RNA, 19 nt, Artificial Sequence
  Description of Artificial Sequence: Synthetic oligonucleotide
ugccaggacaccggaaccc

SEQ ID NO: 3036885 - RNA, 19 nt, Artificial Sequence
  Description of Artificial Sequence: Synthetic oligonucleotide
cucacgacgcauccuggac

SEQ ID NO: 3036886 - RNA, 19 nt, Artificial Sequence
  Description of Artificial Sequence: Synthetic oligonucleotide
uggaacgacagcagcucua

SEQ ID NO: 3036887 - RNA, 19 nt, Artificial Sequence
  Description of Artificial Sequence: Synthetic oligonucleotide
gguugagcuggaacgacag

SEQ ID NO: 3036888 - RNA, 19 nt, Artificial Sequence
  Description of Artificial Sequence: Synthetic oligonucleotide
gauaaccguguuagucuug

SEQ ID NO: 3036889 - RNA, 19 nt, Artificial Sequence
  Description of Artificial Sequence: Synthetic oligonucleotide
ggaccuguaguuguggaac

SEQ ID NO: 3036890 - RNA, 19 nt, Artificial Sequence
  Description of Artificial Sequence: Synthetic oligonucleotide
uaaccguguuagucuugag

SEQ ID NO: 3036891 - RNA, 19 nt, Artificial Sequence
  Description of Artificial Sequence: Synthetic oligonucleotide
uguuagucuugagguugag

SEQ ID NO: 3036892 - RNA, 19 nt, Artificial Sequence
  Description of Artificial Sequence: Synthetic oligonucleotide
cauccuggaccuguaguug

SEQ ID NO: 3036893 - RNA, 19 nt, Artificial Sequence
  Description of Artificial Sequence: Synthetic oligonucleotide
guugagcuggaacgacagc

SEQ ID NO: 3036894 - RNA, 19 nt, Artificial Sequence
  Description of Artificial Sequence: Synthetic oligonucleotide
aucuaggggugcaggacuc

SEQ ID NO: 3036895 - RNA, 19 nt, Artificial Sequence
  Description of Artificial Sequence: Synthetic oligonucleotide
gucuggggcaucuaggggu

SEQ ID NO: 3036896 - RNA, 19 nt, Artificial Sequence
  Description of Artificial Sequence: Synthetic oligonucleotide
ucguccaccucuguauccu

SEQ ID NO: 3036897 - RNA, 19 nt, Artificial Sequence
  Description of Artificial Sequence: Synthetic oligonucleotide
ucuuagauuccugcagcuu

SEQ ID NO: 3036898 - RNA, 19 nt, Artificial Sequence
  Description of Artificial Sequence: Synthetic oligonucleotide
ccuguuuaauccucaccag

SEQ ID NO: 3036899 - RNA, 19 nt, Artificial Sequence
  Description of Artificial Sequence: Synthetic oligonucleotide
uaagcgucucacgacgcau

SEQ ID NO: 3036900 - RNA, 19 nt, Artificial Sequence
  Description of Artificial Sequence: Synthetic oligonucleotide
uagauuccugcagcuucag

SEQ ID NO: 3036901 - RNA, 19 nt, Artificial Sequence
  Description of Artificial Sequence: Synthetic oligonucleotide
ccugucuggggcaucuagg

SEQ ID NO: 3036902 - RNA, 19 nt, Artificial Sequence
  Description of Artificial Sequence: Synthetic oligonucleotide
uuugguccucagccucuga

SEQ ID NO: 3036903 - RNA, 19 nt, Artificial Sequence
  Description of Artificial Sequence: Synthetic oligonucleotide
cugugucauccugugcucc

SEQ ID NO: 3036904 - RNA, 19 nt, Artificial Sequence
  Description of Artificial Sequence: Synthetic oligonucleotide
gugccaggacaccggaacc

SEQ ID NO: 3036905 - RNA, 19 nt, Artificial Sequence
  Description of Artificial Sequence: Synthetic oligonucleotide
ugucauccugugcucccuc

SEQ ID NO: 3036906 - RNA, 19 nt, Artificial Sequence
  Description of Artificial Sequence: Synthetic oligonucleotide
caggacucuuagauuccug

SEQ ID NO: 3036907 - RNA, 19 nt, Artificial Sequence
  Description of Artificial Sequence: Synthetic oligonucleotide
guaagcgucucacgacgca

SEQ ID NO: 3036908 - RNA, 19 nt, Artificial Sequence
  Description of Artificial Sequence: Synthetic oligonucleotide
uccaggggcuggcuguccu

SEQ ID NO: 3036909 - RNA, 19 nt, Artificial Sequence
  Description of Artificial Sequence: Synthetic oligonucleotide
gucuauguggguguggccu

SEQ ID NO: 3036910 - RNA, 19 nt, Artificial Sequence
  Description of Artificial Sequence: Synthetic oligonucleotide
aguuguggaaccaguugau

SEQ ID NO: 3036911 - RNA, 19 nt, Artificial Sequence
  Description of Artificial Sequence: Synthetic oligonucleotide
gaacgacagcagcucuaug

SEQ ID NO: 3036912 - RNA, 19 nt, Artificial Sequence
  Description of Artificial Sequence: Synthetic oligonucleotide
gguggggucuaugugggug

SEQ ID NO: 3036913 - RNA, 19 nt, Artificial Sequence
  Description of Artificial Sequence: Synthetic oligonucleotide
cuauguggguguggccugg

SEQ ID NO: 3036914 - RNA, 19 nt, Artificial Sequence
  Description of Artificial Sequence: Synthetic oligonucleotide
guauccuccuccuguuuaa

SEQ ID NO: 3036915 - RNA, 19 nt, Artificial Sequence
  Description of Artificial Sequence: Synthetic oligonucleotide
ggauccccuaccauccagg

SEQ ID NO: 3036916 - RNA, 19 nt, Artificial Sequence
  Description of Artificial Sequence: Synthetic oligonucleotide
gcuuuugguccucagccuc

SEQ ID NO: 3036917 - RNA, 19 nt, Artificial Sequence
  Description of Artificial Sequence: Synthetic oligonucleotide
caccagagcccugucuggg

SEQ ID NO: 3036918 - RNA, 19 nt, Artificial Sequence
  Description of Artificial Sequence: Synthetic oligonucleotide
uggcuguccucguccaccu

SEQ ID NO: 3036919 - RNA, 19 nt, Artificial Sequence
  Description of Artificial Sequence: Synthetic oligonucleotide
ggacucuuagauuccugca

SEQ ID NO: 3036920 - RNA, 19 nt, Artificial Sequence
  Description of Artificial Sequence: Synthetic oligonucleotide
cuccuccuguuuaauccuc

SEQ ID NO: 3036921 - RNA, 19 nt, Artificial Sequence
  Description of Artificial Sequence: Synthetic oligonucleotide
gggucuauguggguguggc

SEQ ID NO: 3036922 - RNA, 19 nt, Artificial Sequence
  Description of Artificial Sequence: Synthetic oligonucleotide
cugucuggauccccuacca

SEQ ID NO: 3036923 - RNA, 19 nt, Artificial Sequence
  Description of Artificial Sequence: Synthetic oligonucleotide
gucucacgacgcauccugg

SEQ ID NO: 3036924 - RNA, 19 nt, Artificial Sequence
  Description of Artificial Sequence: Synthetic oligonucleotide
uaggggugcaggacucuua

SEQ ID NO: 3036925 - RNA, 19 nt, Artificial Sequence
  Description of Artificial Sequence: Synthetic oligonucleotide
cuguccucguccaccucug

SEQ ID NO: 3036926 - RNA, 19 nt, Artificial Sequence
  Description of Artificial Sequence: Synthetic oligonucleotide
cuaccauccaggggcuggc

SEQ ID NO: 3036927 - RNA, 19 nt, Artificial Sequence
  Description of Artificial Sequence: Synthetic oligonucleotide
ggggcuuuugguccucagc

SEQ ID NO: 3036928 - RNA, 19 nt, Artificial Sequence
  Description of Artificial Sequence: Synthetic oligonucleotide
cguguuagucuugagguug

SEQ ID NO: 3036929 - RNA, 19 nt, Artificial Sequence
  Description of Artificial Sequence: Synthetic oligonucleotide
caggggcuggcuguccucg

SEQ ID NO: 3036930 - RNA, 19 nt, Artificial Sequence
  Description of Artificial Sequence: Synthetic oligonucleotide
acgcauccuggaccuguag

SEQ ID NO: 3036931 - RNA, 19 nt, Artificial Sequence
  Description of Artificial Sequence: Synthetic oligonucleotide
gucagggcucuucggggug

SEQ ID NO: 3036932 - RNA, 19 nt, Artificial Sequence
  Description of Artificial Sequence: Synthetic oligonucleotide
agguugagcuggaacgaca

SEQ ID NO: 3036933 - RNA, 19 nt, Artificial Sequence
  Description of Artificial Sequence: Synthetic oligonucleotide
accuguaguuguggaacca

SEQ ID NO: 3036934 - RNA, 19 nt, Artificial Sequence
  Description of Artificial Sequence: Synthetic oligonucleotide
caagucugugucauccugu

SEQ ID NO: 3036935 - RNA, 19 nt, Artificial Sequence
  Description of Artificial Sequence: Synthetic oligonucleotide
cgggguggggucuaugugg

SEQ ID NO: 3036936 - RNA, 19 nt, Artificial Sequence
  Description of Artificial Sequence: Synthetic oligonucleotide
cgguaagcgucucacgacg

SEQ ID NO: 3036937 - RNA, 19 nt, Artificial Sequence
  Description of Artificial Sequence: Synthetic oligonucleotide
ccaagucugugucauccug

SEQ ID NO: 3036938 - RNA, 19 nt, Artificial Sequence
  Description of Artificial Sequence: Synthetic oligonucleotide
ccuggugccaggacaccgg

SEQ ID NO: 3036939 - RNA, 19 nt, Artificial Sequence
  Description of Artificial Sequence: Synthetic oligonucleotide
cugugcucccucgguaagc

SEQ ID NO: 3036940 - RNA, 19 nt, Artificial Sequence
  Description of Artificial Sequence: Synthetic oligonucleotide
ccaccuggguccaagucug

SEQ ID NO: 3036941 - RNA, 19 nt, Artificial Sequence
  Description of Artificial Sequence: Synthetic oligonucleotide
cuggaccuguaguugugga

SEQ ID NO: 3036942 - RNA, 19 nt, Artificial Sequence
  Description of Artificial Sequence: Synthetic oligonucleotide
auguggguguggccuggug

SEQ ID NO: 3036943 - RNA, 19 nt, Artificial Sequence
  Description of Artificial Sequence: Synthetic oligonucleotide
gggguggggucuauguggg

SEQ ID NO: 3036944 - RNA, 19 nt, Artificial Sequence
  Description of Artificial Sequence: Synthetic oligonucleotide
guccaccucuguauccucc

SEQ ID NO: 3036945 - RNA, 19 nt, Artificial Sequence
  Description of Artificial Sequence: Synthetic oligonucleotide
ucccucgguaagcgucuca

SEQ ID NO: 3036946 - RNA, 19 nt, Artificial Sequence
  Description of Artificial Sequence: Synthetic oligonucleotide
cucugagucagggcucuuc

SEQ ID NO: 3036947 - RNA, 19 nt, Artificial Sequence
  Description of Artificial Sequence: Synthetic oligonucleotide
uggggcaucuaggggugca

SEQ ID NO: 3036948 - RNA, 19 nt, Artificial Sequence
  Description of Artificial Sequence: Synthetic oligonucleotide
gguaagcgucucacgacgc

SEQ ID NO: 3036949 - RNA, 19 nt, Artificial Sequence
  Description of Artificial Sequence: Synthetic oligonucleotide
uguccucguccaccucugu

SEQ ID NO: 3036950 - RNA, 19 nt, Artificial Sequence
  Description of Artificial Sequence: Synthetic oligonucleotide
caucuaggggugcaggacu

SEQ ID NO: 3036951 - RNA, 19 nt, Artificial Sequence
  Description of Artificial Sequence: Synthetic oligonucleotide
guguuagucuugagguuga

SEQ ID NO: 3036952 - RNA, 19 nt, Artificial Sequence
  Description of Artificial Sequence: Synthetic oligonucleotide
cucuuagauuccugcagcu

SEQ ID NO: 3036953 - RNA, 19 nt, Artificial Sequence
  Description of Artificial Sequence: Synthetic oligonucleotide
auccugugcucccucggua

SEQ ID NO: 3036954 - RNA, 19 nt, Artificial Sequence
  Description of Artificial Sequence: Synthetic oligonucleotide
ccuaccauccaggggcugg

SEQ ID NO: 3036955 - RNA, 19 nt, Artificial Sequence
  Description of Artificial Sequence: Synthetic oligonucleotide
gggugcaggacucuuagau

SEQ ID NO: 3036956 - RNA, 19 nt, Artificial Sequence
  Description of Artificial Sequence: Synthetic oligonucleotide
ggaaccaguugauaaccgu

SEQ ID NO: 3036957 - RNA, 19 nt, Artificial Sequence
  Description of Artificial Sequence: Synthetic oligonucleotide
uauccuccuccuguuuaau

SEQ ID NO: 3036958 - RNA, 19 nt, Artificial Sequence
  Description of Artificial Sequence: Synthetic oligonucleotide
ggucuauguggguguggcc

SEQ ID NO: 3036959 - RNA, 19 nt, Artificial Sequence
  Description of Artificial Sequence: Synthetic oligonucleotide
ggcaucuaggggugcagga

SEQ ID NO: 3036960 - RNA, 19 nt, Artificial Sequence
  Description of Artificial Sequence: Synthetic oligonucleotide
accuggguccaagucugug

SEQ ID NO: 3036961 - RNA, 19 nt, Artificial Sequence
  Description of Artificial Sequence: Synthetic oligonucleotide
ccuguaguuguggaaccag

SEQ ID NO: 3036962 - RNA, 19 nt, Artificial Sequence
  Description of Artificial Sequence: Synthetic oligonucleotide
auccaggggcuggcugucc

SEQ ID NO: 3036963 - RNA, 19 nt, Artificial Sequence
  Description of Artificial Sequence: Synthetic oligonucleotide
aauccucaccagagcccug

SEQ ID NO: 3036964 - RNA, 19 nt, Artificial Sequence
  Description of Artificial Sequence: Synthetic oligonucleotide
cuguaguuguggaaccagu

SEQ ID NO: 3036965 - RNA, 19 nt, Artificial Sequence
  Description of Artificial Sequence: Synthetic oligonucleotide
cuuuugguccucagccucu

SEQ ID NO: 3036966 - RNA, 19 nt, Artificial Sequence
  Description of Artificial Sequence: Synthetic oligonucleotide
guuguggaaccaguugaua

SEQ ID NO: 3036967 - RNA, 19 nt, Artificial Sequence
  Description of Artificial Sequence: Synthetic oligonucleotide
ucuugagguugagcuggaa

SEQ ID NO: 3036968 - RNA, 19 nt, Artificial Sequence
  Description of Artificial Sequence: Synthetic oligonucleotide
gcuggaacgacagcagcuc

SEQ ID NO: 3036969 - RNA, 19 nt, Artificial Sequence
  Description of Artificial Sequence: Synthetic oligonucleotide
cacgacgcauccuggaccu

SEQ ID NO: 3036970 - RNA, 19 nt, Artificial Sequence
  Description of Artificial Sequence: Synthetic oligonucleotide
cgucucacgacgcauccug

SEQ ID NO: 3036971 - RNA, 19 nt, Artificial Sequence
  Description of Artificial Sequence: Synthetic oligonucleotide
ccucgguaagcgucucacg

SEQ ID NO: 3036972 - RNA, 19 nt, Artificial Sequence
  Description of Artificial Sequence: Synthetic oligonucleotide
ccagagcccugucuggggc

SEQ ID NO: 3036973 - RNA, 19 nt, Artificial Sequence
  Description of Artificial Sequence: Synthetic oligonucleotide
uauguggguguggccuggu

SEQ ID NO: 3036974 - RNA, 19 nt, Artificial Sequence
  Description of Artificial Sequence: Synthetic oligonucleotide
uccucaccagagcccuguc

SEQ ID NO: 3036975 - RNA, 19 nt, Artificial Sequence
  Description of Artificial Sequence: Synthetic oligonucleotide
gcaucuaggggugcaggac

SEQ ID NO: 3036976 - RNA, 19 nt, Artificial Sequence
  Description of Artificial Sequence: Synthetic oligonucleotide
gggcaucuaggggugcagg

SEQ ID NO: 3036977 - RNA, 19 nt, Artificial Sequence
  Description of Artificial Sequence: Synthetic oligonucleotide
guggggucuaugugggugu

SEQ ID NO: 3036978 - RNA, 19 nt, Artificial Sequence
  Description of Artificial Sequence: Synthetic oligonucleotide
ggcucuucggggugggguc

SEQ ID NO: 3036979 - RNA, 19 nt, Artificial Sequence
  Description of Artificial Sequence: Synthetic oligonucleotide
ccuccuguuuaauccucac

SEQ ID NO: 3036980 - RNA, 19 nt, Artificial Sequence
  Description of Artificial Sequence: Synthetic oligonucleotide
gccuggugccaggacaccg

SEQ ID NO: 3036981 - RNA, 19 nt, Artificial Sequence
  Description of Artificial Sequence: Synthetic oligonucleotide
ccuggaccuguaguugugg

SEQ ID NO: 3036982 - RNA, 19 nt, Artificial Sequence
  Description of Artificial Sequence: Synthetic oligonucleotide
uggguguggccuggugcca

SEQ ID NO: 3036983 - RNA, 19 nt, Artificial Sequence
  Description of Artificial Sequence: Synthetic oligonucleotide
cccugucuggggcaucuag

SEQ ID NO: 3036984 - RNA, 19 nt, Artificial Sequence
  Description of Artificial Sequence: Synthetic oligonucleotide
cuggugccaggacaccgga

SEQ ID NO: 3036985 - RNA, 19 nt, Artificial Sequence
  Description of Artificial Sequence: Synthetic oligonucleotide
cagagcccugucuggggca

SEQ ID NO: 3036986 - RNA, 19 nt, Artificial Sequence
  Description of Artificial Sequence: Synthetic oligonucleotide
guccucguccaccucugua

SEQ ID NO: 3036987 - RNA, 19 nt, Artificial Sequence
  Description of Artificial Sequence: Synthetic oligonucleotide
gcuguccucguccaccucu

SEQ ID NO: 3036988 - RNA, 19 nt, Artificial Sequence
  Description of Artificial Sequence: Synthetic oligonucleotide
gccaggacaccggaacccc

SEQ ID NO: 3036989 - RNA, 19 nt, Artificial Sequence
  Description of Artificial Sequence: Synthetic oligonucleotide
agagcccugucuggggcau

SEQ ID NO: 3036990 - RNA, 19 nt, Artificial Sequence
  Description of Artificial Sequence: Synthetic oligonucleotide
cauccaggggcuggcuguc

SEQ ID NO: 3036991 - RNA, 19 nt, Artificial Sequence
  Description of Artificial Sequence: Synthetic oligonucleotide
ccugugcucccucgguaag

SEQ ID NO: 3036992 - RNA, 19 nt, Artificial Sequence
  Description of Artificial Sequence: Synthetic oligonucleotide
gcauccuggaccuguaguu

SEQ ID NO: 3036993 - RNA, 19 nt, Artificial Sequence
  Description of Artificial Sequence: Synthetic oligonucleotide
cccucgguaagcgucucac

SEQ ID NO: 3036994 - RNA, 19 nt, Artificial Sequence
  Description of Artificial Sequence: Synthetic oligonucleotide
cagggcucuucgggguggg

SEQ ID NO: 3036995 - RNA, 19 nt, Artificial Sequence
  Description of Artificial Sequence: Synthetic oligonucleotide
cuggauccccuaccaucca

SEQ ID NO: 3036996 - RNA, 19 nt, Artificial Sequence
  Description of Artificial Sequence: Synthetic oligonucleotide
ccaguugauaaccguguua

SEQ ID NO: 3036997 - RNA, 19 nt, Artificial Sequence
  Description of Artificial Sequence: Synthetic oligonucleotide
cuggaacgacagcagcucu

SEQ ID NO: 3036998 - RNA, 19 nt, Artificial Sequence
  Description of Artificial Sequence: Synthetic oligonucleotide
ggugcaggacucuuagauu

SEQ ID NO: 3036999 - RNA, 19 nt, Artificial Sequence
  Description of Artificial Sequence: Synthetic oligonucleotide
ggcuuuugguccucagccu

SEQ ID NO: 3037000 - RNA, 19 nt, Artificial Sequence
  Description of Artificial Sequence: Synthetic oligonucleotide
cuucgggguggggucuaug

SEQ ID NO: 3037001 - RNA, 19 nt, Artificial Sequence
  Description of Artificial Sequence: Synthetic oligonucleotide
cauccugugcucccucggu

SEQ ID NO: 3037002 - RNA, 19 nt, Artificial Sequence
  Description of Artificial Sequence: Synthetic oligonucleotide
ccucguccaccucuguauc

SEQ ID NO: 3037003 - RNA, 19 nt, Artificial Sequence
  Description of Artificial Sequence: Synthetic oligonucleotide
agggcucuucggggugggg

SEQ ID NO: 3037004 - RNA, 19 nt, Artificial Sequence
  Description of Artificial Sequence: Synthetic oligonucleotide
gguccaagucugugucauc

SEQ ID NO: 3037005 - RNA, 19 nt, Artificial Sequence
  Description of Artificial Sequence: Synthetic oligonucleotide
ggggcaucuaggggugcag

SEQ ID NO: 3037006 - RNA, 19 nt, Artificial Sequence
  Description of Artificial Sequence: Synthetic oligonucleotide
ggguguggccuggugccag

SEQ ID NO: 3037007 - RNA, 19 nt, Artificial Sequence
  Description of Artificial Sequence: Synthetic oligonucleotide
gucuugagguugagcugga

SEQ ID NO: 3037008 - RNA, 19 nt, Artificial Sequence
  Description of Artificial Sequence: Synthetic oligonucleotide
cuggggcaucuaggggugc

SEQ ID NO: 3037009 - RNA, 19 nt, Artificial Sequence
  Description of Artificial Sequence: Synthetic oligonucleotide
gacgcauccuggaccugua

SEQ ID NO: 3037010 - RNA, 19 nt, Artificial Sequence
  Description of Artificial Sequence: Synthetic oligonucleotide
ucuucgggguggggucuau

SEQ ID NO: 3037011 - RNA, 19 nt, Artificial Sequence
  Description of Artificial Sequence: Synthetic oligonucleotide
ggaacgacagcagcucuau

SEQ ID NO: 3037012 - RNA, 19 nt, Artificial Sequence
  Description of Artificial Sequence: Synthetic oligonucleotide
ggcuggcuguccucgucca

SEQ ID NO: 3037013 - RNA, 19 nt, Artificial Sequence
  Description of Artificial Sequence: Synthetic oligonucleotide
ccucuguauccuccuccug

SEQ ID NO: 3037014 - RNA, 19 nt, Artificial Sequence
  Description of Artificial Sequence: Synthetic oligonucleotide
cccaccuggguccaagucu

SEQ ID NO: 3037015 - RNA, 19 nt, Artificial Sequence
  Description of Artificial Sequence: Synthetic oligonucleotide
ggggugcaggacucuuaga

SEQ ID NO: 3037016 - RNA, 19 nt, Artificial Sequence
  Description of Artificial Sequence: Synthetic oligonucleotide
ggggcuggcuguccucguc

SEQ ID NO: 3037017 - RNA, 19 nt, Artificial Sequence
  Description of Artificial Sequence: Synthetic oligonucleotide
gugucauccugugcucccu

SEQ ID NO: 3037018 - RNA, 19 nt, Artificial Sequence
  Description of Artificial Sequence: Synthetic oligonucleotide
guguggccuggugccagga

SEQ ID NO: 3037019 - RNA, 19 nt, Artificial Sequence
  Description of Artificial Sequence: Synthetic oligonucleotide
acgacgcauccuggaccug

SEQ ID NO: 3037020 - RNA, 19 nt, Artificial Sequence
  Description of Artificial Sequence: Synthetic oligonucleotide
ggguccaagucugugucau

SEQ ID NO: 3037021 - RNA, 19 nt, Artificial Sequence
  Description of Artificial Sequence: Synthetic oligonucleotide
ccuccuccuguuuaauccu

SEQ ID NO: 3037022 - RNA, 19 nt, Artificial Sequence
  Description of Artificial Sequence: Synthetic oligonucleotide
cucccucgguaagcgucuc

SEQ ID NO: 3037023 - RNA, 19 nt, Artificial Sequence
  Description of Artificial Sequence: Synthetic oligonucleotide
ccccaccuggguccaaguc

SEQ ID NO: 3037024 - RNA, 19 nt, Artificial Sequence
  Description of Artificial Sequence: Synthetic oligonucleotide
gcaggacucuuagauuccu

SEQ ID NO: 3037025 - RNA, 19 nt, Artificial Sequence
  Description of Artificial Sequence: Synthetic oligonucleotide
cagcuucaggcucuucauu

SEQ ID NO: 3037026 - RNA, 19 nt, Artificial Sequence
  Description of Artificial Sequence: Synthetic oligonucleotide
cuguauccuccuccuguuu

SEQ ID NO: 3037027 - RNA, 19 nt, Artificial Sequence
  Description of Artificial Sequence: Synthetic oligonucleotide
ggccuggugccaggacacc

SEQ ID NO: 3037028 - RNA, 19 nt, Artificial Sequence
  Description of Artificial Sequence: Synthetic oligonucleotide
ccucagccucugagucagg

SEQ ID NO: 3037029 - RNA, 19 nt, Artificial Sequence
  Description of Artificial Sequence: Synthetic oligonucleotide
gagcccugucuggggcauc

SEQ ID NO: 3037030 - RNA, 19 nt, Artificial Sequence
  Description of Artificial Sequence: Synthetic oligonucleotide
cuaggggugcaggacucuu

SEQ ID NO: 3037031 - RNA, 19 nt, Artificial Sequence
  Description of Artificial Sequence: Synthetic oligonucleotide
gugcucccucgguaagcgu

SEQ ID NO: 3037032 - RNA, 19 nt, Artificial Sequence
  Description of Artificial Sequence: Synthetic oligonucleotide
gggcucuucgggguggggu

SEQ ID NO: 3037033 - RNA, 19 nt, Artificial Sequence
  Description of Artificial Sequence: Synthetic oligonucleotide
cguccaccucuguauccuc

SEQ ID NO: 3037034 - RNA, 19 nt, Artificial Sequence
  Description of Artificial Sequence: Synthetic oligonucleotide
gcucccucgguaagcgucu

SEQ ID NO: 3037035 - RNA, 19 nt, Artificial Sequence
  Description of Artificial Sequence: Synthetic oligonucleotide
gccucugagucagggcucu

SEQ ID NO: 3037036 - RNA, 19 nt, Artificial Sequence
  Description of Artificial Sequence: Synthetic oligonucleotide
cucuucgggguggggucua

SEQ ID NO: 3037037 - RNA, 19 nt, Artificial Sequence
  Description of Artificial Sequence: Synthetic oligonucleotide
caccuggguccaagucugu

SEQ ID NO: 3037038 - RNA, 19 nt, Artificial Sequence
  Description of Artificial Sequence: Synthetic oligonucleotide
ccucaccagagcccugucu

SEQ ID NO: 3037039 - RNA, 19 nt, Artificial Sequence
  Description of Artificial Sequence: Synthetic oligonucleotide
ccguguuagucuugagguu

SEQ ID NO: 3037040 - RNA, 19 nt, Artificial Sequence
  Description of Artificial Sequence: Synthetic oligonucleotide
gcucuucgggguggggucu

SEQ ID NO: 3037041 - RNA, 19 nt, Artificial Sequence
  Description of Artificial Sequence: Synthetic oligonucleotide
ggguggggucuaugugggu

SEQ ID NO: 3037042 - RNA, 19 nt, Artificial Sequence
  Description of Artificial Sequence: Synthetic oligonucleotide
cccuaccauccaggggcug

SEQ ID NO: 3037043 - RNA, 19 nt, Artificial Sequence
  Description of Artificial Sequence: Synthetic oligonucleotide
gcgucucacgacgcauccu

SEQ ID NO: 3037044 - RNA, 19 nt, Artificial Sequence
  Description of Artificial Sequence: Synthetic oligonucleotide
ccccuaccauccaggggcu

SEQ ID NO: 3037045 - RNA, 19 nt, Artificial Sequence
  Description of Artificial Sequence: Synthetic oligonucleotide
cgacgcauccuggaccugu

SEQ ID NO: 3037046 - RNA, 19 nt, Artificial Sequence
  Description of Artificial Sequence: Synthetic oligonucleotide
gcccugucuggggcaucua

SEQ ID NO: 3037047 - RNA, 19 nt, Artificial Sequence
  Description of Artificial Sequence: Synthetic oligonucleotide
ccugcagcuucaggcucuu

SEQ ID NO: 3037048 - RNA, 19 nt, Artificial Sequence
  Description of Artificial Sequence: Synthetic oligonucleotide
ccucugagucagggcucuu

SEQ ID NO: 3037049 - RNA, 19 nt, Artificial Sequence
  Description of Artificial Sequence: Synthetic oligonucleotide
ucauuuaaggcuuuaaucu

SEQ ID NO: 3037050 - RNA, 19 nt, Artificial Sequence
  Description of Artificial Sequence: Synthetic oligonucleotide
uaaggcuuuaaucugcugg

SEQ ID NO: 3037051 - RNA, 19 nt, Artificial Sequence
  Description of Artificial Sequence: Synthetic oligonucleotide
uuuccuugagcaaugaucc

SEQ ID NO: 3037052 - RNA, 19 nt, Artificial Sequence
  Description of Artificial Sequence: Synthetic oligonucleotide
ugagcaaugauccauccag

SEQ ID NO: 3037053 - RNA, 19 nt, Artificial Sequence
  Description of Artificial Sequence: Synthetic oligonucleotide
gaugaugucaggcaggugc

SEQ ID NO: 3037054 - RNA, 19 nt, Artificial Sequence
  Description of Artificial Sequence: Synthetic oligonucleotide
ucgaucuuuagucagaugu

SEQ ID NO: 3037055 - RNA, 19 nt, Artificial Sequence
  Description of Artificial Sequence: Synthetic oligonucleotide
cuguuaaccagguauaagg

SEQ ID NO: 3037056 - RNA, 19 nt, Artificial Sequence
  Description of Artificial Sequence: Synthetic oligonucleotide
agaaaauaagcccuggucu

SEQ ID NO: 3037057 - RNA, 19 nt, Artificial Sequence
  Description of Artificial Sequence: Synthetic oligonucleotide
aggucuucgaucuuuaguc

SEQ ID NO: 3037058 - RNA, 19 nt, Artificial Sequence
  Description of Artificial Sequence: Synthetic oligonucleotide
uuaaccagguauaaggacu

SEQ ID NO: 3037059 - RNA, 19 nt, Artificial Sequence
  Description of Artificial Sequence: Synthetic oligonucleotide
auugaaggaaggcacuggc

SEQ ID NO: 3037060 - RNA, 19 nt, Artificial Sequence
  Description of Artificial Sequence: Synthetic oligonucleotide
uuuuauuuugcuucgaguu

SEQ ID NO: 3037061 - RNA, 19 nt, Artificial Sequence
  Description of Artificial Sequence: Synthetic oligonucleotide
aaauuccugacacauuuca

SEQ ID NO: 3037062 - RNA, 19 nt, Artificial Sequence
  Description of Artificial Sequence: Synthetic oligonucleotide
uucaaaguucuuaaucugc

SEQ ID NO: 3037063 - RNA, 19 nt, Artificial Sequence
  Description of Artificial Sequence: Synthetic oligonucleotide
agguauaaggacugcaugg

SEQ ID NO: 3037064 - RNA, 19 nt, Artificial Sequence
  Description of Artificial Sequence: Synthetic oligonucleotide
uuauuuugcuucgaguugg

SEQ ID NO: 3037065 - RNA, 19 nt, Artificial Sequence
  Description of Artificial Sequence: Synthetic oligonucleotide
uuuauuuugcuucgaguug

SEQ ID NO: 3037066 - RNA, 19 nt, Artificial Sequence
  Description of Artificial Sequence: Synthetic oligonucleotide
uuucuuuaacuccugcucc

SEQ ID NO: 3037067 - RNA, 19 nt, Artificial Sequence
  Description of Artificial Sequence: Synthetic oligonucleotide
ucuagcuccaauaaauggu

SEQ ID NO: 3037068 - RNA, 19 nt, Artificial Sequence
  Description of Artificial Sequence: Synthetic oligonucleotide
aaaauaagcccuggucucc

SEQ ID NO: 3037069 - RNA, 19 nt, Artificial Sequence
  Description of Artificial Sequence: Synthetic oligonucleotide
ucaaaguucuuaaucugcc

SEQ ID NO: 3037070 - RNA, 19 nt, Artificial Sequence
  Description of Artificial Sequence: Synthetic oligonucleotide
uccacuguuaaccagguau

SEQ ID NO: 3037071 - RNA, 19 nt, Artificial Sequence
  Description of Artificial Sequence: Synthetic oligonucleotide
aaguucuuaaucugccuag

SEQ ID NO: 3037072 - RNA, 19 nt, Artificial Sequence
  Description of Artificial Sequence: Synthetic oligonucleotide
agcaccuccacuguuaacc

SEQ ID NO: 3037073 - RNA, 19 nt, Artificial Sequence
  Description of Artificial Sequence: Synthetic oligonucleotide
auuccaaaguuccuguuuc

SEQ ID NO: 3037074 - RNA, 19 nt, Artificial Sequence
  Description of Artificial Sequence: Synthetic oligonucleotide
ucaaauuccugacacauuu

SEQ ID NO: 3037075 - RNA, 19 nt, Artificial Sequence
  Description of Artificial Sequence: Synthetic oligonucleotide
ucuuaaucugccuagcuuc

SEQ ID NO: 3037076 - RNA, 19 nt, Artificial Sequence
  Description of Artificial Sequence: Synthetic oligonucleotide
cagauguucgcuuucauug

SEQ ID NO: 3037077 - RNA, 19 nt, Artificial Sequence
  Description of Artificial Sequence: Synthetic oligonucleotide
ugauccauccagaaaauaa

SEQ ID NO: 3037078 - RNA, 19 nt, Artificial Sequence
  Description of Artificial Sequence: Synthetic oligonucleotide
ugacacauuucaaaguucu

SEQ ID NO: 3037079 - RNA, 19 nt, Artificial Sequence
  Description of Artificial Sequence: Synthetic oligonucleotide
auuuaaggcuuuaaucugc

SEQ ID NO: 3037080 - RNA, 19 nt, Artificial Sequence
  Description of Artificial Sequence: Synthetic oligonucleotide
cucauuuaaggcuuuaauc

SEQ ID NO: 3037081 - RNA, 19 nt, Artificial Sequence
  Description of Artificial Sequence: Synthetic oligonucleotide
ugaaggaaggcacuggcac

SEQ ID NO: 3037082 - RNA, 19 nt, Artificial Sequence
  Description of Artificial Sequence: Synthetic oligonucleotide
uccauccagaaaauaagcc

SEQ ID NO: 3037083 - RNA, 19 nt, Artificial Sequence
  Description of Artificial Sequence: Synthetic oligonucleotide
uuucaaaguucuuaaucug

SEQ ID NO: 3037084 - RNA, 19 nt, Artificial Sequence
  Description of Artificial Sequence: Synthetic oligonucleotide
uguuaaccagguauaagga

SEQ ID NO: 3037085 - RNA, 19 nt, Artificial Sequence
  Description of Artificial Sequence: Synthetic oligonucleotide
cauuucaaaguucuuaauc

SEQ ID NO: 3037086 - RNA, 19 nt, Artificial Sequence
  Description of Artificial Sequence: Synthetic oligonucleotide
uugucuuccuuuuauuuug

SEQ ID NO: 3037087 - RNA, 19 nt, Artificial Sequence
  Description of Artificial Sequence: Synthetic oligonucleotide
agauguucgcuuucauugc

SEQ ID NO: 3037088 - RNA, 19 nt, Artificial Sequence
  Description of Artificial Sequence: Synthetic oligonucleotide
aaaguucuuaaucugccua

SEQ ID NO: 3037089 - RNA, 19 nt, Artificial Sequence
  Description of Artificial Sequence: Synthetic oligonucleotide
uuccugacacauuucaaag

SEQ ID NO: 3037090 - RNA, 19 nt, Artificial Sequence
  Description of Artificial Sequence: Synthetic oligonucleotide
gauccauccagaaaauaag

SEQ ID NO: 3037091 - RNA, 19 nt, Artificial Sequence
  Description of Artificial Sequence: Synthetic oligonucleotide
gaaaauaagcccuggucuc

SEQ ID NO: 3037092 - RNA, 19 nt, Artificial Sequence
  Description of Artificial Sequence: Synthetic oligonucleotide
gucuagcuccaauaaaugg

SEQ ID NO: 3037093 - RNA, 19 nt, Artificial Sequence
  Description of Artificial Sequence: Synthetic oligonucleotide
uauaaggacugcauggcuc

SEQ ID NO: 3037094 - RNA, 19 nt, Artificial Sequence
  Description of Artificial Sequence: Synthetic oligonucleotide
ucuuuagucagauguucgc

SEQ ID NO: 3037095 - RNA, 19 nt, Artificial Sequence
  Description of Artificial Sequence: Synthetic oligonucleotide
uuccuuuuauuuugcuucg

SEQ ID NO: 3037096 - RNA, 19 nt, Artificial Sequence
  Description of Artificial Sequence: Synthetic oligonucleotide
cuuucuuuaacuccugcuc

SEQ ID NO: 3037097 - RNA, 19 nt, Artificial Sequence
  Description of Artificial Sequence: Synthetic oligonucleotide
cauuuaaggcuuuaaucug

SEQ ID NO: 3037098 - RNA, 19 nt, Artificial Sequence
  Description of Artificial Sequence: Synthetic oligonucleotide
ucgaguugggauuccaaag

SEQ ID NO: 3037099 - RNA, 19 nt, Artificial Sequence
  Description of Artificial Sequence: Synthetic oligonucleotide
caaugauccauccagaaaa

SEQ ID NO: 3037100 - RNA, 19 nt, Artificial Sequence
  Description of Artificial Sequence: Synthetic oligonucleotide
uggucuagcuccaauaaau

SEQ ID NO: 3037101 - RNA, 19 nt, Artificial Sequence
  Description of Artificial Sequence: Synthetic oligonucleotide
uaaccagguauaaggacug

SEQ ID NO: 3037102 - RNA, 19 nt, Artificial Sequence
  Description of Artificial Sequence: Synthetic oligonucleotide
acucuguucaaauuccuga

SEQ ID NO: 3037103 - RNA, 19 nt, Artificial Sequence
  Description of Artificial Sequence: Synthetic oligonucleotide
uuuugcuucgaguugggau

SEQ ID NO: 3037104 - RNA, 19 nt, Artificial Sequence
  Description of Artificial Sequence: Synthetic oligonucleotide
uuuaaggcuuuaaucugcu

SEQ ID NO: 3037105 - RNA, 19 nt, Artificial Sequence
  Description of Artificial Sequence: Synthetic oligonucleotide
ucuuucuuuaacuccugcu

SEQ ID NO: 3037106 - RNA, 19 nt, Artificial Sequence
  Description of Artificial Sequence: Synthetic oligonucleotide
cuguucaaauuccugacac

SEQ ID NO: 3037107 - RNA, 19 nt, Artificial Sequence
  Description of Artificial Sequence: Synthetic oligonucleotide
guuccuguuuccuugagca

SEQ ID NO: 3037108 - RNA, 19 nt, Artificial Sequence
  Description of Artificial Sequence: Synthetic oligonucleotide
ucuguucaaauuccugaca

SEQ ID NO: 3037109 - RNA, 19 nt, Artificial Sequence
  Description of Artificial Sequence: Synthetic oligonucleotide
ugcauggcucauuuaaggc

SEQ ID NO: 3037110 - RNA, 19 nt, Artificial Sequence
  Description of Artificial Sequence: Synthetic oligonucleotide
auccauccagaaaauaagc

SEQ ID NO: 3037111 - RNA, 19 nt, Artificial Sequence
  Description of Artificial Sequence: Synthetic oligonucleotide
guugggauuccaaaguucc

SEQ ID NO: 3037112 - RNA, 19 nt, Artificial Sequence
  Description of Artificial Sequence: Synthetic oligonucleotide
uuugcuucgaguugggauu

SEQ ID NO: 3037113 - RNA, 19 nt, Artificial Sequence
  Description of Artificial Sequence: Synthetic oligonucleotide
cugcauggcucauuuaagg

SEQ ID NO: 3037114 - RNA, 19 nt, Artificial Sequence
  Description of Artificial Sequence: Synthetic oligonucleotide
ucuccuggauccauugaag

SEQ ID NO: 3037115 - RNA, 19 nt, Artificial Sequence
  Description of Artificial Sequence: Synthetic oligonucleotide
uuucauugccuguaucucu

SEQ ID NO: 3037116 - RNA, 19 nt, Artificial Sequence
  Description of Artificial Sequence: Synthetic oligonucleotide
auccauugaaggaaggcac

SEQ ID NO: 3037117 - RNA, 19 nt, Artificial Sequence
  Description of Artificial Sequence: Synthetic oligonucleotide
auuccugacacauuucaaa

SEQ ID NO: 3037118 - RNA, 19 nt, Artificial Sequence
  Description of Artificial Sequence: Synthetic oligonucleotide
cagaaaauaagcccugguc

SEQ ID NO: 3037119 - RNA, 19 nt, Artificial Sequence
  Description of Artificial Sequence: Synthetic oligonucleotide
uucuuuaacuccugcuccc

SEQ ID NO: 3037120 - RNA, 19 nt, Artificial Sequence
  Description of Artificial Sequence: Synthetic oligonucleotide
auaaggacugcauggcuca

SEQ ID NO: 3037121 - RNA, 19 nt, Artificial Sequence
  Description of Artificial Sequence: Synthetic oligonucleotide
uauuuugcuucgaguuggg

SEQ ID NO: 3037122 - RNA, 19 nt, Artificial Sequence
  Description of Artificial Sequence: Synthetic oligonucleotide
gauguucgcuuucauugcc

SEQ ID NO: 3037123 - RNA, 19 nt, Artificial Sequence
  Description of Artificial Sequence: Synthetic oligonucleotide
guuaaccagguauaaggac

SEQ ID NO: 3037124 - RNA, 19 nt, Artificial Sequence
  Description of Artificial Sequence: Synthetic oligonucleotide
aguucuuaaucugccuagc

SEQ ID NO: 3037125 - RNA, 19 nt, Artificial Sequence
  Description of Artificial Sequence: Synthetic oligonucleotide
aaucugccuagcuucuucu

SEQ ID NO: 3037126 - RNA, 19 nt, Artificial Sequence
  Description of Artificial Sequence: Synthetic oligonucleotide
ucuucgaucuuuagucaga

SEQ ID NO: 3037127 - RNA, 19 nt, Artificial Sequence
  Description of Artificial Sequence: Synthetic oligonucleotide
cuucccagcaccuccacug

SEQ ID NO: 3037128 - RNA, 19 nt, Artificial Sequence
  Description of Artificial Sequence: Synthetic oligonucleotide
uucuuaaucugccuagcuu

SEQ ID NO: 3037129 - RNA, 19 nt, Artificial Sequence
  Description of Artificial Sequence: Synthetic oligonucleotide
gauccuucccagcaccucc

SEQ ID NO: 3037130 - RNA, 19 nt, Artificial Sequence
  Description of Artificial Sequence: Synthetic oligonucleotide
cuccuggauccauugaagg

SEQ ID NO: 3037131 - RNA, 19 nt, Artificial Sequence
  Description of Artificial Sequence: Synthetic oligonucleotide
uucuuucuuuaacuccugc

SEQ ID NO: 3037132 - RNA, 19 nt, Artificial Sequence
  Description of Artificial Sequence: Synthetic oligonucleotide
uuaaucugcuggucuagcu

SEQ ID NO: 3037133 - RNA, 19 nt, Artificial Sequence
  Description of Artificial Sequence: Synthetic oligonucleotide
uguucaaauuccugacaca

SEQ ID NO: 3037134 - RNA, 19 nt, Artificial Sequence
  Description of Artificial Sequence: Synthetic oligonucleotide
augucaggcaggugcuucc

SEQ ID NO: 3037135 - RNA, 19 nt, Artificial Sequence
  Description of Artificial Sequence: Synthetic oligonucleotide
aucuuuagucagauguucg

SEQ ID NO: 3037136 - RNA, 19 nt, Artificial Sequence
  Description of Artificial Sequence: Synthetic oligonucleotide
cucuguucaaauuccugac

SEQ ID NO: 3037137 - RNA, 19 nt, Artificial Sequence
  Description of Artificial Sequence: Synthetic oligonucleotide
gauccauugaaggaaggca

SEQ ID NO: 3037138 - RNA, 19 nt, Artificial Sequence
  Description of Artificial Sequence: Synthetic oligonucleotide
ccauccagaaaauaagccc

SEQ ID NO: 3037139 - RNA, 19 nt, Artificial Sequence
  Description of Artificial Sequence: Synthetic oligonucleotide
gacugcauggcucauuuaa

SEQ ID NO: 3037140 - RNA, 19 nt, Artificial Sequence
  Description of Artificial Sequence: Synthetic oligonucleotide
uuuaacuccugcucccgcu

SEQ ID NO: 3037141 - RNA, 19 nt, Artificial Sequence
  Description of Artificial Sequence: Synthetic oligonucleotide
uuuagucagauguucgcuu

SEQ ID NO: 3037142 - RNA, 19 nt, Artificial Sequence
  Description of Artificial Sequence: Synthetic oligonucleotide
cuugagcaaugauccaucc

SEQ ID NO: 3037143 - RNA, 19 nt, Artificial Sequence
  Description of Artificial Sequence: Synthetic oligonucleotide
ucuuuaacuccugcucccg

SEQ ID NO: 3037144 - RNA, 19 nt, Artificial Sequence
  Description of Artificial Sequence: Synthetic oligonucleotide
uugaaggaaggcacuggca

SEQ ID NO: 3037145 - RNA, 19 nt, Artificial Sequence
  Description of Artificial Sequence: Synthetic oligonucleotide
ugggauuccaaaguuccug

SEQ ID NO: 3037146 - RNA, 19 nt, Artificial Sequence
  Description of Artificial Sequence: Synthetic oligonucleotide
ugucuuccuuuuauuuugc

SEQ ID NO: 3037147 - RNA, 19 nt, Artificial Sequence
  Description of Artificial Sequence: Synthetic oligonucleotide
agcuccaauaaaugguuga

SEQ ID NO: 3037148 - RNA, 19 nt, Artificial Sequence
  Description of Artificial Sequence: Synthetic oligonucleotide
auaagcccuggucuccugg

SEQ ID NO: 3037149 - RNA, 19 nt, Artificial Sequence
  Description of Artificial Sequence: Synthetic oligonucleotide
gucuucgaucuuuagucag

SEQ ID NO: 3037150 - RNA, 19 nt, Artificial Sequence
  Description of Artificial Sequence: Synthetic oligonucleotide
uccauugaaggaaggcacu

SEQ ID NO: 3037151 - RNA, 19 nt, Artificial Sequence
  Description of Artificial Sequence: Synthetic oligonucleotide
gaucuuuagucagauguuc

SEQ ID NO: 3037152 - RNA, 19 nt, Artificial Sequence
  Description of Artificial Sequence: Synthetic oligonucleotide
uugagcaaugauccaucca

SEQ ID NO: 3037153 - RNA, 19 nt, Artificial Sequence
  Description of Artificial Sequence: Synthetic oligonucleotide
uaaucugccuagcuucuuc

SEQ ID NO: 3037154 - RNA, 19 nt, Artificial Sequence
  Description of Artificial Sequence: Synthetic oligonucleotide
uggauccauugaaggaagg

SEQ ID NO: 3037155 - RNA, 19 nt, Artificial Sequence
  Description of Artificial Sequence: Synthetic oligonucleotide
uucgaguugggauuccaaa

SEQ ID NO: 3037156 - RNA, 19 nt, Artificial Sequence
  Description of Artificial Sequence: Synthetic oligonucleotide
uccagaaaauaagcccugg

SEQ ID NO: 3037157 - RNA, 19 nt, Artificial Sequence
  Description of Artificial Sequence: Synthetic oligonucleotide
uguucgcuuucauugccug

SEQ ID NO: 3037158 - RNA, 19 nt, Artificial Sequence
  Description of Artificial Sequence: Synthetic oligonucleotide
uccugacacauuucaaagu

SEQ ID NO: 3037159 - RNA, 19 nt, Artificial Sequence
  Description of Artificial Sequence: Synthetic oligonucleotide
ggugcuuccagauccuucc

SEQ ID NO: 3037160 - RNA, 19 nt, Artificial Sequence
  Description of Artificial Sequence: Synthetic oligonucleotide
acuguuaaccagguauaag

SEQ ID NO: 3037161 - RNA, 19 nt, Artificial Sequence
  Description of Artificial Sequence: Synthetic oligonucleotide
aguugggauuccaaaguuc

SEQ ID NO: 3037162 - RNA, 19 nt, Artificial Sequence
  Description of Artificial Sequence: Synthetic oligonucleotide
cuggauccauugaaggaag

SEQ ID NO: 3037163 - RNA, 19 nt, Artificial Sequence
  Description of Artificial Sequence: Synthetic oligonucleotide
uucauugccuguaucucuu

SEQ ID NO: 3037164 - RNA, 19 nt, Artificial Sequence
  Description of Artificial Sequence: Synthetic oligonucleotide
cauugaaggaaggcacugg

SEQ ID NO: 3037165 - RNA, 19 nt, Artificial Sequence
  Description of Artificial Sequence: Synthetic oligonucleotide
uuagucagauguucgcuuu

SEQ ID NO: 3037166 - RNA, 19 nt, Artificial Sequence
  Description of Artificial Sequence: Synthetic oligonucleotide
agcaaugauccauccagaa

SEQ ID NO: 3037167 - RNA, 19 nt, Artificial Sequence
  Description of Artificial Sequence: Synthetic oligonucleotide
cauccagaaaauaagcccu

SEQ ID NO: 3037168 - RNA, 19 nt, Artificial Sequence
  Description of Artificial Sequence: Synthetic oligonucleotide
acacauuucaaaguucuua

SEQ ID NO: 3037169 - RNA, 19 nt, Artificial Sequence
  Description of Artificial Sequence: Synthetic oligonucleotide
uagcuccaauaaaugguug

SEQ ID NO: 3037170 - RNA, 19 nt, Artificial Sequence
  Description of Artificial Sequence: Synthetic oligonucleotide
uuaaggcuuuaaucugcug

SEQ ID NO: 3037171 - RNA, 19 nt, Artificial Sequence
  Description of Artificial Sequence: Synthetic oligonucleotide
aauaagcccuggucuccug

SEQ ID NO: 3037172 - RNA, 19 nt, Artificial Sequence
  Description of Artificial Sequence: Synthetic oligonucleotide
accuccacuguuaaccagg

SEQ ID NO: 3037173 - RNA, 19 nt, Artificial Sequence
  Description of Artificial Sequence: Synthetic oligonucleotide
aaauaagcccuggucuccu

SEQ ID NO: 3037174 - RNA, 19 nt, Artificial Sequence
  Description of Artificial Sequence: Synthetic oligonucleotide
ucccgcuccuugaugaugu

SEQ ID NO: 3037175 - RNA, 19 nt, Artificial Sequence
  Description of Artificial Sequence: Synthetic oligonucleotide
cuccuugaugaugucaggc

SEQ ID NO: 3037176 - RNA, 19 nt, Artificial Sequence
  Description of Artificial Sequence: Synthetic oligonucleotide
uuaacuccugcucccgcuc

SEQ ID NO: 3037177 - RNA, 19 nt, Artificial Sequence
  Description of Artificial Sequence: Synthetic oligonucleotide
acauuucaaaguucuuaau

SEQ ID NO: 3037178 - RNA, 19 nt, Artificial Sequence
  Description of Artificial Sequence: Synthetic oligonucleotide
cuuucauugccuguaucuc

SEQ ID NO: 3037179 - RNA, 19 nt, Artificial Sequence
  Description of Artificial Sequence: Synthetic oligonucleotide
gguauaaggacugcauggc

SEQ ID NO: 3037180 - RNA, 19 nt, Artificial Sequence
  Description of Artificial Sequence: Synthetic oligonucleotide
ucugccuagcuucuucuuu

SEQ ID NO: 3037181 - RNA, 19 nt, Artificial Sequence
  Description of Artificial Sequence: Synthetic oligonucleotide
aaugauccauccagaaaau

SEQ ID NO: 3037182 - RNA, 19 nt, Artificial Sequence
  Description of Artificial Sequence: Synthetic oligonucleotide
cugacacauuucaaaguuc

SEQ ID NO: 3037183 - RNA, 19 nt, Artificial Sequence
  Description of Artificial Sequence: Synthetic oligonucleotide
acuggcacucuguucaaau

SEQ ID NO: 3037184 - RNA, 19 nt, Artificial Sequence
  Description of Artificial Sequence: Synthetic oligonucleotide
cuuuaacuccugcucccgc

SEQ ID NO: 3037185 - RNA, 19 nt, Artificial Sequence
  Description of Artificial Sequence: Synthetic oligonucleotide
uccaaaguuccuguuuccu

SEQ ID NO: 3037186 - RNA, 19 nt, Artificial Sequence
  Description of Artificial Sequence: Synthetic oligonucleotide
cacucuguucaaauuccug

SEQ ID NO: 3037187 - RNA, 19 nt, Artificial Sequence
  Description of Artificial Sequence: Synthetic oligonucleotide
uccuguuuccuugagcaau

SEQ ID NO: 3037188 - RNA, 19 nt, Artificial Sequence
  Description of Artificial Sequence: Synthetic oligonucleotide
uucaaauuccugacacauu

SEQ ID NO: 3037189 - RNA, 19 nt, Artificial Sequence
  Description of Artificial Sequence: Synthetic oligonucleotide
uccuugagcaaugauccau

SEQ ID NO: 3037190 - RNA, 19 nt, Artificial Sequence
  Description of Artificial Sequence: Synthetic oligonucleotide
uugggauuccaaaguuccu

SEQ ID NO: 3037191 - RNA, 19 nt, Artificial Sequence
  Description of Artificial Sequence: Synthetic oligonucleotide
aauuccugacacauuucaa

SEQ ID NO: 3037192 - RNA, 19 nt, Artificial Sequence
  Description of Artificial Sequence: Synthetic oligonucleotide
uccagauccuucccagcac

SEQ ID NO: 3037193 - RNA, 19 nt, Artificial Sequence
  Description of Artificial Sequence: Synthetic oligonucleotide
caaauuccugacacauuuc

SEQ ID NO: 3037194 - RNA, 19 nt, Artificial Sequence
  Description of Artificial Sequence: Synthetic oligonucleotide
uguuuccuugagcaaugau

SEQ ID NO: 3037195 - RNA, 19 nt, Artificial Sequence
  Description of Artificial Sequence: Synthetic oligonucleotide
cugccuagcuucuucuuuc

SEQ ID NO: 3037196 - RNA, 19 nt, Artificial Sequence
  Description of Artificial Sequence: Synthetic oligonucleotide
uucgcuuucauugccugua

SEQ ID NO: 3037197 - RNA, 19 nt, Artificial Sequence
  Description of Artificial Sequence: Synthetic oligonucleotide
acugcauggcucauuuaag

SEQ ID NO: 3037198 - RNA, 19 nt, Artificial Sequence
  Description of Artificial Sequence: Synthetic oligonucleotide
aaggcacuggcacucuguu

SEQ ID NO: 3037199 - RNA, 19 nt, Artificial Sequence
  Description of Artificial Sequence: Synthetic oligonucleotide
uucgaucuuuagucagaug

SEQ ID NO: 3037200 - RNA, 19 nt, Artificial Sequence
  Description of Artificial Sequence: Synthetic oligonucleotide
aggacugcauggcucauuu

SEQ ID NO: 3037201 - RNA, 19 nt, Artificial Sequence
  Description of Artificial Sequence: Synthetic oligonucleotide
ugcuggucuagcuccaaua

SEQ ID NO: 3037202 - RNA, 19 nt, Artificial Sequence
  Description of Artificial Sequence: Synthetic oligonucleotide
ccuuuuauuuugcuucgag

SEQ ID NO: 3037203 - RNA, 19 nt, Artificial Sequence
  Description of Artificial Sequence: Synthetic oligonucleotide
ccuugaugaugucaggcag

SEQ ID NO: 3037204 - RNA, 19 nt, Artificial Sequence
  Description of Artificial Sequence: Synthetic oligonucleotide
gaugucaggcaggugcuuc

SEQ ID NO: 3037205 - RNA, 19 nt, Artificial Sequence
  Description of Artificial Sequence: Synthetic oligonucleotide
gauuccaaaguuccuguuu

SEQ ID NO: 3037206 - RNA, 19 nt, Artificial Sequence
  Description of Artificial Sequence: Synthetic oligonucleotide
guucaaauuccugacacau

SEQ ID NO: 3037207 - RNA, 19 nt, Artificial Sequence
  Description of Artificial Sequence: Synthetic oligonucleotide
gucuccuggauccauugaa

SEQ ID NO: 3037208 - RNA, 19 nt, Artificial Sequence
  Description of Artificial Sequence: Synthetic oligonucleotide
uuccuugagcaaugaucca

SEQ ID NO: 3037209 - RNA, 19 nt, Artificial Sequence
  Description of Artificial Sequence: Synthetic oligonucleotide
aggcacuggcacucuguuc

SEQ ID NO: 3037210 - RNA, 19 nt, Artificial Sequence
  Description of Artificial Sequence: Synthetic oligonucleotide
agauccuucccagcaccuc

SEQ ID NO: 3037211 - RNA, 19 nt, Artificial Sequence
  Description of Artificial Sequence: Synthetic oligonucleotide
aggcuuuaaucugcugguc

SEQ ID NO: 3037212 - RNA, 19 nt, Artificial Sequence
  Description of Artificial Sequence: Synthetic oligonucleotide
auccagaaaauaagcccug

SEQ ID NO: 3037213 - RNA, 19 nt, Artificial Sequence
  Description of Artificial Sequence: Synthetic oligonucleotide
ugccuagcuucuucuuucu

SEQ ID NO: 3037214 - RNA, 19 nt, Artificial Sequence
  Description of Artificial Sequence: Synthetic oligonucleotide
gaaggaaggcacuggcacu

SEQ ID NO: 3037215 - RNA, 19 nt, Artificial Sequence
  Description of Artificial Sequence: Synthetic oligonucleotide
gcuuucauugccuguaucu

SEQ ID NO: 3037216 - RNA, 19 nt, Artificial Sequence
  Description of Artificial Sequence: Synthetic oligonucleotide
ggucuagcuccaauaaaug

SEQ ID NO: 3037217 - RNA, 19 nt, Artificial Sequence
  Description of Artificial Sequence: Synthetic oligonucleotide
uccuuuuauuuugcuucga

SEQ ID NO: 3037218 - RNA, 19 nt, Artificial Sequence
  Description of Artificial Sequence: Synthetic oligonucleotide
uuccuguuuccuugagcaa

SEQ ID NO: 3037219 - RNA, 19 nt, Artificial Sequence
  Description of Artificial Sequence: Synthetic oligonucleotide
guauaaggacugcauggcu

SEQ ID NO: 3037220 - RNA, 19 nt, Artificial Sequence
  Description of Artificial Sequence: Synthetic oligonucleotide
augaugucaggcaggugcu

SEQ ID NO: 3037221 - RNA, 19 nt, Artificial Sequence
  Description of Artificial Sequence: Synthetic oligonucleotide
guucuuaaucugccuagcu

SEQ ID NO: 3037222 - RNA, 19 nt, Artificial Sequence
  Description of Artificial Sequence: Synthetic oligonucleotide
cuagcuccaauaaaugguu

SEQ ID NO: 3037223 - RNA, 19 nt, Artificial Sequence
  Description of Artificial Sequence: Synthetic oligonucleotide
cuuaaucugccuagcuucu

SEQ ID NO: 3037224 - RNA, 19 nt, Artificial Sequence
  Description of Artificial Sequence: Synthetic oligonucleotide
gagcaaugauccauccaga

SEQ ID NO: 3037225 - RNA, 19 nt, Artificial Sequence
  Description of Artificial Sequence: Synthetic oligonucleotide
caccuccacuguuaaccag

SEQ ID NO: 3037226 - RNA, 19 nt, Artificial Sequence
  Description of Artificial Sequence: Synthetic oligonucleotide
caaaguucuuaaucugccu

SEQ ID NO: 3037227 - RNA, 19 nt, Artificial Sequence
  Description of Artificial Sequence: Synthetic oligonucleotide
ccagauccuucccagcacc

SEQ ID NO: 3037228 - RNA, 19 nt, Artificial Sequence
  Description of Artificial Sequence: Synthetic oligonucleotide
ucgcuuucauugccuguau

SEQ ID NO: 3037229 - RNA, 19 nt, Artificial Sequence
  Description of Artificial Sequence: Synthetic oligonucleotide
aagcccuggucuccuggau

SEQ ID NO: 3037230 - RNA, 19 nt, Artificial Sequence
  Description of Artificial Sequence: Synthetic oligonucleotide
uagcuucuucuuucuuuaa

SEQ ID NO: 3037231 - RNA, 19 nt, Artificial Sequence
  Description of Artificial Sequence: Synthetic oligonucleotide
ggucuucgaucuuuaguca

SEQ ID NO: 3037232 - RNA, 19 nt, Artificial Sequence
  Description of Artificial Sequence: Synthetic oligonucleotide
uugcuucgaguugggauuc

SEQ ID NO: 3037233 - RNA, 19 nt, Artificial Sequence
  Description of Artificial Sequence: Synthetic oligonucleotide
auuuugcuucgaguuggga

SEQ ID NO: 3037234 - RNA, 19 nt, Artificial Sequence
  Description of Artificial Sequence: Synthetic oligonucleotide
gcccuggucuccuggaucc

SEQ ID NO: 3037235 - RNA, 19 nt, Artificial Sequence
  Description of Artificial Sequence: Synthetic oligonucleotide
ccuugagcaaugauccauc

SEQ ID NO: 3037236 - RNA, 19 nt, Artificial Sequence
  Description of Artificial Sequence: Synthetic oligonucleotide
ccuguuuccuugagcaaug

SEQ ID NO: 3037237 - RNA, 19 nt, Artificial Sequence
  Description of Artificial Sequence: Synthetic oligonucleotide
cgcuccuugaugaugucag

SEQ ID NO: 3037238 - RNA, 19 nt, Artificial Sequence
  Description of Artificial Sequence: Synthetic oligonucleotide
cauggcucauuuaaggcuu

SEQ ID NO: 3037239 - RNA, 19 nt, Artificial Sequence
  Description of Artificial Sequence: Synthetic oligonucleotide
gcaaugauccauccagaaa

SEQ ID NO: 3037240 - RNA, 19 nt, Artificial Sequence
  Description of Artificial Sequence: Synthetic oligonucleotide
gucaggcaggugcuuccag

SEQ ID NO: 3037241 - RNA, 19 nt, Artificial Sequence
  Description of Artificial Sequence: Synthetic oligonucleotide
ugucaggcaggugcuucca

SEQ ID NO: 3037242 - RNA, 19 nt, Artificial Sequence
  Description of Artificial Sequence: Synthetic oligonucleotide
gaguugggauuccaaaguu

SEQ ID NO: 3037243 - RNA, 19 nt, Artificial Sequence
  Description of Artificial Sequence: Synthetic oligonucleotide
cuuuagucagauguucgcu

SEQ ID NO: 3037244 - RNA, 19 nt, Artificial Sequence
  Description of Artificial Sequence: Synthetic oligonucleotide
auguucgcuuucauugccu

SEQ ID NO: 3037245 - RNA, 19 nt, Artificial Sequence
  Description of Artificial Sequence: Synthetic oligonucleotide
ugaugaugucaggcaggug

SEQ ID NO: 3037246 - RNA, 19 nt, Artificial Sequence
  Description of Artificial Sequence: Synthetic oligonucleotide
gcuuuaaucugcuggucua

SEQ ID NO: 3037247 - RNA, 19 nt, Artificial Sequence
  Description of Artificial Sequence: Synthetic oligonucleotide
gcauggcucauuuaaggcu

SEQ ID NO: 3037248 - RNA, 19 nt, Artificial Sequence
  Description of Artificial Sequence: Synthetic oligonucleotide
gcuggucuagcuccaauaa

SEQ ID NO: 3037249 - RNA, 19 nt, Artificial Sequence
  Description of Artificial Sequence: Synthetic oligonucleotide
uuaaucugccuagcuucuu

SEQ ID NO: 3037250 - RNA, 19 nt, Artificial Sequence
  Description of Artificial Sequence: Synthetic oligonucleotide
cuucgaguugggauuccaa

SEQ ID NO: 3037251 - RNA, 19 nt, Artificial Sequence
  Description of Artificial Sequence: Synthetic oligonucleotide
ucauugccuguaucucuuu

SEQ ID NO: 3037252 - RNA, 19 nt, Artificial Sequence
  Description of Artificial Sequence: Synthetic oligonucleotide
augauccauccagaaaaua

SEQ ID NO: 3037253 - RNA, 19 nt, Artificial Sequence
  Description of Artificial Sequence: Synthetic oligonucleotide
cuggucuagcuccaauaaa

SEQ ID NO: 3037254 - RNA, 19 nt, Artificial Sequence
  Description of Artificial Sequence: Synthetic oligonucleotide
caggucuucgaucuuuagu

SEQ ID NO: 3037255 - RNA, 19 nt, Artificial Sequence
  Description of Artificial Sequence: Synthetic oligonucleotide
aaggacugcauggcucauu

SEQ ID NO: 3037256 - RNA, 19 nt, Artificial Sequence
  Description of Artificial Sequence: Synthetic oligonucleotide
aucugccuagcuucuucuu

SEQ ID NO: 3037257 - RNA, 19 nt, Artificial Sequence
  Description of Artificial Sequence: Synthetic oligonucleotide
gcucauuuaaggcuuuaau

SEQ ID NO: 3037258 - RNA, 19 nt, Artificial Sequence
  Description of Artificial Sequence: Synthetic oligonucleotide
ugcuucgaguugggauucc

SEQ ID NO: 3037259 - RNA, 19 nt, Artificial Sequence
  Description of Artificial Sequence: Synthetic oligonucleotide
ccauugaaggaaggcacug

SEQ ID NO: 3037260 - RNA, 19 nt, Artificial Sequence
  Description of Artificial Sequence: Synthetic oligonucleotide
gaaggcacuggcacucugu

SEQ ID NO: 3037261 - RNA, 19 nt, Artificial Sequence
  Description of Artificial Sequence: Synthetic oligonucleotide
cacuguuaaccagguauaa

SEQ ID NO: 3037262 - RNA, 19 nt, Artificial Sequence
  Description of Artificial Sequence: Synthetic oligonucleotide
gggauuccaaaguuccugu

SEQ ID NO: 3037263 - RNA, 19 nt, Artificial Sequence
  Description of Artificial Sequence: Synthetic oligonucleotide
ccuggauccauugaaggaa

SEQ ID NO: 3037264 - RNA, 19 nt, Artificial Sequence
  Description of Artificial Sequence: Synthetic oligonucleotide
gcuccaauaaaugguugaa

SEQ ID NO: 3037265 - RNA, 19 nt, Artificial Sequence
  Description of Artificial Sequence: Synthetic oligonucleotide
ucugcuggucuagcuccaa

SEQ ID NO: 3037266 - RNA, 19 nt, Artificial Sequence
  Description of Artificial Sequence: Synthetic oligonucleotide
ggaaggcacuggcacucug

SEQ ID NO: 3037267 - RNA, 19 nt, Artificial Sequence
  Description of Artificial Sequence: Synthetic oligonucleotide
ucccagcaccuccacuguu

SEQ ID NO: 3037268 - RNA, 19 nt, Artificial Sequence
  Description of Artificial Sequence: Synthetic oligonucleotide
uaaggacugcauggcucau

SEQ ID NO: 3037269 - RNA, 19 nt, Artificial Sequence
  Description of Artificial Sequence: Synthetic oligonucleotide
gcaccuccacuguuaacca

SEQ ID NO: 3037270 - RNA, 19 nt, Artificial Sequence
  Description of Artificial Sequence: Synthetic oligonucleotide
guucgcuuucauugccugu

SEQ ID NO: 3037271 - RNA, 19 nt, Artificial Sequence
  Description of Artificial Sequence: Synthetic oligonucleotide
ccugacacauuucaaaguu

SEQ ID NO: 3037272 - RNA, 19 nt, Artificial Sequence
  Description of Artificial Sequence: Synthetic oligonucleotide
ccaggucuucgaucuuuag

SEQ ID NO: 3037273 - RNA, 19 nt, Artificial Sequence
  Description of Artificial Sequence: Synthetic oligonucleotide
cugcucccgcuccuugaug

SEQ ID NO: 3037274 - RNA, 19 nt, Artificial Sequence
  Description of Artificial Sequence: Synthetic oligonucleotide
uggcucauuuaaggcuuua

SEQ ID NO: 3037275 - RNA, 19 nt, Artificial Sequence
  Description of Artificial Sequence: Synthetic oligonucleotide
aggaaggcacuggcacucu

SEQ ID NO: 3037276 - RNA, 19 nt, Artificial Sequence
  Description of Artificial Sequence: Synthetic oligonucleotide
cuucgaucuuuagucagau

SEQ ID NO: 3037277 - RNA, 19 nt, Artificial Sequence
  Description of Artificial Sequence: Synthetic oligonucleotide
ccacuguuaaccagguaua

SEQ ID NO: 3037278 - RNA, 19 nt, Artificial Sequence
  Description of Artificial Sequence: Synthetic oligonucleotide
cuguuuccuugagcaauga

SEQ ID NO: 3037279 - RNA, 19 nt, Artificial Sequence
  Description of Artificial Sequence: Synthetic oligonucleotide
gacacauuucaaaguucuu

SEQ ID NO: 3037280 - RNA, 19 nt, Artificial Sequence
  Description of Artificial Sequence: Synthetic oligonucleotide
gucagauguucgcuuucau

SEQ ID NO: 3037281 - RNA, 19 nt, Artificial Sequence
  Description of Artificial Sequence: Synthetic oligonucleotide
ggcucauuuaaggcuuuaa

SEQ ID NO: 3037282 - RNA, 19 nt, Artificial Sequence
  Description of Artificial Sequence: Synthetic oligonucleotide
ccagguauaaggacugcau

SEQ ID NO: 3037283 - RNA, 19 nt, Artificial Sequence
  Description of Artificial Sequence: Synthetic oligonucleotide
ccuagcuucuucuuucuuu

SEQ ID NO: 3037284 - RNA, 19 nt, Artificial Sequence
  Description of Artificial Sequence: Synthetic oligonucleotide
cauugccuguaucucuuuu

SEQ ID NO: 3037285 - RNA, 19 nt, Artificial Sequence
  Description of Artificial Sequence: Synthetic oligonucleotide
ccagaaaauaagcccuggu

SEQ ID NO: 3037286 - RNA, 19 nt, Artificial Sequence
  Description of Artificial Sequence: Synthetic oligonucleotide
auggcucauuuaaggcuuu

SEQ ID NO: 3037287 - RNA, 19 nt, Artificial Sequence
  Description of Artificial Sequence: Synthetic oligonucleotide
gcuucgaguugggauucca

SEQ ID NO: 3037288 - RNA, 19 nt, Artificial Sequence
  Description of Artificial Sequence: Synthetic oligonucleotide
cgaguugggauuccaaagu

SEQ ID NO: 3037289 - RNA, 19 nt, Artificial Sequence
  Description of Artificial Sequence: Synthetic oligonucleotide
ggauuccaaaguuccuguu

SEQ ID NO: 3037290 - RNA, 19 nt, Artificial Sequence
  Description of Artificial Sequence: Synthetic oligonucleotide
cuccacuguuaaccaggua

SEQ ID NO: 3037291 - RNA, 19 nt, Artificial Sequence
  Description of Artificial Sequence: Synthetic oligonucleotide
cacuggcacucuguucaaa

SEQ ID NO: 3037292 - RNA, 19 nt, Artificial Sequence
  Description of Artificial Sequence: Synthetic oligonucleotide
gcacucuguucaaauuccu

SEQ ID NO: 3037293 - RNA, 19 nt, Artificial Sequence
  Description of Artificial Sequence: Synthetic oligonucleotide
ggacugcauggcucauuua

SEQ ID NO: 3037294 - RNA, 19 nt, Artificial Sequence
  Description of Artificial Sequence: Synthetic oligonucleotide
gcacuggcacucuguucaa

SEQ ID NO: 3037295 - RNA, 19 nt, Artificial Sequence
  Description of Artificial Sequence: Synthetic oligonucleotide
cugcuggucuagcuccaau

SEQ ID NO: 3037296 - RNA, 19 nt, Artificial Sequence
  Description of Artificial Sequence: Synthetic oligonucleotide
cccaggucuucgaucuuua

SEQ ID NO: 3037297 - RNA, 19 nt, Artificial Sequence
  Description of Artificial Sequence: Synthetic oligonucleotide
cgaucuuuagucagauguu

SEQ ID NO: 3037298 - RNA, 19 nt, Artificial Sequence
  Description of Artificial Sequence: Synthetic oligonucleotide
ccgcuccuugaugauguca

SEQ ID NO: 3037299 - RNA, 19 nt, Artificial Sequence
  Description of Artificial Sequence: Synthetic oligonucleotide
cccgcuccuugaugauguc

SEQ ID NO: 3037300 - RNA, 19 nt, Artificial Sequence
  Description of Artificial Sequence: Synthetic oligonucleotide
ccugcucccgcuccuugau

SEQ ID NO: 3037301 - RNA, 19 nt, Artificial Sequence
  Description of Artificial Sequence: Synthetic oligonucleotide
cccuggucuccuggaucca

SEQ ID NO: 3037302 - RNA, 19 nt, Artificial Sequence
  Description of Artificial Sequence: Synthetic oligonucleotide
ccccaggucuucgaucuuu

SEQ ID NO: 3037303 - RNA, 19 nt, Artificial Sequence
  Description of Artificial Sequence: Synthetic oligonucleotide
aauucaugcauuucccagg

SEQ ID NO: 3037304 - RNA, 19 nt, Artificial Sequence
  Description of Artificial Sequence: Synthetic oligonucleotide
aaauucaugcauuucccag

SEQ ID NO: 3037305 - RNA, 19 nt, Artificial Sequence
  Description of Artificial Sequence: Synthetic oligonucleotide
aaacgguucauccacaagu

SEQ ID NO: 3037306 - RNA, 19 nt, Artificial Sequence
  Description of Artificial Sequence: Synthetic oligonucleotide
cuugauagagcucauauuc

SEQ ID NO: 3037307 - RNA, 19 nt, Artificial Sequence
  Description of Artificial Sequence: Synthetic oligonucleotide
uuuuguuggaacuguaaag

SEQ ID NO: 3037308 - RNA, 19 nt, Artificial Sequence
  Description of Artificial Sequence: Synthetic oligonucleotide
caaggauuaaagaugacug

SEQ ID NO: 3037309 - RNA, 19 nt, Artificial Sequence
  Description of Artificial Sequence: Synthetic oligonucleotide
augacuguauaucaugaac

SEQ ID NO: 3037310 - RNA, 19 nt, Artificial Sequence
  Description of Artificial Sequence: Synthetic oligonucleotide
ugacuguauaucaugaaca

SEQ ID NO: 3037311 - RNA, 19 nt, Artificial Sequence
  Description of Artificial Sequence: Synthetic oligonucleotide
agggcucagaaauucaugc

SEQ ID NO: 3037312 - RNA, 19 nt, Artificial Sequence
  Description of Artificial Sequence: Synthetic oligonucleotide
uaaagaugacuguauauca

SEQ ID NO: 3037313 - RNA, 19 nt, Artificial Sequence
  Description of Artificial Sequence: Synthetic oligonucleotide
aagaugacuguauaucaug

SEQ ID NO: 3037314 - RNA, 19 nt, Artificial Sequence
  Description of Artificial Sequence: Synthetic oligonucleotide
ucaucaacaacucucuuuc

SEQ ID NO: 3037315 - RNA, 19 nt, Artificial Sequence
  Description of Artificial Sequence: Synthetic oligonucleotide
aacuguaaagacuuuccca

SEQ ID NO: 3037316 - RNA, 19 nt, Artificial Sequence
  Description of Artificial Sequence: Synthetic oligonucleotide
auucaugcauuucccaggc

SEQ ID NO: 3037317 - RNA, 19 nt, Artificial Sequence
  Description of Artificial Sequence: Synthetic oligonucleotide
uuuguuggaacuguaaaga

SEQ ID NO: 3037318 - RNA, 19 nt, Artificial Sequence
  Description of Artificial Sequence: Synthetic oligonucleotide
cacaaguucuucaacauac

SEQ ID NO: 3037319 - RNA, 19 nt, Artificial Sequence
  Description of Artificial Sequence: Synthetic oligonucleotide
uuaaagaugacuguauauc

SEQ ID NO: 3037320 - RNA, 19 nt, Artificial Sequence
  Description of Artificial Sequence: Synthetic oligonucleotide
uucaacauacggcucaucu

SEQ ID NO: 3037321 - RNA, 19 nt, Artificial Sequence
  Description of Artificial Sequence: Synthetic oligonucleotide
uuucccaaguccagaaacg

SEQ ID NO: 3037322 - RNA, 19 nt, Artificial Sequence
  Description of Artificial Sequence: Synthetic oligonucleotide
aacaacucucuuuccucgc

SEQ ID NO: 3037323 - RNA, 19 nt, Artificial Sequence
  Description of Artificial Sequence: Synthetic oligonucleotide
uaaagacuuucccaagucc

SEQ ID NO: 3037324 - RNA, 19 nt, Artificial Sequence
  Description of Artificial Sequence: Synthetic oligonucleotide
agaaauucaugcauuuccc

SEQ ID NO: 3037325 - RNA, 19 nt, Artificial Sequence
  Description of Artificial Sequence: Synthetic oligonucleotide
gacuguauaucaugaacag

SEQ ID NO: 3037326 - RNA, 19 nt, Artificial Sequence
  Description of Artificial Sequence: Synthetic oligonucleotide
augaacaguuucugaaggc

SEQ ID NO: 3037327 - RNA, 19 nt, Artificial Sequence
  Description of Artificial Sequence: Synthetic oligonucleotide
caugaacaguuucugaagg

SEQ ID NO: 3037328 - RNA, 19 nt, Artificial Sequence
  Description of Artificial Sequence: Synthetic oligonucleotide
ucaugaacaguuucugaag

SEQ ID NO: 3037329 - RNA, 19 nt, Artificial Sequence
  Description of Artificial Sequence: Synthetic oligonucleotide
aaggauuaaagaugacugu

SEQ ID NO: 3037330 - RNA, 19 nt, Artificial Sequence
  Description of Artificial Sequence: Synthetic oligonucleotide
aacucucuuuccucgcccc

SEQ ID NO: 3037331 - RNA, 19 nt, Artificial Sequence
  Description of Artificial Sequence: Synthetic oligonucleotide
aacuccauggcccggaggu

SEQ ID NO: 3037332 - RNA, 19 nt, Artificial Sequence
  Description of Artificial Sequence: Synthetic oligonucleotide
uguaaagacuuucccaagu

SEQ ID NO: 3037333 - RNA, 19 nt, Artificial Sequence
  Description of Artificial Sequence: Synthetic oligonucleotide
acuguaaagacuuucccaa

SEQ ID NO: 3037334 - RNA, 19 nt, Artificial Sequence
  Description of Artificial Sequence: Synthetic oligonucleotide
ucaaggauuaaagaugacu

SEQ ID NO: 3037335 - RNA, 19 nt, Artificial Sequence
  Description of Artificial Sequence: Synthetic oligonucleotide
cucuaaaucccuugggugc

SEQ ID NO: 3037336 - RNA, 19 nt, Artificial Sequence
  Description of Artificial Sequence: Synthetic oligonucleotide
ucucuaaaucccuugggug

SEQ ID NO: 3037337 - RNA, 19 nt, Artificial Sequence
  Description of Artificial Sequence: Synthetic oligonucleotide
uugauagagcucauauucc

SEQ ID NO: 3037338 - RNA, 19 nt, Artificial Sequence
  Description of Artificial Sequence: Synthetic oligonucleotide
acggcucaucucuaaaucc

SEQ ID NO: 3037339 - RNA, 19 nt, Artificial Sequence
  Description of Artificial Sequence: Synthetic oligonucleotide
uguuggaacuguaaagacu

SEQ ID NO: 3037340 - RNA, 19 nt, Artificial Sequence
  Description of Artificial Sequence: Synthetic oligonucleotide
gaauguguggugguggugg

SEQ ID NO: 3037341 - RNA, 19 nt, Artificial Sequence
  Description of Artificial Sequence: Synthetic oligonucleotide
uuucccaggcuucugagcu

SEQ ID NO: 3037342 - RNA, 19 nt, Artificial Sequence
  Description of Artificial Sequence: Synthetic oligonucleotide
auuaaagaugacuguauau

SEQ ID NO: 3037343 - RNA, 19 nt, Artificial Sequence
  Description of Artificial Sequence: Synthetic oligonucleotide
uucuucaacauacggcuca

SEQ ID NO: 3037344 - RNA, 19 nt, Artificial Sequence
  Description of Artificial Sequence: Synthetic oligonucleotide
ugagcugguguccauuucc

SEQ ID NO: 3037345 - RNA, 19 nt, Artificial Sequence
  Description of Artificial Sequence: Synthetic oligonucleotide
uuccucaucaacaacucuc

SEQ ID NO: 3037346 - RNA, 19 nt, Artificial Sequence
  Description of Artificial Sequence: Synthetic oligonucleotide
uggaguuccugccuggaag

SEQ ID NO: 3037347 - RNA, 19 nt, Artificial Sequence
  Description of Artificial Sequence: Synthetic oligonucleotide
caaguucuucaacauacgg

SEQ ID NO: 3037348 - RNA, 19 nt, Artificial Sequence
  Description of Artificial Sequence: Synthetic oligonucleotide
aaagacuuucccaagucca

SEQ ID NO: 3037349 - RNA, 19 nt, Artificial Sequence
  Description of Artificial Sequence: Synthetic oligonucleotide
aucaugaacaguuucugaa

SEQ ID NO: 3037350 - RNA, 19 nt, Artificial Sequence
  Description of Artificial Sequence: Synthetic oligonucleotide
aguuucugaaggcucacug

SEQ ID NO: 3037351 - RNA, 19 nt, Artificial Sequence
  Description of Artificial Sequence: Synthetic oligonucleotide
ugauagagcucauauuccu

SEQ ID NO: 3037352 - RNA, 19 nt, Artificial Sequence
  Description of Artificial Sequence: Synthetic oligonucleotide
auagagcucauauuccuca

SEQ ID NO: 3037353 - RNA, 19 nt, Artificial Sequence
  Description of Artificial Sequence: Synthetic oligonucleotide
ucauauuccucaucaacaa

SEQ ID NO: 3037354 - RNA, 19 nt, Artificial Sequence
  Description of Artificial Sequence: Synthetic oligonucleotide
uggaagguggcaugugugg

SEQ ID NO: 3037355 - RNA, 19 nt, Artificial Sequence
  Description of Artificial Sequence: Synthetic oligonucleotide
ucugaaggcucacuguugu

SEQ ID NO: 3037356 - RNA, 19 nt, Artificial Sequence
  Description of Artificial Sequence: Synthetic oligonucleotide
auuucccaggcuucugagc

SEQ ID NO: 3037357 - RNA, 19 nt, Artificial Sequence
  Description of Artificial Sequence: Synthetic oligonucleotide
cuuucccaaguccagaaac

SEQ ID NO: 3037358 - RNA, 19 nt, Artificial Sequence
  Description of Artificial Sequence: Synthetic oligonucleotide
aucuugauagagcucauau

SEQ ID NO: 3037359 - RNA, 19 nt, Artificial Sequence
  Description of Artificial Sequence: Synthetic oligonucleotide
auauuccucaucaacaacu

SEQ ID NO: 3037360 - RNA, 19 nt, Artificial Sequence
  Description of Artificial Sequence: Synthetic oligonucleotide
aaugugugguggugguggg

SEQ ID NO: 3037361 - RNA, 19 nt, Artificial Sequence
  Description of Artificial Sequence: Synthetic oligonucleotide
aucaacaacucucuuuccu

SEQ ID NO: 3037362 - RNA, 19 nt, Artificial Sequence
  Description of Artificial Sequence: Synthetic oligonucleotide
aggugaucuugauagagcu

SEQ ID NO: 3037363 - RNA, 19 nt, Artificial Sequence
  Description of Artificial Sequence: Synthetic oligonucleotide
ugccucaaggauuaaagau

SEQ ID NO: 3037364 - RNA, 19 nt, Artificial Sequence
  Description of Artificial Sequence: Synthetic oligonucleotide
auccacaaguucuucaaca

SEQ ID NO: 3037365 - RNA, 19 nt, Artificial Sequence
  Description of Artificial Sequence: Synthetic oligonucleotide
ucaacaacucucuuuccuc

SEQ ID NO: 3037366 - RNA, 19 nt, Artificial Sequence
  Description of Artificial Sequence: Synthetic oligonucleotide
ucaugcauuucccaggcuu

SEQ ID NO: 3037367 - RNA, 19 nt, Artificial Sequence
  Description of Artificial Sequence: Synthetic oligonucleotide
uaucaugaacaguuucuga

SEQ ID NO: 3037368 - RNA, 19 nt, Artificial Sequence
  Description of Artificial Sequence: Synthetic oligonucleotide
gagcucauauuccucauca

SEQ ID NO: 3037369 - RNA, 19 nt, Artificial Sequence
  Description of Artificial Sequence: Synthetic oligonucleotide
uccucaucaacaacucucu

SEQ ID NO: 3037370 - RNA, 19 nt, Artificial Sequence
  Description of Artificial Sequence: Synthetic oligonucleotide
gaaauucaugcauuuccca

SEQ ID NO: 3037371 - RNA, 19 nt, Artificial Sequence
  Description of Artificial Sequence: Synthetic oligonucleotide
uuguuggaacuguaaagac

SEQ ID NO: 3037372 - RNA, 19 nt, Artificial Sequence
  Description of Artificial Sequence: Synthetic oligonucleotide
uggguguaacuccauggcc

SEQ ID NO: 3037373 - RNA, 19 nt, Artificial Sequence
  Description of Artificial Sequence: Synthetic oligonucleotide
uuuccuuuuguuggaacug

SEQ ID NO: 3037374 - RNA, 19 nt, Artificial Sequence
  Description of Artificial Sequence: Synthetic oligonucleotide
ucccuugggugccucaagg

SEQ ID NO: 3037375 - RNA, 19 nt, Artificial Sequence
  Description of Artificial Sequence: Synthetic oligonucleotide
auguguggccuccugaaug

SEQ ID NO: 3037376 - RNA, 19 nt, Artificial Sequence
  Description of Artificial Sequence: Synthetic oligonucleotide
guauaucaugaacaguuuc

SEQ ID NO: 3037377 - RNA, 19 nt, Artificial Sequence
  Description of Artificial Sequence: Synthetic oligonucleotide
ucauccacaaguucuucaa

SEQ ID NO: 3037378 - RNA, 19 nt, Artificial Sequence
  Description of Artificial Sequence: Synthetic oligonucleotide
gauuaaagaugacuguaua

SEQ ID NO: 3037379 - RNA, 19 nt, Artificial Sequence
  Description of Artificial Sequence: Synthetic oligonucleotide
uccagaaacgguucaucca

SEQ ID NO: 3037380 - RNA, 19 nt, Artificial Sequence
  Description of Artificial Sequence: Synthetic oligonucleotide
gugaucuugauagagcuca

SEQ ID NO: 3037381 - RNA, 19 nt, Artificial Sequence
  Description of Artificial Sequence: Synthetic oligonucleotide
ucuaaaucccuugggugcc

SEQ ID NO: 3037382 - RNA, 19 nt, Artificial Sequence
  Description of Artificial Sequence: Synthetic oligonucleotide
ccggaggugaucuugauag

SEQ ID NO: 3037383 - RNA, 19 nt, Artificial Sequence
  Description of Artificial Sequence: Synthetic oligonucleotide
gguggguguaacuccaugg

SEQ ID NO: 3037384 - RNA, 19 nt, Artificial Sequence
  Description of Artificial Sequence: Synthetic oligonucleotide
uguauaucaugaacaguuu

SEQ ID NO: 3037385 - RNA, 19 nt, Artificial Sequence
  Description of Artificial Sequence: Synthetic oligonucleotide
uacggcucaucucuaaauc

SEQ ID NO: 3037386 - RNA, 19 nt, Artificial Sequence
  Description of Artificial Sequence: Synthetic oligonucleotide
aaagaugacuguauaucau

SEQ ID NO: 3037387 - RNA, 19 nt, Artificial Sequence
  Description of Artificial Sequence: Synthetic oligonucleotide
gaaacgguucauccacaag

SEQ ID NO: 3037388 - RNA, 19 nt, Artificial Sequence
  Description of Artificial Sequence: Synthetic oligonucleotide
aacaguuucugaaggcuca

SEQ ID NO: 3037389 - RNA, 19 nt, Artificial Sequence
  Description of Artificial Sequence: Synthetic oligonucleotide
guccagaaacgguucaucc

SEQ ID NO: 3037390 - RNA, 19 nt, Artificial Sequence
  Description of Artificial Sequence: Synthetic oligonucleotide
ucaacauacggcucaucuc

SEQ ID NO: 3037391 - RNA, 19 nt, Artificial Sequence
  Description of Artificial Sequence: Synthetic oligonucleotide
guaaagacuuucccaaguc

SEQ ID NO: 3037392 - RNA, 19 nt, Artificial Sequence
  Description of Artificial Sequence: Synthetic oligonucleotide
aagacuuucccaaguccag

SEQ ID NO: 3037393 - RNA, 19 nt, Artificial Sequence
  Description of Artificial Sequence: Synthetic oligonucleotide
uucugaaggcucacuguug

SEQ ID NO: 3037394 - RNA, 19 nt, Artificial Sequence
  Description of Artificial Sequence: Synthetic oligonucleotide
cuguauaucaugaacaguu

SEQ ID NO: 3037395 - RNA, 19 nt, Artificial Sequence
  Description of Artificial Sequence: Synthetic oligonucleotide
agagcucauauuccucauc

SEQ ID NO: 3037396 - RNA, 19 nt, Artificial Sequence
  Description of Artificial Sequence: Synthetic oligonucleotide
guuccugccuggaaggugg

SEQ ID NO: 3037397 - RNA, 19 nt, Artificial Sequence
  Description of Artificial Sequence: Synthetic oligonucleotide
uguguggccuccugaaugu

SEQ ID NO: 3037398 - RNA, 19 nt, Artificial Sequence
  Description of Artificial Sequence: Synthetic oligonucleotide
uccauuuccuuuuguugga

SEQ ID NO: 3037399 - RNA, 19 nt, Artificial Sequence
  Description of Artificial Sequence: Synthetic oligonucleotide
uccacaaguucuucaacau

SEQ ID NO: 3037400 - RNA, 19 nt, Artificial Sequence
  Description of Artificial Sequence: Synthetic oligonucleotide
ucuugauagagcucauauu

SEQ ID NO: 3037401 - RNA, 19 nt, Artificial Sequence
  Description of Artificial Sequence: Synthetic oligonucleotide
ugugccagccuggaguucc

SEQ ID NO: 3037402 - RNA, 19 nt, Artificial Sequence
  Description of Artificial Sequence: Synthetic oligonucleotide
cauauuccucaucaacaac

SEQ ID NO: 3037403 - RNA, 19 nt, Artificial Sequence
  Description of Artificial Sequence: Synthetic oligonucleotide
gaggugaucuugauagagc

SEQ ID NO: 3037404 - RNA, 19 nt, Artificial Sequence
  Description of Artificial Sequence: Synthetic oligonucleotide
cuuuuguuggaacuguaaa

SEQ ID NO: 3037405 - RNA, 19 nt, Artificial Sequence
  Description of Artificial Sequence: Synthetic oligonucleotide
cuguaaagacuuucccaag

SEQ ID NO: 3037406 - RNA, 19 nt, Artificial Sequence
  Description of Artificial Sequence: Synthetic oligonucleotide
uguguggugguggugggug

SEQ ID NO: 3037407 - RNA, 19 nt, Artificial Sequence
  Description of Artificial Sequence: Synthetic oligonucleotide
uccaguggagggcucagaa

SEQ ID NO: 3037408 - RNA, 19 nt, Artificial Sequence
  Description of Artificial Sequence: Synthetic oligonucleotide
ggaacuguaaagacuuucc

SEQ ID NO: 3037409 - RNA, 19 nt, Artificial Sequence
  Description of Artificial Sequence: Synthetic oligonucleotide
ucacuguugucuucauugu

SEQ ID NO: 3037410 - RNA, 19 nt, Artificial Sequence
  Description of Artificial Sequence: Synthetic oligonucleotide
acaaguucuucaacauacg

SEQ ID NO: 3037411 - RNA, 19 nt, Artificial Sequence
  Description of Artificial Sequence: Synthetic oligonucleotide
uugggugccucaaggauua

SEQ ID NO: 3037412 - RNA, 19 nt, Artificial Sequence
  Description of Artificial Sequence: Synthetic oligonucleotide
caugcauuucccaggcuuc

SEQ ID NO: 3037413 - RNA, 19 nt, Artificial Sequence
  Description of Artificial Sequence: Synthetic oligonucleotide
ggugccucaaggauuaaag

SEQ ID NO: 3037414 - RNA, 19 nt, Artificial Sequence
  Description of Artificial Sequence: Synthetic oligonucleotide
acgguucauccacaaguuc

SEQ ID NO: 3037415 - RNA, 19 nt, Artificial Sequence
  Description of Artificial Sequence: Synthetic oligonucleotide
gguguaacuccauggcccg

SEQ ID NO: 3037416 - RNA, 19 nt, Artificial Sequence
  Description of Artificial Sequence: Synthetic oligonucleotide
ggaguuccugccuggaagg

SEQ ID NO: 3037417 - RNA, 19 nt, Artificial Sequence
  Description of Artificial Sequence: Synthetic oligonucleotide
gaugacuguauaucaugaa

SEQ ID NO: 3037418 - RNA, 19 nt, Artificial Sequence
  Description of Artificial Sequence: Synthetic oligonucleotide
uggaacuguaaagacuuuc

SEQ ID NO: 3037419 - RNA, 19 nt, Artificial Sequence
  Description of Artificial Sequence: Synthetic oligonucleotide
aggauuaaagaugacugua

SEQ ID NO: 3037420 - RNA, 19 nt, Artificial Sequence
  Description of Artificial Sequence: Synthetic oligonucleotide
agaugacuguauaucauga

SEQ ID NO: 3037421 - RNA, 19 nt, Artificial Sequence
  Description of Artificial Sequence: Synthetic oligonucleotide
aguccagaaacgguucauc

SEQ ID NO: 3037422 - RNA, 19 nt, Artificial Sequence
  Description of Artificial Sequence: Synthetic oligonucleotide
ucucuuuccucgccccucc

SEQ ID NO: 3037423 - RNA, 19 nt, Artificial Sequence
  Description of Artificial Sequence: Synthetic oligonucleotide
uaacuccauggcccggagg

SEQ ID NO: 3037424 - RNA, 19 nt, Artificial Sequence
  Description of Artificial Sequence: Synthetic oligonucleotide
cauuuccuuuuguuggaac

SEQ ID NO: 3037425 - RNA, 19 nt, Artificial Sequence
  Description of Artificial Sequence: Synthetic oligonucleotide
ucagaaauucaugcauuuc

SEQ ID NO: 3037426 - RNA, 19 nt, Artificial Sequence
  Description of Artificial Sequence: Synthetic oligonucleotide
cauuucccaggcuucugag

SEQ ID NO: 3037427 - RNA, 19 nt, Artificial Sequence
  Description of Artificial Sequence: Synthetic oligonucleotide
aggcuucugagcugguguc

SEQ ID NO: 3037428 - RNA, 19 nt, Artificial Sequence
  Description of Artificial Sequence: Synthetic oligonucleotide
cuggaagguggcaugugug

SEQ ID NO: 3037429 - RNA, 19 nt, Artificial Sequence
  Description of Artificial Sequence: Synthetic oligonucleotide
uguggccuccugaaugugu

SEQ ID NO: 3037430 - RNA, 19 nt, Artificial Sequence
  Description of Artificial Sequence: Synthetic oligonucleotide
auacggcucaucucuaaau

SEQ ID NO: 3037431 - RNA, 19 nt, Artificial Sequence
  Description of Artificial Sequence: Synthetic oligonucleotide
gauagagcucauauuccuc

SEQ ID NO: 3037432 - RNA, 19 nt, Artificial Sequence
  Description of Artificial Sequence: Synthetic oligonucleotide
gcucauauuccucaucaac

SEQ ID NO: 3037433 - RNA, 19 nt, Artificial Sequence
  Description of Artificial Sequence: Synthetic oligonucleotide
uguaacuccauggcccgga

SEQ ID NO: 3037434 - RNA, 19 nt, Artificial Sequence
  Description of Artificial Sequence: Synthetic oligonucleotide
gaacaguuucugaaggcuc

SEQ ID NO: 3037435 - RNA, 19 nt, Artificial Sequence
  Description of Artificial Sequence: Synthetic oligonucleotide
auuccucaucaacaacucu

SEQ ID NO: 3037436 - RNA, 19 nt, Artificial Sequence
  Description of Artificial Sequence: Synthetic oligonucleotide
agaaacgguucauccacaa

SEQ ID NO: 3037437 - RNA, 19 nt, Artificial Sequence
  Description of Artificial Sequence: Synthetic oligonucleotide
ucccaaguccagaaacggu

SEQ ID NO: 3037438 - RNA, 19 nt, Artificial Sequence
  Description of Artificial Sequence: Synthetic oligonucleotide
ucccaggcuucugagcugg

SEQ ID NO: 3037439 - RNA, 19 nt, Artificial Sequence
  Description of Artificial Sequence: Synthetic oligonucleotide
acuguauaucaugaacagu

SEQ ID NO: 3037440 - RNA, 19 nt, Artificial Sequence
  Description of Artificial Sequence: Synthetic oligonucleotide
caucaacaacucucuuucc

SEQ ID NO: 3037441 - RNA, 19 nt, Artificial Sequence
  Description of Artificial Sequence: Synthetic oligonucleotide
caacauacggcucaucucu

SEQ ID NO: 3037442 - RNA, 19 nt, Artificial Sequence
  Description of Artificial Sequence: Synthetic oligonucleotide
ugguggguguaacuccaug

SEQ ID NO: 3037443 - RNA, 19 nt, Artificial Sequence
  Description of Artificial Sequence: Synthetic oligonucleotide
ggaggugaucuugauagag

SEQ ID NO: 3037444 - RNA, 19 nt, Artificial Sequence
  Description of Artificial Sequence: Synthetic oligonucleotide
caacucucuuuccucgccc

SEQ ID NO: 3037445 - RNA, 19 nt, Artificial Sequence
  Description of Artificial Sequence: Synthetic oligonucleotide
ccagaaacgguucauccac

SEQ ID NO: 3037446 - RNA, 19 nt, Artificial Sequence
  Description of Artificial Sequence: Synthetic oligonucleotide
gccucaaggauuaaagaug

SEQ ID NO: 3037447 - RNA, 19 nt, Artificial Sequence
  Description of Artificial Sequence: Synthetic oligonucleotide
aaaucccuugggugccuca

SEQ ID NO: 3037448 - RNA, 19 nt, Artificial Sequence
  Description of Artificial Sequence: Synthetic oligonucleotide
guuggaacuguaaagacuu

SEQ ID NO: 3037449 - RNA, 19 nt, Artificial Sequence
  Description of Artificial Sequence: Synthetic oligonucleotide
ggguguaacuccauggccc

SEQ ID NO: 3037450 - RNA, 19 nt, Artificial Sequence
  Description of Artificial Sequence: Synthetic oligonucleotide
aacgguucauccacaaguu

SEQ ID NO: 3037451 - RNA, 19 nt, Artificial Sequence
  Description of Artificial Sequence: Synthetic oligonucleotide
ucuuuccucgccccucccu

SEQ ID NO: 3037452 - RNA, 19 nt, Artificial Sequence
  Description of Artificial Sequence: Synthetic oligonucleotide
gagggcucagaaauucaug

SEQ ID NO: 3037453 - RNA, 19 nt, Artificial Sequence
  Description of Artificial Sequence: Synthetic oligonucleotide
cauccacaaguucuucaac

SEQ ID NO: 3037454 - RNA, 19 nt, Artificial Sequence
  Description of Artificial Sequence: Synthetic oligonucleotide
ucugagcugguguccauuu

SEQ ID NO: 3037455 - RNA, 19 nt, Artificial Sequence
  Description of Artificial Sequence: Synthetic oligonucleotide
ugugugccagccuggaguu

SEQ ID NO: 3037456 - RNA, 19 nt, Artificial Sequence
  Description of Artificial Sequence: Synthetic oligonucleotide
ugaauguguggugguggug

SEQ ID NO: 3037457 - RNA, 19 nt, Artificial Sequence
  Description of Artificial Sequence: Synthetic oligonucleotide
uuuccucgccccucccucc

SEQ ID NO: 3037458 - RNA, 19 nt, Artificial Sequence
  Description of Artificial Sequence: Synthetic oligonucleotide
ccucaaggauuaaagauga

SEQ ID NO: 3037459 - RNA, 19 nt, Artificial Sequence
  Description of Artificial Sequence: Synthetic oligonucleotide
uccuuuuguuggaacugua

SEQ ID NO: 3037460 - RNA, 19 nt, Artificial Sequence
  Description of Artificial Sequence: Synthetic oligonucleotide
uccugaaugugugguggug

SEQ ID NO: 3037461 - RNA, 19 nt, Artificial Sequence
  Description of Artificial Sequence: Synthetic oligonucleotide
uggccuccugaaugugugg

SEQ ID NO: 3037462 - RNA, 19 nt, Artificial Sequence
  Description of Artificial Sequence: Synthetic oligonucleotide
gugccucaaggauuaaaga

SEQ ID NO: 3037463 - RNA, 19 nt, Artificial Sequence
  Description of Artificial Sequence: Synthetic oligonucleotide
gccacugugugccagccug

SEQ ID NO: 3037464 - RNA, 19 nt, Artificial Sequence
  Description of Artificial Sequence: Synthetic oligonucleotide
cucaaggauuaaagaugac

SEQ ID NO: 3037465 - RNA, 19 nt, Artificial Sequence
  Description of Artificial Sequence: Synthetic oligonucleotide
cuuuccucgccccucccuc

SEQ ID NO: 3037466 - RNA, 19 nt, Artificial Sequence
  Description of Artificial Sequence: Synthetic oligonucleotide
uagagcucauauuccucau

SEQ ID NO: 3037467 - RNA, 19 nt, Artificial Sequence
  Description of Artificial Sequence: Synthetic oligonucleotide
ugguguccauuuccuuuug

SEQ ID NO: 3037468 - RNA, 19 nt, Artificial Sequence
  Description of Artificial Sequence: Synthetic oligonucleotide
ugaucuugauagagcucau

SEQ ID NO: 3037469 - RNA, 19 nt, Artificial Sequence
  Description of Artificial Sequence: Synthetic oligonucleotide
aaguccagaaacgguucau

SEQ ID NO: 3037470 - RNA, 19 nt, Artificial Sequence
  Description of Artificial Sequence: Synthetic oligonucleotide
acugugugccagccuggag

SEQ ID NO: 3037471 - RNA, 19 nt, Artificial Sequence
  Description of Artificial Sequence: Synthetic oligonucleotide
uucaugcauuucccaggcu

SEQ ID NO: 3037472 - RNA, 19 nt, Artificial Sequence
  Description of Artificial Sequence: Synthetic oligonucleotide
guuucugaaggcucacugu

SEQ ID NO: 3037473 - RNA, 19 nt, Artificial Sequence
  Description of Artificial Sequence: Synthetic oligonucleotide
acuuucccaaguccagaaa

SEQ ID NO: 3037474 - RNA, 19 nt, Artificial Sequence
  Description of Artificial Sequence: Synthetic oligonucleotide
guaacuccauggcccggag

SEQ ID NO: 3037475 - RNA, 19 nt, Artificial Sequence
  Description of Artificial Sequence: Synthetic oligonucleotide
aaucccuugggugccucaa

SEQ ID NO: 3037476 - RNA, 19 nt, Artificial Sequence
  Description of Artificial Sequence: Synthetic oligonucleotide
agccuggaguuccugccug

SEQ ID NO: 3037477 - RNA, 19 nt, Artificial Sequence
  Description of Artificial Sequence: Synthetic oligonucleotide
acauacggcucaucucuaa

SEQ ID NO: 3037478 - RNA, 19 nt, Artificial Sequence
  Description of Artificial Sequence: Synthetic oligonucleotide
aguuccugccuggaaggug

SEQ ID NO: 3037479 - RNA, 19 nt, Artificial Sequence
  Description of Artificial Sequence: Synthetic oligonucleotide
ccugaaugugugguggugg

SEQ ID NO: 3037480 - RNA, 19 nt, Artificial Sequence
  Description of Artificial Sequence: Synthetic oligonucleotide
guggugguggguguaacuc

SEQ ID NO: 3037481 - RNA, 19 nt, Artificial Sequence
  Description of Artificial Sequence: Synthetic oligonucleotide
ucuucaacauacggcucau

SEQ ID NO: 3037482 - RNA, 19 nt, Artificial Sequence
  Description of Artificial Sequence: Synthetic oligonucleotide
agcucauauuccucaucaa

SEQ ID NO: 3037483 - RNA, 19 nt, Artificial Sequence
  Description of Artificial Sequence: Synthetic oligonucleotide
agacuuucccaaguccaga

SEQ ID NO: 3037484 - RNA, 19 nt, Artificial Sequence
  Description of Artificial Sequence: Synthetic oligonucleotide
guggagggcucagaaauuc

SEQ ID NO: 3037485 - RNA, 19 nt, Artificial Sequence
  Description of Artificial Sequence: Synthetic oligonucleotide
aucccuugggugccucaag

SEQ ID NO: 3037486 - RNA, 19 nt, Artificial Sequence
  Description of Artificial Sequence: Synthetic oligonucleotide
ugcauuucccaggcuucug

SEQ ID NO: 3037487 - RNA, 19 nt, Artificial Sequence
  Description of Artificial Sequence: Synthetic oligonucleotide
guggccuccugaaugugug

SEQ ID NO: 3037488 - RNA, 19 nt, Artificial Sequence
  Description of Artificial Sequence: Synthetic oligonucleotide
caaguccagaaacgguuca

SEQ ID NO: 3037489 - RNA, 19 nt, Artificial Sequence
  Description of Artificial Sequence: Synthetic oligonucleotide
ccuccugaauguguggugg

SEQ ID NO: 3037490 - RNA, 19 nt, Artificial Sequence
  Description of Artificial Sequence: Synthetic oligonucleotide
cucaucaacaacucucuuu

SEQ ID NO: 3037491 - RNA, 19 nt, Artificial Sequence
  Description of Artificial Sequence: Synthetic oligonucleotide
uuggaacuguaaagacuuu

SEQ ID NO: 3037492 - RNA, 19 nt, Artificial Sequence
  Description of Artificial Sequence: Synthetic oligonucleotide
caguggagggcucagaaau

SEQ ID NO: 3037493 - RNA, 19 nt, Artificial Sequence
  Description of Artificial Sequence: Synthetic oligonucleotide
uggcauguguggccuccug

SEQ ID NO: 3037494 - RNA, 19 nt, Artificial Sequence
  Description of Artificial Sequence: Synthetic oligonucleotide
cugugugccagccuggagu

SEQ ID NO: 3037495 - RNA, 19 nt, Artificial Sequence
  Description of Artificial Sequence: Synthetic oligonucleotide
acucucuuuccucgccccu

SEQ ID NO: 3037496 - RNA, 19 nt, Artificial Sequence
  Description of Artificial Sequence: Synthetic oligonucleotide
cugccuggaagguggcaug

SEQ ID NO: 3037497 - RNA, 19 nt, Artificial Sequence
  Description of Artificial Sequence: Synthetic oligonucleotide
ggaagguggcauguguggc

SEQ ID NO: 3037498 - RNA, 19 nt, Artificial Sequence
  Description of Artificial Sequence: Synthetic oligonucleotide
cauacggcucaucucuaaa

SEQ ID NO: 3037499 - RNA, 19 nt, Artificial Sequence
  Description of Artificial Sequence: Synthetic oligonucleotide
uuccucgccccucccucca

SEQ ID NO: 3037500 - RNA, 19 nt, Artificial Sequence
  Description of Artificial Sequence: Synthetic oligonucleotide
ccagccuggaguuccugcc

SEQ ID NO: 3037501 - RNA, 19 nt, Artificial Sequence
  Description of Artificial Sequence: Synthetic oligonucleotide
cagaaacgguucauccaca

SEQ ID NO: 3037502 - RNA, 19 nt, Artificial Sequence
  Description of Artificial Sequence: Synthetic oligonucleotide
cugaaggcucacuguuguc

SEQ ID NO: 3037503 - RNA, 19 nt, Artificial Sequence
  Description of Artificial Sequence: Synthetic oligonucleotide
cucagaaauucaugcauuu

SEQ ID NO: 3037504 - RNA, 19 nt, Artificial Sequence
  Description of Artificial Sequence: Synthetic oligonucleotide
uggcccggaggugaucuug

SEQ ID NO: 3037505 - RNA, 19 nt, Artificial Sequence
  Description of Artificial Sequence: Synthetic oligonucleotide
ccaaguccagaaacgguuc

SEQ ID NO: 3037506 - RNA, 19 nt, Artificial Sequence
  Description of Artificial Sequence: Synthetic oligonucleotide
uuccugccuggaagguggc

SEQ ID NO: 3037507 - RNA, 19 nt, Artificial Sequence
  Description of Artificial Sequence: Synthetic oligonucleotide
ggcucagaaauucaugcau

SEQ ID NO: 3037508 - RNA, 19 nt, Artificial Sequence
  Description of Artificial Sequence: Synthetic oligonucleotide
guucuucaacauacggcuc

SEQ ID NO: 3037509 - RNA, 19 nt, Artificial Sequence
  Description of Artificial Sequence: Synthetic oligonucleotide
aacauacggcucaucucua

SEQ ID NO: 3037510 - RNA, 19 nt, Artificial Sequence
  Description of Artificial Sequence: Synthetic oligonucleotide
gaucuugauagagcucaua

SEQ ID NO: 3037511 - RNA, 19 nt, Artificial Sequence
  Description of Artificial Sequence: Synthetic oligonucleotide
cugagcugguguccauuuc

SEQ ID NO: 3037512 - RNA, 19 nt, Artificial Sequence
  Description of Artificial Sequence: Synthetic oligonucleotide
guguaacuccauggcccgg

SEQ ID NO: 3037513 - RNA, 19 nt, Artificial Sequence
  Description of Artificial Sequence: Synthetic oligonucleotide
uucugagcugguguccauu

SEQ ID NO: 3037514 - RNA, 19 nt, Artificial Sequence
  Description of Artificial Sequence: Synthetic oligonucleotide
uccauggcccggaggugau

SEQ ID NO: 3037515 - RNA, 19 nt, Artificial Sequence
  Description of Artificial Sequence: Synthetic oligonucleotide
cuugggugccucaaggauu

SEQ ID NO: 3037516 - RNA, 19 nt, Artificial Sequence
  Description of Artificial Sequence: Synthetic oligonucleotide
cucucuuuccucgccccuc

SEQ ID NO: 3037517 - RNA, 19 nt, Artificial Sequence
  Description of Artificial Sequence: Synthetic oligonucleotide
caggcuucugagcuggugu

SEQ ID NO: 3037518 - RNA, 19 nt, Artificial Sequence
  Description of Artificial Sequence: Synthetic oligonucleotide
cugaauguguggugguggu

SEQ ID NO: 3037519 - RNA, 19 nt, Artificial Sequence
  Description of Artificial Sequence: Synthetic oligonucleotide
agguggcauguguggccuc

SEQ ID NO: 3037520 - RNA, 19 nt, Artificial Sequence
  Description of Artificial Sequence: Synthetic oligonucleotide
cucgccccucccuccagug

SEQ ID NO: 3037521 - RNA, 19 nt, Artificial Sequence
  Description of Artificial Sequence: Synthetic oligonucleotide
ggauuaaagaugacuguau

SEQ ID NO: 3037522 - RNA, 19 nt, Artificial Sequence
  Description of Artificial Sequence: Synthetic oligonucleotide
uccucgccccucccuccag

SEQ ID NO: 3037523 - RNA, 19 nt, Artificial Sequence
  Description of Artificial Sequence: Synthetic oligonucleotide
agcugguguccauuuccuu

SEQ ID NO: 3037524 - RNA, 19 nt, Artificial Sequence
  Description of Artificial Sequence: Synthetic oligonucleotide
gcauguguggccuccugaa

SEQ ID NO: 3037525 - RNA, 19 nt, Artificial Sequence
  Description of Artificial Sequence: Synthetic oligonucleotide
cucuuuccucgccccuccc

SEQ ID NO: 3037526 - RNA, 19 nt, Artificial Sequence
  Description of Artificial Sequence: Synthetic oligonucleotide
ggcauguguggccuccuga

SEQ ID NO: 3037527 - RNA, 19 nt, Artificial Sequence
  Description of Artificial Sequence: Synthetic oligonucleotide
ccuuuuguuggaacuguaa

SEQ ID NO: 3037528 - RNA, 19 nt, Artificial Sequence
  Description of Artificial Sequence: Synthetic oligonucleotide
ugguggugguggguguaac

SEQ ID NO: 3037529 - RNA, 19 nt, Artificial Sequence
  Description of Artificial Sequence: Synthetic oligonucleotide
ggugaucuugauagagcuc

SEQ ID NO: 3037530 - RNA, 19 nt, Artificial Sequence
  Description of Artificial Sequence: Synthetic oligonucleotide
gccagccuggaguuccugc

SEQ ID NO: 3037531 - RNA, 19 nt, Artificial Sequence
  Description of Artificial Sequence: Synthetic oligonucleotide
cuccauggcccggagguga

SEQ ID NO: 3037532 - RNA, 19 nt, Artificial Sequence
  Description of Artificial Sequence: Synthetic oligonucleotide
cuucaacauacggcucauc

SEQ ID NO: 3037533 - RNA, 19 nt, Artificial Sequence
  Description of Artificial Sequence: Synthetic oligonucleotide
gccuggaguuccugccugg

SEQ ID NO: 3037534 - RNA, 19 nt, Artificial Sequence
  Description of Artificial Sequence: Synthetic oligonucleotide
gccuccugaauguguggug

SEQ ID NO: 3037535 - RNA, 19 nt, Artificial Sequence
  Description of Artificial Sequence: Synthetic oligonucleotide
aguggagggcucagaaauu

SEQ ID NO: 3037536 - RNA, 19 nt, Artificial Sequence
  Description of Artificial Sequence: Synthetic oligonucleotide
acuccauggcccggaggug

SEQ ID NO: 3037537 - RNA, 19 nt, Artificial Sequence
  Description of Artificial Sequence: Synthetic oligonucleotide
ggcuucugagcuggugucc

SEQ ID NO: 3037538 - RNA, 19 nt, Artificial Sequence
  Description of Artificial Sequence: Synthetic oligonucleotide
cugguguccauuuccuuuu

SEQ ID NO: 3037539 - RNA, 19 nt, Artificial Sequence
  Description of Artificial Sequence: Synthetic oligonucleotide
ccacugugugccagccugg

SEQ ID NO: 3037540 - RNA, 19 nt, Artificial Sequence
  Description of Artificial Sequence: Synthetic oligonucleotide
uccugccuggaagguggca

SEQ ID NO: 3037541 - RNA, 19 nt, Artificial Sequence
  Description of Artificial Sequence: Synthetic oligonucleotide
cccucccuccaguggaggg

SEQ ID NO: 3037542 - RNA, 19 nt, Artificial Sequence
  Description of Artificial Sequence: Synthetic oligonucleotide
gcugguguccauuuccuuu

SEQ ID NO: 3037543 - RNA, 19 nt, Artificial Sequence
  Description of Artificial Sequence: Synthetic oligonucleotide
gcuucugagcuggugucca

SEQ ID NO: 3037544 - RNA, 19 nt, Artificial Sequence
  Description of Artificial Sequence: Synthetic oligonucleotide
cuggaguuccugccuggaa

SEQ ID NO: 3037545 - RNA, 19 nt, Artificial Sequence
  Description of Artificial Sequence: Synthetic oligonucleotide
ugccagccuggaguuccug

SEQ ID NO: 3037546 - RNA, 19 nt, Artificial Sequence
  Description of Artificial Sequence: Synthetic oligonucleotide
cgguucauccacaaguucu

SEQ ID NO: 3037547 - RNA, 19 nt, Artificial Sequence
  Description of Artificial Sequence: Synthetic oligonucleotide
gguggugguggguguaacu

SEQ ID NO: 3037548 - RNA, 19 nt, Artificial Sequence
  Description of Artificial Sequence: Synthetic oligonucleotide
cuccugaaugugugguggu

SEQ ID NO: 3037549 - RNA, 19 nt, Artificial Sequence
  Description of Artificial Sequence: Synthetic oligonucleotide
ccucccuccaguggagggc

SEQ ID NO: 3037550 - RNA, 19 nt, Artificial Sequence
  Description of Artificial Sequence: Synthetic oligonucleotide
cccaaguccagaaacgguu

SEQ ID NO: 3037551 - RNA, 19 nt, Artificial Sequence
  Description of Artificial Sequence: Synthetic oligonucleotide
cacugugugccagccugga

SEQ ID NO: 3037552 - RNA, 19 nt, Artificial Sequence
  Description of Artificial Sequence: Synthetic oligonucleotide
cacuguugucuucauuguu

SEQ ID NO: 3037553 - RNA, 19 nt, Artificial Sequence
  Description of Artificial Sequence: Synthetic oligonucleotide
gaguuccugccuggaaggu

SEQ ID NO: 3037554 - RNA, 19 nt, Artificial Sequence
  Description of Artificial Sequence: Synthetic oligonucleotide
ccacaaguucuucaacaua

SEQ ID NO: 3037555 - RNA, 19 nt, Artificial Sequence
  Description of Artificial Sequence: Synthetic oligonucleotide
ucccuccaguggagggcuc

SEQ ID NO: 3037556 - RNA, 19 nt, Artificial Sequence
  Description of Artificial Sequence: Synthetic oligonucleotide
gguguccauuuccuuuugu

SEQ ID NO: 3037557 - RNA, 19 nt, Artificial Sequence
  Description of Artificial Sequence: Synthetic oligonucleotide
gguucauccacaaguucuu

SEQ ID NO: 3037558 - RNA, 19 nt, Artificial Sequence
  Description of Artificial Sequence: Synthetic oligonucleotide
ggagggcucagaaauucau

SEQ ID NO: 3037559 - RNA, 19 nt, Artificial Sequence
  Description of Artificial Sequence: Synthetic oligonucleotide
gcucagaaauucaugcauu

SEQ ID NO: 3037560 - RNA, 19 nt, Artificial Sequence
  Description of Artificial Sequence: Synthetic oligonucleotide
cccuugggugccucaagga

SEQ ID NO: 3037561 - RNA, 19 nt, Artificial Sequence
  Description of Artificial Sequence: Synthetic oligonucleotide
ccuggaagguggcaugugu

SEQ ID NO: 3037562 - RNA, 19 nt, Artificial Sequence
  Description of Artificial Sequence: Synthetic oligonucleotide
ccaggcuucugagcuggug

SEQ ID NO: 3037563 - RNA, 19 nt, Artificial Sequence
  Description of Artificial Sequence: Synthetic oligonucleotide
ccaguggagggcucagaaa

SEQ ID NO: 3037564 - RNA, 19 nt, Artificial Sequence
  Description of Artificial Sequence: Synthetic oligonucleotide
cagccuggaguuccugccu

SEQ ID NO: 3037565 - RNA, 19 nt, Artificial Sequence
  Description of Artificial Sequence: Synthetic oligonucleotide
cuaaaucccuugggugccu

SEQ ID NO: 3037566 - RNA, 19 nt, Artificial Sequence
  Description of Artificial Sequence: Synthetic oligonucleotide
gggugccucaaggauuaaa

SEQ ID NO: 3037567 - RNA, 19 nt, Artificial Sequence
  Description of Artificial Sequence: Synthetic oligonucleotide
caguuucugaaggcucacu

SEQ ID NO: 3037568 - RNA, 19 nt, Artificial Sequence
  Description of Artificial Sequence: Synthetic oligonucleotide
cuccaguggagggcucaga

SEQ ID NO: 3037569 - RNA, 19 nt, Artificial Sequence
  Description of Artificial Sequence: Synthetic oligonucleotide
cucccuccaguggagggcu

SEQ ID NO: 3037570 - RNA, 19 nt, Artificial Sequence
  Description of Artificial Sequence: Synthetic oligonucleotide
ccuugggugccucaaggau

SEQ ID NO: 3037571 - RNA, 19 nt, Artificial Sequence
  Description of Artificial Sequence: Synthetic oligonucleotide
ggccuccugaauguguggu

SEQ ID NO: 3037572 - RNA, 19 nt, Artificial Sequence
  Description of Artificial Sequence: Synthetic oligonucleotide
ggcccggaggugaucuuga

SEQ ID NO: 3037573 - RNA, 19 nt, Artificial Sequence
  Description of Artificial Sequence: Synthetic oligonucleotide
ugggugccucaaggauuaa

SEQ ID NO: 3037574 - RNA, 19 nt, Artificial Sequence
  Description of Artificial Sequence: Synthetic oligonucleotide
cuucugagcugguguccau

SEQ ID NO: 3037575 - RNA, 19 nt, Artificial Sequence
  Description of Artificial Sequence: Synthetic oligonucleotide
ccuccaguggagggcucag

SEQ ID NO: 3037576 - RNA, 19 nt, Artificial Sequence
  Description of Artificial Sequence: Synthetic oligonucleotide
gugugccagccuggaguuc

SEQ ID NO: 3037577 - RNA, 19 nt, Artificial Sequence
  Description of Artificial Sequence: Synthetic oligonucleotide
ccauuuccuuuuguuggaa

SEQ ID NO: 3037578 - RNA, 19 nt, Artificial Sequence
  Description of Artificial Sequence: Synthetic oligonucleotide
ccccucccuccaguggagg

SEQ ID NO: 3037579 - RNA, 19 nt, Artificial Sequence
  Description of Artificial Sequence: Synthetic oligonucleotide
cccggaggugaucuugaua

SEQ ID NO: 3037580 - RNA, 19 nt, Artificial Sequence
  Description of Artificial Sequence: Synthetic oligonucleotide
gccccucccuccaguggag

SEQ ID NO: 3037581 - RNA, 19 nt, Artificial Sequence
  Description of Artificial Sequence: Synthetic oligonucleotide
guggcauguguggccuccu

SEQ ID NO: 3037582 - RNA, 19 nt, Artificial Sequence
  Description of Artificial Sequence: Synthetic oligonucleotide
gcucaucucuaaaucccuu

SEQ ID NO: 3037583 - RNA, 19 nt, Artificial Sequence
  Description of Artificial Sequence: Synthetic oligonucleotide
cggaggugaucuugauaga

SEQ ID NO: 3037584 - RNA, 19 nt, Artificial Sequence
  Description of Artificial Sequence: Synthetic oligonucleotide
cgccccucccuccagugga

SEQ ID NO: 3037585 - RNA, 19 nt, Artificial Sequence
  Description of Artificial Sequence: Synthetic oligonucleotide
gugguggguguaacuccau

SEQ ID NO: 3037586 - RNA, 19 nt, Artificial Sequence
  Description of Artificial Sequence: Synthetic oligonucleotide
ggcucacuguugucuucau

SEQ ID NO: 3037587 - RNA, 19 nt, Artificial Sequence
  Description of Artificial Sequence: Synthetic oligonucleotide
gugccagccuggaguuccu

SEQ ID NO: 3037588 - RNA, 19 nt, Artificial Sequence
  Description of Artificial Sequence: Synthetic oligonucleotide
ccucaucaacaacucucuu

SEQ ID NO: 3037589 - RNA, 19 nt, Artificial Sequence
  Description of Artificial Sequence: Synthetic oligonucleotide
ccauggcccggaggugauc

SEQ ID NO: 3037590 - RNA, 19 nt, Artificial Sequence
  Description of Artificial Sequence: Synthetic oligonucleotide
gcccggaggugaucuugau

SEQ ID NO: 3037591 - RNA, 19 nt, Artificial Sequence
  Description of Artificial Sequence: Synthetic oligonucleotide
ccucgccccucccuccagu

SEQ ID NO: 3037592 - RNA, 19 nt, Artificial Sequence
  Description of Artificial Sequence: Synthetic oligonucleotide
uaauagagcgaccagagcg

SEQ ID NO: 3037593 - RNA, 19 nt, Artificial Sequence
  Description of Artificial Sequence: Synthetic oligonucleotide
aaucucguuguacaguucc

SEQ ID NO: 3037594 - RNA, 19 nt, Artificial Sequence
  Description of Artificial Sequence: Synthetic oligonucleotide
caaagcaaguaauagagcg

SEQ ID NO: 3037595 - RNA, 19 nt, Artificial Sequence
  Description of Artificial Sequence: Synthetic oligonucleotide
uccaugaaaacauacuugg

SEQ ID NO: 3037596 - RNA, 19 nt, Artificial Sequence
  Description of Artificial Sequence: Synthetic oligonucleotide
guuaucaaaguccacagag

SEQ ID NO: 3037597 - RNA, 19 nt, Artificial Sequence
  Description of Artificial Sequence: Synthetic oligonucleotide
uccacagagagccacacgg

SEQ ID NO: 3037598 - RNA, 19 nt, Artificial Sequence
  Description of Artificial Sequence: Synthetic oligonucleotide
uucaccuuggcauagaacu

SEQ ID NO: 3037599 - RNA, 19 nt, Artificial Sequence
  Description of Artificial Sequence: Synthetic oligonucleotide
augaaaacauacuuggguc

SEQ ID NO: 3037600 - RNA, 19 nt, Artificial Sequence
  Description of Artificial Sequence: Synthetic oligonucleotide
cacaaagcaaguaauagag

SEQ ID NO: 3037601 - RNA, 19 nt, Artificial Sequence
  Description of Artificial Sequence: Synthetic oligonucleotide
ucuccaguuaucaaagucc

SEQ ID NO: 3037602 - RNA, 19 nt, Artificial Sequence
  Description of Artificial Sequence: Synthetic oligonucleotide
aagcaaguaauagagcgac

SEQ ID NO: 3037603 - RNA, 19 nt, Artificial Sequence
  Description of Artificial Sequence: Synthetic oligonucleotide
uccauuuccucacaaagca

SEQ ID NO: 3037604 - RNA, 19 nt, Artificial Sequence
  Description of Artificial Sequence: Synthetic oligonucleotide
ugcguaaugcuccacuugg

SEQ ID NO: 3037605 - RNA, 19 nt, Artificial Sequence
  Description of Artificial Sequence: Synthetic oligonucleotide
aauagagcgaccagagcgc

SEQ ID NO: 3037606 - RNA, 19 nt, Artificial Sequence
  Description of Artificial Sequence: Synthetic oligonucleotide
aacucaaucucguuguaca

SEQ ID NO: 3037607 - RNA, 19 nt, Artificial Sequence
  Description of Artificial Sequence: Synthetic oligonucleotide
auagaacucaaucucguug

SEQ ID NO: 3037608 - RNA, 19 nt, Artificial Sequence
  Description of Artificial Sequence: Synthetic oligonucleotide
ugcagcugaacacaacgcg

SEQ ID NO: 3037609 - RNA, 19 nt, Artificial Sequence
  Description of Artificial Sequence: Synthetic oligonucleotide
aacacaaaacuccaugaaa

SEQ ID NO: 3037610 - RNA, 19 nt, Artificial Sequence
  Description of Artificial Sequence: Synthetic oligonucleotide
uucaucaucuccuucccag

SEQ ID NO: 3037611 - RNA, 19 nt, Artificial Sequence
  Description of Artificial Sequence: Synthetic oligonucleotide
cauuuccucacaaagcaag

SEQ ID NO: 3037612 - RNA, 19 nt, Artificial Sequence
  Description of Artificial Sequence: Synthetic oligonucleotide
ucgaugagcacacucacgu

SEQ ID NO: 3037613 - RNA, 19 nt, Artificial Sequence
  Description of Artificial Sequence: Synthetic oligonucleotide
cuugauauccuccuuggug

SEQ ID NO: 3037614 - RNA, 19 nt, Artificial Sequence
  Description of Artificial Sequence: Synthetic oligonucleotide
agcacacucacgucggugc

SEQ ID NO: 3037615 - RNA, 19 nt, Artificial Sequence
  Description of Artificial Sequence: Synthetic oligonucleotide
ucacaaagcaaguaauaga

SEQ ID NO: 3037616 - RNA, 19 nt, Artificial Sequence
  Description of Artificial Sequence: Synthetic oligonucleotide
aaaguccacagagagccac

SEQ ID NO: 3037617 - RNA, 19 nt, Artificial Sequence
  Description of Artificial Sequence: Synthetic oligonucleotide
ugaaaacauacuugggucu

SEQ ID NO: 3037618 - RNA, 19 nt, Artificial Sequence
  Description of Artificial Sequence: Synthetic oligonucleotide
aaacuccaugaaaacauac

SEQ ID NO: 3037619 - RNA, 19 nt, Artificial Sequence
  Description of Artificial Sequence: Synthetic oligonucleotide
aacgcggugauccucgaug

SEQ ID NO: 3037620 - RNA, 19 nt, Artificial Sequence
  Description of Artificial Sequence: Synthetic oligonucleotide
auauccuccuuggugagcc

SEQ ID NO: 3037621 - RNA, 19 nt, Artificial Sequence
  Description of Artificial Sequence: Synthetic oligonucleotide
uuaucaaaguccacagaga

SEQ ID NO: 3037622 - RNA, 19 nt, Artificial Sequence
  Description of Artificial Sequence: Synthetic oligonucleotide
aacauacuugggucugucg

SEQ ID NO: 3037623 - RNA, 19 nt, Artificial Sequence
  Description of Artificial Sequence: Synthetic oligonucleotide
uagaacucaaucucguugu

SEQ ID NO: 3037624 - RNA, 19 nt, Artificial Sequence
  Description of Artificial Sequence: Synthetic oligonucleotide
acuucaucaucuccuuccc

SEQ ID NO: 3037625 - RNA, 19 nt, Artificial Sequence
  Description of Artificial Sequence: Synthetic oligonucleotide
accuucuccuuccauuucc

SEQ ID NO: 3037626 - RNA, 19 nt, Artificial Sequence
  Description of Artificial Sequence: Synthetic oligonucleotide
cuuggcauagaacucaauc

SEQ ID NO: 3037627 - RNA, 19 nt, Artificial Sequence
  Description of Artificial Sequence: Synthetic oligonucleotide
cacuucaucaucuccuucc

SEQ ID NO: 3037628 - RNA, 19 nt, Artificial Sequence
  Description of Artificial Sequence: Synthetic oligonucleotide
uaaugcuccacuugggcca

SEQ ID NO: 3037629 - RNA, 19 nt, Artificial Sequence
  Description of Artificial Sequence: Synthetic oligonucleotide
aguaauagagcgaccagag

SEQ ID NO: 3037630 - RNA, 19 nt, Artificial Sequence
  Description of Artificial Sequence: Synthetic oligonucleotide
uggcauagaacucaaucuc

SEQ ID NO: 3037631 - RNA, 19 nt, Artificial Sequence
  Description of Artificial Sequence: Synthetic oligonucleotide
acaguuccacuccaucacc

SEQ ID NO: 3037632 - RNA, 19 nt, Artificial Sequence
  Description of Artificial Sequence: Synthetic oligonucleotide
aaguaauagagcgaccaga

SEQ ID NO: 3037633 - RNA, 19 nt, Artificial Sequence
  Description of Artificial Sequence: Synthetic oligonucleotide
cucacaaagcaaguaauag

SEQ ID NO: 3037634 - RNA, 19 nt, Artificial Sequence
  Description of Artificial Sequence: Synthetic oligonucleotide
acuccaucaccguuccugc

SEQ ID NO: 3037635 - RNA, 19 nt, Artificial Sequence
  Description of Artificial Sequence: Synthetic oligonucleotide
uacaguuccacuccaucac

SEQ ID NO: 3037636 - RNA, 19 nt, Artificial Sequence
  Description of Artificial Sequence: Synthetic oligonucleotide
ucugucguaccacaggguc

SEQ ID NO: 3037637 - RNA, 19 nt, Artificial Sequence
  Description of Artificial Sequence: Synthetic oligonucleotide
acauacuugggucugucgu

SEQ ID NO: 3037638 - RNA, 19 nt, Artificial Sequence
  Description of Artificial Sequence: Synthetic oligonucleotide
uccucaacacaaaacucca

SEQ ID NO: 3037639 - RNA, 19 nt, Artificial Sequence
  Description of Artificial Sequence: Synthetic oligonucleotide
cuccaugaaaacauacuug

SEQ ID NO: 3037640 - RNA, 19 nt, Artificial Sequence
  Description of Artificial Sequence: Synthetic oligonucleotide
guaaugcuccacuugggcc

SEQ ID NO: 3037641 - RNA, 19 nt, Artificial Sequence
  Description of Artificial Sequence: Synthetic oligonucleotide
uuccucacaaagcaaguaa

SEQ ID NO: 3037642 - RNA, 19 nt, Artificial Sequence
  Description of Artificial Sequence: Synthetic oligonucleotide
agagcgcuuauccugggag

SEQ ID NO: 3037643 - RNA, 19 nt, Artificial Sequence
  Description of Artificial Sequence: Synthetic oligonucleotide
caguuaucaaaguccacag

SEQ ID NO: 3037644 - RNA, 19 nt, Artificial Sequence
  Description of Artificial Sequence: Synthetic oligonucleotide
ugucguaccacaggguccg

SEQ ID NO: 3037645 - RNA, 19 nt, Artificial Sequence
  Description of Artificial Sequence: Synthetic oligonucleotide
uccaucaccguuccugcag

SEQ ID NO: 3037646 - RNA, 19 nt, Artificial Sequence
  Description of Artificial Sequence: Synthetic oligonucleotide
acuccaugaaaacauacuu

SEQ ID NO: 3037647 - RNA, 19 nt, Artificial Sequence
  Description of Artificial Sequence: Synthetic oligonucleotide
acaaagcaaguaauagagc

SEQ ID NO: 3037648 - RNA, 19 nt, Artificial Sequence
  Description of Artificial Sequence: Synthetic oligonucleotide
uccucgaugagcacacuca

SEQ ID NO: 3037649 - RNA, 19 nt, Artificial Sequence
  Description of Artificial Sequence: Synthetic oligonucleotide
aaagcaaguaauagagcga

SEQ ID NO: 3037650 - RNA, 19 nt, Artificial Sequence
  Description of Artificial Sequence: Synthetic oligonucleotide
ucaaucucguuguacaguu

SEQ ID NO: 3037651 - RNA, 19 nt, Artificial Sequence
  Description of Artificial Sequence: Synthetic oligonucleotide
gaaaacauacuugggucug

SEQ ID NO: 3037652 - RNA, 19 nt, Artificial Sequence
  Description of Artificial Sequence: Synthetic oligonucleotide
uuauccugggaguccuugg

SEQ ID NO: 3037653 - RNA, 19 nt, Artificial Sequence
  Description of Artificial Sequence: Synthetic oligonucleotide
cacaaaacuccaugaaaac

SEQ ID NO: 3037654 - RNA, 19 nt, Artificial Sequence
  Description of Artificial Sequence: Synthetic oligonucleotide
aaacauacuugggucuguc

SEQ ID NO: 3037655 - RNA, 19 nt, Artificial Sequence
  Description of Artificial Sequence: Synthetic oligonucleotide
uguacaguuccacuccauc

SEQ ID NO: 3037656 - RNA, 19 nt, Artificial Sequence
  Description of Artificial Sequence: Synthetic oligonucleotide
aacuccaugaaaacauacu

SEQ ID NO: 3037657 - RNA, 19 nt, Artificial Sequence
  Description of Artificial Sequence: Synthetic oligonucleotide
gaccagagcgcuuauccug

SEQ ID NO: 3037658 - RNA, 19 nt, Artificial Sequence
  Description of Artificial Sequence: Synthetic oligonucleotide
ugauccucgaugagcacac

SEQ ID NO: 3037659 - RNA, 19 nt, Artificial Sequence
  Description of Artificial Sequence: Synthetic oligonucleotide
agccacacgggcuugauau

SEQ ID NO: 3037660 - RNA, 19 nt, Artificial Sequence
  Description of Artificial Sequence: Synthetic oligonucleotide
guccucaacacaaaacucc

SEQ ID NO: 3037661 - RNA, 19 nt, Artificial Sequence
  Description of Artificial Sequence: Synthetic oligonucleotide
agucucuccaguuaucaaa

SEQ ID NO: 3037662 - RNA, 19 nt, Artificial Sequence
  Description of Artificial Sequence: Synthetic oligonucleotide
ugagccgcggccaagccac

SEQ ID NO: 3037663 - RNA, 19 nt, Artificial Sequence
  Description of Artificial Sequence: Synthetic oligonucleotide
uguccucaacacaaaacuc

SEQ ID NO: 3037664 - RNA, 19 nt, Artificial Sequence
  Description of Artificial Sequence: Synthetic oligonucleotide
uccucacaaagcaaguaau

SEQ ID NO: 3037665 - RNA, 19 nt, Artificial Sequence
  Description of Artificial Sequence: Synthetic oligonucleotide
ucguuguacaguuccacuc

SEQ ID NO: 3037666 - RNA, 19 nt, Artificial Sequence
  Description of Artificial Sequence: Synthetic oligonucleotide
ucaccguuccugcagcuga

SEQ ID NO: 3037667 - RNA, 19 nt, Artificial Sequence
  Description of Artificial Sequence: Synthetic oligonucleotide
acucaaucucguuguacag

SEQ ID NO: 3037668 - RNA, 19 nt, Artificial Sequence
  Description of Artificial Sequence: Synthetic oligonucleotide
caugaaaacauacuugggu

SEQ ID NO: 3037669 - RNA, 19 nt, Artificial Sequence
  Description of Artificial Sequence: Synthetic oligonucleotide
cacaacgcggugauccucg

SEQ ID NO: 3037670 - RNA, 19 nt, Artificial Sequence
  Description of Artificial Sequence: Synthetic oligonucleotide
auacuugggucugucguac

SEQ ID NO: 3037671 - RNA, 19 nt, Artificial Sequence
  Description of Artificial Sequence: Synthetic oligonucleotide
ggucugucguaccacaggg

SEQ ID NO: 3037672 - RNA, 19 nt, Artificial Sequence
  Description of Artificial Sequence: Synthetic oligonucleotide
caagccaccuucuccuucc

SEQ ID NO: 3037673 - RNA, 19 nt, Artificial Sequence
  Description of Artificial Sequence: Synthetic oligonucleotide
auccucgaugagcacacuc

SEQ ID NO: 3037674 - RNA, 19 nt, Artificial Sequence
  Description of Artificial Sequence: Synthetic oligonucleotide
aguuaucaaaguccacaga

SEQ ID NO: 3037675 - RNA, 19 nt, Artificial Sequence
  Description of Artificial Sequence: Synthetic oligonucleotide
caaguaauagagcgaccag

SEQ ID NO: 3037676 - RNA, 19 nt, Artificial Sequence
  Description of Artificial Sequence: Synthetic oligonucleotide
ugauauccuccuuggugag

SEQ ID NO: 3037677 - RNA, 19 nt, Artificial Sequence
  Description of Artificial Sequence: Synthetic oligonucleotide
caguuccacuccaucaccg

SEQ ID NO: 3037678 - RNA, 19 nt, Artificial Sequence
  Description of Artificial Sequence: Synthetic oligonucleotide
aacacaacgcggugauccu

SEQ ID NO: 3037679 - RNA, 19 nt, Artificial Sequence
  Description of Artificial Sequence: Synthetic oligonucleotide
acucacgucggugcugucc

SEQ ID NO: 3037680 - RNA, 19 nt, Artificial Sequence
  Description of Artificial Sequence: Synthetic oligonucleotide
gucucuccaguuaucaaag

SEQ ID NO: 3037681 - RNA, 19 nt, Artificial Sequence
  Description of Artificial Sequence: Synthetic oligonucleotide
cacagagagccacacgggc

SEQ ID NO: 3037682 - RNA, 19 nt, Artificial Sequence
  Description of Artificial Sequence: Synthetic oligonucleotide
guaauagagcgaccagagc

SEQ ID NO: 3037683 - RNA, 19 nt, Artificial Sequence
  Description of Artificial Sequence: Synthetic oligonucleotide
cucgaugagcacacucacg

SEQ ID NO: 3037684 - RNA, 19 nt, Artificial Sequence
  Description of Artificial Sequence: Synthetic oligonucleotide
uuccacuccaucaccguuc

SEQ ID NO: 3037685 - RNA, 19 nt, Artificial Sequence
  Description of Artificial Sequence: Synthetic oligonucleotide
uccacuccaucaccguucc

SEQ ID NO: 3037686 - RNA, 19 nt, Artificial Sequence
  Description of Artificial Sequence: Synthetic oligonucleotide
ccugcagcugaacacaacg

SEQ ID NO: 3037687 - RNA, 19 nt, Artificial Sequence
  Description of Artificial Sequence: Synthetic oligonucleotide
ggcauagaacucaaucucg

SEQ ID NO: 3037688 - RNA, 19 nt, Artificial Sequence
  Description of Artificial Sequence: Synthetic oligonucleotide
uccuuggugagccgcggcc

SEQ ID NO: 3037689 - RNA, 19 nt, Artificial Sequence
  Description of Artificial Sequence: Synthetic oligonucleotide
aaaacauacuugggucugu

SEQ ID NO: 3037690 - RNA, 19 nt, Artificial Sequence
  Description of Artificial Sequence: Synthetic oligonucleotide
cugcagcugaacacaacgc

SEQ ID NO: 3037691 - RNA, 19 nt, Artificial Sequence
  Description of Artificial Sequence: Synthetic oligonucleotide
ggcuugauauccuccuugg

SEQ ID NO: 3037692 - RNA, 19 nt, Artificial Sequence
  Description of Artificial Sequence: Synthetic oligonucleotide
cugucguaccacagggucc

SEQ ID NO: 3037693 - RNA, 19 nt, Artificial Sequence
  Description of Artificial Sequence: Synthetic oligonucleotide
cuccaguuaucaaagucca

SEQ ID NO: 3037694 - RNA, 19 nt, Artificial Sequence
  Description of Artificial Sequence: Synthetic oligonucleotide
cacuccaucaccguuccug

SEQ ID NO: 3037695 - RNA, 19 nt, Artificial Sequence
  Description of Artificial Sequence: Synthetic oligonucleotide
ucaccuuggcauagaacuc

SEQ ID NO: 3037696 - RNA, 19 nt, Artificial Sequence
  Description of Artificial Sequence: Synthetic oligonucleotide
gaacucaaucucguuguac

SEQ ID NO: 3037697 - RNA, 19 nt, Artificial Sequence
  Description of Artificial Sequence: Synthetic oligonucleotide
agcgcuuauccugggaguc

SEQ ID NO: 3037698 - RNA, 19 nt, Artificial Sequence
  Description of Artificial Sequence: Synthetic oligonucleotide
gaguccuuggaguucaccu

SEQ ID NO: 3037699 - RNA, 19 nt, Artificial Sequence
  Description of Artificial Sequence: Synthetic oligonucleotide
acuugggucugucguacca

SEQ ID NO: 3037700 - RNA, 19 nt, Artificial Sequence
  Description of Artificial Sequence: Synthetic oligonucleotide
agcaaguaauagagcgacc

SEQ ID NO: 3037701 - RNA, 19 nt, Artificial Sequence
  Description of Artificial Sequence: Synthetic oligonucleotide
ugggucugucguaccacag

SEQ ID NO: 3037702 - RNA, 19 nt, Artificial Sequence
  Description of Artificial Sequence: Synthetic oligonucleotide
cuguccucaacacaaaacu

SEQ ID NO: 3037703 - RNA, 19 nt, Artificial Sequence
  Description of Artificial Sequence: Synthetic oligonucleotide
ucucguuguacaguuccac

SEQ ID NO: 3037704 - RNA, 19 nt, Artificial Sequence
  Description of Artificial Sequence: Synthetic oligonucleotide
uugggucugucguaccaca

SEQ ID NO: 3037705 - RNA, 19 nt, Artificial Sequence
  Description of Artificial Sequence: Synthetic oligonucleotide
aaugcuccacuugggccag

SEQ ID NO: 3037706 - RNA, 19 nt, Artificial Sequence
  Description of Artificial Sequence: Synthetic oligonucleotide
aguccacagagagccacac

SEQ ID NO: 3037707 - RNA, 19 nt, Artificial Sequence
  Description of Artificial Sequence: Synthetic oligonucleotide
ugcuguccucaacacaaaa

SEQ ID NO: 3037708 - RNA, 19 nt, Artificial Sequence
  Description of Artificial Sequence: Synthetic oligonucleotide
ucugcguaaugcuccacuu

SEQ ID NO: 3037709 - RNA, 19 nt, Artificial Sequence
  Description of Artificial Sequence: Synthetic oligonucleotide
augagcacacucacgucgg

SEQ ID NO: 3037710 - RNA, 19 nt, Artificial Sequence
  Description of Artificial Sequence: Synthetic oligonucleotide
guaccacaggguccgggcg

SEQ ID NO: 3037711 - RNA, 19 nt, Artificial Sequence
  Description of Artificial Sequence: Synthetic oligonucleotide
accagagcgcuuauccugg

SEQ ID NO: 3037712 - RNA, 19 nt, Artificial Sequence
  Description of Artificial Sequence: Synthetic oligonucleotide
gcgaccagagcgcuuaucc

SEQ ID NO: 3037713 - RNA, 19 nt, Artificial Sequence
  Description of Artificial Sequence: Synthetic oligonucleotide
gcaaguaauagagcgacca

SEQ ID NO: 3037714 - RNA, 19 nt, Artificial Sequence
  Description of Artificial Sequence: Synthetic oligonucleotide
acacgggcuugauauccuc

SEQ ID NO: 3037715 - RNA, 19 nt, Artificial Sequence
  Description of Artificial Sequence: Synthetic oligonucleotide
ucccagucucuccaguuau

SEQ ID NO: 3037716 - RNA, 19 nt, Artificial Sequence
  Description of Artificial Sequence: Synthetic oligonucleotide
acgggcuugauauccuccu

SEQ ID NO: 3037717 - RNA, 19 nt, Artificial Sequence
  Description of Artificial Sequence: Synthetic oligonucleotide
cuuggaguucaccuuggca

SEQ ID NO: 3037718 - RNA, 19 nt, Artificial Sequence
  Description of Artificial Sequence: Synthetic oligonucleotide
ccaugaaaacauacuuggg

SEQ ID NO: 3037719 - RNA, 19 nt, Artificial Sequence
  Description of Artificial Sequence: Synthetic oligonucleotide
aguuccacuccaucaccgu

SEQ ID NO: 3037720 - RNA, 19 nt, Artificial Sequence
  Description of Artificial Sequence: Synthetic oligonucleotide
uuuccucacaaagcaagua

SEQ ID NO: 3037721 - RNA, 19 nt, Artificial Sequence
  Description of Artificial Sequence: Synthetic oligonucleotide
uggaguucaccuuggcaua

SEQ ID NO: 3037722 - RNA, 19 nt, Artificial Sequence
  Description of Artificial Sequence: Synthetic oligonucleotide
cacgggcuugauauccucc

SEQ ID NO: 3037723 - RNA, 19 nt, Artificial Sequence
  Description of Artificial Sequence: Synthetic oligonucleotide
gcagcugaacacaacgcgg

SEQ ID NO: 3037724 - RNA, 19 nt, Artificial Sequence
  Description of Artificial Sequence: Synthetic oligonucleotide
aguucaccuuggcauagaa

SEQ ID NO: 3037725 - RNA, 19 nt, Artificial Sequence
  Description of Artificial Sequence: Synthetic oligonucleotide
caucaucuccuucccaguc

SEQ ID NO: 3037726 - RNA, 19 nt, Artificial Sequence
  Description of Artificial Sequence: Synthetic oligonucleotide
cuuauccugggaguccuug

SEQ ID NO: 3037727 - RNA, 19 nt, Artificial Sequence
  Description of Artificial Sequence: Synthetic oligonucleotide
guuguacaguuccacucca

SEQ ID NO: 3037728 - RNA, 19 nt, Artificial Sequence
  Description of Artificial Sequence: Synthetic oligonucleotide
uaccacaggguccgggcgu

SEQ ID NO: 3037729 - RNA, 19 nt, Artificial Sequence
  Description of Artificial Sequence: Synthetic oligonucleotide
uucccagucucuccaguua

SEQ ID NO: 3037730 - RNA, 19 nt, Artificial Sequence
  Description of Artificial Sequence: Synthetic oligonucleotide
agcugaacacaacgcggug

SEQ ID NO: 3037731 - RNA, 19 nt, Artificial Sequence
  Description of Artificial Sequence: Synthetic oligonucleotide
gauauccuccuuggugagc

SEQ ID NO: 3037732 - RNA, 19 nt, Artificial Sequence
  Description of Artificial Sequence: Synthetic oligonucleotide
aguccuuggaguucaccuu

SEQ ID NO: 3037733 - RNA, 19 nt, Artificial Sequence
  Description of Artificial Sequence: Synthetic oligonucleotide
ucucuccaguuaucaaagu

SEQ ID NO: 3037734 - RNA, 19 nt, Artificial Sequence
  Description of Artificial Sequence: Synthetic oligonucleotide
uccacuucaucaucuccuu

SEQ ID NO: 3037735 - RNA, 19 nt, Artificial Sequence
  Description of Artificial Sequence: Synthetic oligonucleotide
uugggccagcuccacuuca

SEQ ID NO: 3037736 - RNA, 19 nt, Artificial Sequence
  Description of Artificial Sequence: Synthetic oligonucleotide
uccuuccauuuccucacaa

SEQ ID NO: 3037737 - RNA, 19 nt, Artificial Sequence
  Description of Artificial Sequence: Synthetic oligonucleotide
cugcguaaugcuccacuug

SEQ ID NO: 3037738 - RNA, 19 nt, Artificial Sequence
  Description of Artificial Sequence: Synthetic oligonucleotide
guuccugcagcugaacaca

SEQ ID NO: 3037739 - RNA, 19 nt, Artificial Sequence
  Description of Artificial Sequence: Synthetic oligonucleotide
uauccuccuuggugagccg

SEQ ID NO: 3037740 - RNA, 19 nt, Artificial Sequence
  Description of Artificial Sequence: Synthetic oligonucleotide
ggugcuguccucaacacaa

SEQ ID NO: 3037741 - RNA, 19 nt, Artificial Sequence
  Description of Artificial Sequence: Synthetic oligonucleotide
uuguacaguuccacuccau

SEQ ID NO: 3037742 - RNA, 19 nt, Artificial Sequence
  Description of Artificial Sequence: Synthetic oligonucleotide
ucggugcuguccucaacac

SEQ ID NO: 3037743 - RNA, 19 nt, Artificial Sequence
  Description of Artificial Sequence: Synthetic oligonucleotide
acgcggugauccucgauga

SEQ ID NO: 3037744 - RNA, 19 nt, Artificial Sequence
  Description of Artificial Sequence: Synthetic oligonucleotide
guccacagagagccacacg

SEQ ID NO: 3037745 - RNA, 19 nt, Artificial Sequence
  Description of Artificial Sequence: Synthetic oligonucleotide
ucguaccacaggguccggg

SEQ ID NO: 3037746 - RNA, 19 nt, Artificial Sequence
  Description of Artificial Sequence: Synthetic oligonucleotide
uuccugcagcugaacacaa

SEQ ID NO: 3037747 - RNA, 19 nt, Artificial Sequence
  Description of Artificial Sequence: Synthetic oligonucleotide
uacuugggucugucguacc

SEQ ID NO: 3037748 - RNA, 19 nt, Artificial Sequence
  Description of Artificial Sequence: Synthetic oligonucleotide
gugauccucgaugagcaca

SEQ ID NO: 3037749 - RNA, 19 nt, Artificial Sequence
  Description of Artificial Sequence: Synthetic oligonucleotide
acagagagccacacgggcu

SEQ ID NO: 3037750 - RNA, 19 nt, Artificial Sequence
  Description of Artificial Sequence: Synthetic oligonucleotide
cuugggucugucguaccac

SEQ ID NO: 3037751 - RNA, 19 nt, Artificial Sequence
  Description of Artificial Sequence: Synthetic oligonucleotide
acacaacgcggugauccuc

SEQ ID NO: 3037752 - RNA, 19 nt, Artificial Sequence
  Description of Artificial Sequence: Synthetic oligonucleotide
cauacuugggucugucgua

SEQ ID NO: 3037753 - RNA, 19 nt, Artificial Sequence
  Description of Artificial Sequence: Synthetic oligonucleotide
uccugcagcugaacacaac

SEQ ID NO: 3037754 - RNA, 19 nt, Artificial Sequence
  Description of Artificial Sequence: Synthetic oligonucleotide
cguuguacaguuccacucc

SEQ ID NO: 3037755 - RNA, 19 nt, Artificial Sequence
  Description of Artificial Sequence: Synthetic oligonucleotide
aaguccacagagagccaca

SEQ ID NO: 3037756 - RNA, 19 nt, Artificial Sequence
  Description of Artificial Sequence: Synthetic oligonucleotide
agagcgaccagagcgcuua

SEQ ID NO: 3037757 - RNA, 19 nt, Artificial Sequence
  Description of Artificial Sequence: Synthetic oligonucleotide
ugagcacacucacgucggu

SEQ ID NO: 3037758 - RNA, 19 nt, Artificial Sequence
  Description of Artificial Sequence: Synthetic oligonucleotide
cguaaugcuccacuugggc

SEQ ID NO: 3037759 - RNA, 19 nt, Artificial Sequence
  Description of Artificial Sequence: Synthetic oligonucleotide
agaacucaaucucguugua

SEQ ID NO: 3037760 - RNA, 19 nt, Artificial Sequence
  Description of Artificial Sequence: Synthetic oligonucleotide
auagagcgaccagagcgcu

SEQ ID NO: 3037761 - RNA, 19 nt, Artificial Sequence
  Description of Artificial Sequence: Synthetic oligonucleotide
gagcacacucacgucggug

SEQ ID NO: 3037762 - RNA, 19 nt, Artificial Sequence
  Description of Artificial Sequence: Synthetic oligonucleotide
caaucucguuguacaguuc

SEQ ID NO: 3037763 - RNA, 19 nt, Artificial Sequence
  Description of Artificial Sequence: Synthetic oligonucleotide
acacucacgucggugcugu

SEQ ID NO: 3037764 - RNA, 19 nt, Artificial Sequence
  Description of Artificial Sequence: Synthetic oligonucleotide
guucaccuuggcauagaac

SEQ ID NO: 3037765 - RNA, 19 nt, Artificial Sequence
  Description of Artificial Sequence: Synthetic oligonucleotide
uggugagccgcggccaagc

SEQ ID NO: 3037766 - RNA, 19 nt, Artificial Sequence
  Description of Artificial Sequence: Synthetic oligonucleotide
caccuuggcauagaacuca

SEQ ID NO: 3037767 - RNA, 19 nt, Artificial Sequence
  Description of Artificial Sequence: Synthetic oligonucleotide
gcuccacuucaucaucucc

SEQ ID NO: 3037768 - RNA, 19 nt, Artificial Sequence
  Description of Artificial Sequence: Synthetic oligonucleotide
gcuguccucaacacaaaac

SEQ ID NO: 3037769 - RNA, 19 nt, Artificial Sequence
  Description of Artificial Sequence: Synthetic oligonucleotide
aucaccguuccugcagcug

SEQ ID NO: 3037770 - RNA, 19 nt, Artificial Sequence
  Description of Artificial Sequence: Synthetic oligonucleotide
aagccaccuucuccuucca

SEQ ID NO: 3037771 - RNA, 19 nt, Artificial Sequence
  Description of Artificial Sequence: Synthetic oligonucleotide
ccacagagagccacacggg

SEQ ID NO: 3037772 - RNA, 19 nt, Artificial Sequence
  Description of Artificial Sequence: Synthetic oligonucleotide
ggaguucaccuuggcauag

SEQ ID NO: 3037773 - RNA, 19 nt, Artificial Sequence
  Description of Artificial Sequence: Synthetic oligonucleotide
acaggguccgggcgugcug

SEQ ID NO: 3037774 - RNA, 19 nt, Artificial Sequence
  Description of Artificial Sequence: Synthetic oligonucleotide
aggguccgggcgugcugcc

SEQ ID NO: 3037775 - RNA, 19 nt, Artificial Sequence
  Description of Artificial Sequence: Synthetic oligonucleotide
gcggugauccucgaugagc

SEQ ID NO: 3037776 - RNA, 19 nt, Artificial Sequence
  Description of Artificial Sequence: Synthetic oligonucleotide
cuugggccagcuccacuuc

SEQ ID NO: 3037777 - RNA, 19 nt, Artificial Sequence
  Description of Artificial Sequence: Synthetic oligonucleotide
cuccuuggugagccgcggc

SEQ ID NO: 3037778 - RNA, 19 nt, Artificial Sequence
  Description of Artificial Sequence: Synthetic oligonucleotide
ccacacgggcuugauaucc

SEQ ID NO: 3037779 - RNA, 19 nt, Artificial Sequence
  Description of Artificial Sequence: Synthetic oligonucleotide
cucguuguacaguuccacu

SEQ ID NO: 3037780 - RNA, 19 nt, Artificial Sequence
  Description of Artificial Sequence: Synthetic oligonucleotide
aucucguuguacaguucca

SEQ ID NO: 3037781 - RNA, 19 nt, Artificial Sequence
  Description of Artificial Sequence: Synthetic oligonucleotide
caggguccgggcgugcugc

SEQ ID NO: 3037782 - RNA, 19 nt, Artificial Sequence
  Description of Artificial Sequence: Synthetic oligonucleotide
agcgaccagagcgcuuauc

SEQ ID NO: 3037783 - RNA, 19 nt, Artificial Sequence
  Description of Artificial Sequence: Synthetic oligonucleotide
ggccagcuccacuucauca

SEQ ID NO: 3037784 - RNA, 19 nt, Artificial Sequence
  Description of Artificial Sequence: Synthetic oligonucleotide
cagcugaacacaacgcggu

SEQ ID NO: 3037785 - RNA, 19 nt, Artificial Sequence
  Description of Artificial Sequence: Synthetic oligonucleotide
uuggugagccgcggccaag

SEQ ID NO: 3037786 - RNA, 19 nt, Artificial Sequence
  Description of Artificial Sequence: Synthetic oligonucleotide
ccucgaugagcacacucac

SEQ ID NO: 3037787 - RNA, 19 nt, Artificial Sequence
  Description of Artificial Sequence: Synthetic oligonucleotide
ugaacacaacgcggugauc

SEQ ID NO: 3037788 - RNA, 19 nt, Artificial Sequence
  Description of Artificial Sequence: Synthetic oligonucleotide
gagcgcuuauccugggagu

SEQ ID NO: 3037789 - RNA, 19 nt, Artificial Sequence
  Description of Artificial Sequence: Synthetic oligonucleotide
ccaucaccguuccugcagc

SEQ ID NO: 3037790 - RNA, 19 nt, Artificial Sequence
  Description of Artificial Sequence: Synthetic oligonucleotide
cguaccacaggguccgggc

SEQ ID NO: 3037791 - RNA, 19 nt, Artificial Sequence
  Description of Artificial Sequence: Synthetic oligonucleotide
cugaacacaacgcggugau

SEQ ID NO: 3037792 - RNA, 19 nt, Artificial Sequence
  Description of Artificial Sequence: Synthetic oligonucleotide
acaacgcggugauccucga

SEQ ID NO: 3037793 - RNA, 19 nt, Artificial Sequence
  Description of Artificial Sequence: Synthetic oligonucleotide
gcugaacacaacgcgguga

SEQ ID NO: 3037794 - RNA, 19 nt, Artificial Sequence
  Description of Artificial Sequence: Synthetic oligonucleotide
gcguaaugcuccacuuggg

SEQ ID NO: 3037795 - RNA, 19 nt, Artificial Sequence
  Description of Artificial Sequence: Synthetic oligonucleotide
caaaguccacagagagcca

SEQ ID NO: 3037796 - RNA, 19 nt, Artificial Sequence
  Description of Artificial Sequence: Synthetic oligonucleotide
gugagccgcggccaagcca

SEQ ID NO: 3037797 - RNA, 19 nt, Artificial Sequence
  Description of Artificial Sequence: Synthetic oligonucleotide
caccuucuccuuccauuuc

SEQ ID NO: 3037798 - RNA, 19 nt, Artificial Sequence
  Description of Artificial Sequence: Synthetic oligonucleotide
cucaaucucguuguacagu

SEQ ID NO: 3037799 - RNA, 19 nt, Artificial Sequence
  Description of Artificial Sequence: Synthetic oligonucleotide
cucacgucggugcuguccu

SEQ ID NO: 3037800 - RNA, 19 nt, Artificial Sequence
  Description of Artificial Sequence: Synthetic oligonucleotide
cucugcguaaugcuccacu

SEQ ID NO: 3037801 - RNA, 19 nt, Artificial Sequence
  Description of Artificial Sequence: Synthetic oligonucleotide
cauagaacucaaucucguu

SEQ ID NO: 3037802 - RNA, 19 nt, Artificial Sequence
  Description of Artificial Sequence: Synthetic oligonucleotide
cugggaguccuuggaguuc

SEQ ID NO: 3037803 - RNA, 19 nt, Artificial Sequence
  Description of Artificial Sequence: Synthetic oligonucleotide
agagagccacacgggcuug

SEQ ID NO: 3037804 - RNA, 19 nt, Artificial Sequence
  Description of Artificial Sequence: Synthetic oligonucleotide
ggccaagccaccuucuccu

SEQ ID NO: 3037805 - RNA, 19 nt, Artificial Sequence
  Description of Artificial Sequence: Synthetic oligonucleotide
uagagcgaccagagcgcuu

SEQ ID NO: 3037806 - RNA, 19 nt, Artificial Sequence
  Description of Artificial Sequence: Synthetic oligonucleotide
accacaggguccgggcgug

SEQ ID NO: 3037807 - RNA, 19 nt, Artificial Sequence
  Description of Artificial Sequence: Synthetic oligonucleotide
gaguucaccuuggcauaga

SEQ ID NO: 3037808 - RNA, 19 nt, Artificial Sequence
  Description of Artificial Sequence: Synthetic oligonucleotide
cagucucuccaguuaucaa

SEQ ID NO: 3037809 - RNA, 19 nt, Artificial Sequence
  Description of Artificial Sequence: Synthetic oligonucleotide
ggaguccuuggaguucacc

SEQ ID NO: 3037810 - RNA, 19 nt, Artificial Sequence
  Description of Artificial Sequence: Synthetic oligonucleotide
ccucacaaagcaaguaaua

SEQ ID NO: 3037811 - RNA, 19 nt, Artificial Sequence
  Description of Artificial Sequence: Synthetic oligonucleotide
ggugauccucgaugagcac

SEQ ID NO: 3037812 - RNA, 19 nt, Artificial Sequence
  Description of Artificial Sequence: Synthetic oligonucleotide
accuuggcauagaacucaa

SEQ ID NO: 3037813 - RNA, 19 nt, Artificial Sequence
  Description of Artificial Sequence: Synthetic oligonucleotide
ggugagccgcggccaagcc

SEQ ID NO: 3037814 - RNA, 19 nt, Artificial Sequence
  Description of Artificial Sequence: Synthetic oligonucleotide
agccaccuucuccuuccau

SEQ ID NO: 3037815 - RNA, 19 nt, Artificial Sequence
  Description of Artificial Sequence: Synthetic oligonucleotide
cuccaucaccguuccugca

SEQ ID NO: 3037816 - RNA, 19 nt, Artificial Sequence
  Description of Artificial Sequence: Synthetic oligonucleotide
gcauagaacucaaucucgu

SEQ ID NO: 3037817 - RNA, 19 nt, Artificial Sequence
  Description of Artificial Sequence: Synthetic oligonucleotide
cagagcgcuuauccuggga

SEQ ID NO: 3037818 - RNA, 19 nt, Artificial Sequence
  Description of Artificial Sequence: Synthetic oligonucleotide
cggugauccucgaugagca

SEQ ID NO: 3037819 - RNA, 19 nt, Artificial Sequence
  Description of Artificial Sequence: Synthetic oligonucleotide
acgucggugcuguccucaa

SEQ ID NO: 3037820 - RNA, 19 nt, Artificial Sequence
  Description of Artificial Sequence: Synthetic oligonucleotide
guuccacuccaucaccguu

SEQ ID NO: 3037821 - RNA, 19 nt, Artificial Sequence
  Description of Artificial Sequence: Synthetic oligonucleotide
cacgucggugcuguccuca

SEQ ID NO: 3037822 - RNA, 19 nt, Artificial Sequence
  Description of Artificial Sequence: Synthetic oligonucleotide
gagagccacacgggcuuga

SEQ ID NO: 3037823 - RNA, 19 nt, Artificial Sequence
  Description of Artificial Sequence: Synthetic oligonucleotide
gagccacacgggcuugaua

SEQ ID NO: 3037824 - RNA, 19 nt, Artificial Sequence
  Description of Artificial Sequence: Synthetic oligonucleotide
ucacgucggugcuguccuc

SEQ ID NO: 3037825 - RNA, 19 nt, Artificial Sequence
  Description of Artificial Sequence: Synthetic oligonucleotide
ccagagcgcuuauccuggg

SEQ ID NO: 3037826 - RNA, 19 nt, Artificial Sequence
  Description of Artificial Sequence: Synthetic oligonucleotide
agagccacacgggcuugau

SEQ ID NO: 3037827 - RNA, 19 nt, Artificial Sequence
  Description of Artificial Sequence: Synthetic oligonucleotide
cagagagccacacgggcuu

SEQ ID NO: 3037828 - RNA, 19 nt, Artificial Sequence
  Description of Artificial Sequence: Synthetic oligonucleotide
cuucccagucucuccaguu

SEQ ID NO: 3037829 - RNA, 19 nt, Artificial Sequence
  Description of Artificial Sequence: Synthetic oligonucleotide
ccaagccaccuucuccuuc

SEQ ID NO: 3037830 - RNA, 19 nt, Artificial Sequence
  Description of Artificial Sequence: Synthetic oligonucleotide
ccauuuccucacaaagcaa

SEQ ID NO: 3037831 - RNA, 19 nt, Artificial Sequence
  Description of Artificial Sequence: Synthetic oligonucleotide
gcgcuuauccugggagucc

SEQ ID NO: 3037832 - RNA, 19 nt, Artificial Sequence
  Description of Artificial Sequence: Synthetic oligonucleotide
cacacgggcuugauauccu

SEQ ID NO: 3037833 - RNA, 19 nt, Artificial Sequence
  Description of Artificial Sequence: Synthetic oligonucleotide
cggccaagccaccuucucc

SEQ ID NO: 3037834 - RNA, 19 nt, Artificial Sequence
  Description of Artificial Sequence: Synthetic oligonucleotide
gucguaccacaggguccgg

SEQ ID NO: 3037835 - RNA, 19 nt, Artificial Sequence
  Description of Artificial Sequence: Synthetic oligonucleotide
caccguuccugcagcugaa

SEQ ID NO: 3037836 - RNA, 19 nt, Artificial Sequence
  Description of Artificial Sequence: Synthetic oligonucleotide
gcuugauauccuccuuggu

SEQ ID NO: 3037837 - RNA, 19 nt, Artificial Sequence
  Description of Artificial Sequence: Synthetic oligonucleotide
cccagucucuccaguuauc

SEQ ID NO: 3037838 - RNA, 19 nt, Artificial Sequence
  Description of Artificial Sequence: Synthetic oligonucleotide
gccaccuucuccuuccauu

SEQ ID NO: 3037839 - RNA, 19 nt, Artificial Sequence
  Description of Artificial Sequence: Synthetic oligonucleotide
gccacacgggcuugauauc

SEQ ID NO: 3037840 - RNA, 19 nt, Artificial Sequence
  Description of Artificial Sequence: Synthetic oligonucleotide
caucaccguuccugcagcu

SEQ ID NO: 3037841 - RNA, 19 nt, Artificial Sequence
  Description of Artificial Sequence: Synthetic oligonucleotide
cgaugagcacacucacguc

SEQ ID NO: 3037842 - RNA, 19 nt, Artificial Sequence
  Description of Artificial Sequence: Synthetic oligonucleotide
ccguuccugcagcugaaca

SEQ ID NO: 3037843 - RNA, 19 nt, Artificial Sequence
  Description of Artificial Sequence: Synthetic oligonucleotide
gucugucguaccacagggu

SEQ ID NO: 3037844 - RNA, 19 nt, Artificial Sequence
  Description of Artificial Sequence: Synthetic oligonucleotide
ccuccuuggugagccgcgg

SEQ ID NO: 3037845 - RNA, 19 nt, Artificial Sequence
  Description of Artificial Sequence: Synthetic oligonucleotide
gugcuguccucaacacaaa

SEQ ID NO: 3037846 - RNA, 19 nt, Artificial Sequence
  Description of Artificial Sequence: Synthetic oligonucleotide
agccgcggccaagccaccu

SEQ ID NO: 3037847 - RNA, 19 nt, Artificial Sequence
  Description of Artificial Sequence: Synthetic oligonucleotide
gcggccaagccaccuucuc

SEQ ID NO: 3037848 - RNA, 19 nt, Artificial Sequence
  Description of Artificial Sequence: Synthetic oligonucleotide
caucuccuucccagucucu

SEQ ID NO: 3037849 - RNA, 19 nt, Artificial Sequence
  Description of Artificial Sequence: Synthetic oligonucleotide
cacucacgucggugcuguc

SEQ ID NO: 3037850 - RNA, 19 nt, Artificial Sequence
  Description of Artificial Sequence: Synthetic oligonucleotide
gauccucgaugagcacacu

SEQ ID NO: 3037851 - RNA, 19 nt, Artificial Sequence
  Description of Artificial Sequence: Synthetic oligonucleotide
ccuucuccuuccauuuccu

SEQ ID NO: 3037852 - RNA, 19 nt, Artificial Sequence
  Description of Artificial Sequence: Synthetic oligonucleotide
ccaccuucuccuuccauuu

SEQ ID NO: 3037853 - RNA, 19 nt, Artificial Sequence
  Description of Artificial Sequence: Synthetic oligonucleotide
gcuccacuugggccagcuc

SEQ ID NO: 3037854 - RNA, 19 nt, Artificial Sequence
  Description of Artificial Sequence: Synthetic oligonucleotide
ccgcggccaagccaccuuc

SEQ ID NO: 3037855 - RNA, 19 nt, Artificial Sequence
  Description of Artificial Sequence: Synthetic oligonucleotide
cgcggugauccucgaugag

SEQ ID NO: 3037856 - RNA, 19 nt, Artificial Sequence
  Description of Artificial Sequence: Synthetic oligonucleotide
ccugggaguccuuggaguu

SEQ ID NO: 3037857 - RNA, 19 nt, Artificial Sequence
  Description of Artificial Sequence: Synthetic oligonucleotide
ccucaacacaaaacuccau

SEQ ID NO: 3037858 - RNA, 19 nt, Artificial Sequence
  Description of Artificial Sequence: Synthetic oligonucleotide
gagcgaccagagcgcuuau

SEQ ID NO: 3037859 - RNA, 19 nt, Artificial Sequence
  Description of Artificial Sequence: Synthetic oligonucleotide
ccacuugggccagcuccac

SEQ ID NO: 3037860 - RNA, 19 nt, Artificial Sequence
  Description of Artificial Sequence: Synthetic oligonucleotide
caacgcggugauccucgau

SEQ ID NO: 3037861 - RNA, 19 nt, Artificial Sequence
  Description of Artificial Sequence: Synthetic oligonucleotide
cacaggguccgggcgugcu

SEQ ID NO: 3037862 - RNA, 19 nt, Artificial Sequence
  Description of Artificial Sequence: Synthetic oligonucleotide
cgucggugcuguccucaac

SEQ ID NO: 3037863 - RNA, 19 nt, Artificial Sequence
  Description of Artificial Sequence: Synthetic oligonucleotide
cggugcuguccucaacaca

SEQ ID NO: 3037864 - RNA, 19 nt, Artificial Sequence
  Description of Artificial Sequence: Synthetic oligonucleotide
gggaguccuuggaguucac

SEQ ID NO: 3037865 - RNA, 19 nt, Artificial Sequence
  Description of Artificial Sequence: Synthetic oligonucleotide
cgaccagagcgcuuauccu

SEQ ID NO: 3037866 - RNA, 19 nt, Artificial Sequence
  Description of Artificial Sequence: Synthetic oligonucleotide
ccacaggguccgggcgugc

SEQ ID NO: 3037867 - RNA, 19 nt, Artificial Sequence
  Description of Artificial Sequence: Synthetic oligonucleotide
ccuuggcauagaacucaau

SEQ ID NO: 3037868 - RNA, 19 nt, Artificial Sequence
  Description of Artificial Sequence: Synthetic oligonucleotide
gccaagccaccuucuccuu

SEQ ID NO: 3037869 - RNA, 19 nt, Artificial Sequence
  Description of Artificial Sequence: Synthetic oligonucleotide
cgcuuauccugggaguccu

SEQ ID NO: 3037870 - RNA, 19 nt, Artificial Sequence
  Description of Artificial Sequence: Synthetic oligonucleotide
gccgcggccaagccaccuu

SEQ ID NO: 3037871 - RNA, 19 nt, Artificial Sequence
  Description of Artificial Sequence: Synthetic oligonucleotide
cgcggccaagccaccuucu

SEQ ID NO: 3037872 - RNA, 19 nt, Artificial Sequence
  Description of Artificial Sequence: Synthetic oligonucleotide
ccacuccaucaccguuccu

SEQ ID NO: 3037873 - RNA, 19 nt, Artificial Sequence
  Description of Artificial Sequence: Synthetic oligonucleotide
uugugaauaaaacagagga

SEQ ID NO: 3037874 - RNA, 19 nt, Artificial Sequence
  Description of Artificial Sequence: Synthetic oligonucleotide
uacauaacgaucauaagcc

SEQ ID NO: 3037875 - RNA, 19 nt, Artificial Sequence
  Description of Artificial Sequence: Synthetic oligonucleotide
agagaagaagaacugagcc

SEQ ID NO: 3037876 - RNA, 19 nt, Artificial Sequence
  Description of Artificial Sequence: Synthetic oligonucleotide
aaugaagaaauacaugggu

SEQ ID NO: 3037877 - RNA, 19 nt, Artificial Sequence
  Description of Artificial Sequence: Synthetic oligonucleotide
agaacugagccacacagcc

SEQ ID NO: 3037878 - RNA, 19 nt, Artificial Sequence
  Description of Artificial Sequence: Synthetic oligonucleotide
uuuggugaugauaacagag

SEQ ID NO: 3037879 - RNA, 19 nt, Artificial Sequence
  Description of Artificial Sequence: Synthetic oligonucleotide
aaagguaacacucagugua

SEQ ID NO: 3037880 - RNA, 19 nt, Artificial Sequence
  Description of Artificial Sequence: Synthetic oligonucleotide
ucuucagagauacagguug

SEQ ID NO: 3037881 - RNA, 19 nt, Artificial Sequence
  Description of Artificial Sequence: Synthetic oligonucleotide
aaacagaggaaacuuugcg

SEQ ID NO: 3037882 - RNA, 19 nt, Artificial Sequence
  Description of Artificial Sequence: Synthetic oligonucleotide
uggcuugugaauaaaacag

SEQ ID NO: 3037883 - RNA, 19 nt, Artificial Sequence
  Description of Artificial Sequence: Synthetic oligonucleotide
gaugauaacagaguuaaug

SEQ ID NO: 3037884 - RNA, 19 nt, Artificial Sequence
  Description of Artificial Sequence: Synthetic oligonucleotide
auaacagaguuaaugaagc

SEQ ID NO: 3037885 - RNA, 19 nt, Artificial Sequence
  Description of Artificial Sequence: Synthetic oligonucleotide
ucuuuggugaugauaacag

SEQ ID NO: 3037886 - RNA, 19 nt, Artificial Sequence
  Description of Artificial Sequence: Synthetic oligonucleotide
gaucaacacaauuaggaag

SEQ ID NO: 3037887 - RNA, 19 nt, Artificial Sequence
  Description of Artificial Sequence: Synthetic oligonucleotide
aucaacacaauuaggaagc

SEQ ID NO: 3037888 - RNA, 19 nt, Artificial Sequence
  Description of Artificial Sequence: Synthetic oligonucleotide
uuuccaaugaagaaauaca

SEQ ID NO: 3037889 - RNA, 19 nt, Artificial Sequence
  Description of Artificial Sequence: Synthetic oligonucleotide
uaaaacagaggaaacuuug

SEQ ID NO: 3037890 - RNA, 19 nt, Artificial Sequence
  Description of Artificial Sequence: Synthetic oligonucleotide
ugcagaucaacacaauuag

SEQ ID NO: 3037891 - RNA, 19 nt, Artificial Sequence
  Description of Artificial Sequence: Synthetic oligonucleotide
agaagaagaacugagccac

SEQ ID NO: 3037892 - RNA, 19 nt, Artificial Sequence
  Description of Artificial Sequence: Synthetic oligonucleotide
gauaacagaguuaaugaag

SEQ ID NO: 3037893 - RNA, 19 nt, Artificial Sequence
  Description of Artificial Sequence: Synthetic oligonucleotide
caaaagguaacacucagug

SEQ ID NO: 3037894 - RNA, 19 nt, Artificial Sequence
  Description of Artificial Sequence: Synthetic oligonucleotide
auagcacauagcuuuaagg

SEQ ID NO: 3037895 - RNA, 19 nt, Artificial Sequence
  Description of Artificial Sequence: Synthetic oligonucleotide
aaaggauaugcucuugucu

SEQ ID NO: 3037896 - RNA, 19 nt, Artificial Sequence
  Description of Artificial Sequence: Synthetic oligonucleotide
agucauugcagaucaacac

SEQ ID NO: 3037897 - RNA, 19 nt, Artificial Sequence
  Description of Artificial Sequence: Synthetic oligonucleotide
aaaacagaggaaacuuugc

SEQ ID NO: 3037898 - RNA, 19 nt, Artificial Sequence
  Description of Artificial Sequence: Synthetic oligonucleotide
uaugcucuugucuucagag

SEQ ID NO: 3037899 - RNA, 19 nt, Artificial Sequence
  Description of Artificial Sequence: Synthetic oligonucleotide
ugaagaaauacaugggugu

SEQ ID NO: 3037900 - RNA, 19 nt, Artificial Sequence
  Description of Artificial Sequence: Synthetic oligonucleotide
augauaacagaguuaauga

SEQ ID NO: 3037901 - RNA, 19 nt, Artificial Sequence
  Description of Artificial Sequence: Synthetic oligonucleotide
aguuaaugaagccaccaag

SEQ ID NO: 3037902 - RNA, 19 nt, Artificial Sequence
  Description of Artificial Sequence: Synthetic oligonucleotide
aauagcacauagcuuuaag

SEQ ID NO: 3037903 - RNA, 19 nt, Artificial Sequence
  Description of Artificial Sequence: Synthetic oligonucleotide
agcacauagcuuuaaggac

SEQ ID NO: 3037904 - RNA, 19 nt, Artificial Sequence
  Description of Artificial Sequence: Synthetic oligonucleotide
cauagcuuuaaggacaugg

SEQ ID NO: 3037905 - RNA, 19 nt, Artificial Sequence
  Description of Artificial Sequence: Synthetic oligonucleotide
uagucuuuggugaugauaa

SEQ ID NO: 3037906 - RNA, 19 nt, Artificial Sequence
  Description of Artificial Sequence: Synthetic oligonucleotide
caagaucuaggaaugacag

SEQ ID NO: 3037907 - RNA, 19 nt, Artificial Sequence
  Description of Artificial Sequence: Synthetic oligonucleotide
guugcuaggaucuuuggug

SEQ ID NO: 3037908 - RNA, 19 nt, Artificial Sequence
  Description of Artificial Sequence: Synthetic oligonucleotide
caagauaugaagcugccac

SEQ ID NO: 3037909 - RNA, 19 nt, Artificial Sequence
  Description of Artificial Sequence: Synthetic oligonucleotide
uagcacauagcuuuaagga

SEQ ID NO: 3037910 - RNA, 19 nt, Artificial Sequence
  Description of Artificial Sequence: Synthetic oligonucleotide
aaugacagguuuccaauga

SEQ ID NO: 3037911 - RNA, 19 nt, Artificial Sequence
  Description of Artificial Sequence: Synthetic oligonucleotide
aacagaggaaacuuugcga

SEQ ID NO: 3037912 - RNA, 19 nt, Artificial Sequence
  Description of Artificial Sequence: Synthetic oligonucleotide
ugaauaaaacagaggaaac

SEQ ID NO: 3037913 - RNA, 19 nt, Artificial Sequence
  Description of Artificial Sequence: Synthetic oligonucleotide
cuugugaauaaaacagagg

SEQ ID NO: 3037914 - RNA, 19 nt, Artificial Sequence
  Description of Artificial Sequence: Synthetic oligonucleotide
uugguguguagacagaaga

SEQ ID NO: 3037915 - RNA, 19 nt, Artificial Sequence
  Description of Artificial Sequence: Synthetic oligonucleotide
aauacauggguguguggag

SEQ ID NO: 3037916 - RNA, 19 nt, Artificial Sequence
  Description of Artificial Sequence: Synthetic oligonucleotide
caaugaagaaauacauggg

SEQ ID NO: 3037917 - RNA, 19 nt, Artificial Sequence
  Description of Artificial Sequence: Synthetic oligonucleotide
acgaucauaagccauggca

SEQ ID NO: 3037918 - RNA, 19 nt, Artificial Sequence
  Description of Artificial Sequence: Synthetic oligonucleotide
aucuuugguguguagacag

SEQ ID NO: 3037919 - RNA, 19 nt, Artificial Sequence
  Description of Artificial Sequence: Synthetic oligonucleotide
agaucuaggaaugacaggu

SEQ ID NO: 3037920 - RNA, 19 nt, Artificial Sequence
  Description of Artificial Sequence: Synthetic oligonucleotide
acagaguuaaugaagccac

SEQ ID NO: 3037921 - RNA, 19 nt, Artificial Sequence
  Description of Artificial Sequence: Synthetic oligonucleotide
aagaucuaggaaugacagg

SEQ ID NO: 3037922 - RNA, 19 nt, Artificial Sequence
  Description of Artificial Sequence: Synthetic oligonucleotide
aaggauaugcucuugucuu

SEQ ID NO: 3037923 - RNA, 19 nt, Artificial Sequence
  Description of Artificial Sequence: Synthetic oligonucleotide
uccaaugaagaaauacaug

SEQ ID NO: 3037924 - RNA, 19 nt, Artificial Sequence
  Description of Artificial Sequence: Synthetic oligonucleotide
aacagaguuaaugaagcca

SEQ ID NO: 3037925 - RNA, 19 nt, Artificial Sequence
  Description of Artificial Sequence: Synthetic oligonucleotide
uugucuucagagauacagg

SEQ ID NO: 3037926 - RNA, 19 nt, Artificial Sequence
  Description of Artificial Sequence: Synthetic oligonucleotide
uuccaaugaagaaauacau

SEQ ID NO: 3037927 - RNA, 19 nt, Artificial Sequence
  Description of Artificial Sequence: Synthetic oligonucleotide
aagacaacccaagaucuag

SEQ ID NO: 3037928 - RNA, 19 nt, Artificial Sequence
  Description of Artificial Sequence: Synthetic oligonucleotide
ugucuucagagauacaggu

SEQ ID NO: 3037929 - RNA, 19 nt, Artificial Sequence
  Description of Artificial Sequence: Synthetic oligonucleotide
aaaagguaacacucagugu

SEQ ID NO: 3037930 - RNA, 19 nt, Artificial Sequence
  Description of Artificial Sequence: Synthetic oligonucleotide
ugugaauaaaacagaggaa

SEQ ID NO: 3037931 - RNA, 19 nt, Artificial Sequence
  Description of Artificial Sequence: Synthetic oligonucleotide
agaggaaacuuugcgaugg

SEQ ID NO: 3037932 - RNA, 19 nt, Artificial Sequence
  Description of Artificial Sequence: Synthetic oligonucleotide
uugcgauggcuacauaacg

SEQ ID NO: 3037933 - RNA, 19 nt, Artificial Sequence
  Description of Artificial Sequence: Synthetic oligonucleotide
cagaucaacacaauuagga

SEQ ID NO: 3037934 - RNA, 19 nt, Artificial Sequence
  Description of Artificial Sequence: Synthetic oligonucleotide
aagaagaacugagccacac

SEQ ID NO: 3037935 - RNA, 19 nt, Artificial Sequence
  Description of Artificial Sequence: Synthetic oligonucleotide
aacgaucauaagccauggc

SEQ ID NO: 3037936 - RNA, 19 nt, Artificial Sequence
  Description of Artificial Sequence: Synthetic oligonucleotide
uguagacagaagacaaccc

SEQ ID NO: 3037937 - RNA, 19 nt, Artificial Sequence
  Description of Artificial Sequence: Synthetic oligonucleotide
cagagauacagguugcuag

SEQ ID NO: 3037938 - RNA, 19 nt, Artificial Sequence
  Description of Artificial Sequence: Synthetic oligonucleotide
aagccaccaagauaugaag

SEQ ID NO: 3037939 - RNA, 19 nt, Artificial Sequence
  Description of Artificial Sequence: Synthetic oligonucleotide
gaaacuuugcgauggcuac

SEQ ID NO: 3037940 - RNA, 19 nt, Artificial Sequence
  Description of Artificial Sequence: Synthetic oligonucleotide
ucauugcagaucaacacaa

SEQ ID NO: 3037941 - RNA, 19 nt, Artificial Sequence
  Description of Artificial Sequence: Synthetic oligonucleotide
auggcuugugaauaaaaca

SEQ ID NO: 3037942 - RNA, 19 nt, Artificial Sequence
  Description of Artificial Sequence: Synthetic oligonucleotide
ugacagguuuccaaugaag

SEQ ID NO: 3037943 - RNA, 19 nt, Artificial Sequence
  Description of Artificial Sequence: Synthetic oligonucleotide
uugcagaucaacacaauua

SEQ ID NO: 3037944 - RNA, 19 nt, Artificial Sequence
  Description of Artificial Sequence: Synthetic oligonucleotide
aagauaugaagcugccacu

SEQ ID NO: 3037945 - RNA, 19 nt, Artificial Sequence
  Description of Artificial Sequence: Synthetic oligonucleotide
uuaaggacauggcuuguga

SEQ ID NO: 3037946 - RNA, 19 nt, Artificial Sequence
  Description of Artificial Sequence: Synthetic oligonucleotide
gaucauaagccauggcagc

SEQ ID NO: 3037947 - RNA, 19 nt, Artificial Sequence
  Description of Artificial Sequence: Synthetic oligonucleotide
ugauaacagaguuaaugaa

SEQ ID NO: 3037948 - RNA, 19 nt, Artificial Sequence
  Description of Artificial Sequence: Synthetic oligonucleotide
gauacagguugcuaggauc

SEQ ID NO: 3037949 - RNA, 19 nt, Artificial Sequence
  Description of Artificial Sequence: Synthetic oligonucleotide
cagaagacaacccaagauc

SEQ ID NO: 3037950 - RNA, 19 nt, Artificial Sequence
  Description of Artificial Sequence: Synthetic oligonucleotide
gauggcuacauaacgauca

SEQ ID NO: 3037951 - RNA, 19 nt, Artificial Sequence
  Description of Artificial Sequence: Synthetic oligonucleotide
uuggugaugauaacagagu

SEQ ID NO: 3037952 - RNA, 19 nt, Artificial Sequence
  Description of Artificial Sequence: Synthetic oligonucleotide
uaugaagcugccacuaaaa

SEQ ID NO: 3037953 - RNA, 19 nt, Artificial Sequence
  Description of Artificial Sequence: Synthetic oligonucleotide
uaacacucaguguagucca

SEQ ID NO: 3037954 - RNA, 19 nt, Artificial Sequence
  Description of Artificial Sequence: Synthetic oligonucleotide
gugaauaaaacagaggaaa

SEQ ID NO: 3037955 - RNA, 19 nt, Artificial Sequence
  Description of Artificial Sequence: Synthetic oligonucleotide
uccagugcagcagagaaga

SEQ ID NO: 3037956 - RNA, 19 nt, Artificial Sequence
  Description of Artificial Sequence: Synthetic oligonucleotide
aucauaagccauggcagcc

SEQ ID NO: 3037957 - RNA, 19 nt, Artificial Sequence
  Description of Artificial Sequence: Synthetic oligonucleotide
cauggcuugugaauaaaac

SEQ ID NO: 3037958 - RNA, 19 nt, Artificial Sequence
  Description of Artificial Sequence: Synthetic oligonucleotide
aagaacugagccacacagc

SEQ ID NO: 3037959 - RNA, 19 nt, Artificial Sequence
  Description of Artificial Sequence: Synthetic oligonucleotide
ugcgauggcuacauaacga

SEQ ID NO: 3037960 - RNA, 19 nt, Artificial Sequence
  Description of Artificial Sequence: Synthetic oligonucleotide
caccaagauaugaagcugc

SEQ ID NO: 3037961 - RNA, 19 nt, Artificial Sequence
  Description of Artificial Sequence: Synthetic oligonucleotide
guaacacucaguguagucc

SEQ ID NO: 3037962 - RNA, 19 nt, Artificial Sequence
  Description of Artificial Sequence: Synthetic oligonucleotide
uagcuuuaaggacauggcu

SEQ ID NO: 3037963 - RNA, 19 nt, Artificial Sequence
  Description of Artificial Sequence: Synthetic oligonucleotide
aaggacauggcuugugaau

SEQ ID NO: 3037964 - RNA, 19 nt, Artificial Sequence
  Description of Artificial Sequence: Synthetic oligonucleotide
acagaagacaacccaagau

SEQ ID NO: 3037965 - RNA, 19 nt, Artificial Sequence
  Description of Artificial Sequence: Synthetic oligonucleotide
gagaagaagaacugagcca

SEQ ID NO: 3037966 - RNA, 19 nt, Artificial Sequence
  Description of Artificial Sequence: Synthetic oligonucleotide
uguaguccagugcagcaga

SEQ ID NO: 3037967 - RNA, 19 nt, Artificial Sequence
  Description of Artificial Sequence: Synthetic oligonucleotide
uaaugaagccaccaagaua

SEQ ID NO: 3037968 - RNA, 19 nt, Artificial Sequence
  Description of Artificial Sequence: Synthetic oligonucleotide
auacauggguguguggagc

SEQ ID NO: 3037969 - RNA, 19 nt, Artificial Sequence
  Description of Artificial Sequence: Synthetic oligonucleotide
ucuaggaaugacagguuuc

SEQ ID NO: 3037970 - RNA, 19 nt, Artificial Sequence
  Description of Artificial Sequence: Synthetic oligonucleotide
cagagaagaagaacugagc

SEQ ID NO: 3037971 - RNA, 19 nt, Artificial Sequence
  Description of Artificial Sequence: Synthetic oligonucleotide
agaucaacacaauuaggaa

SEQ ID NO: 3037972 - RNA, 19 nt, Artificial Sequence
  Description of Artificial Sequence: Synthetic oligonucleotide
cuaggaaugacagguuucc

SEQ ID NO: 3037973 - RNA, 19 nt, Artificial Sequence
  Description of Artificial Sequence: Synthetic oligonucleotide
gaaugacagguuuccaaug

SEQ ID NO: 3037974 - RNA, 19 nt, Artificial Sequence
  Description of Artificial Sequence: Synthetic oligonucleotide
gaagaaauacaugggugug

SEQ ID NO: 3037975 - RNA, 19 nt, Artificial Sequence
  Description of Artificial Sequence: Synthetic oligonucleotide
uaacagaguuaaugaagcc

SEQ ID NO: 3037976 - RNA, 19 nt, Artificial Sequence
  Description of Artificial Sequence: Synthetic oligonucleotide
augaagaaauacaugggug

SEQ ID NO: 3037977 - RNA, 19 nt, Artificial Sequence
  Description of Artificial Sequence: Synthetic oligonucleotide
cagccaaaagguaacacuc

SEQ ID NO: 3037978 - RNA, 19 nt, Artificial Sequence
  Description of Artificial Sequence: Synthetic oligonucleotide
guguagacagaagacaacc

SEQ ID NO: 3037979 - RNA, 19 nt, Artificial Sequence
  Description of Artificial Sequence: Synthetic oligonucleotide
aaagguagucuuuggugau

SEQ ID NO: 3037980 - RNA, 19 nt, Artificial Sequence
  Description of Artificial Sequence: Synthetic oligonucleotide
gaaauacaugggugugugg

SEQ ID NO: 3037981 - RNA, 19 nt, Artificial Sequence
  Description of Artificial Sequence: Synthetic oligonucleotide
agaagacaacccaagaucu

SEQ ID NO: 3037982 - RNA, 19 nt, Artificial Sequence
  Description of Artificial Sequence: Synthetic oligonucleotide
uaacgaucauaagccaugg

SEQ ID NO: 3037983 - RNA, 19 nt, Artificial Sequence
  Description of Artificial Sequence: Synthetic oligonucleotide
agaaauacaugggugugug

SEQ ID NO: 3037984 - RNA, 19 nt, Artificial Sequence
  Description of Artificial Sequence: Synthetic oligonucleotide
uguguagacagaagacaac

SEQ ID NO: 3037985 - RNA, 19 nt, Artificial Sequence
  Description of Artificial Sequence: Synthetic oligonucleotide
ugguguguagacagaagac

SEQ ID NO: 3037986 - RNA, 19 nt, Artificial Sequence
  Description of Artificial Sequence: Synthetic oligonucleotide
aagaaauacaugggugugu

SEQ ID NO: 3037987 - RNA, 19 nt, Artificial Sequence
  Description of Artificial Sequence: Synthetic oligonucleotide
auaacgaucauaagccaug

SEQ ID NO: 3037988 - RNA, 19 nt, Artificial Sequence
  Description of Artificial Sequence: Synthetic oligonucleotide
agugcagcagagaagaaga

SEQ ID NO: 3037989 - RNA, 19 nt, Artificial Sequence
  Description of Artificial Sequence: Synthetic oligonucleotide
uggugaugauaacagaguu

SEQ ID NO: 3037990 - RNA, 19 nt, Artificial Sequence
  Description of Artificial Sequence: Synthetic oligonucleotide
auugcagaucaacacaauu

SEQ ID NO: 3037991 - RNA, 19 nt, Artificial Sequence
  Description of Artificial Sequence: Synthetic oligonucleotide
cucaguguaguccagugca

SEQ ID NO: 3037992 - RNA, 19 nt, Artificial Sequence
  Description of Artificial Sequence: Synthetic oligonucleotide
agccaccaagauaugaagc

SEQ ID NO: 3037993 - RNA, 19 nt, Artificial Sequence
  Description of Artificial Sequence: Synthetic oligonucleotide
uugcuaggaucuuuggugu

SEQ ID NO: 3037994 - RNA, 19 nt, Artificial Sequence
  Description of Artificial Sequence: Synthetic oligonucleotide
aggauaugcucuugucuuc

SEQ ID NO: 3037995 - RNA, 19 nt, Artificial Sequence
  Description of Artificial Sequence: Synthetic oligonucleotide
cuucagagauacagguugc

SEQ ID NO: 3037996 - RNA, 19 nt, Artificial Sequence
  Description of Artificial Sequence: Synthetic oligonucleotide
aguccagugcagcagagaa

SEQ ID NO: 3037997 - RNA, 19 nt, Artificial Sequence
  Description of Artificial Sequence: Synthetic oligonucleotide
gacagguuuccaaugaaga

SEQ ID NO: 3037998 - RNA, 19 nt, Artificial Sequence
  Description of Artificial Sequence: Synthetic oligonucleotide
aacccaagaucuaggaaug

SEQ ID NO: 3037999 - RNA, 19 nt, Artificial Sequence
  Description of Artificial Sequence: Synthetic oligonucleotide
ucaguguaguccagugcag

SEQ ID NO: 3038000 - RNA, 19 nt, Artificial Sequence
  Description of Artificial Sequence: Synthetic oligonucleotide
aagguaacacucaguguag

SEQ ID NO: 3038001 - RNA, 19 nt, Artificial Sequence
  Description of Artificial Sequence: Synthetic oligonucleotide
uuuaaggacauggcuugug

SEQ ID NO: 3038002 - RNA, 19 nt, Artificial Sequence
  Description of Artificial Sequence: Synthetic oligonucleotide
gaauaaaacagaggaaacu

SEQ ID NO: 3038003 - RNA, 19 nt, Artificial Sequence
  Description of Artificial Sequence: Synthetic oligonucleotide
aggaaugacagguuuccaa

SEQ ID NO: 3038004 - RNA, 19 nt, Artificial Sequence
  Description of Artificial Sequence: Synthetic oligonucleotide
uacauggguguguggagcc

SEQ ID NO: 3038005 - RNA, 19 nt, Artificial Sequence
  Description of Artificial Sequence: Synthetic oligonucleotide
auaugaagcugccacuaaa

SEQ ID NO: 3038006 - RNA, 19 nt, Artificial Sequence
  Description of Artificial Sequence: Synthetic oligonucleotide
acauaacgaucauaagcca

SEQ ID NO: 3038007 - RNA, 19 nt, Artificial Sequence
  Description of Artificial Sequence: Synthetic oligonucleotide
aguguaguccagugcagca

SEQ ID NO: 3038008 - RNA, 19 nt, Artificial Sequence
  Description of Artificial Sequence: Synthetic oligonucleotide
uaagccauggcagccaaaa

SEQ ID NO: 3038009 - RNA, 19 nt, Artificial Sequence
  Description of Artificial Sequence: Synthetic oligonucleotide
gcuuuaaggacauggcuug

SEQ ID NO: 3038010 - RNA, 19 nt, Artificial Sequence
  Description of Artificial Sequence: Synthetic oligonucleotide
agaguuaaugaagccacca

SEQ ID NO: 3038011 - RNA, 19 nt, Artificial Sequence
  Description of Artificial Sequence: Synthetic oligonucleotide
accaagauaugaagcugcc

SEQ ID NO: 3038012 - RNA, 19 nt, Artificial Sequence
  Description of Artificial Sequence: Synthetic oligonucleotide
agucuuuggugaugauaac

SEQ ID NO: 3038013 - RNA, 19 nt, Artificial Sequence
  Description of Artificial Sequence: Synthetic oligonucleotide
gacaacccaagaucuagga

SEQ ID NO: 3038014 - RNA, 19 nt, Artificial Sequence
  Description of Artificial Sequence: Synthetic oligonucleotide
cuuugcgauggcuacauaa

SEQ ID NO: 3038015 - RNA, 19 nt, Artificial Sequence
  Description of Artificial Sequence: Synthetic oligonucleotide
caaaggauaugcucuuguc

SEQ ID NO: 3038016 - RNA, 19 nt, Artificial Sequence
  Description of Artificial Sequence: Synthetic oligonucleotide
gcuugugaauaaaacagag

SEQ ID NO: 3038017 - RNA, 19 nt, Artificial Sequence
  Description of Artificial Sequence: Synthetic oligonucleotide
gauaugcucuugucuucag

SEQ ID NO: 3038018 - RNA, 19 nt, Artificial Sequence
  Description of Artificial Sequence: Synthetic oligonucleotide
aagccauggcagccaaaag

SEQ ID NO: 3038019 - RNA, 19 nt, Artificial Sequence
  Description of Artificial Sequence: Synthetic oligonucleotide
cagccagcaaaggauaugc

SEQ ID NO: 3038020 - RNA, 19 nt, Artificial Sequence
  Description of Artificial Sequence: Synthetic oligonucleotide
uaaggacauggcuugugaa

SEQ ID NO: 3038021 - RNA, 19 nt, Artificial Sequence
  Description of Artificial Sequence: Synthetic oligonucleotide
auggcagccaaaagguaac

SEQ ID NO: 3038022 - RNA, 19 nt, Artificial Sequence
  Description of Artificial Sequence: Synthetic oligonucleotide
gagucauugcagaucaaca

SEQ ID NO: 3038023 - RNA, 19 nt, Artificial Sequence
  Description of Artificial Sequence: Synthetic oligonucleotide
ugcagcagagaagaagaac

SEQ ID NO: 3038024 - RNA, 19 nt, Artificial Sequence
  Description of Artificial Sequence: Synthetic oligonucleotide
ucuuugguguguagacaga

SEQ ID NO: 3038025 - RNA, 19 nt, Artificial Sequence
  Description of Artificial Sequence: Synthetic oligonucleotide
ggaucuuugguguguagac

SEQ ID NO: 3038026 - RNA, 19 nt, Artificial Sequence
  Description of Artificial Sequence: Synthetic oligonucleotide
aacuuugcgauggcuacau

SEQ ID NO: 3038027 - RNA, 19 nt, Artificial Sequence
  Description of Artificial Sequence: Synthetic oligonucleotide
agaagaacugagccacaca

SEQ ID NO: 3038028 - RNA, 19 nt, Artificial Sequence
  Description of Artificial Sequence: Synthetic oligonucleotide
cagguugcuaggaucuuug

SEQ ID NO: 3038029 - RNA, 19 nt, Artificial Sequence
  Description of Artificial Sequence: Synthetic oligonucleotide
gaagccaccaagauaugaa

SEQ ID NO: 3038030 - RNA, 19 nt, Artificial Sequence
  Description of Artificial Sequence: Synthetic oligonucleotide
gaguuaaugaagccaccaa

SEQ ID NO: 3038031 - RNA, 19 nt, Artificial Sequence
  Description of Artificial Sequence: Synthetic oligonucleotide
gcagagaagaagaacugag

SEQ ID NO: 3038032 - RNA, 19 nt, Artificial Sequence
  Description of Artificial Sequence: Synthetic oligonucleotide
ucauaagccauggcagcca

SEQ ID NO: 3038033 - RNA, 19 nt, Artificial Sequence
  Description of Artificial Sequence: Synthetic oligonucleotide
auaugcucuugucuucaga

SEQ ID NO: 3038034 - RNA, 19 nt, Artificial Sequence
  Description of Artificial Sequence: Synthetic oligonucleotide
cagaguuaaugaagccacc

SEQ ID NO: 3038035 - RNA, 19 nt, Artificial Sequence
  Description of Artificial Sequence: Synthetic oligonucleotide
agguugcuaggaucuuugg

SEQ ID NO: 3038036 - RNA, 19 nt, Artificial Sequence
  Description of Artificial Sequence: Synthetic oligonucleotide
aagguagucuuuggugaug

SEQ ID NO: 3038037 - RNA, 19 nt, Artificial Sequence
  Description of Artificial Sequence: Synthetic oligonucleotide
agcuuuaaggacauggcuu

SEQ ID NO: 3038038 - RNA, 19 nt, Artificial Sequence
  Description of Artificial Sequence: Synthetic oligonucleotide
gccaaaagguaacacucag

SEQ ID NO: 3038039 - RNA, 19 nt, Artificial Sequence
  Description of Artificial Sequence: Synthetic oligonucleotide
aaacuuugcgauggcuaca

SEQ ID NO: 3038040 - RNA, 19 nt, Artificial Sequence
  Description of Artificial Sequence: Synthetic oligonucleotide
cagugcagcagagaagaag

SEQ ID NO: 3038041 - RNA, 19 nt, Artificial Sequence
  Description of Artificial Sequence: Synthetic oligonucleotide
caacccaagaucuaggaau

SEQ ID NO: 3038042 - RNA, 19 nt, Artificial Sequence
  Description of Artificial Sequence: Synthetic oligonucleotide
acaacccaagaucuaggaa

SEQ ID NO: 3038043 - RNA, 19 nt, Artificial Sequence
  Description of Artificial Sequence: Synthetic oligonucleotide
cacucaguguaguccagug

SEQ ID NO: 3038044 - RNA, 19 nt, Artificial Sequence
  Description of Artificial Sequence: Synthetic oligonucleotide
cgaucauaagccauggcag

SEQ ID NO: 3038045 - RNA, 19 nt, Artificial Sequence
  Description of Artificial Sequence: Synthetic oligonucleotide
agauacagguugcuaggau

SEQ ID NO: 3038046 - RNA, 19 nt, Artificial Sequence
  Description of Artificial Sequence: Synthetic oligonucleotide
agcagagaagaagaacuga

SEQ ID NO: 3038047 - RNA, 19 nt, Artificial Sequence
  Description of Artificial Sequence: Synthetic oligonucleotide
gucuuuggugaugauaaca

SEQ ID NO: 3038048 - RNA, 19 nt, Artificial Sequence
  Description of Artificial Sequence: Synthetic oligonucleotide
ggcuacauaacgaucauaa

SEQ ID NO: 3038049 - RNA, 19 nt, Artificial Sequence
  Description of Artificial Sequence: Synthetic oligonucleotide
agacaacccaagaucuagg

SEQ ID NO: 3038050 - RNA, 19 nt, Artificial Sequence
  Description of Artificial Sequence: Synthetic oligonucleotide
aggaucuuugguguguaga

SEQ ID NO: 3038051 - RNA, 19 nt, Artificial Sequence
  Description of Artificial Sequence: Synthetic oligonucleotide
gauaugaagcugccacuaa

SEQ ID NO: 3038052 - RNA, 19 nt, Artificial Sequence
  Description of Artificial Sequence: Synthetic oligonucleotide
gagccuggagucauugcag

SEQ ID NO: 3038053 - RNA, 19 nt, Artificial Sequence
  Description of Artificial Sequence: Synthetic oligonucleotide
agauaugaagcugccacua

SEQ ID NO: 3038054 - RNA, 19 nt, Artificial Sequence
  Description of Artificial Sequence: Synthetic oligonucleotide
gcuacauaacgaucauaag

SEQ ID NO: 3038055 - RNA, 19 nt, Artificial Sequence
  Description of Artificial Sequence: Synthetic oligonucleotide
guguguggagccuggaguc

SEQ ID NO: 3038056 - RNA, 19 nt, Artificial Sequence
  Description of Artificial Sequence: Synthetic oligonucleotide
cuuuggugaugauaacaga

SEQ ID NO: 3038057 - RNA, 19 nt, Artificial Sequence
  Description of Artificial Sequence: Synthetic oligonucleotide
gaucuuugguguguagaca

SEQ ID NO: 3038058 - RNA, 19 nt, Artificial Sequence
  Description of Artificial Sequence: Synthetic oligonucleotide
ucaacacaauuaggaagcu

SEQ ID NO: 3038059 - RNA, 19 nt, Artificial Sequence
  Description of Artificial Sequence: Synthetic oligonucleotide
uucagagauacagguugcu

SEQ ID NO: 3038060 - RNA, 19 nt, Artificial Sequence
  Description of Artificial Sequence: Synthetic oligonucleotide
gaggaaacuuugcgauggc

SEQ ID NO: 3038061 - RNA, 19 nt, Artificial Sequence
  Description of Artificial Sequence: Synthetic oligonucleotide
ucagagauacagguugcua

SEQ ID NO: 3038062 - RNA, 19 nt, Artificial Sequence
  Description of Artificial Sequence: Synthetic oligonucleotide
augcucuugucuucagaga

SEQ ID NO: 3038063 - RNA, 19 nt, Artificial Sequence
  Description of Artificial Sequence: Synthetic oligonucleotide
guguguagacagaagacaa

SEQ ID NO: 3038064 - RNA, 19 nt, Artificial Sequence
  Description of Artificial Sequence: Synthetic oligonucleotide
gguguguagacagaagaca

SEQ ID NO: 3038065 - RNA, 19 nt, Artificial Sequence
  Description of Artificial Sequence: Synthetic oligonucleotide
agguagucuuuggugauga

SEQ ID NO: 3038066 - RNA, 19 nt, Artificial Sequence
  Description of Artificial Sequence: Synthetic oligonucleotide
aggacauggcuugugaaua

SEQ ID NO: 3038067 - RNA, 19 nt, Artificial Sequence
  Description of Artificial Sequence: Synthetic oligonucleotide
aacacucaguguaguccag

SEQ ID NO: 3038068 - RNA, 19 nt, Artificial Sequence
  Description of Artificial Sequence: Synthetic oligonucleotide
caguguaguccagugcagc

SEQ ID NO: 3038069 - RNA, 19 nt, Artificial Sequence
  Description of Artificial Sequence: Synthetic oligonucleotide
gcagaucaacacaauuagg

SEQ ID NO: 3038070 - RNA, 19 nt, Artificial Sequence
  Description of Artificial Sequence: Synthetic oligonucleotide
guguaguccagugcagcag

SEQ ID NO: 3038071 - RNA, 19 nt, Artificial Sequence
  Description of Artificial Sequence: Synthetic oligonucleotide
ggagucauugcagaucaac

SEQ ID NO: 3038072 - RNA, 19 nt, Artificial Sequence
  Description of Artificial Sequence: Synthetic oligonucleotide
gcacauagcuuuaaggaca

SEQ ID NO: 3038073 - RNA, 19 nt, Artificial Sequence
  Description of Artificial Sequence: Synthetic oligonucleotide
ggagccuggagucauugca

SEQ ID NO: 3038074 - RNA, 19 nt, Artificial Sequence
  Description of Artificial Sequence: Synthetic oligonucleotide
agccuggagucauugcaga

SEQ ID NO: 3038075 - RNA, 19 nt, Artificial Sequence
  Description of Artificial Sequence: Synthetic oligonucleotide
gguaacacucaguguaguc

SEQ ID NO: 3038076 - RNA, 19 nt, Artificial Sequence
  Description of Artificial Sequence: Synthetic oligonucleotide
ugagccacacagccagcaa

SEQ ID NO: 3038077 - RNA, 19 nt, Artificial Sequence
  Description of Artificial Sequence: Synthetic oligonucleotide
cauaacgaucauaagccau

SEQ ID NO: 3038078 - RNA, 19 nt, Artificial Sequence
  Description of Artificial Sequence: Synthetic oligonucleotide
gccagcaaaggauaugcuc

SEQ ID NO: 3038079 - RNA, 19 nt, Artificial Sequence
  Description of Artificial Sequence: Synthetic oligonucleotide
auggcuacauaacgaucau

SEQ ID NO: 3038080 - RNA, 19 nt, Artificial Sequence
  Description of Artificial Sequence: Synthetic oligonucleotide
uggagccuggagucauugc

SEQ ID NO: 3038081 - RNA, 19 nt, Artificial Sequence
  Description of Artificial Sequence: Synthetic oligonucleotide
uaggaaugacagguuucca

SEQ ID NO: 3038082 - RNA, 19 nt, Artificial Sequence
  Description of Artificial Sequence: Synthetic oligonucleotide
ccaagaucuaggaaugaca

SEQ ID NO: 3038083 - RNA, 19 nt, Artificial Sequence
  Description of Artificial Sequence: Synthetic oligonucleotide
aggaaacuuugcgauggcu

SEQ ID NO: 3038084 - RNA, 19 nt, Artificial Sequence
  Description of Artificial Sequence: Synthetic oligonucleotide
uguguggagccuggaguca

SEQ ID NO: 3038085 - RNA, 19 nt, Artificial Sequence
  Description of Artificial Sequence: Synthetic oligonucleotide
guagucuuuggugaugaua

SEQ ID NO: 3038086 - RNA, 19 nt, Artificial Sequence
  Description of Artificial Sequence: Synthetic oligonucleotide
agccaaaagguaacacuca

SEQ ID NO: 3038087 - RNA, 19 nt, Artificial Sequence
  Description of Artificial Sequence: Synthetic oligonucleotide
agcaaaggauaugcucuug

SEQ ID NO: 3038088 - RNA, 19 nt, Artificial Sequence
  Description of Artificial Sequence: Synthetic oligonucleotide
gcagcagagaagaagaacu

SEQ ID NO: 3038089 - RNA, 19 nt, Artificial Sequence
  Description of Artificial Sequence: Synthetic oligonucleotide
cuuugguguguagacagaa

SEQ ID NO: 3038090 - RNA, 19 nt, Artificial Sequence
  Description of Artificial Sequence: Synthetic oligonucleotide
acauggcuugugaauaaaa

SEQ ID NO: 3038091 - RNA, 19 nt, Artificial Sequence
  Description of Artificial Sequence: Synthetic oligonucleotide
uaguccagugcagcagaga

SEQ ID NO: 3038092 - RNA, 19 nt, Artificial Sequence
  Description of Artificial Sequence: Synthetic oligonucleotide
cauggguguguggagccug

SEQ ID NO: 3038093 - RNA, 19 nt, Artificial Sequence
  Description of Artificial Sequence: Synthetic oligonucleotide
ggaaugacagguuuccaau

SEQ ID NO: 3038094 - RNA, 19 nt, Artificial Sequence
  Description of Artificial Sequence: Synthetic oligonucleotide
ccagcaaaggauaugcucu

SEQ ID NO: 3038095 - RNA, 19 nt, Artificial Sequence
  Description of Artificial Sequence: Synthetic oligonucleotide
guaguccagugcagcagag

SEQ ID NO: 3038096 - RNA, 19 nt, Artificial Sequence
  Description of Artificial Sequence: Synthetic oligonucleotide
ggaaacuuugcgauggcua

SEQ ID NO: 3038097 - RNA, 19 nt, Artificial Sequence
  Description of Artificial Sequence: Synthetic oligonucleotide
gaagaagaacugagccaca

SEQ ID NO: 3038098 - RNA, 19 nt, Artificial Sequence
  Description of Artificial Sequence: Synthetic oligonucleotide
agguaacacucaguguagu

SEQ ID NO: 3038099 - RNA, 19 nt, Artificial Sequence
  Description of Artificial Sequence: Synthetic oligonucleotide
guccagugcagcagagaag

SEQ ID NO: 3038100 - RNA, 19 nt, Artificial Sequence
  Description of Artificial Sequence: Synthetic oligonucleotide
gccaccaagauaugaagcu

SEQ ID NO: 3038101 - RNA, 19 nt, Artificial Sequence
  Description of Artificial Sequence: Synthetic oligonucleotide
gcagccaaaagguaacacu

SEQ ID NO: 3038102 - RNA, 19 nt, Artificial Sequence
  Description of Artificial Sequence: Synthetic oligonucleotide
gaacugagccacacagcca

SEQ ID NO: 3038103 - RNA, 19 nt, Artificial Sequence
  Description of Artificial Sequence: Synthetic oligonucleotide
gguguguggagccuggagu

SEQ ID NO: 3038104 - RNA, 19 nt, Artificial Sequence
  Description of Artificial Sequence: Synthetic oligonucleotide
ggcuugugaauaaaacaga

SEQ ID NO: 3038105 - RNA, 19 nt, Artificial Sequence
  Description of Artificial Sequence: Synthetic oligonucleotide
gaagacaacccaagaucua

SEQ ID NO: 3038106 - RNA, 19 nt, Artificial Sequence
  Description of Artificial Sequence: Synthetic oligonucleotide
acugagccacacagccagc

SEQ ID NO: 3038107 - RNA, 19 nt, Artificial Sequence
  Description of Artificial Sequence: Synthetic oligonucleotide
acacucaguguaguccagu

SEQ ID NO: 3038108 - RNA, 19 nt, Artificial Sequence
  Description of Artificial Sequence: Synthetic oligonucleotide
uggcagccaaaagguaaca

SEQ ID NO: 3038109 - RNA, 19 nt, Artificial Sequence
  Description of Artificial Sequence: Synthetic oligonucleotide
gacauggcuugugaauaaa

SEQ ID NO: 3038110 - RNA, 19 nt, Artificial Sequence
  Description of Artificial Sequence: Synthetic oligonucleotide
auggguguguggagccugg

SEQ ID NO: 3038111 - RNA, 19 nt, Artificial Sequence
  Description of Artificial Sequence: Synthetic oligonucleotide
ggauaugcucuugucuuca

SEQ ID NO: 3038112 - RNA, 19 nt, Artificial Sequence
  Description of Artificial Sequence: Synthetic oligonucleotide
cauaagccauggcagccaa

SEQ ID NO: 3038113 - RNA, 19 nt, Artificial Sequence
  Description of Artificial Sequence: Synthetic oligonucleotide
ggguguguggagccuggag

SEQ ID NO: 3038114 - RNA, 19 nt, Artificial Sequence
  Description of Artificial Sequence: Synthetic oligonucleotide
acagguugcuaggaucuuu

SEQ ID NO: 3038115 - RNA, 19 nt, Artificial Sequence
  Description of Artificial Sequence: Synthetic oligonucleotide
ggugaugauaacagaguua

SEQ ID NO: 3038116 - RNA, 19 nt, Artificial Sequence
  Description of Artificial Sequence: Synthetic oligonucleotide
uggcuacauaacgaucaua

SEQ ID NO: 3038117 - RNA, 19 nt, Artificial Sequence
  Description of Artificial Sequence: Synthetic oligonucleotide
uggagucauugcagaucaa

SEQ ID NO: 3038118 - RNA, 19 nt, Artificial Sequence
  Description of Artificial Sequence: Synthetic oligonucleotide
cccaagaucuaggaaugac

SEQ ID NO: 3038119 - RNA, 19 nt, Artificial Sequence
  Description of Artificial Sequence: Synthetic oligonucleotide
gcaaaggauaugcucuugu

SEQ ID NO: 3038120 - RNA, 19 nt, Artificial Sequence
  Description of Artificial Sequence: Synthetic oligonucleotide
cacauagcuuuaaggacau

SEQ ID NO: 3038121 - RNA, 19 nt, Artificial Sequence
  Description of Artificial Sequence: Synthetic oligonucleotide
ccaccaagauaugaagcug

SEQ ID NO: 3038122 - RNA, 19 nt, Artificial Sequence
  Description of Artificial Sequence: Synthetic oligonucleotide
acccaagaucuaggaauga

SEQ ID NO: 3038123 - RNA, 19 nt, Artificial Sequence
  Description of Artificial Sequence: Synthetic oligonucleotide
ggcagccaaaagguaacac

SEQ ID NO: 3038124 - RNA, 19 nt, Artificial Sequence
  Description of Artificial Sequence: Synthetic oligonucleotide
cugagccacacagccagca

SEQ ID NO: 3038125 - RNA, 19 nt, Artificial Sequence
  Description of Artificial Sequence: Synthetic oligonucleotide
ggacauggcuugugaauaa

SEQ ID NO: 3038126 - RNA, 19 nt, Artificial Sequence
  Description of Artificial Sequence: Synthetic oligonucleotide
acauggguguguggagccu

SEQ ID NO: 3038127 - RNA, 19 nt, Artificial Sequence
  Description of Artificial Sequence: Synthetic oligonucleotide
acauagcuuuaaggacaug

SEQ ID NO: 3038128 - RNA, 19 nt, Artificial Sequence
  Description of Artificial Sequence: Synthetic oligonucleotide
agccagcaaaggauaugcu

SEQ ID NO: 3038129 - RNA, 19 nt, Artificial Sequence
  Description of Artificial Sequence: Synthetic oligonucleotide
gccacacagccagcaaagg

SEQ ID NO: 3038130 - RNA, 19 nt, Artificial Sequence
  Description of Artificial Sequence: Synthetic oligonucleotide
augaagccaccaagauaug

SEQ ID NO: 3038131 - RNA, 19 nt, Artificial Sequence
  Description of Artificial Sequence: Synthetic oligonucleotide
ccacacagccagcaaagga

SEQ ID NO: 3038132 - RNA, 19 nt, Artificial Sequence
  Description of Artificial Sequence: Synthetic oligonucleotide
cuaggaucuuuggugugua

SEQ ID NO: 3038133 - RNA, 19 nt, Artificial Sequence
  Description of Artificial Sequence: Synthetic oligonucleotide
acuuugcgauggcuacaua

SEQ ID NO: 3038134 - RNA, 19 nt, Artificial Sequence
  Description of Artificial Sequence: Synthetic oligonucleotide
uggguguguggagccugga

SEQ ID NO: 3038135 - RNA, 19 nt, Artificial Sequence
  Description of Artificial Sequence: Synthetic oligonucleotide
gcgauggcuacauaacgau

SEQ ID NO: 3038136 - RNA, 19 nt, Artificial Sequence
  Description of Artificial Sequence: Synthetic oligonucleotide
cauugcagaucaacacaau

SEQ ID NO: 3038137 - RNA, 19 nt, Artificial Sequence
  Description of Artificial Sequence: Synthetic oligonucleotide
cgauggcuacauaacgauc

SEQ ID NO: 3038138 - RNA, 19 nt, Artificial Sequence
  Description of Artificial Sequence: Synthetic oligonucleotide
ccaaaagguaacacucagu

SEQ ID NO: 3038139 - RNA, 19 nt, Artificial Sequence
  Description of Artificial Sequence: Synthetic oligonucleotide
cuuuaaggacauggcuugu

SEQ ID NO: 3038140 - RNA, 19 nt, Artificial Sequence
  Description of Artificial Sequence: Synthetic oligonucleotide
auaagccauggcagccaaa

SEQ ID NO: 3038141 - RNA, 19 nt, Artificial Sequence
  Description of Artificial Sequence: Synthetic oligonucleotide
gcuaggaucuuuggugugu

SEQ ID NO: 3038142 - RNA, 19 nt, Artificial Sequence
  Description of Artificial Sequence: Synthetic oligonucleotide
gucuucagagauacagguu

SEQ ID NO: 3038143 - RNA, 19 nt, Artificial Sequence
  Description of Artificial Sequence: Synthetic oligonucleotide
ccaagauaugaagcugcca

SEQ ID NO: 3038144 - RNA, 19 nt, Artificial Sequence
  Description of Artificial Sequence: Synthetic oligonucleotide
gguuuccaaugaagaaaua

SEQ ID NO: 3038145 - RNA, 19 nt, Artificial Sequence
  Description of Artificial Sequence: Synthetic oligonucleotide
gcucuugucuucagagaua

SEQ ID NO: 3038146 - RNA, 19 nt, Artificial Sequence
  Description of Artificial Sequence: Synthetic oligonucleotide
ccauggcagccaaaaggua

SEQ ID NO: 3038147 - RNA, 19 nt, Artificial Sequence
  Description of Artificial Sequence: Synthetic oligonucleotide
gguagucuuuggugaugau

SEQ ID NO: 3038148 - RNA, 19 nt, Artificial Sequence
  Description of Artificial Sequence: Synthetic oligonucleotide
gccuggagucauugcagau

SEQ ID NO: 3038149 - RNA, 19 nt, Artificial Sequence
  Description of Artificial Sequence: Synthetic oligonucleotide
aauaauguuauuaauaggg

SEQ ID NO: 3038150 - RNA, 19 nt, Artificial Sequence
  Description of Artificial Sequence: Synthetic oligonucleotide
aauuauuuaauuuagaaua

SEQ ID NO: 3038151 - RNA, 19 nt, Artificial Sequence
  Description of Artificial Sequence: Synthetic oligonucleotide
aauagaaaaccucuuaagg

SEQ ID NO: 3038152 - RNA, 19 nt, Artificial Sequence
  Description of Artificial Sequence: Synthetic oligonucleotide
uuuaauuuagaauagaaaa

SEQ ID NO: 3038153 - RNA, 19 nt, Artificial Sequence
  Description of Artificial Sequence: Synthetic oligonucleotide
aaccacaaaguauacaggc

SEQ ID NO: 3038154 - RNA, 19 nt, Artificial Sequence
  Description of Artificial Sequence: Synthetic oligonucleotide
augaguuucacaaagaagc

SEQ ID NO: 3038155 - RNA, 19 nt, Artificial Sequence
  Description of Artificial Sequence: Synthetic oligonucleotide
acaauaauguuauuaauag

SEQ ID NO: 3038156 - RNA, 19 nt, Artificial Sequence
  Description of Artificial Sequence: Synthetic oligonucleotide
auagaaaaccucuuaaggg

SEQ ID NO: 3038157 - RNA, 19 nt, Artificial Sequence
  Description of Artificial Sequence: Synthetic oligonucleotide
uuuagaauagaaaaccucu

SEQ ID NO: 3038158 - RNA, 19 nt, Artificial Sequence
  Description of Artificial Sequence: Synthetic oligonucleotide
gaagauaaagcacucagcc

SEQ ID NO: 3038159 - RNA, 19 nt, Artificial Sequence
  Description of Artificial Sequence: Synthetic oligonucleotide
aaagaagccaaugaauccc

SEQ ID NO: 3038160 - RNA, 19 nt, Artificial Sequence
  Description of Artificial Sequence: Synthetic oligonucleotide
uuaauuuagaauagaaaac

SEQ ID NO: 3038161 - RNA, 19 nt, Artificial Sequence
  Description of Artificial Sequence: Synthetic oligonucleotide
uugaaauuauuuaauuuag

SEQ ID NO: 3038162 - RNA, 19 nt, Artificial Sequence
  Description of Artificial Sequence: Synthetic oligonucleotide
aaauuauuuaauuuagaau

SEQ ID NO: 3038163 - RNA, 19 nt, Artificial Sequence
  Description of Artificial Sequence: Synthetic oligonucleotide
guuauuaauagggauaugg

SEQ ID NO: 3038164 - RNA, 19 nt, Artificial Sequence
  Description of Artificial Sequence: Synthetic oligonucleotide
aauugaguccuugacaaac

SEQ ID NO: 3038165 - RNA, 19 nt, Artificial Sequence
  Description of Artificial Sequence: Synthetic oligonucleotide
uuaauagggauauggauga

SEQ ID NO: 3038166 - RNA, 19 nt, Artificial Sequence
  Description of Artificial Sequence: Synthetic oligonucleotide
augauagcaaauccuaugg

SEQ ID NO: 3038167 - RNA, 19 nt, Artificial Sequence
  Description of Artificial Sequence: Synthetic oligonucleotide
uauuuaauuuagaauagaa

SEQ ID NO: 3038168 - RNA, 19 nt, Artificial Sequence
  Description of Artificial Sequence: Synthetic oligonucleotide
ucaacaaacugcauuaccu

SEQ ID NO: 3038169 - RNA, 19 nt, Artificial Sequence
  Description of Artificial Sequence: Synthetic oligonucleotide
ucauuuguucacuaguucc

SEQ ID NO: 3038170 - RNA, 19 nt, Artificial Sequence
  Description of Artificial Sequence: Synthetic oligonucleotide
uuuucuaucggguuuggug

SEQ ID NO: 3038171 - RNA, 19 nt, Artificial Sequence
  Description of Artificial Sequence: Synthetic oligonucleotide
gaauagaaaaccucuuaag

SEQ ID NO: 3038172 - RNA, 19 nt, Artificial Sequence
  Description of Artificial Sequence: Synthetic oligonucleotide
aaauccuauggcuguggcc

SEQ ID NO: 3038173 - RNA, 19 nt, Artificial Sequence
  Description of Artificial Sequence: Synthetic oligonucleotide
uuucuaucggguuuggugc

SEQ ID NO: 3038174 - RNA, 19 nt, Artificial Sequence
  Description of Artificial Sequence: Synthetic oligonucleotide
aagccaaugaaucccauga

SEQ ID NO: 3038175 - RNA, 19 nt, Artificial Sequence
  Description of Artificial Sequence: Synthetic oligonucleotide
uagaaaaccucuuaaggga

SEQ ID NO: 3038176 - RNA, 19 nt, Artificial Sequence
  Description of Artificial Sequence: Synthetic oligonucleotide
uucacaaagaagccaauga

SEQ ID NO: 3038177 - RNA, 19 nt, Artificial Sequence
  Description of Artificial Sequence: Synthetic oligonucleotide
uuauuaauagggauaugga

SEQ ID NO: 3038178 - RNA, 19 nt, Artificial Sequence
  Description of Artificial Sequence: Synthetic oligonucleotide
auauggaugaguuucacaa

SEQ ID NO: 3038179 - RNA, 19 nt, Artificial Sequence
  Description of Artificial Sequence: Synthetic oligonucleotide
aaugaaucccaugauagca

SEQ ID NO: 3038180 - RNA, 19 nt, Artificial Sequence
  Description of Artificial Sequence: Synthetic oligonucleotide
aaagaaaccacaaaguaua

SEQ ID NO: 3038181 - RNA, 19 nt, Artificial Sequence
  Description of Artificial Sequence: Synthetic oligonucleotide
auuaauagggauauggaug

SEQ ID NO: 3038182 - RNA, 19 nt, Artificial Sequence
  Description of Artificial Sequence: Synthetic oligonucleotide
aaucccaugauagcaaauc

SEQ ID NO: 3038183 - RNA, 19 nt, Artificial Sequence
  Description of Artificial Sequence: Synthetic oligonucleotide
ucagccacccacaauaaug

SEQ ID NO: 3038184 - RNA, 19 nt, Artificial Sequence
  Description of Artificial Sequence: Synthetic oligonucleotide
uuaagggaaggaaggaaag

SEQ ID NO: 3038185 - RNA, 19 nt, Artificial Sequence
  Description of Artificial Sequence: Synthetic oligonucleotide
acaaagaagccaaugaauc

SEQ ID NO: 3038186 - RNA, 19 nt, Artificial Sequence
  Description of Artificial Sequence: Synthetic oligonucleotide
uucacuaguucccacgaag

SEQ ID NO: 3038187 - RNA, 19 nt, Artificial Sequence
  Description of Artificial Sequence: Synthetic oligonucleotide
aauccuauggcuguggcca

SEQ ID NO: 3038188 - RNA, 19 nt, Artificial Sequence
  Description of Artificial Sequence: Synthetic oligonucleotide
ucuucuggaauucuuuucu

SEQ ID NO: 3038189 - RNA, 19 nt, Artificial Sequence
  Description of Artificial Sequence: Synthetic oligonucleotide
uauuaauagggauauggau

SEQ ID NO: 3038190 - RNA, 19 nt, Artificial Sequence
  Description of Artificial Sequence: Synthetic oligonucleotide
agggauauggaugaguuuc

SEQ ID NO: 3038191 - RNA, 19 nt, Artificial Sequence
  Description of Artificial Sequence: Synthetic oligonucleotide
auggaugaguuucacaaag

SEQ ID NO: 3038192 - RNA, 19 nt, Artificial Sequence
  Description of Artificial Sequence: Synthetic oligonucleotide
ugcauuaccugguccaugg

SEQ ID NO: 3038193 - RNA, 19 nt, Artificial Sequence
  Description of Artificial Sequence: Synthetic oligonucleotide
aaaauguuauuuugaaauu

SEQ ID NO: 3038194 - RNA, 19 nt, Artificial Sequence
  Description of Artificial Sequence: Synthetic oligonucleotide
uggaauucuuuucuaucgg

SEQ ID NO: 3038195 - RNA, 19 nt, Artificial Sequence
  Description of Artificial Sequence: Synthetic oligonucleotide
caauaauguuauuaauagg

SEQ ID NO: 3038196 - RNA, 19 nt, Artificial Sequence
  Description of Artificial Sequence: Synthetic oligonucleotide
acgaagauaaagcacucag

SEQ ID NO: 3038197 - RNA, 19 nt, Artificial Sequence
  Description of Artificial Sequence: Synthetic oligonucleotide
aaaguauacaggcaacuuu

SEQ ID NO: 3038198 - RNA, 19 nt, Artificial Sequence
  Description of Artificial Sequence: Synthetic oligonucleotide
aaaagaaaccacaaaguau

SEQ ID NO: 3038199 - RNA, 19 nt, Artificial Sequence
  Description of Artificial Sequence: Synthetic oligonucleotide
auuuagaauagaaaaccuc

SEQ ID NO: 3038200 - RNA, 19 nt, Artificial Sequence
  Description of Artificial Sequence: Synthetic oligonucleotide
aauuuagaauagaaaaccu

SEQ ID NO: 3038201 - RNA, 19 nt, Artificial Sequence
  Description of Artificial Sequence: Synthetic oligonucleotide
aaaaccucuuaagggaagg

SEQ ID NO: 3038202 - RNA, 19 nt, Artificial Sequence
  Description of Artificial Sequence: Synthetic oligonucleotide
aauguuauuaauagggaua

SEQ ID NO: 3038203 - RNA, 19 nt, Artificial Sequence
  Description of Artificial Sequence: Synthetic oligonucleotide
ugaguuucacaaagaagcc

SEQ ID NO: 3038204 - RNA, 19 nt, Artificial Sequence
  Description of Artificial Sequence: Synthetic oligonucleotide
caaagaagccaaugaaucc

SEQ ID NO: 3038205 - RNA, 19 nt, Artificial Sequence
  Description of Artificial Sequence: Synthetic oligonucleotide
uaauguuauuaauagggau

SEQ ID NO: 3038206 - RNA, 19 nt, Artificial Sequence
  Description of Artificial Sequence: Synthetic oligonucleotide
agaauagaaaaccucuuaa

SEQ ID NO: 3038207 - RNA, 19 nt, Artificial Sequence
  Description of Artificial Sequence: Synthetic oligonucleotide
aagauaaagcacucagcca

SEQ ID NO: 3038208 - RNA, 19 nt, Artificial Sequence
  Description of Artificial Sequence: Synthetic oligonucleotide
uuaccagccgaauugaguc

SEQ ID NO: 3038209 - RNA, 19 nt, Artificial Sequence
  Description of Artificial Sequence: Synthetic oligonucleotide
uacuucaugagcuucucac

SEQ ID NO: 3038210 - RNA, 19 nt, Artificial Sequence
  Description of Artificial Sequence: Synthetic oligonucleotide
uuuuacuucaugagcuucu

SEQ ID NO: 3038211 - RNA, 19 nt, Artificial Sequence
  Description of Artificial Sequence: Synthetic oligonucleotide
cauuuguucacuaguuccc

SEQ ID NO: 3038212 - RNA, 19 nt, Artificial Sequence
  Description of Artificial Sequence: Synthetic oligonucleotide
auuuugaaauuauuuaauu

SEQ ID NO: 3038213 - RNA, 19 nt, Artificial Sequence
  Description of Artificial Sequence: Synthetic oligonucleotide
gaugaguuucacaaagaag

SEQ ID NO: 3038214 - RNA, 19 nt, Artificial Sequence
  Description of Artificial Sequence: Synthetic oligonucleotide
aauucuuuucuaucggguu

SEQ ID NO: 3038215 - RNA, 19 nt, Artificial Sequence
  Description of Artificial Sequence: Synthetic oligonucleotide
uuguucacuaguucccacg

SEQ ID NO: 3038216 - RNA, 19 nt, Artificial Sequence
  Description of Artificial Sequence: Synthetic oligonucleotide
aaauguuauuuugaaauua

SEQ ID NO: 3038217 - RNA, 19 nt, Artificial Sequence
  Description of Artificial Sequence: Synthetic oligonucleotide
uugacaaacugccgacugg

SEQ ID NO: 3038218 - RNA, 19 nt, Artificial Sequence
  Description of Artificial Sequence: Synthetic oligonucleotide
aauguuauuuugaaauuau

SEQ ID NO: 3038219 - RNA, 19 nt, Artificial Sequence
  Description of Artificial Sequence: Synthetic oligonucleotide
uuuaccagccgaauugagu

SEQ ID NO: 3038220 - RNA, 19 nt, Artificial Sequence
  Description of Artificial Sequence: Synthetic oligonucleotide
ugauagcaaauccuauggc

SEQ ID NO: 3038221 - RNA, 19 nt, Artificial Sequence
  Description of Artificial Sequence: Synthetic oligonucleotide
aaaccacaaaguauacagg

SEQ ID NO: 3038222 - RNA, 19 nt, Artificial Sequence
  Description of Artificial Sequence: Synthetic oligonucleotide
ugacaaacugccgacuggg

SEQ ID NO: 3038223 - RNA, 19 nt, Artificial Sequence
  Description of Artificial Sequence: Synthetic oligonucleotide
uagaauagaaaaccucuua

SEQ ID NO: 3038224 - RNA, 19 nt, Artificial Sequence
  Description of Artificial Sequence: Synthetic oligonucleotide
gaguccuugacaaacugcc

SEQ ID NO: 3038225 - RNA, 19 nt, Artificial Sequence
  Description of Artificial Sequence: Synthetic oligonucleotide
gauagcaaauccuauggcu

SEQ ID NO: 3038226 - RNA, 19 nt, Artificial Sequence
  Description of Artificial Sequence: Synthetic oligonucleotide
aauagggauauggaugagu

SEQ ID NO: 3038227 - RNA, 19 nt, Artificial Sequence
  Description of Artificial Sequence: Synthetic oligonucleotide
ugaguccuugacaaacugc

SEQ ID NO: 3038228 - RNA, 19 nt, Artificial Sequence
  Description of Artificial Sequence: Synthetic oligonucleotide
acugggcucaacaaacugc

SEQ ID NO: 3038229 - RNA, 19 nt, Artificial Sequence
  Description of Artificial Sequence: Synthetic oligonucleotide
ccaaugaaucccaugauag

SEQ ID NO: 3038230 - RNA, 19 nt, Artificial Sequence
  Description of Artificial Sequence: Synthetic oligonucleotide
augagcuucucacacccuc

SEQ ID NO: 3038231 - RNA, 19 nt, Artificial Sequence
  Description of Artificial Sequence: Synthetic oligonucleotide
ucuggaauucuuuucuauc

SEQ ID NO: 3038232 - RNA, 19 nt, Artificial Sequence
  Description of Artificial Sequence: Synthetic oligonucleotide
cuaguucccacgaagauaa

SEQ ID NO: 3038233 - RNA, 19 nt, Artificial Sequence
  Description of Artificial Sequence: Synthetic oligonucleotide
uguucacuaguucccacga

SEQ ID NO: 3038234 - RNA, 19 nt, Artificial Sequence
  Description of Artificial Sequence: Synthetic oligonucleotide
uuagaauagaaaaccucuu

SEQ ID NO: 3038235 - RNA, 19 nt, Artificial Sequence
  Description of Artificial Sequence: Synthetic oligonucleotide
ucacuaguucccacgaaga

SEQ ID NO: 3038236 - RNA, 19 nt, Artificial Sequence
  Description of Artificial Sequence: Synthetic oligonucleotide
aagaaaccacaaaguauac

SEQ ID NO: 3038237 - RNA, 19 nt, Artificial Sequence
  Description of Artificial Sequence: Synthetic oligonucleotide
uucccacgaagauaaagca

SEQ ID NO: 3038238 - RNA, 19 nt, Artificial Sequence
  Description of Artificial Sequence: Synthetic oligonucleotide
cuucaugagcuucucacac

SEQ ID NO: 3038239 - RNA, 19 nt, Artificial Sequence
  Description of Artificial Sequence: Synthetic oligonucleotide
auagcaaauccuauggcug

SEQ ID NO: 3038240 - RNA, 19 nt, Artificial Sequence
  Description of Artificial Sequence: Synthetic oligonucleotide
cucaacaaacugcauuacc

SEQ ID NO: 3038241 - RNA, 19 nt, Artificial Sequence
  Description of Artificial Sequence: Synthetic oligonucleotide
aagggaaggaaggaaagaa

SEQ ID NO: 3038242 - RNA, 19 nt, Artificial Sequence
  Description of Artificial Sequence: Synthetic oligonucleotide
uuuuaccagccgaauugag

SEQ ID NO: 3038243 - RNA, 19 nt, Artificial Sequence
  Description of Artificial Sequence: Synthetic oligonucleotide
uuucacaaagaagccaaug

SEQ ID NO: 3038244 - RNA, 19 nt, Artificial Sequence
  Description of Artificial Sequence: Synthetic oligonucleotide
caaugaaucccaugauagc

SEQ ID NO: 3038245 - RNA, 19 nt, Artificial Sequence
  Description of Artificial Sequence: Synthetic oligonucleotide
guucccacgaagauaaagc

SEQ ID NO: 3038246 - RNA, 19 nt, Artificial Sequence
  Description of Artificial Sequence: Synthetic oligonucleotide
ggaauucuuuucuaucggg

SEQ ID NO: 3038247 - RNA, 19 nt, Artificial Sequence
  Description of Artificial Sequence: Synthetic oligonucleotide
aaguauacaggcaacuuuu

SEQ ID NO: 3038248 - RNA, 19 nt, Artificial Sequence
  Description of Artificial Sequence: Synthetic oligonucleotide
ucccaugauagcaaauccu

SEQ ID NO: 3038249 - RNA, 19 nt, Artificial Sequence
  Description of Artificial Sequence: Synthetic oligonucleotide
uugaguccuugacaaacug

SEQ ID NO: 3038250 - RNA, 19 nt, Artificial Sequence
  Description of Artificial Sequence: Synthetic oligonucleotide
auaauguuauuaauaggga

SEQ ID NO: 3038251 - RNA, 19 nt, Artificial Sequence
  Description of Artificial Sequence: Synthetic oligonucleotide
auuaccugguccaugguug

SEQ ID NO: 3038252 - RNA, 19 nt, Artificial Sequence
  Description of Artificial Sequence: Synthetic oligonucleotide
auguuauuaauagggauau

SEQ ID NO: 3038253 - RNA, 19 nt, Artificial Sequence
  Description of Artificial Sequence: Synthetic oligonucleotide
auaaagcacucagccaccc

SEQ ID NO: 3038254 - RNA, 19 nt, Artificial Sequence
  Description of Artificial Sequence: Synthetic oligonucleotide
cuugacaaacugccgacug

SEQ ID NO: 3038255 - RNA, 19 nt, Artificial Sequence
  Description of Artificial Sequence: Synthetic oligonucleotide
gauauggaugaguuucaca

SEQ ID NO: 3038256 - RNA, 19 nt, Artificial Sequence
  Description of Artificial Sequence: Synthetic oligonucleotide
gaagccaaugaaucccaug

SEQ ID NO: 3038257 - RNA, 19 nt, Artificial Sequence
  Description of Artificial Sequence: Synthetic oligonucleotide
acaaacugccgacugggcu

SEQ ID NO: 3038258 - RNA, 19 nt, Artificial Sequence
  Description of Artificial Sequence: Synthetic oligonucleotide
uucaugagcuucucacacc

SEQ ID NO: 3038259 - RNA, 19 nt, Artificial Sequence
  Description of Artificial Sequence: Synthetic oligonucleotide
uggaugaguuucacaaaga

SEQ ID NO: 3038260 - RNA, 19 nt, Artificial Sequence
  Description of Artificial Sequence: Synthetic oligonucleotide
auggcaaucuucuggaauu

SEQ ID NO: 3038261 - RNA, 19 nt, Artificial Sequence
  Description of Artificial Sequence: Synthetic oligonucleotide
aguuucacaaagaagccaa

SEQ ID NO: 3038262 - RNA, 19 nt, Artificial Sequence
  Description of Artificial Sequence: Synthetic oligonucleotide
uagcaaauccuauggcugu

SEQ ID NO: 3038263 - RNA, 19 nt, Artificial Sequence
  Description of Artificial Sequence: Synthetic oligonucleotide
cacaaaguauacaggcaac

SEQ ID NO: 3038264 - RNA, 19 nt, Artificial Sequence
  Description of Artificial Sequence: Synthetic oligonucleotide
caaacugccgacugggcuc

SEQ ID NO: 3038265 - RNA, 19 nt, Artificial Sequence
  Description of Artificial Sequence: Synthetic oligonucleotide
acuucaugagcuucucaca

SEQ ID NO: 3038266 - RNA, 19 nt, Artificial Sequence
  Description of Artificial Sequence: Synthetic oligonucleotide
acaaaguauacaggcaacu

SEQ ID NO: 3038267 - RNA, 19 nt, Artificial Sequence
  Description of Artificial Sequence: Synthetic oligonucleotide
ucuuaagggaaggaaggaa

SEQ ID NO: 3038268 - RNA, 19 nt, Artificial Sequence
  Description of Artificial Sequence: Synthetic oligonucleotide
aguucccacgaagauaaag

SEQ ID NO: 3038269 - RNA, 19 nt, Artificial Sequence
  Description of Artificial Sequence: Synthetic oligonucleotide
gaaaaccucuuaagggaag

SEQ ID NO: 3038270 - RNA, 19 nt, Artificial Sequence
  Description of Artificial Sequence: Synthetic oligonucleotide
ccucuuaagggaaggaagg

SEQ ID NO: 3038271 - RNA, 19 nt, Artificial Sequence
  Description of Artificial Sequence: Synthetic oligonucleotide
ugagcuucucacacccuca

SEQ ID NO: 3038272 - RNA, 19 nt, Artificial Sequence
  Description of Artificial Sequence: Synthetic oligonucleotide
uucucacacccucauuugu

SEQ ID NO: 3038273 - RNA, 19 nt, Artificial Sequence
  Description of Artificial Sequence: Synthetic oligonucleotide
uauggaugaguuucacaaa

SEQ ID NO: 3038274 - RNA, 19 nt, Artificial Sequence
  Description of Artificial Sequence: Synthetic oligonucleotide
ugaaucccaugauagcaaa

SEQ ID NO: 3038275 - RNA, 19 nt, Artificial Sequence
  Description of Artificial Sequence: Synthetic oligonucleotide
uucuggaauucuuuucuau

SEQ ID NO: 3038276 - RNA, 19 nt, Artificial Sequence
  Description of Artificial Sequence: Synthetic oligonucleotide
gauaaagcacucagccacc

SEQ ID NO: 3038277 - RNA, 19 nt, Artificial Sequence
  Description of Artificial Sequence: Synthetic oligonucleotide
cucauuuguucacuaguuc

SEQ ID NO: 3038278 - RNA, 19 nt, Artificial Sequence
  Description of Artificial Sequence: Synthetic oligonucleotide
uuacuucaugagcuucuca

SEQ ID NO: 3038279 - RNA, 19 nt, Artificial Sequence
  Description of Artificial Sequence: Synthetic oligonucleotide
gacugggcucaacaaacug

SEQ ID NO: 3038280 - RNA, 19 nt, Artificial Sequence
  Description of Artificial Sequence: Synthetic oligonucleotide
uuuguucacuaguucccac

SEQ ID NO: 3038281 - RNA, 19 nt, Artificial Sequence
  Description of Artificial Sequence: Synthetic oligonucleotide
ggccauggcaaucuucugg

SEQ ID NO: 3038282 - RNA, 19 nt, Artificial Sequence
  Description of Artificial Sequence: Synthetic oligonucleotide
aagaagccaaugaauccca

SEQ ID NO: 3038283 - RNA, 19 nt, Artificial Sequence
  Description of Artificial Sequence: Synthetic oligonucleotide
caaauccuauggcuguggc

SEQ ID NO: 3038284 - RNA, 19 nt, Artificial Sequence
  Description of Artificial Sequence: Synthetic oligonucleotide
aaccucuuaagggaaggaa

SEQ ID NO: 3038285 - RNA, 19 nt, Artificial Sequence
  Description of Artificial Sequence: Synthetic oligonucleotide
cuucucacacccucauuug

SEQ ID NO: 3038286 - RNA, 19 nt, Artificial Sequence
  Description of Artificial Sequence: Synthetic oligonucleotide
guccuugacaaacugccga

SEQ ID NO: 3038287 - RNA, 19 nt, Artificial Sequence
  Description of Artificial Sequence: Synthetic oligonucleotide
uucuaucggguuuggugca

SEQ ID NO: 3038288 - RNA, 19 nt, Artificial Sequence
  Description of Artificial Sequence: Synthetic oligonucleotide
ucggguuuggugcaucuuu

SEQ ID NO: 3038289 - RNA, 19 nt, Artificial Sequence
  Description of Artificial Sequence: Synthetic oligonucleotide
auagggauauggaugaguu

SEQ ID NO: 3038290 - RNA, 19 nt, Artificial Sequence
  Description of Artificial Sequence: Synthetic oligonucleotide
ucucacacccucauuuguu

SEQ ID NO: 3038291 - RNA, 19 nt, Artificial Sequence
  Description of Artificial Sequence: Synthetic oligonucleotide
gaguuucacaaagaagcca

SEQ ID NO: 3038292 - RNA, 19 nt, Artificial Sequence
  Description of Artificial Sequence: Synthetic oligonucleotide
ucacacccucauuuguuca

SEQ ID NO: 3038293 - RNA, 19 nt, Artificial Sequence
  Description of Artificial Sequence: Synthetic oligonucleotide
aaaccucuuaagggaagga

SEQ ID NO: 3038294 - RNA, 19 nt, Artificial Sequence
  Description of Artificial Sequence: Synthetic oligonucleotide
cugggcucaacaaacugca

SEQ ID NO: 3038295 - RNA, 19 nt, Artificial Sequence
  Description of Artificial Sequence: Synthetic oligonucleotide
auuuguucacuaguuccca

SEQ ID NO: 3038296 - RNA, 19 nt, Artificial Sequence
  Description of Artificial Sequence: Synthetic oligonucleotide
cucacacccucauuuguuc

SEQ ID NO: 3038297 - RNA, 19 nt, Artificial Sequence
  Description of Artificial Sequence: Synthetic oligonucleotide
uguuauuaauagggauaug

SEQ ID NO: 3038298 - RNA, 19 nt, Artificial Sequence
  Description of Artificial Sequence: Synthetic oligonucleotide
ucuuuucuaucggguuugg

SEQ ID NO: 3038299 - RNA, 19 nt, Artificial Sequence
  Description of Artificial Sequence: Synthetic oligonucleotide
caaacugcauuaccugguc

SEQ ID NO: 3038300 - RNA, 19 nt, Artificial Sequence
  Description of Artificial Sequence: Synthetic oligonucleotide
uaccagccgaauugagucc

SEQ ID NO: 3038301 - RNA, 19 nt, Artificial Sequence
  Description of Artificial Sequence: Synthetic oligonucleotide
uuuacuucaugagcuucuc

SEQ ID NO: 3038302 - RNA, 19 nt, Artificial Sequence
  Description of Artificial Sequence: Synthetic oligonucleotide
cacucagccacccacaaua

SEQ ID NO: 3038303 - RNA, 19 nt, Artificial Sequence
  Description of Artificial Sequence: Synthetic oligonucleotide
uguggccauggcaaucuuc

SEQ ID NO: 3038304 - RNA, 19 nt, Artificial Sequence
  Description of Artificial Sequence: Synthetic oligonucleotide
agaaaaccucuuaagggaa

SEQ ID NO: 3038305 - RNA, 19 nt, Artificial Sequence
  Description of Artificial Sequence: Synthetic oligonucleotide
gaauucuuuucuaucgggu

SEQ ID NO: 3038306 - RNA, 19 nt, Artificial Sequence
  Description of Artificial Sequence: Synthetic oligonucleotide
acuaguucccacgaagaua

SEQ ID NO: 3038307 - RNA, 19 nt, Artificial Sequence
  Description of Artificial Sequence: Synthetic oligonucleotide
auugaguccuugacaaacu

SEQ ID NO: 3038308 - RNA, 19 nt, Artificial Sequence
  Description of Artificial Sequence: Synthetic oligonucleotide
uaucggguuuggugcaucu

SEQ ID NO: 3038309 - RNA, 19 nt, Artificial Sequence
  Description of Artificial Sequence: Synthetic oligonucleotide
uaauagggauauggaugag

SEQ ID NO: 3038310 - RNA, 19 nt, Artificial Sequence
  Description of Artificial Sequence: Synthetic oligonucleotide
aguccuugacaaacugccg

SEQ ID NO: 3038311 - RNA, 19 nt, Artificial Sequence
  Description of Artificial Sequence: Synthetic oligonucleotide
accacaaaguauacaggca

SEQ ID NO: 3038312 - RNA, 19 nt, Artificial Sequence
  Description of Artificial Sequence: Synthetic oligonucleotide
aaacugccgacugggcuca

SEQ ID NO: 3038313 - RNA, 19 nt, Artificial Sequence
  Description of Artificial Sequence: Synthetic oligonucleotide
cacaaagaagccaaugaau

SEQ ID NO: 3038314 - RNA, 19 nt, Artificial Sequence
  Description of Artificial Sequence: Synthetic oligonucleotide
ggcucaacaaacugcauua

SEQ ID NO: 3038315 - RNA, 19 nt, Artificial Sequence
  Description of Artificial Sequence: Synthetic oligonucleotide
agccgaauugaguccuuga

SEQ ID NO: 3038316 - RNA, 19 nt, Artificial Sequence
  Description of Artificial Sequence: Synthetic oligonucleotide
cgaagauaaagcacucagc

SEQ ID NO: 3038317 - RNA, 19 nt, Artificial Sequence
  Description of Artificial Sequence: Synthetic oligonucleotide
gaauugaguccuugacaaa

SEQ ID NO: 3038318 - RNA, 19 nt, Artificial Sequence
  Description of Artificial Sequence: Synthetic oligonucleotide
augaaucccaugauagcaa

SEQ ID NO: 3038319 - RNA, 19 nt, Artificial Sequence
  Description of Artificial Sequence: Synthetic oligonucleotide
gacaaacugccgacugggc

SEQ ID NO: 3038320 - RNA, 19 nt, Artificial Sequence
  Description of Artificial Sequence: Synthetic oligonucleotide
ccgacugggcucaacaaac

SEQ ID NO: 3038321 - RNA, 19 nt, Artificial Sequence
  Description of Artificial Sequence: Synthetic oligonucleotide
uagggauauggaugaguuu

SEQ ID NO: 3038322 - RNA, 19 nt, Artificial Sequence
  Description of Artificial Sequence: Synthetic oligonucleotide
gccgaauugaguccuugac

SEQ ID NO: 3038323 - RNA, 19 nt, Artificial Sequence
  Description of Artificial Sequence: Synthetic oligonucleotide
cgaauugaguccuugacaa

SEQ ID NO: 3038324 - RNA, 19 nt, Artificial Sequence
  Description of Artificial Sequence: Synthetic oligonucleotide
accagccgaauugaguccu

SEQ ID NO: 3038325 - RNA, 19 nt, Artificial Sequence
  Description of Artificial Sequence: Synthetic oligonucleotide
aagcacucagccacccaca

SEQ ID NO: 3038326 - RNA, 19 nt, Artificial Sequence
  Description of Artificial Sequence: Synthetic oligonucleotide
gccauggcaaucuucugga

SEQ ID NO: 3038327 - RNA, 19 nt, Artificial Sequence
  Description of Artificial Sequence: Synthetic oligonucleotide
gcaaauccuauggcugugg

SEQ ID NO: 3038328 - RNA, 19 nt, Artificial Sequence
  Description of Artificial Sequence: Synthetic oligonucleotide
cucuuaagggaaggaagga

SEQ ID NO: 3038329 - RNA, 19 nt, Artificial Sequence
  Description of Artificial Sequence: Synthetic oligonucleotide
ccacaaaguauacaggcaa

SEQ ID NO: 3038330 - RNA, 19 nt, Artificial Sequence
  Description of Artificial Sequence: Synthetic oligonucleotide
ugccgacugggcucaacaa

SEQ ID NO: 3038331 - RNA, 19 nt, Artificial Sequence
  Description of Artificial Sequence: Synthetic oligonucleotide
uggccauggcaaucuucug

SEQ ID NO: 3038332 - RNA, 19 nt, Artificial Sequence
  Description of Artificial Sequence: Synthetic oligonucleotide
acacccucauuuguucacu

SEQ ID NO: 3038333 - RNA, 19 nt, Artificial Sequence
  Description of Artificial Sequence: Synthetic oligonucleotide
cagccacccacaauaaugu

SEQ ID NO: 3038334 - RNA, 19 nt, Artificial Sequence
  Description of Artificial Sequence: Synthetic oligonucleotide
cuucuggaauucuuuucua

SEQ ID NO: 3038335 - RNA, 19 nt, Artificial Sequence
  Description of Artificial Sequence: Synthetic oligonucleotide
gccaaugaaucccaugaua

SEQ ID NO: 3038336 - RNA, 19 nt, Artificial Sequence
  Description of Artificial Sequence: Synthetic oligonucleotide
caaucuucuggaauucuuu

SEQ ID NO: 3038337 - RNA, 19 nt, Artificial Sequence
  Description of Artificial Sequence: Synthetic oligonucleotide
acugcauuaccugguccau

SEQ ID NO: 3038338 - RNA, 19 nt, Artificial Sequence
  Description of Artificial Sequence: Synthetic oligonucleotide
cauggcaaucuucuggaau

SEQ ID NO: 3038339 - RNA, 19 nt, Artificial Sequence
  Description of Artificial Sequence: Synthetic oligonucleotide
ugggcucaacaaacugcau

SEQ ID NO: 3038340 - RNA, 19 nt, Artificial Sequence
  Description of Artificial Sequence: Synthetic oligonucleotide
cacgaagauaaagcacuca

SEQ ID NO: 3038341 - RNA, 19 nt, Artificial Sequence
  Description of Artificial Sequence: Synthetic oligonucleotide
cugccgacugggcucaaca

SEQ ID NO: 3038342 - RNA, 19 nt, Artificial Sequence
  Description of Artificial Sequence: Synthetic oligonucleotide
ucuaucggguuuggugcau

SEQ ID NO: 3038343 - RNA, 19 nt, Artificial Sequence
  Description of Artificial Sequence: Synthetic oligonucleotide
ccgaauugaguccuugaca

SEQ ID NO: 3038344 - RNA, 19 nt, Artificial Sequence
  Description of Artificial Sequence: Synthetic oligonucleotide
ggauauggaugaguuucac

SEQ ID NO: 3038345 - RNA, 19 nt, Artificial Sequence
  Description of Artificial Sequence: Synthetic oligonucleotide
gcuucucacacccucauuu

SEQ ID NO: 3038346 - RNA, 19 nt, Artificial Sequence
  Description of Artificial Sequence: Synthetic oligonucleotide
cccaugauagcaaauccua

SEQ ID NO: 3038347 - RNA, 19 nt, Artificial Sequence
  Description of Artificial Sequence: Synthetic oligonucleotide
cugcauuaccugguccaug

SEQ ID NO: 3038348 - RNA, 19 nt, Artificial Sequence
  Description of Artificial Sequence: Synthetic oligonucleotide
guucacuaguucccacgaa

SEQ ID NO: 3038349 - RNA, 19 nt, Artificial Sequence
  Description of Artificial Sequence: Synthetic oligonucleotide
uccuauggcuguggccaug

SEQ ID NO: 3038350 - RNA, 19 nt, Artificial Sequence
  Description of Artificial Sequence: Synthetic oligonucleotide
acugccgacugggcucaac

SEQ ID NO: 3038351 - RNA, 19 nt, Artificial Sequence
  Description of Artificial Sequence: Synthetic oligonucleotide
ccuauggcuguggccaugg

SEQ ID NO: 3038352 - RNA, 19 nt, Artificial Sequence
  Description of Artificial Sequence: Synthetic oligonucleotide
cuauggcuguggccauggc

SEQ ID NO: 3038353 - RNA, 19 nt, Artificial Sequence
  Description of Artificial Sequence: Synthetic oligonucleotide
cuaucggguuuggugcauc

SEQ ID NO: 3038354 - RNA, 19 nt, Artificial Sequence
  Description of Artificial Sequence: Synthetic oligonucleotide
cauuaccugguccaugguu

SEQ ID NO: 3038355 - RNA, 19 nt, Artificial Sequence
  Description of Artificial Sequence: Synthetic oligonucleotide
agcuucucacacccucauu

SEQ ID NO: 3038356 - RNA, 19 nt, Artificial Sequence
  Description of Artificial Sequence: Synthetic oligonucleotide
auccuauggcuguggccau

SEQ ID NO: 3038357 - RNA, 19 nt, Artificial Sequence
  Description of Artificial Sequence: Synthetic oligonucleotide
agccacccacaauaauguu

SEQ ID NO: 3038358 - RNA, 19 nt, Artificial Sequence
  Description of Artificial Sequence: Synthetic oligonucleotide
cagccgaauugaguccuug

SEQ ID NO: 3038359 - RNA, 19 nt, Artificial Sequence
  Description of Artificial Sequence: Synthetic oligonucleotide
gggauauggaugaguuuca

SEQ ID NO: 3038360 - RNA, 19 nt, Artificial Sequence
  Description of Artificial Sequence: Synthetic oligonucleotide
caaaguauacaggcaacuu

SEQ ID NO: 3038361 - RNA, 19 nt, Artificial Sequence
  Description of Artificial Sequence: Synthetic oligonucleotide
uaguucccacgaagauaaa

SEQ ID NO: 3038362 - RNA, 19 nt, Artificial Sequence
  Description of Artificial Sequence: Synthetic oligonucleotide
agaagccaaugaaucccau

SEQ ID NO: 3038363 - RNA, 19 nt, Artificial Sequence
  Description of Artificial Sequence: Synthetic oligonucleotide
gcucaacaaacugcauuac

SEQ ID NO: 3038364 - RNA, 19 nt, Artificial Sequence
  Description of Artificial Sequence: Synthetic oligonucleotide
uggcuguggccauggcaau

SEQ ID NO: 3038365 - RNA, 19 nt, Artificial Sequence
  Description of Artificial Sequence: Synthetic oligonucleotide
acucagccacccacaauaa

SEQ ID NO: 3038366 - RNA, 19 nt, Artificial Sequence
  Description of Artificial Sequence: Synthetic oligonucleotide
gagcuucucacacccucau

SEQ ID NO: 3038367 - RNA, 19 nt, Artificial Sequence
  Description of Artificial Sequence: Synthetic oligonucleotide
gaaucccaugauagcaaau

SEQ ID NO: 3038368 - RNA, 19 nt, Artificial Sequence
  Description of Artificial Sequence: Synthetic oligonucleotide
cacuaguucccacgaagau

SEQ ID NO: 3038369 - RNA, 19 nt, Artificial Sequence
  Description of Artificial Sequence: Synthetic oligonucleotide
gccacccacaauaauguua

SEQ ID NO: 3038370 - RNA, 19 nt, Artificial Sequence
  Description of Artificial Sequence: Synthetic oligonucleotide
gccgacugggcucaacaaa

SEQ ID NO: 3038371 - RNA, 19 nt, Artificial Sequence
  Description of Artificial Sequence: Synthetic oligonucleotide
gggcucaacaaacugcauu

SEQ ID NO: 3038372 - RNA, 19 nt, Artificial Sequence
  Description of Artificial Sequence: Synthetic oligonucleotide
cacccucauuuguucacua

SEQ ID NO: 3038373 - RNA, 19 nt, Artificial Sequence
  Description of Artificial Sequence: Synthetic oligonucleotide
aucggguuuggugcaucuu

SEQ ID NO: 3038374 - RNA, 19 nt, Artificial Sequence
  Description of Artificial Sequence: Synthetic oligonucleotide
ccacaauaauguuauuaau

SEQ ID NO: 3038375 - RNA, 19 nt, Artificial Sequence
  Description of Artificial Sequence: Synthetic oligonucleotide
guuucacaaagaagccaau

SEQ ID NO: 3038376 - RNA, 19 nt, Artificial Sequence
  Description of Artificial Sequence: Synthetic oligonucleotide
caugagcuucucacacccu

SEQ ID NO: 3038377 - RNA, 19 nt, Artificial Sequence
  Description of Artificial Sequence: Synthetic oligonucleotide
ccucauuuguucacuaguu

SEQ ID NO: 3038378 - RNA, 19 nt, Artificial Sequence
  Description of Artificial Sequence: Synthetic oligonucleotide
cuuuucuaucggguuuggu

SEQ ID NO: 3038379 - RNA, 19 nt, Artificial Sequence
  Description of Artificial Sequence: Synthetic oligonucleotide
gcuguggccauggcaaucu

SEQ ID NO: 3038380 - RNA, 19 nt, Artificial Sequence
  Description of Artificial Sequence: Synthetic oligonucleotide
ccaugauagcaaauccuau

SEQ ID NO: 3038381 - RNA, 19 nt, Artificial Sequence
  Description of Artificial Sequence: Synthetic oligonucleotide
ggcaaucuucuggaauucu

SEQ ID NO: 3038382 - RNA, 19 nt, Artificial Sequence
  Description of Artificial Sequence: Synthetic oligonucleotide
cucagccacccacaauaau

SEQ ID NO: 3038383 - RNA, 19 nt, Artificial Sequence
  Description of Artificial Sequence: Synthetic oligonucleotide
gcauuaccugguccauggu

SEQ ID NO: 3038384 - RNA, 19 nt, Artificial Sequence
  Description of Artificial Sequence: Synthetic oligonucleotide
ccauggcaaucuucuggaa

SEQ ID NO: 3038385 - RNA, 19 nt, Artificial Sequence
  Description of Artificial Sequence: Synthetic oligonucleotide
ccuugacaaacugccgacu

SEQ ID NO: 3038386 - RNA, 19 nt, Artificial Sequence
  Description of Artificial Sequence: Synthetic oligonucleotide
gcacucagccacccacaau

SEQ ID NO: 3038387 - RNA, 19 nt, Artificial Sequence
  Description of Artificial Sequence: Synthetic oligonucleotide
cgacugggcucaacaaacu

SEQ ID NO: 3038388 - RNA, 19 nt, Artificial Sequence
  Description of Artificial Sequence: Synthetic oligonucleotide
cuguggccauggcaaucuu

SEQ ID NO: 3038389 - RNA, 19 nt, Artificial Sequence
  Description of Artificial Sequence: Synthetic oligonucleotide
cggguuuggugcaucuuuu

SEQ ID NO: 3038390 - RNA, 19 nt, Artificial Sequence
  Description of Artificial Sequence: Synthetic oligonucleotide
ccagccgaauugaguccuu

SEQ ID NO: 3038391 - RNA, 19 nt, Artificial Sequence
  Description of Artificial Sequence: Synthetic oligonucleotide
aauauaaucucuuacaguc

SEQ ID NO: 3038392 - RNA, 19 nt, Artificial Sequence
  Description of Artificial Sequence: Synthetic oligonucleotide
uauauaagcaguuagaagc

SEQ ID NO: 3038393 - RNA, 19 nt, Artificial Sequence
  Description of Artificial Sequence: Synthetic oligonucleotide
auuuccuccauauauaagc

SEQ ID NO: 3038394 - RNA, 19 nt, Artificial Sequence
  Description of Artificial Sequence: Synthetic oligonucleotide
gaaacaaagacugagcccg

SEQ ID NO: 3038395 - RNA, 19 nt, Artificial Sequence
  Description of Artificial Sequence: Synthetic oligonucleotide
ugaauauaaucucuuacag

SEQ ID NO: 3038396 - RNA, 19 nt, Artificial Sequence
  Description of Artificial Sequence: Synthetic oligonucleotide
uuuaggagcauguuggagg

SEQ ID NO: 3038397 - RNA, 19 nt, Artificial Sequence
  Description of Artificial Sequence: Synthetic oligonucleotide
aaugaggucuucaucaugc

SEQ ID NO: 3038398 - RNA, 19 nt, Artificial Sequence
  Description of Artificial Sequence: Synthetic oligonucleotide
acugaauauaaucucuuac

SEQ ID NO: 3038399 - RNA, 19 nt, Artificial Sequence
  Description of Artificial Sequence: Synthetic oligonucleotide
uccauauauaagcaguuag

SEQ ID NO: 3038400 - RNA, 19 nt, Artificial Sequence
  Description of Artificial Sequence: Synthetic oligonucleotide
aauucuccuggccaagccc

SEQ ID NO: 3038401 - RNA, 19 nt, Artificial Sequence
  Description of Artificial Sequence: Synthetic oligonucleotide
agaaacaaagacugagccc

SEQ ID NO: 3038402 - RNA, 19 nt, Artificial Sequence
  Description of Artificial Sequence: Synthetic oligonucleotide
uucucagucuccauggugg

SEQ ID NO: 3038403 - RNA, 19 nt, Artificial Sequence
  Description of Artificial Sequence: Synthetic oligonucleotide
agcaguuagaagcauaguc

SEQ ID NO: 3038404 - RNA, 19 nt, Artificial Sequence
  Description of Artificial Sequence: Synthetic oligonucleotide
uaagcaguuagaagcauag

SEQ ID NO: 3038405 - RNA, 19 nt, Artificial Sequence
  Description of Artificial Sequence: Synthetic oligonucleotide
agaagcauaguccacgaag

SEQ ID NO: 3038406 - RNA, 19 nt, Artificial Sequence
  Description of Artificial Sequence: Synthetic oligonucleotide
uccacgaagaagacaaccg

SEQ ID NO: 3038407 - RNA, 19 nt, Artificial Sequence
  Description of Artificial Sequence: Synthetic oligonucleotide
auauauaagcaguuagaag

SEQ ID NO: 3038408 - RNA, 19 nt, Artificial Sequence
  Description of Artificial Sequence: Synthetic oligonucleotide
aaagacugagcccgaaguc

SEQ ID NO: 3038409 - RNA, 19 nt, Artificial Sequence
  Description of Artificial Sequence: Synthetic oligonucleotide
uucgauuuccuccauauau

SEQ ID NO: 3038410 - RNA, 19 nt, Artificial Sequence
  Description of Artificial Sequence: Synthetic oligonucleotide
uucaucaugcauccuagcc

SEQ ID NO: 3038411 - RNA, 19 nt, Artificial Sequence
  Description of Artificial Sequence: Synthetic oligonucleotide
aucucuuacagucacugag

SEQ ID NO: 3038412 - RNA, 19 nt, Artificial Sequence
  Description of Artificial Sequence: Synthetic oligonucleotide
ugagucuucgauuuccucc

SEQ ID NO: 3038413 - RNA, 19 nt, Artificial Sequence
  Description of Artificial Sequence: Synthetic oligonucleotide
uaguccacgaagaagacaa

SEQ ID NO: 3038414 - RNA, 19 nt, Artificial Sequence
  Description of Artificial Sequence: Synthetic oligonucleotide
uggcaguccagaaacaaag

SEQ ID NO: 3038415 - RNA, 19 nt, Artificial Sequence
  Description of Artificial Sequence: Synthetic oligonucleotide
aggucuucaucaugcaucc

SEQ ID NO: 3038416 - RNA, 19 nt, Artificial Sequence
  Description of Artificial Sequence: Synthetic oligonucleotide
cagaaacaaagacugagcc

SEQ ID NO: 3038417 - RNA, 19 nt, Artificial Sequence
  Description of Artificial Sequence: Synthetic oligonucleotide
ucaucaugcauccuagcca

SEQ ID NO: 3038418 - RNA, 19 nt, Artificial Sequence
  Description of Artificial Sequence: Synthetic oligonucleotide
gaugaugugcagcugcucc

SEQ ID NO: 3038419 - RNA, 19 nt, Artificial Sequence
  Description of Artificial Sequence: Synthetic oligonucleotide
ucuucaucaugcauccuag

SEQ ID NO: 3038420 - RNA, 19 nt, Artificial Sequence
  Description of Artificial Sequence: Synthetic oligonucleotide
uccagaaacaaagacugag

SEQ ID NO: 3038421 - RNA, 19 nt, Artificial Sequence
  Description of Artificial Sequence: Synthetic oligonucleotide
guuagaagcauaguccacg

SEQ ID NO: 3038422 - RNA, 19 nt, Artificial Sequence
  Description of Artificial Sequence: Synthetic oligonucleotide
uccuccauauauaagcagu

SEQ ID NO: 3038423 - RNA, 19 nt, Artificial Sequence
  Description of Artificial Sequence: Synthetic oligonucleotide
gaugcagcuuaguugguag

SEQ ID NO: 3038424 - RNA, 19 nt, Artificial Sequence
  Description of Artificial Sequence: Synthetic oligonucleotide
aagaagacaaccggggcag

SEQ ID NO: 3038425 - RNA, 19 nt, Artificial Sequence
  Description of Artificial Sequence: Synthetic oligonucleotide
gugaaugaggucuucauca

SEQ ID NO: 3038426 - RNA, 19 nt, Artificial Sequence
  Description of Artificial Sequence: Synthetic oligonucleotide
uggacugaauauaaucucu

SEQ ID NO: 3038427 - RNA, 19 nt, Artificial Sequence
  Description of Artificial Sequence: Synthetic oligonucleotide
ucguucucagucuccaugg

SEQ ID NO: 3038428 - RNA, 19 nt, Artificial Sequence
  Description of Artificial Sequence: Synthetic oligonucleotide
uggccaagccccaagaggc

SEQ ID NO: 3038429 - RNA, 19 nt, Artificial Sequence
  Description of Artificial Sequence: Synthetic oligonucleotide
uaaucucuuacagucacug

SEQ ID NO: 3038430 - RNA, 19 nt, Artificial Sequence
  Description of Artificial Sequence: Synthetic oligonucleotide
ucgaugaggaugaugugca

SEQ ID NO: 3038431 - RNA, 19 nt, Artificial Sequence
  Description of Artificial Sequence: Synthetic oligonucleotide
cugaauauaaucucuuaca

SEQ ID NO: 3038432 - RNA, 19 nt, Artificial Sequence
  Description of Artificial Sequence: Synthetic oligonucleotide
uuuccuccauauauaagca

SEQ ID NO: 3038433 - RNA, 19 nt, Artificial Sequence
  Description of Artificial Sequence: Synthetic oligonucleotide
caucaugcauccuagccag

SEQ ID NO: 3038434 - RNA, 19 nt, Artificial Sequence
  Description of Artificial Sequence: Synthetic oligonucleotide
uaguugguagaugaggaag

SEQ ID NO: 3038435 - RNA, 19 nt, Artificial Sequence
  Description of Artificial Sequence: Synthetic oligonucleotide
cacgaagaagacaaccggg

SEQ ID NO: 3038436 - RNA, 19 nt, Artificial Sequence
  Description of Artificial Sequence: Synthetic oligonucleotide
cuucuggcaguccagaaac

SEQ ID NO: 3038437 - RNA, 19 nt, Artificial Sequence
  Description of Artificial Sequence: Synthetic oligonucleotide
gaagaagacaaccggggca

SEQ ID NO: 3038438 - RNA, 19 nt, Artificial Sequence
  Description of Artificial Sequence: Synthetic oligonucleotide
augaggaugaugugcagcu

SEQ ID NO: 3038439 - RNA, 19 nt, Artificial Sequence
  Description of Artificial Sequence: Synthetic oligonucleotide
gaggaugaugugcagcugc

SEQ ID NO: 3038440 - RNA, 19 nt, Artificial Sequence
  Description of Artificial Sequence: Synthetic oligonucleotide
ugugcagcugcuccagggg

SEQ ID NO: 3038441 - RNA, 19 nt, Artificial Sequence
  Description of Artificial Sequence: Synthetic oligonucleotide
cuuaguugguagaugagga

SEQ ID NO: 3038442 - RNA, 19 nt, Artificial Sequence
  Description of Artificial Sequence: Synthetic oligonucleotide
ucuucgauuuccuccauau

SEQ ID NO: 3038443 - RNA, 19 nt, Artificial Sequence
  Description of Artificial Sequence: Synthetic oligonucleotide
ucucuuacagucacugagu

SEQ ID NO: 3038444 - RNA, 19 nt, Artificial Sequence
  Description of Artificial Sequence: Synthetic oligonucleotide
ugguggacugaauauaauc

SEQ ID NO: 3038445 - RNA, 19 nt, Artificial Sequence
  Description of Artificial Sequence: Synthetic oligonucleotide
uuagaagcauaguccacga

SEQ ID NO: 3038446 - RNA, 19 nt, Artificial Sequence
  Description of Artificial Sequence: Synthetic oligonucleotide
ucaugcauccuagccaggg

SEQ ID NO: 3038447 - RNA, 19 nt, Artificial Sequence
  Description of Artificial Sequence: Synthetic oligonucleotide
aguugguagaugaggaagg

SEQ ID NO: 3038448 - RNA, 19 nt, Artificial Sequence
  Description of Artificial Sequence: Synthetic oligonucleotide
cguuuuaggagcauguugg

SEQ ID NO: 3038449 - RNA, 19 nt, Artificial Sequence
  Description of Artificial Sequence: Synthetic oligonucleotide
uuuuaggagcauguuggag

SEQ ID NO: 3038450 - RNA, 19 nt, Artificial Sequence
  Description of Artificial Sequence: Synthetic oligonucleotide
augcauccuagccaggguc

SEQ ID NO: 3038451 - RNA, 19 nt, Artificial Sequence
  Description of Artificial Sequence: Synthetic oligonucleotide
auucuccuggccaagcccc

SEQ ID NO: 3038452 - RNA, 19 nt, Artificial Sequence
  Description of Artificial Sequence: Synthetic oligonucleotide
aggagcauguuggaggugg

SEQ ID NO: 3038453 - RNA, 19 nt, Artificial Sequence
  Description of Artificial Sequence: Synthetic oligonucleotide
acaaccggggcagcuaucc

SEQ ID NO: 3038454 - RNA, 19 nt, Artificial Sequence
  Description of Artificial Sequence: Synthetic oligonucleotide
ugcccaauucuccuggcca

SEQ ID NO: 3038455 - RNA, 19 nt, Artificial Sequence
  Description of Artificial Sequence: Synthetic oligonucleotide
aaucucuuacagucacuga

SEQ ID NO: 3038456 - RNA, 19 nt, Artificial Sequence
  Description of Artificial Sequence: Synthetic oligonucleotide
gaugaggaugaugugcagc

SEQ ID NO: 3038457 - RNA, 19 nt, Artificial Sequence
  Description of Artificial Sequence: Synthetic oligonucleotide
uuccuccauauauaagcag

SEQ ID NO: 3038458 - RNA, 19 nt, Artificial Sequence
  Description of Artificial Sequence: Synthetic oligonucleotide
acgaagaagacaaccgggg

SEQ ID NO: 3038459 - RNA, 19 nt, Artificial Sequence
  Description of Artificial Sequence: Synthetic oligonucleotide
gaggucuucaucaugcauc

SEQ ID NO: 3038460 - RNA, 19 nt, Artificial Sequence
  Description of Artificial Sequence: Synthetic oligonucleotide
gaagcauaguccacgaaga

SEQ ID NO: 3038461 - RNA, 19 nt, Artificial Sequence
  Description of Artificial Sequence: Synthetic oligonucleotide
ucuucuggcaguccagaaa

SEQ ID NO: 3038462 - RNA, 19 nt, Artificial Sequence
  Description of Artificial Sequence: Synthetic oligonucleotide
acaaagacugagcccgaag

SEQ ID NO: 3038463 - RNA, 19 nt, Artificial Sequence
  Description of Artificial Sequence: Synthetic oligonucleotide
cauauauaagcaguuagaa

SEQ ID NO: 3038464 - RNA, 19 nt, Artificial Sequence
  Description of Artificial Sequence: Synthetic oligonucleotide
gaaugaggucuucaucaug

SEQ ID NO: 3038465 - RNA, 19 nt, Artificial Sequence
  Description of Artificial Sequence: Synthetic oligonucleotide
ucgauuuccuccauauaua

SEQ ID NO: 3038466 - RNA, 19 nt, Artificial Sequence
  Description of Artificial Sequence: Synthetic oligonucleotide
gcaguuagaagcauagucc

SEQ ID NO: 3038467 - RNA, 19 nt, Artificial Sequence
  Description of Artificial Sequence: Synthetic oligonucleotide
agcauaguccacgaagaag

SEQ ID NO: 3038468 - RNA, 19 nt, Artificial Sequence
  Description of Artificial Sequence: Synthetic oligonucleotide
gucgaugaggaugaugugc

SEQ ID NO: 3038469 - RNA, 19 nt, Artificial Sequence
  Description of Artificial Sequence: Synthetic oligonucleotide
auauaagcaguuagaagca

SEQ ID NO: 3038470 - RNA, 19 nt, Artificial Sequence
  Description of Artificial Sequence: Synthetic oligonucleotide
agccccaagaggcacuggg

SEQ ID NO: 3038471 - RNA, 19 nt, Artificial Sequence
  Description of Artificial Sequence: Synthetic oligonucleotide
ucagucuccaugguggacu

SEQ ID NO: 3038472 - RNA, 19 nt, Artificial Sequence
  Description of Artificial Sequence: Synthetic oligonucleotide
uuaguugguagaugaggaa

SEQ ID NO: 3038473 - RNA, 19 nt, Artificial Sequence
  Description of Artificial Sequence: Synthetic oligonucleotide
gauuuccuccauauauaag

SEQ ID NO: 3038474 - RNA, 19 nt, Artificial Sequence
  Description of Artificial Sequence: Synthetic oligonucleotide
aaccggggcagcuaucccu

SEQ ID NO: 3038475 - RNA, 19 nt, Artificial Sequence
  Description of Artificial Sequence: Synthetic oligonucleotide
guggacugaauauaaucuc

SEQ ID NO: 3038476 - RNA, 19 nt, Artificial Sequence
  Description of Artificial Sequence: Synthetic oligonucleotide
ucuuacagucacugagucu

SEQ ID NO: 3038477 - RNA, 19 nt, Artificial Sequence
  Description of Artificial Sequence: Synthetic oligonucleotide
gcuuaguugguagaugagg

SEQ ID NO: 3038478 - RNA, 19 nt, Artificial Sequence
  Description of Artificial Sequence: Synthetic oligonucleotide
gucguucucagucuccaug

SEQ ID NO: 3038479 - RNA, 19 nt, Artificial Sequence
  Description of Artificial Sequence: Synthetic oligonucleotide
ugcauccuagccagggucu

SEQ ID NO: 3038480 - RNA, 19 nt, Artificial Sequence
  Description of Artificial Sequence: Synthetic oligonucleotide
uccaggggccguuuuagga

SEQ ID NO: 3038481 - RNA, 19 nt, Artificial Sequence
  Description of Artificial Sequence: Synthetic oligonucleotide
aagcauaguccacgaagaa

SEQ ID NO: 3038482 - RNA, 19 nt, Artificial Sequence
  Description of Artificial Sequence: Synthetic oligonucleotide
uacagucacugagucuucg

SEQ ID NO: 3038483 - RNA, 19 nt, Artificial Sequence
  Description of Artificial Sequence: Synthetic oligonucleotide
ugaaugaggucuucaucau

SEQ ID NO: 3038484 - RNA, 19 nt, Artificial Sequence
  Description of Artificial Sequence: Synthetic oligonucleotide
gucugcccaauucuccugg

SEQ ID NO: 3038485 - RNA, 19 nt, Artificial Sequence
  Description of Artificial Sequence: Synthetic oligonucleotide
ugaggucuucaucaugcau

SEQ ID NO: 3038486 - RNA, 19 nt, Artificial Sequence
  Description of Artificial Sequence: Synthetic oligonucleotide
uuggagguggugagguccc

SEQ ID NO: 3038487 - RNA, 19 nt, Artificial Sequence
  Description of Artificial Sequence: Synthetic oligonucleotide
uugguagaugaggaaggcc

SEQ ID NO: 3038488 - RNA, 19 nt, Artificial Sequence
  Description of Artificial Sequence: Synthetic oligonucleotide
cucuuacagucacugaguc

SEQ ID NO: 3038489 - RNA, 19 nt, Artificial Sequence
  Description of Artificial Sequence: Synthetic oligonucleotide
cagcuuaguugguagauga

SEQ ID NO: 3038490 - RNA, 19 nt, Artificial Sequence
  Description of Artificial Sequence: Synthetic oligonucleotide
ccagaaacaaagacugagc

SEQ ID NO: 3038491 - RNA, 19 nt, Artificial Sequence
  Description of Artificial Sequence: Synthetic oligonucleotide
caauucuccuggccaagcc

SEQ ID NO: 3038492 - RNA, 19 nt, Artificial Sequence
  Description of Artificial Sequence: Synthetic oligonucleotide
cacugagucuucgauuucc

SEQ ID NO: 3038493 - RNA, 19 nt, Artificial Sequence
  Description of Artificial Sequence: Synthetic oligonucleotide
auccuagccagggucugcc

SEQ ID NO: 3038494 - RNA, 19 nt, Artificial Sequence
  Description of Artificial Sequence: Synthetic oligonucleotide
agcauguuggaggugguga

SEQ ID NO: 3038495 - RNA, 19 nt, Artificial Sequence
  Description of Artificial Sequence: Synthetic oligonucleotide
auauaaucucuuacaguca

SEQ ID NO: 3038496 - RNA, 19 nt, Artificial Sequence
  Description of Artificial Sequence: Synthetic oligonucleotide
cauaguccacgaagaagac

SEQ ID NO: 3038497 - RNA, 19 nt, Artificial Sequence
  Description of Artificial Sequence: Synthetic oligonucleotide
guccacgaagaagacaacc

SEQ ID NO: 3038498 - RNA, 19 nt, Artificial Sequence
  Description of Artificial Sequence: Synthetic oligonucleotide
ucuggcaguccagaaacaa

SEQ ID NO: 3038499 - RNA, 19 nt, Artificial Sequence
  Description of Artificial Sequence: Synthetic oligonucleotide
cuucaucaugcauccuagc

SEQ ID NO: 3038500 - RNA, 19 nt, Artificial Sequence
  Description of Artificial Sequence: Synthetic oligonucleotide
augaugugcagcugcucca

SEQ ID NO: 3038501 - RNA, 19 nt, Artificial Sequence
  Description of Artificial Sequence: Synthetic oligonucleotide
agggucugcccaauucucc

SEQ ID NO: 3038502 - RNA, 19 nt, Artificial Sequence
  Description of Artificial Sequence: Synthetic oligonucleotide
guugguagaugaggaaggc

SEQ ID NO: 3038503 - RNA, 19 nt, Artificial Sequence
  Description of Artificial Sequence: Synthetic oligonucleotide
gucuucaucaugcauccua

SEQ ID NO: 3038504 - RNA, 19 nt, Artificial Sequence
  Description of Artificial Sequence: Synthetic oligonucleotide
uaucuucuggcaguccaga

SEQ ID NO: 3038505 - RNA, 19 nt, Artificial Sequence
  Description of Artificial Sequence: Synthetic oligonucleotide
ggugagguccccgugaaug

SEQ ID NO: 3038506 - RNA, 19 nt, Artificial Sequence
  Description of Artificial Sequence: Synthetic oligonucleotide
agucacugagucuucgauu

SEQ ID NO: 3038507 - RNA, 19 nt, Artificial Sequence
  Description of Artificial Sequence: Synthetic oligonucleotide
uauaagcaguuagaagcau

SEQ ID NO: 3038508 - RNA, 19 nt, Artificial Sequence
  Description of Artificial Sequence: Synthetic oligonucleotide
ugagcccgaagucgaugag

SEQ ID NO: 3038509 - RNA, 19 nt, Artificial Sequence
  Description of Artificial Sequence: Synthetic oligonucleotide
cuuacagucacugagucuu

SEQ ID NO: 3038510 - RNA, 19 nt, Artificial Sequence
  Description of Artificial Sequence: Synthetic oligonucleotide
guuuuaggagcauguugga

SEQ ID NO: 3038511 - RNA, 19 nt, Artificial Sequence
  Description of Artificial Sequence: Synthetic oligonucleotide
ccacgaagaagacaaccgg

SEQ ID NO: 3038512 - RNA, 19 nt, Artificial Sequence
  Description of Artificial Sequence: Synthetic oligonucleotide
uagaugaggaaggccuucu

SEQ ID NO: 3038513 - RNA, 19 nt, Artificial Sequence
  Description of Artificial Sequence: Synthetic oligonucleotide
ugcagcuuaguugguagau

SEQ ID NO: 3038514 - RNA, 19 nt, Artificial Sequence
  Description of Artificial Sequence: Synthetic oligonucleotide
caggggccguuuuaggagc

SEQ ID NO: 3038515 - RNA, 19 nt, Artificial Sequence
  Description of Artificial Sequence: Synthetic oligonucleotide
auguuggagguggugaggu

SEQ ID NO: 3038516 - RNA, 19 nt, Artificial Sequence
  Description of Artificial Sequence: Synthetic oligonucleotide
caguccagaaacaaagacu

SEQ ID NO: 3038517 - RNA, 19 nt, Artificial Sequence
  Description of Artificial Sequence: Synthetic oligonucleotide
agucgaugaggaugaugug

SEQ ID NO: 3038518 - RNA, 19 nt, Artificial Sequence
  Description of Artificial Sequence: Synthetic oligonucleotide
auaguccacgaagaagaca

SEQ ID NO: 3038519 - RNA, 19 nt, Artificial Sequence
  Description of Artificial Sequence: Synthetic oligonucleotide
acagucacugagucuucga

SEQ ID NO: 3038520 - RNA, 19 nt, Artificial Sequence
  Description of Artificial Sequence: Synthetic oligonucleotide
gagguccccgugaaugagg

SEQ ID NO: 3038521 - RNA, 19 nt, Artificial Sequence
  Description of Artificial Sequence: Synthetic oligonucleotide
ccauauauaagcaguuaga

SEQ ID NO: 3038522 - RNA, 19 nt, Artificial Sequence
  Description of Artificial Sequence: Synthetic oligonucleotide
uucuggcaguccagaaaca

SEQ ID NO: 3038523 - RNA, 19 nt, Artificial Sequence
  Description of Artificial Sequence: Synthetic oligonucleotide
uagaagcauaguccacgaa

SEQ ID NO: 3038524 - RNA, 19 nt, Artificial Sequence
  Description of Artificial Sequence: Synthetic oligonucleotide
aagcaguuagaagcauagu

SEQ ID NO: 3038525 - RNA, 19 nt, Artificial Sequence
  Description of Artificial Sequence: Synthetic oligonucleotide
uccuggccaagccccaaga

SEQ ID NO: 3038526 - RNA, 19 nt, Artificial Sequence
  Description of Artificial Sequence: Synthetic oligonucleotide
caaagacugagcccgaagu

SEQ ID NO: 3038527 - RNA, 19 nt, Artificial Sequence
  Description of Artificial Sequence: Synthetic oligonucleotide
gucacugagucuucgauuu

SEQ ID NO: 3038528 - RNA, 19 nt, Artificial Sequence
  Description of Artificial Sequence: Synthetic oligonucleotide
ucugcccaauucuccuggc

SEQ ID NO: 3038529 - RNA, 19 nt, Artificial Sequence
  Description of Artificial Sequence: Synthetic oligonucleotide
gcauguuggagguggugag

SEQ ID NO: 3038530 - RNA, 19 nt, Artificial Sequence
  Description of Artificial Sequence: Synthetic oligonucleotide
uuacagucacugagucuuc

SEQ ID NO: 3038531 - RNA, 19 nt, Artificial Sequence
  Description of Artificial Sequence: Synthetic oligonucleotide
agaagacaaccggggcagc

SEQ ID NO: 3038532 - RNA, 19 nt, Artificial Sequence
  Description of Artificial Sequence: Synthetic oligonucleotide
cugagcccgaagucgauga

SEQ ID NO: 3038533 - RNA, 19 nt, Artificial Sequence
  Description of Artificial Sequence: Synthetic oligonucleotide
gguggacugaauauaaucu

SEQ ID NO: 3038534 - RNA, 19 nt, Artificial Sequence
  Description of Artificial Sequence: Synthetic oligonucleotide
aacaaagacugagcccgaa

SEQ ID NO: 3038535 - RNA, 19 nt, Artificial Sequence
  Description of Artificial Sequence: Synthetic oligonucleotide
agacaaccggggcagcuau

SEQ ID NO: 3038536 - RNA, 19 nt, Artificial Sequence
  Description of Artificial Sequence: Synthetic oligonucleotide
ugaggaugaugugcagcug

SEQ ID NO: 3038537 - RNA, 19 nt, Artificial Sequence
  Description of Artificial Sequence: Synthetic oligonucleotide
auaagcaguuagaagcaua

SEQ ID NO: 3038538 - RNA, 19 nt, Artificial Sequence
  Description of Artificial Sequence: Synthetic oligonucleotide
augcagcuuaguugguaga

SEQ ID NO: 3038539 - RNA, 19 nt, Artificial Sequence
  Description of Artificial Sequence: Synthetic oligonucleotide
cugagucuucgauuuccuc

SEQ ID NO: 3038540 - RNA, 19 nt, Artificial Sequence
  Description of Artificial Sequence: Synthetic oligonucleotide
agcccgaagucgaugagga

SEQ ID NO: 3038541 - RNA, 19 nt, Artificial Sequence
  Description of Artificial Sequence: Synthetic oligonucleotide
aaacaaagacugagcccga

SEQ ID NO: 3038542 - RNA, 19 nt, Artificial Sequence
  Description of Artificial Sequence: Synthetic oligonucleotide
agcuuaguugguagaugag

SEQ ID NO: 3038543 - RNA, 19 nt, Artificial Sequence
  Description of Artificial Sequence: Synthetic oligonucleotide
cugcccaauucuccuggcc

SEQ ID NO: 3038544 - RNA, 19 nt, Artificial Sequence
  Description of Artificial Sequence: Synthetic oligonucleotide
auaaucucuuacagucacu

SEQ ID NO: 3038545 - RNA, 19 nt, Artificial Sequence
  Description of Artificial Sequence: Synthetic oligonucleotide
cagggucugcccaauucuc

SEQ ID NO: 3038546 - RNA, 19 nt, Artificial Sequence
  Description of Artificial Sequence: Synthetic oligonucleotide
ucacugagucuucgauuuc

SEQ ID NO: 3038547 - RNA, 19 nt, Artificial Sequence
  Description of Artificial Sequence: Synthetic oligonucleotide
cuccaggggccguuuuagg

SEQ ID NO: 3038548 - RNA, 19 nt, Artificial Sequence
  Description of Artificial Sequence: Synthetic oligonucleotide
aagacaaccggggcagcua

SEQ ID NO: 3038549 - RNA, 19 nt, Artificial Sequence
  Description of Artificial Sequence: Synthetic oligonucleotide
aucuucuggcaguccagaa

SEQ ID NO: 3038550 - RNA, 19 nt, Artificial Sequence
  Description of Artificial Sequence: Synthetic oligonucleotide
ccguuuuaggagcauguug

SEQ ID NO: 3038551 - RNA, 19 nt, Artificial Sequence
  Description of Artificial Sequence: Synthetic oligonucleotide
uucuccuggccaagcccca

SEQ ID NO: 3038552 - RNA, 19 nt, Artificial Sequence
  Description of Artificial Sequence: Synthetic oligonucleotide
agacugagcccgaagucga

SEQ ID NO: 3038553 - RNA, 19 nt, Artificial Sequence
  Description of Artificial Sequence: Synthetic oligonucleotide
ccaggggccguuuuaggag

SEQ ID NO: 3038554 - RNA, 19 nt, Artificial Sequence
  Description of Artificial Sequence: Synthetic oligonucleotide
uguuggagguggugagguc

SEQ ID NO: 3038555 - RNA, 19 nt, Artificial Sequence
  Description of Artificial Sequence: Synthetic oligonucleotide
acugagcccgaagucgaug

SEQ ID NO: 3038556 - RNA, 19 nt, Artificial Sequence
  Description of Artificial Sequence: Synthetic oligonucleotide
cccgaagucgaugaggaug

SEQ ID NO: 3038557 - RNA, 19 nt, Artificial Sequence
  Description of Artificial Sequence: Synthetic oligonucleotide
aguccacgaagaagacaac

SEQ ID NO: 3038558 - RNA, 19 nt, Artificial Sequence
  Description of Artificial Sequence: Synthetic oligonucleotide
guagaugaggaaggccuuc

SEQ ID NO: 3038559 - RNA, 19 nt, Artificial Sequence
  Description of Artificial Sequence: Synthetic oligonucleotide
acugagucuucgauuuccu

SEQ ID NO: 3038560 - RNA, 19 nt, Artificial Sequence
  Description of Artificial Sequence: Synthetic oligonucleotide
guccccgugaaugaggucu

SEQ ID NO: 3038561 - RNA, 19 nt, Artificial Sequence
  Description of Artificial Sequence: Synthetic oligonucleotide
cuccaugguggacugaaua

SEQ ID NO: 3038562 - RNA, 19 nt, Artificial Sequence
  Description of Artificial Sequence: Synthetic oligonucleotide
ucuccaugguggacugaau

SEQ ID NO: 3038563 - RNA, 19 nt, Artificial Sequence
  Description of Artificial Sequence: Synthetic oligonucleotide
gagcauguuggagguggug

SEQ ID NO: 3038564 - RNA, 19 nt, Artificial Sequence
  Description of Artificial Sequence: Synthetic oligonucleotide
cuggcaguccagaaacaaa

SEQ ID NO: 3038565 - RNA, 19 nt, Artificial Sequence
  Description of Artificial Sequence: Synthetic oligonucleotide
ugcuccaggggccguuuua

SEQ ID NO: 3038566 - RNA, 19 nt, Artificial Sequence
  Description of Artificial Sequence: Synthetic oligonucleotide
aggaugaugugcagcugcu

SEQ ID NO: 3038567 - RNA, 19 nt, Artificial Sequence
  Description of Artificial Sequence: Synthetic oligonucleotide
uccuagccagggucugccc

SEQ ID NO: 3038568 - RNA, 19 nt, Artificial Sequence
  Description of Artificial Sequence: Synthetic oligonucleotide
cgaagaagacaaccggggc

SEQ ID NO: 3038569 - RNA, 19 nt, Artificial Sequence
  Description of Artificial Sequence: Synthetic oligonucleotide
gguggugagguccccguga

SEQ ID NO: 3038570 - RNA, 19 nt, Artificial Sequence
  Description of Artificial Sequence: Synthetic oligonucleotide
agguggugagguccccgug

SEQ ID NO: 3038571 - RNA, 19 nt, Artificial Sequence
  Description of Artificial Sequence: Synthetic oligonucleotide
gucuccaugguggacugaa

SEQ ID NO: 3038572 - RNA, 19 nt, Artificial Sequence
  Description of Artificial Sequence: Synthetic oligonucleotide
cauccuagccagggucugc

SEQ ID NO: 3038573 - RNA, 19 nt, Artificial Sequence
  Description of Artificial Sequence: Synthetic oligonucleotide
caagccccaagaggcacug

SEQ ID NO: 3038574 - RNA, 19 nt, Artificial Sequence
  Description of Artificial Sequence: Synthetic oligonucleotide
caaccggggcagcuauccc

SEQ ID NO: 3038575 - RNA, 19 nt, Artificial Sequence
  Description of Artificial Sequence: Synthetic oligonucleotide
aagccccaagaggcacugg

SEQ ID NO: 3038576 - RNA, 19 nt, Artificial Sequence
  Description of Artificial Sequence: Synthetic oligonucleotide
agguccccgugaaugaggu

SEQ ID NO: 3038577 - RNA, 19 nt, Artificial Sequence
  Description of Artificial Sequence: Synthetic oligonucleotide
ggucugcccaauucuccug

SEQ ID NO: 3038578 - RNA, 19 nt, Artificial Sequence
  Description of Artificial Sequence: Synthetic oligonucleotide
aucaugcauccuagccagg

SEQ ID NO: 3038579 - RNA, 19 nt, Artificial Sequence
  Description of Artificial Sequence: Synthetic oligonucleotide
cuagccagggucugcccaa

SEQ ID NO: 3038580 - RNA, 19 nt, Artificial Sequence
  Description of Artificial Sequence: Synthetic oligonucleotide
cucagucuccaugguggac

SEQ ID NO: 3038581 - RNA, 19 nt, Artificial Sequence
  Description of Artificial Sequence: Synthetic oligonucleotide
accggggcagcuaucccug

SEQ ID NO: 3038582 - RNA, 19 nt, Artificial Sequence
  Description of Artificial Sequence: Synthetic oligonucleotide
uccccgugaaugaggucuu

SEQ ID NO: 3038583 - RNA, 19 nt, Artificial Sequence
  Description of Artificial Sequence: Synthetic oligonucleotide
gaagacaaccggggcagcu

SEQ ID NO: 3038584 - RNA, 19 nt, Artificial Sequence
  Description of Artificial Sequence: Synthetic oligonucleotide
cuccauauauaagcaguua

SEQ ID NO: 3038585 - RNA, 19 nt, Artificial Sequence
  Description of Artificial Sequence: Synthetic oligonucleotide
cgugaaugaggucuucauc

SEQ ID NO: 3038586 - RNA, 19 nt, Artificial Sequence
  Description of Artificial Sequence: Synthetic oligonucleotide
uaggagcauguuggaggug

SEQ ID NO: 3038587 - RNA, 19 nt, Artificial Sequence
  Description of Artificial Sequence: Synthetic oligonucleotide
ggagguggugagguccccg

SEQ ID NO: 3038588 - RNA, 19 nt, Artificial Sequence
  Description of Artificial Sequence: Synthetic oligonucleotide
agucuucgauuuccuccau

SEQ ID NO: 3038589 - RNA, 19 nt, Artificial Sequence
  Description of Artificial Sequence: Synthetic oligonucleotide
augguggacugaauauaau

SEQ ID NO: 3038590 - RNA, 19 nt, Artificial Sequence
  Description of Artificial Sequence: Synthetic oligonucleotide
guggugagguccccgugaa

SEQ ID NO: 3038591 - RNA, 19 nt, Artificial Sequence
  Description of Artificial Sequence: Synthetic oligonucleotide
gcuccaggggccguuuuag

SEQ ID NO: 3038592 - RNA, 19 nt, Artificial Sequence
  Description of Artificial Sequence: Synthetic oligonucleotide
gagguggugagguccccgu

SEQ ID NO: 3038593 - RNA, 19 nt, Artificial Sequence
  Description of Artificial Sequence: Synthetic oligonucleotide
cuucgauuuccuccauaua

SEQ ID NO: 3038594 - RNA, 19 nt, Artificial Sequence
  Description of Artificial Sequence: Synthetic oligonucleotide
uggugagguccccgugaau

SEQ ID NO: 3038595 - RNA, 19 nt, Artificial Sequence
  Description of Artificial Sequence: Synthetic oligonucleotide
gccagggucugcccaauuc

SEQ ID NO: 3038596 - RNA, 19 nt, Artificial Sequence
  Description of Artificial Sequence: Synthetic oligonucleotide
guccagaaacaaagacuga

SEQ ID NO: 3038597 - RNA, 19 nt, Artificial Sequence
  Description of Artificial Sequence: Synthetic oligonucleotide
ccaauucuccuggccaagc

SEQ ID NO: 3038598 - RNA, 19 nt, Artificial Sequence
  Description of Artificial Sequence: Synthetic oligonucleotide
gucuucgauuuccuccaua

SEQ ID NO: 3038599 - RNA, 19 nt, Artificial Sequence
  Description of Artificial Sequence: Synthetic oligonucleotide
ccuggccaagccccaagag

SEQ ID NO: 3038600 - RNA, 19 nt, Artificial Sequence
  Description of Artificial Sequence: Synthetic oligonucleotide
ggcaguccagaaacaaaga

SEQ ID NO: 3038601 - RNA, 19 nt, Artificial Sequence
  Description of Artificial Sequence: Synthetic oligonucleotide
cgauuuccuccauauauaa

SEQ ID NO: 3038602 - RNA, 19 nt, Artificial Sequence
  Description of Artificial Sequence: Synthetic oligonucleotide
uggagguggugaggucccc

SEQ ID NO: 3038603 - RNA, 19 nt, Artificial Sequence
  Description of Artificial Sequence: Synthetic oligonucleotide
gccccaagaggcacugggg

SEQ ID NO: 3038604 - RNA, 19 nt, Artificial Sequence
  Description of Artificial Sequence: Synthetic oligonucleotide
cagucacugagucuucgau

SEQ ID NO: 3038605 - RNA, 19 nt, Artificial Sequence
  Description of Artificial Sequence: Synthetic oligonucleotide
ucuccuggccaagccccaa

SEQ ID NO: 3038606 - RNA, 19 nt, Artificial Sequence
  Description of Artificial Sequence: Synthetic oligonucleotide
caugcauccuagccagggu

SEQ ID NO: 3038607 - RNA, 19 nt, Artificial Sequence
  Description of Artificial Sequence: Synthetic oligonucleotide
gacaaccggggcagcuauc

SEQ ID NO: 3038608 - RNA, 19 nt, Artificial Sequence
  Description of Artificial Sequence: Synthetic oligonucleotide
gcccaauucuccuggccaa

SEQ ID NO: 3038609 - RNA, 19 nt, Artificial Sequence
  Description of Artificial Sequence: Synthetic oligonucleotide
gggucguucucagucucca

SEQ ID NO: 3038610 - RNA, 19 nt, Artificial Sequence
  Description of Artificial Sequence: Synthetic oligonucleotide
gggccguuuuaggagcaug

SEQ ID NO: 3038611 - RNA, 19 nt, Artificial Sequence
  Description of Artificial Sequence: Synthetic oligonucleotide
gggucugcccaauucuccu

SEQ ID NO: 3038612 - RNA, 19 nt, Artificial Sequence
  Description of Artificial Sequence: Synthetic oligonucleotide
ggaugaugugcagcugcuc

SEQ ID NO: 3038613 - RNA, 19 nt, Artificial Sequence
  Description of Artificial Sequence: Synthetic oligonucleotide
ggaugcagcuuaguuggua

SEQ ID NO: 3038614 - RNA, 19 nt, Artificial Sequence
  Description of Artificial Sequence: Synthetic oligonucleotide
gcauccuagccagggucug

SEQ ID NO: 3038615 - RNA, 19 nt, Artificial Sequence
  Description of Artificial Sequence: Synthetic oligonucleotide
ccuagccagggucugccca

SEQ ID NO: 3038616 - RNA, 19 nt, Artificial Sequence
  Description of Artificial Sequence: Synthetic oligonucleotide
gccaagccccaagaggcac

SEQ ID NO: 3038617 - RNA, 19 nt, Artificial Sequence
  Description of Artificial Sequence: Synthetic oligonucleotide
cgaugaggaugaugugcag

SEQ ID NO: 3038618 - RNA, 19 nt, Artificial Sequence
  Description of Artificial Sequence: Synthetic oligonucleotide
ggggucguucucagucucc

SEQ ID NO: 3038619 - RNA, 19 nt, Artificial Sequence
  Description of Artificial Sequence: Synthetic oligonucleotide
aggggccguuuuaggagca

SEQ ID NO: 3038620 - RNA, 19 nt, Artificial Sequence
  Description of Artificial Sequence: Synthetic oligonucleotide
agucuccaugguggacuga

SEQ ID NO: 3038621 - RNA, 19 nt, Artificial Sequence
  Description of Artificial Sequence: Synthetic oligonucleotide
cccaauucuccuggccaag

SEQ ID NO: 3038622 - RNA, 19 nt, Artificial Sequence
  Description of Artificial Sequence: Synthetic oligonucleotide
uagccagggucugcccaau

SEQ ID NO: 3038623 - RNA, 19 nt, Artificial Sequence
  Description of Artificial Sequence: Synthetic oligonucleotide
ggccguuuuaggagcaugu

SEQ ID NO: 3038624 - RNA, 19 nt, Artificial Sequence
  Description of Artificial Sequence: Synthetic oligonucleotide
ccuccauauauaagcaguu

SEQ ID NO: 3038625 - RNA, 19 nt, Artificial Sequence
  Description of Artificial Sequence: Synthetic oligonucleotide
gguccccgugaaugagguc

SEQ ID NO: 3038626 - RNA, 19 nt, Artificial Sequence
  Description of Artificial Sequence: Synthetic oligonucleotide
cccgugaaugaggucuuca

SEQ ID NO: 3038627 - RNA, 19 nt, Artificial Sequence
  Description of Artificial Sequence: Synthetic oligonucleotide
ggccaagccccaagaggca

SEQ ID NO: 3038628 - RNA, 19 nt, Artificial Sequence
  Description of Artificial Sequence: Synthetic oligonucleotide
gacugagcccgaagucgau

SEQ ID NO: 3038629 - RNA, 19 nt, Artificial Sequence
  Description of Artificial Sequence: Synthetic oligonucleotide
ccgugaaugaggucuucau

SEQ ID NO: 3038630 - RNA, 19 nt, Artificial Sequence
  Description of Artificial Sequence: Synthetic oligonucleotide
ggucguucucagucuccau

SEQ ID NO: 3038631 - RNA, 19 nt, Artificial Sequence
  Description of Artificial Sequence: Synthetic oligonucleotide
ggagcauguuggagguggu

SEQ ID NO: 3038632 - RNA, 19 nt, Artificial Sequence
  Description of Artificial Sequence: Synthetic oligonucleotide
ccaagccccaagaggcacu

SEQ ID NO: 3038633 - RNA, 19 nt, Artificial Sequence
  Description of Artificial Sequence: Synthetic oligonucleotide
gccguuuuaggagcauguu

SEQ ID NO: 3038634 - RNA, 19 nt, Artificial Sequence
  Description of Artificial Sequence: Synthetic oligonucleotide
ccccgugaaugaggucuuc

SEQ ID NO: 3038635 - RNA, 19 nt, Artificial Sequence
  Description of Artificial Sequence: Synthetic oligonucleotide
gggaugcagcuuaguuggu

SEQ ID NO: 3038636 - RNA, 19 nt, Artificial Sequence
  Description of Artificial Sequence: Synthetic oligonucleotide
cguucucagucuccauggu

SEQ ID NO: 3038637 - RNA, 19 nt, Artificial Sequence
  Description of Artificial Sequence: Synthetic oligonucleotide
gcccgaagucgaugaggau

SEQ ID NO: 3038638 - RNA, 19 nt, Artificial Sequence
  Description of Artificial Sequence: Synthetic oligonucleotide
cugcuccaggggccguuuu

SEQ ID NO: 3038639 - RNA, 19 nt, Artificial Sequence
  Description of Artificial Sequence: Synthetic oligonucleotide
ggggccguuuuaggagcau

SEQ ID NO: 3038640 - RNA, 19 nt, Artificial Sequence
  Description of Artificial Sequence: Synthetic oligonucleotide
cgaagucgaugaggaugau

SEQ ID NO: 3038641 - RNA, 19 nt, Artificial Sequence
  Description of Artificial Sequence: Synthetic oligonucleotide
aauaauuuguauuuaauuu

SEQ ID NO: 3038642 - RNA, 19 nt, Artificial Sequence
  Description of Artificial Sequence: Synthetic oligonucleotide
ucuuaaaacaaauugugcc

SEQ ID NO: 3038643 - RNA, 19 nt, Artificial Sequence
  Description of Artificial Sequence: Synthetic oligonucleotide
acuugguuaacacagaguc

SEQ ID NO: 3038644 - RNA, 19 nt, Artificial Sequence
  Description of Artificial Sequence: Synthetic oligonucleotide
uuucuuaaaacaaauugug

SEQ ID NO: 3038645 - RNA, 19 nt, Artificial Sequence
  Description of Artificial Sequence: Synthetic oligonucleotide
ucuggcaucagucagaauc

SEQ ID NO: 3038646 - RNA, 19 nt, Artificial Sequence
  Description of Artificial Sequence: Synthetic oligonucleotide
gaugcucuuaaauuaaugc

SEQ ID NO: 3038647 - RNA, 19 nt, Artificial Sequence
  Description of Artificial Sequence: Synthetic oligonucleotide
cauuucuuaaaacaaauug

SEQ ID NO: 3038648 - RNA, 19 nt, Artificial Sequence
  Description of Artificial Sequence: Synthetic oligonucleotide
aauuaaugcauauaauaau

SEQ ID NO: 3038649 - RNA, 19 nt, Artificial Sequence
  Description of Artificial Sequence: Synthetic oligonucleotide
uuuguauuuaauuuccucu

SEQ ID NO: 3038650 - RNA, 19 nt, Artificial Sequence
  Description of Artificial Sequence: Synthetic oligonucleotide
uacaucucgagucacuugg

SEQ ID NO: 3038651 - RNA, 19 nt, Artificial Sequence
  Description of Artificial Sequence: Synthetic oligonucleotide
uuuaauuuccucucuuucc

SEQ ID NO: 3038652 - RNA, 19 nt, Artificial Sequence
  Description of Artificial Sequence: Synthetic oligonucleotide
ucuaguaauaucuucacuu

SEQ ID NO: 3038653 - RNA, 19 nt, Artificial Sequence
  Description of Artificial Sequence: Synthetic oligonucleotide
aaauuaaugcauauaauaa

SEQ ID NO: 3038654 - RNA, 19 nt, Artificial Sequence
  Description of Artificial Sequence: Synthetic oligonucleotide
auuuguauuuaauuuccuc

SEQ ID NO: 3038655 - RNA, 19 nt, Artificial Sequence
  Description of Artificial Sequence: Synthetic oligonucleotide
cuuaaauuaaugcauauaa

SEQ ID NO: 3038656 - RNA, 19 nt, Artificial Sequence
  Description of Artificial Sequence: Synthetic oligonucleotide
aaacaaauugugccucucg

SEQ ID NO: 3038657 - RNA, 19 nt, Artificial Sequence
  Description of Artificial Sequence: Synthetic oligonucleotide
uaaugcauauaauaauuug

SEQ ID NO: 3038658 - RNA, 19 nt, Artificial Sequence
  Description of Artificial Sequence: Synthetic oligonucleotide
uucuuaaaacaaauugugc

SEQ ID NO: 3038659 - RNA, 19 nt, Artificial Sequence
  Description of Artificial Sequence: Synthetic oligonucleotide
aaggcuguguuuucgcucg

SEQ ID NO: 3038660 - RNA, 19 nt, Artificial Sequence
  Description of Artificial Sequence: Synthetic oligonucleotide
uguugagcaaagcagagaa

SEQ ID NO: 3038661 - RNA, 19 nt, Artificial Sequence
  Description of Artificial Sequence: Synthetic oligonucleotide
uauaauaauuuguauuuaa

SEQ ID NO: 3038662 - RNA, 19 nt, Artificial Sequence
  Description of Artificial Sequence: Synthetic oligonucleotide
cuguuguucuucuagaagc

SEQ ID NO: 3038663 - RNA, 19 nt, Artificial Sequence
  Description of Artificial Sequence: Synthetic oligonucleotide
ucucguucugauuuggccg

SEQ ID NO: 3038664 - RNA, 19 nt, Artificial Sequence
  Description of Artificial Sequence: Synthetic oligonucleotide
aauaucuucacuuccuguu

SEQ ID NO: 3038665 - RNA, 19 nt, Artificial Sequence
  Description of Artificial Sequence: Synthetic oligonucleotide
agaacacacagauuccuac

SEQ ID NO: 3038666 - RNA, 19 nt, Artificial Sequence
  Description of Artificial Sequence: Synthetic oligonucleotide
uuaauuuccucucuuuccu

SEQ ID NO: 3038667 - RNA, 19 nt, Artificial Sequence
  Description of Artificial Sequence: Synthetic oligonucleotide
uguguuuucgcucgcacug

SEQ ID NO: 3038668 - RNA, 19 nt, Artificial Sequence
  Description of Artificial Sequence: Synthetic oligonucleotide
ucaguuuccacgcuggcca

SEQ ID NO: 3038669 - RNA, 19 nt, Artificial Sequence
  Description of Artificial Sequence: Synthetic oligonucleotide
gauuccuacaucucgaguc

SEQ ID NO: 3038670 - RNA, 19 nt, Artificial Sequence
  Description of Artificial Sequence: Synthetic oligonucleotide
uuuccuguugagcaaagca

SEQ ID NO: 3038671 - RNA, 19 nt, Artificial Sequence
  Description of Artificial Sequence: Synthetic oligonucleotide
ucagucagaauccggaucu

SEQ ID NO: 3038672 - RNA, 19 nt, Artificial Sequence
  Description of Artificial Sequence: Synthetic oligonucleotide
uuaacacagagucucuuug

SEQ ID NO: 3038673 - RNA, 19 nt, Artificial Sequence
  Description of Artificial Sequence: Synthetic oligonucleotide
aaaggcuguguuuucgcuc

SEQ ID NO: 3038674 - RNA, 19 nt, Artificial Sequence
  Description of Artificial Sequence: Synthetic oligonucleotide
uuccuguugagcaaagcag

SEQ ID NO: 3038675 - RNA, 19 nt, Artificial Sequence
  Description of Artificial Sequence: Synthetic oligonucleotide
aagcagagaacacacagau

SEQ ID NO: 3038676 - RNA, 19 nt, Artificial Sequence
  Description of Artificial Sequence: Synthetic oligonucleotide
uuaaauuaaugcauauaau

SEQ ID NO: 3038677 - RNA, 19 nt, Artificial Sequence
  Description of Artificial Sequence: Synthetic oligonucleotide
caaagcagagaacacacag

SEQ ID NO: 3038678 - RNA, 19 nt, Artificial Sequence
  Description of Artificial Sequence: Synthetic oligonucleotide
guucguagucuucugaccg

SEQ ID NO: 3038679 - RNA, 19 nt, Artificial Sequence
  Description of Artificial Sequence: Synthetic oligonucleotide
auuucuuaaaacaaauugu

SEQ ID NO: 3038680 - RNA, 19 nt, Artificial Sequence
  Description of Artificial Sequence: Synthetic oligonucleotide
ugcucuuaaauuaaugcau

SEQ ID NO: 3038681 - RNA, 19 nt, Artificial Sequence
  Description of Artificial Sequence: Synthetic oligonucleotide
aaguagaugcucuuaaauu

SEQ ID NO: 3038682 - RNA, 19 nt, Artificial Sequence
  Description of Artificial Sequence: Synthetic oligonucleotide
uuugaauuucauuucuuaa

SEQ ID NO: 3038683 - RNA, 19 nt, Artificial Sequence
  Description of Artificial Sequence: Synthetic oligonucleotide
aacaaauugugccucucgu

SEQ ID NO: 3038684 - RNA, 19 nt, Artificial Sequence
  Description of Artificial Sequence: Synthetic oligonucleotide
uaguaauaucuucacuucc

SEQ ID NO: 3038685 - RNA, 19 nt, Artificial Sequence
  Description of Artificial Sequence: Synthetic oligonucleotide
aguagaugcucuuaaauua

SEQ ID NO: 3038686 - RNA, 19 nt, Artificial Sequence
  Description of Artificial Sequence: Synthetic oligonucleotide
uaaguagaugcucuuaaau

SEQ ID NO: 3038687 - RNA, 19 nt, Artificial Sequence
  Description of Artificial Sequence: Synthetic oligonucleotide
aguucguagucuucugacc

SEQ ID NO: 3038688 - RNA, 19 nt, Artificial Sequence
  Description of Artificial Sequence: Synthetic oligonucleotide
agaaaggcuguguuuucgc

SEQ ID NO: 3038689 - RNA, 19 nt, Artificial Sequence
  Description of Artificial Sequence: Synthetic oligonucleotide
uguauuuaauuuccucucu

SEQ ID NO: 3038690 - RNA, 19 nt, Artificial Sequence
  Description of Artificial Sequence: Synthetic oligonucleotide
ucuaaguagaugcucuuaa

SEQ ID NO: 3038691 - RNA, 19 nt, Artificial Sequence
  Description of Artificial Sequence: Synthetic oligonucleotide
uguuguucuucuagaagcc

SEQ ID NO: 3038692 - RNA, 19 nt, Artificial Sequence
  Description of Artificial Sequence: Synthetic oligonucleotide
uuggccgugggacucaggg

SEQ ID NO: 3038693 - RNA, 19 nt, Artificial Sequence
  Description of Artificial Sequence: Synthetic oligonucleotide
uuaaugcauauaauaauuu

SEQ ID NO: 3038694 - RNA, 19 nt, Artificial Sequence
  Description of Artificial Sequence: Synthetic oligonucleotide
aauccggaucuguuccugc

SEQ ID NO: 3038695 - RNA, 19 nt, Artificial Sequence
  Description of Artificial Sequence: Synthetic oligonucleotide
ucacuugguuaacacagag

SEQ ID NO: 3038696 - RNA, 19 nt, Artificial Sequence
  Description of Artificial Sequence: Synthetic oligonucleotide
ucugauuuggccgugggac

SEQ ID NO: 3038697 - RNA, 19 nt, Artificial Sequence
  Description of Artificial Sequence: Synthetic oligonucleotide
acuguccucaguuuccacg

SEQ ID NO: 3038698 - RNA, 19 nt, Artificial Sequence
  Description of Artificial Sequence: Synthetic oligonucleotide
gcagagaacacacagauuc

SEQ ID NO: 3038699 - RNA, 19 nt, Artificial Sequence
  Description of Artificial Sequence: Synthetic oligonucleotide
uuguauuuaauuuccucuc

SEQ ID NO: 3038700 - RNA, 19 nt, Artificial Sequence
  Description of Artificial Sequence: Synthetic oligonucleotide
cacagauuccuacaucucg

SEQ ID NO: 3038701 - RNA, 19 nt, Artificial Sequence
  Description of Artificial Sequence: Synthetic oligonucleotide
uugguuaacacagagucuc

SEQ ID NO: 3038702 - RNA, 19 nt, Artificial Sequence
  Description of Artificial Sequence: Synthetic oligonucleotide
augcucuuaaauuaaugca

SEQ ID NO: 3038703 - RNA, 19 nt, Artificial Sequence
  Description of Artificial Sequence: Synthetic oligonucleotide
agucacuugguuaacacag

SEQ ID NO: 3038704 - RNA, 19 nt, Artificial Sequence
  Description of Artificial Sequence: Synthetic oligonucleotide
agucucuaguaauaucuuc

SEQ ID NO: 3038705 - RNA, 19 nt, Artificial Sequence
  Description of Artificial Sequence: Synthetic oligonucleotide
aagaaaggcuguguuuucg

SEQ ID NO: 3038706 - RNA, 19 nt, Artificial Sequence
  Description of Artificial Sequence: Synthetic oligonucleotide
uuguucuucuagaagccgc

SEQ ID NO: 3038707 - RNA, 19 nt, Artificial Sequence
  Description of Artificial Sequence: Synthetic oligonucleotide
ucuucuagaagccgccgcc

SEQ ID NO: 3038708 - RNA, 19 nt, Artificial Sequence
  Description of Artificial Sequence: Synthetic oligonucleotide
agcaaagcagagaacacac

SEQ ID NO: 3038709 - RNA, 19 nt, Artificial Sequence
  Description of Artificial Sequence: Synthetic oligonucleotide
aaauugugccucucguucu

SEQ ID NO: 3038710 - RNA, 19 nt, Artificial Sequence
  Description of Artificial Sequence: Synthetic oligonucleotide
aaaacaaauugugccucuc

SEQ ID NO: 3038711 - RNA, 19 nt, Artificial Sequence
  Description of Artificial Sequence: Synthetic oligonucleotide
uuccacgcuggccaguucg

SEQ ID NO: 3038712 - RNA, 19 nt, Artificial Sequence
  Description of Artificial Sequence: Synthetic oligonucleotide
uccuguugagcaaagcaga

SEQ ID NO: 3038713 - RNA, 19 nt, Artificial Sequence
  Description of Artificial Sequence: Synthetic oligonucleotide
cuaguaauaucuucacuuc

SEQ ID NO: 3038714 - RNA, 19 nt, Artificial Sequence
  Description of Artificial Sequence: Synthetic oligonucleotide
uguucuucuagaagccgcc

SEQ ID NO: 3038715 - RNA, 19 nt, Artificial Sequence
  Description of Artificial Sequence: Synthetic oligonucleotide
uuaaaacaaauugugccuc

SEQ ID NO: 3038716 - RNA, 19 nt, Artificial Sequence
  Description of Artificial Sequence: Synthetic oligonucleotide
auuaaugcauauaauaauu

SEQ ID NO: 3038717 - RNA, 19 nt, Artificial Sequence
  Description of Artificial Sequence: Synthetic oligonucleotide
aucagucagaauccggauc

SEQ ID NO: 3038718 - RNA, 19 nt, Artificial Sequence
  Description of Artificial Sequence: Synthetic oligonucleotide
acagucucuaguaauaucu

SEQ ID NO: 3038719 - RNA, 19 nt, Artificial Sequence
  Description of Artificial Sequence: Synthetic oligonucleotide
caaauugugccucucguuc

SEQ ID NO: 3038720 - RNA, 19 nt, Artificial Sequence
  Description of Artificial Sequence: Synthetic oligonucleotide
aacacacagauuccuacau

SEQ ID NO: 3038721 - RNA, 19 nt, Artificial Sequence
  Description of Artificial Sequence: Synthetic oligonucleotide
ugcauauaauaauuuguau

SEQ ID NO: 3038722 - RNA, 19 nt, Artificial Sequence
  Description of Artificial Sequence: Synthetic oligonucleotide
uccucaguuuccacgcugg

SEQ ID NO: 3038723 - RNA, 19 nt, Artificial Sequence
  Description of Artificial Sequence: Synthetic oligonucleotide
auaucuucacuuccuguug

SEQ ID NO: 3038724 - RNA, 19 nt, Artificial Sequence
  Description of Artificial Sequence: Synthetic oligonucleotide
aacacagagucucuuugaa

SEQ ID NO: 3038725 - RNA, 19 nt, Artificial Sequence
  Description of Artificial Sequence: Synthetic oligonucleotide
ucucuaguaauaucuucac

SEQ ID NO: 3038726 - RNA, 19 nt, Artificial Sequence
  Description of Artificial Sequence: Synthetic oligonucleotide
cuuccuguuguucuucuag

SEQ ID NO: 3038727 - RNA, 19 nt, Artificial Sequence
  Description of Artificial Sequence: Synthetic oligonucleotide
uuuucgcucgcacuguccu

SEQ ID NO: 3038728 - RNA, 19 nt, Artificial Sequence
  Description of Artificial Sequence: Synthetic oligonucleotide
cuggcaucagucagaaucc

SEQ ID NO: 3038729 - RNA, 19 nt, Artificial Sequence
  Description of Artificial Sequence: Synthetic oligonucleotide
aauugugccucucguucug

SEQ ID NO: 3038730 - RNA, 19 nt, Artificial Sequence
  Description of Artificial Sequence: Synthetic oligonucleotide
agucuucugaccgucuggc

SEQ ID NO: 3038731 - RNA, 19 nt, Artificial Sequence
  Description of Artificial Sequence: Synthetic oligonucleotide
uagucuucugaccgucugg

SEQ ID NO: 3038732 - RNA, 19 nt, Artificial Sequence
  Description of Artificial Sequence: Synthetic oligonucleotide
ucucgagucacuugguuaa

SEQ ID NO: 3038733 - RNA, 19 nt, Artificial Sequence
  Description of Artificial Sequence: Synthetic oligonucleotide
ucauuucuuaaaacaaauu

SEQ ID NO: 3038734 - RNA, 19 nt, Artificial Sequence
  Description of Artificial Sequence: Synthetic oligonucleotide
cagaauccggaucuguucc

SEQ ID NO: 3038735 - RNA, 19 nt, Artificial Sequence
  Description of Artificial Sequence: Synthetic oligonucleotide
guaauaucuucacuuccug

SEQ ID NO: 3038736 - RNA, 19 nt, Artificial Sequence
  Description of Artificial Sequence: Synthetic oligonucleotide
cucaggggaagaaaggcug

SEQ ID NO: 3038737 - RNA, 19 nt, Artificial Sequence
  Description of Artificial Sequence: Synthetic oligonucleotide
cuuaaaacaaauugugccu

SEQ ID NO: 3038738 - RNA, 19 nt, Artificial Sequence
  Description of Artificial Sequence: Synthetic oligonucleotide
cucucuuuccuguugagca

SEQ ID NO: 3038739 - RNA, 19 nt, Artificial Sequence
  Description of Artificial Sequence: Synthetic oligonucleotide
ucuucugaccgucuggcau

SEQ ID NO: 3038740 - RNA, 19 nt, Artificial Sequence
  Description of Artificial Sequence: Synthetic oligonucleotide
uucuagaagccgccgcccg

SEQ ID NO: 3038741 - RNA, 19 nt, Artificial Sequence
  Description of Artificial Sequence: Synthetic oligonucleotide
cucucguucugauuuggcc

SEQ ID NO: 3038742 - RNA, 19 nt, Artificial Sequence
  Description of Artificial Sequence: Synthetic oligonucleotide
uaucuucacuuccuguugu

SEQ ID NO: 3038743 - RNA, 19 nt, Artificial Sequence
  Description of Artificial Sequence: Synthetic oligonucleotide
aguaauaucuucacuuccu

SEQ ID NO: 3038744 - RNA, 19 nt, Artificial Sequence
  Description of Artificial Sequence: Synthetic oligonucleotide
uucuucuagaagccgccgc

SEQ ID NO: 3038745 - RNA, 19 nt, Artificial Sequence
  Description of Artificial Sequence: Synthetic oligonucleotide
gaucuguuccugcacaguc

SEQ ID NO: 3038746 - RNA, 19 nt, Artificial Sequence
  Description of Artificial Sequence: Synthetic oligonucleotide
ucuuaaauuaaugcauaua

SEQ ID NO: 3038747 - RNA, 19 nt, Artificial Sequence
  Description of Artificial Sequence: Synthetic oligonucleotide
gucucuuugaauuucauuu

SEQ ID NO: 3038748 - RNA, 19 nt, Artificial Sequence
  Description of Artificial Sequence: Synthetic oligonucleotide
uaacacagagucucuuuga

SEQ ID NO: 3038749 - RNA, 19 nt, Artificial Sequence
  Description of Artificial Sequence: Synthetic oligonucleotide
ucagaauccggaucuguuc

SEQ ID NO: 3038750 - RNA, 19 nt, Artificial Sequence
  Description of Artificial Sequence: Synthetic oligonucleotide
auuccuacaucucgaguca

SEQ ID NO: 3038751 - RNA, 19 nt, Artificial Sequence
  Description of Artificial Sequence: Synthetic oligonucleotide
auaauaauuuguauuuaau

SEQ ID NO: 3038752 - RNA, 19 nt, Artificial Sequence
  Description of Artificial Sequence: Synthetic oligonucleotide
aaagcagagaacacacaga

SEQ ID NO: 3038753 - RNA, 19 nt, Artificial Sequence
  Description of Artificial Sequence: Synthetic oligonucleotide
gacucaggggaagaaaggc

SEQ ID NO: 3038754 - RNA, 19 nt, Artificial Sequence
  Description of Artificial Sequence: Synthetic oligonucleotide
acacacagauuccuacauc

SEQ ID NO: 3038755 - RNA, 19 nt, Artificial Sequence
  Description of Artificial Sequence: Synthetic oligonucleotide
cuguccucaguuuccacgc

SEQ ID NO: 3038756 - RNA, 19 nt, Artificial Sequence
  Description of Artificial Sequence: Synthetic oligonucleotide
uuuccucucuuuccuguug

SEQ ID NO: 3038757 - RNA, 19 nt, Artificial Sequence
  Description of Artificial Sequence: Synthetic oligonucleotide
ugcacagucucuaguaaua

SEQ ID NO: 3038758 - RNA, 19 nt, Artificial Sequence
  Description of Artificial Sequence: Synthetic oligonucleotide
gaacacacagauuccuaca

SEQ ID NO: 3038759 - RNA, 19 nt, Artificial Sequence
  Description of Artificial Sequence: Synthetic oligonucleotide
cagagaacacacagauucc

SEQ ID NO: 3038760 - RNA, 19 nt, Artificial Sequence
  Description of Artificial Sequence: Synthetic oligonucleotide
guuguucuucuagaagccg

SEQ ID NO: 3038761 - RNA, 19 nt, Artificial Sequence
  Description of Artificial Sequence: Synthetic oligonucleotide
ugaccgucuggcaucaguc

SEQ ID NO: 3038762 - RNA, 19 nt, Artificial Sequence
  Description of Artificial Sequence: Synthetic oligonucleotide
ucuuuccuguugagcaaag

SEQ ID NO: 3038763 - RNA, 19 nt, Artificial Sequence
  Description of Artificial Sequence: Synthetic oligonucleotide
gucucuaguaauaucuuca

SEQ ID NO: 3038764 - RNA, 19 nt, Artificial Sequence
  Description of Artificial Sequence: Synthetic oligonucleotide
uuccuguuguucuucuaga

SEQ ID NO: 3038765 - RNA, 19 nt, Artificial Sequence
  Description of Artificial Sequence: Synthetic oligonucleotide
caguucguagucuucugac

SEQ ID NO: 3038766 - RNA, 19 nt, Artificial Sequence
  Description of Artificial Sequence: Synthetic oligonucleotide
uucugauuuggccguggga

SEQ ID NO: 3038767 - RNA, 19 nt, Artificial Sequence
  Description of Artificial Sequence: Synthetic oligonucleotide
accgucuggcaucagucag

SEQ ID NO: 3038768 - RNA, 19 nt, Artificial Sequence
  Description of Artificial Sequence: Synthetic oligonucleotide
augcauauaauaauuugua

SEQ ID NO: 3038769 - RNA, 19 nt, Artificial Sequence
  Description of Artificial Sequence: Synthetic oligonucleotide
agagaacacacagauuccu

SEQ ID NO: 3038770 - RNA, 19 nt, Artificial Sequence
  Description of Artificial Sequence: Synthetic oligonucleotide
ucuagaagccgccgcccgc

SEQ ID NO: 3038771 - RNA, 19 nt, Artificial Sequence
  Description of Artificial Sequence: Synthetic oligonucleotide
ucaggggaagaaaggcugu

SEQ ID NO: 3038772 - RNA, 19 nt, Artificial Sequence
  Description of Artificial Sequence: Synthetic oligonucleotide
guucugauuuggccguggg

SEQ ID NO: 3038773 - RNA, 19 nt, Artificial Sequence
  Description of Artificial Sequence: Synthetic oligonucleotide
gaagaaaggcuguguuuuc

SEQ ID NO: 3038774 - RNA, 19 nt, Artificial Sequence
  Description of Artificial Sequence: Synthetic oligonucleotide
guagucuucugaccgucug

SEQ ID NO: 3038775 - RNA, 19 nt, Artificial Sequence
  Description of Artificial Sequence: Synthetic oligonucleotide
uccuguuguucuucuagaa

SEQ ID NO: 3038776 - RNA, 19 nt, Artificial Sequence
  Description of Artificial Sequence: Synthetic oligonucleotide
acaaauugugccucucguu

SEQ ID NO: 3038777 - RNA, 19 nt, Artificial Sequence
  Description of Artificial Sequence: Synthetic oligonucleotide
uccugcacagucucuagua

SEQ ID NO: 3038778 - RNA, 19 nt, Artificial Sequence
  Description of Artificial Sequence: Synthetic oligonucleotide
agauuccuacaucucgagu

SEQ ID NO: 3038779 - RNA, 19 nt, Artificial Sequence
  Description of Artificial Sequence: Synthetic oligonucleotide
cacacagauuccuacaucu

SEQ ID NO: 3038780 - RNA, 19 nt, Artificial Sequence
  Description of Artificial Sequence: Synthetic oligonucleotide
gagcaaagcagagaacaca

SEQ ID NO: 3038781 - RNA, 19 nt, Artificial Sequence
  Description of Artificial Sequence: Synthetic oligonucleotide
agucucuuugaauuucauu

SEQ ID NO: 3038782 - RNA, 19 nt, Artificial Sequence
  Description of Artificial Sequence: Synthetic oligonucleotide
aucucgagucacuugguua

SEQ ID NO: 3038783 - RNA, 19 nt, Artificial Sequence
  Description of Artificial Sequence: Synthetic oligonucleotide
acagauuccuacaucucga

SEQ ID NO: 3038784 - RNA, 19 nt, Artificial Sequence
  Description of Artificial Sequence: Synthetic oligonucleotide
uccuacaucucgagucacu

SEQ ID NO: 3038785 - RNA, 19 nt, Artificial Sequence
  Description of Artificial Sequence: Synthetic oligonucleotide
ugguuaacacagagucucu

SEQ ID NO: 3038786 - RNA, 19 nt, Artificial Sequence
  Description of Artificial Sequence: Synthetic oligonucleotide
uucguagucuucugaccgu

SEQ ID NO: 3038787 - RNA, 19 nt, Artificial Sequence
  Description of Artificial Sequence: Synthetic oligonucleotide
ucucuuuccuguugagcaa

SEQ ID NO: 3038788 - RNA, 19 nt, Artificial Sequence
  Description of Artificial Sequence: Synthetic oligonucleotide
cucaguuuccacgcuggcc

SEQ ID NO: 3038789 - RNA, 19 nt, Artificial Sequence
  Description of Artificial Sequence: Synthetic oligonucleotide
uucgcucgcacuguccuca

SEQ ID NO: 3038790 - RNA, 19 nt, Artificial Sequence
  Description of Artificial Sequence: Synthetic oligonucleotide
uguuuucgcucgcacuguc

SEQ ID NO: 3038791 - RNA, 19 nt, Artificial Sequence
  Description of Artificial Sequence: Synthetic oligonucleotide
acagagucucuuugaauuu

SEQ ID NO: 3038792 - RNA, 19 nt, Artificial Sequence
  Description of Artificial Sequence: Synthetic oligonucleotide
gcauauaauaauuuguauu

SEQ ID NO: 3038793 - RNA, 19 nt, Artificial Sequence
  Description of Artificial Sequence: Synthetic oligonucleotide
cacagucucuaguaauauc

SEQ ID NO: 3038794 - RNA, 19 nt, Artificial Sequence
  Description of Artificial Sequence: Synthetic oligonucleotide
ucgcacuguccucaguuuc

SEQ ID NO: 3038795 - RNA, 19 nt, Artificial Sequence
  Description of Artificial Sequence: Synthetic oligonucleotide
cuacaucucgagucacuug

SEQ ID NO: 3038796 - RNA, 19 nt, Artificial Sequence
  Description of Artificial Sequence: Synthetic oligonucleotide
uuccugcacagucucuagu

SEQ ID NO: 3038797 - RNA, 19 nt, Artificial Sequence
  Description of Artificial Sequence: Synthetic oligonucleotide
cacgcuggccaguucguag

SEQ ID NO: 3038798 - RNA, 19 nt, Artificial Sequence
  Description of Artificial Sequence: Synthetic oligonucleotide
agaauccggaucuguuccu

SEQ ID NO: 3038799 - RNA, 19 nt, Artificial Sequence
  Description of Artificial Sequence: Synthetic oligonucleotide
guagaugcucuuaaauuaa

SEQ ID NO: 3038800 - RNA, 19 nt, Artificial Sequence
  Description of Artificial Sequence: Synthetic oligonucleotide
uguuccugcacagucucua

SEQ ID NO: 3038801 - RNA, 19 nt, Artificial Sequence
  Description of Artificial Sequence: Synthetic oligonucleotide
uucuaaguagaugcucuua

SEQ ID NO: 3038802 - RNA, 19 nt, Artificial Sequence
  Description of Artificial Sequence: Synthetic oligonucleotide
uggcaucagucagaauccg

SEQ ID NO: 3038803 - RNA, 19 nt, Artificial Sequence
  Description of Artificial Sequence: Synthetic oligonucleotide
uccggaucuguuccugcac

SEQ ID NO: 3038804 - RNA, 19 nt, Artificial Sequence
  Description of Artificial Sequence: Synthetic oligonucleotide
cuaaguagaugcucuuaaa

SEQ ID NO: 3038805 - RNA, 19 nt, Artificial Sequence
  Description of Artificial Sequence: Synthetic oligonucleotide
guuccugcacagucucuag

SEQ ID NO: 3038806 - RNA, 19 nt, Artificial Sequence
  Description of Artificial Sequence: Synthetic oligonucleotide
ucuucacuuccuguuguuc

SEQ ID NO: 3038807 - RNA, 19 nt, Artificial Sequence
  Description of Artificial Sequence: Synthetic oligonucleotide
cacagagucucuuugaauu

SEQ ID NO: 3038808 - RNA, 19 nt, Artificial Sequence
  Description of Artificial Sequence: Synthetic oligonucleotide
guucuucuagaagccgccg

SEQ ID NO: 3038809 - RNA, 19 nt, Artificial Sequence
  Description of Artificial Sequence: Synthetic oligonucleotide
uucacuuccuguuguucuu

SEQ ID NO: 3038810 - RNA, 19 nt, Artificial Sequence
  Description of Artificial Sequence: Synthetic oligonucleotide
gggacucaggggaagaaag

SEQ ID NO: 3038811 - RNA, 19 nt, Artificial Sequence
  Description of Artificial Sequence: Synthetic oligonucleotide
uccucucuuuccuguugag

SEQ ID NO: 3038812 - RNA, 19 nt, Artificial Sequence
  Description of Artificial Sequence: Synthetic oligonucleotide
uggccgugggacucagggg

SEQ ID NO: 3038813 - RNA, 19 nt, Artificial Sequence
  Description of Artificial Sequence: Synthetic oligonucleotide
gaauccggaucuguuccug

SEQ ID NO: 3038814 - RNA, 19 nt, Artificial Sequence
  Description of Artificial Sequence: Synthetic oligonucleotide
ccuguuguucuucuagaag

SEQ ID NO: 3038815 - RNA, 19 nt, Artificial Sequence
  Description of Artificial Sequence: Synthetic oligonucleotide
ugauuuggccgugggacuc

SEQ ID NO: 3038816 - RNA, 19 nt, Artificial Sequence
  Description of Artificial Sequence: Synthetic oligonucleotide
ucgagucacuugguuaaca

SEQ ID NO: 3038817 - RNA, 19 nt, Artificial Sequence
  Description of Artificial Sequence: Synthetic oligonucleotide
cuucuagaagccgccgccc

SEQ ID NO: 3038818 - RNA, 19 nt, Artificial Sequence
  Description of Artificial Sequence: Synthetic oligonucleotide
cuuuccuguugagcaaagc

SEQ ID NO: 3038819 - RNA, 19 nt, Artificial Sequence
  Description of Artificial Sequence: Synthetic oligonucleotide
cuagaagccgccgcccgcc

SEQ ID NO: 3038820 - RNA, 19 nt, Artificial Sequence
  Description of Artificial Sequence: Synthetic oligonucleotide
agagucucuuugaauuuca

SEQ ID NO: 3038821 - RNA, 19 nt, Artificial Sequence
  Description of Artificial Sequence: Synthetic oligonucleotide
acucaggggaagaaaggcu

SEQ ID NO: 3038822 - RNA, 19 nt, Artificial Sequence
  Description of Artificial Sequence: Synthetic oligonucleotide
auccggaucuguuccugca

SEQ ID NO: 3038823 - RNA, 19 nt, Artificial Sequence
  Description of Artificial Sequence: Synthetic oligonucleotide
cuucacuuccuguuguucu

SEQ ID NO: 3038824 - RNA, 19 nt, Artificial Sequence
  Description of Artificial Sequence: Synthetic oligonucleotide
guccucaguuuccacgcug

SEQ ID NO: 3038825 - RNA, 19 nt, Artificial Sequence
  Description of Artificial Sequence: Synthetic oligonucleotide
gaaaggcuguguuuucgcu

SEQ ID NO: 3038826 - RNA, 19 nt, Artificial Sequence
  Description of Artificial Sequence: Synthetic oligonucleotide
ccuguugagcaaagcagag

SEQ ID NO: 3038827 - RNA, 19 nt, Artificial Sequence
  Description of Artificial Sequence: Synthetic oligonucleotide
cagagucucuuugaauuuc

SEQ ID NO: 3038828 - RNA, 19 nt, Artificial Sequence
  Description of Artificial Sequence: Synthetic oligonucleotide
uuuggccgugggacucagg

SEQ ID NO: 3038829 - RNA, 19 nt, Artificial Sequence
  Description of Artificial Sequence: Synthetic oligonucleotide
agucagaauccggaucugu

SEQ ID NO: 3038830 - RNA, 19 nt, Artificial Sequence
  Description of Artificial Sequence: Synthetic oligonucleotide
uguccucaguuuccacgcu

SEQ ID NO: 3038831 - RNA, 19 nt, Artificial Sequence
  Description of Artificial Sequence: Synthetic oligonucleotide
acgcuggccaguucguagu

SEQ ID NO: 3038832 - RNA, 19 nt, Artificial Sequence
  Description of Artificial Sequence: Synthetic oligonucleotide
auuuccucucuuuccuguu

SEQ ID NO: 3038833 - RNA, 19 nt, Artificial Sequence
  Description of Artificial Sequence: Synthetic oligonucleotide
gaccgucuggcaucaguca

SEQ ID NO: 3038834 - RNA, 19 nt, Artificial Sequence
  Description of Artificial Sequence: Synthetic oligonucleotide
gaagccgccgcccgcccgc

SEQ ID NO: 3038835 - RNA, 19 nt, Artificial Sequence
  Description of Artificial Sequence: Synthetic oligonucleotide
ugccucucguucugauuug

SEQ ID NO: 3038836 - RNA, 19 nt, Artificial Sequence
  Description of Artificial Sequence: Synthetic oligonucleotide
ggacucaggggaagaaagg

SEQ ID NO: 3038837 - RNA, 19 nt, Artificial Sequence
  Description of Artificial Sequence: Synthetic oligonucleotide
guuuucgcucgcacugucc

SEQ ID NO: 3038838 - RNA, 19 nt, Artificial Sequence
  Description of Artificial Sequence: Synthetic oligonucleotide
guauuuaauuuccucucuu

SEQ ID NO: 3038839 - RNA, 19 nt, Artificial Sequence
  Description of Artificial Sequence: Synthetic oligonucleotide
guugagcaaagcagagaac

SEQ ID NO: 3038840 - RNA, 19 nt, Artificial Sequence
  Description of Artificial Sequence: Synthetic oligonucleotide
cuugguuaacacagagucu

SEQ ID NO: 3038841 - RNA, 19 nt, Artificial Sequence
  Description of Artificial Sequence: Synthetic oligonucleotide
aggcuguguuuucgcucgc

SEQ ID NO: 3038842 - RNA, 19 nt, Artificial Sequence
  Description of Artificial Sequence: Synthetic oligonucleotide
guuaacacagagucucuuu

SEQ ID NO: 3038843 - RNA, 19 nt, Artificial Sequence
  Description of Artificial Sequence: Synthetic oligonucleotide
agaagccgccgcccgcccg

SEQ ID NO: 3038844 - RNA, 19 nt, Artificial Sequence
  Description of Artificial Sequence: Synthetic oligonucleotide
ucguagucuucugaccguc

SEQ ID NO: 3038845 - RNA, 19 nt, Artificial Sequence
  Description of Artificial Sequence: Synthetic oligonucleotide
uccacgcuggccaguucgu

SEQ ID NO: 3038846 - RNA, 19 nt, Artificial Sequence
  Description of Artificial Sequence: Synthetic oligonucleotide
uucugaccgucuggcauca

SEQ ID NO: 3038847 - RNA, 19 nt, Artificial Sequence
  Description of Artificial Sequence: Synthetic oligonucleotide
ugggacucaggggaagaaa

SEQ ID NO: 3038848 - RNA, 19 nt, Artificial Sequence
  Description of Artificial Sequence: Synthetic oligonucleotide
ugugccucucguucugauu

SEQ ID NO: 3038849 - RNA, 19 nt, Artificial Sequence
  Description of Artificial Sequence: Synthetic oligonucleotide
gcaucagucagaauccgga

SEQ ID NO: 3038850 - RNA, 19 nt, Artificial Sequence
  Description of Artificial Sequence: Synthetic oligonucleotide
cucuuaaauuaaugcauau

SEQ ID NO: 3038851 - RNA, 19 nt, Artificial Sequence
  Description of Artificial Sequence: Synthetic oligonucleotide
ggcaucagucagaauccgg

SEQ ID NO: 3038852 - RNA, 19 nt, Artificial Sequence
  Description of Artificial Sequence: Synthetic oligonucleotide
ggccgugggacucagggga

SEQ ID NO: 3038853 - RNA, 19 nt, Artificial Sequence
  Description of Artificial Sequence: Synthetic oligonucleotide
ucacuuccuguuguucuuc

SEQ ID NO: 3038854 - RNA, 19 nt, Artificial Sequence
  Description of Artificial Sequence: Synthetic oligonucleotide
aggggaagaaaggcugugu

SEQ ID NO: 3038855 - RNA, 19 nt, Artificial Sequence
  Description of Artificial Sequence: Synthetic oligonucleotide
aucuucacuuccuguuguu

SEQ ID NO: 3038856 - RNA, 19 nt, Artificial Sequence
  Description of Artificial Sequence: Synthetic oligonucleotide
gagaacacacagauuccua

SEQ ID NO: 3038857 - RNA, 19 nt, Artificial Sequence
  Description of Artificial Sequence: Synthetic oligonucleotide
uuccuacaucucgagucac

SEQ ID NO: 3038858 - RNA, 19 nt, Artificial Sequence
  Description of Artificial Sequence: Synthetic oligonucleotide
uuucgcucgcacuguccuc

SEQ ID NO: 3038859 - RNA, 19 nt, Artificial Sequence
  Description of Artificial Sequence: Synthetic oligonucleotide
caguuuccacgcuggccag

SEQ ID NO: 3038860 - RNA, 19 nt, Artificial Sequence
  Description of Artificial Sequence: Synthetic oligonucleotide
uagaagccgccgcccgccc

SEQ ID NO: 3038861 - RNA, 19 nt, Artificial Sequence
  Description of Artificial Sequence: Synthetic oligonucleotide
uugugccucucguucugau

SEQ ID NO: 3038862 - RNA, 19 nt, Artificial Sequence
  Description of Artificial Sequence: Synthetic oligonucleotide
gugccucucguucugauuu

SEQ ID NO: 3038863 - RNA, 19 nt, Artificial Sequence
  Description of Artificial Sequence: Synthetic oligonucleotide
cucuaguaauaucuucacu

SEQ ID NO: 3038864 - RNA, 19 nt, Artificial Sequence
  Description of Artificial Sequence: Synthetic oligonucleotide
gcuguguuuucgcucgcac

SEQ ID NO: 3038865 - RNA, 19 nt, Artificial Sequence
  Description of Artificial Sequence: Synthetic oligonucleotide
uggccaguucguagucuuc

SEQ ID NO: 3038866 - RNA, 19 nt, Artificial Sequence
  Description of Artificial Sequence: Synthetic oligonucleotide
cucguucugauuuggccgu

SEQ ID NO: 3038867 - RNA, 19 nt, Artificial Sequence
  Description of Artificial Sequence: Synthetic oligonucleotide
ggaagaaaggcuguguuuu

SEQ ID NO: 3038868 - RNA, 19 nt, Artificial Sequence
  Description of Artificial Sequence: Synthetic oligonucleotide
cuguugagcaaagcagaga

SEQ ID NO: 3038869 - RNA, 19 nt, Artificial Sequence
  Description of Artificial Sequence: Synthetic oligonucleotide
caggggaagaaaggcugug

SEQ ID NO: 3038870 - RNA, 19 nt, Artificial Sequence
  Description of Artificial Sequence: Synthetic oligonucleotide
cgagucacuugguuaacac

SEQ ID NO: 3038871 - RNA, 19 nt, Artificial Sequence
  Description of Artificial Sequence: Synthetic oligonucleotide
gucacuugguuaacacaga

SEQ ID NO: 3038872 - RNA, 19 nt, Artificial Sequence
  Description of Artificial Sequence: Synthetic oligonucleotide
cacuugguuaacacagagu

SEQ ID NO: 3038873 - RNA, 19 nt, Artificial Sequence
  Description of Artificial Sequence: Synthetic oligonucleotide
gauuuggccgugggacuca

SEQ ID NO: 3038874 - RNA, 19 nt, Artificial Sequence
  Description of Artificial Sequence: Synthetic oligonucleotide
auugugccucucguucuga

SEQ ID NO: 3038875 - RNA, 19 nt, Artificial Sequence
  Description of Artificial Sequence: Synthetic oligonucleotide
gcucuuaaauuaaugcaua

SEQ ID NO: 3038876 - RNA, 19 nt, Artificial Sequence
  Description of Artificial Sequence: Synthetic oligonucleotide
uuuccacgcuggccaguuc

SEQ ID NO: 3038877 - RNA, 19 nt, Artificial Sequence
  Description of Artificial Sequence: Synthetic oligonucleotide
auuuggccgugggacucag

SEQ ID NO: 3038878 - RNA, 19 nt, Artificial Sequence
  Description of Artificial Sequence: Synthetic oligonucleotide
gucuucugaccgucuggca

SEQ ID NO: 3038879 - RNA, 19 nt, Artificial Sequence
  Description of Artificial Sequence: Synthetic oligonucleotide
ucgcucgcacuguccucag

SEQ ID NO: 3038880 - RNA, 19 nt, Artificial Sequence
  Description of Artificial Sequence: Synthetic oligonucleotide
ucguucugauuuggccgug

SEQ ID NO: 3038881 - RNA, 19 nt, Artificial Sequence
  Description of Artificial Sequence: Synthetic oligonucleotide
acaucucgagucacuuggu

SEQ ID NO: 3038882 - RNA, 19 nt, Artificial Sequence
  Description of Artificial Sequence: Synthetic oligonucleotide
cucuuuccuguugagcaaa

SEQ ID NO: 3038883 - RNA, 19 nt, Artificial Sequence
  Description of Artificial Sequence: Synthetic oligonucleotide
cuguguuuucgcucgcacu

SEQ ID NO: 3038884 - RNA, 19 nt, Artificial Sequence
  Description of Artificial Sequence: Synthetic oligonucleotide
cucgagucacuugguuaac

SEQ ID NO: 3038885 - RNA, 19 nt, Artificial Sequence
  Description of Artificial Sequence: Synthetic oligonucleotide
ccucucuuuccuguugagc

SEQ ID NO: 3038886 - RNA, 19 nt, Artificial Sequence
  Description of Artificial Sequence: Synthetic oligonucleotide
cugauuuggccgugggacu

SEQ ID NO: 3038887 - RNA, 19 nt, Artificial Sequence
  Description of Artificial Sequence: Synthetic oligonucleotide
ccucucguucugauuuggc

SEQ ID NO: 3038888 - RNA, 19 nt, Artificial Sequence
  Description of Artificial Sequence: Synthetic oligonucleotide
gccaguucguagucuucug

SEQ ID NO: 3038889 - RNA, 19 nt, Artificial Sequence
  Description of Artificial Sequence: Synthetic oligonucleotide
aagccgccgcccgcccgcc

SEQ ID NO: 3038890 - RNA, 19 nt, Artificial Sequence
  Description of Artificial Sequence: Synthetic oligonucleotide
gccucucguucugauuugg

SEQ ID NO: 3038891 - RNA, 19 nt, Artificial Sequence
  Description of Artificial Sequence: Synthetic oligonucleotide
aguuuccacgcuggccagu

SEQ ID NO: 3038892 - RNA, 19 nt, Artificial Sequence
  Description of Artificial Sequence: Synthetic oligonucleotide
caucagucagaauccggau

SEQ ID NO: 3038893 - RNA, 19 nt, Artificial Sequence
  Description of Artificial Sequence: Synthetic oligonucleotide
cugcacagucucuaguaau

SEQ ID NO: 3038894 - RNA, 19 nt, Artificial Sequence
  Description of Artificial Sequence: Synthetic oligonucleotide
cagucagaauccggaucug

SEQ ID NO: 3038895 - RNA, 19 nt, Artificial Sequence
  Description of Artificial Sequence: Synthetic oligonucleotide
agcagagaacacacagauu

SEQ ID NO: 3038896 - RNA, 19 nt, Artificial Sequence
  Description of Artificial Sequence: Synthetic oligonucleotide
ccaguucguagucuucuga

SEQ ID NO: 3038897 - RNA, 19 nt, Artificial Sequence
  Description of Artificial Sequence: Synthetic oligonucleotide
cugaccgucuggcaucagu

SEQ ID NO: 3038898 - RNA, 19 nt, Artificial Sequence
  Description of Artificial Sequence: Synthetic oligonucleotide
gcaaagcagagaacacaca

SEQ ID NO: 3038899 - RNA, 19 nt, Artificial Sequence
  Description of Artificial Sequence: Synthetic oligonucleotide
gucagaauccggaucuguu

SEQ ID NO: 3038900 - RNA, 19 nt, Artificial Sequence
  Description of Artificial Sequence: Synthetic oligonucleotide
cagucucuaguaauaucuu

SEQ ID NO: 3038901 - RNA, 19 nt, Artificial Sequence
  Description of Artificial Sequence: Synthetic oligonucleotide
ucugaccgucuggcaucag

SEQ ID NO: 3038902 - RNA, 19 nt, Artificial Sequence
  Description of Artificial Sequence: Synthetic oligonucleotide
gggaagaaaggcuguguuu

SEQ ID NO: 3038903 - RNA, 19 nt, Artificial Sequence
  Description of Artificial Sequence: Synthetic oligonucleotide
ccucaguuuccacgcuggc

SEQ ID NO: 3038904 - RNA, 19 nt, Artificial Sequence
  Description of Artificial Sequence: Synthetic oligonucleotide
cggaucuguuccugcacag

SEQ ID NO: 3038905 - RNA, 19 nt, Artificial Sequence
  Description of Artificial Sequence: Synthetic oligonucleotide
cacuuccuguuguucuucu

SEQ ID NO: 3038906 - RNA, 19 nt, Artificial Sequence
  Description of Artificial Sequence: Synthetic oligonucleotide
gagucucuuugaauuucau

SEQ ID NO: 3038907 - RNA, 19 nt, Artificial Sequence
  Description of Artificial Sequence: Synthetic oligonucleotide
gugggacucaggggaagaa

SEQ ID NO: 3038908 - RNA, 19 nt, Artificial Sequence
  Description of Artificial Sequence: Synthetic oligonucleotide
cuggccaguucguagucuu

SEQ ID NO: 3038909 - RNA, 19 nt, Artificial Sequence
  Description of Artificial Sequence: Synthetic oligonucleotide
ccggaucuguuccugcaca

SEQ ID NO: 3038910 - RNA, 19 nt, Artificial Sequence
  Description of Artificial Sequence: Synthetic oligonucleotide
ccugcacagucucuaguaa

SEQ ID NO: 3038911 - RNA, 19 nt, Artificial Sequence
  Description of Artificial Sequence: Synthetic oligonucleotide
guguuuucgcucgcacugu

SEQ ID NO: 3038912 - RNA, 19 nt, Artificial Sequence
  Description of Artificial Sequence: Synthetic oligonucleotide
gcucgcacuguccucaguu

SEQ ID NO: 3038913 - RNA, 19 nt, Artificial Sequence
  Description of Artificial Sequence: Synthetic oligonucleotide
cguucugauuuggccgugg

SEQ ID NO: 3038914 - RNA, 19 nt, Artificial Sequence
  Description of Artificial Sequence: Synthetic oligonucleotide
ccgucuggcaucagucaga

SEQ ID NO: 3038915 - RNA, 19 nt, Artificial Sequence
  Description of Artificial Sequence: Synthetic oligonucleotide
ggccaguucguagucuucu

SEQ ID NO: 3038916 - RNA, 19 nt, Artificial Sequence
  Description of Artificial Sequence: Synthetic oligonucleotide
guuuccacgcuggccaguu

SEQ ID NO: 3038917 - RNA, 19 nt, Artificial Sequence
  Description of Artificial Sequence: Synthetic oligonucleotide
cucgcacuguccucaguuu

SEQ ID NO: 3038918 - RNA, 19 nt, Artificial Sequence
  Description of Artificial Sequence: Synthetic oligonucleotide
gguuaacacagagucucuu

SEQ ID NO: 3038919 - RNA, 19 nt, Artificial Sequence
  Description of Artificial Sequence: Synthetic oligonucleotide
cuguuccugcacagucucu

SEQ ID NO: 3038920 - RNA, 19 nt, Artificial Sequence
  Description of Artificial Sequence: Synthetic oligonucleotide
ggcuguguuuucgcucgca

SEQ ID NO: 3038921 - RNA, 19 nt, Artificial Sequence
  Description of Artificial Sequence: Synthetic oligonucleotide
ggaucuguuccugcacagu

SEQ ID NO: 3038922 - RNA, 19 nt, Artificial Sequence
  Description of Artificial Sequence: Synthetic oligonucleotide
gcacagucucuaguaauau

SEQ ID NO: 3038923 - RNA, 19 nt, Artificial Sequence
  Description of Artificial Sequence: Synthetic oligonucleotide
ccgugggacucaggggaag

SEQ ID NO: 3038924 - RNA, 19 nt, Artificial Sequence
  Description of Artificial Sequence: Synthetic oligonucleotide
ccuacaucucgagucacuu

SEQ ID NO: 3038925 - RNA, 19 nt, Artificial Sequence
  Description of Artificial Sequence: Synthetic oligonucleotide
cgucuggcaucagucagaa

SEQ ID NO: 3038926 - RNA, 19 nt, Artificial Sequence
  Description of Artificial Sequence: Synthetic oligonucleotide
gcuggccaguucguagucu

SEQ ID NO: 3038927 - RNA, 19 nt, Artificial Sequence
  Description of Artificial Sequence: Synthetic oligonucleotide
cgcuggccaguucguaguc

SEQ ID NO: 3038928 - RNA, 19 nt, Artificial Sequence
  Description of Artificial Sequence: Synthetic oligonucleotide
gucuggcaucagucagaau

SEQ ID NO: 3038929 - RNA, 19 nt, Artificial Sequence
  Description of Artificial Sequence: Synthetic oligonucleotide
cgugggacucaggggaaga

SEQ ID NO: 3038930 - RNA, 19 nt, Artificial Sequence
  Description of Artificial Sequence: Synthetic oligonucleotide
cguagucuucugaccgucu

SEQ ID NO: 3038931 - RNA, 19 nt, Artificial Sequence
  Description of Artificial Sequence: Synthetic oligonucleotide
gccgugggacucaggggaa

SEQ ID NO: 3038932 - RNA, 19 nt, Artificial Sequence
  Description of Artificial Sequence: Synthetic oligonucleotide
ccgcccgccgccgccgccg

SEQ ID NO: 3038933 - RNA, 19 nt, Artificial Sequence
  Description of Artificial Sequence: Synthetic oligonucleotide
ccacgcuggccaguucgua

SEQ ID NO: 3038934 - RNA, 19 nt, Artificial Sequence
  Description of Artificial Sequence: Synthetic oligonucleotide
cgcccgccgccgccgccgc

SEQ ID NO: 3038935 - RNA, 19 nt, Artificial Sequence
  Description of Artificial Sequence: Synthetic oligonucleotide
cgcucgcacuguccucagu

SEQ ID NO: 3038936 - RNA, 19 nt, Artificial Sequence
  Description of Artificial Sequence: Synthetic oligonucleotide
uuaaagaucacuuucuucc

SEQ ID NO: 3038937 - RNA, 19 nt, Artificial Sequence
  Description of Artificial Sequence: Synthetic oligonucleotide
aauuacaugagaaacagug

SEQ ID NO: 3038938 - RNA, 19 nt, Artificial Sequence
  Description of Artificial Sequence: Synthetic oligonucleotide
aauuacuuucuccagucuc

SEQ ID NO: 3038939 - RNA, 19 nt, Artificial Sequence
  Description of Artificial Sequence: Synthetic oligonucleotide
aucacuuucuuccacaggg

SEQ ID NO: 3038940 - RNA, 19 nt, Artificial Sequence
  Description of Artificial Sequence: Synthetic oligonucleotide
agaaaguuauuccagaaug

SEQ ID NO: 3038941 - RNA, 19 nt, Artificial Sequence
  Description of Artificial Sequence: Synthetic oligonucleotide
uauaauuacaugagaaaca

SEQ ID NO: 3038942 - RNA, 19 nt, Artificial Sequence
  Description of Artificial Sequence: Synthetic oligonucleotide
aauuguaucaccugggaau

SEQ ID NO: 3038943 - RNA, 19 nt, Artificial Sequence
  Description of Artificial Sequence: Synthetic oligonucleotide
acagugaagagacuuggcc

SEQ ID NO: 3038944 - RNA, 19 nt, Artificial Sequence
  Description of Artificial Sequence: Synthetic oligonucleotide
ugauauuugacguaauagu

SEQ ID NO: 3038945 - RNA, 19 nt, Artificial Sequence
  Description of Artificial Sequence: Synthetic oligonucleotide
aaaguuauuccagaauguc

SEQ ID NO: 3038946 - RNA, 19 nt, Artificial Sequence
  Description of Artificial Sequence: Synthetic oligonucleotide
gauauuugacguaauagug

SEQ ID NO: 3038947 - RNA, 19 nt, Artificial Sequence
  Description of Artificial Sequence: Synthetic oligonucleotide
uaauagugaauaaaccaca

SEQ ID NO: 3038948 - RNA, 19 nt, Artificial Sequence
  Description of Artificial Sequence: Synthetic oligonucleotide
aaagaucacuuucuuccac

SEQ ID NO: 3038949 - RNA, 19 nt, Artificial Sequence
  Description of Artificial Sequence: Synthetic oligonucleotide
uuacaugagaaacagugaa

SEQ ID NO: 3038950 - RNA, 19 nt, Artificial Sequence
  Description of Artificial Sequence: Synthetic oligonucleotide
agugaagagacuuggcccg

SEQ ID NO: 3038951 - RNA, 19 nt, Artificial Sequence
  Description of Artificial Sequence: Synthetic oligonucleotide
agcuacgugauauuugacg

SEQ ID NO: 3038952 - RNA, 19 nt, Artificial Sequence
  Description of Artificial Sequence: Synthetic oligonucleotide
uuagcuacgugauauuuga

SEQ ID NO: 3038953 - RNA, 19 nt, Artificial Sequence
  Description of Artificial Sequence: Synthetic oligonucleotide
accacagagguauaauuac

SEQ ID NO: 3038954 - RNA, 19 nt, Artificial Sequence
  Description of Artificial Sequence: Synthetic oligonucleotide
ugucuuaaagaucacuuuc

SEQ ID NO: 3038955 - RNA, 19 nt, Artificial Sequence
  Description of Artificial Sequence: Synthetic oligonucleotide
aguuauuccagaaugucuc

SEQ ID NO: 3038956 - RNA, 19 nt, Artificial Sequence
  Description of Artificial Sequence: Synthetic oligonucleotide
guauaauuacaugagaaac

SEQ ID NO: 3038957 - RNA, 19 nt, Artificial Sequence
  Description of Artificial Sequence: Synthetic oligonucleotide
uaugucuuaaagaucacuu

SEQ ID NO: 3038958 - RNA, 19 nt, Artificial Sequence
  Description of Artificial Sequence: Synthetic oligonucleotide
aaacagugaagagacuugg

SEQ ID NO: 3038959 - RNA, 19 nt, Artificial Sequence
  Description of Artificial Sequence: Synthetic oligonucleotide
uuuagcuacgugauauuug

SEQ ID NO: 3038960 - RNA, 19 nt, Artificial Sequence
  Description of Artificial Sequence: Synthetic oligonucleotide
aauagugaauaaaccacag

SEQ ID NO: 3038961 - RNA, 19 nt, Artificial Sequence
  Description of Artificial Sequence: Synthetic oligonucleotide
uauuugacguaauagugaa

SEQ ID NO: 3038962 - RNA, 19 nt, Artificial Sequence
  Description of Artificial Sequence: Synthetic oligonucleotide
uuugacguaauagugaaua

SEQ ID NO: 3038963 - RNA, 19 nt, Artificial Sequence
  Description of Artificial Sequence: Synthetic oligonucleotide
uccagaaugucuccagggg

SEQ ID NO: 3038964 - RNA, 19 nt, Artificial Sequence
  Description of Artificial Sequence: Synthetic oligonucleotide
guaauagugaauaaaccac

SEQ ID NO: 3038965 - RNA, 19 nt, Artificial Sequence
  Description of Artificial Sequence: Synthetic oligonucleotide
uacaugagaaacagugaag

SEQ ID NO: 3038966 - RNA, 19 nt, Artificial Sequence
  Description of Artificial Sequence: Synthetic oligonucleotide
gacguaauagugaauaaac

SEQ ID NO: 3038967 - RNA, 19 nt, Artificial Sequence
  Description of Artificial Sequence: Synthetic oligonucleotide
ucagccauugccuucucag

SEQ ID NO: 3038968 - RNA, 19 nt, Artificial Sequence
  Description of Artificial Sequence: Synthetic oligonucleotide
ucaacgauggcauaugguu

SEQ ID NO: 3038969 - RNA, 19 nt, Artificial Sequence
  Description of Artificial Sequence: Synthetic oligonucleotide
ugguccuucagccauugcc

SEQ ID NO: 3038970 - RNA, 19 nt, Artificial Sequence
  Description of Artificial Sequence: Synthetic oligonucleotide
agugaauaaaccacagagg

SEQ ID NO: 3038971 - RNA, 19 nt, Artificial Sequence
  Description of Artificial Sequence: Synthetic oligonucleotide
gugauauuugacguaauag

SEQ ID NO: 3038972 - RNA, 19 nt, Artificial Sequence
  Description of Artificial Sequence: Synthetic oligonucleotide
uuccagaaugucuccaggg

SEQ ID NO: 3038973 - RNA, 19 nt, Artificial Sequence
  Description of Artificial Sequence: Synthetic oligonucleotide
acguaauagugaauaaacc

SEQ ID NO: 3038974 - RNA, 19 nt, Artificial Sequence
  Description of Artificial Sequence: Synthetic oligonucleotide
aagaucacuuucuuccaca

SEQ ID NO: 3038975 - RNA, 19 nt, Artificial Sequence
  Description of Artificial Sequence: Synthetic oligonucleotide
agagguauaauuacaugag

SEQ ID NO: 3038976 - RNA, 19 nt, Artificial Sequence
  Description of Artificial Sequence: Synthetic oligonucleotide
ugucaacgauggcauaugg

SEQ ID NO: 3038977 - RNA, 19 nt, Artificial Sequence
  Description of Artificial Sequence: Synthetic oligonucleotide
cagagguauaauuacauga

SEQ ID NO: 3038978 - RNA, 19 nt, Artificial Sequence
  Description of Artificial Sequence: Synthetic oligonucleotide
cagugaagagacuuggccc

SEQ ID NO: 3038979 - RNA, 19 nt, Artificial Sequence
  Description of Artificial Sequence: Synthetic oligonucleotide
gugaauaaaccacagaggu

SEQ ID NO: 3038980 - RNA, 19 nt, Artificial Sequence
  Description of Artificial Sequence: Synthetic oligonucleotide
aaaccacagagguauaauu

SEQ ID NO: 3038981 - RNA, 19 nt, Artificial Sequence
  Description of Artificial Sequence: Synthetic oligonucleotide
cagaauuguaucaccuggg

SEQ ID NO: 3038982 - RNA, 19 nt, Artificial Sequence
  Description of Artificial Sequence: Synthetic oligonucleotide
gaauaaaccacagagguau

SEQ ID NO: 3038983 - RNA, 19 nt, Artificial Sequence
  Description of Artificial Sequence: Synthetic oligonucleotide
aacagugaagagacuuggc

SEQ ID NO: 3038984 - RNA, 19 nt, Artificial Sequence
  Description of Artificial Sequence: Synthetic oligonucleotide
aaguuauuccagaaugucu

SEQ ID NO: 3038985 - RNA, 19 nt, Artificial Sequence
  Description of Artificial Sequence: Synthetic oligonucleotide
uaaagaucacuuucuucca

SEQ ID NO: 3038986 - RNA, 19 nt, Artificial Sequence
  Description of Artificial Sequence: Synthetic oligonucleotide
cagaaugucuccaggggcc

SEQ ID NO: 3038987 - RNA, 19 nt, Artificial Sequence
  Description of Artificial Sequence: Synthetic oligonucleotide
auuccagaaugucuccagg

SEQ ID NO: 3038988 - RNA, 19 nt, Artificial Sequence
  Description of Artificial Sequence: Synthetic oligonucleotide
aacgauggcauaugguuuu

SEQ ID NO: 3038989 - RNA, 19 nt, Artificial Sequence
  Description of Artificial Sequence: Synthetic oligonucleotide
agaauuguaucaccuggga

SEQ ID NO: 3038990 - RNA, 19 nt, Artificial Sequence
  Description of Artificial Sequence: Synthetic oligonucleotide
uucgugucaacgauggcau

SEQ ID NO: 3038991 - RNA, 19 nt, Artificial Sequence
  Description of Artificial Sequence: Synthetic oligonucleotide
acagagguauaauuacaug

SEQ ID NO: 3038992 - RNA, 19 nt, Artificial Sequence
  Description of Artificial Sequence: Synthetic oligonucleotide
gaaacagugaagagacuug

SEQ ID NO: 3038993 - RNA, 19 nt, Artificial Sequence
  Description of Artificial Sequence: Synthetic oligonucleotide
acuuucuccagucuccaga

SEQ ID NO: 3038994 - RNA, 19 nt, Artificial Sequence
  Description of Artificial Sequence: Synthetic oligonucleotide
auauuugacguaauaguga

SEQ ID NO: 3038995 - RNA, 19 nt, Artificial Sequence
  Description of Artificial Sequence: Synthetic oligonucleotide
agaucacuuucuuccacag

SEQ ID NO: 3038996 - RNA, 19 nt, Artificial Sequence
  Description of Artificial Sequence: Synthetic oligonucleotide
ugaauaaaccacagaggua

SEQ ID NO: 3038997 - RNA, 19 nt, Artificial Sequence
  Description of Artificial Sequence: Synthetic oligonucleotide
ucuuaaagaucacuuucuu

SEQ ID NO: 3038998 - RNA, 19 nt, Artificial Sequence
  Description of Artificial Sequence: Synthetic oligonucleotide
acuuucuuccacagggccc

SEQ ID NO: 3038999 - RNA, 19 nt, Artificial Sequence
  Description of Artificial Sequence: Synthetic oligonucleotide
ucuccagaauuguaucacc

SEQ ID NO: 3039000 - RNA, 19 nt, Artificial Sequence
  Description of Artificial Sequence: Synthetic oligonucleotide
uucucauccgguguguacc

SEQ ID NO: 3039001 - RNA, 19 nt, Artificial Sequence
  Description of Artificial Sequence: Synthetic oligonucleotide
gaucacuuucuuccacagg

SEQ ID NO: 3039002 - RNA, 19 nt, Artificial Sequence
  Description of Artificial Sequence: Synthetic oligonucleotide
uguaccccgucauuguccc

SEQ ID NO: 3039003 - RNA, 19 nt, Artificial Sequence
  Description of Artificial Sequence: Synthetic oligonucleotide
agaaacagugaagagacuu

SEQ ID NO: 3039004 - RNA, 19 nt, Artificial Sequence
  Description of Artificial Sequence: Synthetic oligonucleotide
uucuccagucuccagaauu

SEQ ID NO: 3039005 - RNA, 19 nt, Artificial Sequence
  Description of Artificial Sequence: Synthetic oligonucleotide
gagguauaauuacaugaga

SEQ ID NO: 3039006 - RNA, 19 nt, Artificial Sequence
  Description of Artificial Sequence: Synthetic oligonucleotide
guuauuccagaaugucucc

SEQ ID NO: 3039007 - RNA, 19 nt, Artificial Sequence
  Description of Artificial Sequence: Synthetic oligonucleotide
ucauccgguguguaccccg

SEQ ID NO: 3039008 - RNA, 19 nt, Artificial Sequence
  Description of Artificial Sequence: Synthetic oligonucleotide
cuuucuuccacagggcccc

SEQ ID NO: 3039009 - RNA, 19 nt, Artificial Sequence
  Description of Artificial Sequence: Synthetic oligonucleotide
uaauuacaugagaaacagu

SEQ ID NO: 3039010 - RNA, 19 nt, Artificial Sequence
  Description of Artificial Sequence: Synthetic oligonucleotide
agagacuuggcccgguaug

SEQ ID NO: 3039011 - RNA, 19 nt, Artificial Sequence
  Description of Artificial Sequence: Synthetic oligonucleotide
uugcgcgguggcaacacgg

SEQ ID NO: 3039012 - RNA, 19 nt, Artificial Sequence
  Description of Artificial Sequence: Synthetic oligonucleotide
ugacguaauagugaauaaa

SEQ ID NO: 3039013 - RNA, 19 nt, Artificial Sequence
  Description of Artificial Sequence: Synthetic oligonucleotide
uacgugauauuugacguaa

SEQ ID NO: 3039014 - RNA, 19 nt, Artificial Sequence
  Description of Artificial Sequence: Synthetic oligonucleotide
aaugucuccaggggccacg

SEQ ID NO: 3039015 - RNA, 19 nt, Artificial Sequence
  Description of Artificial Sequence: Synthetic oligonucleotide
uuugggcuucgugucaacg

SEQ ID NO: 3039016 - RNA, 19 nt, Artificial Sequence
  Description of Artificial Sequence: Synthetic oligonucleotide
ccagaauuguaucaccugg

SEQ ID NO: 3039017 - RNA, 19 nt, Artificial Sequence
  Description of Artificial Sequence: Synthetic oligonucleotide
ucacuuucuuccacagggc

SEQ ID NO: 3039018 - RNA, 19 nt, Artificial Sequence
  Description of Artificial Sequence: Synthetic oligonucleotide
ucccgcagaaaguuauucc

SEQ ID NO: 3039019 - RNA, 19 nt, Artificial Sequence
  Description of Artificial Sequence: Synthetic oligonucleotide
cacuuucuuccacagggcc

SEQ ID NO: 3039020 - RNA, 19 nt, Artificial Sequence
  Description of Artificial Sequence: Synthetic oligonucleotide
agucuccagaauuguauca

SEQ ID NO: 3039021 - RNA, 19 nt, Artificial Sequence
  Description of Artificial Sequence: Synthetic oligonucleotide
uaccccgucauuguccccg

SEQ ID NO: 3039022 - RNA, 19 nt, Artificial Sequence
  Description of Artificial Sequence: Synthetic oligonucleotide
gaauuguaucaccugggaa

SEQ ID NO: 3039023 - RNA, 19 nt, Artificial Sequence
  Description of Artificial Sequence: Synthetic oligonucleotide
auuacaugagaaacaguga

SEQ ID NO: 3039024 - RNA, 19 nt, Artificial Sequence
  Description of Artificial Sequence: Synthetic oligonucleotide
agccauugccuucucagca

SEQ ID NO: 3039025 - RNA, 19 nt, Artificial Sequence
  Description of Artificial Sequence: Synthetic oligonucleotide
aaccacagagguauaauua

SEQ ID NO: 3039026 - RNA, 19 nt, Artificial Sequence
  Description of Artificial Sequence: Synthetic oligonucleotide
uuauuccagaaugucucca

SEQ ID NO: 3039027 - RNA, 19 nt, Artificial Sequence
  Description of Artificial Sequence: Synthetic oligonucleotide
uuuuagcuacgugauauuu

SEQ ID NO: 3039028 - RNA, 19 nt, Artificial Sequence
  Description of Artificial Sequence: Synthetic oligonucleotide
uugacguaauagugaauaa

SEQ ID NO: 3039029 - RNA, 19 nt, Artificial Sequence
  Description of Artificial Sequence: Synthetic oligonucleotide
uugggcuucgugucaacga

SEQ ID NO: 3039030 - RNA, 19 nt, Artificial Sequence
  Description of Artificial Sequence: Synthetic oligonucleotide
augucuuaaagaucacuuu

SEQ ID NO: 3039031 - RNA, 19 nt, Artificial Sequence
  Description of Artificial Sequence: Synthetic oligonucleotide
ugcgcgguggcaacacggg

SEQ ID NO: 3039032 - RNA, 19 nt, Artificial Sequence
  Description of Artificial Sequence: Synthetic oligonucleotide
aagagacuuggcccgguau

SEQ ID NO: 3039033 - RNA, 19 nt, Artificial Sequence
  Description of Artificial Sequence: Synthetic oligonucleotide
cguaauagugaauaaacca

SEQ ID NO: 3039034 - RNA, 19 nt, Artificial Sequence
  Description of Artificial Sequence: Synthetic oligonucleotide
uuccacagggccccguccc

SEQ ID NO: 3039035 - RNA, 19 nt, Artificial Sequence
  Description of Artificial Sequence: Synthetic oligonucleotide
cuucgugucaacgauggca

SEQ ID NO: 3039036 - RNA, 19 nt, Artificial Sequence
  Description of Artificial Sequence: Synthetic oligonucleotide
uaaaccacagagguauaau

SEQ ID NO: 3039037 - RNA, 19 nt, Artificial Sequence
  Description of Artificial Sequence: Synthetic oligonucleotide
ucucagcacccgcagcugc

SEQ ID NO: 3039038 - RNA, 19 nt, Artificial Sequence
  Description of Artificial Sequence: Synthetic oligonucleotide
auugccuucucagcacccg

SEQ ID NO: 3039039 - RNA, 19 nt, Artificial Sequence
  Description of Artificial Sequence: Synthetic oligonucleotide
ucaguuccugguccuucag

SEQ ID NO: 3039040 - RNA, 19 nt, Artificial Sequence
  Description of Artificial Sequence: Synthetic oligonucleotide
uguguaccccgucauuguc

SEQ ID NO: 3039041 - RNA, 19 nt, Artificial Sequence
  Description of Artificial Sequence: Synthetic oligonucleotide
uuccugguccuucagccau

SEQ ID NO: 3039042 - RNA, 19 nt, Artificial Sequence
  Description of Artificial Sequence: Synthetic oligonucleotide
ucauuguccccggcgagcc

SEQ ID NO: 3039043 - RNA, 19 nt, Artificial Sequence
  Description of Artificial Sequence: Synthetic oligonucleotide
uccgguguguaccccguca

SEQ ID NO: 3039044 - RNA, 19 nt, Artificial Sequence
  Description of Artificial Sequence: Synthetic oligonucleotide
aggggccacgucuugcgcg

SEQ ID NO: 3039045 - RNA, 19 nt, Artificial Sequence
  Description of Artificial Sequence: Synthetic oligonucleotide
ugggcuucgugucaacgau

SEQ ID NO: 3039046 - RNA, 19 nt, Artificial Sequence
  Description of Artificial Sequence: Synthetic oligonucleotide
gaaaguuauuccagaaugu

SEQ ID NO: 3039047 - RNA, 19 nt, Artificial Sequence
  Description of Artificial Sequence: Synthetic oligonucleotide
uuacuuucuccagucucca

SEQ ID NO: 3039048 - RNA, 19 nt, Artificial Sequence
  Description of Artificial Sequence: Synthetic oligonucleotide
uaucaccugggaauauuuu

SEQ ID NO: 3039049 - RNA, 19 nt, Artificial Sequence
  Description of Artificial Sequence: Synthetic oligonucleotide
cuucucauccgguguguac

SEQ ID NO: 3039050 - RNA, 19 nt, Artificial Sequence
  Description of Artificial Sequence: Synthetic oligonucleotide
uugccuucucagcacccgc

SEQ ID NO: 3039051 - RNA, 19 nt, Artificial Sequence
  Description of Artificial Sequence: Synthetic oligonucleotide
cagucuccagaauuguauc

SEQ ID NO: 3039052 - RNA, 19 nt, Artificial Sequence
  Description of Artificial Sequence: Synthetic oligonucleotide
auuguaucaccugggaaua

SEQ ID NO: 3039053 - RNA, 19 nt, Artificial Sequence
  Description of Artificial Sequence: Synthetic oligonucleotide
ggcuucgugucaacgaugg

SEQ ID NO: 3039054 - RNA, 19 nt, Artificial Sequence
  Description of Artificial Sequence: Synthetic oligonucleotide
auaaaccacagagguauaa

SEQ ID NO: 3039055 - RNA, 19 nt, Artificial Sequence
  Description of Artificial Sequence: Synthetic oligonucleotide
uccacagggccccgucccg

SEQ ID NO: 3039056 - RNA, 19 nt, Artificial Sequence
  Description of Artificial Sequence: Synthetic oligonucleotide
gucuccagaauuguaucac

SEQ ID NO: 3039057 - RNA, 19 nt, Artificial Sequence
  Description of Artificial Sequence: Synthetic oligonucleotide
cauugccuucucagcaccc

SEQ ID NO: 3039058 - RNA, 19 nt, Artificial Sequence
  Description of Artificial Sequence: Synthetic oligonucleotide
ugccuucucagcacccgca

SEQ ID NO: 3039059 - RNA, 19 nt, Artificial Sequence
  Description of Artificial Sequence: Synthetic oligonucleotide
cagccauugccuucucagc

SEQ ID NO: 3039060 - RNA, 19 nt, Artificial Sequence
  Description of Artificial Sequence: Synthetic oligonucleotide
gguguguaccccgucauug

SEQ ID NO: 3039061 - RNA, 19 nt, Artificial Sequence
  Description of Artificial Sequence: Synthetic oligonucleotide
uccagucuccagaauugua

SEQ ID NO: 3039062 - RNA, 19 nt, Artificial Sequence
  Description of Artificial Sequence: Synthetic oligonucleotide
ggcaacacgggcucccggg

SEQ ID NO: 3039063 - RNA, 19 nt, Artificial Sequence
  Description of Artificial Sequence: Synthetic oligonucleotide
cuuucuccagucuccagaa

SEQ ID NO: 3039064 - RNA, 19 nt, Artificial Sequence
  Description of Artificial Sequence: Synthetic oligonucleotide
ccagaaugucuccaggggc

SEQ ID NO: 3039065 - RNA, 19 nt, Artificial Sequence
  Description of Artificial Sequence: Synthetic oligonucleotide
cgguaugucuuaaagauca

SEQ ID NO: 3039066 - RNA, 19 nt, Artificial Sequence
  Description of Artificial Sequence: Synthetic oligonucleotide
uagcuacgugauauuugac

SEQ ID NO: 3039067 - RNA, 19 nt, Artificial Sequence
  Description of Artificial Sequence: Synthetic oligonucleotide
ucuuccacagggccccguc

SEQ ID NO: 3039068 - RNA, 19 nt, Artificial Sequence
  Description of Artificial Sequence: Synthetic oligonucleotide
gcuacgugauauuugacgu

SEQ ID NO: 3039069 - RNA, 19 nt, Artificial Sequence
  Description of Artificial Sequence: Synthetic oligonucleotide
uggcaacacgggcucccgg

SEQ ID NO: 3039070 - RNA, 19 nt, Artificial Sequence
  Description of Artificial Sequence: Synthetic oligonucleotide
caguuccugguccuucagc

SEQ ID NO: 3039071 - RNA, 19 nt, Artificial Sequence
  Description of Artificial Sequence: Synthetic oligonucleotide
agccgcagcuucucauccg

SEQ ID NO: 3039072 - RNA, 19 nt, Artificial Sequence
  Description of Artificial Sequence: Synthetic oligonucleotide
gucuuaaagaucacuuucu

SEQ ID NO: 3039073 - RNA, 19 nt, Artificial Sequence
  Description of Artificial Sequence: Synthetic oligonucleotide
ggcccgguaugucuuaaag

SEQ ID NO: 3039074 - RNA, 19 nt, Artificial Sequence
  Description of Artificial Sequence: Synthetic oligonucleotide
guguaccccgucauugucc

SEQ ID NO: 3039075 - RNA, 19 nt, Artificial Sequence
  Description of Artificial Sequence: Synthetic oligonucleotide
cuuccacagggccccgucc

SEQ ID NO: 3039076 - RNA, 19 nt, Artificial Sequence
  Description of Artificial Sequence: Synthetic oligonucleotide
cacagagguauaauuacau

SEQ ID NO: 3039077 - RNA, 19 nt, Artificial Sequence
  Description of Artificial Sequence: Synthetic oligonucleotide
ggccccgucccgcagaaag

SEQ ID NO: 3039078 - RNA, 19 nt, Artificial Sequence
  Description of Artificial Sequence: Synthetic oligonucleotide
cagcuucucauccggugug

SEQ ID NO: 3039079 - RNA, 19 nt, Artificial Sequence
  Description of Artificial Sequence: Synthetic oligonucleotide
cagccgcagcuucucaucc

SEQ ID NO: 3039080 - RNA, 19 nt, Artificial Sequence
  Description of Artificial Sequence: Synthetic oligonucleotide
gugucaacgauggcauaug

SEQ ID NO: 3039081 - RNA, 19 nt, Artificial Sequence
  Description of Artificial Sequence: Synthetic oligonucleotide
gucauuguccccggcgagc

SEQ ID NO: 3039082 - RNA, 19 nt, Artificial Sequence
  Description of Artificial Sequence: Synthetic oligonucleotide
aauaaaccacagagguaua

SEQ ID NO: 3039083 - RNA, 19 nt, Artificial Sequence
  Description of Artificial Sequence: Synthetic oligonucleotide
ucuccaggggccacgucuu

SEQ ID NO: 3039084 - RNA, 19 nt, Artificial Sequence
  Description of Artificial Sequence: Synthetic oligonucleotide
uuuugggcuucgugucaac

SEQ ID NO: 3039085 - RNA, 19 nt, Artificial Sequence
  Description of Artificial Sequence: Synthetic oligonucleotide
cuugcgcgguggcaacacg

SEQ ID NO: 3039086 - RNA, 19 nt, Artificial Sequence
  Description of Artificial Sequence: Synthetic oligonucleotide
gugaagagacuuggcccgg

SEQ ID NO: 3039087 - RNA, 19 nt, Artificial Sequence
  Description of Artificial Sequence: Synthetic oligonucleotide
ugcagccgcagcuucucau

SEQ ID NO: 3039088 - RNA, 19 nt, Artificial Sequence
  Description of Artificial Sequence: Synthetic oligonucleotide
agaaugucuccaggggcca

SEQ ID NO: 3039089 - RNA, 19 nt, Artificial Sequence
  Description of Artificial Sequence: Synthetic oligonucleotide
ggggcucaguuccuggucc

SEQ ID NO: 3039090 - RNA, 19 nt, Artificial Sequence
  Description of Artificial Sequence: Synthetic oligonucleotide
agacuuggcccgguauguc

SEQ ID NO: 3039091 - RNA, 19 nt, Artificial Sequence
  Description of Artificial Sequence: Synthetic oligonucleotide
uucucagcacccgcagcug

SEQ ID NO: 3039092 - RNA, 19 nt, Artificial Sequence
  Description of Artificial Sequence: Synthetic oligonucleotide
cuccagaauuguaucaccu

SEQ ID NO: 3039093 - RNA, 19 nt, Artificial Sequence
  Description of Artificial Sequence: Synthetic oligonucleotide
guaugucuuaaagaucacu

SEQ ID NO: 3039094 - RNA, 19 nt, Artificial Sequence
  Description of Artificial Sequence: Synthetic oligonucleotide
cuucucagcacccgcagcu

SEQ ID NO: 3039095 - RNA, 19 nt, Artificial Sequence
  Description of Artificial Sequence: Synthetic oligonucleotide
ucuugcgcgguggcaacac

SEQ ID NO: 3039096 - RNA, 19 nt, Artificial Sequence
  Description of Artificial Sequence: Synthetic oligonucleotide
ccgcagaaaguuauuccag

SEQ ID NO: 3039097 - RNA, 19 nt, Artificial Sequence
  Description of Artificial Sequence: Synthetic oligonucleotide
cucaguuccugguccuuca

SEQ ID NO: 3039098 - RNA, 19 nt, Artificial Sequence
  Description of Artificial Sequence: Synthetic oligonucleotide
gccgcagcuucucauccgg

SEQ ID NO: 3039099 - RNA, 19 nt, Artificial Sequence
  Description of Artificial Sequence: Synthetic oligonucleotide
uccaggggccacgucuugc

SEQ ID NO: 3039100 - RNA, 19 nt, Artificial Sequence
  Description of Artificial Sequence: Synthetic oligonucleotide
gacuuggcccgguaugucu

SEQ ID NO: 3039101 - RNA, 19 nt, Artificial Sequence
  Description of Artificial Sequence: Synthetic oligonucleotide
gucuccaggggccacgucu

SEQ ID NO: 3039102 - RNA, 19 nt, Artificial Sequence
  Description of Artificial Sequence: Synthetic oligonucleotide
guuccugguccuucagcca

SEQ ID NO: 3039103 - RNA, 19 nt, Artificial Sequence
  Description of Artificial Sequence: Synthetic oligonucleotide
cagaaaguuauuccagaau

SEQ ID NO: 3039104 - RNA, 19 nt, Artificial Sequence
  Description of Artificial Sequence: Synthetic oligonucleotide
ugaagagacuuggcccggu

SEQ ID NO: 3039105 - RNA, 19 nt, Artificial Sequence
  Description of Artificial Sequence: Synthetic oligonucleotide
cccgcagaaaguuauucca

SEQ ID NO: 3039106 - RNA, 19 nt, Artificial Sequence
  Description of Artificial Sequence: Synthetic oligonucleotide
cuacgugauauuugacgua

SEQ ID NO: 3039107 - RNA, 19 nt, Artificial Sequence
  Description of Artificial Sequence: Synthetic oligonucleotide
ggggccacgucuugcgcgg

SEQ ID NO: 3039108 - RNA, 19 nt, Artificial Sequence
  Description of Artificial Sequence: Synthetic oligonucleotide
gcaacacgggcucccgggg

SEQ ID NO: 3039109 - RNA, 19 nt, Artificial Sequence
  Description of Artificial Sequence: Synthetic oligonucleotide
gucccgcagaaaguuauuc

SEQ ID NO: 3039110 - RNA, 19 nt, Artificial Sequence
  Description of Artificial Sequence: Synthetic oligonucleotide
auccgguguguaccccguc

SEQ ID NO: 3039111 - RNA, 19 nt, Artificial Sequence
  Description of Artificial Sequence: Synthetic oligonucleotide
uuucuuccacagggccccg

SEQ ID NO: 3039112 - RNA, 19 nt, Artificial Sequence
  Description of Artificial Sequence: Synthetic oligonucleotide
auuugacguaauagugaau

SEQ ID NO: 3039113 - RNA, 19 nt, Artificial Sequence
  Description of Artificial Sequence: Synthetic oligonucleotide
gaagagacuuggcccggua

SEQ ID NO: 3039114 - RNA, 19 nt, Artificial Sequence
  Description of Artificial Sequence: Synthetic oligonucleotide
acgucuugcgcgguggcaa

SEQ ID NO: 3039115 - RNA, 19 nt, Artificial Sequence
  Description of Artificial Sequence: Synthetic oligonucleotide
ccauugccuucucagcacc

SEQ ID NO: 3039116 - RNA, 19 nt, Artificial Sequence
  Description of Artificial Sequence: Synthetic oligonucleotide
cccgucauuguccccggcg

SEQ ID NO: 3039117 - RNA, 19 nt, Artificial Sequence
  Description of Artificial Sequence: Synthetic oligonucleotide
gccauugccuucucagcac

SEQ ID NO: 3039118 - RNA, 19 nt, Artificial Sequence
  Description of Artificial Sequence: Synthetic oligonucleotide
uuguaucaccugggaauau

SEQ ID NO: 3039119 - RNA, 19 nt, Artificial Sequence
  Description of Artificial Sequence: Synthetic oligonucleotide
gagacuuggcccgguaugu

SEQ ID NO: 3039120 - RNA, 19 nt, Artificial Sequence
  Description of Artificial Sequence: Synthetic oligonucleotide
ccaggggccacgucuugcg

SEQ ID NO: 3039121 - RNA, 19 nt, Artificial Sequence
  Description of Artificial Sequence: Synthetic oligonucleotide
cccgguaugucuuaaagau

SEQ ID NO: 3039122 - RNA, 19 nt, Artificial Sequence
  Description of Artificial Sequence: Synthetic oligonucleotide
guggcaacacgggcucccg

SEQ ID NO: 3039123 - RNA, 19 nt, Artificial Sequence
  Description of Artificial Sequence: Synthetic oligonucleotide
gaaugucuccaggggccac

SEQ ID NO: 3039124 - RNA, 19 nt, Artificial Sequence
  Description of Artificial Sequence: Synthetic oligonucleotide
ccacagagguauaauuaca

SEQ ID NO: 3039125 - RNA, 19 nt, Artificial Sequence
  Description of Artificial Sequence: Synthetic oligonucleotide
gcccgguaugucuuaaaga

SEQ ID NO: 3039126 - RNA, 19 nt, Artificial Sequence
  Description of Artificial Sequence: Synthetic oligonucleotide
ccgguaugucuuaaagauc

SEQ ID NO: 3039127 - RNA, 19 nt, Artificial Sequence
  Description of Artificial Sequence: Synthetic oligonucleotide
agcuucucauccggugugu

SEQ ID NO: 3039128 - RNA, 19 nt, Artificial Sequence
  Description of Artificial Sequence: Synthetic oligonucleotide
cucauccgguguguacccc

SEQ ID NO: 3039129 - RNA, 19 nt, Artificial Sequence
  Description of Artificial Sequence: Synthetic oligonucleotide
caacgauggcauaugguuu

SEQ ID NO: 3039130 - RNA, 19 nt, Artificial Sequence
  Description of Artificial Sequence: Synthetic oligonucleotide
gccuucucagcacccgcag

SEQ ID NO: 3039131 - RNA, 19 nt, Artificial Sequence
  Description of Artificial Sequence: Synthetic oligonucleotide
gguggcaacacgggcuccc

SEQ ID NO: 3039132 - RNA, 19 nt, Artificial Sequence
  Description of Artificial Sequence: Synthetic oligonucleotide
acagggccccgucccgcag

SEQ ID NO: 3039133 - RNA, 19 nt, Artificial Sequence
  Description of Artificial Sequence: Synthetic oligonucleotide
guguguaccccgucauugu

SEQ ID NO: 3039134 - RNA, 19 nt, Artificial Sequence
  Description of Artificial Sequence: Synthetic oligonucleotide
caggggccacgucuugcgc

SEQ ID NO: 3039135 - RNA, 19 nt, Artificial Sequence
  Description of Artificial Sequence: Synthetic oligonucleotide
gucaacgauggcauauggu

SEQ ID NO: 3039136 - RNA, 19 nt, Artificial Sequence
  Description of Artificial Sequence: Synthetic oligonucleotide
ucgugucaacgauggcaua

SEQ ID NO: 3039137 - RNA, 19 nt, Artificial Sequence
  Description of Artificial Sequence: Synthetic oligonucleotide
uccugguccuucagccauu

SEQ ID NO: 3039138 - RNA, 19 nt, Artificial Sequence
  Description of Artificial Sequence: Synthetic oligonucleotide
cagcacccgcagcugcugc

SEQ ID NO: 3039139 - RNA, 19 nt, Artificial Sequence
  Description of Artificial Sequence: Synthetic oligonucleotide
cugguccuucagccauugc

SEQ ID NO: 3039140 - RNA, 19 nt, Artificial Sequence
  Description of Artificial Sequence: Synthetic oligonucleotide
uggcccgguaugucuuaaa

SEQ ID NO: 3039141 - RNA, 19 nt, Artificial Sequence
  Description of Artificial Sequence: Synthetic oligonucleotide
guaucaccugggaauauuu

SEQ ID NO: 3039142 - RNA, 19 nt, Artificial Sequence
  Description of Artificial Sequence: Synthetic oligonucleotide
acuuggcccgguaugucuu

SEQ ID NO: 3039143 - RNA, 19 nt, Artificial Sequence
  Description of Artificial Sequence: Synthetic oligonucleotide
gccacgucuugcgcggugg

SEQ ID NO: 3039144 - RNA, 19 nt, Artificial Sequence
  Description of Artificial Sequence: Synthetic oligonucleotide
augucuccaggggccacgu

SEQ ID NO: 3039145 - RNA, 19 nt, Artificial Sequence
  Description of Artificial Sequence: Synthetic oligonucleotide
ccuucucagcacccgcagc

SEQ ID NO: 3039146 - RNA, 19 nt, Artificial Sequence
  Description of Artificial Sequence: Synthetic oligonucleotide
uuggcccgguaugucuuaa

SEQ ID NO: 3039147 - RNA, 19 nt, Artificial Sequence
  Description of Artificial Sequence: Synthetic oligonucleotide
cgcagaaaguuauuccaga

SEQ ID NO: 3039148 - RNA, 19 nt, Artificial Sequence
  Description of Artificial Sequence: Synthetic oligonucleotide
uucuuccacagggccccgu

SEQ ID NO: 3039149 - RNA, 19 nt, Artificial Sequence
  Description of Artificial Sequence: Synthetic oligonucleotide
ccagucuccagaauuguau

SEQ ID NO: 3039150 - RNA, 19 nt, Artificial Sequence
  Description of Artificial Sequence: Synthetic oligonucleotide
gcagcuucucauccggugu

SEQ ID NO: 3039151 - RNA, 19 nt, Artificial Sequence
  Description of Artificial Sequence: Synthetic oligonucleotide
guaccccgucauugucccc

SEQ ID NO: 3039152 - RNA, 19 nt, Artificial Sequence
  Description of Artificial Sequence: Synthetic oligonucleotide
gagaaacagugaagagacu

SEQ ID NO: 3039153 - RNA, 19 nt, Artificial Sequence
  Description of Artificial Sequence: Synthetic oligonucleotide
gcuucgugucaacgauggc

SEQ ID NO: 3039154 - RNA, 19 nt, Artificial Sequence
  Description of Artificial Sequence: Synthetic oligonucleotide
acgugauauuugacguaau

SEQ ID NO: 3039155 - RNA, 19 nt, Artificial Sequence
  Description of Artificial Sequence: Synthetic oligonucleotide
gcgguggcaacacgggcuc

SEQ ID NO: 3039156 - RNA, 19 nt, Artificial Sequence
  Description of Artificial Sequence: Synthetic oligonucleotide
cuccaggggccacgucuug

SEQ ID NO: 3039157 - RNA, 19 nt, Artificial Sequence
  Description of Artificial Sequence: Synthetic oligonucleotide
cgcagcuucucauccggug

SEQ ID NO: 3039158 - RNA, 19 nt, Artificial Sequence
  Description of Artificial Sequence: Synthetic oligonucleotide
cgugauauuugacguaaua

SEQ ID NO: 3039159 - RNA, 19 nt, Artificial Sequence
  Description of Artificial Sequence: Synthetic oligonucleotide
gggcuucgugucaacgaug

SEQ ID NO: 3039160 - RNA, 19 nt, Artificial Sequence
  Description of Artificial Sequence: Synthetic oligonucleotide
agggccccgucccgcagaa

SEQ ID NO: 3039161 - RNA, 19 nt, Artificial Sequence
  Description of Artificial Sequence: Synthetic oligonucleotide
cuuggcccgguaugucuua

SEQ ID NO: 3039162 - RNA, 19 nt, Artificial Sequence
  Description of Artificial Sequence: Synthetic oligonucleotide
cucagcacccgcagcugcu

SEQ ID NO: 3039163 - RNA, 19 nt, Artificial Sequence
  Description of Artificial Sequence: Synthetic oligonucleotide
cacagggccccgucccgca

SEQ ID NO: 3039164 - RNA, 19 nt, Artificial Sequence
  Description of Artificial Sequence: Synthetic oligonucleotide
gcucaguuccugguccuuc

SEQ ID NO: 3039165 - RNA, 19 nt, Artificial Sequence
  Description of Artificial Sequence: Synthetic oligonucleotide
ccgucauuguccccggcga

SEQ ID NO: 3039166 - RNA, 19 nt, Artificial Sequence
  Description of Artificial Sequence: Synthetic oligonucleotide
gcgcgguggcaacacgggc

SEQ ID NO: 3039167 - RNA, 19 nt, Artificial Sequence
  Description of Artificial Sequence: Synthetic oligonucleotide
cgucauuguccccggcgag

SEQ ID NO: 3039168 - RNA, 19 nt, Artificial Sequence
  Description of Artificial Sequence: Synthetic oligonucleotide
gucuugcgcgguggcaaca

SEQ ID NO: 3039169 - RNA, 19 nt, Artificial Sequence
  Description of Artificial Sequence: Synthetic oligonucleotide
guccuucagccauugccuu

SEQ ID NO: 3039170 - RNA, 19 nt, Artificial Sequence
  Description of Artificial Sequence: Synthetic oligonucleotide
cacgucuugcgcgguggca

SEQ ID NO: 3039171 - RNA, 19 nt, Artificial Sequence
  Description of Artificial Sequence: Synthetic oligonucleotide
cauccgguguguaccccgu

SEQ ID NO: 3039172 - RNA, 19 nt, Artificial Sequence
  Description of Artificial Sequence: Synthetic oligonucleotide
gcacccgcagcugcugcag

SEQ ID NO: 3039173 - RNA, 19 nt, Artificial Sequence
  Description of Artificial Sequence: Synthetic oligonucleotide
cccgcagcugcugcagccg

SEQ ID NO: 3039174 - RNA, 19 nt, Artificial Sequence
  Description of Artificial Sequence: Synthetic oligonucleotide
ccugguccuucagccauug

SEQ ID NO: 3039175 - RNA, 19 nt, Artificial Sequence
  Description of Artificial Sequence: Synthetic oligonucleotide
cuccagucuccagaauugu

SEQ ID NO: 3039176 - RNA, 19 nt, Artificial Sequence
  Description of Artificial Sequence: Synthetic oligonucleotide
ggccacgucuugcgcggug

SEQ ID NO: 3039177 - RNA, 19 nt, Artificial Sequence
  Description of Artificial Sequence: Synthetic oligonucleotide
ccacgucuugcgcgguggc

SEQ ID NO: 3039178 - RNA, 19 nt, Artificial Sequence
  Description of Artificial Sequence: Synthetic oligonucleotide
cugcagccgcagcuucuca

SEQ ID NO: 3039179 - RNA, 19 nt, Artificial Sequence
  Description of Artificial Sequence: Synthetic oligonucleotide
cagggccccgucccgcaga

SEQ ID NO: 3039180 - RNA, 19 nt, Artificial Sequence
  Description of Artificial Sequence: Synthetic oligonucleotide
cgucuugcgcgguggcaac

SEQ ID NO: 3039181 - RNA, 19 nt, Artificial Sequence
  Description of Artificial Sequence: Synthetic oligonucleotide
ccacagggccccgucccgc

SEQ ID NO: 3039182 - RNA, 19 nt, Artificial Sequence
  Description of Artificial Sequence: Synthetic oligonucleotide
gggcucaguuccugguccu

SEQ ID NO: 3039183 - RNA, 19 nt, Artificial Sequence
  Description of Artificial Sequence: Synthetic oligonucleotide
gcuucucauccggugugua

SEQ ID NO: 3039184 - RNA, 19 nt, Artificial Sequence
  Description of Artificial Sequence: Synthetic oligonucleotide
cauuguccccggcgagccu

SEQ ID NO: 3039185 - RNA, 19 nt, Artificial Sequence
  Description of Artificial Sequence: Synthetic oligonucleotide
ccgucccgcagaaaguuau

SEQ ID NO: 3039186 - RNA, 19 nt, Artificial Sequence
  Description of Artificial Sequence: Synthetic oligonucleotide
cgugucaacgauggcauau

SEQ ID NO: 3039187 - RNA, 19 nt, Artificial Sequence
  Description of Artificial Sequence: Synthetic oligonucleotide
cgcgguggcaacacgggcu

SEQ ID NO: 3039188 - RNA, 19 nt, Artificial Sequence
  Description of Artificial Sequence: Synthetic oligonucleotide
ccccgucauuguccccggc

SEQ ID NO: 3039189 - RNA, 19 nt, Artificial Sequence
  Description of Artificial Sequence: Synthetic oligonucleotide
cccgucccgcagaaaguua

SEQ ID NO: 3039190 - RNA, 19 nt, Artificial Sequence
  Description of Artificial Sequence: Synthetic oligonucleotide
ccgguguguaccccgucau

SEQ ID NO: 3039191 - RNA, 19 nt, Artificial Sequence
  Description of Artificial Sequence: Synthetic oligonucleotide
gccccgucccgcagaaagu

SEQ ID NO: 3039192 - RNA, 19 nt, Artificial Sequence
  Description of Artificial Sequence: Synthetic oligonucleotide
cgguggcaacacgggcucc

SEQ ID NO: 3039193 - RNA, 19 nt, Artificial Sequence
  Description of Artificial Sequence: Synthetic oligonucleotide
ccgcagcuucucauccggu

SEQ ID NO: 3039194 - RNA, 19 nt, Artificial Sequence
  Description of Artificial Sequence: Synthetic oligonucleotide
ccccgucccgcagaaaguu

SEQ ID NO: 3039195 - RNA, 19 nt, Artificial Sequence
  Description of Artificial Sequence: Synthetic oligonucleotide
cgucccgcagaaaguuauu

SEQ ID NO: 3039196 - RNA, 19 nt, Artificial Sequence
  Description of Artificial Sequence: Synthetic oligonucleotide
cgguguguaccccgucauu

SEQ ID NO: 3039197 - RNA, 19 nt, Artificial Sequence
  Description of Artificial Sequence: Synthetic oligonucleotide
gggccacgucuugcgcggu

SEQ ID NO: 3039198 - RNA, 19 nt, Artificial Sequence
  Description of Artificial Sequence: Synthetic oligonucleotide
gggccccgucccgcagaaa

SEQ ID NO: 3039199 - RNA, 19 nt, Artificial Sequence
  Description of Artificial Sequence: Synthetic oligonucleotide
uuuaauaccagugaaaugg

SEQ ID NO: 3039200 - RNA, 19 nt, Artificial Sequence
  Description of Artificial Sequence: Synthetic oligonucleotide
aacuugaaguaauaaaacc

SEQ ID NO: 3039201 - RNA, 19 nt, Artificial Sequence
  Description of Artificial Sequence: Synthetic oligonucleotide
aauggaauuggcuaucuac

SEQ ID NO: 3039202 - RNA, 19 nt, Artificial Sequence
  Description of Artificial Sequence: Synthetic oligonucleotide
uaauuuauuguacaaauug

SEQ ID NO: 3039203 - RNA, 19 nt, Artificial Sequence
  Description of Artificial Sequence: Synthetic oligonucleotide
aaaaccaacaaagcaaugc

SEQ ID NO: 3039204 - RNA, 19 nt, Artificial Sequence
  Description of Artificial Sequence: Synthetic oligonucleotide
aaaccaacaaagcaaugcc

SEQ ID NO: 3039205 - RNA, 19 nt, Artificial Sequence
  Description of Artificial Sequence: Synthetic oligonucleotide
aguaauaaaaccaacaaag

SEQ ID NO: 3039206 - RNA, 19 nt, Artificial Sequence
  Description of Artificial Sequence: Synthetic oligonucleotide
augacuucaaucuuagacc

SEQ ID NO: 3039207 - RNA, 19 nt, Artificial Sequence
  Description of Artificial Sequence: Synthetic oligonucleotide
uuaacuugaaguaauaaaa

SEQ ID NO: 3039208 - RNA, 19 nt, Artificial Sequence
  Description of Artificial Sequence: Synthetic oligonucleotide
aauagaugagguuagacau

SEQ ID NO: 3039209 - RNA, 19 nt, Artificial Sequence
  Description of Artificial Sequence: Synthetic oligonucleotide
ucaaaauccauuuacgaug

SEQ ID NO: 3039210 - RNA, 19 nt, Artificial Sequence
  Description of Artificial Sequence: Synthetic oligonucleotide
ucuuagaccgaaaauacag

SEQ ID NO: 3039211 - RNA, 19 nt, Artificial Sequence
  Description of Artificial Sequence: Synthetic oligonucleotide
aauucauucuaccugugag

SEQ ID NO: 3039212 - RNA, 19 nt, Artificial Sequence
  Description of Artificial Sequence: Synthetic oligonucleotide
agaccgaaaauacagacuc

SEQ ID NO: 3039213 - RNA, 19 nt, Artificial Sequence
  Description of Artificial Sequence: Synthetic oligonucleotide
uauuacaugaugaugaguu

SEQ ID NO: 3039214 - RNA, 19 nt, Artificial Sequence
  Description of Artificial Sequence: Synthetic oligonucleotide
uacaaauugaguauuacau

SEQ ID NO: 3039215 - RNA, 19 nt, Artificial Sequence
  Description of Artificial Sequence: Synthetic oligonucleotide
aaucuuagaccgaaaauac

SEQ ID NO: 3039216 - RNA, 19 nt, Artificial Sequence
  Description of Artificial Sequence: Synthetic oligonucleotide
aaaauacagacucccgccg

SEQ ID NO: 3039217 - RNA, 19 nt, Artificial Sequence
  Description of Artificial Sequence: Synthetic oligonucleotide
uuauuguacaaauugagua

SEQ ID NO: 3039218 - RNA, 19 nt, Artificial Sequence
  Description of Artificial Sequence: Synthetic oligonucleotide
ugacuucaaucuuagaccg

SEQ ID NO: 3039219 - RNA, 19 nt, Artificial Sequence
  Description of Artificial Sequence: Synthetic oligonucleotide
uaugggacuuaauagauga

SEQ ID NO: 3039220 - RNA, 19 nt, Artificial Sequence
  Description of Artificial Sequence: Synthetic oligonucleotide
aaugccuccguauguggcc

SEQ ID NO: 3039221 - RNA, 19 nt, Artificial Sequence
  Description of Artificial Sequence: Synthetic oligonucleotide
aaauacagacucccgccgc

SEQ ID NO: 3039222 - RNA, 19 nt, Artificial Sequence
  Description of Artificial Sequence: Synthetic oligonucleotide
uaauagaugagguuagaca

SEQ ID NO: 3039223 - RNA, 19 nt, Artificial Sequence
  Description of Artificial Sequence: Synthetic oligonucleotide
uuuauuguacaaauugagu

SEQ ID NO: 3039224 - RNA, 19 nt, Artificial Sequence
  Description of Artificial Sequence: Synthetic oligonucleotide
ucuacuuucugcaccagcc

SEQ ID NO: 3039225 - RNA, 19 nt, Artificial Sequence
  Description of Artificial Sequence: Synthetic oligonucleotide
gaaaauacagacucccgcc

SEQ ID NO: 3039226 - RNA, 19 nt, Artificial Sequence
  Description of Artificial Sequence: Synthetic oligonucleotide
auuuacgaugcuuucacag

SEQ ID NO: 3039227 - RNA, 19 nt, Artificial Sequence
  Description of Artificial Sequence: Synthetic oligonucleotide
aaguaauaaaaccaacaaa

SEQ ID NO: 3039228 - RNA, 19 nt, Artificial Sequence
  Description of Artificial Sequence: Synthetic oligonucleotide
uuucaaaauccauuuacga

SEQ ID NO: 3039229 - RNA, 19 nt, Artificial Sequence
  Description of Artificial Sequence: Synthetic oligonucleotide
uuagacauuucaaaaucca

SEQ ID NO: 3039230 - RNA, 19 nt, Artificial Sequence
  Description of Artificial Sequence: Synthetic oligonucleotide
aaagcaaugccuccguaug

SEQ ID NO: 3039231 - RNA, 19 nt, Artificial Sequence
  Description of Artificial Sequence: Synthetic oligonucleotide
aagaguugaaauuacuuuu

SEQ ID NO: 3039232 - RNA, 19 nt, Artificial Sequence
  Description of Artificial Sequence: Synthetic oligonucleotide
cauuucaaaauccauuuac

SEQ ID NO: 3039233 - RNA, 19 nt, Artificial Sequence
  Description of Artificial Sequence: Synthetic oligonucleotide
uaacuugaaguaauaaaac

SEQ ID NO: 3039234 - RNA, 19 nt, Artificial Sequence
  Description of Artificial Sequence: Synthetic oligonucleotide
aauuuauuguacaaauuga

SEQ ID NO: 3039235 - RNA, 19 nt, Artificial Sequence
  Description of Artificial Sequence: Synthetic oligonucleotide
uuggcuaucuacuuucugc

SEQ ID NO: 3039236 - RNA, 19 nt, Artificial Sequence
  Description of Artificial Sequence: Synthetic oligonucleotide
cuagguucauaauuuauug

SEQ ID NO: 3039237 - RNA, 19 nt, Artificial Sequence
  Description of Artificial Sequence: Synthetic oligonucleotide
ugaugaguugacaucagcu

SEQ ID NO: 3039238 - RNA, 19 nt, Artificial Sequence
  Description of Artificial Sequence: Synthetic oligonucleotide
caaauugaguauuacauga

SEQ ID NO: 3039239 - RNA, 19 nt, Artificial Sequence
  Description of Artificial Sequence: Synthetic oligonucleotide
caaaauccauuuacgaugc

SEQ ID NO: 3039240 - RNA, 19 nt, Artificial Sequence
  Description of Artificial Sequence: Synthetic oligonucleotide
auuuauuguacaaauugag

SEQ ID NO: 3039241 - RNA, 19 nt, Artificial Sequence
  Description of Artificial Sequence: Synthetic oligonucleotide
agugaaauggaauuggcua

SEQ ID NO: 3039242 - RNA, 19 nt, Artificial Sequence
  Description of Artificial Sequence: Synthetic oligonucleotide
acaaauugaguauuacaug

SEQ ID NO: 3039243 - RNA, 19 nt, Artificial Sequence
  Description of Artificial Sequence: Synthetic oligonucleotide
uuagaccgaaaauacagac

SEQ ID NO: 3039244 - RNA, 19 nt, Artificial Sequence
  Description of Artificial Sequence: Synthetic oligonucleotide
uauuguacaaauugaguau

SEQ ID NO: 3039245 - RNA, 19 nt, Artificial Sequence
  Description of Artificial Sequence: Synthetic oligonucleotide
augaguugacaucagcuuc

SEQ ID NO: 3039246 - RNA, 19 nt, Artificial Sequence
  Description of Artificial Sequence: Synthetic oligonucleotide
gaguauuacaugaugauga

SEQ ID NO: 3039247 - RNA, 19 nt, Artificial Sequence
  Description of Artificial Sequence: Synthetic oligonucleotide
uuaggccuuaacuugaagu

SEQ ID NO: 3039248 - RNA, 19 nt, Artificial Sequence
  Description of Artificial Sequence: Synthetic oligonucleotide
uuuuccuagguucauaauu

SEQ ID NO: 3039249 - RNA, 19 nt, Artificial Sequence
  Description of Artificial Sequence: Synthetic oligonucleotide
ucagguaugggacuuaaua

SEQ ID NO: 3039250 - RNA, 19 nt, Artificial Sequence
  Description of Artificial Sequence: Synthetic oligonucleotide
auuucaaaauccauuuacg

SEQ ID NO: 3039251 - RNA, 19 nt, Artificial Sequence
  Description of Artificial Sequence: Synthetic oligonucleotide
accgaaaauacagacuccc

SEQ ID NO: 3039252 - RNA, 19 nt, Artificial Sequence
  Description of Artificial Sequence: Synthetic oligonucleotide
ugggacuuaauagaugagg

SEQ ID NO: 3039253 - RNA, 19 nt, Artificial Sequence
  Description of Artificial Sequence: Synthetic oligonucleotide
augaugaugaguugacauc

SEQ ID NO: 3039254 - RNA, 19 nt, Artificial Sequence
  Description of Artificial Sequence: Synthetic oligonucleotide
uucaaaauccauuuacgau

SEQ ID NO: 3039255 - RNA, 19 nt, Artificial Sequence
  Description of Artificial Sequence: Synthetic oligonucleotide
gaugcuuucacagcuuggg

SEQ ID NO: 3039256 - RNA, 19 nt, Artificial Sequence
  Description of Artificial Sequence: Synthetic oligonucleotide
uuuacgaugcuuucacagc

SEQ ID NO: 3039257 - RNA, 19 nt, Artificial Sequence
  Description of Artificial Sequence: Synthetic oligonucleotide
acacaauucauucuaccug

SEQ ID NO: 3039258 - RNA, 19 nt, Artificial Sequence
  Description of Artificial Sequence: Synthetic oligonucleotide
uucauucuaccugugagag

SEQ ID NO: 3039259 - RNA, 19 nt, Artificial Sequence
  Description of Artificial Sequence: Synthetic oligonucleotide
uacacaauucauucuaccu

SEQ ID NO: 3039260 - RNA, 19 nt, Artificial Sequence
  Description of Artificial Sequence: Synthetic oligonucleotide
cauucuaccugugagagug

SEQ ID NO: 3039261 - RNA, 19 nt, Artificial Sequence
  Description of Artificial Sequence: Synthetic oligonucleotide
uuuuaauaccagugaaaug

SEQ ID NO: 3039262 - RNA, 19 nt, Artificial Sequence
  Description of Artificial Sequence: Synthetic oligonucleotide
gaugagguuagacauuuca

SEQ ID NO: 3039263 - RNA, 19 nt, Artificial Sequence
  Description of Artificial Sequence: Synthetic oligonucleotide
acuugaaguaauaaaacca

SEQ ID NO: 3039264 - RNA, 19 nt, Artificial Sequence
  Description of Artificial Sequence: Synthetic oligonucleotide
ugaugaugaguugacauca

SEQ ID NO: 3039265 - RNA, 19 nt, Artificial Sequence
  Description of Artificial Sequence: Synthetic oligonucleotide
uuacgaugcuuucacagcu

SEQ ID NO: 3039266 - RNA, 19 nt, Artificial Sequence
  Description of Artificial Sequence: Synthetic oligonucleotide
ugagguuagacauuucaaa

SEQ ID NO: 3039267 - RNA, 19 nt, Artificial Sequence
  Description of Artificial Sequence: Synthetic oligonucleotide
aguauuacaugaugaugag

SEQ ID NO: 3039268 - RNA, 19 nt, Artificial Sequence
  Description of Artificial Sequence: Synthetic oligonucleotide
uguaagaguugaaauuacu

SEQ ID NO: 3039269 - RNA, 19 nt, Artificial Sequence
  Description of Artificial Sequence: Synthetic oligonucleotide
augaugaguugacaucagc

SEQ ID NO: 3039270 - RNA, 19 nt, Artificial Sequence
  Description of Artificial Sequence: Synthetic oligonucleotide
guaauaaaaccaacaaagc

SEQ ID NO: 3039271 - RNA, 19 nt, Artificial Sequence
  Description of Artificial Sequence: Synthetic oligonucleotide
uuuccuagguucauaauuu

SEQ ID NO: 3039272 - RNA, 19 nt, Artificial Sequence
  Description of Artificial Sequence: Synthetic oligonucleotide
gaauuggcuaucuacuuuc

SEQ ID NO: 3039273 - RNA, 19 nt, Artificial Sequence
  Description of Artificial Sequence: Synthetic oligonucleotide
uugaaguaauaaaaccaac

SEQ ID NO: 3039274 - RNA, 19 nt, Artificial Sequence
  Description of Artificial Sequence: Synthetic oligonucleotide
ugaguauuacaugaugaug

SEQ ID NO: 3039275 - RNA, 19 nt, Artificial Sequence
  Description of Artificial Sequence: Synthetic oligonucleotide
uuaauaccagugaaaugga

SEQ ID NO: 3039276 - RNA, 19 nt, Artificial Sequence
  Description of Artificial Sequence: Synthetic oligonucleotide
agaguguaagaguugaaau

SEQ ID NO: 3039277 - RNA, 19 nt, Artificial Sequence
  Description of Artificial Sequence: Synthetic oligonucleotide
uuacaugaugaugaguuga

SEQ ID NO: 3039278 - RNA, 19 nt, Artificial Sequence
  Description of Artificial Sequence: Synthetic oligonucleotide
cuuaacuugaaguaauaaa

SEQ ID NO: 3039279 - RNA, 19 nt, Artificial Sequence
  Description of Artificial Sequence: Synthetic oligonucleotide
ugaguugacaucagcuucu

SEQ ID NO: 3039280 - RNA, 19 nt, Artificial Sequence
  Description of Artificial Sequence: Synthetic oligonucleotide
agguucauaauuuauugua

SEQ ID NO: 3039281 - RNA, 19 nt, Artificial Sequence
  Description of Artificial Sequence: Synthetic oligonucleotide
aauaccagugaaauggaau

SEQ ID NO: 3039282 - RNA, 19 nt, Artificial Sequence
  Description of Artificial Sequence: Synthetic oligonucleotide
agguaugggacuuaauaga

SEQ ID NO: 3039283 - RNA, 19 nt, Artificial Sequence
  Description of Artificial Sequence: Synthetic oligonucleotide
aucuacuuucugcaccagc

SEQ ID NO: 3039284 - RNA, 19 nt, Artificial Sequence
  Description of Artificial Sequence: Synthetic oligonucleotide
cuugaaguaauaaaaccaa

SEQ ID NO: 3039285 - RNA, 19 nt, Artificial Sequence
  Description of Artificial Sequence: Synthetic oligonucleotide
uuaauagaugagguuagac

SEQ ID NO: 3039286 - RNA, 19 nt, Artificial Sequence
  Description of Artificial Sequence: Synthetic oligonucleotide
auugaguauuacaugauga

SEQ ID NO: 3039287 - RNA, 19 nt, Artificial Sequence
  Description of Artificial Sequence: Synthetic oligonucleotide
uugaguauuacaugaugau

SEQ ID NO: 3039288 - RNA, 19 nt, Artificial Sequence
  Description of Artificial Sequence: Synthetic oligonucleotide
guuagacauuucaaaaucc

SEQ ID NO: 3039289 - RNA, 19 nt, Artificial Sequence
  Description of Artificial Sequence: Synthetic oligonucleotide
uacaugaugaugaguugac

SEQ ID NO: 3039290 - RNA, 19 nt, Artificial Sequence
  Description of Artificial Sequence: Synthetic oligonucleotide
auuacaugaugaugaguug

SEQ ID NO: 3039291 - RNA, 19 nt, Artificial Sequence
  Description of Artificial Sequence: Synthetic oligonucleotide
auucauucuaccugugaga

SEQ ID NO: 3039292 - RNA, 19 nt, Artificial Sequence
  Description of Artificial Sequence: Synthetic oligonucleotide
uagaccgaaaauacagacu

SEQ ID NO: 3039293 - RNA, 19 nt, Artificial Sequence
  Description of Artificial Sequence: Synthetic oligonucleotide
aacaaagcaaugccuccgu

SEQ ID NO: 3039294 - RNA, 19 nt, Artificial Sequence
  Description of Artificial Sequence: Synthetic oligonucleotide
auaccagugaaauggaauu

SEQ ID NO: 3039295 - RNA, 19 nt, Artificial Sequence
  Description of Artificial Sequence: Synthetic oligonucleotide
agcuucuucagguauggga

SEQ ID NO: 3039296 - RNA, 19 nt, Artificial Sequence
  Description of Artificial Sequence: Synthetic oligonucleotide
gacuuaauagaugagguua

SEQ ID NO: 3039297 - RNA, 19 nt, Artificial Sequence
  Description of Artificial Sequence: Synthetic oligonucleotide
accaacaaagcaaugccuc

SEQ ID NO: 3039298 - RNA, 19 nt, Artificial Sequence
  Description of Artificial Sequence: Synthetic oligonucleotide
gagguuagacauuucaaaa

SEQ ID NO: 3039299 - RNA, 19 nt, Artificial Sequence
  Description of Artificial Sequence: Synthetic oligonucleotide
guacaaauugaguauuaca

SEQ ID NO: 3039300 - RNA, 19 nt, Artificial Sequence
  Description of Artificial Sequence: Synthetic oligonucleotide
accagugaaauggaauugg

SEQ ID NO: 3039301 - RNA, 19 nt, Artificial Sequence
  Description of Artificial Sequence: Synthetic oligonucleotide
aguguaagaguugaaauua

SEQ ID NO: 3039302 - RNA, 19 nt, Artificial Sequence
  Description of Artificial Sequence: Synthetic oligonucleotide
ugcuuucacagcuuggggu

SEQ ID NO: 3039303 - RNA, 19 nt, Artificial Sequence
  Description of Artificial Sequence: Synthetic oligonucleotide
ugugagaguguaagaguug

SEQ ID NO: 3039304 - RNA, 19 nt, Artificial Sequence
  Description of Artificial Sequence: Synthetic oligonucleotide
aauccauuuacgaugcuuu

SEQ ID NO: 3039305 - RNA, 19 nt, Artificial Sequence
  Description of Artificial Sequence: Synthetic oligonucleotide
uaaaaccaacaaagcaaug

SEQ ID NO: 3039306 - RNA, 19 nt, Artificial Sequence
  Description of Artificial Sequence: Synthetic oligonucleotide
uagguucauaauuuauugu

SEQ ID NO: 3039307 - RNA, 19 nt, Artificial Sequence
  Description of Artificial Sequence: Synthetic oligonucleotide
uagacauuucaaaauccau

SEQ ID NO: 3039308 - RNA, 19 nt, Artificial Sequence
  Description of Artificial Sequence: Synthetic oligonucleotide
uguacaaauugaguauuac

SEQ ID NO: 3039309 - RNA, 19 nt, Artificial Sequence
  Description of Artificial Sequence: Synthetic oligonucleotide
auaaaaccaacaaagcaau

SEQ ID NO: 3039310 - RNA, 19 nt, Artificial Sequence
  Description of Artificial Sequence: Synthetic oligonucleotide
uaggccuuaacuugaagua

SEQ ID NO: 3039311 - RNA, 19 nt, Artificial Sequence
  Description of Artificial Sequence: Synthetic oligonucleotide
uggcuaucuacuuucugca

SEQ ID NO: 3039312 - RNA, 19 nt, Artificial Sequence
  Description of Artificial Sequence: Synthetic oligonucleotide
agguuagacauuucaaaau

SEQ ID NO: 3039313 - RNA, 19 nt, Artificial Sequence
  Description of Artificial Sequence: Synthetic oligonucleotide
acuuaauagaugagguuag

SEQ ID NO: 3039314 - RNA, 19 nt, Artificial Sequence
  Description of Artificial Sequence: Synthetic oligonucleotide
uuuaggccuuaacuugaag

SEQ ID NO: 3039315 - RNA, 19 nt, Artificial Sequence
  Description of Artificial Sequence: Synthetic oligonucleotide
guacacaauucauucuacc

SEQ ID NO: 3039316 - RNA, 19 nt, Artificial Sequence
  Description of Artificial Sequence: Synthetic oligonucleotide
accugugagaguguaagag

SEQ ID NO: 3039317 - RNA, 19 nt, Artificial Sequence
  Description of Artificial Sequence: Synthetic oligonucleotide
ucugcaccagccaugacuu

SEQ ID NO: 3039318 - RNA, 19 nt, Artificial Sequence
  Description of Artificial Sequence: Synthetic oligonucleotide
cuaccugugagaguguaag

SEQ ID NO: 3039319 - RNA, 19 nt, Artificial Sequence
  Description of Artificial Sequence: Synthetic oligonucleotide
gacauuucaaaauccauuu

SEQ ID NO: 3039320 - RNA, 19 nt, Artificial Sequence
  Description of Artificial Sequence: Synthetic oligonucleotide
aaauccauuuacgaugcuu

SEQ ID NO: 3039321 - RNA, 19 nt, Artificial Sequence
  Description of Artificial Sequence: Synthetic oligonucleotide
accagccaugacuucaauc

SEQ ID NO: 3039322 - RNA, 19 nt, Artificial Sequence
  Description of Artificial Sequence: Synthetic oligonucleotide
auccauuuacgaugcuuuc

SEQ ID NO: 3039323 - RNA, 19 nt, Artificial Sequence
  Description of Artificial Sequence: Synthetic oligonucleotide
aagcaaugccuccguaugu

SEQ ID NO: 3039324 - RNA, 19 nt, Artificial Sequence
  Description of Artificial Sequence: Synthetic oligonucleotide
augcuuucacagcuugggg

SEQ ID NO: 3039325 - RNA, 19 nt, Artificial Sequence
  Description of Artificial Sequence: Synthetic oligonucleotide
aaauugaguauuacaugau

SEQ ID NO: 3039326 - RNA, 19 nt, Artificial Sequence
  Description of Artificial Sequence: Synthetic oligonucleotide
caacaaagcaaugccuccg

SEQ ID NO: 3039327 - RNA, 19 nt, Artificial Sequence
  Description of Artificial Sequence: Synthetic oligonucleotide
uaauaccagugaaauggaa

SEQ ID NO: 3039328 - RNA, 19 nt, Artificial Sequence
  Description of Artificial Sequence: Synthetic oligonucleotide
uccauuuacgaugcuuuca

SEQ ID NO: 3039329 - RNA, 19 nt, Artificial Sequence
  Description of Artificial Sequence: Synthetic oligonucleotide
aaccaacaaagcaaugccu

SEQ ID NO: 3039330 - RNA, 19 nt, Artificial Sequence
  Description of Artificial Sequence: Synthetic oligonucleotide
uccuagguucauaauuuau

SEQ ID NO: 3039331 - RNA, 19 nt, Artificial Sequence
  Description of Artificial Sequence: Synthetic oligonucleotide
cuaucuacuuucugcacca

SEQ ID NO: 3039332 - RNA, 19 nt, Artificial Sequence
  Description of Artificial Sequence: Synthetic oligonucleotide
gcuaucuacuuucugcacc

SEQ ID NO: 3039333 - RNA, 19 nt, Artificial Sequence
  Description of Artificial Sequence: Synthetic oligonucleotide
uauguggccaguacacaau

SEQ ID NO: 3039334 - RNA, 19 nt, Artificial Sequence
  Description of Artificial Sequence: Synthetic oligonucleotide
uuguacaaauugaguauua

SEQ ID NO: 3039335 - RNA, 19 nt, Artificial Sequence
  Description of Artificial Sequence: Synthetic oligonucleotide
auggaauuggcuaucuacu

SEQ ID NO: 3039336 - RNA, 19 nt, Artificial Sequence
  Description of Artificial Sequence: Synthetic oligonucleotide
acucccgccgccgacgucc

SEQ ID NO: 3039337 - RNA, 19 nt, Artificial Sequence
  Description of Artificial Sequence: Synthetic oligonucleotide
cuuagaccgaaaauacaga

SEQ ID NO: 3039338 - RNA, 19 nt, Artificial Sequence
  Description of Artificial Sequence: Synthetic oligonucleotide
uacuuucugcaccagccau

SEQ ID NO: 3039339 - RNA, 19 nt, Artificial Sequence
  Description of Artificial Sequence: Synthetic oligonucleotide
auuguacaaauugaguauu

SEQ ID NO: 3039340 - RNA, 19 nt, Artificial Sequence
  Description of Artificial Sequence: Synthetic oligonucleotide
uaccagugaaauggaauug

SEQ ID NO: 3039341 - RNA, 19 nt, Artificial Sequence
  Description of Artificial Sequence: Synthetic oligonucleotide
uagaugagguuagacauuu

SEQ ID NO: 3039342 - RNA, 19 nt, Artificial Sequence
  Description of Artificial Sequence: Synthetic oligonucleotide
uuuuaggccuuaacuugaa

SEQ ID NO: 3039343 - RNA, 19 nt, Artificial Sequence
  Description of Artificial Sequence: Synthetic oligonucleotide
caaugccuccguauguggc

SEQ ID NO: 3039344 - RNA, 19 nt, Artificial Sequence
  Description of Artificial Sequence: Synthetic oligonucleotide
ugaaauggaauuggcuauc

SEQ ID NO: 3039345 - RNA, 19 nt, Artificial Sequence
  Description of Artificial Sequence: Synthetic oligonucleotide
acgaugcuuucacagcuug

SEQ ID NO: 3039346 - RNA, 19 nt, Artificial Sequence
  Description of Artificial Sequence: Synthetic oligonucleotide
agacauuucaaaauccauu

SEQ ID NO: 3039347 - RNA, 19 nt, Artificial Sequence
  Description of Artificial Sequence: Synthetic oligonucleotide
gagaguguaagaguugaaa

SEQ ID NO: 3039348 - RNA, 19 nt, Artificial Sequence
  Description of Artificial Sequence: Synthetic oligonucleotide
guggccaguacacaauuca

SEQ ID NO: 3039349 - RNA, 19 nt, Artificial Sequence
  Description of Artificial Sequence: Synthetic oligonucleotide
gaugaugaguugacaucag

SEQ ID NO: 3039350 - RNA, 19 nt, Artificial Sequence
  Description of Artificial Sequence: Synthetic oligonucleotide
gccaguacacaauucauuc

SEQ ID NO: 3039351 - RNA, 19 nt, Artificial Sequence
  Description of Artificial Sequence: Synthetic oligonucleotide
aaauggaauuggcuaucua

SEQ ID NO: 3039352 - RNA, 19 nt, Artificial Sequence
  Description of Artificial Sequence: Synthetic oligonucleotide
uggaauuggcuaucuacuu

SEQ ID NO: 3039353 - RNA, 19 nt, Artificial Sequence
  Description of Artificial Sequence: Synthetic oligonucleotide
aaaauccauuuacgaugcu

SEQ ID NO: 3039354 - RNA, 19 nt, Artificial Sequence
  Description of Artificial Sequence: Synthetic oligonucleotide
gguucauaauuuauuguac

SEQ ID NO: 3039355 - RNA, 19 nt, Artificial Sequence
  Description of Artificial Sequence: Synthetic oligonucleotide
gaugaguugacaucagcuu

SEQ ID NO: 3039356 - RNA, 19 nt, Artificial Sequence
  Description of Artificial Sequence: Synthetic oligonucleotide
acauuucaaaauccauuua

SEQ ID NO: 3039357 - RNA, 19 nt, Artificial Sequence
  Description of Artificial Sequence: Synthetic oligonucleotide
aguugacaucagcuucuuc

SEQ ID NO: 3039358 - RNA, 19 nt, Artificial Sequence
  Description of Artificial Sequence: Synthetic oligonucleotide
gaguguaagaguugaaauu

SEQ ID NO: 3039359 - RNA, 19 nt, Artificial Sequence
  Description of Artificial Sequence: Synthetic oligonucleotide
guauguggccaguacacaa

SEQ ID NO: 3039360 - RNA, 19 nt, Artificial Sequence
  Description of Artificial Sequence: Synthetic oligonucleotide
cgaaaauacagacucccgc

SEQ ID NO: 3039361 - RNA, 19 nt, Artificial Sequence
  Description of Artificial Sequence: Synthetic oligonucleotide
cacaauucauucuaccugu

SEQ ID NO: 3039362 - RNA, 19 nt, Artificial Sequence
  Description of Artificial Sequence: Synthetic oligonucleotide
ucuaccugugagaguguaa

SEQ ID NO: 3039363 - RNA, 19 nt, Artificial Sequence
  Description of Artificial Sequence: Synthetic oligonucleotide
ugagaguguaagaguugaa

SEQ ID NO: 3039364 - RNA, 19 nt, Artificial Sequence
  Description of Artificial Sequence: Synthetic oligonucleotide
uggccaguacacaauucau

SEQ ID NO: 3039365 - RNA, 19 nt, Artificial Sequence
  Description of Artificial Sequence: Synthetic oligonucleotide
caguacacaauucauucua

SEQ ID NO: 3039366 - RNA, 19 nt, Artificial Sequence
  Description of Artificial Sequence: Synthetic oligonucleotide
agcaaugccuccguaugug

SEQ ID NO: 3039367 - RNA, 19 nt, Artificial Sequence
  Description of Artificial Sequence: Synthetic oligonucleotide
ccauuuacgaugcuuucac

SEQ ID NO: 3039368 - RNA, 19 nt, Artificial Sequence
  Description of Artificial Sequence: Synthetic oligonucleotide
uguggccaguacacaauuc

SEQ ID NO: 3039369 - RNA, 19 nt, Artificial Sequence
  Description of Artificial Sequence: Synthetic oligonucleotide
gugagaguguaagaguuga

SEQ ID NO: 3039370 - RNA, 19 nt, Artificial Sequence
  Description of Artificial Sequence: Synthetic oligonucleotide
guaugggacuuaauagaug

SEQ ID NO: 3039371 - RNA, 19 nt, Artificial Sequence
  Description of Artificial Sequence: Synthetic oligonucleotide
acagacucccgccgccgac

SEQ ID NO: 3039372 - RNA, 19 nt, Artificial Sequence
  Description of Artificial Sequence: Synthetic oligonucleotide
ucauucuaccugugagagu

SEQ ID NO: 3039373 - RNA, 19 nt, Artificial Sequence
  Description of Artificial Sequence: Synthetic oligonucleotide
uuccuagguucauaauuua

SEQ ID NO: 3039374 - RNA, 19 nt, Artificial Sequence
  Description of Artificial Sequence: Synthetic oligonucleotide
ccaacaaagcaaugccucc

SEQ ID NO: 3039375 - RNA, 19 nt, Artificial Sequence
  Description of Artificial Sequence: Synthetic oligonucleotide
uaccugugagaguguaaga

SEQ ID NO: 3039376 - RNA, 19 nt, Artificial Sequence
  Description of Artificial Sequence: Synthetic oligonucleotide
caauucauucuaccuguga

SEQ ID NO: 3039377 - RNA, 19 nt, Artificial Sequence
  Description of Artificial Sequence: Synthetic oligonucleotide
gaccgaaaauacagacucc

SEQ ID NO: 3039378 - RNA, 19 nt, Artificial Sequence
  Description of Artificial Sequence: Synthetic oligonucleotide
gugaaauggaauuggcuau

SEQ ID NO: 3039379 - RNA, 19 nt, Artificial Sequence
  Description of Artificial Sequence: Synthetic oligonucleotide
aucuuagaccgaaaauaca

SEQ ID NO: 3039380 - RNA, 19 nt, Artificial Sequence
  Description of Artificial Sequence: Synthetic oligonucleotide
guguaagaguugaaauuac

SEQ ID NO: 3039381 - RNA, 19 nt, Artificial Sequence
  Description of Artificial Sequence: Synthetic oligonucleotide
augagguuagacauuucaa

SEQ ID NO: 3039382 - RNA, 19 nt, Artificial Sequence
  Description of Artificial Sequence: Synthetic oligonucleotide
ccagugaaauggaauuggc

SEQ ID NO: 3039383 - RNA, 19 nt, Artificial Sequence
  Description of Artificial Sequence: Synthetic oligonucleotide
auacagacucccgccgccg

SEQ ID NO: 3039384 - RNA, 19 nt, Artificial Sequence
  Description of Artificial Sequence: Synthetic oligonucleotide
ccgaaaauacagacucccg

SEQ ID NO: 3039385 - RNA, 19 nt, Artificial Sequence
  Description of Artificial Sequence: Synthetic oligonucleotide
acaugaugaugaguugaca

SEQ ID NO: 3039386 - RNA, 19 nt, Artificial Sequence
  Description of Artificial Sequence: Synthetic oligonucleotide
gcaaugccuccguaugugg

SEQ ID NO: 3039387 - RNA, 19 nt, Artificial Sequence
  Description of Artificial Sequence: Synthetic oligonucleotide
guaagaguugaaauuacuu

SEQ ID NO: 3039388 - RNA, 19 nt, Artificial Sequence
  Description of Artificial Sequence: Synthetic oligonucleotide
acuuucugcaccagccaug

SEQ ID NO: 3039389 - RNA, 19 nt, Artificial Sequence
  Description of Artificial Sequence: Synthetic oligonucleotide
ccgacguccuucaacagac

SEQ ID NO: 3039390 - RNA, 19 nt, Artificial Sequence
  Description of Artificial Sequence: Synthetic oligonucleotide
uacgaugcuuucacagcuu

SEQ ID NO: 3039391 - RNA, 19 nt, Artificial Sequence
  Description of Artificial Sequence: Synthetic oligonucleotide
auguggccaguacacaauu

SEQ ID NO: 3039392 - RNA, 19 nt, Artificial Sequence
  Description of Artificial Sequence: Synthetic oligonucleotide
uaucuacuuucugcaccag

SEQ ID NO: 3039393 - RNA, 19 nt, Artificial Sequence
  Description of Artificial Sequence: Synthetic oligonucleotide
cuuucugcaccagccauga

SEQ ID NO: 3039394 - RNA, 19 nt, Artificial Sequence
  Description of Artificial Sequence: Synthetic oligonucleotide
uacagacucccgccgccga

SEQ ID NO: 3039395 - RNA, 19 nt, Artificial Sequence
  Description of Artificial Sequence: Synthetic oligonucleotide
cuuaauagaugagguuaga

SEQ ID NO: 3039396 - RNA, 19 nt, Artificial Sequence
  Description of Artificial Sequence: Synthetic oligonucleotide
cauuuacgaugcuuucaca

SEQ ID NO: 3039397 - RNA, 19 nt, Artificial Sequence
  Description of Artificial Sequence: Synthetic oligonucleotide
uucagguaugggacuuaau

SEQ ID NO: 3039398 - RNA, 19 nt, Artificial Sequence
  Description of Artificial Sequence: Synthetic oligonucleotide
uucuucagguaugggacuu

SEQ ID NO: 3039399 - RNA, 19 nt, Artificial Sequence
  Description of Artificial Sequence: Synthetic oligonucleotide
cuacuuucugcaccagcca

SEQ ID NO: 3039400 - RNA, 19 nt, Artificial Sequence
  Description of Artificial Sequence: Synthetic oligonucleotide
cuccguauguggccaguac

SEQ ID NO: 3039401 - RNA, 19 nt, Artificial Sequence
  Description of Artificial Sequence: Synthetic oligonucleotide
aggccuuaacuugaaguaa

SEQ ID NO: 3039402 - RNA, 19 nt, Artificial Sequence
  Description of Artificial Sequence: Synthetic oligonucleotide
ccguauguggccaguacac

SEQ ID NO: 3039403 - RNA, 19 nt, Artificial Sequence
  Description of Artificial Sequence: Synthetic oligonucleotide
acaauucauucuaccugug

SEQ ID NO: 3039404 - RNA, 19 nt, Artificial Sequence
  Description of Artificial Sequence: Synthetic oligonucleotide
augggacuuaauagaugag

SEQ ID NO: 3039405 - RNA, 19 nt, Artificial Sequence
  Description of Artificial Sequence: Synthetic oligonucleotide
gaaauggaauuggcuaucu

SEQ ID NO: 3039406 - RNA, 19 nt, Artificial Sequence
  Description of Artificial Sequence: Synthetic oligonucleotide
cagugaaauggaauuggcu

SEQ ID NO: 3039407 - RNA, 19 nt, Artificial Sequence
  Description of Artificial Sequence: Synthetic oligonucleotide
auagaugagguuagacauu

SEQ ID NO: 3039408 - RNA, 19 nt, Artificial Sequence
  Description of Artificial Sequence: Synthetic oligonucleotide
cugugagaguguaagaguu

SEQ ID NO: 3039409 - RNA, 19 nt, Artificial Sequence
  Description of Artificial Sequence: Synthetic oligonucleotide
acaaagcaaugccuccgua

SEQ ID NO: 3039410 - RNA, 19 nt, Artificial Sequence
  Description of Artificial Sequence: Synthetic oligonucleotide
uucuaccugugagagugua

SEQ ID NO: 3039411 - RNA, 19 nt, Artificial Sequence
  Description of Artificial Sequence: Synthetic oligonucleotide
caaagcaaugccuccguau

SEQ ID NO: 3039412 - RNA, 19 nt, Artificial Sequence
  Description of Artificial Sequence: Synthetic oligonucleotide
agaugagguuagacauuuc

SEQ ID NO: 3039413 - RNA, 19 nt, Artificial Sequence
  Description of Artificial Sequence: Synthetic oligonucleotide
gggacuuaauagaugaggu

SEQ ID NO: 3039414 - RNA, 19 nt, Artificial Sequence
  Description of Artificial Sequence: Synthetic oligonucleotide
cagacucccgccgccgacg

SEQ ID NO: 3039415 - RNA, 19 nt, Artificial Sequence
  Description of Artificial Sequence: Synthetic oligonucleotide
agccaugacuucaaucuua

SEQ ID NO: 3039416 - RNA, 19 nt, Artificial Sequence
  Description of Artificial Sequence: Synthetic oligonucleotide
ggcuaucuacuuucugcac

SEQ ID NO: 3039417 - RNA, 19 nt, Artificial Sequence
  Description of Artificial Sequence: Synthetic oligonucleotide
gacuucaaucuuagaccga

SEQ ID NO: 3039418 - RNA, 19 nt, Artificial Sequence
  Description of Artificial Sequence: Synthetic oligonucleotide
guauuacaugaugaugagu

SEQ ID NO: 3039419 - RNA, 19 nt, Artificial Sequence
  Description of Artificial Sequence: Synthetic oligonucleotide
uuucugcaccagccaugac

SEQ ID NO: 3039420 - RNA, 19 nt, Artificial Sequence
  Description of Artificial Sequence: Synthetic oligonucleotide
cuucaaucuuagaccgaaa

SEQ ID NO: 3039421 - RNA, 19 nt, Artificial Sequence
  Description of Artificial Sequence: Synthetic oligonucleotide
uuucacagcuugggguuuu

SEQ ID NO: 3039422 - RNA, 19 nt, Artificial Sequence
  Description of Artificial Sequence: Synthetic oligonucleotide
gguaugggacuuaauagau

SEQ ID NO: 3039423 - RNA, 19 nt, Artificial Sequence
  Description of Artificial Sequence: Synthetic oligonucleotide
ugccuccguauguggccag

SEQ ID NO: 3039424 - RNA, 19 nt, Artificial Sequence
  Description of Artificial Sequence: Synthetic oligonucleotide
augccuccguauguggcca

SEQ ID NO: 3039425 - RNA, 19 nt, Artificial Sequence
  Description of Artificial Sequence: Synthetic oligonucleotide
cuucuucagguaugggacu

SEQ ID NO: 3039426 - RNA, 19 nt, Artificial Sequence
  Description of Artificial Sequence: Synthetic oligonucleotide
agacucccgccgccgacgu

SEQ ID NO: 3039427 - RNA, 19 nt, Artificial Sequence
  Description of Artificial Sequence: Synthetic oligonucleotide
ggaauuggcuaucuacuuu

SEQ ID NO: 3039428 - RNA, 19 nt, Artificial Sequence
  Description of Artificial Sequence: Synthetic oligonucleotide
gccgacguccuucaacaga

SEQ ID NO: 3039429 - RNA, 19 nt, Artificial Sequence
  Description of Artificial Sequence: Synthetic oligonucleotide
cgaugcuuucacagcuugg

SEQ ID NO: 3039430 - RNA, 19 nt, Artificial Sequence
  Description of Artificial Sequence: Synthetic oligonucleotide
ccuagguucauaauuuauu

SEQ ID NO: 3039431 - RNA, 19 nt, Artificial Sequence
  Description of Artificial Sequence: Synthetic oligonucleotide
ccuuaacuugaaguaauaa

SEQ ID NO: 3039432 - RNA, 19 nt, Artificial Sequence
  Description of Artificial Sequence: Synthetic oligonucleotide
ggacuuaauagaugagguu

SEQ ID NO: 3039433 - RNA, 19 nt, Artificial Sequence
  Description of Artificial Sequence: Synthetic oligonucleotide
auucuaccugugagagugu

SEQ ID NO: 3039434 - RNA, 19 nt, Artificial Sequence
  Description of Artificial Sequence: Synthetic oligonucleotide
gcuuucacagcuugggguu

SEQ ID NO: 3039435 - RNA, 19 nt, Artificial Sequence
  Description of Artificial Sequence: Synthetic oligonucleotide
gccgccgacguccuucaac

SEQ ID NO: 3039436 - RNA, 19 nt, Artificial Sequence
  Description of Artificial Sequence: Synthetic oligonucleotide
ccgccgacguccuucaaca

SEQ ID NO: 3039437 - RNA, 19 nt, Artificial Sequence
  Description of Artificial Sequence: Synthetic oligonucleotide
cugcaccagccaugacuuc

SEQ ID NO: 3039438 - RNA, 19 nt, Artificial Sequence
  Description of Artificial Sequence: Synthetic oligonucleotide
ccaguacacaauucauucu

SEQ ID NO: 3039439 - RNA, 19 nt, Artificial Sequence
  Description of Artificial Sequence: Synthetic oligonucleotide
ggccuuaacuugaaguaau

SEQ ID NO: 3039440 - RNA, 19 nt, Artificial Sequence
  Description of Artificial Sequence: Synthetic oligonucleotide
gaguugacaucagcuucuu

SEQ ID NO: 3039441 - RNA, 19 nt, Artificial Sequence
  Description of Artificial Sequence: Synthetic oligonucleotide
cagccaugacuucaaucuu

SEQ ID NO: 3039442 - RNA, 19 nt, Artificial Sequence
  Description of Artificial Sequence: Synthetic oligonucleotide
ccaugacuucaaucuuaga

SEQ ID NO: 3039443 - RNA, 19 nt, Artificial Sequence
  Description of Artificial Sequence: Synthetic oligonucleotide
ggccaguacacaauucauu

SEQ ID NO: 3039444 - RNA, 19 nt, Artificial Sequence
  Description of Artificial Sequence: Synthetic oligonucleotide
gacucccgccgccgacguc

SEQ ID NO: 3039445 - RNA, 19 nt, Artificial Sequence
  Description of Artificial Sequence: Synthetic oligonucleotide
cgacguccuucaacagacc

SEQ ID NO: 3039446 - RNA, 19 nt, Artificial Sequence
  Description of Artificial Sequence: Synthetic oligonucleotide
cuuucacagcuugggguuu

SEQ ID NO: 3039447 - RNA, 19 nt, Artificial Sequence
  Description of Artificial Sequence: Synthetic oligonucleotide
cguauguggccaguacaca

SEQ ID NO: 3039448 - RNA, 19 nt, Artificial Sequence
  Description of Artificial Sequence: Synthetic oligonucleotide
cccgccgccgacguccuuc

SEQ ID NO: 3039449 - RNA, 19 nt, Artificial Sequence
  Description of Artificial Sequence: Synthetic oligonucleotide
cgccgacguccuucaacag

SEQ ID NO: 3039450 - RNA, 19 nt, Artificial Sequence
  Description of Artificial Sequence: Synthetic oligonucleotide
ucccgccgccgacguccuu

SEQ ID NO: 3039451 - RNA, 19 nt, Artificial Sequence
  Description of Artificial Sequence: Synthetic oligonucleotide
ccuccguauguggccagua

SEQ ID NO: 3039452 - RNA, 19 nt, Artificial Sequence
  Description of Artificial Sequence: Synthetic oligonucleotide
ccgccgccgacguccuuca

SEQ ID NO: 3039453 - RNA, 19 nt, Artificial Sequence
  Description of Artificial Sequence: Synthetic oligonucleotide
cucccgccgccgacguccu

SEQ ID NO: 3039454 - RNA, 19 nt, Artificial Sequence
  Description of Artificial Sequence: Synthetic oligonucleotide
gccuccguauguggccagu

SEQ ID NO: 3039455 - RNA, 19 nt, Artificial Sequence
  Description of Artificial Sequence: Synthetic oligonucleotide
cgccgccgacguccuucaa

SEQ ID NO: 3039456 - RNA, 19 nt, Artificial Sequence
  Description of Artificial Sequence: Synthetic oligonucleotide
aagacguagaacaagaugg

SEQ ID NO: 3039457 - RNA, 19 nt, Artificial Sequence
  Description of Artificial Sequence: Synthetic oligonucleotide
agguaaaauaaauagaaag

SEQ ID NO: 3039458 - RNA, 19 nt, Artificial Sequence
  Description of Artificial Sequence: Synthetic oligonucleotide
acugagguaaaauaaauag

SEQ ID NO: 3039459 - RNA, 19 nt, Artificial Sequence
  Description of Artificial Sequence: Synthetic oligonucleotide
ugagguaaaauaaauagaa

SEQ ID NO: 3039460 - RNA, 19 nt, Artificial Sequence
  Description of Artificial Sequence: Synthetic oligonucleotide
acuaauguuauacugaggu

SEQ ID NO: 3039461 - RNA, 19 nt, Artificial Sequence
  Description of Artificial Sequence: Synthetic oligonucleotide
aauaaauagaaaggcaguc

SEQ ID NO: 3039462 - RNA, 19 nt, Artificial Sequence
  Description of Artificial Sequence: Synthetic oligonucleotide
uaaaauaaauagaaaggca

SEQ ID NO: 3039463 - RNA, 19 nt, Artificial Sequence
  Description of Artificial Sequence: Synthetic oligonucleotide
aauagaaaggcagucuugg

SEQ ID NO: 3039464 - RNA, 19 nt, Artificial Sequence
  Description of Artificial Sequence: Synthetic oligonucleotide
guaaaauaaauagaaaggc

SEQ ID NO: 3039465 - RNA, 19 nt, Artificial Sequence
  Description of Artificial Sequence: Synthetic oligonucleotide
uaagauguacucuuguacc

SEQ ID NO: 3039466 - RNA, 19 nt, Artificial Sequence
  Description of Artificial Sequence: Synthetic oligonucleotide
gguaaaauaaauagaaagg

SEQ ID NO: 3039467 - RNA, 19 nt, Artificial Sequence
  Description of Artificial Sequence: Synthetic oligonucleotide
ucgaacaugagcccgauga

SEQ ID NO: 3039468 - RNA, 19 nt, Artificial Sequence
  Description of Artificial Sequence: Synthetic oligonucleotide
uuauacugagguaaaauaa

SEQ ID NO: 3039469 - RNA, 19 nt, Artificial Sequence
  Description of Artificial Sequence: Synthetic oligonucleotide
ugcaagaugauggugauga

SEQ ID NO: 3039470 - RNA, 19 nt, Artificial Sequence
  Description of Artificial Sequence: Synthetic oligonucleotide
uuggcugugaccucgaaca

SEQ ID NO: 3039471 - RNA, 19 nt, Artificial Sequence
  Description of Artificial Sequence: Synthetic oligonucleotide
gugaugaagacguagaaca

SEQ ID NO: 3039472 - RNA, 19 nt, Artificial Sequence
  Description of Artificial Sequence: Synthetic oligonucleotide
uauacugagguaaaauaaa

SEQ ID NO: 3039473 - RNA, 19 nt, Artificial Sequence
  Description of Artificial Sequence: Synthetic oligonucleotide
uaauguuauacugagguaa

SEQ ID NO: 3039474 - RNA, 19 nt, Artificial Sequence
  Description of Artificial Sequence: Synthetic oligonucleotide
aaugacgaacuccuggcug

SEQ ID NO: 3039475 - RNA, 19 nt, Artificial Sequence
  Description of Artificial Sequence: Synthetic oligonucleotide
acagcaugcaagaugaugg

SEQ ID NO: 3039476 - RNA, 19 nt, Artificial Sequence
  Description of Artificial Sequence: Synthetic oligonucleotide
uugugaaugacgaacuccu

SEQ ID NO: 3039477 - RNA, 19 nt, Artificial Sequence
  Description of Artificial Sequence: Synthetic oligonucleotide
gaagacguagaacaagaug

SEQ ID NO: 3039478 - RNA, 19 nt, Artificial Sequence
  Description of Artificial Sequence: Synthetic oligonucleotide
aaagccauggcagcgggcg

SEQ ID NO: 3039479 - RNA, 19 nt, Artificial Sequence
  Description of Artificial Sequence: Synthetic oligonucleotide
uagaacaagauggugacca

SEQ ID NO: 3039480 - RNA, 19 nt, Artificial Sequence
  Description of Artificial Sequence: Synthetic oligonucleotide
acacuaauguuauacugag

SEQ ID NO: 3039481 - RNA, 19 nt, Artificial Sequence
  Description of Artificial Sequence: Synthetic oligonucleotide
ugaaugacgaacuccuggc

SEQ ID NO: 3039482 - RNA, 19 nt, Artificial Sequence
  Description of Artificial Sequence: Synthetic oligonucleotide
ugcaugguugugaaugacg

SEQ ID NO: 3039483 - RNA, 19 nt, Artificial Sequence
  Description of Artificial Sequence: Synthetic oligonucleotide
augguugugaaugacgaac

SEQ ID NO: 3039484 - RNA, 19 nt, Artificial Sequence
  Description of Artificial Sequence: Synthetic oligonucleotide
cuaagauguacucuuguac

SEQ ID NO: 3039485 - RNA, 19 nt, Artificial Sequence
  Description of Artificial Sequence: Synthetic oligonucleotide
aaauaaauagaaaggcagu

SEQ ID NO: 3039486 - RNA, 19 nt, Artificial Sequence
  Description of Artificial Sequence: Synthetic oligonucleotide
uaaauagaaaggcagucuu

SEQ ID NO: 3039487 - RNA, 19 nt, Artificial Sequence
  Description of Artificial Sequence: Synthetic oligonucleotide
gaugauggugaugaagacg

SEQ ID NO: 3039488 - RNA, 19 nt, Artificial Sequence
  Description of Artificial Sequence: Synthetic oligonucleotide
caagauggugaccaggucc

SEQ ID NO: 3039489 - RNA, 19 nt, Artificial Sequence
  Description of Artificial Sequence: Synthetic oligonucleotide
uguaccacagcaugcaaga

SEQ ID NO: 3039490 - RNA, 19 nt, Artificial Sequence
  Description of Artificial Sequence: Synthetic oligonucleotide
aagauguacucuuguacca

SEQ ID NO: 3039491 - RNA, 19 nt, Artificial Sequence
  Description of Artificial Sequence: Synthetic oligonucleotide
uagaaaggcagucuuggcu

SEQ ID NO: 3039492 - RNA, 19 nt, Artificial Sequence
  Description of Artificial Sequence: Synthetic oligonucleotide
gugaaugacgaacuccugg

SEQ ID NO: 3039493 - RNA, 19 nt, Artificial Sequence
  Description of Artificial Sequence: Synthetic oligonucleotide
auagaaaggcagucuuggc

SEQ ID NO: 3039494 - RNA, 19 nt, Artificial Sequence
  Description of Artificial Sequence: Synthetic oligonucleotide
gugaccucgaacaugagcc

SEQ ID NO: 3039495 - RNA, 19 nt, Artificial Sequence
  Description of Artificial Sequence: Synthetic oligonucleotide
gaagccgaugucugcaugg

SEQ ID NO: 3039496 - RNA, 19 nt, Artificial Sequence
  Description of Artificial Sequence: Synthetic oligonucleotide
agugguaguggacugucuc

SEQ ID NO: 3039497 - RNA, 19 nt, Artificial Sequence
  Description of Artificial Sequence: Synthetic oligonucleotide
gauuuugucuaagauguac

SEQ ID NO: 3039498 - RNA, 19 nt, Artificial Sequence
  Description of Artificial Sequence: Synthetic oligonucleotide
cugauuuugucuaagaugu

SEQ ID NO: 3039499 - RNA, 19 nt, Artificial Sequence
  Description of Artificial Sequence: Synthetic oligonucleotide
ugugaccucgaacaugagc

SEQ ID NO: 3039500 - RNA, 19 nt, Artificial Sequence
  Description of Artificial Sequence: Synthetic oligonucleotide
aacuccuggcugaagagcg

SEQ ID NO: 3039501 - RNA, 19 nt, Artificial Sequence
  Description of Artificial Sequence: Synthetic oligonucleotide
aggcacacuaauguuauac

SEQ ID NO: 3039502 - RNA, 19 nt, Artificial Sequence
  Description of Artificial Sequence: Synthetic oligonucleotide
gaugaagacguagaacaag

SEQ ID NO: 3039503 - RNA, 19 nt, Artificial Sequence
  Description of Artificial Sequence: Synthetic oligonucleotide
uguaggcacacuaauguua

SEQ ID NO: 3039504 - RNA, 19 nt, Artificial Sequence
  Description of Artificial Sequence: Synthetic oligonucleotide
uuguaccacagcaugcaag

SEQ ID NO: 3039505 - RNA, 19 nt, Artificial Sequence
  Description of Artificial Sequence: Synthetic oligonucleotide
cuacggaaagccauggcag

SEQ ID NO: 3039506 - RNA, 19 nt, Artificial Sequence
  Description of Artificial Sequence: Synthetic oligonucleotide
uuuugucuaagauguacuc

SEQ ID NO: 3039507 - RNA, 19 nt, Artificial Sequence
  Description of Artificial Sequence: Synthetic oligonucleotide
gauggugaugaagacguag

SEQ ID NO: 3039508 - RNA, 19 nt, Artificial Sequence
  Description of Artificial Sequence: Synthetic oligonucleotide
acucuuguaccacagcaug

SEQ ID NO: 3039509 - RNA, 19 nt, Artificial Sequence
  Description of Artificial Sequence: Synthetic oligonucleotide
uuuucguccuccuacggaa

SEQ ID NO: 3039510 - RNA, 19 nt, Artificial Sequence
  Description of Artificial Sequence: Synthetic oligonucleotide
augauggugaugaagacgu

SEQ ID NO: 3039511 - RNA, 19 nt, Artificial Sequence
  Description of Artificial Sequence: Synthetic oligonucleotide
auaaauagaaaggcagucu

SEQ ID NO: 3039512 - RNA, 19 nt, Artificial Sequence
  Description of Artificial Sequence: Synthetic oligonucleotide
guuauacugagguaaaaua

SEQ ID NO: 3039513 - RNA, 19 nt, Artificial Sequence
  Description of Artificial Sequence: Synthetic oligonucleotide
uugucuaagauguacucuu

SEQ ID NO: 3039514 - RNA, 19 nt, Artificial Sequence
  Description of Artificial Sequence: Synthetic oligonucleotide
gaugaggacgcagagcacc

SEQ ID NO: 3039515 - RNA, 19 nt, Artificial Sequence
  Description of Artificial Sequence: Synthetic oligonucleotide
aacaagauggugaccaggu

SEQ ID NO: 3039516 - RNA, 19 nt, Artificial Sequence
  Description of Artificial Sequence: Synthetic oligonucleotide
gaacaugagcccgaugagg

SEQ ID NO: 3039517 - RNA, 19 nt, Artificial Sequence
  Description of Artificial Sequence: Synthetic oligonucleotide
aacaugagcccgaugagga

SEQ ID NO: 3039518 - RNA, 19 nt, Artificial Sequence
  Description of Artificial Sequence: Synthetic oligonucleotide
aaauagaaaggcagucuug

SEQ ID NO: 3039519 - RNA, 19 nt, Artificial Sequence
  Description of Artificial Sequence: Synthetic oligonucleotide
uguuauacugagguaaaau

SEQ ID NO: 3039520 - RNA, 19 nt, Artificial Sequence
  Description of Artificial Sequence: Synthetic oligonucleotide
uuugucuaagauguacucu

SEQ ID NO: 3039521 - RNA, 19 nt, Artificial Sequence
  Description of Artificial Sequence: Synthetic oligonucleotide
uggacugucucgcugucug

SEQ ID NO: 3039522 - RNA, 19 nt, Artificial Sequence
  Description of Artificial Sequence: Synthetic oligonucleotide
ugaagagcggguaacuuuu

SEQ ID NO: 3039523 - RNA, 19 nt, Artificial Sequence
  Description of Artificial Sequence: Synthetic oligonucleotide
ugguugugaaugacgaacu

SEQ ID NO: 3039524 - RNA, 19 nt, Artificial Sequence
  Description of Artificial Sequence: Synthetic oligonucleotide
gucugcaugguugugaaug

SEQ ID NO: 3039525 - RNA, 19 nt, Artificial Sequence
  Description of Artificial Sequence: Synthetic oligonucleotide
ucuaagauguacucuugua

SEQ ID NO: 3039526 - RNA, 19 nt, Artificial Sequence
  Description of Artificial Sequence: Synthetic oligonucleotide
ugcuguaggcacacuaaug

SEQ ID NO: 3039527 - RNA, 19 nt, Artificial Sequence
  Description of Artificial Sequence: Synthetic oligonucleotide
agcagaagccgaugucugc

SEQ ID NO: 3039528 - RNA, 19 nt, Artificial Sequence
  Description of Artificial Sequence: Synthetic oligonucleotide
ugcugauuuugucuaagau

SEQ ID NO: 3039529 - RNA, 19 nt, Artificial Sequence
  Description of Artificial Sequence: Synthetic oligonucleotide
guugugaaugacgaacucc

SEQ ID NO: 3039530 - RNA, 19 nt, Artificial Sequence
  Description of Artificial Sequence: Synthetic oligonucleotide
gaacaagauggugaccagg

SEQ ID NO: 3039531 - RNA, 19 nt, Artificial Sequence
  Description of Artificial Sequence: Synthetic oligonucleotide
uuugcugauuuugucuaag

SEQ ID NO: 3039532 - RNA, 19 nt, Artificial Sequence
  Description of Artificial Sequence: Synthetic oligonucleotide
ucuuguaccacagcaugca

SEQ ID NO: 3039533 - RNA, 19 nt, Artificial Sequence
  Description of Artificial Sequence: Synthetic oligonucleotide
cacacuaauguuauacuga

SEQ ID NO: 3039534 - RNA, 19 nt, Artificial Sequence
  Description of Artificial Sequence: Synthetic oligonucleotide
cugagguaaaauaaauaga

SEQ ID NO: 3039535 - RNA, 19 nt, Artificial Sequence
  Description of Artificial Sequence: Synthetic oligonucleotide
ugucuaagauguacucuug

SEQ ID NO: 3039536 - RNA, 19 nt, Artificial Sequence
  Description of Artificial Sequence: Synthetic oligonucleotide
uguacucuuguaccacagc

SEQ ID NO: 3039537 - RNA, 19 nt, Artificial Sequence
  Description of Artificial Sequence: Synthetic oligonucleotide
guacucuuguaccacagca

SEQ ID NO: 3039538 - RNA, 19 nt, Artificial Sequence
  Description of Artificial Sequence: Synthetic oligonucleotide
agagcaccaagcagaagcc

SEQ ID NO: 3039539 - RNA, 19 nt, Artificial Sequence
  Description of Artificial Sequence: Synthetic oligonucleotide
ucugcuguaggcacacuaa

SEQ ID NO: 3039540 - RNA, 19 nt, Artificial Sequence
  Description of Artificial Sequence: Synthetic oligonucleotide
gacgcagagcaccaagcag

SEQ ID NO: 3039541 - RNA, 19 nt, Artificial Sequence
  Description of Artificial Sequence: Synthetic oligonucleotide
ugaugaagacguagaacaa

SEQ ID NO: 3039542 - RNA, 19 nt, Artificial Sequence
  Description of Artificial Sequence: Synthetic oligonucleotide
aagauggugaccagguccu

SEQ ID NO: 3039543 - RNA, 19 nt, Artificial Sequence
  Description of Artificial Sequence: Synthetic oligonucleotide
gugguaguggacugucucg

SEQ ID NO: 3039544 - RNA, 19 nt, Artificial Sequence
  Description of Artificial Sequence: Synthetic oligonucleotide
aauguuauacugagguaaa

SEQ ID NO: 3039545 - RNA, 19 nt, Artificial Sequence
  Description of Artificial Sequence: Synthetic oligonucleotide
accacagcaugcaagauga

SEQ ID NO: 3039546 - RNA, 19 nt, Artificial Sequence
  Description of Artificial Sequence: Synthetic oligonucleotide
auuuugucuaagauguacu

SEQ ID NO: 3039547 - RNA, 19 nt, Artificial Sequence
  Description of Artificial Sequence: Synthetic oligonucleotide
cucuuguaccacagcaugc

SEQ ID NO: 3039548 - RNA, 19 nt, Artificial Sequence
  Description of Artificial Sequence: Synthetic oligonucleotide
cucgcugucugcuguaggc

SEQ ID NO: 3039549 - RNA, 19 nt, Artificial Sequence
  Description of Artificial Sequence: Synthetic oligonucleotide
gugaccagguccuuugggc

SEQ ID NO: 3039550 - RNA, 19 nt, Artificial Sequence
  Description of Artificial Sequence: Synthetic oligonucleotide
gaccagguccuuugggccg

SEQ ID NO: 3039551 - RNA, 19 nt, Artificial Sequence
  Description of Artificial Sequence: Synthetic oligonucleotide
uacggaaagccauggcagc

SEQ ID NO: 3039552 - RNA, 19 nt, Artificial Sequence
  Description of Artificial Sequence: Synthetic oligonucleotide
acguagaacaagaugguga

SEQ ID NO: 3039553 - RNA, 19 nt, Artificial Sequence
  Description of Artificial Sequence: Synthetic oligonucleotide
ugugaaugacgaacuccug

SEQ ID NO: 3039554 - RNA, 19 nt, Artificial Sequence
  Description of Artificial Sequence: Synthetic oligonucleotide
cacuaauguuauacugagg

SEQ ID NO: 3039555 - RNA, 19 nt, Artificial Sequence
  Description of Artificial Sequence: Synthetic oligonucleotide
acgaacuccuggcugaaga

SEQ ID NO: 3039556 - RNA, 19 nt, Artificial Sequence
  Description of Artificial Sequence: Synthetic oligonucleotide
augaagacguagaacaaga

SEQ ID NO: 3039557 - RNA, 19 nt, Artificial Sequence
  Description of Artificial Sequence: Synthetic oligonucleotide
uucguccuccuacggaaag

SEQ ID NO: 3039558 - RNA, 19 nt, Artificial Sequence
  Description of Artificial Sequence: Synthetic oligonucleotide
augacgaacuccuggcuga

SEQ ID NO: 3039559 - RNA, 19 nt, Artificial Sequence
  Description of Artificial Sequence: Synthetic oligonucleotide
gauguacucuuguaccaca

SEQ ID NO: 3039560 - RNA, 19 nt, Artificial Sequence
  Description of Artificial Sequence: Synthetic oligonucleotide
acaagauggugaccagguc

SEQ ID NO: 3039561 - RNA, 19 nt, Artificial Sequence
  Description of Artificial Sequence: Synthetic oligonucleotide
agaacaagauggugaccag

SEQ ID NO: 3039562 - RNA, 19 nt, Artificial Sequence
  Description of Artificial Sequence: Synthetic oligonucleotide
ugaagacguagaacaagau

SEQ ID NO: 3039563 - RNA, 19 nt, Artificial Sequence
  Description of Artificial Sequence: Synthetic oligonucleotide
uacucuuguaccacagcau

SEQ ID NO: 3039564 - RNA, 19 nt, Artificial Sequence
  Description of Artificial Sequence: Synthetic oligonucleotide
uccuccuacggaaagccau

SEQ ID NO: 3039565 - RNA, 19 nt, Artificial Sequence
  Description of Artificial Sequence: Synthetic oligonucleotide
cuuugggccguagugguag

SEQ ID NO: 3039566 - RNA, 19 nt, Artificial Sequence
  Description of Artificial Sequence: Synthetic oligonucleotide
agucuuggcugugaccucg

SEQ ID NO: 3039567 - RNA, 19 nt, Artificial Sequence
  Description of Artificial Sequence: Synthetic oligonucleotide
gcacacuaauguuauacug

SEQ ID NO: 3039568 - RNA, 19 nt, Artificial Sequence
  Description of Artificial Sequence: Synthetic oligonucleotide
uugcugauuuugucuaaga

SEQ ID NO: 3039569 - RNA, 19 nt, Artificial Sequence
  Description of Artificial Sequence: Synthetic oligonucleotide
gaggacgcagagcaccaag

SEQ ID NO: 3039570 - RNA, 19 nt, Artificial Sequence
  Description of Artificial Sequence: Synthetic oligonucleotide
ucucgcugucugcuguagg

SEQ ID NO: 3039571 - RNA, 19 nt, Artificial Sequence
  Description of Artificial Sequence: Synthetic oligonucleotide
gacguagaacaagauggug

SEQ ID NO: 3039572 - RNA, 19 nt, Artificial Sequence
  Description of Artificial Sequence: Synthetic oligonucleotide
gaugucugcaugguuguga

SEQ ID NO: 3039573 - RNA, 19 nt, Artificial Sequence
  Description of Artificial Sequence: Synthetic oligonucleotide
uaguggacugucucgcugu

SEQ ID NO: 3039574 - RNA, 19 nt, Artificial Sequence
  Description of Artificial Sequence: Synthetic oligonucleotide
ugguaguggacugucucgc

SEQ ID NO: 3039575 - RNA, 19 nt, Artificial Sequence
  Description of Artificial Sequence: Synthetic oligonucleotide
uccuuugggccguaguggu

SEQ ID NO: 3039576 - RNA, 19 nt, Artificial Sequence
  Description of Artificial Sequence: Synthetic oligonucleotide
gaccucgaacaugagcccg

SEQ ID NO: 3039577 - RNA, 19 nt, Artificial Sequence
  Description of Artificial Sequence: Synthetic oligonucleotide
aggacgcagagcaccaagc

SEQ ID NO: 3039578 - RNA, 19 nt, Artificial Sequence
  Description of Artificial Sequence: Synthetic oligonucleotide
ugaccucgaacaugagccc

SEQ ID NO: 3039579 - RNA, 19 nt, Artificial Sequence
  Description of Artificial Sequence: Synthetic oligonucleotide
ugggccguagugguagugg

SEQ ID NO: 3039580 - RNA, 19 nt, Artificial Sequence
  Description of Artificial Sequence: Synthetic oligonucleotide
guaguggacugucucgcug

SEQ ID NO: 3039581 - RNA, 19 nt, Artificial Sequence
  Description of Artificial Sequence: Synthetic oligonucleotide
auacugagguaaaauaaau

SEQ ID NO: 3039582 - RNA, 19 nt, Artificial Sequence
  Description of Artificial Sequence: Synthetic oligonucleotide
gagguaaaauaaauagaaa

SEQ ID NO: 3039583 - RNA, 19 nt, Artificial Sequence
  Description of Artificial Sequence: Synthetic oligonucleotide
gaacuccuggcugaagagc

SEQ ID NO: 3039584 - RNA, 19 nt, Artificial Sequence
  Description of Artificial Sequence: Synthetic oligonucleotide
ucagcagccgcagcgaaaa

SEQ ID NO: 3039585 - RNA, 19 nt, Artificial Sequence
  Description of Artificial Sequence: Synthetic oligonucleotide
guccuuugggccguagugg

SEQ ID NO: 3039586 - RNA, 19 nt, Artificial Sequence
  Description of Artificial Sequence: Synthetic oligonucleotide
cacagcaugcaagaugaug

SEQ ID NO: 3039587 - RNA, 19 nt, Artificial Sequence
  Description of Artificial Sequence: Synthetic oligonucleotide
aagcagaagccgaugucug

SEQ ID NO: 3039588 - RNA, 19 nt, Artificial Sequence
  Description of Artificial Sequence: Synthetic oligonucleotide
uggugaccagguccuuugg

SEQ ID NO: 3039589 - RNA, 19 nt, Artificial Sequence
  Description of Artificial Sequence: Synthetic oligonucleotide
acggaaagccauggcagcg

SEQ ID NO: 3039590 - RNA, 19 nt, Artificial Sequence
  Description of Artificial Sequence: Synthetic oligonucleotide
cuuggcugugaccucgaac

SEQ ID NO: 3039591 - RNA, 19 nt, Artificial Sequence
  Description of Artificial Sequence: Synthetic oligonucleotide
agaagccgaugucugcaug

SEQ ID NO: 3039592 - RNA, 19 nt, Artificial Sequence
  Description of Artificial Sequence: Synthetic oligonucleotide
auggugaugaagacguaga

SEQ ID NO: 3039593 - RNA, 19 nt, Artificial Sequence
  Description of Artificial Sequence: Synthetic oligonucleotide
aguggacugucucgcuguc

SEQ ID NO: 3039594 - RNA, 19 nt, Artificial Sequence
  Description of Artificial Sequence: Synthetic oligonucleotide
augucugcaugguugugaa

SEQ ID NO: 3039595 - RNA, 19 nt, Artificial Sequence
  Description of Artificial Sequence: Synthetic oligonucleotide
gguccuuugggccguagug

SEQ ID NO: 3039596 - RNA, 19 nt, Artificial Sequence
  Description of Artificial Sequence: Synthetic oligonucleotide
acgcagagcaccaagcaga

SEQ ID NO: 3039597 - RNA, 19 nt, Artificial Sequence
  Description of Artificial Sequence: Synthetic oligonucleotide
aggcagucuuggcugugac

SEQ ID NO: 3039598 - RNA, 19 nt, Artificial Sequence
  Description of Artificial Sequence: Synthetic oligonucleotide
acugccugcggggacccgc

SEQ ID NO: 3039599 - RNA, 19 nt, Artificial Sequence
  Description of Artificial Sequence: Synthetic oligonucleotide
gagcaccaagcagaagccg

SEQ ID NO: 3039600 - RNA, 19 nt, Artificial Sequence
  Description of Artificial Sequence: Synthetic oligonucleotide
acccucgcucagcagccgc

SEQ ID NO: 3039601 - RNA, 19 nt, Artificial Sequence
  Description of Artificial Sequence: Synthetic oligonucleotide
cuaauguuauacugaggua

SEQ ID NO: 3039602 - RNA, 19 nt, Artificial Sequence
  Description of Artificial Sequence: Synthetic oligonucleotide
ggugaccagguccuuuggg

SEQ ID NO: 3039603 - RNA, 19 nt, Artificial Sequence
  Description of Artificial Sequence: Synthetic oligonucleotide
cguagaacaagauggugac

SEQ ID NO: 3039604 - RNA, 19 nt, Artificial Sequence
  Description of Artificial Sequence: Synthetic oligonucleotide
ggaaagccauggcagcggg

SEQ ID NO: 3039605 - RNA, 19 nt, Artificial Sequence
  Description of Artificial Sequence: Synthetic oligonucleotide
ugauuuugucuaagaugua

SEQ ID NO: 3039606 - RNA, 19 nt, Artificial Sequence
  Description of Artificial Sequence: Synthetic oligonucleotide
agcaugcaagaugauggug

SEQ ID NO: 3039607 - RNA, 19 nt, Artificial Sequence
  Description of Artificial Sequence: Synthetic oligonucleotide
auguacucuuguaccacag

SEQ ID NO: 3039608 - RNA, 19 nt, Artificial Sequence
  Description of Artificial Sequence: Synthetic oligonucleotide
uuucguccuccuacggaaa

SEQ ID NO: 3039609 - RNA, 19 nt, Artificial Sequence
  Description of Artificial Sequence: Synthetic oligonucleotide
acugucucgcugucugcug

SEQ ID NO: 3039610 - RNA, 19 nt, Artificial Sequence
  Description of Artificial Sequence: Synthetic oligonucleotide
gcuguaggcacacuaaugu

SEQ ID NO: 3039611 - RNA, 19 nt, Artificial Sequence
  Description of Artificial Sequence: Synthetic oligonucleotide
agacguagaacaagauggu

SEQ ID NO: 3039612 - RNA, 19 nt, Artificial Sequence
  Description of Artificial Sequence: Synthetic oligonucleotide
agcaccaagcagaagccga

SEQ ID NO: 3039613 - RNA, 19 nt, Artificial Sequence
  Description of Artificial Sequence: Synthetic oligonucleotide
gcaugcaagaugaugguga

SEQ ID NO: 3039614 - RNA, 19 nt, Artificial Sequence
  Description of Artificial Sequence: Synthetic oligonucleotide
uagugguaguggacugucu

SEQ ID NO: 3039615 - RNA, 19 nt, Artificial Sequence
  Description of Artificial Sequence: Synthetic oligonucleotide
guagaacaagauggugacc

SEQ ID NO: 3039616 - RNA, 19 nt, Artificial Sequence
  Description of Artificial Sequence: Synthetic oligonucleotide
ugcacugccugcggggacc

SEQ ID NO: 3039617 - RNA, 19 nt, Artificial Sequence
  Description of Artificial Sequence: Synthetic oligonucleotide
aaaggcagucuuggcugug

SEQ ID NO: 3039618 - RNA, 19 nt, Artificial Sequence
  Description of Artificial Sequence: Synthetic oligonucleotide
aaggcagucuuggcuguga

SEQ ID NO: 3039619 - RNA, 19 nt, Artificial Sequence
  Description of Artificial Sequence: Synthetic oligonucleotide
cuccuacggaaagccaugg

SEQ ID NO: 3039620 - RNA, 19 nt, Artificial Sequence
  Description of Artificial Sequence: Synthetic oligonucleotide
ccgaugaggacgcagagca

SEQ ID NO: 3039621 - RNA, 19 nt, Artificial Sequence
  Description of Artificial Sequence: Synthetic oligonucleotide
cuccuggcugaagagcggg

SEQ ID NO: 3039622 - RNA, 19 nt, Artificial Sequence
  Description of Artificial Sequence: Synthetic oligonucleotide
gccgaugucugcaugguug

SEQ ID NO: 3039623 - RNA, 19 nt, Artificial Sequence
  Description of Artificial Sequence: Synthetic oligonucleotide
aagccgaugucugcauggu

SEQ ID NO: 3039624 - RNA, 19 nt, Artificial Sequence
  Description of Artificial Sequence: Synthetic oligonucleotide
gcugugaccucgaacauga

SEQ ID NO: 3039625 - RNA, 19 nt, Artificial Sequence
  Description of Artificial Sequence: Synthetic oligonucleotide
guagugguaguggacuguc

SEQ ID NO: 3039626 - RNA, 19 nt, Artificial Sequence
  Description of Artificial Sequence: Synthetic oligonucleotide
ucguccuccuacggaaagc

SEQ ID NO: 3039627 - RNA, 19 nt, Artificial Sequence
  Description of Artificial Sequence: Synthetic oligonucleotide
gaaugacgaacuccuggcu

SEQ ID NO: 3039628 - RNA, 19 nt, Artificial Sequence
  Description of Artificial Sequence: Synthetic oligonucleotide
gcaugguugugaaugacga

SEQ ID NO: 3039629 - RNA, 19 nt, Artificial Sequence
  Description of Artificial Sequence: Synthetic oligonucleotide
ucgcugucugcuguaggca

SEQ ID NO: 3039630 - RNA, 19 nt, Artificial Sequence
  Description of Artificial Sequence: Synthetic oligonucleotide
uggcugaagagcggguaac

SEQ ID NO: 3039631 - RNA, 19 nt, Artificial Sequence
  Description of Artificial Sequence: Synthetic oligonucleotide
caagcagaagccgaugucu

SEQ ID NO: 3039632 - RNA, 19 nt, Artificial Sequence
  Description of Artificial Sequence: Synthetic oligonucleotide
agguccuuugggccguagu

SEQ ID NO: 3039633 - RNA, 19 nt, Artificial Sequence
  Description of Artificial Sequence: Synthetic oligonucleotide
guuugcugauuuugucuaa

SEQ ID NO: 3039634 - RNA, 19 nt, Artificial Sequence
  Description of Artificial Sequence: Synthetic oligonucleotide
gucugcuguaggcacacua

SEQ ID NO: 3039635 - RNA, 19 nt, Artificial Sequence
  Description of Artificial Sequence: Synthetic oligonucleotide
gaaagccauggcagcgggc

SEQ ID NO: 3039636 - RNA, 19 nt, Artificial Sequence
  Description of Artificial Sequence: Synthetic oligonucleotide
uccuggcugaagagcgggu

SEQ ID NO: 3039637 - RNA, 19 nt, Artificial Sequence
  Description of Artificial Sequence: Synthetic oligonucleotide
cugucugcuguaggcacac

SEQ ID NO: 3039638 - RNA, 19 nt, Artificial Sequence
  Description of Artificial Sequence: Synthetic oligonucleotide
uuugggccguagugguagu

SEQ ID NO: 3039639 - RNA, 19 nt, Artificial Sequence
  Description of Artificial Sequence: Synthetic oligonucleotide
uggcugugaccucgaacau

SEQ ID NO: 3039640 - RNA, 19 nt, Artificial Sequence
  Description of Artificial Sequence: Synthetic oligonucleotide
caugguugugaaugacgaa

SEQ ID NO: 3039641 - RNA, 19 nt, Artificial Sequence
  Description of Artificial Sequence: Synthetic oligonucleotide
gcagucuuggcugugaccu

SEQ ID NO: 3039642 - RNA, 19 nt, Artificial Sequence
  Description of Artificial Sequence: Synthetic oligonucleotide
ucuuggcugugaccucgaa

SEQ ID NO: 3039643 - RNA, 19 nt, Artificial Sequence
  Description of Artificial Sequence: Synthetic oligonucleotide
acuccuggcugaagagcgg

SEQ ID NO: 3039644 - RNA, 19 nt, Artificial Sequence
  Description of Artificial Sequence: Synthetic oligonucleotide
gagcccgaugaggacgcag

SEQ ID NO: 3039645 - RNA, 19 nt, Artificial Sequence
  Description of Artificial Sequence: Synthetic oligonucleotide
guaggcacacuaauguuau

SEQ ID NO: 3039646 - RNA, 19 nt, Artificial Sequence
  Description of Artificial Sequence: Synthetic oligonucleotide
augcaagaugauggugaug

SEQ ID NO: 3039647 - RNA, 19 nt, Artificial Sequence
  Description of Artificial Sequence: Synthetic oligonucleotide
gacgaacuccuggcugaag

SEQ ID NO: 3039648 - RNA, 19 nt, Artificial Sequence
  Description of Artificial Sequence: Synthetic oligonucleotide
augaggacgcagagcacca

SEQ ID NO: 3039649 - RNA, 19 nt, Artificial Sequence
  Description of Artificial Sequence: Synthetic oligonucleotide
ggacgcagagcaccaagca

SEQ ID NO: 3039650 - RNA, 19 nt, Artificial Sequence
  Description of Artificial Sequence: Synthetic oligonucleotide
ggcagucuuggcugugacc

SEQ ID NO: 3039651 - RNA, 19 nt, Artificial Sequence
  Description of Artificial Sequence: Synthetic oligonucleotide
cauggcagcgggcgugcac

SEQ ID NO: 3039652 - RNA, 19 nt, Artificial Sequence
  Description of Artificial Sequence: Synthetic oligonucleotide
cuuguaccacagcaugcaa

SEQ ID NO: 3039653 - RNA, 19 nt, Artificial Sequence
  Description of Artificial Sequence: Synthetic oligonucleotide
ugucucgcugucugcugua

SEQ ID NO: 3039654 - RNA, 19 nt, Artificial Sequence
  Description of Artificial Sequence: Synthetic oligonucleotide
agcccgaugaggacgcaga

SEQ ID NO: 3039655 - RNA, 19 nt, Artificial Sequence
  Description of Artificial Sequence: Synthetic oligonucleotide
ggcacacuaauguuauacu

SEQ ID NO: 3039656 - RNA, 19 nt, Artificial Sequence
  Description of Artificial Sequence: Synthetic oligonucleotide
uugggccguagugguagug

SEQ ID NO: 3039657 - RNA, 19 nt, Artificial Sequence
  Description of Artificial Sequence: Synthetic oligonucleotide
ugcggggacccgcacccuc

SEQ ID NO: 3039658 - RNA, 19 nt, Artificial Sequence
  Description of Artificial Sequence: Synthetic oligonucleotide
ugucugcaugguugugaau

SEQ ID NO: 3039659 - RNA, 19 nt, Artificial Sequence
  Description of Artificial Sequence: Synthetic oligonucleotide
agccauggcagcgggcgug

SEQ ID NO: 3039660 - RNA, 19 nt, Artificial Sequence
  Description of Artificial Sequence: Synthetic oligonucleotide
ccugcggggacccgcaccc

SEQ ID NO: 3039661 - RNA, 19 nt, Artificial Sequence
  Description of Artificial Sequence: Synthetic oligonucleotide
cugaagagcggguaacuuu

SEQ ID NO: 3039662 - RNA, 19 nt, Artificial Sequence
  Description of Artificial Sequence: Synthetic oligonucleotide
ggcgugcacugccugcggg

SEQ ID NO: 3039663 - RNA, 19 nt, Artificial Sequence
  Description of Artificial Sequence: Synthetic oligonucleotide
agcgggcgugcacugccug

SEQ ID NO: 3039664 - RNA, 19 nt, Artificial Sequence
  Description of Artificial Sequence: Synthetic oligonucleotide
cucgaacaugagcccgaug

SEQ ID NO: 3039665 - RNA, 19 nt, Artificial Sequence
  Description of Artificial Sequence: Synthetic oligonucleotide
ccuccuacggaaagccaug

SEQ ID NO: 3039666 - RNA, 19 nt, Artificial Sequence
  Description of Artificial Sequence: Synthetic oligonucleotide
caugcaagaugauggugau

SEQ ID NO: 3039667 - RNA, 19 nt, Artificial Sequence
  Description of Artificial Sequence: Synthetic oligonucleotide
acccgcacccucgcucagc

SEQ ID NO: 3039668 - RNA, 19 nt, Artificial Sequence
  Description of Artificial Sequence: Synthetic oligonucleotide
cuggcugaagagcggguaa

SEQ ID NO: 3039669 - RNA, 19 nt, Artificial Sequence
  Description of Artificial Sequence: Synthetic oligonucleotide
cucgcucagcagccgcagc

SEQ ID NO: 3039670 - RNA, 19 nt, Artificial Sequence
  Description of Artificial Sequence: Synthetic oligonucleotide
gucucgcugucugcuguag

SEQ ID NO: 3039671 - RNA, 19 nt, Artificial Sequence
  Description of Artificial Sequence: Synthetic oligonucleotide
uaggcacacuaauguuaua

SEQ ID NO: 3039672 - RNA, 19 nt, Artificial Sequence
  Description of Artificial Sequence: Synthetic oligonucleotide
accucgaacaugagcccga

SEQ ID NO: 3039673 - RNA, 19 nt, Artificial Sequence
  Description of Artificial Sequence: Synthetic oligonucleotide
ugacgaacuccuggcugaa

SEQ ID NO: 3039674 - RNA, 19 nt, Artificial Sequence
  Description of Artificial Sequence: Synthetic oligonucleotide
gacugucucgcugucugcu

SEQ ID NO: 3039675 - RNA, 19 nt, Artificial Sequence
  Description of Artificial Sequence: Synthetic oligonucleotide
cgaacuccuggcugaagag

SEQ ID NO: 3039676 - RNA, 19 nt, Artificial Sequence
  Description of Artificial Sequence: Synthetic oligonucleotide
gcagaagccgaugucugca

SEQ ID NO: 3039677 - RNA, 19 nt, Artificial Sequence
  Description of Artificial Sequence: Synthetic oligonucleotide
gcagcgggcgugcacugcc

SEQ ID NO: 3039678 - RNA, 19 nt, Artificial Sequence
  Description of Artificial Sequence: Synthetic oligonucleotide
caccaagcagaagccgaug

SEQ ID NO: 3039679 - RNA, 19 nt, Artificial Sequence
  Description of Artificial Sequence: Synthetic oligonucleotide
ggcugugaccucgaacaug

SEQ ID NO: 3039680 - RNA, 19 nt, Artificial Sequence
  Description of Artificial Sequence: Synthetic oligonucleotide
ccaagcagaagccgauguc

SEQ ID NO: 3039681 - RNA, 19 nt, Artificial Sequence
  Description of Artificial Sequence: Synthetic oligonucleotide
cgcacccucgcucagcagc

SEQ ID NO: 3039682 - RNA, 19 nt, Artificial Sequence
  Description of Artificial Sequence: Synthetic oligonucleotide
cgaacaugagcccgaugag

SEQ ID NO: 3039683 - RNA, 19 nt, Artificial Sequence
  Description of Artificial Sequence: Synthetic oligonucleotide
ugaggacgcagagcaccaa

SEQ ID NO: 3039684 - RNA, 19 nt, Artificial Sequence
  Description of Artificial Sequence: Synthetic oligonucleotide
ggacugucucgcugucugc

SEQ ID NO: 3039685 - RNA, 19 nt, Artificial Sequence
  Description of Artificial Sequence: Synthetic oligonucleotide
agccgaugucugcaugguu

SEQ ID NO: 3039686 - RNA, 19 nt, Artificial Sequence
  Description of Artificial Sequence: Synthetic oligonucleotide
accagguccuuugggccgu

SEQ ID NO: 3039687 - RNA, 19 nt, Artificial Sequence
  Description of Artificial Sequence: Synthetic oligonucleotide
cguccuccuacggaaagcc

SEQ ID NO: 3039688 - RNA, 19 nt, Artificial Sequence
  Description of Artificial Sequence: Synthetic oligonucleotide
gcccgaugaggacgcagag

SEQ ID NO: 3039689 - RNA, 19 nt, Artificial Sequence
  Description of Artificial Sequence: Synthetic oligonucleotide
cagcaugcaagaugauggu

SEQ ID NO: 3039690 - RNA, 19 nt, Artificial Sequence
  Description of Artificial Sequence: Synthetic oligonucleotide
cucagcagccgcagcgaaa

SEQ ID NO: 3039691 - RNA, 19 nt, Artificial Sequence
  Description of Artificial Sequence: Synthetic oligonucleotide
ccguagugguaguggacug

SEQ ID NO: 3039692 - RNA, 19 nt, Artificial Sequence
  Description of Artificial Sequence: Synthetic oligonucleotide
gacccgcacccucgcucag

SEQ ID NO: 3039693 - RNA, 19 nt, Artificial Sequence
  Description of Artificial Sequence: Synthetic oligonucleotide
cuguaggcacacuaauguu

SEQ ID NO: 3039694 - RNA, 19 nt, Artificial Sequence
  Description of Artificial Sequence: Synthetic oligonucleotide
gggacccgcacccucgcuc

SEQ ID NO: 3039695 - RNA, 19 nt, Artificial Sequence
  Description of Artificial Sequence: Synthetic oligonucleotide
ggacccgcacccucgcuca

SEQ ID NO: 3039696 - RNA, 19 nt, Artificial Sequence
  Description of Artificial Sequence: Synthetic oligonucleotide
gggccguagugguagugga

SEQ ID NO: 3039697 - RNA, 19 nt, Artificial Sequence
  Description of Artificial Sequence: Synthetic oligonucleotide
cguuugcugauuuugucua

SEQ ID NO: 3039698 - RNA, 19 nt, Artificial Sequence
  Description of Artificial Sequence: Synthetic oligonucleotide
gauggugaccagguccuuu

SEQ ID NO: 3039699 - RNA, 19 nt, Artificial Sequence
  Description of Artificial Sequence: Synthetic oligonucleotide
gugcacugccugcggggac

SEQ ID NO: 3039700 - RNA, 19 nt, Artificial Sequence
  Description of Artificial Sequence: Synthetic oligonucleotide
cugcuguaggcacacuaau

SEQ ID NO: 3039701 - RNA, 19 nt, Artificial Sequence
  Description of Artificial Sequence: Synthetic oligonucleotide
cccgaugaggacgcagagc

SEQ ID NO: 3039702 - RNA, 19 nt, Artificial Sequence
  Description of Artificial Sequence: Synthetic oligonucleotide
ugucugcuguaggcacacu

SEQ ID NO: 3039703 - RNA, 19 nt, Artificial Sequence
  Description of Artificial Sequence: Synthetic oligonucleotide
gcacccucgcucagcagcc

SEQ ID NO: 3039704 - RNA, 19 nt, Artificial Sequence
  Description of Artificial Sequence: Synthetic oligonucleotide
cugucucgcugucugcugu

SEQ ID NO: 3039705 - RNA, 19 nt, Artificial Sequence
  Description of Artificial Sequence: Synthetic oligonucleotide
cgcugucugcuguaggcac

SEQ ID NO: 3039706 - RNA, 19 nt, Artificial Sequence
  Description of Artificial Sequence: Synthetic oligonucleotide
cacccucgcucagcagccg

SEQ ID NO: 3039707 - RNA, 19 nt, Artificial Sequence
  Description of Artificial Sequence: Synthetic oligonucleotide
gccguagugguaguggacu

SEQ ID NO: 3039708 - RNA, 19 nt, Artificial Sequence
  Description of Artificial Sequence: Synthetic oligonucleotide
gggcgugcacugccugcgg

SEQ ID NO: 3039709 - RNA, 19 nt, Artificial Sequence
  Description of Artificial Sequence: Synthetic oligonucleotide
guccuccuacggaaagcca

SEQ ID NO: 3039710 - RNA, 19 nt, Artificial Sequence
  Description of Artificial Sequence: Synthetic oligonucleotide
gguaguggacugucucgcu

SEQ ID NO: 3039711 - RNA, 19 nt, Artificial Sequence
  Description of Artificial Sequence: Synthetic oligonucleotide
ugccugcggggacccgcac

SEQ ID NO: 3039712 - RNA, 19 nt, Artificial Sequence
  Description of Artificial Sequence: Synthetic oligonucleotide
ugagcccgaugaggacgca

SEQ ID NO: 3039713 - RNA, 19 nt, Artificial Sequence
  Description of Artificial Sequence: Synthetic oligonucleotide
cugccugcggggacccgca

SEQ ID NO: 3039714 - RNA, 19 nt, Artificial Sequence
  Description of Artificial Sequence: Synthetic oligonucleotide
gccugcggggacccgcacc

SEQ ID NO: 3039715 - RNA, 19 nt, Artificial Sequence
  Description of Artificial Sequence: Synthetic oligonucleotide
gcggggacccgcacccucg

SEQ ID NO: 3039716 - RNA, 19 nt, Artificial Sequence
  Description of Artificial Sequence: Synthetic oligonucleotide
cagcagccgcagcgaaaac

SEQ ID NO: 3039717 - RNA, 19 nt, Artificial Sequence
  Description of Artificial Sequence: Synthetic oligonucleotide
gcugucugcuguaggcaca

SEQ ID NO: 3039718 - RNA, 19 nt, Artificial Sequence
  Description of Artificial Sequence: Synthetic oligonucleotide
gcgggcgugcacugccugc

SEQ ID NO: 3039719 - RNA, 19 nt, Artificial Sequence
  Description of Artificial Sequence: Synthetic oligonucleotide
ggccguagugguaguggac

SEQ ID NO: 3039720 - RNA, 19 nt, Artificial Sequence
  Description of Artificial Sequence: Synthetic oligonucleotide
gucuuggcugugaccucga

SEQ ID NO: 3039721 - RNA, 19 nt, Artificial Sequence
  Description of Artificial Sequence: Synthetic oligonucleotide
cagaagccgaugucugcau

SEQ ID NO: 3039722 - RNA, 19 nt, Artificial Sequence
  Description of Artificial Sequence: Synthetic oligonucleotide
cagguccuuugggccguag

SEQ ID NO: 3039723 - RNA, 19 nt, Artificial Sequence
  Description of Artificial Sequence: Synthetic oligonucleotide
gccauggcagcgggcgugc

SEQ ID NO: 3039724 - RNA, 19 nt, Artificial Sequence
  Description of Artificial Sequence: Synthetic oligonucleotide
cgaugaggacgcagagcac

SEQ ID NO: 3039725 - RNA, 19 nt, Artificial Sequence
  Description of Artificial Sequence: Synthetic oligonucleotide
ccucgcucagcagccgcag

SEQ ID NO: 3039726 - RNA, 19 nt, Artificial Sequence
  Description of Artificial Sequence: Synthetic oligonucleotide
ggcugaagagcggguaacu

SEQ ID NO: 3039727 - RNA, 19 nt, Artificial Sequence
  Description of Artificial Sequence: Synthetic oligonucleotide
cgggcgugcacugccugcg

SEQ ID NO: 3039728 - RNA, 19 nt, Artificial Sequence
  Description of Artificial Sequence: Synthetic oligonucleotide
ccgaugucugcaugguugu

SEQ ID NO: 3039729 - RNA, 19 nt, Artificial Sequence
  Description of Artificial Sequence: Synthetic oligonucleotide
guggacugucucgcugucu

SEQ ID NO: 3039730 - RNA, 19 nt, Artificial Sequence
  Description of Artificial Sequence: Synthetic oligonucleotide
cacugccugcggggacccg

SEQ ID NO: 3039731 - RNA, 19 nt, Artificial Sequence
  Description of Artificial Sequence: Synthetic oligonucleotide
gcacugccugcggggaccc

SEQ ID NO: 3039732 - RNA, 19 nt, Artificial Sequence
  Description of Artificial Sequence: Synthetic oligonucleotide
gcugaagagcggguaacuu

SEQ ID NO: 3039733 - RNA, 19 nt, Artificial Sequence
  Description of Artificial Sequence: Synthetic oligonucleotide
cgcagagcaccaagcagaa

SEQ ID NO: 3039734 - RNA, 19 nt, Artificial Sequence
  Description of Artificial Sequence: Synthetic oligonucleotide
cccucgcucagcagccgca

SEQ ID NO: 3039735 - RNA, 19 nt, Artificial Sequence
  Description of Artificial Sequence: Synthetic oligonucleotide
ccuggcugaagagcgggua

SEQ ID NO: 3039736 - RNA, 19 nt, Artificial Sequence
  Description of Artificial Sequence: Synthetic oligonucleotide
gcaccaagcagaagccgau

SEQ ID NO: 3039737 - RNA, 19 nt, Artificial Sequence
  Description of Artificial Sequence: Synthetic oligonucleotide
ccuuugggccguaguggua

SEQ ID NO: 3039738 - RNA, 19 nt, Artificial Sequence
  Description of Artificial Sequence: Synthetic oligonucleotide
cagcgggcgugcacugccu

SEQ ID NO: 3039739 - RNA, 19 nt, Artificial Sequence
  Description of Artificial Sequence: Synthetic oligonucleotide
ccgcacccucgcucagcag

SEQ ID NO: 3039740 - RNA, 19 nt, Artificial Sequence
  Description of Artificial Sequence: Synthetic oligonucleotide
cgugcacugccugcgggga

SEQ ID NO: 3039741 - RNA, 19 nt, Artificial Sequence
  Description of Artificial Sequence: Synthetic oligonucleotide
cggggacccgcacccucgc

SEQ ID NO: 3039742 - RNA, 19 nt, Artificial Sequence
  Description of Artificial Sequence: Synthetic oligonucleotide
cguagugguaguggacugu

SEQ ID NO: 3039743 - RNA, 19 nt, Artificial Sequence
  Description of Artificial Sequence: Synthetic oligonucleotide
ggggacccgcacccucgcu

SEQ ID NO: 3039744 - RNA, 19 nt, Artificial Sequence
  Description of Artificial Sequence: Synthetic oligonucleotide
ccacagcaugcaagaugau

SEQ ID NO: 3039745 - RNA, 19 nt, Artificial Sequence
  Description of Artificial Sequence: Synthetic oligonucleotide
ccucgaacaugagcccgau

SEQ ID NO: 3039746 - RNA, 19 nt, Artificial Sequence
  Description of Artificial Sequence: Synthetic oligonucleotide
cugcggggacccgcacccu

SEQ ID NO: 3039747 - RNA, 19 nt, Artificial Sequence
  Description of Artificial Sequence: Synthetic oligonucleotide
ccauggcagcgggcgugca

SEQ ID NO: 3039748 - RNA, 19 nt, Artificial Sequence
  Description of Artificial Sequence: Synthetic oligonucleotide
ccagguccuuugggccgua

SEQ ID NO: 3039749 - RNA, 19 nt, Artificial Sequence
  Description of Artificial Sequence: Synthetic oligonucleotide
aauucugugagacuccagc

SEQ ID NO: 3039750 - RNA, 19 nt, Artificial Sequence
  Description of Artificial Sequence: Synthetic oligonucleotide
gaaaagucuacccagcaag

SEQ ID NO: 3039751 - RNA, 19 nt, Artificial Sequence
  Description of Artificial Sequence: Synthetic oligonucleotide
ugaaguuaccuacaggaag

SEQ ID NO: 3039752 - RNA, 19 nt, Artificial Sequence
  Description of Artificial Sequence: Synthetic oligonucleotide
ucugugagacuccagcugg

SEQ ID NO: 3039753 - RNA, 19 nt, Artificial Sequence
  Description of Artificial Sequence: Synthetic oligonucleotide
aagucuacccagcaagcac

SEQ ID NO: 3039754 - RNA, 19 nt, Artificial Sequence
  Description of Artificial Sequence: Synthetic oligonucleotide
agaugaaaagucuacccag

SEQ ID NO: 3039755 - RNA, 19 nt, Artificial Sequence
  Description of Artificial Sequence: Synthetic oligonucleotide
ucacuagaaacaaugauuu

SEQ ID NO: 3039756 - RNA, 19 nt, Artificial Sequence
  Description of Artificial Sequence: Synthetic oligonucleotide
uucacuagaaacaaugauu

SEQ ID NO: 3039757 - RNA, 19 nt, Artificial Sequence
  Description of Artificial Sequence: Synthetic oligonucleotide
ugugaaugcuucuugguca

SEQ ID NO: 3039758 - RNA, 19 nt, Artificial Sequence
  Description of Artificial Sequence: Synthetic oligonucleotide
uuagucuucuccacuaggc

SEQ ID NO: 3039759 - RNA, 19 nt, Artificial Sequence
  Description of Artificial Sequence: Synthetic oligonucleotide
aaucugcuguuccagauga

SEQ ID NO: 3039760 - RNA, 19 nt, Artificial Sequence
  Description of Artificial Sequence: Synthetic oligonucleotide
aaaagucuacccagcaagc

SEQ ID NO: 3039761 - RNA, 19 nt, Artificial Sequence
  Description of Artificial Sequence: Synthetic oligonucleotide
uuuaauucugugagacucc

SEQ ID NO: 3039762 - RNA, 19 nt, Artificial Sequence
  Description of Artificial Sequence: Synthetic oligonucleotide
agggaggacacacaguuuc

SEQ ID NO: 3039763 - RNA, 19 nt, Artificial Sequence
  Description of Artificial Sequence: Synthetic oligonucleotide
uuagggaggacacacaguu

SEQ ID NO: 3039764 - RNA, 19 nt, Artificial Sequence
  Description of Artificial Sequence: Synthetic oligonucleotide
aguucugagaggaggaacc

SEQ ID NO: 3039765 - RNA, 19 nt, Artificial Sequence
  Description of Artificial Sequence: Synthetic oligonucleotide
uucucuacaagucuuguuu

SEQ ID NO: 3039766 - RNA, 19 nt, Artificial Sequence
  Description of Artificial Sequence: Synthetic oligonucleotide
gagaggaggaaccagugug

SEQ ID NO: 3039767 - RNA, 19 nt, Artificial Sequence
  Description of Artificial Sequence: Synthetic oligonucleotide
uuucucacacaguagaaaa

SEQ ID NO: 3039768 - RNA, 19 nt, Artificial Sequence
  Description of Artificial Sequence: Synthetic oligonucleotide
aguuucacuagaaacaaug

SEQ ID NO: 3039769 - RNA, 19 nt, Artificial Sequence
  Description of Artificial Sequence: Synthetic oligonucleotide
uuucacuagaaacaaugau

SEQ ID NO: 3039770 - RNA, 19 nt, Artificial Sequence
  Description of Artificial Sequence: Synthetic oligonucleotide
uguuccagaugaaaagucu

SEQ ID NO: 3039771 - RNA, 19 nt, Artificial Sequence
  Description of Artificial Sequence: Synthetic oligonucleotide
ugcuguuccagaugaaaag

SEQ ID NO: 3039772 - RNA, 19 nt, Artificial Sequence
  Description of Artificial Sequence: Synthetic oligonucleotide
ggugaaguuaccuacagga

SEQ ID NO: 3039773 - RNA, 19 nt, Artificial Sequence
  Description of Artificial Sequence: Synthetic oligonucleotide
aaaucugcuguuccagaug

SEQ ID NO: 3039774 - RNA, 19 nt, Artificial Sequence
  Description of Artificial Sequence: Synthetic oligonucleotide
aaaaucugcuguuccagau

SEQ ID NO: 3039775 - RNA, 19 nt, Artificial Sequence
  Description of Artificial Sequence: Synthetic oligonucleotide
aaugcuucuuggucagcuc

SEQ ID NO: 3039776 - RNA, 19 nt, Artificial Sequence
  Description of Artificial Sequence: Synthetic oligonucleotide
accuacaggaaguucagug

SEQ ID NO: 3039777 - RNA, 19 nt, Artificial Sequence
  Description of Artificial Sequence: Synthetic oligonucleotide
acaagucuuguuuaauucu

SEQ ID NO: 3039778 - RNA, 19 nt, Artificial Sequence
  Description of Artificial Sequence: Synthetic oligonucleotide
ucuugcuuagucuucucca

SEQ ID NO: 3039779 - RNA, 19 nt, Artificial Sequence
  Description of Artificial Sequence: Synthetic oligonucleotide
agcugggcgagauucuugc

SEQ ID NO: 3039780 - RNA, 19 nt, Artificial Sequence
  Description of Artificial Sequence: Synthetic oligonucleotide
agucuucuccacuaggcag

SEQ ID NO: 3039781 - RNA, 19 nt, Artificial Sequence
  Description of Artificial Sequence: Synthetic oligonucleotide
ucugagaggaggaaccagu

SEQ ID NO: 3039782 - RNA, 19 nt, Artificial Sequence
  Description of Artificial Sequence: Synthetic oligonucleotide
uaaccuuucuguauuuuau

SEQ ID NO: 3039783 - RNA, 19 nt, Artificial Sequence
  Description of Artificial Sequence: Synthetic oligonucleotide
uuaccuacaggaaguucag

SEQ ID NO: 3039784 - RNA, 19 nt, Artificial Sequence
  Description of Artificial Sequence: Synthetic oligonucleotide
caagucuuguuuaauucug

SEQ ID NO: 3039785 - RNA, 19 nt, Artificial Sequence
  Description of Artificial Sequence: Synthetic oligonucleotide
accaguguggugaaguuac

SEQ ID NO: 3039786 - RNA, 19 nt, Artificial Sequence
  Description of Artificial Sequence: Synthetic oligonucleotide
uucugugagacuccagcug

SEQ ID NO: 3039787 - RNA, 19 nt, Artificial Sequence
  Description of Artificial Sequence: Synthetic oligonucleotide
uuucuguauuuuauuauuu

SEQ ID NO: 3039788 - RNA, 19 nt, Artificial Sequence
  Description of Artificial Sequence: Synthetic oligonucleotide
uugugaaugcuucuugguc

SEQ ID NO: 3039789 - RNA, 19 nt, Artificial Sequence
  Description of Artificial Sequence: Synthetic oligonucleotide
cuuagucuucuccacuagg

SEQ ID NO: 3039790 - RNA, 19 nt, Artificial Sequence
  Description of Artificial Sequence: Synthetic oligonucleotide
guuaccuacaggaaguuca

SEQ ID NO: 3039791 - RNA, 19 nt, Artificial Sequence
  Description of Artificial Sequence: Synthetic oligonucleotide
uuccagaugaaaagucuac

SEQ ID NO: 3039792 - RNA, 19 nt, Artificial Sequence
  Description of Artificial Sequence: Synthetic oligonucleotide
ugaaaagucuacccagcaa

SEQ ID NO: 3039793 - RNA, 19 nt, Artificial Sequence
  Description of Artificial Sequence: Synthetic oligonucleotide
uggugaaguuaccuacagg

SEQ ID NO: 3039794 - RNA, 19 nt, Artificial Sequence
  Description of Artificial Sequence: Synthetic oligonucleotide
ugagacuccagcugggcga

SEQ ID NO: 3039795 - RNA, 19 nt, Artificial Sequence
  Description of Artificial Sequence: Synthetic oligonucleotide
acugggccaguucugagag

SEQ ID NO: 3039796 - RNA, 19 nt, Artificial Sequence
  Description of Artificial Sequence: Synthetic oligonucleotide
uuuccgggcagguggaucc

SEQ ID NO: 3039797 - RNA, 19 nt, Artificial Sequence
  Description of Artificial Sequence: Synthetic oligonucleotide
aaguucagugcagaguucu

SEQ ID NO: 3039798 - RNA, 19 nt, Artificial Sequence
  Description of Artificial Sequence: Synthetic oligonucleotide
acuaggcagguucuuuaac

SEQ ID NO: 3039799 - RNA, 19 nt, Artificial Sequence
  Description of Artificial Sequence: Synthetic oligonucleotide
uguggugaaguuaccuaca

SEQ ID NO: 3039800 - RNA, 19 nt, Artificial Sequence
  Description of Artificial Sequence: Synthetic oligonucleotide
agucuuguuuaauucugug

SEQ ID NO: 3039801 - RNA, 19 nt, Artificial Sequence
  Description of Artificial Sequence: Synthetic oligonucleotide
cuacccagcaagcacuggg

SEQ ID NO: 3039802 - RNA, 19 nt, Artificial Sequence
  Description of Artificial Sequence: Synthetic oligonucleotide
agguucuuuaacuuuggau

SEQ ID NO: 3039803 - RNA, 19 nt, Artificial Sequence
  Description of Artificial Sequence: Synthetic oligonucleotide
uacaggaaguucagugcag

SEQ ID NO: 3039804 - RNA, 19 nt, Artificial Sequence
  Description of Artificial Sequence: Synthetic oligonucleotide
uccagaugaaaagucuacc

SEQ ID NO: 3039805 - RNA, 19 nt, Artificial Sequence
  Description of Artificial Sequence: Synthetic oligonucleotide
uagucuucuccacuaggca

SEQ ID NO: 3039806 - RNA, 19 nt, Artificial Sequence
  Description of Artificial Sequence: Synthetic oligonucleotide
cuuggcuugugaaugcuuc

SEQ ID NO: 3039807 - RNA, 19 nt, Artificial Sequence
  Description of Artificial Sequence: Synthetic oligonucleotide
augaaaagucuacccagca

SEQ ID NO: 3039808 - RNA, 19 nt, Artificial Sequence
  Description of Artificial Sequence: Synthetic oligonucleotide
uuaauucugugagacucca

SEQ ID NO: 3039809 - RNA, 19 nt, Artificial Sequence
  Description of Artificial Sequence: Synthetic oligonucleotide
aaagucuacccagcaagca

SEQ ID NO: 3039810 - RNA, 19 nt, Artificial Sequence
  Description of Artificial Sequence: Synthetic oligonucleotide
auucugugagacuccagcu

SEQ ID NO: 3039811 - RNA, 19 nt, Artificial Sequence
  Description of Artificial Sequence: Synthetic oligonucleotide
uuuagggaggacacacagu

SEQ ID NO: 3039812 - RNA, 19 nt, Artificial Sequence
  Description of Artificial Sequence: Synthetic oligonucleotide
cuugcuuagucuucuccac

SEQ ID NO: 3039813 - RNA, 19 nt, Artificial Sequence
  Description of Artificial Sequence: Synthetic oligonucleotide
aaccuuucuguauuuuauu

SEQ ID NO: 3039814 - RNA, 19 nt, Artificial Sequence
  Description of Artificial Sequence: Synthetic oligonucleotide
acccagcaagcacugggcc

SEQ ID NO: 3039815 - RNA, 19 nt, Artificial Sequence
  Description of Artificial Sequence: Synthetic oligonucleotide
gucuuguuuaauucuguga

SEQ ID NO: 3039816 - RNA, 19 nt, Artificial Sequence
  Description of Artificial Sequence: Synthetic oligonucleotide
aggacacacaguuucacua

SEQ ID NO: 3039817 - RNA, 19 nt, Artificial Sequence
  Description of Artificial Sequence: Synthetic oligonucleotide
guguggugaaguuaccuac

SEQ ID NO: 3039818 - RNA, 19 nt, Artificial Sequence
  Description of Artificial Sequence: Synthetic oligonucleotide
ccagaugaaaagucuaccc

SEQ ID NO: 3039819 - RNA, 19 nt, Artificial Sequence
  Description of Artificial Sequence: Synthetic oligonucleotide
gugaaugcuucuuggucag

SEQ ID NO: 3039820 - RNA, 19 nt, Artificial Sequence
  Description of Artificial Sequence: Synthetic oligonucleotide
ugagaggaggaaccagugu

SEQ ID NO: 3039821 - RNA, 19 nt, Artificial Sequence
  Description of Artificial Sequence: Synthetic oligonucleotide
uaauucugugagacuccag

SEQ ID NO: 3039822 - RNA, 19 nt, Artificial Sequence
  Description of Artificial Sequence: Synthetic oligonucleotide
cagaugaaaagucuaccca

SEQ ID NO: 3039823 - RNA, 19 nt, Artificial Sequence
  Description of Artificial Sequence: Synthetic oligonucleotide
accuuucuguauuuuauua

SEQ ID NO: 3039824 - RNA, 19 nt, Artificial Sequence
  Description of Artificial Sequence: Synthetic oligonucleotide
uacccagcaagcacugggc

SEQ ID NO: 3039825 - RNA, 19 nt, Artificial Sequence
  Description of Artificial Sequence: Synthetic oligonucleotide
gcuugugaaugcuucuugg

SEQ ID NO: 3039826 - RNA, 19 nt, Artificial Sequence
  Description of Artificial Sequence: Synthetic oligonucleotide
auggcuuggcuugugaaug

SEQ ID NO: 3039827 - RNA, 19 nt, Artificial Sequence
  Description of Artificial Sequence: Synthetic oligonucleotide
gucuucuccacuaggcagg

SEQ ID NO: 3039828 - RNA, 19 nt, Artificial Sequence
  Description of Artificial Sequence: Synthetic oligonucleotide
ggauccauggcuuggcuug

SEQ ID NO: 3039829 - RNA, 19 nt, Artificial Sequence
  Description of Artificial Sequence: Synthetic oligonucleotide
cuguuccagaugaaaaguc

SEQ ID NO: 3039830 - RNA, 19 nt, Artificial Sequence
  Description of Artificial Sequence: Synthetic oligonucleotide
gguucuuuaacuuuggauu

SEQ ID NO: 3039831 - RNA, 19 nt, Artificial Sequence
  Description of Artificial Sequence: Synthetic oligonucleotide
ucucuacaagucuuguuua

SEQ ID NO: 3039832 - RNA, 19 nt, Artificial Sequence
  Description of Artificial Sequence: Synthetic oligonucleotide
ugggccaguucugagagga

SEQ ID NO: 3039833 - RNA, 19 nt, Artificial Sequence
  Description of Artificial Sequence: Synthetic oligonucleotide
agugcagaguucucuacaa

SEQ ID NO: 3039834 - RNA, 19 nt, Artificial Sequence
  Description of Artificial Sequence: Synthetic oligonucleotide
augcuucuuggucagcucu

SEQ ID NO: 3039835 - RNA, 19 nt, Artificial Sequence
  Description of Artificial Sequence: Synthetic oligonucleotide
gugagacuccagcugggcg

SEQ ID NO: 3039836 - RNA, 19 nt, Artificial Sequence
  Description of Artificial Sequence: Synthetic oligonucleotide
gaaguuaccuacaggaagu

SEQ ID NO: 3039837 - RNA, 19 nt, Artificial Sequence
  Description of Artificial Sequence: Synthetic oligonucleotide
uugcuuagucuucuccacu

SEQ ID NO: 3039838 - RNA, 19 nt, Artificial Sequence
  Description of Artificial Sequence: Synthetic oligonucleotide
cuacaggaaguucagugca

SEQ ID NO: 3039839 - RNA, 19 nt, Artificial Sequence
  Description of Artificial Sequence: Synthetic oligonucleotide
ucugcuguuccagaugaaa

SEQ ID NO: 3039840 - RNA, 19 nt, Artificial Sequence
  Description of Artificial Sequence: Synthetic oligonucleotide
cuuguuuaauucugugaga

SEQ ID NO: 3039841 - RNA, 19 nt, Artificial Sequence
  Description of Artificial Sequence: Synthetic oligonucleotide
aagucuuguuuaauucugu

SEQ ID NO: 3039842 - RNA, 19 nt, Artificial Sequence
  Description of Artificial Sequence: Synthetic oligonucleotide
ugcuuagucuucuccacua

SEQ ID NO: 3039843 - RNA, 19 nt, Artificial Sequence
  Description of Artificial Sequence: Synthetic oligonucleotide
ccuacaggaaguucagugc

SEQ ID NO: 3039844 - RNA, 19 nt, Artificial Sequence
  Description of Artificial Sequence: Synthetic oligonucleotide
uuuuaaccuuucuguauuu

SEQ ID NO: 3039845 - RNA, 19 nt, Artificial Sequence
  Description of Artificial Sequence: Synthetic oligonucleotide
aguuaccuacaggaaguuc

SEQ ID NO: 3039846 - RNA, 19 nt, Artificial Sequence
  Description of Artificial Sequence: Synthetic oligonucleotide
ucuacaagucuuguuuaau

SEQ ID NO: 3039847 - RNA, 19 nt, Artificial Sequence
  Description of Artificial Sequence: Synthetic oligonucleotide
ucagugcagaguucucuac

SEQ ID NO: 3039848 - RNA, 19 nt, Artificial Sequence
  Description of Artificial Sequence: Synthetic oligonucleotide
uucagugcagaguucucua

SEQ ID NO: 3039849 - RNA, 19 nt, Artificial Sequence
  Description of Artificial Sequence: Synthetic oligonucleotide
cugagaggaggaaccagug

SEQ ID NO: 3039850 - RNA, 19 nt, Artificial Sequence
  Description of Artificial Sequence: Synthetic oligonucleotide
ucuccacuaggcagguucu

SEQ ID NO: 3039851 - RNA, 19 nt, Artificial Sequence
  Description of Artificial Sequence: Synthetic oligonucleotide
guuucacuagaaacaauga

SEQ ID NO: 3039852 - RNA, 19 nt, Artificial Sequence
  Description of Artificial Sequence: Synthetic oligonucleotide
uucugagaggaggaaccag

SEQ ID NO: 3039853 - RNA, 19 nt, Artificial Sequence
  Description of Artificial Sequence: Synthetic oligonucleotide
ggacacacaguuucacuag

SEQ ID NO: 3039854 - RNA, 19 nt, Artificial Sequence
  Description of Artificial Sequence: Synthetic oligonucleotide
uaggcagguucuuuaacuu

SEQ ID NO: 3039855 - RNA, 19 nt, Artificial Sequence
  Description of Artificial Sequence: Synthetic oligonucleotide
gacacacaguuucacuaga

SEQ ID NO: 3039856 - RNA, 19 nt, Artificial Sequence
  Description of Artificial Sequence: Synthetic oligonucleotide
uuggcuugugaaugcuucu

SEQ ID NO: 3039857 - RNA, 19 nt, Artificial Sequence
  Description of Artificial Sequence: Synthetic oligonucleotide
ggaggaaccagugugguga

SEQ ID NO: 3039858 - RNA, 19 nt, Artificial Sequence
  Description of Artificial Sequence: Synthetic oligonucleotide
ugggcgagauucuugcuua

SEQ ID NO: 3039859 - RNA, 19 nt, Artificial Sequence
  Description of Artificial Sequence: Synthetic oligonucleotide
caggaaguucagugcagag

SEQ ID NO: 3039860 - RNA, 19 nt, Artificial Sequence
  Description of Artificial Sequence: Synthetic oligonucleotide
aggaaguucagugcagagu

SEQ ID NO: 3039861 - RNA, 19 nt, Artificial Sequence
  Description of Artificial Sequence: Synthetic oligonucleotide
agucuacccagcaagcacu

SEQ ID NO: 3039862 - RNA, 19 nt, Artificial Sequence
  Description of Artificial Sequence: Synthetic oligonucleotide
gaguucucuacaagucuug

SEQ ID NO: 3039863 - RNA, 19 nt, Artificial Sequence
  Description of Artificial Sequence: Synthetic oligonucleotide
uccauggcuuggcuuguga

SEQ ID NO: 3039864 - RNA, 19 nt, Artificial Sequence
  Description of Artificial Sequence: Synthetic oligonucleotide
uucuuuccgggcaggugga

SEQ ID NO: 3039865 - RNA, 19 nt, Artificial Sequence
  Description of Artificial Sequence: Synthetic oligonucleotide
gagauucuugcuuagucuu

SEQ ID NO: 3039866 - RNA, 19 nt, Artificial Sequence
  Description of Artificial Sequence: Synthetic oligonucleotide
uuuaaccuuucuguauuuu

SEQ ID NO: 3039867 - RNA, 19 nt, Artificial Sequence
  Description of Artificial Sequence: Synthetic oligonucleotide
ugugagacuccagcugggc

SEQ ID NO: 3039868 - RNA, 19 nt, Artificial Sequence
  Description of Artificial Sequence: Synthetic oligonucleotide
cuaggcagguucuuuaacu

SEQ ID NO: 3039869 - RNA, 19 nt, Artificial Sequence
  Description of Artificial Sequence: Synthetic oligonucleotide
cugugagacuccagcuggg

SEQ ID NO: 3039870 - RNA, 19 nt, Artificial Sequence
  Description of Artificial Sequence: Synthetic oligonucleotide
gugcagaguucucuacaag

SEQ ID NO: 3039871 - RNA, 19 nt, Artificial Sequence
  Description of Artificial Sequence: Synthetic oligonucleotide
aguucucuacaagucuugu

SEQ ID NO: 3039872 - RNA, 19 nt, Artificial Sequence
  Description of Artificial Sequence: Synthetic oligonucleotide
ggcagguucuuuaacuuug

SEQ ID NO: 3039873 - RNA, 19 nt, Artificial Sequence
  Description of Artificial Sequence: Synthetic oligonucleotide
acaggaaguucagugcaga

SEQ ID NO: 3039874 - RNA, 19 nt, Artificial Sequence
  Description of Artificial Sequence: Synthetic oligonucleotide
ucuacccagcaagcacugg

SEQ ID NO: 3039875 - RNA, 19 nt, Artificial Sequence
  Description of Artificial Sequence: Synthetic oligonucleotide
aggaggaaccaguguggug

SEQ ID NO: 3039876 - RNA, 19 nt, Artificial Sequence
  Description of Artificial Sequence: Synthetic oligonucleotide
ggaaguucagugcagaguu

SEQ ID NO: 3039877 - RNA, 19 nt, Artificial Sequence
  Description of Artificial Sequence: Synthetic oligonucleotide
agaguucucuacaagucuu

SEQ ID NO: 3039878 - RNA, 19 nt, Artificial Sequence
  Description of Artificial Sequence: Synthetic oligonucleotide
uucuuuaacuuuggauuuu

SEQ ID NO: 3039879 - RNA, 19 nt, Artificial Sequence
  Description of Artificial Sequence: Synthetic oligonucleotide
gagacuccagcugggcgag

SEQ ID NO: 3039880 - RNA, 19 nt, Artificial Sequence
  Description of Artificial Sequence: Synthetic oligonucleotide
caguucugagaggaggaac

SEQ ID NO: 3039881 - RNA, 19 nt, Artificial Sequence
  Description of Artificial Sequence: Synthetic oligonucleotide
aaccaguguggugaaguua

SEQ ID NO: 3039882 - RNA, 19 nt, Artificial Sequence
  Description of Artificial Sequence: Synthetic oligonucleotide
ggcuugugaaugcuucuug

SEQ ID NO: 3039883 - RNA, 19 nt, Artificial Sequence
  Description of Artificial Sequence: Synthetic oligonucleotide
ggccaguucugagaggagg

SEQ ID NO: 3039884 - RNA, 19 nt, Artificial Sequence
  Description of Artificial Sequence: Synthetic oligonucleotide
uggauccauggcuuggcuu

SEQ ID NO: 3039885 - RNA, 19 nt, Artificial Sequence
  Description of Artificial Sequence: Synthetic oligonucleotide
aaguuaccuacaggaaguu

SEQ ID NO: 3039886 - RNA, 19 nt, Artificial Sequence
  Description of Artificial Sequence: Synthetic oligonucleotide
aguucagugcagaguucuc

SEQ ID NO: 3039887 - RNA, 19 nt, Artificial Sequence
  Description of Artificial Sequence: Synthetic oligonucleotide
gcgagauucuugcuuaguc

SEQ ID NO: 3039888 - RNA, 19 nt, Artificial Sequence
  Description of Artificial Sequence: Synthetic oligonucleotide
aggcagguucuuuaacuuu

SEQ ID NO: 3039889 - RNA, 19 nt, Artificial Sequence
  Description of Artificial Sequence: Synthetic oligonucleotide
cuugugaaugcuucuuggu

SEQ ID NO: 3039890 - RNA, 19 nt, Artificial Sequence
  Description of Artificial Sequence: Synthetic oligonucleotide
cucuacaagucuuguuuaa

SEQ ID NO: 3039891 - RNA, 19 nt, Artificial Sequence
  Description of Artificial Sequence: Synthetic oligonucleotide
cuucuuggucagcucugac

SEQ ID NO: 3039892 - RNA, 19 nt, Artificial Sequence
  Description of Artificial Sequence: Synthetic oligonucleotide
gaggacacacaguuucacu

SEQ ID NO: 3039893 - RNA, 19 nt, Artificial Sequence
  Description of Artificial Sequence: Synthetic oligonucleotide
gcuuagucuucuccacuag

SEQ ID NO: 3039894 - RNA, 19 nt, Artificial Sequence
  Description of Artificial Sequence: Synthetic oligonucleotide
guuccagaugaaaagucua

SEQ ID NO: 3039895 - RNA, 19 nt, Artificial Sequence
  Description of Artificial Sequence: Synthetic oligonucleotide
caagcacugggccaguucu

SEQ ID NO: 3039896 - RNA, 19 nt, Artificial Sequence
  Description of Artificial Sequence: Synthetic oligonucleotide
cagugcagaguucucuaca

SEQ ID NO: 3039897 - RNA, 19 nt, Artificial Sequence
  Description of Artificial Sequence: Synthetic oligonucleotide
cuacaagucuuguuuaauu

SEQ ID NO: 3039898 - RNA, 19 nt, Artificial Sequence
  Description of Artificial Sequence: Synthetic oligonucleotide
gaaguucagugcagaguuc

SEQ ID NO: 3039899 - RNA, 19 nt, Artificial Sequence
  Description of Artificial Sequence: Synthetic oligonucleotide
ugaaugcuucuuggucagc

SEQ ID NO: 3039900 - RNA, 19 nt, Artificial Sequence
  Description of Artificial Sequence: Synthetic oligonucleotide
agcacugggccaguucuga

SEQ ID NO: 3039901 - RNA, 19 nt, Artificial Sequence
  Description of Artificial Sequence: Synthetic oligonucleotide
gcagaguucucuacaaguc

SEQ ID NO: 3039902 - RNA, 19 nt, Artificial Sequence
  Description of Artificial Sequence: Synthetic oligonucleotide
gugaaguuaccuacaggaa

SEQ ID NO: 3039903 - RNA, 19 nt, Artificial Sequence
  Description of Artificial Sequence: Synthetic oligonucleotide
cagaguucucuacaagucu

SEQ ID NO: 3039904 - RNA, 19 nt, Artificial Sequence
  Description of Artificial Sequence: Synthetic oligonucleotide
uccacuaggcagguucuuu

SEQ ID NO: 3039905 - RNA, 19 nt, Artificial Sequence
  Description of Artificial Sequence: Synthetic oligonucleotide
uagggaggacacacaguuu

SEQ ID NO: 3039906 - RNA, 19 nt, Artificial Sequence
  Description of Artificial Sequence: Synthetic oligonucleotide
aagcacugggccaguucug

SEQ ID NO: 3039907 - RNA, 19 nt, Artificial Sequence
  Description of Artificial Sequence: Synthetic oligonucleotide
cacugggccaguucugaga

SEQ ID NO: 3039908 - RNA, 19 nt, Artificial Sequence
  Description of Artificial Sequence: Synthetic oligonucleotide
guucugagaggaggaacca

SEQ ID NO: 3039909 - RNA, 19 nt, Artificial Sequence
  Description of Artificial Sequence: Synthetic oligonucleotide
uggcuugugaaugcuucuu

SEQ ID NO: 3039910 - RNA, 19 nt, Artificial Sequence
  Description of Artificial Sequence: Synthetic oligonucleotide
cagcugggcgagauucuug

SEQ ID NO: 3039911 - RNA, 19 nt, Artificial Sequence
  Description of Artificial Sequence: Synthetic oligonucleotide
acacacaguuucacuagaa

SEQ ID NO: 3039912 - RNA, 19 nt, Artificial Sequence
  Description of Artificial Sequence: Synthetic oligonucleotide
uaccuacaggaaguucagu

SEQ ID NO: 3039913 - RNA, 19 nt, Artificial Sequence
  Description of Artificial Sequence: Synthetic oligonucleotide
gucuacccagcaagcacug

SEQ ID NO: 3039914 - RNA, 19 nt, Artificial Sequence
  Description of Artificial Sequence: Synthetic oligonucleotide
ccagcaagcacugggccag

SEQ ID NO: 3039915 - RNA, 19 nt, Artificial Sequence
  Description of Artificial Sequence: Synthetic oligonucleotide
gguggauccauggcuuggc

SEQ ID NO: 3039916 - RNA, 19 nt, Artificial Sequence
  Description of Artificial Sequence: Synthetic oligonucleotide
cuuuccgggcagguggauc

SEQ ID NO: 3039917 - RNA, 19 nt, Artificial Sequence
  Description of Artificial Sequence: Synthetic oligonucleotide
cacuaggcagguucuuuaa

SEQ ID NO: 3039918 - RNA, 19 nt, Artificial Sequence
  Description of Artificial Sequence: Synthetic oligonucleotide
cagguucuuuaacuuugga

SEQ ID NO: 3039919 - RNA, 19 nt, Artificial Sequence
  Description of Artificial Sequence: Synthetic oligonucleotide
gaggaaccaguguggugaa

SEQ ID NO: 3039920 - RNA, 19 nt, Artificial Sequence
  Description of Artificial Sequence: Synthetic oligonucleotide
ggaggacacacaguuucac

SEQ ID NO: 3039921 - RNA, 19 nt, Artificial Sequence
  Description of Artificial Sequence: Synthetic oligonucleotide
cauggcuuggcuugugaau

SEQ ID NO: 3039922 - RNA, 19 nt, Artificial Sequence
  Description of Artificial Sequence: Synthetic oligonucleotide
ggaaccaguguggugaagu

SEQ ID NO: 3039923 - RNA, 19 nt, Artificial Sequence
  Description of Artificial Sequence: Synthetic oligonucleotide
gaaccaguguggugaaguu

SEQ ID NO: 3039924 - RNA, 19 nt, Artificial Sequence
  Description of Artificial Sequence: Synthetic oligonucleotide
gaggaggaaccaguguggu

SEQ ID NO: 3039925 - RNA, 19 nt, Artificial Sequence
  Description of Artificial Sequence: Synthetic oligonucleotide
guucucuacaagucuuguu

SEQ ID NO: 3039926 - RNA, 19 nt, Artificial Sequence
  Description of Artificial Sequence: Synthetic oligonucleotide
gggcagguggauccauggc

SEQ ID NO: 3039927 - RNA, 19 nt, Artificial Sequence
  Description of Artificial Sequence: Synthetic oligonucleotide
aggaaccaguguggugaag

SEQ ID NO: 3039928 - RNA, 19 nt, Artificial Sequence
  Description of Artificial Sequence: Synthetic oligonucleotide
gcuguuccagaugaaaagu

SEQ ID NO: 3039929 - RNA, 19 nt, Artificial Sequence
  Description of Artificial Sequence: Synthetic oligonucleotide
gggcgagauucuugcuuag

SEQ ID NO: 3039930 - RNA, 19 nt, Artificial Sequence
  Description of Artificial Sequence: Synthetic oligonucleotide
gcaagcacugggccaguuc

SEQ ID NO: 3039931 - RNA, 19 nt, Artificial Sequence
  Description of Artificial Sequence: Synthetic oligonucleotide
gccaguucugagaggagga

SEQ ID NO: 3039932 - RNA, 19 nt, Artificial Sequence
  Description of Artificial Sequence: Synthetic oligonucleotide
cgggcagguggauccaugg

SEQ ID NO: 3039933 - RNA, 19 nt, Artificial Sequence
  Description of Artificial Sequence: Synthetic oligonucleotide
ccaguguggugaaguuacc

SEQ ID NO: 3039934 - RNA, 19 nt, Artificial Sequence
  Description of Artificial Sequence: Synthetic oligonucleotide
gcacugggccaguucugag

SEQ ID NO: 3039935 - RNA, 19 nt, Artificial Sequence
  Description of Artificial Sequence: Synthetic oligonucleotide
auccauggcuuggcuugug

SEQ ID NO: 3039936 - RNA, 19 nt, Artificial Sequence
  Description of Artificial Sequence: Synthetic oligonucleotide
caguguggugaaguuaccu

SEQ ID NO: 3039937 - RNA, 19 nt, Artificial Sequence
  Description of Artificial Sequence: Synthetic oligonucleotide
ucuuuccgggcagguggau

SEQ ID NO: 3039938 - RNA, 19 nt, Artificial Sequence
  Description of Artificial Sequence: Synthetic oligonucleotide
uuccgggcagguggaucca

SEQ ID NO: 3039939 - RNA, 19 nt, Artificial Sequence
  Description of Artificial Sequence: Synthetic oligonucleotide
cacuagaaacaaugauuuu

SEQ ID NO: 3039940 - RNA, 19 nt, Artificial Sequence
  Description of Artificial Sequence: Synthetic oligonucleotide
cugggcgagauucuugcuu

SEQ ID NO: 3039941 - RNA, 19 nt, Artificial Sequence
  Description of Artificial Sequence: Synthetic oligonucleotide
guggauccauggcuuggcu

SEQ ID NO: 3039942 - RNA, 19 nt, Artificial Sequence
  Description of Artificial Sequence: Synthetic oligonucleotide
gauccauggcuuggcuugu

SEQ ID NO: 3039943 - RNA, 19 nt, Artificial Sequence
  Description of Artificial Sequence: Synthetic oligonucleotide
gggaggacacacaguuuca

SEQ ID NO: 3039944 - RNA, 19 nt, Artificial Sequence
  Description of Artificial Sequence: Synthetic oligonucleotide
cgagauucuugcuuagucu

SEQ ID NO: 3039945 - RNA, 19 nt, Artificial Sequence
  Description of Artificial Sequence: Synthetic oligonucleotide
caguuucacuagaaacaau

SEQ ID NO: 3039946 - RNA, 19 nt, Artificial Sequence
  Description of Artificial Sequence: Synthetic oligonucleotide
ccacuaggcagguucuuua

SEQ ID NO: 3039947 - RNA, 19 nt, Artificial Sequence
  Description of Artificial Sequence: Synthetic oligonucleotide
uccgggcagguggauccau

SEQ ID NO: 3039948 - RNA, 19 nt, Artificial Sequence
  Description of Artificial Sequence: Synthetic oligonucleotide
ccauggcuuggcuugugaa

SEQ ID NO: 3039949 - RNA, 19 nt, Artificial Sequence
  Description of Artificial Sequence: Synthetic oligonucleotide
aucugcuguuccagaugaa

SEQ ID NO: 3039950 - RNA, 19 nt, Artificial Sequence
  Description of Artificial Sequence: Synthetic oligonucleotide
agcaagcacugggccaguu

SEQ ID NO: 3039951 - RNA, 19 nt, Artificial Sequence
  Description of Artificial Sequence: Synthetic oligonucleotide
ccgggcagguggauccaug

SEQ ID NO: 3039952 - RNA, 19 nt, Artificial Sequence
  Description of Artificial Sequence: Synthetic oligonucleotide
gggccaguucugagaggag

SEQ ID NO: 3039953 - RNA, 19 nt, Artificial Sequence
  Description of Artificial Sequence: Synthetic oligonucleotide
gcagguggauccauggcuu

SEQ ID NO: 3039954 - RNA, 19 nt, Artificial Sequence
  Description of Artificial Sequence: Synthetic oligonucleotide
ggcgagauucuugcuuagu

SEQ ID NO: 3039955 - RNA, 19 nt, Artificial Sequence
  Description of Artificial Sequence: Synthetic oligonucleotide
ccaguucugagaggaggaa

SEQ ID NO: 3039956 - RNA, 19 nt, Artificial Sequence
  Description of Artificial Sequence: Synthetic oligonucleotide
agacuccagcugggcgaga

SEQ ID NO: 3039957 - RNA, 19 nt, Artificial Sequence
  Description of Artificial Sequence: Synthetic oligonucleotide
gcugggcgagauucuugcu

SEQ ID NO: 3039958 - RNA, 19 nt, Artificial Sequence
  Description of Artificial Sequence: Synthetic oligonucleotide
gcuuggcuugugaaugcuu

SEQ ID NO: 3039959 - RNA, 19 nt, Artificial Sequence
  Description of Artificial Sequence: Synthetic oligonucleotide
cuccacuaggcagguucuu

SEQ ID NO: 3039960 - RNA, 19 nt, Artificial Sequence
  Description of Artificial Sequence: Synthetic oligonucleotide
cuucuccacuaggcagguu

SEQ ID NO: 3039961 - RNA, 19 nt, Artificial Sequence
  Description of Artificial Sequence: Synthetic oligonucleotide
agauuuguggcccacaggc

SEQ ID NO: 3039962 - RNA, 19 nt, Artificial Sequence
  Description of Artificial Sequence: Synthetic oligonucleotide
uauuguuucgaauacauuc

SEQ ID NO: 3039963 - RNA, 19 nt, Artificial Sequence
  Description of Artificial Sequence: Synthetic oligonucleotide
uucccaauacagaauaagg

SEQ ID NO: 3039964 - RNA, 19 nt, Artificial Sequence
  Description of Artificial Sequence: Synthetic oligonucleotide
auaaggcuugaccacagcc

SEQ ID NO: 3039965 - RNA, 19 nt, Artificial Sequence
  Description of Artificial Sequence: Synthetic oligonucleotide
uacagaauaaggcuugacc

SEQ ID NO: 3039966 - RNA, 19 nt, Artificial Sequence
  Description of Artificial Sequence: Synthetic oligonucleotide
acagaauaaggcuugacca

SEQ ID NO: 3039967 - RNA, 19 nt, Artificial Sequence
  Description of Artificial Sequence: Synthetic oligonucleotide
uuuauuguuucgaauacau

SEQ ID NO: 3039968 - RNA, 19 nt, Artificial Sequence
  Description of Artificial Sequence: Synthetic oligonucleotide
aagguccaaaguuuuauug

SEQ ID NO: 3039969 - RNA, 19 nt, Artificial Sequence
  Description of Artificial Sequence: Synthetic oligonucleotide
ucccaauacagaauaaggc

SEQ ID NO: 3039970 - RNA, 19 nt, Artificial Sequence
  Description of Artificial Sequence: Synthetic oligonucleotide
gaauacauucuccagcagc

SEQ ID NO: 3039971 - RNA, 19 nt, Artificial Sequence
  Description of Artificial Sequence: Synthetic oligonucleotide
uuccaguuugguuucaagg

SEQ ID NO: 3039972 - RNA, 19 nt, Artificial Sequence
  Description of Artificial Sequence: Synthetic oligonucleotide
aauaaggcuugaccacagc

SEQ ID NO: 3039973 - RNA, 19 nt, Artificial Sequence
  Description of Artificial Sequence: Synthetic oligonucleotide
cacaucaccgcauucaaag

SEQ ID NO: 3039974 - RNA, 19 nt, Artificial Sequence
  Description of Artificial Sequence: Synthetic oligonucleotide
aaaguuuuauuguuucgaa

SEQ ID NO: 3039975 - RNA, 19 nt, Artificial Sequence
  Description of Artificial Sequence: Synthetic oligonucleotide
auuuguggcccacaggcgg

SEQ ID NO: 3039976 - RNA, 19 nt, Artificial Sequence
  Description of Artificial Sequence: Synthetic oligonucleotide
aauacauucuccagcagcu

SEQ ID NO: 3039977 - RNA, 19 nt, Artificial Sequence
  Description of Artificial Sequence: Synthetic oligonucleotide
cacuuguagagauuugugg

SEQ ID NO: 3039978 - RNA, 19 nt, Artificial Sequence
  Description of Artificial Sequence: Synthetic oligonucleotide
ucgaauacauucuccagca

SEQ ID NO: 3039979 - RNA, 19 nt, Artificial Sequence
  Description of Artificial Sequence: Synthetic oligonucleotide
uaaggcuugaccacagccc

SEQ ID NO: 3039980 - RNA, 19 nt, Artificial Sequence
  Description of Artificial Sequence: Synthetic oligonucleotide
cuuguagagauuuguggcc

SEQ ID NO: 3039981 - RNA, 19 nt, Artificial Sequence
  Description of Artificial Sequence: Synthetic oligonucleotide
uacauucuccagcagcucc

SEQ ID NO: 3039982 - RNA, 19 nt, Artificial Sequence
  Description of Artificial Sequence: Synthetic oligonucleotide
uuucgaauacauucuccag

SEQ ID NO: 3039983 - RNA, 19 nt, Artificial Sequence
  Description of Artificial Sequence: Synthetic oligonucleotide
uuucaagggacuccccucc

SEQ ID NO: 3039984 - RNA, 19 nt, Artificial Sequence
  Description of Artificial Sequence: Synthetic oligonucleotide
uugaccacagcccuccagc

SEQ ID NO: 3039985 - RNA, 19 nt, Artificial Sequence
  Description of Artificial Sequence: Synthetic oligonucleotide
caauacagaauaaggcuug

SEQ ID NO: 3039986 - RNA, 19 nt, Artificial Sequence
  Description of Artificial Sequence: Synthetic oligonucleotide
aaguuuuauuguuucgaau

SEQ ID NO: 3039987 - RNA, 19 nt, Artificial Sequence
  Description of Artificial Sequence: Synthetic oligonucleotide
aaggcuugaccacagcccu

SEQ ID NO: 3039988 - RNA, 19 nt, Artificial Sequence
  Description of Artificial Sequence: Synthetic oligonucleotide
guuucgaauacauucucca

SEQ ID NO: 3039989 - RNA, 19 nt, Artificial Sequence
  Description of Artificial Sequence: Synthetic oligonucleotide
agagauuuguggcccacag

SEQ ID NO: 3039990 - RNA, 19 nt, Artificial Sequence
  Description of Artificial Sequence: Synthetic oligonucleotide
uaccgaggacacaucaccg

SEQ ID NO: 3039991 - RNA, 19 nt, Artificial Sequence
  Description of Artificial Sequence: Synthetic oligonucleotide
ggaacaggcacuuguagag

SEQ ID NO: 3039992 - RNA, 19 nt, Artificial Sequence
  Description of Artificial Sequence: Synthetic oligonucleotide
auucccaauacagaauaag

SEQ ID NO: 3039993 - RNA, 19 nt, Artificial Sequence
  Description of Artificial Sequence: Synthetic oligonucleotide
cagaccuaggagcagcucg

SEQ ID NO: 3039994 - RNA, 19 nt, Artificial Sequence
  Description of Artificial Sequence: Synthetic oligonucleotide
accgaggacacaucaccgc

SEQ ID NO: 3039995 - RNA, 19 nt, Artificial Sequence
  Description of Artificial Sequence: Synthetic oligonucleotide
uuugguuucaagggacucc

SEQ ID NO: 3039996 - RNA, 19 nt, Artificial Sequence
  Description of Artificial Sequence: Synthetic oligonucleotide
aacaggcacuuguagagau

SEQ ID NO: 3039997 - RNA, 19 nt, Artificial Sequence
  Description of Artificial Sequence: Synthetic oligonucleotide
guaccgaggacacaucacc

SEQ ID NO: 3039998 - RNA, 19 nt, Artificial Sequence
  Description of Artificial Sequence: Synthetic oligonucleotide
agguccaaaguuuuauugu

SEQ ID NO: 3039999 - RNA, 19 nt, Artificial Sequence
  Description of Artificial Sequence: Synthetic oligonucleotide
auuguuucgaauacauucu

SEQ ID NO: 3040000 - RNA, 19 nt, Artificial Sequence
  Description of Artificial Sequence: Synthetic oligonucleotide
cagaauaaggcuugaccac

SEQ ID NO: 3040001 - RNA, 19 nt, Artificial Sequence
  Description of Artificial Sequence: Synthetic oligonucleotide
ucaugucccacccaccccu

SEQ ID NO: 3040002 - RNA, 19 nt, Artificial Sequence
  Description of Artificial Sequence: Synthetic oligonucleotide
uucaaagguccaaaguuuu

SEQ ID NO: 3040003 - RNA, 19 nt, Artificial Sequence
  Description of Artificial Sequence: Synthetic oligonucleotide
acaucaccgcauucaaagg

SEQ ID NO: 3040004 - RNA, 19 nt, Artificial Sequence
  Description of Artificial Sequence: Synthetic oligonucleotide
uuguagagauuuguggccc

SEQ ID NO: 3040005 - RNA, 19 nt, Artificial Sequence
  Description of Artificial Sequence: Synthetic oligonucleotide
aaagguccaaaguuuuauu

SEQ ID NO: 3040006 - RNA, 19 nt, Artificial Sequence
  Description of Artificial Sequence: Synthetic oligonucleotide
uugguuucaagggacuccc

SEQ ID NO: 3040007 - RNA, 19 nt, Artificial Sequence
  Description of Artificial Sequence: Synthetic oligonucleotide
gagauuuguggcccacagg

SEQ ID NO: 3040008 - RNA, 19 nt, Artificial Sequence
  Description of Artificial Sequence: Synthetic oligonucleotide
agcugggaggcagagaggg

SEQ ID NO: 3040009 - RNA, 19 nt, Artificial Sequence
  Description of Artificial Sequence: Synthetic oligonucleotide
cuaggagcagcucggggcg

SEQ ID NO: 3040010 - RNA, 19 nt, Artificial Sequence
  Description of Artificial Sequence: Synthetic oligonucleotide
uguccccugacccaccucu

SEQ ID NO: 3040011 - RNA, 19 nt, Artificial Sequence
  Description of Artificial Sequence: Synthetic oligonucleotide
uuguuucgaauacauucuc

SEQ ID NO: 3040012 - RNA, 19 nt, Artificial Sequence
  Description of Artificial Sequence: Synthetic oligonucleotide
ucaccgcauucaaaggucc

SEQ ID NO: 3040013 - RNA, 19 nt, Artificial Sequence
  Description of Artificial Sequence: Synthetic oligonucleotide
acccucaccuuccucugcc

SEQ ID NO: 3040014 - RNA, 19 nt, Artificial Sequence
  Description of Artificial Sequence: Synthetic oligonucleotide
caaaguuuuauuguuucga

SEQ ID NO: 3040015 - RNA, 19 nt, Artificial Sequence
  Description of Artificial Sequence: Synthetic oligonucleotide
aauacagaauaaggcuuga

SEQ ID NO: 3040016 - RNA, 19 nt, Artificial Sequence
  Description of Artificial Sequence: Synthetic oligonucleotide
caguuugguuucaagggac

SEQ ID NO: 3040017 - RNA, 19 nt, Artificial Sequence
  Description of Artificial Sequence: Synthetic oligonucleotide
gagaggggcuuccaguuug

SEQ ID NO: 3040018 - RNA, 19 nt, Artificial Sequence
  Description of Artificial Sequence: Synthetic oligonucleotide
agaauaaggcuugaccaca

SEQ ID NO: 3040019 - RNA, 19 nt, Artificial Sequence
  Description of Artificial Sequence: Synthetic oligonucleotide
ugggccagaccuaggagca

SEQ ID NO: 3040020 - RNA, 19 nt, Artificial Sequence
  Description of Artificial Sequence: Synthetic oligonucleotide
acaggcgguacccucaccu

SEQ ID NO: 3040021 - RNA, 19 nt, Artificial Sequence
  Description of Artificial Sequence: Synthetic oligonucleotide
uccagcccaccccugaggc

SEQ ID NO: 3040022 - RNA, 19 nt, Artificial Sequence
  Description of Artificial Sequence: Synthetic oligonucleotide
gaauaaggcuugaccacag

SEQ ID NO: 3040023 - RNA, 19 nt, Artificial Sequence
  Description of Artificial Sequence: Synthetic oligonucleotide
uuauuguuucgaauacauu

SEQ ID NO: 3040024 - RNA, 19 nt, Artificial Sequence
  Description of Artificial Sequence: Synthetic oligonucleotide
gauuuguggcccacaggcg

SEQ ID NO: 3040025 - RNA, 19 nt, Artificial Sequence
  Description of Artificial Sequence: Synthetic oligonucleotide
auacagaauaaggcuugac

SEQ ID NO: 3040026 - RNA, 19 nt, Artificial Sequence
  Description of Artificial Sequence: Synthetic oligonucleotide
uccauucccaauacagaau

SEQ ID NO: 3040027 - RNA, 19 nt, Artificial Sequence
  Description of Artificial Sequence: Synthetic oligonucleotide
aucaccgcauucaaagguc

SEQ ID NO: 3040028 - RNA, 19 nt, Artificial Sequence
  Description of Artificial Sequence: Synthetic oligonucleotide
ucccucaugucccacccac

SEQ ID NO: 3040029 - RNA, 19 nt, Artificial Sequence
  Description of Artificial Sequence: Synthetic oligonucleotide
agcucccucaugucccacc

SEQ ID NO: 3040030 - RNA, 19 nt, Artificial Sequence
  Description of Artificial Sequence: Synthetic oligonucleotide
ucaaagguccaaaguuuua

SEQ ID NO: 3040031 - RNA, 19 nt, Artificial Sequence
  Description of Artificial Sequence: Synthetic oligonucleotide
uguagagauuuguggccca

SEQ ID NO: 3040032 - RNA, 19 nt, Artificial Sequence
  Description of Artificial Sequence: Synthetic oligonucleotide
uggacggguacuggggugg

SEQ ID NO: 3040033 - RNA, 19 nt, Artificial Sequence
  Description of Artificial Sequence: Synthetic oligonucleotide
cuuccaguuugguuucaag

SEQ ID NO: 3040034 - RNA, 19 nt, Artificial Sequence
  Description of Artificial Sequence: Synthetic oligonucleotide
accacagcccuccagccca

SEQ ID NO: 3040035 - RNA, 19 nt, Artificial Sequence
  Description of Artificial Sequence: Synthetic oligonucleotide
aguaccgaggacacaucac

SEQ ID NO: 3040036 - RNA, 19 nt, Artificial Sequence
  Description of Artificial Sequence: Synthetic oligonucleotide
ccaaaguuuuauuguuucg

SEQ ID NO: 3040037 - RNA, 19 nt, Artificial Sequence
  Description of Artificial Sequence: Synthetic oligonucleotide
gacuggacggguacugggg

SEQ ID NO: 3040038 - RNA, 19 nt, Artificial Sequence
  Description of Artificial Sequence: Synthetic oligonucleotide
acagcccuccagcccaccc

SEQ ID NO: 3040039 - RNA, 19 nt, Artificial Sequence
  Description of Artificial Sequence: Synthetic oligonucleotide
cauucaaagguccaaaguu

SEQ ID NO: 3040040 - RNA, 19 nt, Artificial Sequence
  Description of Artificial Sequence: Synthetic oligonucleotide
auucaaagguccaaaguuu

SEQ ID NO: 3040041 - RNA, 19 nt, Artificial Sequence
  Description of Artificial Sequence: Synthetic oligonucleotide
uuuguggcccacaggcggu

SEQ ID NO: 3040042 - RNA, 19 nt, Artificial Sequence
  Description of Artificial Sequence: Synthetic oligonucleotide
cuuccucugccucccaccc

SEQ ID NO: 3040043 - RNA, 19 nt, Artificial Sequence
  Description of Artificial Sequence: Synthetic oligonucleotide
cugggaggcagagaggggc

SEQ ID NO: 3040044 - RNA, 19 nt, Artificial Sequence
  Description of Artificial Sequence: Synthetic oligonucleotide
guuucaagggacuccccuc

SEQ ID NO: 3040045 - RNA, 19 nt, Artificial Sequence
  Description of Artificial Sequence: Synthetic oligonucleotide
ugaccacagcccuccagcc

SEQ ID NO: 3040046 - RNA, 19 nt, Artificial Sequence
  Description of Artificial Sequence: Synthetic oligonucleotide
aggcgguacccucaccuuc

SEQ ID NO: 3040047 - RNA, 19 nt, Artificial Sequence
  Description of Artificial Sequence: Synthetic oligonucleotide
ggcgugaggggacuggacg

SEQ ID NO: 3040048 - RNA, 19 nt, Artificial Sequence
  Description of Artificial Sequence: Synthetic oligonucleotide
ccuaggagcagcucggggc

SEQ ID NO: 3040049 - RNA, 19 nt, Artificial Sequence
  Description of Artificial Sequence: Synthetic oligonucleotide
agaccuaggagcagcucgg

SEQ ID NO: 3040050 - RNA, 19 nt, Artificial Sequence
  Description of Artificial Sequence: Synthetic oligonucleotide
accuaggagcagcucgggg

SEQ ID NO: 3040051 - RNA, 19 nt, Artificial Sequence
  Description of Artificial Sequence: Synthetic oligonucleotide
accccuccauucccaauac

SEQ ID NO: 3040052 - RNA, 19 nt, Artificial Sequence
  Description of Artificial Sequence: Synthetic oligonucleotide
gacacaucaccgcauucaa

SEQ ID NO: 3040053 - RNA, 19 nt, Artificial Sequence
  Description of Artificial Sequence: Synthetic oligonucleotide
aagggacuccccucccugu

SEQ ID NO: 3040054 - RNA, 19 nt, Artificial Sequence
  Description of Artificial Sequence: Synthetic oligonucleotide
cuugaccacagcccuccag

SEQ ID NO: 3040055 - RNA, 19 nt, Artificial Sequence
  Description of Artificial Sequence: Synthetic oligonucleotide
cucggggcgggcgugaggg

SEQ ID NO: 3040056 - RNA, 19 nt, Artificial Sequence
  Description of Artificial Sequence: Synthetic oligonucleotide
caugggccagaccuaggag

SEQ ID NO: 3040057 - RNA, 19 nt, Artificial Sequence
  Description of Artificial Sequence: Synthetic oligonucleotide
augucccacccaccccucc

SEQ ID NO: 3040058 - RNA, 19 nt, Artificial Sequence
  Description of Artificial Sequence: Synthetic oligonucleotide
ugucccacccaccccucca

SEQ ID NO: 3040059 - RNA, 19 nt, Artificial Sequence
  Description of Artificial Sequence: Synthetic oligonucleotide
ggacuggacggguacuggg

SEQ ID NO: 3040060 - RNA, 19 nt, Artificial Sequence
  Description of Artificial Sequence: Synthetic oligonucleotide
gaggggacuggacggguac

SEQ ID NO: 3040061 - RNA, 19 nt, Artificial Sequence
  Description of Artificial Sequence: Synthetic oligonucleotide
agggacuccccucccuguc

SEQ ID NO: 3040062 - RNA, 19 nt, Artificial Sequence
  Description of Artificial Sequence: Synthetic oligonucleotide
cucaugucccacccacccc

SEQ ID NO: 3040063 - RNA, 19 nt, Artificial Sequence
  Description of Artificial Sequence: Synthetic oligonucleotide
uggggaacaggcacuugua

SEQ ID NO: 3040064 - RNA, 19 nt, Artificial Sequence
  Description of Artificial Sequence: Synthetic oligonucleotide
cacccaguaccgaggacac

SEQ ID NO: 3040065 - RNA, 19 nt, Artificial Sequence
  Description of Artificial Sequence: Synthetic oligonucleotide
uccccugacccaccucugc

SEQ ID NO: 3040066 - RNA, 19 nt, Artificial Sequence
  Description of Artificial Sequence: Synthetic oligonucleotide
caagggacuccccucccug

SEQ ID NO: 3040067 - RNA, 19 nt, Artificial Sequence
  Description of Artificial Sequence: Synthetic oligonucleotide
ugguuucaagggacucccc

SEQ ID NO: 3040068 - RNA, 19 nt, Artificial Sequence
  Description of Artificial Sequence: Synthetic oligonucleotide
ugggaggcagagaggggcu

SEQ ID NO: 3040069 - RNA, 19 nt, Artificial Sequence
  Description of Artificial Sequence: Synthetic oligonucleotide
aguuugguuucaagggacu

SEQ ID NO: 3040070 - RNA, 19 nt, Artificial Sequence
  Description of Artificial Sequence: Synthetic oligonucleotide
gggaacaggcacuuguaga

SEQ ID NO: 3040071 - RNA, 19 nt, Artificial Sequence
  Description of Artificial Sequence: Synthetic oligonucleotide
ggggaacaggcacuuguag

SEQ ID NO: 3040072 - RNA, 19 nt, Artificial Sequence
  Description of Artificial Sequence: Synthetic oligonucleotide
cagcccaccccugaggccc

SEQ ID NO: 3040073 - RNA, 19 nt, Artificial Sequence
  Description of Artificial Sequence: Synthetic oligonucleotide
uagagauuuguggcccaca

SEQ ID NO: 3040074 - RNA, 19 nt, Artificial Sequence
  Description of Artificial Sequence: Synthetic oligonucleotide
cugcccaugggccagaccu

SEQ ID NO: 3040075 - RNA, 19 nt, Artificial Sequence
  Description of Artificial Sequence: Synthetic oligonucleotide
uacccucaccuuccucugc

SEQ ID NO: 3040076 - RNA, 19 nt, Artificial Sequence
  Description of Artificial Sequence: Synthetic oligonucleotide
guacccucaccuuccucug

SEQ ID NO: 3040077 - RNA, 19 nt, Artificial Sequence
  Description of Artificial Sequence: Synthetic oligonucleotide
guuugguuucaagggacuc

SEQ ID NO: 3040078 - RNA, 19 nt, Artificial Sequence
  Description of Artificial Sequence: Synthetic oligonucleotide
gcgugaggggacuggacgg

SEQ ID NO: 3040079 - RNA, 19 nt, Artificial Sequence
  Description of Artificial Sequence: Synthetic oligonucleotide
gguacccucaccuuccucu

SEQ ID NO: 3040080 - RNA, 19 nt, Artificial Sequence
  Description of Artificial Sequence: Synthetic oligonucleotide
caguaccgaggacacauca

SEQ ID NO: 3040081 - RNA, 19 nt, Artificial Sequence
  Description of Artificial Sequence: Synthetic oligonucleotide
gaacaggcacuuguagaga

SEQ ID NO: 3040082 - RNA, 19 nt, Artificial Sequence
  Description of Artificial Sequence: Synthetic oligonucleotide
cccaauacagaauaaggcu

SEQ ID NO: 3040083 - RNA, 19 nt, Artificial Sequence
  Description of Artificial Sequence: Synthetic oligonucleotide
caucaccgcauucaaaggu

SEQ ID NO: 3040084 - RNA, 19 nt, Artificial Sequence
  Description of Artificial Sequence: Synthetic oligonucleotide
gacccaccucugcccaugg

SEQ ID NO: 3040085 - RNA, 19 nt, Artificial Sequence
  Description of Artificial Sequence: Synthetic oligonucleotide
gaccuaggagcagcucggg

SEQ ID NO: 3040086 - RNA, 19 nt, Artificial Sequence
  Description of Artificial Sequence: Synthetic oligonucleotide
ucugcccaugggccagacc

SEQ ID NO: 3040087 - RNA, 19 nt, Artificial Sequence
  Description of Artificial Sequence: Synthetic oligonucleotide
cuggacggguacuggggug

SEQ ID NO: 3040088 - RNA, 19 nt, Artificial Sequence
  Description of Artificial Sequence: Synthetic oligonucleotide
ggcugcacccaguaccgag

SEQ ID NO: 3040089 - RNA, 19 nt, Artificial Sequence
  Description of Artificial Sequence: Synthetic oligonucleotide
gaggcagagaggggcuucc

SEQ ID NO: 3040090 - RNA, 19 nt, Artificial Sequence
  Description of Artificial Sequence: Synthetic oligonucleotide
accccugaggccccagcug

SEQ ID NO: 3040091 - RNA, 19 nt, Artificial Sequence
  Description of Artificial Sequence: Synthetic oligonucleotide
ggacacaucaccgcauuca

SEQ ID NO: 3040092 - RNA, 19 nt, Artificial Sequence
  Description of Artificial Sequence: Synthetic oligonucleotide
uggcccacaggcgguaccc

SEQ ID NO: 3040093 - RNA, 19 nt, Artificial Sequence
  Description of Artificial Sequence: Synthetic oligonucleotide
guggggaacaggcacuugu

SEQ ID NO: 3040094 - RNA, 19 nt, Artificial Sequence
  Description of Artificial Sequence: Synthetic oligonucleotide
ugacccaccucugcccaug

SEQ ID NO: 3040095 - RNA, 19 nt, Artificial Sequence
  Description of Artificial Sequence: Synthetic oligonucleotide
ccaccucugcccaugggcc

SEQ ID NO: 3040096 - RNA, 19 nt, Artificial Sequence
  Description of Artificial Sequence: Synthetic oligonucleotide
cauucccaauacagaauaa

SEQ ID NO: 3040097 - RNA, 19 nt, Artificial Sequence
  Description of Artificial Sequence: Synthetic oligonucleotide
ugaggggacuggacgggua

SEQ ID NO: 3040098 - RNA, 19 nt, Artificial Sequence
  Description of Artificial Sequence: Synthetic oligonucleotide
guagagauuuguggcccac

SEQ ID NO: 3040099 - RNA, 19 nt, Artificial Sequence
  Description of Artificial Sequence: Synthetic oligonucleotide
acggguacugggguggggu

SEQ ID NO: 3040100 - RNA, 19 nt, Artificial Sequence
  Description of Artificial Sequence: Synthetic oligonucleotide
agaggggcuuccaguuugg

SEQ ID NO: 3040101 - RNA, 19 nt, Artificial Sequence
  Description of Artificial Sequence: Synthetic oligonucleotide
gguacuggggugggguggg

SEQ ID NO: 3040102 - RNA, 19 nt, Artificial Sequence
  Description of Artificial Sequence: Synthetic oligonucleotide
agagaggggcuuccaguuu

SEQ ID NO: 3040103 - RNA, 19 nt, Artificial Sequence
  Description of Artificial Sequence: Synthetic oligonucleotide
cagcccuccagcccacccc

SEQ ID NO: 3040104 - RNA, 19 nt, Artificial Sequence
  Description of Artificial Sequence: Synthetic oligonucleotide
ugcacccaguaccgaggac

SEQ ID NO: 3040105 - RNA, 19 nt, Artificial Sequence
  Description of Artificial Sequence: Synthetic oligonucleotide
accgcauucaaagguccaa

SEQ ID NO: 3040106 - RNA, 19 nt, Artificial Sequence
  Description of Artificial Sequence: Synthetic oligonucleotide
gcauucaaagguccaaagu

SEQ ID NO: 3040107 - RNA, 19 nt, Artificial Sequence
  Description of Artificial Sequence: Synthetic oligonucleotide
uaggagcagcucggggcgg

SEQ ID NO: 3040108 - RNA, 19 nt, Artificial Sequence
  Description of Artificial Sequence: Synthetic oligonucleotide
caaagguccaaaguuuuau

SEQ ID NO: 3040109 - RNA, 19 nt, Artificial Sequence
  Description of Artificial Sequence: Synthetic oligonucleotide
cgcauucaaagguccaaag

SEQ ID NO: 3040110 - RNA, 19 nt, Artificial Sequence
  Description of Artificial Sequence: Synthetic oligonucleotide
gcacccaguaccgaggaca

SEQ ID NO: 3040111 - RNA, 19 nt, Artificial Sequence
  Description of Artificial Sequence: Synthetic oligonucleotide
gcucccucaugucccaccc

SEQ ID NO: 3040112 - RNA, 19 nt, Artificial Sequence
  Description of Artificial Sequence: Synthetic oligonucleotide
acccaccucugcccauggg

SEQ ID NO: 3040113 - RNA, 19 nt, Artificial Sequence
  Description of Artificial Sequence: Synthetic oligonucleotide
ccauucccaauacagaaua

SEQ ID NO: 3040114 - RNA, 19 nt, Artificial Sequence
  Description of Artificial Sequence: Synthetic oligonucleotide
accucugcccaugggccag

SEQ ID NO: 3040115 - RNA, 19 nt, Artificial Sequence
  Description of Artificial Sequence: Synthetic oligonucleotide
aggagcagcucggggcggg

SEQ ID NO: 3040116 - RNA, 19 nt, Artificial Sequence
  Description of Artificial Sequence: Synthetic oligonucleotide
gacggguacuggggugggg

SEQ ID NO: 3040117 - RNA, 19 nt, Artificial Sequence
  Description of Artificial Sequence: Synthetic oligonucleotide
ggguacugggguggggugg

SEQ ID NO: 3040118 - RNA, 19 nt, Artificial Sequence
  Description of Artificial Sequence: Synthetic oligonucleotide
gagcagcucggggcgggcg

SEQ ID NO: 3040119 - RNA, 19 nt, Artificial Sequence
  Description of Artificial Sequence: Synthetic oligonucleotide
ccaauacagaauaaggcuu

SEQ ID NO: 3040120 - RNA, 19 nt, Artificial Sequence
  Description of Artificial Sequence: Synthetic oligonucleotide
caccccuccauucccaaua

SEQ ID NO: 3040121 - RNA, 19 nt, Artificial Sequence
  Description of Artificial Sequence: Synthetic oligonucleotide
ggcgguacccucaccuucc

SEQ ID NO: 3040122 - RNA, 19 nt, Artificial Sequence
  Description of Artificial Sequence: Synthetic oligonucleotide
ugcccaugggccagaccua

SEQ ID NO: 3040123 - RNA, 19 nt, Artificial Sequence
  Description of Artificial Sequence: Synthetic oligonucleotide
guggcccacaggcgguacc

SEQ ID NO: 3040124 - RNA, 19 nt, Artificial Sequence
  Description of Artificial Sequence: Synthetic oligonucleotide
ggacuccccucccuguccc

SEQ ID NO: 3040125 - RNA, 19 nt, Artificial Sequence
  Description of Artificial Sequence: Synthetic oligonucleotide
ccuccauucccaauacaga

SEQ ID NO: 3040126 - RNA, 19 nt, Artificial Sequence
  Description of Artificial Sequence: Synthetic oligonucleotide
gggacuggacggguacugg

SEQ ID NO: 3040127 - RNA, 19 nt, Artificial Sequence
  Description of Artificial Sequence: Synthetic oligonucleotide
gacuccccucccugucccc

SEQ ID NO: 3040128 - RNA, 19 nt, Artificial Sequence
  Description of Artificial Sequence: Synthetic oligonucleotide
caccgcauucaaaggucca

SEQ ID NO: 3040129 - RNA, 19 nt, Artificial Sequence
  Description of Artificial Sequence: Synthetic oligonucleotide
gaggacacaucaccgcauu

SEQ ID NO: 3040130 - RNA, 19 nt, Artificial Sequence
  Description of Artificial Sequence: Synthetic oligonucleotide
caugucccacccaccccuc

SEQ ID NO: 3040131 - RNA, 19 nt, Artificial Sequence
  Description of Artificial Sequence: Synthetic oligonucleotide
cugcacccaguaccgagga

SEQ ID NO: 3040132 - RNA, 19 nt, Artificial Sequence
  Description of Artificial Sequence: Synthetic oligonucleotide
ggccagaccuaggagcagc

SEQ ID NO: 3040133 - RNA, 19 nt, Artificial Sequence
  Description of Artificial Sequence: Synthetic oligonucleotide
ucggggcgggcgugagggg

SEQ ID NO: 3040134 - RNA, 19 nt, Artificial Sequence
  Description of Artificial Sequence: Synthetic oligonucleotide
cccugacccaccucugccc

SEQ ID NO: 3040135 - RNA, 19 nt, Artificial Sequence
  Description of Artificial Sequence: Synthetic oligonucleotide
acacaucaccgcauucaaa

SEQ ID NO: 3040136 - RNA, 19 nt, Artificial Sequence
  Description of Artificial Sequence: Synthetic oligonucleotide
aggcacuuguagagauuug

SEQ ID NO: 3040137 - RNA, 19 nt, Artificial Sequence
  Description of Artificial Sequence: Synthetic oligonucleotide
uguggcccacaggcgguac

SEQ ID NO: 3040138 - RNA, 19 nt, Artificial Sequence
  Description of Artificial Sequence: Synthetic oligonucleotide
cacaggcgguacccucacc

SEQ ID NO: 3040139 - RNA, 19 nt, Artificial Sequence
  Description of Artificial Sequence: Synthetic oligonucleotide
gcagagaggggcuuccagu

SEQ ID NO: 3040140 - RNA, 19 nt, Artificial Sequence
  Description of Artificial Sequence: Synthetic oligonucleotide
cagagaggggcuuccaguu

SEQ ID NO: 3040141 - RNA, 19 nt, Artificial Sequence
  Description of Artificial Sequence: Synthetic oligonucleotide
caccucugcccaugggcca

SEQ ID NO: 3040142 - RNA, 19 nt, Artificial Sequence
  Description of Artificial Sequence: Synthetic oligonucleotide
aggggacuggacggguacu

SEQ ID NO: 3040143 - RNA, 19 nt, Artificial Sequence
  Description of Artificial Sequence: Synthetic oligonucleotide
ggggacuggacggguacug

SEQ ID NO: 3040144 - RNA, 19 nt, Artificial Sequence
  Description of Artificial Sequence: Synthetic oligonucleotide
guccaaaguuuuauuguuu

SEQ ID NO: 3040145 - RNA, 19 nt, Artificial Sequence
  Description of Artificial Sequence: Synthetic oligonucleotide
ccaugggccagaccuagga

SEQ ID NO: 3040146 - RNA, 19 nt, Artificial Sequence
  Description of Artificial Sequence: Synthetic oligonucleotide
ccccugacccaccucugcc

SEQ ID NO: 3040147 - RNA, 19 nt, Artificial Sequence
  Description of Artificial Sequence: Synthetic oligonucleotide
cgaauacauucuccagcag

SEQ ID NO: 3040148 - RNA, 19 nt, Artificial Sequence
  Description of Artificial Sequence: Synthetic oligonucleotide
ccgaggacacaucaccgca

SEQ ID NO: 3040149 - RNA, 19 nt, Artificial Sequence
  Description of Artificial Sequence: Synthetic oligonucleotide
acaggcacuuguagagauu

SEQ ID NO: 3040150 - RNA, 19 nt, Artificial Sequence
  Description of Artificial Sequence: Synthetic oligonucleotide
gcccaugggccagaccuag

SEQ ID NO: 3040151 - RNA, 19 nt, Artificial Sequence
  Description of Artificial Sequence: Synthetic oligonucleotide
gcugggaggcagagagggg

SEQ ID NO: 3040152 - RNA, 19 nt, Artificial Sequence
  Description of Artificial Sequence: Synthetic oligonucleotide
guacugggguggggugggg

SEQ ID NO: 3040153 - RNA, 19 nt, Artificial Sequence
  Description of Artificial Sequence: Synthetic oligonucleotide
cccucaugucccacccacc

SEQ ID NO: 3040154 - RNA, 19 nt, Artificial Sequence
  Description of Artificial Sequence: Synthetic oligonucleotide
ggccccagcugggaggcag

SEQ ID NO: 3040155 - RNA, 19 nt, Artificial Sequence
  Description of Artificial Sequence: Synthetic oligonucleotide
uuguggcccacaggcggua

SEQ ID NO: 3040156 - RNA, 19 nt, Artificial Sequence
  Description of Artificial Sequence: Synthetic oligonucleotide
ccucaccuuccucugccuc

SEQ ID NO: 3040157 - RNA, 19 nt, Artificial Sequence
  Description of Artificial Sequence: Synthetic oligonucleotide
guccccugacccaccucug

SEQ ID NO: 3040158 - RNA, 19 nt, Artificial Sequence
  Description of Artificial Sequence: Synthetic oligonucleotide
ggacggguacugggguggg

SEQ ID NO: 3040159 - RNA, 19 nt, Artificial Sequence
  Description of Artificial Sequence: Synthetic oligonucleotide
ccaguaccgaggacacauc

SEQ ID NO: 3040160 - RNA, 19 nt, Artificial Sequence
  Description of Artificial Sequence: Synthetic oligonucleotide
cccaugggccagaccuagg

SEQ ID NO: 3040161 - RNA, 19 nt, Artificial Sequence
  Description of Artificial Sequence: Synthetic oligonucleotide
cuguccccugacccaccuc

SEQ ID NO: 3040162 - RNA, 19 nt, Artificial Sequence
  Description of Artificial Sequence: Synthetic oligonucleotide
ccagcccaccccugaggcc

SEQ ID NO: 3040163 - RNA, 19 nt, Artificial Sequence
  Description of Artificial Sequence: Synthetic oligonucleotide
ggaggcagagaggggcuuc

SEQ ID NO: 3040164 - RNA, 19 nt, Artificial Sequence
  Description of Artificial Sequence: Synthetic oligonucleotide
ccuccagcccaccccugag

SEQ ID NO: 3040165 - RNA, 19 nt, Artificial Sequence
  Description of Artificial Sequence: Synthetic oligonucleotide
cucccucaugucccaccca

SEQ ID NO: 3040166 - RNA, 19 nt, Artificial Sequence
  Description of Artificial Sequence: Synthetic oligonucleotide
ccugacccaccucugccca

SEQ ID NO: 3040167 - RNA, 19 nt, Artificial Sequence
  Description of Artificial Sequence: Synthetic oligonucleotide
cccacaggcgguacccuca

SEQ ID NO: 3040168 - RNA, 19 nt, Artificial Sequence
  Description of Artificial Sequence: Synthetic oligonucleotide
agcucggggcgggcgugag

SEQ ID NO: 3040169 - RNA, 19 nt, Artificial Sequence
  Description of Artificial Sequence: Synthetic oligonucleotide
acccaguaccgaggacaca

SEQ ID NO: 3040170 - RNA, 19 nt, Artificial Sequence
  Description of Artificial Sequence: Synthetic oligonucleotide
gguggggaacaggcacuug

SEQ ID NO: 3040171 - RNA, 19 nt, Artificial Sequence
  Description of Artificial Sequence: Synthetic oligonucleotide
gcgggcgugaggggacugg

SEQ ID NO: 3040172 - RNA, 19 nt, Artificial Sequence
  Description of Artificial Sequence: Synthetic oligonucleotide
cacagcccuccagcccacc

SEQ ID NO: 3040173 - RNA, 19 nt, Artificial Sequence
  Description of Artificial Sequence: Synthetic oligonucleotide
ccacaggcgguacccucac

SEQ ID NO: 3040174 - RNA, 19 nt, Artificial Sequence
  Description of Artificial Sequence: Synthetic oligonucleotide
gcucggggcgggcgugagg

SEQ ID NO: 3040175 - RNA, 19 nt, Artificial Sequence
  Description of Artificial Sequence: Synthetic oligonucleotide
gcccacaggcgguacccuc

SEQ ID NO: 3040176 - RNA, 19 nt, Artificial Sequence
  Description of Artificial Sequence: Synthetic oligonucleotide
caccccugaggccccagcu

SEQ ID NO: 3040177 - RNA, 19 nt, Artificial Sequence
  Description of Artificial Sequence: Synthetic oligonucleotide
cauucuccagcagcucccu

SEQ ID NO: 3040178 - RNA, 19 nt, Artificial Sequence
  Description of Artificial Sequence: Synthetic oligonucleotide
cccucccuguccccugacc

SEQ ID NO: 3040179 - RNA, 19 nt, Artificial Sequence
  Description of Artificial Sequence: Synthetic oligonucleotide
cccaguaccgaggacacau

SEQ ID NO: 3040180 - RNA, 19 nt, Artificial Sequence
  Description of Artificial Sequence: Synthetic oligonucleotide
cagcucccucaugucccac

SEQ ID NO: 3040181 - RNA, 19 nt, Artificial Sequence
  Description of Artificial Sequence: Synthetic oligonucleotide
gggccagaccuaggagcag

SEQ ID NO: 3040182 - RNA, 19 nt, Artificial Sequence
  Description of Artificial Sequence: Synthetic oligonucleotide
gugaggggacuggacgggu

SEQ ID NO: 3040183 - RNA, 19 nt, Artificial Sequence
  Description of Artificial Sequence: Synthetic oligonucleotide
gaggggcuuccaguuuggu

SEQ ID NO: 3040184 - RNA, 19 nt, Artificial Sequence
  Description of Artificial Sequence: Synthetic oligonucleotide
gucccacccaccccuccau

SEQ ID NO: 3040185 - RNA, 19 nt, Artificial Sequence
  Description of Artificial Sequence: Synthetic oligonucleotide
ggagcagcucggggcgggc

SEQ ID NO: 3040186 - RNA, 19 nt, Artificial Sequence
  Description of Artificial Sequence: Synthetic oligonucleotide
gggcgugaggggacuggac

SEQ ID NO: 3040187 - RNA, 19 nt, Artificial Sequence
  Description of Artificial Sequence: Synthetic oligonucleotide
ccgcauucaaagguccaaa

SEQ ID NO: 3040188 - RNA, 19 nt, Artificial Sequence
  Description of Artificial Sequence: Synthetic oligonucleotide
ccagaccuaggagcagcuc

SEQ ID NO: 3040189 - RNA, 19 nt, Artificial Sequence
  Description of Artificial Sequence: Synthetic oligonucleotide
cggguacugggguggggug

SEQ ID NO: 3040190 - RNA, 19 nt, Artificial Sequence
  Description of Artificial Sequence: Synthetic oligonucleotide
gcagcucggggcgggcgug

SEQ ID NO: 3040191 - RNA, 19 nt, Artificial Sequence
  Description of Artificial Sequence: Synthetic oligonucleotide
caggcgguacccucaccuu

SEQ ID NO: 3040192 - RNA, 19 nt, Artificial Sequence
  Description of Artificial Sequence: Synthetic oligonucleotide
gggguggggaacaggcacu

SEQ ID NO: 3040193 - RNA, 19 nt, Artificial Sequence
  Description of Artificial Sequence: Synthetic oligonucleotide
ccacagcccuccagcccac

SEQ ID NO: 3040194 - RNA, 19 nt, Artificial Sequence
  Description of Artificial Sequence: Synthetic oligonucleotide
caccuuccucugccuccca

SEQ ID NO: 3040195 - RNA, 19 nt, Artificial Sequence
  Description of Artificial Sequence: Synthetic oligonucleotide
cccuccagcccaccccuga

SEQ ID NO: 3040196 - RNA, 19 nt, Artificial Sequence
  Description of Artificial Sequence: Synthetic oligonucleotide
cugacccaccucugcccau

SEQ ID NO: 3040197 - RNA, 19 nt, Artificial Sequence
  Description of Artificial Sequence: Synthetic oligonucleotide
ccccuccauucccaauaca

SEQ ID NO: 3040198 - RNA, 19 nt, Artificial Sequence
  Description of Artificial Sequence: Synthetic oligonucleotide
ggcgggcgugaggggacug

SEQ ID NO: 3040199 - RNA, 19 nt, Artificial Sequence
  Description of Artificial Sequence: Synthetic oligonucleotide
cagcucggggcgggcguga

SEQ ID NO: 3040200 - RNA, 19 nt, Artificial Sequence
  Description of Artificial Sequence: Synthetic oligonucleotide
aggccccagcugggaggca

SEQ ID NO: 3040201 - RNA, 19 nt, Artificial Sequence
  Description of Artificial Sequence: Synthetic oligonucleotide
cgaggacacaucaccgcau

SEQ ID NO: 3040202 - RNA, 19 nt, Artificial Sequence
  Description of Artificial Sequence: Synthetic oligonucleotide
cgguacccucaccuuccuc

SEQ ID NO: 3040203 - RNA, 19 nt, Artificial Sequence
  Description of Artificial Sequence: Synthetic oligonucleotide
ggguggggaacaggcacuu

SEQ ID NO: 3040204 - RNA, 19 nt, Artificial Sequence
  Description of Artificial Sequence: Synthetic oligonucleotide
gcgguacccucaccuuccu

SEQ ID NO: 3040205 - RNA, 19 nt, Artificial Sequence
  Description of Artificial Sequence: Synthetic oligonucleotide
gccccagcugggaggcaga

SEQ ID NO: 3040206 - RNA, 19 nt, Artificial Sequence
  Description of Artificial Sequence: Synthetic oligonucleotide
ccccucccuguccccugac

SEQ ID NO: 3040207 - RNA, 19 nt, Artificial Sequence
  Description of Artificial Sequence: Synthetic oligonucleotide
cccagcugggaggcagaga

SEQ ID NO: 3040208 - RNA, 19 nt, Artificial Sequence
  Description of Artificial Sequence: Synthetic oligonucleotide
ggcccacaggcgguacccu

SEQ ID NO: 3040209 - RNA, 19 nt, Artificial Sequence
  Description of Artificial Sequence: Synthetic oligonucleotide
cgggcgugaggggacugga

SEQ ID NO: 3040210 - RNA, 19 nt, Artificial Sequence
  Description of Artificial Sequence: Synthetic oligonucleotide
ccaccccuccauucccaau

SEQ ID NO: 3040211 - RNA, 19 nt, Artificial Sequence
  Description of Artificial Sequence: Synthetic oligonucleotide
gggcgggcgugaggggacu

SEQ ID NO: 3040212 - RNA, 19 nt, Artificial Sequence
  Description of Artificial Sequence: Synthetic oligonucleotide
ugaacaauaacuuaugacc

SEQ ID NO: 3040213 - RNA, 19 nt, Artificial Sequence
  Description of Artificial Sequence: Synthetic oligonucleotide
uuuaacauagugaaaauac

SEQ ID NO: 3040214 - RNA, 19 nt, Artificial Sequence
  Description of Artificial Sequence: Synthetic oligonucleotide
aaaagaagccgacagcagc

SEQ ID NO: 3040215 - RNA, 19 nt, Artificial Sequence
  Description of Artificial Sequence: Synthetic oligonucleotide
auagugaaaauacaaguac

SEQ ID NO: 3040216 - RNA, 19 nt, Artificial Sequence
  Description of Artificial Sequence: Synthetic oligonucleotide
  modified_base (17)..(17): a, c, u, g, unknown or other
aguauuguuaacccaanac

SEQ ID NO: 3040217 - RNA, 19 nt, Artificial Sequence
  Description of Artificial Sequence: Synthetic oligonucleotide
acaaguuuuauucccauac

SEQ ID NO: 3040218 - RNA, 19 nt, Artificial Sequence
  Description of Artificial Sequence: Synthetic oligonucleotide
uuucaaacaaguuuuauuc

SEQ ID NO: 3040219 - RNA, 19 nt, Artificial Sequence
  Description of Artificial Sequence: Synthetic oligonucleotide
aaauacaaguaccagaaaa

SEQ ID NO: 3040220 - RNA, 19 nt, Artificial Sequence
  Description of Artificial Sequence: Synthetic oligonucleotide
aagaucauuuaacauagug

SEQ ID NO: 3040221 - RNA, 19 nt, Artificial Sequence
  Description of Artificial Sequence: Synthetic oligonucleotide
uuaaaauguacacagggaa

SEQ ID NO: 3040222 - RNA, 19 nt, Artificial Sequence
  Description of Artificial Sequence: Synthetic oligonucleotide
uuuuauucccauacaaucc

SEQ ID NO: 3040223 - RNA, 19 nt, Artificial Sequence
  Description of Artificial Sequence: Synthetic oligonucleotide
uugcuuaaaauguacacag

SEQ ID NO: 3040224 - RNA, 19 nt, Artificial Sequence
  Description of Artificial Sequence: Synthetic oligonucleotide
cauauuaagaucauuuaac

SEQ ID NO: 3040225 - RNA, 19 nt, Artificial Sequence
  Description of Artificial Sequence: Synthetic oligonucleotide
uuuccuuugcuuaaaaugu

SEQ ID NO: 3040226 - RNA, 19 nt, Artificial Sequence
  Description of Artificial Sequence: Synthetic oligonucleotide
ucaaaaguauuguuaaccc

SEQ ID NO: 3040227 - RNA, 19 nt, Artificial Sequence
  Description of Artificial Sequence: Synthetic oligonucleotide
uaacuuaugaccuggcucc

SEQ ID NO: 3040228 - RNA, 19 nt, Artificial Sequence
  Description of Artificial Sequence: Synthetic oligonucleotide
  modified_base (9)..(9): a, c, u, g, unknown or other
uaacccaanacauauuaag

SEQ ID NO: 3040229 - RNA, 19 nt, Artificial Sequence
  Description of Artificial Sequence: Synthetic oligonucleotide
uuuauucccauacaauccc

SEQ ID NO: 3040230 - RNA, 19 nt, Artificial Sequence
  Description of Artificial Sequence: Synthetic oligonucleotide
aacaugauucuuuaaugug

SEQ ID NO: 3040231 - RNA, 19 nt, Artificial Sequence
  Description of Artificial Sequence: Synthetic oligonucleotide
ugaaaauacaaguaccaga

SEQ ID NO: 3040232 - RNA, 19 nt, Artificial Sequence
  Description of Artificial Sequence: Synthetic oligonucleotide
gaucauuuaacauagugaa

SEQ ID NO: 3040233 - RNA, 19 nt, Artificial Sequence
  Description of Artificial Sequence: Synthetic oligonucleotide
ucaaacaaguuuuauuccc

SEQ ID NO: 3040234 - RNA, 19 nt, Artificial Sequence
  Description of Artificial Sequence: Synthetic oligonucleotide
ucauuuaacauagugaaaa

SEQ ID NO: 3040235 - RNA, 19 nt, Artificial Sequence
  Description of Artificial Sequence: Synthetic oligonucleotide
  modified_base (16)..(16): a, c, u, g, unknown or other
guauuguuaacccaanaca

SEQ ID NO: 3040236 - RNA, 19 nt, Artificial Sequence
  Description of Artificial Sequence: Synthetic oligonucleotide
uacacagggaacaugauuc

SEQ ID NO: 3040237 - RNA, 19 nt, Artificial Sequence
  Description of Artificial Sequence: Synthetic oligonucleotide
aacucaaaaguauuguuaa

SEQ ID NO: 3040238 - RNA, 19 nt, Artificial Sequence
  Description of Artificial Sequence: Synthetic oligonucleotide
auauuaagaucauuuaaca

SEQ ID NO: 3040239 - RNA, 19 nt, Artificial Sequence
  Description of Artificial Sequence: Synthetic oligonucleotide
uccaaauuuucaaacaagu

SEQ ID NO: 3040240 - RNA, 19 nt, Artificial Sequence
  Description of Artificial Sequence: Synthetic oligonucleotide
ugauucuuuaaugugaaca

SEQ ID NO: 3040241 - RNA, 19 nt, Artificial Sequence
  Description of Artificial Sequence: Synthetic oligonucleotide
gaagcuacugaauggaagc

SEQ ID NO: 3040242 - RNA, 19 nt, Artificial Sequence
  Description of Artificial Sequence: Synthetic oligonucleotide
aauggaagccauuucaaau

SEQ ID NO: 3040243 - RNA, 19 nt, Artificial Sequence
  Description of Artificial Sequence: Synthetic oligonucleotide
  modified_base (15)..(15): a, c, u, g, unknown or other
uauuguuaacccaanacau

SEQ ID NO: 3040244 - RNA, 19 nt, Artificial Sequence
  Description of Artificial Sequence: Synthetic oligonucleotide
aaauuuucaaacaaguuuu

SEQ ID NO: 3040245 - RNA, 19 nt, Artificial Sequence
  Description of Artificial Sequence: Synthetic oligonucleotide
uagugaaaauacaaguacc

SEQ ID NO: 3040246 - RNA, 19 nt, Artificial Sequence
  Description of Artificial Sequence: Synthetic oligonucleotide
ucucaggaaacucaaaagu

SEQ ID NO: 3040247 - RNA, 19 nt, Artificial Sequence
  Description of Artificial Sequence: Synthetic oligonucleotide
uuaacauagugaaaauaca

SEQ ID NO: 3040248 - RNA, 19 nt, Artificial Sequence
  Description of Artificial Sequence: Synthetic oligonucleotide
uuaaugugaacaauaacuu

SEQ ID NO: 3040249 - RNA, 19 nt, Artificial Sequence
  Description of Artificial Sequence: Synthetic oligonucleotide
aacauagugaaaauacaag

SEQ ID NO: 3040250 - RNA, 19 nt, Artificial Sequence
  Description of Artificial Sequence: Synthetic oligonucleotide
aaaauguacacagggaaca

SEQ ID NO: 3040251 - RNA, 19 nt, Artificial Sequence
  Description of Artificial Sequence: Synthetic oligonucleotide
uaacauagugaaaauacaa

SEQ ID NO: 3040252 - RNA, 19 nt, Artificial Sequence
  Description of Artificial Sequence: Synthetic oligonucleotide
aaugugaacaauaacuuau

SEQ ID NO: 3040253 - RNA, 19 nt, Artificial Sequence
  Description of Artificial Sequence: Synthetic oligonucleotide
  modified_base (2)..(2): a, c, u, g, unknown or other
anacauauuaagaucauuu

SEQ ID NO: 3040254 - RNA, 19 nt, Artificial Sequence
  Description of Artificial Sequence: Synthetic oligonucleotide
guuuuauucccauacaauc

SEQ ID NO: 3040255 - RNA, 19 nt, Artificial Sequence
  Description of Artificial Sequence: Synthetic oligonucleotide
cucaaaaguauuguuaacc

SEQ ID NO: 3040256 - RNA, 19 nt, Artificial Sequence
  Description of Artificial Sequence: Synthetic oligonucleotide
uucuguuacguucucagga

SEQ ID NO: 3040257 - RNA, 19 nt, Artificial Sequence
  Description of Artificial Sequence: Synthetic oligonucleotide
  modified_base (13)..(13): a, c, u, g, unknown or other
uuguuaacccaanacauau

SEQ ID NO: 3040258 - RNA, 19 nt, Artificial Sequence
  Description of Artificial Sequence: Synthetic oligonucleotide
gcuuaaaauguacacaggg

SEQ ID NO: 3040259 - RNA, 19 nt, Artificial Sequence
  Description of Artificial Sequence: Synthetic oligonucleotide
uauuccaaauuuucaaaca

SEQ ID NO: 3040260 - RNA, 19 nt, Artificial Sequence
  Description of Artificial Sequence: Synthetic oligonucleotide
ucuuuaaugugaacaauaa

SEQ ID NO: 3040261 - RNA, 19 nt, Artificial Sequence
  Description of Artificial Sequence: Synthetic oligonucleotide
uaaaauguacacagggaac

SEQ ID NO: 3040262 - RNA, 19 nt, Artificial Sequence
  Description of Artificial Sequence: Synthetic oligonucleotide
uuccaaauuuucaaacaag

SEQ ID NO: 3040263 - RNA, 19 nt, Artificial Sequence
  Description of Artificial Sequence: Synthetic oligonucleotide
acuacuaacacacuucaau

SEQ ID NO: 3040264 - RNA, 19 nt, Artificial Sequence
  Description of Artificial Sequence: Synthetic oligonucleotide
aauaacuuaugaccuggcu

SEQ ID NO: 3040265 - RNA, 19 nt, Artificial Sequence
  Description of Artificial Sequence: Synthetic oligonucleotide
aaaaguauuguuaacccaa

SEQ ID NO: 3040266 - RNA, 19 nt, Artificial Sequence
  Description of Artificial Sequence: Synthetic oligonucleotide
aaguuuuauucccauacaa

SEQ ID NO: 3040267 - RNA, 19 nt, Artificial Sequence
  Description of Artificial Sequence: Synthetic oligonucleotide
aacaauaacuuaugaccug

SEQ ID NO: 3040268 - RNA, 19 nt, Artificial Sequence
  Description of Artificial Sequence: Synthetic oligonucleotide
gaaaauacaaguaccagaa

SEQ ID NO: 3040269 - RNA, 19 nt, Artificial Sequence
  Description of Artificial Sequence: Synthetic oligonucleotide
uuugcuuaaaauguacaca

SEQ ID NO: 3040270 - RNA, 19 nt, Artificial Sequence
  Description of Artificial Sequence: Synthetic oligonucleotide
gaagaccaggcacagaagc

SEQ ID NO: 3040271 - RNA, 19 nt, Artificial Sequence
  Description of Artificial Sequence: Synthetic oligonucleotide
ucccauacaaucccgagac

SEQ ID NO: 3040272 - RNA, 19 nt, Artificial Sequence
  Description of Artificial Sequence: Synthetic oligonucleotide
uucaaacaaguuuuauucc

SEQ ID NO: 3040273 - RNA, 19 nt, Artificial Sequence
  Description of Artificial Sequence: Synthetic oligonucleotide
uucucaggaaacucaaaag

SEQ ID NO: 3040274 - RNA, 19 nt, Artificial Sequence
  Description of Artificial Sequence: Synthetic oligonucleotide
cuuugcuuaaaauguacac

SEQ ID NO: 3040275 - RNA, 19 nt, Artificial Sequence
  Description of Artificial Sequence: Synthetic oligonucleotide
ugugaacaauaacuuauga

SEQ ID NO: 3040276 - RNA, 19 nt, Artificial Sequence
  Description of Artificial Sequence: Synthetic oligonucleotide
guuucuguuacguucucag

SEQ ID NO: 3040277 - RNA, 19 nt, Artificial Sequence
  Description of Artificial Sequence: Synthetic oligonucleotide
uauuaagaucauuuaacau

SEQ ID NO: 3040278 - RNA, 19 nt, Artificial Sequence
  Description of Artificial Sequence: Synthetic oligonucleotide
acaauaacuuaugaccugg

SEQ ID NO: 3040279 - RNA, 19 nt, Artificial Sequence
  Description of Artificial Sequence: Synthetic oligonucleotide
  modified_base (7)..(7): a, c, u, g, unknown or other
acccaanacauauuaagau

SEQ ID NO: 3040280 - RNA, 19 nt, Artificial Sequence
  Description of Artificial Sequence: Synthetic oligonucleotide
ucaggaaacucaaaaguau

SEQ ID NO: 3040281 - RNA, 19 nt, Artificial Sequence
  Description of Artificial Sequence: Synthetic oligonucleotide
acagccagacuacuaacac

SEQ ID NO: 3040282 - RNA, 19 nt, Artificial Sequence
  Description of Artificial Sequence: Synthetic oligonucleotide
uggaagccauuucaaauag

SEQ ID NO: 3040283 - RNA, 19 nt, Artificial Sequence
  Description of Artificial Sequence: Synthetic oligonucleotide
  modified_base (10)..(10): a, c, u, g, unknown or other
uuaacccaanacauauuaa

SEQ ID NO: 3040284 - RNA, 19 nt, Artificial Sequence
  Description of Artificial Sequence: Synthetic oligonucleotide
uuauucccauacaaucccg

SEQ ID NO: 3040285 - RNA, 19 nt, Artificial Sequence
  Description of Artificial Sequence: Synthetic oligonucleotide
uacuuggguggcuucaugg

SEQ ID NO: 3040286 - RNA, 19 nt, Artificial Sequence
  Description of Artificial Sequence: Synthetic oligonucleotide
agccagacuacuaacacac

SEQ ID NO: 3040287 - RNA, 19 nt, Artificial Sequence
  Description of Artificial Sequence: Synthetic oligonucleotide
aagcuacugaauggaagcc

SEQ ID NO: 3040288 - RNA, 19 nt, Artificial Sequence
  Description of Artificial Sequence: Synthetic oligonucleotide
ugcuuaaaauguacacagg

SEQ ID NO: 3040289 - RNA, 19 nt, Artificial Sequence
  Description of Artificial Sequence: Synthetic oligonucleotide
gugaacaauaacuuaugac

SEQ ID NO: 3040290 - RNA, 19 nt, Artificial Sequence
  Description of Artificial Sequence: Synthetic oligonucleotide
auuccaaauuuucaaacaa

SEQ ID NO: 3040291 - RNA, 19 nt, Artificial Sequence
  Description of Artificial Sequence: Synthetic oligonucleotide
acucaaaaguauuguuaac

SEQ ID NO: 3040292 - RNA, 19 nt, Artificial Sequence
  Description of Artificial Sequence: Synthetic oligonucleotide
acuuggguggcuucauggc

SEQ ID NO: 3040293 - RNA, 19 nt, Artificial Sequence
  Description of Artificial Sequence: Synthetic oligonucleotide
agcacuauuccaaauuuuc

SEQ ID NO: 3040294 - RNA, 19 nt, Artificial Sequence
  Description of Artificial Sequence: Synthetic oligonucleotide
uccaucucucugaagacca

SEQ ID NO: 3040295 - RNA, 19 nt, Artificial Sequence
  Description of Artificial Sequence: Synthetic oligonucleotide
cuaacacacuucaauuacc

SEQ ID NO: 3040296 - RNA, 19 nt, Artificial Sequence
  Description of Artificial Sequence: Synthetic oligonucleotide
uacguucucaggaaacuca

SEQ ID NO: 3040297 - RNA, 19 nt, Artificial Sequence
  Description of Artificial Sequence: Synthetic oligonucleotide
agaucauuuaacauaguga

SEQ ID NO: 3040298 - RNA, 19 nt, Artificial Sequence
  Description of Artificial Sequence: Synthetic oligonucleotide
  modified_base (8)..(8): a, c, u, g, unknown or other
aacccaanacauauuaaga

SEQ ID NO: 3040299 - RNA, 19 nt, Artificial Sequence
  Description of Artificial Sequence: Synthetic oligonucleotide
cuuaaaauguacacaggga

SEQ ID NO: 3040300 - RNA, 19 nt, Artificial Sequence
  Description of Artificial Sequence: Synthetic oligonucleotide
cuuuaaugugaacaauaac

SEQ ID NO: 3040301 - RNA, 19 nt, Artificial Sequence
  Description of Artificial Sequence: Synthetic oligonucleotide
uguuacguucucaggaaac

SEQ ID NO: 3040302 - RNA, 19 nt, Artificial Sequence
  Description of Artificial Sequence: Synthetic oligonucleotide
aaacucaaaaguauuguua

SEQ ID NO: 3040303 - RNA, 19 nt, Artificial Sequence
  Description of Artificial Sequence: Synthetic oligonucleotide
ugaauggaagccauuucaa

SEQ ID NO: 3040304 - RNA, 19 nt, Artificial Sequence
  Description of Artificial Sequence: Synthetic oligonucleotide
agacuacuaacacacuuca

SEQ ID NO: 3040305 - RNA, 19 nt, Artificial Sequence
  Description of Artificial Sequence: Synthetic oligonucleotide
ggaacaugauucuuuaaug

SEQ ID NO: 3040306 - RNA, 19 nt, Artificial Sequence
  Description of Artificial Sequence: Synthetic oligonucleotide
aaacaaguuuuauucccau

SEQ ID NO: 3040307 - RNA, 19 nt, Artificial Sequence
  Description of Artificial Sequence: Synthetic oligonucleotide
  modified_base (11)..(11): a, c, u, g, unknown or other
guuaacccaanacauauua

SEQ ID NO: 3040308 - RNA, 19 nt, Artificial Sequence
  Description of Artificial Sequence: Synthetic oligonucleotide
uccuuugcuuaaaauguac

SEQ ID NO: 3040309 - RNA, 19 nt, Artificial Sequence
  Description of Artificial Sequence: Synthetic oligonucleotide
uaaugugaacaauaacuua

SEQ ID NO: 3040310 - RNA, 19 nt, Artificial Sequence
  Description of Artificial Sequence: Synthetic oligonucleotide
uucauggcugggcacagca

SEQ ID NO: 3040311 - RNA, 19 nt, Artificial Sequence
  Description of Artificial Sequence: Synthetic oligonucleotide
aaagaagccgacagcagca

SEQ ID NO: 3040312 - RNA, 19 nt, Artificial Sequence
  Description of Artificial Sequence: Synthetic oligonucleotide
acacacuucaauuaccauu

SEQ ID NO: 3040313 - RNA, 19 nt, Artificial Sequence
  Description of Artificial Sequence: Synthetic oligonucleotide
acaaucccgagacguuucc

SEQ ID NO: 3040314 - RNA, 19 nt, Artificial Sequence
  Description of Artificial Sequence: Synthetic oligonucleotide
aaaauacaaguaccagaaa

SEQ ID NO: 3040315 - RNA, 19 nt, Artificial Sequence
  Description of Artificial Sequence: Synthetic oligonucleotide
  modified_base (5)..(5): a, c, u, g, unknown or other
ccaanacauauuaagauca

SEQ ID NO: 3040316 - RNA, 19 nt, Artificial Sequence
  Description of Artificial Sequence: Synthetic oligonucleotide
cauagugaaaauacaagua

SEQ ID NO: 3040317 - RNA, 19 nt, Artificial Sequence
  Description of Artificial Sequence: Synthetic oligonucleotide
cauggcugggcacagcagg

SEQ ID NO: 3040318 - RNA, 19 nt, Artificial Sequence
  Description of Artificial Sequence: Synthetic oligonucleotide
  modified_base (18)..(18): a, c, u, g, unknown or other
aaguauuguuaacccaana

SEQ ID NO: 3040319 - RNA, 19 nt, Artificial Sequence
  Description of Artificial Sequence: Synthetic oligonucleotide
uauucccauacaaucccga

SEQ ID NO: 3040320 - RNA, 19 nt, Artificial Sequence
  Description of Artificial Sequence: Synthetic oligonucleotide
ucuguuacguucucaggaa

SEQ ID NO: 3040321 - RNA, 19 nt, Artificial Sequence
  Description of Artificial Sequence: Synthetic oligonucleotide
acaugauucuuuaauguga

SEQ ID NO: 3040322 - RNA, 19 nt, Artificial Sequence
  Description of Artificial Sequence: Synthetic oligonucleotide
uucccauacaaucccgaga

SEQ ID NO: 3040323 - RNA, 19 nt, Artificial Sequence
  Description of Artificial Sequence: Synthetic oligonucleotide
  modified_base (3)..(3): a, c, u, g, unknown or other
aanacauauuaagaucauu

SEQ ID NO: 3040324 - RNA, 19 nt, Artificial Sequence
  Description of Artificial Sequence: Synthetic oligonucleotide
cagacuacuaacacacuuc

SEQ ID NO: 3040325 - RNA, 19 nt, Artificial Sequence
  Description of Artificial Sequence: Synthetic oligonucleotide
gugaaaauacaaguaccag

SEQ ID NO: 3040326 - RNA, 19 nt, Artificial Sequence
  Description of Artificial Sequence: Synthetic oligonucleotide
caaauuuucaaacaaguuu

SEQ ID NO: 3040327 - RNA, 19 nt, Artificial Sequence
  Description of Artificial Sequence: Synthetic oligonucleotide
uuggguggcuucauggcug

SEQ ID NO: 3040328 - RNA, 19 nt, Artificial Sequence
  Description of Artificial Sequence: Synthetic oligonucleotide
cugaauggaagccauuuca

SEQ ID NO: 3040329 - RNA, 19 nt, Artificial Sequence
  Description of Artificial Sequence: Synthetic oligonucleotide
auucccauacaaucccgag

SEQ ID NO: 3040330 - RNA, 19 nt, Artificial Sequence
  Description of Artificial Sequence: Synthetic oligonucleotide
agaagcuacugaauggaag

SEQ ID NO: 3040331 - RNA, 19 nt, Artificial Sequence
  Description of Artificial Sequence: Synthetic oligonucleotide
gaacaauaacuuaugaccu

SEQ ID NO: 3040332 - RNA, 19 nt, Artificial Sequence
  Description of Artificial Sequence: Synthetic oligonucleotide
caaaaguauuguuaaccca

SEQ ID NO: 3040333 - RNA, 19 nt, Artificial Sequence
  Description of Artificial Sequence: Synthetic oligonucleotide
aacaaguuuuauucccaua

SEQ ID NO: 3040334 - RNA, 19 nt, Artificial Sequence
  Description of Artificial Sequence: Synthetic oligonucleotide
ggcuccacuacuugggugg

SEQ ID NO: 3040335 - RNA, 19 nt, Artificial Sequence
  Description of Artificial Sequence: Synthetic oligonucleotide
auuuaacauagugaaaaua

SEQ ID NO: 3040336 - RNA, 19 nt, Artificial Sequence
  Description of Artificial Sequence: Synthetic oligonucleotide
aggaaacucaaaaguauug

SEQ ID NO: 3040337 - RNA, 19 nt, Artificial Sequence
  Description of Artificial Sequence: Synthetic oligonucleotide
auguacacagggaacauga

SEQ ID NO: 3040338 - RNA, 19 nt, Artificial Sequence
  Description of Artificial Sequence: Synthetic oligonucleotide
aagaagccgacagcagcac

SEQ ID NO: 3040339 - RNA, 19 nt, Artificial Sequence
  Description of Artificial Sequence: Synthetic oligonucleotide
aaucccgagacguuuccuu

SEQ ID NO: 3040340 - RNA, 19 nt, Artificial Sequence
  Description of Artificial Sequence: Synthetic oligonucleotide
acagaagcuacugaaugga

SEQ ID NO: 3040341 - RNA, 19 nt, Artificial Sequence
  Description of Artificial Sequence: Synthetic oligonucleotide
caaacaaguuuuauuccca

SEQ ID NO: 3040342 - RNA, 19 nt, Artificial Sequence
  Description of Artificial Sequence: Synthetic oligonucleotide
caauaacuuaugaccuggc

SEQ ID NO: 3040343 - RNA, 19 nt, Artificial Sequence
  Description of Artificial Sequence: Synthetic oligonucleotide
cugaagaccaggcacagaa

SEQ ID NO: 3040344 - RNA, 19 nt, Artificial Sequence
  Description of Artificial Sequence: Synthetic oligonucleotide
aacacacuucaauuaccau

SEQ ID NO: 3040345 - RNA, 19 nt, Artificial Sequence
  Description of Artificial Sequence: Synthetic oligonucleotide
uaugaccuggcuccacuac

SEQ ID NO: 3040346 - RNA, 19 nt, Artificial Sequence
  Description of Artificial Sequence: Synthetic oligonucleotide
  modified_base (14)..(14): a, c, u, g, unknown or other
auuguuaacccaanacaua

SEQ ID NO: 3040347 - RNA, 19 nt, Artificial Sequence
  Description of Artificial Sequence: Synthetic oligonucleotide
caugauucuuuaaugugaa

SEQ ID NO: 3040348 - RNA, 19 nt, Artificial Sequence
  Description of Artificial Sequence: Synthetic oligonucleotide
gagacguuuccuuugcuua

SEQ ID NO: 3040349 - RNA, 19 nt, Artificial Sequence
  Description of Artificial Sequence: Synthetic oligonucleotide
  modified_base (19)..(19): a, c, u, g, unknown or other
aaaguauuguuaacccaan

SEQ ID NO: 3040350 - RNA, 19 nt, Artificial Sequence
  Description of Artificial Sequence: Synthetic oligonucleotide
aguuuuauucccauacaau

SEQ ID NO: 3040351 - RNA, 19 nt, Artificial Sequence
  Description of Artificial Sequence: Synthetic oligonucleotide
agcagcacuauuccaaauu

SEQ ID NO: 3040352 - RNA, 19 nt, Artificial Sequence
  Description of Artificial Sequence: Synthetic oligonucleotide
cucaggaaacucaaaagua

SEQ ID NO: 3040353 - RNA, 19 nt, Artificial Sequence
  Description of Artificial Sequence: Synthetic oligonucleotide
  modified_base (6)..(6): a, c, u, g, unknown or other
cccaanacauauuaagauc

SEQ ID NO: 3040354 - RNA, 19 nt, Artificial Sequence
  Description of Artificial Sequence: Synthetic oligonucleotide
  modified_base (12)..(12): a, c, u, g, unknown or other
uguuaacccaanacauauu

SEQ ID NO: 3040355 - RNA, 19 nt, Artificial Sequence
  Description of Artificial Sequence: Synthetic oligonucleotide
aaauguacacagggaacau

SEQ ID NO: 3040356 - RNA, 19 nt, Artificial Sequence
  Description of Artificial Sequence: Synthetic oligonucleotide
aauuuucaaacaaguuuua

SEQ ID NO: 3040357 - RNA, 19 nt, Artificial Sequence
  Description of Artificial Sequence: Synthetic oligonucleotide
uuccuuugcuuaaaaugua

SEQ ID NO: 3040358 - RNA, 19 nt, Artificial Sequence
  Description of Artificial Sequence: Synthetic oligonucleotide
gcacagaagcuacugaaug

SEQ ID NO: 3040359 - RNA, 19 nt, Artificial Sequence
  Description of Artificial Sequence: Synthetic oligonucleotide
uacaaucccgagacguuuc

SEQ ID NO: 3040360 - RNA, 19 nt, Artificial Sequence
  Description of Artificial Sequence: Synthetic oligonucleotide
uacugaauggaagccauuu

SEQ ID NO: 3040361 - RNA, 19 nt, Artificial Sequence
  Description of Artificial Sequence: Synthetic oligonucleotide
augugaacaauaacuuaug

SEQ ID NO: 3040362 - RNA, 19 nt, Artificial Sequence
  Description of Artificial Sequence: Synthetic oligonucleotide
aagaccaggcacagaagcu

SEQ ID NO: 3040363 - RNA, 19 nt, Artificial Sequence
  Description of Artificial Sequence: Synthetic oligonucleotide
gaaacucaaaaguauuguu

SEQ ID NO: 3040364 - RNA, 19 nt, Artificial Sequence
  Description of Artificial Sequence: Synthetic oligonucleotide
gacagcagcacuauuccaa

SEQ ID NO: 3040365 - RNA, 19 nt, Artificial Sequence
  Description of Artificial Sequence: Synthetic oligonucleotide
uguuucuguuacguucuca

SEQ ID NO: 3040366 - RNA, 19 nt, Artificial Sequence
  Description of Artificial Sequence: Synthetic oligonucleotide
augaccuggcuccacuacu

SEQ ID NO: 3040367 - RNA, 19 nt, Artificial Sequence
  Description of Artificial Sequence: Synthetic oligonucleotide
caucucucugaagaccagg

SEQ ID NO: 3040368 - RNA, 19 nt, Artificial Sequence
  Description of Artificial Sequence: Synthetic oligonucleotide
acacagggaacaugauucu

SEQ ID NO: 3040369 - RNA, 19 nt, Artificial Sequence
  Description of Artificial Sequence: Synthetic oligonucleotide
uuacguucucaggaaacuc

SEQ ID NO: 3040370 - RNA, 19 nt, Artificial Sequence
  Description of Artificial Sequence: Synthetic oligonucleotide
caaguuuuauucccauaca

SEQ ID NO: 3040371 - RNA, 19 nt, Artificial Sequence
  Description of Artificial Sequence: Synthetic oligonucleotide
uguacacagggaacaugau

SEQ ID NO: 3040372 - RNA, 19 nt, Artificial Sequence
  Description of Artificial Sequence: Synthetic oligonucleotide
acagcagcacuauuccaaa

SEQ ID NO: 3040373 - RNA, 19 nt, Artificial Sequence
  Description of Artificial Sequence: Synthetic oligonucleotide
cuccaucucucugaagacc

SEQ ID NO: 3040374 - RNA, 19 nt, Artificial Sequence
  Description of Artificial Sequence: Synthetic oligonucleotide
agacguuuccuuugcuuaa

SEQ ID NO: 3040375 - RNA, 19 nt, Artificial Sequence
  Description of Artificial Sequence: Synthetic oligonucleotide
cacacuucaauuaccauuu

SEQ ID NO: 3040376 - RNA, 19 nt, Artificial Sequence
  Description of Artificial Sequence: Synthetic oligonucleotide
ucccgagacguuuccuuug

SEQ ID NO: 3040377 - RNA, 19 nt, Artificial Sequence
  Description of Artificial Sequence: Synthetic oligonucleotide
agcuacugaauggaagcca

SEQ ID NO: 3040378 - RNA, 19 nt, Artificial Sequence
  Description of Artificial Sequence: Synthetic oligonucleotide
uuaugaccuggcuccacua

SEQ ID NO: 3040379 - RNA, 19 nt, Artificial Sequence
  Description of Artificial Sequence: Synthetic oligonucleotide
acuuaugaccuggcuccac

SEQ ID NO: 3040380 - RNA, 19 nt, Artificial Sequence
  Description of Artificial Sequence: Synthetic oligonucleotide
cacagccagacuacuaaca

SEQ ID NO: 3040381 - RNA, 19 nt, Artificial Sequence
  Description of Artificial Sequence: Synthetic oligonucleotide
ugaccuggcuccacuacuu

SEQ ID NO: 3040382 - RNA, 19 nt, Artificial Sequence
  Description of Artificial Sequence: Synthetic oligonucleotide
uggcuccacuacuugggug

SEQ ID NO: 3040383 - RNA, 19 nt, Artificial Sequence
  Description of Artificial Sequence: Synthetic oligonucleotide
ccuggcuccacuacuuggg

SEQ ID NO: 3040384 - RNA, 19 nt, Artificial Sequence
  Description of Artificial Sequence: Synthetic oligonucleotide
cuacuaacacacuucaauu

SEQ ID NO: 3040385 - RNA, 19 nt, Artificial Sequence
  Description of Artificial Sequence: Synthetic oligonucleotide
guggcuucauggcugggca

SEQ ID NO: 3040386 - RNA, 19 nt, Artificial Sequence
  Description of Artificial Sequence: Synthetic oligonucleotide
ggcacagcaggauggcucc

SEQ ID NO: 3040387 - RNA, 19 nt, Artificial Sequence
  Description of Artificial Sequence: Synthetic oligonucleotide
acagggaacaugauucuuu

SEQ ID NO: 3040388 - RNA, 19 nt, Artificial Sequence
  Description of Artificial Sequence: Synthetic oligonucleotide
aucauuuaacauagugaaa

SEQ ID NO: 3040389 - RNA, 19 nt, Artificial Sequence
  Description of Artificial Sequence: Synthetic oligonucleotide
aacuuaugaccuggcucca

SEQ ID NO: 3040390 - RNA, 19 nt, Artificial Sequence
  Description of Artificial Sequence: Synthetic oligonucleotide
agaagccgacagcagcacu

SEQ ID NO: 3040391 - RNA, 19 nt, Artificial Sequence
  Description of Artificial Sequence: Synthetic oligonucleotide
auacaaucccgagacguuu

SEQ ID NO: 3040392 - RNA, 19 nt, Artificial Sequence
  Description of Artificial Sequence: Synthetic oligonucleotide
gggaacaugauucuuuaau

SEQ ID NO: 3040393 - RNA, 19 nt, Artificial Sequence
  Description of Artificial Sequence: Synthetic oligonucleotide
gaccuggcuccacuacuug

SEQ ID NO: 3040394 - RNA, 19 nt, Artificial Sequence
  Description of Artificial Sequence: Synthetic oligonucleotide
gaccaggcacagaagcuac

SEQ ID NO: 3040395 - RNA, 19 nt, Artificial Sequence
  Description of Artificial Sequence: Synthetic oligonucleotide
uuguuucuguuacguucuc

SEQ ID NO: 3040396 - RNA, 19 nt, Artificial Sequence
  Description of Artificial Sequence: Synthetic oligonucleotide
gaagccgacagcagcacua

SEQ ID NO: 3040397 - RNA, 19 nt, Artificial Sequence
  Description of Artificial Sequence: Synthetic oligonucleotide
ccgacagcagcacuauucc

SEQ ID NO: 3040398 - RNA, 19 nt, Artificial Sequence
  Description of Artificial Sequence: Synthetic oligonucleotide
gcugggcacagcaggaugg

SEQ ID NO: 3040399 - RNA, 19 nt, Artificial Sequence
  Description of Artificial Sequence: Synthetic oligonucleotide
uccacuacuuggguggcuu

SEQ ID NO: 3040400 - RNA, 19 nt, Artificial Sequence
  Description of Artificial Sequence: Synthetic oligonucleotide
agaccaggcacagaagcua

SEQ ID NO: 3040401 - RNA, 19 nt, Artificial Sequence
  Description of Artificial Sequence: Synthetic oligonucleotide
cagccagacuacuaacaca

SEQ ID NO: 3040402 - RNA, 19 nt, Artificial Sequence
  Description of Artificial Sequence: Synthetic oligonucleotide
cuacuuggguggcuucaug

SEQ ID NO: 3040403 - RNA, 19 nt, Artificial Sequence
  Description of Artificial Sequence: Synthetic oligonucleotide
  modified_base (4)..(4): a, c, u, g, unknown or other
caanacauauuaagaucau

SEQ ID NO: 3040404 - RNA, 19 nt, Artificial Sequence
  Description of Artificial Sequence: Synthetic oligonucleotide
ggaaacucaaaaguauugu

SEQ ID NO: 3040405 - RNA, 19 nt, Artificial Sequence
  Description of Artificial Sequence: Synthetic oligonucleotide
guuacguucucaggaaacu

SEQ ID NO: 3040406 - RNA, 19 nt, Artificial Sequence
  Description of Artificial Sequence: Synthetic oligonucleotide
agggaacaugauucuuuaa

SEQ ID NO: 3040407 - RNA, 19 nt, Artificial Sequence
  Description of Artificial Sequence: Synthetic oligonucleotide
ucugaagaccaggcacaga

SEQ ID NO: 3040408 - RNA, 19 nt, Artificial Sequence
  Description of Artificial Sequence: Synthetic oligonucleotide
acguuuccuuugcuuaaaa

SEQ ID NO: 3040409 - RNA, 19 nt, Artificial Sequence
  Description of Artificial Sequence: Synthetic oligonucleotide
ccuuugcuuaaaauguaca

SEQ ID NO: 3040410 - RNA, 19 nt, Artificial Sequence
  Description of Artificial Sequence: Synthetic oligonucleotide
cagggaacaugauucuuua

SEQ ID NO: 3040411 - RNA, 19 nt, Artificial Sequence
  Description of Artificial Sequence: Synthetic oligonucleotide
aagccgacagcagcacuau

SEQ ID NO: 3040412 - RNA, 19 nt, Artificial Sequence
  Description of Artificial Sequence: Synthetic oligonucleotide
cuuaugaccuggcuccacu

SEQ ID NO: 3040413 - RNA, 19 nt, Artificial Sequence
  Description of Artificial Sequence: Synthetic oligonucleotide
guacacagggaacaugauu

SEQ ID NO: 3040414 - RNA, 19 nt, Artificial Sequence
  Description of Artificial Sequence: Synthetic oligonucleotide
gcacuauuccaaauuuuca

SEQ ID NO: 3040415 - RNA, 19 nt, Artificial Sequence
  Description of Artificial Sequence: Synthetic oligonucleotide
caggaaacucaaaaguauu

SEQ ID NO: 3040416 - RNA, 19 nt, Artificial Sequence
  Description of Artificial Sequence: Synthetic oligonucleotide
uggcuucauggcugggcac

SEQ ID NO: 3040417 - RNA, 19 nt, Artificial Sequence
  Description of Artificial Sequence: Synthetic oligonucleotide
acguucucaggaaacucaa

SEQ ID NO: 3040418 - RNA, 19 nt, Artificial Sequence
  Description of Artificial Sequence: Synthetic oligonucleotide
ggaagccauuucaaauagc

SEQ ID NO: 3040419 - RNA, 19 nt, Artificial Sequence
  Description of Artificial Sequence: Synthetic oligonucleotide
cuguuacguucucaggaaa

SEQ ID NO: 3040420 - RNA, 19 nt, Artificial Sequence
  Description of Artificial Sequence: Synthetic oligonucleotide
gacguuuccuuugcuuaaa

SEQ ID NO: 3040421 - RNA, 19 nt, Artificial Sequence
  Description of Artificial Sequence: Synthetic oligonucleotide
gccgacagcagcacuauuc

SEQ ID NO: 3040422 - RNA, 19 nt, Artificial Sequence
  Description of Artificial Sequence: Synthetic oligonucleotide
cuuggguggcuucauggcu

SEQ ID NO: 3040423 - RNA, 19 nt, Artificial Sequence
  Description of Artificial Sequence: Synthetic oligonucleotide
gacuacuaacacacuucaa

SEQ ID NO: 3040424 - RNA, 19 nt, Artificial Sequence
  Description of Artificial Sequence: Synthetic oligonucleotide
caggcacagaagcuacuga

SEQ ID NO: 3040425 - RNA, 19 nt, Artificial Sequence
  Description of Artificial Sequence: Synthetic oligonucleotide
cugggcacagcaggauggc

SEQ ID NO: 3040426 - RNA, 19 nt, Artificial Sequence
  Description of Artificial Sequence: Synthetic oligonucleotide
ggcugggcacagcaggaug

SEQ ID NO: 3040427 - RNA, 19 nt, Artificial Sequence
  Description of Artificial Sequence: Synthetic oligonucleotide
ccuccaucucucugaagac

SEQ ID NO: 3040428 - RNA, 19 nt, Artificial Sequence
  Description of Artificial Sequence: Synthetic oligonucleotide
acacuucaauuaccauuuu

SEQ ID NO: 3040429 - RNA, 19 nt, Artificial Sequence
  Description of Artificial Sequence: Synthetic oligonucleotide
auggcugggcacagcagga

SEQ ID NO: 3040430 - RNA, 19 nt, Artificial Sequence
  Description of Artificial Sequence: Synthetic oligonucleotide
cauacaaucccgagacguu

SEQ ID NO: 3040431 - RNA, 19 nt, Artificial Sequence
  Description of Artificial Sequence: Synthetic oligonucleotide
cccgagacguuuccuuugc

SEQ ID NO: 3040432 - RNA, 19 nt, Artificial Sequence
  Description of Artificial Sequence: Synthetic oligonucleotide
gcagcacuauuccaaauuu

SEQ ID NO: 3040433 - RNA, 19 nt, Artificial Sequence
  Description of Artificial Sequence: Synthetic oligonucleotide
cccauacaaucccgagacg

SEQ ID NO: 3040434 - RNA, 19 nt, Artificial Sequence
  Description of Artificial Sequence: Synthetic oligonucleotide
ggcuucauggcugggcaca

SEQ ID NO: 3040435 - RNA, 19 nt, Artificial Sequence
  Description of Artificial Sequence: Synthetic oligonucleotide
gggcacagcaggauggcuc

SEQ ID NO: 3040436 - RNA, 19 nt, Artificial Sequence
  Description of Artificial Sequence: Synthetic oligonucleotide
ccaaauuuucaaacaaguu

SEQ ID NO: 3040437 - RNA, 19 nt, Artificial Sequence
  Description of Artificial Sequence: Synthetic oligonucleotide
ccaucucucugaagaccag

SEQ ID NO: 3040438 - RNA, 19 nt, Artificial Sequence
  Description of Artificial Sequence: Synthetic oligonucleotide
ccauacaaucccgagacgu

SEQ ID NO: 3040439 - RNA, 19 nt, Artificial Sequence
  Description of Artificial Sequence: Synthetic oligonucleotide
uggcugggcacagcaggau

SEQ ID NO: 3040440 - RNA, 19 nt, Artificial Sequence
  Description of Artificial Sequence: Synthetic oligonucleotide
accaggcacagaagcuacu

SEQ ID NO: 3040441 - RNA, 19 nt, Artificial Sequence
  Description of Artificial Sequence: Synthetic oligonucleotide
cagcacuauuccaaauuuu

SEQ ID NO: 3040442 - RNA, 19 nt, Artificial Sequence
  Description of Artificial Sequence: Synthetic oligonucleotide
gcuacugaauggaagccau

SEQ ID NO: 3040443 - RNA, 19 nt, Artificial Sequence
  Description of Artificial Sequence: Synthetic oligonucleotide
ccagacuacuaacacacuu

SEQ ID NO: 3040444 - RNA, 19 nt, Artificial Sequence
  Description of Artificial Sequence: Synthetic oligonucleotide
agccgacagcagcacuauu

SEQ ID NO: 3040445 - RNA, 19 nt, Artificial Sequence
  Description of Artificial Sequence: Synthetic oligonucleotide
cuggcuccacuacuugggu

SEQ ID NO: 3040446 - RNA, 19 nt, Artificial Sequence
  Description of Artificial Sequence: Synthetic oligonucleotide
gcuccacuacuuggguggc

SEQ ID NO: 3040447 - RNA, 19 nt, Artificial Sequence
  Description of Artificial Sequence: Synthetic oligonucleotide
cuacugaauggaagccauu

SEQ ID NO: 3040448 - RNA, 19 nt, Artificial Sequence
  Description of Artificial Sequence: Synthetic oligonucleotide
ggcacagaagcuacugaau

SEQ ID NO: 3040449 - RNA, 19 nt, Artificial Sequence
  Description of Artificial Sequence: Synthetic oligonucleotide
ccacuacuuggguggcuuc

SEQ ID NO: 3040450 - RNA, 19 nt, Artificial Sequence
  Description of Artificial Sequence: Synthetic oligonucleotide
cagcagcacuauuccaaau

SEQ ID NO: 3040451 - RNA, 19 nt, Artificial Sequence
  Description of Artificial Sequence: Synthetic oligonucleotide
caaucccgagacguuuccu

SEQ ID NO: 3040452 - RNA, 19 nt, Artificial Sequence
  Description of Artificial Sequence: Synthetic oligonucleotide
ggguggcuucauggcuggg

SEQ ID NO: 3040453 - RNA, 19 nt, Artificial Sequence
  Description of Artificial Sequence: Synthetic oligonucleotide
gcacagcaggauggcuccc

SEQ ID NO: 3040454 - RNA, 19 nt, Artificial Sequence
  Description of Artificial Sequence: Synthetic oligonucleotide
cguucucaggaaacucaaa

SEQ ID NO: 3040455 - RNA, 19 nt, Artificial Sequence
  Description of Artificial Sequence: Synthetic oligonucleotide
cguuuccuuugcuuaaaau

SEQ ID NO: 3040456 - RNA, 19 nt, Artificial Sequence
  Description of Artificial Sequence: Synthetic oligonucleotide
ccccuccaucucucugaag

SEQ ID NO: 3040457 - RNA, 19 nt, Artificial Sequence
  Description of Artificial Sequence: Synthetic oligonucleotide
cgagacguuuccuuugcuu

SEQ ID NO: 3040458 - RNA, 19 nt, Artificial Sequence
  Description of Artificial Sequence: Synthetic oligonucleotide
cuccacuacuuggguggcu

SEQ ID NO: 3040459 - RNA, 19 nt, Artificial Sequence
  Description of Artificial Sequence: Synthetic oligonucleotide
gccagacuacuaacacacu

SEQ ID NO: 3040460 - RNA, 19 nt, Artificial Sequence
  Description of Artificial Sequence: Synthetic oligonucleotide
ccgagacguuuccuuugcu

SEQ ID NO: 3040461 - RNA, 19 nt, Artificial Sequence
  Description of Artificial Sequence: Synthetic oligonucleotide
  modified_base (1)..(1): a, c, u, g, unknown or other
nacauauuaagaucauuua

SEQ ID NO: 3040462 - RNA, 19 nt, Artificial Sequence
  Description of Artificial Sequence: Synthetic oligonucleotide
uuuauuaagccucauaacc

SEQ ID NO: 3040463 - RNA, 19 nt, Artificial Sequence
  Description of Artificial Sequence: Synthetic oligonucleotide
aaaucuacauugucgaagc

SEQ ID NO: 3040464 - RNA, 19 nt, Artificial Sequence
  Description of Artificial Sequence: Synthetic oligonucleotide
uucuaaaucuacauugucg

SEQ ID NO: 3040465 - RNA, 19 nt, Artificial Sequence
  Description of Artificial Sequence: Synthetic oligonucleotide
auaucuucuuuauuaagcc

SEQ ID NO: 3040466 - RNA, 19 nt, Artificial Sequence
  Description of Artificial Sequence: Synthetic oligonucleotide
aauuuggcggcgucgaucc

SEQ ID NO: 3040467 - RNA, 19 nt, Artificial Sequence
  Description of Artificial Sequence: Synthetic oligonucleotide
ucuuuauuaagccucauaa

SEQ ID NO: 3040468 - RNA, 19 nt, Artificial Sequence
  Description of Artificial Sequence: Synthetic oligonucleotide
ucuaaaucuacauugucga

SEQ ID NO: 3040469 - RNA, 19 nt, Artificial Sequence
  Description of Artificial Sequence: Synthetic oligonucleotide
uggauaauggccaaacaag

SEQ ID NO: 3040470 - RNA, 19 nt, Artificial Sequence
  Description of Artificial Sequence: Synthetic oligonucleotide
cauaucuucuuuauuaagc

SEQ ID NO: 3040471 - RNA, 19 nt, Artificial Sequence
  Description of Artificial Sequence: Synthetic oligonucleotide
acugcacacaaccagauag

SEQ ID NO: 3040472 - RNA, 19 nt, Artificial Sequence
  Description of Artificial Sequence: Synthetic oligonucleotide
aauucgaagaaacgcuccg

SEQ ID NO: 3040473 - RNA, 19 nt, Artificial Sequence
  Description of Artificial Sequence: Synthetic oligonucleotide
acaggcacugcacacaacc

SEQ ID NO: 3040474 - RNA, 19 nt, Artificial Sequence
  Description of Artificial Sequence: Synthetic oligonucleotide
aagcaguguaauuuggcgg

SEQ ID NO: 3040475 - RNA, 19 nt, Artificial Sequence
  Description of Artificial Sequence: Synthetic oligonucleotide
agcaguguaauuuggcggc

SEQ ID NO: 3040476 - RNA, 19 nt, Artificial Sequence
  Description of Artificial Sequence: Synthetic oligonucleotide
uuauuaagccucauaaccu

SEQ ID NO: 3040477 - RNA, 19 nt, Artificial Sequence
  Description of Artificial Sequence: Synthetic oligonucleotide
gaagcaguguaauuuggcg

SEQ ID NO: 3040478 - RNA, 19 nt, Artificial Sequence
  Description of Artificial Sequence: Synthetic oligonucleotide
uaaaucuacauugucgaag

SEQ ID NO: 3040479 - RNA, 19 nt, Artificial Sequence
  Description of Artificial Sequence: Synthetic oligonucleotide
ucuacauugucgaagcagu

SEQ ID NO: 3040480 - RNA, 19 nt, Artificial Sequence
  Description of Artificial Sequence: Synthetic oligonucleotide
aagaccuguggcuugacga

SEQ ID NO: 3040481 - RNA, 19 nt, Artificial Sequence
  Description of Artificial Sequence: Synthetic oligonucleotide
auaaccucccugcuuuugc

SEQ ID NO: 3040482 - RNA, 19 nt, Artificial Sequence
  Description of Artificial Sequence: Synthetic oligonucleotide
agccucauaaccucccugc

SEQ ID NO: 3040483 - RNA, 19 nt, Artificial Sequence
  Description of Artificial Sequence: Synthetic oligonucleotide
caaacaagugcauaucuuc

SEQ ID NO: 3040484 - RNA, 19 nt, Artificial Sequence
  Description of Artificial Sequence: Synthetic oligonucleotide
ucuucuaaaucuacauugu

SEQ ID NO: 3040485 - RNA, 19 nt, Artificial Sequence
  Description of Artificial Sequence: Synthetic oligonucleotide
uaauggccaaacaagugca

SEQ ID NO: 3040486 - RNA, 19 nt, Artificial Sequence
  Description of Artificial Sequence: Synthetic oligonucleotide
aaccagauagaagucauca

SEQ ID NO: 3040487 - RNA, 19 nt, Artificial Sequence
  Description of Artificial Sequence: Synthetic oligonucleotide
ugcagugucgccauugcug

SEQ ID NO: 3040488 - RNA, 19 nt, Artificial Sequence
  Description of Artificial Sequence: Synthetic oligonucleotide
aucuucuuuauuaagccuc

SEQ ID NO: 3040489 - RNA, 19 nt, Artificial Sequence
  Description of Artificial Sequence: Synthetic oligonucleotide
cuuuauuaagccucauaac

SEQ ID NO: 3040490 - RNA, 19 nt, Artificial Sequence
  Description of Artificial Sequence: Synthetic oligonucleotide
ugcuguuccuucuuguugc

SEQ ID NO: 3040491 - RNA, 19 nt, Artificial Sequence
  Description of Artificial Sequence: Synthetic oligonucleotide
uauuaagccucauaaccuc

SEQ ID NO: 3040492 - RNA, 19 nt, Artificial Sequence
  Description of Artificial Sequence: Synthetic oligonucleotide
ucuucuuuauuaagccuca

SEQ ID NO: 3040493 - RNA, 19 nt, Artificial Sequence
  Description of Artificial Sequence: Synthetic oligonucleotide
uguuccuucggcagcagca

SEQ ID NO: 3040494 - RNA, 19 nt, Artificial Sequence
  Description of Artificial Sequence: Synthetic oligonucleotide
ucaugugcuggauaauggc

SEQ ID NO: 3040495 - RNA, 19 nt, Artificial Sequence
  Description of Artificial Sequence: Synthetic oligonucleotide
caugugcuggauaauggcc

SEQ ID NO: 3040496 - RNA, 19 nt, Artificial Sequence
  Description of Artificial Sequence: Synthetic oligonucleotide
uuugccacccucuuuucca

SEQ ID NO: 3040497 - RNA, 19 nt, Artificial Sequence
  Description of Artificial Sequence: Synthetic oligonucleotide
ucgaagcaguguaauuugg

SEQ ID NO: 3040498 - RNA, 19 nt, Artificial Sequence
  Description of Artificial Sequence: Synthetic oligonucleotide
uuaagccucauaaccuccc

SEQ ID NO: 3040499 - RNA, 19 nt, Artificial Sequence
  Description of Artificial Sequence: Synthetic oligonucleotide
gauaauggccaaacaagug

SEQ ID NO: 3040500 - RNA, 19 nt, Artificial Sequence
  Description of Artificial Sequence: Synthetic oligonucleotide
ucgaagaaacgcuccgacg

SEQ ID NO: 3040501 - RNA, 19 nt, Artificial Sequence
  Description of Artificial Sequence: Synthetic oligonucleotide
uugacgaccugguuacagg

SEQ ID NO: 3040502 - RNA, 19 nt, Artificial Sequence
  Description of Artificial Sequence: Synthetic oligonucleotide
auuaagccucauaaccucc

SEQ ID NO: 3040503 - RNA, 19 nt, Artificial Sequence
  Description of Artificial Sequence: Synthetic oligonucleotide
aggguuugcccagaaacgc

SEQ ID NO: 3040504 - RNA, 19 nt, Artificial Sequence
  Description of Artificial Sequence: Synthetic oligonucleotide
uucgaagaaacgcuccgac

SEQ ID NO: 3040505 - RNA, 19 nt, Artificial Sequence
  Description of Artificial Sequence: Synthetic oligonucleotide
uaucuucuuuauuaagccu

SEQ ID NO: 3040506 - RNA, 19 nt, Artificial Sequence
  Description of Artificial Sequence: Synthetic oligonucleotide
acgaccugguuacaggcac

SEQ ID NO: 3040507 - RNA, 19 nt, Artificial Sequence
  Description of Artificial Sequence: Synthetic oligonucleotide
ugacuggaagaccuguggc

SEQ ID NO: 3040508 - RNA, 19 nt, Artificial Sequence
  Description of Artificial Sequence: Synthetic oligonucleotide
aaacaagugcauaucuucu

SEQ ID NO: 3040509 - RNA, 19 nt, Artificial Sequence
  Description of Artificial Sequence: Synthetic oligonucleotide
aacgccuccggacugggca

SEQ ID NO: 3040510 - RNA, 19 nt, Artificial Sequence
  Description of Artificial Sequence: Synthetic oligonucleotide
agacacgggaauucgaaga

SEQ ID NO: 3040511 - RNA, 19 nt, Artificial Sequence
  Description of Artificial Sequence: Synthetic oligonucleotide
aucuacauugucgaagcag

SEQ ID NO: 3040512 - RNA, 19 nt, Artificial Sequence
  Description of Artificial Sequence: Synthetic oligonucleotide
agaccuguggcuugacgac

SEQ ID NO: 3040513 - RNA, 19 nt, Artificial Sequence
  Description of Artificial Sequence: Synthetic oligonucleotide
ugcauaucuucuuuauuaa

SEQ ID NO: 3040514 - RNA, 19 nt, Artificial Sequence
  Description of Artificial Sequence: Synthetic oligonucleotide
aagugcauaucuucuuuau

SEQ ID NO: 3040515 - RNA, 19 nt, Artificial Sequence
  Description of Artificial Sequence: Synthetic oligonucleotide
gugacuggaagaccugugg

SEQ ID NO: 3040516 - RNA, 19 nt, Artificial Sequence
  Description of Artificial Sequence: Synthetic oligonucleotide
aaacgcuccgacgucaucu

SEQ ID NO: 3040517 - RNA, 19 nt, Artificial Sequence
  Description of Artificial Sequence: Synthetic oligonucleotide
uugcuguuccuucuuguug

SEQ ID NO: 3040518 - RNA, 19 nt, Artificial Sequence
  Description of Artificial Sequence: Synthetic oligonucleotide
uguaauuuggcggcgucga

SEQ ID NO: 3040519 - RNA, 19 nt, Artificial Sequence
  Description of Artificial Sequence: Synthetic oligonucleotide
caggguuugcccagaaacg

SEQ ID NO: 3040520 - RNA, 19 nt, Artificial Sequence
  Description of Artificial Sequence: Synthetic oligonucleotide
agauagaagucaucaugug

SEQ ID NO: 3040521 - RNA, 19 nt, Artificial Sequence
  Description of Artificial Sequence: Synthetic oligonucleotide
gaauucgaagaaacgcucc

SEQ ID NO: 3040522 - RNA, 19 nt, Artificial Sequence
  Description of Artificial Sequence: Synthetic oligonucleotide
cacgggaauucgaagaaac

SEQ ID NO: 3040523 - RNA, 19 nt, Artificial Sequence
  Description of Artificial Sequence: Synthetic oligonucleotide
aacaagugcauaucuucuu

SEQ ID NO: 3040524 - RNA, 19 nt, Artificial Sequence
  Description of Artificial Sequence: Synthetic oligonucleotide
aguguaauuuggcggcguc

SEQ ID NO: 3040525 - RNA, 19 nt, Artificial Sequence
  Description of Artificial Sequence: Synthetic oligonucleotide
gaagucaucaugugcugga

SEQ ID NO: 3040526 - RNA, 19 nt, Artificial Sequence
  Description of Artificial Sequence: Synthetic oligonucleotide
ugacgaccugguuacaggc

SEQ ID NO: 3040527 - RNA, 19 nt, Artificial Sequence
  Description of Artificial Sequence: Synthetic oligonucleotide
uuuuccagccucuucuaaa

SEQ ID NO: 3040528 - RNA, 19 nt, Artificial Sequence
  Description of Artificial Sequence: Synthetic oligonucleotide
uucuuuauuaagccucaua

SEQ ID NO: 3040529 - RNA, 19 nt, Artificial Sequence
  Description of Artificial Sequence: Synthetic oligonucleotide
uuuucccuguuccuucggc

SEQ ID NO: 3040530 - RNA, 19 nt, Artificial Sequence
  Description of Artificial Sequence: Synthetic oligonucleotide
gugcauaucuucuuuauua

SEQ ID NO: 3040531 - RNA, 19 nt, Artificial Sequence
  Description of Artificial Sequence: Synthetic oligonucleotide
ugucgaagcaguguaauuu

SEQ ID NO: 3040532 - RNA, 19 nt, Artificial Sequence
  Description of Artificial Sequence: Synthetic oligonucleotide
gucgaagcaguguaauuug

SEQ ID NO: 3040533 - RNA, 19 nt, Artificial Sequence
  Description of Artificial Sequence: Synthetic oligonucleotide
gaagaccuguggcuugacg

SEQ ID NO: 3040534 - RNA, 19 nt, Artificial Sequence
  Description of Artificial Sequence: Synthetic oligonucleotide
ugugacuggaagaccugug

SEQ ID NO: 3040535 - RNA, 19 nt, Artificial Sequence
  Description of Artificial Sequence: Synthetic oligonucleotide
aucaugugcuggauaaugg

SEQ ID NO: 3040536 - RNA, 19 nt, Artificial Sequence
  Description of Artificial Sequence: Synthetic oligonucleotide
aggaggaccaggguuugcc

SEQ ID NO: 3040537 - RNA, 19 nt, Artificial Sequence
  Description of Artificial Sequence: Synthetic oligonucleotide
gagacacgggaauucgaag

SEQ ID NO: 3040538 - RNA, 19 nt, Artificial Sequence
  Description of Artificial Sequence: Synthetic oligonucleotide
uucucccacagugugacug

SEQ ID NO: 3040539 - RNA, 19 nt, Artificial Sequence
  Description of Artificial Sequence: Synthetic oligonucleotide
uucccuguuccuucggcag

SEQ ID NO: 3040540 - RNA, 19 nt, Artificial Sequence
  Description of Artificial Sequence: Synthetic oligonucleotide
uguuccuucuuguugcuuu

SEQ ID NO: 3040541 - RNA, 19 nt, Artificial Sequence
  Description of Artificial Sequence: Synthetic oligonucleotide
ucucccacagugugacugg

SEQ ID NO: 3040542 - RNA, 19 nt, Artificial Sequence
  Description of Artificial Sequence: Synthetic oligonucleotide
acauugucgaagcagugua

SEQ ID NO: 3040543 - RNA, 19 nt, Artificial Sequence
  Description of Artificial Sequence: Synthetic oligonucleotide
cuucuaaaucuacauuguc

SEQ ID NO: 3040544 - RNA, 19 nt, Artificial Sequence
  Description of Artificial Sequence: Synthetic oligonucleotide
gucaucaugugcuggauaa

SEQ ID NO: 3040545 - RNA, 19 nt, Artificial Sequence
  Description of Artificial Sequence: Synthetic oligonucleotide
uuuccagccucuucuaaau

SEQ ID NO: 3040546 - RNA, 19 nt, Artificial Sequence
  Description of Artificial Sequence: Synthetic oligonucleotide
uccuucggcagcagcagcc

SEQ ID NO: 3040547 - RNA, 19 nt, Artificial Sequence
  Description of Artificial Sequence: Synthetic oligonucleotide
uguggcuugacgaccuggu

SEQ ID NO: 3040548 - RNA, 19 nt, Artificial Sequence
  Description of Artificial Sequence: Synthetic oligonucleotide
aagccucauaaccucccug

SEQ ID NO: 3040549 - RNA, 19 nt, Artificial Sequence
  Description of Artificial Sequence: Synthetic oligonucleotide
cuggauaauggccaaacaa

SEQ ID NO: 3040550 - RNA, 19 nt, Artificial Sequence
  Description of Artificial Sequence: Synthetic oligonucleotide
aggcacugcacacaaccag

SEQ ID NO: 3040551 - RNA, 19 nt, Artificial Sequence
  Description of Artificial Sequence: Synthetic oligonucleotide
aaucuacauugucgaagca

SEQ ID NO: 3040552 - RNA, 19 nt, Artificial Sequence
  Description of Artificial Sequence: Synthetic oligonucleotide
uacauugucgaagcagugu

SEQ ID NO: 3040553 - RNA, 19 nt, Artificial Sequence
  Description of Artificial Sequence: Synthetic oligonucleotide
cacagugugacuggaagac

SEQ ID NO: 3040554 - RNA, 19 nt, Artificial Sequence
  Description of Artificial Sequence: Synthetic oligonucleotide
agugucgccauugcuguuc

SEQ ID NO: 3040555 - RNA, 19 nt, Artificial Sequence
  Description of Artificial Sequence: Synthetic oligonucleotide
ugguuacaggcacugcaca

SEQ ID NO: 3040556 - RNA, 19 nt, Artificial Sequence
  Description of Artificial Sequence: Synthetic oligonucleotide
uuucccuguuccuucggca

SEQ ID NO: 3040557 - RNA, 19 nt, Artificial Sequence
  Description of Artificial Sequence: Synthetic oligonucleotide
ccagauagaagucaucaug

SEQ ID NO: 3040558 - RNA, 19 nt, Artificial Sequence
  Description of Artificial Sequence: Synthetic oligonucleotide
uggccaaacaagugcauau

SEQ ID NO: 3040559 - RNA, 19 nt, Artificial Sequence
  Description of Artificial Sequence: Synthetic oligonucleotide
caucaugugcuggauaaug

SEQ ID NO: 3040560 - RNA, 19 nt, Artificial Sequence
  Description of Artificial Sequence: Synthetic oligonucleotide
uggcuugacgaccugguua

SEQ ID NO: 3040561 - RNA, 19 nt, Artificial Sequence
  Description of Artificial Sequence: Synthetic oligonucleotide
cugguuacaggcacugcac

SEQ ID NO: 3040562 - RNA, 19 nt, Artificial Sequence
  Description of Artificial Sequence: Synthetic oligonucleotide
aagaaacgcuccgacguca

SEQ ID NO: 3040563 - RNA, 19 nt, Artificial Sequence
  Description of Artificial Sequence: Synthetic oligonucleotide
acaagugcauaucuucuuu

SEQ ID NO: 3040564 - RNA, 19 nt, Artificial Sequence
  Description of Artificial Sequence: Synthetic oligonucleotide
uccaggaggaccaggguuu

SEQ ID NO: 3040565 - RNA, 19 nt, Artificial Sequence
  Description of Artificial Sequence: Synthetic oligonucleotide
uaaccucccugcuuuugcc

SEQ ID NO: 3040566 - RNA, 19 nt, Artificial Sequence
  Description of Artificial Sequence: Synthetic oligonucleotide
cagauagaagucaucaugu

SEQ ID NO: 3040567 - RNA, 19 nt, Artificial Sequence
  Description of Artificial Sequence: Synthetic oligonucleotide
ugcuggauaauggccaaac

SEQ ID NO: 3040568 - RNA, 19 nt, Artificial Sequence
  Description of Artificial Sequence: Synthetic oligonucleotide
ugcccagaaacgccuccgg

SEQ ID NO: 3040569 - RNA, 19 nt, Artificial Sequence
  Description of Artificial Sequence: Synthetic oligonucleotide
gcauaucuucuuuauuaag

SEQ ID NO: 3040570 - RNA, 19 nt, Artificial Sequence
  Description of Artificial Sequence: Synthetic oligonucleotide
uuggcggcgucgauccagg

SEQ ID NO: 3040571 - RNA, 19 nt, Artificial Sequence
  Description of Artificial Sequence: Synthetic oligonucleotide
gcggcgucgauccaggagg

SEQ ID NO: 3040572 - RNA, 19 nt, Artificial Sequence
  Description of Artificial Sequence: Synthetic oligonucleotide
gaagaaacgcuccgacguc

SEQ ID NO: 3040573 - RNA, 19 nt, Artificial Sequence
  Description of Artificial Sequence: Synthetic oligonucleotide
cuugacgaccugguuacag

SEQ ID NO: 3040574 - RNA, 19 nt, Artificial Sequence
  Description of Artificial Sequence: Synthetic oligonucleotide
aaccucccugcuuuugcca

SEQ ID NO: 3040575 - RNA, 19 nt, Artificial Sequence
  Description of Artificial Sequence: Synthetic oligonucleotide
uaauuuggcggcgucgauc

SEQ ID NO: 3040576 - RNA, 19 nt, Artificial Sequence
  Description of Artificial Sequence: Synthetic oligonucleotide
cuacauugucgaagcagug

SEQ ID NO: 3040577 - RNA, 19 nt, Artificial Sequence
  Description of Artificial Sequence: Synthetic oligonucleotide
gacacgggaauucgaagaa

SEQ ID NO: 3040578 - RNA, 19 nt, Artificial Sequence
  Description of Artificial Sequence: Synthetic oligonucleotide
guguaauuuggcggcgucg

SEQ ID NO: 3040579 - RNA, 19 nt, Artificial Sequence
  Description of Artificial Sequence: Synthetic oligonucleotide
agugcauaucuucuuuauu

SEQ ID NO: 3040580 - RNA, 19 nt, Artificial Sequence
  Description of Artificial Sequence: Synthetic oligonucleotide
aggaccaggguuugcccag

SEQ ID NO: 3040581 - RNA, 19 nt, Artificial Sequence
  Description of Artificial Sequence: Synthetic oligonucleotide
uuugcggugcagugucgcc

SEQ ID NO: 3040582 - RNA, 19 nt, Artificial Sequence
  Description of Artificial Sequence: Synthetic oligonucleotide
acgggaauucgaagaaacg

SEQ ID NO: 3040583 - RNA, 19 nt, Artificial Sequence
  Description of Artificial Sequence: Synthetic oligonucleotide
auugcuguuccuucuuguu

SEQ ID NO: 3040584 - RNA, 19 nt, Artificial Sequence
  Description of Artificial Sequence: Synthetic oligonucleotide
cacuuugcggugcaguguc

SEQ ID NO: 3040585 - RNA, 19 nt, Artificial Sequence
  Description of Artificial Sequence: Synthetic oligonucleotide
auugucgaagcaguguaau

SEQ ID NO: 3040586 - RNA, 19 nt, Artificial Sequence
  Description of Artificial Sequence: Synthetic oligonucleotide
augugcuggauaauggcca

SEQ ID NO: 3040587 - RNA, 19 nt, Artificial Sequence
  Description of Artificial Sequence: Synthetic oligonucleotide
ugcacacaaccagauagaa

SEQ ID NO: 3040588 - RNA, 19 nt, Artificial Sequence
  Description of Artificial Sequence: Synthetic oligonucleotide
ugugcuggauaauggccaa

SEQ ID NO: 3040589 - RNA, 19 nt, Artificial Sequence
  Description of Artificial Sequence: Synthetic oligonucleotide
uugcccagaaacgccuccg

SEQ ID NO: 3040590 - RNA, 19 nt, Artificial Sequence
  Description of Artificial Sequence: Synthetic oligonucleotide
accagauagaagucaucau

SEQ ID NO: 3040591 - RNA, 19 nt, Artificial Sequence
  Description of Artificial Sequence: Synthetic oligonucleotide
agaaacgccuccggacugg

SEQ ID NO: 3040592 - RNA, 19 nt, Artificial Sequence
  Description of Artificial Sequence: Synthetic oligonucleotide
ggcuugacgaccugguuac

SEQ ID NO: 3040593 - RNA, 19 nt, Artificial Sequence
  Description of Artificial Sequence: Synthetic oligonucleotide
auccaggaggaccaggguu

SEQ ID NO: 3040594 - RNA, 19 nt, Artificial Sequence
  Description of Artificial Sequence: Synthetic oligonucleotide
ucccuguuccuucggcagc

SEQ ID NO: 3040595 - RNA, 19 nt, Artificial Sequence
  Description of Artificial Sequence: Synthetic oligonucleotide
acugggcacuuugcggugc

SEQ ID NO: 3040596 - RNA, 19 nt, Artificial Sequence
  Description of Artificial Sequence: Synthetic oligonucleotide
ucuuuuccagccucuucua

SEQ ID NO: 3040597 - RNA, 19 nt, Artificial Sequence
  Description of Artificial Sequence: Synthetic oligonucleotide
uccggacugggcacuuugc

SEQ ID NO: 3040598 - RNA, 19 nt, Artificial Sequence
  Description of Artificial Sequence: Synthetic oligonucleotide
uuccuucggcagcagcagc

SEQ ID NO: 3040599 - RNA, 19 nt, Artificial Sequence
  Description of Artificial Sequence: Synthetic oligonucleotide
cuuugcggugcagugucgc

SEQ ID NO: 3040600 - RNA, 19 nt, Artificial Sequence
  Description of Artificial Sequence: Synthetic oligonucleotide
auucgaagaaacgcuccga

SEQ ID NO: 3040601 - RNA, 19 nt, Artificial Sequence
  Description of Artificial Sequence: Synthetic oligonucleotide
gguuacaggcacugcacac

SEQ ID NO: 3040602 - RNA, 19 nt, Artificial Sequence
  Description of Artificial Sequence: Synthetic oligonucleotide
agagacacgggaauucgaa

SEQ ID NO: 3040603 - RNA, 19 nt, Artificial Sequence
  Description of Artificial Sequence: Synthetic oligonucleotide
cuaaaucuacauugucgaa

SEQ ID NO: 3040604 - RNA, 19 nt, Artificial Sequence
  Description of Artificial Sequence: Synthetic oligonucleotide
ucgauccaggaggaccagg

SEQ ID NO: 3040605 - RNA, 19 nt, Artificial Sequence
  Description of Artificial Sequence: Synthetic oligonucleotide
gaccugguuacaggcacug

SEQ ID NO: 3040606 - RNA, 19 nt, Artificial Sequence
  Description of Artificial Sequence: Synthetic oligonucleotide
guuccuucggcagcagcag

SEQ ID NO: 3040607 - RNA, 19 nt, Artificial Sequence
  Description of Artificial Sequence: Synthetic oligonucleotide
gaaacgccuccggacuggg

SEQ ID NO: 3040608 - RNA, 19 nt, Artificial Sequence
  Description of Artificial Sequence: Synthetic oligonucleotide
uuccagccucuucuaaauc

SEQ ID NO: 3040609 - RNA, 19 nt, Artificial Sequence
  Description of Artificial Sequence: Synthetic oligonucleotide
uugucgaagcaguguaauu

SEQ ID NO: 3040610 - RNA, 19 nt, Artificial Sequence
  Description of Artificial Sequence: Synthetic oligonucleotide
ucgccauugcuguuccuuc

SEQ ID NO: 3040611 - RNA, 19 nt, Artificial Sequence
  Description of Artificial Sequence: Synthetic oligonucleotide
caaccagauagaagucauc

SEQ ID NO: 3040612 - RNA, 19 nt, Artificial Sequence
  Description of Artificial Sequence: Synthetic oligonucleotide
cagcagccgagagacacgg

SEQ ID NO: 3040613 - RNA, 19 nt, Artificial Sequence
  Description of Artificial Sequence: Synthetic oligonucleotide
cuggaagaccuguggcuug

SEQ ID NO: 3040614 - RNA, 19 nt, Artificial Sequence
  Description of Artificial Sequence: Synthetic oligonucleotide
ggaauucgaagaaacgcuc

SEQ ID NO: 3040615 - RNA, 19 nt, Artificial Sequence
  Description of Artificial Sequence: Synthetic oligonucleotide
aacgcuccgacgucaucuu

SEQ ID NO: 3040616 - RNA, 19 nt, Artificial Sequence
  Description of Artificial Sequence: Synthetic oligonucleotide
acuggaagaccuguggcuu

SEQ ID NO: 3040617 - RNA, 19 nt, Artificial Sequence
  Description of Artificial Sequence: Synthetic oligonucleotide
ggcacuuugcggugcagug

SEQ ID NO: 3040618 - RNA, 19 nt, Artificial Sequence
  Description of Artificial Sequence: Synthetic oligonucleotide
aauggccaaacaagugcau

SEQ ID NO: 3040619 - RNA, 19 nt, Artificial Sequence
  Description of Artificial Sequence: Synthetic oligonucleotide
agucaucaugugcuggaua

SEQ ID NO: 3040620 - RNA, 19 nt, Artificial Sequence
  Description of Artificial Sequence: Synthetic oligonucleotide
aagucaucaugugcuggau

SEQ ID NO: 3040621 - RNA, 19 nt, Artificial Sequence
  Description of Artificial Sequence: Synthetic oligonucleotide
aaacgccuccggacugggc

SEQ ID NO: 3040622 - RNA, 19 nt, Artificial Sequence
  Description of Artificial Sequence: Synthetic oligonucleotide
acgccuccggacugggcac

SEQ ID NO: 3040623 - RNA, 19 nt, Artificial Sequence
  Description of Artificial Sequence: Synthetic oligonucleotide
gaccuguggcuugacgacc

SEQ ID NO: 3040624 - RNA, 19 nt, Artificial Sequence
  Description of Artificial Sequence: Synthetic oligonucleotide
gacugggcacuuugcggug

SEQ ID NO: 3040625 - RNA, 19 nt, Artificial Sequence
  Description of Artificial Sequence: Synthetic oligonucleotide
uugcggugcagugucgcca

SEQ ID NO: 3040626 - RNA, 19 nt, Artificial Sequence
  Description of Artificial Sequence: Synthetic oligonucleotide
cugcacacaaccagauaga

SEQ ID NO: 3040627 - RNA, 19 nt, Artificial Sequence
  Description of Artificial Sequence: Synthetic oligonucleotide
cccacagugugacuggaag

SEQ ID NO: 3040628 - RNA, 19 nt, Artificial Sequence
  Description of Artificial Sequence: Synthetic oligonucleotide
cagaaacgccuccggacug

SEQ ID NO: 3040629 - RNA, 19 nt, Artificial Sequence
  Description of Artificial Sequence: Synthetic oligonucleotide
cauaaccucccugcuuuug

SEQ ID NO: 3040630 - RNA, 19 nt, Artificial Sequence
  Description of Artificial Sequence: Synthetic oligonucleotide
cgggaauucgaagaaacgc

SEQ ID NO: 3040631 - RNA, 19 nt, Artificial Sequence
  Description of Artificial Sequence: Synthetic oligonucleotide
cuuuugccacccucuuuuc

SEQ ID NO: 3040632 - RNA, 19 nt, Artificial Sequence
  Description of Artificial Sequence: Synthetic oligonucleotide
cagugugacuggaagaccu

SEQ ID NO: 3040633 - RNA, 19 nt, Artificial Sequence
  Description of Artificial Sequence: Synthetic oligonucleotide
accugguuacaggcacugc

SEQ ID NO: 3040634 - RNA, 19 nt, Artificial Sequence
  Description of Artificial Sequence: Synthetic oligonucleotide
cuguggcuugacgaccugg

SEQ ID NO: 3040635 - RNA, 19 nt, Artificial Sequence
  Description of Artificial Sequence: Synthetic oligonucleotide
caagugcauaucuucuuua

SEQ ID NO: 3040636 - RNA, 19 nt, Artificial Sequence
  Description of Artificial Sequence: Synthetic oligonucleotide
cucauaaccucccugcuuu

SEQ ID NO: 3040637 - RNA, 19 nt, Artificial Sequence
  Description of Artificial Sequence: Synthetic oligonucleotide
cgaagcaguguaauuuggc

SEQ ID NO: 3040638 - RNA, 19 nt, Artificial Sequence
  Description of Artificial Sequence: Synthetic oligonucleotide
cuguuccuucggcagcagc

SEQ ID NO: 3040639 - RNA, 19 nt, Artificial Sequence
  Description of Artificial Sequence: Synthetic oligonucleotide
ggugcagugucgccauugc

SEQ ID NO: 3040640 - RNA, 19 nt, Artificial Sequence
  Description of Artificial Sequence: Synthetic oligonucleotide
gugucgccauugcuguucc

SEQ ID NO: 3040641 - RNA, 19 nt, Artificial Sequence
  Description of Artificial Sequence: Synthetic oligonucleotide
ggauaauggccaaacaagu

SEQ ID NO: 3040642 - RNA, 19 nt, Artificial Sequence
  Description of Artificial Sequence: Synthetic oligonucleotide
agugugacuggaagaccug

SEQ ID NO: 3040643 - RNA, 19 nt, Artificial Sequence
  Description of Artificial Sequence: Synthetic oligonucleotide
cccagaaacgccuccggac

SEQ ID NO: 3040644 - RNA, 19 nt, Artificial Sequence
  Description of Artificial Sequence: Synthetic oligonucleotide
cuccggacugggcacuuug

SEQ ID NO: 3040645 - RNA, 19 nt, Artificial Sequence
  Description of Artificial Sequence: Synthetic oligonucleotide
ugcggugcagugucgccau

SEQ ID NO: 3040646 - RNA, 19 nt, Artificial Sequence
  Description of Artificial Sequence: Synthetic oligonucleotide
cauugucgaagcaguguaa

SEQ ID NO: 3040647 - RNA, 19 nt, Artificial Sequence
  Description of Artificial Sequence: Synthetic oligonucleotide
gcagccgagagacacggga

SEQ ID NO: 3040648 - RNA, 19 nt, Artificial Sequence
  Description of Artificial Sequence: Synthetic oligonucleotide
ucaucaugugcuggauaau

SEQ ID NO: 3040649 - RNA, 19 nt, Artificial Sequence
  Description of Artificial Sequence: Synthetic oligonucleotide
uacaggcacugcacacaac

SEQ ID NO: 3040650 - RNA, 19 nt, Artificial Sequence
  Description of Artificial Sequence: Synthetic oligonucleotide
gagagacacgggaauucga

SEQ ID NO: 3040651 - RNA, 19 nt, Artificial Sequence
  Description of Artificial Sequence: Synthetic oligonucleotide
gaaacgcuccgacgucauc

SEQ ID NO: 3040652 - RNA, 19 nt, Artificial Sequence
  Description of Artificial Sequence: Synthetic oligonucleotide
ggaggaccaggguuugccc

SEQ ID NO: 3040653 - RNA, 19 nt, Artificial Sequence
  Description of Artificial Sequence: Synthetic oligonucleotide
cucccugcuuuugccaccc

SEQ ID NO: 3040654 - RNA, 19 nt, Artificial Sequence
  Description of Artificial Sequence: Synthetic oligonucleotide
gccacccucuuuuccagcc

SEQ ID NO: 3040655 - RNA, 19 nt, Artificial Sequence
  Description of Artificial Sequence: Synthetic oligonucleotide
ucccacagugugacuggaa

SEQ ID NO: 3040656 - RNA, 19 nt, Artificial Sequence
  Description of Artificial Sequence: Synthetic oligonucleotide
acgcuccgacgucaucuuc

SEQ ID NO: 3040657 - RNA, 19 nt, Artificial Sequence
  Description of Artificial Sequence: Synthetic oligonucleotide
gggaauucgaagaaacgcu

SEQ ID NO: 3040658 - RNA, 19 nt, Artificial Sequence
  Description of Artificial Sequence: Synthetic oligonucleotide
auggccaaacaagugcaua

SEQ ID NO: 3040659 - RNA, 19 nt, Artificial Sequence
  Description of Artificial Sequence: Synthetic oligonucleotide
gcacacaaccagauagaag

SEQ ID NO: 3040660 - RNA, 19 nt, Artificial Sequence
  Description of Artificial Sequence: Synthetic oligonucleotide
gacgaccugguuacaggca

SEQ ID NO: 3040661 - RNA, 19 nt, Artificial Sequence
  Description of Artificial Sequence: Synthetic oligonucleotide
ucauaaccucccugcuuuu

SEQ ID NO: 3040662 - RNA, 19 nt, Artificial Sequence
  Description of Artificial Sequence: Synthetic oligonucleotide
cuuuuccagccucuucuaa

SEQ ID NO: 3040663 - RNA, 19 nt, Artificial Sequence
  Description of Artificial Sequence: Synthetic oligonucleotide
ccugguuacaggcacugca

SEQ ID NO: 3040664 - RNA, 19 nt, Artificial Sequence
  Description of Artificial Sequence: Synthetic oligonucleotide
ucggcagcagcagccgaga

SEQ ID NO: 3040665 - RNA, 19 nt, Artificial Sequence
  Description of Artificial Sequence: Synthetic oligonucleotide
acuuugcggugcagugucg

SEQ ID NO: 3040666 - RNA, 19 nt, Artificial Sequence
  Description of Artificial Sequence: Synthetic oligonucleotide
gcgucgauccaggaggacc

SEQ ID NO: 3040667 - RNA, 19 nt, Artificial Sequence
  Description of Artificial Sequence: Synthetic oligonucleotide
ggcggcgucgauccaggag

SEQ ID NO: 3040668 - RNA, 19 nt, Artificial Sequence
  Description of Artificial Sequence: Synthetic oligonucleotide
gcaguguaauuuggcggcg

SEQ ID NO: 3040669 - RNA, 19 nt, Artificial Sequence
  Description of Artificial Sequence: Synthetic oligonucleotide
cgcuccgacgucaucuucg

SEQ ID NO: 3040670 - RNA, 19 nt, Artificial Sequence
  Description of Artificial Sequence: Synthetic oligonucleotide
gcuggauaauggccaaaca

SEQ ID NO: 3040671 - RNA, 19 nt, Artificial Sequence
  Description of Artificial Sequence: Synthetic oligonucleotide
ccggacugggcacuuugcg

SEQ ID NO: 3040672 - RNA, 19 nt, Artificial Sequence
  Description of Artificial Sequence: Synthetic oligonucleotide
ggacugggcacuuugcggu

SEQ ID NO: 3040673 - RNA, 19 nt, Artificial Sequence
  Description of Artificial Sequence: Synthetic oligonucleotide
ggguuugcccagaaacgcc

SEQ ID NO: 3040674 - RNA, 19 nt, Artificial Sequence
  Description of Artificial Sequence: Synthetic oligonucleotide
accuguggcuugacgaccu

SEQ ID NO: 3040675 - RNA, 19 nt, Artificial Sequence
  Description of Artificial Sequence: Synthetic oligonucleotide
accaggguuugcccagaaa

SEQ ID NO: 3040676 - RNA, 19 nt, Artificial Sequence
  Description of Artificial Sequence: Synthetic oligonucleotide
cggacugggcacuuugcgg

SEQ ID NO: 3040677 - RNA, 19 nt, Artificial Sequence
  Description of Artificial Sequence: Synthetic oligonucleotide
acacgggaauucgaagaaa

SEQ ID NO: 3040678 - RNA, 19 nt, Artificial Sequence
  Description of Artificial Sequence: Synthetic oligonucleotide
gauccaggaggaccagggu

SEQ ID NO: 3040679 - RNA, 19 nt, Artificial Sequence
  Description of Artificial Sequence: Synthetic oligonucleotide
cgagagacacgggaauucg

SEQ ID NO: 3040680 - RNA, 19 nt, Artificial Sequence
  Description of Artificial Sequence: Synthetic oligonucleotide
gcagugucgccauugcugu

SEQ ID NO: 3040681 - RNA, 19 nt, Artificial Sequence
  Description of Artificial Sequence: Synthetic oligonucleotide
cagccgagagacacgggaa

SEQ ID NO: 3040682 - RNA, 19 nt, Artificial Sequence
  Description of Artificial Sequence: Synthetic oligonucleotide
gccucuucuaaaucuacau

SEQ ID NO: 3040683 - RNA, 19 nt, Artificial Sequence
  Description of Artificial Sequence: Synthetic oligonucleotide
agaaacgcuccgacgucau

SEQ ID NO: 3040684 - RNA, 19 nt, Artificial Sequence
  Description of Artificial Sequence: Synthetic oligonucleotide
ccauugcuguuccuucuug

SEQ ID NO: 3040685 - RNA, 19 nt, Artificial Sequence
  Description of Artificial Sequence: Synthetic oligonucleotide
guuugcccagaaacgccuc

SEQ ID NO: 3040686 - RNA, 19 nt, Artificial Sequence
  Description of Artificial Sequence: Synthetic oligonucleotide
cgaagaaacgcuccgacgu

SEQ ID NO: 3040687 - RNA, 19 nt, Artificial Sequence
  Description of Artificial Sequence: Synthetic oligonucleotide
gcagcagccgagagacacg

SEQ ID NO: 3040688 - RNA, 19 nt, Artificial Sequence
  Description of Artificial Sequence: Synthetic oligonucleotide
ugggcacuuugcggugcag

SEQ ID NO: 3040689 - RNA, 19 nt, Artificial Sequence
  Description of Artificial Sequence: Synthetic oligonucleotide
gucgauccaggaggaccag

SEQ ID NO: 3040690 - RNA, 19 nt, Artificial Sequence
  Description of Artificial Sequence: Synthetic oligonucleotide
ccacagugugacuggaaga

SEQ ID NO: 3040691 - RNA, 19 nt, Artificial Sequence
  Description of Artificial Sequence: Synthetic oligonucleotide
ugucgccauugcuguuccu

SEQ ID NO: 3040692 - RNA, 19 nt, Artificial Sequence
  Description of Artificial Sequence: Synthetic oligonucleotide
gguuugcccagaaacgccu

SEQ ID NO: 3040693 - RNA, 19 nt, Artificial Sequence
  Description of Artificial Sequence: Synthetic oligonucleotide
ccuucggcagcagcagccg

SEQ ID NO: 3040694 - RNA, 19 nt, Artificial Sequence
  Description of Artificial Sequence: Synthetic oligonucleotide
gaccaggguuugcccagaa

SEQ ID NO: 3040695 - RNA, 19 nt, Artificial Sequence
  Description of Artificial Sequence: Synthetic oligonucleotide
agcagccgagagacacggg

SEQ ID NO: 3040696 - RNA, 19 nt, Artificial Sequence
  Description of Artificial Sequence: Synthetic oligonucleotide
acccucuuuuccagccucu

SEQ ID NO: 3040697 - RNA, 19 nt, Artificial Sequence
  Description of Artificial Sequence: Synthetic oligonucleotide
caggaggaccaggguuugc

SEQ ID NO: 3040698 - RNA, 19 nt, Artificial Sequence
  Description of Artificial Sequence: Synthetic oligonucleotide
cuucggcagcagcagccga

SEQ ID NO: 3040699 - RNA, 19 nt, Artificial Sequence
  Description of Artificial Sequence: Synthetic oligonucleotide
ccgagagacacgggaauuc

SEQ ID NO: 3040700 - RNA, 19 nt, Artificial Sequence
  Description of Artificial Sequence: Synthetic oligonucleotide
gugugacuggaagaccugu

SEQ ID NO: 3040701 - RNA, 19 nt, Artificial Sequence
  Description of Artificial Sequence: Synthetic oligonucleotide
cgucgauccaggaggacca

SEQ ID NO: 3040702 - RNA, 19 nt, Artificial Sequence
  Description of Artificial Sequence: Synthetic oligonucleotide
ccugcuuuugccacccucu

SEQ ID NO: 3040703 - RNA, 19 nt, Artificial Sequence
  Description of Artificial Sequence: Synthetic oligonucleotide
guaauuuggcggcgucgau

SEQ ID NO: 3040704 - RNA, 19 nt, Artificial Sequence
  Description of Artificial Sequence: Synthetic oligonucleotide
cacugcacacaaccagaua

SEQ ID NO: 3040705 - RNA, 19 nt, Artificial Sequence
  Description of Artificial Sequence: Synthetic oligonucleotide
cugggcacuuugcggugca

SEQ ID NO: 3040706 - RNA, 19 nt, Artificial Sequence
  Description of Artificial Sequence: Synthetic oligonucleotide
ucccugcuuuugccacccu

SEQ ID NO: 3040707 - RNA, 19 nt, Artificial Sequence
  Description of Artificial Sequence: Synthetic oligonucleotide
ccagaaacgccuccggacu

SEQ ID NO: 3040708 - RNA, 19 nt, Artificial Sequence
  Description of Artificial Sequence: Synthetic oligonucleotide
uggcggcgucgauccagga

SEQ ID NO: 3040709 - RNA, 19 nt, Artificial Sequence
  Description of Artificial Sequence: Synthetic oligonucleotide
gugcagugucgccauugcu

SEQ ID NO: 3040710 - RNA, 19 nt, Artificial Sequence
  Description of Artificial Sequence: Synthetic oligonucleotide
gucgccauugcuguuccuu

SEQ ID NO: 3040711 - RNA, 19 nt, Artificial Sequence
  Description of Artificial Sequence: Synthetic oligonucleotide
gcccagaaacgccuccgga

SEQ ID NO: 3040712 - RNA, 19 nt, Artificial Sequence
  Description of Artificial Sequence: Synthetic oligonucleotide
cccugcuuuugccacccuc

SEQ ID NO: 3040713 - RNA, 19 nt, Artificial Sequence
  Description of Artificial Sequence: Synthetic oligonucleotide
cucccacagugugacugga

SEQ ID NO: 3040714 - RNA, 19 nt, Artificial Sequence
  Description of Artificial Sequence: Synthetic oligonucleotide
gugcuggauaauggccaaa

SEQ ID NO: 3040715 - RNA, 19 nt, Artificial Sequence
  Description of Artificial Sequence: Synthetic oligonucleotide
caguguaauuuggcggcgu

SEQ ID NO: 3040716 - RNA, 19 nt, Artificial Sequence
  Description of Artificial Sequence: Synthetic oligonucleotide
cuucuuuauuaagccucau

SEQ ID NO: 3040717 - RNA, 19 nt, Artificial Sequence
  Description of Artificial Sequence: Synthetic oligonucleotide
gccucauaaccucccugcu

SEQ ID NO: 3040718 - RNA, 19 nt, Artificial Sequence
  Description of Artificial Sequence: Synthetic oligonucleotide
ggaagaccuguggcuugac

SEQ ID NO: 3040719 - RNA, 19 nt, Artificial Sequence
  Description of Artificial Sequence: Synthetic oligonucleotide
ccaggaggaccaggguuug

SEQ ID NO: 3040720 - RNA, 19 nt, Artificial Sequence
  Description of Artificial Sequence: Synthetic oligonucleotide
guggcuugacgaccugguu

SEQ ID NO: 3040721 - RNA, 19 nt, Artificial Sequence
  Description of Artificial Sequence: Synthetic oligonucleotide
gcuguuccuucuuguugcu

SEQ ID NO: 3040722 - RNA, 19 nt, Artificial Sequence
  Description of Artificial Sequence: Synthetic oligonucleotide
cugcuuuugccacccucuu

SEQ ID NO: 3040723 - RNA, 19 nt, Artificial Sequence
  Description of Artificial Sequence: Synthetic oligonucleotide
ccuguggcuugacgaccug

SEQ ID NO: 3040724 - RNA, 19 nt, Artificial Sequence
  Description of Artificial Sequence: Synthetic oligonucleotide
gcacuuugcggugcagugu

SEQ ID NO: 3040725 - RNA, 19 nt, Artificial Sequence
  Description of Artificial Sequence: Synthetic oligonucleotide
cggugcagugucgccauug

SEQ ID NO: 3040726 - RNA, 19 nt, Artificial Sequence
  Description of Artificial Sequence: Synthetic oligonucleotide
cccuguuccuucggcagca

SEQ ID NO: 3040727 - RNA, 19 nt, Artificial Sequence
  Description of Artificial Sequence: Synthetic oligonucleotide
gccauugcuguuccuucuu

SEQ ID NO: 3040728 - RNA, 19 nt, Artificial Sequence
  Description of Artificial Sequence: Synthetic oligonucleotide
gggcacuuugcggugcagu

SEQ ID NO: 3040729 - RNA, 19 nt, Artificial Sequence
  Description of Artificial Sequence: Synthetic oligonucleotide
ggaccaggguuugcccaga

SEQ ID NO: 3040730 - RNA, 19 nt, Artificial Sequence
  Description of Artificial Sequence: Synthetic oligonucleotide
ggcgucgauccaggaggac

SEQ ID NO: 3040731 - RNA, 19 nt, Artificial Sequence
  Description of Artificial Sequence: Synthetic oligonucleotide
gcacugcacacaaccagau

SEQ ID NO: 3040732 - RNA, 19 nt, Artificial Sequence
  Description of Artificial Sequence: Synthetic oligonucleotide
ccucauaaccucccugcuu

SEQ ID NO: 3040733 - RNA, 19 nt, Artificial Sequence
  Description of Artificial Sequence: Synthetic oligonucleotide
gcuugacgaccugguuaca

SEQ ID NO: 3040734 - RNA, 19 nt, Artificial Sequence
  Description of Artificial Sequence: Synthetic oligonucleotide
cuguuccuucuuguugcuu

SEQ ID NO: 3040735 - RNA, 19 nt, Artificial Sequence
  Description of Artificial Sequence: Synthetic oligonucleotide
cggcagcagcagccgagag

SEQ ID NO: 3040736 - RNA, 19 nt, Artificial Sequence
  Description of Artificial Sequence: Synthetic oligonucleotide
gccgagagacacgggaauu

SEQ ID NO: 3040737 - RNA, 19 nt, Artificial Sequence
  Description of Artificial Sequence: Synthetic oligonucleotide
cagugucgccauugcuguu

SEQ ID NO: 3040738 - RNA, 19 nt, Artificial Sequence
  Description of Artificial Sequence: Synthetic oligonucleotide
cggcgucgauccaggagga

SEQ ID NO: 3040739 - RNA, 19 nt, Artificial Sequence
  Description of Artificial Sequence: Synthetic oligonucleotide
cgccauugcuguuccuucu

SEQ ID NO: 3040740 - RNA, 19 nt, Artificial Sequence
  Description of Artificial Sequence: Synthetic oligonucleotide
ccacccucuuuuccagccu

SEQ ID NO: 3040741 - RNA, 19 nt, Artificial Sequence
  Description of Artificial Sequence: Synthetic oligonucleotide
gcggugcagugucgccauu

SEQ ID NO: 3040742 - RNA, 19 nt, Artificial Sequence
  Description of Artificial Sequence: Synthetic oligonucleotide
gccuccggacugggcacuu

SEQ ID NO: 3040743 - RNA, 19 nt, Artificial Sequence
  Description of Artificial Sequence: Synthetic oligonucleotide
ccuccggacugggcacuuu

SEQ ID NO: 3040744 - RNA, 19 nt, Artificial Sequence
  Description of Artificial Sequence: Synthetic oligonucleotide
augacaaccaaggagaagc

SEQ ID NO: 3040745 - RNA, 19 nt, Artificial Sequence
  Description of Artificial Sequence: Synthetic oligonucleotide
aaguaguagaaggcgaugc

SEQ ID NO: 3040746 - RNA, 19 nt, Artificial Sequence
  Description of Artificial Sequence: Synthetic oligonucleotide
uagaaggcgaugcagauga

SEQ ID NO: 3040747 - RNA, 19 nt, Artificial Sequence
  Description of Artificial Sequence: Synthetic oligonucleotide
augaagaagagagggaucc

SEQ ID NO: 3040748 - RNA, 19 nt, Artificial Sequence
  Description of Artificial Sequence: Synthetic oligonucleotide
acuccuuugaacauggggc

SEQ ID NO: 3040749 - RNA, 19 nt, Artificial Sequence
  Description of Artificial Sequence: Synthetic oligonucleotide
gaugcagaugaccacauug

SEQ ID NO: 3040750 - RNA, 19 nt, Artificial Sequence
  Description of Artificial Sequence: Synthetic oligonucleotide
gaagaaguaguagaaggcg

SEQ ID NO: 3040751 - RNA, 19 nt, Artificial Sequence
  Description of Artificial Sequence: Synthetic oligonucleotide
uauguggacaccaccauca

SEQ ID NO: 3040752 - RNA, 19 nt, Artificial Sequence
  Description of Artificial Sequence: Synthetic oligonucleotide
aaacaggugagagagguug

SEQ ID NO: 3040753 - RNA, 19 nt, Artificial Sequence
  Description of Artificial Sequence: Synthetic oligonucleotide
agaagaaguaguagaaggc

SEQ ID NO: 3040754 - RNA, 19 nt, Artificial Sequence
  Description of Artificial Sequence: Synthetic oligonucleotide
agcuccaugaagaagagag

SEQ ID NO: 3040755 - RNA, 19 nt, Artificial Sequence
  Description of Artificial Sequence: Synthetic oligonucleotide
aagcauccagcacaccggc

SEQ ID NO: 3040756 - RNA, 19 nt, Artificial Sequence
  Description of Artificial Sequence: Synthetic oligonucleotide
ugagguuggaagcauccag

SEQ ID NO: 3040757 - RNA, 19 nt, Artificial Sequence
  Description of Artificial Sequence: Synthetic oligonucleotide
uagaugccgauguaugugg

SEQ ID NO: 3040758 - RNA, 19 nt, Artificial Sequence
  Description of Artificial Sequence: Synthetic oligonucleotide
gagaugacaaccaaggaga

SEQ ID NO: 3040759 - RNA, 19 nt, Artificial Sequence
  Description of Artificial Sequence: Synthetic oligonucleotide
uuguaguagaugccgaugu

SEQ ID NO: 3040760 - RNA, 19 nt, Artificial Sequence
  Description of Artificial Sequence: Synthetic oligonucleotide
cuggcuugcaaacuggccg

SEQ ID NO: 3040761 - RNA, 19 nt, Artificial Sequence
  Description of Artificial Sequence: Synthetic oligonucleotide
gaugcaggagaugacaacc

SEQ ID NO: 3040762 - RNA, 19 nt, Artificial Sequence
  Description of Artificial Sequence: Synthetic oligonucleotide
accaccaucaugccauagc

SEQ ID NO: 3040763 - RNA, 19 nt, Artificial Sequence
  Description of Artificial Sequence: Synthetic oligonucleotide
acaaccaaggagaagcugg

SEQ ID NO: 3040764 - RNA, 19 nt, Artificial Sequence
  Description of Artificial Sequence: Synthetic oligonucleotide
gacgagaagaaguaguaga

SEQ ID NO: 3040765 - RNA, 19 nt, Artificial Sequence
  Description of Artificial Sequence: Synthetic oligonucleotide
ugcgucauggacgagaaga

SEQ ID NO: 3040766 - RNA, 19 nt, Artificial Sequence
  Description of Artificial Sequence: Synthetic oligonucleotide
ggagaugacaaccaaggag

SEQ ID NO: 3040767 - RNA, 19 nt, Artificial Sequence
  Description of Artificial Sequence: Synthetic oligonucleotide
cuugcaaacuggccgaagg

SEQ ID NO: 3040768 - RNA, 19 nt, Artificial Sequence
  Description of Artificial Sequence: Synthetic oligonucleotide
guuggaagcauccagcaca

SEQ ID NO: 3040769 - RNA, 19 nt, Artificial Sequence
  Description of Artificial Sequence: Synthetic oligonucleotide
gaagaagagagggaucccg

SEQ ID NO: 3040770 - RNA, 19 nt, Artificial Sequence
  Description of Artificial Sequence: Synthetic oligonucleotide
guggacaccaccaucaugc

SEQ ID NO: 3040771 - RNA, 19 nt, Artificial Sequence
  Description of Artificial Sequence: Synthetic oligonucleotide
auaaacaggugagagaggu

SEQ ID NO: 3040772 - RNA, 19 nt, Artificial Sequence
  Description of Artificial Sequence: Synthetic oligonucleotide
cuccaugaagaagagaggg

SEQ ID NO: 3040773 - RNA, 19 nt, Artificial Sequence
  Description of Artificial Sequence: Synthetic oligonucleotide
aagaagagagggaucccgc

SEQ ID NO: 3040774 - RNA, 19 nt, Artificial Sequence
  Description of Artificial Sequence: Synthetic oligonucleotide
gauguauguggacaccacc

SEQ ID NO: 3040775 - RNA, 19 nt, Artificial Sequence
  Description of Artificial Sequence: Synthetic oligonucleotide
uaguagaugccgauguaug

SEQ ID NO: 3040776 - RNA, 19 nt, Artificial Sequence
  Description of Artificial Sequence: Synthetic oligonucleotide
uugcaguaagcccagggca

SEQ ID NO: 3040777 - RNA, 19 nt, Artificial Sequence
  Description of Artificial Sequence: Synthetic oligonucleotide
cacauuguaguagaugccg

SEQ ID NO: 3040778 - RNA, 19 nt, Artificial Sequence
  Description of Artificial Sequence: Synthetic oligonucleotide
gagagagguugccagacag

SEQ ID NO: 3040779 - RNA, 19 nt, Artificial Sequence
  Description of Artificial Sequence: Synthetic oligonucleotide
ggaagcauccagcacaccg

SEQ ID NO: 3040780 - RNA, 19 nt, Artificial Sequence
  Description of Artificial Sequence: Synthetic oligonucleotide
aguugcaguaagcccaggg

SEQ ID NO: 3040781 - RNA, 19 nt, Artificial Sequence
  Description of Artificial Sequence: Synthetic oligonucleotide
gagagguugccagacaggg

SEQ ID NO: 3040782 - RNA, 19 nt, Artificial Sequence
  Description of Artificial Sequence: Synthetic oligonucleotide
guuaguugcaguaagccca

SEQ ID NO: 3040783 - RNA, 19 nt, Artificial Sequence
  Description of Artificial Sequence: Synthetic oligonucleotide
gcauaaacaggugagagag

SEQ ID NO: 3040784 - RNA, 19 nt, Artificial Sequence
  Description of Artificial Sequence: Synthetic oligonucleotide
uaguagaaggcgaugcaga

SEQ ID NO: 3040785 - RNA, 19 nt, Artificial Sequence
  Description of Artificial Sequence: Synthetic oligonucleotide
ugcaguaagcccagggcag

SEQ ID NO: 3040786 - RNA, 19 nt, Artificial Sequence
  Description of Artificial Sequence: Synthetic oligonucleotide
aaggacagcuccaugaaga

SEQ ID NO: 3040787 - RNA, 19 nt, Artificial Sequence
  Description of Artificial Sequence: Synthetic oligonucleotide
gagguugccagacagggca

SEQ ID NO: 3040788 - RNA, 19 nt, Artificial Sequence
  Description of Artificial Sequence: Synthetic oligonucleotide
uuaguugcaguaagcccag

SEQ ID NO: 3040789 - RNA, 19 nt, Artificial Sequence
  Description of Artificial Sequence: Synthetic oligonucleotide
gacagcuccaugaagaaga

SEQ ID NO: 3040790 - RNA, 19 nt, Artificial Sequence
  Description of Artificial Sequence: Synthetic oligonucleotide
gaugaccacauuguaguag

SEQ ID NO: 3040791 - RNA, 19 nt, Artificial Sequence
  Description of Artificial Sequence: Synthetic oligonucleotide
ugcauaaacaggugagaga

SEQ ID NO: 3040792 - RNA, 19 nt, Artificial Sequence
  Description of Artificial Sequence: Synthetic oligonucleotide
uagcccacuccuuugaaca

SEQ ID NO: 3040793 - RNA, 19 nt, Artificial Sequence
  Description of Artificial Sequence: Synthetic oligonucleotide
gaagcauccagcacaccgg

SEQ ID NO: 3040794 - RNA, 19 nt, Artificial Sequence
  Description of Artificial Sequence: Synthetic oligonucleotide
auagcccacuccuuugaac

SEQ ID NO: 3040795 - RNA, 19 nt, Artificial Sequence
  Description of Artificial Sequence: Synthetic oligonucleotide
uggacugggagccauuggu

SEQ ID NO: 3040796 - RNA, 19 nt, Artificial Sequence
  Description of Artificial Sequence: Synthetic oligonucleotide
cacuccuuugaacaugggg

SEQ ID NO: 3040797 - RNA, 19 nt, Artificial Sequence
  Description of Artificial Sequence: Synthetic oligonucleotide
guugcaguaagcccagggc

SEQ ID NO: 3040798 - RNA, 19 nt, Artificial Sequence
  Description of Artificial Sequence: Synthetic oligonucleotide
ucaggggugguuccagggg

SEQ ID NO: 3040799 - RNA, 19 nt, Artificial Sequence
  Description of Artificial Sequence: Synthetic oligonucleotide
augaccacauuguaguaga

SEQ ID NO: 3040800 - RNA, 19 nt, Artificial Sequence
  Description of Artificial Sequence: Synthetic oligonucleotide
gguuccagggguuaguugc

SEQ ID NO: 3040801 - RNA, 19 nt, Artificial Sequence
  Description of Artificial Sequence: Synthetic oligonucleotide
aagaaguaguagaaggcga

SEQ ID NO: 3040802 - RNA, 19 nt, Artificial Sequence
  Description of Artificial Sequence: Synthetic oligonucleotide
caaacuggccgaaggacag

SEQ ID NO: 3040803 - RNA, 19 nt, Artificial Sequence
  Description of Artificial Sequence: Synthetic oligonucleotide
aacaggugagagagguugc

SEQ ID NO: 3040804 - RNA, 19 nt, Artificial Sequence
  Description of Artificial Sequence: Synthetic oligonucleotide
uccaugaagaagagaggga

SEQ ID NO: 3040805 - RNA, 19 nt, Artificial Sequence
  Description of Artificial Sequence: Synthetic oligonucleotide
ucauggacgagaagaagua

SEQ ID NO: 3040806 - RNA, 19 nt, Artificial Sequence
  Description of Artificial Sequence: Synthetic oligonucleotide
aguagaugccgauguaugu

SEQ ID NO: 3040807 - RNA, 19 nt, Artificial Sequence
  Description of Artificial Sequence: Synthetic oligonucleotide
accaaggagaagcugggcu

SEQ ID NO: 3040808 - RNA, 19 nt, Artificial Sequence
  Description of Artificial Sequence: Synthetic oligonucleotide
aggugagagagguugccag

SEQ ID NO: 3040809 - RNA, 19 nt, Artificial Sequence
  Description of Artificial Sequence: Synthetic oligonucleotide
gaaggacagcuccaugaag

SEQ ID NO: 3040810 - RNA, 19 nt, Artificial Sequence
  Description of Artificial Sequence: Synthetic oligonucleotide
aguaguagaaggcgaugca

SEQ ID NO: 3040811 - RNA, 19 nt, Artificial Sequence
  Description of Artificial Sequence: Synthetic oligonucleotide
agggguuaguugcaguaag

SEQ ID NO: 3040812 - RNA, 19 nt, Artificial Sequence
  Description of Artificial Sequence: Synthetic oligonucleotide
caaccaaggagaagcuggg

SEQ ID NO: 3040813 - RNA, 19 nt, Artificial Sequence
  Description of Artificial Sequence: Synthetic oligonucleotide
agcacaccggcacagucag

SEQ ID NO: 3040814 - RNA, 19 nt, Artificial Sequence
  Description of Artificial Sequence: Synthetic oligonucleotide
guaguagaaggcgaugcag

SEQ ID NO: 3040815 - RNA, 19 nt, Artificial Sequence
  Description of Artificial Sequence: Synthetic oligonucleotide
uugcaaacuggccgaagga

SEQ ID NO: 3040816 - RNA, 19 nt, Artificial Sequence
  Description of Artificial Sequence: Synthetic oligonucleotide
aaccaaggagaagcugggc

SEQ ID NO: 3040817 - RNA, 19 nt, Artificial Sequence
  Description of Artificial Sequence: Synthetic oligonucleotide
uggacgagaagaaguagua

SEQ ID NO: 3040818 - RNA, 19 nt, Artificial Sequence
  Description of Artificial Sequence: Synthetic oligonucleotide
cauaaacaggugagagagg

SEQ ID NO: 3040819 - RNA, 19 nt, Artificial Sequence
  Description of Artificial Sequence: Synthetic oligonucleotide
cacaccggcacagucaggg

SEQ ID NO: 3040820 - RNA, 19 nt, Artificial Sequence
  Description of Artificial Sequence: Synthetic oligonucleotide
agcacgugcgucauggacg

SEQ ID NO: 3040821 - RNA, 19 nt, Artificial Sequence
  Description of Artificial Sequence: Synthetic oligonucleotide
uguauguggacaccaccau

SEQ ID NO: 3040822 - RNA, 19 nt, Artificial Sequence
  Description of Artificial Sequence: Synthetic oligonucleotide
uuggaagcauccagcacac

SEQ ID NO: 3040823 - RNA, 19 nt, Artificial Sequence
  Description of Artificial Sequence: Synthetic oligonucleotide
uguggacaccaccaucaug

SEQ ID NO: 3040824 - RNA, 19 nt, Artificial Sequence
  Description of Artificial Sequence: Synthetic oligonucleotide
cuggccgaaggacagcucc

SEQ ID NO: 3040825 - RNA, 19 nt, Artificial Sequence
  Description of Artificial Sequence: Synthetic oligonucleotide
gagguuggaagcauccagc

SEQ ID NO: 3040826 - RNA, 19 nt, Artificial Sequence
  Description of Artificial Sequence: Synthetic oligonucleotide
auuguaguagaugccgaug

SEQ ID NO: 3040827 - RNA, 19 nt, Artificial Sequence
  Description of Artificial Sequence: Synthetic oligonucleotide
aguagaaggcgaugcagau

SEQ ID NO: 3040828 - RNA, 19 nt, Artificial Sequence
  Description of Artificial Sequence: Synthetic oligonucleotide
acaggugagagagguugcc

SEQ ID NO: 3040829 - RNA, 19 nt, Artificial Sequence
  Description of Artificial Sequence: Synthetic oligonucleotide
guaagcccagggcagcacg

SEQ ID NO: 3040830 - RNA, 19 nt, Artificial Sequence
  Description of Artificial Sequence: Synthetic oligonucleotide
guagaugccgauguaugug

SEQ ID NO: 3040831 - RNA, 19 nt, Artificial Sequence
  Description of Artificial Sequence: Synthetic oligonucleotide
aaacuggccgaaggacagc

SEQ ID NO: 3040832 - RNA, 19 nt, Artificial Sequence
  Description of Artificial Sequence: Synthetic oligonucleotide
gaaggcgaugcagaugacc

SEQ ID NO: 3040833 - RNA, 19 nt, Artificial Sequence
  Description of Artificial Sequence: Synthetic oligonucleotide
ugaugcaggagaugacaac

SEQ ID NO: 3040834 - RNA, 19 nt, Artificial Sequence
  Description of Artificial Sequence: Synthetic oligonucleotide
gaugacaaccaaggagaag

SEQ ID NO: 3040835 - RNA, 19 nt, Artificial Sequence
  Description of Artificial Sequence: Synthetic oligonucleotide
caugaagaagagagggauc

SEQ ID NO: 3040836 - RNA, 19 nt, Artificial Sequence
  Description of Artificial Sequence: Synthetic oligonucleotide
gggcugauccuccagaccc

SEQ ID NO: 3040837 - RNA, 19 nt, Artificial Sequence
  Description of Artificial Sequence: Synthetic oligonucleotide
ugcaaacuggccgaaggac

SEQ ID NO: 3040838 - RNA, 19 nt, Artificial Sequence
  Description of Artificial Sequence: Synthetic oligonucleotide
gaaguaguagaaggcgaug

SEQ ID NO: 3040839 - RNA, 19 nt, Artificial Sequence
  Description of Artificial Sequence: Synthetic oligonucleotide
agguuggaagcauccagca

SEQ ID NO: 3040840 - RNA, 19 nt, Artificial Sequence
  Description of Artificial Sequence: Synthetic oligonucleotide
auguauguggacaccacca

SEQ ID NO: 3040841 - RNA, 19 nt, Artificial Sequence
  Description of Artificial Sequence: Synthetic oligonucleotide
ggagccauuggugagguug

SEQ ID NO: 3040842 - RNA, 19 nt, Artificial Sequence
  Description of Artificial Sequence: Synthetic oligonucleotide
cagaugaccacauuguagu

SEQ ID NO: 3040843 - RNA, 19 nt, Artificial Sequence
  Description of Artificial Sequence: Synthetic oligonucleotide
gaccacauuguaguagaug

SEQ ID NO: 3040844 - RNA, 19 nt, Artificial Sequence
  Description of Artificial Sequence: Synthetic oligonucleotide
ugcagaugaccacauugua

SEQ ID NO: 3040845 - RNA, 19 nt, Artificial Sequence
  Description of Artificial Sequence: Synthetic oligonucleotide
uguaguagaugccgaugua

SEQ ID NO: 3040846 - RNA, 19 nt, Artificial Sequence
  Description of Artificial Sequence: Synthetic oligonucleotide
uggcuugcaaacuggccga

SEQ ID NO: 3040847 - RNA, 19 nt, Artificial Sequence
  Description of Artificial Sequence: Synthetic oligonucleotide
ccauuggugagguuggaag

SEQ ID NO: 3040848 - RNA, 19 nt, Artificial Sequence
  Description of Artificial Sequence: Synthetic oligonucleotide
gaugccgauguauguggac

SEQ ID NO: 3040849 - RNA, 19 nt, Artificial Sequence
  Description of Artificial Sequence: Synthetic oligonucleotide
ugcaggagaugacaaccaa

SEQ ID NO: 3040850 - RNA, 19 nt, Artificial Sequence
  Description of Artificial Sequence: Synthetic oligonucleotide
ugagagagguugccagaca

SEQ ID NO: 3040851 - RNA, 19 nt, Artificial Sequence
  Description of Artificial Sequence: Synthetic oligonucleotide
gagccauuggugagguugg

SEQ ID NO: 3040852 - RNA, 19 nt, Artificial Sequence
  Description of Artificial Sequence: Synthetic oligonucleotide
agcccagggcagcacgugc

SEQ ID NO: 3040853 - RNA, 19 nt, Artificial Sequence
  Description of Artificial Sequence: Synthetic oligonucleotide
aacuggccgaaggacagcu

SEQ ID NO: 3040854 - RNA, 19 nt, Artificial Sequence
  Description of Artificial Sequence: Synthetic oligonucleotide
aggagaugacaaccaagga

SEQ ID NO: 3040855 - RNA, 19 nt, Artificial Sequence
  Description of Artificial Sequence: Synthetic oligonucleotide
ucaugccauagcccacucc

SEQ ID NO: 3040856 - RNA, 19 nt, Artificial Sequence
  Description of Artificial Sequence: Synthetic oligonucleotide
auggacgagaagaaguagu

SEQ ID NO: 3040857 - RNA, 19 nt, Artificial Sequence
  Description of Artificial Sequence: Synthetic oligonucleotide
caccaucaugccauagccc

SEQ ID NO: 3040858 - RNA, 19 nt, Artificial Sequence
  Description of Artificial Sequence: Synthetic oligonucleotide
ugccgauguauguggacac

SEQ ID NO: 3040859 - RNA, 19 nt, Artificial Sequence
  Description of Artificial Sequence: Synthetic oligonucleotide
ugaagaagagagggauccc

SEQ ID NO: 3040860 - RNA, 19 nt, Artificial Sequence
  Description of Artificial Sequence: Synthetic oligonucleotide
gacagggcaguggacuggg

SEQ ID NO: 3040861 - RNA, 19 nt, Artificial Sequence
  Description of Artificial Sequence: Synthetic oligonucleotide
caugaugcaggagaugaca

SEQ ID NO: 3040862 - RNA, 19 nt, Artificial Sequence
  Description of Artificial Sequence: Synthetic oligonucleotide
agucaggggugguuccagg

SEQ ID NO: 3040863 - RNA, 19 nt, Artificial Sequence
  Description of Artificial Sequence: Synthetic oligonucleotide
agaaguaguagaaggcgau

SEQ ID NO: 3040864 - RNA, 19 nt, Artificial Sequence
  Description of Artificial Sequence: Synthetic oligonucleotide
cauggacgagaagaaguag

SEQ ID NO: 3040865 - RNA, 19 nt, Artificial Sequence
  Description of Artificial Sequence: Synthetic oligonucleotide
caaggagaagcugggcugc

SEQ ID NO: 3040866 - RNA, 19 nt, Artificial Sequence
  Description of Artificial Sequence: Synthetic oligonucleotide
gaacauggggcugauccuc

SEQ ID NO: 3040867 - RNA, 19 nt, Artificial Sequence
  Description of Artificial Sequence: Synthetic oligonucleotide
gcagaugaccacauuguag

SEQ ID NO: 3040868 - RNA, 19 nt, Artificial Sequence
  Description of Artificial Sequence: Synthetic oligonucleotide
guauguggacaccaccauc

SEQ ID NO: 3040869 - RNA, 19 nt, Artificial Sequence
  Description of Artificial Sequence: Synthetic oligonucleotide
acgagaagaaguaguagaa

SEQ ID NO: 3040870 - RNA, 19 nt, Artificial Sequence
  Description of Artificial Sequence: Synthetic oligonucleotide
acaugaugcaggagaugac

SEQ ID NO: 3040871 - RNA, 19 nt, Artificial Sequence
  Description of Artificial Sequence: Synthetic oligonucleotide
agagguugccagacagggc

SEQ ID NO: 3040872 - RNA, 19 nt, Artificial Sequence
  Description of Artificial Sequence: Synthetic oligonucleotide
agagagguugccagacagg

SEQ ID NO: 3040873 - RNA, 19 nt, Artificial Sequence
  Description of Artificial Sequence: Synthetic oligonucleotide
ggguuaguugcaguaagcc

SEQ ID NO: 3040874 - RNA, 19 nt, Artificial Sequence
  Description of Artificial Sequence: Synthetic oligonucleotide
uaagcccagggcagcacgu

SEQ ID NO: 3040875 - RNA, 19 nt, Artificial Sequence
  Description of Artificial Sequence: Synthetic oligonucleotide
aucaugccauagcccacuc

SEQ ID NO: 3040876 - RNA, 19 nt, Artificial Sequence
  Description of Artificial Sequence: Synthetic oligonucleotide
ccaccaucaugccauagcc

SEQ ID NO: 3040877 - RNA, 19 nt, Artificial Sequence
  Description of Artificial Sequence: Synthetic oligonucleotide
gacaccaccaucaugccau

SEQ ID NO: 3040878 - RNA, 19 nt, Artificial Sequence
  Description of Artificial Sequence: Synthetic oligonucleotide
accccuggcuugcaaacug

SEQ ID NO: 3040879 - RNA, 19 nt, Artificial Sequence
  Description of Artificial Sequence: Synthetic oligonucleotide
gagaagcugggcugcauaa

SEQ ID NO: 3040880 - RNA, 19 nt, Artificial Sequence
  Description of Artificial Sequence: Synthetic oligonucleotide
ggcagcacgugcgucaugg

SEQ ID NO: 3040881 - RNA, 19 nt, Artificial Sequence
  Description of Artificial Sequence: Synthetic oligonucleotide
caugccauagcccacuccu

SEQ ID NO: 3040882 - RNA, 19 nt, Artificial Sequence
  Description of Artificial Sequence: Synthetic oligonucleotide
ugccauagcccacuccuuu

SEQ ID NO: 3040883 - RNA, 19 nt, Artificial Sequence
  Description of Artificial Sequence: Synthetic oligonucleotide
ggcugcauaaacaggugag

SEQ ID NO: 3040884 - RNA, 19 nt, Artificial Sequence
  Description of Artificial Sequence: Synthetic oligonucleotide
aguaagcccagggcagcac

SEQ ID NO: 3040885 - RNA, 19 nt, Artificial Sequence
  Description of Artificial Sequence: Synthetic oligonucleotide
ugguuccagggguuaguug

SEQ ID NO: 3040886 - RNA, 19 nt, Artificial Sequence
  Description of Artificial Sequence: Synthetic oligonucleotide
uaaacaggugagagagguu

SEQ ID NO: 3040887 - RNA, 19 nt, Artificial Sequence
  Description of Artificial Sequence: Synthetic oligonucleotide
uccuuugaacauggggcug

SEQ ID NO: 3040888 - RNA, 19 nt, Artificial Sequence
  Description of Artificial Sequence: Synthetic oligonucleotide
uggacaccaccaucaugcc

SEQ ID NO: 3040889 - RNA, 19 nt, Artificial Sequence
  Description of Artificial Sequence: Synthetic oligonucleotide
cacagucaggggugguucc

SEQ ID NO: 3040890 - RNA, 19 nt, Artificial Sequence
  Description of Artificial Sequence: Synthetic oligonucleotide
cagacagggcaguggacug

SEQ ID NO: 3040891 - RNA, 19 nt, Artificial Sequence
  Description of Artificial Sequence: Synthetic oligonucleotide
cugggcugcauaaacaggu

SEQ ID NO: 3040892 - RNA, 19 nt, Artificial Sequence
  Description of Artificial Sequence: Synthetic oligonucleotide
aggacagcuccaugaagaa

SEQ ID NO: 3040893 - RNA, 19 nt, Artificial Sequence
  Description of Artificial Sequence: Synthetic oligonucleotide
gucauggacgagaagaagu

SEQ ID NO: 3040894 - RNA, 19 nt, Artificial Sequence
  Description of Artificial Sequence: Synthetic oligonucleotide
guagaaggcgaugcagaug

SEQ ID NO: 3040895 - RNA, 19 nt, Artificial Sequence
  Description of Artificial Sequence: Synthetic oligonucleotide
auggggcugauccuccaga

SEQ ID NO: 3040896 - RNA, 19 nt, Artificial Sequence
  Description of Artificial Sequence: Synthetic oligonucleotide
aguggacugggagccauug

SEQ ID NO: 3040897 - RNA, 19 nt, Artificial Sequence
  Description of Artificial Sequence: Synthetic oligonucleotide
ggugagguuggaagcaucc

SEQ ID NO: 3040898 - RNA, 19 nt, Artificial Sequence
  Description of Artificial Sequence: Synthetic oligonucleotide
guggacugggagccauugg

SEQ ID NO: 3040899 - RNA, 19 nt, Artificial Sequence
  Description of Artificial Sequence: Synthetic oligonucleotide
cccacuccuuugaacaugg

SEQ ID NO: 3040900 - RNA, 19 nt, Artificial Sequence
  Description of Artificial Sequence: Synthetic oligonucleotide
gugagagagguugccagac

SEQ ID NO: 3040901 - RNA, 19 nt, Artificial Sequence
  Description of Artificial Sequence: Synthetic oligonucleotide
agacagggcaguggacugg

SEQ ID NO: 3040902 - RNA, 19 nt, Artificial Sequence
  Description of Artificial Sequence: Synthetic oligonucleotide
cagcacgugcgucauggac

SEQ ID NO: 3040903 - RNA, 19 nt, Artificial Sequence
  Description of Artificial Sequence: Synthetic oligonucleotide
uggugagguuggaagcauc

SEQ ID NO: 3040904 - RNA, 19 nt, Artificial Sequence
  Description of Artificial Sequence: Synthetic oligonucleotide
uccagggguuaguugcagu

SEQ ID NO: 3040905 - RNA, 19 nt, Artificial Sequence
  Description of Artificial Sequence: Synthetic oligonucleotide
acaccggcacagucagggg

SEQ ID NO: 3040906 - RNA, 19 nt, Artificial Sequence
  Description of Artificial Sequence: Synthetic oligonucleotide
ggacgagaagaaguaguag

SEQ ID NO: 3040907 - RNA, 19 nt, Artificial Sequence
  Description of Artificial Sequence: Synthetic oligonucleotide
agaugaccacauuguagua

SEQ ID NO: 3040908 - RNA, 19 nt, Artificial Sequence
  Description of Artificial Sequence: Synthetic oligonucleotide
augaugcaggagaugacaa

SEQ ID NO: 3040909 - RNA, 19 nt, Artificial Sequence
  Description of Artificial Sequence: Synthetic oligonucleotide
ugaccacauuguaguagau

SEQ ID NO: 3040910 - RNA, 19 nt, Artificial Sequence
  Description of Artificial Sequence: Synthetic oligonucleotide
cauggggcugauccuccag

SEQ ID NO: 3040911 - RNA, 19 nt, Artificial Sequence
  Description of Artificial Sequence: Synthetic oligonucleotide
ccacauuguaguagaugcc

SEQ ID NO: 3040912 - RNA, 19 nt, Artificial Sequence
  Description of Artificial Sequence: Synthetic oligonucleotide
acgugcgucauggacgaga

SEQ ID NO: 3040913 - RNA, 19 nt, Artificial Sequence
  Description of Artificial Sequence: Synthetic oligonucleotide
gcuccaugaagaagagagg

SEQ ID NO: 3040914 - RNA, 19 nt, Artificial Sequence
  Description of Artificial Sequence: Synthetic oligonucleotide
augcaggagaugacaacca

SEQ ID NO: 3040915 - RNA, 19 nt, Artificial Sequence
  Description of Artificial Sequence: Synthetic oligonucleotide
cuccuuugaacauggggcu

SEQ ID NO: 3040916 - RNA, 19 nt, Artificial Sequence
  Description of Artificial Sequence: Synthetic oligonucleotide
gguuggaagcauccagcac

SEQ ID NO: 3040917 - RNA, 19 nt, Artificial Sequence
  Description of Artificial Sequence: Synthetic oligonucleotide
uuggugagguuggaagcau

SEQ ID NO: 3040918 - RNA, 19 nt, Artificial Sequence
  Description of Artificial Sequence: Synthetic oligonucleotide
auccagcacaccggcacag

SEQ ID NO: 3040919 - RNA, 19 nt, Artificial Sequence
  Description of Artificial Sequence: Synthetic oligonucleotide
guaguagaugccgauguau

SEQ ID NO: 3040920 - RNA, 19 nt, Artificial Sequence
  Description of Artificial Sequence: Synthetic oligonucleotide
guugccagacagggcagug

SEQ ID NO: 3040921 - RNA, 19 nt, Artificial Sequence
  Description of Artificial Sequence: Synthetic oligonucleotide
ugggagccauuggugaggu

SEQ ID NO: 3040922 - RNA, 19 nt, Artificial Sequence
  Description of Artificial Sequence: Synthetic oligonucleotide
cagcacaccggcacaguca

SEQ ID NO: 3040923 - RNA, 19 nt, Artificial Sequence
  Description of Artificial Sequence: Synthetic oligonucleotide
ccuggcuugcaaacuggcc

SEQ ID NO: 3040924 - RNA, 19 nt, Artificial Sequence
  Description of Artificial Sequence: Synthetic oligonucleotide
accggcacagucaggggug

SEQ ID NO: 3040925 - RNA, 19 nt, Artificial Sequence
  Description of Artificial Sequence: Synthetic oligonucleotide
ggugagagagguugccaga

SEQ ID NO: 3040926 - RNA, 19 nt, Artificial Sequence
  Description of Artificial Sequence: Synthetic oligonucleotide
ccgaaggacagcuccauga

SEQ ID NO: 3040927 - RNA, 19 nt, Artificial Sequence
  Description of Artificial Sequence: Synthetic oligonucleotide
gcaaacuggccgaaggaca

SEQ ID NO: 3040928 - RNA, 19 nt, Artificial Sequence
  Description of Artificial Sequence: Synthetic oligonucleotide
acauggggcugauccucca

SEQ ID NO: 3040929 - RNA, 19 nt, Artificial Sequence
  Description of Artificial Sequence: Synthetic oligonucleotide
gcugggcugcauaaacagg

SEQ ID NO: 3040930 - RNA, 19 nt, Artificial Sequence
  Description of Artificial Sequence: Synthetic oligonucleotide
agcccacuccuuugaacau

SEQ ID NO: 3040931 - RNA, 19 nt, Artificial Sequence
  Description of Artificial Sequence: Synthetic oligonucleotide
uaguugcaguaagcccagg

SEQ ID NO: 3040932 - RNA, 19 nt, Artificial Sequence
  Description of Artificial Sequence: Synthetic oligonucleotide
cagggcagcacgugcguca

SEQ ID NO: 3040933 - RNA, 19 nt, Artificial Sequence
  Description of Artificial Sequence: Synthetic oligonucleotide
gggguuaguugcaguaagc

SEQ ID NO: 3040934 - RNA, 19 nt, Artificial Sequence
  Description of Artificial Sequence: Synthetic oligonucleotide
gccauagcccacuccuuug

SEQ ID NO: 3040935 - RNA, 19 nt, Artificial Sequence
  Description of Artificial Sequence: Synthetic oligonucleotide
agaagcugggcugcauaaa

SEQ ID NO: 3040936 - RNA, 19 nt, Artificial Sequence
  Description of Artificial Sequence: Synthetic oligonucleotide
ggacagcuccaugaagaag

SEQ ID NO: 3040937 - RNA, 19 nt, Artificial Sequence
  Description of Artificial Sequence: Synthetic oligonucleotide
acagucaggggugguucca

SEQ ID NO: 3040938 - RNA, 19 nt, Artificial Sequence
  Description of Artificial Sequence: Synthetic oligonucleotide
cacacaugaugcaggagau

SEQ ID NO: 3040939 - RNA, 19 nt, Artificial Sequence
  Description of Artificial Sequence: Synthetic oligonucleotide
gggcugcauaaacagguga

SEQ ID NO: 3040940 - RNA, 19 nt, Artificial Sequence
  Description of Artificial Sequence: Synthetic oligonucleotide
ggcgaugcagaugaccaca

SEQ ID NO: 3040941 - RNA, 19 nt, Artificial Sequence
  Description of Artificial Sequence: Synthetic oligonucleotide
agaugccgauguaugugga

SEQ ID NO: 3040942 - RNA, 19 nt, Artificial Sequence
  Description of Artificial Sequence: Synthetic oligonucleotide
agaaggcgaugcagaugac

SEQ ID NO: 3040943 - RNA, 19 nt, Artificial Sequence
  Description of Artificial Sequence: Synthetic oligonucleotide
ggacugggagccauuggug

SEQ ID NO: 3040944 - RNA, 19 nt, Artificial Sequence
  Description of Artificial Sequence: Synthetic oligonucleotide
gcugcauaaacaggugaga

SEQ ID NO: 3040945 - RNA, 19 nt, Artificial Sequence
  Description of Artificial Sequence: Synthetic oligonucleotide
gugagguuggaagcaucca

SEQ ID NO: 3040946 - RNA, 19 nt, Artificial Sequence
  Description of Artificial Sequence: Synthetic oligonucleotide
cagucaggggugguuccag

SEQ ID NO: 3040947 - RNA, 19 nt, Artificial Sequence
  Description of Artificial Sequence: Synthetic oligonucleotide
ggggcugauccuccagacc

SEQ ID NO: 3040948 - RNA, 19 nt, Artificial Sequence
  Description of Artificial Sequence: Synthetic oligonucleotide
gcacgugcgucauggacga

SEQ ID NO: 3040949 - RNA, 19 nt, Artificial Sequence
  Description of Artificial Sequence: Synthetic oligonucleotide
cauccagcacaccggcaca

SEQ ID NO: 3040950 - RNA, 19 nt, Artificial Sequence
  Description of Artificial Sequence: Synthetic oligonucleotide
agguugccagacagggcag

SEQ ID NO: 3040951 - RNA, 19 nt, Artificial Sequence
  Description of Artificial Sequence: Synthetic oligonucleotide
acuggccgaaggacagcuc

SEQ ID NO: 3040952 - RNA, 19 nt, Artificial Sequence
  Description of Artificial Sequence: Synthetic oligonucleotide
uggaagcauccagcacacc

SEQ ID NO: 3040953 - RNA, 19 nt, Artificial Sequence
  Description of Artificial Sequence: Synthetic oligonucleotide
uccagcacaccggcacagu

SEQ ID NO: 3040954 - RNA, 19 nt, Artificial Sequence
  Description of Artificial Sequence: Synthetic oligonucleotide
caggugagagagguugcca

SEQ ID NO: 3040955 - RNA, 19 nt, Artificial Sequence
  Description of Artificial Sequence: Synthetic oligonucleotide
gcaccccuggcuugcaaac

SEQ ID NO: 3040956 - RNA, 19 nt, Artificial Sequence
  Description of Artificial Sequence: Synthetic oligonucleotide
gcaguaagcccagggcagc

SEQ ID NO: 3040957 - RNA, 19 nt, Artificial Sequence
  Description of Artificial Sequence: Synthetic oligonucleotide
ccccuggcuugcaaacugg

SEQ ID NO: 3040958 - RNA, 19 nt, Artificial Sequence
  Description of Artificial Sequence: Synthetic oligonucleotide
gugcgucauggacgagaag

SEQ ID NO: 3040959 - RNA, 19 nt, Artificial Sequence
  Description of Artificial Sequence: Synthetic oligonucleotide
caccaccaucaugccauag

SEQ ID NO: 3040960 - RNA, 19 nt, Artificial Sequence
  Description of Artificial Sequence: Synthetic oligonucleotide
cgauguauguggacaccac

SEQ ID NO: 3040961 - RNA, 19 nt, Artificial Sequence
  Description of Artificial Sequence: Synthetic oligonucleotide
gcccagggcagcacgugcg

SEQ ID NO: 3040962 - RNA, 19 nt, Artificial Sequence
  Description of Artificial Sequence: Synthetic oligonucleotide
caucaugccauagcccacu

SEQ ID NO: 3040963 - RNA, 19 nt, Artificial Sequence
  Description of Artificial Sequence: Synthetic oligonucleotide
cagggguuaguugcaguaa

SEQ ID NO: 3040964 - RNA, 19 nt, Artificial Sequence
  Description of Artificial Sequence: Synthetic oligonucleotide
gcuugcaaacuggccgaag

SEQ ID NO: 3040965 - RNA, 19 nt, Artificial Sequence
  Description of Artificial Sequence: Synthetic oligonucleotide
ccagcacaccggcacaguc

SEQ ID NO: 3040966 - RNA, 19 nt, Artificial Sequence
  Description of Artificial Sequence: Synthetic oligonucleotide
gcacagucaggggugguuc

SEQ ID NO: 3040967 - RNA, 19 nt, Artificial Sequence
  Description of Artificial Sequence: Synthetic oligonucleotide
caggggugguuccaggggu

SEQ ID NO: 3040968 - RNA, 19 nt, Artificial Sequence
  Description of Artificial Sequence: Synthetic oligonucleotide
ccuuugaacauggggcuga

SEQ ID NO: 3040969 - RNA, 19 nt, Artificial Sequence
  Description of Artificial Sequence: Synthetic oligonucleotide
gccgaaggacagcuccaug

SEQ ID NO: 3040970 - RNA, 19 nt, Artificial Sequence
  Description of Artificial Sequence: Synthetic oligonucleotide
ggcugauccuccagacccc

SEQ ID NO: 3040971 - RNA, 19 nt, Artificial Sequence
  Description of Artificial Sequence: Synthetic oligonucleotide
agcauccagcacaccggca

SEQ ID NO: 3040972 - RNA, 19 nt, Artificial Sequence
  Description of Artificial Sequence: Synthetic oligonucleotide
acaccaccaucaugccaua

SEQ ID NO: 3040973 - RNA, 19 nt, Artificial Sequence
  Description of Artificial Sequence: Synthetic oligonucleotide
ccagggguuaguugcagua

SEQ ID NO: 3040974 - RNA, 19 nt, Artificial Sequence
  Description of Artificial Sequence: Synthetic oligonucleotide
ccaugaagaagagagggau

SEQ ID NO: 3040975 - RNA, 19 nt, Artificial Sequence
  Description of Artificial Sequence: Synthetic oligonucleotide
caccggcacagucaggggu

SEQ ID NO: 3040976 - RNA, 19 nt, Artificial Sequence
  Description of Artificial Sequence: Synthetic oligonucleotide
gcccacuccuuugaacaug

SEQ ID NO: 3040977 - RNA, 19 nt, Artificial Sequence
  Description of Artificial Sequence: Synthetic oligonucleotide
caguaagcccagggcagca

SEQ ID NO: 3040978 - RNA, 19 nt, Artificial Sequence
  Description of Artificial Sequence: Synthetic oligonucleotide
agccauuggugagguugga

SEQ ID NO: 3040979 - RNA, 19 nt, Artificial Sequence
  Description of Artificial Sequence: Synthetic oligonucleotide
ccgauguauguggacacca

SEQ ID NO: 3040980 - RNA, 19 nt, Artificial Sequence
  Description of Artificial Sequence: Synthetic oligonucleotide
cgucauggacgagaagaag

SEQ ID NO: 3040981 - RNA, 19 nt, Artificial Sequence
  Description of Artificial Sequence: Synthetic oligonucleotide
ggcaccccuggcuugcaaa

SEQ ID NO: 3040982 - RNA, 19 nt, Artificial Sequence
  Description of Artificial Sequence: Synthetic oligonucleotide
agggcagcacgugcgucau

SEQ ID NO: 3040983 - RNA, 19 nt, Artificial Sequence
  Description of Artificial Sequence: Synthetic oligonucleotide
gggugguuccagggguuag

SEQ ID NO: 3040984 - RNA, 19 nt, Artificial Sequence
  Description of Artificial Sequence: Synthetic oligonucleotide
ccacuccuuugaacauggg

SEQ ID NO: 3040985 - RNA, 19 nt, Artificial Sequence
  Description of Artificial Sequence: Synthetic oligonucleotide
gcgucauggacgagaagaa

SEQ ID NO: 3040986 - RNA, 19 nt, Artificial Sequence
  Description of Artificial Sequence: Synthetic oligonucleotide
augccauagcccacuccuu

SEQ ID NO: 3040987 - RNA, 19 nt, Artificial Sequence
  Description of Artificial Sequence: Synthetic oligonucleotide
ccaggcaccccuggcuugc

SEQ ID NO: 3040988 - RNA, 19 nt, Artificial Sequence
  Description of Artificial Sequence: Synthetic oligonucleotide
aggcaccccuggcuugcaa

SEQ ID NO: 3040989 - RNA, 19 nt, Artificial Sequence
  Description of Artificial Sequence: Synthetic oligonucleotide
cgaaggacagcuccaugaa

SEQ ID NO: 3040990 - RNA, 19 nt, Artificial Sequence
  Description of Artificial Sequence: Synthetic oligonucleotide
gccauuggugagguuggaa

SEQ ID NO: 3040991 - RNA, 19 nt, Artificial Sequence
  Description of Artificial Sequence: Synthetic oligonucleotide
cccaggcaccccuggcuug

SEQ ID NO: 3040992 - RNA, 19 nt, Artificial Sequence
  Description of Artificial Sequence: Synthetic oligonucleotide
cgugcgucauggacgagaa

SEQ ID NO: 3040993 - RNA, 19 nt, Artificial Sequence
  Description of Artificial Sequence: Synthetic oligonucleotide
ggugguuccagggguuagu

SEQ ID NO: 3040994 - RNA, 19 nt, Artificial Sequence
  Description of Artificial Sequence: Synthetic oligonucleotide
gugguuccagggguuaguu

SEQ ID NO: 3040995 - RNA, 19 nt, Artificial Sequence
  Description of Artificial Sequence: Synthetic oligonucleotide
ccggcacagucaggggugg

SEQ ID NO: 3040996 - RNA, 19 nt, Artificial Sequence
  Description of Artificial Sequence: Synthetic oligonucleotide
gcagcacgugcgucaugga

SEQ ID NO: 3040997 - RNA, 19 nt, Artificial Sequence
  Description of Artificial Sequence: Synthetic oligonucleotide
cuuugaacauggggcugau

SEQ ID NO: 3040998 - RNA, 19 nt, Artificial Sequence
  Description of Artificial Sequence: Synthetic oligonucleotide
cacgugcgucauggacgag

SEQ ID NO: 3040999 - RNA, 19 nt, Artificial Sequence
  Description of Artificial Sequence: Synthetic oligonucleotide
gcacaccggcacagucagg

SEQ ID NO: 3041000 - RNA, 19 nt, Artificial Sequence
  Description of Artificial Sequence: Synthetic oligonucleotide
gguugccagacagggcagu

SEQ ID NO: 3041001 - RNA, 19 nt, Artificial Sequence
  Description of Artificial Sequence: Synthetic oligonucleotide
ggcuugcaaacuggccgaa

SEQ ID NO: 3041002 - RNA, 19 nt, Artificial Sequence
  Description of Artificial Sequence: Synthetic oligonucleotide
gggcagcacgugcgucaug

SEQ ID NO: 3041003 - RNA, 19 nt, Artificial Sequence
  Description of Artificial Sequence: Synthetic oligonucleotide
ggggugguuccagggguua

SEQ ID NO: 3041004 - RNA, 19 nt, Artificial Sequence
  Description of Artificial Sequence: Synthetic oligonucleotide
ggcacagucaggggugguu

SEQ ID NO: 3041005 - RNA, 19 nt, Artificial Sequence
  Description of Artificial Sequence: Synthetic oligonucleotide
gcaguggacugggagccau

SEQ ID NO: 3041006 - RNA, 19 nt, Artificial Sequence
  Description of Artificial Sequence: Synthetic oligonucleotide
gcgaugcagaugaccacau

SEQ ID NO: 3041007 - RNA, 19 nt, Artificial Sequence
  Description of Artificial Sequence: Synthetic oligonucleotide
caguggacugggagccauu

SEQ ID NO: 3041008 - RNA, 19 nt, Artificial Sequence
  Description of Artificial Sequence: Synthetic oligonucleotide
caggcaccccuggcuugca

SEQ ID NO: 3041009 - RNA, 19 nt, Artificial Sequence
  Description of Artificial Sequence: Synthetic oligonucleotide
ggccgaaggacagcuccau

SEQ ID NO: 3041010 - RNA, 19 nt, Artificial Sequence
  Description of Artificial Sequence: Synthetic oligonucleotide
cccagggcagcacgugcgu

SEQ ID NO: 3041011 - RNA, 19 nt, Artificial Sequence
  Description of Artificial Sequence: Synthetic oligonucleotide
ccccaggcaccccuggcuu

SEQ ID NO: 3041012 - RNA, 19 nt, Artificial Sequence
  Description of Artificial Sequence: Synthetic oligonucleotide
cgaugcagaugaccacauu

SEQ ID NO: 3041013 - RNA, 19 nt, Artificial Sequence
  Description of Artificial Sequence: Synthetic oligonucleotide
  modified_base (15)..(15): a, c, u, g, unknown or other
aaaaguuuaacuuunuuuc

SEQ ID NO: 3041014 - RNA, 19 nt, Artificial Sequence
  Description of Artificial Sequence: Synthetic oligonucleotide
aacuauuuaagacuaacag

SEQ ID NO: 3041015 - RNA, 19 nt, Artificial Sequence
  Description of Artificial Sequence: Synthetic oligonucleotide
aaaguuaaugugcuuggcc

SEQ ID NO: 3041016 - RNA, 19 nt, Artificial Sequence
  Description of Artificial Sequence: Synthetic oligonucleotide
  modified_base (3)..(3): a, c, u, g, unknown or other
  modified_base (15)..(15): a, c, u, g, unknown or other
aanauuauuauaaanaaaa

SEQ ID NO: 3041017 - RNA, 19 nt, Artificial Sequence
  Description of Artificial Sequence: Synthetic oligonucleotide
aacaguuaaaauaacaguc

SEQ ID NO: 3041018 - RNA, 19 nt, Artificial Sequence
  Description of Artificial Sequence: Synthetic oligonucleotide
aagacuaacaguuaaaaua

SEQ ID NO: 3041019 - RNA, 19 nt, Artificial Sequence
  Description of Artificial Sequence: Synthetic oligonucleotide
  modified_base (7)..(7): a, c, u, g, unknown or other
aacuuunuuucuuucuuuc

SEQ ID NO: 3041020 - RNA, 19 nt, Artificial Sequence
  Description of Artificial Sequence: Synthetic oligonucleotide
  modified_base (5)..(5): a, c, u, g, unknown or other
  modified_base (17)..(17): a, c, u, g, unknown or other
uaaanauuauuauaaanaa

SEQ ID NO: 3041021 - RNA, 19 nt, Artificial Sequence
  Description of Artificial Sequence: Synthetic oligonucleotide
uaugagaaaguuaaugugc

SEQ ID NO: 3041022 - RNA, 19 nt, Artificial Sequence
  Description of Artificial Sequence: Synthetic oligonucleotide
cuaacaguuaaaauaacag

SEQ ID NO: 3041023 - RNA, 19 nt, Artificial Sequence
  Description of Artificial Sequence: Synthetic oligonucleotide
  modified_base (14)..(14): a, c, u, g, unknown or other
aaaguuuaacuuunuuucu

SEQ ID NO: 3041024 - RNA, 19 nt, Artificial Sequence
  Description of Artificial Sequence: Synthetic oligonucleotide
guuaaaauaacagucagug

SEQ ID NO: 3041025 - RNA, 19 nt, Artificial Sequence
  Description of Artificial Sequence: Synthetic oligonucleotide
uguaugagaaaguuaaugu

SEQ ID NO: 3041026 - RNA, 19 nt, Artificial Sequence
  Description of Artificial Sequence: Synthetic oligonucleotide
acucccauaaucuacaucu

SEQ ID NO: 3041027 - RNA, 19 nt, Artificial Sequence
  Description of Artificial Sequence: Synthetic oligonucleotide
  modified_base (6)..(6): a, c, u, g, unknown or other
  modified_base (18)..(18): a, c, u, g, unknown or other
auaaanauuauuauaaana

SEQ ID NO: 3041028 - RNA, 19 nt, Artificial Sequence
  Description of Artificial Sequence: Synthetic oligonucleotide
ugcaauaugguuuucgcug

SEQ ID NO: 3041029 - RNA, 19 nt, Artificial Sequence
  Description of Artificial Sequence: Synthetic oligonucleotide
aaucucuccguugaugucc

SEQ ID NO: 3041030 - RNA, 19 nt, Artificial Sequence
  Description of Artificial Sequence: Synthetic oligonucleotide
  modified_base (4)..(4): a, c, u, g, unknown or other
  modified_base (16)..(16): a, c, u, g, unknown or other
aaanauuauuauaaanaaa

SEQ ID NO: 3041031 - RNA, 19 nt, Artificial Sequence
  Description of Artificial Sequence: Synthetic oligonucleotide
  modified_base (10)..(10): a, c, u, g, unknown or other
uuuaacuuunuuucuuucu

SEQ ID NO: 3041032 - RNA, 19 nt, Artificial Sequence
  Description of Artificial Sequence: Synthetic oligonucleotide
aaguuaaugugcuuggcca

SEQ ID NO: 3041033 - RNA, 19 nt, Artificial Sequence
  Description of Artificial Sequence: Synthetic oligonucleotide
guaaggauggaccagcuag

SEQ ID NO: 3041034 - RNA, 19 nt, Artificial Sequence
  Description of Artificial Sequence: Synthetic oligonucleotide
acuauuuaagacuaacagu

SEQ ID NO: 3041035 - RNA, 19 nt, Artificial Sequence
  Description of Artificial Sequence: Synthetic oligonucleotide
agaaaguuaaugugcuugg

SEQ ID NO: 3041036 - RNA, 19 nt, Artificial Sequence
  Description of Artificial Sequence: Synthetic oligonucleotide
ucuuuaaguccucagcuca

SEQ ID NO: 3041037 - RNA, 19 nt, Artificial Sequence
  Description of Artificial Sequence: Synthetic oligonucleotide
auaaucuacaucuggguca

SEQ ID NO: 3041038 - RNA, 19 nt, Artificial Sequence
  Description of Artificial Sequence: Synthetic oligonucleotide
uaacaguuaaaauaacagu

SEQ ID NO: 3041039 - RNA, 19 nt, Artificial Sequence
  Description of Artificial Sequence: Synthetic oligonucleotide
uuuccgagccuuuugaggc

SEQ ID NO: 3041040 - RNA, 19 nt, Artificial Sequence
  Description of Artificial Sequence: Synthetic oligonucleotide
uaaaucucuccguugaugu

SEQ ID NO: 3041041 - RNA, 19 nt, Artificial Sequence
  Description of Artificial Sequence: Synthetic oligonucleotide
guaugagaaaguuaaugug

SEQ ID NO: 3041042 - RNA, 19 nt, Artificial Sequence
  Description of Artificial Sequence: Synthetic oligonucleotide
aauaacagucaguguauga

SEQ ID NO: 3041043 - RNA, 19 nt, Artificial Sequence
  Description of Artificial Sequence: Synthetic oligonucleotide
ucuauuugucagcugacgu

SEQ ID NO: 3041044 - RNA, 19 nt, Artificial Sequence
  Description of Artificial Sequence: Synthetic oligonucleotide
ucauacucgucguaaaucu

SEQ ID NO: 3041045 - RNA, 19 nt, Artificial Sequence
  Description of Artificial Sequence: Synthetic oligonucleotide
ucccauaaucuacaucugg

SEQ ID NO: 3041046 - RNA, 19 nt, Artificial Sequence
  Description of Artificial Sequence: Synthetic oligonucleotide
auaacagucaguguaugag

SEQ ID NO: 3041047 - RNA, 19 nt, Artificial Sequence
  Description of Artificial Sequence: Synthetic oligonucleotide
  modified_base (9)..(9): a, c, u, g, unknown or other
uuaacuuunuuucuuucuu

SEQ ID NO: 3041048 - RNA, 19 nt, Artificial Sequence
  Description of Artificial Sequence: Synthetic oligonucleotide
uucgcugucacucccauaa

SEQ ID NO: 3041049 - RNA, 19 nt, Artificial Sequence
  Description of Artificial Sequence: Synthetic oligonucleotide
uuaucaguuggcuuguccu

SEQ ID NO: 3041050 - RNA, 19 nt, Artificial Sequence
  Description of Artificial Sequence: Synthetic oligonucleotide
aucuacaucugggucaucc

SEQ ID NO: 3041051 - RNA, 19 nt, Artificial Sequence
  Description of Artificial Sequence: Synthetic oligonucleotide
uauuugucagcugacgucc

SEQ ID NO: 3041052 - RNA, 19 nt, Artificial Sequence
  Description of Artificial Sequence: Synthetic oligonucleotide
uaaggauggaccagcuagg

SEQ ID NO: 3041053 - RNA, 19 nt, Artificial Sequence
  Description of Artificial Sequence: Synthetic oligonucleotide
uuuaagacuaacaguuaaa

SEQ ID NO: 3041054 - RNA, 19 nt, Artificial Sequence
  Description of Artificial Sequence: Synthetic oligonucleotide
aguuaaugugcuuggccac

SEQ ID NO: 3041055 - RNA, 19 nt, Artificial Sequence
  Description of Artificial Sequence: Synthetic oligonucleotide
auuuaagacuaacaguuaa

SEQ ID NO: 3041056 - RNA, 19 nt, Artificial Sequence
  Description of Artificial Sequence: Synthetic oligonucleotide
ugggucauccucuuccucg

SEQ ID NO: 3041057 - RNA, 19 nt, Artificial Sequence
  Description of Artificial Sequence: Synthetic oligonucleotide
ucuuucuuuccuuuccgag

SEQ ID NO: 3041058 - RNA, 19 nt, Artificial Sequence
  Description of Artificial Sequence: Synthetic oligonucleotide
augguuuucgcugucacuc

SEQ ID NO: 3041059 - RNA, 19 nt, Artificial Sequence
  Description of Artificial Sequence: Synthetic oligonucleotide
agucuguuggcccuuauca

SEQ ID NO: 3041060 - RNA, 19 nt, Artificial Sequence
  Description of Artificial Sequence: Synthetic oligonucleotide
uuaagacuaacaguuaaaa

SEQ ID NO: 3041061 - RNA, 19 nt, Artificial Sequence
  Description of Artificial Sequence: Synthetic oligonucleotide
ucguaaaucucuccguuga

SEQ ID NO: 3041062 - RNA, 19 nt, Artificial Sequence
  Description of Artificial Sequence: Synthetic oligonucleotide
uuaaaauaacagucagugu

SEQ ID NO: 3041063 - RNA, 19 nt, Artificial Sequence
  Description of Artificial Sequence: Synthetic oligonucleotide
  modified_base (4)..(4): a, c, u, g, unknown or other
uuunuuucuuucuuucuuu

SEQ ID NO: 3041064 - RNA, 19 nt, Artificial Sequence
  Description of Artificial Sequence: Synthetic oligonucleotide
auaugguuuucgcugucac

SEQ ID NO: 3041065 - RNA, 19 nt, Artificial Sequence
  Description of Artificial Sequence: Synthetic oligonucleotide
caguuaaaauaacagucag

SEQ ID NO: 3041066 - RNA, 19 nt, Artificial Sequence
  Description of Artificial Sequence: Synthetic oligonucleotide
aaaucucuccguugauguc

SEQ ID NO: 3041067 - RNA, 19 nt, Artificial Sequence
  Description of Artificial Sequence: Synthetic oligonucleotide
agccuuuugaggcugaggu

SEQ ID NO: 3041068 - RNA, 19 nt, Artificial Sequence
  Description of Artificial Sequence: Synthetic oligonucleotide
cuuuccgagccuuuugagg

SEQ ID NO: 3041069 - RNA, 19 nt, Artificial Sequence
  Description of Artificial Sequence: Synthetic oligonucleotide
aggucuauuugucagcuga

SEQ ID NO: 3041070 - RNA, 19 nt, Artificial Sequence
  Description of Artificial Sequence: Synthetic oligonucleotide
cucgucguaaaucucuccg

SEQ ID NO: 3041071 - RNA, 19 nt, Artificial Sequence
  Description of Artificial Sequence: Synthetic oligonucleotide
aaaauaacagucaguguau

SEQ ID NO: 3041072 - RNA, 19 nt, Artificial Sequence
  Description of Artificial Sequence: Synthetic oligonucleotide
aaguccucagcucaccaca

SEQ ID NO: 3041073 - RNA, 19 nt, Artificial Sequence
  Description of Artificial Sequence: Synthetic oligonucleotide
caguguaugagaaaguuaa

SEQ ID NO: 3041074 - RNA, 19 nt, Artificial Sequence
  Description of Artificial Sequence: Synthetic oligonucleotide
guugauguccucugccugg

SEQ ID NO: 3041075 - RNA, 19 nt, Artificial Sequence
  Description of Artificial Sequence: Synthetic oligonucleotide
ugugcuuggccacugguaa

SEQ ID NO: 3041076 - RNA, 19 nt, Artificial Sequence
  Description of Artificial Sequence: Synthetic oligonucleotide
uagggcuucuuuaaguccu

SEQ ID NO: 3041077 - RNA, 19 nt, Artificial Sequence
  Description of Artificial Sequence: Synthetic oligonucleotide
uaagacuaacaguuaaaau

SEQ ID NO: 3041078 - RNA, 19 nt, Artificial Sequence
  Description of Artificial Sequence: Synthetic oligonucleotide
uuguccugcaauaugguuu

SEQ ID NO: 3041079 - RNA, 19 nt, Artificial Sequence
  Description of Artificial Sequence: Synthetic oligonucleotide
  modified_base (3)..(3): a, c, u, g, unknown or other
uunuuucuuucuuucuuuc

SEQ ID NO: 3041080 - RNA, 19 nt, Artificial Sequence
  Description of Artificial Sequence: Synthetic oligonucleotide
agacuaacaguuaaaauaa

SEQ ID NO: 3041081 - RNA, 19 nt, Artificial Sequence
  Description of Artificial Sequence: Synthetic oligonucleotide
acuaacaguuaaaauaaca

SEQ ID NO: 3041082 - RNA, 19 nt, Artificial Sequence
  Description of Artificial Sequence: Synthetic oligonucleotide
uaacagucaguguaugaga

SEQ ID NO: 3041083 - RNA, 19 nt, Artificial Sequence
  Description of Artificial Sequence: Synthetic oligonucleotide
ugucacucccauaaucuac

SEQ ID NO: 3041084 - RNA, 19 nt, Artificial Sequence
  Description of Artificial Sequence: Synthetic oligonucleotide
guguaugagaaaguuaaug

SEQ ID NO: 3041085 - RNA, 19 nt, Artificial Sequence
  Description of Artificial Sequence: Synthetic oligonucleotide
  modified_base (2)..(2): a, c, u, g, unknown or other
unuuucuuucuuucuuucu

SEQ ID NO: 3041086 - RNA, 19 nt, Artificial Sequence
  Description of Artificial Sequence: Synthetic oligonucleotide
  modified_base (6)..(6): a, c, u, g, unknown or other
acuuunuuucuuucuuucu

SEQ ID NO: 3041087 - RNA, 19 nt, Artificial Sequence
  Description of Artificial Sequence: Synthetic oligonucleotide
cagucaguguaugagaaag

SEQ ID NO: 3041088 - RNA, 19 nt, Artificial Sequence
  Description of Artificial Sequence: Synthetic oligonucleotide
ucuguuggcccuuaucagu

SEQ ID NO: 3041089 - RNA, 19 nt, Artificial Sequence
  Description of Artificial Sequence: Synthetic oligonucleotide
aaauaacagucaguguaug

SEQ ID NO: 3041090 - RNA, 19 nt, Artificial Sequence
  Description of Artificial Sequence: Synthetic oligonucleotide
aaugugcuuggccacuggu

SEQ ID NO: 3041091 - RNA, 19 nt, Artificial Sequence
  Description of Artificial Sequence: Synthetic oligonucleotide
uggccacugguaaggaugg

SEQ ID NO: 3041092 - RNA, 19 nt, Artificial Sequence
  Description of Artificial Sequence: Synthetic oligonucleotide
cuauuugucagcugacguc

SEQ ID NO: 3041093 - RNA, 19 nt, Artificial Sequence
  Description of Artificial Sequence: Synthetic oligonucleotide
uuaaguccucagcucacca

SEQ ID NO: 3041094 - RNA, 19 nt, Artificial Sequence
  Description of Artificial Sequence: Synthetic oligonucleotide
  modified_base (12)..(12): a, c, u, g, unknown or other
aguuuaacuuunuuucuuu

SEQ ID NO: 3041095 - RNA, 19 nt, Artificial Sequence
  Description of Artificial Sequence: Synthetic oligonucleotide
aaggauggaccagcuaggg

SEQ ID NO: 3041096 - RNA, 19 nt, Artificial Sequence
  Description of Artificial Sequence: Synthetic oligonucleotide
aucaguuggcuuguccugc

SEQ ID NO: 3041097 - RNA, 19 nt, Artificial Sequence
  Description of Artificial Sequence: Synthetic oligonucleotide
uccugcaauaugguuuucg

SEQ ID NO: 3041098 - RNA, 19 nt, Artificial Sequence
  Description of Artificial Sequence: Synthetic oligonucleotide
uccguugauguccucugcc

SEQ ID NO: 3041099 - RNA, 19 nt, Artificial Sequence
  Description of Artificial Sequence: Synthetic oligonucleotide
uaucaguuggcuuguccug

SEQ ID NO: 3041100 - RNA, 19 nt, Artificial Sequence
  Description of Artificial Sequence: Synthetic oligonucleotide
uccucagcucaccacacca

SEQ ID NO: 3041101 - RNA, 19 nt, Artificial Sequence
  Description of Artificial Sequence: Synthetic oligonucleotide
cuagggcuucuuuaagucc

SEQ ID NO: 3041102 - RNA, 19 nt, Artificial Sequence
  Description of Artificial Sequence: Synthetic oligonucleotide
ucccaacuauuuaagacua

SEQ ID NO: 3041103 - RNA, 19 nt, Artificial Sequence
  Description of Artificial Sequence: Synthetic oligonucleotide
ucuuccucgucauacucgu

SEQ ID NO: 3041104 - RNA, 19 nt, Artificial Sequence
  Description of Artificial Sequence: Synthetic oligonucleotide
aggauggaccagcuagggc

SEQ ID NO: 3041105 - RNA, 19 nt, Artificial Sequence
  Description of Artificial Sequence: Synthetic oligonucleotide
ucaguguaugagaaaguua

SEQ ID NO: 3041106 - RNA, 19 nt, Artificial Sequence
  Description of Artificial Sequence: Synthetic oligonucleotide
ucagcucaccacaccacag

SEQ ID NO: 3041107 - RNA, 19 nt, Artificial Sequence
  Description of Artificial Sequence: Synthetic oligonucleotide
aauaugguuuucgcuguca

SEQ ID NO: 3041108 - RNA, 19 nt, Artificial Sequence
  Description of Artificial Sequence: Synthetic oligonucleotide
uucuuuaaguccucagcuc

SEQ ID NO: 3041109 - RNA, 19 nt, Artificial Sequence
  Description of Artificial Sequence: Synthetic oligonucleotide
acucgucguaaaucucucc

SEQ ID NO: 3041110 - RNA, 19 nt, Artificial Sequence
  Description of Artificial Sequence: Synthetic oligonucleotide
ugacgucccaacuauuuaa

SEQ ID NO: 3041111 - RNA, 19 nt, Artificial Sequence
  Description of Artificial Sequence: Synthetic oligonucleotide
cucaccacaccacagucug

SEQ ID NO: 3041112 - RNA, 19 nt, Artificial Sequence
  Description of Artificial Sequence: Synthetic oligonucleotide
agcucaccacaccacaguc

SEQ ID NO: 3041113 - RNA, 19 nt, Artificial Sequence
  Description of Artificial Sequence: Synthetic oligonucleotide
ugcuuggccacugguaagg

SEQ ID NO: 3041114 - RNA, 19 nt, Artificial Sequence
  Description of Artificial Sequence: Synthetic oligonucleotide
  modified_base (11)..(11): a, c, u, g, unknown or other
guuuaacuuunuuucuuuc

SEQ ID NO: 3041115 - RNA, 19 nt, Artificial Sequence
  Description of Artificial Sequence: Synthetic oligonucleotide
uccuuuccgagccuuuuga

SEQ ID NO: 3041116 - RNA, 19 nt, Artificial Sequence
  Description of Artificial Sequence: Synthetic oligonucleotide
caacuauuuaagacuaaca

SEQ ID NO: 3041117 - RNA, 19 nt, Artificial Sequence
  Description of Artificial Sequence: Synthetic oligonucleotide
aacagucaguguaugagaa

SEQ ID NO: 3041118 - RNA, 19 nt, Artificial Sequence
  Description of Artificial Sequence: Synthetic oligonucleotide
guuggcccuuaucaguugg

SEQ ID NO: 3041119 - RNA, 19 nt, Artificial Sequence
  Description of Artificial Sequence: Synthetic oligonucleotide
  modified_base (8)..(8): a, c, u, g, unknown or other
uaacuuunuuucuuucuuu

SEQ ID NO: 3041120 - RNA, 19 nt, Artificial Sequence
  Description of Artificial Sequence: Synthetic oligonucleotide
ucagcugacgucccaacua

SEQ ID NO: 3041121 - RNA, 19 nt, Artificial Sequence
  Description of Artificial Sequence: Synthetic oligonucleotide
uaaugugcuuggccacugg

SEQ ID NO: 3041122 - RNA, 19 nt, Artificial Sequence
  Description of Artificial Sequence: Synthetic oligonucleotide
  modified_base (13)..(13): a, c, u, g, unknown or other
aaguuuaacuuunuuucuu

SEQ ID NO: 3041123 - RNA, 19 nt, Artificial Sequence
  Description of Artificial Sequence: Synthetic oligonucleotide
cccauaaucuacaucuggg

SEQ ID NO: 3041124 - RNA, 19 nt, Artificial Sequence
  Description of Artificial Sequence: Synthetic oligonucleotide
uuuaaguccucagcucacc

SEQ ID NO: 3041125 - RNA, 19 nt, Artificial Sequence
  Description of Artificial Sequence: Synthetic oligonucleotide
aguuaaaauaacagucagu

SEQ ID NO: 3041126 - RNA, 19 nt, Artificial Sequence
  Description of Artificial Sequence: Synthetic oligonucleotide
ugaggucuauuugucagcu

SEQ ID NO: 3041127 - RNA, 19 nt, Artificial Sequence
  Description of Artificial Sequence: Synthetic oligonucleotide
guaaaucucuccguugaug

SEQ ID NO: 3041128 - RNA, 19 nt, Artificial Sequence
  Description of Artificial Sequence: Synthetic oligonucleotide
uucuuucuuuccuuuccga

SEQ ID NO: 3041129 - RNA, 19 nt, Artificial Sequence
  Description of Artificial Sequence: Synthetic oligonucleotide
gcugaggucuauuugucag

SEQ ID NO: 3041130 - RNA, 19 nt, Artificial Sequence
  Description of Artificial Sequence: Synthetic oligonucleotide
cuuuaaguccucagcucac

SEQ ID NO: 3041131 - RNA, 19 nt, Artificial Sequence
  Description of Artificial Sequence: Synthetic oligonucleotide
gucuauuugucagcugacg

SEQ ID NO: 3041132 - RNA, 19 nt, Artificial Sequence
  Description of Artificial Sequence: Synthetic oligonucleotide
agcuagggcuucuuuaagu

SEQ ID NO: 3041133 - RNA, 19 nt, Artificial Sequence
  Description of Artificial Sequence: Synthetic oligonucleotide
uaugguuuucgcugucacu

SEQ ID NO: 3041134 - RNA, 19 nt, Artificial Sequence
  Description of Artificial Sequence: Synthetic oligonucleotide
uguccugcaauaugguuuu

SEQ ID NO: 3041135 - RNA, 19 nt, Artificial Sequence
  Description of Artificial Sequence: Synthetic oligonucleotide
cugaggucuauuugucagc

SEQ ID NO: 3041136 - RNA, 19 nt, Artificial Sequence
  Description of Artificial Sequence: Synthetic oligonucleotide
ucuccguugauguccucug

SEQ ID NO: 3041137 - RNA, 19 nt, Artificial Sequence
  Description of Artificial Sequence: Synthetic oligonucleotide
cacaccacagucuguuggc

SEQ ID NO: 3041138 - RNA, 19 nt, Artificial Sequence
  Description of Artificial Sequence: Synthetic oligonucleotide
ucuacaucugggucauccu

SEQ ID NO: 3041139 - RNA, 19 nt, Artificial Sequence
  Description of Artificial Sequence: Synthetic oligonucleotide
gacgucccaacuauuuaag

SEQ ID NO: 3041140 - RNA, 19 nt, Artificial Sequence
  Description of Artificial Sequence: Synthetic oligonucleotide
uaaguccucagcucaccac

SEQ ID NO: 3041141 - RNA, 19 nt, Artificial Sequence
  Description of Artificial Sequence: Synthetic oligonucleotide
gucguaaaucucuccguug

SEQ ID NO: 3041142 - RNA, 19 nt, Artificial Sequence
  Description of Artificial Sequence: Synthetic oligonucleotide
gucuguuggcccuuaucag

SEQ ID NO: 3041143 - RNA, 19 nt, Artificial Sequence
  Description of Artificial Sequence: Synthetic oligonucleotide
ggcuuguccugcaauaugg

SEQ ID NO: 3041144 - RNA, 19 nt, Artificial Sequence
  Description of Artificial Sequence: Synthetic oligonucleotide
uggcuuguccugcaauaug

SEQ ID NO: 3041145 - RNA, 19 nt, Artificial Sequence
  Description of Artificial Sequence: Synthetic oligonucleotide
gauguccucugccuggauc

SEQ ID NO: 3041146 - RNA, 19 nt, Artificial Sequence
  Description of Artificial Sequence: Synthetic oligonucleotide
auacucgucguaaaucucu

SEQ ID NO: 3041147 - RNA, 19 nt, Artificial Sequence
  Description of Artificial Sequence: Synthetic oligonucleotide
cugguaaggauggaccagc

SEQ ID NO: 3041148 - RNA, 19 nt, Artificial Sequence
  Description of Artificial Sequence: Synthetic oligonucleotide
uuccuuuccgagccuuuug

SEQ ID NO: 3041149 - RNA, 19 nt, Artificial Sequence
  Description of Artificial Sequence: Synthetic oligonucleotide
uuugucagcugacguccca

SEQ ID NO: 3041150 - RNA, 19 nt, Artificial Sequence
  Description of Artificial Sequence: Synthetic oligonucleotide
cuucuuuaaguccucagcu

SEQ ID NO: 3041151 - RNA, 19 nt, Artificial Sequence
  Description of Artificial Sequence: Synthetic oligonucleotide
gucccaacuauuuaagacu

SEQ ID NO: 3041152 - RNA, 19 nt, Artificial Sequence
  Description of Artificial Sequence: Synthetic oligonucleotide
uuaaugugcuuggccacug

SEQ ID NO: 3041153 - RNA, 19 nt, Artificial Sequence
  Description of Artificial Sequence: Synthetic oligonucleotide
ucgucguaaaucucuccgu

SEQ ID NO: 3041154 - RNA, 19 nt, Artificial Sequence
  Description of Artificial Sequence: Synthetic oligonucleotide
uaaucuacaucugggucau

SEQ ID NO: 3041155 - RNA, 19 nt, Artificial Sequence
  Description of Artificial Sequence: Synthetic oligonucleotide
ugguuuucgcugucacucc

SEQ ID NO: 3041156 - RNA, 19 nt, Artificial Sequence
  Description of Artificial Sequence: Synthetic oligonucleotide
cuacaucugggucauccuc

SEQ ID NO: 3041157 - RNA, 19 nt, Artificial Sequence
  Description of Artificial Sequence: Synthetic oligonucleotide
gcccuuaucaguuggcuug

SEQ ID NO: 3041158 - RNA, 19 nt, Artificial Sequence
  Description of Artificial Sequence: Synthetic oligonucleotide
acugguaaggauggaccag

SEQ ID NO: 3041159 - RNA, 19 nt, Artificial Sequence
  Description of Artificial Sequence: Synthetic oligonucleotide
uacucgucguaaaucucuc

SEQ ID NO: 3041160 - RNA, 19 nt, Artificial Sequence
  Description of Artificial Sequence: Synthetic oligonucleotide
ggauggaccagcuagggcu

SEQ ID NO: 3041161 - RNA, 19 nt, Artificial Sequence
  Description of Artificial Sequence: Synthetic oligonucleotide
cauacucgucguaaaucuc

SEQ ID NO: 3041162 - RNA, 19 nt, Artificial Sequence
  Description of Artificial Sequence: Synthetic oligonucleotide
ccugcaauaugguuuucgc

SEQ ID NO: 3041163 - RNA, 19 nt, Artificial Sequence
  Description of Artificial Sequence: Synthetic oligonucleotide
gucauacucgucguaaauc

SEQ ID NO: 3041164 - RNA, 19 nt, Artificial Sequence
  Description of Artificial Sequence: Synthetic oligonucleotide
uuggcccuuaucaguuggc

SEQ ID NO: 3041165 - RNA, 19 nt, Artificial Sequence
  Description of Artificial Sequence: Synthetic oligonucleotide
uuuucgcugucacucccau

SEQ ID NO: 3041166 - RNA, 19 nt, Artificial Sequence
  Description of Artificial Sequence: Synthetic oligonucleotide
auuugucagcugacguccc

SEQ ID NO: 3041167 - RNA, 19 nt, Artificial Sequence
  Description of Artificial Sequence: Synthetic oligonucleotide
gacuaacaguuaaaauaac

SEQ ID NO: 3041168 - RNA, 19 nt, Artificial Sequence
  Description of Artificial Sequence: Synthetic oligonucleotide
ugguaaggauggaccagcu

SEQ ID NO: 3041169 - RNA, 19 nt, Artificial Sequence
  Description of Artificial Sequence: Synthetic oligonucleotide
ccacugguaaggauggacc

SEQ ID NO: 3041170 - RNA, 19 nt, Artificial Sequence
  Description of Artificial Sequence: Synthetic oligonucleotide
ucaguuggcuuguccugca

SEQ ID NO: 3041171 - RNA, 19 nt, Artificial Sequence
  Description of Artificial Sequence: Synthetic oligonucleotide
uguuggcccuuaucaguug

SEQ ID NO: 3041172 - RNA, 19 nt, Artificial Sequence
  Description of Artificial Sequence: Synthetic oligonucleotide
acgucccaacuauuuaaga

SEQ ID NO: 3041173 - RNA, 19 nt, Artificial Sequence
  Description of Artificial Sequence: Synthetic oligonucleotide
accagcuagggcuucuuua

SEQ ID NO: 3041174 - RNA, 19 nt, Artificial Sequence
  Description of Artificial Sequence: Synthetic oligonucleotide
ucgucauacucgucguaaa

SEQ ID NO: 3041175 - RNA, 19 nt, Artificial Sequence
  Description of Artificial Sequence: Synthetic oligonucleotide
aguuggcuuguccugcaau

SEQ ID NO: 3041176 - RNA, 19 nt, Artificial Sequence
  Description of Artificial Sequence: Synthetic oligonucleotide
ccaacuauuuaagacuaac

SEQ ID NO: 3041177 - RNA, 19 nt, Artificial Sequence
  Description of Artificial Sequence: Synthetic oligonucleotide
ucugccuggaucuccucuu

SEQ ID NO: 3041178 - RNA, 19 nt, Artificial Sequence
  Description of Artificial Sequence: Synthetic oligonucleotide
gagccuuuugaggcugagg

SEQ ID NO: 3041179 - RNA, 19 nt, Artificial Sequence
  Description of Artificial Sequence: Synthetic oligonucleotide
gcuagggcuucuuuaaguc

SEQ ID NO: 3041180 - RNA, 19 nt, Artificial Sequence
  Description of Artificial Sequence: Synthetic oligonucleotide
acagucaguguaugagaaa

SEQ ID NO: 3041181 - RNA, 19 nt, Artificial Sequence
  Description of Artificial Sequence: Synthetic oligonucleotide
cacugguaaggauggacca

SEQ ID NO: 3041182 - RNA, 19 nt, Artificial Sequence
  Description of Artificial Sequence: Synthetic oligonucleotide
cucccauaaucuacaucug

SEQ ID NO: 3041183 - RNA, 19 nt, Artificial Sequence
  Description of Artificial Sequence: Synthetic oligonucleotide
  modified_base (5)..(5): a, c, u, g, unknown or other
cuuunuuucuuucuuucuu

SEQ ID NO: 3041184 - RNA, 19 nt, Artificial Sequence
  Description of Artificial Sequence: Synthetic oligonucleotide
gucacucccauaaucuaca

SEQ ID NO: 3041185 - RNA, 19 nt, Artificial Sequence
  Description of Artificial Sequence: Synthetic oligonucleotide
ugucagcugacgucccaac

SEQ ID NO: 3041186 - RNA, 19 nt, Artificial Sequence
  Description of Artificial Sequence: Synthetic oligonucleotide
gaggucuauuugucagcug

SEQ ID NO: 3041187 - RNA, 19 nt, Artificial Sequence
  Description of Artificial Sequence: Synthetic oligonucleotide
aguccucagcucaccacac

SEQ ID NO: 3041188 - RNA, 19 nt, Artificial Sequence
  Description of Artificial Sequence: Synthetic oligonucleotide
guuggcuuguccugcaaua

SEQ ID NO: 3041189 - RNA, 19 nt, Artificial Sequence
  Description of Artificial Sequence: Synthetic oligonucleotide
cgucccaacuauuuaagac

SEQ ID NO: 3041190 - RNA, 19 nt, Artificial Sequence
  Description of Artificial Sequence: Synthetic oligonucleotide
gguuuucgcugucacuccc

SEQ ID NO: 3041191 - RNA, 19 nt, Artificial Sequence
  Description of Artificial Sequence: Synthetic oligonucleotide
ccacaccacagucuguugg

SEQ ID NO: 3041192 - RNA, 19 nt, Artificial Sequence
  Description of Artificial Sequence: Synthetic oligonucleotide
uugauguccucugccugga

SEQ ID NO: 3041193 - RNA, 19 nt, Artificial Sequence
  Description of Artificial Sequence: Synthetic oligonucleotide
uuggcuuguccugcaauau

SEQ ID NO: 3041194 - RNA, 19 nt, Artificial Sequence
  Description of Artificial Sequence: Synthetic oligonucleotide
aggcugaggucuauuuguc

SEQ ID NO: 3041195 - RNA, 19 nt, Artificial Sequence
  Description of Artificial Sequence: Synthetic oligonucleotide
uuccgagccuuuugaggcu

SEQ ID NO: 3041196 - RNA, 19 nt, Artificial Sequence
  Description of Artificial Sequence: Synthetic oligonucleotide
cucagcucaccacaccaca

SEQ ID NO: 3041197 - RNA, 19 nt, Artificial Sequence
  Description of Artificial Sequence: Synthetic oligonucleotide
caauaugguuuucgcuguc

SEQ ID NO: 3041198 - RNA, 19 nt, Artificial Sequence
  Description of Artificial Sequence: Synthetic oligonucleotide
agucaguguaugagaaagu

SEQ ID NO: 3041199 - RNA, 19 nt, Artificial Sequence
  Description of Artificial Sequence: Synthetic oligonucleotide
gugcuuggccacugguaag

SEQ ID NO: 3041200 - RNA, 19 nt, Artificial Sequence
  Description of Artificial Sequence: Synthetic oligonucleotide
uggcccuuaucaguuggcu

SEQ ID NO: 3041201 - RNA, 19 nt, Artificial Sequence
  Description of Artificial Sequence: Synthetic oligonucleotide
cacucccauaaucuacauc

SEQ ID NO: 3041202 - RNA, 19 nt, Artificial Sequence
  Description of Artificial Sequence: Synthetic oligonucleotide
cagcuagggcuucuuuaag

SEQ ID NO: 3041203 - RNA, 19 nt, Artificial Sequence
  Description of Artificial Sequence: Synthetic oligonucleotide
uccgagccuuuugaggcug

SEQ ID NO: 3041204 - RNA, 19 nt, Artificial Sequence
  Description of Artificial Sequence: Synthetic oligonucleotide
accacaccacagucuguug

SEQ ID NO: 3041205 - RNA, 19 nt, Artificial Sequence
  Description of Artificial Sequence: Synthetic oligonucleotide
cuccguugauguccucugc

SEQ ID NO: 3041206 - RNA, 19 nt, Artificial Sequence
  Description of Artificial Sequence: Synthetic oligonucleotide
ucacucccauaaucuacau

SEQ ID NO: 3041207 - RNA, 19 nt, Artificial Sequence
  Description of Artificial Sequence: Synthetic oligonucleotide
uugucagcugacgucccaa

SEQ ID NO: 3041208 - RNA, 19 nt, Artificial Sequence
  Description of Artificial Sequence: Synthetic oligonucleotide
ucuuuccuuuccgagccuu

SEQ ID NO: 3041209 - RNA, 19 nt, Artificial Sequence
  Description of Artificial Sequence: Synthetic oligonucleotide
uuuccuuuccgagccuuuu

SEQ ID NO: 3041210 - RNA, 19 nt, Artificial Sequence
  Description of Artificial Sequence: Synthetic oligonucleotide
cagucuguuggcccuuauc

SEQ ID NO: 3041211 - RNA, 19 nt, Artificial Sequence
  Description of Artificial Sequence: Synthetic oligonucleotide
aguguaugagaaaguuaau

SEQ ID NO: 3041212 - RNA, 19 nt, Artificial Sequence
  Description of Artificial Sequence: Synthetic oligonucleotide
uuugaggcugaggucuauu

SEQ ID NO: 3041213 - RNA, 19 nt, Artificial Sequence
  Description of Artificial Sequence: Synthetic oligonucleotide
cucgucauacucgucguaa

SEQ ID NO: 3041214 - RNA, 19 nt, Artificial Sequence
  Description of Artificial Sequence: Synthetic oligonucleotide
cugcaauaugguuuucgcu

SEQ ID NO: 3041215 - RNA, 19 nt, Artificial Sequence
  Description of Artificial Sequence: Synthetic oligonucleotide
gucaguguaugagaaaguu

SEQ ID NO: 3041216 - RNA, 19 nt, Artificial Sequence
  Description of Artificial Sequence: Synthetic oligonucleotide
agggcuucuuuaaguccuc

SEQ ID NO: 3041217 - RNA, 19 nt, Artificial Sequence
  Description of Artificial Sequence: Synthetic oligonucleotide
ccuuuccgagccuuuugag

SEQ ID NO: 3041218 - RNA, 19 nt, Artificial Sequence
  Description of Artificial Sequence: Synthetic oligonucleotide
guuaaugugcuuggccacu

SEQ ID NO: 3041219 - RNA, 19 nt, Artificial Sequence
  Description of Artificial Sequence: Synthetic oligonucleotide
gcaauaugguuuucgcugu

SEQ ID NO: 3041220 - RNA, 19 nt, Artificial Sequence
  Description of Artificial Sequence: Synthetic oligonucleotide
uuuugaggcugaggucuau

SEQ ID NO: 3041221 - RNA, 19 nt, Artificial Sequence
  Description of Artificial Sequence: Synthetic oligonucleotide
cugucacucccauaaucua

SEQ ID NO: 3041222 - RNA, 19 nt, Artificial Sequence
  Description of Artificial Sequence: Synthetic oligonucleotide
guuuucgcugucacuccca

SEQ ID NO: 3041223 - RNA, 19 nt, Artificial Sequence
  Description of Artificial Sequence: Synthetic oligonucleotide
cugacgucccaacuauuua

SEQ ID NO: 3041224 - RNA, 19 nt, Artificial Sequence
  Description of Artificial Sequence: Synthetic oligonucleotide
aucucuccguugauguccu

SEQ ID NO: 3041225 - RNA, 19 nt, Artificial Sequence
  Description of Artificial Sequence: Synthetic oligonucleotide
uuucgcugucacucccaua

SEQ ID NO: 3041226 - RNA, 19 nt, Artificial Sequence
  Description of Artificial Sequence: Synthetic oligonucleotide
ggucuauuugucagcugac

SEQ ID NO: 3041227 - RNA, 19 nt, Artificial Sequence
  Description of Artificial Sequence: Synthetic oligonucleotide
ugauguccucugccuggau

SEQ ID NO: 3041228 - RNA, 19 nt, Artificial Sequence
  Description of Artificial Sequence: Synthetic oligonucleotide
gccacugguaaggauggac

SEQ ID NO: 3041229 - RNA, 19 nt, Artificial Sequence
  Description of Artificial Sequence: Synthetic oligonucleotide
cugggucauccucuuccuc

SEQ ID NO: 3041230 - RNA, 19 nt, Artificial Sequence
  Description of Artificial Sequence: Synthetic oligonucleotide
cuuuugaggcugaggucua

SEQ ID NO: 3041231 - RNA, 19 nt, Artificial Sequence
  Description of Artificial Sequence: Synthetic oligonucleotide
ucgcugucacucccauaau

SEQ ID NO: 3041232 - RNA, 19 nt, Artificial Sequence
  Description of Artificial Sequence: Synthetic oligonucleotide
ggaucuccucuuugaugug

SEQ ID NO: 3041233 - RNA, 19 nt, Artificial Sequence
  Description of Artificial Sequence: Synthetic oligonucleotide
augugcuuggccacuggua

SEQ ID NO: 3041234 - RNA, 19 nt, Artificial Sequence
  Description of Artificial Sequence: Synthetic oligonucleotide
cuuguccugcaauaugguu

SEQ ID NO: 3041235 - RNA, 19 nt, Artificial Sequence
  Description of Artificial Sequence: Synthetic oligonucleotide
ccuuuugaggcugaggucu

SEQ ID NO: 3041236 - RNA, 19 nt, Artificial Sequence
  Description of Artificial Sequence: Synthetic oligonucleotide
ccagcuagggcuucuuuaa

SEQ ID NO: 3041237 - RNA, 19 nt, Artificial Sequence
  Description of Artificial Sequence: Synthetic oligonucleotide
gucagcugacgucccaacu

SEQ ID NO: 3041238 - RNA, 19 nt, Artificial Sequence
  Description of Artificial Sequence: Synthetic oligonucleotide
acagucuguuggcccuuau

SEQ ID NO: 3041239 - RNA, 19 nt, Artificial Sequence
  Description of Artificial Sequence: Synthetic oligonucleotide
ccauaaucuacaucugggu

SEQ ID NO: 3041240 - RNA, 19 nt, Artificial Sequence
  Description of Artificial Sequence: Synthetic oligonucleotide
cuguuggcccuuaucaguu

SEQ ID NO: 3041241 - RNA, 19 nt, Artificial Sequence
  Description of Artificial Sequence: Synthetic oligonucleotide
gccuuuugaggcugagguc

SEQ ID NO: 3041242 - RNA, 19 nt, Artificial Sequence
  Description of Artificial Sequence: Synthetic oligonucleotide
ccucagcucaccacaccac

SEQ ID NO: 3041243 - RNA, 19 nt, Artificial Sequence
  Description of Artificial Sequence: Synthetic oligonucleotide
cguugauguccucugccug

SEQ ID NO: 3041244 - RNA, 19 nt, Artificial Sequence
  Description of Artificial Sequence: Synthetic oligonucleotide
gguaaggauggaccagcua

SEQ ID NO: 3041245 - RNA, 19 nt, Artificial Sequence
  Description of Artificial Sequence: Synthetic oligonucleotide
uguccucugccuggaucuc

SEQ ID NO: 3041246 - RNA, 19 nt, Artificial Sequence
  Description of Artificial Sequence: Synthetic oligonucleotide
cucuccguugauguccucu

SEQ ID NO: 3041247 - RNA, 19 nt, Artificial Sequence
  Description of Artificial Sequence: Synthetic oligonucleotide
cgcugucacucccauaauc

SEQ ID NO: 3041248 - RNA, 19 nt, Artificial Sequence
  Description of Artificial Sequence: Synthetic oligonucleotide
gauggaccagcuagggcuu

SEQ ID NO: 3041249 - RNA, 19 nt, Artificial Sequence
  Description of Artificial Sequence: Synthetic oligonucleotide
cagcucaccacaccacagu

SEQ ID NO: 3041250 - RNA, 19 nt, Artificial Sequence
  Description of Artificial Sequence: Synthetic oligonucleotide
cagcugacgucccaacuau

SEQ ID NO: 3041251 - RNA, 19 nt, Artificial Sequence
  Description of Artificial Sequence: Synthetic oligonucleotide
cuuggccacugguaaggau

SEQ ID NO: 3041252 - RNA, 19 nt, Artificial Sequence
  Description of Artificial Sequence: Synthetic oligonucleotide
ucucuccguugauguccuc

SEQ ID NO: 3041253 - RNA, 19 nt, Artificial Sequence
  Description of Artificial Sequence: Synthetic oligonucleotide
cuuuccuuuccgagccuuu

SEQ ID NO: 3041254 - RNA, 19 nt, Artificial Sequence
  Description of Artificial Sequence: Synthetic oligonucleotide
caccacaccacagucuguu

SEQ ID NO: 3041255 - RNA, 19 nt, Artificial Sequence
  Description of Artificial Sequence: Synthetic oligonucleotide
gaccagcuagggcuucuuu

SEQ ID NO: 3041256 - RNA, 19 nt, Artificial Sequence
  Description of Artificial Sequence: Synthetic oligonucleotide
caguuggcuuguccugcaa

SEQ ID NO: 3041257 - RNA, 19 nt, Artificial Sequence
  Description of Artificial Sequence: Synthetic oligonucleotide
agcugacgucccaacuauu

SEQ ID NO: 3041258 - RNA, 19 nt, Artificial Sequence
  Description of Artificial Sequence: Synthetic oligonucleotide
gcugacgucccaacuauuu

SEQ ID NO: 3041259 - RNA, 19 nt, Artificial Sequence
  Description of Artificial Sequence: Synthetic oligonucleotide
cccaacuauuuaagacuaa

SEQ ID NO: 3041260 - RNA, 19 nt, Artificial Sequence
  Description of Artificial Sequence: Synthetic oligonucleotide
gggcuucuuuaaguccuca

SEQ ID NO: 3041261 - RNA, 19 nt, Artificial Sequence
  Description of Artificial Sequence: Synthetic oligonucleotide
ggcccuuaucaguuggcuu

SEQ ID NO: 3041262 - RNA, 19 nt, Artificial Sequence
  Description of Artificial Sequence: Synthetic oligonucleotide
ccguugauguccucugccu

SEQ ID NO: 3041263 - RNA, 19 nt, Artificial Sequence
  Description of Artificial Sequence: Synthetic oligonucleotide
gcuuggccacugguaagga

SEQ ID NO: 3041264 - RNA, 19 nt, Artificial Sequence
  Description of Artificial Sequence: Synthetic oligonucleotide
gcucaccacaccacagucu

SEQ ID NO: 3041265 - RNA, 19 nt, Artificial Sequence
  Description of Artificial Sequence: Synthetic oligonucleotide
guccugcaauaugguuuuc

SEQ ID NO: 3041266 - RNA, 19 nt, Artificial Sequence
  Description of Artificial Sequence: Synthetic oligonucleotide
ccuuaucaguuggcuuguc

SEQ ID NO: 3041267 - RNA, 19 nt, Artificial Sequence
  Description of Artificial Sequence: Synthetic oligonucleotide
cacagucuguuggcccuua

SEQ ID NO: 3041268 - RNA, 19 nt, Artificial Sequence
  Description of Artificial Sequence: Synthetic oligonucleotide
cgagccuuuugaggcugag

SEQ ID NO: 3041269 - RNA, 19 nt, Artificial Sequence
  Description of Artificial Sequence: Synthetic oligonucleotide
cgucauacucgucguaaau

SEQ ID NO: 3041270 - RNA, 19 nt, Artificial Sequence
  Description of Artificial Sequence: Synthetic oligonucleotide
ccucgucauacucgucgua

SEQ ID NO: 3041271 - RNA, 19 nt, Artificial Sequence
  Description of Artificial Sequence: Synthetic oligonucleotide
ccgagccuuuugaggcuga

SEQ ID NO: 3041272 - RNA, 19 nt, Artificial Sequence
  Description of Artificial Sequence: Synthetic oligonucleotide
cguaaaucucuccguugau

SEQ ID NO: 3041273 - RNA, 19 nt, Artificial Sequence
  Description of Artificial Sequence: Synthetic oligonucleotide
cccuuaucaguuggcuugu

SEQ ID NO: 3041274 - RNA, 19 nt, Artificial Sequence
  Description of Artificial Sequence: Synthetic oligonucleotide
ccacagucuguuggcccuu

SEQ ID NO: 3041275 - RNA, 19 nt, Artificial Sequence
  Description of Artificial Sequence: Synthetic oligonucleotide
uucuaaacaauuaacaacc

SEQ ID NO: 3041276 - RNA, 19 nt, Artificial Sequence
  Description of Artificial Sequence: Synthetic oligonucleotide
uuuguuaaaagccacaaca

SEQ ID NO: 3041277 - RNA, 19 nt, Artificial Sequence
  Description of Artificial Sequence: Synthetic oligonucleotide
cauguuaucaaaaugaaug

SEQ ID NO: 3041278 - RNA, 19 nt, Artificial Sequence
  Description of Artificial Sequence: Synthetic oligonucleotide
guuaguaguaaccauaggg

SEQ ID NO: 3041279 - RNA, 19 nt, Artificial Sequence
  Description of Artificial Sequence: Synthetic oligonucleotide
cauucuguaaaauagaaug

SEQ ID NO: 3041280 - RNA, 19 nt, Artificial Sequence
  Description of Artificial Sequence: Synthetic oligonucleotide
auucuaaacaauuaacaac

SEQ ID NO: 3041281 - RNA, 19 nt, Artificial Sequence
  Description of Artificial Sequence: Synthetic oligonucleotide
aauuguuaccccaugaccg

SEQ ID NO: 3041282 - RNA, 19 nt, Artificial Sequence
  Description of Artificial Sequence: Synthetic oligonucleotide
aauucuaaacaauuaacaa

SEQ ID NO: 3041283 - RNA, 19 nt, Artificial Sequence
  Description of Artificial Sequence: Synthetic oligonucleotide
aacaauuaacaacccauuc

SEQ ID NO: 3041284 - RNA, 19 nt, Artificial Sequence
  Description of Artificial Sequence: Synthetic oligonucleotide
uaugacuacaagaagacaa

SEQ ID NO: 3041285 - RNA, 19 nt, Artificial Sequence
  Description of Artificial Sequence: Synthetic oligonucleotide
aaaacuaugacuacaagaa

SEQ ID NO: 3041286 - RNA, 19 nt, Artificial Sequence
  Description of Artificial Sequence: Synthetic oligonucleotide
uuaguaguaaccauaggga

SEQ ID NO: 3041287 - RNA, 19 nt, Artificial Sequence
  Description of Artificial Sequence: Synthetic oligonucleotide
uaaacaauuaacaacccau

SEQ ID NO: 3041288 - RNA, 19 nt, Artificial Sequence
  Description of Artificial Sequence: Synthetic oligonucleotide
aaagccacaacauuucugu

SEQ ID NO: 3041289 - RNA, 19 nt, Artificial Sequence
  Description of Artificial Sequence: Synthetic oligonucleotide
guugugaccauauuguccg

SEQ ID NO: 3041290 - RNA, 19 nt, Artificial Sequence
  Description of Artificial Sequence: Synthetic oligonucleotide
uggucuuuuguuaaaagcc

SEQ ID NO: 3041291 - RNA, 19 nt, Artificial Sequence
  Description of Artificial Sequence: Synthetic oligonucleotide
acuacaagaagacaaagga

SEQ ID NO: 3041292 - RNA, 19 nt, Artificial Sequence
  Description of Artificial Sequence: Synthetic oligonucleotide
uuuauugccaucaaucauc

SEQ ID NO: 3041293 - RNA, 19 nt, Artificial Sequence
  Description of Artificial Sequence: Synthetic oligonucleotide
uagcauguuaucaaaauga

SEQ ID NO: 3041294 - RNA, 19 nt, Artificial Sequence
  Description of Artificial Sequence: Synthetic oligonucleotide
uuaucaaaaugaauggucu

SEQ ID NO: 3041295 - RNA, 19 nt, Artificial Sequence
  Description of Artificial Sequence: Synthetic oligonucleotide
auaauuguuaccccaugac

SEQ ID NO: 3041296 - RNA, 19 nt, Artificial Sequence
  Description of Artificial Sequence: Synthetic oligonucleotide
uuuuccaagucucaaauuc

SEQ ID NO: 3041297 - RNA, 19 nt, Artificial Sequence
  Description of Artificial Sequence: Synthetic oligonucleotide
aaauucuaaacaauuaaca

SEQ ID NO: 3041298 - RNA, 19 nt, Artificial Sequence
  Description of Artificial Sequence: Synthetic oligonucleotide
auguuaucaaaaugaaugg

SEQ ID NO: 3041299 - RNA, 19 nt, Artificial Sequence
  Description of Artificial Sequence: Synthetic oligonucleotide
aaaaugaauggucuuuugu

SEQ ID NO: 3041300 - RNA, 19 nt, Artificial Sequence
  Description of Artificial Sequence: Synthetic oligonucleotide
auugccaucaaucaucaca

SEQ ID NO: 3041301 - RNA, 19 nt, Artificial Sequence
  Description of Artificial Sequence: Synthetic oligonucleotide
auuucuguuaguaguaacc

SEQ ID NO: 3041302 - RNA, 19 nt, Artificial Sequence
  Description of Artificial Sequence: Synthetic oligonucleotide
ucuaacaagaucaguuuug

SEQ ID NO: 3041303 - RNA, 19 nt, Artificial Sequence
  Description of Artificial Sequence: Synthetic oligonucleotide
uaauuguuaccccaugacc

SEQ ID NO: 3041304 - RNA, 19 nt, Artificial Sequence
  Description of Artificial Sequence: Synthetic oligonucleotide
uuagcauguuaucaaaaug

SEQ ID NO: 3041305 - RNA, 19 nt, Artificial Sequence
  Description of Artificial Sequence: Synthetic oligonucleotide
aagucucaaauucuaaaca

SEQ ID NO: 3041306 - RNA, 19 nt, Artificial Sequence
  Description of Artificial Sequence: Synthetic oligonucleotide
caaauucuaaacaauuaac

SEQ ID NO: 3041307 - RNA, 19 nt, Artificial Sequence
  Description of Artificial Sequence: Synthetic oligonucleotide
aaaugaauggucuuuuguu

SEQ ID NO: 3041308 - RNA, 19 nt, Artificial Sequence
  Description of Artificial Sequence: Synthetic oligonucleotide
caugccacugauuugcucg

SEQ ID NO: 3041309 - RNA, 19 nt, Artificial Sequence
  Description of Artificial Sequence: Synthetic oligonucleotide
aaacuaugacuacaagaag

SEQ ID NO: 3041310 - RNA, 19 nt, Artificial Sequence
  Description of Artificial Sequence: Synthetic oligonucleotide
acaauuaacaacccauucu

SEQ ID NO: 3041311 - RNA, 19 nt, Artificial Sequence
  Description of Artificial Sequence: Synthetic oligonucleotide
auaguaaggcucuugucuc

SEQ ID NO: 3041312 - RNA, 19 nt, Artificial Sequence
  Description of Artificial Sequence: Synthetic oligonucleotide
caauuaacaacccauucug

SEQ ID NO: 3041313 - RNA, 19 nt, Artificial Sequence
  Description of Artificial Sequence: Synthetic oligonucleotide
cuaacugucuguuaucuug

SEQ ID NO: 3041314 - RNA, 19 nt, Artificial Sequence
  Description of Artificial Sequence: Synthetic oligonucleotide
aacuaugacuacaagaaga

SEQ ID NO: 3041315 - RNA, 19 nt, Artificial Sequence
  Description of Artificial Sequence: Synthetic oligonucleotide
caaaggaagguuuagcaug

SEQ ID NO: 3041316 - RNA, 19 nt, Artificial Sequence
  Description of Artificial Sequence: Synthetic oligonucleotide
aacccauucuguaaaauag

SEQ ID NO: 3041317 - RNA, 19 nt, Artificial Sequence
  Description of Artificial Sequence: Synthetic oligonucleotide
uaguaguaaccauagggag

SEQ ID NO: 3041318 - RNA, 19 nt, Artificial Sequence
  Description of Artificial Sequence: Synthetic oligonucleotide
uuaaaagccacaacauuuc

SEQ ID NO: 3041319 - RNA, 19 nt, Artificial Sequence
  Description of Artificial Sequence: Synthetic oligonucleotide
ucaaucaucacaucucuaa

SEQ ID NO: 3041320 - RNA, 19 nt, Artificial Sequence
  Description of Artificial Sequence: Synthetic oligonucleotide
aaugaauggucuuuuguua

SEQ ID NO: 3041321 - RNA, 19 nt, Artificial Sequence
  Description of Artificial Sequence: Synthetic oligonucleotide
cacaucucuaacaagauca

SEQ ID NO: 3041322 - RNA, 19 nt, Artificial Sequence
  Description of Artificial Sequence: Synthetic oligonucleotide
acaacauuucuguuaguag

SEQ ID NO: 3041323 - RNA, 19 nt, Artificial Sequence
  Description of Artificial Sequence: Synthetic oligonucleotide
acuaugacuacaagaagac

SEQ ID NO: 3041324 - RNA, 19 nt, Artificial Sequence
  Description of Artificial Sequence: Synthetic oligonucleotide
ucuaaacaauuaacaaccc

SEQ ID NO: 3041325 - RNA, 19 nt, Artificial Sequence
  Description of Artificial Sequence: Synthetic oligonucleotide
ucuguuaguaguaaccaua

SEQ ID NO: 3041326 - RNA, 19 nt, Artificial Sequence
  Description of Artificial Sequence: Synthetic oligonucleotide
ucucaaauucuaaacaauu

SEQ ID NO: 3041327 - RNA, 19 nt, Artificial Sequence
  Description of Artificial Sequence: Synthetic oligonucleotide
caagucucaaauucuaaac

SEQ ID NO: 3041328 - RNA, 19 nt, Artificial Sequence
  Description of Artificial Sequence: Synthetic oligonucleotide
gacuacaagaagacaaagg

SEQ ID NO: 3041329 - RNA, 19 nt, Artificial Sequence
  Description of Artificial Sequence: Synthetic oligonucleotide
ucuguaaaauagaaugaaa

SEQ ID NO: 3041330 - RNA, 19 nt, Artificial Sequence
  Description of Artificial Sequence: Synthetic oligonucleotide
uugauaguaaggcucuugu

SEQ ID NO: 3041331 - RNA, 19 nt, Artificial Sequence
  Description of Artificial Sequence: Synthetic oligonucleotide
uuuagcauguuaucaaaau

SEQ ID NO: 3041332 - RNA, 19 nt, Artificial Sequence
  Description of Artificial Sequence: Synthetic oligonucleotide
gacaaaggaagguuuagca

SEQ ID NO: 3041333 - RNA, 19 nt, Artificial Sequence
  Description of Artificial Sequence: Synthetic oligonucleotide
gauaguaaggcucuugucu

SEQ ID NO: 3041334 - RNA, 19 nt, Artificial Sequence
  Description of Artificial Sequence: Synthetic oligonucleotide
cuguggauaauuguuaccc

SEQ ID NO: 3041335 - RNA, 19 nt, Artificial Sequence
  Description of Artificial Sequence: Synthetic oligonucleotide
uuaacaacccauucuguaa

SEQ ID NO: 3041336 - RNA, 19 nt, Artificial Sequence
  Description of Artificial Sequence: Synthetic oligonucleotide
gucacuuuggccauccucg

SEQ ID NO: 3041337 - RNA, 19 nt, Artificial Sequence
  Description of Artificial Sequence: Synthetic oligonucleotide
aagguuuagcauguuauca

SEQ ID NO: 3041338 - RNA, 19 nt, Artificial Sequence
  Description of Artificial Sequence: Synthetic oligonucleotide
ucuuuuguuaaaagccaca

SEQ ID NO: 3041339 - RNA, 19 nt, Artificial Sequence
  Description of Artificial Sequence: Synthetic oligonucleotide
uuauugccaucaaucauca

SEQ ID NO: 3041340 - RNA, 19 nt, Artificial Sequence
  Description of Artificial Sequence: Synthetic oligonucleotide
uuaucccuaccucuaacug

SEQ ID NO: 3041341 - RNA, 19 nt, Artificial Sequence
  Description of Artificial Sequence: Synthetic oligonucleotide
uuguuaaaagccacaacau

SEQ ID NO: 3041342 - RNA, 19 nt, Artificial Sequence
  Description of Artificial Sequence: Synthetic oligonucleotide
cuguuaguaguaaccauag

SEQ ID NO: 3041343 - RNA, 19 nt, Artificial Sequence
  Description of Artificial Sequence: Synthetic oligonucleotide
gauaauuguuaccccauga

SEQ ID NO: 3041344 - RNA, 19 nt, Artificial Sequence
  Description of Artificial Sequence: Synthetic oligonucleotide
guaguaaccauagggaggc

SEQ ID NO: 3041345 - RNA, 19 nt, Artificial Sequence
  Description of Artificial Sequence: Synthetic oligonucleotide
caucacaucucuaacaaga

SEQ ID NO: 3041346 - RNA, 19 nt, Artificial Sequence
  Description of Artificial Sequence: Synthetic oligonucleotide
uguuaguaguaaccauagg

SEQ ID NO: 3041347 - RNA, 19 nt, Artificial Sequence
  Description of Artificial Sequence: Synthetic oligonucleotide
auauuguccguacuguugu

SEQ ID NO: 3041348 - RNA, 19 nt, Artificial Sequence
  Description of Artificial Sequence: Synthetic oligonucleotide
uuuccaagucucaaauucu

SEQ ID NO: 3041349 - RNA, 19 nt, Artificial Sequence
  Description of Artificial Sequence: Synthetic oligonucleotide
guuaucaaaaugaaugguc

SEQ ID NO: 3041350 - RNA, 19 nt, Artificial Sequence
  Description of Artificial Sequence: Synthetic oligonucleotide
uccguacuguuguugauag

SEQ ID NO: 3041351 - RNA, 19 nt, Artificial Sequence
  Description of Artificial Sequence: Synthetic oligonucleotide
uuucuguuaguaguaacca

SEQ ID NO: 3041352 - RNA, 19 nt, Artificial Sequence
  Description of Artificial Sequence: Synthetic oligonucleotide
aguaguaaccauagggagg

SEQ ID NO: 3041353 - RNA, 19 nt, Artificial Sequence
  Description of Artificial Sequence: Synthetic oligonucleotide
gauuugcucgauuugucac

SEQ ID NO: 3041354 - RNA, 19 nt, Artificial Sequence
  Description of Artificial Sequence: Synthetic oligonucleotide
agucucaaauucuaaacaa

SEQ ID NO: 3041355 - RNA, 19 nt, Artificial Sequence
  Description of Artificial Sequence: Synthetic oligonucleotide
uaacugucuguuaucuugc

SEQ ID NO: 3041356 - RNA, 19 nt, Artificial Sequence
  Description of Artificial Sequence: Synthetic oligonucleotide
uacuguuguugauaguaag

SEQ ID NO: 3041357 - RNA, 19 nt, Artificial Sequence
  Description of Artificial Sequence: Synthetic oligonucleotide
uugccaucaaucaucacau

SEQ ID NO: 3041358 - RNA, 19 nt, Artificial Sequence
  Description of Artificial Sequence: Synthetic oligonucleotide
ucugcuguggauaauuguu

SEQ ID NO: 3041359 - RNA, 19 nt, Artificial Sequence
  Description of Artificial Sequence: Synthetic oligonucleotide
uuguugauaguaaggcucu

SEQ ID NO: 3041360 - RNA, 19 nt, Artificial Sequence
  Description of Artificial Sequence: Synthetic oligonucleotide
cuguuguugauaguaaggc

SEQ ID NO: 3041361 - RNA, 19 nt, Artificial Sequence
  Description of Artificial Sequence: Synthetic oligonucleotide
cauauuguccguacuguug

SEQ ID NO: 3041362 - RNA, 19 nt, Artificial Sequence
  Description of Artificial Sequence: Synthetic oligonucleotide
aucaucacaucucuaacaa

SEQ ID NO: 3041363 - RNA, 19 nt, Artificial Sequence
  Description of Artificial Sequence: Synthetic oligonucleotide
uucuguaaaauagaaugaa

SEQ ID NO: 3041364 - RNA, 19 nt, Artificial Sequence
  Description of Artificial Sequence: Synthetic oligonucleotide
ucgucuguuaucccuaccu

SEQ ID NO: 3041365 - RNA, 19 nt, Artificial Sequence
  Description of Artificial Sequence: Synthetic oligonucleotide
acaagaagacaaaggaagg

SEQ ID NO: 3041366 - RNA, 19 nt, Artificial Sequence
  Description of Artificial Sequence: Synthetic oligonucleotide
ugcucgauuugucacuuug

SEQ ID NO: 3041367 - RNA, 19 nt, Artificial Sequence
  Description of Artificial Sequence: Synthetic oligonucleotide
acuguuguugauaguaagg

SEQ ID NO: 3041368 - RNA, 19 nt, Artificial Sequence
  Description of Artificial Sequence: Synthetic oligonucleotide
guuguugauaguaaggcuc

SEQ ID NO: 3041369 - RNA, 19 nt, Artificial Sequence
  Description of Artificial Sequence: Synthetic oligonucleotide
uguuaucaaaaugaauggu

SEQ ID NO: 3041370 - RNA, 19 nt, Artificial Sequence
  Description of Artificial Sequence: Synthetic oligonucleotide
uguuguugauaguaaggcu

SEQ ID NO: 3041371 - RNA, 19 nt, Artificial Sequence
  Description of Artificial Sequence: Synthetic oligonucleotide
ugauuugcucgauuuguca

SEQ ID NO: 3041372 - RNA, 19 nt, Artificial Sequence
  Description of Artificial Sequence: Synthetic oligonucleotide
auuaacaacccauucugua

SEQ ID NO: 3041373 - RNA, 19 nt, Artificial Sequence
  Description of Artificial Sequence: Synthetic oligonucleotide
ucgauuugucacuuuggcc

SEQ ID NO: 3041374 - RNA, 19 nt, Artificial Sequence
  Description of Artificial Sequence: Synthetic oligonucleotide
gaccauauuguccguacug

SEQ ID NO: 3041375 - RNA, 19 nt, Artificial Sequence
  Description of Artificial Sequence: Synthetic oligonucleotide
acuuuggccauccucgucu

SEQ ID NO: 3041376 - RNA, 19 nt, Artificial Sequence
  Description of Artificial Sequence: Synthetic oligonucleotide
aagacaaaggaagguuuag

SEQ ID NO: 3041377 - RNA, 19 nt, Artificial Sequence
  Description of Artificial Sequence: Synthetic oligonucleotide
uaacaacccauucuguaaa

SEQ ID NO: 3041378 - RNA, 19 nt, Artificial Sequence
  Description of Artificial Sequence: Synthetic oligonucleotide
uguggauaauuguuacccc

SEQ ID NO: 3041379 - RNA, 19 nt, Artificial Sequence
  Description of Artificial Sequence: Synthetic oligonucleotide
cucgauuugucacuuuggc

SEQ ID NO: 3041380 - RNA, 19 nt, Artificial Sequence
  Description of Artificial Sequence: Synthetic oligonucleotide
uaaaagccacaacauuucu

SEQ ID NO: 3041381 - RNA, 19 nt, Artificial Sequence
  Description of Artificial Sequence: Synthetic oligonucleotide
aaaagccacaacauuucug

SEQ ID NO: 3041382 - RNA, 19 nt, Artificial Sequence
  Description of Artificial Sequence: Synthetic oligonucleotide
aagaagacaaaggaagguu

SEQ ID NO: 3041383 - RNA, 19 nt, Artificial Sequence
  Description of Artificial Sequence: Synthetic oligonucleotide
aaaggaagguuuagcaugu

SEQ ID NO: 3041384 - RNA, 19 nt, Artificial Sequence
  Description of Artificial Sequence: Synthetic oligonucleotide
aguaaccauagggaggccg

SEQ ID NO: 3041385 - RNA, 19 nt, Artificial Sequence
  Description of Artificial Sequence: Synthetic oligonucleotide
gaagguuuagcauguuauc

SEQ ID NO: 3041386 - RNA, 19 nt, Artificial Sequence
  Description of Artificial Sequence: Synthetic oligonucleotide
acaaaggaagguuuagcau

SEQ ID NO: 3041387 - RNA, 19 nt, Artificial Sequence
  Description of Artificial Sequence: Synthetic oligonucleotide
ugacuacaagaagacaaag

SEQ ID NO: 3041388 - RNA, 19 nt, Artificial Sequence
  Description of Artificial Sequence: Synthetic oligonucleotide
uaucccuaccucuaacugu

SEQ ID NO: 3041389 - RNA, 19 nt, Artificial Sequence
  Description of Artificial Sequence: Synthetic oligonucleotide
ucucuaacaagaucaguuu

SEQ ID NO: 3041390 - RNA, 19 nt, Artificial Sequence
  Description of Artificial Sequence: Synthetic oligonucleotide
ucaucacaucucuaacaag

SEQ ID NO: 3041391 - RNA, 19 nt, Artificial Sequence
  Description of Artificial Sequence: Synthetic oligonucleotide
augaauggucuuuuguuaa

SEQ ID NO: 3041392 - RNA, 19 nt, Artificial Sequence
  Description of Artificial Sequence: Synthetic oligonucleotide
auuugcucgauuugucacu

SEQ ID NO: 3041393 - RNA, 19 nt, Artificial Sequence
  Description of Artificial Sequence: Synthetic oligonucleotide
aauuaacaacccauucugu

SEQ ID NO: 3041394 - RNA, 19 nt, Artificial Sequence
  Description of Artificial Sequence: Synthetic oligonucleotide
acugauuugcucgauuugu

SEQ ID NO: 3041395 - RNA, 19 nt, Artificial Sequence
  Description of Artificial Sequence: Synthetic oligonucleotide
auucuguaaaauagaauga

SEQ ID NO: 3041396 - RNA, 19 nt, Artificial Sequence
  Description of Artificial Sequence: Synthetic oligonucleotide
cuaaacaauuaacaaccca

SEQ ID NO: 3041397 - RNA, 19 nt, Artificial Sequence
  Description of Artificial Sequence: Synthetic oligonucleotide
uggauaauuguuaccccau

SEQ ID NO: 3041398 - RNA, 19 nt, Artificial Sequence
  Description of Artificial Sequence: Synthetic oligonucleotide
accucuaacugucuguuau

SEQ ID NO: 3041399 - RNA, 19 nt, Artificial Sequence
  Description of Artificial Sequence: Synthetic oligonucleotide
ugcuguggauaauuguuac

SEQ ID NO: 3041400 - RNA, 19 nt, Artificial Sequence
  Description of Artificial Sequence: Synthetic oligonucleotide
uguuaccccaugaccgucc

SEQ ID NO: 3041401 - RNA, 19 nt, Artificial Sequence
  Description of Artificial Sequence: Synthetic oligonucleotide
auuguuaccccaugaccgu

SEQ ID NO: 3041402 - RNA, 19 nt, Artificial Sequence
  Description of Artificial Sequence: Synthetic oligonucleotide
uguuaucccuaccucuaac

SEQ ID NO: 3041403 - RNA, 19 nt, Artificial Sequence
  Description of Artificial Sequence: Synthetic oligonucleotide
cauuucuguuaguaguaac

SEQ ID NO: 3041404 - RNA, 19 nt, Artificial Sequence
  Description of Artificial Sequence: Synthetic oligonucleotide
caaaaugaauggucuuuug

SEQ ID NO: 3041405 - RNA, 19 nt, Artificial Sequence
  Description of Artificial Sequence: Synthetic oligonucleotide
ucacaucucuaacaagauc

SEQ ID NO: 3041406 - RNA, 19 nt, Artificial Sequence
  Description of Artificial Sequence: Synthetic oligonucleotide
aaacaauuaacaacccauu

SEQ ID NO: 3041407 - RNA, 19 nt, Artificial Sequence
  Description of Artificial Sequence: Synthetic oligonucleotide
agguuuagcauguuaucaa

SEQ ID NO: 3041408 - RNA, 19 nt, Artificial Sequence
  Description of Artificial Sequence: Synthetic oligonucleotide
uuguccguacuguuguuga

SEQ ID NO: 3041409 - RNA, 19 nt, Artificial Sequence
  Description of Artificial Sequence: Synthetic oligonucleotide
caaucaucacaucucuaac

SEQ ID NO: 3041410 - RNA, 19 nt, Artificial Sequence
  Description of Artificial Sequence: Synthetic oligonucleotide
aucucuaacaagaucaguu

SEQ ID NO: 3041411 - RNA, 19 nt, Artificial Sequence
  Description of Artificial Sequence: Synthetic oligonucleotide
gccacaacauuucuguuag

SEQ ID NO: 3041412 - RNA, 19 nt, Artificial Sequence
  Description of Artificial Sequence: Synthetic oligonucleotide
aaggcucuugucucugcug

SEQ ID NO: 3041413 - RNA, 19 nt, Artificial Sequence
  Description of Artificial Sequence: Synthetic oligonucleotide
ucucugcuguggauaauug

SEQ ID NO: 3041414 - RNA, 19 nt, Artificial Sequence
  Description of Artificial Sequence: Synthetic oligonucleotide
guggauaauuguuacccca

SEQ ID NO: 3041415 - RNA, 19 nt, Artificial Sequence
  Description of Artificial Sequence: Synthetic oligonucleotide
uaucaaaaugaauggucuu

SEQ ID NO: 3041416 - RNA, 19 nt, Artificial Sequence
  Description of Artificial Sequence: Synthetic oligonucleotide
uuccaagucucaaauucua

SEQ ID NO: 3041417 - RNA, 19 nt, Artificial Sequence
  Description of Artificial Sequence: Synthetic oligonucleotide
aucccuaccucuaacuguc

SEQ ID NO: 3041418 - RNA, 19 nt, Artificial Sequence
  Description of Artificial Sequence: Synthetic oligonucleotide
guccaugccacugauuugc

SEQ ID NO: 3041419 - RNA, 19 nt, Artificial Sequence
  Description of Artificial Sequence: Synthetic oligonucleotide
accccaugaccguccaugc

SEQ ID NO: 3041420 - RNA, 19 nt, Artificial Sequence
  Description of Artificial Sequence: Synthetic oligonucleotide
cucaaauucuaaacaauua

SEQ ID NO: 3041421 - RNA, 19 nt, Artificial Sequence
  Description of Artificial Sequence: Synthetic oligonucleotide
uccaagucucaaauucuaa

SEQ ID NO: 3041422 - RNA, 19 nt, Artificial Sequence
  Description of Artificial Sequence: Synthetic oligonucleotide
ugauaguaaggcucuuguc

SEQ ID NO: 3041423 - RNA, 19 nt, Artificial Sequence
  Description of Artificial Sequence: Synthetic oligonucleotide
ugaauggucuuuuguuaaa

SEQ ID NO: 3041424 - RNA, 19 nt, Artificial Sequence
  Description of Artificial Sequence: Synthetic oligonucleotide
cuacaagaagacaaaggaa

SEQ ID NO: 3041425 - RNA, 19 nt, Artificial Sequence
  Description of Artificial Sequence: Synthetic oligonucleotide
aacaacccauucuguaaaa

SEQ ID NO: 3041426 - RNA, 19 nt, Artificial Sequence
  Description of Artificial Sequence: Synthetic oligonucleotide
uaccccaugaccguccaug

SEQ ID NO: 3041427 - RNA, 19 nt, Artificial Sequence
  Description of Artificial Sequence: Synthetic oligonucleotide
aucaaaaugaauggucuuu

SEQ ID NO: 3041428 - RNA, 19 nt, Artificial Sequence
  Description of Artificial Sequence: Synthetic oligonucleotide
uaaggcucuugucucugcu

SEQ ID NO: 3041429 - RNA, 19 nt, Artificial Sequence
  Description of Artificial Sequence: Synthetic oligonucleotide
accauagggaggccgcggg

SEQ ID NO: 3041430 - RNA, 19 nt, Artificial Sequence
  Description of Artificial Sequence: Synthetic oligonucleotide
uucuguuaguaguaaccau

SEQ ID NO: 3041431 - RNA, 19 nt, Artificial Sequence
  Description of Artificial Sequence: Synthetic oligonucleotide
guuaaaagccacaacauuu

SEQ ID NO: 3041432 - RNA, 19 nt, Artificial Sequence
  Description of Artificial Sequence: Synthetic oligonucleotide
guugauaguaaggcucuug

SEQ ID NO: 3041433 - RNA, 19 nt, Artificial Sequence
  Description of Artificial Sequence: Synthetic oligonucleotide
ugaccauauuguccguacu

SEQ ID NO: 3041434 - RNA, 19 nt, Artificial Sequence
  Description of Artificial Sequence: Synthetic oligonucleotide
cugauuugcucgauuuguc

SEQ ID NO: 3041435 - RNA, 19 nt, Artificial Sequence
  Description of Artificial Sequence: Synthetic oligonucleotide
aaccauagggaggccgcgg

SEQ ID NO: 3041436 - RNA, 19 nt, Artificial Sequence
  Description of Artificial Sequence: Synthetic oligonucleotide
agccacaacauuucuguua

SEQ ID NO: 3041437 - RNA, 19 nt, Artificial Sequence
  Description of Artificial Sequence: Synthetic oligonucleotide
guaaccauagggaggccgc

SEQ ID NO: 3041438 - RNA, 19 nt, Artificial Sequence
  Description of Artificial Sequence: Synthetic oligonucleotide
aggcucuugucucugcugu

SEQ ID NO: 3041439 - RNA, 19 nt, Artificial Sequence
  Description of Artificial Sequence: Synthetic oligonucleotide
gugaccauauuguccguac

SEQ ID NO: 3041440 - RNA, 19 nt, Artificial Sequence
  Description of Artificial Sequence: Synthetic oligonucleotide
accauauuguccguacugu

SEQ ID NO: 3041441 - RNA, 19 nt, Artificial Sequence
  Description of Artificial Sequence: Synthetic oligonucleotide
gguugugaccauauugucc

SEQ ID NO: 3041442 - RNA, 19 nt, Artificial Sequence
  Description of Artificial Sequence: Synthetic oligonucleotide
auccucgucuguuaucccu

SEQ ID NO: 3041443 - RNA, 19 nt, Artificial Sequence
  Description of Artificial Sequence: Synthetic oligonucleotide
cuuuuguuaaaagccacaa

SEQ ID NO: 3041444 - RNA, 19 nt, Artificial Sequence
  Description of Artificial Sequence: Synthetic oligonucleotide
cgauuugucacuuuggcca

SEQ ID NO: 3041445 - RNA, 19 nt, Artificial Sequence
  Description of Artificial Sequence: Synthetic oligonucleotide
uugucucugcuguggauaa

SEQ ID NO: 3041446 - RNA, 19 nt, Artificial Sequence
  Description of Artificial Sequence: Synthetic oligonucleotide
auuguccguacuguuguug

SEQ ID NO: 3041447 - RNA, 19 nt, Artificial Sequence
  Description of Artificial Sequence: Synthetic oligonucleotide
uaguaaggcucuugucucu

SEQ ID NO: 3041448 - RNA, 19 nt, Artificial Sequence
  Description of Artificial Sequence: Synthetic oligonucleotide
ugaccguccaugccacuga

SEQ ID NO: 3041449 - RNA, 19 nt, Artificial Sequence
  Description of Artificial Sequence: Synthetic oligonucleotide
acaucucuaacaagaucag

SEQ ID NO: 3041450 - RNA, 19 nt, Artificial Sequence
  Description of Artificial Sequence: Synthetic oligonucleotide
agaagacaaaggaagguuu

SEQ ID NO: 3041451 - RNA, 19 nt, Artificial Sequence
  Description of Artificial Sequence: Synthetic oligonucleotide
gucuuuuguuaaaagccac

SEQ ID NO: 3041452 - RNA, 19 nt, Artificial Sequence
  Description of Artificial Sequence: Synthetic oligonucleotide
uaaccauagggaggccgcg

SEQ ID NO: 3041453 - RNA, 19 nt, Artificial Sequence
  Description of Artificial Sequence: Synthetic oligonucleotide
ccaucaaucaucacaucuc

SEQ ID NO: 3041454 - RNA, 19 nt, Artificial Sequence
  Description of Artificial Sequence: Synthetic oligonucleotide
cacugauuugcucgauuug

SEQ ID NO: 3041455 - RNA, 19 nt, Artificial Sequence
  Description of Artificial Sequence: Synthetic oligonucleotide
guuaucccuaccucuaacu

SEQ ID NO: 3041456 - RNA, 19 nt, Artificial Sequence
  Description of Artificial Sequence: Synthetic oligonucleotide
gaagacaaaggaagguuua

SEQ ID NO: 3041457 - RNA, 19 nt, Artificial Sequence
  Description of Artificial Sequence: Synthetic oligonucleotide
gaauggucuuuuguuaaaa

SEQ ID NO: 3041458 - RNA, 19 nt, Artificial Sequence
  Description of Artificial Sequence: Synthetic oligonucleotide
gcggguugugaccauauug

SEQ ID NO: 3041459 - RNA, 19 nt, Artificial Sequence
  Description of Artificial Sequence: Synthetic oligonucleotide
ggauaauuguuaccccaug

SEQ ID NO: 3041460 - RNA, 19 nt, Artificial Sequence
  Description of Artificial Sequence: Synthetic oligonucleotide
ucuaacugucuguuaucuu

SEQ ID NO: 3041461 - RNA, 19 nt, Artificial Sequence
  Description of Artificial Sequence: Synthetic oligonucleotide
aggaagguuuagcauguua

SEQ ID NO: 3041462 - RNA, 19 nt, Artificial Sequence
  Description of Artificial Sequence: Synthetic oligonucleotide
auagggaggccgcggguug

SEQ ID NO: 3041463 - RNA, 19 nt, Artificial Sequence
  Description of Artificial Sequence: Synthetic oligonucleotide
augacuacaagaagacaaa

SEQ ID NO: 3041464 - RNA, 19 nt, Artificial Sequence
  Description of Artificial Sequence: Synthetic oligonucleotide
aguaaggcucuugucucug

SEQ ID NO: 3041465 - RNA, 19 nt, Artificial Sequence
  Description of Artificial Sequence: Synthetic oligonucleotide
caacccauucuguaaaaua

SEQ ID NO: 3041466 - RNA, 19 nt, Artificial Sequence
  Description of Artificial Sequence: Synthetic oligonucleotide
uaacaagaucaguuuuguu

SEQ ID NO: 3041467 - RNA, 19 nt, Artificial Sequence
  Description of Artificial Sequence: Synthetic oligonucleotide
ggucuuuuguuaaaagcca

SEQ ID NO: 3041468 - RNA, 19 nt, Artificial Sequence
  Description of Artificial Sequence: Synthetic oligonucleotide
cacaacauuucuguuagua

SEQ ID NO: 3041469 - RNA, 19 nt, Artificial Sequence
  Description of Artificial Sequence: Synthetic oligonucleotide
ucacuuuggccauccucgu

SEQ ID NO: 3041470 - RNA, 19 nt, Artificial Sequence
  Description of Artificial Sequence: Synthetic oligonucleotide
uuugcucgauuugucacuu

SEQ ID NO: 3041471 - RNA, 19 nt, Artificial Sequence
  Description of Artificial Sequence: Synthetic oligonucleotide
uccucgucuguuaucccua

SEQ ID NO: 3041472 - RNA, 19 nt, Artificial Sequence
  Description of Artificial Sequence: Synthetic oligonucleotide
guuuagcauguuaucaaaa

SEQ ID NO: 3041473 - RNA, 19 nt, Artificial Sequence
  Description of Artificial Sequence: Synthetic oligonucleotide
gcuguggauaauuguuacc

SEQ ID NO: 3041474 - RNA, 19 nt, Artificial Sequence
  Description of Artificial Sequence: Synthetic oligonucleotide
gaggccgcggguugugacc

SEQ ID NO: 3041475 - RNA, 19 nt, Artificial Sequence
  Description of Artificial Sequence: Synthetic oligonucleotide
guaaggcucuugucucugc

SEQ ID NO: 3041476 - RNA, 19 nt, Artificial Sequence
  Description of Artificial Sequence: Synthetic oligonucleotide
aagccacaacauuucuguu

SEQ ID NO: 3041477 - RNA, 19 nt, Artificial Sequence
  Description of Artificial Sequence: Synthetic oligonucleotide
ucuugucucugcuguggau

SEQ ID NO: 3041478 - RNA, 19 nt, Artificial Sequence
  Description of Artificial Sequence: Synthetic oligonucleotide
acauuucuguuaguaguaa

SEQ ID NO: 3041479 - RNA, 19 nt, Artificial Sequence
  Description of Artificial Sequence: Synthetic oligonucleotide
caucaaucaucacaucucu

SEQ ID NO: 3041480 - RNA, 19 nt, Artificial Sequence
  Description of Artificial Sequence: Synthetic oligonucleotide
acccauucuguaaaauaga

SEQ ID NO: 3041481 - RNA, 19 nt, Artificial Sequence
  Description of Artificial Sequence: Synthetic oligonucleotide
ccauccucgucuguuaucc

SEQ ID NO: 3041482 - RNA, 19 nt, Artificial Sequence
  Description of Artificial Sequence: Synthetic oligonucleotide
aucacaucucuaacaagau

SEQ ID NO: 3041483 - RNA, 19 nt, Artificial Sequence
  Description of Artificial Sequence: Synthetic oligonucleotide
cuuuggccauccucgucug

SEQ ID NO: 3041484 - RNA, 19 nt, Artificial Sequence
  Description of Artificial Sequence: Synthetic oligonucleotide
ugugaccauauuguccgua

SEQ ID NO: 3041485 - RNA, 19 nt, Artificial Sequence
  Description of Artificial Sequence: Synthetic oligonucleotide
augccacugauuugcucga

SEQ ID NO: 3041486 - RNA, 19 nt, Artificial Sequence
  Description of Artificial Sequence: Synthetic oligonucleotide
uccaugccacugauuugcu

SEQ ID NO: 3041487 - RNA, 19 nt, Artificial Sequence
  Description of Artificial Sequence: Synthetic oligonucleotide
auuugucacuuuggccauc

SEQ ID NO: 3041488 - RNA, 19 nt, Artificial Sequence
  Description of Artificial Sequence: Synthetic oligonucleotide
gccaucaaucaucacaucu

SEQ ID NO: 3041489 - RNA, 19 nt, Artificial Sequence
  Description of Artificial Sequence: Synthetic oligonucleotide
cuaacaagaucaguuuugu

SEQ ID NO: 3041490 - RNA, 19 nt, Artificial Sequence
  Description of Artificial Sequence: Synthetic oligonucleotide
acaacccauucuguaaaau

SEQ ID NO: 3041491 - RNA, 19 nt, Artificial Sequence
  Description of Artificial Sequence: Synthetic oligonucleotide
gcucgauuugucacuuugg

SEQ ID NO: 3041492 - RNA, 19 nt, Artificial Sequence
  Description of Artificial Sequence: Synthetic oligonucleotide
cuaugacuacaagaagaca

SEQ ID NO: 3041493 - RNA, 19 nt, Artificial Sequence
  Description of Artificial Sequence: Synthetic oligonucleotide
uauugccaucaaucaucac

SEQ ID NO: 3041494 - RNA, 19 nt, Artificial Sequence
  Description of Artificial Sequence: Synthetic oligonucleotide
gauuugucacuuuggccau

SEQ ID NO: 3041495 - RNA, 19 nt, Artificial Sequence
  Description of Artificial Sequence: Synthetic oligonucleotide
gcucuugucucugcugugg

SEQ ID NO: 3041496 - RNA, 19 nt, Artificial Sequence
  Description of Artificial Sequence: Synthetic oligonucleotide
uguccguacuguuguugau

SEQ ID NO: 3041497 - RNA, 19 nt, Artificial Sequence
  Description of Artificial Sequence: Synthetic oligonucleotide
cauccucgucuguuauccc

SEQ ID NO: 3041498 - RNA, 19 nt, Artificial Sequence
  Description of Artificial Sequence: Synthetic oligonucleotide
cucgucuguuaucccuacc

SEQ ID NO: 3041499 - RNA, 19 nt, Artificial Sequence
  Description of Artificial Sequence: Synthetic oligonucleotide
uuuggccauccucgucugu

SEQ ID NO: 3041500 - RNA, 19 nt, Artificial Sequence
  Description of Artificial Sequence: Synthetic oligonucleotide
cugcuguggauaauuguua

SEQ ID NO: 3041501 - RNA, 19 nt, Artificial Sequence
  Description of Artificial Sequence: Synthetic oligonucleotide
cuugucucugcuguggaua

SEQ ID NO: 3041502 - RNA, 19 nt, Artificial Sequence
  Description of Artificial Sequence: Synthetic oligonucleotide
uuggccauccucgucuguu

SEQ ID NO: 3041503 - RNA, 19 nt, Artificial Sequence
  Description of Artificial Sequence: Synthetic oligonucleotide
caagaagacaaaggaaggu

SEQ ID NO: 3041504 - RNA, 19 nt, Artificial Sequence
  Description of Artificial Sequence: Synthetic oligonucleotide
uauuguccguacuguuguu

SEQ ID NO: 3041505 - RNA, 19 nt, Artificial Sequence
  Description of Artificial Sequence: Synthetic oligonucleotide
guacuguuguugauaguaa

SEQ ID NO: 3041506 - RNA, 19 nt, Artificial Sequence
  Description of Artificial Sequence: Synthetic oligonucleotide
ggaagguuuagcauguuau

SEQ ID NO: 3041507 - RNA, 19 nt, Artificial Sequence
  Description of Artificial Sequence: Synthetic oligonucleotide
ccaagucucaaauucuaaa

SEQ ID NO: 3041508 - RNA, 19 nt, Artificial Sequence
  Description of Artificial Sequence: Synthetic oligonucleotide
uugugaccauauuguccgu

SEQ ID NO: 3041509 - RNA, 19 nt, Artificial Sequence
  Description of Artificial Sequence: Synthetic oligonucleotide
uuguuaccccaugaccguc

SEQ ID NO: 3041510 - RNA, 19 nt, Artificial Sequence
  Description of Artificial Sequence: Synthetic oligonucleotide
uaccucuaacugucuguua

SEQ ID NO: 3041511 - RNA, 19 nt, Artificial Sequence
  Description of Artificial Sequence: Synthetic oligonucleotide
guuaccccaugaccgucca

SEQ ID NO: 3041512 - RNA, 19 nt, Artificial Sequence
  Description of Artificial Sequence: Synthetic oligonucleotide
cucuaacugucuguuaucu

SEQ ID NO: 3041513 - RNA, 19 nt, Artificial Sequence
  Description of Artificial Sequence: Synthetic oligonucleotide
ggguugugaccauauuguc

SEQ ID NO: 3041514 - RNA, 19 nt, Artificial Sequence
  Description of Artificial Sequence: Synthetic oligonucleotide
gucucaaauucuaaacaau

SEQ ID NO: 3041515 - RNA, 19 nt, Artificial Sequence
  Description of Artificial Sequence: Synthetic oligonucleotide
uugucacuuuggccauccu

SEQ ID NO: 3041516 - RNA, 19 nt, Artificial Sequence
  Description of Artificial Sequence: Synthetic oligonucleotide
ucccuaccucuaacugucu

SEQ ID NO: 3041517 - RNA, 19 nt, Artificial Sequence
  Description of Artificial Sequence: Synthetic oligonucleotide
cacuuuggccauccucguc

SEQ ID NO: 3041518 - RNA, 19 nt, Artificial Sequence
  Description of Artificial Sequence: Synthetic oligonucleotide
uggccauccucgucuguua

SEQ ID NO: 3041519 - RNA, 19 nt, Artificial Sequence
  Description of Artificial Sequence: Synthetic oligonucleotide
cucuugucucugcugugga

SEQ ID NO: 3041520 - RNA, 19 nt, Artificial Sequence
  Description of Artificial Sequence: Synthetic oligonucleotide
uguugauaguaaggcucuu

SEQ ID NO: 3041521 - RNA, 19 nt, Artificial Sequence
  Description of Artificial Sequence: Synthetic oligonucleotide
uaguaaccauagggaggcc

SEQ ID NO: 3041522 - RNA, 19 nt, Artificial Sequence
  Description of Artificial Sequence: Synthetic oligonucleotide
cucugcuguggauaauugu

SEQ ID NO: 3041523 - RNA, 19 nt, Artificial Sequence
  Description of Artificial Sequence: Synthetic oligonucleotide
aucaaucaucacaucucua

SEQ ID NO: 3041524 - RNA, 19 nt, Artificial Sequence
  Description of Artificial Sequence: Synthetic oligonucleotide
cuguuaucccuaccucuaa

SEQ ID NO: 3041525 - RNA, 19 nt, Artificial Sequence
  Description of Artificial Sequence: Synthetic oligonucleotide
ccucuaacugucuguuauc

SEQ ID NO: 3041526 - RNA, 19 nt, Artificial Sequence
  Description of Artificial Sequence: Synthetic oligonucleotide
aaggaagguuuagcauguu

SEQ ID NO: 3041527 - RNA, 19 nt, Artificial Sequence
  Description of Artificial Sequence: Synthetic oligonucleotide
cguacuguuguugauagua

SEQ ID NO: 3041528 - RNA, 19 nt, Artificial Sequence
  Description of Artificial Sequence: Synthetic oligonucleotide
guccguacuguuguugaua

SEQ ID NO: 3041529 - RNA, 19 nt, Artificial Sequence
  Description of Artificial Sequence: Synthetic oligonucleotide
ggcucuugucucugcugug

SEQ ID NO: 3041530 - RNA, 19 nt, Artificial Sequence
  Description of Artificial Sequence: Synthetic oligonucleotide
uagggaggccgcggguugu

SEQ ID NO: 3041531 - RNA, 19 nt, Artificial Sequence
  Description of Artificial Sequence: Synthetic oligonucleotide
uugcucgauuugucacuuu

SEQ ID NO: 3041532 - RNA, 19 nt, Artificial Sequence
  Description of Artificial Sequence: Synthetic oligonucleotide
cccuaccucuaacugucug

SEQ ID NO: 3041533 - RNA, 19 nt, Artificial Sequence
  Description of Artificial Sequence: Synthetic oligonucleotide
ugucucugcuguggauaau

SEQ ID NO: 3041534 - RNA, 19 nt, Artificial Sequence
  Description of Artificial Sequence: Synthetic oligonucleotide
caucucuaacaagaucagu

SEQ ID NO: 3041535 - RNA, 19 nt, Artificial Sequence
  Description of Artificial Sequence: Synthetic oligonucleotide
ggaggccgcggguugugac

SEQ ID NO: 3041536 - RNA, 19 nt, Artificial Sequence
  Description of Artificial Sequence: Synthetic oligonucleotide
gucucugcuguggauaauu

SEQ ID NO: 3041537 - RNA, 19 nt, Artificial Sequence
  Description of Artificial Sequence: Synthetic oligonucleotide
cuaccucuaacugucuguu

SEQ ID NO: 3041538 - RNA, 19 nt, Artificial Sequence
  Description of Artificial Sequence: Synthetic oligonucleotide
cgucuguuaucccuaccuc

SEQ ID NO: 3041539 - RNA, 19 nt, Artificial Sequence
  Description of Artificial Sequence: Synthetic oligonucleotide
ccucgucuguuaucccuac

SEQ ID NO: 3041540 - RNA, 19 nt, Artificial Sequence
  Description of Artificial Sequence: Synthetic oligonucleotide
cggguugugaccauauugu

SEQ ID NO: 3041541 - RNA, 19 nt, Artificial Sequence
  Description of Artificial Sequence: Synthetic oligonucleotide
gcauguuaucaaaaugaau

SEQ ID NO: 3041542 - RNA, 19 nt, Artificial Sequence
  Description of Artificial Sequence: Synthetic oligonucleotide
ugccacugauuugcucgau

SEQ ID NO: 3041543 - RNA, 19 nt, Artificial Sequence
  Description of Artificial Sequence: Synthetic oligonucleotide
ccauucuguaaaauagaau

SEQ ID NO: 3041544 - RNA, 19 nt, Artificial Sequence
  Description of Artificial Sequence: Synthetic oligonucleotide
ccuaccucuaacugucugu

SEQ ID NO: 3041545 - RNA, 19 nt, Artificial Sequence
  Description of Artificial Sequence: Synthetic oligonucleotide
ccaugccacugauuugcuc

SEQ ID NO: 3041546 - RNA, 19 nt, Artificial Sequence
  Description of Artificial Sequence: Synthetic oligonucleotide
gccauccucgucuguuauc

SEQ ID NO: 3041547 - RNA, 19 nt, Artificial Sequence
  Description of Artificial Sequence: Synthetic oligonucleotide
ccccaugaccguccaugcc

SEQ ID NO: 3041548 - RNA, 19 nt, Artificial Sequence
  Description of Artificial Sequence: Synthetic oligonucleotide
agggaggccgcggguugug

SEQ ID NO: 3041549 - RNA, 19 nt, Artificial Sequence
  Description of Artificial Sequence: Synthetic oligonucleotide
gaccguccaugccacugau

SEQ ID NO: 3041550 - RNA, 19 nt, Artificial Sequence
  Description of Artificial Sequence: Synthetic oligonucleotide
ccguccaugccacugauuu

SEQ ID NO: 3041551 - RNA, 19 nt, Artificial Sequence
  Description of Artificial Sequence: Synthetic oligonucleotide
cguccaugccacugauuug

SEQ ID NO: 3041552 - RNA, 19 nt, Artificial Sequence
  Description of Artificial Sequence: Synthetic oligonucleotide
ccacugauuugcucgauuu

SEQ ID NO: 3041553 - RNA, 19 nt, Artificial Sequence
  Description of Artificial Sequence: Synthetic oligonucleotide
cauagggaggccgcggguu

SEQ ID NO: 3041554 - RNA, 19 nt, Artificial Sequence
  Description of Artificial Sequence: Synthetic oligonucleotide
ccauauuguccguacuguu

SEQ ID NO: 3041555 - RNA, 19 nt, Artificial Sequence
  Description of Artificial Sequence: Synthetic oligonucleotide
accguccaugccacugauu

SEQ ID NO: 3041556 - RNA, 19 nt, Artificial Sequence
  Description of Artificial Sequence: Synthetic oligonucleotide
gccacugauuugcucgauu

SEQ ID NO: 3041557 - RNA, 19 nt, Artificial Sequence
  Description of Artificial Sequence: Synthetic oligonucleotide
ggccauccucgucuguuau

SEQ ID NO: 3041558 - RNA, 19 nt, Artificial Sequence
  Description of Artificial Sequence: Synthetic oligonucleotide
gggaggccgcggguuguga

SEQ ID NO: 3041559 - RNA, 19 nt, Artificial Sequence
  Description of Artificial Sequence: Synthetic oligonucleotide
ccauagggaggccgcgggu

SEQ ID NO: 3041560 - RNA, 19 nt, Artificial Sequence
  Description of Artificial Sequence: Synthetic oligonucleotide
ccacaacauuucuguuagu

SEQ ID NO: 3041561 - RNA, 19 nt, Artificial Sequence
  Description of Artificial Sequence: Synthetic oligonucleotide
ccguacuguuguugauagu

SEQ ID NO: 3041562 - RNA, 19 nt, Artificial Sequence
  Description of Artificial Sequence: Synthetic oligonucleotide
gccgcggguugugaccaua

SEQ ID NO: 3041563 - RNA, 19 nt, Artificial Sequence
  Description of Artificial Sequence: Synthetic oligonucleotide
ccgcggguugugaccauau

SEQ ID NO: 3041564 - RNA, 19 nt, Artificial Sequence
  Description of Artificial Sequence: Synthetic oligonucleotide
ggccgcggguugugaccau

SEQ ID NO: 3041565 - RNA, 19 nt, Artificial Sequence
  Description of Artificial Sequence: Synthetic oligonucleotide
cgcggguugugaccauauu

SEQ ID NO: 3041566 - RNA, 19 nt, Artificial Sequence
  Description of Artificial Sequence: Synthetic oligonucleotide
gauauaauugagcccaucg

SEQ ID NO: 3041567 - RNA, 19 nt, Artificial Sequence
  Description of Artificial Sequence: Synthetic oligonucleotide
auauaauugagcccaucgc

SEQ ID NO: 3041568 - RNA, 19 nt, Artificial Sequence
  Description of Artificial Sequence: Synthetic oligonucleotide
uucaguuccacgaucuugg

SEQ ID NO: 3041569 - RNA, 19 nt, Artificial Sequence
  Description of Artificial Sequence: Synthetic oligonucleotide
agcaucuuggcacaguggc

SEQ ID NO: 3041570 - RNA, 19 nt, Artificial Sequence
  Description of Artificial Sequence: Synthetic oligonucleotide
aacgcugucaaucuuggug

SEQ ID NO: 3041571 - RNA, 19 nt, Artificial Sequence
  Description of Artificial Sequence: Synthetic oligonucleotide
uauaauugagcccaucgcu

SEQ ID NO: 3041572 - RNA, 19 nt, Artificial Sequence
  Description of Artificial Sequence: Synthetic oligonucleotide
auggacagcaucuuggcac

SEQ ID NO: 3041573 - RNA, 19 nt, Artificial Sequence
  Description of Artificial Sequence: Synthetic oligonucleotide
uucaguguggggaaguggg

SEQ ID NO: 3041574 - RNA, 19 nt, Artificial Sequence
  Description of Artificial Sequence: Synthetic oligonucleotide
cuugaaauccaacagccgc

SEQ ID NO: 3041575 - RNA, 19 nt, Artificial Sequence
  Description of Artificial Sequence: Synthetic oligonucleotide
auuaccuccaucuggagcu

SEQ ID NO: 3041576 - RNA, 19 nt, Artificial Sequence
  Description of Artificial Sequence: Synthetic oligonucleotide
ugggaaaccgauuucagug

SEQ ID NO: 3041577 - RNA, 19 nt, Artificial Sequence
  Description of Artificial Sequence: Synthetic oligonucleotide
aagagcugcucacagaugu

SEQ ID NO: 3041578 - RNA, 19 nt, Artificial Sequence
  Description of Artificial Sequence: Synthetic oligonucleotide
aguuccacgaucuugggga

SEQ ID NO: 3041579 - RNA, 19 nt, Artificial Sequence
  Description of Artificial Sequence: Synthetic oligonucleotide
ucaaucuugguggagaaug

SEQ ID NO: 3041580 - RNA, 19 nt, Artificial Sequence
  Description of Artificial Sequence: Synthetic oligonucleotide
cuguauuugggguagcugc

SEQ ID NO: 3041581 - RNA, 19 nt, Artificial Sequence
  Description of Artificial Sequence: Synthetic oligonucleotide
aacauggacagcaucuugg

SEQ ID NO: 3041582 - RNA, 19 nt, Artificial Sequence
  Description of Artificial Sequence: Synthetic oligonucleotide
aacagggugaguucguucu

SEQ ID NO: 3041583 - RNA, 19 nt, Artificial Sequence
  Description of Artificial Sequence: Synthetic oligonucleotide
aaauccaacagccgcuucu

SEQ ID NO: 3041584 - RNA, 19 nt, Artificial Sequence
  Description of Artificial Sequence: Synthetic oligonucleotide
acgcugucaaucuuggugg

SEQ ID NO: 3041585 - RNA, 19 nt, Artificial Sequence
  Description of Artificial Sequence: Synthetic oligonucleotide
uacuuuuguccuuagcacc

SEQ ID NO: 3041586 - RNA, 19 nt, Artificial Sequence
  Description of Artificial Sequence: Synthetic oligonucleotide
aaaccgauuucaguguggg

SEQ ID NO: 3041587 - RNA, 19 nt, Artificial Sequence
  Description of Artificial Sequence: Synthetic oligonucleotide
ucuugguggagaaugggga

SEQ ID NO: 3041588 - RNA, 19 nt, Artificial Sequence
  Description of Artificial Sequence: Synthetic oligonucleotide
aucgcuaucgcucugggaa

SEQ ID NO: 3041589 - RNA, 19 nt, Artificial Sequence
  Description of Artificial Sequence: Synthetic oligonucleotide
gaucuuggggauauaauug

SEQ ID NO: 3041590 - RNA, 19 nt, Artificial Sequence
  Description of Artificial Sequence: Synthetic oligonucleotide
ucgauuaccuccaucugga

SEQ ID NO: 3041591 - RNA, 19 nt, Artificial Sequence
  Description of Artificial Sequence: Synthetic oligonucleotide
gucgauuaccuccaucugg

SEQ ID NO: 3041592 - RNA, 19 nt, Artificial Sequence
  Description of Artificial Sequence: Synthetic oligonucleotide
aguucguucucccaggccu

SEQ ID NO: 3041593 - RNA, 19 nt, Artificial Sequence
  Description of Artificial Sequence: Synthetic oligonucleotide
aggucgauuaccuccaucu

SEQ ID NO: 3041594 - RNA, 19 nt, Artificial Sequence
  Description of Artificial Sequence: Synthetic oligonucleotide
aauggggagcugaacaggg

SEQ ID NO: 3041595 - RNA, 19 nt, Artificial Sequence
  Description of Artificial Sequence: Synthetic oligonucleotide
cuuggggauauaauugagc

SEQ ID NO: 3041596 - RNA, 19 nt, Artificial Sequence
  Description of Artificial Sequence: Synthetic oligonucleotide
agaauggggagcugaacag

SEQ ID NO: 3041597 - RNA, 19 nt, Artificial Sequence
  Description of Artificial Sequence: Synthetic oligonucleotide
gauuaccuccaucuggagc

SEQ ID NO: 3041598 - RNA, 19 nt, Artificial Sequence
  Description of Artificial Sequence: Synthetic oligonucleotide
uugaaauccaacagccgcu

SEQ ID NO: 3041599 - RNA, 19 nt, Artificial Sequence
  Description of Artificial Sequence: Synthetic oligonucleotide
ucuuggggauauaauugag

SEQ ID NO: 3041600 - RNA, 19 nt, Artificial Sequence
  Description of Artificial Sequence: Synthetic oligonucleotide
uccaucuggagcucgucgg

SEQ ID NO: 3041601 - RNA, 19 nt, Artificial Sequence
  Description of Artificial Sequence: Synthetic oligonucleotide
aaucuugguggagaauggg

SEQ ID NO: 3041602 - RNA, 19 nt, Artificial Sequence
  Description of Artificial Sequence: Synthetic oligonucleotide
gagaauggggagcugaaca

SEQ ID NO: 3041603 - RNA, 19 nt, Artificial Sequence
  Description of Artificial Sequence: Synthetic oligonucleotide
aauugagcccaucgcuauc

SEQ ID NO: 3041604 - RNA, 19 nt, Artificial Sequence
  Description of Artificial Sequence: Synthetic oligonucleotide
ucggucuucaguuccacga

SEQ ID NO: 3041605 - RNA, 19 nt, Artificial Sequence
  Description of Artificial Sequence: Synthetic oligonucleotide
ucugggaaaccgauuucag

SEQ ID NO: 3041606 - RNA, 19 nt, Artificial Sequence
  Description of Artificial Sequence: Synthetic oligonucleotide
guacuuuuguccuuagcac

SEQ ID NO: 3041607 - RNA, 19 nt, Artificial Sequence
  Description of Artificial Sequence: Synthetic oligonucleotide
uauuugggguagcugcucc

SEQ ID NO: 3041608 - RNA, 19 nt, Artificial Sequence
  Description of Artificial Sequence: Synthetic oligonucleotide
acuuuuguccuuagcaccg

SEQ ID NO: 3041609 - RNA, 19 nt, Artificial Sequence
  Description of Artificial Sequence: Synthetic oligonucleotide
uguauuugggguagcugcu

SEQ ID NO: 3041610 - RNA, 19 nt, Artificial Sequence
  Description of Artificial Sequence: Synthetic oligonucleotide
aucuuggggauauaauuga

SEQ ID NO: 3041611 - RNA, 19 nt, Artificial Sequence
  Description of Artificial Sequence: Synthetic oligonucleotide
cugcaggucgauuaccucc

SEQ ID NO: 3041612 - RNA, 19 nt, Artificial Sequence
  Description of Artificial Sequence: Synthetic oligonucleotide
auugagcccaucgcuaucg

SEQ ID NO: 3041613 - RNA, 19 nt, Artificial Sequence
  Description of Artificial Sequence: Synthetic oligonucleotide
accgauuucagugugggga

SEQ ID NO: 3041614 - RNA, 19 nt, Artificial Sequence
  Description of Artificial Sequence: Synthetic oligonucleotide
uagaaguccgggaugccca

SEQ ID NO: 3041615 - RNA, 19 nt, Artificial Sequence
  Description of Artificial Sequence: Synthetic oligonucleotide
caaucuugguggagaaugg

SEQ ID NO: 3041616 - RNA, 19 nt, Artificial Sequence
  Description of Artificial Sequence: Synthetic oligonucleotide
aggccuugaaauccaacag

SEQ ID NO: 3041617 - RNA, 19 nt, Artificial Sequence
  Description of Artificial Sequence: Synthetic oligonucleotide
uuguagaaguccgggaugc

SEQ ID NO: 3041618 - RNA, 19 nt, Artificial Sequence
  Description of Artificial Sequence: Synthetic oligonucleotide
uggaacucggucuucaguu

SEQ ID NO: 3041619 - RNA, 19 nt, Artificial Sequence
  Description of Artificial Sequence: Synthetic oligonucleotide
uggggagcugaacagggug

SEQ ID NO: 3041620 - RNA, 19 nt, Artificial Sequence
  Description of Artificial Sequence: Synthetic oligonucleotide
gaacucggucuucaguucc

SEQ ID NO: 3041621 - RNA, 19 nt, Artificial Sequence
  Description of Artificial Sequence: Synthetic oligonucleotide
gaauggggagcugaacagg

SEQ ID NO: 3041622 - RNA, 19 nt, Artificial Sequence
  Description of Artificial Sequence: Synthetic oligonucleotide
ugggguagcugcuccagag

SEQ ID NO: 3041623 - RNA, 19 nt, Artificial Sequence
  Description of Artificial Sequence: Synthetic oligonucleotide
uuucaguguggggaagugg

SEQ ID NO: 3041624 - RNA, 19 nt, Artificial Sequence
  Description of Artificial Sequence: Synthetic oligonucleotide
aaccgauuucagugugggg

SEQ ID NO: 3041625 - RNA, 19 nt, Artificial Sequence
  Description of Artificial Sequence: Synthetic oligonucleotide
guccuuagcaccguguugc

SEQ ID NO: 3041626 - RNA, 19 nt, Artificial Sequence
  Description of Artificial Sequence: Synthetic oligonucleotide
accuugucguacuuuuguc

SEQ ID NO: 3041627 - RNA, 19 nt, Artificial Sequence
  Description of Artificial Sequence: Synthetic oligonucleotide
gaacauggacagcaucuug

SEQ ID NO: 3041628 - RNA, 19 nt, Artificial Sequence
  Description of Artificial Sequence: Synthetic oligonucleotide
gaaaccgauuucagugugg

SEQ ID NO: 3041629 - RNA, 19 nt, Artificial Sequence
  Description of Artificial Sequence: Synthetic oligonucleotide
ugcaggucgauuaccucca

SEQ ID NO: 3041630 - RNA, 19 nt, Artificial Sequence
  Description of Artificial Sequence: Synthetic oligonucleotide
cuuguagaaguccgggaug

SEQ ID NO: 3041631 - RNA, 19 nt, Artificial Sequence
  Description of Artificial Sequence: Synthetic oligonucleotide
aauccaacagccgcuucug

SEQ ID NO: 3041632 - RNA, 19 nt, Artificial Sequence
  Description of Artificial Sequence: Synthetic oligonucleotide
aucuuggcacaguggcucc

SEQ ID NO: 3041633 - RNA, 19 nt, Artificial Sequence
  Description of Artificial Sequence: Synthetic oligonucleotide
uucucccaggccuugaaau

SEQ ID NO: 3041634 - RNA, 19 nt, Artificial Sequence
  Description of Artificial Sequence: Synthetic oligonucleotide
uaauugagcccaucgcuau

SEQ ID NO: 3041635 - RNA, 19 nt, Artificial Sequence
  Description of Artificial Sequence: Synthetic oligonucleotide
ggugaguucguucucccag

SEQ ID NO: 3041636 - RNA, 19 nt, Artificial Sequence
  Description of Artificial Sequence: Synthetic oligonucleotide
uguccuuagcaccguguug

SEQ ID NO: 3041637 - RNA, 19 nt, Artificial Sequence
  Description of Artificial Sequence: Synthetic oligonucleotide
aucuugguggagaaugggg

SEQ ID NO: 3041638 - RNA, 19 nt, Artificial Sequence
  Description of Artificial Sequence: Synthetic oligonucleotide
uccaacagccgcuucugga

SEQ ID NO: 3041639 - RNA, 19 nt, Artificial Sequence
  Description of Artificial Sequence: Synthetic oligonucleotide
agcugaacagggugaguuc

SEQ ID NO: 3041640 - RNA, 19 nt, Artificial Sequence
  Description of Artificial Sequence: Synthetic oligonucleotide
ugaguucguucucccaggc

SEQ ID NO: 3041641 - RNA, 19 nt, Artificial Sequence
  Description of Artificial Sequence: Synthetic oligonucleotide
gugaguucguucucccagg

SEQ ID NO: 3041642 - RNA, 19 nt, Artificial Sequence
  Description of Artificial Sequence: Synthetic oligonucleotide
guagcugcuccagaggugc

SEQ ID NO: 3041643 - RNA, 19 nt, Artificial Sequence
  Description of Artificial Sequence: Synthetic oligonucleotide
aaguccgggaugcccaccu

SEQ ID NO: 3041644 - RNA, 19 nt, Artificial Sequence
  Description of Artificial Sequence: Synthetic oligonucleotide
caccguguugcacugcagg

SEQ ID NO: 3041645 - RNA, 19 nt, Artificial Sequence
  Description of Artificial Sequence: Synthetic oligonucleotide
ucaguuccacgaucuuggg

SEQ ID NO: 3041646 - RNA, 19 nt, Artificial Sequence
  Description of Artificial Sequence: Synthetic oligonucleotide
ucacagaugugggugcugc

SEQ ID NO: 3041647 - RNA, 19 nt, Artificial Sequence
  Description of Artificial Sequence: Synthetic oligonucleotide
acugcaggucgauuaccuc

SEQ ID NO: 3041648 - RNA, 19 nt, Artificial Sequence
  Description of Artificial Sequence: Synthetic oligonucleotide
augugggugcugcugaaca

SEQ ID NO: 3041649 - RNA, 19 nt, Artificial Sequence
  Description of Artificial Sequence: Synthetic oligonucleotide
uggacagcaucuuggcaca

SEQ ID NO: 3041650 - RNA, 19 nt, Artificial Sequence
  Description of Artificial Sequence: Synthetic oligonucleotide
uuagcaccguguugcacug

SEQ ID NO: 3041651 - RNA, 19 nt, Artificial Sequence
  Description of Artificial Sequence: Synthetic oligonucleotide
ggggaagugggccagguug

SEQ ID NO: 3041652 - RNA, 19 nt, Artificial Sequence
  Description of Artificial Sequence: Synthetic oligonucleotide
ugcacugcaggucgauuac

SEQ ID NO: 3041653 - RNA, 19 nt, Artificial Sequence
  Description of Artificial Sequence: Synthetic oligonucleotide
ugcuuguagaaguccggga

SEQ ID NO: 3041654 - RNA, 19 nt, Artificial Sequence
  Description of Artificial Sequence: Synthetic oligonucleotide
caggccuugaaauccaaca

SEQ ID NO: 3041655 - RNA, 19 nt, Artificial Sequence
  Description of Artificial Sequence: Synthetic oligonucleotide
guggcuccuguauuugggg

SEQ ID NO: 3041656 - RNA, 19 nt, Artificial Sequence
  Description of Artificial Sequence: Synthetic oligonucleotide
ugcucacagaugugggugc

SEQ ID NO: 3041657 - RNA, 19 nt, Artificial Sequence
  Description of Artificial Sequence: Synthetic oligonucleotide
ugucaaucuugguggagaa

SEQ ID NO: 3041658 - RNA, 19 nt, Artificial Sequence
  Description of Artificial Sequence: Synthetic oligonucleotide
ucaguguggggaagugggc

SEQ ID NO: 3041659 - RNA, 19 nt, Artificial Sequence
  Description of Artificial Sequence: Synthetic oligonucleotide
agaaguccgggaugcccac

SEQ ID NO: 3041660 - RNA, 19 nt, Artificial Sequence
  Description of Artificial Sequence: Synthetic oligonucleotide
ucguacuuuuguccuuagc

SEQ ID NO: 3041661 - RNA, 19 nt, Artificial Sequence
  Description of Artificial Sequence: Synthetic oligonucleotide
uuugggguagcugcuccag

SEQ ID NO: 3041662 - RNA, 19 nt, Artificial Sequence
  Description of Artificial Sequence: Synthetic oligonucleotide
cuccaucuggagcucgucg

SEQ ID NO: 3041663 - RNA, 19 nt, Artificial Sequence
  Description of Artificial Sequence: Synthetic oligonucleotide
uugcacugcaggucgauua

SEQ ID NO: 3041664 - RNA, 19 nt, Artificial Sequence
  Description of Artificial Sequence: Synthetic oligonucleotide
aguggcuccuguauuuggg

SEQ ID NO: 3041665 - RNA, 19 nt, Artificial Sequence
  Description of Artificial Sequence: Synthetic oligonucleotide
aggugcuuguagaaguccg

SEQ ID NO: 3041666 - RNA, 19 nt, Artificial Sequence
  Description of Artificial Sequence: Synthetic oligonucleotide
uaucgcucugggaaaccga

SEQ ID NO: 3041667 - RNA, 19 nt, Artificial Sequence
  Description of Artificial Sequence: Synthetic oligonucleotide
cuaucgcucugggaaaccg

SEQ ID NO: 3041668 - RNA, 19 nt, Artificial Sequence
  Description of Artificial Sequence: Synthetic oligonucleotide
caucuuggcacaguggcuc

SEQ ID NO: 3041669 - RNA, 19 nt, Artificial Sequence
  Description of Artificial Sequence: Synthetic oligonucleotide
uccagaggugcuuguagaa

SEQ ID NO: 3041670 - RNA, 19 nt, Artificial Sequence
  Description of Artificial Sequence: Synthetic oligonucleotide
cugaacauggacagcaucu

SEQ ID NO: 3041671 - RNA, 19 nt, Artificial Sequence
  Description of Artificial Sequence: Synthetic oligonucleotide
guagaaguccgggaugccc

SEQ ID NO: 3041672 - RNA, 19 nt, Artificial Sequence
  Description of Artificial Sequence: Synthetic oligonucleotide
ggccuugaaauccaacagc

SEQ ID NO: 3041673 - RNA, 19 nt, Artificial Sequence
  Description of Artificial Sequence: Synthetic oligonucleotide
uuguccuuagcaccguguu

SEQ ID NO: 3041674 - RNA, 19 nt, Artificial Sequence
  Description of Artificial Sequence: Synthetic oligonucleotide
ucgggcaacgcugucaauc

SEQ ID NO: 3041675 - RNA, 19 nt, Artificial Sequence
  Description of Artificial Sequence: Synthetic oligonucleotide
caguuccacgaucuugggg

SEQ ID NO: 3041676 - RNA, 19 nt, Artificial Sequence
  Description of Artificial Sequence: Synthetic oligonucleotide
gccuugaaauccaacagcc

SEQ ID NO: 3041677 - RNA, 19 nt, Artificial Sequence
  Description of Artificial Sequence: Synthetic oligonucleotide
ccuugucguacuuuugucc

SEQ ID NO: 3041678 - RNA, 19 nt, Artificial Sequence
  Description of Artificial Sequence: Synthetic oligonucleotide
cucccaggccuugaaaucc

SEQ ID NO: 3041679 - RNA, 19 nt, Artificial Sequence
  Description of Artificial Sequence: Synthetic oligonucleotide
gugcuuguagaaguccggg

SEQ ID NO: 3041680 - RNA, 19 nt, Artificial Sequence
  Description of Artificial Sequence: Synthetic oligonucleotide
ucucccaggccuugaaauc

SEQ ID NO: 3041681 - RNA, 19 nt, Artificial Sequence
  Description of Artificial Sequence: Synthetic oligonucleotide
ggugcugcugaacauggac

SEQ ID NO: 3041682 - RNA, 19 nt, Artificial Sequence
  Description of Artificial Sequence: Synthetic oligonucleotide
uggagaauggggagcugaa

SEQ ID NO: 3041683 - RNA, 19 nt, Artificial Sequence
  Description of Artificial Sequence: Synthetic oligonucleotide
gcugaacagggugaguucg

SEQ ID NO: 3041684 - RNA, 19 nt, Artificial Sequence
  Description of Artificial Sequence: Synthetic oligonucleotide
auaauugagcccaucgcua

SEQ ID NO: 3041685 - RNA, 19 nt, Artificial Sequence
  Description of Artificial Sequence: Synthetic oligonucleotide
cuuagcaccguguugcacu

SEQ ID NO: 3041686 - RNA, 19 nt, Artificial Sequence
  Description of Artificial Sequence: Synthetic oligonucleotide
acagggugaguucguucuc

SEQ ID NO: 3041687 - RNA, 19 nt, Artificial Sequence
  Description of Artificial Sequence: Synthetic oligonucleotide
acagaugugggugcugcug

SEQ ID NO: 3041688 - RNA, 19 nt, Artificial Sequence
  Description of Artificial Sequence: Synthetic oligonucleotide
gaggugcuuguagaagucc

SEQ ID NO: 3041689 - RNA, 19 nt, Artificial Sequence
  Description of Artificial Sequence: Synthetic oligonucleotide
agaggugcuuguagaaguc

SEQ ID NO: 3041690 - RNA, 19 nt, Artificial Sequence
  Description of Artificial Sequence: Synthetic oligonucleotide
gaacagggugaguucguuc

SEQ ID NO: 3041691 - RNA, 19 nt, Artificial Sequence
  Description of Artificial Sequence: Synthetic oligonucleotide
accguguugcacugcaggu

SEQ ID NO: 3041692 - RNA, 19 nt, Artificial Sequence
  Description of Artificial Sequence: Synthetic oligonucleotide
agcaccguguugcacugca

SEQ ID NO: 3041693 - RNA, 19 nt, Artificial Sequence
  Description of Artificial Sequence: Synthetic oligonucleotide
uccacgaucuuggggauau

SEQ ID NO: 3041694 - RNA, 19 nt, Artificial Sequence
  Description of Artificial Sequence: Synthetic oligonucleotide
ggaaaccgauuucagugug

SEQ ID NO: 3041695 - RNA, 19 nt, Artificial Sequence
  Description of Artificial Sequence: Synthetic oligonucleotide
cuugucguacuuuuguccu

SEQ ID NO: 3041696 - RNA, 19 nt, Artificial Sequence
  Description of Artificial Sequence: Synthetic oligonucleotide
gagcccaucgcuaucgcuc

SEQ ID NO: 3041697 - RNA, 19 nt, Artificial Sequence
  Description of Artificial Sequence: Synthetic oligonucleotide
uccgggaugcccaccuugu

SEQ ID NO: 3041698 - RNA, 19 nt, Artificial Sequence
  Description of Artificial Sequence: Synthetic oligonucleotide
auuucaguguggggaagug

SEQ ID NO: 3041699 - RNA, 19 nt, Artificial Sequence
  Description of Artificial Sequence: Synthetic oligonucleotide
caguggcuccuguauuugg

SEQ ID NO: 3041700 - RNA, 19 nt, Artificial Sequence
  Description of Artificial Sequence: Synthetic oligonucleotide
gaguucguucucccaggcc

SEQ ID NO: 3041701 - RNA, 19 nt, Artificial Sequence
  Description of Artificial Sequence: Synthetic oligonucleotide
cugcucacagaugugggug

SEQ ID NO: 3041702 - RNA, 19 nt, Artificial Sequence
  Description of Artificial Sequence: Synthetic oligonucleotide
uucuggaacucggucuuca

SEQ ID NO: 3041703 - RNA, 19 nt, Artificial Sequence
  Description of Artificial Sequence: Synthetic oligonucleotide
auccaacagccgcuucugg

SEQ ID NO: 3041704 - RNA, 19 nt, Artificial Sequence
  Description of Artificial Sequence: Synthetic oligonucleotide
cucggucuucaguuccacg

SEQ ID NO: 3041705 - RNA, 19 nt, Artificial Sequence
  Description of Artificial Sequence: Synthetic oligonucleotide
auuugggguagcugcucca

SEQ ID NO: 3041706 - RNA, 19 nt, Artificial Sequence
  Description of Artificial Sequence: Synthetic oligonucleotide
caguguggggaagugggcc

SEQ ID NO: 3041707 - RNA, 19 nt, Artificial Sequence
  Description of Artificial Sequence: Synthetic oligonucleotide
ugaacauggacagcaucuu

SEQ ID NO: 3041708 - RNA, 19 nt, Artificial Sequence
  Description of Artificial Sequence: Synthetic oligonucleotide
uggcuccuguauuuggggu

SEQ ID NO: 3041709 - RNA, 19 nt, Artificial Sequence
  Description of Artificial Sequence: Synthetic oligonucleotide
ccuugaaauccaacagccg

SEQ ID NO: 3041710 - RNA, 19 nt, Artificial Sequence
  Description of Artificial Sequence: Synthetic oligonucleotide
cguacuuuuguccuuagca

SEQ ID NO: 3041711 - RNA, 19 nt, Artificial Sequence
  Description of Artificial Sequence: Synthetic oligonucleotide
ugaaauccaacagccgcuu

SEQ ID NO: 3041712 - RNA, 19 nt, Artificial Sequence
  Description of Artificial Sequence: Synthetic oligonucleotide
aucuggagcucgucgggca

SEQ ID NO: 3041713 - RNA, 19 nt, Artificial Sequence
  Description of Artificial Sequence: Synthetic oligonucleotide
ugugggugcugcugaacau

SEQ ID NO: 3041714 - RNA, 19 nt, Artificial Sequence
  Description of Artificial Sequence: Synthetic oligonucleotide
ucccaggccuugaaaucca

SEQ ID NO: 3041715 - RNA, 19 nt, Artificial Sequence
  Description of Artificial Sequence: Synthetic oligonucleotide
ugucguacuuuuguccuua

SEQ ID NO: 3041716 - RNA, 19 nt, Artificial Sequence
  Description of Artificial Sequence: Synthetic oligonucleotide
ugagcccaucgcuaucgcu

SEQ ID NO: 3041717 - RNA, 19 nt, Artificial Sequence
  Description of Artificial Sequence: Synthetic oligonucleotide
cguguugcacugcaggucg

SEQ ID NO: 3041718 - RNA, 19 nt, Artificial Sequence
  Description of Artificial Sequence: Synthetic oligonucleotide
uggagcucgucgggcaacg

SEQ ID NO: 3041719 - RNA, 19 nt, Artificial Sequence
  Description of Artificial Sequence: Synthetic oligonucleotide
uugagcccaucgcuaucgc

SEQ ID NO: 3041720 - RNA, 19 nt, Artificial Sequence
  Description of Artificial Sequence: Synthetic oligonucleotide
agcugcucacagauguggg

SEQ ID NO: 3041721 - RNA, 19 nt, Artificial Sequence
  Description of Artificial Sequence: Synthetic oligonucleotide
uugggguagcugcuccaga

SEQ ID NO: 3041722 - RNA, 19 nt, Artificial Sequence
  Description of Artificial Sequence: Synthetic oligonucleotide
uguagaaguccgggaugcc

SEQ ID NO: 3041723 - RNA, 19 nt, Artificial Sequence
  Description of Artificial Sequence: Synthetic oligonucleotide
gaaauccaacagccgcuuc

SEQ ID NO: 3041724 - RNA, 19 nt, Artificial Sequence
  Description of Artificial Sequence: Synthetic oligonucleotide
uccuguauuugggguagcu

SEQ ID NO: 3041725 - RNA, 19 nt, Artificial Sequence
  Description of Artificial Sequence: Synthetic oligonucleotide
ucuggagcucgucgggcaa

SEQ ID NO: 3041726 - RNA, 19 nt, Artificial Sequence
  Description of Artificial Sequence: Synthetic oligonucleotide
cugucaaucuugguggaga

SEQ ID NO: 3041727 - RNA, 19 nt, Artificial Sequence
  Description of Artificial Sequence: Synthetic oligonucleotide
agcccaucgcuaucgcucu

SEQ ID NO: 3041728 - RNA, 19 nt, Artificial Sequence
  Description of Artificial Sequence: Synthetic oligonucleotide
cucugggaaaccgauuuca

SEQ ID NO: 3041729 - RNA, 19 nt, Artificial Sequence
  Description of Artificial Sequence: Synthetic oligonucleotide
ggugcuuguagaaguccgg

SEQ ID NO: 3041730 - RNA, 19 nt, Artificial Sequence
  Description of Artificial Sequence: Synthetic oligonucleotide
cagggugaguucguucucc

SEQ ID NO: 3041731 - RNA, 19 nt, Artificial Sequence
  Description of Artificial Sequence: Synthetic oligonucleotide
gaugcccaccuugucguac

SEQ ID NO: 3041732 - RNA, 19 nt, Artificial Sequence
  Description of Artificial Sequence: Synthetic oligonucleotide
caacagccgcuucuggaac

SEQ ID NO: 3041733 - RNA, 19 nt, Artificial Sequence
  Description of Artificial Sequence: Synthetic oligonucleotide
ugcugaacauggacagcau

SEQ ID NO: 3041734 - RNA, 19 nt, Artificial Sequence
  Description of Artificial Sequence: Synthetic oligonucleotide
acucggucuucaguuccac

SEQ ID NO: 3041735 - RNA, 19 nt, Artificial Sequence
  Description of Artificial Sequence: Synthetic oligonucleotide
gcuccagaggugcuuguag

SEQ ID NO: 3041736 - RNA, 19 nt, Artificial Sequence
  Description of Artificial Sequence: Synthetic oligonucleotide
acaguggcuccuguauuug

SEQ ID NO: 3041737 - RNA, 19 nt, Artificial Sequence
  Description of Artificial Sequence: Synthetic oligonucleotide
agcucgucgggcaacgcug

SEQ ID NO: 3041738 - RNA, 19 nt, Artificial Sequence
  Description of Artificial Sequence: Synthetic oligonucleotide
cuccagaggugcuuguaga

SEQ ID NO: 3041739 - RNA, 19 nt, Artificial Sequence
  Description of Artificial Sequence: Synthetic oligonucleotide
uccuuagcaccguguugca

SEQ ID NO: 3041740 - RNA, 19 nt, Artificial Sequence
  Description of Artificial Sequence: Synthetic oligonucleotide
aacucggucuucaguucca

SEQ ID NO: 3041741 - RNA, 19 nt, Artificial Sequence
  Description of Artificial Sequence: Synthetic oligonucleotide
gugggugcugcugaacaug

SEQ ID NO: 3041742 - RNA, 19 nt, Artificial Sequence
  Description of Artificial Sequence: Synthetic oligonucleotide
acagccgcuucuggaacuc

SEQ ID NO: 3041743 - RNA, 19 nt, Artificial Sequence
  Description of Artificial Sequence: Synthetic oligonucleotide
gcaacgcugucaaucuugg

SEQ ID NO: 3041744 - RNA, 19 nt, Artificial Sequence
  Description of Artificial Sequence: Synthetic oligonucleotide
ggcaacgcugucaaucuug

SEQ ID NO: 3041745 - RNA, 19 nt, Artificial Sequence
  Description of Artificial Sequence: Synthetic oligonucleotide
ucgcuaucgcucugggaaa

SEQ ID NO: 3041746 - RNA, 19 nt, Artificial Sequence
  Description of Artificial Sequence: Synthetic oligonucleotide
cagaggugcuuguagaagu

SEQ ID NO: 3041747 - RNA, 19 nt, Artificial Sequence
  Description of Artificial Sequence: Synthetic oligonucleotide
uaccuccaucuggagcucg

SEQ ID NO: 3041748 - RNA, 19 nt, Artificial Sequence
  Description of Artificial Sequence: Synthetic oligonucleotide
cagaugugggugcugcuga

SEQ ID NO: 3041749 - RNA, 19 nt, Artificial Sequence
  Description of Artificial Sequence: Synthetic oligonucleotide
gaugugggugcugcugaac

SEQ ID NO: 3041750 - RNA, 19 nt, Artificial Sequence
  Description of Artificial Sequence: Synthetic oligonucleotide
augcccaccuugucguacu

SEQ ID NO: 3041751 - RNA, 19 nt, Artificial Sequence
  Description of Artificial Sequence: Synthetic oligonucleotide
guccgggaugcccaccuug

SEQ ID NO: 3041752 - RNA, 19 nt, Artificial Sequence
  Description of Artificial Sequence: Synthetic oligonucleotide
guggagaauggggagcuga

SEQ ID NO: 3041753 - RNA, 19 nt, Artificial Sequence
  Description of Artificial Sequence: Synthetic oligonucleotide
uuggcacaguggcuccugu

SEQ ID NO: 3041754 - RNA, 19 nt, Artificial Sequence
  Description of Artificial Sequence: Synthetic oligonucleotide
gggguagcugcuccagagg

SEQ ID NO: 3041755 - RNA, 19 nt, Artificial Sequence
  Description of Artificial Sequence: Synthetic oligonucleotide
uguggggaagugggccagg

SEQ ID NO: 3041756 - RNA, 19 nt, Artificial Sequence
  Description of Artificial Sequence: Synthetic oligonucleotide
caucuggagcucgucgggc

SEQ ID NO: 3041757 - RNA, 19 nt, Artificial Sequence
  Description of Artificial Sequence: Synthetic oligonucleotide
ucgucgggcaacgcuguca

SEQ ID NO: 3041758 - RNA, 19 nt, Artificial Sequence
  Description of Artificial Sequence: Synthetic oligonucleotide
cauggacagcaucuuggca

SEQ ID NO: 3041759 - RNA, 19 nt, Artificial Sequence
  Description of Artificial Sequence: Synthetic oligonucleotide
ggucgauuaccuccaucug

SEQ ID NO: 3041760 - RNA, 19 nt, Artificial Sequence
  Description of Artificial Sequence: Synthetic oligonucleotide
gauuucaguguggggaagu

SEQ ID NO: 3041761 - RNA, 19 nt, Artificial Sequence
  Description of Artificial Sequence: Synthetic oligonucleotide
uugucguacuuuuguccuu

SEQ ID NO: 3041762 - RNA, 19 nt, Artificial Sequence
  Description of Artificial Sequence: Synthetic oligonucleotide
agccgcuucuggaacucgg

SEQ ID NO: 3041763 - RNA, 19 nt, Artificial Sequence
  Description of Artificial Sequence: Synthetic oligonucleotide
gcugaacauggacagcauc

SEQ ID NO: 3041764 - RNA, 19 nt, Artificial Sequence
  Description of Artificial Sequence: Synthetic oligonucleotide
agaugugggugcugcugaa

SEQ ID NO: 3041765 - RNA, 19 nt, Artificial Sequence
  Description of Artificial Sequence: Synthetic oligonucleotide
acgaucuuggggauauaau

SEQ ID NO: 3041766 - RNA, 19 nt, Artificial Sequence
  Description of Artificial Sequence: Synthetic oligonucleotide
guauuugggguagcugcuc

SEQ ID NO: 3041767 - RNA, 19 nt, Artificial Sequence
  Description of Artificial Sequence: Synthetic oligonucleotide
uucguucucccaggccuug

SEQ ID NO: 3041768 - RNA, 19 nt, Artificial Sequence
  Description of Artificial Sequence: Synthetic oligonucleotide
gcuccuguauuugggguag

SEQ ID NO: 3041769 - RNA, 19 nt, Artificial Sequence
  Description of Artificial Sequence: Synthetic oligonucleotide
ggaacucggucuucaguuc

SEQ ID NO: 3041770 - RNA, 19 nt, Artificial Sequence
  Description of Artificial Sequence: Synthetic oligonucleotide
aucgcucugggaaaccgau

SEQ ID NO: 3041771 - RNA, 19 nt, Artificial Sequence
  Description of Artificial Sequence: Synthetic oligonucleotide
uguugcacugcaggucgau

SEQ ID NO: 3041772 - RNA, 19 nt, Artificial Sequence
  Description of Artificial Sequence: Synthetic oligonucleotide
gagcugaacagggugaguu

SEQ ID NO: 3041773 - RNA, 19 nt, Artificial Sequence
  Description of Artificial Sequence: Synthetic oligonucleotide
ggucuucaguuccacgauc

SEQ ID NO: 3041774 - RNA, 19 nt, Artificial Sequence
  Description of Artificial Sequence: Synthetic oligonucleotide
cuuggcacaguggcuccug

SEQ ID NO: 3041775 - RNA, 19 nt, Artificial Sequence
  Description of Artificial Sequence: Synthetic oligonucleotide
cacgaucuuggggauauaa

SEQ ID NO: 3041776 - RNA, 19 nt, Artificial Sequence
  Description of Artificial Sequence: Synthetic oligonucleotide
agagcugcucacagaugug

SEQ ID NO: 3041777 - RNA, 19 nt, Artificial Sequence
  Description of Artificial Sequence: Synthetic oligonucleotide
caggucgauuaccuccauc

SEQ ID NO: 3041778 - RNA, 19 nt, Artificial Sequence
  Description of Artificial Sequence: Synthetic oligonucleotide
cugggaaaccgauuucagu

SEQ ID NO: 3041779 - RNA, 19 nt, Artificial Sequence
  Description of Artificial Sequence: Synthetic oligonucleotide
ccaucuggagcucgucggg

SEQ ID NO: 3041780 - RNA, 19 nt, Artificial Sequence
  Description of Artificial Sequence: Synthetic oligonucleotide
caccuugucguacuuuugu

SEQ ID NO: 3041781 - RNA, 19 nt, Artificial Sequence
  Description of Artificial Sequence: Synthetic oligonucleotide
gaaguccgggaugcccacc

SEQ ID NO: 3041782 - RNA, 19 nt, Artificial Sequence
  Description of Artificial Sequence: Synthetic oligonucleotide
ucuuggcacaguggcuccu

SEQ ID NO: 3041783 - RNA, 19 nt, Artificial Sequence
  Description of Artificial Sequence: Synthetic oligonucleotide
gcuuguagaaguccgggau

SEQ ID NO: 3041784 - RNA, 19 nt, Artificial Sequence
  Description of Artificial Sequence: Synthetic oligonucleotide
gggagcugaacagggugag

SEQ ID NO: 3041785 - RNA, 19 nt, Artificial Sequence
  Description of Artificial Sequence: Synthetic oligonucleotide
cacugcaggucgauuaccu

SEQ ID NO: 3041786 - RNA, 19 nt, Artificial Sequence
  Description of Artificial Sequence: Synthetic oligonucleotide
ccagaggugcuuguagaag

SEQ ID NO: 3041787 - RNA, 19 nt, Artificial Sequence
  Description of Artificial Sequence: Synthetic oligonucleotide
guguggggaagugggccag

SEQ ID NO: 3041788 - RNA, 19 nt, Artificial Sequence
  Description of Artificial Sequence: Synthetic oligonucleotide
guucucccaggccuugaaa

SEQ ID NO: 3041789 - RNA, 19 nt, Artificial Sequence
  Description of Artificial Sequence: Synthetic oligonucleotide
gggaaaccgauuucagugu

SEQ ID NO: 3041790 - RNA, 19 nt, Artificial Sequence
  Description of Artificial Sequence: Synthetic oligonucleotide
uggcacaguggcuccugua

SEQ ID NO: 3041791 - RNA, 19 nt, Artificial Sequence
  Description of Artificial Sequence: Synthetic oligonucleotide
ucgcucugggaaaccgauu

SEQ ID NO: 3041792 - RNA, 19 nt, Artificial Sequence
  Description of Artificial Sequence: Synthetic oligonucleotide
uggggaagugggccagguu

SEQ ID NO: 3041793 - RNA, 19 nt, Artificial Sequence
  Description of Artificial Sequence: Synthetic oligonucleotide
uagcugcuccagaggugcu

SEQ ID NO: 3041794 - RNA, 19 nt, Artificial Sequence
  Description of Artificial Sequence: Synthetic oligonucleotide
ccuguauuugggguagcug

SEQ ID NO: 3041795 - RNA, 19 nt, Artificial Sequence
  Description of Artificial Sequence: Synthetic oligonucleotide
ggauauaauugagcccauc

SEQ ID NO: 3041796 - RNA, 19 nt, Artificial Sequence
  Description of Artificial Sequence: Synthetic oligonucleotide
gguagcugcuccagaggug

SEQ ID NO: 3041797 - RNA, 19 nt, Artificial Sequence
  Description of Artificial Sequence: Synthetic oligonucleotide
gagcucgucgggcaacgcu

SEQ ID NO: 3041798 - RNA, 19 nt, Artificial Sequence
  Description of Artificial Sequence: Synthetic oligonucleotide
uuaccuccaucuggagcuc

SEQ ID NO: 3041799 - RNA, 19 nt, Artificial Sequence
  Description of Artificial Sequence: Synthetic oligonucleotide
ggagaauggggagcugaac

SEQ ID NO: 3041800 - RNA, 19 nt, Artificial Sequence
  Description of Artificial Sequence: Synthetic oligonucleotide
gcugucaaucuugguggag

SEQ ID NO: 3041801 - RNA, 19 nt, Artificial Sequence
  Description of Artificial Sequence: Synthetic oligonucleotide
caucgcuaucgcucuggga

SEQ ID NO: 3041802 - RNA, 19 nt, Artificial Sequence
  Description of Artificial Sequence: Synthetic oligonucleotide
gggaugcccaccuugucgu

SEQ ID NO: 3041803 - RNA, 19 nt, Artificial Sequence
  Description of Artificial Sequence: Synthetic oligonucleotide
ccaacagccgcuucuggaa

SEQ ID NO: 3041804 - RNA, 19 nt, Artificial Sequence
  Description of Artificial Sequence: Synthetic oligonucleotide
ccaucgcuaucgcucuggg

SEQ ID NO: 3041805 - RNA, 19 nt, Artificial Sequence
  Description of Artificial Sequence: Synthetic oligonucleotide
ucguucucccaggccuuga

SEQ ID NO: 3041806 - RNA, 19 nt, Artificial Sequence
  Description of Artificial Sequence: Synthetic oligonucleotide
cuggaacucggucuucagu

SEQ ID NO: 3041807 - RNA, 19 nt, Artificial Sequence
  Description of Artificial Sequence: Synthetic oligonucleotide
auggggagcugaacagggu

SEQ ID NO: 3041808 - RNA, 19 nt, Artificial Sequence
  Description of Artificial Sequence: Synthetic oligonucleotide
ggcuccuguauuuggggua

SEQ ID NO: 3041809 - RNA, 19 nt, Artificial Sequence
  Description of Artificial Sequence: Synthetic oligonucleotide
ccaggccuugaaauccaac

SEQ ID NO: 3041810 - RNA, 19 nt, Artificial Sequence
  Description of Artificial Sequence: Synthetic oligonucleotide
cuucuggaacucggucuuc

SEQ ID NO: 3041811 - RNA, 19 nt, Artificial Sequence
  Description of Artificial Sequence: Synthetic oligonucleotide
cuggagcucgucgggcaac

SEQ ID NO: 3041812 - RNA, 19 nt, Artificial Sequence
  Description of Artificial Sequence: Synthetic oligonucleotide
cacaguggcuccuguauuu

SEQ ID NO: 3041813 - RNA, 19 nt, Artificial Sequence
  Description of Artificial Sequence: Synthetic oligonucleotide
cccaucgcuaucgcucugg

SEQ ID NO: 3041814 - RNA, 19 nt, Artificial Sequence
  Description of Artificial Sequence: Synthetic oligonucleotide
ggcacaguggcuccuguau

SEQ ID NO: 3041815 - RNA, 19 nt, Artificial Sequence
  Description of Artificial Sequence: Synthetic oligonucleotide
cagccgcuucuggaacucg

SEQ ID NO: 3041816 - RNA, 19 nt, Artificial Sequence
  Description of Artificial Sequence: Synthetic oligonucleotide
gcucugggaaaccgauuuc

SEQ ID NO: 3041817 - RNA, 19 nt, Artificial Sequence
  Description of Artificial Sequence: Synthetic oligonucleotide
cuccuguauuugggguagc

SEQ ID NO: 3041818 - RNA, 19 nt, Artificial Sequence
  Description of Artificial Sequence: Synthetic oligonucleotide
uuccacgaucuuggggaua

SEQ ID NO: 3041819 - RNA, 19 nt, Artificial Sequence
  Description of Artificial Sequence: Synthetic oligonucleotide
gcuaucgcucugggaaacc

SEQ ID NO: 3041820 - RNA, 19 nt, Artificial Sequence
  Description of Artificial Sequence: Synthetic oligonucleotide
ggggagcugaacaggguga

SEQ ID NO: 3041821 - RNA, 19 nt, Artificial Sequence
  Description of Artificial Sequence: Synthetic oligonucleotide
cugaacagggugaguucgu

SEQ ID NO: 3041822 - RNA, 19 nt, Artificial Sequence
  Description of Artificial Sequence: Synthetic oligonucleotide
gacagcaucuuggcacagu

SEQ ID NO: 3041823 - RNA, 19 nt, Artificial Sequence
  Description of Artificial Sequence: Synthetic oligonucleotide
ccaccuugucguacuuuug

SEQ ID NO: 3041824 - RNA, 19 nt, Artificial Sequence
  Description of Artificial Sequence: Synthetic oligonucleotide
uagcaccguguugcacugc

SEQ ID NO: 3041825 - RNA, 19 nt, Artificial Sequence
  Description of Artificial Sequence: Synthetic oligonucleotide
ugcccaccuugucguacuu

SEQ ID NO: 3041826 - RNA, 19 nt, Artificial Sequence
  Description of Artificial Sequence: Synthetic oligonucleotide
accuccaucuggagcucgu

SEQ ID NO: 3041827 - RNA, 19 nt, Artificial Sequence
  Description of Artificial Sequence: Synthetic oligonucleotide
ccgauuucaguguggggaa

SEQ ID NO: 3041828 - RNA, 19 nt, Artificial Sequence
  Description of Artificial Sequence: Synthetic oligonucleotide
gcacugcaggucgauuacc

SEQ ID NO: 3041829 - RNA, 19 nt, Artificial Sequence
  Description of Artificial Sequence: Synthetic oligonucleotide
agcugcuccagaggugcuu

SEQ ID NO: 3041830 - RNA, 19 nt, Artificial Sequence
  Description of Artificial Sequence: Synthetic oligonucleotide
gcugcucacagaugugggu

SEQ ID NO: 3041831 - RNA, 19 nt, Artificial Sequence
  Description of Artificial Sequence: Synthetic oligonucleotide
cgaucuuggggauauaauu

SEQ ID NO: 3041832 - RNA, 19 nt, Artificial Sequence
  Description of Artificial Sequence: Synthetic oligonucleotide
guuccacgaucuuggggau

SEQ ID NO: 3041833 - RNA, 19 nt, Artificial Sequence
  Description of Artificial Sequence: Synthetic oligonucleotide
cucgucgggcaacgcuguc

SEQ ID NO: 3041834 - RNA, 19 nt, Artificial Sequence
  Description of Artificial Sequence: Synthetic oligonucleotide
cgauuaccuccaucuggag

SEQ ID NO: 3041835 - RNA, 19 nt, Artificial Sequence
  Description of Artificial Sequence: Synthetic oligonucleotide
aguccgggaugcccaccuu

SEQ ID NO: 3041836 - RNA, 19 nt, Artificial Sequence
  Description of Artificial Sequence: Synthetic oligonucleotide
ccguguugcacugcagguc

SEQ ID NO: 3041837 - RNA, 19 nt, Artificial Sequence
  Description of Artificial Sequence: Synthetic oligonucleotide
cuuuuguccuuagcaccgu

SEQ ID NO: 3041838 - RNA, 19 nt, Artificial Sequence
  Description of Artificial Sequence: Synthetic oligonucleotide
gguggagaauggggagcug

SEQ ID NO: 3041839 - RNA, 19 nt, Artificial Sequence
  Description of Artificial Sequence: Synthetic oligonucleotide
ccuuagcaccguguugcac

SEQ ID NO: 3041840 - RNA, 19 nt, Artificial Sequence
  Description of Artificial Sequence: Synthetic oligonucleotide
gucaaucuugguggagaau

SEQ ID NO: 3041841 - RNA, 19 nt, Artificial Sequence
  Description of Artificial Sequence: Synthetic oligonucleotide
guguugcacugcaggucga

SEQ ID NO: 3041842 - RNA, 19 nt, Artificial Sequence
  Description of Artificial Sequence: Synthetic oligonucleotide
gggaagugggccagguugu

SEQ ID NO: 3041843 - RNA, 19 nt, Artificial Sequence
  Description of Artificial Sequence: Synthetic oligonucleotide
gcaccguguugcacugcag

SEQ ID NO: 3041844 - RNA, 19 nt, Artificial Sequence
  Description of Artificial Sequence: Synthetic oligonucleotide
cgauuucaguguggggaag

SEQ ID NO: 3041845 - RNA, 19 nt, Artificial Sequence
  Description of Artificial Sequence: Synthetic oligonucleotide
caacgcugucaaucuuggu

SEQ ID NO: 3041846 - RNA, 19 nt, Artificial Sequence
  Description of Artificial Sequence: Synthetic oligonucleotide
ggagcucgucgggcaacgc

SEQ ID NO: 3041847 - RNA, 19 nt, Artificial Sequence
  Description of Artificial Sequence: Synthetic oligonucleotide
guugcacugcaggucgauu

SEQ ID NO: 3041848 - RNA, 19 nt, Artificial Sequence
  Description of Artificial Sequence: Synthetic oligonucleotide
guggggaagugggccaggu

SEQ ID NO: 3041849 - RNA, 19 nt, Artificial Sequence
  Description of Artificial Sequence: Synthetic oligonucleotide
guucguucucccaggccuu

SEQ ID NO: 3041850 - RNA, 19 nt, Artificial Sequence
  Description of Artificial Sequence: Synthetic oligonucleotide
gcaucuuggcacaguggcu

SEQ ID NO: 3041851 - RNA, 19 nt, Artificial Sequence
  Description of Artificial Sequence: Synthetic oligonucleotide
cccaccuugucguacuuuu

SEQ ID NO: 3041852 - RNA, 19 nt, Artificial Sequence
  Description of Artificial Sequence: Synthetic oligonucleotide
cgcuaucgcucugggaaac

SEQ ID NO: 3041853 - RNA, 19 nt, Artificial Sequence
  Description of Artificial Sequence: Synthetic oligonucleotide
gcacaguggcuccuguauu

SEQ ID NO: 3041854 - RNA, 19 nt, Artificial Sequence
  Description of Artificial Sequence: Synthetic oligonucleotide
gcccaucgcuaucgcucug

SEQ ID NO: 3041855 - RNA, 19 nt, Artificial Sequence
  Description of Artificial Sequence: Synthetic oligonucleotide
ggaugcccaccuugucgua

SEQ ID NO: 3041856 - RNA, 19 nt, Artificial Sequence
  Description of Artificial Sequence: Synthetic oligonucleotide
cgucgggcaacgcugucaa

SEQ ID NO: 3041857 - RNA, 19 nt, Artificial Sequence
  Description of Artificial Sequence: Synthetic oligonucleotide
ccgggaugcccaccuuguc

SEQ ID NO: 3041858 - RNA, 19 nt, Artificial Sequence
  Description of Artificial Sequence: Synthetic oligonucleotide
gggugcugcugaacaugga

SEQ ID NO: 3041859 - RNA, 19 nt, Artificial Sequence
  Description of Artificial Sequence: Synthetic oligonucleotide
cgcucugggaaaccgauuu

SEQ ID NO: 3041860 - RNA, 19 nt, Artificial Sequence
  Description of Artificial Sequence: Synthetic oligonucleotide
cgggcaacgcugucaaucu

SEQ ID NO: 3041861 - RNA, 19 nt, Artificial Sequence
  Description of Artificial Sequence: Synthetic oligonucleotide
cgcugucaaucuuggugga

SEQ ID NO: 3041862 - RNA, 19 nt, Artificial Sequence
  Description of Artificial Sequence: Synthetic oligonucleotide
ggagcugaacagggugagu

SEQ ID NO: 3041863 - RNA, 19 nt, Artificial Sequence
  Description of Artificial Sequence: Synthetic oligonucleotide
gggauauaauugagcccau

SEQ ID NO: 3041864 - RNA, 19 nt, Artificial Sequence
  Description of Artificial Sequence: Synthetic oligonucleotide
cccaggccuugaaauccaa

SEQ ID NO: 3041865 - RNA, 19 nt, Artificial Sequence
  Description of Artificial Sequence: Synthetic oligonucleotide
gccgcuucuggaacucggu

SEQ ID NO: 3041866 - RNA, 19 nt, Artificial Sequence
  Description of Artificial Sequence: Synthetic oligonucleotide
cguucucccaggccuugaa

SEQ ID NO: 3041867 - RNA, 19 nt, Artificial Sequence
  Description of Artificial Sequence: Synthetic oligonucleotide
gucgggcaacgcugucaau

SEQ ID NO: 3041868 - RNA, 19 nt, Artificial Sequence
  Description of Artificial Sequence: Synthetic oligonucleotide
gcucgucgggcaacgcugu

SEQ ID NO: 3041869 - RNA, 19 nt, Artificial Sequence
  Description of Artificial Sequence: Synthetic oligonucleotide
gggcaacgcugucaaucuu

SEQ ID NO: 3041870 - RNA, 19 nt, Artificial Sequence
  Description of Artificial Sequence: Synthetic oligonucleotide
ggaagugggccagguuguu

SEQ ID NO: 3041871 - RNA, 19 nt, Artificial Sequence
  Description of Artificial Sequence: Synthetic oligonucleotide
gcaggucgauuaccuccau

SEQ ID NO: 3041872 - RNA, 19 nt, Artificial Sequence
  Description of Artificial Sequence: Synthetic oligonucleotide
cggucuucaguuccacgau

SEQ ID NO: 3041873 - RNA, 19 nt, Artificial Sequence
  Description of Artificial Sequence: Synthetic oligonucleotide
gcccaccuugucguacuuu

SEQ ID NO: 3041874 - RNA, 19 nt, Artificial Sequence
  Description of Artificial Sequence: Synthetic oligonucleotide
ccacgaucuuggggauaua

SEQ ID NO: 3041875 - RNA, 19 nt, Artificial Sequence
  Description of Artificial Sequence: Synthetic oligonucleotide
acagagucgauuuuaagcc

SEQ ID NO: 3041876 - RNA, 19 nt, Artificial Sequence
  Description of Artificial Sequence: Synthetic oligonucleotide
aagccaaccucucuuaucg

SEQ ID NO: 3041877 - RNA, 19 nt, Artificial Sequence
  Description of Artificial Sequence: Synthetic oligonucleotide
aaaacgagacucugggugg

SEQ ID NO: 3041878 - RNA, 19 nt, Artificial Sequence
  Description of Artificial Sequence: Synthetic oligonucleotide
aucugugagagucaggugg

SEQ ID NO: 3041879 - RNA, 19 nt, Artificial Sequence
  Description of Artificial Sequence: Synthetic oligonucleotide
gacagagucgauuuuaagc

SEQ ID NO: 3041880 - RNA, 19 nt, Artificial Sequence
  Description of Artificial Sequence: Synthetic oligonucleotide
aacugaggccuccaaaacg

SEQ ID NO: 3041881 - RNA, 19 nt, Artificial Sequence
  Description of Artificial Sequence: Synthetic oligonucleotide
cuuaucgccacucagugag

SEQ ID NO: 3041882 - RNA, 19 nt, Artificial Sequence
  Description of Artificial Sequence: Synthetic oligonucleotide
auucacaucugugagaguc

SEQ ID NO: 3041883 - RNA, 19 nt, Artificial Sequence
  Description of Artificial Sequence: Synthetic oligonucleotide
cagugaguaacucacaggc

SEQ ID NO: 3041884 - RNA, 19 nt, Artificial Sequence
  Description of Artificial Sequence: Synthetic oligonucleotide
ucauucacaucugugagag

SEQ ID NO: 3041885 - RNA, 19 nt, Artificial Sequence
  Description of Artificial Sequence: Synthetic oligonucleotide
ugucauucacaucugugag

SEQ ID NO: 3041886 - RNA, 19 nt, Artificial Sequence
  Description of Artificial Sequence: Synthetic oligonucleotide
aauaucuccccggugacag

SEQ ID NO: 3041887 - RNA, 19 nt, Artificial Sequence
  Description of Artificial Sequence: Synthetic oligonucleotide
uuuucuguuucccugucca

SEQ ID NO: 3041888 - RNA, 19 nt, Artificial Sequence
  Description of Artificial Sequence: Synthetic oligonucleotide
ucgauuuuaagccaaccuc

SEQ ID NO: 3041889 - RNA, 19 nt, Artificial Sequence
  Description of Artificial Sequence: Synthetic oligonucleotide
aagaggacccaccuauuuc

SEQ ID NO: 3041890 - RNA, 19 nt, Artificial Sequence
  Description of Artificial Sequence: Synthetic oligonucleotide
auacacauuuucuguuucc

SEQ ID NO: 3041891 - RNA, 19 nt, Artificial Sequence
  Description of Artificial Sequence: Synthetic oligonucleotide
gugaguaacucacaggcag

SEQ ID NO: 3041892 - RNA, 19 nt, Artificial Sequence
  Description of Artificial Sequence: Synthetic oligonucleotide
uugucauucacaucuguga

SEQ ID NO: 3041893 - RNA, 19 nt, Artificial Sequence
  Description of Artificial Sequence: Synthetic oligonucleotide
ucuguuucccuguccagcg

SEQ ID NO: 3041894 - RNA, 19 nt, Artificial Sequence
  Description of Artificial Sequence: Synthetic oligonucleotide
uggcagaagaacaagccug

SEQ ID NO: 3041895 - RNA, 19 nt, Artificial Sequence
  Description of Artificial Sequence: Synthetic oligonucleotide
ugugccguggugcucaaag

SEQ ID NO: 3041896 - RNA, 19 nt, Artificial Sequence
  Description of Artificial Sequence: Synthetic oligonucleotide
ucagugaguaacucacagg

SEQ ID NO: 3041897 - RNA, 19 nt, Artificial Sequence
  Description of Artificial Sequence: Synthetic oligonucleotide
ugaguaacucacaggcagg

SEQ ID NO: 3041898 - RNA, 19 nt, Artificial Sequence
  Description of Artificial Sequence: Synthetic oligonucleotide
agaagaacaagccugugua

SEQ ID NO: 3041899 - RNA, 19 nt, Artificial Sequence
  Description of Artificial Sequence: Synthetic oligonucleotide
cuaaauaucuccccgguga

SEQ ID NO: 3041900 - RNA, 19 nt, Artificial Sequence
  Description of Artificial Sequence: Synthetic oligonucleotide
aaugugaacugaggccucc

SEQ ID NO: 3041901 - RNA, 19 nt, Artificial Sequence
  Description of Artificial Sequence: Synthetic oligonucleotide
uuuuaagccaaccucucuu

SEQ ID NO: 3041902 - RNA, 19 nt, Artificial Sequence
  Description of Artificial Sequence: Synthetic oligonucleotide
acuuguacccgauacacau

SEQ ID NO: 3041903 - RNA, 19 nt, Artificial Sequence
  Description of Artificial Sequence: Synthetic oligonucleotide
ugaacugaggccuccaaaa

SEQ ID NO: 3041904 - RNA, 19 nt, Artificial Sequence
  Description of Artificial Sequence: Synthetic oligonucleotide
agaacaagccuguguacuc

SEQ ID NO: 3041905 - RNA, 19 nt, Artificial Sequence
  Description of Artificial Sequence: Synthetic oligonucleotide
agucagguggaaaugugcc

SEQ ID NO: 3041906 - RNA, 19 nt, Artificial Sequence
  Description of Artificial Sequence: Synthetic oligonucleotide
gauggcagaagaacaagcc

SEQ ID NO: 3041907 - RNA, 19 nt, Artificial Sequence
  Description of Artificial Sequence: Synthetic oligonucleotide
aagccuguguacuccuugg

SEQ ID NO: 3041908 - RNA, 19 nt, Artificial Sequence
  Description of Artificial Sequence: Synthetic oligonucleotide
agccgcgcuaaauaucucc

SEQ ID NO: 3041909 - RNA, 19 nt, Artificial Sequence
  Description of Artificial Sequence: Synthetic oligonucleotide
uauuucaguggccaccacu

SEQ ID NO: 3041910 - RNA, 19 nt, Artificial Sequence
  Description of Artificial Sequence: Synthetic oligonucleotide
aagaacaagccuguguacu

SEQ ID NO: 3041911 - RNA, 19 nt, Artificial Sequence
  Description of Artificial Sequence: Synthetic oligonucleotide
ucucuuaucgccacucagu

SEQ ID NO: 3041912 - RNA, 19 nt, Artificial Sequence
  Description of Artificial Sequence: Synthetic oligonucleotide
cacucagugaguaacucac

SEQ ID NO: 3041913 - RNA, 19 nt, Artificial Sequence
  Description of Artificial Sequence: Synthetic oligonucleotide
aguggccaccacuuguacc

SEQ ID NO: 3041914 - RNA, 19 nt, Artificial Sequence
  Description of Artificial Sequence: Synthetic oligonucleotide
cacauuuucuguuucccug

SEQ ID NO: 3041915 - RNA, 19 nt, Artificial Sequence
  Description of Artificial Sequence: Synthetic oligonucleotide
ugccguggugcucaaagag

SEQ ID NO: 3041916 - RNA, 19 nt, Artificial Sequence
  Description of Artificial Sequence: Synthetic oligonucleotide
agaggacccaccuauuuca

SEQ ID NO: 3041917 - RNA, 19 nt, Artificial Sequence
  Description of Artificial Sequence: Synthetic oligonucleotide
aaaacgacugcuggucauc

SEQ ID NO: 3041918 - RNA, 19 nt, Artificial Sequence
  Description of Artificial Sequence: Synthetic oligonucleotide
acaucugugagagucaggu

SEQ ID NO: 3041919 - RNA, 19 nt, Artificial Sequence
  Description of Artificial Sequence: Synthetic oligonucleotide
cucagugaguaacucacag

SEQ ID NO: 3041920 - RNA, 19 nt, Artificial Sequence
  Description of Artificial Sequence: Synthetic oligonucleotide
accuauuucaguggccacc

SEQ ID NO: 3041921 - RNA, 19 nt, Artificial Sequence
  Description of Artificial Sequence: Synthetic oligonucleotide
uguacuccuuggcuaggcg

SEQ ID NO: 3041922 - RNA, 19 nt, Artificial Sequence
  Description of Artificial Sequence: Synthetic oligonucleotide
uaaauaucuccccggugac

SEQ ID NO: 3041923 - RNA, 19 nt, Artificial Sequence
  Description of Artificial Sequence: Synthetic oligonucleotide
guggccaccacuuguaccc

SEQ ID NO: 3041924 - RNA, 19 nt, Artificial Sequence
  Description of Artificial Sequence: Synthetic oligonucleotide
uggugcucaaagaggaccc

SEQ ID NO: 3041925 - RNA, 19 nt, Artificial Sequence
  Description of Artificial Sequence: Synthetic oligonucleotide
uggaaaugugccguggugc

SEQ ID NO: 3041926 - RNA, 19 nt, Artificial Sequence
  Description of Artificial Sequence: Synthetic oligonucleotide
ggcaaaugugaacugaggc

SEQ ID NO: 3041927 - RNA, 19 nt, Artificial Sequence
  Description of Artificial Sequence: Synthetic oligonucleotide
gcaaaugugaacugaggcc

SEQ ID NO: 3041928 - RNA, 19 nt, Artificial Sequence
  Description of Artificial Sequence: Synthetic oligonucleotide
aaacgagacucuggguggc

SEQ ID NO: 3041929 - RNA, 19 nt, Artificial Sequence
  Description of Artificial Sequence: Synthetic oligonucleotide
uacacauuuucuguuuccc

SEQ ID NO: 3041930 - RNA, 19 nt, Artificial Sequence
  Description of Artificial Sequence: Synthetic oligonucleotide
ucacaggcaggccuucagg

SEQ ID NO: 3041931 - RNA, 19 nt, Artificial Sequence
  Description of Artificial Sequence: Synthetic oligonucleotide
ugcuggucaucaucggugg

SEQ ID NO: 3041932 - RNA, 19 nt, Artificial Sequence
  Description of Artificial Sequence: Synthetic oligonucleotide
aaaugugccguggugcuca

SEQ ID NO: 3041933 - RNA, 19 nt, Artificial Sequence
  Description of Artificial Sequence: Synthetic oligonucleotide
aaagaggacccaccuauuu

SEQ ID NO: 3041934 - RNA, 19 nt, Artificial Sequence
  Description of Artificial Sequence: Synthetic oligonucleotide
agucgauuuuaagccaacc

SEQ ID NO: 3041935 - RNA, 19 nt, Artificial Sequence
  Description of Artificial Sequence: Synthetic oligonucleotide
ucugugagagucaggugga

SEQ ID NO: 3041936 - RNA, 19 nt, Artificial Sequence
  Description of Artificial Sequence: Synthetic oligonucleotide
acccaccuauuucaguggc

SEQ ID NO: 3041937 - RNA, 19 nt, Artificial Sequence
  Description of Artificial Sequence: Synthetic oligonucleotide
uuguacccgauacacauuu

SEQ ID NO: 3041938 - RNA, 19 nt, Artificial Sequence
  Description of Artificial Sequence: Synthetic oligonucleotide
ugcucaaagaggacccacc

SEQ ID NO: 3041939 - RNA, 19 nt, Artificial Sequence
  Description of Artificial Sequence: Synthetic oligonucleotide
uacccgauacacauuuucu

SEQ ID NO: 3041940 - RNA, 19 nt, Artificial Sequence
  Description of Artificial Sequence: Synthetic oligonucleotide
uacuccuuggcuaggcgug

SEQ ID NO: 3041941 - RNA, 19 nt, Artificial Sequence
  Description of Artificial Sequence: Synthetic oligonucleotide
uucaguggccaccacuugu

SEQ ID NO: 3041942 - RNA, 19 nt, Artificial Sequence
  Description of Artificial Sequence: Synthetic oligonucleotide
auuuuaagccaaccucucu

SEQ ID NO: 3041943 - RNA, 19 nt, Artificial Sequence
  Description of Artificial Sequence: Synthetic oligonucleotide
acauuuucuguuucccugu

SEQ ID NO: 3041944 - RNA, 19 nt, Artificial Sequence
  Description of Artificial Sequence: Synthetic oligonucleotide
auggcagaagaacaagccu

SEQ ID NO: 3041945 - RNA, 19 nt, Artificial Sequence
  Description of Artificial Sequence: Synthetic oligonucleotide
cacaggcaggccuucaggg

SEQ ID NO: 3041946 - RNA, 19 nt, Artificial Sequence
  Description of Artificial Sequence: Synthetic oligonucleotide
gaggccuccaaaacgacug

SEQ ID NO: 3041947 - RNA, 19 nt, Artificial Sequence
  Description of Artificial Sequence: Synthetic oligonucleotide
acccgauacacauuuucug

SEQ ID NO: 3041948 - RNA, 19 nt, Artificial Sequence
  Description of Artificial Sequence: Synthetic oligonucleotide
gaagaacaagccuguguac

SEQ ID NO: 3041949 - RNA, 19 nt, Artificial Sequence
  Description of Artificial Sequence: Synthetic oligonucleotide
uuuaagccaaccucucuua

SEQ ID NO: 3041950 - RNA, 19 nt, Artificial Sequence
  Description of Artificial Sequence: Synthetic oligonucleotide
uucacaucugugagaguca

SEQ ID NO: 3041951 - RNA, 19 nt, Artificial Sequence
  Description of Artificial Sequence: Synthetic oligonucleotide
ugacagagucgauuuuaag

SEQ ID NO: 3041952 - RNA, 19 nt, Artificial Sequence
  Description of Artificial Sequence: Synthetic oligonucleotide
uguuucccuguccagcgga

SEQ ID NO: 3041953 - RNA, 19 nt, Artificial Sequence
  Description of Artificial Sequence: Synthetic oligonucleotide
ucagguggaaaugugccgu

SEQ ID NO: 3041954 - RNA, 19 nt, Artificial Sequence
  Description of Artificial Sequence: Synthetic oligonucleotide
uccaaaacgacugcugguc

SEQ ID NO: 3041955 - RNA, 19 nt, Artificial Sequence
  Description of Artificial Sequence: Synthetic oligonucleotide
aacaagccuguguacuccu

SEQ ID NO: 3041956 - RNA, 19 nt, Artificial Sequence
  Description of Artificial Sequence: Synthetic oligonucleotide
gacccaccuauuucagugg

SEQ ID NO: 3041957 - RNA, 19 nt, Artificial Sequence
  Description of Artificial Sequence: Synthetic oligonucleotide
aguaacucacaggcaggcc

SEQ ID NO: 3041958 - RNA, 19 nt, Artificial Sequence
  Description of Artificial Sequence: Synthetic oligonucleotide
uucccuguccagcggagcc

SEQ ID NO: 3041959 - RNA, 19 nt, Artificial Sequence
  Description of Artificial Sequence: Synthetic oligonucleotide
cuguguacuccuuggcuag

SEQ ID NO: 3041960 - RNA, 19 nt, Artificial Sequence
  Description of Artificial Sequence: Synthetic oligonucleotide
aaaugugaacugaggccuc

SEQ ID NO: 3041961 - RNA, 19 nt, Artificial Sequence
  Description of Artificial Sequence: Synthetic oligonucleotide
guugucauucacaucugug

SEQ ID NO: 3041962 - RNA, 19 nt, Artificial Sequence
  Description of Artificial Sequence: Synthetic oligonucleotide
aagggcaaaugugaacuga

SEQ ID NO: 3041963 - RNA, 19 nt, Artificial Sequence
  Description of Artificial Sequence: Synthetic oligonucleotide
cugcuggucaucaucggug

SEQ ID NO: 3041964 - RNA, 19 nt, Artificial Sequence
  Description of Artificial Sequence: Synthetic oligonucleotide
uaucuccccggugacagag

SEQ ID NO: 3041965 - RNA, 19 nt, Artificial Sequence
  Description of Artificial Sequence: Synthetic oligonucleotide
agccuguguacuccuuggc

SEQ ID NO: 3041966 - RNA, 19 nt, Artificial Sequence
  Description of Artificial Sequence: Synthetic oligonucleotide
gaacugaggccuccaaaac

SEQ ID NO: 3041967 - RNA, 19 nt, Artificial Sequence
  Description of Artificial Sequence: Synthetic oligonucleotide
acacauuuucuguuucccu

SEQ ID NO: 3041968 - RNA, 19 nt, Artificial Sequence
  Description of Artificial Sequence: Synthetic oligonucleotide
ucacaucugugagagucag

SEQ ID NO: 3041969 - RNA, 19 nt, Artificial Sequence
  Description of Artificial Sequence: Synthetic oligonucleotide
ugagagucagguggaaaug

SEQ ID NO: 3041970 - RNA, 19 nt, Artificial Sequence
  Description of Artificial Sequence: Synthetic oligonucleotide
gaguaacucacaggcaggc

SEQ ID NO: 3041971 - RNA, 19 nt, Artificial Sequence
  Description of Artificial Sequence: Synthetic oligonucleotide
ggacccaccuauuucagug

SEQ ID NO: 3041972 - RNA, 19 nt, Artificial Sequence
  Description of Artificial Sequence: Synthetic oligonucleotide
gauuuuaagccaaccucuc

SEQ ID NO: 3041973 - RNA, 19 nt, Artificial Sequence
  Description of Artificial Sequence: Synthetic oligonucleotide
ugaggccuccaaaacgacu

SEQ ID NO: 3041974 - RNA, 19 nt, Artificial Sequence
  Description of Artificial Sequence: Synthetic oligonucleotide
gggguugucauucacaucu

SEQ ID NO: 3041975 - RNA, 19 nt, Artificial Sequence
  Description of Artificial Sequence: Synthetic oligonucleotide
uuaagccaaccucucuuau

SEQ ID NO: 3041976 - RNA, 19 nt, Artificial Sequence
  Description of Artificial Sequence: Synthetic oligonucleotide
gaacaagccuguguacucc

SEQ ID NO: 3041977 - RNA, 19 nt, Artificial Sequence
  Description of Artificial Sequence: Synthetic oligonucleotide
uaagccaaccucucuuauc

SEQ ID NO: 3041978 - RNA, 19 nt, Artificial Sequence
  Description of Artificial Sequence: Synthetic oligonucleotide
cucucuuaucgccacucag

SEQ ID NO: 3041979 - RNA, 19 nt, Artificial Sequence
  Description of Artificial Sequence: Synthetic oligonucleotide
gaggggauggcagaagaac

SEQ ID NO: 3041980 - RNA, 19 nt, Artificial Sequence
  Description of Artificial Sequence: Synthetic oligonucleotide
guacccgauacacauuuuc

SEQ ID NO: 3041981 - RNA, 19 nt, Artificial Sequence
  Description of Artificial Sequence: Synthetic oligonucleotide
acugaggccuccaaaacga

SEQ ID NO: 3041982 - RNA, 19 nt, Artificial Sequence
  Description of Artificial Sequence: Synthetic oligonucleotide
caccacuuguacccgauac

SEQ ID NO: 3041983 - RNA, 19 nt, Artificial Sequence
  Description of Artificial Sequence: Synthetic oligonucleotide
ucuuaucgccacucaguga

SEQ ID NO: 3041984 - RNA, 19 nt, Artificial Sequence
  Description of Artificial Sequence: Synthetic oligonucleotide
uuucaguggccaccacuug

SEQ ID NO: 3041985 - RNA, 19 nt, Artificial Sequence
  Description of Artificial Sequence: Synthetic oligonucleotide
acugcuggucaucaucggu

SEQ ID NO: 3041986 - RNA, 19 nt, Artificial Sequence
  Description of Artificial Sequence: Synthetic oligonucleotide
guggugcucaaagaggacc

SEQ ID NO: 3041987 - RNA, 19 nt, Artificial Sequence
  Description of Artificial Sequence: Synthetic oligonucleotide
cuggucaucaucgguggcc

SEQ ID NO: 3041988 - RNA, 19 nt, Artificial Sequence
  Description of Artificial Sequence: Synthetic oligonucleotide
aaauaucuccccggugaca

SEQ ID NO: 3041989 - RNA, 19 nt, Artificial Sequence
  Description of Artificial Sequence: Synthetic oligonucleotide
aggccuccaaaacgacugc

SEQ ID NO: 3041990 - RNA, 19 nt, Artificial Sequence
  Description of Artificial Sequence: Synthetic oligonucleotide
agccaaccucucuuaucgc

SEQ ID NO: 3041991 - RNA, 19 nt, Artificial Sequence
  Description of Artificial Sequence: Synthetic oligonucleotide
accacuuguacccgauaca

SEQ ID NO: 3041992 - RNA, 19 nt, Artificial Sequence
  Description of Artificial Sequence: Synthetic oligonucleotide
ucaguggccaccacuugua

SEQ ID NO: 3041993 - RNA, 19 nt, Artificial Sequence
  Description of Artificial Sequence: Synthetic oligonucleotide
aucaucgguggccucaaaa

SEQ ID NO: 3041994 - RNA, 19 nt, Artificial Sequence
  Description of Artificial Sequence: Synthetic oligonucleotide
aaacgacugcuggucauca

SEQ ID NO: 3041995 - RNA, 19 nt, Artificial Sequence
  Description of Artificial Sequence: Synthetic oligonucleotide
guaacucacaggcaggccu

SEQ ID NO: 3041996 - RNA, 19 nt, Artificial Sequence
  Description of Artificial Sequence: Synthetic oligonucleotide
gacucuggguggcacugag

SEQ ID NO: 3041997 - RNA, 19 nt, Artificial Sequence
  Description of Artificial Sequence: Synthetic oligonucleotide
gacugcuggucaucaucgg

SEQ ID NO: 3041998 - RNA, 19 nt, Artificial Sequence
  Description of Artificial Sequence: Synthetic oligonucleotide
cugccaagggcaaauguga

SEQ ID NO: 3041999 - RNA, 19 nt, Artificial Sequence
  Description of Artificial Sequence: Synthetic oligonucleotide
guggaaaugugccguggug

SEQ ID NO: 3042000 - RNA, 19 nt, Artificial Sequence
  Description of Artificial Sequence: Synthetic oligonucleotide
caaaugugaacugaggccu

SEQ ID NO: 3042001 - RNA, 19 nt, Artificial Sequence
  Description of Artificial Sequence: Synthetic oligonucleotide
uccuuggcuaggcgugggg

SEQ ID NO: 3042002 - RNA, 19 nt, Artificial Sequence
  Description of Artificial Sequence: Synthetic oligonucleotide
uccccggugacagagucga

SEQ ID NO: 3042003 - RNA, 19 nt, Artificial Sequence
  Description of Artificial Sequence: Synthetic oligonucleotide
ugugaacugaggccuccaa

SEQ ID NO: 3042004 - RNA, 19 nt, Artificial Sequence
  Description of Artificial Sequence: Synthetic oligonucleotide
gucauucacaucugugaga

SEQ ID NO: 3042005 - RNA, 19 nt, Artificial Sequence
  Description of Artificial Sequence: Synthetic oligonucleotide
accucucuuaucgccacuc

SEQ ID NO: 3042006 - RNA, 19 nt, Artificial Sequence
  Description of Artificial Sequence: Synthetic oligonucleotide
auuucaguggccaccacuu

SEQ ID NO: 3042007 - RNA, 19 nt, Artificial Sequence
  Description of Artificial Sequence: Synthetic oligonucleotide
gucgauuuuaagccaaccu

SEQ ID NO: 3042008 - RNA, 19 nt, Artificial Sequence
  Description of Artificial Sequence: Synthetic oligonucleotide
caagccuguguacuccuug

SEQ ID NO: 3042009 - RNA, 19 nt, Artificial Sequence
  Description of Artificial Sequence: Synthetic oligonucleotide
ccuccaaaacgacugcugg

SEQ ID NO: 3042010 - RNA, 19 nt, Artificial Sequence
  Description of Artificial Sequence: Synthetic oligonucleotide
uguguacuccuuggcuagg

SEQ ID NO: 3042011 - RNA, 19 nt, Artificial Sequence
  Description of Artificial Sequence: Synthetic oligonucleotide
ucuccccggugacagaguc

SEQ ID NO: 3042012 - RNA, 19 nt, Artificial Sequence
  Description of Artificial Sequence: Synthetic oligonucleotide
caagggcaaaugugaacug

SEQ ID NO: 3042013 - RNA, 19 nt, Artificial Sequence
  Description of Artificial Sequence: Synthetic oligonucleotide
ugccaagggcaaaugugaa

SEQ ID NO: 3042014 - RNA, 19 nt, Artificial Sequence
  Description of Artificial Sequence: Synthetic oligonucleotide
ucgccacucagugaguaac

SEQ ID NO: 3042015 - RNA, 19 nt, Artificial Sequence
  Description of Artificial Sequence: Synthetic oligonucleotide
uaacucacaggcaggccuu

SEQ ID NO: 3042016 - RNA, 19 nt, Artificial Sequence
  Description of Artificial Sequence: Synthetic oligonucleotide
acaggcaggccuucagggu

SEQ ID NO: 3042017 - RNA, 19 nt, Artificial Sequence
  Description of Artificial Sequence: Synthetic oligonucleotide
aacucacaggcaggccuuc

SEQ ID NO: 3042018 - RNA, 19 nt, Artificial Sequence
  Description of Artificial Sequence: Synthetic oligonucleotide
aggggauggcagaagaaca

SEQ ID NO: 3042019 - RNA, 19 nt, Artificial Sequence
  Description of Artificial Sequence: Synthetic oligonucleotide
uggucaucaucgguggccu

SEQ ID NO: 3042020 - RNA, 19 nt, Artificial Sequence
  Description of Artificial Sequence: Synthetic oligonucleotide
caaccucucuuaucgccac

SEQ ID NO: 3042021 - RNA, 19 nt, Artificial Sequence
  Description of Artificial Sequence: Synthetic oligonucleotide
ggauggcagaagaacaagc

SEQ ID NO: 3042022 - RNA, 19 nt, Artificial Sequence
  Description of Artificial Sequence: Synthetic oligonucleotide
cacaucugugagagucagg

SEQ ID NO: 3042023 - RNA, 19 nt, Artificial Sequence
  Description of Artificial Sequence: Synthetic oligonucleotide
uguccagcggagccgcgcu

SEQ ID NO: 3042024 - RNA, 19 nt, Artificial Sequence
  Description of Artificial Sequence: Synthetic oligonucleotide
caggcaggccuucaggguc

SEQ ID NO: 3042025 - RNA, 19 nt, Artificial Sequence
  Description of Artificial Sequence: Synthetic oligonucleotide
uucucugccaagggcaaau

SEQ ID NO: 3042026 - RNA, 19 nt, Artificial Sequence
  Description of Artificial Sequence: Synthetic oligonucleotide
gcgcuaaauaucuccccgg

SEQ ID NO: 3042027 - RNA, 19 nt, Artificial Sequence
  Description of Artificial Sequence: Synthetic oligonucleotide
agguggaaaugugccgugg

SEQ ID NO: 3042028 - RNA, 19 nt, Artificial Sequence
  Description of Artificial Sequence: Synthetic oligonucleotide
gcuaaauaucuccccggug

SEQ ID NO: 3042029 - RNA, 19 nt, Artificial Sequence
  Description of Artificial Sequence: Synthetic oligonucleotide
gccaaccucucuuaucgcc

SEQ ID NO: 3042030 - RNA, 19 nt, Artificial Sequence
  Description of Artificial Sequence: Synthetic oligonucleotide
caucugugagagucaggug

SEQ ID NO: 3042031 - RNA, 19 nt, Artificial Sequence
  Description of Artificial Sequence: Synthetic oligonucleotide
agagucgauuuuaagccaa

SEQ ID NO: 3042032 - RNA, 19 nt, Artificial Sequence
  Description of Artificial Sequence: Synthetic oligonucleotide
gguggcacugaggggaugg

SEQ ID NO: 3042033 - RNA, 19 nt, Artificial Sequence
  Description of Artificial Sequence: Synthetic oligonucleotide
cagagucgauuuuaagcca

SEQ ID NO: 3042034 - RNA, 19 nt, Artificial Sequence
  Description of Artificial Sequence: Synthetic oligonucleotide
gugagagucagguggaaau

SEQ ID NO: 3042035 - RNA, 19 nt, Artificial Sequence
  Description of Artificial Sequence: Synthetic oligonucleotide
agugaguaacucacaggca

SEQ ID NO: 3042036 - RNA, 19 nt, Artificial Sequence
  Description of Artificial Sequence: Synthetic oligonucleotide
aaccucucuuaucgccacu

SEQ ID NO: 3042037 - RNA, 19 nt, Artificial Sequence
  Description of Artificial Sequence: Synthetic oligonucleotide
uuaucgccacucagugagu

SEQ ID NO: 3042038 - RNA, 19 nt, Artificial Sequence
  Description of Artificial Sequence: Synthetic oligonucleotide
agcggagccgcgcuaaaua

SEQ ID NO: 3042039 - RNA, 19 nt, Artificial Sequence
  Description of Artificial Sequence: Synthetic oligonucleotide
acgagacucuggguggcac

SEQ ID NO: 3042040 - RNA, 19 nt, Artificial Sequence
  Description of Artificial Sequence: Synthetic oligonucleotide
ggcacugaggggauggcag

SEQ ID NO: 3042041 - RNA, 19 nt, Artificial Sequence
  Description of Artificial Sequence: Synthetic oligonucleotide
ucccuguccagcggagccg

SEQ ID NO: 3042042 - RNA, 19 nt, Artificial Sequence
  Description of Artificial Sequence: Synthetic oligonucleotide
gaggacccaccuauuucag

SEQ ID NO: 3042043 - RNA, 19 nt, Artificial Sequence
  Description of Artificial Sequence: Synthetic oligonucleotide
aacgacugcuggucaucau

SEQ ID NO: 3042044 - RNA, 19 nt, Artificial Sequence
  Description of Artificial Sequence: Synthetic oligonucleotide
cuguuucccuguccagcgg

SEQ ID NO: 3042045 - RNA, 19 nt, Artificial Sequence
  Description of Artificial Sequence: Synthetic oligonucleotide
uucagggucccuggcaguc

SEQ ID NO: 3042046 - RNA, 19 nt, Artificial Sequence
  Description of Artificial Sequence: Synthetic oligonucleotide
uuucccuguccagcggagc

SEQ ID NO: 3042047 - RNA, 19 nt, Artificial Sequence
  Description of Artificial Sequence: Synthetic oligonucleotide
aggacccaccuauuucagu

SEQ ID NO: 3042048 - RNA, 19 nt, Artificial Sequence
  Description of Artificial Sequence: Synthetic oligonucleotide
uaucgccacucagugagua

SEQ ID NO: 3042049 - RNA, 19 nt, Artificial Sequence
  Description of Artificial Sequence: Synthetic oligonucleotide
acuccuuggcuaggcgugg

SEQ ID NO: 3042050 - RNA, 19 nt, Artificial Sequence
  Description of Artificial Sequence: Synthetic oligonucleotide
gggcaaaugugaacugagg

SEQ ID NO: 3042051 - RNA, 19 nt, Artificial Sequence
  Description of Artificial Sequence: Synthetic oligonucleotide
gagucgauuuuaagccaac

SEQ ID NO: 3042052 - RNA, 19 nt, Artificial Sequence
  Description of Artificial Sequence: Synthetic oligonucleotide
cagguggaaaugugccgug

SEQ ID NO: 3042053 - RNA, 19 nt, Artificial Sequence
  Description of Artificial Sequence: Synthetic oligonucleotide
cuccccggugacagagucg

SEQ ID NO: 3042054 - RNA, 19 nt, Artificial Sequence
  Description of Artificial Sequence: Synthetic oligonucleotide
ccacuuguacccgauacac

SEQ ID NO: 3042055 - RNA, 19 nt, Artificial Sequence
  Description of Artificial Sequence: Synthetic oligonucleotide
uguacccgauacacauuuu

SEQ ID NO: 3042056 - RNA, 19 nt, Artificial Sequence
  Description of Artificial Sequence: Synthetic oligonucleotide
ucucugccaagggcaaaug

SEQ ID NO: 3042057 - RNA, 19 nt, Artificial Sequence
  Description of Artificial Sequence: Synthetic oligonucleotide
gagagucagguggaaaugu

SEQ ID NO: 3042058 - RNA, 19 nt, Artificial Sequence
  Description of Artificial Sequence: Synthetic oligonucleotide
cugaggccuccaaaacgac

SEQ ID NO: 3042059 - RNA, 19 nt, Artificial Sequence
  Description of Artificial Sequence: Synthetic oligonucleotide
ccuucagggucccuggcag

SEQ ID NO: 3042060 - RNA, 19 nt, Artificial Sequence
  Description of Artificial Sequence: Synthetic oligonucleotide
cagaagaacaagccugugu

SEQ ID NO: 3042061 - RNA, 19 nt, Artificial Sequence
  Description of Artificial Sequence: Synthetic oligonucleotide
caccuauuucaguggccac

SEQ ID NO: 3042062 - RNA, 19 nt, Artificial Sequence
  Description of Artificial Sequence: Synthetic oligonucleotide
gggauggcagaagaacaag

SEQ ID NO: 3042063 - RNA, 19 nt, Artificial Sequence
  Description of Artificial Sequence: Synthetic oligonucleotide
cgcgcuaaauaucuccccg

SEQ ID NO: 3042064 - RNA, 19 nt, Artificial Sequence
  Description of Artificial Sequence: Synthetic oligonucleotide
cacuuguacccgauacaca

SEQ ID NO: 3042065 - RNA, 19 nt, Artificial Sequence
  Description of Artificial Sequence: Synthetic oligonucleotide
gccguggugcucaaagagg

SEQ ID NO: 3042066 - RNA, 19 nt, Artificial Sequence
  Description of Artificial Sequence: Synthetic oligonucleotide
guguacuccuuggcuaggc

SEQ ID NO: 3042067 - RNA, 19 nt, Artificial Sequence
  Description of Artificial Sequence: Synthetic oligonucleotide
aacgagacucuggguggca

SEQ ID NO: 3042068 - RNA, 19 nt, Artificial Sequence
  Description of Artificial Sequence: Synthetic oligonucleotide
guacuccuuggcuaggcgu

SEQ ID NO: 3042069 - RNA, 19 nt, Artificial Sequence
  Description of Artificial Sequence: Synthetic oligonucleotide
gaaaugugccguggugcuc

SEQ ID NO: 3042070 - RNA, 19 nt, Artificial Sequence
  Description of Artificial Sequence: Synthetic oligonucleotide
guuucccuguccagcggag

SEQ ID NO: 3042071 - RNA, 19 nt, Artificial Sequence
  Description of Artificial Sequence: Synthetic oligonucleotide
uggcacugaggggauggca

SEQ ID NO: 3042072 - RNA, 19 nt, Artificial Sequence
  Description of Artificial Sequence: Synthetic oligonucleotide
uggccaccacuuguacccg

SEQ ID NO: 3042073 - RNA, 19 nt, Artificial Sequence
  Description of Artificial Sequence: Synthetic oligonucleotide
ucaucaucgguggccucaa

SEQ ID NO: 3042074 - RNA, 19 nt, Artificial Sequence
  Description of Artificial Sequence: Synthetic oligonucleotide
aucgccacucagugaguaa

SEQ ID NO: 3042075 - RNA, 19 nt, Artificial Sequence
  Description of Artificial Sequence: Synthetic oligonucleotide
aaugugccguggugcucaa

SEQ ID NO: 3042076 - RNA, 19 nt, Artificial Sequence
  Description of Artificial Sequence: Synthetic oligonucleotide
gccaagggcaaaugugaac

SEQ ID NO: 3042077 - RNA, 19 nt, Artificial Sequence
  Description of Artificial Sequence: Synthetic oligonucleotide
cuauuucaguggccaccac

SEQ ID NO: 3042078 - RNA, 19 nt, Artificial Sequence
  Description of Artificial Sequence: Synthetic oligonucleotide
auaucuccccggugacaga

SEQ ID NO: 3042079 - RNA, 19 nt, Artificial Sequence
  Description of Artificial Sequence: Synthetic oligonucleotide
gugacagagucgauuuuaa

SEQ ID NO: 3042080 - RNA, 19 nt, Artificial Sequence
  Description of Artificial Sequence: Synthetic oligonucleotide
acucuggguggcacugagg

SEQ ID NO: 3042081 - RNA, 19 nt, Artificial Sequence
  Description of Artificial Sequence: Synthetic oligonucleotide
gugcucaaagaggacccac

SEQ ID NO: 3042082 - RNA, 19 nt, Artificial Sequence
  Description of Artificial Sequence: Synthetic oligonucleotide
ggugacagagucgauuuua

SEQ ID NO: 3042083 - RNA, 19 nt, Artificial Sequence
  Description of Artificial Sequence: Synthetic oligonucleotide
ggaaaugugccguggugcu

SEQ ID NO: 3042084 - RNA, 19 nt, Artificial Sequence
  Description of Artificial Sequence: Synthetic oligonucleotide
caguggccaccacuuguac

SEQ ID NO: 3042085 - RNA, 19 nt, Artificial Sequence
  Description of Artificial Sequence: Synthetic oligonucleotide
cucaaagaggacccaccua

SEQ ID NO: 3042086 - RNA, 19 nt, Artificial Sequence
  Description of Artificial Sequence: Synthetic oligonucleotide
uccagcggagccgcgcuaa

SEQ ID NO: 3042087 - RNA, 19 nt, Artificial Sequence
  Description of Artificial Sequence: Synthetic oligonucleotide
cuguccagcggagccgcgc

SEQ ID NO: 3042088 - RNA, 19 nt, Artificial Sequence
  Description of Artificial Sequence: Synthetic oligonucleotide
cgauuuuaagccaaccucu

SEQ ID NO: 3042089 - RNA, 19 nt, Artificial Sequence
  Description of Artificial Sequence: Synthetic oligonucleotide
cuccaaaacgacugcuggu

SEQ ID NO: 3042090 - RNA, 19 nt, Artificial Sequence
  Description of Artificial Sequence: Synthetic oligonucleotide
ccguggugcucaaagagga

SEQ ID NO: 3042091 - RNA, 19 nt, Artificial Sequence
  Description of Artificial Sequence: Synthetic oligonucleotide
gccgcgcuaaauaucuccc

SEQ ID NO: 3042092 - RNA, 19 nt, Artificial Sequence
  Description of Artificial Sequence: Synthetic oligonucleotide
augugaacugaggccucca

SEQ ID NO: 3042093 - RNA, 19 nt, Artificial Sequence
  Description of Artificial Sequence: Synthetic oligonucleotide
ccaaccucucuuaucgcca

SEQ ID NO: 3042094 - RNA, 19 nt, Artificial Sequence
  Description of Artificial Sequence: Synthetic oligonucleotide
gugccguggugcucaaaga

SEQ ID NO: 3042095 - RNA, 19 nt, Artificial Sequence
  Description of Artificial Sequence: Synthetic oligonucleotide
cuccuuggcuaggcguggg

SEQ ID NO: 3042096 - RNA, 19 nt, Artificial Sequence
  Description of Artificial Sequence: Synthetic oligonucleotide
gccuccaaaacgacugcug

SEQ ID NO: 3042097 - RNA, 19 nt, Artificial Sequence
  Description of Artificial Sequence: Synthetic oligonucleotide
ggagccgcgcuaaauaucu

SEQ ID NO: 3042098 - RNA, 19 nt, Artificial Sequence
  Description of Artificial Sequence: Synthetic oligonucleotide
ccaagggcaaaugugaacu

SEQ ID NO: 3042099 - RNA, 19 nt, Artificial Sequence
  Description of Artificial Sequence: Synthetic oligonucleotide
cccaccuauuucaguggcc

SEQ ID NO: 3042100 - RNA, 19 nt, Artificial Sequence
  Description of Artificial Sequence: Synthetic oligonucleotide
caaaacgacugcuggucau

SEQ ID NO: 3042101 - RNA, 19 nt, Artificial Sequence
  Description of Artificial Sequence: Synthetic oligonucleotide
ccuguguacuccuuggcua

SEQ ID NO: 3042102 - RNA, 19 nt, Artificial Sequence
  Description of Artificial Sequence: Synthetic oligonucleotide
ccuauuucaguggccacca

SEQ ID NO: 3042103 - RNA, 19 nt, Artificial Sequence
  Description of Artificial Sequence: Synthetic oligonucleotide
gcucaaagaggacccaccu

SEQ ID NO: 3042104 - RNA, 19 nt, Artificial Sequence
  Description of Artificial Sequence: Synthetic oligonucleotide
ccgcgcuaaauaucucccc

SEQ ID NO: 3042105 - RNA, 19 nt, Artificial Sequence
  Description of Artificial Sequence: Synthetic oligonucleotide
ccaccuauuucaguggcca

SEQ ID NO: 3042106 - RNA, 19 nt, Artificial Sequence
  Description of Artificial Sequence: Synthetic oligonucleotide
ccacucagugaguaacuca

SEQ ID NO: 3042107 - RNA, 19 nt, Artificial Sequence
  Description of Artificial Sequence: Synthetic oligonucleotide
gguugucauucacaucugu

SEQ ID NO: 3042108 - RNA, 19 nt, Artificial Sequence
  Description of Artificial Sequence: Synthetic oligonucleotide
gguggaaaugugccguggu

SEQ ID NO: 3042109 - RNA, 19 nt, Artificial Sequence
  Description of Artificial Sequence: Synthetic oligonucleotide
acucacaggcaggccuuca

SEQ ID NO: 3042110 - RNA, 19 nt, Artificial Sequence
  Description of Artificial Sequence: Synthetic oligonucleotide
cucugccaagggcaaaugu

SEQ ID NO: 3042111 - RNA, 19 nt, Artificial Sequence
  Description of Artificial Sequence: Synthetic oligonucleotide
ggggauggcagaagaacaa

SEQ ID NO: 3042112 - RNA, 19 nt, Artificial Sequence
  Description of Artificial Sequence: Synthetic oligonucleotide
ccaaaacgacugcugguca

SEQ ID NO: 3042113 - RNA, 19 nt, Artificial Sequence
  Description of Artificial Sequence: Synthetic oligonucleotide
gcagaagaacaagccugug

SEQ ID NO: 3042114 - RNA, 19 nt, Artificial Sequence
  Description of Artificial Sequence: Synthetic oligonucleotide
guggcacugaggggauggc

SEQ ID NO: 3042115 - RNA, 19 nt, Artificial Sequence
  Description of Artificial Sequence: Synthetic oligonucleotide
agacucuggguggcacuga

SEQ ID NO: 3042116 - RNA, 19 nt, Artificial Sequence
  Description of Artificial Sequence: Synthetic oligonucleotide
ggcagaagaacaagccugu

SEQ ID NO: 3042117 - RNA, 19 nt, Artificial Sequence
  Description of Artificial Sequence: Synthetic oligonucleotide
ggguugucauucacaucug

SEQ ID NO: 3042118 - RNA, 19 nt, Artificial Sequence
  Description of Artificial Sequence: Synthetic oligonucleotide
gccuguguacuccuuggcu

SEQ ID NO: 3042119 - RNA, 19 nt, Artificial Sequence
  Description of Artificial Sequence: Synthetic oligonucleotide
cuuguacccgauacacauu

SEQ ID NO: 3042120 - RNA, 19 nt, Artificial Sequence
  Description of Artificial Sequence: Synthetic oligonucleotide
cacugaggggauggcagaa

SEQ ID NO: 3042121 - RNA, 19 nt, Artificial Sequence
  Description of Artificial Sequence: Synthetic oligonucleotide
ggugcucaaagaggaccca

SEQ ID NO: 3042122 - RNA, 19 nt, Artificial Sequence
  Description of Artificial Sequence: Synthetic oligonucleotide
ggccuucagggucccuggc

SEQ ID NO: 3042123 - RNA, 19 nt, Artificial Sequence
  Description of Artificial Sequence: Synthetic oligonucleotide
caaagaggacccaccuauu

SEQ ID NO: 3042124 - RNA, 19 nt, Artificial Sequence
  Description of Artificial Sequence: Synthetic oligonucleotide
acaagccuguguacuccuu

SEQ ID NO: 3042125 - RNA, 19 nt, Artificial Sequence
  Description of Artificial Sequence: Synthetic oligonucleotide
gagccgcgcuaaauaucuc

SEQ ID NO: 3042126 - RNA, 19 nt, Artificial Sequence
  Description of Artificial Sequence: Synthetic oligonucleotide
cguggugcucaaagaggac

SEQ ID NO: 3042127 - RNA, 19 nt, Artificial Sequence
  Description of Artificial Sequence: Synthetic oligonucleotide
cuucagggucccuggcagu

SEQ ID NO: 3042128 - RNA, 19 nt, Artificial Sequence
  Description of Artificial Sequence: Synthetic oligonucleotide
aucuccccggugacagagu

SEQ ID NO: 3042129 - RNA, 19 nt, Artificial Sequence
  Description of Artificial Sequence: Synthetic oligonucleotide
cauucacaucugugagagu

SEQ ID NO: 3042130 - RNA, 19 nt, Artificial Sequence
  Description of Artificial Sequence: Synthetic oligonucleotide
cccuguccagcggagccgc

SEQ ID NO: 3042131 - RNA, 19 nt, Artificial Sequence
  Description of Artificial Sequence: Synthetic oligonucleotide
ggucaucaucgguggccuc

SEQ ID NO: 3042132 - RNA, 19 nt, Artificial Sequence
  Description of Artificial Sequence: Synthetic oligonucleotide
cugugagagucagguggaa

SEQ ID NO: 3042133 - RNA, 19 nt, Artificial Sequence
  Description of Artificial Sequence: Synthetic oligonucleotide
ccucucuuaucgccacuca

SEQ ID NO: 3042134 - RNA, 19 nt, Artificial Sequence
  Description of Artificial Sequence: Synthetic oligonucleotide
ggccaccacuuguacccga

SEQ ID NO: 3042135 - RNA, 19 nt, Artificial Sequence
  Description of Artificial Sequence: Synthetic oligonucleotide
cggagccgcgcuaaauauc

SEQ ID NO: 3042136 - RNA, 19 nt, Artificial Sequence
  Description of Artificial Sequence: Synthetic oligonucleotide
gcggagccgcgcuaaauau

SEQ ID NO: 3042137 - RNA, 19 nt, Artificial Sequence
  Description of Artificial Sequence: Synthetic oligonucleotide
ccuguccagcggagccgcg

SEQ ID NO: 3042138 - RNA, 19 nt, Artificial Sequence
  Description of Artificial Sequence: Synthetic oligonucleotide
ccggugacagagucgauuu

SEQ ID NO: 3042139 - RNA, 19 nt, Artificial Sequence
  Description of Artificial Sequence: Synthetic oligonucleotide
caucaucgguggccucaaa

SEQ ID NO: 3042140 - RNA, 19 nt, Artificial Sequence
  Description of Artificial Sequence: Synthetic oligonucleotide
ggccuccaaaacgacugcu

SEQ ID NO: 3042141 - RNA, 19 nt, Artificial Sequence
  Description of Artificial Sequence: Synthetic oligonucleotide
cgcuaaauaucuccccggu

SEQ ID NO: 3042142 - RNA, 19 nt, Artificial Sequence
  Description of Artificial Sequence: Synthetic oligonucleotide
ggcaggccuucaggguccc

SEQ ID NO: 3042143 - RNA, 19 nt, Artificial Sequence
  Description of Artificial Sequence: Synthetic oligonucleotide
guccagcggagccgcgcua

SEQ ID NO: 3042144 - RNA, 19 nt, Artificial Sequence
  Description of Artificial Sequence: Synthetic oligonucleotide
augugccguggugcucaaa

SEQ ID NO: 3042145 - RNA, 19 nt, Artificial Sequence
  Description of Artificial Sequence: Synthetic oligonucleotide
ccaccacuuguacccgaua

SEQ ID NO: 3042146 - RNA, 19 nt, Artificial Sequence
  Description of Artificial Sequence: Synthetic oligonucleotide
gccaccacuuguacccgau

SEQ ID NO: 3042147 - RNA, 19 nt, Artificial Sequence
  Description of Artificial Sequence: Synthetic oligonucleotide
cgagacucuggguggcacu

SEQ ID NO: 3042148 - RNA, 19 nt, Artificial Sequence
  Description of Artificial Sequence: Synthetic oligonucleotide
cagcggagccgcgcuaaau

SEQ ID NO: 3042149 - RNA, 19 nt, Artificial Sequence
  Description of Artificial Sequence: Synthetic oligonucleotide
cccggugacagagucgauu

SEQ ID NO: 3042150 - RNA, 19 nt, Artificial Sequence
  Description of Artificial Sequence: Synthetic oligonucleotide
cgccacucagugaguaacu

SEQ ID NO: 3042151 - RNA, 19 nt, Artificial Sequence
  Description of Artificial Sequence: Synthetic oligonucleotide
ccagcggagccgcgcuaaa

SEQ ID NO: 3042152 - RNA, 19 nt, Artificial Sequence
  Description of Artificial Sequence: Synthetic oligonucleotide
cggugacagagucgauuuu

SEQ ID NO: 3042153 - RNA, 19 nt, Artificial Sequence
  Description of Artificial Sequence: Synthetic oligonucleotide
gcaggccuucagggucccu

SEQ ID NO: 3042154 - RNA, 19 nt, Artificial Sequence
  Description of Artificial Sequence: Synthetic oligonucleotide
ccccggugacagagucgau

SEQ ID NO: 3042155 - RNA, 19 nt, Artificial Sequence
  Description of Artificial Sequence: Synthetic oligonucleotide
auauauauuacguauauac

SEQ ID NO: 3042156 - RNA, 19 nt, Artificial Sequence
  Description of Artificial Sequence: Synthetic oligonucleotide
uauaaauucaagcugauug

SEQ ID NO: 3042157 - RNA, 19 nt, Artificial Sequence
  Description of Artificial Sequence: Synthetic oligonucleotide
auaaucuauaaauucaagc

SEQ ID NO: 3042158 - RNA, 19 nt, Artificial Sequence
  Description of Artificial Sequence: Synthetic oligonucleotide
uauauauauauauauaaug

SEQ ID NO: 3042159 - RNA, 19 nt, Artificial Sequence
  Description of Artificial Sequence: Synthetic oligonucleotide
auauauaauauauauuacg

SEQ ID NO: 3042160 - RNA, 19 nt, Artificial Sequence
  Description of Artificial Sequence: Synthetic oligonucleotide
aauaaauuuaccugcacca

SEQ ID NO: 3042161 - RNA, 19 nt, Artificial Sequence
  Description of Artificial Sequence: Synthetic oligonucleotide
uucagaauuauaaucauug

SEQ ID NO: 3042162 - RNA, 19 nt, Artificial Sequence
  Description of Artificial Sequence: Synthetic oligonucleotide
uauauuacguauauacacg

SEQ ID NO: 3042163 - RNA, 19 nt, Artificial Sequence
  Description of Artificial Sequence: Synthetic oligonucleotide
uauacauguaugcagauca

SEQ ID NO: 3042164 - RNA, 19 nt, Artificial Sequence
  Description of Artificial Sequence: Synthetic oligonucleotide
uaaucuauaaauucaagcu

SEQ ID NO: 3042165 - RNA, 19 nt, Artificial Sequence
  Description of Artificial Sequence: Synthetic oligonucleotide
auuacguauauacacgccc

SEQ ID NO: 3042166 - RNA, 19 nt, Artificial Sequence
  Description of Artificial Sequence: Synthetic oligonucleotide
aaucuauaaauucaagcug

SEQ ID NO: 3042167 - RNA, 19 nt, Artificial Sequence
  Description of Artificial Sequence: Synthetic oligonucleotide
uauaauguauauauaauau

SEQ ID NO: 3042168 - RNA, 19 nt, Artificial Sequence
  Description of Artificial Sequence: Synthetic oligonucleotide
aaaacauacauacuauaca

SEQ ID NO: 3042169 - RNA, 19 nt, Artificial Sequence
  Description of Artificial Sequence: Synthetic oligonucleotide
aucauugccagucauaauc

SEQ ID NO: 3042170 - RNA, 19 nt, Artificial Sequence
  Description of Artificial Sequence: Synthetic oligonucleotide
acauacauacuauacauag

SEQ ID NO: 3042171 - RNA, 19 nt, Artificial Sequence
  Description of Artificial Sequence: Synthetic oligonucleotide
acaaaucaaauauugcugg

SEQ ID NO: 3042172 - RNA, 19 nt, Artificial Sequence
  Description of Artificial Sequence: Synthetic oligonucleotide
guauauauaauauauauua

SEQ ID NO: 3042173 - RNA, 19 nt, Artificial Sequence
  Description of Artificial Sequence: Synthetic oligonucleotide
auauuacguauauacacgc

SEQ ID NO: 3042174 - RNA, 19 nt, Artificial Sequence
  Description of Artificial Sequence: Synthetic oligonucleotide
ucaguaauaaauuuaccug

SEQ ID NO: 3042175 - RNA, 19 nt, Artificial Sequence
  Description of Artificial Sequence: Synthetic oligonucleotide
agucauaaucuauaaauuc

SEQ ID NO: 3042176 - RNA, 19 nt, Artificial Sequence
  Description of Artificial Sequence: Synthetic oligonucleotide
auuauaaucauugccaguc

SEQ ID NO: 3042177 - RNA, 19 nt, Artificial Sequence
  Description of Artificial Sequence: Synthetic oligonucleotide
uugucuacaaaucaaauau

SEQ ID NO: 3042178 - RNA, 19 nt, Artificial Sequence
  Description of Artificial Sequence: Synthetic oligonucleotide
uaauaaauuuaccugcacc

SEQ ID NO: 3042179 - RNA, 19 nt, Artificial Sequence
  Description of Artificial Sequence: Synthetic oligonucleotide
aaacauacauacuauacau

SEQ ID NO: 3042180 - RNA, 19 nt, Artificial Sequence
  Description of Artificial Sequence: Synthetic oligonucleotide
aaauuuaccugcaccaacc

SEQ ID NO: 3042181 - RNA, 19 nt, Artificial Sequence
  Description of Artificial Sequence: Synthetic oligonucleotide
uacaaaucaaauauugcug

SEQ ID NO: 3042182 - RNA, 19 nt, Artificial Sequence
  Description of Artificial Sequence: Synthetic oligonucleotide
auguaugcagaucacacac

SEQ ID NO: 3042183 - RNA, 19 nt, Artificial Sequence
  Description of Artificial Sequence: Synthetic oligonucleotide
uauauauaauauauauuac

SEQ ID NO: 3042184 - RNA, 19 nt, Artificial Sequence
  Description of Artificial Sequence: Synthetic oligonucleotide
auguauauauaauauauau

SEQ ID NO: 3042185 - RNA, 19 nt, Artificial Sequence
  Description of Artificial Sequence: Synthetic oligonucleotide
uauauauuacguauauaca

SEQ ID NO: 3042186 - RNA, 19 nt, Artificial Sequence
  Description of Artificial Sequence: Synthetic oligonucleotide
aaaucucucucauauauau

SEQ ID NO: 3042187 - RNA, 19 nt, Artificial Sequence
  Description of Artificial Sequence: Synthetic oligonucleotide
cuauacauaguuuauaaca

SEQ ID NO: 3042188 - RNA, 19 nt, Artificial Sequence
  Description of Artificial Sequence: Synthetic oligonucleotide
uauacauaguuuauaacaa

SEQ ID NO: 3042189 - RNA, 19 nt, Artificial Sequence
  Description of Artificial Sequence: Synthetic oligonucleotide
uauauauauauaauguaua

SEQ ID NO: 3042190 - RNA, 19 nt, Artificial Sequence
  Description of Artificial Sequence: Synthetic oligonucleotide
gaauuauaaucauugccag

SEQ ID NO: 3042191 - RNA, 19 nt, Artificial Sequence
  Description of Artificial Sequence: Synthetic oligonucleotide
caguaauaaauuuaccugc

SEQ ID NO: 3042192 - RNA, 19 nt, Artificial Sequence
  Description of Artificial Sequence: Synthetic oligonucleotide
auauauauauauauaaugu

SEQ ID NO: 3042193 - RNA, 19 nt, Artificial Sequence
  Description of Artificial Sequence: Synthetic oligonucleotide
cauauauauauauauauaa

SEQ ID NO: 3042194 - RNA, 19 nt, Artificial Sequence
  Description of Artificial Sequence: Synthetic oligonucleotide
uauauauauauauaaugua

SEQ ID NO: 3042195 - RNA, 19 nt, Artificial Sequence
  Description of Artificial Sequence: Synthetic oligonucleotide
ucacacacagcacugaaug

SEQ ID NO: 3042196 - RNA, 19 nt, Artificial Sequence
  Description of Artificial Sequence: Synthetic oligonucleotide
aaauauugcuggcucugac

SEQ ID NO: 3042197 - RNA, 19 nt, Artificial Sequence
  Description of Artificial Sequence: Synthetic oligonucleotide
uaucaagucacuaaaucuc

SEQ ID NO: 3042198 - RNA, 19 nt, Artificial Sequence
  Description of Artificial Sequence: Synthetic oligonucleotide
agaauuauaaucauugcca

SEQ ID NO: 3042199 - RNA, 19 nt, Artificial Sequence
  Description of Artificial Sequence: Synthetic oligonucleotide
cagaauuauaaucauugcc

SEQ ID NO: 3042200 - RNA, 19 nt, Artificial Sequence
  Description of Artificial Sequence: Synthetic oligonucleotide
caaaacauacauacuauac

SEQ ID NO: 3042201 - RNA, 19 nt, Artificial Sequence
  Description of Artificial Sequence: Synthetic oligonucleotide
auaguuuauaacaacauga

SEQ ID NO: 3042202 - RNA, 19 nt, Artificial Sequence
  Description of Artificial Sequence: Synthetic oligonucleotide
uaauauauauuacguauau

SEQ ID NO: 3042203 - RNA, 19 nt, Artificial Sequence
  Description of Artificial Sequence: Synthetic oligonucleotide
acuauacauaguuuauaac

SEQ ID NO: 3042204 - RNA, 19 nt, Artificial Sequence
  Description of Artificial Sequence: Synthetic oligonucleotide
auacauaguuuauaacaac

SEQ ID NO: 3042205 - RNA, 19 nt, Artificial Sequence
  Description of Artificial Sequence: Synthetic oligonucleotide
aagucacuaaaucucucuc

SEQ ID NO: 3042206 - RNA, 19 nt, Artificial Sequence
  Description of Artificial Sequence: Synthetic oligonucleotide
uuuaccugcaccaacccgu

SEQ ID NO: 3042207 - RNA, 19 nt, Artificial Sequence
  Description of Artificial Sequence: Synthetic oligonucleotide
augcagaucacacacagca

SEQ ID NO: 3042208 - RNA, 19 nt, Artificial Sequence
  Description of Artificial Sequence: Synthetic oligonucleotide
ucauaaucuauaaauucaa

SEQ ID NO: 3042209 - RNA, 19 nt, Artificial Sequence
  Description of Artificial Sequence: Synthetic oligonucleotide
auaaauucaagcugauugu

SEQ ID NO: 3042210 - RNA, 19 nt, Artificial Sequence
  Description of Artificial Sequence: Synthetic oligonucleotide
ucauauauauauauauaua

SEQ ID NO: 3042211 - RNA, 19 nt, Artificial Sequence
  Description of Artificial Sequence: Synthetic oligonucleotide
uguauauauaauauauauu

SEQ ID NO: 3042212 - RNA, 19 nt, Artificial Sequence
  Description of Artificial Sequence: Synthetic oligonucleotide
acagccaugguucuuacug

SEQ ID NO: 3042213 - RNA, 19 nt, Artificial Sequence
  Description of Artificial Sequence: Synthetic oligonucleotide
aauauugcuggcucugacu

SEQ ID NO: 3042214 - RNA, 19 nt, Artificial Sequence
  Description of Artificial Sequence: Synthetic oligonucleotide
aauuauaaucauugccagu

SEQ ID NO: 3042215 - RNA, 19 nt, Artificial Sequence
  Description of Artificial Sequence: Synthetic oligonucleotide
aagcugauugucuacaaau

SEQ ID NO: 3042216 - RNA, 19 nt, Artificial Sequence
  Description of Artificial Sequence: Synthetic oligonucleotide
uacuauacauaguuuauaa

SEQ ID NO: 3042217 - RNA, 19 nt, Artificial Sequence
  Description of Artificial Sequence: Synthetic oligonucleotide
aucucucucauauauauau

SEQ ID NO: 3042218 - RNA, 19 nt, Artificial Sequence
  Description of Artificial Sequence: Synthetic oligonucleotide
aggcacuauacauguaugc

SEQ ID NO: 3042219 - RNA, 19 nt, Artificial Sequence
  Description of Artificial Sequence: Synthetic oligonucleotide
uaguuuauaacaacaugaa

SEQ ID NO: 3042220 - RNA, 19 nt, Artificial Sequence
  Description of Artificial Sequence: Synthetic oligonucleotide
auauauauauauaauguau

SEQ ID NO: 3042221 - RNA, 19 nt, Artificial Sequence
  Description of Artificial Sequence: Synthetic oligonucleotide
uaaauuuaccugcaccaac

SEQ ID NO: 3042222 - RNA, 19 nt, Artificial Sequence
  Description of Artificial Sequence: Synthetic oligonucleotide
ucagaauuauaaucauugc

SEQ ID NO: 3042223 - RNA, 19 nt, Artificial Sequence
  Description of Artificial Sequence: Synthetic oligonucleotide
uauacacgcccacaaaaca

SEQ ID NO: 3042224 - RNA, 19 nt, Artificial Sequence
  Description of Artificial Sequence: Synthetic oligonucleotide
cauaguuuauaacaacaug

SEQ ID NO: 3042225 - RNA, 19 nt, Artificial Sequence
  Description of Artificial Sequence: Synthetic oligonucleotide
aauucaagcugauugucua

SEQ ID NO: 3042226 - RNA, 19 nt, Artificial Sequence
  Description of Artificial Sequence: Synthetic oligonucleotide
aaaucaaauauugcuggcu

SEQ ID NO: 3042227 - RNA, 19 nt, Artificial Sequence
  Description of Artificial Sequence: Synthetic oligonucleotide
uacugcaugggauaggcac

SEQ ID NO: 3042228 - RNA, 19 nt, Artificial Sequence
  Description of Artificial Sequence: Synthetic oligonucleotide
cauaaucuauaaauucaag

SEQ ID NO: 3042229 - RNA, 19 nt, Artificial Sequence
  Description of Artificial Sequence: Synthetic oligonucleotide
ucucauauauauauauaua

SEQ ID NO: 3042230 - RNA, 19 nt, Artificial Sequence
  Description of Artificial Sequence: Synthetic oligonucleotide
ugauugucuacaaaucaaa

SEQ ID NO: 3042231 - RNA, 19 nt, Artificial Sequence
  Description of Artificial Sequence: Synthetic oligonucleotide
uauuacguauauacacgcc

SEQ ID NO: 3042232 - RNA, 19 nt, Artificial Sequence
  Description of Artificial Sequence: Synthetic oligonucleotide
acauguaugcagaucacac

SEQ ID NO: 3042233 - RNA, 19 nt, Artificial Sequence
  Description of Artificial Sequence: Synthetic oligonucleotide
guaugcagaucacacacag

SEQ ID NO: 3042234 - RNA, 19 nt, Artificial Sequence
  Description of Artificial Sequence: Synthetic oligonucleotide
auauaauauauauuacgua

SEQ ID NO: 3042235 - RNA, 19 nt, Artificial Sequence
  Description of Artificial Sequence: Synthetic oligonucleotide
caugggauaggcacuauac

SEQ ID NO: 3042236 - RNA, 19 nt, Artificial Sequence
  Description of Artificial Sequence: Synthetic oligonucleotide
gucuacaaaucaaauauug

SEQ ID NO: 3042237 - RNA, 19 nt, Artificial Sequence
  Description of Artificial Sequence: Synthetic oligonucleotide
auaggcacuauacauguau

SEQ ID NO: 3042238 - RNA, 19 nt, Artificial Sequence
  Description of Artificial Sequence: Synthetic oligonucleotide
caugguucuuacugcaugg

SEQ ID NO: 3042239 - RNA, 19 nt, Artificial Sequence
  Description of Artificial Sequence: Synthetic oligonucleotide
ucauugccagucauaaucu

SEQ ID NO: 3042240 - RNA, 19 nt, Artificial Sequence
  Description of Artificial Sequence: Synthetic oligonucleotide
uuuggcucaguaauaaauu

SEQ ID NO: 3042241 - RNA, 19 nt, Artificial Sequence
  Description of Artificial Sequence: Synthetic oligonucleotide
uaaucauugccagucauaa

SEQ ID NO: 3042242 - RNA, 19 nt, Artificial Sequence
  Description of Artificial Sequence: Synthetic oligonucleotide
auugucuacaaaucaaaua

SEQ ID NO: 3042243 - RNA, 19 nt, Artificial Sequence
  Description of Artificial Sequence: Synthetic oligonucleotide
auuuaccugcaccaacccg

SEQ ID NO: 3042244 - RNA, 19 nt, Artificial Sequence
  Description of Artificial Sequence: Synthetic oligonucleotide
aacuacugacucgguaugc

SEQ ID NO: 3042245 - RNA, 19 nt, Artificial Sequence
  Description of Artificial Sequence: Synthetic oligonucleotide
aucuauaaauucaagcuga

SEQ ID NO: 3042246 - RNA, 19 nt, Artificial Sequence
  Description of Artificial Sequence: Synthetic oligonucleotide
uuauaaucauugccaguca

SEQ ID NO: 3042247 - RNA, 19 nt, Artificial Sequence
  Description of Artificial Sequence: Synthetic oligonucleotide
uggauuuggcaugacagcc

SEQ ID NO: 3042248 - RNA, 19 nt, Artificial Sequence
  Description of Artificial Sequence: Synthetic oligonucleotide
auauacacgcccacaaaac

SEQ ID NO: 3042249 - RNA, 19 nt, Artificial Sequence
  Description of Artificial Sequence: Synthetic oligonucleotide
auucaagcugauugucuac

SEQ ID NO: 3042250 - RNA, 19 nt, Artificial Sequence
  Description of Artificial Sequence: Synthetic oligonucleotide
acuccaacuacugacucgg

SEQ ID NO: 3042251 - RNA, 19 nt, Artificial Sequence
  Description of Artificial Sequence: Synthetic oligonucleotide
ugggauaggcacuauacau

SEQ ID NO: 3042252 - RNA, 19 nt, Artificial Sequence
  Description of Artificial Sequence: Synthetic oligonucleotide
caaaucaaauauugcuggc

SEQ ID NO: 3042253 - RNA, 19 nt, Artificial Sequence
  Description of Artificial Sequence: Synthetic oligonucleotide
cuacaaaucaaauauugcu

SEQ ID NO: 3042254 - RNA, 19 nt, Artificial Sequence
  Description of Artificial Sequence: Synthetic oligonucleotide
uauaaucauugccagucau

SEQ ID NO: 3042255 - RNA, 19 nt, Artificial Sequence
  Description of Artificial Sequence: Synthetic oligonucleotide
aauguauauauaauauaua

SEQ ID NO: 3042256 - RNA, 19 nt, Artificial Sequence
  Description of Artificial Sequence: Synthetic oligonucleotide
gucauaaucuauaaauuca

SEQ ID NO: 3042257 - RNA, 19 nt, Artificial Sequence
  Description of Artificial Sequence: Synthetic oligonucleotide
ucaaauauugcuggcucug

SEQ ID NO: 3042258 - RNA, 19 nt, Artificial Sequence
  Description of Artificial Sequence: Synthetic oligonucleotide
aguuuauaacaacaugaau

SEQ ID NO: 3042259 - RNA, 19 nt, Artificial Sequence
  Description of Artificial Sequence: Synthetic oligonucleotide
cuggacuccaacuacugac

SEQ ID NO: 3042260 - RNA, 19 nt, Artificial Sequence
  Description of Artificial Sequence: Synthetic oligonucleotide
ugcaccaacccguaucaag

SEQ ID NO: 3042261 - RNA, 19 nt, Artificial Sequence
  Description of Artificial Sequence: Synthetic oligonucleotide
cucaguaauaaauuuaccu

SEQ ID NO: 3042262 - RNA, 19 nt, Artificial Sequence
  Description of Artificial Sequence: Synthetic oligonucleotide
auauauauauauauauaau

SEQ ID NO: 3042263 - RNA, 19 nt, Artificial Sequence
  Description of Artificial Sequence: Synthetic oligonucleotide
cuuacugcaugggauaggc

SEQ ID NO: 3042264 - RNA, 19 nt, Artificial Sequence
  Description of Artificial Sequence: Synthetic oligonucleotide
aaauucaagcugauugucu

SEQ ID NO: 3042265 - RNA, 19 nt, Artificial Sequence
  Description of Artificial Sequence: Synthetic oligonucleotide
uacugacucgguaugcgcc

SEQ ID NO: 3042266 - RNA, 19 nt, Artificial Sequence
  Description of Artificial Sequence: Synthetic oligonucleotide
gacuccaacuacugacucg

SEQ ID NO: 3042267 - RNA, 19 nt, Artificial Sequence
  Description of Artificial Sequence: Synthetic oligonucleotide
cucauauauauauauauau

SEQ ID NO: 3042268 - RNA, 19 nt, Artificial Sequence
  Description of Artificial Sequence: Synthetic oligonucleotide
agucacuaaaucucucuca

SEQ ID NO: 3042269 - RNA, 19 nt, Artificial Sequence
  Description of Artificial Sequence: Synthetic oligonucleotide
ucucucauauauauauaua

SEQ ID NO: 3042270 - RNA, 19 nt, Artificial Sequence
  Description of Artificial Sequence: Synthetic oligonucleotide
acaaaacauacauacuaua

SEQ ID NO: 3042271 - RNA, 19 nt, Artificial Sequence
  Description of Artificial Sequence: Synthetic oligonucleotide
guaucaagucacuaaaucu

SEQ ID NO: 3042272 - RNA, 19 nt, Artificial Sequence
  Description of Artificial Sequence: Synthetic oligonucleotide
uaggcacuauacauguaug

SEQ ID NO: 3042273 - RNA, 19 nt, Artificial Sequence
  Description of Artificial Sequence: Synthetic oligonucleotide
ggauucagaauuauaauca

SEQ ID NO: 3042274 - RNA, 19 nt, Artificial Sequence
  Description of Artificial Sequence: Synthetic oligonucleotide
aguaauaaauuuaccugca

SEQ ID NO: 3042275 - RNA, 19 nt, Artificial Sequence
  Description of Artificial Sequence: Synthetic oligonucleotide
uguaugcagaucacacaca

SEQ ID NO: 3042276 - RNA, 19 nt, Artificial Sequence
  Description of Artificial Sequence: Synthetic oligonucleotide
uaaauucaagcugauuguc

SEQ ID NO: 3042277 - RNA, 19 nt, Artificial Sequence
  Description of Artificial Sequence: Synthetic oligonucleotide
auggauucagaauuauaau

SEQ ID NO: 3042278 - RNA, 19 nt, Artificial Sequence
  Description of Artificial Sequence: Synthetic oligonucleotide
guaauaaauuuaccugcac

SEQ ID NO: 3042279 - RNA, 19 nt, Artificial Sequence
  Description of Artificial Sequence: Synthetic oligonucleotide
cuggauuuggcaugacagc

SEQ ID NO: 3042280 - RNA, 19 nt, Artificial Sequence
  Description of Artificial Sequence: Synthetic oligonucleotide
accugcaccaacccguauc

SEQ ID NO: 3042281 - RNA, 19 nt, Artificial Sequence
  Description of Artificial Sequence: Synthetic oligonucleotide
uuauggauucagaauuaua

SEQ ID NO: 3042282 - RNA, 19 nt, Artificial Sequence
  Description of Artificial Sequence: Synthetic oligonucleotide
aucaaauauugcuggcucu

SEQ ID NO: 3042283 - RNA, 19 nt, Artificial Sequence
  Description of Artificial Sequence: Synthetic oligonucleotide
uaaaucucucucauauaua

SEQ ID NO: 3042284 - RNA, 19 nt, Artificial Sequence
  Description of Artificial Sequence: Synthetic oligonucleotide
agcacugaaugcccuggac

SEQ ID NO: 3042285 - RNA, 19 nt, Artificial Sequence
  Description of Artificial Sequence: Synthetic oligonucleotide
ucauuuggcucaguaauaa

SEQ ID NO: 3042286 - RNA, 19 nt, Artificial Sequence
  Description of Artificial Sequence: Synthetic oligonucleotide
acgcccacaaaacauacau

SEQ ID NO: 3042287 - RNA, 19 nt, Artificial Sequence
  Description of Artificial Sequence: Synthetic oligonucleotide
acuacugacucgguaugcg

SEQ ID NO: 3042288 - RNA, 19 nt, Artificial Sequence
  Description of Artificial Sequence: Synthetic oligonucleotide
uggacuccaacuacugacu

SEQ ID NO: 3042289 - RNA, 19 nt, Artificial Sequence
  Description of Artificial Sequence: Synthetic oligonucleotide
uaugcagaucacacacagc

SEQ ID NO: 3042290 - RNA, 19 nt, Artificial Sequence
  Description of Artificial Sequence: Synthetic oligonucleotide
cacuauacauguaugcaga

SEQ ID NO: 3042291 - RNA, 19 nt, Artificial Sequence
  Description of Artificial Sequence: Synthetic oligonucleotide
gcacuauacauguaugcag

SEQ ID NO: 3042292 - RNA, 19 nt, Artificial Sequence
  Description of Artificial Sequence: Synthetic oligonucleotide
ugucuacaaaucaaauauu

SEQ ID NO: 3042293 - RNA, 19 nt, Artificial Sequence
  Description of Artificial Sequence: Synthetic oligonucleotide
ugugagugcuggauuuggc

SEQ ID NO: 3042294 - RNA, 19 nt, Artificial Sequence
  Description of Artificial Sequence: Synthetic oligonucleotide
ugguucuuacugcauggga

SEQ ID NO: 3042295 - RNA, 19 nt, Artificial Sequence
  Description of Artificial Sequence: Synthetic oligonucleotide
cacugaaugcccuggacuc

SEQ ID NO: 3042296 - RNA, 19 nt, Artificial Sequence
  Description of Artificial Sequence: Synthetic oligonucleotide
auuuggcucaguaauaaau

SEQ ID NO: 3042297 - RNA, 19 nt, Artificial Sequence
  Description of Artificial Sequence: Synthetic oligonucleotide
uugccagucauaaucuaua

SEQ ID NO: 3042298 - RNA, 19 nt, Artificial Sequence
  Description of Artificial Sequence: Synthetic oligonucleotide
cacacagcacugaaugccc

SEQ ID NO: 3042299 - RNA, 19 nt, Artificial Sequence
  Description of Artificial Sequence: Synthetic oligonucleotide
ugagugcuggauuuggcau

SEQ ID NO: 3042300 - RNA, 19 nt, Artificial Sequence
  Description of Artificial Sequence: Synthetic oligonucleotide
uucaagcugauugucuaca

SEQ ID NO: 3042301 - RNA, 19 nt, Artificial Sequence
  Description of Artificial Sequence: Synthetic oligonucleotide
uugugagugcuggauuugg

SEQ ID NO: 3042302 - RNA, 19 nt, Artificial Sequence
  Description of Artificial Sequence: Synthetic oligonucleotide
cucucauauauauauauau

SEQ ID NO: 3042303 - RNA, 19 nt, Artificial Sequence
  Description of Artificial Sequence: Synthetic oligonucleotide
uucuuacugcaugggauag

SEQ ID NO: 3042304 - RNA, 19 nt, Artificial Sequence
  Description of Artificial Sequence: Synthetic oligonucleotide
agcugauugucuacaaauc

SEQ ID NO: 3042305 - RNA, 19 nt, Artificial Sequence
  Description of Artificial Sequence: Synthetic oligonucleotide
gcuggauuuggcaugacag

SEQ ID NO: 3042306 - RNA, 19 nt, Artificial Sequence
  Description of Artificial Sequence: Synthetic oligonucleotide
ugcuggauuuggcaugaca

SEQ ID NO: 3042307 - RNA, 19 nt, Artificial Sequence
  Description of Artificial Sequence: Synthetic oligonucleotide
augggauaggcacuauaca

SEQ ID NO: 3042308 - RNA, 19 nt, Artificial Sequence
  Description of Artificial Sequence: Synthetic oligonucleotide
uggcaugacagccaugguu

SEQ ID NO: 3042309 - RNA, 19 nt, Artificial Sequence
  Description of Artificial Sequence: Synthetic oligonucleotide
cuaaaucucucucauauau

SEQ ID NO: 3042310 - RNA, 19 nt, Artificial Sequence
  Description of Artificial Sequence: Synthetic oligonucleotide
ucaagucacuaaaucucuc

SEQ ID NO: 3042311 - RNA, 19 nt, Artificial Sequence
  Description of Artificial Sequence: Synthetic oligonucleotide
acugaaugcccuggacucc

SEQ ID NO: 3042312 - RNA, 19 nt, Artificial Sequence
  Description of Artificial Sequence: Synthetic oligonucleotide
gagugcuggauuuggcaug

SEQ ID NO: 3042313 - RNA, 19 nt, Artificial Sequence
  Description of Artificial Sequence: Synthetic oligonucleotide
cuacugacucgguaugcgc

SEQ ID NO: 3042314 - RNA, 19 nt, Artificial Sequence
  Description of Artificial Sequence: Synthetic oligonucleotide
ucuuacugcaugggauagg

SEQ ID NO: 3042315 - RNA, 19 nt, Artificial Sequence
  Description of Artificial Sequence: Synthetic oligonucleotide
acuugugagugcuggauuu

SEQ ID NO: 3042316 - RNA, 19 nt, Artificial Sequence
  Description of Artificial Sequence: Synthetic oligonucleotide
acauaguuuauaacaacau

SEQ ID NO: 3042317 - RNA, 19 nt, Artificial Sequence
  Description of Artificial Sequence: Synthetic oligonucleotide
uacacgcccacaaaacaua

SEQ ID NO: 3042318 - RNA, 19 nt, Artificial Sequence
  Description of Artificial Sequence: Synthetic oligonucleotide
aaucauugccagucauaau

SEQ ID NO: 3042319 - RNA, 19 nt, Artificial Sequence
  Description of Artificial Sequence: Synthetic oligonucleotide
ucgguaugcgccucauuug

SEQ ID NO: 3042320 - RNA, 19 nt, Artificial Sequence
  Description of Artificial Sequence: Synthetic oligonucleotide
cagaucacacacagcacug

SEQ ID NO: 3042321 - RNA, 19 nt, Artificial Sequence
  Description of Artificial Sequence: Synthetic oligonucleotide
cugauugucuacaaaucaa

SEQ ID NO: 3042322 - RNA, 19 nt, Artificial Sequence
  Description of Artificial Sequence: Synthetic oligonucleotide
acuauacauguaugcagau

SEQ ID NO: 3042323 - RNA, 19 nt, Artificial Sequence
  Description of Artificial Sequence: Synthetic oligonucleotide
cacacacagcacugaaugc

SEQ ID NO: 3042324 - RNA, 19 nt, Artificial Sequence
  Description of Artificial Sequence: Synthetic oligonucleotide
aucaagucacuaaaucucu

SEQ ID NO: 3042325 - RNA, 19 nt, Artificial Sequence
  Description of Artificial Sequence: Synthetic oligonucleotide
auaaauuuaccugcaccaa

SEQ ID NO: 3042326 - RNA, 19 nt, Artificial Sequence
  Description of Artificial Sequence: Synthetic oligonucleotide
ugcagaucacacacagcac

SEQ ID NO: 3042327 - RNA, 19 nt, Artificial Sequence
  Description of Artificial Sequence: Synthetic oligonucleotide
ucucucucauauauauaua

SEQ ID NO: 3042328 - RNA, 19 nt, Artificial Sequence
  Description of Artificial Sequence: Synthetic oligonucleotide
uccaacuacugacucggua

SEQ ID NO: 3042329 - RNA, 19 nt, Artificial Sequence
  Description of Artificial Sequence: Synthetic oligonucleotide
gcugauugucuacaaauca

SEQ ID NO: 3042330 - RNA, 19 nt, Artificial Sequence
  Description of Artificial Sequence: Synthetic oligonucleotide
auugcuggcucugacuugu

SEQ ID NO: 3042331 - RNA, 19 nt, Artificial Sequence
  Description of Artificial Sequence: Synthetic oligonucleotide
auacauguaugcagaucac

SEQ ID NO: 3042332 - RNA, 19 nt, Artificial Sequence
  Description of Artificial Sequence: Synthetic oligonucleotide
acagcacugaaugcccugg

SEQ ID NO: 3042333 - RNA, 19 nt, Artificial Sequence
  Description of Artificial Sequence: Synthetic oligonucleotide
cauguaugcagaucacaca

SEQ ID NO: 3042334 - RNA, 19 nt, Artificial Sequence
  Description of Artificial Sequence: Synthetic oligonucleotide
gauucagaauuauaaucau

SEQ ID NO: 3042335 - RNA, 19 nt, Artificial Sequence
  Description of Artificial Sequence: Synthetic oligonucleotide
ggcucaguaauaaauuuac

SEQ ID NO: 3042336 - RNA, 19 nt, Artificial Sequence
  Description of Artificial Sequence: Synthetic oligonucleotide
ucaagcugauugucuacaa

SEQ ID NO: 3042337 - RNA, 19 nt, Artificial Sequence
  Description of Artificial Sequence: Synthetic oligonucleotide
cacuaaaucucucucauau

SEQ ID NO: 3042338 - RNA, 19 nt, Artificial Sequence
  Description of Artificial Sequence: Synthetic oligonucleotide
uauugcuggcucugacuug

SEQ ID NO: 3042339 - RNA, 19 nt, Artificial Sequence
  Description of Artificial Sequence: Synthetic oligonucleotide
accaacccguaucaaguca

SEQ ID NO: 3042340 - RNA, 19 nt, Artificial Sequence
  Description of Artificial Sequence: Synthetic oligonucleotide
acugacucgguaugcgccu

SEQ ID NO: 3042341 - RNA, 19 nt, Artificial Sequence
  Description of Artificial Sequence: Synthetic oligonucleotide
caacuacugacucgguaug

SEQ ID NO: 3042342 - RNA, 19 nt, Artificial Sequence
  Description of Artificial Sequence: Synthetic oligonucleotide
ugccagucauaaucuauaa

SEQ ID NO: 3042343 - RNA, 19 nt, Artificial Sequence
  Description of Artificial Sequence: Synthetic oligonucleotide
augguucuuacugcauggg

SEQ ID NO: 3042344 - RNA, 19 nt, Artificial Sequence
  Description of Artificial Sequence: Synthetic oligonucleotide
acuaaaucucucucauaua

SEQ ID NO: 3042345 - RNA, 19 nt, Artificial Sequence
  Description of Artificial Sequence: Synthetic oligonucleotide
gugagugcuggauuuggca

SEQ ID NO: 3042346 - RNA, 19 nt, Artificial Sequence
  Description of Artificial Sequence: Synthetic oligonucleotide
agccaugguucuuacugca

SEQ ID NO: 3042347 - RNA, 19 nt, Artificial Sequence
  Description of Artificial Sequence: Synthetic oligonucleotide
cagccaugguucuuacugc

SEQ ID NO: 3042348 - RNA, 19 nt, Artificial Sequence
  Description of Artificial Sequence: Synthetic oligonucleotide
uaugcgccucauuuggcuc

SEQ ID NO: 3042349 - RNA, 19 nt, Artificial Sequence
  Description of Artificial Sequence: Synthetic oligonucleotide
acccguaucaagucacuaa

SEQ ID NO: 3042350 - RNA, 19 nt, Artificial Sequence
  Description of Artificial Sequence: Synthetic oligonucleotide
gaucacacacagcacugaa

SEQ ID NO: 3042351 - RNA, 19 nt, Artificial Sequence
  Description of Artificial Sequence: Synthetic oligonucleotide
uggcucugacuugugagug

SEQ ID NO: 3042352 - RNA, 19 nt, Artificial Sequence
  Description of Artificial Sequence: Synthetic oligonucleotide
acacgcccacaaaacauac

SEQ ID NO: 3042353 - RNA, 19 nt, Artificial Sequence
  Description of Artificial Sequence: Synthetic oligonucleotide
gcuggcucugacuugugag

SEQ ID NO: 3042354 - RNA, 19 nt, Artificial Sequence
  Description of Artificial Sequence: Synthetic oligonucleotide
ugcccuggacuccaacuac

SEQ ID NO: 3042355 - RNA, 19 nt, Artificial Sequence
  Description of Artificial Sequence: Synthetic oligonucleotide
ugacuugugagugcuggau

SEQ ID NO: 3042356 - RNA, 19 nt, Artificial Sequence
  Description of Artificial Sequence: Synthetic oligonucleotide
uuacugcaugggauaggca

SEQ ID NO: 3042357 - RNA, 19 nt, Artificial Sequence
  Description of Artificial Sequence: Synthetic oligonucleotide
guucuuacugcaugggaua

SEQ ID NO: 3042358 - RNA, 19 nt, Artificial Sequence
  Description of Artificial Sequence: Synthetic oligonucleotide
cucucucauauauauauau

SEQ ID NO: 3042359 - RNA, 19 nt, Artificial Sequence
  Description of Artificial Sequence: Synthetic oligonucleotide
cauacuauacauaguuuau

SEQ ID NO: 3042360 - RNA, 19 nt, Artificial Sequence
  Description of Artificial Sequence: Synthetic oligonucleotide
auugccagucauaaucuau

SEQ ID NO: 3042361 - RNA, 19 nt, Artificial Sequence
  Description of Artificial Sequence: Synthetic oligonucleotide
ggcaugacagccaugguuc

SEQ ID NO: 3042362 - RNA, 19 nt, Artificial Sequence
  Description of Artificial Sequence: Synthetic oligonucleotide
ccagucauaaucuauaaau

SEQ ID NO: 3042363 - RNA, 19 nt, Artificial Sequence
  Description of Artificial Sequence: Synthetic oligonucleotide
auacacgcccacaaaacau

SEQ ID NO: 3042364 - RNA, 19 nt, Artificial Sequence
  Description of Artificial Sequence: Synthetic oligonucleotide
gggauaggcacuauacaug

SEQ ID NO: 3042365 - RNA, 19 nt, Artificial Sequence
  Description of Artificial Sequence: Synthetic oligonucleotide
ucacuaaaucucucucaua

SEQ ID NO: 3042366 - RNA, 19 nt, Artificial Sequence
  Description of Artificial Sequence: Synthetic oligonucleotide
agugcuggauuuggcauga

SEQ ID NO: 3042367 - RNA, 19 nt, Artificial Sequence
  Description of Artificial Sequence: Synthetic oligonucleotide
auucagaauuauaaucauu

SEQ ID NO: 3042368 - RNA, 19 nt, Artificial Sequence
  Description of Artificial Sequence: Synthetic oligonucleotide
cacaaaacauacauacuau

SEQ ID NO: 3042369 - RNA, 19 nt, Artificial Sequence
  Description of Artificial Sequence: Synthetic oligonucleotide
cguaucaagucacuaaauc

SEQ ID NO: 3042370 - RNA, 19 nt, Artificial Sequence
  Description of Artificial Sequence: Synthetic oligonucleotide
auaaucauugccagucaua

SEQ ID NO: 3042371 - RNA, 19 nt, Artificial Sequence
  Description of Artificial Sequence: Synthetic oligonucleotide
gucacuaaaucucucucau

SEQ ID NO: 3042372 - RNA, 19 nt, Artificial Sequence
  Description of Artificial Sequence: Synthetic oligonucleotide
ggauaggcacuauacaugu

SEQ ID NO: 3042373 - RNA, 19 nt, Artificial Sequence
  Description of Artificial Sequence: Synthetic oligonucleotide
caagucacuaaaucucucu

SEQ ID NO: 3042374 - RNA, 19 nt, Artificial Sequence
  Description of Artificial Sequence: Synthetic oligonucleotide
aaucucucucauauauaua

SEQ ID NO: 3042375 - RNA, 19 nt, Artificial Sequence
  Description of Artificial Sequence: Synthetic oligonucleotide
augcgccucauuuggcuca

SEQ ID NO: 3042376 - RNA, 19 nt, Artificial Sequence
  Description of Artificial Sequence: Synthetic oligonucleotide
gauugucuacaaaucaaau

SEQ ID NO: 3042377 - RNA, 19 nt, Artificial Sequence
  Description of Artificial Sequence: Synthetic oligonucleotide
gauuuggcaugacagccau

SEQ ID NO: 3042378 - RNA, 19 nt, Artificial Sequence
  Description of Artificial Sequence: Synthetic oligonucleotide
cauacauacuauacauagu

SEQ ID NO: 3042379 - RNA, 19 nt, Artificial Sequence
  Description of Artificial Sequence: Synthetic oligonucleotide
uuaccugcaccaacccgua

SEQ ID NO: 3042380 - RNA, 19 nt, Artificial Sequence
  Description of Artificial Sequence: Synthetic oligonucleotide
ggcacuauacauguaugca

SEQ ID NO: 3042381 - RNA, 19 nt, Artificial Sequence
  Description of Artificial Sequence: Synthetic oligonucleotide
cuugugagugcuggauuug

SEQ ID NO: 3042382 - RNA, 19 nt, Artificial Sequence
  Description of Artificial Sequence: Synthetic oligonucleotide
acugcaugggauaggcacu

SEQ ID NO: 3042383 - RNA, 19 nt, Artificial Sequence
  Description of Artificial Sequence: Synthetic oligonucleotide
agaucacacacagcacuga

SEQ ID NO: 3042384 - RNA, 19 nt, Artificial Sequence
  Description of Artificial Sequence: Synthetic oligonucleotide
ugacucgguaugcgccuca

SEQ ID NO: 3042385 - RNA, 19 nt, Artificial Sequence
  Description of Artificial Sequence: Synthetic oligonucleotide
gaaugcccuggacuccaac

SEQ ID NO: 3042386 - RNA, 19 nt, Artificial Sequence
  Description of Artificial Sequence: Synthetic oligonucleotide
augcccuggacuccaacua

SEQ ID NO: 3042387 - RNA, 19 nt, Artificial Sequence
  Description of Artificial Sequence: Synthetic oligonucleotide
augacagccaugguucuua

SEQ ID NO: 3042388 - RNA, 19 nt, Artificial Sequence
  Description of Artificial Sequence: Synthetic oligonucleotide
cucauuuggcucaguaaua

SEQ ID NO: 3042389 - RNA, 19 nt, Artificial Sequence
  Description of Artificial Sequence: Synthetic oligonucleotide
ccaacccguaucaagucac

SEQ ID NO: 3042390 - RNA, 19 nt, Artificial Sequence
  Description of Artificial Sequence: Synthetic oligonucleotide
caccaacccguaucaaguc

SEQ ID NO: 3042391 - RNA, 19 nt, Artificial Sequence
  Description of Artificial Sequence: Synthetic oligonucleotide
uuggcaugacagccauggu

SEQ ID NO: 3042392 - RNA, 19 nt, Artificial Sequence
  Description of Artificial Sequence: Synthetic oligonucleotide
ugacagccaugguucuuac

SEQ ID NO: 3042393 - RNA, 19 nt, Artificial Sequence
  Description of Artificial Sequence: Synthetic oligonucleotide
cagucauaaucuauaaauu

SEQ ID NO: 3042394 - RNA, 19 nt, Artificial Sequence
  Description of Artificial Sequence: Synthetic oligonucleotide
gcagaucacacacagcacu

SEQ ID NO: 3042395 - RNA, 19 nt, Artificial Sequence
  Description of Artificial Sequence: Synthetic oligonucleotide
aacccguaucaagucacua

SEQ ID NO: 3042396 - RNA, 19 nt, Artificial Sequence
  Description of Artificial Sequence: Synthetic oligonucleotide
guaugcgccucauuuggcu

SEQ ID NO: 3042397 - RNA, 19 nt, Artificial Sequence
  Description of Artificial Sequence: Synthetic oligonucleotide
ccaugguucuuacugcaug

SEQ ID NO: 3042398 - RNA, 19 nt, Artificial Sequence
  Description of Artificial Sequence: Synthetic oligonucleotide
gcucaguaauaaauuuacc

SEQ ID NO: 3042399 - RNA, 19 nt, Artificial Sequence
  Description of Artificial Sequence: Synthetic oligonucleotide
caagcugauugucuacaaa

SEQ ID NO: 3042400 - RNA, 19 nt, Artificial Sequence
  Description of Artificial Sequence: Synthetic oligonucleotide
cauuuggcucaguaauaaa

SEQ ID NO: 3042401 - RNA, 19 nt, Artificial Sequence
  Description of Artificial Sequence: Synthetic oligonucleotide
caaauauugcuggcucuga

SEQ ID NO: 3042402 - RNA, 19 nt, Artificial Sequence
  Description of Artificial Sequence: Synthetic oligonucleotide
cucgguaugcgccucauuu

SEQ ID NO: 3042403 - RNA, 19 nt, Artificial Sequence
  Description of Artificial Sequence: Synthetic oligonucleotide
cgguaugcgccucauuugg

SEQ ID NO: 3042404 - RNA, 19 nt, Artificial Sequence
  Description of Artificial Sequence: Synthetic oligonucleotide
aucacacacagcacugaau

SEQ ID NO: 3042405 - RNA, 19 nt, Artificial Sequence
  Description of Artificial Sequence: Synthetic oligonucleotide
ggcucugacuugugagugc

SEQ ID NO: 3042406 - RNA, 19 nt, Artificial Sequence
  Description of Artificial Sequence: Synthetic oligonucleotide
ggacuccaacuacugacuc

SEQ ID NO: 3042407 - RNA, 19 nt, Artificial Sequence
  Description of Artificial Sequence: Synthetic oligonucleotide
ugaaugcccuggacuccaa

SEQ ID NO: 3042408 - RNA, 19 nt, Artificial Sequence
  Description of Artificial Sequence: Synthetic oligonucleotide
ugcgccucauuuggcucag

SEQ ID NO: 3042409 - RNA, 19 nt, Artificial Sequence
  Description of Artificial Sequence: Synthetic oligonucleotide
cugaaugcccuggacucca

SEQ ID NO: 3042410 - RNA, 19 nt, Artificial Sequence
  Description of Artificial Sequence: Synthetic oligonucleotide
guuauggauucagaauuau

SEQ ID NO: 3042411 - RNA, 19 nt, Artificial Sequence
  Description of Artificial Sequence: Synthetic oligonucleotide
gacuugugagugcuggauu

SEQ ID NO: 3042412 - RNA, 19 nt, Artificial Sequence
  Description of Artificial Sequence: Synthetic oligonucleotide
ggauuuggcaugacagcca

SEQ ID NO: 3042413 - RNA, 19 nt, Artificial Sequence
  Description of Artificial Sequence: Synthetic oligonucleotide
cauugccagucauaaucua

SEQ ID NO: 3042414 - RNA, 19 nt, Artificial Sequence
  Description of Artificial Sequence: Synthetic oligonucleotide
gguucuuacugcaugggau

SEQ ID NO: 3042415 - RNA, 19 nt, Artificial Sequence
  Description of Artificial Sequence: Synthetic oligonucleotide
cacgcccacaaaacauaca

SEQ ID NO: 3042416 - RNA, 19 nt, Artificial Sequence
  Description of Artificial Sequence: Synthetic oligonucleotide
gguaugcgccucauuuggc

SEQ ID NO: 3042417 - RNA, 19 nt, Artificial Sequence
  Description of Artificial Sequence: Synthetic oligonucleotide
cguauauacacgcccacaa

SEQ ID NO: 3042418 - RNA, 19 nt, Artificial Sequence
  Description of Artificial Sequence: Synthetic oligonucleotide
gcacugaaugcccuggacu

SEQ ID NO: 3042419 - RNA, 19 nt, Artificial Sequence
  Description of Artificial Sequence: Synthetic oligonucleotide
ccucauuuggcucaguaau

SEQ ID NO: 3042420 - RNA, 19 nt, Artificial Sequence
  Description of Artificial Sequence: Synthetic oligonucleotide
acacagcacugaaugcccu

SEQ ID NO: 3042421 - RNA, 19 nt, Artificial Sequence
  Description of Artificial Sequence: Synthetic oligonucleotide
ccaacuacugacucgguau

SEQ ID NO: 3042422 - RNA, 19 nt, Artificial Sequence
  Description of Artificial Sequence: Synthetic oligonucleotide
gccagucauaaucuauaaa

SEQ ID NO: 3042423 - RNA, 19 nt, Artificial Sequence
  Description of Artificial Sequence: Synthetic oligonucleotide
cccguaucaagucacuaaa

SEQ ID NO: 3042424 - RNA, 19 nt, Artificial Sequence
  Description of Artificial Sequence: Synthetic oligonucleotide
gauaggcacuauacaugua

SEQ ID NO: 3042425 - RNA, 19 nt, Artificial Sequence
  Description of Artificial Sequence: Synthetic oligonucleotide
gccucauuuggcucaguaa

SEQ ID NO: 3042426 - RNA, 19 nt, Artificial Sequence
  Description of Artificial Sequence: Synthetic oligonucleotide
ccugcaccaacccguauca

SEQ ID NO: 3042427 - RNA, 19 nt, Artificial Sequence
  Description of Artificial Sequence: Synthetic oligonucleotide
uaccugcaccaacccguau

SEQ ID NO: 3042428 - RNA, 19 nt, Artificial Sequence
  Description of Artificial Sequence: Synthetic oligonucleotide
cccuggacuccaacuacug

SEQ ID NO: 3042429 - RNA, 19 nt, Artificial Sequence
  Description of Artificial Sequence: Synthetic oligonucleotide
gacagccaugguucuuacu

SEQ ID NO: 3042430 - RNA, 19 nt, Artificial Sequence
  Description of Artificial Sequence: Synthetic oligonucleotide
cuauaaauucaagcugauu

SEQ ID NO: 3042431 - RNA, 19 nt, Artificial Sequence
  Description of Artificial Sequence: Synthetic oligonucleotide
gcaccaacccguaucaagu

SEQ ID NO: 3042432 - RNA, 19 nt, Artificial Sequence
  Description of Artificial Sequence: Synthetic oligonucleotide
acucgguaugcgccucauu

SEQ ID NO: 3042433 - RNA, 19 nt, Artificial Sequence
  Description of Artificial Sequence: Synthetic oligonucleotide
cugacucgguaugcgccuc

SEQ ID NO: 3042434 - RNA, 19 nt, Artificial Sequence
  Description of Artificial Sequence: Synthetic oligonucleotide
ugcaugggauaggcacuau

SEQ ID NO: 3042435 - RNA, 19 nt, Artificial Sequence
  Description of Artificial Sequence: Synthetic oligonucleotide
gcaugggauaggcacuaua

SEQ ID NO: 3042436 - RNA, 19 nt, Artificial Sequence
  Description of Artificial Sequence: Synthetic oligonucleotide
cugcaugggauaggcacua

SEQ ID NO: 3042437 - RNA, 19 nt, Artificial Sequence
  Description of Artificial Sequence: Synthetic oligonucleotide
caacccguaucaagucacu

SEQ ID NO: 3042438 - RNA, 19 nt, Artificial Sequence
  Description of Artificial Sequence: Synthetic oligonucleotide
ccuggacuccaacuacuga

SEQ ID NO: 3042439 - RNA, 19 nt, Artificial Sequence
  Description of Artificial Sequence: Synthetic oligonucleotide
gcucugacuugugagugcu

SEQ ID NO: 3042440 - RNA, 19 nt, Artificial Sequence
  Description of Artificial Sequence: Synthetic oligonucleotide
gcaugacagccaugguucu

SEQ ID NO: 3042441 - RNA, 19 nt, Artificial Sequence
  Description of Artificial Sequence: Synthetic oligonucleotide
gacucgguaugcgccucau

SEQ ID NO: 3042442 - RNA, 19 nt, Artificial Sequence
  Description of Artificial Sequence: Synthetic oligonucleotide
cuccaacuacugacucggu

SEQ ID NO: 3042443 - RNA, 19 nt, Artificial Sequence
  Description of Artificial Sequence: Synthetic oligonucleotide
gugcuggauuuggcaugac

SEQ ID NO: 3042444 - RNA, 19 nt, Artificial Sequence
  Description of Artificial Sequence: Synthetic oligonucleotide
ccguaucaagucacuaaau

SEQ ID NO: 3042445 - RNA, 19 nt, Artificial Sequence
  Description of Artificial Sequence: Synthetic oligonucleotide
caugacagccaugguucuu

SEQ ID NO: 3042446 - RNA, 19 nt, Artificial Sequence
  Description of Artificial Sequence: Synthetic oligonucleotide
cugcaccaacccguaucaa

SEQ ID NO: 3042447 - RNA, 19 nt, Artificial Sequence
  Description of Artificial Sequence: Synthetic oligonucleotide
gcccuggacuccaacuacu

SEQ ID NO: 3042448 - RNA, 19 nt, Artificial Sequence
  Description of Artificial Sequence: Synthetic oligonucleotide
cgcccacaaaacauacaua

SEQ ID NO: 3042449 - RNA, 19 nt, Artificial Sequence
  Description of Artificial Sequence: Synthetic oligonucleotide
cgccucauuuggcucagua

SEQ ID NO: 3042450 - RNA, 19 nt, Artificial Sequence
  Description of Artificial Sequence: Synthetic oligonucleotide
gccaugguucuuacugcau

SEQ ID NO: 3042451 - RNA, 19 nt, Artificial Sequence
  Description of Artificial Sequence: Synthetic oligonucleotide
gcgccucauuuggcucagu

SEQ ID NO: 3042452 - RNA, 19 nt, Artificial Sequence
  Description of Artificial Sequence: Synthetic oligonucleotide
aauaguuugagcaucaugg

SEQ ID NO: 3042453 - RNA, 19 nt, Artificial Sequence
  Description of Artificial Sequence: Synthetic oligonucleotide
uguggacccacaaagaucu

SEQ ID NO: 3042454 - RNA, 19 nt, Artificial Sequence
  Description of Artificial Sequence: Synthetic oligonucleotide
cuuuuguggacccacaaag

SEQ ID NO: 3042455 - RNA, 19 nt, Artificial Sequence
  Description of Artificial Sequence: Synthetic oligonucleotide
aguuugagcaucauggguc

SEQ ID NO: 3042456 - RNA, 19 nt, Artificial Sequence
  Description of Artificial Sequence: Synthetic oligonucleotide
auaguuugagcaucauggg

SEQ ID NO: 3042457 - RNA, 19 nt, Artificial Sequence
  Description of Artificial Sequence: Synthetic oligonucleotide
gaauaguuugagcaucaug

SEQ ID NO: 3042458 - RNA, 19 nt, Artificial Sequence
  Description of Artificial Sequence: Synthetic oligonucleotide
uuuguggacccacaaagau

SEQ ID NO: 3042459 - RNA, 19 nt, Artificial Sequence
  Description of Artificial Sequence: Synthetic oligonucleotide
uuuuguggacccacaaaga

SEQ ID NO: 3042460 - RNA, 19 nt, Artificial Sequence
  Description of Artificial Sequence: Synthetic oligonucleotide
uaguuugagcaucaugggu

SEQ ID NO: 3042461 - RNA, 19 nt, Artificial Sequence
  Description of Artificial Sequence: Synthetic oligonucleotide
uuguggacccacaaagauc

SEQ ID NO: 3042462 - RNA, 19 nt, Artificial Sequence
  Description of Artificial Sequence: Synthetic oligonucleotide
ugggauuccuuuuguggac

SEQ ID NO: 3042463 - RNA, 19 nt, Artificial Sequence
  Description of Artificial Sequence: Synthetic oligonucleotide
uugagcaucaugggucacc

SEQ ID NO: 3042464 - RNA, 19 nt, Artificial Sequence
  Description of Artificial Sequence: Synthetic oligonucleotide
guuugagcaucauggguca

SEQ ID NO: 3042465 - RNA, 19 nt, Artificial Sequence
  Description of Artificial Sequence: Synthetic oligonucleotide
uccuuuuguggacccacaa

SEQ ID NO: 3042466 - RNA, 19 nt, Artificial Sequence
  Description of Artificial Sequence: Synthetic oligonucleotide
ggauuccuuuuguggaccc

SEQ ID NO: 3042467 - RNA, 19 nt, Artificial Sequence
  Description of Artificial Sequence: Synthetic oligonucleotide
uggacccacaaagaucuuu

SEQ ID NO: 3042468 - RNA, 19 nt, Artificial Sequence
  Description of Artificial Sequence: Synthetic oligonucleotide
gauuccuuuuguggaccca

SEQ ID NO: 3042469 - RNA, 19 nt, Artificial Sequence
  Description of Artificial Sequence: Synthetic oligonucleotide
ggacccacaaagaucuuuc

SEQ ID NO: 3042470 - RNA, 19 nt, Artificial Sequence
  Description of Artificial Sequence: Synthetic oligonucleotide
uuugagcaucaugggucac

SEQ ID NO: 3042471 - RNA, 19 nt, Artificial Sequence
  Description of Artificial Sequence: Synthetic oligonucleotide
gggauuccuuuuguggacc

SEQ ID NO: 3042472 - RNA, 19 nt, Artificial Sequence
  Description of Artificial Sequence: Synthetic oligonucleotide
gacccacaaagaucuuucu

SEQ ID NO: 3042473 - RNA, 19 nt, Artificial Sequence
  Description of Artificial Sequence: Synthetic oligonucleotide
ccuuuuguggacccacaaa

SEQ ID NO: 3042474 - RNA, 19 nt, Artificial Sequence
  Description of Artificial Sequence: Synthetic oligonucleotide
guggacccacaaagaucuu

SEQ ID NO: 3042475 - RNA, 19 nt, Artificial Sequence
  Description of Artificial Sequence: Synthetic oligonucleotide
aaugaagcacaucauuucc

SEQ ID NO: 3042476 - RNA, 19 nt, Artificial Sequence
  Description of Artificial Sequence: Synthetic oligonucleotide
agaacgauacgcuucagcc

SEQ ID NO: 3042477 - RNA, 19 nt, Artificial Sequence
  Description of Artificial Sequence: Synthetic oligonucleotide
auuuccuuaaaacuucagc

SEQ ID NO: 3042478 - RNA, 19 nt, Artificial Sequence
  Description of Artificial Sequence: Synthetic oligonucleotide
aacgauacgcuucagccac

SEQ ID NO: 3042479 - RNA, 19 nt, Artificial Sequence
  Description of Artificial Sequence: Synthetic oligonucleotide
aguugaugaaaucuacugc

SEQ ID NO: 3042480 - RNA, 19 nt, Artificial Sequence
  Description of Artificial Sequence: Synthetic oligonucleotide
uuuccuuaaaacuucagcu

SEQ ID NO: 3042481 - RNA, 19 nt, Artificial Sequence
  Description of Artificial Sequence: Synthetic oligonucleotide
aauuucugcagcauucucc

SEQ ID NO: 3042482 - RNA, 19 nt, Artificial Sequence
  Description of Artificial Sequence: Synthetic oligonucleotide
aaaacuucagcuccacauc

SEQ ID NO: 3042483 - RNA, 19 nt, Artificial Sequence
  Description of Artificial Sequence: Synthetic oligonucleotide
aaacuucagcuccacaucg

SEQ ID NO: 3042484 - RNA, 19 nt, Artificial Sequence
  Description of Artificial Sequence: Synthetic oligonucleotide
aagggcacugugcugaagc

SEQ ID NO: 3042485 - RNA, 19 nt, Artificial Sequence
  Description of Artificial Sequence: Synthetic oligonucleotide
guugaugaaaucuacugcc

SEQ ID NO: 3042486 - RNA, 19 nt, Artificial Sequence
  Description of Artificial Sequence: Synthetic oligonucleotide
aagccagagaacgauacgc

SEQ ID NO: 3042487 - RNA, 19 nt, Artificial Sequence
  Description of Artificial Sequence: Synthetic oligonucleotide
auuuugucaagguuuggcg

SEQ ID NO: 3042488 - RNA, 19 nt, Artificial Sequence
  Description of Artificial Sequence: Synthetic oligonucleotide
uccuuaaaacuucagcucc

SEQ ID NO: 3042489 - RNA, 19 nt, Artificial Sequence
  Description of Artificial Sequence: Synthetic oligonucleotide
ugugacaccaccauugacu

SEQ ID NO: 3042490 - RNA, 19 nt, Artificial Sequence
  Description of Artificial Sequence: Synthetic oligonucleotide
gagagguuacugcagaggg

SEQ ID NO: 3042491 - RNA, 19 nt, Artificial Sequence
  Description of Artificial Sequence: Synthetic oligonucleotide
acaucauuuccuuaaaacu

SEQ ID NO: 3042492 - RNA, 19 nt, Artificial Sequence
  Description of Artificial Sequence: Synthetic oligonucleotide
uaguugaugaaaucuacug

SEQ ID NO: 3042493 - RNA, 19 nt, Artificial Sequence
  Description of Artificial Sequence: Synthetic oligonucleotide
uaaaacuucagcuccacau

SEQ ID NO: 3042494 - RNA, 19 nt, Artificial Sequence
  Description of Artificial Sequence: Synthetic oligonucleotide
guguaaaugaagcacauca

SEQ ID NO: 3042495 - RNA, 19 nt, Artificial Sequence
  Description of Artificial Sequence: Synthetic oligonucleotide
uuuucaguugaucugcgcu

SEQ ID NO: 3042496 - RNA, 19 nt, Artificial Sequence
  Description of Artificial Sequence: Synthetic oligonucleotide
uaaaugaagcacaucauuu

SEQ ID NO: 3042497 - RNA, 19 nt, Artificial Sequence
  Description of Artificial Sequence: Synthetic oligonucleotide
acacaugaccuucaagcgc

SEQ ID NO: 3042498 - RNA, 19 nt, Artificial Sequence
  Description of Artificial Sequence: Synthetic oligonucleotide
uuuugucaagguuuggcgc

SEQ ID NO: 3042499 - RNA, 19 nt, Artificial Sequence
  Description of Artificial Sequence: Synthetic oligonucleotide
ugaguuuucaguugaucug

SEQ ID NO: 3042500 - RNA, 19 nt, Artificial Sequence
  Description of Artificial Sequence: Synthetic oligonucleotide
aaucaucagccauuuuguc

SEQ ID NO: 3042501 - RNA, 19 nt, Artificial Sequence
  Description of Artificial Sequence: Synthetic oligonucleotide
uuugucaagguuuggcgcc

SEQ ID NO: 3042502 - RNA, 19 nt, Artificial Sequence
  Description of Artificial Sequence: Synthetic oligonucleotide
cacaucauuuccuuaaaac

SEQ ID NO: 3042503 - RNA, 19 nt, Artificial Sequence
  Description of Artificial Sequence: Synthetic oligonucleotide
ucaucagccauuuugucaa

SEQ ID NO: 3042504 - RNA, 19 nt, Artificial Sequence
  Description of Artificial Sequence: Synthetic oligonucleotide
gaagcaugauaguugauga

SEQ ID NO: 3042505 - RNA, 19 nt, Artificial Sequence
  Description of Artificial Sequence: Synthetic oligonucleotide
cuucccguguaaaugaagc

SEQ ID NO: 3042506 - RNA, 19 nt, Artificial Sequence
  Description of Artificial Sequence: Synthetic oligonucleotide
ucugcagcauucuccacgg

SEQ ID NO: 3042507 - RNA, 19 nt, Artificial Sequence
  Description of Artificial Sequence: Synthetic oligonucleotide
aaaucaucagccauuuugu

SEQ ID NO: 3042508 - RNA, 19 nt, Artificial Sequence
  Description of Artificial Sequence: Synthetic oligonucleotide
agaggucuccaagacaucc

SEQ ID NO: 3042509 - RNA, 19 nt, Artificial Sequence
  Description of Artificial Sequence: Synthetic oligonucleotide
auacgcuucagccacuaag

SEQ ID NO: 3042510 - RNA, 19 nt, Artificial Sequence
  Description of Artificial Sequence: Synthetic oligonucleotide
ugaugaaaucuacugccug

SEQ ID NO: 3042511 - RNA, 19 nt, Artificial Sequence
  Description of Artificial Sequence: Synthetic oligonucleotide
ugauaguugaugaaaucua

SEQ ID NO: 3042512 - RNA, 19 nt, Artificial Sequence
  Description of Artificial Sequence: Synthetic oligonucleotide
augauaguugaugaaaucu

SEQ ID NO: 3042513 - RNA, 19 nt, Artificial Sequence
  Description of Artificial Sequence: Synthetic oligonucleotide
ugcagcauucuccacggag

SEQ ID NO: 3042514 - RNA, 19 nt, Artificial Sequence
  Description of Artificial Sequence: Synthetic oligonucleotide
aaaucuacugccugaguuu

SEQ ID NO: 3042515 - RNA, 19 nt, Artificial Sequence
  Description of Artificial Sequence: Synthetic oligonucleotide
aagcacaucauuuccuuaa

SEQ ID NO: 3042516 - RNA, 19 nt, Artificial Sequence
  Description of Artificial Sequence: Synthetic oligonucleotide
gacauccgaagcaugauag

SEQ ID NO: 3042517 - RNA, 19 nt, Artificial Sequence
  Description of Artificial Sequence: Synthetic oligonucleotide
ugaagccagagaacgauac

SEQ ID NO: 3042518 - RNA, 19 nt, Artificial Sequence
  Description of Artificial Sequence: Synthetic oligonucleotide
aagguuuggcgccuucccg

SEQ ID NO: 3042519 - RNA, 19 nt, Artificial Sequence
  Description of Artificial Sequence: Synthetic oligonucleotide
uuucaguugaucugcgcug

SEQ ID NO: 3042520 - RNA, 19 nt, Artificial Sequence
  Description of Artificial Sequence: Synthetic oligonucleotide
uugaucugcgcuguggagg

SEQ ID NO: 3042521 - RNA, 19 nt, Artificial Sequence
  Description of Artificial Sequence: Synthetic oligonucleotide
aggaugagaauuucugcag

SEQ ID NO: 3042522 - RNA, 19 nt, Artificial Sequence
  Description of Artificial Sequence: Synthetic oligonucleotide
cacacaugaccuucaagcg

SEQ ID NO: 3042523 - RNA, 19 nt, Artificial Sequence
  Description of Artificial Sequence: Synthetic oligonucleotide
uguaaaugaagcacaucau

SEQ ID NO: 3042524 - RNA, 19 nt, Artificial Sequence
  Description of Artificial Sequence: Synthetic oligonucleotide
aucauuuccuuaaaacuuc

SEQ ID NO: 3042525 - RNA, 19 nt, Artificial Sequence
  Description of Artificial Sequence: Synthetic oligonucleotide
gaugaaaucuacugccuga

SEQ ID NO: 3042526 - RNA, 19 nt, Artificial Sequence
  Description of Artificial Sequence: Synthetic oligonucleotide
aucaucagccauuuuguca

SEQ ID NO: 3042527 - RNA, 19 nt, Artificial Sequence
  Description of Artificial Sequence: Synthetic oligonucleotide
cauacuugucagcagcugc

SEQ ID NO: 3042528 - RNA, 19 nt, Artificial Sequence
  Description of Artificial Sequence: Synthetic oligonucleotide
uuccuuaaaacuucagcuc

SEQ ID NO: 3042529 - RNA, 19 nt, Artificial Sequence
  Description of Artificial Sequence: Synthetic oligonucleotide
gauaguugaugaaaucuac

SEQ ID NO: 3042530 - RNA, 19 nt, Artificial Sequence
  Description of Artificial Sequence: Synthetic oligonucleotide
uacgcuucagccacuaagu

SEQ ID NO: 3042531 - RNA, 19 nt, Artificial Sequence
  Description of Artificial Sequence: Synthetic oligonucleotide
gaguuuucaguugaucugc

SEQ ID NO: 3042532 - RNA, 19 nt, Artificial Sequence
  Description of Artificial Sequence: Synthetic oligonucleotide
cuaaguggggaugugacac

SEQ ID NO: 3042533 - RNA, 19 nt, Artificial Sequence
  Description of Artificial Sequence: Synthetic oligonucleotide
uccgaagcaugauaguuga

SEQ ID NO: 3042534 - RNA, 19 nt, Artificial Sequence
  Description of Artificial Sequence: Synthetic oligonucleotide
cauuuugucaagguuuggc

SEQ ID NO: 3042535 - RNA, 19 nt, Artificial Sequence
  Description of Artificial Sequence: Synthetic oligonucleotide
guggaggucagccaggaug

SEQ ID NO: 3042536 - RNA, 19 nt, Artificial Sequence
  Description of Artificial Sequence: Synthetic oligonucleotide
ugccagcaaaucaucagcc

SEQ ID NO: 3042537 - RNA, 19 nt, Artificial Sequence
  Description of Artificial Sequence: Synthetic oligonucleotide
uugaugaaaucuacugccu

SEQ ID NO: 3042538 - RNA, 19 nt, Artificial Sequence
  Description of Artificial Sequence: Synthetic oligonucleotide
uggaggucagccaggauga

SEQ ID NO: 3042539 - RNA, 19 nt, Artificial Sequence
  Description of Artificial Sequence: Synthetic oligonucleotide
auacuugucagcagcugcc

SEQ ID NO: 3042540 - RNA, 19 nt, Artificial Sequence
  Description of Artificial Sequence: Synthetic oligonucleotide
gaugagaauuucugcagca

SEQ ID NO: 3042541 - RNA, 19 nt, Artificial Sequence
  Description of Artificial Sequence: Synthetic oligonucleotide
uucagcuccacaucguuaa

SEQ ID NO: 3042542 - RNA, 19 nt, Artificial Sequence
  Description of Artificial Sequence: Synthetic oligonucleotide
gaagccagagaacgauacg

SEQ ID NO: 3042543 - RNA, 19 nt, Artificial Sequence
  Description of Artificial Sequence: Synthetic oligonucleotide
ucauuuccuuaaaacuuca

SEQ ID NO: 3042544 - RNA, 19 nt, Artificial Sequence
  Description of Artificial Sequence: Synthetic oligonucleotide
gcuucagccacuaaguggg

SEQ ID NO: 3042545 - RNA, 19 nt, Artificial Sequence
  Description of Artificial Sequence: Synthetic oligonucleotide
accauugacuuccacccag

SEQ ID NO: 3042546 - RNA, 19 nt, Artificial Sequence
  Description of Artificial Sequence: Synthetic oligonucleotide
agggcauccucacacauga

SEQ ID NO: 3042547 - RNA, 19 nt, Artificial Sequence
  Description of Artificial Sequence: Synthetic oligonucleotide
agcuccacaucguuaaucu

SEQ ID NO: 3042548 - RNA, 19 nt, Artificial Sequence
  Description of Artificial Sequence: Synthetic oligonucleotide
gucuccaagacauccgaag

SEQ ID NO: 3042549 - RNA, 19 nt, Artificial Sequence
  Description of Artificial Sequence: Synthetic oligonucleotide
gagaacgauacgcuucagc

SEQ ID NO: 3042550 - RNA, 19 nt, Artificial Sequence
  Description of Artificial Sequence: Synthetic oligonucleotide
uuaaaacuucagcuccaca

SEQ ID NO: 3042551 - RNA, 19 nt, Artificial Sequence
  Description of Artificial Sequence: Synthetic oligonucleotide
accuucaagcgcuccaggg

SEQ ID NO: 3042552 - RNA, 19 nt, Artificial Sequence
  Description of Artificial Sequence: Synthetic oligonucleotide
ugugcugaagccagagaac

SEQ ID NO: 3042553 - RNA, 19 nt, Artificial Sequence
  Description of Artificial Sequence: Synthetic oligonucleotide
uccacggagagguuacugc

SEQ ID NO: 3042554 - RNA, 19 nt, Artificial Sequence
  Description of Artificial Sequence: Synthetic oligonucleotide
ugagaauuucugcagcauu

SEQ ID NO: 3042555 - RNA, 19 nt, Artificial Sequence
  Description of Artificial Sequence: Synthetic oligonucleotide
gugcugaagccagagaacg

SEQ ID NO: 3042556 - RNA, 19 nt, Artificial Sequence
  Description of Artificial Sequence: Synthetic oligonucleotide
caugauaguugaugaaauc

SEQ ID NO: 3042557 - RNA, 19 nt, Artificial Sequence
  Description of Artificial Sequence: Synthetic oligonucleotide
gagaauuucugcagcauuc

SEQ ID NO: 3042558 - RNA, 19 nt, Artificial Sequence
  Description of Artificial Sequence: Synthetic oligonucleotide
cugccagcaaaucaucagc

SEQ ID NO: 3042559 - RNA, 19 nt, Artificial Sequence
  Description of Artificial Sequence: Synthetic oligonucleotide
cuccacaucguuaaucuca

SEQ ID NO: 3042560 - RNA, 19 nt, Artificial Sequence
  Description of Artificial Sequence: Synthetic oligonucleotide
gagguuacugcagagggca

SEQ ID NO: 3042561 - RNA, 19 nt, Artificial Sequence
  Description of Artificial Sequence: Synthetic oligonucleotide
ucuacugccugaguuuuca

SEQ ID NO: 3042562 - RNA, 19 nt, Artificial Sequence
  Description of Artificial Sequence: Synthetic oligonucleotide
cacuaaguggggaugugac

SEQ ID NO: 3042563 - RNA, 19 nt, Artificial Sequence
  Description of Artificial Sequence: Synthetic oligonucleotide
caggaugagaauuucugca

SEQ ID NO: 3042564 - RNA, 19 nt, Artificial Sequence
  Description of Artificial Sequence: Synthetic oligonucleotide
ugccugaguuuucaguuga

SEQ ID NO: 3042565 - RNA, 19 nt, Artificial Sequence
  Description of Artificial Sequence: Synthetic oligonucleotide
agggcacugugcugaagcc

SEQ ID NO: 3042566 - RNA, 19 nt, Artificial Sequence
  Description of Artificial Sequence: Synthetic oligonucleotide
aguugaucugcgcugugga

SEQ ID NO: 3042567 - RNA, 19 nt, Artificial Sequence
  Description of Artificial Sequence: Synthetic oligonucleotide
augaaaucuacugccugag

SEQ ID NO: 3042568 - RNA, 19 nt, Artificial Sequence
  Description of Artificial Sequence: Synthetic oligonucleotide
agcaugauaguugaugaaa

SEQ ID NO: 3042569 - RNA, 19 nt, Artificial Sequence
  Description of Artificial Sequence: Synthetic oligonucleotide
ugaagcacaucauuuccuu

SEQ ID NO: 3042570 - RNA, 19 nt, Artificial Sequence
  Description of Artificial Sequence: Synthetic oligonucleotide
ccaccauugacuuccaccc

SEQ ID NO: 3042571 - RNA, 19 nt, Artificial Sequence
  Description of Artificial Sequence: Synthetic oligonucleotide
augugacaccaccauugac

SEQ ID NO: 3042572 - RNA, 19 nt, Artificial Sequence
  Description of Artificial Sequence: Synthetic oligonucleotide
ucagccaggaugagaauuu

SEQ ID NO: 3042573 - RNA, 19 nt, Artificial Sequence
  Description of Artificial Sequence: Synthetic oligonucleotide
uccacaucguuaaucucaa

SEQ ID NO: 3042574 - RNA, 19 nt, Artificial Sequence
  Description of Artificial Sequence: Synthetic oligonucleotide
ucccguguaaaugaagcac

SEQ ID NO: 3042575 - RNA, 19 nt, Artificial Sequence
  Description of Artificial Sequence: Synthetic oligonucleotide
aagcaugauaguugaugaa

SEQ ID NO: 3042576 - RNA, 19 nt, Artificial Sequence
  Description of Artificial Sequence: Synthetic oligonucleotide
ugaucugcgcuguggaggu

SEQ ID NO: 3042577 - RNA, 19 nt, Artificial Sequence
  Description of Artificial Sequence: Synthetic oligonucleotide
acccagaggucuccaagac

SEQ ID NO: 3042578 - RNA, 19 nt, Artificial Sequence
  Description of Artificial Sequence: Synthetic oligonucleotide
ugcgcuguggaggucagcc

SEQ ID NO: 3042579 - RNA, 19 nt, Artificial Sequence
  Description of Artificial Sequence: Synthetic oligonucleotide
gaaaucuacugccugaguu

SEQ ID NO: 3042580 - RNA, 19 nt, Artificial Sequence
  Description of Artificial Sequence: Synthetic oligonucleotide
cauuuccuuaaaacuucag

SEQ ID NO: 3042581 - RNA, 19 nt, Artificial Sequence
  Description of Artificial Sequence: Synthetic oligonucleotide
gaacgauacgcuucagcca

SEQ ID NO: 3042582 - RNA, 19 nt, Artificial Sequence
  Description of Artificial Sequence: Synthetic oligonucleotide
guuacugcagagggcaucc

SEQ ID NO: 3042583 - RNA, 19 nt, Artificial Sequence
  Description of Artificial Sequence: Synthetic oligonucleotide
caagacauccgaagcauga

SEQ ID NO: 3042584 - RNA, 19 nt, Artificial Sequence
  Description of Artificial Sequence: Synthetic oligonucleotide
uucccguguaaaugaagca

SEQ ID NO: 3042585 - RNA, 19 nt, Artificial Sequence
  Description of Artificial Sequence: Synthetic oligonucleotide
ugaaaucuacugccugagu

SEQ ID NO: 3042586 - RNA, 19 nt, Artificial Sequence
  Description of Artificial Sequence: Synthetic oligonucleotide
acuaaguggggaugugaca

SEQ ID NO: 3042587 - RNA, 19 nt, Artificial Sequence
  Description of Artificial Sequence: Synthetic oligonucleotide
ggaugugacaccaccauug

SEQ ID NO: 3042588 - RNA, 19 nt, Artificial Sequence
  Description of Artificial Sequence: Synthetic oligonucleotide
uucuccacggagagguuac

SEQ ID NO: 3042589 - RNA, 19 nt, Artificial Sequence
  Description of Artificial Sequence: Synthetic oligonucleotide
auaguugaugaaaucuacu

SEQ ID NO: 3042590 - RNA, 19 nt, Artificial Sequence
  Description of Artificial Sequence: Synthetic oligonucleotide
uaaguggggaugugacacc

SEQ ID NO: 3042591 - RNA, 19 nt, Artificial Sequence
  Description of Artificial Sequence: Synthetic oligonucleotide
cugaguuuucaguugaucu

SEQ ID NO: 3042592 - RNA, 19 nt, Artificial Sequence
  Description of Artificial Sequence: Synthetic oligonucleotide
ucagccacuaaguggggau

SEQ ID NO: 3042593 - RNA, 19 nt, Artificial Sequence
  Description of Artificial Sequence: Synthetic oligonucleotide
ggcauccucacacaugacc

SEQ ID NO: 3042594 - RNA, 19 nt, Artificial Sequence
  Description of Artificial Sequence: Synthetic oligonucleotide
gaugugacaccaccauuga

SEQ ID NO: 3042595 - RNA, 19 nt, Artificial Sequence
  Description of Artificial Sequence: Synthetic oligonucleotide
caagguuuggcgccuuccc

SEQ ID NO: 3042596 - RNA, 19 nt, Artificial Sequence
  Description of Artificial Sequence: Synthetic oligonucleotide
ucagcagcugccagcaaau

SEQ ID NO: 3042597 - RNA, 19 nt, Artificial Sequence
  Description of Artificial Sequence: Synthetic oligonucleotide
aaucuacugccugaguuuu

SEQ ID NO: 3042598 - RNA, 19 nt, Artificial Sequence
  Description of Artificial Sequence: Synthetic oligonucleotide
gaauuucugcagcauucuc

SEQ ID NO: 3042599 - RNA, 19 nt, Artificial Sequence
  Description of Artificial Sequence: Synthetic oligonucleotide
uggggaugugacaccacca

SEQ ID NO: 3042600 - RNA, 19 nt, Artificial Sequence
  Description of Artificial Sequence: Synthetic oligonucleotide
ggaugagaauuucugcagc

SEQ ID NO: 3042601 - RNA, 19 nt, Artificial Sequence
  Description of Artificial Sequence: Synthetic oligonucleotide
guuuucaguugaucugcgc

SEQ ID NO: 3042602 - RNA, 19 nt, Artificial Sequence
  Description of Artificial Sequence: Synthetic oligonucleotide
agaauuucugcagcauucu

SEQ ID NO: 3042603 - RNA, 19 nt, Artificial Sequence
  Description of Artificial Sequence: Synthetic oligonucleotide
cuuaaaacuucagcuccac

SEQ ID NO: 3042604 - RNA, 19 nt, Artificial Sequence
  Description of Artificial Sequence: Synthetic oligonucleotide
guugaucugcgcuguggag

SEQ ID NO: 3042605 - RNA, 19 nt, Artificial Sequence
  Description of Artificial Sequence: Synthetic oligonucleotide
cugugcugaagccagagaa

SEQ ID NO: 3042606 - RNA, 19 nt, Artificial Sequence
  Description of Artificial Sequence: Synthetic oligonucleotide
gaggucuccaagacauccg

SEQ ID NO: 3042607 - RNA, 19 nt, Artificial Sequence
  Description of Artificial Sequence: Synthetic oligonucleotide
ugaccuucaagcgcuccag

SEQ ID NO: 3042608 - RNA, 19 nt, Artificial Sequence
  Description of Artificial Sequence: Synthetic oligonucleotide
uugucagcagcugccagca

SEQ ID NO: 3042609 - RNA, 19 nt, Artificial Sequence
  Description of Artificial Sequence: Synthetic oligonucleotide
guggggaugugacaccacc

SEQ ID NO: 3042610 - RNA, 19 nt, Artificial Sequence
  Description of Artificial Sequence: Synthetic oligonucleotide
uccaagacauccgaagcau

SEQ ID NO: 3042611 - RNA, 19 nt, Artificial Sequence
  Description of Artificial Sequence: Synthetic oligonucleotide
ucaagguuuggcgccuucc

SEQ ID NO: 3042612 - RNA, 19 nt, Artificial Sequence
  Description of Artificial Sequence: Synthetic oligonucleotide
aaguggggaugugacacca

SEQ ID NO: 3042613 - RNA, 19 nt, Artificial Sequence
  Description of Artificial Sequence: Synthetic oligonucleotide
caucauuuccuuaaaacuu

SEQ ID NO: 3042614 - RNA, 19 nt, Artificial Sequence
  Description of Artificial Sequence: Synthetic oligonucleotide
augaccuucaagcgcucca

SEQ ID NO: 3042615 - RNA, 19 nt, Artificial Sequence
  Description of Artificial Sequence: Synthetic oligonucleotide
cuucaagcgcuccagggca

SEQ ID NO: 3042616 - RNA, 19 nt, Artificial Sequence
  Description of Artificial Sequence: Synthetic oligonucleotide
aguuuucaguugaucugcg

SEQ ID NO: 3042617 - RNA, 19 nt, Artificial Sequence
  Description of Artificial Sequence: Synthetic oligonucleotide
guaaaugaagcacaucauu

SEQ ID NO: 3042618 - RNA, 19 nt, Artificial Sequence
  Description of Artificial Sequence: Synthetic oligonucleotide
uucaguugaucugcgcugu

SEQ ID NO: 3042619 - RNA, 19 nt, Artificial Sequence
  Description of Artificial Sequence: Synthetic oligonucleotide
gaccuucaagcgcuccagg

SEQ ID NO: 3042620 - RNA, 19 nt, Artificial Sequence
  Description of Artificial Sequence: Synthetic oligonucleotide
ugcugaagccagagaacga

SEQ ID NO: 3042621 - RNA, 19 nt, Artificial Sequence
  Description of Artificial Sequence: Synthetic oligonucleotide
auccgaagcaugauaguug

SEQ ID NO: 3042622 - RNA, 19 nt, Artificial Sequence
  Description of Artificial Sequence: Synthetic oligonucleotide
agguuuggcgccuucccgu

SEQ ID NO: 3042623 - RNA, 19 nt, Artificial Sequence
  Description of Artificial Sequence: Synthetic oligonucleotide
aggucuccaagacauccga

SEQ ID NO: 3042624 - RNA, 19 nt, Artificial Sequence
  Description of Artificial Sequence: Synthetic oligonucleotide
cagcauucuccacggagag

SEQ ID NO: 3042625 - RNA, 19 nt, Artificial Sequence
  Description of Artificial Sequence: Synthetic oligonucleotide
acggagagguuacugcaga

SEQ ID NO: 3042626 - RNA, 19 nt, Artificial Sequence
  Description of Artificial Sequence: Synthetic oligonucleotide
cacggagagguuacugcag

SEQ ID NO: 3042627 - RNA, 19 nt, Artificial Sequence
  Description of Artificial Sequence: Synthetic oligonucleotide
agggcauacuugucagcag

SEQ ID NO: 3042628 - RNA, 19 nt, Artificial Sequence
  Description of Artificial Sequence: Synthetic oligonucleotide
ccaggaugagaauuucugc

SEQ ID NO: 3042629 - RNA, 19 nt, Artificial Sequence
  Description of Artificial Sequence: Synthetic oligonucleotide
ggagagguuacugcagagg

SEQ ID NO: 3042630 - RNA, 19 nt, Artificial Sequence
  Description of Artificial Sequence: Synthetic oligonucleotide
aagacauccgaagcaugau

SEQ ID NO: 3042631 - RNA, 19 nt, Artificial Sequence
  Description of Artificial Sequence: Synthetic oligonucleotide
uacugcagagggcauccuc

SEQ ID NO: 3042632 - RNA, 19 nt, Artificial Sequence
  Description of Artificial Sequence: Synthetic oligonucleotide
gcugccagcaaaucaucag

SEQ ID NO: 3042633 - RNA, 19 nt, Artificial Sequence
  Description of Artificial Sequence: Synthetic oligonucleotide
aggucagccaggaugagaa

SEQ ID NO: 3042634 - RNA, 19 nt, Artificial Sequence
  Description of Artificial Sequence: Synthetic oligonucleotide
gcagagggcauccucacac

SEQ ID NO: 3042635 - RNA, 19 nt, Artificial Sequence
  Description of Artificial Sequence: Synthetic oligonucleotide
gggcauacuugucagcagc

SEQ ID NO: 3042636 - RNA, 19 nt, Artificial Sequence
  Description of Artificial Sequence: Synthetic oligonucleotide
acauccgaagcaugauagu

SEQ ID NO: 3042637 - RNA, 19 nt, Artificial Sequence
  Description of Artificial Sequence: Synthetic oligonucleotide
agacauccgaagcaugaua

SEQ ID NO: 3042638 - RNA, 19 nt, Artificial Sequence
  Description of Artificial Sequence: Synthetic oligonucleotide
caguugaucugcgcugugg

SEQ ID NO: 3042639 - RNA, 19 nt, Artificial Sequence
  Description of Artificial Sequence: Synthetic oligonucleotide
augaagcacaucauuuccu

SEQ ID NO: 3042640 - RNA, 19 nt, Artificial Sequence
  Description of Artificial Sequence: Synthetic oligonucleotide
cagagaacgauacgcuuca

SEQ ID NO: 3042641 - RNA, 19 nt, Artificial Sequence
  Description of Artificial Sequence: Synthetic oligonucleotide
acugcagagggcauccuca

SEQ ID NO: 3042642 - RNA, 19 nt, Artificial Sequence
  Description of Artificial Sequence: Synthetic oligonucleotide
cuccaagacauccgaagca

SEQ ID NO: 3042643 - RNA, 19 nt, Artificial Sequence
  Description of Artificial Sequence: Synthetic oligonucleotide
acgcuucagccacuaagug

SEQ ID NO: 3042644 - RNA, 19 nt, Artificial Sequence
  Description of Artificial Sequence: Synthetic oligonucleotide
cacaugaccuucaagcgcu

SEQ ID NO: 3042645 - RNA, 19 nt, Artificial Sequence
  Description of Artificial Sequence: Synthetic oligonucleotide
ucaguugaucugcgcugug

SEQ ID NO: 3042646 - RNA, 19 nt, Artificial Sequence
  Description of Artificial Sequence: Synthetic oligonucleotide
agcacaucauuuccuuaaa

SEQ ID NO: 3042647 - RNA, 19 nt, Artificial Sequence
  Description of Artificial Sequence: Synthetic oligonucleotide
acugugcugaagccagaga

SEQ ID NO: 3042648 - RNA, 19 nt, Artificial Sequence
  Description of Artificial Sequence: Synthetic oligonucleotide
ugcagagggcauccucaca

SEQ ID NO: 3042649 - RNA, 19 nt, Artificial Sequence
  Description of Artificial Sequence: Synthetic oligonucleotide
uuuggcgccuucccgugua

SEQ ID NO: 3042650 - RNA, 19 nt, Artificial Sequence
  Description of Artificial Sequence: Synthetic oligonucleotide
agagggcauccucacacau

SEQ ID NO: 3042651 - RNA, 19 nt, Artificial Sequence
  Description of Artificial Sequence: Synthetic oligonucleotide
aacuucagcuccacaucgu

SEQ ID NO: 3042652 - RNA, 19 nt, Artificial Sequence
  Description of Artificial Sequence: Synthetic oligonucleotide
agcaaaucaucagccauuu

SEQ ID NO: 3042653 - RNA, 19 nt, Artificial Sequence
  Description of Artificial Sequence: Synthetic oligonucleotide
ggcacugugcugaagccag

SEQ ID NO: 3042654 - RNA, 19 nt, Artificial Sequence
  Description of Artificial Sequence: Synthetic oligonucleotide
ccagagaacgauacgcuuc

SEQ ID NO: 3042655 - RNA, 19 nt, Artificial Sequence
  Description of Artificial Sequence: Synthetic oligonucleotide
uucagccacuaagugggga

SEQ ID NO: 3042656 - RNA, 19 nt, Artificial Sequence
  Description of Artificial Sequence: Synthetic oligonucleotide
uacuugucagcagcugcca

SEQ ID NO: 3042657 - RNA, 19 nt, Artificial Sequence
  Description of Artificial Sequence: Synthetic oligonucleotide
gaagcacaucauuuccuua

SEQ ID NO: 3042658 - RNA, 19 nt, Artificial Sequence
  Description of Artificial Sequence: Synthetic oligonucleotide
ucugcgcuguggaggucag

SEQ ID NO: 3042659 - RNA, 19 nt, Artificial Sequence
  Description of Artificial Sequence: Synthetic oligonucleotide
gucagcagcugccagcaaa

SEQ ID NO: 3042660 - RNA, 19 nt, Artificial Sequence
  Description of Artificial Sequence: Synthetic oligonucleotide
aaagggcacugugcugaag

SEQ ID NO: 3042661 - RNA, 19 nt, Artificial Sequence
  Description of Artificial Sequence: Synthetic oligonucleotide
cuucagccacuaagugggg

SEQ ID NO: 3042662 - RNA, 19 nt, Artificial Sequence
  Description of Artificial Sequence: Synthetic oligonucleotide
agcauucuccacggagagg

SEQ ID NO: 3042663 - RNA, 19 nt, Artificial Sequence
  Description of Artificial Sequence: Synthetic oligonucleotide
ccuucaagcgcuccagggc

SEQ ID NO: 3042664 - RNA, 19 nt, Artificial Sequence
  Description of Artificial Sequence: Synthetic oligonucleotide
cagggcauacuugucagca

SEQ ID NO: 3042665 - RNA, 19 nt, Artificial Sequence
  Description of Artificial Sequence: Synthetic oligonucleotide
acuuccacccagaggucuc

SEQ ID NO: 3042666 - RNA, 19 nt, Artificial Sequence
  Description of Artificial Sequence: Synthetic oligonucleotide
cacugugcugaagccagag

SEQ ID NO: 3042667 - RNA, 19 nt, Artificial Sequence
  Description of Artificial Sequence: Synthetic oligonucleotide
cuacugccugaguuuucag

SEQ ID NO: 3042668 - RNA, 19 nt, Artificial Sequence
  Description of Artificial Sequence: Synthetic oligonucleotide
gccauuuugucaagguuug

SEQ ID NO: 3042669 - RNA, 19 nt, Artificial Sequence
  Description of Artificial Sequence: Synthetic oligonucleotide
cgaagcaugauaguugaug

SEQ ID NO: 3042670 - RNA, 19 nt, Artificial Sequence
  Description of Artificial Sequence: Synthetic oligonucleotide
agccagagaacgauacgcu

SEQ ID NO: 3042671 - RNA, 19 nt, Artificial Sequence
  Description of Artificial Sequence: Synthetic oligonucleotide
aucugcgcuguggagguca

SEQ ID NO: 3042672 - RNA, 19 nt, Artificial Sequence
  Description of Artificial Sequence: Synthetic oligonucleotide
uugucaagguuuggcgccu

SEQ ID NO: 3042673 - RNA, 19 nt, Artificial Sequence
  Description of Artificial Sequence: Synthetic oligonucleotide
cugcagagggcauccucac

SEQ ID NO: 3042674 - RNA, 19 nt, Artificial Sequence
  Description of Artificial Sequence: Synthetic oligonucleotide
uucaagcgcuccagggcau

SEQ ID NO: 3042675 - RNA, 19 nt, Artificial Sequence
  Description of Artificial Sequence: Synthetic oligonucleotide
caugaccuucaagcgcucc

SEQ ID NO: 3042676 - RNA, 19 nt, Artificial Sequence
  Description of Artificial Sequence: Synthetic oligonucleotide
agcgcuccagggcauacuu

SEQ ID NO: 3042677 - RNA, 19 nt, Artificial Sequence
  Description of Artificial Sequence: Synthetic oligonucleotide
cacccagaggucuccaaga

SEQ ID NO: 3042678 - RNA, 19 nt, Artificial Sequence
  Description of Artificial Sequence: Synthetic oligonucleotide
caucagccauuuugucaag

SEQ ID NO: 3042679 - RNA, 19 nt, Artificial Sequence
  Description of Artificial Sequence: Synthetic oligonucleotide
ugacuuccacccagagguc

SEQ ID NO: 3042680 - RNA, 19 nt, Artificial Sequence
  Description of Artificial Sequence: Synthetic oligonucleotide
ucagcuccacaucguuaau

SEQ ID NO: 3042681 - RNA, 19 nt, Artificial Sequence
  Description of Artificial Sequence: Synthetic oligonucleotide
agccacuaaguggggaugu

SEQ ID NO: 3042682 - RNA, 19 nt, Artificial Sequence
  Description of Artificial Sequence: Synthetic oligonucleotide
auucuccacggagagguua

SEQ ID NO: 3042683 - RNA, 19 nt, Artificial Sequence
  Description of Artificial Sequence: Synthetic oligonucleotide
aguggggaugugacaccac

SEQ ID NO: 3042684 - RNA, 19 nt, Artificial Sequence
  Description of Artificial Sequence: Synthetic oligonucleotide
cuuccacccagaggucucc

SEQ ID NO: 3042685 - RNA, 19 nt, Artificial Sequence
  Description of Artificial Sequence: Synthetic oligonucleotide
gaggucagccaggaugaga

SEQ ID NO: 3042686 - RNA, 19 nt, Artificial Sequence
  Description of Artificial Sequence: Synthetic oligonucleotide
cagcuccacaucguuaauc

SEQ ID NO: 3042687 - RNA, 19 nt, Artificial Sequence
  Description of Artificial Sequence: Synthetic oligonucleotide
gcauucuccacggagaggu

SEQ ID NO: 3042688 - RNA, 19 nt, Artificial Sequence
  Description of Artificial Sequence: Synthetic oligonucleotide
cccguguaaaugaagcaca

SEQ ID NO: 3042689 - RNA, 19 nt, Artificial Sequence
  Description of Artificial Sequence: Synthetic oligonucleotide
gugacaccaccauugacuu

SEQ ID NO: 3042690 - RNA, 19 nt, Artificial Sequence
  Description of Artificial Sequence: Synthetic oligonucleotide
ugacaccaccauugacuuc

SEQ ID NO: 3042691 - RNA, 19 nt, Artificial Sequence
  Description of Artificial Sequence: Synthetic oligonucleotide
aucuacugccugaguuuuc

SEQ ID NO: 3042692 - RNA, 19 nt, Artificial Sequence
  Description of Artificial Sequence: Synthetic oligonucleotide
cuccacggagagguuacug

SEQ ID NO: 3042693 - RNA, 19 nt, Artificial Sequence
  Description of Artificial Sequence: Synthetic oligonucleotide
gaaagggcacugugcugaa

SEQ ID NO: 3042694 - RNA, 19 nt, Artificial Sequence
  Description of Artificial Sequence: Synthetic oligonucleotide
agagaacgauacgcuucag

SEQ ID NO: 3042695 - RNA, 19 nt, Artificial Sequence
  Description of Artificial Sequence: Synthetic oligonucleotide
uguggaggucagccaggau

SEQ ID NO: 3042696 - RNA, 19 nt, Artificial Sequence
  Description of Artificial Sequence: Synthetic oligonucleotide
gguuuggcgccuucccgug

SEQ ID NO: 3042697 - RNA, 19 nt, Artificial Sequence
  Description of Artificial Sequence: Synthetic oligonucleotide
agccaggaugagaauuucu

SEQ ID NO: 3042698 - RNA, 19 nt, Artificial Sequence
  Description of Artificial Sequence: Synthetic oligonucleotide
uccacccagaggucuccaa

SEQ ID NO: 3042699 - RNA, 19 nt, Artificial Sequence
  Description of Artificial Sequence: Synthetic oligonucleotide
ccuucccguguaaaugaag

SEQ ID NO: 3042700 - RNA, 19 nt, Artificial Sequence
  Description of Artificial Sequence: Synthetic oligonucleotide
gauacgcuucagccacuaa

SEQ ID NO: 3042701 - RNA, 19 nt, Artificial Sequence
  Description of Artificial Sequence: Synthetic oligonucleotide
gcagcauucuccacggaga

SEQ ID NO: 3042702 - RNA, 19 nt, Artificial Sequence
  Description of Artificial Sequence: Synthetic oligonucleotide
aagcgcuccagggcauacu

SEQ ID NO: 3042703 - RNA, 19 nt, Artificial Sequence
  Description of Artificial Sequence: Synthetic oligonucleotide
ccuuaaaacuucagcucca

SEQ ID NO: 3042704 - RNA, 19 nt, Artificial Sequence
  Description of Artificial Sequence: Synthetic oligonucleotide
ccaagacauccgaagcaug

SEQ ID NO: 3042705 - RNA, 19 nt, Artificial Sequence
  Description of Artificial Sequence: Synthetic oligonucleotide
cugaagccagagaacgaua

SEQ ID NO: 3042706 - RNA, 19 nt, Artificial Sequence
  Description of Artificial Sequence: Synthetic oligonucleotide
ccagaggucuccaagacau

SEQ ID NO: 3042707 - RNA, 19 nt, Artificial Sequence
  Description of Artificial Sequence: Synthetic oligonucleotide
cagccacuaaguggggaug

SEQ ID NO: 3042708 - RNA, 19 nt, Artificial Sequence
  Description of Artificial Sequence: Synthetic oligonucleotide
gccagcaaaucaucagcca

SEQ ID NO: 3042709 - RNA, 19 nt, Artificial Sequence
  Description of Artificial Sequence: Synthetic oligonucleotide
cagaggucuccaagacauc

SEQ ID NO: 3042710 - RNA, 19 nt, Artificial Sequence
  Description of Artificial Sequence: Synthetic oligonucleotide
gacuuccacccagaggucu

SEQ ID NO: 3042711 - RNA, 19 nt, Artificial Sequence
  Description of Artificial Sequence: Synthetic oligonucleotide
ccacccagaggucuccaag

SEQ ID NO: 3042712 - RNA, 19 nt, Artificial Sequence
  Description of Artificial Sequence: Synthetic oligonucleotide
acaugaccuucaagcgcuc

SEQ ID NO: 3042713 - RNA, 19 nt, Artificial Sequence
  Description of Artificial Sequence: Synthetic oligonucleotide
cagagggcauccucacaca

SEQ ID NO: 3042714 - RNA, 19 nt, Artificial Sequence
  Description of Artificial Sequence: Synthetic oligonucleotide
gguuacugcagagggcauc

SEQ ID NO: 3042715 - RNA, 19 nt, Artificial Sequence
  Description of Artificial Sequence: Synthetic oligonucleotide
gucaagguuuggcgccuuc

SEQ ID NO: 3042716 - RNA, 19 nt, Artificial Sequence
  Description of Artificial Sequence: Synthetic oligonucleotide
gcuguggaggucagccagg

SEQ ID NO: 3042717 - RNA, 19 nt, Artificial Sequence
  Description of Artificial Sequence: Synthetic oligonucleotide
gcacaucauuuccuuaaaa

SEQ ID NO: 3042718 - RNA, 19 nt, Artificial Sequence
  Description of Artificial Sequence: Synthetic oligonucleotide
uuacugcagagggcauccu

SEQ ID NO: 3042719 - RNA, 19 nt, Artificial Sequence
  Description of Artificial Sequence: Synthetic oligonucleotide
cagcaaaucaucagccauu

SEQ ID NO: 3042720 - RNA, 19 nt, Artificial Sequence
  Description of Artificial Sequence: Synthetic oligonucleotide
ucuccacggagagguuacu

SEQ ID NO: 3042721 - RNA, 19 nt, Artificial Sequence
  Description of Artificial Sequence: Synthetic oligonucleotide
uuggcgccuucccguguaa

SEQ ID NO: 3042722 - RNA, 19 nt, Artificial Sequence
  Description of Artificial Sequence: Synthetic oligonucleotide
cauccgaagcaugauaguu

SEQ ID NO: 3042723 - RNA, 19 nt, Artificial Sequence
  Description of Artificial Sequence: Synthetic oligonucleotide
caagcgcuccagggcauac

SEQ ID NO: 3042724 - RNA, 19 nt, Artificial Sequence
  Description of Artificial Sequence: Synthetic oligonucleotide
cagccaggaugagaauuuc

SEQ ID NO: 3042725 - RNA, 19 nt, Artificial Sequence
  Description of Artificial Sequence: Synthetic oligonucleotide
caccauugacuuccaccca

SEQ ID NO: 3042726 - RNA, 19 nt, Artificial Sequence
  Description of Artificial Sequence: Synthetic oligonucleotide
cgcuguggaggucagccag

SEQ ID NO: 3042727 - RNA, 19 nt, Artificial Sequence
  Description of Artificial Sequence: Synthetic oligonucleotide
gcgccuucccguguaaaug

SEQ ID NO: 3042728 - RNA, 19 nt, Artificial Sequence
  Description of Artificial Sequence: Synthetic oligonucleotide
ccauuuugucaagguuugg

SEQ ID NO: 3042729 - RNA, 19 nt, Artificial Sequence
  Description of Artificial Sequence: Synthetic oligonucleotide
ucaagcgcuccagggcaua

SEQ ID NO: 3042730 - RNA, 19 nt, Artificial Sequence
  Description of Artificial Sequence: Synthetic oligonucleotide
gucagccaggaugagaauu

SEQ ID NO: 3042731 - RNA, 19 nt, Artificial Sequence
  Description of Artificial Sequence: Synthetic oligonucleotide
ccagggcauacuugucagc

SEQ ID NO: 3042732 - RNA, 19 nt, Artificial Sequence
  Description of Artificial Sequence: Synthetic oligonucleotide
gcaugauaguugaugaaau

SEQ ID NO: 3042733 - RNA, 19 nt, Artificial Sequence
  Description of Artificial Sequence: Synthetic oligonucleotide
gcagcugccagcaaaucau

SEQ ID NO: 3042734 - RNA, 19 nt, Artificial Sequence
  Description of Artificial Sequence: Synthetic oligonucleotide
ggggaugugacaccaccau

SEQ ID NO: 3042735 - RNA, 19 nt, Artificial Sequence
  Description of Artificial Sequence: Synthetic oligonucleotide
cggagagguuacugcagag

SEQ ID NO: 3042736 - RNA, 19 nt, Artificial Sequence
  Description of Artificial Sequence: Synthetic oligonucleotide
ugucaagguuuggcgccuu

SEQ ID NO: 3042737 - RNA, 19 nt, Artificial Sequence
  Description of Artificial Sequence: Synthetic oligonucleotide
ccagcaaaucaucagccau

SEQ ID NO: 3042738 - RNA, 19 nt, Artificial Sequence
  Description of Artificial Sequence: Synthetic oligonucleotide
uggcgccuucccguguaaa

SEQ ID NO: 3042739 - RNA, 19 nt, Artificial Sequence
  Description of Artificial Sequence: Synthetic oligonucleotide
cagcagcugccagcaaauc

SEQ ID NO: 3042740 - RNA, 19 nt, Artificial Sequence
  Description of Artificial Sequence: Synthetic oligonucleotide
gggcacugugcugaagcca

SEQ ID NO: 3042741 - RNA, 19 nt, Artificial Sequence
  Description of Artificial Sequence: Synthetic oligonucleotide
gccacuaaguggggaugug

SEQ ID NO: 3042742 - RNA, 19 nt, Artificial Sequence
  Description of Artificial Sequence: Synthetic oligonucleotide
acgauacgcuucagccacu

SEQ ID NO: 3042743 - RNA, 19 nt, Artificial Sequence
  Description of Artificial Sequence: Synthetic oligonucleotide
cguguaaaugaagcacauc

SEQ ID NO: 3042744 - RNA, 19 nt, Artificial Sequence
  Description of Artificial Sequence: Synthetic oligonucleotide
ggcauacuugucagcagcu

SEQ ID NO: 3042745 - RNA, 19 nt, Artificial Sequence
  Description of Artificial Sequence: Synthetic oligonucleotide
agguuacugcagagggcau

SEQ ID NO: 3042746 - RNA, 19 nt, Artificial Sequence
  Description of Artificial Sequence: Synthetic oligonucleotide
cccagaggucuccaagaca

SEQ ID NO: 3042747 - RNA, 19 nt, Artificial Sequence
  Description of Artificial Sequence: Synthetic oligonucleotide
ccacuaaguggggauguga

SEQ ID NO: 3042748 - RNA, 19 nt, Artificial Sequence
  Description of Artificial Sequence: Synthetic oligonucleotide
cgccuucccguguaaauga

SEQ ID NO: 3042749 - RNA, 19 nt, Artificial Sequence
  Description of Artificial Sequence: Synthetic oligonucleotide
gaucugcgcuguggagguc

SEQ ID NO: 3042750 - RNA, 19 nt, Artificial Sequence
  Description of Artificial Sequence: Synthetic oligonucleotide
guuuggcgccuucccgugu

SEQ ID NO: 3042751 - RNA, 19 nt, Artificial Sequence
  Description of Artificial Sequence: Synthetic oligonucleotide
gccagagaacgauacgcuu

SEQ ID NO: 3042752 - RNA, 19 nt, Artificial Sequence
  Description of Artificial Sequence: Synthetic oligonucleotide
ggucuccaagacauccgaa

SEQ ID NO: 3042753 - RNA, 19 nt, Artificial Sequence
  Description of Artificial Sequence: Synthetic oligonucleotide
cugcgcuguggaggucagc

SEQ ID NO: 3042754 - RNA, 19 nt, Artificial Sequence
  Description of Artificial Sequence: Synthetic oligonucleotide
gggaugugacaccaccauu

SEQ ID NO: 3042755 - RNA, 19 nt, Artificial Sequence
  Description of Artificial Sequence: Synthetic oligonucleotide
ggcgccuucccguguaaau

SEQ ID NO: 3042756 - RNA, 19 nt, Artificial Sequence
  Description of Artificial Sequence: Synthetic oligonucleotide
gcgcuguggaggucagcca

SEQ ID NO: 3042757 - RNA, 19 nt, Artificial Sequence
  Description of Artificial Sequence: Synthetic oligonucleotide
gcgcuccagggcauacuug

SEQ ID NO: 3042758 - RNA, 19 nt, Artificial Sequence
  Description of Artificial Sequence: Synthetic oligonucleotide
ccguguaaaugaagcacau

SEQ ID NO: 3042759 - RNA, 19 nt, Artificial Sequence
  Description of Artificial Sequence: Synthetic oligonucleotide
cauucuccacggagagguu

SEQ ID NO: 3042760 - RNA, 19 nt, Artificial Sequence
  Description of Artificial Sequence: Synthetic oligonucleotide
gccuucccguguaaaugaa

SEQ ID NO: 3042761 - RNA, 19 nt, Artificial Sequence
  Description of Artificial Sequence: Synthetic oligonucleotide
gggcauccucacacaugac

SEQ ID NO: 3042762 - RNA, 19 nt, Artificial Sequence
  Description of Artificial Sequence: Synthetic oligonucleotide
ggucagccaggaugagaau

SEQ ID NO: 3042763 - RNA, 19 nt, Artificial Sequence
  Description of Artificial Sequence: Synthetic oligonucleotide
gcacugugcugaagccaga

SEQ ID NO: 3042764 - RNA, 19 nt, Artificial Sequence
  Description of Artificial Sequence: Synthetic oligonucleotide
gccugaguuuucaguugau

SEQ ID NO: 3042765 - RNA, 19 nt, Artificial Sequence
  Description of Artificial Sequence: Synthetic oligonucleotide
cgauacgcuucagccacua

SEQ ID NO: 3042766 - RNA, 19 nt, Artificial Sequence
  Description of Artificial Sequence: Synthetic oligonucleotide
ccgaagcaugauaguugau

SEQ ID NO: 3042767 - RNA, 19 nt, Artificial Sequence
  Description of Artificial Sequence: Synthetic oligonucleotide
uuuacccacacacaguuag

SEQ ID NO: 3042768 - RNA, 19 nt, Artificial Sequence
  Description of Artificial Sequence: Synthetic oligonucleotide
ucucaugagguucucaggg

SEQ ID NO: 3042769 - RNA, 19 nt, Artificial Sequence
  Description of Artificial Sequence: Synthetic oligonucleotide
guaauuuacccacacacag

SEQ ID NO: 3042770 - RNA, 19 nt, Artificial Sequence
  Description of Artificial Sequence: Synthetic oligonucleotide
uuggaaaccaccuuccucc

SEQ ID NO: 3042771 - RNA, 19 nt, Artificial Sequence
  Description of Artificial Sequence: Synthetic oligonucleotide
aauuuacccacacacaguu

SEQ ID NO: 3042772 - RNA, 19 nt, Artificial Sequence
  Description of Artificial Sequence: Synthetic oligonucleotide
agucacaugcuccucaagg

SEQ ID NO: 3042773 - RNA, 19 nt, Artificial Sequence
  Description of Artificial Sequence: Synthetic oligonucleotide
acacaguuaggacagccgc

SEQ ID NO: 3042774 - RNA, 19 nt, Artificial Sequence
  Description of Artificial Sequence: Synthetic oligonucleotide
ucugaggaaggccuugagg

SEQ ID NO: 3042775 - RNA, 19 nt, Artificial Sequence
  Description of Artificial Sequence: Synthetic oligonucleotide
cuagcaguggcuugcaccg

SEQ ID NO: 3042776 - RNA, 19 nt, Artificial Sequence
  Description of Artificial Sequence: Synthetic oligonucleotide
uccacuuugcauucugagg

SEQ ID NO: 3042777 - RNA, 19 nt, Artificial Sequence
  Description of Artificial Sequence: Synthetic oligonucleotide
uccauucugaggaaggccu

SEQ ID NO: 3042778 - RNA, 19 nt, Artificial Sequence
  Description of Artificial Sequence: Synthetic oligonucleotide
aggacagccgcucaggcag

SEQ ID NO: 3042779 - RNA, 19 nt, Artificial Sequence
  Description of Artificial Sequence: Synthetic oligonucleotide
uucugcguaauuuacccac

SEQ ID NO: 3042780 - RNA, 19 nt, Artificial Sequence
  Description of Artificial Sequence: Synthetic oligonucleotide
ucaaggauggccagggccu

SEQ ID NO: 3042781 - RNA, 19 nt, Artificial Sequence
  Description of Artificial Sequence: Synthetic oligonucleotide
uaauuuacccacacacagu

SEQ ID NO: 3042782 - RNA, 19 nt, Artificial Sequence
  Description of Artificial Sequence: Synthetic oligonucleotide
gaaaccaccuuccucccug

SEQ ID NO: 3042783 - RNA, 19 nt, Artificial Sequence
  Description of Artificial Sequence: Synthetic oligonucleotide
ugcauucugaggcggaucu

SEQ ID NO: 3042784 - RNA, 19 nt, Artificial Sequence
  Description of Artificial Sequence: Synthetic oligonucleotide
uauccucuguaccugcuug

SEQ ID NO: 3042785 - RNA, 19 nt, Artificial Sequence
  Description of Artificial Sequence: Synthetic oligonucleotide
aucggcagcuagcaguggc

SEQ ID NO: 3042786 - RNA, 19 nt, Artificial Sequence
  Description of Artificial Sequence: Synthetic oligonucleotide
aaggccuugagguucucgu

SEQ ID NO: 3042787 - RNA, 19 nt, Artificial Sequence
  Description of Artificial Sequence: Synthetic oligonucleotide
ugagguucucgucagucac

SEQ ID NO: 3042788 - RNA, 19 nt, Artificial Sequence
  Description of Artificial Sequence: Synthetic oligonucleotide
cucaaggauggccagggcc

SEQ ID NO: 3042789 - RNA, 19 nt, Artificial Sequence
  Description of Artificial Sequence: Synthetic oligonucleotide
ucagccuccacuuugcauu

SEQ ID NO: 3042790 - RNA, 19 nt, Artificial Sequence
  Description of Artificial Sequence: Synthetic oligonucleotide
agugccucagcagagcuuc

SEQ ID NO: 3042791 - RNA, 19 nt, Artificial Sequence
  Description of Artificial Sequence: Synthetic oligonucleotide
guuugugggaggcuggagc

SEQ ID NO: 3042792 - RNA, 19 nt, Artificial Sequence
  Description of Artificial Sequence: Synthetic oligonucleotide
uuugugggaggcuggagcu

SEQ ID NO: 3042793 - RNA, 19 nt, Artificial Sequence
  Description of Artificial Sequence: Synthetic oligonucleotide
uuacccacacacaguuagg

SEQ ID NO: 3042794 - RNA, 19 nt, Artificial Sequence
  Description of Artificial Sequence: Synthetic oligonucleotide
ucggguggcagagaguacg

SEQ ID NO: 3042795 - RNA, 19 nt, Artificial Sequence
  Description of Artificial Sequence: Synthetic oligonucleotide
auccccaacgaucggcagc

SEQ ID NO: 3042796 - RNA, 19 nt, Artificial Sequence
  Description of Artificial Sequence: Synthetic oligonucleotide
acacacaguuaggacagcc

SEQ ID NO: 3042797 - RNA, 19 nt, Artificial Sequence
  Description of Artificial Sequence: Synthetic oligonucleotide
ccacuuugcauucugaggc

SEQ ID NO: 3042798 - RNA, 19 nt, Artificial Sequence
  Description of Artificial Sequence: Synthetic oligonucleotide
cacacaguuaggacagccg

SEQ ID NO: 3042799 - RNA, 19 nt, Artificial Sequence
  Description of Artificial Sequence: Synthetic oligonucleotide
gcguaauuuacccacacac

SEQ ID NO: 3042800 - RNA, 19 nt, Artificial Sequence
  Description of Artificial Sequence: Synthetic oligonucleotide
cugugguccauccccaacg

SEQ ID NO: 3042801 - RNA, 19 nt, Artificial Sequence
  Description of Artificial Sequence: Synthetic oligonucleotide
ucuguaccugcuuggaaac

SEQ ID NO: 3042802 - RNA, 19 nt, Artificial Sequence
  Description of Artificial Sequence: Synthetic oligonucleotide
ugguccauccccaacgauc

SEQ ID NO: 3042803 - RNA, 19 nt, Artificial Sequence
  Description of Artificial Sequence: Synthetic oligonucleotide
uccucaaggauggccaggg

SEQ ID NO: 3042804 - RNA, 19 nt, Artificial Sequence
  Description of Artificial Sequence: Synthetic oligonucleotide
acgaucggcagcuagcagu

SEQ ID NO: 3042805 - RNA, 19 nt, Artificial Sequence
  Description of Artificial Sequence: Synthetic oligonucleotide
cucgucagucacaugcucc

SEQ ID NO: 3042806 - RNA, 19 nt, Artificial Sequence
  Description of Artificial Sequence: Synthetic oligonucleotide
uguaccugcuuggaaacca

SEQ ID NO: 3042807 - RNA, 19 nt, Artificial Sequence
  Description of Artificial Sequence: Synthetic oligonucleotide
cucaugagguucucagggg

SEQ ID NO: 3042808 - RNA, 19 nt, Artificial Sequence
  Description of Artificial Sequence: Synthetic oligonucleotide
acaguuaggacagccgcuc

SEQ ID NO: 3042809 - RNA, 19 nt, Artificial Sequence
  Description of Artificial Sequence: Synthetic oligonucleotide
accaccuuccucccugugg

SEQ ID NO: 3042810 - RNA, 19 nt, Artificial Sequence
  Description of Artificial Sequence: Synthetic oligonucleotide
gcuucugcguaauuuaccc

SEQ ID NO: 3042811 - RNA, 19 nt, Artificial Sequence
  Description of Artificial Sequence: Synthetic oligonucleotide
uccugguagugccucagca

SEQ ID NO: 3042812 - RNA, 19 nt, Artificial Sequence
  Description of Artificial Sequence: Synthetic oligonucleotide
aguuaggacagccgcucag

SEQ ID NO: 3042813 - RNA, 19 nt, Artificial Sequence
  Description of Artificial Sequence: Synthetic oligonucleotide
cauucugaggcggaucucc

SEQ ID NO: 3042814 - RNA, 19 nt, Artificial Sequence
  Description of Artificial Sequence: Synthetic oligonucleotide
acaugcuccucaaggaugg

SEQ ID NO: 3042815 - RNA, 19 nt, Artificial Sequence
  Description of Artificial Sequence: Synthetic oligonucleotide
ugcguaauuuacccacaca

SEQ ID NO: 3042816 - RNA, 19 nt, Artificial Sequence
  Description of Artificial Sequence: Synthetic oligonucleotide
cuccacuuugcauucugag

SEQ ID NO: 3042817 - RNA, 19 nt, Artificial Sequence
  Description of Artificial Sequence: Synthetic oligonucleotide
aguggcuugcaccggagca

SEQ ID NO: 3042818 - RNA, 19 nt, Artificial Sequence
  Description of Artificial Sequence: Synthetic oligonucleotide
agcuucugcguaauuuacc

SEQ ID NO: 3042819 - RNA, 19 nt, Artificial Sequence
  Description of Artificial Sequence: Synthetic oligonucleotide
ucugcguaauuuacccaca

SEQ ID NO: 3042820 - RNA, 19 nt, Artificial Sequence
  Description of Artificial Sequence: Synthetic oligonucleotide
agcauggugucugugaaga

SEQ ID NO: 3042821 - RNA, 19 nt, Artificial Sequence
  Description of Artificial Sequence: Synthetic oligonucleotide
ucacaugcuccucaaggau

SEQ ID NO: 3042822 - RNA, 19 nt, Artificial Sequence
  Description of Artificial Sequence: Synthetic oligonucleotide
agagcuucugcguaauuua

SEQ ID NO: 3042823 - RNA, 19 nt, Artificial Sequence
  Description of Artificial Sequence: Synthetic oligonucleotide
uugagguucucgucaguca

SEQ ID NO: 3042824 - RNA, 19 nt, Artificial Sequence
  Description of Artificial Sequence: Synthetic oligonucleotide
cuuuggcucccuguuaucc

SEQ ID NO: 3042825 - RNA, 19 nt, Artificial Sequence
  Description of Artificial Sequence: Synthetic oligonucleotide
ggucucaugagguucucag

SEQ ID NO: 3042826 - RNA, 19 nt, Artificial Sequence
  Description of Artificial Sequence: Synthetic oligonucleotide
cuuggaaaccaccuuccuc

SEQ ID NO: 3042827 - RNA, 19 nt, Artificial Sequence
  Description of Artificial Sequence: Synthetic oligonucleotide
cacuuugcauucugaggcg

SEQ ID NO: 3042828 - RNA, 19 nt, Artificial Sequence
  Description of Artificial Sequence: Synthetic oligonucleotide
gucucaugagguucucagg

SEQ ID NO: 3042829 - RNA, 19 nt, Artificial Sequence
  Description of Artificial Sequence: Synthetic oligonucleotide
ucagcagagcuucugcgua

SEQ ID NO: 3042830 - RNA, 19 nt, Artificial Sequence
  Description of Artificial Sequence: Synthetic oligonucleotide
cucccugugguccaucccc

SEQ ID NO: 3042831 - RNA, 19 nt, Artificial Sequence
  Description of Artificial Sequence: Synthetic oligonucleotide
auccucuguaccugcuugg

SEQ ID NO: 3042832 - RNA, 19 nt, Artificial Sequence
  Description of Artificial Sequence: Synthetic oligonucleotide
aacgaucggcagcuagcag

SEQ ID NO: 3042833 - RNA, 19 nt, Artificial Sequence
  Description of Artificial Sequence: Synthetic oligonucleotide
accuuccucccuguggucc

SEQ ID NO: 3042834 - RNA, 19 nt, Artificial Sequence
  Description of Artificial Sequence: Synthetic oligonucleotide
guuaggacagccgcucagg

SEQ ID NO: 3042835 - RNA, 19 nt, Artificial Sequence
  Description of Artificial Sequence: Synthetic oligonucleotide
gauggccagggccugcugc

SEQ ID NO: 3042836 - RNA, 19 nt, Artificial Sequence
  Description of Artificial Sequence: Synthetic oligonucleotide
cugaggaaggccuugaggu

SEQ ID NO: 3042837 - RNA, 19 nt, Artificial Sequence
  Description of Artificial Sequence: Synthetic oligonucleotide
uuuggcucccuguuauccu

SEQ ID NO: 3042838 - RNA, 19 nt, Artificial Sequence
  Description of Artificial Sequence: Synthetic oligonucleotide
uucugaggaaggccuugag

SEQ ID NO: 3042839 - RNA, 19 nt, Artificial Sequence
  Description of Artificial Sequence: Synthetic oligonucleotide
ugugguccauccccaacga

SEQ ID NO: 3042840 - RNA, 19 nt, Artificial Sequence
  Description of Artificial Sequence: Synthetic oligonucleotide
acuuugcauucugaggcgg

SEQ ID NO: 3042841 - RNA, 19 nt, Artificial Sequence
  Description of Artificial Sequence: Synthetic oligonucleotide
uucucgucagucacaugcu

SEQ ID NO: 3042842 - RNA, 19 nt, Artificial Sequence
  Description of Artificial Sequence: Synthetic oligonucleotide
gguccauccccaacgaucg

SEQ ID NO: 3042843 - RNA, 19 nt, Artificial Sequence
  Description of Artificial Sequence: Synthetic oligonucleotide
uugcaccggagcauggugu

SEQ ID NO: 3042844 - RNA, 19 nt, Artificial Sequence
  Description of Artificial Sequence: Synthetic oligonucleotide
agcaguuugugggaggcug

SEQ ID NO: 3042845 - RNA, 19 nt, Artificial Sequence
  Description of Artificial Sequence: Synthetic oligonucleotide
uacccacacacaguuagga

SEQ ID NO: 3042846 - RNA, 19 nt, Artificial Sequence
  Description of Artificial Sequence: Synthetic oligonucleotide
cugcuuggaaaccaccuuc

SEQ ID NO: 3042847 - RNA, 19 nt, Artificial Sequence
  Description of Artificial Sequence: Synthetic oligonucleotide
gucacaugcuccucaagga

SEQ ID NO: 3042848 - RNA, 19 nt, Artificial Sequence
  Description of Artificial Sequence: Synthetic oligonucleotide
gagcucggguggcagagag

SEQ ID NO: 3042849 - RNA, 19 nt, Artificial Sequence
  Description of Artificial Sequence: Synthetic oligonucleotide
gcuagcaguggcuugcacc

SEQ ID NO: 3042850 - RNA, 19 nt, Artificial Sequence
  Description of Artificial Sequence: Synthetic oligonucleotide
gaucuccauucugaggaag

SEQ ID NO: 3042851 - RNA, 19 nt, Artificial Sequence
  Description of Artificial Sequence: Synthetic oligonucleotide
auccugguagugccucagc

SEQ ID NO: 3042852 - RNA, 19 nt, Artificial Sequence
  Description of Artificial Sequence: Synthetic oligonucleotide
cuugagguucucgucaguc

SEQ ID NO: 3042853 - RNA, 19 nt, Artificial Sequence
  Description of Artificial Sequence: Synthetic oligonucleotide
uaccugcuuggaaaccacc

SEQ ID NO: 3042854 - RNA, 19 nt, Artificial Sequence
  Description of Artificial Sequence: Synthetic oligonucleotide
uccauccccaacgaucggc

SEQ ID NO: 3042855 - RNA, 19 nt, Artificial Sequence
  Description of Artificial Sequence: Synthetic oligonucleotide
ucccuguuauccucuguac

SEQ ID NO: 3042856 - RNA, 19 nt, Artificial Sequence
  Description of Artificial Sequence: Synthetic oligonucleotide
gaggaaggccuugagguuc

SEQ ID NO: 3042857 - RNA, 19 nt, Artificial Sequence
  Description of Artificial Sequence: Synthetic oligonucleotide
uggaaaccaccuuccuccc

SEQ ID NO: 3042858 - RNA, 19 nt, Artificial Sequence
  Description of Artificial Sequence: Synthetic oligonucleotide
cucaggcagcaguuugugg

SEQ ID NO: 3042859 - RNA, 19 nt, Artificial Sequence
  Description of Artificial Sequence: Synthetic oligonucleotide
ucucgucagucacaugcuc

SEQ ID NO: 3042860 - RNA, 19 nt, Artificial Sequence
  Description of Artificial Sequence: Synthetic oligonucleotide
ccacacacaguuaggacag

SEQ ID NO: 3042861 - RNA, 19 nt, Artificial Sequence
  Description of Artificial Sequence: Synthetic oligonucleotide
ucagucacaugcuccucaa

SEQ ID NO: 3042862 - RNA, 19 nt, Artificial Sequence
  Description of Artificial Sequence: Synthetic oligonucleotide
cugguagugccucagcaga

SEQ ID NO: 3042863 - RNA, 19 nt, Artificial Sequence
  Description of Artificial Sequence: Synthetic oligonucleotide
cuugcaccggagcauggug

SEQ ID NO: 3042864 - RNA, 19 nt, Artificial Sequence
  Description of Artificial Sequence: Synthetic oligonucleotide
aggccuugagguucucguc

SEQ ID NO: 3042865 - RNA, 19 nt, Artificial Sequence
  Description of Artificial Sequence: Synthetic oligonucleotide
gaaggccuugagguucucg

SEQ ID NO: 3042866 - RNA, 19 nt, Artificial Sequence
  Description of Artificial Sequence: Synthetic oligonucleotide
uaggacagccgcucaggca

SEQ ID NO: 3042867 - RNA, 19 nt, Artificial Sequence
  Description of Artificial Sequence: Synthetic oligonucleotide
cuccauucugaggaaggcc

SEQ ID NO: 3042868 - RNA, 19 nt, Artificial Sequence
  Description of Artificial Sequence: Synthetic oligonucleotide
uuauccucuguaccugcuu

SEQ ID NO: 3042869 - RNA, 19 nt, Artificial Sequence
  Description of Artificial Sequence: Synthetic oligonucleotide
uccccaacgaucggcagcu

SEQ ID NO: 3042870 - RNA, 19 nt, Artificial Sequence
  Description of Artificial Sequence: Synthetic oligonucleotide
aaaccaccuuccucccugu

SEQ ID NO: 3042871 - RNA, 19 nt, Artificial Sequence
  Description of Artificial Sequence: Synthetic oligonucleotide
ucggcagcuagcaguggcu

SEQ ID NO: 3042872 - RNA, 19 nt, Artificial Sequence
  Description of Artificial Sequence: Synthetic oligonucleotide
gaggcggaucuccauucug

SEQ ID NO: 3042873 - RNA, 19 nt, Artificial Sequence
  Description of Artificial Sequence: Synthetic oligonucleotide
cugcguaauuuacccacac

SEQ ID NO: 3042874 - RNA, 19 nt, Artificial Sequence
  Description of Artificial Sequence: Synthetic oligonucleotide
gucagucacaugcuccuca

SEQ ID NO: 3042875 - RNA, 19 nt, Artificial Sequence
  Description of Artificial Sequence: Synthetic oligonucleotide
ugaggcggaucuccauucu

SEQ ID NO: 3042876 - RNA, 19 nt, Artificial Sequence
  Description of Artificial Sequence: Synthetic oligonucleotide
uuggcucccuguuauccuc

SEQ ID NO: 3042877 - RNA, 19 nt, Artificial Sequence
  Description of Artificial Sequence: Synthetic oligonucleotide
uggagcucggguggcagag

SEQ ID NO: 3042878 - RNA, 19 nt, Artificial Sequence
  Description of Artificial Sequence: Synthetic oligonucleotide
accauccugguagugccuc

SEQ ID NO: 3042879 - RNA, 19 nt, Artificial Sequence
  Description of Artificial Sequence: Synthetic oligonucleotide
ugaggaaggccuugagguu

SEQ ID NO: 3042880 - RNA, 19 nt, Artificial Sequence
  Description of Artificial Sequence: Synthetic oligonucleotide
uuugcauucugaggcggau

SEQ ID NO: 3042881 - RNA, 19 nt, Artificial Sequence
  Description of Artificial Sequence: Synthetic oligonucleotide
agcuagcaguggcuugcac

SEQ ID NO: 3042882 - RNA, 19 nt, Artificial Sequence
  Description of Artificial Sequence: Synthetic oligonucleotide
cuguuauccucuguaccug

SEQ ID NO: 3042883 - RNA, 19 nt, Artificial Sequence
  Description of Artificial Sequence: Synthetic oligonucleotide
gagcuucugcguaauuuac

SEQ ID NO: 3042884 - RNA, 19 nt, Artificial Sequence
  Description of Artificial Sequence: Synthetic oligonucleotide
uccucccugugguccaucc

SEQ ID NO: 3042885 - RNA, 19 nt, Artificial Sequence
  Description of Artificial Sequence: Synthetic oligonucleotide
agcaguggcuugcaccgga

SEQ ID NO: 3042886 - RNA, 19 nt, Artificial Sequence
  Description of Artificial Sequence: Synthetic oligonucleotide
ggaggcuggagcucgggug

SEQ ID NO: 3042887 - RNA, 19 nt, Artificial Sequence
  Description of Artificial Sequence: Synthetic oligonucleotide
cagggaggccuuuggcucc

SEQ ID NO: 3042888 - RNA, 19 nt, Artificial Sequence
  Description of Artificial Sequence: Synthetic oligonucleotide
ccaacgaucggcagcuagc

SEQ ID NO: 3042889 - RNA, 19 nt, Artificial Sequence
  Description of Artificial Sequence: Synthetic oligonucleotide
ucccugugguccaucccca

SEQ ID NO: 3042890 - RNA, 19 nt, Artificial Sequence
  Description of Artificial Sequence: Synthetic oligonucleotide
ugcaccggagcaugguguc

SEQ ID NO: 3042891 - RNA, 19 nt, Artificial Sequence
  Description of Artificial Sequence: Synthetic oligonucleotide
cauucugaggaaggccuug

SEQ ID NO: 3042892 - RNA, 19 nt, Artificial Sequence
  Description of Artificial Sequence: Synthetic oligonucleotide
uccucuguaccugcuugga

SEQ ID NO: 3042893 - RNA, 19 nt, Artificial Sequence
  Description of Artificial Sequence: Synthetic oligonucleotide
aaccaccuuccucccugug

SEQ ID NO: 3042894 - RNA, 19 nt, Artificial Sequence
  Description of Artificial Sequence: Synthetic oligonucleotide
cuuugcauucugaggcgga

SEQ ID NO: 3042895 - RNA, 19 nt, Artificial Sequence
  Description of Artificial Sequence: Synthetic oligonucleotide
cuucugcguaauuuaccca

SEQ ID NO: 3042896 - RNA, 19 nt, Artificial Sequence
  Description of Artificial Sequence: Synthetic oligonucleotide
ccaccauccugguagugcc

SEQ ID NO: 3042897 - RNA, 19 nt, Artificial Sequence
  Description of Artificial Sequence: Synthetic oligonucleotide
accugcuuggaaaccaccu

SEQ ID NO: 3042898 - RNA, 19 nt, Artificial Sequence
  Description of Artificial Sequence: Synthetic oligonucleotide
cccacacacaguuaggaca

SEQ ID NO: 3042899 - RNA, 19 nt, Artificial Sequence
  Description of Artificial Sequence: Synthetic oligonucleotide
auucugaggaaggccuuga

SEQ ID NO: 3042900 - RNA, 19 nt, Artificial Sequence
  Description of Artificial Sequence: Synthetic oligonucleotide
aguuugugggaggcuggag

SEQ ID NO: 3042901 - RNA, 19 nt, Artificial Sequence
  Description of Artificial Sequence: Synthetic oligonucleotide
uggcuugcaccggagcaug

SEQ ID NO: 3042902 - RNA, 19 nt, Artificial Sequence
  Description of Artificial Sequence: Synthetic oligonucleotide
ggcggaucuccauucugag

SEQ ID NO: 3042903 - RNA, 19 nt, Artificial Sequence
  Description of Artificial Sequence: Synthetic oligonucleotide
ccugguagugccucagcag

SEQ ID NO: 3042904 - RNA, 19 nt, Artificial Sequence
  Description of Artificial Sequence: Synthetic oligonucleotide
ccucagcagagcuucugcg

SEQ ID NO: 3042905 - RNA, 19 nt, Artificial Sequence
  Description of Artificial Sequence: Synthetic oligonucleotide
cccuguuauccucuguacc

SEQ ID NO: 3042906 - RNA, 19 nt, Artificial Sequence
  Description of Artificial Sequence: Synthetic oligonucleotide
uggcucccuguuauccucu

SEQ ID NO: 3042907 - RNA, 19 nt, Artificial Sequence
  Description of Artificial Sequence: Synthetic oligonucleotide
cggaucuccauucugagga

SEQ ID NO: 3042908 - RNA, 19 nt, Artificial Sequence
  Description of Artificial Sequence: Synthetic oligonucleotide
gcggaucuccauucugagg

SEQ ID NO: 3042909 - RNA, 19 nt, Artificial Sequence
  Description of Artificial Sequence: Synthetic oligonucleotide
uucugaggcggaucuccau

SEQ ID NO: 3042910 - RNA, 19 nt, Artificial Sequence
  Description of Artificial Sequence: Synthetic oligonucleotide
agguucucgucagucacau

SEQ ID NO: 3042911 - RNA, 19 nt, Artificial Sequence
  Description of Artificial Sequence: Synthetic oligonucleotide
cauccccaacgaucggcag

SEQ ID NO: 3042912 - RNA, 19 nt, Artificial Sequence
  Description of Artificial Sequence: Synthetic oligonucleotide
cauccugguagugccucag

SEQ ID NO: 3042913 - RNA, 19 nt, Artificial Sequence
  Description of Artificial Sequence: Synthetic oligonucleotide
cuguaccugcuuggaaacc

SEQ ID NO: 3042914 - RNA, 19 nt, Artificial Sequence
  Description of Artificial Sequence: Synthetic oligonucleotide
aggcggaucuccauucuga

SEQ ID NO: 3042915 - RNA, 19 nt, Artificial Sequence
  Description of Artificial Sequence: Synthetic oligonucleotide
gcagcuagcaguggcuugc

SEQ ID NO: 3042916 - RNA, 19 nt, Artificial Sequence
  Description of Artificial Sequence: Synthetic oligonucleotide
ugccucagcagagcuucug

SEQ ID NO: 3042917 - RNA, 19 nt, Artificial Sequence
  Description of Artificial Sequence: Synthetic oligonucleotide
uugcauucugaggcggauc

SEQ ID NO: 3042918 - RNA, 19 nt, Artificial Sequence
  Description of Artificial Sequence: Synthetic oligonucleotide
cucccuguuauccucugua

SEQ ID NO: 3042919 - RNA, 19 nt, Artificial Sequence
  Description of Artificial Sequence: Synthetic oligonucleotide
caguggcuugcaccggagc

SEQ ID NO: 3042920 - RNA, 19 nt, Artificial Sequence
  Description of Artificial Sequence: Synthetic oligonucleotide
cagucacaugcuccucaag

SEQ ID NO: 3042921 - RNA, 19 nt, Artificial Sequence
  Description of Artificial Sequence: Synthetic oligonucleotide
ggagcauggugucugugaa

SEQ ID NO: 3042922 - RNA, 19 nt, Artificial Sequence
  Description of Artificial Sequence: Synthetic oligonucleotide
uagugccucagcagagcuu

SEQ ID NO: 3042923 - RNA, 19 nt, Artificial Sequence
  Description of Artificial Sequence: Synthetic oligonucleotide
caggcagcaguuuguggga

SEQ ID NO: 3042924 - RNA, 19 nt, Artificial Sequence
  Description of Artificial Sequence: Synthetic oligonucleotide
gguagugccucagcagagc

SEQ ID NO: 3042925 - RNA, 19 nt, Artificial Sequence
  Description of Artificial Sequence: Synthetic oligonucleotide
gccuugagguucucgucag

SEQ ID NO: 3042926 - RNA, 19 nt, Artificial Sequence
  Description of Artificial Sequence: Synthetic oligonucleotide
caacgaucggcagcuagca

SEQ ID NO: 3042927 - RNA, 19 nt, Artificial Sequence
  Description of Artificial Sequence: Synthetic oligonucleotide
gaucggcagcuagcagugg

SEQ ID NO: 3042928 - RNA, 19 nt, Artificial Sequence
  Description of Artificial Sequence: Synthetic oligonucleotide
gcagcaguuugugggaggc

SEQ ID NO: 3042929 - RNA, 19 nt, Artificial Sequence
  Description of Artificial Sequence: Synthetic oligonucleotide
uagcaguggcuugcaccgg

SEQ ID NO: 3042930 - RNA, 19 nt, Artificial Sequence
  Description of Artificial Sequence: Synthetic oligonucleotide
guagugccucagcagagcu

SEQ ID NO: 3042931 - RNA, 19 nt, Artificial Sequence
  Description of Artificial Sequence: Synthetic oligonucleotide
cagccuccacuuugcauuc

SEQ ID NO: 3042932 - RNA, 19 nt, Artificial Sequence
  Description of Artificial Sequence: Synthetic oligonucleotide
caccggagcauggugucug

SEQ ID NO: 3042933 - RNA, 19 nt, Artificial Sequence
  Description of Artificial Sequence: Synthetic oligonucleotide
guaccugcuuggaaaccac

SEQ ID NO: 3042934 - RNA, 19 nt, Artificial Sequence
  Description of Artificial Sequence: Synthetic oligonucleotide
cguaauuuacccacacaca

SEQ ID NO: 3042935 - RNA, 19 nt, Artificial Sequence
  Description of Artificial Sequence: Synthetic oligonucleotide
gagguucucgucagucaca

SEQ ID NO: 3042936 - RNA, 19 nt, Artificial Sequence
  Description of Artificial Sequence: Synthetic oligonucleotide
gccucagcagagcuucugc

SEQ ID NO: 3042937 - RNA, 19 nt, Artificial Sequence
  Description of Artificial Sequence: Synthetic oligonucleotide
aggcagcaguuugugggag

SEQ ID NO: 3042938 - RNA, 19 nt, Artificial Sequence
  Description of Artificial Sequence: Synthetic oligonucleotide
auucugaggcggaucucca

SEQ ID NO: 3042939 - RNA, 19 nt, Artificial Sequence
  Description of Artificial Sequence: Synthetic oligonucleotide
cucagcagagcuucugcgu

SEQ ID NO: 3042940 - RNA, 19 nt, Artificial Sequence
  Description of Artificial Sequence: Synthetic oligonucleotide
ccugcugcccaccauccug

SEQ ID NO: 3042941 - RNA, 19 nt, Artificial Sequence
  Description of Artificial Sequence: Synthetic oligonucleotide
guccauccccaacgaucgg

SEQ ID NO: 3042942 - RNA, 19 nt, Artificial Sequence
  Description of Artificial Sequence: Synthetic oligonucleotide
gaggccuuuggcucccugu

SEQ ID NO: 3042943 - RNA, 19 nt, Artificial Sequence
  Description of Artificial Sequence: Synthetic oligonucleotide
cacaguuaggacagccgcu

SEQ ID NO: 3042944 - RNA, 19 nt, Artificial Sequence
  Description of Artificial Sequence: Synthetic oligonucleotide
ggcagcuagcaguggcuug

SEQ ID NO: 3042945 - RNA, 19 nt, Artificial Sequence
  Description of Artificial Sequence: Synthetic oligonucleotide
cccaacgaucggcagcuag

SEQ ID NO: 3042946 - RNA, 19 nt, Artificial Sequence
  Description of Artificial Sequence: Synthetic oligonucleotide
cccaccauccugguagugc

SEQ ID NO: 3042947 - RNA, 19 nt, Artificial Sequence
  Description of Artificial Sequence: Synthetic oligonucleotide
cucggguggcagagaguac

SEQ ID NO: 3042948 - RNA, 19 nt, Artificial Sequence
  Description of Artificial Sequence: Synthetic oligonucleotide
gccuccacuuugcauucug

SEQ ID NO: 3042949 - RNA, 19 nt, Artificial Sequence
  Description of Artificial Sequence: Synthetic oligonucleotide
accggagcauggugucugu

SEQ ID NO: 3042950 - RNA, 19 nt, Artificial Sequence
  Description of Artificial Sequence: Synthetic oligonucleotide
agcagagcuucugcguaau

SEQ ID NO: 3042951 - RNA, 19 nt, Artificial Sequence
  Description of Artificial Sequence: Synthetic oligonucleotide
uugugggaggcuggagcuc

SEQ ID NO: 3042952 - RNA, 19 nt, Artificial Sequence
  Description of Artificial Sequence: Synthetic oligonucleotide
cgaucggcagcuagcagug

SEQ ID NO: 3042953 - RNA, 19 nt, Artificial Sequence
  Description of Artificial Sequence: Synthetic oligonucleotide
auuuacccacacacaguua

SEQ ID NO: 3042954 - RNA, 19 nt, Artificial Sequence
  Description of Artificial Sequence: Synthetic oligonucleotide
caugcuccucaaggauggc

SEQ ID NO: 3042955 - RNA, 19 nt, Artificial Sequence
  Description of Artificial Sequence: Synthetic oligonucleotide
cacacacaguuaggacagc

SEQ ID NO: 3042956 - RNA, 19 nt, Artificial Sequence
  Description of Artificial Sequence: Synthetic oligonucleotide
caguuaggacagccgcuca

SEQ ID NO: 3042957 - RNA, 19 nt, Artificial Sequence
  Description of Artificial Sequence: Synthetic oligonucleotide
ugcugcccaccauccuggu

SEQ ID NO: 3042958 - RNA, 19 nt, Artificial Sequence
  Description of Artificial Sequence: Synthetic oligonucleotide
gcucggguggcagagagua

SEQ ID NO: 3042959 - RNA, 19 nt, Artificial Sequence
  Description of Artificial Sequence: Synthetic oligonucleotide
ggguggcagagaguacggg

SEQ ID NO: 3042960 - RNA, 19 nt, Artificial Sequence
  Description of Artificial Sequence: Synthetic oligonucleotide
cagcagagcuucugcguaa

SEQ ID NO: 3042961 - RNA, 19 nt, Artificial Sequence
  Description of Artificial Sequence: Synthetic oligonucleotide
guuauccucuguaccugcu

SEQ ID NO: 3042962 - RNA, 19 nt, Artificial Sequence
  Description of Artificial Sequence: Synthetic oligonucleotide
cagagcuucugcguaauuu

SEQ ID NO: 3042963 - RNA, 19 nt, Artificial Sequence
  Description of Artificial Sequence: Synthetic oligonucleotide
ccugugguccauccccaac

SEQ ID NO: 3042964 - RNA, 19 nt, Artificial Sequence
  Description of Artificial Sequence: Synthetic oligonucleotide
caguuugugggaggcugga

SEQ ID NO: 3042965 - RNA, 19 nt, Artificial Sequence
  Description of Artificial Sequence: Synthetic oligonucleotide
acagccgcucaggcagcag

SEQ ID NO: 3042966 - RNA, 19 nt, Artificial Sequence
  Description of Artificial Sequence: Synthetic oligonucleotide
cuggagcucggguggcaga

SEQ ID NO: 3042967 - RNA, 19 nt, Artificial Sequence
  Description of Artificial Sequence: Synthetic oligonucleotide
caccuuccucccugugguc

SEQ ID NO: 3042968 - RNA, 19 nt, Artificial Sequence
  Description of Artificial Sequence: Synthetic oligonucleotide
ccauccccaacgaucggca

SEQ ID NO: 3042969 - RNA, 19 nt, Artificial Sequence
  Description of Artificial Sequence: Synthetic oligonucleotide
gacagccgcucaggcagca

SEQ ID NO: 3042970 - RNA, 19 nt, Artificial Sequence
  Description of Artificial Sequence: Synthetic oligonucleotide
cucagccuccacuuugcau

SEQ ID NO: 3042971 - RNA, 19 nt, Artificial Sequence
  Description of Artificial Sequence: Synthetic oligonucleotide
ccgcucaggcagcaguuug

SEQ ID NO: 3042972 - RNA, 19 nt, Artificial Sequence
  Description of Artificial Sequence: Synthetic oligonucleotide
ggcucccuguuauccucug

SEQ ID NO: 3042973 - RNA, 19 nt, Artificial Sequence
  Description of Artificial Sequence: Synthetic oligonucleotide
cggguggcagagaguacgg

SEQ ID NO: 3042974 - RNA, 19 nt, Artificial Sequence
  Description of Artificial Sequence: Synthetic oligonucleotide
gcaguggcuugcaccggag

SEQ ID NO: 3042975 - RNA, 19 nt, Artificial Sequence
  Description of Artificial Sequence: Synthetic oligonucleotide
gccuuuggcucccuguuau

SEQ ID NO: 3042976 - RNA, 19 nt, Artificial Sequence
  Description of Artificial Sequence: Synthetic oligonucleotide
ccucaaggauggccagggc

SEQ ID NO: 3042977 - RNA, 19 nt, Artificial Sequence
  Description of Artificial Sequence: Synthetic oligonucleotide
ccuuuggcucccuguuauc

SEQ ID NO: 3042978 - RNA, 19 nt, Artificial Sequence
  Description of Artificial Sequence: Synthetic oligonucleotide
ccucccugugguccauccc

SEQ ID NO: 3042979 - RNA, 19 nt, Artificial Sequence
  Description of Artificial Sequence: Synthetic oligonucleotide
agcucggguggcagagagu

SEQ ID NO: 3042980 - RNA, 19 nt, Artificial Sequence
  Description of Artificial Sequence: Synthetic oligonucleotide
guggcuugcaccggagcau

SEQ ID NO: 3042981 - RNA, 19 nt, Artificial Sequence
  Description of Artificial Sequence: Synthetic oligonucleotide
agccuccacuuugcauucu

SEQ ID NO: 3042982 - RNA, 19 nt, Artificial Sequence
  Description of Artificial Sequence: Synthetic oligonucleotide
cagccgcucaggcagcagu

SEQ ID NO: 3042983 - RNA, 19 nt, Artificial Sequence
  Description of Artificial Sequence: Synthetic oligonucleotide
uuccucccugugguccauc

SEQ ID NO: 3042984 - RNA, 19 nt, Artificial Sequence
  Description of Artificial Sequence: Synthetic oligonucleotide
ggaaaccaccuuccucccu

SEQ ID NO: 3042985 - RNA, 19 nt, Artificial Sequence
  Description of Artificial Sequence: Synthetic oligonucleotide
ccaccuuccucccuguggu

SEQ ID NO: 3042986 - RNA, 19 nt, Artificial Sequence
  Description of Artificial Sequence: Synthetic oligonucleotide
ccuuccucccuguggucca

SEQ ID NO: 3042987 - RNA, 19 nt, Artificial Sequence
  Description of Artificial Sequence: Synthetic oligonucleotide
gggucucaugagguucuca

SEQ ID NO: 3042988 - RNA, 19 nt, Artificial Sequence
  Description of Artificial Sequence: Synthetic oligonucleotide
ggccuuuggcucccuguua

SEQ ID NO: 3042989 - RNA, 19 nt, Artificial Sequence
  Description of Artificial Sequence: Synthetic oligonucleotide
cagcuagcaguggcuugca

SEQ ID NO: 3042990 - RNA, 19 nt, Artificial Sequence
  Description of Artificial Sequence: Synthetic oligonucleotide
gcauucugaggcggaucuc

SEQ ID NO: 3042991 - RNA, 19 nt, Artificial Sequence
  Description of Artificial Sequence: Synthetic oligonucleotide
caccauccugguagugccu

SEQ ID NO: 3042992 - RNA, 19 nt, Artificial Sequence
  Description of Artificial Sequence: Synthetic oligonucleotide
ccucuguaccugcuuggaa

SEQ ID NO: 3042993 - RNA, 19 nt, Artificial Sequence
  Description of Artificial Sequence: Synthetic oligonucleotide
gccagggccugcugcccac

SEQ ID NO: 3042994 - RNA, 19 nt, Artificial Sequence
  Description of Artificial Sequence: Synthetic oligonucleotide
ggagcucggguggcagaga

SEQ ID NO: 3042995 - RNA, 19 nt, Artificial Sequence
  Description of Artificial Sequence: Synthetic oligonucleotide
gcuugcaccggagcauggu

SEQ ID NO: 3042996 - RNA, 19 nt, Artificial Sequence
  Description of Artificial Sequence: Synthetic oligonucleotide
gcugcccaccauccuggua

SEQ ID NO: 3042997 - RNA, 19 nt, Artificial Sequence
  Description of Artificial Sequence: Synthetic oligonucleotide
gcucccuguuauccucugu

SEQ ID NO: 3042998 - RNA, 19 nt, Artificial Sequence
  Description of Artificial Sequence: Synthetic oligonucleotide
ggggucucaugagguucuc

SEQ ID NO: 3042999 - RNA, 19 nt, Artificial Sequence
  Description of Artificial Sequence: Synthetic oligonucleotide
ccggagcauggugucugug

SEQ ID NO: 3043000 - RNA, 19 nt, Artificial Sequence
  Description of Artificial Sequence: Synthetic oligonucleotide
cagcaguuugugggaggcu

SEQ ID NO: 3043001 - RNA, 19 nt, Artificial Sequence
  Description of Artificial Sequence: Synthetic oligonucleotide
ggcuggagcucggguggca

SEQ ID NO: 3043002 - RNA, 19 nt, Artificial Sequence
  Description of Artificial Sequence: Synthetic oligonucleotide
ccagggccugcugcccacc

SEQ ID NO: 3043003 - RNA, 19 nt, Artificial Sequence
  Description of Artificial Sequence: Synthetic oligonucleotide
ccauucugaggaaggccuu

SEQ ID NO: 3043004 - RNA, 19 nt, Artificial Sequence
  Description of Artificial Sequence: Synthetic oligonucleotide
cgcucaggcagcaguuugu

SEQ ID NO: 3043005 - RNA, 19 nt, Artificial Sequence
  Description of Artificial Sequence: Synthetic oligonucleotide
gcagagcuucugcguaauu

SEQ ID NO: 3043006 - RNA, 19 nt, Artificial Sequence
  Description of Artificial Sequence: Synthetic oligonucleotide
gugccucagcagagcuucu

SEQ ID NO: 3043007 - RNA, 19 nt, Artificial Sequence
  Description of Artificial Sequence: Synthetic oligonucleotide
ccuugagguucucgucagu

SEQ ID NO: 3043008 - RNA, 19 nt, Artificial Sequence
  Description of Artificial Sequence: Synthetic oligonucleotide
gcaccggagcauggugucu

SEQ ID NO: 3043009 - RNA, 19 nt, Artificial Sequence
  Description of Artificial Sequence: Synthetic oligonucleotide
cuuccucccugugguccau

SEQ ID NO: 3043010 - RNA, 19 nt, Artificial Sequence
  Description of Artificial Sequence: Synthetic oligonucleotide
ccccaacgaucggcagcua

SEQ ID NO: 3043011 - RNA, 19 nt, Artificial Sequence
  Description of Artificial Sequence: Synthetic oligonucleotide
aacaaagagucucaaaagc

SEQ ID NO: 3043012 - RNA, 19 nt, Artificial Sequence
  Description of Artificial Sequence: Synthetic oligonucleotide
aauaggcuggguuagcacc

SEQ ID NO: 3043013 - RNA, 19 nt, Artificial Sequence
  Description of Artificial Sequence: Synthetic oligonucleotide
aaauccuaaggccuucucc

SEQ ID NO: 3043014 - RNA, 19 nt, Artificial Sequence
  Description of Artificial Sequence: Synthetic oligonucleotide
auaagcuucgaugugaacc

SEQ ID NO: 3043015 - RNA, 19 nt, Artificial Sequence
  Description of Artificial Sequence: Synthetic oligonucleotide
uuuccaaugaaugacauga

SEQ ID NO: 3043016 - RNA, 19 nt, Artificial Sequence
  Description of Artificial Sequence: Synthetic oligonucleotide
acugguguauuucauaggg

SEQ ID NO: 3043017 - RNA, 19 nt, Artificial Sequence
  Description of Artificial Sequence: Synthetic oligonucleotide
aaugacaugagcccagugu

SEQ ID NO: 3043018 - RNA, 19 nt, Artificial Sequence
  Description of Artificial Sequence: Synthetic oligonucleotide
aauccuaaggccuucuccu

SEQ ID NO: 3043019 - RNA, 19 nt, Artificial Sequence
  Description of Artificial Sequence: Synthetic oligonucleotide
uuuguuucgguuuccaaug

SEQ ID NO: 3043020 - RNA, 19 nt, Artificial Sequence
  Description of Artificial Sequence: Synthetic oligonucleotide
caacuugcaaaucucaagg

SEQ ID NO: 3043021 - RNA, 19 nt, Artificial Sequence
  Description of Artificial Sequence: Synthetic oligonucleotide
aucucaaggaacuucucac

SEQ ID NO: 3043022 - RNA, 19 nt, Artificial Sequence
  Description of Artificial Sequence: Synthetic oligonucleotide
ucucaaucagaauaggcug

SEQ ID NO: 3043023 - RNA, 19 nt, Artificial Sequence
  Description of Artificial Sequence: Synthetic oligonucleotide
acaaagagucucaaaagcc

SEQ ID NO: 3043024 - RNA, 19 nt, Artificial Sequence
  Description of Artificial Sequence: Synthetic oligonucleotide
uuucauagggugcucagug

SEQ ID NO: 3043025 - RNA, 19 nt, Artificial Sequence
  Description of Artificial Sequence: Synthetic oligonucleotide
ugacaauagagacugcccc

SEQ ID NO: 3043026 - RNA, 19 nt, Artificial Sequence
  Description of Artificial Sequence: Synthetic oligonucleotide
uugugagcacucuugauag

SEQ ID NO: 3043027 - RNA, 19 nt, Artificial Sequence
  Description of Artificial Sequence: Synthetic oligonucleotide
caaugaaugacaugagccc

SEQ ID NO: 3043028 - RNA, 19 nt, Artificial Sequence
  Description of Artificial Sequence: Synthetic oligonucleotide
uuucgguuuccaaugaaug

SEQ ID NO: 3043029 - RNA, 19 nt, Artificial Sequence
  Description of Artificial Sequence: Synthetic oligonucleotide
aauagccaaguuuguuucg

SEQ ID NO: 3043030 - RNA, 19 nt, Artificial Sequence
  Description of Artificial Sequence: Synthetic oligonucleotide
aaucucaaggaacuucuca

SEQ ID NO: 3043031 - RNA, 19 nt, Artificial Sequence
  Description of Artificial Sequence: Synthetic oligonucleotide
uuuguaacaaagagucuca

SEQ ID NO: 3043032 - RNA, 19 nt, Artificial Sequence
  Description of Artificial Sequence: Synthetic oligonucleotide
uaagcuucgaugugaaccc

SEQ ID NO: 3043033 - RNA, 19 nt, Artificial Sequence
  Description of Artificial Sequence: Synthetic oligonucleotide
ucaaaagccaacacucccc

SEQ ID NO: 3043034 - RNA, 19 nt, Artificial Sequence
  Description of Artificial Sequence: Synthetic oligonucleotide
ucacugguguauuucauag

SEQ ID NO: 3043035 - RNA, 19 nt, Artificial Sequence
  Description of Artificial Sequence: Synthetic oligonucleotide
cuugcaaaucucaaggaac

SEQ ID NO: 3043036 - RNA, 19 nt, Artificial Sequence
  Description of Artificial Sequence: Synthetic oligonucleotide
uaggucucaaucagaauag

SEQ ID NO: 3043037 - RNA, 19 nt, Artificial Sequence
  Description of Artificial Sequence: Synthetic oligonucleotide
cagggaauagccaaguuug

SEQ ID NO: 3043038 - RNA, 19 nt, Artificial Sequence
  Description of Artificial Sequence: Synthetic oligonucleotide
uccaaugaaugacaugagc

SEQ ID NO: 3043039 - RNA, 19 nt, Artificial Sequence
  Description of Artificial Sequence: Synthetic oligonucleotide
uccagcagaauucuuguga

SEQ ID NO: 3043040 - RNA, 19 nt, Artificial Sequence
  Description of Artificial Sequence: Synthetic oligonucleotide
acaacuugcaaaucucaag

SEQ ID NO: 3043041 - RNA, 19 nt, Artificial Sequence
  Description of Artificial Sequence: Synthetic oligonucleotide
uugauagcuggaauaagcu

SEQ ID NO: 3043042 - RNA, 19 nt, Artificial Sequence
  Description of Artificial Sequence: Synthetic oligonucleotide
ucaaggaacuucucacugg

SEQ ID NO: 3043043 - RNA, 19 nt, Artificial Sequence
  Description of Artificial Sequence: Synthetic oligonucleotide
ugugaacccagacaacuug

SEQ ID NO: 3043044 - RNA, 19 nt, Artificial Sequence
  Description of Artificial Sequence: Synthetic oligonucleotide
gauagcuggaauaagcuuc

SEQ ID NO: 3043045 - RNA, 19 nt, Artificial Sequence
  Description of Artificial Sequence: Synthetic oligonucleotide
aauaagcuucgaugugaac

SEQ ID NO: 3043046 - RNA, 19 nt, Artificial Sequence
  Description of Artificial Sequence: Synthetic oligonucleotide
uggaccacggguuccagcg

SEQ ID NO: 3043047 - RNA, 19 nt, Artificial Sequence
  Description of Artificial Sequence: Synthetic oligonucleotide
uucgaugugaacccagaca

SEQ ID NO: 3043048 - RNA, 19 nt, Artificial Sequence
  Description of Artificial Sequence: Synthetic oligonucleotide
aaugaaugacaugagccca

SEQ ID NO: 3043049 - RNA, 19 nt, Artificial Sequence
  Description of Artificial Sequence: Synthetic oligonucleotide
uggguuagcaccaucaguu

SEQ ID NO: 3043050 - RNA, 19 nt, Artificial Sequence
  Description of Artificial Sequence: Synthetic oligonucleotide
cucaaucagaauaggcugg

SEQ ID NO: 3043051 - RNA, 19 nt, Artificial Sequence
  Description of Artificial Sequence: Synthetic oligonucleotide
agcaccaucaguuccucuc

SEQ ID NO: 3043052 - RNA, 19 nt, Artificial Sequence
  Description of Artificial Sequence: Synthetic oligonucleotide
ccaaugaaugacaugagcc

SEQ ID NO: 3043053 - RNA, 19 nt, Artificial Sequence
  Description of Artificial Sequence: Synthetic oligonucleotide
aaucagaauaggcuggguu

SEQ ID NO: 3043054 - RNA, 19 nt, Artificial Sequence
  Description of Artificial Sequence: Synthetic oligonucleotide
aacccagacaacuugcaaa

SEQ ID NO: 3043055 - RNA, 19 nt, Artificial Sequence
  Description of Artificial Sequence: Synthetic oligonucleotide
agcgugacaauagagacug

SEQ ID NO: 3043056 - RNA, 19 nt, Artificial Sequence
  Description of Artificial Sequence: Synthetic oligonucleotide
gaauagccaaguuuguuuc

SEQ ID NO: 3043057 - RNA, 19 nt, Artificial Sequence
  Description of Artificial Sequence: Synthetic oligonucleotide
aacuugcaaaucucaagga

SEQ ID NO: 3043058 - RNA, 19 nt, Artificial Sequence
  Description of Artificial Sequence: Synthetic oligonucleotide
aggaacuucucacuggugu

SEQ ID NO: 3043059 - RNA, 19 nt, Artificial Sequence
  Description of Artificial Sequence: Synthetic oligonucleotide
agagacugccccucugugc

SEQ ID NO: 3043060 - RNA, 19 nt, Artificial Sequence
  Description of Artificial Sequence: Synthetic oligonucleotide
ucucaaaagccaacacucc

SEQ ID NO: 3043061 - RNA, 19 nt, Artificial Sequence
  Description of Artificial Sequence: Synthetic oligonucleotide
aaggccuucuccuggucuc

SEQ ID NO: 3043062 - RNA, 19 nt, Artificial Sequence
  Description of Artificial Sequence: Synthetic oligonucleotide
cucaaaagccaacacuccc

SEQ ID NO: 3043063 - RNA, 19 nt, Artificial Sequence
  Description of Artificial Sequence: Synthetic oligonucleotide
uauuucauagggugcucag

SEQ ID NO: 3043064 - RNA, 19 nt, Artificial Sequence
  Description of Artificial Sequence: Synthetic oligonucleotide
uucgguuuccaaugaauga

SEQ ID NO: 3043065 - RNA, 19 nt, Artificial Sequence
  Description of Artificial Sequence: Synthetic oligonucleotide
guaggucucaaucagaaua

SEQ ID NO: 3043066 - RNA, 19 nt, Artificial Sequence
  Description of Artificial Sequence: Synthetic oligonucleotide
uccagauccagcagaauuc

SEQ ID NO: 3043067 - RNA, 19 nt, Artificial Sequence
  Description of Artificial Sequence: Synthetic oligonucleotide
gagcacucuugauagcugg

SEQ ID NO: 3043068 - RNA, 19 nt, Artificial Sequence
  Description of Artificial Sequence: Synthetic oligonucleotide
ucaaucagaauaggcuggg

SEQ ID NO: 3043069 - RNA, 19 nt, Artificial Sequence
  Description of Artificial Sequence: Synthetic oligonucleotide
aauagagacugccccucug

SEQ ID NO: 3043070 - RNA, 19 nt, Artificial Sequence
  Description of Artificial Sequence: Synthetic oligonucleotide
uccuaaggccuucuccugg

SEQ ID NO: 3043071 - RNA, 19 nt, Artificial Sequence
  Description of Artificial Sequence: Synthetic oligonucleotide
auagggugcucagugaagg

SEQ ID NO: 3043072 - RNA, 19 nt, Artificial Sequence
  Description of Artificial Sequence: Synthetic oligonucleotide
agcagaauucuugugagca

SEQ ID NO: 3043073 - RNA, 19 nt, Artificial Sequence
  Description of Artificial Sequence: Synthetic oligonucleotide
ucagaauaggcuggguuag

SEQ ID NO: 3043074 - RNA, 19 nt, Artificial Sequence
  Description of Artificial Sequence: Synthetic oligonucleotide
uggaauaagcuucgaugug

SEQ ID NO: 3043075 - RNA, 19 nt, Artificial Sequence
  Description of Artificial Sequence: Synthetic oligonucleotide
aucaguuccucuccucuuc

SEQ ID NO: 3043076 - RNA, 19 nt, Artificial Sequence
  Description of Artificial Sequence: Synthetic oligonucleotide
uuccagauccagcagaauu

SEQ ID NO: 3043077 - RNA, 19 nt, Artificial Sequence
  Description of Artificial Sequence: Synthetic oligonucleotide
aagagucucaaaagccaac

SEQ ID NO: 3043078 - RNA, 19 nt, Artificial Sequence
  Description of Artificial Sequence: Synthetic oligonucleotide
caaagagucucaaaagcca

SEQ ID NO: 3043079 - RNA, 19 nt, Artificial Sequence
  Description of Artificial Sequence: Synthetic oligonucleotide
cagugaaggucgcauaggg

SEQ ID NO: 3043080 - RNA, 19 nt, Artificial Sequence
  Description of Artificial Sequence: Synthetic oligonucleotide
ucauagggugcucagugaa

SEQ ID NO: 3043081 - RNA, 19 nt, Artificial Sequence
  Description of Artificial Sequence: Synthetic oligonucleotide
gucucaaaagccaacacuc

SEQ ID NO: 3043082 - RNA, 19 nt, Artificial Sequence
  Description of Artificial Sequence: Synthetic oligonucleotide
uucuugugagcacucuuga

SEQ ID NO: 3043083 - RNA, 19 nt, Artificial Sequence
  Description of Artificial Sequence: Synthetic oligonucleotide
acuugcaaaucucaaggaa

SEQ ID NO: 3043084 - RNA, 19 nt, Artificial Sequence
  Description of Artificial Sequence: Synthetic oligonucleotide
gacaugagcccaguguagg

SEQ ID NO: 3043085 - RNA, 19 nt, Artificial Sequence
  Description of Artificial Sequence: Synthetic oligonucleotide
aucagaauaggcuggguua

SEQ ID NO: 3043086 - RNA, 19 nt, Artificial Sequence
  Description of Artificial Sequence: Synthetic oligonucleotide
ucgguuuccaaugaaugac

SEQ ID NO: 3043087 - RNA, 19 nt, Artificial Sequence
  Description of Artificial Sequence: Synthetic oligonucleotide
auagccaaguuuguuucgg

SEQ ID NO: 3043088 - RNA, 19 nt, Artificial Sequence
  Description of Artificial Sequence: Synthetic oligonucleotide
ugacaugagcccaguguag

SEQ ID NO: 3043089 - RNA, 19 nt, Artificial Sequence
  Description of Artificial Sequence: Synthetic oligonucleotide
uuccaaugaaugacaugag

SEQ ID NO: 3043090 - RNA, 19 nt, Artificial Sequence
  Description of Artificial Sequence: Synthetic oligonucleotide
cucagugaaggucgcauag

SEQ ID NO: 3043091 - RNA, 19 nt, Artificial Sequence
  Description of Artificial Sequence: Synthetic oligonucleotide
uucucacugguguauuuca

SEQ ID NO: 3043092 - RNA, 19 nt, Artificial Sequence
  Description of Artificial Sequence: Synthetic oligonucleotide
auagcuggaauaagcuucg

SEQ ID NO: 3043093 - RNA, 19 nt, Artificial Sequence
  Description of Artificial Sequence: Synthetic oligonucleotide
gugaaggucgcauagggaa

SEQ ID NO: 3043094 - RNA, 19 nt, Artificial Sequence
  Description of Artificial Sequence: Synthetic oligonucleotide
acaauagagacugccccuc

SEQ ID NO: 3043095 - RNA, 19 nt, Artificial Sequence
  Description of Artificial Sequence: Synthetic oligonucleotide
augacaugagcccagugua

SEQ ID NO: 3043096 - RNA, 19 nt, Artificial Sequence
  Description of Artificial Sequence: Synthetic oligonucleotide
ugaacccagacaacuugca

SEQ ID NO: 3043097 - RNA, 19 nt, Artificial Sequence
  Description of Artificial Sequence: Synthetic oligonucleotide
ucuuccagauccagcagaa

SEQ ID NO: 3043098 - RNA, 19 nt, Artificial Sequence
  Description of Artificial Sequence: Synthetic oligonucleotide
ucagugaaggucgcauagg

SEQ ID NO: 3043099 - RNA, 19 nt, Artificial Sequence
  Description of Artificial Sequence: Synthetic oligonucleotide
ugaaggucgcauagggaac

SEQ ID NO: 3043100 - RNA, 19 nt, Artificial Sequence
  Description of Artificial Sequence: Synthetic oligonucleotide
agauccagcagaauucuug

SEQ ID NO: 3043101 - RNA, 19 nt, Artificial Sequence
  Description of Artificial Sequence: Synthetic oligonucleotide
aaagagucucaaaagccaa

SEQ ID NO: 3043102 - RNA, 19 nt, Artificial Sequence
  Description of Artificial Sequence: Synthetic oligonucleotide
aguuccucuccucuuccag

SEQ ID NO: 3043103 - RNA, 19 nt, Artificial Sequence
  Description of Artificial Sequence: Synthetic oligonucleotide
acucuugauagcuggaaua

SEQ ID NO: 3043104 - RNA, 19 nt, Artificial Sequence
  Description of Artificial Sequence: Synthetic oligonucleotide
ucaguuccucuccucuucc

SEQ ID NO: 3043105 - RNA, 19 nt, Artificial Sequence
  Description of Artificial Sequence: Synthetic oligonucleotide
ugagcacucuugauagcug

SEQ ID NO: 3043106 - RNA, 19 nt, Artificial Sequence
  Description of Artificial Sequence: Synthetic oligonucleotide
caguguaggucucaaucag

SEQ ID NO: 3043107 - RNA, 19 nt, Artificial Sequence
  Description of Artificial Sequence: Synthetic oligonucleotide
ucuugauagcuggaauaag

SEQ ID NO: 3043108 - RNA, 19 nt, Artificial Sequence
  Description of Artificial Sequence: Synthetic oligonucleotide
aaaucucaaggaacuucuc

SEQ ID NO: 3043109 - RNA, 19 nt, Artificial Sequence
  Description of Artificial Sequence: Synthetic oligonucleotide
accucaguggaccacgggu

SEQ ID NO: 3043110 - RNA, 19 nt, Artificial Sequence
  Description of Artificial Sequence: Synthetic oligonucleotide
auagagacugccccucugu

SEQ ID NO: 3043111 - RNA, 19 nt, Artificial Sequence
  Description of Artificial Sequence: Synthetic oligonucleotide
gaauaggcuggguuagcac

SEQ ID NO: 3043112 - RNA, 19 nt, Artificial Sequence
  Description of Artificial Sequence: Synthetic oligonucleotide
gaaggucgcauagggaacc

SEQ ID NO: 3043113 - RNA, 19 nt, Artificial Sequence
  Description of Artificial Sequence: Synthetic oligonucleotide
cagacaacuugcaaaucuc

SEQ ID NO: 3043114 - RNA, 19 nt, Artificial Sequence
  Description of Artificial Sequence: Synthetic oligonucleotide
guuuccaaugaaugacaug

SEQ ID NO: 3043115 - RNA, 19 nt, Artificial Sequence
  Description of Artificial Sequence: Synthetic oligonucleotide
ugauagcuggaauaagcuu

SEQ ID NO: 3043116 - RNA, 19 nt, Artificial Sequence
  Description of Artificial Sequence: Synthetic oligonucleotide
aaccucaguggaccacggg

SEQ ID NO: 3043117 - RNA, 19 nt, Artificial Sequence
  Description of Artificial Sequence: Synthetic oligonucleotide
uucauagggugcucaguga

SEQ ID NO: 3043118 - RNA, 19 nt, Artificial Sequence
  Description of Artificial Sequence: Synthetic oligonucleotide
uuguuucgguuuccaauga

SEQ ID NO: 3043119 - RNA, 19 nt, Artificial Sequence
  Description of Artificial Sequence: Synthetic oligonucleotide
agagucucaaaagccaaca

SEQ ID NO: 3043120 - RNA, 19 nt, Artificial Sequence
  Description of Artificial Sequence: Synthetic oligonucleotide
acccagacaacuugcaaau

SEQ ID NO: 3043121 - RNA, 19 nt, Artificial Sequence
  Description of Artificial Sequence: Synthetic oligonucleotide
gcauagggaaccucagugg

SEQ ID NO: 3043122 - RNA, 19 nt, Artificial Sequence
  Description of Artificial Sequence: Synthetic oligonucleotide
gugacaauagagacugccc

SEQ ID NO: 3043123 - RNA, 19 nt, Artificial Sequence
  Description of Artificial Sequence: Synthetic oligonucleotide
cacugguguauuucauagg

SEQ ID NO: 3043124 - RNA, 19 nt, Artificial Sequence
  Description of Artificial Sequence: Synthetic oligonucleotide
uagagacugccccucugug

SEQ ID NO: 3043125 - RNA, 19 nt, Artificial Sequence
  Description of Artificial Sequence: Synthetic oligonucleotide
cuggaauaagcuucgaugu

SEQ ID NO: 3043126 - RNA, 19 nt, Artificial Sequence
  Description of Artificial Sequence: Synthetic oligonucleotide
augagcccaguguaggucu

SEQ ID NO: 3043127 - RNA, 19 nt, Artificial Sequence
  Description of Artificial Sequence: Synthetic oligonucleotide
uguuucgguuuccaaugaa

SEQ ID NO: 3043128 - RNA, 19 nt, Artificial Sequence
  Description of Artificial Sequence: Synthetic oligonucleotide
cauagggugcucagugaag

SEQ ID NO: 3043129 - RNA, 19 nt, Artificial Sequence
  Description of Artificial Sequence: Synthetic oligonucleotide
cuugugagcacucuugaua

SEQ ID NO: 3043130 - RNA, 19 nt, Artificial Sequence
  Description of Artificial Sequence: Synthetic oligonucleotide
cauagggaaccucagugga

SEQ ID NO: 3043131 - RNA, 19 nt, Artificial Sequence
  Description of Artificial Sequence: Synthetic oligonucleotide
agaauucuugugagcacuc

SEQ ID NO: 3043132 - RNA, 19 nt, Artificial Sequence
  Description of Artificial Sequence: Synthetic oligonucleotide
gguuagcaccaucaguucc

SEQ ID NO: 3043133 - RNA, 19 nt, Artificial Sequence
  Description of Artificial Sequence: Synthetic oligonucleotide
auagggaaccucaguggac

SEQ ID NO: 3043134 - RNA, 19 nt, Artificial Sequence
  Description of Artificial Sequence: Synthetic oligonucleotide
aaguuuguuucgguuucca

SEQ ID NO: 3043135 - RNA, 19 nt, Artificial Sequence
  Description of Artificial Sequence: Synthetic oligonucleotide
gaaugacaugagcccagug

SEQ ID NO: 3043136 - RNA, 19 nt, Artificial Sequence
  Description of Artificial Sequence: Synthetic oligonucleotide
gucucaaucagaauaggcu

SEQ ID NO: 3043137 - RNA, 19 nt, Artificial Sequence
  Description of Artificial Sequence: Synthetic oligonucleotide
agaauaggcuggguuagca

SEQ ID NO: 3043138 - RNA, 19 nt, Artificial Sequence
  Description of Artificial Sequence: Synthetic oligonucleotide
cccagcaaauccuaaggcc

SEQ ID NO: 3043139 - RNA, 19 nt, Artificial Sequence
  Description of Artificial Sequence: Synthetic oligonucleotide
guuuguuucgguuuccaau

SEQ ID NO: 3043140 - RNA, 19 nt, Artificial Sequence
  Description of Artificial Sequence: Synthetic oligonucleotide
agggugcucagugaagguc

SEQ ID NO: 3043141 - RNA, 19 nt, Artificial Sequence
  Description of Artificial Sequence: Synthetic oligonucleotide
gauccagcagaauucuugu

SEQ ID NO: 3043142 - RNA, 19 nt, Artificial Sequence
  Description of Artificial Sequence: Synthetic oligonucleotide
augaaugacaugagcccag

SEQ ID NO: 3043143 - RNA, 19 nt, Artificial Sequence
  Description of Artificial Sequence: Synthetic oligonucleotide
cuucgaugugaacccagac

SEQ ID NO: 3043144 - RNA, 19 nt, Artificial Sequence
  Description of Artificial Sequence: Synthetic oligonucleotide
ccagcgugacaauagagac

SEQ ID NO: 3043145 - RNA, 19 nt, Artificial Sequence
  Description of Artificial Sequence: Synthetic oligonucleotide
gacaauagagacugccccu

SEQ ID NO: 3043146 - RNA, 19 nt, Artificial Sequence
  Description of Artificial Sequence: Synthetic oligonucleotide
ucuugugagcacucuugau

SEQ ID NO: 3043147 - RNA, 19 nt, Artificial Sequence
  Description of Artificial Sequence: Synthetic oligonucleotide
ggaauaagcuucgauguga

SEQ ID NO: 3043148 - RNA, 19 nt, Artificial Sequence
  Description of Artificial Sequence: Synthetic oligonucleotide
uguaggucucaaucagaau

SEQ ID NO: 3043149 - RNA, 19 nt, Artificial Sequence
  Description of Artificial Sequence: Synthetic oligonucleotide
aguuuguuucgguuuccaa

SEQ ID NO: 3043150 - RNA, 19 nt, Artificial Sequence
  Description of Artificial Sequence: Synthetic oligonucleotide
gugaacccagacaacuugc

SEQ ID NO: 3043151 - RNA, 19 nt, Artificial Sequence
  Description of Artificial Sequence: Synthetic oligonucleotide
ccagcagaauucuugugag

SEQ ID NO: 3043152 - RNA, 19 nt, Artificial Sequence
  Description of Artificial Sequence: Synthetic oligonucleotide
gaccacggguuccagcgug

SEQ ID NO: 3043153 - RNA, 19 nt, Artificial Sequence
  Description of Artificial Sequence: Synthetic oligonucleotide
agacaacuugcaaaucuca

SEQ ID NO: 3043154 - RNA, 19 nt, Artificial Sequence
  Description of Artificial Sequence: Synthetic oligonucleotide
gagacugccccucugugcu

SEQ ID NO: 3043155 - RNA, 19 nt, Artificial Sequence
  Description of Artificial Sequence: Synthetic oligonucleotide
gaauaagcuucgaugugaa

SEQ ID NO: 3043156 - RNA, 19 nt, Artificial Sequence
  Description of Artificial Sequence: Synthetic oligonucleotide
agcuggaauaagcuucgau

SEQ ID NO: 3043157 - RNA, 19 nt, Artificial Sequence
  Description of Artificial Sequence: Synthetic oligonucleotide
ucgcauagggaaccucagu

SEQ ID NO: 3043158 - RNA, 19 nt, Artificial Sequence
  Description of Artificial Sequence: Synthetic oligonucleotide
aggucucaaucagaauagg

SEQ ID NO: 3043159 - RNA, 19 nt, Artificial Sequence
  Description of Artificial Sequence: Synthetic oligonucleotide
agcaaauccuaaggccuuc

SEQ ID NO: 3043160 - RNA, 19 nt, Artificial Sequence
  Description of Artificial Sequence: Synthetic oligonucleotide
acaugagcccaguguaggu

SEQ ID NO: 3043161 - RNA, 19 nt, Artificial Sequence
  Description of Artificial Sequence: Synthetic oligonucleotide
cagcagaauucuugugagc

SEQ ID NO: 3043162 - RNA, 19 nt, Artificial Sequence
  Description of Artificial Sequence: Synthetic oligonucleotide
gggugcucagugaaggucg

SEQ ID NO: 3043163 - RNA, 19 nt, Artificial Sequence
  Description of Artificial Sequence: Synthetic oligonucleotide
auuucauagggugcucagu

SEQ ID NO: 3043164 - RNA, 19 nt, Artificial Sequence
  Description of Artificial Sequence: Synthetic oligonucleotide
auccuaaggccuucuccug

SEQ ID NO: 3043165 - RNA, 19 nt, Artificial Sequence
  Description of Artificial Sequence: Synthetic oligonucleotide
gacaacuugcaaaucucaa

SEQ ID NO: 3043166 - RNA, 19 nt, Artificial Sequence
  Description of Artificial Sequence: Synthetic oligonucleotide
ggucucaaucagaauaggc

SEQ ID NO: 3043167 - RNA, 19 nt, Artificial Sequence
  Description of Artificial Sequence: Synthetic oligonucleotide
ggaaccucaguggaccacg

SEQ ID NO: 3043168 - RNA, 19 nt, Artificial Sequence
  Description of Artificial Sequence: Synthetic oligonucleotide
auccagcagaauucuugug

SEQ ID NO: 3043169 - RNA, 19 nt, Artificial Sequence
  Description of Artificial Sequence: Synthetic oligonucleotide
gguuccagcgugacaauag

SEQ ID NO: 3043170 - RNA, 19 nt, Artificial Sequence
  Description of Artificial Sequence: Synthetic oligonucleotide
uguauuucauagggugcuc

SEQ ID NO: 3043171 - RNA, 19 nt, Artificial Sequence
  Description of Artificial Sequence: Synthetic oligonucleotide
ugcucagugaaggucgcau

SEQ ID NO: 3043172 - RNA, 19 nt, Artificial Sequence
  Description of Artificial Sequence: Synthetic oligonucleotide
guauuucauagggugcuca

SEQ ID NO: 3043173 - RNA, 19 nt, Artificial Sequence
  Description of Artificial Sequence: Synthetic oligonucleotide
gaacccagacaacuugcaa

SEQ ID NO: 3043174 - RNA, 19 nt, Artificial Sequence
  Description of Artificial Sequence: Synthetic oligonucleotide
ucaguggaccacggguucc

SEQ ID NO: 3043175 - RNA, 19 nt, Artificial Sequence
  Description of Artificial Sequence: Synthetic oligonucleotide
uagccaaguuuguuucggu

SEQ ID NO: 3043176 - RNA, 19 nt, Artificial Sequence
  Description of Artificial Sequence: Synthetic oligonucleotide
gaaccucaguggaccacgg

SEQ ID NO: 3043177 - RNA, 19 nt, Artificial Sequence
  Description of Artificial Sequence: Synthetic oligonucleotide
caaguuuguuucgguuucc

SEQ ID NO: 3043178 - RNA, 19 nt, Artificial Sequence
  Description of Artificial Sequence: Synthetic oligonucleotide
guuccagcgugacaauaga

SEQ ID NO: 3043179 - RNA, 19 nt, Artificial Sequence
  Description of Artificial Sequence: Synthetic oligonucleotide
guguaggucucaaucagaa

SEQ ID NO: 3043180 - RNA, 19 nt, Artificial Sequence
  Description of Artificial Sequence: Synthetic oligonucleotide
aaggaacuucucacuggug

SEQ ID NO: 3043181 - RNA, 19 nt, Artificial Sequence
  Description of Artificial Sequence: Synthetic oligonucleotide
cucuugauagcuggaauaa

SEQ ID NO: 3043182 - RNA, 19 nt, Artificial Sequence
  Description of Artificial Sequence: Synthetic oligonucleotide
aguguaggucucaaucaga

SEQ ID NO: 3043183 - RNA, 19 nt, Artificial Sequence
  Description of Artificial Sequence: Synthetic oligonucleotide
agccaaguuuguuucgguu

SEQ ID NO: 3043184 - RNA, 19 nt, Artificial Sequence
  Description of Artificial Sequence: Synthetic oligonucleotide
auaggcuggguuagcacca

SEQ ID NO: 3043185 - RNA, 19 nt, Artificial Sequence
  Description of Artificial Sequence: Synthetic oligonucleotide
caaauccuaaggccuucuc

SEQ ID NO: 3043186 - RNA, 19 nt, Artificial Sequence
  Description of Artificial Sequence: Synthetic oligonucleotide
gcaaaucucaaggaacuuc

SEQ ID NO: 3043187 - RNA, 19 nt, Artificial Sequence
  Description of Artificial Sequence: Synthetic oligonucleotide
uagggugcucagugaaggu

SEQ ID NO: 3043188 - RNA, 19 nt, Artificial Sequence
  Description of Artificial Sequence: Synthetic oligonucleotide
caugagcccaguguagguc

SEQ ID NO: 3043189 - RNA, 19 nt, Artificial Sequence
  Description of Artificial Sequence: Synthetic oligonucleotide
cucaguggaccacggguuc

SEQ ID NO: 3043190 - RNA, 19 nt, Artificial Sequence
  Description of Artificial Sequence: Synthetic oligonucleotide
agugaaggucgcauaggga

SEQ ID NO: 3043191 - RNA, 19 nt, Artificial Sequence
  Description of Artificial Sequence: Synthetic oligonucleotide
ccaaguuuguuucgguuuc

SEQ ID NO: 3043192 - RNA, 19 nt, Artificial Sequence
  Description of Artificial Sequence: Synthetic oligonucleotide
gagccagggaauagccaag

SEQ ID NO: 3043193 - RNA, 19 nt, Artificial Sequence
  Description of Artificial Sequence: Synthetic oligonucleotide
aacuucucacugguguauu

SEQ ID NO: 3043194 - RNA, 19 nt, Artificial Sequence
  Description of Artificial Sequence: Synthetic oligonucleotide
guguauuucauagggugcu

SEQ ID NO: 3043195 - RNA, 19 nt, Artificial Sequence
  Description of Artificial Sequence: Synthetic oligonucleotide
gucgcauagggaaccucag

SEQ ID NO: 3043196 - RNA, 19 nt, Artificial Sequence
  Description of Artificial Sequence: Synthetic oligonucleotide
ggaauagccaaguuuguuu

SEQ ID NO: 3043197 - RNA, 19 nt, Artificial Sequence
  Description of Artificial Sequence: Synthetic oligonucleotide
cgcauagggaaccucagug

SEQ ID NO: 3043198 - RNA, 19 nt, Artificial Sequence
  Description of Artificial Sequence: Synthetic oligonucleotide
caaggaacuucucacuggu

SEQ ID NO: 3043199 - RNA, 19 nt, Artificial Sequence
  Description of Artificial Sequence: Synthetic oligonucleotide
gcuggguuagcaccaucag

SEQ ID NO: 3043200 - RNA, 19 nt, Artificial Sequence
  Description of Artificial Sequence: Synthetic oligonucleotide
cgugacaauagagacugcc

SEQ ID NO: 3043201 - RNA, 19 nt, Artificial Sequence
  Description of Artificial Sequence: Synthetic oligonucleotide
guuagcaccaucaguuccu

SEQ ID NO: 3043202 - RNA, 19 nt, Artificial Sequence
  Description of Artificial Sequence: Synthetic oligonucleotide
gacugccccucugugcucc

SEQ ID NO: 3043203 - RNA, 19 nt, Artificial Sequence
  Description of Artificial Sequence: Synthetic oligonucleotide
uuagcaccaucaguuccuc

SEQ ID NO: 3043204 - RNA, 19 nt, Artificial Sequence
  Description of Artificial Sequence: Synthetic oligonucleotide
agcuucgaugugaacccag

SEQ ID NO: 3043205 - RNA, 19 nt, Artificial Sequence
  Description of Artificial Sequence: Synthetic oligonucleotide
ugcaaaucucaaggaacuu

SEQ ID NO: 3043206 - RNA, 19 nt, Artificial Sequence
  Description of Artificial Sequence: Synthetic oligonucleotide
aagcuucgaugugaaccca

SEQ ID NO: 3043207 - RNA, 19 nt, Artificial Sequence
  Description of Artificial Sequence: Synthetic oligonucleotide
aaggucgcauagggaaccu

SEQ ID NO: 3043208 - RNA, 19 nt, Artificial Sequence
  Description of Artificial Sequence: Synthetic oligonucleotide
gcagaauucuugugagcac

SEQ ID NO: 3043209 - RNA, 19 nt, Artificial Sequence
  Description of Artificial Sequence: Synthetic oligonucleotide
ccaguguaggucucaauca

SEQ ID NO: 3043210 - RNA, 19 nt, Artificial Sequence
  Description of Artificial Sequence: Synthetic oligonucleotide
acugccccucugugcuccc

SEQ ID NO: 3043211 - RNA, 19 nt, Artificial Sequence
  Description of Artificial Sequence: Synthetic oligonucleotide
agggaaccucaguggacca

SEQ ID NO: 3043212 - RNA, 19 nt, Artificial Sequence
  Description of Artificial Sequence: Synthetic oligonucleotide
cagaauaggcuggguuagc

SEQ ID NO: 3043213 - RNA, 19 nt, Artificial Sequence
  Description of Artificial Sequence: Synthetic oligonucleotide
ugagcccaguguaggucuc

SEQ ID NO: 3043214 - RNA, 19 nt, Artificial Sequence
  Description of Artificial Sequence: Synthetic oligonucleotide
agacugccccucugugcuc

SEQ ID NO: 3043215 - RNA, 19 nt, Artificial Sequence
  Description of Artificial Sequence: Synthetic oligonucleotide
guggaccacggguuccagc

SEQ ID NO: 3043216 - RNA, 19 nt, Artificial Sequence
  Description of Artificial Sequence: Synthetic oligonucleotide
aggcuggguuagcaccauc

SEQ ID NO: 3043217 - RNA, 19 nt, Artificial Sequence
  Description of Artificial Sequence: Synthetic oligonucleotide
ccccagcaaauccuaaggc

SEQ ID NO: 3043218 - RNA, 19 nt, Artificial Sequence
  Description of Artificial Sequence: Synthetic oligonucleotide
cagaauucuugugagcacu

SEQ ID NO: 3043219 - RNA, 19 nt, Artificial Sequence
  Description of Artificial Sequence: Synthetic oligonucleotide
agccagggaauagccaagu

SEQ ID NO: 3043220 - RNA, 19 nt, Artificial Sequence
  Description of Artificial Sequence: Synthetic oligonucleotide
agggaauagccaaguuugu

SEQ ID NO: 3043221 - RNA, 19 nt, Artificial Sequence
  Description of Artificial Sequence: Synthetic oligonucleotide
ggucgcauagggaaccuca

SEQ ID NO: 3043222 - RNA, 19 nt, Artificial Sequence
  Description of Artificial Sequence: Synthetic oligonucleotide
guuucgguuuccaaugaau

SEQ ID NO: 3043223 - RNA, 19 nt, Artificial Sequence
  Description of Artificial Sequence: Synthetic oligonucleotide
ccagcaaauccuaaggccu

SEQ ID NO: 3043224 - RNA, 19 nt, Artificial Sequence
  Description of Artificial Sequence: Synthetic oligonucleotide
gaauucuugugagcacucu

SEQ ID NO: 3043225 - RNA, 19 nt, Artificial Sequence
  Description of Artificial Sequence: Synthetic oligonucleotide
uccucuccucuuccagauc

SEQ ID NO: 3043226 - RNA, 19 nt, Artificial Sequence
  Description of Artificial Sequence: Synthetic oligonucleotide
ggaacuucucacuggugua

SEQ ID NO: 3043227 - RNA, 19 nt, Artificial Sequence
  Description of Artificial Sequence: Synthetic oligonucleotide
aggucgcauagggaaccuc

SEQ ID NO: 3043228 - RNA, 19 nt, Artificial Sequence
  Description of Artificial Sequence: Synthetic oligonucleotide
cuaaggccuucuccugguc

SEQ ID NO: 3043229 - RNA, 19 nt, Artificial Sequence
  Description of Artificial Sequence: Synthetic oligonucleotide
uagcaccaucaguuccucu

SEQ ID NO: 3043230 - RNA, 19 nt, Artificial Sequence
  Description of Artificial Sequence: Synthetic oligonucleotide
cccgagccagggaauagcc

SEQ ID NO: 3043231 - RNA, 19 nt, Artificial Sequence
  Description of Artificial Sequence: Synthetic oligonucleotide
gaacuucucacugguguau

SEQ ID NO: 3043232 - RNA, 19 nt, Artificial Sequence
  Description of Artificial Sequence: Synthetic oligonucleotide
ccagacaacuugcaaaucu

SEQ ID NO: 3043233 - RNA, 19 nt, Artificial Sequence
  Description of Artificial Sequence: Synthetic oligonucleotide
augugaacccagacaacuu

SEQ ID NO: 3043234 - RNA, 19 nt, Artificial Sequence
  Description of Artificial Sequence: Synthetic oligonucleotide
ggcuggguuagcaccauca

SEQ ID NO: 3043235 - RNA, 19 nt, Artificial Sequence
  Description of Artificial Sequence: Synthetic oligonucleotide
ggguuagcaccaucaguuc

SEQ ID NO: 3043236 - RNA, 19 nt, Artificial Sequence
  Description of Artificial Sequence: Synthetic oligonucleotide
cuggguuagcaccaucagu

SEQ ID NO: 3043237 - RNA, 19 nt, Artificial Sequence
  Description of Artificial Sequence: Synthetic oligonucleotide
cagcgugacaauagagacu

SEQ ID NO: 3043238 - RNA, 19 nt, Artificial Sequence
  Description of Artificial Sequence: Synthetic oligonucleotide
cucuccucuuccagaucca

SEQ ID NO: 3043239 - RNA, 19 nt, Artificial Sequence
  Description of Artificial Sequence: Synthetic oligonucleotide
uagcuggaauaagcuucga

SEQ ID NO: 3043240 - RNA, 19 nt, Artificial Sequence
  Description of Artificial Sequence: Synthetic oligonucleotide
caguuccucuccucuucca

SEQ ID NO: 3043241 - RNA, 19 nt, Artificial Sequence
  Description of Artificial Sequence: Synthetic oligonucleotide
cacucuugauagcuggaau

SEQ ID NO: 3043242 - RNA, 19 nt, Artificial Sequence
  Description of Artificial Sequence: Synthetic oligonucleotide
gccaaguuuguuucgguuu

SEQ ID NO: 3043243 - RNA, 19 nt, Artificial Sequence
  Description of Artificial Sequence: Synthetic oligonucleotide
ggugcucagugaaggucgc

SEQ ID NO: 3043244 - RNA, 19 nt, Artificial Sequence
  Description of Artificial Sequence: Synthetic oligonucleotide
cgagccagggaauagccaa

SEQ ID NO: 3043245 - RNA, 19 nt, Artificial Sequence
  Description of Artificial Sequence: Synthetic oligonucleotide
caauagagacugccccucu

SEQ ID NO: 3043246 - RNA, 19 nt, Artificial Sequence
  Description of Artificial Sequence: Synthetic oligonucleotide
gcuucgaugugaacccaga

SEQ ID NO: 3043247 - RNA, 19 nt, Artificial Sequence
  Description of Artificial Sequence: Synthetic oligonucleotide
gagcccaguguaggucuca

SEQ ID NO: 3043248 - RNA, 19 nt, Artificial Sequence
  Description of Artificial Sequence: Synthetic oligonucleotide
gguuuccaaugaaugacau

SEQ ID NO: 3043249 - RNA, 19 nt, Artificial Sequence
  Description of Artificial Sequence: Synthetic oligonucleotide
cgguuuccaaugaaugaca

SEQ ID NO: 3043250 - RNA, 19 nt, Artificial Sequence
  Description of Artificial Sequence: Synthetic oligonucleotide
agcccaguguaggucucaa

SEQ ID NO: 3043251 - RNA, 19 nt, Artificial Sequence
  Description of Artificial Sequence: Synthetic oligonucleotide
accacggguuccagcguga

SEQ ID NO: 3043252 - RNA, 19 nt, Artificial Sequence
  Description of Artificial Sequence: Synthetic oligonucleotide
cgaugugaacccagacaac

SEQ ID NO: 3043253 - RNA, 19 nt, Artificial Sequence
  Description of Artificial Sequence: Synthetic oligonucleotide
cacggguuccagcgugaca

SEQ ID NO: 3043254 - RNA, 19 nt, Artificial Sequence
  Description of Artificial Sequence: Synthetic oligonucleotide
cagcaaauccuaaggccuu

SEQ ID NO: 3043255 - RNA, 19 nt, Artificial Sequence
  Description of Artificial Sequence: Synthetic oligonucleotide
gcacucuugauagcuggaa

SEQ ID NO: 3043256 - RNA, 19 nt, Artificial Sequence
  Description of Artificial Sequence: Synthetic oligonucleotide
gcucagugaaggucgcaua

SEQ ID NO: 3043257 - RNA, 19 nt, Artificial Sequence
  Description of Artificial Sequence: Synthetic oligonucleotide
caguggaccacggguucca

SEQ ID NO: 3043258 - RNA, 19 nt, Artificial Sequence
  Description of Artificial Sequence: Synthetic oligonucleotide
caucaguuccucuccucuu

SEQ ID NO: 3043259 - RNA, 19 nt, Artificial Sequence
  Description of Artificial Sequence: Synthetic oligonucleotide
gggaaccucaguggaccac

SEQ ID NO: 3043260 - RNA, 19 nt, Artificial Sequence
  Description of Artificial Sequence: Synthetic oligonucleotide
ccagggaauagccaaguuu

SEQ ID NO: 3043261 - RNA, 19 nt, Artificial Sequence
  Description of Artificial Sequence: Synthetic oligonucleotide
ccaucaguuccucuccucu

SEQ ID NO: 3043262 - RNA, 19 nt, Artificial Sequence
  Description of Artificial Sequence: Synthetic oligonucleotide
ccccgagccagggaauagc

SEQ ID NO: 3043263 - RNA, 19 nt, Artificial Sequence
  Description of Artificial Sequence: Synthetic oligonucleotide
caaucagaauaggcugggu

SEQ ID NO: 3043264 - RNA, 19 nt, Artificial Sequence
  Description of Artificial Sequence: Synthetic oligonucleotide
gugcucagugaaggucgca

SEQ ID NO: 3043265 - RNA, 19 nt, Artificial Sequence
  Description of Artificial Sequence: Synthetic oligonucleotide
gggaauagccaaguuuguu

SEQ ID NO: 3043266 - RNA, 19 nt, Artificial Sequence
  Description of Artificial Sequence: Synthetic oligonucleotide
cugccccucugugcucccc

SEQ ID NO: 3043267 - RNA, 19 nt, Artificial Sequence
  Description of Artificial Sequence: Synthetic oligonucleotide
gcaaauccuaaggccuucu

SEQ ID NO: 3043268 - RNA, 19 nt, Artificial Sequence
  Description of Artificial Sequence: Synthetic oligonucleotide
ccgagccagggaauagcca

SEQ ID NO: 3043269 - RNA, 19 nt, Artificial Sequence
  Description of Artificial Sequence: Synthetic oligonucleotide
ccuaaggccuucuccuggu

SEQ ID NO: 3043270 - RNA, 19 nt, Artificial Sequence
  Description of Artificial Sequence: Synthetic oligonucleotide
cagauccagcagaauucuu

SEQ ID NO: 3043271 - RNA, 19 nt, Artificial Sequence
  Description of Artificial Sequence: Synthetic oligonucleotide
ggguuccagcgugacaaua

SEQ ID NO: 3043272 - RNA, 19 nt, Artificial Sequence
  Description of Artificial Sequence: Synthetic oligonucleotide
ccucaguggaccacggguu

SEQ ID NO: 3043273 - RNA, 19 nt, Artificial Sequence
  Description of Artificial Sequence: Synthetic oligonucleotide
cuuccagauccagcagaau

SEQ ID NO: 3043274 - RNA, 19 nt, Artificial Sequence
  Description of Artificial Sequence: Synthetic oligonucleotide
gcgugacaauagagacugc

SEQ ID NO: 3043275 - RNA, 19 nt, Artificial Sequence
  Description of Artificial Sequence: Synthetic oligonucleotide
ccacggguuccagcgugac

SEQ ID NO: 3043276 - RNA, 19 nt, Artificial Sequence
  Description of Artificial Sequence: Synthetic oligonucleotide
ggaccacggguuccagcgu

SEQ ID NO: 3043277 - RNA, 19 nt, Artificial Sequence
  Description of Artificial Sequence: Synthetic oligonucleotide
gccagggaauagccaaguu

SEQ ID NO: 3043278 - RNA, 19 nt, Artificial Sequence
  Description of Artificial Sequence: Synthetic oligonucleotide
cggguuccagcgugacaau

SEQ ID NO: 3043279 - RNA, 19 nt, Artificial Sequence
  Description of Artificial Sequence: Synthetic oligonucleotide
aauauauucauccuccauc

SEQ ID NO: 3043280 - RNA, 19 nt, Artificial Sequence
  Description of Artificial Sequence: Synthetic oligonucleotide
ugugaaaauagauacagcc

SEQ ID NO: 3043281 - RNA, 19 nt, Artificial Sequence
  Description of Artificial Sequence: Synthetic oligonucleotide
aaaccaacuaaaaucaucc

SEQ ID NO: 3043282 - RNA, 19 nt, Artificial Sequence
  Description of Artificial Sequence: Synthetic oligonucleotide
agacaaaccaacuaaaauc

SEQ ID NO: 3043283 - RNA, 19 nt, Artificial Sequence
  Description of Artificial Sequence: Synthetic oligonucleotide
uucuuaaccacccacaccc

SEQ ID NO: 3043284 - RNA, 19 nt, Artificial Sequence
  Description of Artificial Sequence: Synthetic oligonucleotide
aucuaaauuauguaaacag

SEQ ID NO: 3043285 - RNA, 19 nt, Artificial Sequence
  Description of Artificial Sequence: Synthetic oligonucleotide
uuuacaaagauacacucga

SEQ ID NO: 3043286 - RNA, 19 nt, Artificial Sequence
  Description of Artificial Sequence: Synthetic oligonucleotide
gauuuuaaacuucuuaacc

SEQ ID NO: 3043287 - RNA, 19 nt, Artificial Sequence
  Description of Artificial Sequence: Synthetic oligonucleotide
guaaacagaauuuuaagug

SEQ ID NO: 3043288 - RNA, 19 nt, Artificial Sequence
  Description of Artificial Sequence: Synthetic oligonucleotide
ugaaaauagauacagcccu

SEQ ID NO: 3043289 - RNA, 19 nt, Artificial Sequence
  Description of Artificial Sequence: Synthetic oligonucleotide
aaauuauguaaacagaauu

SEQ ID NO: 3043290 - RNA, 19 nt, Artificial Sequence
  Description of Artificial Sequence: Synthetic oligonucleotide
auuuuaagugcacccaucc

SEQ ID NO: 3043291 - RNA, 19 nt, Artificial Sequence
  Description of Artificial Sequence: Synthetic oligonucleotide
uuuuacaaagauacacucg

SEQ ID NO: 3043292 - RNA, 19 nt, Artificial Sequence
  Description of Artificial Sequence: Synthetic oligonucleotide
uacaaagauacacucgagg

SEQ ID NO: 3043293 - RNA, 19 nt, Artificial Sequence
  Description of Artificial Sequence: Synthetic oligonucleotide
uaaacagaauuuuaagugc

SEQ ID NO: 3043294 - RNA, 19 nt, Artificial Sequence
  Description of Artificial Sequence: Synthetic oligonucleotide
uguucuguggcuaauauau

SEQ ID NO: 3043295 - RNA, 19 nt, Artificial Sequence
  Description of Artificial Sequence: Synthetic oligonucleotide
aaagauacacucgaggaag

SEQ ID NO: 3043296 - RNA, 19 nt, Artificial Sequence
  Description of Artificial Sequence: Synthetic oligonucleotide
ucuaaauuauguaaacaga

SEQ ID NO: 3043297 - RNA, 19 nt, Artificial Sequence
  Description of Artificial Sequence: Synthetic oligonucleotide
uguaaacagaauuuuaagu

SEQ ID NO: 3043298 - RNA, 19 nt, Artificial Sequence
  Description of Artificial Sequence: Synthetic oligonucleotide
auuuuaaacuucuuaacca

SEQ ID NO: 3043299 - RNA, 19 nt, Artificial Sequence
  Description of Artificial Sequence: Synthetic oligonucleotide
aaacuucuuaaccacccac

SEQ ID NO: 3043300 - RNA, 19 nt, Artificial Sequence
  Description of Artificial Sequence: Synthetic oligonucleotide
uggccuuaaacucacagag

SEQ ID NO: 3043301 - RNA, 19 nt, Artificial Sequence
  Description of Artificial Sequence: Synthetic oligonucleotide
uauguaaacagaauuuuaa

SEQ ID NO: 3043302 - RNA, 19 nt, Artificial Sequence
  Description of Artificial Sequence: Synthetic oligonucleotide
uuaaacuucuuaaccaccc

SEQ ID NO: 3043303 - RNA, 19 nt, Artificial Sequence
  Description of Artificial Sequence: Synthetic oligonucleotide
guggcuaauauauucaucc

SEQ ID NO: 3043304 - RNA, 19 nt, Artificial Sequence
  Description of Artificial Sequence: Synthetic oligonucleotide
ucagccaguauuacaagcg

SEQ ID NO: 3043305 - RNA, 19 nt, Artificial Sequence
  Description of Artificial Sequence: Synthetic oligonucleotide
ucuuuuacaaagauacacu

SEQ ID NO: 3043306 - RNA, 19 nt, Artificial Sequence
  Description of Artificial Sequence: Synthetic oligonucleotide
ucccaugagaauaucagcc

SEQ ID NO: 3043307 - RNA, 19 nt, Artificial Sequence
  Description of Artificial Sequence: Synthetic oligonucleotide
uuuuaaacuucuuaaccac

SEQ ID NO: 3043308 - RNA, 19 nt, Artificial Sequence
  Description of Artificial Sequence: Synthetic oligonucleotide
aagcugagccuuuuguccc

SEQ ID NO: 3043309 - RNA, 19 nt, Artificial Sequence
  Description of Artificial Sequence: Synthetic oligonucleotide
aaccaacuaaaaucauccc

SEQ ID NO: 3043310 - RNA, 19 nt, Artificial Sequence
  Description of Artificial Sequence: Synthetic oligonucleotide
uuuaaacuucuuaaccacc

SEQ ID NO: 3043311 - RNA, 19 nt, Artificial Sequence
  Description of Artificial Sequence: Synthetic oligonucleotide
ccuucuuuuacaaagauac

SEQ ID NO: 3043312 - RNA, 19 nt, Artificial Sequence
  Description of Artificial Sequence: Synthetic oligonucleotide
aauaucagccaguauuaca

SEQ ID NO: 3043313 - RNA, 19 nt, Artificial Sequence
  Description of Artificial Sequence: Synthetic oligonucleotide
acugugaaaauagauacag

SEQ ID NO: 3043314 - RNA, 19 nt, Artificial Sequence
  Description of Artificial Sequence: Synthetic oligonucleotide
uguuguugggauuuuaaac

SEQ ID NO: 3043315 - RNA, 19 nt, Artificial Sequence
  Description of Artificial Sequence: Synthetic oligonucleotide
ucauccuccaucuaaauua

SEQ ID NO: 3043316 - RNA, 19 nt, Artificial Sequence
  Description of Artificial Sequence: Synthetic oligonucleotide
acaaagauacacucgagga

SEQ ID NO: 3043317 - RNA, 19 nt, Artificial Sequence
  Description of Artificial Sequence: Synthetic oligonucleotide
uucuuuuacaaagauacac

SEQ ID NO: 3043318 - RNA, 19 nt, Artificial Sequence
  Description of Artificial Sequence: Synthetic oligonucleotide
auauauucauccuccaucu

SEQ ID NO: 3043319 - RNA, 19 nt, Artificial Sequence
  Description of Artificial Sequence: Synthetic oligonucleotide
uaaaaucaucccaugagaa

SEQ ID NO: 3043320 - RNA, 19 nt, Artificial Sequence
  Description of Artificial Sequence: Synthetic oligonucleotide
uuuaagugcacccauccau

SEQ ID NO: 3043321 - RNA, 19 nt, Artificial Sequence
  Description of Artificial Sequence: Synthetic oligonucleotide
aacuaaaaucaucccauga

SEQ ID NO: 3043322 - RNA, 19 nt, Artificial Sequence
  Description of Artificial Sequence: Synthetic oligonucleotide
aucagccaguauuacaagc

SEQ ID NO: 3043323 - RNA, 19 nt, Artificial Sequence
  Description of Artificial Sequence: Synthetic oligonucleotide
gaagcugagccuuuugucc

SEQ ID NO: 3043324 - RNA, 19 nt, Artificial Sequence
  Description of Artificial Sequence: Synthetic oligonucleotide
aauuauguaaacagaauuu

SEQ ID NO: 3043325 - RNA, 19 nt, Artificial Sequence
  Description of Artificial Sequence: Synthetic oligonucleotide
aaaauagauacagcccuuc

SEQ ID NO: 3043326 - RNA, 19 nt, Artificial Sequence
  Description of Artificial Sequence: Synthetic oligonucleotide
agugguuucucuguguagc

SEQ ID NO: 3043327 - RNA, 19 nt, Artificial Sequence
  Description of Artificial Sequence: Synthetic oligonucleotide
ucagcuucccuguuguugg

SEQ ID NO: 3043328 - RNA, 19 nt, Artificial Sequence
  Description of Artificial Sequence: Synthetic oligonucleotide
agugcacccauccauacag

SEQ ID NO: 3043329 - RNA, 19 nt, Artificial Sequence
  Description of Artificial Sequence: Synthetic oligonucleotide
cuuuuacaaagauacacuc

SEQ ID NO: 3043330 - RNA, 19 nt, Artificial Sequence
  Description of Artificial Sequence: Synthetic oligonucleotide
cagaauuuuaagugcaccc

SEQ ID NO: 3043331 - RNA, 19 nt, Artificial Sequence
  Description of Artificial Sequence: Synthetic oligonucleotide
uaaauuauguaaacagaau

SEQ ID NO: 3043332 - RNA, 19 nt, Artificial Sequence
  Description of Artificial Sequence: Synthetic oligonucleotide
uccuccaucuaaauuaugu

SEQ ID NO: 3043333 - RNA, 19 nt, Artificial Sequence
  Description of Artificial Sequence: Synthetic oligonucleotide
acuucuuaaccacccacac

SEQ ID NO: 3043334 - RNA, 19 nt, Artificial Sequence
  Description of Artificial Sequence: Synthetic oligonucleotide
ucuaugcagaccaggcugg

SEQ ID NO: 3043335 - RNA, 19 nt, Artificial Sequence
  Description of Artificial Sequence: Synthetic oligonucleotide
acagaauuuuaagugcacc

SEQ ID NO: 3043336 - RNA, 19 nt, Artificial Sequence
  Description of Artificial Sequence: Synthetic oligonucleotide
gacaaaccaacuaaaauca

SEQ ID NO: 3043337 - RNA, 19 nt, Artificial Sequence
  Description of Artificial Sequence: Synthetic oligonucleotide
ucuguggcuaauauauuca

SEQ ID NO: 3043338 - RNA, 19 nt, Artificial Sequence
  Description of Artificial Sequence: Synthetic oligonucleotide
aucccaugagaauaucagc

SEQ ID NO: 3043339 - RNA, 19 nt, Artificial Sequence
  Description of Artificial Sequence: Synthetic oligonucleotide
aaaaucaucccaugagaau

SEQ ID NO: 3043340 - RNA, 19 nt, Artificial Sequence
  Description of Artificial Sequence: Synthetic oligonucleotide
acaguugucagcuucccug

SEQ ID NO: 3043341 - RNA, 19 nt, Artificial Sequence
  Description of Artificial Sequence: Synthetic oligonucleotide
cuguuuaauguucuguggc

SEQ ID NO: 3043342 - RNA, 19 nt, Artificial Sequence
  Description of Artificial Sequence: Synthetic oligonucleotide
aaaucaucccaugagaaua

SEQ ID NO: 3043343 - RNA, 19 nt, Artificial Sequence
  Description of Artificial Sequence: Synthetic oligonucleotide
aagacagugguuucucugu

SEQ ID NO: 3043344 - RNA, 19 nt, Artificial Sequence
  Description of Artificial Sequence: Synthetic oligonucleotide
accaacuaaaaucauccca

SEQ ID NO: 3043345 - RNA, 19 nt, Artificial Sequence
  Description of Artificial Sequence: Synthetic oligonucleotide
aauuuuaagugcacccauc

SEQ ID NO: 3043346 - RNA, 19 nt, Artificial Sequence
  Description of Artificial Sequence: Synthetic oligonucleotide
uuauguaaacagaauuuua

SEQ ID NO: 3043347 - RNA, 19 nt, Artificial Sequence
  Description of Artificial Sequence: Synthetic oligonucleotide
caucccaugagaauaucag

SEQ ID NO: 3043348 - RNA, 19 nt, Artificial Sequence
  Description of Artificial Sequence: Synthetic oligonucleotide
aaauagauacagcccuucu

SEQ ID NO: 3043349 - RNA, 19 nt, Artificial Sequence
  Description of Artificial Sequence: Synthetic oligonucleotide
aauguucuguggcuaauau

SEQ ID NO: 3043350 - RNA, 19 nt, Artificial Sequence
  Description of Artificial Sequence: Synthetic oligonucleotide
aauagauacagcccuucuu

SEQ ID NO: 3043351 - RNA, 19 nt, Artificial Sequence
  Description of Artificial Sequence: Synthetic oligonucleotide
aaacagaauuuuaagugca

SEQ ID NO: 3043352 - RNA, 19 nt, Artificial Sequence
  Description of Artificial Sequence: Synthetic oligonucleotide
uauuacaagcguuuguuuu

SEQ ID NO: 3043353 - RNA, 19 nt, Artificial Sequence
  Description of Artificial Sequence: Synthetic oligonucleotide
uguuuaauguucuguggcu

SEQ ID NO: 3043354 - RNA, 19 nt, Artificial Sequence
  Description of Artificial Sequence: Synthetic oligonucleotide
gauacagcccuucuuuuac

SEQ ID NO: 3043355 - RNA, 19 nt, Artificial Sequence
  Description of Artificial Sequence: Synthetic oligonucleotide
auagauacagcccuucuuu

SEQ ID NO: 3043356 - RNA, 19 nt, Artificial Sequence
  Description of Artificial Sequence: Synthetic oligonucleotide
aacagaauuuuaagugcac

SEQ ID NO: 3043357 - RNA, 19 nt, Artificial Sequence
  Description of Artificial Sequence: Synthetic oligonucleotide
uuacaaagauacacucgag

SEQ ID NO: 3043358 - RNA, 19 nt, Artificial Sequence
  Description of Artificial Sequence: Synthetic oligonucleotide
ugggauuuuaaacuucuua

SEQ ID NO: 3043359 - RNA, 19 nt, Artificial Sequence
  Description of Artificial Sequence: Synthetic oligonucleotide
cacucgaggaagcugagcc

SEQ ID NO: 3043360 - RNA, 19 nt, Artificial Sequence
  Description of Artificial Sequence: Synthetic oligonucleotide
gagaauaucagccaguauu

SEQ ID NO: 3043361 - RNA, 19 nt, Artificial Sequence
  Description of Artificial Sequence: Synthetic oligonucleotide
auauucauccuccaucuaa

SEQ ID NO: 3043362 - RNA, 19 nt, Artificial Sequence
  Description of Artificial Sequence: Synthetic oligonucleotide
cuaggcuucagacaaacca

SEQ ID NO: 3043363 - RNA, 19 nt, Artificial Sequence
  Description of Artificial Sequence: Synthetic oligonucleotide
uauucauccuccaucuaaa

SEQ ID NO: 3043364 - RNA, 19 nt, Artificial Sequence
  Description of Artificial Sequence: Synthetic oligonucleotide
caaaccaacuaaaaucauc

SEQ ID NO: 3043365 - RNA, 19 nt, Artificial Sequence
  Description of Artificial Sequence: Synthetic oligonucleotide
uuaaccacccacacccacc

SEQ ID NO: 3043366 - RNA, 19 nt, Artificial Sequence
  Description of Artificial Sequence: Synthetic oligonucleotide
ucagacaaaccaacuaaaa

SEQ ID NO: 3043367 - RNA, 19 nt, Artificial Sequence
  Description of Artificial Sequence: Synthetic oligonucleotide
aagauacacucgaggaagc

SEQ ID NO: 3043368 - RNA, 19 nt, Artificial Sequence
  Description of Artificial Sequence: Synthetic oligonucleotide
cauacaguugucagcuucc

SEQ ID NO: 3043369 - RNA, 19 nt, Artificial Sequence
  Description of Artificial Sequence: Synthetic oligonucleotide
uucagacaaaccaacuaaa

SEQ ID NO: 3043370 - RNA, 19 nt, Artificial Sequence
  Description of Artificial Sequence: Synthetic oligonucleotide
uuuuaagugcacccaucca

SEQ ID NO: 3043371 - RNA, 19 nt, Artificial Sequence
  Description of Artificial Sequence: Synthetic oligonucleotide
guuguugggauuuuaaacu

SEQ ID NO: 3043372 - RNA, 19 nt, Artificial Sequence
  Description of Artificial Sequence: Synthetic oligonucleotide
uaauauauucauccuccau

SEQ ID NO: 3043373 - RNA, 19 nt, Artificial Sequence
  Description of Artificial Sequence: Synthetic oligonucleotide
ucaucccaugagaauauca

SEQ ID NO: 3043374 - RNA, 19 nt, Artificial Sequence
  Description of Artificial Sequence: Synthetic oligonucleotide
cuuaaacucacagagaucu

SEQ ID NO: 3043375 - RNA, 19 nt, Artificial Sequence
  Description of Artificial Sequence: Synthetic oligonucleotide
gcuaauauauucauccucc

SEQ ID NO: 3043376 - RNA, 19 nt, Artificial Sequence
  Description of Artificial Sequence: Synthetic oligonucleotide
uuuaauguucuguggcuaa

SEQ ID NO: 3043377 - RNA, 19 nt, Artificial Sequence
  Description of Artificial Sequence: Synthetic oligonucleotide
auuauguaaacagaauuuu

SEQ ID NO: 3043378 - RNA, 19 nt, Artificial Sequence
  Description of Artificial Sequence: Synthetic oligonucleotide
cucucuaugcagaccaggc

SEQ ID NO: 3043379 - RNA, 19 nt, Artificial Sequence
  Description of Artificial Sequence: Synthetic oligonucleotide
uaaacuucuuaaccaccca

SEQ ID NO: 3043380 - RNA, 19 nt, Artificial Sequence
  Description of Artificial Sequence: Synthetic oligonucleotide
uaggcuucagacaaaccaa

SEQ ID NO: 3043381 - RNA, 19 nt, Artificial Sequence
  Description of Artificial Sequence: Synthetic oligonucleotide
agaauuuuaagugcaccca

SEQ ID NO: 3043382 - RNA, 19 nt, Artificial Sequence
  Description of Artificial Sequence: Synthetic oligonucleotide
auaucagccaguauuacaa

SEQ ID NO: 3043383 - RNA, 19 nt, Artificial Sequence
  Description of Artificial Sequence: Synthetic oligonucleotide
cauccauacaguugucagc

SEQ ID NO: 3043384 - RNA, 19 nt, Artificial Sequence
  Description of Artificial Sequence: Synthetic oligonucleotide
aguauuacaagcguuuguu

SEQ ID NO: 3043385 - RNA, 19 nt, Artificial Sequence
  Description of Artificial Sequence: Synthetic oligonucleotide
uuaagugcacccauccaua

SEQ ID NO: 3043386 - RNA, 19 nt, Artificial Sequence
  Description of Artificial Sequence: Synthetic oligonucleotide
ccacugugaaaauagauac

SEQ ID NO: 3043387 - RNA, 19 nt, Artificial Sequence
  Description of Artificial Sequence: Synthetic oligonucleotide
ugagccuuuugucccuagg

SEQ ID NO: 3043388 - RNA, 19 nt, Artificial Sequence
  Description of Artificial Sequence: Synthetic oligonucleotide
ggauuuuaaacuucuuaac

SEQ ID NO: 3043389 - RNA, 19 nt, Artificial Sequence
  Description of Artificial Sequence: Synthetic oligonucleotide
auccauacaguugucagcu

SEQ ID NO: 3043390 - RNA, 19 nt, Artificial Sequence
  Description of Artificial Sequence: Synthetic oligonucleotide
gagccuuuugucccuaggc

SEQ ID NO: 3043391 - RNA, 19 nt, Artificial Sequence
  Description of Artificial Sequence: Synthetic oligonucleotide
uguggcuaauauauucauc

SEQ ID NO: 3043392 - RNA, 19 nt, Artificial Sequence
  Description of Artificial Sequence: Synthetic oligonucleotide
uguugggauuuuaaacuuc

SEQ ID NO: 3043393 - RNA, 19 nt, Artificial Sequence
  Description of Artificial Sequence: Synthetic oligonucleotide
aacuucuuaaccacccaca

SEQ ID NO: 3043394 - RNA, 19 nt, Artificial Sequence
  Description of Artificial Sequence: Synthetic oligonucleotide
cugugaaaauagauacagc

SEQ ID NO: 3043395 - RNA, 19 nt, Artificial Sequence
  Description of Artificial Sequence: Synthetic oligonucleotide
uuaaacucacagagaucug

SEQ ID NO: 3043396 - RNA, 19 nt, Artificial Sequence
  Description of Artificial Sequence: Synthetic oligonucleotide
gggauuuuaaacuucuuaa

SEQ ID NO: 3043397 - RNA, 19 nt, Artificial Sequence
  Description of Artificial Sequence: Synthetic oligonucleotide
uaucagccaguauuacaag

SEQ ID NO: 3043398 - RNA, 19 nt, Artificial Sequence
  Description of Artificial Sequence: Synthetic oligonucleotide
caagacagugguuucucug

SEQ ID NO: 3043399 - RNA, 19 nt, Artificial Sequence
  Description of Artificial Sequence: Synthetic oligonucleotide
gauacacucgaggaagcug

SEQ ID NO: 3043400 - RNA, 19 nt, Artificial Sequence
  Description of Artificial Sequence: Synthetic oligonucleotide
uugucccuaggcuucagac

SEQ ID NO: 3043401 - RNA, 19 nt, Artificial Sequence
  Description of Artificial Sequence: Synthetic oligonucleotide
acacccaccacugugaaaa

SEQ ID NO: 3043402 - RNA, 19 nt, Artificial Sequence
  Description of Artificial Sequence: Synthetic oligonucleotide
cuucagacaaaccaacuaa

SEQ ID NO: 3043403 - RNA, 19 nt, Artificial Sequence
  Description of Artificial Sequence: Synthetic oligonucleotide
cuucuuaaccacccacacc

SEQ ID NO: 3043404 - RNA, 19 nt, Artificial Sequence
  Description of Artificial Sequence: Synthetic oligonucleotide
uuguugggauuuuaaacuu

SEQ ID NO: 3043405 - RNA, 19 nt, Artificial Sequence
  Description of Artificial Sequence: Synthetic oligonucleotide
augcagaccaggcuggccu

SEQ ID NO: 3043406 - RNA, 19 nt, Artificial Sequence
  Description of Artificial Sequence: Synthetic oligonucleotide
ugucccuaggcuucagaca

SEQ ID NO: 3043407 - RNA, 19 nt, Artificial Sequence
  Description of Artificial Sequence: Synthetic oligonucleotide
auacaguugucagcuuccc

SEQ ID NO: 3043408 - RNA, 19 nt, Artificial Sequence
  Description of Artificial Sequence: Synthetic oligonucleotide
agccuuuugucccuaggcu

SEQ ID NO: 3043409 - RNA, 19 nt, Artificial Sequence
  Description of Artificial Sequence: Synthetic oligonucleotide
caacuaaaaucaucccaug

SEQ ID NO: 3043410 - RNA, 19 nt, Artificial Sequence
  Description of Artificial Sequence: Synthetic oligonucleotide
uggcuaauauauucauccu

SEQ ID NO: 3043411 - RNA, 19 nt, Artificial Sequence
  Description of Artificial Sequence: Synthetic oligonucleotide
uaagugcacccauccauac

SEQ ID NO: 3043412 - RNA, 19 nt, Artificial Sequence
  Description of Artificial Sequence: Synthetic oligonucleotide
auacacucgaggaagcuga

SEQ ID NO: 3043413 - RNA, 19 nt, Artificial Sequence
  Description of Artificial Sequence: Synthetic oligonucleotide
aagugcacccauccauaca

SEQ ID NO: 3043414 - RNA, 19 nt, Artificial Sequence
  Description of Artificial Sequence: Synthetic oligonucleotide
agaauaucagccaguauua

SEQ ID NO: 3043415 - RNA, 19 nt, Artificial Sequence
  Description of Artificial Sequence: Synthetic oligonucleotide
uuugucccuaggcuucaga

SEQ ID NO: 3043416 - RNA, 19 nt, Artificial Sequence
  Description of Artificial Sequence: Synthetic oligonucleotide
aaucaucccaugagaauau

SEQ ID NO: 3043417 - RNA, 19 nt, Artificial Sequence
  Description of Artificial Sequence: Synthetic oligonucleotide
cuaauauauucauccucca

SEQ ID NO: 3043418 - RNA, 19 nt, Artificial Sequence
  Description of Artificial Sequence: Synthetic oligonucleotide
acucucuaugcagaccagg

SEQ ID NO: 3043419 - RNA, 19 nt, Artificial Sequence
  Description of Artificial Sequence: Synthetic oligonucleotide
caucuaaauuauguaaaca

SEQ ID NO: 3043420 - RNA, 19 nt, Artificial Sequence
  Description of Artificial Sequence: Synthetic oligonucleotide
cuuaaccacccacacccac

SEQ ID NO: 3043421 - RNA, 19 nt, Artificial Sequence
  Description of Artificial Sequence: Synthetic oligonucleotide
ggcuaauauauucauccuc

SEQ ID NO: 3043422 - RNA, 19 nt, Artificial Sequence
  Description of Artificial Sequence: Synthetic oligonucleotide
cccaccacugugaaaauag

SEQ ID NO: 3043423 - RNA, 19 nt, Artificial Sequence
  Description of Artificial Sequence: Synthetic oligonucleotide
gucccuaggcuucagacaa

SEQ ID NO: 3043424 - RNA, 19 nt, Artificial Sequence
  Description of Artificial Sequence: Synthetic oligonucleotide
ucaagacagugguuucucu

SEQ ID NO: 3043425 - RNA, 19 nt, Artificial Sequence
  Description of Artificial Sequence: Synthetic oligonucleotide
caaagauacacucgaggaa

SEQ ID NO: 3043426 - RNA, 19 nt, Artificial Sequence
  Description of Artificial Sequence: Synthetic oligonucleotide
gaauaucagccaguauuac

SEQ ID NO: 3043427 - RNA, 19 nt, Artificial Sequence
  Description of Artificial Sequence: Synthetic oligonucleotide
gaauuuuaagugcacccau

SEQ ID NO: 3043428 - RNA, 19 nt, Artificial Sequence
  Description of Artificial Sequence: Synthetic oligonucleotide
ccaucuaaauuauguaaac

SEQ ID NO: 3043429 - RNA, 19 nt, Artificial Sequence
  Description of Artificial Sequence: Synthetic oligonucleotide
ugagaauaucagccaguau

SEQ ID NO: 3043430 - RNA, 19 nt, Artificial Sequence
  Description of Artificial Sequence: Synthetic oligonucleotide
accacugugaaaauagaua

SEQ ID NO: 3043431 - RNA, 19 nt, Artificial Sequence
  Description of Artificial Sequence: Synthetic oligonucleotide
uacagcccuucuuuuacaa

SEQ ID NO: 3043432 - RNA, 19 nt, Artificial Sequence
  Description of Artificial Sequence: Synthetic oligonucleotide
uacaguugucagcuucccu

SEQ ID NO: 3043433 - RNA, 19 nt, Artificial Sequence
  Description of Artificial Sequence: Synthetic oligonucleotide
ucuuaaccacccacaccca

SEQ ID NO: 3043434 - RNA, 19 nt, Artificial Sequence
  Description of Artificial Sequence: Synthetic oligonucleotide
uucaagacagugguuucuc

SEQ ID NO: 3043435 - RNA, 19 nt, Artificial Sequence
  Description of Artificial Sequence: Synthetic oligonucleotide
uacacucgaggaagcugag

SEQ ID NO: 3043436 - RNA, 19 nt, Artificial Sequence
  Description of Artificial Sequence: Synthetic oligonucleotide
gucagcuucccuguuguug

SEQ ID NO: 3043437 - RNA, 19 nt, Artificial Sequence
  Description of Artificial Sequence: Synthetic oligonucleotide
acagugguuucucugugua

SEQ ID NO: 3043438 - RNA, 19 nt, Artificial Sequence
  Description of Artificial Sequence: Synthetic oligonucleotide
agauacagcccuucuuuua

SEQ ID NO: 3043439 - RNA, 19 nt, Artificial Sequence
  Description of Artificial Sequence: Synthetic oligonucleotide
cuucuuuuacaaagauaca

SEQ ID NO: 3043440 - RNA, 19 nt, Artificial Sequence
  Description of Artificial Sequence: Synthetic oligonucleotide
ccauccauacaguugucag

SEQ ID NO: 3043441 - RNA, 19 nt, Artificial Sequence
  Description of Artificial Sequence: Synthetic oligonucleotide
acccacacccaccacugug

SEQ ID NO: 3043442 - RNA, 19 nt, Artificial Sequence
  Description of Artificial Sequence: Synthetic oligonucleotide
augagaauaucagccagua

SEQ ID NO: 3043443 - RNA, 19 nt, Artificial Sequence
  Description of Artificial Sequence: Synthetic oligonucleotide
uagauacagcccuucuuuu

SEQ ID NO: 3043444 - RNA, 19 nt, Artificial Sequence
  Description of Artificial Sequence: Synthetic oligonucleotide
auucauccuccaucuaaau

SEQ ID NO: 3043445 - RNA, 19 nt, Artificial Sequence
  Description of Artificial Sequence: Synthetic oligonucleotide
cacugugaaaauagauaca

SEQ ID NO: 3043446 - RNA, 19 nt, Artificial Sequence
  Description of Artificial Sequence: Synthetic oligonucleotide
cuggccuuaaacucacaga

SEQ ID NO: 3043447 - RNA, 19 nt, Artificial Sequence
  Description of Artificial Sequence: Synthetic oligonucleotide
auacagcccuucuuuuaca

SEQ ID NO: 3043448 - RNA, 19 nt, Artificial Sequence
  Description of Artificial Sequence: Synthetic oligonucleotide
acacucgaggaagcugagc

SEQ ID NO: 3043449 - RNA, 19 nt, Artificial Sequence
  Description of Artificial Sequence: Synthetic oligonucleotide
ccaugagaauaucagccag

SEQ ID NO: 3043450 - RNA, 19 nt, Artificial Sequence
  Description of Artificial Sequence: Synthetic oligonucleotide
uuaauguucuguggcuaau

SEQ ID NO: 3043451 - RNA, 19 nt, Artificial Sequence
  Description of Artificial Sequence: Synthetic oligonucleotide
acucgaggaagcugagccu

SEQ ID NO: 3043452 - RNA, 19 nt, Artificial Sequence
  Description of Artificial Sequence: Synthetic oligonucleotide
gaggaagcugagccuuuug

SEQ ID NO: 3043453 - RNA, 19 nt, Artificial Sequence
  Description of Artificial Sequence: Synthetic oligonucleotide
ugcacccauccauacaguu

SEQ ID NO: 3043454 - RNA, 19 nt, Artificial Sequence
  Description of Artificial Sequence: Synthetic oligonucleotide
uaauguucuguggcuaaua

SEQ ID NO: 3043455 - RNA, 19 nt, Artificial Sequence
  Description of Artificial Sequence: Synthetic oligonucleotide
cagugguuucucuguguag

SEQ ID NO: 3043456 - RNA, 19 nt, Artificial Sequence
  Description of Artificial Sequence: Synthetic oligonucleotide
aaccacccacacccaccac

SEQ ID NO: 3043457 - RNA, 19 nt, Artificial Sequence
  Description of Artificial Sequence: Synthetic oligonucleotide
ggaagcugagccuuuuguc

SEQ ID NO: 3043458 - RNA, 19 nt, Artificial Sequence
  Description of Artificial Sequence: Synthetic oligonucleotide
auguucuguggcuaauaua

SEQ ID NO: 3043459 - RNA, 19 nt, Artificial Sequence
  Description of Artificial Sequence: Synthetic oligonucleotide
uaugcagaccaggcuggcc

SEQ ID NO: 3043460 - RNA, 19 nt, Artificial Sequence
  Description of Artificial Sequence: Synthetic oligonucleotide
uucccuguuguugggauuu

SEQ ID NO: 3043461 - RNA, 19 nt, Artificial Sequence
  Description of Artificial Sequence: Synthetic oligonucleotide
guugggauuuuaaacuucu

SEQ ID NO: 3043462 - RNA, 19 nt, Artificial Sequence
  Description of Artificial Sequence: Synthetic oligonucleotide
aucaucccaugagaauauc

SEQ ID NO: 3043463 - RNA, 19 nt, Artificial Sequence
  Description of Artificial Sequence: Synthetic oligonucleotide
agauacacucgaggaagcu

SEQ ID NO: 3043464 - RNA, 19 nt, Artificial Sequence
  Description of Artificial Sequence: Synthetic oligonucleotide
uugggauuuuaaacuucuu

SEQ ID NO: 3043465 - RNA, 19 nt, Artificial Sequence
  Description of Artificial Sequence: Synthetic oligonucleotide
guuuaauguucuguggcua

SEQ ID NO: 3043466 - RNA, 19 nt, Artificial Sequence
  Description of Artificial Sequence: Synthetic oligonucleotide
cagacaaaccaacuaaaau

SEQ ID NO: 3043467 - RNA, 19 nt, Artificial Sequence
  Description of Artificial Sequence: Synthetic oligonucleotide
cacccauccauacaguugu

SEQ ID NO: 3043468 - RNA, 19 nt, Artificial Sequence
  Description of Artificial Sequence: Synthetic oligonucleotide
gccuuaaacucacagagau

SEQ ID NO: 3043469 - RNA, 19 nt, Artificial Sequence
  Description of Artificial Sequence: Synthetic oligonucleotide
caugagaauaucagccagu

SEQ ID NO: 3043470 - RNA, 19 nt, Artificial Sequence
  Description of Artificial Sequence: Synthetic oligonucleotide
ccuuuugucccuaggcuuc

SEQ ID NO: 3043471 - RNA, 19 nt, Artificial Sequence
  Description of Artificial Sequence: Synthetic oligonucleotide
ccauacaguugucagcuuc

SEQ ID NO: 3043472 - RNA, 19 nt, Artificial Sequence
  Description of Artificial Sequence: Synthetic oligonucleotide
gcuucagacaaaccaacua

SEQ ID NO: 3043473 - RNA, 19 nt, Artificial Sequence
  Description of Artificial Sequence: Synthetic oligonucleotide
uuuugucccuaggcuucag

SEQ ID NO: 3043474 - RNA, 19 nt, Artificial Sequence
  Description of Artificial Sequence: Synthetic oligonucleotide
agcugagccuuuugucccu

SEQ ID NO: 3043475 - RNA, 19 nt, Artificial Sequence
  Description of Artificial Sequence: Synthetic oligonucleotide
acaaaccaacuaaaaucau

SEQ ID NO: 3043476 - RNA, 19 nt, Artificial Sequence
  Description of Artificial Sequence: Synthetic oligonucleotide
ccaacuaaaaucaucccau

SEQ ID NO: 3043477 - RNA, 19 nt, Artificial Sequence
  Description of Artificial Sequence: Synthetic oligonucleotide
gacagugguuucucugugu

SEQ ID NO: 3043478 - RNA, 19 nt, Artificial Sequence
  Description of Artificial Sequence: Synthetic oligonucleotide
agcccuucuuuuacaaaga

SEQ ID NO: 3043479 - RNA, 19 nt, Artificial Sequence
  Description of Artificial Sequence: Synthetic oligonucleotide
gaaaauagauacagcccuu

SEQ ID NO: 3043480 - RNA, 19 nt, Artificial Sequence
  Description of Artificial Sequence: Synthetic oligonucleotide
guauuacaagcguuuguuu

SEQ ID NO: 3043481 - RNA, 19 nt, Artificial Sequence
  Description of Artificial Sequence: Synthetic oligonucleotide
ccuuaaacucacagagauc

SEQ ID NO: 3043482 - RNA, 19 nt, Artificial Sequence
  Description of Artificial Sequence: Synthetic oligonucleotide
cagcuucccuguuguuggg

SEQ ID NO: 3043483 - RNA, 19 nt, Artificial Sequence
  Description of Artificial Sequence: Synthetic oligonucleotide
cugagccuuuugucccuag

SEQ ID NO: 3043484 - RNA, 19 nt, Artificial Sequence
  Description of Artificial Sequence: Synthetic oligonucleotide
ucgaggaagcugagccuuu

SEQ ID NO: 3043485 - RNA, 19 nt, Artificial Sequence
  Description of Artificial Sequence: Synthetic oligonucleotide
caguauuacaagcguuugu

SEQ ID NO: 3043486 - RNA, 19 nt, Artificial Sequence
  Description of Artificial Sequence: Synthetic oligonucleotide
ccaguauuacaagcguuug

SEQ ID NO: 3043487 - RNA, 19 nt, Artificial Sequence
  Description of Artificial Sequence: Synthetic oligonucleotide
cccaugagaauaucagcca

SEQ ID NO: 3043488 - RNA, 19 nt, Artificial Sequence
  Description of Artificial Sequence: Synthetic oligonucleotide
caccacugugaaaauagau

SEQ ID NO: 3043489 - RNA, 19 nt, Artificial Sequence
  Description of Artificial Sequence: Synthetic oligonucleotide
gcacccauccauacaguug

SEQ ID NO: 3043490 - RNA, 19 nt, Artificial Sequence
  Description of Artificial Sequence: Synthetic oligonucleotide
aguugucagcuucccuguu

SEQ ID NO: 3043491 - RNA, 19 nt, Artificial Sequence
  Description of Artificial Sequence: Synthetic oligonucleotide
ccuaggcuucagacaaacc

SEQ ID NO: 3043492 - RNA, 19 nt, Artificial Sequence
  Description of Artificial Sequence: Synthetic oligonucleotide
ucccuaggcuucagacaaa

SEQ ID NO: 3043493 - RNA, 19 nt, Artificial Sequence
  Description of Artificial Sequence: Synthetic oligonucleotide
uccauacaguugucagcuu

SEQ ID NO: 3043494 - RNA, 19 nt, Artificial Sequence
  Description of Artificial Sequence: Synthetic oligonucleotide
agccaguauuacaagcguu

SEQ ID NO: 3043495 - RNA, 19 nt, Artificial Sequence
  Description of Artificial Sequence: Synthetic oligonucleotide
ugcagaccaggcuggccuu

SEQ ID NO: 3043496 - RNA, 19 nt, Artificial Sequence
  Description of Artificial Sequence: Synthetic oligonucleotide
cuguggcuaauauauucau

SEQ ID NO: 3043497 - RNA, 19 nt, Artificial Sequence
  Description of Artificial Sequence: Synthetic oligonucleotide
cauccuccaucuaaauuau

SEQ ID NO: 3043498 - RNA, 19 nt, Artificial Sequence
  Description of Artificial Sequence: Synthetic oligonucleotide
ccacccacacccaccacug

SEQ ID NO: 3043499 - RNA, 19 nt, Artificial Sequence
  Description of Artificial Sequence: Synthetic oligonucleotide
ccuguuguugggauuuuaa

SEQ ID NO: 3043500 - RNA, 19 nt, Artificial Sequence
  Description of Artificial Sequence: Synthetic oligonucleotide
cuuuugucccuaggcuuca

SEQ ID NO: 3043501 - RNA, 19 nt, Artificial Sequence
  Description of Artificial Sequence: Synthetic oligonucleotide
agcuucccuguuguuggga

SEQ ID NO: 3043502 - RNA, 19 nt, Artificial Sequence
  Description of Artificial Sequence: Synthetic oligonucleotide
caguugucagcuucccugu

SEQ ID NO: 3043503 - RNA, 19 nt, Artificial Sequence
  Description of Artificial Sequence: Synthetic oligonucleotide
ccuccaucuaaauuaugua

SEQ ID NO: 3043504 - RNA, 19 nt, Artificial Sequence
  Description of Artificial Sequence: Synthetic oligonucleotide
cagccaguauuacaagcgu

SEQ ID NO: 3043505 - RNA, 19 nt, Artificial Sequence
  Description of Artificial Sequence: Synthetic oligonucleotide
auccuccaucuaaauuaug

SEQ ID NO: 3043506 - RNA, 19 nt, Artificial Sequence
  Description of Artificial Sequence: Synthetic oligonucleotide
acccauccauacaguuguc

SEQ ID NO: 3043507 - RNA, 19 nt, Artificial Sequence
  Description of Artificial Sequence: Synthetic oligonucleotide
cccuaggcuucagacaaac

SEQ ID NO: 3043508 - RNA, 19 nt, Artificial Sequence
  Description of Artificial Sequence: Synthetic oligonucleotide
ggccuuaaacucacagaga

SEQ ID NO: 3043509 - RNA, 19 nt, Artificial Sequence
  Description of Artificial Sequence: Synthetic oligonucleotide
acccaccacugugaaaaua

SEQ ID NO: 3043510 - RNA, 19 nt, Artificial Sequence
  Description of Artificial Sequence: Synthetic oligonucleotide
cccuucuuuuacaaagaua

SEQ ID NO: 3043511 - RNA, 19 nt, Artificial Sequence
  Description of Artificial Sequence: Synthetic oligonucleotide
cccacacccaccacuguga

SEQ ID NO: 3043512 - RNA, 19 nt, Artificial Sequence
  Description of Artificial Sequence: Synthetic oligonucleotide
gccuuuugucccuaggcuu

SEQ ID NO: 3043513 - RNA, 19 nt, Artificial Sequence
  Description of Artificial Sequence: Synthetic oligonucleotide
gccaguauuacaagcguuu

SEQ ID NO: 3043514 - RNA, 19 nt, Artificial Sequence
  Description of Artificial Sequence: Synthetic oligonucleotide
cucgaggaagcugagccuu

SEQ ID NO: 3043515 - RNA, 19 nt, Artificial Sequence
  Description of Artificial Sequence: Synthetic oligonucleotide
ccaccacugugaaaauaga

SEQ ID NO: 3043516 - RNA, 19 nt, Artificial Sequence
  Description of Artificial Sequence: Synthetic oligonucleotide
cacacccaccacugugaaa

SEQ ID NO: 3043517 - RNA, 19 nt, Artificial Sequence
  Description of Artificial Sequence: Synthetic oligonucleotide
ggcuucagacaaaccaacu

SEQ ID NO: 3043518 - RNA, 19 nt, Artificial Sequence
  Description of Artificial Sequence: Synthetic oligonucleotide
cccauccauacaguuguca

SEQ ID NO: 3043519 - RNA, 19 nt, Artificial Sequence
  Description of Artificial Sequence: Synthetic oligonucleotide
ucccuguuguugggauuuu

SEQ ID NO: 3043520 - RNA, 19 nt, Artificial Sequence
  Description of Artificial Sequence: Synthetic oligonucleotide
gcccuucuuuuacaaagau

SEQ ID NO: 3043521 - RNA, 19 nt, Artificial Sequence
  Description of Artificial Sequence: Synthetic oligonucleotide
gcuucccuguuguugggau

SEQ ID NO: 3043522 - RNA, 19 nt, Artificial Sequence
  Description of Artificial Sequence: Synthetic oligonucleotide
guucuguggcuaauauauu

SEQ ID NO: 3043523 - RNA, 19 nt, Artificial Sequence
  Description of Artificial Sequence: Synthetic oligonucleotide
cuucccuguuguugggauu

SEQ ID NO: 3043524 - RNA, 19 nt, Artificial Sequence
  Description of Artificial Sequence: Synthetic oligonucleotide
gugcacccauccauacagu

SEQ ID NO: 3043525 - RNA, 19 nt, Artificial Sequence
  Description of Artificial Sequence: Synthetic oligonucleotide
ccacacccaccacugugaa

SEQ ID NO: 3043526 - RNA, 19 nt, Artificial Sequence
  Description of Artificial Sequence: Synthetic oligonucleotide
cacccaccacugugaaaau

SEQ ID NO: 3043527 - RNA, 19 nt, Artificial Sequence
  Description of Artificial Sequence: Synthetic oligonucleotide
cacccacacccaccacugu

SEQ ID NO: 3043528 - RNA, 19 nt, Artificial Sequence
  Description of Artificial Sequence: Synthetic oligonucleotide
gcugagccuuuugucccua

SEQ ID NO: 3043529 - RNA, 19 nt, Artificial Sequence
  Description of Artificial Sequence: Synthetic oligonucleotide
gcagaccaggcuggccuua

SEQ ID NO: 3043530 - RNA, 19 nt, Artificial Sequence
  Description of Artificial Sequence: Synthetic oligonucleotide
cccuguuguugggauuuua

SEQ ID NO: 3043531 - RNA, 19 nt, Artificial Sequence
  Description of Artificial Sequence: Synthetic oligonucleotide
cgaggaagcugagccuuuu

SEQ ID NO: 3043532 - RNA, 19 nt, Artificial Sequence
  Description of Artificial Sequence: Synthetic oligonucleotide
gaugauuccaaucaggaca

SEQ ID NO: 3043533 - RNA, 19 nt, Artificial Sequence
  Description of Artificial Sequence: Synthetic oligonucleotide
agugacuagaacuuugggg

SEQ ID NO: 3043534 - RNA, 19 nt, Artificial Sequence
  Description of Artificial Sequence: Synthetic oligonucleotide
cacuccaaaacuuucaggg

SEQ ID NO: 3043535 - RNA, 19 nt, Artificial Sequence
  Description of Artificial Sequence: Synthetic oligonucleotide
uuuccaauuggcuaagugc

SEQ ID NO: 3043536 - RNA, 19 nt, Artificial Sequence
  Description of Artificial Sequence: Synthetic oligonucleotide
cuuauuagaaugcagugac

SEQ ID NO: 3043537 - RNA, 19 nt, Artificial Sequence
  Description of Artificial Sequence: Synthetic oligonucleotide
uuccaauuggcuaagugcc

SEQ ID NO: 3043538 - RNA, 19 nt, Artificial Sequence
  Description of Artificial Sequence: Synthetic oligonucleotide
uucuucuuuguccacagag

SEQ ID NO: 3043539 - RNA, 19 nt, Artificial Sequence
  Description of Artificial Sequence: Synthetic oligonucleotide
ucuucuuuguccacagagg

SEQ ID NO: 3043540 - RNA, 19 nt, Artificial Sequence
  Description of Artificial Sequence: Synthetic oligonucleotide
gaauuccugauccuccugg

SEQ ID NO: 3043541 - RNA, 19 nt, Artificial Sequence
  Description of Artificial Sequence: Synthetic oligonucleotide
caaguucucugguagagcc

SEQ ID NO: 3043542 - RNA, 19 nt, Artificial Sequence
  Description of Artificial Sequence: Synthetic oligonucleotide
uuuguuuuguugagacagg

SEQ ID NO: 3043543 - RNA, 19 nt, Artificial Sequence
  Description of Artificial Sequence: Synthetic oligonucleotide
acaucugauuuccaauugg

SEQ ID NO: 3043544 - RNA, 19 nt, Artificial Sequence
  Description of Artificial Sequence: Synthetic oligonucleotide
uuccaaucaggacagucag

SEQ ID NO: 3043545 - RNA, 19 nt, Artificial Sequence
  Description of Artificial Sequence: Synthetic oligonucleotide
uguuccaucauucccaguu

SEQ ID NO: 3043546 - RNA, 19 nt, Artificial Sequence
  Description of Artificial Sequence: Synthetic oligonucleotide
ucugauuuccaauuggcua

SEQ ID NO: 3043547 - RNA, 19 nt, Artificial Sequence
  Description of Artificial Sequence: Synthetic oligonucleotide
cuugaauuccugauccucc

SEQ ID NO: 3043548 - RNA, 19 nt, Artificial Sequence
  Description of Artificial Sequence: Synthetic oligonucleotide
cuucuuuguccacagaggc

SEQ ID NO: 3043549 - RNA, 19 nt, Artificial Sequence
  Description of Artificial Sequence: Synthetic oligonucleotide
ucuuuguccacagaggcug

SEQ ID NO: 3043550 - RNA, 19 nt, Artificial Sequence
  Description of Artificial Sequence: Synthetic oligonucleotide
agcgugaugauuccaauca

SEQ ID NO: 3043551 - RNA, 19 nt, Artificial Sequence
  Description of Artificial Sequence: Synthetic oligonucleotide
aauuggcuaagugccaagg

SEQ ID NO: 3043552 - RNA, 19 nt, Artificial Sequence
  Description of Artificial Sequence: Synthetic oligonucleotide
uuuuguugagacagggcug

SEQ ID NO: 3043553 - RNA, 19 nt, Artificial Sequence
  Description of Artificial Sequence: Synthetic oligonucleotide
aagcgugaugauuccaauc

SEQ ID NO: 3043554 - RNA, 19 nt, Artificial Sequence
  Description of Artificial Sequence: Synthetic oligonucleotide
auuagaaugcagugacuag

SEQ ID NO: 3043555 - RNA, 19 nt, Artificial Sequence
  Description of Artificial Sequence: Synthetic oligonucleotide
uuagaaugcagugacuaga

SEQ ID NO: 3043556 - RNA, 19 nt, Artificial Sequence
  Description of Artificial Sequence: Synthetic oligonucleotide
uucccaguucaucagacac

SEQ ID NO: 3043557 - RNA, 19 nt, Artificial Sequence
  Description of Artificial Sequence: Synthetic oligonucleotide
aacccucucacuuucugca

SEQ ID NO: 3043558 - RNA, 19 nt, Artificial Sequence
  Description of Artificial Sequence: Synthetic oligonucleotide
uuuucccacaucugaaccc

SEQ ID NO: 3043559 - RNA, 19 nt, Artificial Sequence
  Description of Artificial Sequence: Synthetic oligonucleotide
uauuagaaugcagugacua

SEQ ID NO: 3043560 - RNA, 19 nt, Artificial Sequence
  Description of Artificial Sequence: Synthetic oligonucleotide
caucugauuuccaauuggc

SEQ ID NO: 3043561 - RNA, 19 nt, Artificial Sequence
  Description of Artificial Sequence: Synthetic oligonucleotide
ucagacacaucugauuucc

SEQ ID NO: 3043562 - RNA, 19 nt, Artificial Sequence
  Description of Artificial Sequence: Synthetic oligonucleotide
uuguuuuguugagacaggg

SEQ ID NO: 3043563 - RNA, 19 nt, Artificial Sequence
  Description of Artificial Sequence: Synthetic oligonucleotide
ugcaucugcuccaaguucu

SEQ ID NO: 3043564 - RNA, 19 nt, Artificial Sequence
  Description of Artificial Sequence: Synthetic oligonucleotide
gaaugcagugacuagaacu

SEQ ID NO: 3043565 - RNA, 19 nt, Artificial Sequence
  Description of Artificial Sequence: Synthetic oligonucleotide
auuuccaauuggcuaagug

SEQ ID NO: 3043566 - RNA, 19 nt, Artificial Sequence
  Description of Artificial Sequence: Synthetic oligonucleotide
uuuguugagacagggcugc

SEQ ID NO: 3043567 - RNA, 19 nt, Artificial Sequence
  Description of Artificial Sequence: Synthetic oligonucleotide
uguuuuguugagacagggc

SEQ ID NO: 3043568 - RNA, 19 nt, Artificial Sequence
  Description of Artificial Sequence: Synthetic oligonucleotide
ugggauuauaggcauguuc

SEQ ID NO: 3043569 - RNA, 19 nt, Artificial Sequence
  Description of Artificial Sequence: Synthetic oligonucleotide
ucuugcacuucugauguag

SEQ ID NO: 3043570 - RNA, 19 nt, Artificial Sequence
  Description of Artificial Sequence: Synthetic oligonucleotide
aaugcagugacuagaacuu

SEQ ID NO: 3043571 - RNA, 19 nt, Artificial Sequence
  Description of Artificial Sequence: Synthetic oligonucleotide
aggaacccuuauuagaaug

SEQ ID NO: 3043572 - RNA, 19 nt, Artificial Sequence
  Description of Artificial Sequence: Synthetic oligonucleotide
uuggcuaagugccaaggaa

SEQ ID NO: 3043573 - RNA, 19 nt, Artificial Sequence
  Description of Artificial Sequence: Synthetic oligonucleotide
gugacuagaacuuuggggu

SEQ ID NO: 3043574 - RNA, 19 nt, Artificial Sequence
  Description of Artificial Sequence: Synthetic oligonucleotide
ugcagugacuagaacuuug

SEQ ID NO: 3043575 - RNA, 19 nt, Artificial Sequence
  Description of Artificial Sequence: Synthetic oligonucleotide
uggcuaagugccaaggaac

SEQ ID NO: 3043576 - RNA, 19 nt, Artificial Sequence
  Description of Artificial Sequence: Synthetic oligonucleotide
aguucucugguagagccac

SEQ ID NO: 3043577 - RNA, 19 nt, Artificial Sequence
  Description of Artificial Sequence: Synthetic oligonucleotide
uugagacagggcugcaugg

SEQ ID NO: 3043578 - RNA, 19 nt, Artificial Sequence
  Description of Artificial Sequence: Synthetic oligonucleotide
uggucuugcacuucugaug

SEQ ID NO: 3043579 - RNA, 19 nt, Artificial Sequence
  Description of Artificial Sequence: Synthetic oligonucleotide
gggauuauaggcauguucc

SEQ ID NO: 3043580 - RNA, 19 nt, Artificial Sequence
  Description of Artificial Sequence: Synthetic oligonucleotide
guuuuguugagacagggcu

SEQ ID NO: 3043581 - RNA, 19 nt, Artificial Sequence
  Description of Artificial Sequence: Synthetic oligonucleotide
uagaaugcagugacuagaa

SEQ ID NO: 3043582 - RNA, 19 nt, Artificial Sequence
  Description of Artificial Sequence: Synthetic oligonucleotide
ugccaaggaacccuuauua

SEQ ID NO: 3043583 - RNA, 19 nt, Artificial Sequence
  Description of Artificial Sequence: Synthetic oligonucleotide
gaacuuugggguuuucuuc

SEQ ID NO: 3043584 - RNA, 19 nt, Artificial Sequence
  Description of Artificial Sequence: Synthetic oligonucleotide
ucucacuuucugcaucugc

SEQ ID NO: 3043585 - RNA, 19 nt, Artificial Sequence
  Description of Artificial Sequence: Synthetic oligonucleotide
aggcauguuccaucauucc

SEQ ID NO: 3043586 - RNA, 19 nt, Artificial Sequence
  Description of Artificial Sequence: Synthetic oligonucleotide
uaggcauguuccaucauuc

SEQ ID NO: 3043587 - RNA, 19 nt, Artificial Sequence
  Description of Artificial Sequence: Synthetic oligonucleotide
agaaugcagugacuagaac

SEQ ID NO: 3043588 - RNA, 19 nt, Artificial Sequence
  Description of Artificial Sequence: Synthetic oligonucleotide
aucagacacaucugauuuc

SEQ ID NO: 3043589 - RNA, 19 nt, Artificial Sequence
  Description of Artificial Sequence: Synthetic oligonucleotide
ugaugauuccaaucaggac

SEQ ID NO: 3043590 - RNA, 19 nt, Artificial Sequence
  Description of Artificial Sequence: Synthetic oligonucleotide
uuauuagaaugcagugacu

SEQ ID NO: 3043591 - RNA, 19 nt, Artificial Sequence
  Description of Artificial Sequence: Synthetic oligonucleotide
uggcucucccgcuagagug

SEQ ID NO: 3043592 - RNA, 19 nt, Artificial Sequence
  Description of Artificial Sequence: Synthetic oligonucleotide
guugagacagggcugcaug

SEQ ID NO: 3043593 - RNA, 19 nt, Artificial Sequence
  Description of Artificial Sequence: Synthetic oligonucleotide
uccaaguucucugguagag

SEQ ID NO: 3043594 - RNA, 19 nt, Artificial Sequence
  Description of Artificial Sequence: Synthetic oligonucleotide
agaacuuugggguuuucuu

SEQ ID NO: 3043595 - RNA, 19 nt, Artificial Sequence
  Description of Artificial Sequence: Synthetic oligonucleotide
gagacagggcugcaugggg

SEQ ID NO: 3043596 - RNA, 19 nt, Artificial Sequence
  Description of Artificial Sequence: Synthetic oligonucleotide
aaaagcgugaugauuccaa

SEQ ID NO: 3043597 - RNA, 19 nt, Artificial Sequence
  Description of Artificial Sequence: Synthetic oligonucleotide
acuucugauguagccaagg

SEQ ID NO: 3043598 - RNA, 19 nt, Artificial Sequence
  Description of Artificial Sequence: Synthetic oligonucleotide
ugaacccucucacuuucug

SEQ ID NO: 3043599 - RNA, 19 nt, Artificial Sequence
  Description of Artificial Sequence: Synthetic oligonucleotide
uugcacuucugauguagcc

SEQ ID NO: 3043600 - RNA, 19 nt, Artificial Sequence
  Description of Artificial Sequence: Synthetic oligonucleotide
aaagcgugaugauuccaau

SEQ ID NO: 3043601 - RNA, 19 nt, Artificial Sequence
  Description of Artificial Sequence: Synthetic oligonucleotide
ucugaacccucucacuuuc

SEQ ID NO: 3043602 - RNA, 19 nt, Artificial Sequence
  Description of Artificial Sequence: Synthetic oligonucleotide
caucauucccaguucauca

SEQ ID NO: 3043603 - RNA, 19 nt, Artificial Sequence
  Description of Artificial Sequence: Synthetic oligonucleotide
gggguuuucuucuuugucc

SEQ ID NO: 3043604 - RNA, 19 nt, Artificial Sequence
  Description of Artificial Sequence: Synthetic oligonucleotide
gguagagccacuccaaaac

SEQ ID NO: 3043605 - RNA, 19 nt, Artificial Sequence
  Description of Artificial Sequence: Synthetic oligonucleotide
caaggaacccuuauuagaa

SEQ ID NO: 3043606 - RNA, 19 nt, Artificial Sequence
  Description of Artificial Sequence: Synthetic oligonucleotide
ucauucccaguucaucaga

SEQ ID NO: 3043607 - RNA, 19 nt, Artificial Sequence
  Description of Artificial Sequence: Synthetic oligonucleotide
uucaucagacacaucugau

SEQ ID NO: 3043608 - RNA, 19 nt, Artificial Sequence
  Description of Artificial Sequence: Synthetic oligonucleotide
ucucccgcuagagugcugg

SEQ ID NO: 3043609 - RNA, 19 nt, Artificial Sequence
  Description of Artificial Sequence: Synthetic oligonucleotide
uugaauuccugauccuccu

SEQ ID NO: 3043610 - RNA, 19 nt, Artificial Sequence
  Description of Artificial Sequence: Synthetic oligonucleotide
ucaucagacacaucugauu

SEQ ID NO: 3043611 - RNA, 19 nt, Artificial Sequence
  Description of Artificial Sequence: Synthetic oligonucleotide
uguccacagaggcuguuga

SEQ ID NO: 3043612 - RNA, 19 nt, Artificial Sequence
  Description of Artificial Sequence: Synthetic oligonucleotide
uucuuuguccacagaggcu

SEQ ID NO: 3043613 - RNA, 19 nt, Artificial Sequence
  Description of Artificial Sequence: Synthetic oligonucleotide
gaacccucucacuuucugc

SEQ ID NO: 3043614 - RNA, 19 nt, Artificial Sequence
  Description of Artificial Sequence: Synthetic oligonucleotide
cugauuuccaauuggcuaa

SEQ ID NO: 3043615 - RNA, 19 nt, Artificial Sequence
  Description of Artificial Sequence: Synthetic oligonucleotide
ucugguagagccacuccaa

SEQ ID NO: 3043616 - RNA, 19 nt, Artificial Sequence
  Description of Artificial Sequence: Synthetic oligonucleotide
ugcacuucugauguagcca

SEQ ID NO: 3043617 - RNA, 19 nt, Artificial Sequence
  Description of Artificial Sequence: Synthetic oligonucleotide
aucugcuccaaguucucug

SEQ ID NO: 3043618 - RNA, 19 nt, Artificial Sequence
  Description of Artificial Sequence: Synthetic oligonucleotide
ugagacagggcugcauggg

SEQ ID NO: 3043619 - RNA, 19 nt, Artificial Sequence
  Description of Artificial Sequence: Synthetic oligonucleotide
aacccuuauuagaaugcag

SEQ ID NO: 3043620 - RNA, 19 nt, Artificial Sequence
  Description of Artificial Sequence: Synthetic oligonucleotide
cacaucugaacccucucac

SEQ ID NO: 3043621 - RNA, 19 nt, Artificial Sequence
  Description of Artificial Sequence: Synthetic oligonucleotide
ugaauuccugauccuccug

SEQ ID NO: 3043622 - RNA, 19 nt, Artificial Sequence
  Description of Artificial Sequence: Synthetic oligonucleotide
auaggcauguuccaucauu

SEQ ID NO: 3043623 - RNA, 19 nt, Artificial Sequence
  Description of Artificial Sequence: Synthetic oligonucleotide
auuggcuaagugccaagga

SEQ ID NO: 3043624 - RNA, 19 nt, Artificial Sequence
  Description of Artificial Sequence: Synthetic oligonucleotide
cauguuccaucauucccag

SEQ ID NO: 3043625 - RNA, 19 nt, Artificial Sequence
  Description of Artificial Sequence: Synthetic oligonucleotide
acacaucugauuuccaauu

SEQ ID NO: 3043626 - RNA, 19 nt, Artificial Sequence
  Description of Artificial Sequence: Synthetic oligonucleotide
acuccaaaacuuucaggga

SEQ ID NO: 3043627 - RNA, 19 nt, Artificial Sequence
  Description of Artificial Sequence: Synthetic oligonucleotide
auuccaaucaggacaguca

SEQ ID NO: 3043628 - RNA, 19 nt, Artificial Sequence
  Description of Artificial Sequence: Synthetic oligonucleotide
cauucccaguucaucagac

SEQ ID NO: 3043629 - RNA, 19 nt, Artificial Sequence
  Description of Artificial Sequence: Synthetic oligonucleotide
gauuccaaucaggacaguc

SEQ ID NO: 3043630 - RNA, 19 nt, Artificial Sequence
  Description of Artificial Sequence: Synthetic oligonucleotide
aaggaacccuuauuagaau

SEQ ID NO: 3043631 - RNA, 19 nt, Artificial Sequence
  Description of Artificial Sequence: Synthetic oligonucleotide
uccaauuggcuaagugcca

SEQ ID NO: 3043632 - RNA, 19 nt, Artificial Sequence
  Description of Artificial Sequence: Synthetic oligonucleotide
ucccaguucaucagacaca

SEQ ID NO: 3043633 - RNA, 19 nt, Artificial Sequence
  Description of Artificial Sequence: Synthetic oligonucleotide
agacacaucugauuuccaa

SEQ ID NO: 3043634 - RNA, 19 nt, Artificial Sequence
  Description of Artificial Sequence: Synthetic oligonucleotide
acccuuauuagaaugcagu

SEQ ID NO: 3043635 - RNA, 19 nt, Artificial Sequence
  Description of Artificial Sequence: Synthetic oligonucleotide
uuucccacaucugaacccu

SEQ ID NO: 3043636 - RNA, 19 nt, Artificial Sequence
  Description of Artificial Sequence: Synthetic oligonucleotide
acuuucugcaucugcucca

SEQ ID NO: 3043637 - RNA, 19 nt, Artificial Sequence
  Description of Artificial Sequence: Synthetic oligonucleotide
gugaugauuccaaucagga

SEQ ID NO: 3043638 - RNA, 19 nt, Artificial Sequence
  Description of Artificial Sequence: Synthetic oligonucleotide
cacaucugauuuccaauug

SEQ ID NO: 3043639 - RNA, 19 nt, Artificial Sequence
  Description of Artificial Sequence: Synthetic oligonucleotide
auccuccuggcucucccgc

SEQ ID NO: 3043640 - RNA, 19 nt, Artificial Sequence
  Description of Artificial Sequence: Synthetic oligonucleotide
ugggguuuucuucuuuguc

SEQ ID NO: 3043641 - RNA, 19 nt, Artificial Sequence
  Description of Artificial Sequence: Synthetic oligonucleotide
ggcauguuccaucauuccc

SEQ ID NO: 3043642 - RNA, 19 nt, Artificial Sequence
  Description of Artificial Sequence: Synthetic oligonucleotide
cagugacuagaacuuuggg

SEQ ID NO: 3043643 - RNA, 19 nt, Artificial Sequence
  Description of Artificial Sequence: Synthetic oligonucleotide
acaucugaacccucucacu

SEQ ID NO: 3043644 - RNA, 19 nt, Artificial Sequence
  Description of Artificial Sequence: Synthetic oligonucleotide
cuccaaaacuuucagggaa

SEQ ID NO: 3043645 - RNA, 19 nt, Artificial Sequence
  Description of Artificial Sequence: Synthetic oligonucleotide
ucacuuucugcaucugcuc

SEQ ID NO: 3043646 - RNA, 19 nt, Artificial Sequence
  Description of Artificial Sequence: Synthetic oligonucleotide
uagagccacuccaaaacuu

SEQ ID NO: 3043647 - RNA, 19 nt, Artificial Sequence
  Description of Artificial Sequence: Synthetic oligonucleotide
gcuccaaguucucugguag

SEQ ID NO: 3043648 - RNA, 19 nt, Artificial Sequence
  Description of Artificial Sequence: Synthetic oligonucleotide
ugguagagccacuccaaaa

SEQ ID NO: 3043649 - RNA, 19 nt, Artificial Sequence
  Description of Artificial Sequence: Synthetic oligonucleotide
cugcaugggguccaggcug

SEQ ID NO: 3043650 - RNA, 19 nt, Artificial Sequence
  Description of Artificial Sequence: Synthetic oligonucleotide
agugccaaggaacccuuau

SEQ ID NO: 3043651 - RNA, 19 nt, Artificial Sequence
  Description of Artificial Sequence: Synthetic oligonucleotide
gauccuccuggcucucccg

SEQ ID NO: 3043652 - RNA, 19 nt, Artificial Sequence
  Description of Artificial Sequence: Synthetic oligonucleotide
uugggguuuucuucuuugu

SEQ ID NO: 3043653 - RNA, 19 nt, Artificial Sequence
  Description of Artificial Sequence: Synthetic oligonucleotide
aguucaucagacacaucug

SEQ ID NO: 3043654 - RNA, 19 nt, Artificial Sequence
  Description of Artificial Sequence: Synthetic oligonucleotide
ggaacccuuauuagaaugc

SEQ ID NO: 3043655 - RNA, 19 nt, Artificial Sequence
  Description of Artificial Sequence: Synthetic oligonucleotide
caauuggcuaagugccaag

SEQ ID NO: 3043656 - RNA, 19 nt, Artificial Sequence
  Description of Artificial Sequence: Synthetic oligonucleotide
gaacccuuauuagaaugca

SEQ ID NO: 3043657 - RNA, 19 nt, Artificial Sequence
  Description of Artificial Sequence: Synthetic oligonucleotide
ucccacaucugaacccucu

SEQ ID NO: 3043658 - RNA, 19 nt, Artificial Sequence
  Description of Artificial Sequence: Synthetic oligonucleotide
aucugauuuccaauuggcu

SEQ ID NO: 3043659 - RNA, 19 nt, Artificial Sequence
  Description of Artificial Sequence: Synthetic oligonucleotide
uccaucauucccaguucau

SEQ ID NO: 3043660 - RNA, 19 nt, Artificial Sequence
  Description of Artificial Sequence: Synthetic oligonucleotide
uaagugccaaggaacccuu

SEQ ID NO: 3043661 - RNA, 19 nt, Artificial Sequence
  Description of Artificial Sequence: Synthetic oligonucleotide
gacacaucugauuuccaau

SEQ ID NO: 3043662 - RNA, 19 nt, Artificial Sequence
  Description of Artificial Sequence: Synthetic oligonucleotide
gccaaggaacccuuauuag

SEQ ID NO: 3043663 - RNA, 19 nt, Artificial Sequence
  Description of Artificial Sequence: Synthetic oligonucleotide
ugacuagaacuuugggguu

SEQ ID NO: 3043664 - RNA, 19 nt, Artificial Sequence
  Description of Artificial Sequence: Synthetic oligonucleotide
cucugguagagccacucca

SEQ ID NO: 3043665 - RNA, 19 nt, Artificial Sequence
  Description of Artificial Sequence: Synthetic oligonucleotide
gcagugacuagaacuuugg

SEQ ID NO: 3043666 - RNA, 19 nt, Artificial Sequence
  Description of Artificial Sequence: Synthetic oligonucleotide
cuucugauguagccaagga

SEQ ID NO: 3043667 - RNA, 19 nt, Artificial Sequence
  Description of Artificial Sequence: Synthetic oligonucleotide
ggguuuucuucuuugucca

SEQ ID NO: 3043668 - RNA, 19 nt, Artificial Sequence
  Description of Artificial Sequence: Synthetic oligonucleotide
guuccaucauucccaguuc

SEQ ID NO: 3043669 - RNA, 19 nt, Artificial Sequence
  Description of Artificial Sequence: Synthetic oligonucleotide
uucucugguagagccacuc

SEQ ID NO: 3043670 - RNA, 19 nt, Artificial Sequence
  Description of Artificial Sequence: Synthetic oligonucleotide
uccacagaggcuguugauu

SEQ ID NO: 3043671 - RNA, 19 nt, Artificial Sequence
  Description of Artificial Sequence: Synthetic oligonucleotide
gccacuccaaaacuuucag

SEQ ID NO: 3043672 - RNA, 19 nt, Artificial Sequence
  Description of Artificial Sequence: Synthetic oligonucleotide
ggcuaagugccaaggaacc

SEQ ID NO: 3043673 - RNA, 19 nt, Artificial Sequence
  Description of Artificial Sequence: Synthetic oligonucleotide
ccaaggaugaccuugaauu

SEQ ID NO: 3043674 - RNA, 19 nt, Artificial Sequence
  Description of Artificial Sequence: Synthetic oligonucleotide
aucugaacccucucacuuu

SEQ ID NO: 3043675 - RNA, 19 nt, Artificial Sequence
  Description of Artificial Sequence: Synthetic oligonucleotide
ugcuccaaguucucuggua

SEQ ID NO: 3043676 - RNA, 19 nt, Artificial Sequence
  Description of Artificial Sequence: Synthetic oligonucleotide
accuugaauuccugauccu

SEQ ID NO: 3043677 - RNA, 19 nt, Artificial Sequence
  Description of Artificial Sequence: Synthetic oligonucleotide
caucagacacaucugauuu

SEQ ID NO: 3043678 - RNA, 19 nt, Artificial Sequence
  Description of Artificial Sequence: Synthetic oligonucleotide
ggucuugcacuucugaugu

SEQ ID NO: 3043679 - RNA, 19 nt, Artificial Sequence
  Description of Artificial Sequence: Synthetic oligonucleotide
aaguucucugguagagcca

SEQ ID NO: 3043680 - RNA, 19 nt, Artificial Sequence
  Description of Artificial Sequence: Synthetic oligonucleotide
aggcuggucuugcacuucu

SEQ ID NO: 3043681 - RNA, 19 nt, Artificial Sequence
  Description of Artificial Sequence: Synthetic oligonucleotide
ccacuccaaaacuuucagg

SEQ ID NO: 3043682 - RNA, 19 nt, Artificial Sequence
  Description of Artificial Sequence: Synthetic oligonucleotide
gcauguuccaucauuccca

SEQ ID NO: 3043683 - RNA, 19 nt, Artificial Sequence
  Description of Artificial Sequence: Synthetic oligonucleotide
guagagccacuccaaaacu

SEQ ID NO: 3043684 - RNA, 19 nt, Artificial Sequence
  Description of Artificial Sequence: Synthetic oligonucleotide
ccaaggaacccuuauuaga

SEQ ID NO: 3043685 - RNA, 19 nt, Artificial Sequence
  Description of Artificial Sequence: Synthetic oligonucleotide
uguugagacagggcugcau

SEQ ID NO: 3043686 - RNA, 19 nt, Artificial Sequence
  Description of Artificial Sequence: Synthetic oligonucleotide
cacuucugauguagccaag

SEQ ID NO: 3043687 - RNA, 19 nt, Artificial Sequence
  Description of Artificial Sequence: Synthetic oligonucleotide
agagccacuccaaaacuuu

SEQ ID NO: 3043688 - RNA, 19 nt, Artificial Sequence
  Description of Artificial Sequence: Synthetic oligonucleotide
agccacuccaaaacuuuca

SEQ ID NO: 3043689 - RNA, 19 nt, Artificial Sequence
  Description of Artificial Sequence: Synthetic oligonucleotide
cuaagugccaaggaacccu

SEQ ID NO: 3043690 - RNA, 19 nt, Artificial Sequence
  Description of Artificial Sequence: Synthetic oligonucleotide
gcgugaugauuccaaucag

SEQ ID NO: 3043691 - RNA, 19 nt, Artificial Sequence
  Description of Artificial Sequence: Synthetic oligonucleotide
gcacuucugauguagccaa

SEQ ID NO: 3043692 - RNA, 19 nt, Artificial Sequence
  Description of Artificial Sequence: Synthetic oligonucleotide
guccaggcuggucuugcac

SEQ ID NO: 3043693 - RNA, 19 nt, Artificial Sequence
  Description of Artificial Sequence: Synthetic oligonucleotide
ccuuauuagaaugcaguga

SEQ ID NO: 3043694 - RNA, 19 nt, Artificial Sequence
  Description of Artificial Sequence: Synthetic oligonucleotide
agacagggcugcauggggu

SEQ ID NO: 3043695 - RNA, 19 nt, Artificial Sequence
  Description of Artificial Sequence: Synthetic oligonucleotide
cuccaaguucucugguaga

SEQ ID NO: 3043696 - RNA, 19 nt, Artificial Sequence
  Description of Artificial Sequence: Synthetic oligonucleotide
ucccgcuagagugcuggga

SEQ ID NO: 3043697 - RNA, 19 nt, Artificial Sequence
  Description of Artificial Sequence: Synthetic oligonucleotide
gcuaagugccaaggaaccc

SEQ ID NO: 3043698 - RNA, 19 nt, Artificial Sequence
  Description of Artificial Sequence: Synthetic oligonucleotide
uccuccuggcucucccgcu

SEQ ID NO: 3043699 - RNA, 19 nt, Artificial Sequence
  Description of Artificial Sequence: Synthetic oligonucleotide
gguuuucuucuuuguccac

SEQ ID NO: 3043700 - RNA, 19 nt, Artificial Sequence
  Description of Artificial Sequence: Synthetic oligonucleotide
acuagaacuuugggguuuu

SEQ ID NO: 3043701 - RNA, 19 nt, Artificial Sequence
  Description of Artificial Sequence: Synthetic oligonucleotide
ccuugaauuccugauccuc

SEQ ID NO: 3043702 - RNA, 19 nt, Artificial Sequence
  Description of Artificial Sequence: Synthetic oligonucleotide
caucugaacccucucacuu

SEQ ID NO: 3043703 - RNA, 19 nt, Artificial Sequence
  Description of Artificial Sequence: Synthetic oligonucleotide
uucccacaucugaacccuc

SEQ ID NO: 3043704 - RNA, 19 nt, Artificial Sequence
  Description of Artificial Sequence: Synthetic oligonucleotide
gcuggucuugcacuucuga

SEQ ID NO: 3043705 - RNA, 19 nt, Artificial Sequence
  Description of Artificial Sequence: Synthetic oligonucleotide
acccucucacuuucugcau

SEQ ID NO: 3043706 - RNA, 19 nt, Artificial Sequence
  Description of Artificial Sequence: Synthetic oligonucleotide
cuccuggcucucccgcuag

SEQ ID NO: 3043707 - RNA, 19 nt, Artificial Sequence
  Description of Artificial Sequence: Synthetic oligonucleotide
cucccgcuagagugcuggg

SEQ ID NO: 3043708 - RNA, 19 nt, Artificial Sequence
  Description of Artificial Sequence: Synthetic oligonucleotide
cugguagagccacuccaaa

SEQ ID NO: 3043709 - RNA, 19 nt, Artificial Sequence
  Description of Artificial Sequence: Synthetic oligonucleotide
uccuggcucucccgcuaga

SEQ ID NO: 3043710 - RNA, 19 nt, Artificial Sequence
  Description of Artificial Sequence: Synthetic oligonucleotide
uuguugagacagggcugca

SEQ ID NO: 3043711 - RNA, 19 nt, Artificial Sequence
  Description of Artificial Sequence: Synthetic oligonucleotide
ccaaguucucugguagagc

SEQ ID NO: 3043712 - RNA, 19 nt, Artificial Sequence
  Description of Artificial Sequence: Synthetic oligonucleotide
uuuguccacagaggcuguu

SEQ ID NO: 3043713 - RNA, 19 nt, Artificial Sequence
  Description of Artificial Sequence: Synthetic oligonucleotide
cagacacaucugauuucca

SEQ ID NO: 3043714 - RNA, 19 nt, Artificial Sequence
  Description of Artificial Sequence: Synthetic oligonucleotide
ugauuccaaucaggacagu

SEQ ID NO: 3043715 - RNA, 19 nt, Artificial Sequence
  Description of Artificial Sequence: Synthetic oligonucleotide
ccaucauucccaguucauc

SEQ ID NO: 3043716 - RNA, 19 nt, Artificial Sequence
  Description of Artificial Sequence: Synthetic oligonucleotide
gacuagaacuuugggguuu

SEQ ID NO: 3043717 - RNA, 19 nt, Artificial Sequence
  Description of Artificial Sequence: Synthetic oligonucleotide
cuggucuugcacuucugau

SEQ ID NO: 3043718 - RNA, 19 nt, Artificial Sequence
  Description of Artificial Sequence: Synthetic oligonucleotide
cugauccuccuggcucucc

SEQ ID NO: 3043719 - RNA, 19 nt, Artificial Sequence
  Description of Artificial Sequence: Synthetic oligonucleotide
augcagugacuagaacuuu

SEQ ID NO: 3043720 - RNA, 19 nt, Artificial Sequence
  Description of Artificial Sequence: Synthetic oligonucleotide
cucucacuuucugcaucug

SEQ ID NO: 3043721 - RNA, 19 nt, Artificial Sequence
  Description of Artificial Sequence: Synthetic oligonucleotide
gauuuccaauuggcuaagu

SEQ ID NO: 3043722 - RNA, 19 nt, Artificial Sequence
  Description of Artificial Sequence: Synthetic oligonucleotide
cuagaacuuugggguuuuc

SEQ ID NO: 3043723 - RNA, 19 nt, Artificial Sequence
  Description of Artificial Sequence: Synthetic oligonucleotide
caugggguccaggcugguc

SEQ ID NO: 3043724 - RNA, 19 nt, Artificial Sequence
  Description of Artificial Sequence: Synthetic oligonucleotide
ccacaucugaacccucuca

SEQ ID NO: 3043725 - RNA, 19 nt, Artificial Sequence
  Description of Artificial Sequence: Synthetic oligonucleotide
aagugccaaggaacccuua

SEQ ID NO: 3043726 - RNA, 19 nt, Artificial Sequence
  Description of Artificial Sequence: Synthetic oligonucleotide
cccucucacuuucugcauc

SEQ ID NO: 3043727 - RNA, 19 nt, Artificial Sequence
  Description of Artificial Sequence: Synthetic oligonucleotide
cuuuguccacagaggcugu

SEQ ID NO: 3043728 - RNA, 19 nt, Artificial Sequence
  Description of Artificial Sequence: Synthetic oligonucleotide
gugccaaggaacccuuauu

SEQ ID NO: 3043729 - RNA, 19 nt, Artificial Sequence
  Description of Artificial Sequence: Synthetic oligonucleotide
agggcugcaugggguccag

SEQ ID NO: 3043730 - RNA, 19 nt, Artificial Sequence
  Description of Artificial Sequence: Synthetic oligonucleotide
ccuggcucucccgcuagag

SEQ ID NO: 3043731 - RNA, 19 nt, Artificial Sequence
  Description of Artificial Sequence: Synthetic oligonucleotide
ggguccaggcuggucuugc

SEQ ID NO: 3043732 - RNA, 19 nt, Artificial Sequence
  Description of Artificial Sequence: Synthetic oligonucleotide
caggcuggucuugcacuuc

SEQ ID NO: 3043733 - RNA, 19 nt, Artificial Sequence
  Description of Artificial Sequence: Synthetic oligonucleotide
cucucccgcuagagugcug

SEQ ID NO: 3043734 - RNA, 19 nt, Artificial Sequence
  Description of Artificial Sequence: Synthetic oligonucleotide
ccaauuggcuaagugccaa

SEQ ID NO: 3043735 - RNA, 19 nt, Artificial Sequence
  Description of Artificial Sequence: Synthetic oligonucleotide
ccaaaacuuucagggaaaa

SEQ ID NO: 3043736 - RNA, 19 nt, Artificial Sequence
  Description of Artificial Sequence: Synthetic oligonucleotide
guccacagaggcuguugau

SEQ ID NO: 3043737 - RNA, 19 nt, Artificial Sequence
  Description of Artificial Sequence: Synthetic oligonucleotide
cuggcucucccgcuagagu

SEQ ID NO: 3043738 - RNA, 19 nt, Artificial Sequence
  Description of Artificial Sequence: Synthetic oligonucleotide
gguccaggcuggucuugca

SEQ ID NO: 3043739 - RNA, 19 nt, Artificial Sequence
  Description of Artificial Sequence: Synthetic oligonucleotide
gucuugcacuucugaugua

SEQ ID NO: 3043740 - RNA, 19 nt, Artificial Sequence
  Description of Artificial Sequence: Synthetic oligonucleotide
cugaacccucucacuuucu

SEQ ID NO: 3043741 - RNA, 19 nt, Artificial Sequence
  Description of Artificial Sequence: Synthetic oligonucleotide
ccucucacuuucugcaucu

SEQ ID NO: 3043742 - RNA, 19 nt, Artificial Sequence
  Description of Artificial Sequence: Synthetic oligonucleotide
cagggcugcauggggucca

SEQ ID NO: 3043743 - RNA, 19 nt, Artificial Sequence
  Description of Artificial Sequence: Synthetic oligonucleotide
caucugcuccaaguucucu

SEQ ID NO: 3043744 - RNA, 19 nt, Artificial Sequence
  Description of Artificial Sequence: Synthetic oligonucleotide
cccaguucaucagacacau

SEQ ID NO: 3043745 - RNA, 19 nt, Artificial Sequence
  Description of Artificial Sequence: Synthetic oligonucleotide
ccaguucaucagacacauc

SEQ ID NO: 3043746 - RNA, 19 nt, Artificial Sequence
  Description of Artificial Sequence: Synthetic oligonucleotide
cccgcuagagugcugggau

SEQ ID NO: 3043747 - RNA, 19 nt, Artificial Sequence
  Description of Artificial Sequence: Synthetic oligonucleotide
gggguccaggcuggucuug

SEQ ID NO: 3043748 - RNA, 19 nt, Artificial Sequence
  Description of Artificial Sequence: Synthetic oligonucleotide
cgcuagagugcugggauua

SEQ ID NO: 3043749 - RNA, 19 nt, Artificial Sequence
  Description of Artificial Sequence: Synthetic oligonucleotide
gcucucccgcuagagugcu

SEQ ID NO: 3043750 - RNA, 19 nt, Artificial Sequence
  Description of Artificial Sequence: Synthetic oligonucleotide
ccuccuggcucucccgcua

SEQ ID NO: 3043751 - RNA, 19 nt, Artificial Sequence
  Description of Artificial Sequence: Synthetic oligonucleotide
ccgcuagagugcugggauu

SEQ ID NO: 3043752 - RNA, 19 nt, Artificial Sequence
  Description of Artificial Sequence: Synthetic oligonucleotide
gcaugggguccaggcuggu

SEQ ID NO: 3043753 - RNA, 19 nt, Artificial Sequence
  Description of Artificial Sequence: Synthetic oligonucleotide
ucuaauucuuccaucauug

SEQ ID NO: 3043754 - RNA, 19 nt, Artificial Sequence
  Description of Artificial Sequence: Synthetic oligonucleotide
uguuccuugacuuccaagg

SEQ ID NO: 3043755 - RNA, 19 nt, Artificial Sequence
  Description of Artificial Sequence: Synthetic oligonucleotide
uucauaaccuccuacaaug

SEQ ID NO: 3043756 - RNA, 19 nt, Artificial Sequence
  Description of Artificial Sequence: Synthetic oligonucleotide
ucgacaauggauuugauaa

SEQ ID NO: 3043757 - RNA, 19 nt, Artificial Sequence
  Description of Artificial Sequence: Synthetic oligonucleotide
aaagguuuaguucccagug

SEQ ID NO: 3043758 - RNA, 19 nt, Artificial Sequence
  Description of Artificial Sequence: Synthetic oligonucleotide
uuuacaguuguauaaguac

SEQ ID NO: 3043759 - RNA, 19 nt, Artificial Sequence
  Description of Artificial Sequence: Synthetic oligonucleotide
aaugcagaagcccagacuu

SEQ ID NO: 3043760 - RNA, 19 nt, Artificial Sequence
  Description of Artificial Sequence: Synthetic oligonucleotide
aguuguauaaguacugugg

SEQ ID NO: 3043761 - RNA, 19 nt, Artificial Sequence
  Description of Artificial Sequence: Synthetic oligonucleotide
uguauaaguacugugguaa

SEQ ID NO: 3043762 - RNA, 19 nt, Artificial Sequence
  Description of Artificial Sequence: Synthetic oligonucleotide
uuacaguuguauaaguacu

SEQ ID NO: 3043763 - RNA, 19 nt, Artificial Sequence
  Description of Artificial Sequence: Synthetic oligonucleotide
aauucuuccaucauuguau

SEQ ID NO: 3043764 - RNA, 19 nt, Artificial Sequence
  Description of Artificial Sequence: Synthetic oligonucleotide
auaaguacugugguaauuc

SEQ ID NO: 3043765 - RNA, 19 nt, Artificial Sequence
  Description of Artificial Sequence: Synthetic oligonucleotide
aaaagguuuaguucccagu

SEQ ID NO: 3043766 - RNA, 19 nt, Artificial Sequence
  Description of Artificial Sequence: Synthetic oligonucleotide
gguaauuccagccacauga

SEQ ID NO: 3043767 - RNA, 19 nt, Artificial Sequence
  Description of Artificial Sequence: Synthetic oligonucleotide
caguguauucuucauaacc

SEQ ID NO: 3043768 - RNA, 19 nt, Artificial Sequence
  Description of Artificial Sequence: Synthetic oligonucleotide
acuuccaaggcuuugagua

SEQ ID NO: 3043769 - RNA, 19 nt, Artificial Sequence
  Description of Artificial Sequence: Synthetic oligonucleotide
acaucuaauucuuccauca

SEQ ID NO: 3043770 - RNA, 19 nt, Artificial Sequence
  Description of Artificial Sequence: Synthetic oligonucleotide
uacaguuguauaaguacug

SEQ ID NO: 3043771 - RNA, 19 nt, Artificial Sequence
  Description of Artificial Sequence: Synthetic oligonucleotide
uucuucauaaccuccuaca

SEQ ID NO: 3043772 - RNA, 19 nt, Artificial Sequence
  Description of Artificial Sequence: Synthetic oligonucleotide
uguuccuucgacaauggau

SEQ ID NO: 3043773 - RNA, 19 nt, Artificial Sequence
  Description of Artificial Sequence: Synthetic oligonucleotide
aaggcuuugaguaccacug

SEQ ID NO: 3043774 - RNA, 19 nt, Artificial Sequence
  Description of Artificial Sequence: Synthetic oligonucleotide
aagcaggcauguaucaugc

SEQ ID NO: 3043775 - RNA, 19 nt, Artificial Sequence
  Description of Artificial Sequence: Synthetic oligonucleotide
ucuuccaucauuguaugcu

SEQ ID NO: 3043776 - RNA, 19 nt, Artificial Sequence
  Description of Artificial Sequence: Synthetic oligonucleotide
ugucacaucuuuacaguug

SEQ ID NO: 3043777 - RNA, 19 nt, Artificial Sequence
  Description of Artificial Sequence: Synthetic oligonucleotide
auggggaccagucaccagg

SEQ ID NO: 3043778 - RNA, 19 nt, Artificial Sequence
  Description of Artificial Sequence: Synthetic oligonucleotide
guugacagcgagaagaaug

SEQ ID NO: 3043779 - RNA, 19 nt, Artificial Sequence
  Description of Artificial Sequence: Synthetic oligonucleotide
uugacagcgagaagaaugu

SEQ ID NO: 3043780 - RNA, 19 nt, Artificial Sequence
  Description of Artificial Sequence: Synthetic oligonucleotide
uguaucaugcccgacguac

SEQ ID NO: 3043781 - RNA, 19 nt, Artificial Sequence
  Description of Artificial Sequence: Synthetic oligonucleotide
uacugugguaauuccagcc

SEQ ID NO: 3043782 - RNA, 19 nt, Artificial Sequence
  Description of Artificial Sequence: Synthetic oligonucleotide
aguauuccuccguaguguc

SEQ ID NO: 3043783 - RNA, 19 nt, Artificial Sequence
  Description of Artificial Sequence: Synthetic oligonucleotide
caggcauguaucaugcccg

SEQ ID NO: 3043784 - RNA, 19 nt, Artificial Sequence
  Description of Artificial Sequence: Synthetic oligonucleotide
ugugguuggaguccagggc

SEQ ID NO: 3043785 - RNA, 19 nt, Artificial Sequence
  Description of Artificial Sequence: Synthetic oligonucleotide
cuuccugcaguauuccucc

SEQ ID NO: 3043786 - RNA, 19 nt, Artificial Sequence
  Description of Artificial Sequence: Synthetic oligonucleotide
uugugguuggaguccaggg

SEQ ID NO: 3043787 - RNA, 19 nt, Artificial Sequence
  Description of Artificial Sequence: Synthetic oligonucleotide
uaauucuuccaucauugua

SEQ ID NO: 3043788 - RNA, 19 nt, Artificial Sequence
  Description of Artificial Sequence: Synthetic oligonucleotide
uuuaguucccaguguauuc

SEQ ID NO: 3043789 - RNA, 19 nt, Artificial Sequence
  Description of Artificial Sequence: Synthetic oligonucleotide
acagcgagaagaaugucac

SEQ ID NO: 3043790 - RNA, 19 nt, Artificial Sequence
  Description of Artificial Sequence: Synthetic oligonucleotide
uaaguacugugguaauucc

SEQ ID NO: 3043791 - RNA, 19 nt, Artificial Sequence
  Description of Artificial Sequence: Synthetic oligonucleotide
aguguauucuucauaaccu

SEQ ID NO: 3043792 - RNA, 19 nt, Artificial Sequence
  Description of Artificial Sequence: Synthetic oligonucleotide
uuccaucauuguaugcugg

SEQ ID NO: 3043793 - RNA, 19 nt, Artificial Sequence
  Description of Artificial Sequence: Synthetic oligonucleotide
ucuucauaaccuccuacaa

SEQ ID NO: 3043794 - RNA, 19 nt, Artificial Sequence
  Description of Artificial Sequence: Synthetic oligonucleotide
aguacugugguaauuccag

SEQ ID NO: 3043795 - RNA, 19 nt, Artificial Sequence
  Description of Artificial Sequence: Synthetic oligonucleotide
acaaugcagaagcccagac

SEQ ID NO: 3043796 - RNA, 19 nt, Artificial Sequence
  Description of Artificial Sequence: Synthetic oligonucleotide
agugucacaucuuuacagu

SEQ ID NO: 3043797 - RNA, 19 nt, Artificial Sequence
  Description of Artificial Sequence: Synthetic oligonucleotide
ucuuuacaguuguauaagu

SEQ ID NO: 3043798 - RNA, 19 nt, Artificial Sequence
  Description of Artificial Sequence: Synthetic oligonucleotide
ucauaaccuccuacaaugc

SEQ ID NO: 3043799 - RNA, 19 nt, Artificial Sequence
  Description of Artificial Sequence: Synthetic oligonucleotide
uaaccuccuacaaugcaga

SEQ ID NO: 3043800 - RNA, 19 nt, Artificial Sequence
  Description of Artificial Sequence: Synthetic oligonucleotide
ugucaccacaucuaauucu

SEQ ID NO: 3043801 - RNA, 19 nt, Artificial Sequence
  Description of Artificial Sequence: Synthetic oligonucleotide
augucaccacaucuaauuc

SEQ ID NO: 3043802 - RNA, 19 nt, Artificial Sequence
  Description of Artificial Sequence: Synthetic oligonucleotide
cauuguaugcugguguucc

SEQ ID NO: 3043803 - RNA, 19 nt, Artificial Sequence
  Description of Artificial Sequence: Synthetic oligonucleotide
aucuuuacaguuguauaag

SEQ ID NO: 3043804 - RNA, 19 nt, Artificial Sequence
  Description of Artificial Sequence: Synthetic oligonucleotide
aagguuuaguucccagugu

SEQ ID NO: 3043805 - RNA, 19 nt, Artificial Sequence
  Description of Artificial Sequence: Synthetic oligonucleotide
uaauuccagccacaugacc

SEQ ID NO: 3043806 - RNA, 19 nt, Artificial Sequence
  Description of Artificial Sequence: Synthetic oligonucleotide
auaaccuccuacaaugcag

SEQ ID NO: 3043807 - RNA, 19 nt, Artificial Sequence
  Description of Artificial Sequence: Synthetic oligonucleotide
ugcaguauuccuccguagu

SEQ ID NO: 3043808 - RNA, 19 nt, Artificial Sequence
  Description of Artificial Sequence: Synthetic oligonucleotide
agcgagaagaaugucacca

SEQ ID NO: 3043809 - RNA, 19 nt, Artificial Sequence
  Description of Artificial Sequence: Synthetic oligonucleotide
caagcaggcauguaucaug

SEQ ID NO: 3043810 - RNA, 19 nt, Artificial Sequence
  Description of Artificial Sequence: Synthetic oligonucleotide
gaagaaugucaccacaucu

SEQ ID NO: 3043811 - RNA, 19 nt, Artificial Sequence
  Description of Artificial Sequence: Synthetic oligonucleotide
acugugguaauuccagcca

SEQ ID NO: 3043812 - RNA, 19 nt, Artificial Sequence
  Description of Artificial Sequence: Synthetic oligonucleotide
auucuuccaucauuguaug

SEQ ID NO: 3043813 - RNA, 19 nt, Artificial Sequence
  Description of Artificial Sequence: Synthetic oligonucleotide
agaaugucaccacaucuaa

SEQ ID NO: 3043814 - RNA, 19 nt, Artificial Sequence
  Description of Artificial Sequence: Synthetic oligonucleotide
caucuuuacaguuguauaa

SEQ ID NO: 3043815 - RNA, 19 nt, Artificial Sequence
  Description of Artificial Sequence: Synthetic oligonucleotide
uggaguccagggcugcugg

SEQ ID NO: 3043816 - RNA, 19 nt, Artificial Sequence
  Description of Artificial Sequence: Synthetic oligonucleotide
uuaguucccaguguauucu

SEQ ID NO: 3043817 - RNA, 19 nt, Artificial Sequence
  Description of Artificial Sequence: Synthetic oligonucleotide
augcccgacguacuccucc

SEQ ID NO: 3043818 - RNA, 19 nt, Artificial Sequence
  Description of Artificial Sequence: Synthetic oligonucleotide
ugacuuccaaggcuuugag

SEQ ID NO: 3043819 - RNA, 19 nt, Artificial Sequence
  Description of Artificial Sequence: Synthetic oligonucleotide
ugugguaauuccagccaca

SEQ ID NO: 3043820 - RNA, 19 nt, Artificial Sequence
  Description of Artificial Sequence: Synthetic oligonucleotide
gcauguaucaugcccgacg

SEQ ID NO: 3043821 - RNA, 19 nt, Artificial Sequence
  Description of Artificial Sequence: Synthetic oligonucleotide
ugguguuccuucgacaaug

SEQ ID NO: 3043822 - RNA, 19 nt, Artificial Sequence
  Description of Artificial Sequence: Synthetic oligonucleotide
accacaucuaauucuucca

SEQ ID NO: 3043823 - RNA, 19 nt, Artificial Sequence
  Description of Artificial Sequence: Synthetic oligonucleotide
cuuccaucauuguaugcug

SEQ ID NO: 3043824 - RNA, 19 nt, Artificial Sequence
  Description of Artificial Sequence: Synthetic oligonucleotide
acaucuuuacaguuguaua

SEQ ID NO: 3043825 - RNA, 19 nt, Artificial Sequence
  Description of Artificial Sequence: Synthetic oligonucleotide
aagaaugucaccacaucua

SEQ ID NO: 3043826 - RNA, 19 nt, Artificial Sequence
  Description of Artificial Sequence: Synthetic oligonucleotide
aucuaauucuuccaucauu

SEQ ID NO: 3043827 - RNA, 19 nt, Artificial Sequence
  Description of Artificial Sequence: Synthetic oligonucleotide
caguuguauaaguacugug

SEQ ID NO: 3043828 - RNA, 19 nt, Artificial Sequence
  Description of Artificial Sequence: Synthetic oligonucleotide
uauuccuccguagugucac

SEQ ID NO: 3043829 - RNA, 19 nt, Artificial Sequence
  Description of Artificial Sequence: Synthetic oligonucleotide
uucgacaauggauuugaua

SEQ ID NO: 3043830 - RNA, 19 nt, Artificial Sequence
  Description of Artificial Sequence: Synthetic oligonucleotide
acuuccugcaguauuccuc

SEQ ID NO: 3043831 - RNA, 19 nt, Artificial Sequence
  Description of Artificial Sequence: Synthetic oligonucleotide
gacaauggauuugauaaaa

SEQ ID NO: 3043832 - RNA, 19 nt, Artificial Sequence
  Description of Artificial Sequence: Synthetic oligonucleotide
guacuccucccguugacag

SEQ ID NO: 3043833 - RNA, 19 nt, Artificial Sequence
  Description of Artificial Sequence: Synthetic oligonucleotide
uuguauaaguacuguggua

SEQ ID NO: 3043834 - RNA, 19 nt, Artificial Sequence
  Description of Artificial Sequence: Synthetic oligonucleotide
uaugcugguguuccuucga

SEQ ID NO: 3043835 - RNA, 19 nt, Artificial Sequence
  Description of Artificial Sequence: Synthetic oligonucleotide
auugugguuggaguccagg

SEQ ID NO: 3043836 - RNA, 19 nt, Artificial Sequence
  Description of Artificial Sequence: Synthetic oligonucleotide
uccaucauuguaugcuggu

SEQ ID NO: 3043837 - RNA, 19 nt, Artificial Sequence
  Description of Artificial Sequence: Synthetic oligonucleotide
gacagcgagaagaauguca

SEQ ID NO: 3043838 - RNA, 19 nt, Artificial Sequence
  Description of Artificial Sequence: Synthetic oligonucleotide
cuacaaugcagaagcccag

SEQ ID NO: 3043839 - RNA, 19 nt, Artificial Sequence
  Description of Artificial Sequence: Synthetic oligonucleotide
guuguauaaguacuguggu

SEQ ID NO: 3043840 - RNA, 19 nt, Artificial Sequence
  Description of Artificial Sequence: Synthetic oligonucleotide
uguaugcugguguuccuuc

SEQ ID NO: 3043841 - RNA, 19 nt, Artificial Sequence
  Description of Artificial Sequence: Synthetic oligonucleotide
augcugguguuccuucgac

SEQ ID NO: 3043842 - RNA, 19 nt, Artificial Sequence
  Description of Artificial Sequence: Synthetic oligonucleotide
cagacuuccugcaguauuc

SEQ ID NO: 3043843 - RNA, 19 nt, Artificial Sequence
  Description of Artificial Sequence: Synthetic oligonucleotide
aucaugcccgacguacucc

SEQ ID NO: 3043844 - RNA, 19 nt, Artificial Sequence
  Description of Artificial Sequence: Synthetic oligonucleotide
uugacuuccaaggcuuuga

SEQ ID NO: 3043845 - RNA, 19 nt, Artificial Sequence
  Description of Artificial Sequence: Synthetic oligonucleotide
uauucuucauaaccuccua

SEQ ID NO: 3043846 - RNA, 19 nt, Artificial Sequence
  Description of Artificial Sequence: Synthetic oligonucleotide
aaguacugugguaauucca

SEQ ID NO: 3043847 - RNA, 19 nt, Artificial Sequence
  Description of Artificial Sequence: Synthetic oligonucleotide
agacuuccugcaguauucc

SEQ ID NO: 3043848 - RNA, 19 nt, Artificial Sequence
  Description of Artificial Sequence: Synthetic oligonucleotide
guguauucuucauaaccuc

SEQ ID NO: 3043849 - RNA, 19 nt, Artificial Sequence
  Description of Artificial Sequence: Synthetic oligonucleotide
uuccaaggcuuugaguacc

SEQ ID NO: 3043850 - RNA, 19 nt, Artificial Sequence
  Description of Artificial Sequence: Synthetic oligonucleotide
auuccagccacaugaccca

SEQ ID NO: 3043851 - RNA, 19 nt, Artificial Sequence
  Description of Artificial Sequence: Synthetic oligonucleotide
cuuuacaguuguauaagua

SEQ ID NO: 3043852 - RNA, 19 nt, Artificial Sequence
  Description of Artificial Sequence: Synthetic oligonucleotide
uccguagugucacaucuuu

SEQ ID NO: 3043853 - RNA, 19 nt, Artificial Sequence
  Description of Artificial Sequence: Synthetic oligonucleotide
cacaucuaauucuuccauc

SEQ ID NO: 3043854 - RNA, 19 nt, Artificial Sequence
  Description of Artificial Sequence: Synthetic oligonucleotide
caggauggggaccagucac

SEQ ID NO: 3043855 - RNA, 19 nt, Artificial Sequence
  Description of Artificial Sequence: Synthetic oligonucleotide
uaucaugcccgacguacuc

SEQ ID NO: 3043856 - RNA, 19 nt, Artificial Sequence
  Description of Artificial Sequence: Synthetic oligonucleotide
aagcccagacuuccugcag

SEQ ID NO: 3043857 - RNA, 19 nt, Artificial Sequence
  Description of Artificial Sequence: Synthetic oligonucleotide
acaguuguauaaguacugu

SEQ ID NO: 3043858 - RNA, 19 nt, Artificial Sequence
  Description of Artificial Sequence: Synthetic oligonucleotide
agguuuaguucccagugua

SEQ ID NO: 3043859 - RNA, 19 nt, Artificial Sequence
  Description of Artificial Sequence: Synthetic oligonucleotide
uucuuccaucauuguaugc

SEQ ID NO: 3043860 - RNA, 19 nt, Artificial Sequence
  Description of Artificial Sequence: Synthetic oligonucleotide
gcaggcauguaucaugccc

SEQ ID NO: 3043861 - RNA, 19 nt, Artificial Sequence
  Description of Artificial Sequence: Synthetic oligonucleotide
ugguaauuccagccacaug

SEQ ID NO: 3043862 - RNA, 19 nt, Artificial Sequence
  Description of Artificial Sequence: Synthetic oligonucleotide
agcaggcauguaucaugcc

SEQ ID NO: 3043863 - RNA, 19 nt, Artificial Sequence
  Description of Artificial Sequence: Synthetic oligonucleotide
gcugcagucuuccuggagc

SEQ ID NO: 3043864 - RNA, 19 nt, Artificial Sequence
  Description of Artificial Sequence: Synthetic oligonucleotide
cugugguaauuccagccac

SEQ ID NO: 3043865 - RNA, 19 nt, Artificial Sequence
  Description of Artificial Sequence: Synthetic oligonucleotide
cacaugacccaggaugggg

SEQ ID NO: 3043866 - RNA, 19 nt, Artificial Sequence
  Description of Artificial Sequence: Synthetic oligonucleotide
aucauuguaugcugguguu

SEQ ID NO: 3043867 - RNA, 19 nt, Artificial Sequence
  Description of Artificial Sequence: Synthetic oligonucleotide
uauaaguacugugguaauu

SEQ ID NO: 3043868 - RNA, 19 nt, Artificial Sequence
  Description of Artificial Sequence: Synthetic oligonucleotide
ucaugcccgacguacuccu

SEQ ID NO: 3043869 - RNA, 19 nt, Artificial Sequence
  Description of Artificial Sequence: Synthetic oligonucleotide
guagugucacaucuuuaca

SEQ ID NO: 3043870 - RNA, 19 nt, Artificial Sequence
  Description of Artificial Sequence: Synthetic oligonucleotide
accaggcggggucacauug

SEQ ID NO: 3043871 - RNA, 19 nt, Artificial Sequence
  Description of Artificial Sequence: Synthetic oligonucleotide
gggaccagucaccaggcgg

SEQ ID NO: 3043872 - RNA, 19 nt, Artificial Sequence
  Description of Artificial Sequence: Synthetic oligonucleotide
guacugugguaauuccagc

SEQ ID NO: 3043873 - RNA, 19 nt, Artificial Sequence
  Description of Artificial Sequence: Synthetic oligonucleotide
aggauggggaccagucacc

SEQ ID NO: 3043874 - RNA, 19 nt, Artificial Sequence
  Description of Artificial Sequence: Synthetic oligonucleotide
gaagcccagacuuccugca

SEQ ID NO: 3043875 - RNA, 19 nt, Artificial Sequence
  Description of Artificial Sequence: Synthetic oligonucleotide
uacaaugcagaagcccaga

SEQ ID NO: 3043876 - RNA, 19 nt, Artificial Sequence
  Description of Artificial Sequence: Synthetic oligonucleotide
uccaaggcuuugaguacca

SEQ ID NO: 3043877 - RNA, 19 nt, Artificial Sequence
  Description of Artificial Sequence: Synthetic oligonucleotide
cuguuccuugacuuccaag

SEQ ID NO: 3043878 - RNA, 19 nt, Artificial Sequence
  Description of Artificial Sequence: Synthetic oligonucleotide
cauaaccuccuacaaugca

SEQ ID NO: 3043879 - RNA, 19 nt, Artificial Sequence
  Description of Artificial Sequence: Synthetic oligonucleotide
acguacuccucccguugac

SEQ ID NO: 3043880 - RNA, 19 nt, Artificial Sequence
  Description of Artificial Sequence: Synthetic oligonucleotide
ugcugguguuccuucgaca

SEQ ID NO: 3043881 - RNA, 19 nt, Artificial Sequence
  Description of Artificial Sequence: Synthetic oligonucleotide
uccugcaguauuccuccgu

SEQ ID NO: 3043882 - RNA, 19 nt, Artificial Sequence
  Description of Artificial Sequence: Synthetic oligonucleotide
ugguuggaguccagggcug

SEQ ID NO: 3043883 - RNA, 19 nt, Artificial Sequence
  Description of Artificial Sequence: Synthetic oligonucleotide
augacccaggauggggacc

SEQ ID NO: 3043884 - RNA, 19 nt, Artificial Sequence
  Description of Artificial Sequence: Synthetic oligonucleotide
cguagugucacaucuuuac

SEQ ID NO: 3043885 - RNA, 19 nt, Artificial Sequence
  Description of Artificial Sequence: Synthetic oligonucleotide
gucacaucuuuacaguugu

SEQ ID NO: 3043886 - RNA, 19 nt, Artificial Sequence
  Description of Artificial Sequence: Synthetic oligonucleotide
ccuacaaugcagaagccca

SEQ ID NO: 3043887 - RNA, 19 nt, Artificial Sequence
  Description of Artificial Sequence: Synthetic oligonucleotide
auuguaugcugguguuccu

SEQ ID NO: 3043888 - RNA, 19 nt, Artificial Sequence
  Description of Artificial Sequence: Synthetic oligonucleotide
uccuucgacaauggauuug

SEQ ID NO: 3043889 - RNA, 19 nt, Artificial Sequence
  Description of Artificial Sequence: Synthetic oligonucleotide
gucacauugugguuggagu

SEQ ID NO: 3043890 - RNA, 19 nt, Artificial Sequence
  Description of Artificial Sequence: Synthetic oligonucleotide
gcaguauuccuccguagug

SEQ ID NO: 3043891 - RNA, 19 nt, Artificial Sequence
  Description of Artificial Sequence: Synthetic oligonucleotide
gauggggaccagucaccag

SEQ ID NO: 3043892 - RNA, 19 nt, Artificial Sequence
  Description of Artificial Sequence: Synthetic oligonucleotide
ucccaguguauucuucaua

SEQ ID NO: 3043893 - RNA, 19 nt, Artificial Sequence
  Description of Artificial Sequence: Synthetic oligonucleotide
ggaccagucaccaggcggg

SEQ ID NO: 3043894 - RNA, 19 nt, Artificial Sequence
  Description of Artificial Sequence: Synthetic oligonucleotide
cugcaguauuccuccguag

SEQ ID NO: 3043895 - RNA, 19 nt, Artificial Sequence
  Description of Artificial Sequence: Synthetic oligonucleotide
caucauuguaugcuggugu

SEQ ID NO: 3043896 - RNA, 19 nt, Artificial Sequence
  Description of Artificial Sequence: Synthetic oligonucleotide
aaccuccuacaaugcagaa

SEQ ID NO: 3043897 - RNA, 19 nt, Artificial Sequence
  Description of Artificial Sequence: Synthetic oligonucleotide
uacuccucccguugacagc

SEQ ID NO: 3043898 - RNA, 19 nt, Artificial Sequence
  Description of Artificial Sequence: Synthetic oligonucleotide
gccacaugacccaggaugg

SEQ ID NO: 3043899 - RNA, 19 nt, Artificial Sequence
  Description of Artificial Sequence: Synthetic oligonucleotide
aguucccaguguauucuuc

SEQ ID NO: 3043900 - RNA, 19 nt, Artificial Sequence
  Description of Artificial Sequence: Synthetic oligonucleotide
guaauuccagccacaugac

SEQ ID NO: 3043901 - RNA, 19 nt, Artificial Sequence
  Description of Artificial Sequence: Synthetic oligonucleotide
ucauuguaugcugguguuc

SEQ ID NO: 3043902 - RNA, 19 nt, Artificial Sequence
  Description of Artificial Sequence: Synthetic oligonucleotide
agcccagacuuccugcagu

SEQ ID NO: 3043903 - RNA, 19 nt, Artificial Sequence
  Description of Artificial Sequence: Synthetic oligonucleotide
uuccugcaguauuccuccg

SEQ ID NO: 3043904 - RNA, 19 nt, Artificial Sequence
  Description of Artificial Sequence: Synthetic oligonucleotide
cagaagcccagacuuccug

SEQ ID NO: 3043905 - RNA, 19 nt, Artificial Sequence
  Description of Artificial Sequence: Synthetic oligonucleotide
uccucccguugacagcgag

SEQ ID NO: 3043906 - RNA, 19 nt, Artificial Sequence
  Description of Artificial Sequence: Synthetic oligonucleotide
aguccagggcugcugggcu

SEQ ID NO: 3043907 - RNA, 19 nt, Artificial Sequence
  Description of Artificial Sequence: Synthetic oligonucleotide
cuugacuuccaaggcuuug

SEQ ID NO: 3043908 - RNA, 19 nt, Artificial Sequence
  Description of Artificial Sequence: Synthetic oligonucleotide
gugguuggaguccagggcu

SEQ ID NO: 3043909 - RNA, 19 nt, Artificial Sequence
  Description of Artificial Sequence: Synthetic oligonucleotide
uucccaguguauucuucau

SEQ ID NO: 3043910 - RNA, 19 nt, Artificial Sequence
  Description of Artificial Sequence: Synthetic oligonucleotide
ggggucacauugugguugg

SEQ ID NO: 3043911 - RNA, 19 nt, Artificial Sequence
  Description of Artificial Sequence: Synthetic oligonucleotide
ggucacauugugguuggag

SEQ ID NO: 3043912 - RNA, 19 nt, Artificial Sequence
  Description of Artificial Sequence: Synthetic oligonucleotide
acaugacccaggaugggga

SEQ ID NO: 3043913 - RNA, 19 nt, Artificial Sequence
  Description of Artificial Sequence: Synthetic oligonucleotide
gacguacuccucccguuga

SEQ ID NO: 3043914 - RNA, 19 nt, Artificial Sequence
  Description of Artificial Sequence: Synthetic oligonucleotide
cagcgagaagaaugucacc

SEQ ID NO: 3043915 - RNA, 19 nt, Artificial Sequence
  Description of Artificial Sequence: Synthetic oligonucleotide
acauugugguuggagucca

SEQ ID NO: 3043916 - RNA, 19 nt, Artificial Sequence
  Description of Artificial Sequence: Synthetic oligonucleotide
ugcccgacguacuccuccc

SEQ ID NO: 3043917 - RNA, 19 nt, Artificial Sequence
  Description of Artificial Sequence: Synthetic oligonucleotide
uuggaguccagggcugcug

SEQ ID NO: 3043918 - RNA, 19 nt, Artificial Sequence
  Description of Artificial Sequence: Synthetic oligonucleotide
gaguccagggcugcugggc

SEQ ID NO: 3043919 - RNA, 19 nt, Artificial Sequence
  Description of Artificial Sequence: Synthetic oligonucleotide
guuccuucgacaauggauu

SEQ ID NO: 3043920 - RNA, 19 nt, Artificial Sequence
  Description of Artificial Sequence: Synthetic oligonucleotide
cauguaucaugcccgacgu

SEQ ID NO: 3043921 - RNA, 19 nt, Artificial Sequence
  Description of Artificial Sequence: Synthetic oligonucleotide
guauucuucauaaccuccu

SEQ ID NO: 3043922 - RNA, 19 nt, Artificial Sequence
  Description of Artificial Sequence: Synthetic oligonucleotide
aggcauguaucaugcccga

SEQ ID NO: 3043923 - RNA, 19 nt, Artificial Sequence
  Description of Artificial Sequence: Synthetic oligonucleotide
uuccuucgacaauggauuu

SEQ ID NO: 3043924 - RNA, 19 nt, Artificial Sequence
  Description of Artificial Sequence: Synthetic oligonucleotide
gagaagaaugucaccacau

SEQ ID NO: 3043925 - RNA, 19 nt, Artificial Sequence
  Description of Artificial Sequence: Synthetic oligonucleotide
gguguuccuucgacaaugg

SEQ ID NO: 3043926 - RNA, 19 nt, Artificial Sequence
  Description of Artificial Sequence: Synthetic oligonucleotide
gcugguguuccuucgacaa

SEQ ID NO: 3043927 - RNA, 19 nt, Artificial Sequence
  Description of Artificial Sequence: Synthetic oligonucleotide
cccaguguauucuucauaa

SEQ ID NO: 3043928 - RNA, 19 nt, Artificial Sequence
  Description of Artificial Sequence: Synthetic oligonucleotide
uuguaugcugguguuccuu

SEQ ID NO: 3043929 - RNA, 19 nt, Artificial Sequence
  Description of Artificial Sequence: Synthetic oligonucleotide
gcagucuuccuggagcucc

SEQ ID NO: 3043930 - RNA, 19 nt, Artificial Sequence
  Description of Artificial Sequence: Synthetic oligonucleotide
ucacaucuuuacaguugua

SEQ ID NO: 3043931 - RNA, 19 nt, Artificial Sequence
  Description of Artificial Sequence: Synthetic oligonucleotide
uccuccguagugucacauc

SEQ ID NO: 3043932 - RNA, 19 nt, Artificial Sequence
  Description of Artificial Sequence: Synthetic oligonucleotide
augcagaagcccagacuuc

SEQ ID NO: 3043933 - RNA, 19 nt, Artificial Sequence
  Description of Artificial Sequence: Synthetic oligonucleotide
ucccguugacagcgagaag

SEQ ID NO: 3043934 - RNA, 19 nt, Artificial Sequence
  Description of Artificial Sequence: Synthetic oligonucleotide
cuucauaaccuccuacaau

SEQ ID NO: 3043935 - RNA, 19 nt, Artificial Sequence
  Description of Artificial Sequence: Synthetic oligonucleotide
caaggcuuugaguaccacu

SEQ ID NO: 3043936 - RNA, 19 nt, Artificial Sequence
  Description of Artificial Sequence: Synthetic oligonucleotide
cauugugguuggaguccag

SEQ ID NO: 3043937 - RNA, 19 nt, Artificial Sequence
  Description of Artificial Sequence: Synthetic oligonucleotide
cuaauucuuccaucauugu

SEQ ID NO: 3043938 - RNA, 19 nt, Artificial Sequence
  Description of Artificial Sequence: Synthetic oligonucleotide
uaguucccaguguauucuu

SEQ ID NO: 3043939 - RNA, 19 nt, Artificial Sequence
  Description of Artificial Sequence: Synthetic oligonucleotide
cccguugacagcgagaaga

SEQ ID NO: 3043940 - RNA, 19 nt, Artificial Sequence
  Description of Artificial Sequence: Synthetic oligonucleotide
gaccagucaccaggcgggg

SEQ ID NO: 3043941 - RNA, 19 nt, Artificial Sequence
  Description of Artificial Sequence: Synthetic oligonucleotide
gcgagaagaaugucaccac

SEQ ID NO: 3043942 - RNA, 19 nt, Artificial Sequence
  Description of Artificial Sequence: Synthetic oligonucleotide
cucccguugacagcgagaa

SEQ ID NO: 3043943 - RNA, 19 nt, Artificial Sequence
  Description of Artificial Sequence: Synthetic oligonucleotide
guauaaguacugugguaau

SEQ ID NO: 3043944 - RNA, 19 nt, Artificial Sequence
  Description of Artificial Sequence: Synthetic oligonucleotide
cacaucuuuacaguuguau

SEQ ID NO: 3043945 - RNA, 19 nt, Artificial Sequence
  Description of Artificial Sequence: Synthetic oligonucleotide
ucaccaggcggggucacau

SEQ ID NO: 3043946 - RNA, 19 nt, Artificial Sequence
  Description of Artificial Sequence: Synthetic oligonucleotide
ugacagcgagaagaauguc

SEQ ID NO: 3043947 - RNA, 19 nt, Artificial Sequence
  Description of Artificial Sequence: Synthetic oligonucleotide
auuccuccguagugucaca

SEQ ID NO: 3043948 - RNA, 19 nt, Artificial Sequence
  Description of Artificial Sequence: Synthetic oligonucleotide
uuccuccguagugucacau

SEQ ID NO: 3043949 - RNA, 19 nt, Artificial Sequence
  Description of Artificial Sequence: Synthetic oligonucleotide
ggcggggucacauuguggu

SEQ ID NO: 3043950 - RNA, 19 nt, Artificial Sequence
  Description of Artificial Sequence: Synthetic oligonucleotide
guuuaguucccaguguauu

SEQ ID NO: 3043951 - RNA, 19 nt, Artificial Sequence
  Description of Artificial Sequence: Synthetic oligonucleotide
gacuuccugcaguauuccu

SEQ ID NO: 3043952 - RNA, 19 nt, Artificial Sequence
  Description of Artificial Sequence: Synthetic oligonucleotide
ggaguccagggcugcuggg

SEQ ID NO: 3043953 - RNA, 19 nt, Artificial Sequence
  Description of Artificial Sequence: Synthetic oligonucleotide
ccaguguauucuucauaac

SEQ ID NO: 3043954 - RNA, 19 nt, Artificial Sequence
  Description of Artificial Sequence: Synthetic oligonucleotide
guguuccuucgacaaugga

SEQ ID NO: 3043955 - RNA, 19 nt, Artificial Sequence
  Description of Artificial Sequence: Synthetic oligonucleotide
ccuucgacaauggauuuga

SEQ ID NO: 3043956 - RNA, 19 nt, Artificial Sequence
  Description of Artificial Sequence: Synthetic oligonucleotide
gccaagcaggcauguauca

SEQ ID NO: 3043957 - RNA, 19 nt, Artificial Sequence
  Description of Artificial Sequence: Synthetic oligonucleotide
guauuccuccguaguguca

SEQ ID NO: 3043958 - RNA, 19 nt, Artificial Sequence
  Description of Artificial Sequence: Synthetic oligonucleotide
agucaccaggcggggucac

SEQ ID NO: 3043959 - RNA, 19 nt, Artificial Sequence
  Description of Artificial Sequence: Synthetic oligonucleotide
auguaucaugcccgacgua

SEQ ID NO: 3043960 - RNA, 19 nt, Artificial Sequence
  Description of Artificial Sequence: Synthetic oligonucleotide
aggcggggucacauugugg

SEQ ID NO: 3043961 - RNA, 19 nt, Artificial Sequence
  Description of Artificial Sequence: Synthetic oligonucleotide
gugucacaucuuuacaguu

SEQ ID NO: 3043962 - RNA, 19 nt, Artificial Sequence
  Description of Artificial Sequence: Synthetic oligonucleotide
cccaggauggggaccaguc

SEQ ID NO: 3043963 - RNA, 19 nt, Artificial Sequence
  Description of Artificial Sequence: Synthetic oligonucleotide
caguauuccuccguagugu

SEQ ID NO: 3043964 - RNA, 19 nt, Artificial Sequence
  Description of Artificial Sequence: Synthetic oligonucleotide
ccaucauuguaugcuggug

SEQ ID NO: 3043965 - RNA, 19 nt, Artificial Sequence
  Description of Artificial Sequence: Synthetic oligonucleotide
gaaugucaccacaucuaau

SEQ ID NO: 3043966 - RNA, 19 nt, Artificial Sequence
  Description of Artificial Sequence: Synthetic oligonucleotide
cugcagucuuccuggagcu

SEQ ID NO: 3043967 - RNA, 19 nt, Artificial Sequence
  Description of Artificial Sequence: Synthetic oligonucleotide
ggagcuccuguuccuugac

SEQ ID NO: 3043968 - RNA, 19 nt, Artificial Sequence
  Description of Artificial Sequence: Synthetic oligonucleotide
ugcagucuuccuggagcuc

SEQ ID NO: 3043969 - RNA, 19 nt, Artificial Sequence
  Description of Artificial Sequence: Synthetic oligonucleotide
gagcuccuguuccuugacu

SEQ ID NO: 3043970 - RNA, 19 nt, Artificial Sequence
  Description of Artificial Sequence: Synthetic oligonucleotide
ggauggggaccagucacca

SEQ ID NO: 3043971 - RNA, 19 nt, Artificial Sequence
  Description of Artificial Sequence: Synthetic oligonucleotide
guaucaugcccgacguacu

SEQ ID NO: 3043972 - RNA, 19 nt, Artificial Sequence
  Description of Artificial Sequence: Synthetic oligonucleotide
caugcccgacguacuccuc

SEQ ID NO: 3043973 - RNA, 19 nt, Artificial Sequence
  Description of Artificial Sequence: Synthetic oligonucleotide
gugguaauuccagccacau

SEQ ID NO: 3043974 - RNA, 19 nt, Artificial Sequence
  Description of Artificial Sequence: Synthetic oligonucleotide
cgagaagaaugucaccaca

SEQ ID NO: 3043975 - RNA, 19 nt, Artificial Sequence
  Description of Artificial Sequence: Synthetic oligonucleotide
ccagccacaugacccagga

SEQ ID NO: 3043976 - RNA, 19 nt, Artificial Sequence
  Description of Artificial Sequence: Synthetic oligonucleotide
ccuccguagugucacaucu

SEQ ID NO: 3043977 - RNA, 19 nt, Artificial Sequence
  Description of Artificial Sequence: Synthetic oligonucleotide
accagucaccaggcggggu

SEQ ID NO: 3043978 - RNA, 19 nt, Artificial Sequence
  Description of Artificial Sequence: Synthetic oligonucleotide
cugcugggcugcagucuuc

SEQ ID NO: 3043979 - RNA, 19 nt, Artificial Sequence
  Description of Artificial Sequence: Synthetic oligonucleotide
cggggucacauugugguug

SEQ ID NO: 3043980 - RNA, 19 nt, Artificial Sequence
  Description of Artificial Sequence: Synthetic oligonucleotide
ccacaugacccaggauggg

SEQ ID NO: 3043981 - RNA, 19 nt, Artificial Sequence
  Description of Artificial Sequence: Synthetic oligonucleotide
ccugcaguauuccuccgua

SEQ ID NO: 3043982 - RNA, 19 nt, Artificial Sequence
  Description of Artificial Sequence: Synthetic oligonucleotide
cgacguacuccucccguug

SEQ ID NO: 3043983 - RNA, 19 nt, Artificial Sequence
  Description of Artificial Sequence: Synthetic oligonucleotide
gcccgacguacuccucccg

SEQ ID NO: 3043984 - RNA, 19 nt, Artificial Sequence
  Description of Artificial Sequence: Synthetic oligonucleotide
ggcauguaucaugcccgac

SEQ ID NO: 3043985 - RNA, 19 nt, Artificial Sequence
  Description of Artificial Sequence: Synthetic oligonucleotide
ccaggauggggaccaguca

SEQ ID NO: 3043986 - RNA, 19 nt, Artificial Sequence
  Description of Artificial Sequence: Synthetic oligonucleotide
cagucaccaggcgggguca

SEQ ID NO: 3043987 - RNA, 19 nt, Artificial Sequence
  Description of Artificial Sequence: Synthetic oligonucleotide
ccguugacagcgagaagaa

SEQ ID NO: 3043988 - RNA, 19 nt, Artificial Sequence
  Description of Artificial Sequence: Synthetic oligonucleotide
gguuuaguucccaguguau

SEQ ID NO: 3043989 - RNA, 19 nt, Artificial Sequence
  Description of Artificial Sequence: Synthetic oligonucleotide
cgacaauggauuugauaaa

SEQ ID NO: 3043990 - RNA, 19 nt, Artificial Sequence
  Description of Artificial Sequence: Synthetic oligonucleotide
ccacaucuaauucuuccau

SEQ ID NO: 3043991 - RNA, 19 nt, Artificial Sequence
  Description of Artificial Sequence: Synthetic oligonucleotide
cuucgacaauggauuugau

SEQ ID NO: 3043992 - RNA, 19 nt, Artificial Sequence
  Description of Artificial Sequence: Synthetic oligonucleotide
gcccagacuuccugcagua

SEQ ID NO: 3043993 - RNA, 19 nt, Artificial Sequence
  Description of Artificial Sequence: Synthetic oligonucleotide
cagucuuccuggagcuccu

SEQ ID NO: 3043994 - RNA, 19 nt, Artificial Sequence
  Description of Artificial Sequence: Synthetic oligonucleotide
cugguguuccuucgacaau

SEQ ID NO: 3043995 - RNA, 19 nt, Artificial Sequence
  Description of Artificial Sequence: Synthetic oligonucleotide
guuggaguccagggcugcu

SEQ ID NO: 3043996 - RNA, 19 nt, Artificial Sequence
  Description of Artificial Sequence: Synthetic oligonucleotide
gucaccaggcggggucaca

SEQ ID NO: 3043997 - RNA, 19 nt, Artificial Sequence
  Description of Artificial Sequence: Synthetic oligonucleotide
cuccguagugucacaucuu

SEQ ID NO: 3043998 - RNA, 19 nt, Artificial Sequence
  Description of Artificial Sequence: Synthetic oligonucleotide
ccaaggcuuugaguaccac

SEQ ID NO: 3043999 - RNA, 19 nt, Artificial Sequence
  Description of Artificial Sequence: Synthetic oligonucleotide
ccucccguugacagcgaga

SEQ ID NO: 3044000 - RNA, 19 nt, Artificial Sequence
  Description of Artificial Sequence: Synthetic oligonucleotide
ccagacuuccugcaguauu

SEQ ID NO: 3044001 - RNA, 19 nt, Artificial Sequence
  Description of Artificial Sequence: Synthetic oligonucleotide
gcugcugggcugcagucuu

SEQ ID NO: 3044002 - RNA, 19 nt, Artificial Sequence
  Description of Artificial Sequence: Synthetic oligonucleotide
ccguagugucacaucuuua

SEQ ID NO: 3044003 - RNA, 19 nt, Artificial Sequence
  Description of Artificial Sequence: Synthetic oligonucleotide
cuccucccguugacagcga

SEQ ID NO: 3044004 - RNA, 19 nt, Artificial Sequence
  Description of Artificial Sequence: Synthetic oligonucleotide
ccuguuccuugacuuccaa

SEQ ID NO: 3044005 - RNA, 19 nt, Artificial Sequence
  Description of Artificial Sequence: Synthetic oligonucleotide
gggcugcagucuuccugga

SEQ ID NO: 3044006 - RNA, 19 nt, Artificial Sequence
  Description of Artificial Sequence: Synthetic oligonucleotide
cguacuccucccguugaca

SEQ ID NO: 3044007 - RNA, 19 nt, Artificial Sequence
  Description of Artificial Sequence: Synthetic oligonucleotide
ggcugcugggcugcagucu

SEQ ID NO: 3044008 - RNA, 19 nt, Artificial Sequence
  Description of Artificial Sequence: Synthetic oligonucleotide
cccgacguacuccucccgu

SEQ ID NO: 3044009 - RNA, 19 nt, Artificial Sequence
  Description of Artificial Sequence: Synthetic oligonucleotide
ccaggcggggucacauugu

SEQ ID NO: 3044010 - RNA, 19 nt, Artificial Sequence
  Description of Artificial Sequence: Synthetic oligonucleotide
ccaagcaggcauguaucau

SEQ ID NO: 3044011 - RNA, 19 nt, Artificial Sequence
  Description of Artificial Sequence: Synthetic oligonucleotide
cagccacaugacccaggau

SEQ ID NO: 3044012 - RNA, 19 nt, Artificial Sequence
  Description of Artificial Sequence: Synthetic oligonucleotide
gggucacauugugguugga

SEQ ID NO: 3044013 - RNA, 19 nt, Artificial Sequence
  Description of Artificial Sequence: Synthetic oligonucleotide
ccuugacuuccaaggcuuu

SEQ ID NO: 3044014 - RNA, 19 nt, Artificial Sequence
  Description of Artificial Sequence: Synthetic oligonucleotide
caccaggcggggucacauu

SEQ ID NO: 3044015 - RNA, 19 nt, Artificial Sequence
  Description of Artificial Sequence: Synthetic oligonucleotide
gcggggucacauugugguu

SEQ ID NO: 3044016 - RNA, 19 nt, Artificial Sequence
  Description of Artificial Sequence: Synthetic oligonucleotide
ccgacguacuccucccguu

SEQ ID NO: 3044017 - RNA, 19 nt, Artificial Sequence
  Description of Artificial Sequence: Synthetic oligonucleotide
cguugacagcgagaagaau

SEQ ID NO: 3044018 - RNA, 19 nt, Artificial Sequence
  Description of Artificial Sequence: Synthetic oligonucleotide
  modified_base (10)..(10): a, c, u, g, unknown or other
aagugggaancucaccagc

SEQ ID NO: 3044019 - RNA, 19 nt, Artificial Sequence
  Description of Artificial Sequence: Synthetic oligonucleotide
ugaacuccgacaaagaaac

SEQ ID NO: 3044020 - RNA, 19 nt, Artificial Sequence
  Description of Artificial Sequence: Synthetic oligonucleotide
aguacaggcacacacuggc

SEQ ID NO: 3044021 - RNA, 19 nt, Artificial Sequence
  Description of Artificial Sequence: Synthetic oligonucleotide
aauggguagaugaugacgg

SEQ ID NO: 3044022 - RNA, 19 nt, Artificial Sequence
  Description of Artificial Sequence: Synthetic oligonucleotide
  modified_base (10)..(10): a, c, u, g, unknown or other
aucgacccgnaccagagcc

SEQ ID NO: 3044023 - RNA, 19 nt, Artificial Sequence
  Description of Artificial Sequence: Synthetic oligonucleotide
augaugacggccuugcccc

SEQ ID NO: 3044024 - RNA, 19 nt, Artificial Sequence
  Description of Artificial Sequence: Synthetic oligonucleotide
auagacguuguucucacac

SEQ ID NO: 3044025 - RNA, 19 nt, Artificial Sequence
  Description of Artificial Sequence: Synthetic oligonucleotide
  modified_base (12)..(12): a, c, u, g, unknown or other
ucaagugggaancucacca

SEQ ID NO: 3044026 - RNA, 19 nt, Artificial Sequence
  Description of Artificial Sequence: Synthetic oligonucleotide
acuuagccaggauagaugg

SEQ ID NO: 3044027 - RNA, 19 nt, Artificial Sequence
  Description of Artificial Sequence: Synthetic oligonucleotide
aaagaaacaggcaaggaga

SEQ ID NO: 3044028 - RNA, 19 nt, Artificial Sequence
  Description of Artificial Sequence: Synthetic oligonucleotide
gcagauguggucuugaucg

SEQ ID NO: 3044029 - RNA, 19 nt, Artificial Sequence
  Description of Artificial Sequence: Synthetic oligonucleotide
guuguucucacacaauggg

SEQ ID NO: 3044030 - RNA, 19 nt, Artificial Sequence
  Description of Artificial Sequence: Synthetic oligonucleotide
caaagaaacaggcaaggag

SEQ ID NO: 3044031 - RNA, 19 nt, Artificial Sequence
  Description of Artificial Sequence: Synthetic oligonucleotide
aaaaccugcagcaaggcca

SEQ ID NO: 3044032 - RNA, 19 nt, Artificial Sequence
  Description of Artificial Sequence: Synthetic oligonucleotide
uggaaaaccugcagcaagg

SEQ ID NO: 3044033 - RNA, 19 nt, Artificial Sequence
  Description of Artificial Sequence: Synthetic oligonucleotide
gagagaacugcucagccag

SEQ ID NO: 3044034 - RNA, 19 nt, Artificial Sequence
  Description of Artificial Sequence: Synthetic oligonucleotide
aacuccgacaaagaaacag

SEQ ID NO: 3044035 - RNA, 19 nt, Artificial Sequence
  Description of Artificial Sequence: Synthetic oligonucleotide
  modified_base (2)..(2): a, c, u, g, unknown or other
  modified_base (19)..(19): a, c, u, g, unknown or other
anagcagucaagugggaan

SEQ ID NO: 3044036 - RNA, 19 nt, Artificial Sequence
  Description of Artificial Sequence: Synthetic oligonucleotide
gagaacuuagccaggauag

SEQ ID NO: 3044037 - RNA, 19 nt, Artificial Sequence
  Description of Artificial Sequence: Synthetic oligonucleotide
  modified_base (15)..(15): a, c, u, g, unknown or other
ucuugaucgacccgnacca

SEQ ID NO: 3044038 - RNA, 19 nt, Artificial Sequence
  Description of Artificial Sequence: Synthetic oligonucleotide
gaugaugacggccuugccc

SEQ ID NO: 3044039 - RNA, 19 nt, Artificial Sequence
  Description of Artificial Sequence: Synthetic oligonucleotide
aguauaccaggugagcugc

SEQ ID NO: 3044040 - RNA, 19 nt, Artificial Sequence
  Description of Artificial Sequence: Synthetic oligonucleotide
  modified_base (9)..(9): a, c, u, g, unknown or other
gagacuucncaucacugag

SEQ ID NO: 3044041 - RNA, 19 nt, Artificial Sequence
  Description of Artificial Sequence: Synthetic oligonucleotide
gacaaagaaacaggcaagg

SEQ ID NO: 3044042 - RNA, 19 nt, Artificial Sequence
  Description of Artificial Sequence: Synthetic oligonucleotide
aggacauagacguuguucu

SEQ ID NO: 3044043 - RNA, 19 nt, Artificial Sequence
  Description of Artificial Sequence: Synthetic oligonucleotide
  modified_base (4)..(4): a, c, u, g, unknown or other
gaancucaccagcagagac

SEQ ID NO: 3044044 - RNA, 19 nt, Artificial Sequence
  Description of Artificial Sequence: Synthetic oligonucleotide
aggcaaggagaacuuagcc

SEQ ID NO: 3044045 - RNA, 19 nt, Artificial Sequence
  Description of Artificial Sequence: Synthetic oligonucleotide
gaacugcucagccaguggg

SEQ ID NO: 3044046 - RNA, 19 nt, Artificial Sequence
  Description of Artificial Sequence: Synthetic oligonucleotide
  modified_base (16)..(16): a, c, u, g, unknown or other
gucuugaucgacccgnacc

SEQ ID NO: 3044047 - RNA, 19 nt, Artificial Sequence
  Description of Artificial Sequence: Synthetic oligonucleotide
gauagauggcaggucaugg

SEQ ID NO: 3044048 - RNA, 19 nt, Artificial Sequence
  Description of Artificial Sequence: Synthetic oligonucleotide
  modified_base (10)..(10): a, c, u, g, unknown or other
agagacuucncaucacuga

SEQ ID NO: 3044049 - RNA, 19 nt, Artificial Sequence
  Description of Artificial Sequence: Synthetic oligonucleotide
uguucucacacaaugggua

SEQ ID NO: 3044050 - RNA, 19 nt, Artificial Sequence
  Description of Artificial Sequence: Synthetic oligonucleotide
  modified_base (12)..(12): a, c, u, g, unknown or other
ugaucgacccgnaccagag

SEQ ID NO: 3044051 - RNA, 19 nt, Artificial Sequence
  Description of Artificial Sequence: Synthetic oligonucleotide
gcaaggagaacuuagccag

SEQ ID NO: 3044052 - RNA, 19 nt, Artificial Sequence
  Description of Artificial Sequence: Synthetic oligonucleotide
auagauggcaggucauggg

SEQ ID NO: 3044053 - RNA, 19 nt, Artificial Sequence
  Description of Artificial Sequence: Synthetic oligonucleotide
acauagacguuguucucac

SEQ ID NO: 3044054 - RNA, 19 nt, Artificial Sequence
  Description of Artificial Sequence: Synthetic oligonucleotide
uuagccaggauagauggca

SEQ ID NO: 3044055 - RNA, 19 nt, Artificial Sequence
  Description of Artificial Sequence: Synthetic oligonucleotide
gauggcaggucaugggacg

SEQ ID NO: 3044056 - RNA, 19 nt, Artificial Sequence
  Description of Artificial Sequence: Synthetic oligonucleotide
ugagcugcgagcuggaaaa

SEQ ID NO: 3044057 - RNA, 19 nt, Artificial Sequence
  Description of Artificial Sequence: Synthetic oligonucleotide
auguggucuugaucgaccc

SEQ ID NO: 3044058 - RNA, 19 nt, Artificial Sequence
  Description of Artificial Sequence: Synthetic oligonucleotide
  modified_base (7)..(7): a, c, u, g, unknown or other
ugggaancucaccagcaga

SEQ ID NO: 3044059 - RNA, 19 nt, Artificial Sequence
  Description of Artificial Sequence: Synthetic oligonucleotide
acguuguucucacacaaug

SEQ ID NO: 3044060 - RNA, 19 nt, Artificial Sequence
  Description of Artificial Sequence: Synthetic oligonucleotide
uagauggcaggucauggga

SEQ ID NO: 3044061 - RNA, 19 nt, Artificial Sequence
  Description of Artificial Sequence: Synthetic oligonucleotide
uucacagcagauguggucu

SEQ ID NO: 3044062 - RNA, 19 nt, Artificial Sequence
  Description of Artificial Sequence: Synthetic oligonucleotide
cacacacuggcauugggag

SEQ ID NO: 3044063 - RNA, 19 nt, Artificial Sequence
  Description of Artificial Sequence: Synthetic oligonucleotide
caauggguagaugaugacg

SEQ ID NO: 3044064 - RNA, 19 nt, Artificial Sequence
  Description of Artificial Sequence: Synthetic oligonucleotide
gaaaaccugcagcaaggcc

SEQ ID NO: 3044065 - RNA, 19 nt, Artificial Sequence
  Description of Artificial Sequence: Synthetic oligonucleotide
ucgagagaacugcucagcc

SEQ ID NO: 3044066 - RNA, 19 nt, Artificial Sequence
  Description of Artificial Sequence: Synthetic oligonucleotide
agcuggaaaaccugcagca

SEQ ID NO: 3044067 - RNA, 19 nt, Artificial Sequence
  Description of Artificial Sequence: Synthetic oligonucleotide
uuguucucacacaaugggu

SEQ ID NO: 3044068 - RNA, 19 nt, Artificial Sequence
  Description of Artificial Sequence: Synthetic oligonucleotide
acaauggguagaugaugac

SEQ ID NO: 3044069 - RNA, 19 nt, Artificial Sequence
  Description of Artificial Sequence: Synthetic oligonucleotide
ugcagcaaggccaggucag

SEQ ID NO: 3044070 - RNA, 19 nt, Artificial Sequence
  Description of Artificial Sequence: Synthetic oligonucleotide
cuccgacaaagaaacaggc

SEQ ID NO: 3044071 - RNA, 19 nt, Artificial Sequence
  Description of Artificial Sequence: Synthetic oligonucleotide
caugggacgggaacugucg

SEQ ID NO: 3044072 - RNA, 19 nt, Artificial Sequence
  Description of Artificial Sequence: Synthetic oligonucleotide
agcagauguggucuugauc

SEQ ID NO: 3044073 - RNA, 19 nt, Artificial Sequence
  Description of Artificial Sequence: Synthetic oligonucleotide
cuggaaaaccugcagcaag

SEQ ID NO: 3044074 - RNA, 19 nt, Artificial Sequence
  Description of Artificial Sequence: Synthetic oligonucleotide
aacuuagccaggauagaug

SEQ ID NO: 3044075 - RNA, 19 nt, Artificial Sequence
  Description of Artificial Sequence: Synthetic oligonucleotide
uccgacaaagaaacaggca

SEQ ID NO: 3044076 - RNA, 19 nt, Artificial Sequence
  Description of Artificial Sequence: Synthetic oligonucleotide
gaaacaggcaaggagaacu

SEQ ID NO: 3044077 - RNA, 19 nt, Artificial Sequence
  Description of Artificial Sequence: Synthetic oligonucleotide
auugggagacaggacauag

SEQ ID NO: 3044078 - RNA, 19 nt, Artificial Sequence
  Description of Artificial Sequence: Synthetic oligonucleotide
auggguagaugaugacggc

SEQ ID NO: 3044079 - RNA, 19 nt, Artificial Sequence
  Description of Artificial Sequence: Synthetic oligonucleotide
acuccgacaaagaaacagg

SEQ ID NO: 3044080 - RNA, 19 nt, Artificial Sequence
  Description of Artificial Sequence: Synthetic oligonucleotide
  modified_base (16)..(16): a, c, u, g, unknown or other
accagcagagacuucncau

SEQ ID NO: 3044081 - RNA, 19 nt, Artificial Sequence
  Description of Artificial Sequence: Synthetic oligonucleotide
gaacugucgagagaacugc

SEQ ID NO: 3044082 - RNA, 19 nt, Artificial Sequence
  Description of Artificial Sequence: Synthetic oligonucleotide
guucucacacaauggguag

SEQ ID NO: 3044083 - RNA, 19 nt, Artificial Sequence
  Description of Artificial Sequence: Synthetic oligonucleotide
cuugccccaguauaccagg

SEQ ID NO: 3044084 - RNA, 19 nt, Artificial Sequence
  Description of Artificial Sequence: Synthetic oligonucleotide
ugcgagcuggaaaaccugc

SEQ ID NO: 3044085 - RNA, 19 nt, Artificial Sequence
  Description of Artificial Sequence: Synthetic oligonucleotide
uguggucuugaucgacccg

SEQ ID NO: 3044086 - RNA, 19 nt, Artificial Sequence
  Description of Artificial Sequence: Synthetic oligonucleotide
ggagacaggacauagacgu

SEQ ID NO: 3044087 - RNA, 19 nt, Artificial Sequence
  Description of Artificial Sequence: Synthetic oligonucleotide
uagaugaugacggccuugc

SEQ ID NO: 3044088 - RNA, 19 nt, Artificial Sequence
  Description of Artificial Sequence: Synthetic oligonucleotide
ugucgagagaacugcucag

SEQ ID NO: 3044089 - RNA, 19 nt, Artificial Sequence
  Description of Artificial Sequence: Synthetic oligonucleotide
agaacugcucagccagugg

SEQ ID NO: 3044090 - RNA, 19 nt, Artificial Sequence
  Description of Artificial Sequence: Synthetic oligonucleotide
cacaauggguagaugauga

SEQ ID NO: 3044091 - RNA, 19 nt, Artificial Sequence
  Description of Artificial Sequence: Synthetic oligonucleotide
  modified_base (6)..(6): a, c, u, g, unknown or other
ccgganagcagucaagugg

SEQ ID NO: 3044092 - RNA, 19 nt, Artificial Sequence
  Description of Artificial Sequence: Synthetic oligonucleotide
  modified_base (3)..(3): a, c, u, g, unknown or other
aancucaccagcagagacu

SEQ ID NO: 3044093 - RNA, 19 nt, Artificial Sequence
  Description of Artificial Sequence: Synthetic oligonucleotide
  modified_base (13)..(13): a, c, u, g, unknown or other
uugaucgacccgnaccaga

SEQ ID NO: 3044094 - RNA, 19 nt, Artificial Sequence
  Description of Artificial Sequence: Synthetic oligonucleotide
gauguggucuugaucgacc

SEQ ID NO: 3044095 - RNA, 19 nt, Artificial Sequence
  Description of Artificial Sequence: Synthetic oligonucleotide
agacaggacauagacguug

SEQ ID NO: 3044096 - RNA, 19 nt, Artificial Sequence
  Description of Artificial Sequence: Synthetic oligonucleotide
  modified_base (11)..(11): a, c, u, g, unknown or other
caagugggaancucaccag

SEQ ID NO: 3044097 - RNA, 19 nt, Artificial Sequence
  Description of Artificial Sequence: Synthetic oligonucleotide
aaaccugcagcaaggccag

SEQ ID NO: 3044098 - RNA, 19 nt, Artificial Sequence
  Description of Artificial Sequence: Synthetic oligonucleotide
caguauaccaggugagcug

SEQ ID NO: 3044099 - RNA, 19 nt, Artificial Sequence
  Description of Artificial Sequence: Synthetic oligonucleotide
uagacguuguucucacaca

SEQ ID NO: 3044100 - RNA, 19 nt, Artificial Sequence
  Description of Artificial Sequence: Synthetic oligonucleotide
caggcaaggagaacuuagc

SEQ ID NO: 3044101 - RNA, 19 nt, Artificial Sequence
  Description of Artificial Sequence: Synthetic oligonucleotide
  modified_base (2)..(2): a, c, u, g, unknown or other
ancucaccagcagagacuu

SEQ ID NO: 3044102 - RNA, 19 nt, Artificial Sequence
  Description of Artificial Sequence: Synthetic oligonucleotide
agacguuguucucacacaa

SEQ ID NO: 3044103 - RNA, 19 nt, Artificial Sequence
  Description of Artificial Sequence: Synthetic oligonucleotide
  modified_base (9)..(9): a, c, u, g, unknown or other
ucgacccgnaccagagccg

SEQ ID NO: 3044104 - RNA, 19 nt, Artificial Sequence
  Description of Artificial Sequence: Synthetic oligonucleotide
uggguagaugaugacggcc

SEQ ID NO: 3044105 - RNA, 19 nt, Artificial Sequence
  Description of Artificial Sequence: Synthetic oligonucleotide
gacauagacguuguucuca

SEQ ID NO: 3044106 - RNA, 19 nt, Artificial Sequence
  Description of Artificial Sequence: Synthetic oligonucleotide
uagccaggauagauggcag

SEQ ID NO: 3044107 - RNA, 19 nt, Artificial Sequence
  Description of Artificial Sequence: Synthetic oligonucleotide
acaggcaaggagaacuuag

SEQ ID NO: 3044108 - RNA, 19 nt, Artificial Sequence
  Description of Artificial Sequence: Synthetic oligonucleotide
  modified_base (11)..(11): a, c, u, g, unknown or other
cagagacuucncaucacug

SEQ ID NO: 3044109 - RNA, 19 nt, Artificial Sequence
  Description of Artificial Sequence: Synthetic oligonucleotide
cacacuggcauugggagac

SEQ ID NO: 3044110 - RNA, 19 nt, Artificial Sequence
  Description of Artificial Sequence: Synthetic oligonucleotide
  modified_base (10)..(10): a, c, u, g, unknown or other
agagccgganagcagucaa

SEQ ID NO: 3044111 - RNA, 19 nt, Artificial Sequence
  Description of Artificial Sequence: Synthetic oligonucleotide
aagaaacaggcaaggagaa

SEQ ID NO: 3044112 - RNA, 19 nt, Artificial Sequence
  Description of Artificial Sequence: Synthetic oligonucleotide
auaccaggugagcugcgag

SEQ ID NO: 3044113 - RNA, 19 nt, Artificial Sequence
  Description of Artificial Sequence: Synthetic oligonucleotide
cuccugaacuccgacaaag

SEQ ID NO: 3044114 - RNA, 19 nt, Artificial Sequence
  Description of Artificial Sequence: Synthetic oligonucleotide
agauguggucuugaucgac

SEQ ID NO: 3044115 - RNA, 19 nt, Artificial Sequence
  Description of Artificial Sequence: Synthetic oligonucleotide
uccugaacuccgacaaaga

SEQ ID NO: 3044116 - RNA, 19 nt, Artificial Sequence
  Description of Artificial Sequence: Synthetic oligonucleotide
agcugcgagcuggaaaacc

SEQ ID NO: 3044117 - RNA, 19 nt, Artificial Sequence
  Description of Artificial Sequence: Synthetic oligonucleotide
agaaacaggcaaggagaac

SEQ ID NO: 3044118 - RNA, 19 nt, Artificial Sequence
  Description of Artificial Sequence: Synthetic oligonucleotide
uaccaggugagcugcgagc

SEQ ID NO: 3044119 - RNA, 19 nt, Artificial Sequence
  Description of Artificial Sequence: Synthetic oligonucleotide
cugaacuccgacaaagaaa

SEQ ID NO: 3044120 - RNA, 19 nt, Artificial Sequence
  Description of Artificial Sequence: Synthetic oligonucleotide
caaggagaacuuagccagg

SEQ ID NO: 3044121 - RNA, 19 nt, Artificial Sequence
  Description of Artificial Sequence: Synthetic oligonucleotide
ggaguacaggcacacacug

SEQ ID NO: 3044122 - RNA, 19 nt, Artificial Sequence
  Description of Artificial Sequence: Synthetic oligonucleotide
agccaggauagauggcagg

SEQ ID NO: 3044123 - RNA, 19 nt, Artificial Sequence
  Description of Artificial Sequence: Synthetic oligonucleotide
agauggcaggucaugggac

SEQ ID NO: 3044124 - RNA, 19 nt, Artificial Sequence
  Description of Artificial Sequence: Synthetic oligonucleotide
ggcauugggagacaggaca

SEQ ID NO: 3044125 - RNA, 19 nt, Artificial Sequence
  Description of Artificial Sequence: Synthetic oligonucleotide
acacaauggguagaugaug

SEQ ID NO: 3044126 - RNA, 19 nt, Artificial Sequence
  Description of Artificial Sequence: Synthetic oligonucleotide
caggacauagacguuguuc

SEQ ID NO: 3044127 - RNA, 19 nt, Artificial Sequence
  Description of Artificial Sequence: Synthetic oligonucleotide
uugggagacaggacauaga

SEQ ID NO: 3044128 - RNA, 19 nt, Artificial Sequence
  Description of Artificial Sequence: Synthetic oligonucleotide
gaguacaggcacacacugg

SEQ ID NO: 3044129 - RNA, 19 nt, Artificial Sequence
  Description of Artificial Sequence: Synthetic oligonucleotide
  modified_base (8)..(8): a, c, u, g, unknown or other
gugggaancucaccagcag

SEQ ID NO: 3044130 - RNA, 19 nt, Artificial Sequence
  Description of Artificial Sequence: Synthetic oligonucleotide
  modified_base (5)..(5): a, c, u, g, unknown or other
cgganagcagucaaguggg

SEQ ID NO: 3044131 - RNA, 19 nt, Artificial Sequence
  Description of Artificial Sequence: Synthetic oligonucleotide
ugggcuagcugcugcaggu

SEQ ID NO: 3044132 - RNA, 19 nt, Artificial Sequence
  Description of Artificial Sequence: Synthetic oligonucleotide
caggauagauggcagguca

SEQ ID NO: 3044133 - RNA, 19 nt, Artificial Sequence
  Description of Artificial Sequence: Synthetic oligonucleotide
acgggaacugucgagagaa

SEQ ID NO: 3044134 - RNA, 19 nt, Artificial Sequence
  Description of Artificial Sequence: Synthetic oligonucleotide
ucaugggacgggaacuguc

SEQ ID NO: 3044135 - RNA, 19 nt, Artificial Sequence
  Description of Artificial Sequence: Synthetic oligonucleotide
cuuagccaggauagauggc

SEQ ID NO: 3044136 - RNA, 19 nt, Artificial Sequence
  Description of Artificial Sequence: Synthetic oligonucleotide
acaaagaaacaggcaagga

SEQ ID NO: 3044137 - RNA, 19 nt, Artificial Sequence
  Description of Artificial Sequence: Synthetic oligonucleotide
  modified_base (2)..(2): a, c, u, g, unknown or other
  modified_base (15)..(15): a, c, u, g, unknown or other
gnaccagagccgganagca

SEQ ID NO: 3044138 - RNA, 19 nt, Artificial Sequence
  Description of Artificial Sequence: Synthetic oligonucleotide
ggcaaggagaacuuagcca

SEQ ID NO: 3044139 - RNA, 19 nt, Artificial Sequence
  Description of Artificial Sequence: Synthetic oligonucleotide
acugucgagagaacugcuc

SEQ ID NO: 3044140 - RNA, 19 nt, Artificial Sequence
  Description of Artificial Sequence: Synthetic oligonucleotide
ugggacgggaacugucgag

SEQ ID NO: 3044141 - RNA, 19 nt, Artificial Sequence
  Description of Artificial Sequence: Synthetic oligonucleotide
caggugagcugcgagcugg

SEQ ID NO: 3044142 - RNA, 19 nt, Artificial Sequence
  Description of Artificial Sequence: Synthetic oligonucleotide
  modified_base (6)..(6): a, c, u, g, unknown or other
gggaancucaccagcagag

SEQ ID NO: 3044143 - RNA, 19 nt, Artificial Sequence
  Description of Artificial Sequence: Synthetic oligonucleotide
ucagccaguggggaguaca

SEQ ID NO: 3044144 - RNA, 19 nt, Artificial Sequence
  Description of Artificial Sequence: Synthetic oligonucleotide
  modified_base (9)..(9): a, c, u, g, unknown or other
agugggaancucaccagca

SEQ ID NO: 3044145 - RNA, 19 nt, Artificial Sequence
  Description of Artificial Sequence: Synthetic oligonucleotide
gguucuucacagcagaugu

SEQ ID NO: 3044146 - RNA, 19 nt, Artificial Sequence
  Description of Artificial Sequence: Synthetic oligonucleotide
ugccccaguauaccaggug

SEQ ID NO: 3044147 - RNA, 19 nt, Artificial Sequence
  Description of Artificial Sequence: Synthetic oligonucleotide
agggcuccugaacuccgac

SEQ ID NO: 3044148 - RNA, 19 nt, Artificial Sequence
  Description of Artificial Sequence: Synthetic oligonucleotide
  modified_base (19)..(19): a, c, u, g, unknown or other
cucaccagcagagacuucn

SEQ ID NO: 3044149 - RNA, 19 nt, Artificial Sequence
  Description of Artificial Sequence: Synthetic oligonucleotide
ggggaguacaggcacacac

SEQ ID NO: 3044150 - RNA, 19 nt, Artificial Sequence
  Description of Artificial Sequence: Synthetic oligonucleotide
gagaacugcucagccagug

SEQ ID NO: 3044151 - RNA, 19 nt, Artificial Sequence
  Description of Artificial Sequence: Synthetic oligonucleotide
agguucuucacagcagaug

SEQ ID NO: 3044152 - RNA, 19 nt, Artificial Sequence
  Description of Artificial Sequence: Synthetic oligonucleotide
  modified_base (3)..(3): a, c, u, g, unknown or other
ganagcagucaagugggaa

SEQ ID NO: 3044153 - RNA, 19 nt, Artificial Sequence
  Description of Artificial Sequence: Synthetic oligonucleotide
cugucgagagaacugcuca

SEQ ID NO: 3044154 - RNA, 19 nt, Artificial Sequence
  Description of Artificial Sequence: Synthetic oligonucleotide
cuggcauugggagacagga

SEQ ID NO: 3044155 - RNA, 19 nt, Artificial Sequence
  Description of Artificial Sequence: Synthetic oligonucleotide
uauaccaggugagcugcga

SEQ ID NO: 3044156 - RNA, 19 nt, Artificial Sequence
  Description of Artificial Sequence: Synthetic oligonucleotide
caggucaugggacgggaac

SEQ ID NO: 3044157 - RNA, 19 nt, Artificial Sequence
  Description of Artificial Sequence: Synthetic oligonucleotide
ggaacugucgagagaacug

SEQ ID NO: 3044158 - RNA, 19 nt, Artificial Sequence
  Description of Artificial Sequence: Synthetic oligonucleotide
  modified_base (14)..(14): a, c, u, g, unknown or other
cuugaucgacccgnaccag

SEQ ID NO: 3044159 - RNA, 19 nt, Artificial Sequence
  Description of Artificial Sequence: Synthetic oligonucleotide
  modified_base (13)..(13): a, c, u, g, unknown or other
accagagccgganagcagu

SEQ ID NO: 3044160 - RNA, 19 nt, Artificial Sequence
  Description of Artificial Sequence: Synthetic oligonucleotide
  modified_base (11)..(11): a, c, u, g, unknown or other
gaucgacccgnaccagagc

SEQ ID NO: 3044161 - RNA, 19 nt, Artificial Sequence
  Description of Artificial Sequence: Synthetic oligonucleotide
  modified_base (13)..(13): a, c, u, g, unknown or other
agcagagacuucncaucac

SEQ ID NO: 3044162 - RNA, 19 nt, Artificial Sequence
  Description of Artificial Sequence: Synthetic oligonucleotide
uucucacacaauggguaga

SEQ ID NO: 3044163 - RNA, 19 nt, Artificial Sequence
  Description of Artificial Sequence: Synthetic oligonucleotide
caguggggaguacaggcac

SEQ ID NO: 3044164 - RNA, 19 nt, Artificial Sequence
  Description of Artificial Sequence: Synthetic oligonucleotide
  modified_base (18)..(18): a, c, u, g, unknown or other
ucaccagcagagacuucnc

SEQ ID NO: 3044165 - RNA, 19 nt, Artificial Sequence
  Description of Artificial Sequence: Synthetic oligonucleotide
  modified_base (19)..(19): a, c, u, g, unknown or other
guggucuugaucgacccgn

SEQ ID NO: 3044166 - RNA, 19 nt, Artificial Sequence
  Description of Artificial Sequence: Synthetic oligonucleotide
  modified_base (8)..(8): a, c, u, g, unknown or other
agccgganagcagucaagu

SEQ ID NO: 3044167 - RNA, 19 nt, Artificial Sequence
  Description of Artificial Sequence: Synthetic oligonucleotide
gucgagagaacugcucagc

SEQ ID NO: 3044168 - RNA, 19 nt, Artificial Sequence
  Description of Artificial Sequence: Synthetic oligonucleotide
  modified_base (13)..(13): a, c, u, g, unknown or other
gucaagugggaancucacc

SEQ ID NO: 3044169 - RNA, 19 nt, Artificial Sequence
  Description of Artificial Sequence: Synthetic oligonucleotide
cguuguucucacacaaugg

SEQ ID NO: 3044170 - RNA, 19 nt, Artificial Sequence
  Description of Artificial Sequence: Synthetic oligonucleotide
acacacuggcauugggaga

SEQ ID NO: 3044171 - RNA, 19 nt, Artificial Sequence
  Description of Artificial Sequence: Synthetic oligonucleotide
cugcagguucuucacagca

SEQ ID NO: 3044172 - RNA, 19 nt, Artificial Sequence
  Description of Artificial Sequence: Synthetic oligonucleotide
ucagcauccugggcuagcu

SEQ ID NO: 3044173 - RNA, 19 nt, Artificial Sequence
  Description of Artificial Sequence: Synthetic oligonucleotide
uggcauugggagacaggac

SEQ ID NO: 3044174 - RNA, 19 nt, Artificial Sequence
  Description of Artificial Sequence: Synthetic oligonucleotide
auggcaggucaugggacgg

SEQ ID NO: 3044175 - RNA, 19 nt, Artificial Sequence
  Description of Artificial Sequence: Synthetic oligonucleotide
aacugucgagagaacugcu

SEQ ID NO: 3044176 - RNA, 19 nt, Artificial Sequence
  Description of Artificial Sequence: Synthetic oligonucleotide
accaggugagcugcgagcu

SEQ ID NO: 3044177 - RNA, 19 nt, Artificial Sequence
  Description of Artificial Sequence: Synthetic oligonucleotide
ugcucagccaguggggagu

SEQ ID NO: 3044178 - RNA, 19 nt, Artificial Sequence
  Description of Artificial Sequence: Synthetic oligonucleotide
aaacaggcaaggagaacuu

SEQ ID NO: 3044179 - RNA, 19 nt, Artificial Sequence
  Description of Artificial Sequence: Synthetic oligonucleotide
ccgacaaagaaacaggcaa

SEQ ID NO: 3044180 - RNA, 19 nt, Artificial Sequence
  Description of Artificial Sequence: Synthetic oligonucleotide
acggccuugccccaguaua

SEQ ID NO: 3044181 - RNA, 19 nt, Artificial Sequence
  Description of Artificial Sequence: Synthetic oligonucleotide
guagaugaugacggccuug

SEQ ID NO: 3044182 - RNA, 19 nt, Artificial Sequence
  Description of Artificial Sequence: Synthetic oligonucleotide
agaacuuagccaggauaga

SEQ ID NO: 3044183 - RNA, 19 nt, Artificial Sequence
  Description of Artificial Sequence: Synthetic oligonucleotide
agcaaggccaggucagcau

SEQ ID NO: 3044184 - RNA, 19 nt, Artificial Sequence
  Description of Artificial Sequence: Synthetic oligonucleotide
cagccaguggggaguacag

SEQ ID NO: 3044185 - RNA, 19 nt, Artificial Sequence
  Description of Artificial Sequence: Synthetic oligonucleotide
aggucaugggacgggaacu

SEQ ID NO: 3044186 - RNA, 19 nt, Artificial Sequence
  Description of Artificial Sequence: Synthetic oligonucleotide
cugcgagcuggaaaaccug

SEQ ID NO: 3044187 - RNA, 19 nt, Artificial Sequence
  Description of Artificial Sequence: Synthetic oligonucleotide
gggagacaggacauagacg

SEQ ID NO: 3044188 - RNA, 19 nt, Artificial Sequence
  Description of Artificial Sequence: Synthetic oligonucleotide
cgacaaagaaacaggcaag

SEQ ID NO: 3044189 - RNA, 19 nt, Artificial Sequence
  Description of Artificial Sequence: Synthetic oligonucleotide
cagagggcuccugaacucc

SEQ ID NO: 3044190 - RNA, 19 nt, Artificial Sequence
  Description of Artificial Sequence: Synthetic oligonucleotide
augggacgggaacugucga

SEQ ID NO: 3044191 - RNA, 19 nt, Artificial Sequence
  Description of Artificial Sequence: Synthetic oligonucleotide
gaacuuagccaggauagau

SEQ ID NO: 3044192 - RNA, 19 nt, Artificial Sequence
  Description of Artificial Sequence: Synthetic oligonucleotide
caggucagcauccugggcu

SEQ ID NO: 3044193 - RNA, 19 nt, Artificial Sequence
  Description of Artificial Sequence: Synthetic oligonucleotide
caggcacacacuggcauug

SEQ ID NO: 3044194 - RNA, 19 nt, Artificial Sequence
  Description of Artificial Sequence: Synthetic oligonucleotide
acugcucagccagugggga

SEQ ID NO: 3044195 - RNA, 19 nt, Artificial Sequence
  Description of Artificial Sequence: Synthetic oligonucleotide
  modified_base (18)..(18): a, c, u, g, unknown or other
uggucuugaucgacccgna

SEQ ID NO: 3044196 - RNA, 19 nt, Artificial Sequence
  Description of Artificial Sequence: Synthetic oligonucleotide
aacaggcaaggagaacuua

SEQ ID NO: 3044197 - RNA, 19 nt, Artificial Sequence
  Description of Artificial Sequence: Synthetic oligonucleotide
  modified_base (9)..(9): a, c, u, g, unknown or other
gagccgganagcagucaag

SEQ ID NO: 3044198 - RNA, 19 nt, Artificial Sequence
  Description of Artificial Sequence: Synthetic oligonucleotide
agagggcuccugaacuccg

SEQ ID NO: 3044199 - RNA, 19 nt, Artificial Sequence
  Description of Artificial Sequence: Synthetic oligonucleotide
uugccccaguauaccaggu

SEQ ID NO: 3044200 - RNA, 19 nt, Artificial Sequence
  Description of Artificial Sequence: Synthetic oligonucleotide
acagcagauguggucuuga

SEQ ID NO: 3044201 - RNA, 19 nt, Artificial Sequence
  Description of Artificial Sequence: Synthetic oligonucleotide
acaggcacacacuggcauu

SEQ ID NO: 3044202 - RNA, 19 nt, Artificial Sequence
  Description of Artificial Sequence: Synthetic oligonucleotide
gacgggaacugucgagaga

SEQ ID NO: 3044203 - RNA, 19 nt, Artificial Sequence
  Description of Artificial Sequence: Synthetic oligonucleotide
ggaaaaccugcagcaaggc

SEQ ID NO: 3044204 - RNA, 19 nt, Artificial Sequence
  Description of Artificial Sequence: Synthetic oligonucleotide
gaugacggccuugccccag

SEQ ID NO: 3044205 - RNA, 19 nt, Artificial Sequence
  Description of Artificial Sequence: Synthetic oligonucleotide
ggcacacacuggcauuggg

SEQ ID NO: 3044206 - RNA, 19 nt, Artificial Sequence
  Description of Artificial Sequence: Synthetic oligonucleotide
gccaggucagcauccuggg

SEQ ID NO: 3044207 - RNA, 19 nt, Artificial Sequence
  Description of Artificial Sequence: Synthetic oligonucleotide
aggagaacuuagccaggau

SEQ ID NO: 3044208 - RNA, 19 nt, Artificial Sequence
  Description of Artificial Sequence: Synthetic oligonucleotide
ggacgggaacugucgagag

SEQ ID NO: 3044209 - RNA, 19 nt, Artificial Sequence
  Description of Artificial Sequence: Synthetic oligonucleotide
ggcuccugaacuccgacaa

SEQ ID NO: 3044210 - RNA, 19 nt, Artificial Sequence
  Description of Artificial Sequence: Synthetic oligonucleotide
gugagcugcgagcuggaaa

SEQ ID NO: 3044211 - RNA, 19 nt, Artificial Sequence
  Description of Artificial Sequence: Synthetic oligonucleotide
ggauagauggcaggucaug

SEQ ID NO: 3044212 - RNA, 19 nt, Artificial Sequence
  Description of Artificial Sequence: Synthetic oligonucleotide
agccaguggggaguacagg

SEQ ID NO: 3044213 - RNA, 19 nt, Artificial Sequence
  Description of Artificial Sequence: Synthetic oligonucleotide
guauaccaggugagcugcg

SEQ ID NO: 3044214 - RNA, 19 nt, Artificial Sequence
  Description of Artificial Sequence: Synthetic oligonucleotide
  modified_base (7)..(7): a, c, u, g, unknown or other
gccgganagcagucaagug

SEQ ID NO: 3044215 - RNA, 19 nt, Artificial Sequence
  Description of Artificial Sequence: Synthetic oligonucleotide
cugcucagccaguggggag

SEQ ID NO: 3044216 - RNA, 19 nt, Artificial Sequence
  Description of Artificial Sequence: Synthetic oligonucleotide
  modified_base (4)..(4): a, c, u, g, unknown or other
  modified_base (17)..(17): a, c, u, g, unknown or other
ccgnaccagagccgganag

SEQ ID NO: 3044217 - RNA, 19 nt, Artificial Sequence
  Description of Artificial Sequence: Synthetic oligonucleotide
cugcagcaaggccagguca

SEQ ID NO: 3044218 - RNA, 19 nt, Artificial Sequence
  Description of Artificial Sequence: Synthetic oligonucleotide
gccccaguauaccagguga

SEQ ID NO: 3044219 - RNA, 19 nt, Artificial Sequence
  Description of Artificial Sequence: Synthetic oligonucleotide
aggucagcauccugggcua

SEQ ID NO: 3044220 - RNA, 19 nt, Artificial Sequence
  Description of Artificial Sequence: Synthetic oligonucleotide
ugaugacggccuugcccca

SEQ ID NO: 3044221 - RNA, 19 nt, Artificial Sequence
  Description of Artificial Sequence: Synthetic oligonucleotide
guggggaguacaggcacac

SEQ ID NO: 3044222 - RNA, 19 nt, Artificial Sequence
  Description of Artificial Sequence: Synthetic oligonucleotide
cacacaauggguagaugau

SEQ ID NO: 3044223 - RNA, 19 nt, Artificial Sequence
  Description of Artificial Sequence: Synthetic oligonucleotide
  modified_base (17)..(17): a, c, u, g, unknown or other
agcagucaagugggaancu

SEQ ID NO: 3044224 - RNA, 19 nt, Artificial Sequence
  Description of Artificial Sequence: Synthetic oligonucleotide
  modified_base (16)..(16): a, c, u, g, unknown or other
gcagucaagugggaancuc

SEQ ID NO: 3044225 - RNA, 19 nt, Artificial Sequence
  Description of Artificial Sequence: Synthetic oligonucleotide
ucacagcagauguggucuu

SEQ ID NO: 3044226 - RNA, 19 nt, Artificial Sequence
  Description of Artificial Sequence: Synthetic oligonucleotide
ggacauagacguuguucuc

SEQ ID NO: 3044227 - RNA, 19 nt, Artificial Sequence
  Description of Artificial Sequence: Synthetic oligonucleotide
ggucaugggacgggaacug

SEQ ID NO: 3044228 - RNA, 19 nt, Artificial Sequence
  Description of Artificial Sequence: Synthetic oligonucleotide
cacuggcauugggagacag

SEQ ID NO: 3044229 - RNA, 19 nt, Artificial Sequence
  Description of Artificial Sequence: Synthetic oligonucleotide
aggcacacacuggcauugg

SEQ ID NO: 3044230 - RNA, 19 nt, Artificial Sequence
  Description of Artificial Sequence: Synthetic oligonucleotide
cucacacaauggguagaug

SEQ ID NO: 3044231 - RNA, 19 nt, Artificial Sequence
  Description of Artificial Sequence: Synthetic oligonucleotide
cagauguggucuugaucga

SEQ ID NO: 3044232 - RNA, 19 nt, Artificial Sequence
  Description of Artificial Sequence: Synthetic oligonucleotide
  modified_base (3)..(3): a, c, u, g, unknown or other
  modified_base (16)..(16): a, c, u, g, unknown or other
cgnaccagagccgganagc

SEQ ID NO: 3044233 - RNA, 19 nt, Artificial Sequence
  Description of Artificial Sequence: Synthetic oligonucleotide
gacaggacauagacguugu

SEQ ID NO: 3044234 - RNA, 19 nt, Artificial Sequence
  Description of Artificial Sequence: Synthetic oligonucleotide
gcaaggccaggucagcauc

SEQ ID NO: 3044235 - RNA, 19 nt, Artificial Sequence
  Description of Artificial Sequence: Synthetic oligonucleotide
cauagacguuguucucaca

SEQ ID NO: 3044236 - RNA, 19 nt, Artificial Sequence
  Description of Artificial Sequence: Synthetic oligonucleotide
aguggggaguacaggcaca

SEQ ID NO: 3044237 - RNA, 19 nt, Artificial Sequence
  Description of Artificial Sequence: Synthetic oligonucleotide
ccccaguauaccaggugag

SEQ ID NO: 3044238 - RNA, 19 nt, Artificial Sequence
  Description of Artificial Sequence: Synthetic oligonucleotide
ggagccagagggcuccuga

SEQ ID NO: 3044239 - RNA, 19 nt, Artificial Sequence
  Description of Artificial Sequence: Synthetic oligonucleotide
aggauagauggcaggucau

SEQ ID NO: 3044240 - RNA, 19 nt, Artificial Sequence
  Description of Artificial Sequence: Synthetic oligonucleotide
aggccaggucagcauccug

SEQ ID NO: 3044241 - RNA, 19 nt, Artificial Sequence
  Description of Artificial Sequence: Synthetic oligonucleotide
augacggccuugccccagu

SEQ ID NO: 3044242 - RNA, 19 nt, Artificial Sequence
  Description of Artificial Sequence: Synthetic oligonucleotide
  modified_base (6)..(6): a, c, u, g, unknown or other
  modified_base (19)..(19): a, c, u, g, unknown or other
acccgnaccagagccggan

SEQ ID NO: 3044243 - RNA, 19 nt, Artificial Sequence
  Description of Artificial Sequence: Synthetic oligonucleotide
gucagcauccugggcuagc

SEQ ID NO: 3044244 - RNA, 19 nt, Artificial Sequence
  Description of Artificial Sequence: Synthetic oligonucleotide
gagccagagggcuccugaa

SEQ ID NO: 3044245 - RNA, 19 nt, Artificial Sequence
  Description of Artificial Sequence: Synthetic oligonucleotide
acaggacauagacguuguu

SEQ ID NO: 3044246 - RNA, 19 nt, Artificial Sequence
  Description of Artificial Sequence: Synthetic oligonucleotide
  modified_base (12)..(12): a, c, u, g, unknown or other
gcagagacuucncaucacu

SEQ ID NO: 3044247 - RNA, 19 nt, Artificial Sequence
  Description of Artificial Sequence: Synthetic oligonucleotide
  modified_base (17)..(17): a, c, u, g, unknown or other
caccagcagagacuucnca

SEQ ID NO: 3044248 - RNA, 19 nt, Artificial Sequence
  Description of Artificial Sequence: Synthetic oligonucleotide
ggcuagcugcugcagguuc

SEQ ID NO: 3044249 - RNA, 19 nt, Artificial Sequence
  Description of Artificial Sequence: Synthetic oligonucleotide
ccugaacuccgacaaagaa

SEQ ID NO: 3044250 - RNA, 19 nt, Artificial Sequence
  Description of Artificial Sequence: Synthetic oligonucleotide
cccaguauaccaggugagc

SEQ ID NO: 3044251 - RNA, 19 nt, Artificial Sequence
  Description of Artificial Sequence: Synthetic oligonucleotide
gaacuccgacaaagaaaca

SEQ ID NO: 3044252 - RNA, 19 nt, Artificial Sequence
  Description of Artificial Sequence: Synthetic oligonucleotide
agagaacugcucagccagu

SEQ ID NO: 3044253 - RNA, 19 nt, Artificial Sequence
  Description of Artificial Sequence: Synthetic oligonucleotide
  modified_base (17)..(17): a, c, u, g, unknown or other
ggucuugaucgacccgnac

SEQ ID NO: 3044254 - RNA, 19 nt, Artificial Sequence
  Description of Artificial Sequence: Synthetic oligonucleotide
  modified_base (5)..(5): a, c, u, g, unknown or other
ggaancucaccagcagaga

SEQ ID NO: 3044255 - RNA, 19 nt, Artificial Sequence
  Description of Artificial Sequence: Synthetic oligonucleotide
aaccugcagcaaggccagg

SEQ ID NO: 3044256 - RNA, 19 nt, Artificial Sequence
  Description of Artificial Sequence: Synthetic oligonucleotide
uggggaguacaggcacaca

SEQ ID NO: 3044257 - RNA, 19 nt, Artificial Sequence
  Description of Artificial Sequence: Synthetic oligonucleotide
gggacgggaacugucgaga

SEQ ID NO: 3044258 - RNA, 19 nt, Artificial Sequence
  Description of Artificial Sequence: Synthetic oligonucleotide
gcacacacuggcauuggga

SEQ ID NO: 3044259 - RNA, 19 nt, Artificial Sequence
  Description of Artificial Sequence: Synthetic oligonucleotide
cauccugggcuagcugcug

SEQ ID NO: 3044260 - RNA, 19 nt, Artificial Sequence
  Description of Artificial Sequence: Synthetic oligonucleotide
ccagagggcuccugaacuc

SEQ ID NO: 3044261 - RNA, 19 nt, Artificial Sequence
  Description of Artificial Sequence: Synthetic oligonucleotide
gccagagggcuccugaacu

SEQ ID NO: 3044262 - RNA, 19 nt, Artificial Sequence
  Description of Artificial Sequence: Synthetic oligonucleotide
ugacggccuugccccagua

SEQ ID NO: 3044263 - RNA, 19 nt, Artificial Sequence
  Description of Artificial Sequence: Synthetic oligonucleotide
gggaacugucgagagaacu

SEQ ID NO: 3044264 - RNA, 19 nt, Artificial Sequence
  Description of Artificial Sequence: Synthetic oligonucleotide
gagcugcgagcuggaaaac

SEQ ID NO: 3044265 - RNA, 19 nt, Artificial Sequence
  Description of Artificial Sequence: Synthetic oligonucleotide
  modified_base (12)..(12): a, c, u, g, unknown or other
ccagagccgganagcaguc

SEQ ID NO: 3044266 - RNA, 19 nt, Artificial Sequence
  Description of Artificial Sequence: Synthetic oligonucleotide
gccuugccccaguauacca

SEQ ID NO: 3044267 - RNA, 19 nt, Artificial Sequence
  Description of Artificial Sequence: Synthetic oligonucleotide
gagggcuccugaacuccga

SEQ ID NO: 3044268 - RNA, 19 nt, Artificial Sequence
  Description of Artificial Sequence: Synthetic oligonucleotide
cagcaaggccaggucagca

SEQ ID NO: 3044269 - RNA, 19 nt, Artificial Sequence
  Description of Artificial Sequence: Synthetic oligonucleotide
gacguuguucucacacaau

SEQ ID NO: 3044270 - RNA, 19 nt, Artificial Sequence
  Description of Artificial Sequence: Synthetic oligonucleotide
gcugcgagcuggaaaaccu

SEQ ID NO: 3044271 - RNA, 19 nt, Artificial Sequence
  Description of Artificial Sequence: Synthetic oligonucleotide
gggcuccugaacuccgaca

SEQ ID NO: 3044272 - RNA, 19 nt, Artificial Sequence
  Description of Artificial Sequence: Synthetic oligonucleotide
  modified_base (4)..(4): a, c, u, g, unknown or other
gganagcagucaaguggga

SEQ ID NO: 3044273 - RNA, 19 nt, Artificial Sequence
  Description of Artificial Sequence: Synthetic oligonucleotide
cauugggagacaggacaua

SEQ ID NO: 3044274 - RNA, 19 nt, Artificial Sequence
  Description of Artificial Sequence: Synthetic oligonucleotide
  modified_base (7)..(7): a, c, u, g, unknown or other
gacccgnaccagagccgga

SEQ ID NO: 3044275 - RNA, 19 nt, Artificial Sequence
  Description of Artificial Sequence: Synthetic oligonucleotide
  modified_base (11)..(11): a, c, u, g, unknown or other
cagagccgganagcaguca

SEQ ID NO: 3044276 - RNA, 19 nt, Artificial Sequence
  Description of Artificial Sequence: Synthetic oligonucleotide
ccaggauagauggcagguc

SEQ ID NO: 3044277 - RNA, 19 nt, Artificial Sequence
  Description of Artificial Sequence: Synthetic oligonucleotide
gcagcaaggccaggucagc

SEQ ID NO: 3044278 - RNA, 19 nt, Artificial Sequence
  Description of Artificial Sequence: Synthetic oligonucleotide
  modified_base (8)..(8): a, c, u, g, unknown or other
cgacccgnaccagagccgg

SEQ ID NO: 3044279 - RNA, 19 nt, Artificial Sequence
  Description of Artificial Sequence: Synthetic oligonucleotide
cgagagaacugcucagcca

SEQ ID NO: 3044280 - RNA, 19 nt, Artificial Sequence
  Description of Artificial Sequence: Synthetic oligonucleotide
ccaguauaccaggugagcu

SEQ ID NO: 3044281 - RNA, 19 nt, Artificial Sequence
  Description of Artificial Sequence: Synthetic oligonucleotide
gccaggauagauggcaggu

SEQ ID NO: 3044282 - RNA, 19 nt, Artificial Sequence
  Description of Artificial Sequence: Synthetic oligonucleotide
acacuggcauugggagaca

SEQ ID NO: 3044283 - RNA, 19 nt, Artificial Sequence
  Description of Artificial Sequence: Synthetic oligonucleotide
gggaguacaggcacacacu

SEQ ID NO: 3044284 - RNA, 19 nt, Artificial Sequence
  Description of Artificial Sequence: Synthetic oligonucleotide
gcgagcuggaaaaccugca

SEQ ID NO: 3044285 - RNA, 19 nt, Artificial Sequence
  Description of Artificial Sequence: Synthetic oligonucleotide
gacggccuugccccaguau

SEQ ID NO: 3044286 - RNA, 19 nt, Artificial Sequence
  Description of Artificial Sequence: Synthetic oligonucleotide
ggucagcauccugggcuag

SEQ ID NO: 3044287 - RNA, 19 nt, Artificial Sequence
  Description of Artificial Sequence: Synthetic oligonucleotide
cggccuugccccaguauac

SEQ ID NO: 3044288 - RNA, 19 nt, Artificial Sequence
  Description of Artificial Sequence: Synthetic oligonucleotide
ggcaggucaugggacggga

SEQ ID NO: 3044289 - RNA, 19 nt, Artificial Sequence
  Description of Artificial Sequence: Synthetic oligonucleotide
gucaugggacgggaacugu

SEQ ID NO: 3044290 - RNA, 19 nt, Artificial Sequence
  Description of Artificial Sequence: Synthetic oligonucleotide
gagacaggacauagacguu

SEQ ID NO: 3044291 - RNA, 19 nt, Artificial Sequence
  Description of Artificial Sequence: Synthetic oligonucleotide
cucagccaguggggaguac

SEQ ID NO: 3044292 - RNA, 19 nt, Artificial Sequence
  Description of Artificial Sequence: Synthetic oligonucleotide
ccaggugagcugcgagcug

SEQ ID NO: 3044293 - RNA, 19 nt, Artificial Sequence
  Description of Artificial Sequence: Synthetic oligonucleotide
gcuccugaacuccgacaaa

SEQ ID NO: 3044294 - RNA, 19 nt, Artificial Sequence
  Description of Artificial Sequence: Synthetic oligonucleotide
gcauugggagacaggacau

SEQ ID NO: 3044295 - RNA, 19 nt, Artificial Sequence
  Description of Artificial Sequence: Synthetic oligonucleotide
cagcagauguggucuugau

SEQ ID NO: 3044296 - RNA, 19 nt, Artificial Sequence
  Description of Artificial Sequence: Synthetic oligonucleotide
cgggaacugucgagagaac

SEQ ID NO: 3044297 - RNA, 19 nt, Artificial Sequence
  Description of Artificial Sequence: Synthetic oligonucleotide
ggugagcugcgagcuggaa

SEQ ID NO: 3044298 - RNA, 19 nt, Artificial Sequence
  Description of Artificial Sequence: Synthetic oligonucleotide
gcauccugggcuagcugcu

SEQ ID NO: 3044299 - RNA, 19 nt, Artificial Sequence
  Description of Artificial Sequence: Synthetic oligonucleotide
gggagccagagggcuccug

SEQ ID NO: 3044300 - RNA, 19 nt, Artificial Sequence
  Description of Artificial Sequence: Synthetic oligonucleotide
gcaggucaugggacgggaa

SEQ ID NO: 3044301 - RNA, 19 nt, Artificial Sequence
  Description of Artificial Sequence: Synthetic oligonucleotide
  modified_base (5)..(5): a, c, u, g, unknown or other
  modified_base (18)..(18): a, c, u, g, unknown or other
cccgnaccagagccggana

SEQ ID NO: 3044302 - RNA, 19 nt, Artificial Sequence
  Description of Artificial Sequence: Synthetic oligonucleotide
gcucagccaguggggagua

SEQ ID NO: 3044303 - RNA, 19 nt, Artificial Sequence
  Description of Artificial Sequence: Synthetic oligonucleotide
ggggagccagagggcuccu

SEQ ID NO: 3044304 - RNA, 19 nt, Artificial Sequence
  Description of Artificial Sequence: Synthetic oligonucleotide
  modified_base (1)..(1): a, c, u, g, unknown or other
  modified_base (18)..(18): a, c, u, g, unknown or other
nagcagucaagugggaanc

SEQ ID NO: 3044305 - RNA, 19 nt, Artificial Sequence
  Description of Artificial Sequence: Synthetic oligonucleotide
  modified_base (1)..(1): a, c, u, g, unknown or other
  modified_base (14)..(14): a, c, u, g, unknown or other
naccagagccgganagcag

SEQ ID NO: 3044306 - RNA, 19 nt, Artificial Sequence
  Description of Artificial Sequence: Synthetic oligonucleotide
  modified_base (1)..(1): a, c, u, g, unknown or other
ncucaccagcagagacuuc

SEQ ID NO: 3044307 - RNA, 19 nt, Artificial Sequence
  Description of Artificial Sequence: Synthetic oligonucleotide
agugauuauacuuaaagac

SEQ ID NO: 3044308 - RNA, 19 nt, Artificial Sequence
  Description of Artificial Sequence: Synthetic oligonucleotide
aaagugauuauacuuaaag

SEQ ID NO: 3044309 - RNA, 19 nt, Artificial Sequence
  Description of Artificial Sequence: Synthetic oligonucleotide
ugaaauauuuuccacacug

SEQ ID NO: 3044310 - RNA, 19 nt, Artificial Sequence
  Description of Artificial Sequence: Synthetic oligonucleotide
caaaauuuguuuuauuucc

SEQ ID NO: 3044311 - RNA, 19 nt, Artificial Sequence
  Description of Artificial Sequence: Synthetic oligonucleotide
uguuuuauuuccuguaugg

SEQ ID NO: 3044312 - RNA, 19 nt, Artificial Sequence
  Description of Artificial Sequence: Synthetic oligonucleotide
acagguaaaagacuucugc

SEQ ID NO: 3044313 - RNA, 19 nt, Artificial Sequence
  Description of Artificial Sequence: Synthetic oligonucleotide
aagacuucugcccugagug

SEQ ID NO: 3044314 - RNA, 19 nt, Artificial Sequence
  Description of Artificial Sequence: Synthetic oligonucleotide
auauuuuccacacugguca

SEQ ID NO: 3044315 - RNA, 19 nt, Artificial Sequence
  Description of Artificial Sequence: Synthetic oligonucleotide
uuuauuuccuguauggacu

SEQ ID NO: 3044316 - RNA, 19 nt, Artificial Sequence
  Description of Artificial Sequence: Synthetic oligonucleotide
agguaaaagacuucugccc

SEQ ID NO: 3044317 - RNA, 19 nt, Artificial Sequence
  Description of Artificial Sequence: Synthetic oligonucleotide
uguauggacucgauaaugg

SEQ ID NO: 3044318 - RNA, 19 nt, Artificial Sequence
  Description of Artificial Sequence: Synthetic oligonucleotide
acucauuacauuugaaggg

SEQ ID NO: 3044319 - RNA, 19 nt, Artificial Sequence
  Description of Artificial Sequence: Synthetic oligonucleotide
agugcuucugggcaaagcc

SEQ ID NO: 3044320 - RNA, 19 nt, Artificial Sequence
  Description of Artificial Sequence: Synthetic oligonucleotide
cacucauuacauuugaagg

SEQ ID NO: 3044321 - RNA, 19 nt, Artificial Sequence
  Description of Artificial Sequence: Synthetic oligonucleotide
aaauauuuuccacacuggu

SEQ ID NO: 3044322 - RNA, 19 nt, Artificial Sequence
  Description of Artificial Sequence: Synthetic oligonucleotide
aagugauuauacuuaaaga

SEQ ID NO: 3044323 - RNA, 19 nt, Artificial Sequence
  Description of Artificial Sequence: Synthetic oligonucleotide
uuuuauuuccuguauggac

SEQ ID NO: 3044324 - RNA, 19 nt, Artificial Sequence
  Description of Artificial Sequence: Synthetic oligonucleotide
ucgauaauggcucuuuagc

SEQ ID NO: 3044325 - RNA, 19 nt, Artificial Sequence
  Description of Artificial Sequence: Synthetic oligonucleotide
aauauuuuccacacugguc

SEQ ID NO: 3044326 - RNA, 19 nt, Artificial Sequence
  Description of Artificial Sequence: Synthetic oligonucleotide
uuauacuuaaagacuuugc

SEQ ID NO: 3044327 - RNA, 19 nt, Artificial Sequence
  Description of Artificial Sequence: Synthetic oligonucleotide
gauaauggcucuuuagcug

SEQ ID NO: 3044328 - RNA, 19 nt, Artificial Sequence
  Description of Artificial Sequence: Synthetic oligonucleotide
ugauuauacuuaaagacuu

SEQ ID NO: 3044329 - RNA, 19 nt, Artificial Sequence
  Description of Artificial Sequence: Synthetic oligonucleotide
ucuggcugaaauauuuucc

SEQ ID NO: 3044330 - RNA, 19 nt, Artificial Sequence
  Description of Artificial Sequence: Synthetic oligonucleotide
cauuacauuugaagggucg

SEQ ID NO: 3044331 - RNA, 19 nt, Artificial Sequence
  Description of Artificial Sequence: Synthetic oligonucleotide
uccuguauggacucgauaa

SEQ ID NO: 3044332 - RNA, 19 nt, Artificial Sequence
  Description of Artificial Sequence: Synthetic oligonucleotide
agcagugagugcuuggugg

SEQ ID NO: 3044333 - RNA, 19 nt, Artificial Sequence
  Description of Artificial Sequence: Synthetic oligonucleotide
gaaauauuuuccacacugg

SEQ ID NO: 3044334 - RNA, 19 nt, Artificial Sequence
  Description of Artificial Sequence: Synthetic oligonucleotide
uauggacucgauaauggcu

SEQ ID NO: 3044335 - RNA, 19 nt, Artificial Sequence
  Description of Artificial Sequence: Synthetic oligonucleotide
agugccuugcugcacacgg

SEQ ID NO: 3044336 - RNA, 19 nt, Artificial Sequence
  Description of Artificial Sequence: Synthetic oligonucleotide
aguguggcgucucuggugg

SEQ ID NO: 3044337 - RNA, 19 nt, Artificial Sequence
  Description of Artificial Sequence: Synthetic oligonucleotide
uuuguuuuauuuccuguau

SEQ ID NO: 3044338 - RNA, 19 nt, Artificial Sequence
  Description of Artificial Sequence: Synthetic oligonucleotide
uuguuuuauuuccuguaug

SEQ ID NO: 3044339 - RNA, 19 nt, Artificial Sequence
  Description of Artificial Sequence: Synthetic oligonucleotide
cuggucacagguaaaagac

SEQ ID NO: 3044340 - RNA, 19 nt, Artificial Sequence
  Description of Artificial Sequence: Synthetic oligonucleotide
auuugaagggucguucccc

SEQ ID NO: 3044341 - RNA, 19 nt, Artificial Sequence
  Description of Artificial Sequence: Synthetic oligonucleotide
auaauggcucuuuagcugu

SEQ ID NO: 3044342 - RNA, 19 nt, Artificial Sequence
  Description of Artificial Sequence: Synthetic oligonucleotide
cagguaaaagacuucugcc

SEQ ID NO: 3044343 - RNA, 19 nt, Artificial Sequence
  Description of Artificial Sequence: Synthetic oligonucleotide
ugucuuuucuggcugaaau

SEQ ID NO: 3044344 - RNA, 19 nt, Artificial Sequence
  Description of Artificial Sequence: Synthetic oligonucleotide
auuauacuuaaagacuuug

SEQ ID NO: 3044345 - RNA, 19 nt, Artificial Sequence
  Description of Artificial Sequence: Synthetic oligonucleotide
aaaauuuguuuuauuuccu

SEQ ID NO: 3044346 - RNA, 19 nt, Artificial Sequence
  Description of Artificial Sequence: Synthetic oligonucleotide
uuccacacuggucacaggu

SEQ ID NO: 3044347 - RNA, 19 nt, Artificial Sequence
  Description of Artificial Sequence: Synthetic oligonucleotide
ucugacaaaauuuguuuua

SEQ ID NO: 3044348 - RNA, 19 nt, Artificial Sequence
  Description of Artificial Sequence: Synthetic oligonucleotide
uuagcugucuuuucuggcu

SEQ ID NO: 3044349 - RNA, 19 nt, Artificial Sequence
  Description of Artificial Sequence: Synthetic oligonucleotide
uuuagcugucuuuucuggc

SEQ ID NO: 3044350 - RNA, 19 nt, Artificial Sequence
  Description of Artificial Sequence: Synthetic oligonucleotide
acuggucacagguaaaaga

SEQ ID NO: 3044351 - RNA, 19 nt, Artificial Sequence
  Description of Artificial Sequence: Synthetic oligonucleotide
aaagacuucugcccugagu

SEQ ID NO: 3044352 - RNA, 19 nt, Artificial Sequence
  Description of Artificial Sequence: Synthetic oligonucleotide
ugagugcaggcucaugugc

SEQ ID NO: 3044353 - RNA, 19 nt, Artificial Sequence
  Description of Artificial Sequence: Synthetic oligonucleotide
agugcuugguggucagugc

SEQ ID NO: 3044354 - RNA, 19 nt, Artificial Sequence
  Description of Artificial Sequence: Synthetic oligonucleotide
ugcaaggagugcuucuggg

SEQ ID NO: 3044355 - RNA, 19 nt, Artificial Sequence
  Description of Artificial Sequence: Synthetic oligonucleotide
gacaaaauuuguuuuauuu

SEQ ID NO: 3044356 - RNA, 19 nt, Artificial Sequence
  Description of Artificial Sequence: Synthetic oligonucleotide
uccccuguaugcauccugg

SEQ ID NO: 3044357 - RNA, 19 nt, Artificial Sequence
  Description of Artificial Sequence: Synthetic oligonucleotide
auggacucgauaauggcuc

SEQ ID NO: 3044358 - RNA, 19 nt, Artificial Sequence
  Description of Artificial Sequence: Synthetic oligonucleotide
cucgauaauggcucuuuag

SEQ ID NO: 3044359 - RNA, 19 nt, Artificial Sequence
  Description of Artificial Sequence: Synthetic oligonucleotide
ugugcuccagcagugagug

SEQ ID NO: 3044360 - RNA, 19 nt, Artificial Sequence
  Description of Artificial Sequence: Synthetic oligonucleotide
cuuaaagacuuugccacag

SEQ ID NO: 3044361 - RNA, 19 nt, Artificial Sequence
  Description of Artificial Sequence: Synthetic oligonucleotide
cugguguggaccugcaagg

SEQ ID NO: 3044362 - RNA, 19 nt, Artificial Sequence
  Description of Artificial Sequence: Synthetic oligonucleotide
uucugacaaaauuuguuuu

SEQ ID NO: 3044363 - RNA, 19 nt, Artificial Sequence
  Description of Artificial Sequence: Synthetic oligonucleotide
uuauuuccuguauggacuc

SEQ ID NO: 3044364 - RNA, 19 nt, Artificial Sequence
  Description of Artificial Sequence: Synthetic oligonucleotide
ugcuucugggcaaagcccu

SEQ ID NO: 3044365 - RNA, 19 nt, Artificial Sequence
  Description of Artificial Sequence: Synthetic oligonucleotide
gcugaaauauuuuccacac

SEQ ID NO: 3044366 - RNA, 19 nt, Artificial Sequence
  Description of Artificial Sequence: Synthetic oligonucleotide
uucuggcugaaauauuuuc

SEQ ID NO: 3044367 - RNA, 19 nt, Artificial Sequence
  Description of Artificial Sequence: Synthetic oligonucleotide
guauggacucgauaauggc

SEQ ID NO: 3044368 - RNA, 19 nt, Artificial Sequence
  Description of Artificial Sequence: Synthetic oligonucleotide
uuugaagggucguucccca

SEQ ID NO: 3044369 - RNA, 19 nt, Artificial Sequence
  Description of Artificial Sequence: Synthetic oligonucleotide
guggucagugccuugcugc

SEQ ID NO: 3044370 - RNA, 19 nt, Artificial Sequence
  Description of Artificial Sequence: Synthetic oligonucleotide
uguggaccugcaaggagug

SEQ ID NO: 3044371 - RNA, 19 nt, Artificial Sequence
  Description of Artificial Sequence: Synthetic oligonucleotide
aaaagacuucugcccugag

SEQ ID NO: 3044372 - RNA, 19 nt, Artificial Sequence
  Description of Artificial Sequence: Synthetic oligonucleotide
acuuaaagacuuugccaca

SEQ ID NO: 3044373 - RNA, 19 nt, Artificial Sequence
  Description of Artificial Sequence: Synthetic oligonucleotide
cauuugaagggucguuccc

SEQ ID NO: 3044374 - RNA, 19 nt, Artificial Sequence
  Description of Artificial Sequence: Synthetic oligonucleotide
guaaaagacuucugcccug

SEQ ID NO: 3044375 - RNA, 19 nt, Artificial Sequence
  Description of Artificial Sequence: Synthetic oligonucleotide
uggucacagguaaaagacu

SEQ ID NO: 3044376 - RNA, 19 nt, Artificial Sequence
  Description of Artificial Sequence: Synthetic oligonucleotide
cuggcugaaauauuuucca

SEQ ID NO: 3044377 - RNA, 19 nt, Artificial Sequence
  Description of Artificial Sequence: Synthetic oligonucleotide
uaaaagacuucugcccuga

SEQ ID NO: 3044378 - RNA, 19 nt, Artificial Sequence
  Description of Artificial Sequence: Synthetic oligonucleotide
uagcugucuuuucuggcug

SEQ ID NO: 3044379 - RNA, 19 nt, Artificial Sequence
  Description of Artificial Sequence: Synthetic oligonucleotide
auuacauuugaagggucgu

SEQ ID NO: 3044380 - RNA, 19 nt, Artificial Sequence
  Description of Artificial Sequence: Synthetic oligonucleotide
ugggcaaagcccuucccac

SEQ ID NO: 3044381 - RNA, 19 nt, Artificial Sequence
  Description of Artificial Sequence: Synthetic oligonucleotide
gugauuauacuuaaagacu

SEQ ID NO: 3044382 - RNA, 19 nt, Artificial Sequence
  Description of Artificial Sequence: Synthetic oligonucleotide
acacggugcagguguacgg

SEQ ID NO: 3044383 - RNA, 19 nt, Artificial Sequence
  Description of Artificial Sequence: Synthetic oligonucleotide
agugcaggcucaugugcuc

SEQ ID NO: 3044384 - RNA, 19 nt, Artificial Sequence
  Description of Artificial Sequence: Synthetic oligonucleotide
uggcugaaauauuuuccac

SEQ ID NO: 3044385 - RNA, 19 nt, Artificial Sequence
  Description of Artificial Sequence: Synthetic oligonucleotide
cuguauggacucgauaaug

SEQ ID NO: 3044386 - RNA, 19 nt, Artificial Sequence
  Description of Artificial Sequence: Synthetic oligonucleotide
augcauccugguguggacc

SEQ ID NO: 3044387 - RNA, 19 nt, Artificial Sequence
  Description of Artificial Sequence: Synthetic oligonucleotide
uggaccugcaaggagugcu

SEQ ID NO: 3044388 - RNA, 19 nt, Artificial Sequence
  Description of Artificial Sequence: Synthetic oligonucleotide
uauuuccuguauggacucg

SEQ ID NO: 3044389 - RNA, 19 nt, Artificial Sequence
  Description of Artificial Sequence: Synthetic oligonucleotide
aaaagugauuauacuuaaa

SEQ ID NO: 3044390 - RNA, 19 nt, Artificial Sequence
  Description of Artificial Sequence: Synthetic oligonucleotide
uuucuggcugaaauauuuu

SEQ ID NO: 3044391 - RNA, 19 nt, Artificial Sequence
  Description of Artificial Sequence: Synthetic oligonucleotide
caaggagugcuucugggca

SEQ ID NO: 3044392 - RNA, 19 nt, Artificial Sequence
  Description of Artificial Sequence: Synthetic oligonucleotide
cuguaugcauccuggugug

SEQ ID NO: 3044393 - RNA, 19 nt, Artificial Sequence
  Description of Artificial Sequence: Synthetic oligonucleotide
ugacaaaauuuguuuuauu

SEQ ID NO: 3044394 - RNA, 19 nt, Artificial Sequence
  Description of Artificial Sequence: Synthetic oligonucleotide
gagugcuugguggucagug

SEQ ID NO: 3044395 - RNA, 19 nt, Artificial Sequence
  Description of Artificial Sequence: Synthetic oligonucleotide
ggcugaaauauuuuccaca

SEQ ID NO: 3044396 - RNA, 19 nt, Artificial Sequence
  Description of Artificial Sequence: Synthetic oligonucleotide
cucaugugcuccagcagug

SEQ ID NO: 3044397 - RNA, 19 nt, Artificial Sequence
  Description of Artificial Sequence: Synthetic oligonucleotide
uaugcauccugguguggac

SEQ ID NO: 3044398 - RNA, 19 nt, Artificial Sequence
  Description of Artificial Sequence: Synthetic oligonucleotide
aaggagugcuucugggcaa

SEQ ID NO: 3044399 - RNA, 19 nt, Artificial Sequence
  Description of Artificial Sequence: Synthetic oligonucleotide
gugcuugguggucagugcc

SEQ ID NO: 3044400 - RNA, 19 nt, Artificial Sequence
  Description of Artificial Sequence: Synthetic oligonucleotide
caugugcuccagcagugag

SEQ ID NO: 3044401 - RNA, 19 nt, Artificial Sequence
  Description of Artificial Sequence: Synthetic oligonucleotide
uugguggucagugccuugc

SEQ ID NO: 3044402 - RNA, 19 nt, Artificial Sequence
  Description of Artificial Sequence: Synthetic oligonucleotide
agguguacggccgcucccc

SEQ ID NO: 3044403 - RNA, 19 nt, Artificial Sequence
  Description of Artificial Sequence: Synthetic oligonucleotide
guuuuauuuccuguaugga

SEQ ID NO: 3044404 - RNA, 19 nt, Artificial Sequence
  Description of Artificial Sequence: Synthetic oligonucleotide
ugcauccugguguggaccu

SEQ ID NO: 3044405 - RNA, 19 nt, Artificial Sequence
  Description of Artificial Sequence: Synthetic oligonucleotide
ucugggcaaagcccuuccc

SEQ ID NO: 3044406 - RNA, 19 nt, Artificial Sequence
  Description of Artificial Sequence: Synthetic oligonucleotide
aggcucaugugcuccagca

SEQ ID NO: 3044407 - RNA, 19 nt, Artificial Sequence
  Description of Artificial Sequence: Synthetic oligonucleotide
aauggcucuuuagcugucu

SEQ ID NO: 3044408 - RNA, 19 nt, Artificial Sequence
  Description of Artificial Sequence: Synthetic oligonucleotide
cugagugcaggcucaugug

SEQ ID NO: 3044409 - RNA, 19 nt, Artificial Sequence
  Description of Artificial Sequence: Synthetic oligonucleotide
cugcaaggagugcuucugg

SEQ ID NO: 3044410 - RNA, 19 nt, Artificial Sequence
  Description of Artificial Sequence: Synthetic oligonucleotide
uguaugcauccuggugugg

SEQ ID NO: 3044411 - RNA, 19 nt, Artificial Sequence
  Description of Artificial Sequence: Synthetic oligonucleotide
auuuccuguauggacucga

SEQ ID NO: 3044412 - RNA, 19 nt, Artificial Sequence
  Description of Artificial Sequence: Synthetic oligonucleotide
uggucagugccuugcugca

SEQ ID NO: 3044413 - RNA, 19 nt, Artificial Sequence
  Description of Artificial Sequence: Synthetic oligonucleotide
gguaaaagacuucugcccu

SEQ ID NO: 3044414 - RNA, 19 nt, Artificial Sequence
  Description of Artificial Sequence: Synthetic oligonucleotide
agugagugcuuggugguca

SEQ ID NO: 3044415 - RNA, 19 nt, Artificial Sequence
  Description of Artificial Sequence: Synthetic oligonucleotide
uuuccuguauggacucgau

SEQ ID NO: 3044416 - RNA, 19 nt, Artificial Sequence
  Description of Artificial Sequence: Synthetic oligonucleotide
uugaagggucguuccccag

SEQ ID NO: 3044417 - RNA, 19 nt, Artificial Sequence
  Description of Artificial Sequence: Synthetic oligonucleotide
ccugguguggaccugcaag

SEQ ID NO: 3044418 - RNA, 19 nt, Artificial Sequence
  Description of Artificial Sequence: Synthetic oligonucleotide
ucucugguggauugcuaaa

SEQ ID NO: 3044419 - RNA, 19 nt, Artificial Sequence
  Description of Artificial Sequence: Synthetic oligonucleotide
cacacggugcagguguacg

SEQ ID NO: 3044420 - RNA, 19 nt, Artificial Sequence
  Description of Artificial Sequence: Synthetic oligonucleotide
uuacauuugaagggucguu

SEQ ID NO: 3044421 - RNA, 19 nt, Artificial Sequence
  Description of Artificial Sequence: Synthetic oligonucleotide
uuccuguauggacucgaua

SEQ ID NO: 3044422 - RNA, 19 nt, Artificial Sequence
  Description of Artificial Sequence: Synthetic oligonucleotide
uggacucgauaauggcucu

SEQ ID NO: 3044423 - RNA, 19 nt, Artificial Sequence
  Description of Artificial Sequence: Synthetic oligonucleotide
ugcccugagugcaggcuca

SEQ ID NO: 3044424 - RNA, 19 nt, Artificial Sequence
  Description of Artificial Sequence: Synthetic oligonucleotide
gucucugguggauugcuaa

SEQ ID NO: 3044425 - RNA, 19 nt, Artificial Sequence
  Description of Artificial Sequence: Synthetic oligonucleotide
gguguggaccugcaaggag

SEQ ID NO: 3044426 - RNA, 19 nt, Artificial Sequence
  Description of Artificial Sequence: Synthetic oligonucleotide
gucagugccuugcugcaca

SEQ ID NO: 3044427 - RNA, 19 nt, Artificial Sequence
  Description of Artificial Sequence: Synthetic oligonucleotide
gcaaggagugcuucugggc

SEQ ID NO: 3044428 - RNA, 19 nt, Artificial Sequence
  Description of Artificial Sequence: Synthetic oligonucleotide
uggcgucucugguggauug

SEQ ID NO: 3044429 - RNA, 19 nt, Artificial Sequence
  Description of Artificial Sequence: Synthetic oligonucleotide
caguguggcgucucuggug

SEQ ID NO: 3044430 - RNA, 19 nt, Artificial Sequence
  Description of Artificial Sequence: Synthetic oligonucleotide
gucuuuucuggcugaaaua

SEQ ID NO: 3044431 - RNA, 19 nt, Artificial Sequence
  Description of Artificial Sequence: Synthetic oligonucleotide
uaauggcucuuuagcuguc

SEQ ID NO: 3044432 - RNA, 19 nt, Artificial Sequence
  Description of Artificial Sequence: Synthetic oligonucleotide
ucaugugcuccagcaguga

SEQ ID NO: 3044433 - RNA, 19 nt, Artificial Sequence
  Description of Artificial Sequence: Synthetic oligonucleotide
acacuggucacagguaaaa

SEQ ID NO: 3044434 - RNA, 19 nt, Artificial Sequence
  Description of Artificial Sequence: Synthetic oligonucleotide
ugcaggcucaugugcucca

SEQ ID NO: 3044435 - RNA, 19 nt, Artificial Sequence
  Description of Artificial Sequence: Synthetic oligonucleotide
ucugcccugagugcaggcu

SEQ ID NO: 3044436 - RNA, 19 nt, Artificial Sequence
  Description of Artificial Sequence: Synthetic oligonucleotide
gagugcuucugggcaaagc

SEQ ID NO: 3044437 - RNA, 19 nt, Artificial Sequence
  Description of Artificial Sequence: Synthetic oligonucleotide
cacuggucacagguaaaag

SEQ ID NO: 3044438 - RNA, 19 nt, Artificial Sequence
  Description of Artificial Sequence: Synthetic oligonucleotide
cauccugguguggaccugc

SEQ ID NO: 3044439 - RNA, 19 nt, Artificial Sequence
  Description of Artificial Sequence: Synthetic oligonucleotide
accugcaaggagugcuucu

SEQ ID NO: 3044440 - RNA, 19 nt, Artificial Sequence
  Description of Artificial Sequence: Synthetic oligonucleotide
ucguuccccaguguggcgu

SEQ ID NO: 3044441 - RNA, 19 nt, Artificial Sequence
  Description of Artificial Sequence: Synthetic oligonucleotide
gugagugcuugguggucag

SEQ ID NO: 3044442 - RNA, 19 nt, Artificial Sequence
  Description of Artificial Sequence: Synthetic oligonucleotide
cacggugcagguguacggc

SEQ ID NO: 3044443 - RNA, 19 nt, Artificial Sequence
  Description of Artificial Sequence: Synthetic oligonucleotide
cugggcaaagcccuuccca

SEQ ID NO: 3044444 - RNA, 19 nt, Artificial Sequence
  Description of Artificial Sequence: Synthetic oligonucleotide
ugguguggaccugcaagga

SEQ ID NO: 3044445 - RNA, 19 nt, Artificial Sequence
  Description of Artificial Sequence: Synthetic oligonucleotide
cucuuuagcugucuuuucu

SEQ ID NO: 3044446 - RNA, 19 nt, Artificial Sequence
  Description of Artificial Sequence: Synthetic oligonucleotide
gccacagucuuuacacugg

SEQ ID NO: 3044447 - RNA, 19 nt, Artificial Sequence
  Description of Artificial Sequence: Synthetic oligonucleotide
uucugcccugagugcaggc

SEQ ID NO: 3044448 - RNA, 19 nt, Artificial Sequence
  Description of Artificial Sequence: Synthetic oligonucleotide
ucagugccuugcugcacac

SEQ ID NO: 3044449 - RNA, 19 nt, Artificial Sequence
  Description of Artificial Sequence: Synthetic oligonucleotide
acggccgcuccccuguaug

SEQ ID NO: 3044450 - RNA, 19 nt, Artificial Sequence
  Description of Artificial Sequence: Synthetic oligonucleotide
acucgauaauggcucuuua

SEQ ID NO: 3044451 - RNA, 19 nt, Artificial Sequence
  Description of Artificial Sequence: Synthetic oligonucleotide
cuccccuguaugcauccug

SEQ ID NO: 3044452 - RNA, 19 nt, Artificial Sequence
  Description of Artificial Sequence: Synthetic oligonucleotide
uggcucuuuagcugucuuu

SEQ ID NO: 3044453 - RNA, 19 nt, Artificial Sequence
  Description of Artificial Sequence: Synthetic oligonucleotide
gucguuccccaguguggcg

SEQ ID NO: 3044454 - RNA, 19 nt, Artificial Sequence
  Description of Artificial Sequence: Synthetic oligonucleotide
cuugguggucagugccuug

SEQ ID NO: 3044455 - RNA, 19 nt, Artificial Sequence
  Description of Artificial Sequence: Synthetic oligonucleotide
cuucugcccugagugcagg

SEQ ID NO: 3044456 - RNA, 19 nt, Artificial Sequence
  Description of Artificial Sequence: Synthetic oligonucleotide
cugcccugagugcaggcuc

SEQ ID NO: 3044457 - RNA, 19 nt, Artificial Sequence
  Description of Artificial Sequence: Synthetic oligonucleotide
cagguguacggccgcuccc

SEQ ID NO: 3044458 - RNA, 19 nt, Artificial Sequence
  Description of Artificial Sequence: Synthetic oligonucleotide
ccacagucuuuacacuggg

SEQ ID NO: 3044459 - RNA, 19 nt, Artificial Sequence
  Description of Artificial Sequence: Synthetic oligonucleotide
gauuauacuuaaagacuuu

SEQ ID NO: 3044460 - RNA, 19 nt, Artificial Sequence
  Description of Artificial Sequence: Synthetic oligonucleotide
acuucugcccugagugcag

SEQ ID NO: 3044461 - RNA, 19 nt, Artificial Sequence
  Description of Artificial Sequence: Synthetic oligonucleotide
ggucguuccccaguguggc

SEQ ID NO: 3044462 - RNA, 19 nt, Artificial Sequence
  Description of Artificial Sequence: Synthetic oligonucleotide
caggcucaugugcuccagc

SEQ ID NO: 3044463 - RNA, 19 nt, Artificial Sequence
  Description of Artificial Sequence: Synthetic oligonucleotide
gguggucagugccuugcug

SEQ ID NO: 3044464 - RNA, 19 nt, Artificial Sequence
  Description of Artificial Sequence: Synthetic oligonucleotide
cacacucauuacauuugaa

SEQ ID NO: 3044465 - RNA, 19 nt, Artificial Sequence
  Description of Artificial Sequence: Synthetic oligonucleotide
augugcuccagcagugagu

SEQ ID NO: 3044466 - RNA, 19 nt, Artificial Sequence
  Description of Artificial Sequence: Synthetic oligonucleotide
auggcucuuuagcugucuu

SEQ ID NO: 3044467 - RNA, 19 nt, Artificial Sequence
  Description of Artificial Sequence: Synthetic oligonucleotide
ccuguaugcauccuggugu

SEQ ID NO: 3044468 - RNA, 19 nt, Artificial Sequence
  Description of Artificial Sequence: Synthetic oligonucleotide
uguggcgucucugguggau

SEQ ID NO: 3044469 - RNA, 19 nt, Artificial Sequence
  Description of Artificial Sequence: Synthetic oligonucleotide
gggucguuccccagugugg

SEQ ID NO: 3044470 - RNA, 19 nt, Artificial Sequence
  Description of Artificial Sequence: Synthetic oligonucleotide
ggugcagguguacggccgc

SEQ ID NO: 3044471 - RNA, 19 nt, Artificial Sequence
  Description of Artificial Sequence: Synthetic oligonucleotide
uccugguguggaccugcaa

SEQ ID NO: 3044472 - RNA, 19 nt, Artificial Sequence
  Description of Artificial Sequence: Synthetic oligonucleotide
cugacaaaauuuguuuuau

SEQ ID NO: 3044473 - RNA, 19 nt, Artificial Sequence
  Description of Artificial Sequence: Synthetic oligonucleotide
cuucugggcaaagcccuuc

SEQ ID NO: 3044474 - RNA, 19 nt, Artificial Sequence
  Description of Artificial Sequence: Synthetic oligonucleotide
guguggaccugcaaggagu

SEQ ID NO: 3044475 - RNA, 19 nt, Artificial Sequence
  Description of Artificial Sequence: Synthetic oligonucleotide
gagugcaggcucaugugcu

SEQ ID NO: 3044476 - RNA, 19 nt, Artificial Sequence
  Description of Artificial Sequence: Synthetic oligonucleotide
cugaaauauuuuccacacu

SEQ ID NO: 3044477 - RNA, 19 nt, Artificial Sequence
  Description of Artificial Sequence: Synthetic oligonucleotide
cccuguaugcauccuggug

SEQ ID NO: 3044478 - RNA, 19 nt, Artificial Sequence
  Description of Artificial Sequence: Synthetic oligonucleotide
cucugguggauugcuaaaa

SEQ ID NO: 3044479 - RNA, 19 nt, Artificial Sequence
  Description of Artificial Sequence: Synthetic oligonucleotide
ugcacacggugcaggugua

SEQ ID NO: 3044480 - RNA, 19 nt, Artificial Sequence
  Description of Artificial Sequence: Synthetic oligonucleotide
cacacuggucacagguaaa

SEQ ID NO: 3044481 - RNA, 19 nt, Artificial Sequence
  Description of Artificial Sequence: Synthetic oligonucleotide
guguacggccgcuccccug

SEQ ID NO: 3044482 - RNA, 19 nt, Artificial Sequence
  Description of Artificial Sequence: Synthetic oligonucleotide
gcucuuuagcugucuuuuc

SEQ ID NO: 3044483 - RNA, 19 nt, Artificial Sequence
  Description of Artificial Sequence: Synthetic oligonucleotide
ccugcaaggagugcuucug

SEQ ID NO: 3044484 - RNA, 19 nt, Artificial Sequence
  Description of Artificial Sequence: Synthetic oligonucleotide
cagugccuugcugcacacg

SEQ ID NO: 3044485 - RNA, 19 nt, Artificial Sequence
  Description of Artificial Sequence: Synthetic oligonucleotide
gacucgauaauggcucuuu

SEQ ID NO: 3044486 - RNA, 19 nt, Artificial Sequence
  Description of Artificial Sequence: Synthetic oligonucleotide
cuuuucuggcugaaauauu

SEQ ID NO: 3044487 - RNA, 19 nt, Artificial Sequence
  Description of Artificial Sequence: Synthetic oligonucleotide
aggagugcuucugggcaaa

SEQ ID NO: 3044488 - RNA, 19 nt, Artificial Sequence
  Description of Artificial Sequence: Synthetic oligonucleotide
cagugagugcuuggugguc

SEQ ID NO: 3044489 - RNA, 19 nt, Artificial Sequence
  Description of Artificial Sequence: Synthetic oligonucleotide
uacggccgcuccccuguau

SEQ ID NO: 3044490 - RNA, 19 nt, Artificial Sequence
  Description of Artificial Sequence: Synthetic oligonucleotide
cgauaauggcucuuuagcu

SEQ ID NO: 3044491 - RNA, 19 nt, Artificial Sequence
  Description of Artificial Sequence: Synthetic oligonucleotide
gggcaaagcccuucccaca

SEQ ID NO: 3044492 - RNA, 19 nt, Artificial Sequence
  Description of Artificial Sequence: Synthetic oligonucleotide
ccugagugcaggcucaugu

SEQ ID NO: 3044493 - RNA, 19 nt, Artificial Sequence
  Description of Artificial Sequence: Synthetic oligonucleotide
guggaccugcaaggagugc

SEQ ID NO: 3044494 - RNA, 19 nt, Artificial Sequence
  Description of Artificial Sequence: Synthetic oligonucleotide
gcagugagugcuugguggu

SEQ ID NO: 3044495 - RNA, 19 nt, Artificial Sequence
  Description of Artificial Sequence: Synthetic oligonucleotide
ggcucuuuagcugucuuuu

SEQ ID NO: 3044496 - RNA, 19 nt, Artificial Sequence
  Description of Artificial Sequence: Synthetic oligonucleotide
cugucuuuucuggcugaaa

SEQ ID NO: 3044497 - RNA, 19 nt, Artificial Sequence
  Description of Artificial Sequence: Synthetic oligonucleotide
gccuugcugcacacggugc

SEQ ID NO: 3044498 - RNA, 19 nt, Artificial Sequence
  Description of Artificial Sequence: Synthetic oligonucleotide
ggcgucucugguggauugc

SEQ ID NO: 3044499 - RNA, 19 nt, Artificial Sequence
  Description of Artificial Sequence: Synthetic oligonucleotide
auccugguguggaccugca

SEQ ID NO: 3044500 - RNA, 19 nt, Artificial Sequence
  Description of Artificial Sequence: Synthetic oligonucleotide
gcaggcucaugugcuccag

SEQ ID NO: 3044501 - RNA, 19 nt, Artificial Sequence
  Description of Artificial Sequence: Synthetic oligonucleotide
ggucagugccuugcugcac

SEQ ID NO: 3044502 - RNA, 19 nt, Artificial Sequence
  Description of Artificial Sequence: Synthetic oligonucleotide
guguggcgucucuggugga

SEQ ID NO: 3044503 - RNA, 19 nt, Artificial Sequence
  Description of Artificial Sequence: Synthetic oligonucleotide
ccuguauggacucgauaau

SEQ ID NO: 3044504 - RNA, 19 nt, Artificial Sequence
  Description of Artificial Sequence: Synthetic oligonucleotide
gcauccugguguggaccug

SEQ ID NO: 3044505 - RNA, 19 nt, Artificial Sequence
  Description of Artificial Sequence: Synthetic oligonucleotide
gcacacggugcagguguac

SEQ ID NO: 3044506 - RNA, 19 nt, Artificial Sequence
  Description of Artificial Sequence: Synthetic oligonucleotide
ggccgcuccccuguaugca

SEQ ID NO: 3044507 - RNA, 19 nt, Artificial Sequence
  Description of Artificial Sequence: Synthetic oligonucleotide
ccgcuccccuguaugcauc

SEQ ID NO: 3044508 - RNA, 19 nt, Artificial Sequence
  Description of Artificial Sequence: Synthetic oligonucleotide
gugccuugcugcacacggu

SEQ ID NO: 3044509 - RNA, 19 nt, Artificial Sequence
  Description of Artificial Sequence: Synthetic oligonucleotide
gguguacggccgcuccccu

SEQ ID NO: 3044510 - RNA, 19 nt, Artificial Sequence
  Description of Artificial Sequence: Synthetic oligonucleotide
cguuccccaguguggcguc

SEQ ID NO: 3044511 - RNA, 19 nt, Artificial Sequence
  Description of Artificial Sequence: Synthetic oligonucleotide
guggcgucucugguggauu

SEQ ID NO: 3044512 - RNA, 19 nt, Artificial Sequence
  Description of Artificial Sequence: Synthetic oligonucleotide
gcgucucugguggauugcu

SEQ ID NO: 3044513 - RNA, 19 nt, Artificial Sequence
  Description of Artificial Sequence: Synthetic oligonucleotide
gugcagguguacggccgcu

SEQ ID NO: 3044514 - RNA, 19 nt, Artificial Sequence
  Description of Artificial Sequence: Synthetic oligonucleotide
gccgcuccccuguaugcau

SEQ ID NO: 3044515 - RNA, 19 nt, Artificial Sequence
  Description of Artificial Sequence: Synthetic oligonucleotide
cccugagugcaggcucaug

SEQ ID NO: 3044516 - RNA, 19 nt, Artificial Sequence
  Description of Artificial Sequence: Synthetic oligonucleotide
ggaccugcaaggagugcuu

SEQ ID NO: 3044517 - RNA, 19 nt, Artificial Sequence
  Description of Artificial Sequence: Synthetic oligonucleotide
ggacucgauaauggcucuu

SEQ ID NO: 3044518 - RNA, 19 nt, Artificial Sequence
  Description of Artificial Sequence: Synthetic oligonucleotide
cgucucugguggauugcua

SEQ ID NO: 3044519 - RNA, 19 nt, Artificial Sequence
  Description of Artificial Sequence: Synthetic oligonucleotide
ccccuguaugcauccuggu

SEQ ID NO: 3044520 - RNA, 19 nt, Artificial Sequence
  Description of Artificial Sequence: Synthetic oligonucleotide
gcccugagugcaggcucau

SEQ ID NO: 3044521 - RNA, 19 nt, Artificial Sequence
  Description of Artificial Sequence: Synthetic oligonucleotide
aacaagauguucuuggacu

SEQ ID NO: 3044522 - RNA, 19 nt, Artificial Sequence
  Description of Artificial Sequence: Synthetic oligonucleotide
acaaacaagauguucuugg

SEQ ID NO: 3044523 - RNA, 19 nt, Artificial Sequence
  Description of Artificial Sequence: Synthetic oligonucleotide
aaacaagauguucuuggac

SEQ ID NO: 3044524 - RNA, 19 nt, Artificial Sequence
  Description of Artificial Sequence: Synthetic oligonucleotide
aaugacaaacaagauguuc

SEQ ID NO: 3044525 - RNA, 19 nt, Artificial Sequence
  Description of Artificial Sequence: Synthetic oligonucleotide
aaagaccacauagguaucc

SEQ ID NO: 3044526 - RNA, 19 nt, Artificial Sequence
  Description of Artificial Sequence: Synthetic oligonucleotide
ucaccaaagaccacauagg

SEQ ID NO: 3044527 - RNA, 19 nt, Artificial Sequence
  Description of Artificial Sequence: Synthetic oligonucleotide
ucuggcuuggcaaugacaa

SEQ ID NO: 3044528 - RNA, 19 nt, Artificial Sequence
  Description of Artificial Sequence: Synthetic oligonucleotide
auggucuccucauugcugc

SEQ ID NO: 3044529 - RNA, 19 nt, Artificial Sequence
  Description of Artificial Sequence: Synthetic oligonucleotide
uucgacauugccuuucgag

SEQ ID NO: 3044530 - RNA, 19 nt, Artificial Sequence
  Description of Artificial Sequence: Synthetic oligonucleotide
uucuggauggugauccugg

SEQ ID NO: 3044531 - RNA, 19 nt, Artificial Sequence
  Description of Artificial Sequence: Synthetic oligonucleotide
agcuuuguguaccugcugg

SEQ ID NO: 3044532 - RNA, 19 nt, Artificial Sequence
  Description of Artificial Sequence: Synthetic oligonucleotide
uucuuggacuucuggaugg

SEQ ID NO: 3044533 - RNA, 19 nt, Artificial Sequence
  Description of Artificial Sequence: Synthetic oligonucleotide
gauguucuuggacuucugg

SEQ ID NO: 3044534 - RNA, 19 nt, Artificial Sequence
  Description of Artificial Sequence: Synthetic oligonucleotide
uuggccucaccaaagacca

SEQ ID NO: 3044535 - RNA, 19 nt, Artificial Sequence
  Description of Artificial Sequence: Synthetic oligonucleotide
ugaauuucucugcugcagc

SEQ ID NO: 3044536 - RNA, 19 nt, Artificial Sequence
  Description of Artificial Sequence: Synthetic oligonucleotide
aagacaucuggcuuggcaa

SEQ ID NO: 3044537 - RNA, 19 nt, Artificial Sequence
  Description of Artificial Sequence: Synthetic oligonucleotide
cuugaagacaucuggcuug

SEQ ID NO: 3044538 - RNA, 19 nt, Artificial Sequence
  Description of Artificial Sequence: Synthetic oligonucleotide
ucugagggcaccuugaauu

SEQ ID NO: 3044539 - RNA, 19 nt, Artificial Sequence
  Description of Artificial Sequence: Synthetic oligonucleotide
ucgacauugccuuucgagc

SEQ ID NO: 3044540 - RNA, 19 nt, Artificial Sequence
  Description of Artificial Sequence: Synthetic oligonucleotide
cuuggccucaccaaagacc

SEQ ID NO: 3044541 - RNA, 19 nt, Artificial Sequence
  Description of Artificial Sequence: Synthetic oligonucleotide
ugaaucugccguaagccca

SEQ ID NO: 3044542 - RNA, 19 nt, Artificial Sequence
  Description of Artificial Sequence: Synthetic oligonucleotide
cuuggcaaugacaaacaag

SEQ ID NO: 3044543 - RNA, 19 nt, Artificial Sequence
  Description of Artificial Sequence: Synthetic oligonucleotide
cucacugcggcuuugcuug

SEQ ID NO: 3044544 - RNA, 19 nt, Artificial Sequence
  Description of Artificial Sequence: Synthetic oligonucleotide
augacaaacaagauguucu

SEQ ID NO: 3044545 - RNA, 19 nt, Artificial Sequence
  Description of Artificial Sequence: Synthetic oligonucleotide
acauagguauccgaggcgg

SEQ ID NO: 3044546 - RNA, 19 nt, Artificial Sequence
  Description of Artificial Sequence: Synthetic oligonucleotide
gacuucuggauggugaucc

SEQ ID NO: 3044547 - RNA, 19 nt, Artificial Sequence
  Description of Artificial Sequence: Synthetic oligonucleotide
uuggacuucuggaugguga

SEQ ID NO: 3044548 - RNA, 19 nt, Artificial Sequence
  Description of Artificial Sequence: Synthetic oligonucleotide
accacauagguauccgagg

SEQ ID NO: 3044549 - RNA, 19 nt, Artificial Sequence
  Description of Artificial Sequence: Synthetic oligonucleotide
uuuguguaccugcugggac

SEQ ID NO: 3044550 - RNA, 19 nt, Artificial Sequence
  Description of Artificial Sequence: Synthetic oligonucleotide
ucugcugcagcuuugugua

SEQ ID NO: 3044551 - RNA, 19 nt, Artificial Sequence
  Description of Artificial Sequence: Synthetic oligonucleotide
uugaauuucucugcugcag

SEQ ID NO: 3044552 - RNA, 19 nt, Artificial Sequence
  Description of Artificial Sequence: Synthetic oligonucleotide
ggcaaugacaaacaagaug

SEQ ID NO: 3044553 - RNA, 19 nt, Artificial Sequence
  Description of Artificial Sequence: Synthetic oligonucleotide
ugcagcuuuguguaccugc

SEQ ID NO: 3044554 - RNA, 19 nt, Artificial Sequence
  Description of Artificial Sequence: Synthetic oligonucleotide
aagaccacauagguauccg

SEQ ID NO: 3044555 - RNA, 19 nt, Artificial Sequence
  Description of Artificial Sequence: Synthetic oligonucleotide
gagccuucuucucacugcg

SEQ ID NO: 3044556 - RNA, 19 nt, Artificial Sequence
  Description of Artificial Sequence: Synthetic oligonucleotide
agguccucgaucuuggccu

SEQ ID NO: 3044557 - RNA, 19 nt, Artificial Sequence
  Description of Artificial Sequence: Synthetic oligonucleotide
ucuugaagacaucuggcuu

SEQ ID NO: 3044558 - RNA, 19 nt, Artificial Sequence
  Description of Artificial Sequence: Synthetic oligonucleotide
gggcugaggacucugaggg

SEQ ID NO: 3044559 - RNA, 19 nt, Artificial Sequence
  Description of Artificial Sequence: Synthetic oligonucleotide
ggcucuugaagacaucugg

SEQ ID NO: 3044560 - RNA, 19 nt, Artificial Sequence
  Description of Artificial Sequence: Synthetic oligonucleotide
cugaaucugccguaagccc

SEQ ID NO: 3044561 - RNA, 19 nt, Artificial Sequence
  Description of Artificial Sequence: Synthetic oligonucleotide
ugggacagguccucgaucu

SEQ ID NO: 3044562 - RNA, 19 nt, Artificial Sequence
  Description of Artificial Sequence: Synthetic oligonucleotide
gaagacaucuggcuuggca

SEQ ID NO: 3044563 - RNA, 19 nt, Artificial Sequence
  Description of Artificial Sequence: Synthetic oligonucleotide
ucacccggggcccaggugc

SEQ ID NO: 3044564 - RNA, 19 nt, Artificial Sequence
  Description of Artificial Sequence: Synthetic oligonucleotide
aagauguucuuggacuucu

SEQ ID NO: 3044565 - RNA, 19 nt, Artificial Sequence
  Description of Artificial Sequence: Synthetic oligonucleotide
uugaagacaucuggcuugg

SEQ ID NO: 3044566 - RNA, 19 nt, Artificial Sequence
  Description of Artificial Sequence: Synthetic oligonucleotide
cuuugcuuggcuuuggcaa

SEQ ID NO: 3044567 - RNA, 19 nt, Artificial Sequence
  Description of Artificial Sequence: Synthetic oligonucleotide
gaccacauagguauccgag

SEQ ID NO: 3044568 - RNA, 19 nt, Artificial Sequence
  Description of Artificial Sequence: Synthetic oligonucleotide
uaccugcugggacaggucc

SEQ ID NO: 3044569 - RNA, 19 nt, Artificial Sequence
  Description of Artificial Sequence: Synthetic oligonucleotide
uuguguaccugcugggaca

SEQ ID NO: 3044570 - RNA, 19 nt, Artificial Sequence
  Description of Artificial Sequence: Synthetic oligonucleotide
ugccguaagcccaguuucg

SEQ ID NO: 3044571 - RNA, 19 nt, Artificial Sequence
  Description of Artificial Sequence: Synthetic oligonucleotide
aauggucuccucauugcug

SEQ ID NO: 3044572 - RNA, 19 nt, Artificial Sequence
  Description of Artificial Sequence: Synthetic oligonucleotide
guuucgacauugccuuucg

SEQ ID NO: 3044573 - RNA, 19 nt, Artificial Sequence
  Description of Artificial Sequence: Synthetic oligonucleotide
ggcaccuugaauuucucug

SEQ ID NO: 3044574 - RNA, 19 nt, Artificial Sequence
  Description of Artificial Sequence: Synthetic oligonucleotide
guucuuggacuucuggaug

SEQ ID NO: 3044575 - RNA, 19 nt, Artificial Sequence
  Description of Artificial Sequence: Synthetic oligonucleotide
uggcuuggcaaugacaaac

SEQ ID NO: 3044576 - RNA, 19 nt, Artificial Sequence
  Description of Artificial Sequence: Synthetic oligonucleotide
gcaaugacaaacaagaugu

SEQ ID NO: 3044577 - RNA, 19 nt, Artificial Sequence
  Description of Artificial Sequence: Synthetic oligonucleotide
ugccuuucgagccuucuuc

SEQ ID NO: 3044578 - RNA, 19 nt, Artificial Sequence
  Description of Artificial Sequence: Synthetic oligonucleotide
aagcccaguuucgacauug

SEQ ID NO: 3044579 - RNA, 19 nt, Artificial Sequence
  Description of Artificial Sequence: Synthetic oligonucleotide
cacauagguauccgaggcg

SEQ ID NO: 3044580 - RNA, 19 nt, Artificial Sequence
  Description of Artificial Sequence: Synthetic oligonucleotide
auagguauccgaggcgggg

SEQ ID NO: 3044581 - RNA, 19 nt, Artificial Sequence
  Description of Artificial Sequence: Synthetic oligonucleotide
gacagguccucgaucuugg

SEQ ID NO: 3044582 - RNA, 19 nt, Artificial Sequence
  Description of Artificial Sequence: Synthetic oligonucleotide
ucugccguaagcccaguuu

SEQ ID NO: 3044583 - RNA, 19 nt, Artificial Sequence
  Description of Artificial Sequence: Synthetic oligonucleotide
acaagauguucuuggacuu

SEQ ID NO: 3044584 - RNA, 19 nt, Artificial Sequence
  Description of Artificial Sequence: Synthetic oligonucleotide
uuugcuuggcuuuggcaau

SEQ ID NO: 3044585 - RNA, 19 nt, Artificial Sequence
  Description of Artificial Sequence: Synthetic oligonucleotide
ugacaaacaagauguucuu

SEQ ID NO: 3044586 - RNA, 19 nt, Artificial Sequence
  Description of Artificial Sequence: Synthetic oligonucleotide
ucgagccuucuucucacug

SEQ ID NO: 3044587 - RNA, 19 nt, Artificial Sequence
  Description of Artificial Sequence: Synthetic oligonucleotide
ucgcacuguggccucaccc

SEQ ID NO: 3044588 - RNA, 19 nt, Artificial Sequence
  Description of Artificial Sequence: Synthetic oligonucleotide
uguguaccugcugggacag

SEQ ID NO: 3044589 - RNA, 19 nt, Artificial Sequence
  Description of Artificial Sequence: Synthetic oligonucleotide
uguaccugcugggacaggu

SEQ ID NO: 3044590 - RNA, 19 nt, Artificial Sequence
  Description of Artificial Sequence: Synthetic oligonucleotide
caggugccaacucagggac

SEQ ID NO: 3044591 - RNA, 19 nt, Artificial Sequence
  Description of Artificial Sequence: Synthetic oligonucleotide
ucagggaccagggcugagg

SEQ ID NO: 3044592 - RNA, 19 nt, Artificial Sequence
  Description of Artificial Sequence: Synthetic oligonucleotide
cauagguauccgaggcggg

SEQ ID NO: 3044593 - RNA, 19 nt, Artificial Sequence
  Description of Artificial Sequence: Synthetic oligonucleotide
gaaucugccguaagcccag

SEQ ID NO: 3044594 - RNA, 19 nt, Artificial Sequence
  Description of Artificial Sequence: Synthetic oligonucleotide
caaacaagauguucuugga

SEQ ID NO: 3044595 - RNA, 19 nt, Artificial Sequence
  Description of Artificial Sequence: Synthetic oligonucleotide
acuguggccucacccgggg

SEQ ID NO: 3044596 - RNA, 19 nt, Artificial Sequence
  Description of Artificial Sequence: Synthetic oligonucleotide
ucgaucuuggccucaccaa

SEQ ID NO: 3044597 - RNA, 19 nt, Artificial Sequence
  Description of Artificial Sequence: Synthetic oligonucleotide
ggcaauggucuccucauug

SEQ ID NO: 3044598 - RNA, 19 nt, Artificial Sequence
  Description of Artificial Sequence: Synthetic oligonucleotide
gaggcggggcucuugaaga

SEQ ID NO: 3044599 - RNA, 19 nt, Artificial Sequence
  Description of Artificial Sequence: Synthetic oligonucleotide
ugcugcagcuuuguguacc

SEQ ID NO: 3044600 - RNA, 19 nt, Artificial Sequence
  Description of Artificial Sequence: Synthetic oligonucleotide
cugccguaagcccaguuuc

SEQ ID NO: 3044601 - RNA, 19 nt, Artificial Sequence
  Description of Artificial Sequence: Synthetic oligonucleotide
cuuucgagccuucuucuca

SEQ ID NO: 3044602 - RNA, 19 nt, Artificial Sequence
  Description of Artificial Sequence: Synthetic oligonucleotide
ugccaacucagggaccagg

SEQ ID NO: 3044603 - RNA, 19 nt, Artificial Sequence
  Description of Artificial Sequence: Synthetic oligonucleotide
cuugaauuucucugcugca

SEQ ID NO: 3044604 - RNA, 19 nt, Artificial Sequence
  Description of Artificial Sequence: Synthetic oligonucleotide
accuugaauuucucugcug

SEQ ID NO: 3044605 - RNA, 19 nt, Artificial Sequence
  Description of Artificial Sequence: Synthetic oligonucleotide
uggacuucuggauggugau

SEQ ID NO: 3044606 - RNA, 19 nt, Artificial Sequence
  Description of Artificial Sequence: Synthetic oligonucleotide
cagguccucgaucuuggcc

SEQ ID NO: 3044607 - RNA, 19 nt, Artificial Sequence
  Description of Artificial Sequence: Synthetic oligonucleotide
uccugcuccucgcacugug

SEQ ID NO: 3044608 - RNA, 19 nt, Artificial Sequence
  Description of Artificial Sequence: Synthetic oligonucleotide
ugacucccugaaucugccg

SEQ ID NO: 3044609 - RNA, 19 nt, Artificial Sequence
  Description of Artificial Sequence: Synthetic oligonucleotide
ccugaaucugccguaagcc

SEQ ID NO: 3044610 - RNA, 19 nt, Artificial Sequence
  Description of Artificial Sequence: Synthetic oligonucleotide
gcaccuugaauuucucugc

SEQ ID NO: 3044611 - RNA, 19 nt, Artificial Sequence
  Description of Artificial Sequence: Synthetic oligonucleotide
ccacauagguauccgaggc

SEQ ID NO: 3044612 - RNA, 19 nt, Artificial Sequence
  Description of Artificial Sequence: Synthetic oligonucleotide
gaauuucucugcugcagcu

SEQ ID NO: 3044613 - RNA, 19 nt, Artificial Sequence
  Description of Artificial Sequence: Synthetic oligonucleotide
ccaaagaccacauagguau

SEQ ID NO: 3044614 - RNA, 19 nt, Artificial Sequence
  Description of Artificial Sequence: Synthetic oligonucleotide
uggcaaugacaaacaagau

SEQ ID NO: 3044615 - RNA, 19 nt, Artificial Sequence
  Description of Artificial Sequence: Synthetic oligonucleotide
agaccacauagguauccga

SEQ ID NO: 3044616 - RNA, 19 nt, Artificial Sequence
  Description of Artificial Sequence: Synthetic oligonucleotide
ucucacugcggcuuugcuu

SEQ ID NO: 3044617 - RNA, 19 nt, Artificial Sequence
  Description of Artificial Sequence: Synthetic oligonucleotide
agacaucuggcuuggcaau

SEQ ID NO: 3044618 - RNA, 19 nt, Artificial Sequence
  Description of Artificial Sequence: Synthetic oligonucleotide
aauuucucugcugcagcuu

SEQ ID NO: 3044619 - RNA, 19 nt, Artificial Sequence
  Description of Artificial Sequence: Synthetic oligonucleotide
uuucgacauugccuuucga

SEQ ID NO: 3044620 - RNA, 19 nt, Artificial Sequence
  Description of Artificial Sequence: Synthetic oligonucleotide
gcuuuguguaccugcuggg

SEQ ID NO: 3044621 - RNA, 19 nt, Artificial Sequence
  Description of Artificial Sequence: Synthetic oligonucleotide
uagguauccgaggcggggc

SEQ ID NO: 3044622 - RNA, 19 nt, Artificial Sequence
  Description of Artificial Sequence: Synthetic oligonucleotide
cucgaucuuggccucacca

SEQ ID NO: 3044623 - RNA, 19 nt, Artificial Sequence
  Description of Artificial Sequence: Synthetic oligonucleotide
gauccuggugacucccuga

SEQ ID NO: 3044624 - RNA, 19 nt, Artificial Sequence
  Description of Artificial Sequence: Synthetic oligonucleotide
ugcuccucgcacuguggcc

SEQ ID NO: 3044625 - RNA, 19 nt, Artificial Sequence
  Description of Artificial Sequence: Synthetic oligonucleotide
aggcggggcucuugaagac

SEQ ID NO: 3044626 - RNA, 19 nt, Artificial Sequence
  Description of Artificial Sequence: Synthetic oligonucleotide
ccuggugacucccugaauc

SEQ ID NO: 3044627 - RNA, 19 nt, Artificial Sequence
  Description of Artificial Sequence: Synthetic oligonucleotide
ucccugaaucugccguaag

SEQ ID NO: 3044628 - RNA, 19 nt, Artificial Sequence
  Description of Artificial Sequence: Synthetic oligonucleotide
ugcuuggcuuuggcaaugg

SEQ ID NO: 3044629 - RNA, 19 nt, Artificial Sequence
  Description of Artificial Sequence: Synthetic oligonucleotide
uccucuaccuccucaucuu

SEQ ID NO: 3044630 - RNA, 19 nt, Artificial Sequence
  Description of Artificial Sequence: Synthetic oligonucleotide
gacaucuggcuuggcaaug

SEQ ID NO: 3044631 - RNA, 19 nt, Artificial Sequence
  Description of Artificial Sequence: Synthetic oligonucleotide
uccgaggcggggcucuuga

SEQ ID NO: 3044632 - RNA, 19 nt, Artificial Sequence
  Description of Artificial Sequence: Synthetic oligonucleotide
uucucacugcggcuuugcu

SEQ ID NO: 3044633 - RNA, 19 nt, Artificial Sequence
  Description of Artificial Sequence: Synthetic oligonucleotide
caaagaccacauagguauc

SEQ ID NO: 3044634 - RNA, 19 nt, Artificial Sequence
  Description of Artificial Sequence: Synthetic oligonucleotide
cugcuccucgcacuguggc

SEQ ID NO: 3044635 - RNA, 19 nt, Artificial Sequence
  Description of Artificial Sequence: Synthetic oligonucleotide
cucuugaagacaucuggcu

SEQ ID NO: 3044636 - RNA, 19 nt, Artificial Sequence
  Description of Artificial Sequence: Synthetic oligonucleotide
uggugauccuggugacucc

SEQ ID NO: 3044637 - RNA, 19 nt, Artificial Sequence
  Description of Artificial Sequence: Synthetic oligonucleotide
gacucccugaaucugccgu

SEQ ID NO: 3044638 - RNA, 19 nt, Artificial Sequence
  Description of Artificial Sequence: Synthetic oligonucleotide
agggaccagggcugaggac

SEQ ID NO: 3044639 - RNA, 19 nt, Artificial Sequence
  Description of Artificial Sequence: Synthetic oligonucleotide
gccuucuucucacugcggc

SEQ ID NO: 3044640 - RNA, 19 nt, Artificial Sequence
  Description of Artificial Sequence: Synthetic oligonucleotide
ugcggcuuugcuuggcuuu

SEQ ID NO: 3044641 - RNA, 19 nt, Artificial Sequence
  Description of Artificial Sequence: Synthetic oligonucleotide
cgacauugccuuucgagcc

SEQ ID NO: 3044642 - RNA, 19 nt, Artificial Sequence
  Description of Artificial Sequence: Synthetic oligonucleotide
auccuggugacucccugaa

SEQ ID NO: 3044643 - RNA, 19 nt, Artificial Sequence
  Description of Artificial Sequence: Synthetic oligonucleotide
uggugacucccugaaucug

SEQ ID NO: 3044644 - RNA, 19 nt, Artificial Sequence
  Description of Artificial Sequence: Synthetic oligonucleotide
cuucuggauggugauccug

SEQ ID NO: 3044645 - RNA, 19 nt, Artificial Sequence
  Description of Artificial Sequence: Synthetic oligonucleotide
uugcuuggcuuuggcaaug

SEQ ID NO: 3044646 - RNA, 19 nt, Artificial Sequence
  Description of Artificial Sequence: Synthetic oligonucleotide
ucacugcggcuuugcuugg

SEQ ID NO: 3044647 - RNA, 19 nt, Artificial Sequence
  Description of Artificial Sequence: Synthetic oligonucleotide
caacucagggaccagggcu

SEQ ID NO: 3044648 - RNA, 19 nt, Artificial Sequence
  Description of Artificial Sequence: Synthetic oligonucleotide
gcucuugaagacaucuggc

SEQ ID NO: 3044649 - RNA, 19 nt, Artificial Sequence
  Description of Artificial Sequence: Synthetic oligonucleotide
agguauccgaggcggggcu

SEQ ID NO: 3044650 - RNA, 19 nt, Artificial Sequence
  Description of Artificial Sequence: Synthetic oligonucleotide
acuucuggauggugauccu

SEQ ID NO: 3044651 - RNA, 19 nt, Artificial Sequence
  Description of Artificial Sequence: Synthetic oligonucleotide
cagggcugaggacucugag

SEQ ID NO: 3044652 - RNA, 19 nt, Artificial Sequence
  Description of Artificial Sequence: Synthetic oligonucleotide
caccaaagaccacauaggu

SEQ ID NO: 3044653 - RNA, 19 nt, Artificial Sequence
  Description of Artificial Sequence: Synthetic oligonucleotide
ugcugggacagguccucga

SEQ ID NO: 3044654 - RNA, 19 nt, Artificial Sequence
  Description of Artificial Sequence: Synthetic oligonucleotide
cugaggacucugagggcac

SEQ ID NO: 3044655 - RNA, 19 nt, Artificial Sequence
  Description of Artificial Sequence: Synthetic oligonucleotide
caagauguucuuggacuuc

SEQ ID NO: 3044656 - RNA, 19 nt, Artificial Sequence
  Description of Artificial Sequence: Synthetic oligonucleotide
uugccuuucgagccuucuu

SEQ ID NO: 3044657 - RNA, 19 nt, Artificial Sequence
  Description of Artificial Sequence: Synthetic oligonucleotide
cuucucacugcggcuuugc

SEQ ID NO: 3044658 - RNA, 19 nt, Artificial Sequence
  Description of Artificial Sequence: Synthetic oligonucleotide
agcccaguuucgacauugc

SEQ ID NO: 3044659 - RNA, 19 nt, Artificial Sequence
  Description of Artificial Sequence: Synthetic oligonucleotide
gugacucccugaaucugcc

SEQ ID NO: 3044660 - RNA, 19 nt, Artificial Sequence
  Description of Artificial Sequence: Synthetic oligonucleotide
gacucugagggcaccuuga

SEQ ID NO: 3044661 - RNA, 19 nt, Artificial Sequence
  Description of Artificial Sequence: Synthetic oligonucleotide
acucugagggcaccuugaa

SEQ ID NO: 3044662 - RNA, 19 nt, Artificial Sequence
  Description of Artificial Sequence: Synthetic oligonucleotide
gacauugccuuucgagccu

SEQ ID NO: 3044663 - RNA, 19 nt, Artificial Sequence
  Description of Artificial Sequence: Synthetic oligonucleotide
accaaagaccacauaggua

SEQ ID NO: 3044664 - RNA, 19 nt, Artificial Sequence
  Description of Artificial Sequence: Synthetic oligonucleotide
cuuuguguaccugcuggga

SEQ ID NO: 3044665 - RNA, 19 nt, Artificial Sequence
  Description of Artificial Sequence: Synthetic oligonucleotide
ucuuggacuucuggauggu

SEQ ID NO: 3044666 - RNA, 19 nt, Artificial Sequence
  Description of Artificial Sequence: Synthetic oligonucleotide
auugccuuucgagccuucu

SEQ ID NO: 3044667 - RNA, 19 nt, Artificial Sequence
  Description of Artificial Sequence: Synthetic oligonucleotide
guaagcccaguuucgacau

SEQ ID NO: 3044668 - RNA, 19 nt, Artificial Sequence
  Description of Artificial Sequence: Synthetic oligonucleotide
ugaggacucugagggcacc

SEQ ID NO: 3044669 - RNA, 19 nt, Artificial Sequence
  Description of Artificial Sequence: Synthetic oligonucleotide
cuuggacuucuggauggug

SEQ ID NO: 3044670 - RNA, 19 nt, Artificial Sequence
  Description of Artificial Sequence: Synthetic oligonucleotide
caucuggcuuggcaaugac

SEQ ID NO: 3044671 - RNA, 19 nt, Artificial Sequence
  Description of Artificial Sequence: Synthetic oligonucleotide
ucuucucacugcggcuuug

SEQ ID NO: 3044672 - RNA, 19 nt, Artificial Sequence
  Description of Artificial Sequence: Synthetic oligonucleotide
gccaacucagggaccaggg

SEQ ID NO: 3044673 - RNA, 19 nt, Artificial Sequence
  Description of Artificial Sequence: Synthetic oligonucleotide
gcacuguggccucacccgg

SEQ ID NO: 3044674 - RNA, 19 nt, Artificial Sequence
  Description of Artificial Sequence: Synthetic oligonucleotide
ugagggcaccuugaauuuc

SEQ ID NO: 3044675 - RNA, 19 nt, Artificial Sequence
  Description of Artificial Sequence: Synthetic oligonucleotide
acucccugaaucugccgua

SEQ ID NO: 3044676 - RNA, 19 nt, Artificial Sequence
  Description of Artificial Sequence: Synthetic oligonucleotide
ggugauccuggugacuccc

SEQ ID NO: 3044677 - RNA, 19 nt, Artificial Sequence
  Description of Artificial Sequence: Synthetic oligonucleotide
aucuggcuuggcaaugaca

SEQ ID NO: 3044678 - RNA, 19 nt, Artificial Sequence
  Description of Artificial Sequence: Synthetic oligonucleotide
cugggacagguccucgauc

SEQ ID NO: 3044679 - RNA, 19 nt, Artificial Sequence
  Description of Artificial Sequence: Synthetic oligonucleotide
cagcuuuguguaccugcug

SEQ ID NO: 3044680 - RNA, 19 nt, Artificial Sequence
  Description of Artificial Sequence: Synthetic oligonucleotide
ggacucugagggcaccuug

SEQ ID NO: 3044681 - RNA, 19 nt, Artificial Sequence
  Description of Artificial Sequence: Synthetic oligonucleotide
aggugccaacucagggacc

SEQ ID NO: 3044682 - RNA, 19 nt, Artificial Sequence
  Description of Artificial Sequence: Synthetic oligonucleotide
gcugaggacucugagggca

SEQ ID NO: 3044683 - RNA, 19 nt, Artificial Sequence
  Description of Artificial Sequence: Synthetic oligonucleotide
ggacagguccucgaucuug

SEQ ID NO: 3044684 - RNA, 19 nt, Artificial Sequence
  Description of Artificial Sequence: Synthetic oligonucleotide
ggugccaacucagggacca

SEQ ID NO: 3044685 - RNA, 19 nt, Artificial Sequence
  Description of Artificial Sequence: Synthetic oligonucleotide
ggauggugauccuggugac

SEQ ID NO: 3044686 - RNA, 19 nt, Artificial Sequence
  Description of Artificial Sequence: Synthetic oligonucleotide
ggcuuuggcaauggucucc

SEQ ID NO: 3044687 - RNA, 19 nt, Artificial Sequence
  Description of Artificial Sequence: Synthetic oligonucleotide
gcuuugcuuggcuuuggca

SEQ ID NO: 3044688 - RNA, 19 nt, Artificial Sequence
  Description of Artificial Sequence: Synthetic oligonucleotide
agauguucuuggacuucug

SEQ ID NO: 3044689 - RNA, 19 nt, Artificial Sequence
  Description of Artificial Sequence: Synthetic oligonucleotide
uccuggugacucccugaau

SEQ ID NO: 3044690 - RNA, 19 nt, Artificial Sequence
  Description of Artificial Sequence: Synthetic oligonucleotide
cuccucuaccuccucaucu

SEQ ID NO: 3044691 - RNA, 19 nt, Artificial Sequence
  Description of Artificial Sequence: Synthetic oligonucleotide
gagggcaccuugaauuucu

SEQ ID NO: 3044692 - RNA, 19 nt, Artificial Sequence
  Description of Artificial Sequence: Synthetic oligonucleotide
cuggugacucccugaaucu

SEQ ID NO: 3044693 - RNA, 19 nt, Artificial Sequence
  Description of Artificial Sequence: Synthetic oligonucleotide
uggcaauggucuccucauu

SEQ ID NO: 3044694 - RNA, 19 nt, Artificial Sequence
  Description of Artificial Sequence: Synthetic oligonucleotide
ugaagacaucuggcuuggc

SEQ ID NO: 3044695 - RNA, 19 nt, Artificial Sequence
  Description of Artificial Sequence: Synthetic oligonucleotide
uccucgaucuuggccucac

SEQ ID NO: 3044696 - RNA, 19 nt, Artificial Sequence
  Description of Artificial Sequence: Synthetic oligonucleotide
cgagccuucuucucacugc

SEQ ID NO: 3044697 - RNA, 19 nt, Artificial Sequence
  Description of Artificial Sequence: Synthetic oligonucleotide
uaagcccaguuucgacauu

SEQ ID NO: 3044698 - RNA, 19 nt, Artificial Sequence
  Description of Artificial Sequence: Synthetic oligonucleotide
agccuucuucucacugcgg

SEQ ID NO: 3044699 - RNA, 19 nt, Artificial Sequence
  Description of Artificial Sequence: Synthetic oligonucleotide
ggccucaccaaagaccaca

SEQ ID NO: 3044700 - RNA, 19 nt, Artificial Sequence
  Description of Artificial Sequence: Synthetic oligonucleotide
ccaacucagggaccagggc

SEQ ID NO: 3044701 - RNA, 19 nt, Artificial Sequence
  Description of Artificial Sequence: Synthetic oligonucleotide
agggcaccuugaauuucuc

SEQ ID NO: 3044702 - RNA, 19 nt, Artificial Sequence
  Description of Artificial Sequence: Synthetic oligonucleotide
cguaagcccaguuucgaca

SEQ ID NO: 3044703 - RNA, 19 nt, Artificial Sequence
  Description of Artificial Sequence: Synthetic oligonucleotide
cucgcacuguggccucacc

SEQ ID NO: 3044704 - RNA, 19 nt, Artificial Sequence
  Description of Artificial Sequence: Synthetic oligonucleotide
ggcuuggcaaugacaaaca

SEQ ID NO: 3044705 - RNA, 19 nt, Artificial Sequence
  Description of Artificial Sequence: Synthetic oligonucleotide
aaucugccguaagcccagu

SEQ ID NO: 3044706 - RNA, 19 nt, Artificial Sequence
  Description of Artificial Sequence: Synthetic oligonucleotide
cccaguuucgacauugccu

SEQ ID NO: 3044707 - RNA, 19 nt, Artificial Sequence
  Description of Artificial Sequence: Synthetic oligonucleotide
cugcugcagcuuuguguac

SEQ ID NO: 3044708 - RNA, 19 nt, Artificial Sequence
  Description of Artificial Sequence: Synthetic oligonucleotide
ccaguuucgacauugccuu

SEQ ID NO: 3044709 - RNA, 19 nt, Artificial Sequence
  Description of Artificial Sequence: Synthetic oligonucleotide
cauugccuuucgagccuuc

SEQ ID NO: 3044710 - RNA, 19 nt, Artificial Sequence
  Description of Artificial Sequence: Synthetic oligonucleotide
cuuuggcaauggucuccuc

SEQ ID NO: 3044711 - RNA, 19 nt, Artificial Sequence
  Description of Artificial Sequence: Synthetic oligonucleotide
gauggugauccuggugacu

SEQ ID NO: 3044712 - RNA, 19 nt, Artificial Sequence
  Description of Artificial Sequence: Synthetic oligonucleotide
ccugcuccucgcacugugg

SEQ ID NO: 3044713 - RNA, 19 nt, Artificial Sequence
  Description of Artificial Sequence: Synthetic oligonucleotide
cacccggggcccaggugcc

SEQ ID NO: 3044714 - RNA, 19 nt, Artificial Sequence
  Description of Artificial Sequence: Synthetic oligonucleotide
caccuugaauuucucugcu

SEQ ID NO: 3044715 - RNA, 19 nt, Artificial Sequence
  Description of Artificial Sequence: Synthetic oligonucleotide
ggcugaggacucugagggc

SEQ ID NO: 3044716 - RNA, 19 nt, Artificial Sequence
  Description of Artificial Sequence: Synthetic oligonucleotide
aucugccguaagcccaguu

SEQ ID NO: 3044717 - RNA, 19 nt, Artificial Sequence
  Description of Artificial Sequence: Synthetic oligonucleotide
guggccucacccggggccc

SEQ ID NO: 3044718 - RNA, 19 nt, Artificial Sequence
  Description of Artificial Sequence: Synthetic oligonucleotide
ccguaagcccaguuucgac

SEQ ID NO: 3044719 - RNA, 19 nt, Artificial Sequence
  Description of Artificial Sequence: Synthetic oligonucleotide
cuguggccucacccggggc

SEQ ID NO: 3044720 - RNA, 19 nt, Artificial Sequence
  Description of Artificial Sequence: Synthetic oligonucleotide
acauugccuuucgagccuu

SEQ ID NO: 3044721 - RNA, 19 nt, Artificial Sequence
  Description of Artificial Sequence: Synthetic oligonucleotide
cuggcuuggcaaugacaaa

SEQ ID NO: 3044722 - RNA, 19 nt, Artificial Sequence
  Description of Artificial Sequence: Synthetic oligonucleotide
cucacccggggcccaggug

SEQ ID NO: 3044723 - RNA, 19 nt, Artificial Sequence
  Description of Artificial Sequence: Synthetic oligonucleotide
ccuuucgagccuucuucuc

SEQ ID NO: 3044724 - RNA, 19 nt, Artificial Sequence
  Description of Artificial Sequence: Synthetic oligonucleotide
accugcugggacagguccu

SEQ ID NO: 3044725 - RNA, 19 nt, Artificial Sequence
  Description of Artificial Sequence: Synthetic oligonucleotide
guaccugcugggacagguc

SEQ ID NO: 3044726 - RNA, 19 nt, Artificial Sequence
  Description of Artificial Sequence: Synthetic oligonucleotide
cacugcggcuuugcuuggc

SEQ ID NO: 3044727 - RNA, 19 nt, Artificial Sequence
  Description of Artificial Sequence: Synthetic oligonucleotide
gggcccaggugccaacuca

SEQ ID NO: 3044728 - RNA, 19 nt, Artificial Sequence
  Description of Artificial Sequence: Synthetic oligonucleotide
cgaggcggggcucuugaag

SEQ ID NO: 3044729 - RNA, 19 nt, Artificial Sequence
  Description of Artificial Sequence: Synthetic oligonucleotide
cugagggcaccuugaauuu

SEQ ID NO: 3044730 - RNA, 19 nt, Artificial Sequence
  Description of Artificial Sequence: Synthetic oligonucleotide
caaugacaaacaagauguu

SEQ ID NO: 3044731 - RNA, 19 nt, Artificial Sequence
  Description of Artificial Sequence: Synthetic oligonucleotide
cuccucgcacuguggccuc

SEQ ID NO: 3044732 - RNA, 19 nt, Artificial Sequence
  Description of Artificial Sequence: Synthetic oligonucleotide
cugcagcuuuguguaccug

SEQ ID NO: 3044733 - RNA, 19 nt, Artificial Sequence
  Description of Artificial Sequence: Synthetic oligonucleotide
gguccucgaucuuggccuc

SEQ ID NO: 3044734 - RNA, 19 nt, Artificial Sequence
  Description of Artificial Sequence: Synthetic oligonucleotide
aggacucugagggcaccuu

SEQ ID NO: 3044735 - RNA, 19 nt, Artificial Sequence
  Description of Artificial Sequence: Synthetic oligonucleotide
gaggacucugagggcaccu

SEQ ID NO: 3044736 - RNA, 19 nt, Artificial Sequence
  Description of Artificial Sequence: Synthetic oligonucleotide
gcggcuuugcuuggcuuug

SEQ ID NO: 3044737 - RNA, 19 nt, Artificial Sequence
  Description of Artificial Sequence: Synthetic oligonucleotide
uccucgcacuguggccuca

SEQ ID NO: 3044738 - RNA, 19 nt, Artificial Sequence
  Description of Artificial Sequence: Synthetic oligonucleotide
cucccugaaucugccguaa

SEQ ID NO: 3044739 - RNA, 19 nt, Artificial Sequence
  Description of Artificial Sequence: Synthetic oligonucleotide
ggacuucuggauggugauc

SEQ ID NO: 3044740 - RNA, 19 nt, Artificial Sequence
  Description of Artificial Sequence: Synthetic oligonucleotide
gccguaagcccaguuucga

SEQ ID NO: 3044741 - RNA, 19 nt, Artificial Sequence
  Description of Artificial Sequence: Synthetic oligonucleotide
auccgaggcggggcucuug

SEQ ID NO: 3044742 - RNA, 19 nt, Artificial Sequence
  Description of Artificial Sequence: Synthetic oligonucleotide
guauccgaggcggggcucu

SEQ ID NO: 3044743 - RNA, 19 nt, Artificial Sequence
  Description of Artificial Sequence: Synthetic oligonucleotide
cucugagggcaccuugaau

SEQ ID NO: 3044744 - RNA, 19 nt, Artificial Sequence
  Description of Artificial Sequence: Synthetic oligonucleotide
gcagcuuuguguaccugcu

SEQ ID NO: 3044745 - RNA, 19 nt, Artificial Sequence
  Description of Artificial Sequence: Synthetic oligonucleotide
gcugcagcuuuguguaccu

SEQ ID NO: 3044746 - RNA, 19 nt, Artificial Sequence
  Description of Artificial Sequence: Synthetic oligonucleotide
cgaucuuggccucaccaaa

SEQ ID NO: 3044747 - RNA, 19 nt, Artificial Sequence
  Description of Artificial Sequence: Synthetic oligonucleotide
gggcaccuugaauuucucu

SEQ ID NO: 3044748 - RNA, 19 nt, Artificial Sequence
  Description of Artificial Sequence: Synthetic oligonucleotide
gcuuuggcaauggucuccu

SEQ ID NO: 3044749 - RNA, 19 nt, Artificial Sequence
  Description of Artificial Sequence: Synthetic oligonucleotide
gcuccucgcacuguggccu

SEQ ID NO: 3044750 - RNA, 19 nt, Artificial Sequence
  Description of Artificial Sequence: Synthetic oligonucleotide
ccucgaucuuggccucacc

SEQ ID NO: 3044751 - RNA, 19 nt, Artificial Sequence
  Description of Artificial Sequence: Synthetic oligonucleotide
ccugcugggacagguccuc

SEQ ID NO: 3044752 - RNA, 19 nt, Artificial Sequence
  Description of Artificial Sequence: Synthetic oligonucleotide
ggcggggcucuugaagaca

SEQ ID NO: 3044753 - RNA, 19 nt, Artificial Sequence
  Description of Artificial Sequence: Synthetic oligonucleotide
gguauccgaggcggggcuc

SEQ ID NO: 3044754 - RNA, 19 nt, Artificial Sequence
  Description of Artificial Sequence: Synthetic oligonucleotide
uauccgaggcggggcucuu

SEQ ID NO: 3044755 - RNA, 19 nt, Artificial Sequence
  Description of Artificial Sequence: Synthetic oligonucleotide
uggccucacccggggccca

SEQ ID NO: 3044756 - RNA, 19 nt, Artificial Sequence
  Description of Artificial Sequence: Synthetic oligonucleotide
gcugggacagguccucgau

SEQ ID NO: 3044757 - RNA, 19 nt, Artificial Sequence
  Description of Artificial Sequence: Synthetic oligonucleotide
ggggcccaggugccaacuc

SEQ ID NO: 3044758 - RNA, 19 nt, Artificial Sequence
  Description of Artificial Sequence: Synthetic oligonucleotide
guccucgaucuuggccuca

SEQ ID NO: 3044759 - RNA, 19 nt, Artificial Sequence
  Description of Artificial Sequence: Synthetic oligonucleotide
gugauccuggugacucccu

SEQ ID NO: 3044760 - RNA, 19 nt, Artificial Sequence
  Description of Artificial Sequence: Synthetic oligonucleotide
gcuuggcuuuggcaauggu

SEQ ID NO: 3044761 - RNA, 19 nt, Artificial Sequence
  Description of Artificial Sequence: Synthetic oligonucleotide
caguuucgacauugccuuu

SEQ ID NO: 3044762 - RNA, 19 nt, Artificial Sequence
  Description of Artificial Sequence: Synthetic oligonucleotide
cugcggcuuugcuuggcuu

SEQ ID NO: 3044763 - RNA, 19 nt, Artificial Sequence
  Description of Artificial Sequence: Synthetic oligonucleotide
gaccagggcugaggacucu

SEQ ID NO: 3044764 - RNA, 19 nt, Artificial Sequence
  Description of Artificial Sequence: Synthetic oligonucleotide
gccucacccggggcccagg

SEQ ID NO: 3044765 - RNA, 19 nt, Artificial Sequence
  Description of Artificial Sequence: Synthetic oligonucleotide
cggcuuugcuuggcuuugg

SEQ ID NO: 3044766 - RNA, 19 nt, Artificial Sequence
  Description of Artificial Sequence: Synthetic oligonucleotide
acccggggcccaggugcca

SEQ ID NO: 3044767 - RNA, 19 nt, Artificial Sequence
  Description of Artificial Sequence: Synthetic oligonucleotide
gcggggcucuugaagacau

SEQ ID NO: 3044768 - RNA, 19 nt, Artificial Sequence
  Description of Artificial Sequence: Synthetic oligonucleotide
ccucgcacuguggccucac

SEQ ID NO: 3044769 - RNA, 19 nt, Artificial Sequence
  Description of Artificial Sequence: Synthetic oligonucleotide
gccucaccaaagaccacau

SEQ ID NO: 3044770 - RNA, 19 nt, Artificial Sequence
  Description of Artificial Sequence: Synthetic oligonucleotide
ggccucacccggggcccag

SEQ ID NO: 3044771 - RNA, 19 nt, Artificial Sequence
  Description of Artificial Sequence: Synthetic oligonucleotide
ccggggcccaggugccaac

SEQ ID NO: 3044772 - RNA, 19 nt, Artificial Sequence
  Description of Artificial Sequence: Synthetic oligonucleotide
cggggcucuugaagacauc

SEQ ID NO: 3044773 - RNA, 19 nt, Artificial Sequence
  Description of Artificial Sequence: Synthetic oligonucleotide
cuccugcuccucgcacugu

SEQ ID NO: 3044774 - RNA, 19 nt, Artificial Sequence
  Description of Artificial Sequence: Synthetic oligonucleotide
ccgaggcggggcucuugaa

SEQ ID NO: 3044775 - RNA, 19 nt, Artificial Sequence
  Description of Artificial Sequence: Synthetic oligonucleotide
ccucacccggggcccaggu

SEQ ID NO: 3044776 - RNA, 19 nt, Artificial Sequence
  Description of Artificial Sequence: Synthetic oligonucleotide
cccggggcccaggugccaa

SEQ ID NO: 3044777 - RNA, 19 nt, Artificial Sequence
  Description of Artificial Sequence: Synthetic oligonucleotide
cggggcccaggugccaacu

SEQ ID NO: 3044778 - RNA, 19 nt, Artificial Sequence
  Description of Artificial Sequence: Synthetic oligonucleotide
aacucauugaugcucaggc

SEQ ID NO: 3044779 - RNA, 19 nt, Artificial Sequence
  Description of Artificial Sequence: Synthetic oligonucleotide
aguaccacaaaguaggagc

SEQ ID NO: 3044780 - RNA, 19 nt, Artificial Sequence
  Description of Artificial Sequence: Synthetic oligonucleotide
auuaguaccacaaaguagg

SEQ ID NO: 3044781 - RNA, 19 nt, Artificial Sequence
  Description of Artificial Sequence: Synthetic oligonucleotide
aaaguaggagcugaugucc

SEQ ID NO: 3044782 - RNA, 19 nt, Artificial Sequence
  Description of Artificial Sequence: Synthetic oligonucleotide
uccuuaaacucauugaugc

SEQ ID NO: 3044783 - RNA, 19 nt, Artificial Sequence
  Description of Artificial Sequence: Synthetic oligonucleotide
uacucauugaacuucagcu

SEQ ID NO: 3044784 - RNA, 19 nt, Artificial Sequence
  Description of Artificial Sequence: Synthetic oligonucleotide
aaugugaagaaagugguga

SEQ ID NO: 3044785 - RNA, 19 nt, Artificial Sequence
  Description of Artificial Sequence: Synthetic oligonucleotide
ugaacuucagcuccgaguc

SEQ ID NO: 3044786 - RNA, 19 nt, Artificial Sequence
  Description of Artificial Sequence: Synthetic oligonucleotide
uuaaacucauugaugcuca

SEQ ID NO: 3044787 - RNA, 19 nt, Artificial Sequence
  Description of Artificial Sequence: Synthetic oligonucleotide
aaaugaggcaacugcucgg

SEQ ID NO: 3044788 - RNA, 19 nt, Artificial Sequence
  Description of Artificial Sequence: Synthetic oligonucleotide
uguccucacagacugaccc

SEQ ID NO: 3044789 - RNA, 19 nt, Artificial Sequence
  Description of Artificial Sequence: Synthetic oligonucleotide
uaccuuuucguccuucccg

SEQ ID NO: 3044790 - RNA, 19 nt, Artificial Sequence
  Description of Artificial Sequence: Synthetic oligonucleotide
cauuaguaccacaaaguag

SEQ ID NO: 3044791 - RNA, 19 nt, Artificial Sequence
  Description of Artificial Sequence: Synthetic oligonucleotide
uucacauccaagcucuuca

SEQ ID NO: 3044792 - RNA, 19 nt, Artificial Sequence
  Description of Artificial Sequence: Synthetic oligonucleotide
cucauugaacuucagcucc

SEQ ID NO: 3044793 - RNA, 19 nt, Artificial Sequence
  Description of Artificial Sequence: Synthetic oligonucleotide
gugaccacagucucaaugg

SEQ ID NO: 3044794 - RNA, 19 nt, Artificial Sequence
  Description of Artificial Sequence: Synthetic oligonucleotide
acucauugaacuucagcuc

SEQ ID NO: 3044795 - RNA, 19 nt, Artificial Sequence
  Description of Artificial Sequence: Synthetic oligonucleotide
caaaugaggcaacugcucg

SEQ ID NO: 3044796 - RNA, 19 nt, Artificial Sequence
  Description of Artificial Sequence: Synthetic oligonucleotide
gcaaaugugaagaaagugg

SEQ ID NO: 3044797 - RNA, 19 nt, Artificial Sequence
  Description of Artificial Sequence: Synthetic oligonucleotide
gaaaguggugaccacaguc

SEQ ID NO: 3044798 - RNA, 19 nt, Artificial Sequence
  Description of Artificial Sequence: Synthetic oligonucleotide
aagcucuucaucuucucgu

SEQ ID NO: 3044799 - RNA, 19 nt, Artificial Sequence
  Description of Artificial Sequence: Synthetic oligonucleotide
accuuuucguccuucccgc

SEQ ID NO: 3044800 - RNA, 19 nt, Artificial Sequence
  Description of Artificial Sequence: Synthetic oligonucleotide
uccugguucacauccaagc

SEQ ID NO: 3044801 - RNA, 19 nt, Artificial Sequence
  Description of Artificial Sequence: Synthetic oligonucleotide
gucaagagagcccacgucc

SEQ ID NO: 3044802 - RNA, 19 nt, Artificial Sequence
  Description of Artificial Sequence: Synthetic oligonucleotide
aguuccuuaaacucauuga

SEQ ID NO: 3044803 - RNA, 19 nt, Artificial Sequence
  Description of Artificial Sequence: Synthetic oligonucleotide
ugguucacauccaagcucu

SEQ ID NO: 3044804 - RNA, 19 nt, Artificial Sequence
  Description of Artificial Sequence: Synthetic oligonucleotide
aaguggugaccacagucuc

SEQ ID NO: 3044805 - RNA, 19 nt, Artificial Sequence
  Description of Artificial Sequence: Synthetic oligonucleotide
augugaagaaaguggugac

SEQ ID NO: 3044806 - RNA, 19 nt, Artificial Sequence
  Description of Artificial Sequence: Synthetic oligonucleotide
ucauugaacuucagcuccg

SEQ ID NO: 3044807 - RNA, 19 nt, Artificial Sequence
  Description of Artificial Sequence: Synthetic oligonucleotide
ugcaaaugugaagaaagug

SEQ ID NO: 3044808 - RNA, 19 nt, Artificial Sequence
  Description of Artificial Sequence: Synthetic oligonucleotide
aagaaaguggugaccacag

SEQ ID NO: 3044809 - RNA, 19 nt, Artificial Sequence
  Description of Artificial Sequence: Synthetic oligonucleotide
cugauguccucacagacug

SEQ ID NO: 3044810 - RNA, 19 nt, Artificial Sequence
  Description of Artificial Sequence: Synthetic oligonucleotide
ucaggcuaccuuuucgucc

SEQ ID NO: 3044811 - RNA, 19 nt, Artificial Sequence
  Description of Artificial Sequence: Synthetic oligonucleotide
ugaccaguuccuuaaacuc

SEQ ID NO: 3044812 - RNA, 19 nt, Artificial Sequence
  Description of Artificial Sequence: Synthetic oligonucleotide
aaaguggugaccacagucu

SEQ ID NO: 3044813 - RNA, 19 nt, Artificial Sequence
  Description of Artificial Sequence: Synthetic oligonucleotide
uccuuuagcaaaugaggca

SEQ ID NO: 3044814 - RNA, 19 nt, Artificial Sequence
  Description of Artificial Sequence: Synthetic oligonucleotide
aaacucauugaugcucagg

SEQ ID NO: 3044815 - RNA, 19 nt, Artificial Sequence
  Description of Artificial Sequence: Synthetic oligonucleotide
uccgcugccauuaguacca

SEQ ID NO: 3044816 - RNA, 19 nt, Artificial Sequence
  Description of Artificial Sequence: Synthetic oligonucleotide
ugcucaggcuaccuuuucg

SEQ ID NO: 3044817 - RNA, 19 nt, Artificial Sequence
  Description of Artificial Sequence: Synthetic oligonucleotide
uccccaaucagucuccagu

SEQ ID NO: 3044818 - RNA, 19 nt, Artificial Sequence
  Description of Artificial Sequence: Synthetic oligonucleotide
gauuuccuucgccaguucc

SEQ ID NO: 3044819 - RNA, 19 nt, Artificial Sequence
  Description of Artificial Sequence: Synthetic oligonucleotide
ucauugaugcucaggcuac

SEQ ID NO: 3044820 - RNA, 19 nt, Artificial Sequence
  Description of Artificial Sequence: Synthetic oligonucleotide
ccugcaaaugugaagaaag

SEQ ID NO: 3044821 - RNA, 19 nt, Artificial Sequence
  Description of Artificial Sequence: Synthetic oligonucleotide
uccuuccugauuuccuucg

SEQ ID NO: 3044822 - RNA, 19 nt, Artificial Sequence
  Description of Artificial Sequence: Synthetic oligonucleotide
auuuccuucgccaguuccc

SEQ ID NO: 3044823 - RNA, 19 nt, Artificial Sequence
  Description of Artificial Sequence: Synthetic oligonucleotide
ucuccaguacucauugaac

SEQ ID NO: 3044824 - RNA, 19 nt, Artificial Sequence
  Description of Artificial Sequence: Synthetic oligonucleotide
uuuccaagcuuucuccuuc

SEQ ID NO: 3044825 - RNA, 19 nt, Artificial Sequence
  Description of Artificial Sequence: Synthetic oligonucleotide
agcaggcuuuacuucuucc

SEQ ID NO: 3044826 - RNA, 19 nt, Artificial Sequence
  Description of Artificial Sequence: Synthetic oligonucleotide
ugugaagaaaguggugacc

SEQ ID NO: 3044827 - RNA, 19 nt, Artificial Sequence
  Description of Artificial Sequence: Synthetic oligonucleotide
agagcccacguccuuuagc

SEQ ID NO: 3044828 - RNA, 19 nt, Artificial Sequence
  Description of Artificial Sequence: Synthetic oligonucleotide
guacucauugaacuucagc

SEQ ID NO: 3044829 - RNA, 19 nt, Artificial Sequence
  Description of Artificial Sequence: Synthetic oligonucleotide
caaaguaggagcugauguc

SEQ ID NO: 3044830 - RNA, 19 nt, Artificial Sequence
  Description of Artificial Sequence: Synthetic oligonucleotide
aaaugugaagaaaguggug

SEQ ID NO: 3044831 - RNA, 19 nt, Artificial Sequence
  Description of Artificial Sequence: Synthetic oligonucleotide
caggcuuuacuucuuccgg

SEQ ID NO: 3044832 - RNA, 19 nt, Artificial Sequence
  Description of Artificial Sequence: Synthetic oligonucleotide
uuagcaaaugaggcaacug

SEQ ID NO: 3044833 - RNA, 19 nt, Artificial Sequence
  Description of Artificial Sequence: Synthetic oligonucleotide
ugaggcaacugcucgguga

SEQ ID NO: 3044834 - RNA, 19 nt, Artificial Sequence
  Description of Artificial Sequence: Synthetic oligonucleotide
uuccugauuuccuucgcca

SEQ ID NO: 3044835 - RNA, 19 nt, Artificial Sequence
  Description of Artificial Sequence: Synthetic oligonucleotide
caagcuuucuccuuccuga

SEQ ID NO: 3044836 - RNA, 19 nt, Artificial Sequence
  Description of Artificial Sequence: Synthetic oligonucleotide
caagcucuucaucuucucg

SEQ ID NO: 3044837 - RNA, 19 nt, Artificial Sequence
  Description of Artificial Sequence: Synthetic oligonucleotide
ucuucucgucaagagagcc

SEQ ID NO: 3044838 - RNA, 19 nt, Artificial Sequence
  Description of Artificial Sequence: Synthetic oligonucleotide
uucucgucaagagagccca

SEQ ID NO: 3044839 - RNA, 19 nt, Artificial Sequence
  Description of Artificial Sequence: Synthetic oligonucleotide
aacuucagcuccgaguccu

SEQ ID NO: 3044840 - RNA, 19 nt, Artificial Sequence
  Description of Artificial Sequence: Synthetic oligonucleotide
guccuuuagcaaaugaggc

SEQ ID NO: 3044841 - RNA, 19 nt, Artificial Sequence
  Description of Artificial Sequence: Synthetic oligonucleotide
gacccaggaaaggaguugg

SEQ ID NO: 3044842 - RNA, 19 nt, Artificial Sequence
  Description of Artificial Sequence: Synthetic oligonucleotide
uucuuccggauuuccaagc

SEQ ID NO: 3044843 - RNA, 19 nt, Artificial Sequence
  Description of Artificial Sequence: Synthetic oligonucleotide
uccugauuuccuucgccag

SEQ ID NO: 3044844 - RNA, 19 nt, Artificial Sequence
  Description of Artificial Sequence: Synthetic oligonucleotide
agcucuucaucuucucguc

SEQ ID NO: 3044845 - RNA, 19 nt, Artificial Sequence
  Description of Artificial Sequence: Synthetic oligonucleotide
uuaguaccacaaaguagga

SEQ ID NO: 3044846 - RNA, 19 nt, Artificial Sequence
  Description of Artificial Sequence: Synthetic oligonucleotide
ucaagagagcccacguccu

SEQ ID NO: 3044847 - RNA, 19 nt, Artificial Sequence
  Description of Artificial Sequence: Synthetic oligonucleotide
aaugaggcaacugcucggu

SEQ ID NO: 3044848 - RNA, 19 nt, Artificial Sequence
  Description of Artificial Sequence: Synthetic oligonucleotide
uuuagcaaaugaggcaacu

SEQ ID NO: 3044849 - RNA, 19 nt, Artificial Sequence
  Description of Artificial Sequence: Synthetic oligonucleotide
ggauuuccaagcuuucucc

SEQ ID NO: 3044850 - RNA, 19 nt, Artificial Sequence
  Description of Artificial Sequence: Synthetic oligonucleotide
uucgccaguuccccaauca

SEQ ID NO: 3044851 - RNA, 19 nt, Artificial Sequence
  Description of Artificial Sequence: Synthetic oligonucleotide
ggagcugauguccucacag

SEQ ID NO: 3044852 - RNA, 19 nt, Artificial Sequence
  Description of Artificial Sequence: Synthetic oligonucleotide
caaucagucuccaguacuc

SEQ ID NO: 3044853 - RNA, 19 nt, Artificial Sequence
  Description of Artificial Sequence: Synthetic oligonucleotide
caguuccuuaaacucauug

SEQ ID NO: 3044854 - RNA, 19 nt, Artificial Sequence
  Description of Artificial Sequence: Synthetic oligonucleotide
uuuucguccuucccgcccu

SEQ ID NO: 3044855 - RNA, 19 nt, Artificial Sequence
  Description of Artificial Sequence: Synthetic oligonucleotide
ucuuccggauuuccaagcu

SEQ ID NO: 3044856 - RNA, 19 nt, Artificial Sequence
  Description of Artificial Sequence: Synthetic oligonucleotide
cuucuuccggauuuccaag

SEQ ID NO: 3044857 - RNA, 19 nt, Artificial Sequence
  Description of Artificial Sequence: Synthetic oligonucleotide
gaagaaaguggugaccaca

SEQ ID NO: 3044858 - RNA, 19 nt, Artificial Sequence
  Description of Artificial Sequence: Synthetic oligonucleotide
gauguccucacagacugac

SEQ ID NO: 3044859 - RNA, 19 nt, Artificial Sequence
  Description of Artificial Sequence: Synthetic oligonucleotide
caaaugugaagaaaguggu

SEQ ID NO: 3044860 - RNA, 19 nt, Artificial Sequence
  Description of Artificial Sequence: Synthetic oligonucleotide
uccaagcucuucaucuucu

SEQ ID NO: 3044861 - RNA, 19 nt, Artificial Sequence
  Description of Artificial Sequence: Synthetic oligonucleotide
cuucucgucaagagagccc

SEQ ID NO: 3044862 - RNA, 19 nt, Artificial Sequence
  Description of Artificial Sequence: Synthetic oligonucleotide
gugaagaaaguggugacca

SEQ ID NO: 3044863 - RNA, 19 nt, Artificial Sequence
  Description of Artificial Sequence: Synthetic oligonucleotide
uuccggauuuccaagcuuu

SEQ ID NO: 3044864 - RNA, 19 nt, Artificial Sequence
  Description of Artificial Sequence: Synthetic oligonucleotide
gagcccacguccuuuagca

SEQ ID NO: 3044865 - RNA, 19 nt, Artificial Sequence
  Description of Artificial Sequence: Synthetic oligonucleotide
aguaggagcugauguccuc

SEQ ID NO: 3044866 - RNA, 19 nt, Artificial Sequence
  Description of Artificial Sequence: Synthetic oligonucleotide
cuuccugauuuccuucgcc

SEQ ID NO: 3044867 - RNA, 19 nt, Artificial Sequence
  Description of Artificial Sequence: Synthetic oligonucleotide
uaguaccacaaaguaggag

SEQ ID NO: 3044868 - RNA, 19 nt, Artificial Sequence
  Description of Artificial Sequence: Synthetic oligonucleotide
ugaugcucaggcuaccuuu

SEQ ID NO: 3044869 - RNA, 19 nt, Artificial Sequence
  Description of Artificial Sequence: Synthetic oligonucleotide
acguccuuuagcaaaugag

SEQ ID NO: 3044870 - RNA, 19 nt, Artificial Sequence
  Description of Artificial Sequence: Synthetic oligonucleotide
uccaguuccgucagcggcu

SEQ ID NO: 3044871 - RNA, 19 nt, Artificial Sequence
  Description of Artificial Sequence: Synthetic oligonucleotide
cguccuuuagcaaaugagg

SEQ ID NO: 3044872 - RNA, 19 nt, Artificial Sequence
  Description of Artificial Sequence: Synthetic oligonucleotide
cuuuucguccuucccgccc

SEQ ID NO: 3044873 - RNA, 19 nt, Artificial Sequence
  Description of Artificial Sequence: Synthetic oligonucleotide
uaaacucauugaugcucag

SEQ ID NO: 3044874 - RNA, 19 nt, Artificial Sequence
  Description of Artificial Sequence: Synthetic oligonucleotide
ucgccaguuccccaaucag

SEQ ID NO: 3044875 - RNA, 19 nt, Artificial Sequence
  Description of Artificial Sequence: Synthetic oligonucleotide
ucggugaccaguuccuuaa

SEQ ID NO: 3044876 - RNA, 19 nt, Artificial Sequence
  Description of Artificial Sequence: Synthetic oligonucleotide
uuuccuucgccaguucccc

SEQ ID NO: 3044877 - RNA, 19 nt, Artificial Sequence
  Description of Artificial Sequence: Synthetic oligonucleotide
cagucuccaguacucauug

SEQ ID NO: 3044878 - RNA, 19 nt, Artificial Sequence
  Description of Artificial Sequence: Synthetic oligonucleotide
ucaauggcugccuccaguu

SEQ ID NO: 3044879 - RNA, 19 nt, Artificial Sequence
  Description of Artificial Sequence: Synthetic oligonucleotide
ucgucaagagagcccacgu

SEQ ID NO: 3044880 - RNA, 19 nt, Artificial Sequence
  Description of Artificial Sequence: Synthetic oligonucleotide
guuccuuaaacucauugau

SEQ ID NO: 3044881 - RNA, 19 nt, Artificial Sequence
  Description of Artificial Sequence: Synthetic oligonucleotide
aaucagucuccaguacuca

SEQ ID NO: 3044882 - RNA, 19 nt, Artificial Sequence
  Description of Artificial Sequence: Synthetic oligonucleotide
cugguucacauccaagcuc

SEQ ID NO: 3044883 - RNA, 19 nt, Artificial Sequence
  Description of Artificial Sequence: Synthetic oligonucleotide
ugaagaaaguggugaccac

SEQ ID NO: 3044884 - RNA, 19 nt, Artificial Sequence
  Description of Artificial Sequence: Synthetic oligonucleotide
uccucacagacugacccag

SEQ ID NO: 3044885 - RNA, 19 nt, Artificial Sequence
  Description of Artificial Sequence: Synthetic oligonucleotide
cuccgcugccauuaguacc

SEQ ID NO: 3044886 - RNA, 19 nt, Artificial Sequence
  Description of Artificial Sequence: Synthetic oligonucleotide
aguuccccaaucagucucc

SEQ ID NO: 3044887 - RNA, 19 nt, Artificial Sequence
  Description of Artificial Sequence: Synthetic oligonucleotide
gaggcaacugcucggugac

SEQ ID NO: 3044888 - RNA, 19 nt, Artificial Sequence
  Description of Artificial Sequence: Synthetic oligonucleotide
uccaguacucauugaacuu

SEQ ID NO: 3044889 - RNA, 19 nt, Artificial Sequence
  Description of Artificial Sequence: Synthetic oligonucleotide
accacaaaguaggagcuga

SEQ ID NO: 3044890 - RNA, 19 nt, Artificial Sequence
  Description of Artificial Sequence: Synthetic oligonucleotide
agcaaaugaggcaacugcu

SEQ ID NO: 3044891 - RNA, 19 nt, Artificial Sequence
  Description of Artificial Sequence: Synthetic oligonucleotide
ucagucuccaguacucauu

SEQ ID NO: 3044892 - RNA, 19 nt, Artificial Sequence
  Description of Artificial Sequence: Synthetic oligonucleotide
cuuuagcaaaugaggcaac

SEQ ID NO: 3044893 - RNA, 19 nt, Artificial Sequence
  Description of Artificial Sequence: Synthetic oligonucleotide
ugcucggugaccaguuccu

SEQ ID NO: 3044894 - RNA, 19 nt, Artificial Sequence
  Description of Artificial Sequence: Synthetic oligonucleotide
cucauugaugcucaggcua

SEQ ID NO: 3044895 - RNA, 19 nt, Artificial Sequence
  Description of Artificial Sequence: Synthetic oligonucleotide
acucauugaugcucaggcu

SEQ ID NO: 3044896 - RNA, 19 nt, Artificial Sequence
  Description of Artificial Sequence: Synthetic oligonucleotide
gacugacccaggaaaggag

SEQ ID NO: 3044897 - RNA, 19 nt, Artificial Sequence
  Description of Artificial Sequence: Synthetic oligonucleotide
acagacugacccaggaaag

SEQ ID NO: 3044898 - RNA, 19 nt, Artificial Sequence
  Description of Artificial Sequence: Synthetic oligonucleotide
cuaccuuuucguccuuccc

SEQ ID NO: 3044899 - RNA, 19 nt, Artificial Sequence
  Description of Artificial Sequence: Synthetic oligonucleotide
uuuacuucuuccggauuuc

SEQ ID NO: 3044900 - RNA, 19 nt, Artificial Sequence
  Description of Artificial Sequence: Synthetic oligonucleotide
uuccaagcuuucuccuucc

SEQ ID NO: 3044901 - RNA, 19 nt, Artificial Sequence
  Description of Artificial Sequence: Synthetic oligonucleotide
cacagacugacccaggaaa

SEQ ID NO: 3044902 - RNA, 19 nt, Artificial Sequence
  Description of Artificial Sequence: Synthetic oligonucleotide
aggcuuuacuucuuccgga

SEQ ID NO: 3044903 - RNA, 19 nt, Artificial Sequence
  Description of Artificial Sequence: Synthetic oligonucleotide
uuacuucuuccggauuucc

SEQ ID NO: 3044904 - RNA, 19 nt, Artificial Sequence
  Description of Artificial Sequence: Synthetic oligonucleotide
aguuccgucagcggcuccg

SEQ ID NO: 3044905 - RNA, 19 nt, Artificial Sequence
  Description of Artificial Sequence: Synthetic oligonucleotide
gaccaguuccuuaaacuca

SEQ ID NO: 3044906 - RNA, 19 nt, Artificial Sequence
  Description of Artificial Sequence: Synthetic oligonucleotide
ucacagacugacccaggaa

SEQ ID NO: 3044907 - RNA, 19 nt, Artificial Sequence
  Description of Artificial Sequence: Synthetic oligonucleotide
gucuccaguacucauugaa

SEQ ID NO: 3044908 - RNA, 19 nt, Artificial Sequence
  Description of Artificial Sequence: Synthetic oligonucleotide
aucuucucgucaagagagc

SEQ ID NO: 3044909 - RNA, 19 nt, Artificial Sequence
  Description of Artificial Sequence: Synthetic oligonucleotide
cugcucggugaccaguucc

SEQ ID NO: 3044910 - RNA, 19 nt, Artificial Sequence
  Description of Artificial Sequence: Synthetic oligonucleotide
cagacugacccaggaaagg

SEQ ID NO: 3044911 - RNA, 19 nt, Artificial Sequence
  Description of Artificial Sequence: Synthetic oligonucleotide
aagcuuucuccuuccugau

SEQ ID NO: 3044912 - RNA, 19 nt, Artificial Sequence
  Description of Artificial Sequence: Synthetic oligonucleotide
auuuccaagcuuucuccuu

SEQ ID NO: 3044913 - RNA, 19 nt, Artificial Sequence
  Description of Artificial Sequence: Synthetic oligonucleotide
cucgucaagagagcccacg

SEQ ID NO: 3044914 - RNA, 19 nt, Artificial Sequence
  Description of Artificial Sequence: Synthetic oligonucleotide
caguuccccaaucagucuc

SEQ ID NO: 3044915 - RNA, 19 nt, Artificial Sequence
  Description of Artificial Sequence: Synthetic oligonucleotide
ugacccaggaaaggaguug

SEQ ID NO: 3044916 - RNA, 19 nt, Artificial Sequence
  Description of Artificial Sequence: Synthetic oligonucleotide
uccgaguccugguucacau

SEQ ID NO: 3044917 - RNA, 19 nt, Artificial Sequence
  Description of Artificial Sequence: Synthetic oligonucleotide
gauuuccaagcuuucuccu

SEQ ID NO: 3044918 - RNA, 19 nt, Artificial Sequence
  Description of Artificial Sequence: Synthetic oligonucleotide
gaacuucagcuccgagucc

SEQ ID NO: 3044919 - RNA, 19 nt, Artificial Sequence
  Description of Artificial Sequence: Synthetic oligonucleotide
aaguaggagcugauguccu

SEQ ID NO: 3044920 - RNA, 19 nt, Artificial Sequence
  Description of Artificial Sequence: Synthetic oligonucleotide
gugaccaguuccuuaaacu

SEQ ID NO: 3044921 - RNA, 19 nt, Artificial Sequence
  Description of Artificial Sequence: Synthetic oligonucleotide
agacugacccaggaaagga

SEQ ID NO: 3044922 - RNA, 19 nt, Artificial Sequence
  Description of Artificial Sequence: Synthetic oligonucleotide
agaaaguggugaccacagu

SEQ ID NO: 3044923 - RNA, 19 nt, Artificial Sequence
  Description of Artificial Sequence: Synthetic oligonucleotide
aucagucuccaguacucau

SEQ ID NO: 3044924 - RNA, 19 nt, Artificial Sequence
  Description of Artificial Sequence: Synthetic oligonucleotide
uccgucagcggcuccgcug

SEQ ID NO: 3044925 - RNA, 19 nt, Artificial Sequence
  Description of Artificial Sequence: Synthetic oligonucleotide
cacaaaguaggagcugaug

SEQ ID NO: 3044926 - RNA, 19 nt, Artificial Sequence
  Description of Artificial Sequence: Synthetic oligonucleotide
uugaugcucaggcuaccuu

SEQ ID NO: 3044927 - RNA, 19 nt, Artificial Sequence
  Description of Artificial Sequence: Synthetic oligonucleotide
uucagcuccgaguccuggu

SEQ ID NO: 3044928 - RNA, 19 nt, Artificial Sequence
  Description of Artificial Sequence: Synthetic oligonucleotide
acugcucggugaccaguuc

SEQ ID NO: 3044929 - RNA, 19 nt, Artificial Sequence
  Description of Artificial Sequence: Synthetic oligonucleotide
cuccaguacucauugaacu

SEQ ID NO: 3044930 - RNA, 19 nt, Artificial Sequence
  Description of Artificial Sequence: Synthetic oligonucleotide
augcucaggcuaccuuuuc

SEQ ID NO: 3044931 - RNA, 19 nt, Artificial Sequence
  Description of Artificial Sequence: Synthetic oligonucleotide
acugacccaggaaaggagu

SEQ ID NO: 3044932 - RNA, 19 nt, Artificial Sequence
  Description of Artificial Sequence: Synthetic oligonucleotide
ucagcuccgaguccugguu

SEQ ID NO: 3044933 - RNA, 19 nt, Artificial Sequence
  Description of Artificial Sequence: Synthetic oligonucleotide
caguacucauugaacuuca

SEQ ID NO: 3044934 - RNA, 19 nt, Artificial Sequence
  Description of Artificial Sequence: Synthetic oligonucleotide
cacagucucaauggcugcc

SEQ ID NO: 3044935 - RNA, 19 nt, Artificial Sequence
  Description of Artificial Sequence: Synthetic oligonucleotide
auguccucacagacugacc

SEQ ID NO: 3044936 - RNA, 19 nt, Artificial Sequence
  Description of Artificial Sequence: Synthetic oligonucleotide
auugaugcucaggcuaccu

SEQ ID NO: 3044937 - RNA, 19 nt, Artificial Sequence
  Description of Artificial Sequence: Synthetic oligonucleotide
cucaggcuaccuuuucguc

SEQ ID NO: 3044938 - RNA, 19 nt, Artificial Sequence
  Description of Artificial Sequence: Synthetic oligonucleotide
gagcugauguccucacaga

SEQ ID NO: 3044939 - RNA, 19 nt, Artificial Sequence
  Description of Artificial Sequence: Synthetic oligonucleotide
uccggauuuccaagcuuuc

SEQ ID NO: 3044940 - RNA, 19 nt, Artificial Sequence
  Description of Artificial Sequence: Synthetic oligonucleotide
uccuucgccaguuccccaa

SEQ ID NO: 3044941 - RNA, 19 nt, Artificial Sequence
  Description of Artificial Sequence: Synthetic oligonucleotide
ggugaccaguuccuuaaac

SEQ ID NO: 3044942 - RNA, 19 nt, Artificial Sequence
  Description of Artificial Sequence: Synthetic oligonucleotide
cgaguccugguucacaucc

SEQ ID NO: 3044943 - RNA, 19 nt, Artificial Sequence
  Description of Artificial Sequence: Synthetic oligonucleotide
uccaagcuuucuccuuccu

SEQ ID NO: 3044944 - RNA, 19 nt, Artificial Sequence
  Description of Artificial Sequence: Synthetic oligonucleotide
ugauguccucacagacuga

SEQ ID NO: 3044945 - RNA, 19 nt, Artificial Sequence
  Description of Artificial Sequence: Synthetic oligonucleotide
uuccccaaucagucuccag

SEQ ID NO: 3044946 - RNA, 19 nt, Artificial Sequence
  Description of Artificial Sequence: Synthetic oligonucleotide
gcuaccuuuucguccuucc

SEQ ID NO: 3044947 - RNA, 19 nt, Artificial Sequence
  Description of Artificial Sequence: Synthetic oligonucleotide
aagagagcccacguccuuu

SEQ ID NO: 3044948 - RNA, 19 nt, Artificial Sequence
  Description of Artificial Sequence: Synthetic oligonucleotide
uucccgcccugcaaaugug

SEQ ID NO: 3044949 - RNA, 19 nt, Artificial Sequence
  Description of Artificial Sequence: Synthetic oligonucleotide
ucccgcccugcaaauguga

SEQ ID NO: 3044950 - RNA, 19 nt, Artificial Sequence
  Description of Artificial Sequence: Synthetic oligonucleotide
cucacagacugacccagga

SEQ ID NO: 3044951 - RNA, 19 nt, Artificial Sequence
  Description of Artificial Sequence: Synthetic oligonucleotide
cuuuacuucuuccggauuu

SEQ ID NO: 3044952 - RNA, 19 nt, Artificial Sequence
  Description of Artificial Sequence: Synthetic oligonucleotide
accaguuccuuaaacucau

SEQ ID NO: 3044953 - RNA, 19 nt, Artificial Sequence
  Description of Artificial Sequence: Synthetic oligonucleotide
guaggagcugauguccuca

SEQ ID NO: 3044954 - RNA, 19 nt, Artificial Sequence
  Description of Artificial Sequence: Synthetic oligonucleotide
cuucagcuccgaguccugg

SEQ ID NO: 3044955 - RNA, 19 nt, Artificial Sequence
  Description of Artificial Sequence: Synthetic oligonucleotide
aguacucauugaacuucag

SEQ ID NO: 3044956 - RNA, 19 nt, Artificial Sequence
  Description of Artificial Sequence: Synthetic oligonucleotide
acagucucaauggcugccu

SEQ ID NO: 3044957 - RNA, 19 nt, Artificial Sequence
  Description of Artificial Sequence: Synthetic oligonucleotide
cauugaugcucaggcuacc

SEQ ID NO: 3044958 - RNA, 19 nt, Artificial Sequence
  Description of Artificial Sequence: Synthetic oligonucleotide
auggcugccuccaguuccg

SEQ ID NO: 3044959 - RNA, 19 nt, Artificial Sequence
  Description of Artificial Sequence: Synthetic oligonucleotide
gcugccuccaguuccguca

SEQ ID NO: 3044960 - RNA, 19 nt, Artificial Sequence
  Description of Artificial Sequence: Synthetic oligonucleotide
gucucaauggcugccucca

SEQ ID NO: 3044961 - RNA, 19 nt, Artificial Sequence
  Description of Artificial Sequence: Synthetic oligonucleotide
ucguccuucccgcccugca

SEQ ID NO: 3044962 - RNA, 19 nt, Artificial Sequence
  Description of Artificial Sequence: Synthetic oligonucleotide
gagagcccacguccuuuag

SEQ ID NO: 3044963 - RNA, 19 nt, Artificial Sequence
  Description of Artificial Sequence: Synthetic oligonucleotide
augaggcaacugcucggug

SEQ ID NO: 3044964 - RNA, 19 nt, Artificial Sequence
  Description of Artificial Sequence: Synthetic oligonucleotide
cacguccuuuagcaaauga

SEQ ID NO: 3044965 - RNA, 19 nt, Artificial Sequence
  Description of Artificial Sequence: Synthetic oligonucleotide
aguggugaccacagucuca

SEQ ID NO: 3044966 - RNA, 19 nt, Artificial Sequence
  Description of Artificial Sequence: Synthetic oligonucleotide
gcugccauuaguaccacaa

SEQ ID NO: 3044967 - RNA, 19 nt, Artificial Sequence
  Description of Artificial Sequence: Synthetic oligonucleotide
cugcaaaugugaagaaagu

SEQ ID NO: 3044968 - RNA, 19 nt, Artificial Sequence
  Description of Artificial Sequence: Synthetic oligonucleotide
uuucguccuucccgcccug

SEQ ID NO: 3044969 - RNA, 19 nt, Artificial Sequence
  Description of Artificial Sequence: Synthetic oligonucleotide
agagagcccacguccuuua

SEQ ID NO: 3044970 - RNA, 19 nt, Artificial Sequence
  Description of Artificial Sequence: Synthetic oligonucleotide
aacugcucggugaccaguu

SEQ ID NO: 3044971 - RNA, 19 nt, Artificial Sequence
  Description of Artificial Sequence: Synthetic oligonucleotide
ccaguacucauugaacuuc

SEQ ID NO: 3044972 - RNA, 19 nt, Artificial Sequence
  Description of Artificial Sequence: Synthetic oligonucleotide
ccauuaguaccacaaagua

SEQ ID NO: 3044973 - RNA, 19 nt, Artificial Sequence
  Description of Artificial Sequence: Synthetic oligonucleotide
aggagcugauguccucaca

SEQ ID NO: 3044974 - RNA, 19 nt, Artificial Sequence
  Description of Artificial Sequence: Synthetic oligonucleotide
ccuuuagcaaaugaggcaa

SEQ ID NO: 3044975 - RNA, 19 nt, Artificial Sequence
  Description of Artificial Sequence: Synthetic oligonucleotide
uuccuucgccaguucccca

SEQ ID NO: 3044976 - RNA, 19 nt, Artificial Sequence
  Description of Artificial Sequence: Synthetic oligonucleotide
gcaaaugaggcaacugcuc

SEQ ID NO: 3044977 - RNA, 19 nt, Artificial Sequence
  Description of Artificial Sequence: Synthetic oligonucleotide
guccugguucacauccaag

SEQ ID NO: 3044978 - RNA, 19 nt, Artificial Sequence
  Description of Artificial Sequence: Synthetic oligonucleotide
guaccacaaaguaggagcu

SEQ ID NO: 3044979 - RNA, 19 nt, Artificial Sequence
  Description of Artificial Sequence: Synthetic oligonucleotide
gccaguuccccaaucaguc

SEQ ID NO: 3044980 - RNA, 19 nt, Artificial Sequence
  Description of Artificial Sequence: Synthetic oligonucleotide
ucucgucaagagagcccac

SEQ ID NO: 3044981 - RNA, 19 nt, Artificial Sequence
  Description of Artificial Sequence: Synthetic oligonucleotide
caauggcugccuccaguuc

SEQ ID NO: 3044982 - RNA, 19 nt, Artificial Sequence
  Description of Artificial Sequence: Synthetic oligonucleotide
guccucacagacugaccca

SEQ ID NO: 3044983 - RNA, 19 nt, Artificial Sequence
  Description of Artificial Sequence: Synthetic oligonucleotide
caggcuaccuuuucguccu

SEQ ID NO: 3044984 - RNA, 19 nt, Artificial Sequence
  Description of Artificial Sequence: Synthetic oligonucleotide
aggcaacugcucggugacc

SEQ ID NO: 3044985 - RNA, 19 nt, Artificial Sequence
  Description of Artificial Sequence: Synthetic oligonucleotide
agcuuucuccuuccugauu

SEQ ID NO: 3044986 - RNA, 19 nt, Artificial Sequence
  Description of Artificial Sequence: Synthetic oligonucleotide
gcuuucuccuuccugauuu

SEQ ID NO: 3044987 - RNA, 19 nt, Artificial Sequence
  Description of Artificial Sequence: Synthetic oligonucleotide
gccauuaguaccacaaagu

SEQ ID NO: 3044988 - RNA, 19 nt, Artificial Sequence
  Description of Artificial Sequence: Synthetic oligonucleotide
ggcaacugcucggugacca

SEQ ID NO: 3044989 - RNA, 19 nt, Artificial Sequence
  Description of Artificial Sequence: Synthetic oligonucleotide
cagucucaauggcugccuc

SEQ ID NO: 3044990 - RNA, 19 nt, Artificial Sequence
  Description of Artificial Sequence: Synthetic oligonucleotide
cuucccgcccugcaaaugu

SEQ ID NO: 3044991 - RNA, 19 nt, Artificial Sequence
  Description of Artificial Sequence: Synthetic oligonucleotide
uccuucccgcccugcaaau

SEQ ID NO: 3044992 - RNA, 19 nt, Artificial Sequence
  Description of Artificial Sequence: Synthetic oligonucleotide
cuucgccaguuccccaauc

SEQ ID NO: 3044993 - RNA, 19 nt, Artificial Sequence
  Description of Artificial Sequence: Synthetic oligonucleotide
guccuucccgcccugcaaa

SEQ ID NO: 3044994 - RNA, 19 nt, Artificial Sequence
  Description of Artificial Sequence: Synthetic oligonucleotide
cauugaacuucagcuccga

SEQ ID NO: 3044995 - RNA, 19 nt, Artificial Sequence
  Description of Artificial Sequence: Synthetic oligonucleotide
cggauuuccaagcuuucuc

SEQ ID NO: 3044996 - RNA, 19 nt, Artificial Sequence
  Description of Artificial Sequence: Synthetic oligonucleotide
uuccgucagcggcuccgcu

SEQ ID NO: 3044997 - RNA, 19 nt, Artificial Sequence
  Description of Artificial Sequence: Synthetic oligonucleotide
cugccauuaguaccacaaa

SEQ ID NO: 3044998 - RNA, 19 nt, Artificial Sequence
  Description of Artificial Sequence: Synthetic oligonucleotide
cucggugaccaguuccuua

SEQ ID NO: 3044999 - RNA, 19 nt, Artificial Sequence
  Description of Artificial Sequence: Synthetic oligonucleotide
gcuccgcugccauuaguac

SEQ ID NO: 3045000 - RNA, 19 nt, Artificial Sequence
  Description of Artificial Sequence: Synthetic oligonucleotide
cucaauggcugccuccagu

SEQ ID NO: 3045001 - RNA, 19 nt, Artificial Sequence
  Description of Artificial Sequence: Synthetic oligonucleotide
agcggcuccgcugccauua

SEQ ID NO: 3045002 - RNA, 19 nt, Artificial Sequence
  Description of Artificial Sequence: Synthetic oligonucleotide
uucguccuucccgcccugc

SEQ ID NO: 3045003 - RNA, 19 nt, Artificial Sequence
  Description of Artificial Sequence: Synthetic oligonucleotide
gcaacugcucggugaccag

SEQ ID NO: 3045004 - RNA, 19 nt, Artificial Sequence
  Description of Artificial Sequence: Synthetic oligonucleotide
ccuuccugauuuccuucgc

SEQ ID NO: 3045005 - RNA, 19 nt, Artificial Sequence
  Description of Artificial Sequence: Synthetic oligonucleotide
ccgucagcggcuccgcugc

SEQ ID NO: 3045006 - RNA, 19 nt, Artificial Sequence
  Description of Artificial Sequence: Synthetic oligonucleotide
agcccacguccuuuagcaa

SEQ ID NO: 3045007 - RNA, 19 nt, Artificial Sequence
  Description of Artificial Sequence: Synthetic oligonucleotide
cccaaucagucuccaguac

SEQ ID NO: 3045008 - RNA, 19 nt, Artificial Sequence
  Description of Artificial Sequence: Synthetic oligonucleotide
guuccgucagcggcuccgc

SEQ ID NO: 3045009 - RNA, 19 nt, Artificial Sequence
  Description of Artificial Sequence: Synthetic oligonucleotide
ccucacagacugacccagg

SEQ ID NO: 3045010 - RNA, 19 nt, Artificial Sequence
  Description of Artificial Sequence: Synthetic oligonucleotide
acuucagcuccgaguccug

SEQ ID NO: 3045011 - RNA, 19 nt, Artificial Sequence
  Description of Artificial Sequence: Synthetic oligonucleotide
gcucaggcuaccuuuucgu

SEQ ID NO: 3045012 - RNA, 19 nt, Artificial Sequence
  Description of Artificial Sequence: Synthetic oligonucleotide
ccuuuucguccuucccgcc

SEQ ID NO: 3045013 - RNA, 19 nt, Artificial Sequence
  Description of Artificial Sequence: Synthetic oligonucleotide
gaugcucaggcuaccuuuu

SEQ ID NO: 3045014 - RNA, 19 nt, Artificial Sequence
  Description of Artificial Sequence: Synthetic oligonucleotide
ccaagcucuucaucuucuc

SEQ ID NO: 3045015 - RNA, 19 nt, Artificial Sequence
  Description of Artificial Sequence: Synthetic oligonucleotide
ccaaucagucuccaguacu

SEQ ID NO: 3045016 - RNA, 19 nt, Artificial Sequence
  Description of Artificial Sequence: Synthetic oligonucleotide
ggcuuuacuucuuccggau

SEQ ID NO: 3045017 - RNA, 19 nt, Artificial Sequence
  Description of Artificial Sequence: Synthetic oligonucleotide
ccgcccugcaaaugugaag

SEQ ID NO: 3045018 - RNA, 19 nt, Artificial Sequence
  Description of Artificial Sequence: Synthetic oligonucleotide
guuccccaaucagucucca

SEQ ID NO: 3045019 - RNA, 19 nt, Artificial Sequence
  Description of Artificial Sequence: Synthetic oligonucleotide
cgcccugcaaaugugaaga

SEQ ID NO: 3045020 - RNA, 19 nt, Artificial Sequence
  Description of Artificial Sequence: Synthetic oligonucleotide
cugauuuccuucgccaguu

SEQ ID NO: 3045021 - RNA, 19 nt, Artificial Sequence
  Description of Artificial Sequence: Synthetic oligonucleotide
ggcuccgcugccauuagua

SEQ ID NO: 3045022 - RNA, 19 nt, Artificial Sequence
  Description of Artificial Sequence: Synthetic oligonucleotide
gcugauguccucacagacu

SEQ ID NO: 3045023 - RNA, 19 nt, Artificial Sequence
  Description of Artificial Sequence: Synthetic oligonucleotide
cugacccaggaaaggaguu

SEQ ID NO: 3045024 - RNA, 19 nt, Artificial Sequence
  Description of Artificial Sequence: Synthetic oligonucleotide
caguuccgucagcggcucc

SEQ ID NO: 3045025 - RNA, 19 nt, Artificial Sequence
  Description of Artificial Sequence: Synthetic oligonucleotide
ccuuaaacucauugaugcu

SEQ ID NO: 3045026 - RNA, 19 nt, Artificial Sequence
  Description of Artificial Sequence: Synthetic oligonucleotide
ccugguucacauccaagcu

SEQ ID NO: 3045027 - RNA, 19 nt, Artificial Sequence
  Description of Artificial Sequence: Synthetic oligonucleotide
cgucaagagagcccacguc

SEQ ID NO: 3045028 - RNA, 19 nt, Artificial Sequence
  Description of Artificial Sequence: Synthetic oligonucleotide
cuuccggauuuccaagcuu

SEQ ID NO: 3045029 - RNA, 19 nt, Artificial Sequence
  Description of Artificial Sequence: Synthetic oligonucleotide
cuccgaguccugguucaca

SEQ ID NO: 3045030 - RNA, 19 nt, Artificial Sequence
  Description of Artificial Sequence: Synthetic oligonucleotide
ccccaaucagucuccagua

SEQ ID NO: 3045031 - RNA, 19 nt, Artificial Sequence
  Description of Artificial Sequence: Synthetic oligonucleotide
cccaggaaaggaguuggga

SEQ ID NO: 3045032 - RNA, 19 nt, Artificial Sequence
  Description of Artificial Sequence: Synthetic oligonucleotide
caacugcucggugaccagu

SEQ ID NO: 3045033 - RNA, 19 nt, Artificial Sequence
  Description of Artificial Sequence: Synthetic oligonucleotide
ggcuaccuuuucguccuuc

SEQ ID NO: 3045034 - RNA, 19 nt, Artificial Sequence
  Description of Artificial Sequence: Synthetic oligonucleotide
ccugauuuccuucgccagu

SEQ ID NO: 3045035 - RNA, 19 nt, Artificial Sequence
  Description of Artificial Sequence: Synthetic oligonucleotide
uggcugccuccaguuccgu

SEQ ID NO: 3045036 - RNA, 19 nt, Artificial Sequence
  Description of Artificial Sequence: Synthetic oligonucleotide
ccgaguccugguucacauc

SEQ ID NO: 3045037 - RNA, 19 nt, Artificial Sequence
  Description of Artificial Sequence: Synthetic oligonucleotide
gcccugcaaaugugaagaa

SEQ ID NO: 3045038 - RNA, 19 nt, Artificial Sequence
  Description of Artificial Sequence: Synthetic oligonucleotide
cccugcaaaugugaagaaa

SEQ ID NO: 3045039 - RNA, 19 nt, Artificial Sequence
  Description of Artificial Sequence: Synthetic oligonucleotide
caagagagcccacguccuu

SEQ ID NO: 3045040 - RNA, 19 nt, Artificial Sequence
  Description of Artificial Sequence: Synthetic oligonucleotide
aggcuaccuuuucguccuu

SEQ ID NO: 3045041 - RNA, 19 nt, Artificial Sequence
  Description of Artificial Sequence: Synthetic oligonucleotide
gcggcuccgcugccauuag

SEQ ID NO: 3045042 - RNA, 19 nt, Artificial Sequence
  Description of Artificial Sequence: Synthetic oligonucleotide
gcuuuacuucuuccggauu

SEQ ID NO: 3045043 - RNA, 19 nt, Artificial Sequence
  Description of Artificial Sequence: Synthetic oligonucleotide
ccuucccgcccugcaaaug

SEQ ID NO: 3045044 - RNA, 19 nt, Artificial Sequence
  Description of Artificial Sequence: Synthetic oligonucleotide
ccaguuccgucagcggcuc

SEQ ID NO: 3045045 - RNA, 19 nt, Artificial Sequence
  Description of Artificial Sequence: Synthetic oligonucleotide
ccaguuccccaaucagucu

SEQ ID NO: 3045046 - RNA, 19 nt, Artificial Sequence
  Description of Artificial Sequence: Synthetic oligonucleotide
ccacguccuuuagcaaaug

SEQ ID NO: 3045047 - RNA, 19 nt, Artificial Sequence
  Description of Artificial Sequence: Synthetic oligonucleotide
cccgcccugcaaaugugaa

SEQ ID NO: 3045048 - RNA, 19 nt, Artificial Sequence
  Description of Artificial Sequence: Synthetic oligonucleotide
cccacguccuuuagcaaau

SEQ ID NO: 3045049 - RNA, 19 nt, Artificial Sequence
  Description of Artificial Sequence: Synthetic oligonucleotide
gcuccgaguccugguucac

SEQ ID NO: 3045050 - RNA, 19 nt, Artificial Sequence
  Description of Artificial Sequence: Synthetic oligonucleotide
cgccaguuccccaaucagu

SEQ ID NO: 3045051 - RNA, 19 nt, Artificial Sequence
  Description of Artificial Sequence: Synthetic oligonucleotide
ccacaaaguaggagcugau

SEQ ID NO: 3045052 - RNA, 19 nt, Artificial Sequence
  Description of Artificial Sequence: Synthetic oligonucleotide
ccggauuuccaagcuuucu

SEQ ID NO: 3045053 - RNA, 19 nt, Artificial Sequence
  Description of Artificial Sequence: Synthetic oligonucleotide
cguccuucccgcccugcaa

SEQ ID NO: 3045054 - RNA, 19 nt, Artificial Sequence
  Description of Artificial Sequence: Synthetic oligonucleotide
cgcugccauuaguaccaca

SEQ ID NO: 3045055 - RNA, 19 nt, Artificial Sequence
  Description of Artificial Sequence: Synthetic oligonucleotide
cgucagcggcuccgcugcc

SEQ ID NO: 3045056 - RNA, 19 nt, Artificial Sequence
  Description of Artificial Sequence: Synthetic oligonucleotide
gguucacauccaagcucuu

SEQ ID NO: 3045057 - RNA, 19 nt, Artificial Sequence
  Description of Artificial Sequence: Synthetic oligonucleotide
cggugaccaguuccuuaaa

SEQ ID NO: 3045058 - RNA, 19 nt, Artificial Sequence
  Description of Artificial Sequence: Synthetic oligonucleotide
ccuucgccaguuccccaau

SEQ ID NO: 3045059 - RNA, 19 nt, Artificial Sequence
  Description of Artificial Sequence: Synthetic oligonucleotide
gcucggugaccaguuccuu

SEQ ID NO: 3045060 - RNA, 19 nt, Artificial Sequence
  Description of Artificial Sequence: Synthetic oligonucleotide
cggcuccgcugccauuagu

SEQ ID NO: 3045061 - RNA, 19 nt, Artificial Sequence
  Description of Artificial Sequence: Synthetic oligonucleotide
aaagaccacagacaggcgc

SEQ ID NO: 3045062 - RNA, 19 nt, Artificial Sequence
  Description of Artificial Sequence: Synthetic oligonucleotide
ucagacaucaauagguucc

SEQ ID NO: 3045063 - RNA, 19 nt, Artificial Sequence
  Description of Artificial Sequence: Synthetic oligonucleotide
cucuucaccacaaauaccc

SEQ ID NO: 3045064 - RNA, 19 nt, Artificial Sequence
  Description of Artificial Sequence: Synthetic oligonucleotide
uucaccaaagaccacagac

SEQ ID NO: 3045065 - RNA, 19 nt, Artificial Sequence
  Description of Artificial Sequence: Synthetic oligonucleotide
ucugagaugguacuggcug

SEQ ID NO: 3045066 - RNA, 19 nt, Artificial Sequence
  Description of Artificial Sequence: Synthetic oligonucleotide
acaucaauagguucccggc

SEQ ID NO: 3045067 - RNA, 19 nt, Artificial Sequence
  Description of Artificial Sequence: Synthetic oligonucleotide
ugugccauggugcagccgg

SEQ ID NO: 3045068 - RNA, 19 nt, Artificial Sequence
  Description of Artificial Sequence: Synthetic oligonucleotide
auacccucuguccagacac

SEQ ID NO: 3045069 - RNA, 19 nt, Artificial Sequence
  Description of Artificial Sequence: Synthetic oligonucleotide
gacacagucacuagcagcg

SEQ ID NO: 3045070 - RNA, 19 nt, Artificial Sequence
  Description of Artificial Sequence: Synthetic oligonucleotide
accacaaauacccucuguc

SEQ ID NO: 3045071 - RNA, 19 nt, Artificial Sequence
  Description of Artificial Sequence: Synthetic oligonucleotide
gacaucaauagguucccgg

SEQ ID NO: 3045072 - RNA, 19 nt, Artificial Sequence
  Description of Artificial Sequence: Synthetic oligonucleotide
acagacaggcgcuugaaag

SEQ ID NO: 3045073 - RNA, 19 nt, Artificial Sequence
  Description of Artificial Sequence: Synthetic oligonucleotide
ucucaagguccccagauga

SEQ ID NO: 3045074 - RNA, 19 nt, Artificial Sequence
  Description of Artificial Sequence: Synthetic oligonucleotide
cucaucguucucaaggucc

SEQ ID NO: 3045075 - RNA, 19 nt, Artificial Sequence
  Description of Artificial Sequence: Synthetic oligonucleotide
uucaccacaaauacccucu

SEQ ID NO: 3045076 - RNA, 19 nt, Artificial Sequence
  Description of Artificial Sequence: Synthetic oligonucleotide
cugaccagcucugagaugg

SEQ ID NO: 3045077 - RNA, 19 nt, Artificial Sequence
  Description of Artificial Sequence: Synthetic oligonucleotide
cugcucaucguucucaagg

SEQ ID NO: 3045078 - RNA, 19 nt, Artificial Sequence
  Description of Artificial Sequence: Synthetic oligonucleotide
ucaccaaagaccacagaca

SEQ ID NO: 3045079 - RNA, 19 nt, Artificial Sequence
  Description of Artificial Sequence: Synthetic oligonucleotide
gaaagggaccguuugugcc

SEQ ID NO: 3045080 - RNA, 19 nt, Artificial Sequence
  Description of Artificial Sequence: Synthetic oligonucleotide
agcgacagaccacuucucc

SEQ ID NO: 3045081 - RNA, 19 nt, Artificial Sequence
  Description of Artificial Sequence: Synthetic oligonucleotide
uguucaccaaagaccacag

SEQ ID NO: 3045082 - RNA, 19 nt, Artificial Sequence
  Description of Artificial Sequence: Synthetic oligonucleotide
acaaauacccucuguccag

SEQ ID NO: 3045083 - RNA, 19 nt, Artificial Sequence
  Description of Artificial Sequence: Synthetic oligonucleotide
aaagggaccguuugugcca

SEQ ID NO: 3045084 - RNA, 19 nt, Artificial Sequence
  Description of Artificial Sequence: Synthetic oligonucleotide
caccagguagccaagcugg

SEQ ID NO: 3045085 - RNA, 19 nt, Artificial Sequence
  Description of Artificial Sequence: Synthetic oligonucleotide
uucgcucagcaccagguag

SEQ ID NO: 3045086 - RNA, 19 nt, Artificial Sequence
  Description of Artificial Sequence: Synthetic oligonucleotide
caccaaagaccacagacag

SEQ ID NO: 3045087 - RNA, 19 nt, Artificial Sequence
  Description of Artificial Sequence: Synthetic oligonucleotide
aaauacccucuguccagac

SEQ ID NO: 3045088 - RNA, 19 nt, Artificial Sequence
  Description of Artificial Sequence: Synthetic oligonucleotide
ugggauucgcuccagcccc

SEQ ID NO: 3045089 - RNA, 19 nt, Artificial Sequence
  Description of Artificial Sequence: Synthetic oligonucleotide
ucuguccagacacagucac

SEQ ID NO: 3045090 - RNA, 19 nt, Artificial Sequence
  Description of Artificial Sequence: Synthetic oligonucleotide
ucaucgcagccguagaugc

SEQ ID NO: 3045091 - RNA, 19 nt, Artificial Sequence
  Description of Artificial Sequence: Synthetic oligonucleotide
accguuugugccauggugc

SEQ ID NO: 3045092 - RNA, 19 nt, Artificial Sequence
  Description of Artificial Sequence: Synthetic oligonucleotide
acagaccacuucuccagcc

SEQ ID NO: 3045093 - RNA, 19 nt, Artificial Sequence
  Description of Artificial Sequence: Synthetic oligonucleotide
ucaagguccccagaugacg

SEQ ID NO: 3045094 - RNA, 19 nt, Artificial Sequence
  Description of Artificial Sequence: Synthetic oligonucleotide
uccagacacagucacuagc

SEQ ID NO: 3045095 - RNA, 19 nt, Artificial Sequence
  Description of Artificial Sequence: Synthetic oligonucleotide
gucagugcggaagucaucg

SEQ ID NO: 3045096 - RNA, 19 nt, Artificial Sequence
  Description of Artificial Sequence: Synthetic oligonucleotide
ucugggauucgcuccagcc

SEQ ID NO: 3045097 - RNA, 19 nt, Artificial Sequence
  Description of Artificial Sequence: Synthetic oligonucleotide
ugaaagggaccguuugugc

SEQ ID NO: 3045098 - RNA, 19 nt, Artificial Sequence
  Description of Artificial Sequence: Synthetic oligonucleotide
ucaucguucucaagguccc

SEQ ID NO: 3045099 - RNA, 19 nt, Artificial Sequence
  Description of Artificial Sequence: Synthetic oligonucleotide
aagguccccagaugacgcc

SEQ ID NO: 3045100 - RNA, 19 nt, Artificial Sequence
  Description of Artificial Sequence: Synthetic oligonucleotide
gaagucaucgcagccguag

SEQ ID NO: 3045101 - RNA, 19 nt, Artificial Sequence
  Description of Artificial Sequence: Synthetic oligonucleotide
cagacaggcgcuugaaagg

SEQ ID NO: 3045102 - RNA, 19 nt, Artificial Sequence
  Description of Artificial Sequence: Synthetic oligonucleotide
agcucagacaucaauaggu

SEQ ID NO: 3045103 - RNA, 19 nt, Artificial Sequence
  Description of Artificial Sequence: Synthetic oligonucleotide
ugugcugaccagcucugag

SEQ ID NO: 3045104 - RNA, 19 nt, Artificial Sequence
  Description of Artificial Sequence: Synthetic oligonucleotide
uugaaagggaccguuugug

SEQ ID NO: 3045105 - RNA, 19 nt, Artificial Sequence
  Description of Artificial Sequence: Synthetic oligonucleotide
aucaauagguucccggccu

SEQ ID NO: 3045106 - RNA, 19 nt, Artificial Sequence
  Description of Artificial Sequence: Synthetic oligonucleotide
ugcagcucagacaucaaua

SEQ ID NO: 3045107 - RNA, 19 nt, Artificial Sequence
  Description of Artificial Sequence: Synthetic oligonucleotide
aauacccucuguccagaca

SEQ ID NO: 3045108 - RNA, 19 nt, Artificial Sequence
  Description of Artificial Sequence: Synthetic oligonucleotide
caucaauagguucccggcc

SEQ ID NO: 3045109 - RNA, 19 nt, Artificial Sequence
  Description of Artificial Sequence: Synthetic oligonucleotide
acuagcagcguguguucac

SEQ ID NO: 3045110 - RNA, 19 nt, Artificial Sequence
  Description of Artificial Sequence: Synthetic oligonucleotide
gaccguuugugccauggug

SEQ ID NO: 3045111 - RNA, 19 nt, Artificial Sequence
  Description of Artificial Sequence: Synthetic oligonucleotide
agccagugccuucugcagc

SEQ ID NO: 3045112 - RNA, 19 nt, Artificial Sequence
  Description of Artificial Sequence: Synthetic oligonucleotide
aauagguucccggccucgg

SEQ ID NO: 3045113 - RNA, 19 nt, Artificial Sequence
  Description of Artificial Sequence: Synthetic oligonucleotide
ggcaccuucgcucagcacc

SEQ ID NO: 3045114 - RNA, 19 nt, Artificial Sequence
  Description of Artificial Sequence: Synthetic oligonucleotide
cguguguucaccaaagacc

SEQ ID NO: 3045115 - RNA, 19 nt, Artificial Sequence
  Description of Artificial Sequence: Synthetic oligonucleotide
ugccucuucaccacaaaua

SEQ ID NO: 3045116 - RNA, 19 nt, Artificial Sequence
  Description of Artificial Sequence: Synthetic oligonucleotide
caagguccccagaugacgc

SEQ ID NO: 3045117 - RNA, 19 nt, Artificial Sequence
  Description of Artificial Sequence: Synthetic oligonucleotide
uucucaagguccccagaug

SEQ ID NO: 3045118 - RNA, 19 nt, Artificial Sequence
  Description of Artificial Sequence: Synthetic oligonucleotide
agacaggcgcuugaaaggg

SEQ ID NO: 3045119 - RNA, 19 nt, Artificial Sequence
  Description of Artificial Sequence: Synthetic oligonucleotide
gaugacgccaguacggcac

SEQ ID NO: 3045120 - RNA, 19 nt, Artificial Sequence
  Description of Artificial Sequence: Synthetic oligonucleotide
aguacggcaccuucgcuca

SEQ ID NO: 3045121 - RNA, 19 nt, Artificial Sequence
  Description of Artificial Sequence: Synthetic oligonucleotide
ugcugaccagcucugagau

SEQ ID NO: 3045122 - RNA, 19 nt, Artificial Sequence
  Description of Artificial Sequence: Synthetic oligonucleotide
auucgcuccagccccuggg

SEQ ID NO: 3045123 - RNA, 19 nt, Artificial Sequence
  Description of Artificial Sequence: Synthetic oligonucleotide
ugcucaucguucucaaggu

SEQ ID NO: 3045124 - RNA, 19 nt, Artificial Sequence
  Description of Artificial Sequence: Synthetic oligonucleotide
guuugugccauggugcagc

SEQ ID NO: 3045125 - RNA, 19 nt, Artificial Sequence
  Description of Artificial Sequence: Synthetic oligonucleotide
guguguucaccaaagacca

SEQ ID NO: 3045126 - RNA, 19 nt, Artificial Sequence
  Description of Artificial Sequence: Synthetic oligonucleotide
uguccagacacagucacua

SEQ ID NO: 3045127 - RNA, 19 nt, Artificial Sequence
  Description of Artificial Sequence: Synthetic oligonucleotide
gcagcucagacaucaauag

SEQ ID NO: 3045128 - RNA, 19 nt, Artificial Sequence
  Description of Artificial Sequence: Synthetic oligonucleotide
cacaaauacccucugucca

SEQ ID NO: 3045129 - RNA, 19 nt, Artificial Sequence
  Description of Artificial Sequence: Synthetic oligonucleotide
ucgcucagcaccagguagc

SEQ ID NO: 3045130 - RNA, 19 nt, Artificial Sequence
  Description of Artificial Sequence: Synthetic oligonucleotide
aagcuggucugggauucgc

SEQ ID NO: 3045131 - RNA, 19 nt, Artificial Sequence
  Description of Artificial Sequence: Synthetic oligonucleotide
cucagacaucaauagguuc

SEQ ID NO: 3045132 - RNA, 19 nt, Artificial Sequence
  Description of Artificial Sequence: Synthetic oligonucleotide
cuucaccacaaauacccuc

SEQ ID NO: 3045133 - RNA, 19 nt, Artificial Sequence
  Description of Artificial Sequence: Synthetic oligonucleotide
ugcggaagucaucgcagcc

SEQ ID NO: 3045134 - RNA, 19 nt, Artificial Sequence
  Description of Artificial Sequence: Synthetic oligonucleotide
ucgguucugccucuucacc

SEQ ID NO: 3045135 - RNA, 19 nt, Artificial Sequence
  Description of Artificial Sequence: Synthetic oligonucleotide
acaggcugugcugaccagc

SEQ ID NO: 3045136 - RNA, 19 nt, Artificial Sequence
  Description of Artificial Sequence: Synthetic oligonucleotide
cuggucugggauucgcucc

SEQ ID NO: 3045137 - RNA, 19 nt, Artificial Sequence
  Description of Artificial Sequence: Synthetic oligonucleotide
aagaccacagacaggcgcu

SEQ ID NO: 3045138 - RNA, 19 nt, Artificial Sequence
  Description of Artificial Sequence: Synthetic oligonucleotide
cugagaugguacuggcugc

SEQ ID NO: 3045139 - RNA, 19 nt, Artificial Sequence
  Description of Artificial Sequence: Synthetic oligonucleotide
cugggauucgcuccagccc

SEQ ID NO: 3045140 - RNA, 19 nt, Artificial Sequence
  Description of Artificial Sequence: Synthetic oligonucleotide
augacgccaguacggcacc

SEQ ID NO: 3045141 - RNA, 19 nt, Artificial Sequence
  Description of Artificial Sequence: Synthetic oligonucleotide
accagcucugagaugguac

SEQ ID NO: 3045142 - RNA, 19 nt, Artificial Sequence
  Description of Artificial Sequence: Synthetic oligonucleotide
acaggcccuagcgacagac

SEQ ID NO: 3045143 - RNA, 19 nt, Artificial Sequence
  Description of Artificial Sequence: Synthetic oligonucleotide
ucuucaccacaaauacccu

SEQ ID NO: 3045144 - RNA, 19 nt, Artificial Sequence
  Description of Artificial Sequence: Synthetic oligonucleotide
agaccacuucuccagccag

SEQ ID NO: 3045145 - RNA, 19 nt, Artificial Sequence
  Description of Artificial Sequence: Synthetic oligonucleotide
aggcgcuugaaagggaccg

SEQ ID NO: 3045146 - RNA, 19 nt, Artificial Sequence
  Description of Artificial Sequence: Synthetic oligonucleotide
cagcucagacaucaauagg

SEQ ID NO: 3045147 - RNA, 19 nt, Artificial Sequence
  Description of Artificial Sequence: Synthetic oligonucleotide
ccagaugacgccaguacgg

SEQ ID NO: 3045148 - RNA, 19 nt, Artificial Sequence
  Description of Artificial Sequence: Synthetic oligonucleotide
aagucaucgcagccguaga

SEQ ID NO: 3045149 - RNA, 19 nt, Artificial Sequence
  Description of Artificial Sequence: Synthetic oligonucleotide
agugcggaagucaucgcag

SEQ ID NO: 3045150 - RNA, 19 nt, Artificial Sequence
  Description of Artificial Sequence: Synthetic oligonucleotide
acaggcgcuugaaagggac

SEQ ID NO: 3045151 - RNA, 19 nt, Artificial Sequence
  Description of Artificial Sequence: Synthetic oligonucleotide
cucagcaccagguagccaa

SEQ ID NO: 3045152 - RNA, 19 nt, Artificial Sequence
  Description of Artificial Sequence: Synthetic oligonucleotide
cauggugcagccggaagcc

SEQ ID NO: 3045153 - RNA, 19 nt, Artificial Sequence
  Description of Artificial Sequence: Synthetic oligonucleotide
caguacggcaccuucgcuc

SEQ ID NO: 3045154 - RNA, 19 nt, Artificial Sequence
  Description of Artificial Sequence: Synthetic oligonucleotide
agaugguacuggcugccug

SEQ ID NO: 3045155 - RNA, 19 nt, Artificial Sequence
  Description of Artificial Sequence: Synthetic oligonucleotide
aggcccuagcgacagacca

SEQ ID NO: 3045156 - RNA, 19 nt, Artificial Sequence
  Description of Artificial Sequence: Synthetic oligonucleotide
ucaccacaaauacccucug

SEQ ID NO: 3045157 - RNA, 19 nt, Artificial Sequence
  Description of Artificial Sequence: Synthetic oligonucleotide
ucguucucaagguccccag

SEQ ID NO: 3045158 - RNA, 19 nt, Artificial Sequence
  Description of Artificial Sequence: Synthetic oligonucleotide
agccggaagccacaggcug

SEQ ID NO: 3045159 - RNA, 19 nt, Artificial Sequence
  Description of Artificial Sequence: Synthetic oligonucleotide
gccucuucaccacaaauac

SEQ ID NO: 3045160 - RNA, 19 nt, Artificial Sequence
  Description of Artificial Sequence: Synthetic oligonucleotide
ccacaaauacccucugucc

SEQ ID NO: 3045161 - RNA, 19 nt, Artificial Sequence
  Description of Artificial Sequence: Synthetic oligonucleotide
uggucugggauucgcucca

SEQ ID NO: 3045162 - RNA, 19 nt, Artificial Sequence
  Description of Artificial Sequence: Synthetic oligonucleotide
gcagccggaagccacaggc

SEQ ID NO: 3045163 - RNA, 19 nt, Artificial Sequence
  Description of Artificial Sequence: Synthetic oligonucleotide
gacagaccacuucuccagc

SEQ ID NO: 3045164 - RNA, 19 nt, Artificial Sequence
  Description of Artificial Sequence: Synthetic oligonucleotide
cagcguguguucaccaaag

SEQ ID NO: 3045165 - RNA, 19 nt, Artificial Sequence
  Description of Artificial Sequence: Synthetic oligonucleotide
uuugugccauggugcagcc

SEQ ID NO: 3045166 - RNA, 19 nt, Artificial Sequence
  Description of Artificial Sequence: Synthetic oligonucleotide
cagacaucaauagguuccc

SEQ ID NO: 3045167 - RNA, 19 nt, Artificial Sequence
  Description of Artificial Sequence: Synthetic oligonucleotide
caaagaccacagacaggcg

SEQ ID NO: 3045168 - RNA, 19 nt, Artificial Sequence
  Description of Artificial Sequence: Synthetic oligonucleotide
ucaauagguucccggccuc

SEQ ID NO: 3045169 - RNA, 19 nt, Artificial Sequence
  Description of Artificial Sequence: Synthetic oligonucleotide
agguucccggccucgguuc

SEQ ID NO: 3045170 - RNA, 19 nt, Artificial Sequence
  Description of Artificial Sequence: Synthetic oligonucleotide
guguucaccaaagaccaca

SEQ ID NO: 3045171 - RNA, 19 nt, Artificial Sequence
  Description of Artificial Sequence: Synthetic oligonucleotide
gauucgcuccagccccugg

SEQ ID NO: 3045172 - RNA, 19 nt, Artificial Sequence
  Description of Artificial Sequence: Synthetic oligonucleotide
cuagcagcguguguucacc

SEQ ID NO: 3045173 - RNA, 19 nt, Artificial Sequence
  Description of Artificial Sequence: Synthetic oligonucleotide
gcuugaaagggaccguuug

SEQ ID NO: 3045174 - RNA, 19 nt, Artificial Sequence
  Description of Artificial Sequence: Synthetic oligonucleotide
guagccaagcuggucuggg

SEQ ID NO: 3045175 - RNA, 19 nt, Artificial Sequence
  Description of Artificial Sequence: Synthetic oligonucleotide
cucaagguccccagaugac

SEQ ID NO: 3045176 - RNA, 19 nt, Artificial Sequence
  Description of Artificial Sequence: Synthetic oligonucleotide
acgccaguacggcaccuuc

SEQ ID NO: 3045177 - RNA, 19 nt, Artificial Sequence
  Description of Artificial Sequence: Synthetic oligonucleotide
uguguucaccaaagaccac

SEQ ID NO: 3045178 - RNA, 19 nt, Artificial Sequence
  Description of Artificial Sequence: Synthetic oligonucleotide
cucgguucugccucuucac

SEQ ID NO: 3045179 - RNA, 19 nt, Artificial Sequence
  Description of Artificial Sequence: Synthetic oligonucleotide
cuagcgacagaccacuucu

SEQ ID NO: 3045180 - RNA, 19 nt, Artificial Sequence
  Description of Artificial Sequence: Synthetic oligonucleotide
agucaucgcagccguagau

SEQ ID NO: 3045181 - RNA, 19 nt, Artificial Sequence
  Description of Artificial Sequence: Synthetic oligonucleotide
aagccacaggcugugcuga

SEQ ID NO: 3045182 - RNA, 19 nt, Artificial Sequence
  Description of Artificial Sequence: Synthetic oligonucleotide
uccagccagugccuucugc

SEQ ID NO: 3045183 - RNA, 19 nt, Artificial Sequence
  Description of Artificial Sequence: Synthetic oligonucleotide
cagaugacgccaguacggc

SEQ ID NO: 3045184 - RNA, 19 nt, Artificial Sequence
  Description of Artificial Sequence: Synthetic oligonucleotide
accuucgcucagcaccagg

SEQ ID NO: 3045185 - RNA, 19 nt, Artificial Sequence
  Description of Artificial Sequence: Synthetic oligonucleotide
gucaucgcagccguagaug

SEQ ID NO: 3045186 - RNA, 19 nt, Artificial Sequence
  Description of Artificial Sequence: Synthetic oligonucleotide
ucacuagcagcguguguuc

SEQ ID NO: 3045187 - RNA, 19 nt, Artificial Sequence
  Description of Artificial Sequence: Synthetic oligonucleotide
cacagucacuagcagcgug

SEQ ID NO: 3045188 - RNA, 19 nt, Artificial Sequence
  Description of Artificial Sequence: Synthetic oligonucleotide
agccaagcuggucugggau

SEQ ID NO: 3045189 - RNA, 19 nt, Artificial Sequence
  Description of Artificial Sequence: Synthetic oligonucleotide
ucuccagccagugccuucu

SEQ ID NO: 3045190 - RNA, 19 nt, Artificial Sequence
  Description of Artificial Sequence: Synthetic oligonucleotide
agaugacgccaguacggca

SEQ ID NO: 3045191 - RNA, 19 nt, Artificial Sequence
  Description of Artificial Sequence: Synthetic oligonucleotide
accacagacaggcgcuuga

SEQ ID NO: 3045192 - RNA, 19 nt, Artificial Sequence
  Description of Artificial Sequence: Synthetic oligonucleotide
uucugccucuucaccacaa

SEQ ID NO: 3045193 - RNA, 19 nt, Artificial Sequence
  Description of Artificial Sequence: Synthetic oligonucleotide
acagucacuagcagcgugu

SEQ ID NO: 3045194 - RNA, 19 nt, Artificial Sequence
  Description of Artificial Sequence: Synthetic oligonucleotide
uucgcuccagccccugggu

SEQ ID NO: 3045195 - RNA, 19 nt, Artificial Sequence
  Description of Artificial Sequence: Synthetic oligonucleotide
ucagugcggaagucaucgc

SEQ ID NO: 3045196 - RNA, 19 nt, Artificial Sequence
  Description of Artificial Sequence: Synthetic oligonucleotide
agguagccaagcuggucug

SEQ ID NO: 3045197 - RNA, 19 nt, Artificial Sequence
  Description of Artificial Sequence: Synthetic oligonucleotide
ccucuguccagacacaguc

SEQ ID NO: 3045198 - RNA, 19 nt, Artificial Sequence
  Description of Artificial Sequence: Synthetic oligonucleotide
agacaucaauagguucccg

SEQ ID NO: 3045199 - RNA, 19 nt, Artificial Sequence
  Description of Artificial Sequence: Synthetic oligonucleotide
ucugccucuucaccacaaa

SEQ ID NO: 3045200 - RNA, 19 nt, Artificial Sequence
  Description of Artificial Sequence: Synthetic oligonucleotide
gcguguguucaccaaagac

SEQ ID NO: 3045201 - RNA, 19 nt, Artificial Sequence
  Description of Artificial Sequence: Synthetic oligonucleotide
caauagguucccggccucg

SEQ ID NO: 3045202 - RNA, 19 nt, Artificial Sequence
  Description of Artificial Sequence: Synthetic oligonucleotide
guccagacacagucacuag

SEQ ID NO: 3045203 - RNA, 19 nt, Artificial Sequence
  Description of Artificial Sequence: Synthetic oligonucleotide
agcguguguucaccaaaga

SEQ ID NO: 3045204 - RNA, 19 nt, Artificial Sequence
  Description of Artificial Sequence: Synthetic oligonucleotide
cccagaugacgccaguacg

SEQ ID NO: 3045205 - RNA, 19 nt, Artificial Sequence
  Description of Artificial Sequence: Synthetic oligonucleotide
gugcugaccagcucugaga

SEQ ID NO: 3045206 - RNA, 19 nt, Artificial Sequence
  Description of Artificial Sequence: Synthetic oligonucleotide
gugcggaagucaucgcagc

SEQ ID NO: 3045207 - RNA, 19 nt, Artificial Sequence
  Description of Artificial Sequence: Synthetic oligonucleotide
aucguucucaaggucccca

SEQ ID NO: 3045208 - RNA, 19 nt, Artificial Sequence
  Description of Artificial Sequence: Synthetic oligonucleotide
uagcagcguguguucacca

SEQ ID NO: 3045209 - RNA, 19 nt, Artificial Sequence
  Description of Artificial Sequence: Synthetic oligonucleotide
ccauggugcagccggaagc

SEQ ID NO: 3045210 - RNA, 19 nt, Artificial Sequence
  Description of Artificial Sequence: Synthetic oligonucleotide
auagguucccggccucggu

SEQ ID NO: 3045211 - RNA, 19 nt, Artificial Sequence
  Description of Artificial Sequence: Synthetic oligonucleotide
caggcgcuugaaagggacc

SEQ ID NO: 3045212 - RNA, 19 nt, Artificial Sequence
  Description of Artificial Sequence: Synthetic oligonucleotide
uagguucccggccucgguu

SEQ ID NO: 3045213 - RNA, 19 nt, Artificial Sequence
  Description of Artificial Sequence: Synthetic oligonucleotide
gguucugccucuucaccac

SEQ ID NO: 3045214 - RNA, 19 nt, Artificial Sequence
  Description of Artificial Sequence: Synthetic oligonucleotide
uagccaagcuggucuggga

SEQ ID NO: 3045215 - RNA, 19 nt, Artificial Sequence
  Description of Artificial Sequence: Synthetic oligonucleotide
agugccuucugcagcucag

SEQ ID NO: 3045216 - RNA, 19 nt, Artificial Sequence
  Description of Artificial Sequence: Synthetic oligonucleotide
ucugcagcucagacaucaa

SEQ ID NO: 3045217 - RNA, 19 nt, Artificial Sequence
  Description of Artificial Sequence: Synthetic oligonucleotide
agucacuagcagcgugugu

SEQ ID NO: 3045218 - RNA, 19 nt, Artificial Sequence
  Description of Artificial Sequence: Synthetic oligonucleotide
uacccucuguccagacaca

SEQ ID NO: 3045219 - RNA, 19 nt, Artificial Sequence
  Description of Artificial Sequence: Synthetic oligonucleotide
ccagacacagucacuagca

SEQ ID NO: 3045220 - RNA, 19 nt, Artificial Sequence
  Description of Artificial Sequence: Synthetic oligonucleotide
gcggaagucaucgcagccg

SEQ ID NO: 3045221 - RNA, 19 nt, Artificial Sequence
  Description of Artificial Sequence: Synthetic oligonucleotide
gcaccagguagccaagcug

SEQ ID NO: 3045222 - RNA, 19 nt, Artificial Sequence
  Description of Artificial Sequence: Synthetic oligonucleotide
cagguagccaagcuggucu

SEQ ID NO: 3045223 - RNA, 19 nt, Artificial Sequence
  Description of Artificial Sequence: Synthetic oligonucleotide
acccucuguccagacacag

SEQ ID NO: 3045224 - RNA, 19 nt, Artificial Sequence
  Description of Artificial Sequence: Synthetic oligonucleotide
cagugcggaagucaucgca

SEQ ID NO: 3045225 - RNA, 19 nt, Artificial Sequence
  Description of Artificial Sequence: Synthetic oligonucleotide
ccucuucaccacaaauacc

SEQ ID NO: 3045226 - RNA, 19 nt, Artificial Sequence
  Description of Artificial Sequence: Synthetic oligonucleotide
uagcgacagaccacuucuc

SEQ ID NO: 3045227 - RNA, 19 nt, Artificial Sequence
  Description of Artificial Sequence: Synthetic oligonucleotide
cuugaaagggaccguuugu

SEQ ID NO: 3045228 - RNA, 19 nt, Artificial Sequence
  Description of Artificial Sequence: Synthetic oligonucleotide
gccaguacggcaccuucgc

SEQ ID NO: 3045229 - RNA, 19 nt, Artificial Sequence
  Description of Artificial Sequence: Synthetic oligonucleotide
gggaccguuugugccaugg

SEQ ID NO: 3045230 - RNA, 19 nt, Artificial Sequence
  Description of Artificial Sequence: Synthetic oligonucleotide
uacggcaccuucgcucagc

SEQ ID NO: 3045231 - RNA, 19 nt, Artificial Sequence
  Description of Artificial Sequence: Synthetic oligonucleotide
agcagcguguguucaccaa

SEQ ID NO: 3045232 - RNA, 19 nt, Artificial Sequence
  Description of Artificial Sequence: Synthetic oligonucleotide
uucuccagccagugccuuc

SEQ ID NO: 3045233 - RNA, 19 nt, Artificial Sequence
  Description of Artificial Sequence: Synthetic oligonucleotide
caggcccuagcgacagacc

SEQ ID NO: 3045234 - RNA, 19 nt, Artificial Sequence
  Description of Artificial Sequence: Synthetic oligonucleotide
cucuguccagacacaguca

SEQ ID NO: 3045235 - RNA, 19 nt, Artificial Sequence
  Description of Artificial Sequence: Synthetic oligonucleotide
gucacuagcagcguguguu

SEQ ID NO: 3045236 - RNA, 19 nt, Artificial Sequence
  Description of Artificial Sequence: Synthetic oligonucleotide
acggcaccuucgcucagca

SEQ ID NO: 3045237 - RNA, 19 nt, Artificial Sequence
  Description of Artificial Sequence: Synthetic oligonucleotide
cgacagaccacuucuccag

SEQ ID NO: 3045238 - RNA, 19 nt, Artificial Sequence
  Description of Artificial Sequence: Synthetic oligonucleotide
aagggaccguuugugccau

SEQ ID NO: 3045239 - RNA, 19 nt, Artificial Sequence
  Description of Artificial Sequence: Synthetic oligonucleotide
uugugccauggugcagccg

SEQ ID NO: 3045240 - RNA, 19 nt, Artificial Sequence
  Description of Artificial Sequence: Synthetic oligonucleotide
guucaccaaagaccacaga

SEQ ID NO: 3045241 - RNA, 19 nt, Artificial Sequence
  Description of Artificial Sequence: Synthetic oligonucleotide
aggcugugcugaccagcuc

SEQ ID NO: 3045242 - RNA, 19 nt, Artificial Sequence
  Description of Artificial Sequence: Synthetic oligonucleotide
cagaccacuucuccagcca

SEQ ID NO: 3045243 - RNA, 19 nt, Artificial Sequence
  Description of Artificial Sequence: Synthetic oligonucleotide
caaauacccucuguccaga

SEQ ID NO: 3045244 - RNA, 19 nt, Artificial Sequence
  Description of Artificial Sequence: Synthetic oligonucleotide
gucugggauucgcuccagc

SEQ ID NO: 3045245 - RNA, 19 nt, Artificial Sequence
  Description of Artificial Sequence: Synthetic oligonucleotide
ugaccagcucugagauggu

SEQ ID NO: 3045246 - RNA, 19 nt, Artificial Sequence
  Description of Artificial Sequence: Synthetic oligonucleotide
gcuggucugggauucgcuc

SEQ ID NO: 3045247 - RNA, 19 nt, Artificial Sequence
  Description of Artificial Sequence: Synthetic oligonucleotide
cagucacuagcagcgugug

SEQ ID NO: 3045248 - RNA, 19 nt, Artificial Sequence
  Description of Artificial Sequence: Synthetic oligonucleotide
ucgcuccagccccuggguc

SEQ ID NO: 3045249 - RNA, 19 nt, Artificial Sequence
  Description of Artificial Sequence: Synthetic oligonucleotide
gaccacagacaggcgcuug

SEQ ID NO: 3045250 - RNA, 19 nt, Artificial Sequence
  Description of Artificial Sequence: Synthetic oligonucleotide
uccagccccugggucagug

SEQ ID NO: 3045251 - RNA, 19 nt, Artificial Sequence
  Description of Artificial Sequence: Synthetic oligonucleotide
guucugccucuucaccaca

SEQ ID NO: 3045252 - RNA, 19 nt, Artificial Sequence
  Description of Artificial Sequence: Synthetic oligonucleotide
gguagccaagcuggucugg

SEQ ID NO: 3045253 - RNA, 19 nt, Artificial Sequence
  Description of Artificial Sequence: Synthetic oligonucleotide
uucccggccucgguucugc

SEQ ID NO: 3045254 - RNA, 19 nt, Artificial Sequence
  Description of Artificial Sequence: Synthetic oligonucleotide
gcgacagaccacuucucca

SEQ ID NO: 3045255 - RNA, 19 nt, Artificial Sequence
  Description of Artificial Sequence: Synthetic oligonucleotide
caucguucucaaggucccc

SEQ ID NO: 3045256 - RNA, 19 nt, Artificial Sequence
  Description of Artificial Sequence: Synthetic oligonucleotide
ugguacuggcugccugcuc

SEQ ID NO: 3045257 - RNA, 19 nt, Artificial Sequence
  Description of Artificial Sequence: Synthetic oligonucleotide
augguacuggcugccugcu

SEQ ID NO: 3045258 - RNA, 19 nt, Artificial Sequence
  Description of Artificial Sequence: Synthetic oligonucleotide
agguccccagaugacgcca

SEQ ID NO: 3045259 - RNA, 19 nt, Artificial Sequence
  Description of Artificial Sequence: Synthetic oligonucleotide
ccuagcgacagaccacuuc

SEQ ID NO: 3045260 - RNA, 19 nt, Artificial Sequence
  Description of Artificial Sequence: Synthetic oligonucleotide
ggcugugcugaccagcucu

SEQ ID NO: 3045261 - RNA, 19 nt, Artificial Sequence
  Description of Artificial Sequence: Synthetic oligonucleotide
ccccagaugacgccaguac

SEQ ID NO: 3045262 - RNA, 19 nt, Artificial Sequence
  Description of Artificial Sequence: Synthetic oligonucleotide
uccccagaugacgccagua

SEQ ID NO: 3045263 - RNA, 19 nt, Artificial Sequence
  Description of Artificial Sequence: Synthetic oligonucleotide
gacaggcgcuugaaaggga

SEQ ID NO: 3045264 - RNA, 19 nt, Artificial Sequence
  Description of Artificial Sequence: Synthetic oligonucleotide
acacagucacuagcagcgu

SEQ ID NO: 3045265 - RNA, 19 nt, Artificial Sequence
  Description of Artificial Sequence: Synthetic oligonucleotide
gcucaucguucucaagguc

SEQ ID NO: 3045266 - RNA, 19 nt, Artificial Sequence
  Description of Artificial Sequence: Synthetic oligonucleotide
cacagacaggcgcuugaaa

SEQ ID NO: 3045267 - RNA, 19 nt, Artificial Sequence
  Description of Artificial Sequence: Synthetic oligonucleotide
agccccugggucagugcgg

SEQ ID NO: 3045268 - RNA, 19 nt, Artificial Sequence
  Description of Artificial Sequence: Synthetic oligonucleotide
cuucugcagcucagacauc

SEQ ID NO: 3045269 - RNA, 19 nt, Artificial Sequence
  Description of Artificial Sequence: Synthetic oligonucleotide
agcuggucugggauucgcu

SEQ ID NO: 3045270 - RNA, 19 nt, Artificial Sequence
  Description of Artificial Sequence: Synthetic oligonucleotide
cucugagaugguacuggcu

SEQ ID NO: 3045271 - RNA, 19 nt, Artificial Sequence
  Description of Artificial Sequence: Synthetic oligonucleotide
caggcugugcugaccagcu

SEQ ID NO: 3045272 - RNA, 19 nt, Artificial Sequence
  Description of Artificial Sequence: Synthetic oligonucleotide
gcagcguguguucaccaaa

SEQ ID NO: 3045273 - RNA, 19 nt, Artificial Sequence
  Description of Artificial Sequence: Synthetic oligonucleotide
ccaagcuggucugggauuc

SEQ ID NO: 3045274 - RNA, 19 nt, Artificial Sequence
  Description of Artificial Sequence: Synthetic oligonucleotide
cagugccuucugcagcuca

SEQ ID NO: 3045275 - RNA, 19 nt, Artificial Sequence
  Description of Artificial Sequence: Synthetic oligonucleotide
ugccauggugcagccggaa

SEQ ID NO: 3045276 - RNA, 19 nt, Artificial Sequence
  Description of Artificial Sequence: Synthetic oligonucleotide
cuucgcucagcaccaggua

SEQ ID NO: 3045277 - RNA, 19 nt, Artificial Sequence
  Description of Artificial Sequence: Synthetic oligonucleotide
guacggcaccuucgcucag

SEQ ID NO: 3045278 - RNA, 19 nt, Artificial Sequence
  Description of Artificial Sequence: Synthetic oligonucleotide
cacuagcagcguguguuca

SEQ ID NO: 3045279 - RNA, 19 nt, Artificial Sequence
  Description of Artificial Sequence: Synthetic oligonucleotide
gcugaccagcucugagaug

SEQ ID NO: 3045280 - RNA, 19 nt, Artificial Sequence
  Description of Artificial Sequence: Synthetic oligonucleotide
ugacgccaguacggcaccu

SEQ ID NO: 3045281 - RNA, 19 nt, Artificial Sequence
  Description of Artificial Sequence: Synthetic oligonucleotide
auggugcagccggaagcca

SEQ ID NO: 3045282 - RNA, 19 nt, Artificial Sequence
  Description of Artificial Sequence: Synthetic oligonucleotide
gcugugcugaccagcucug

SEQ ID NO: 3045283 - RNA, 19 nt, Artificial Sequence
  Description of Artificial Sequence: Synthetic oligonucleotide
cccugggucagugcggaag

SEQ ID NO: 3045284 - RNA, 19 nt, Artificial Sequence
  Description of Artificial Sequence: Synthetic oligonucleotide
ccugcucaucguucucaag

SEQ ID NO: 3045285 - RNA, 19 nt, Artificial Sequence
  Description of Artificial Sequence: Synthetic oligonucleotide
gguccccagaugacgccag

SEQ ID NO: 3045286 - RNA, 19 nt, Artificial Sequence
  Description of Artificial Sequence: Synthetic oligonucleotide
cgccaguacggcaccuucg

SEQ ID NO: 3045287 - RNA, 19 nt, Artificial Sequence
  Description of Artificial Sequence: Synthetic oligonucleotide
cugccucuucaccacaaau

SEQ ID NO: 3045288 - RNA, 19 nt, Artificial Sequence
  Description of Artificial Sequence: Synthetic oligonucleotide
ccguuugugccauggugca

SEQ ID NO: 3045289 - RNA, 19 nt, Artificial Sequence
  Description of Artificial Sequence: Synthetic oligonucleotide
gaccagcucugagauggua

SEQ ID NO: 3045290 - RNA, 19 nt, Artificial Sequence
  Description of Artificial Sequence: Synthetic oligonucleotide
ccggccucgguucugccuc

SEQ ID NO: 3045291 - RNA, 19 nt, Artificial Sequence
  Description of Artificial Sequence: Synthetic oligonucleotide
ucccggccucgguucugcc

SEQ ID NO: 3045292 - RNA, 19 nt, Artificial Sequence
  Description of Artificial Sequence: Synthetic oligonucleotide
caccacaaauacccucugu

SEQ ID NO: 3045293 - RNA, 19 nt, Artificial Sequence
  Description of Artificial Sequence: Synthetic oligonucleotide
gcaccuucgcucagcacca

SEQ ID NO: 3045294 - RNA, 19 nt, Artificial Sequence
  Description of Artificial Sequence: Synthetic oligonucleotide
gagaugguacuggcugccu

SEQ ID NO: 3045295 - RNA, 19 nt, Artificial Sequence
  Description of Artificial Sequence: Synthetic oligonucleotide
cugcagcucagacaucaau

SEQ ID NO: 3045296 - RNA, 19 nt, Artificial Sequence
  Description of Artificial Sequence: Synthetic oligonucleotide
agaccacagacaggcgcuu

SEQ ID NO: 3045297 - RNA, 19 nt, Artificial Sequence
  Description of Artificial Sequence: Synthetic oligonucleotide
uacuggcugccugcucauc

SEQ ID NO: 3045298 - RNA, 19 nt, Artificial Sequence
  Description of Artificial Sequence: Synthetic oligonucleotide
ccucgguucugccucuuca

SEQ ID NO: 3045299 - RNA, 19 nt, Artificial Sequence
  Description of Artificial Sequence: Synthetic oligonucleotide
ggugcagccggaagccaca

SEQ ID NO: 3045300 - RNA, 19 nt, Artificial Sequence
  Description of Artificial Sequence: Synthetic oligonucleotide
cuguccagacacagucacu

SEQ ID NO: 3045301 - RNA, 19 nt, Artificial Sequence
  Description of Artificial Sequence: Synthetic oligonucleotide
cuccagccagugccuucug

SEQ ID NO: 3045302 - RNA, 19 nt, Artificial Sequence
  Description of Artificial Sequence: Synthetic oligonucleotide
cuggcugccugcucaucgu

SEQ ID NO: 3045303 - RNA, 19 nt, Artificial Sequence
  Description of Artificial Sequence: Synthetic oligonucleotide
ggcccuagcgacagaccac

SEQ ID NO: 3045304 - RNA, 19 nt, Artificial Sequence
  Description of Artificial Sequence: Synthetic oligonucleotide
cgguucugccucuucacca

SEQ ID NO: 3045305 - RNA, 19 nt, Artificial Sequence
  Description of Artificial Sequence: Synthetic oligonucleotide
agggaccguuugugccaug

SEQ ID NO: 3045306 - RNA, 19 nt, Artificial Sequence
  Description of Artificial Sequence: Synthetic oligonucleotide
ccuucgcucagcaccaggu

SEQ ID NO: 3045307 - RNA, 19 nt, Artificial Sequence
  Description of Artificial Sequence: Synthetic oligonucleotide
guucccggccucgguucug

SEQ ID NO: 3045308 - RNA, 19 nt, Artificial Sequence
  Description of Artificial Sequence: Synthetic oligonucleotide
ggucugggauucgcuccag

SEQ ID NO: 3045309 - RNA, 19 nt, Artificial Sequence
  Description of Artificial Sequence: Synthetic oligonucleotide
ccagguagccaagcugguc

SEQ ID NO: 3045310 - RNA, 19 nt, Artificial Sequence
  Description of Artificial Sequence: Synthetic oligonucleotide
ggcugccugcucaucguuc

SEQ ID NO: 3045311 - RNA, 19 nt, Artificial Sequence
  Description of Artificial Sequence: Synthetic oligonucleotide
ggucagugcggaagucauc

SEQ ID NO: 3045312 - RNA, 19 nt, Artificial Sequence
  Description of Artificial Sequence: Synthetic oligonucleotide
caccuucgcucagcaccag

SEQ ID NO: 3045313 - RNA, 19 nt, Artificial Sequence
  Description of Artificial Sequence: Synthetic oligonucleotide
cagccggaagccacaggcu

SEQ ID NO: 3045314 - RNA, 19 nt, Artificial Sequence
  Description of Artificial Sequence: Synthetic oligonucleotide
guacuggcugccugcucau

SEQ ID NO: 3045315 - RNA, 19 nt, Artificial Sequence
  Description of Artificial Sequence: Synthetic oligonucleotide
gccugcucaucguucucaa

SEQ ID NO: 3045316 - RNA, 19 nt, Artificial Sequence
  Description of Artificial Sequence: Synthetic oligonucleotide
ggauucgcuccagccccug

SEQ ID NO: 3045317 - RNA, 19 nt, Artificial Sequence
  Description of Artificial Sequence: Synthetic oligonucleotide
ccggaagccacaggcugug

SEQ ID NO: 3045318 - RNA, 19 nt, Artificial Sequence
  Description of Artificial Sequence: Synthetic oligonucleotide
gcucagacaucaauagguu

SEQ ID NO: 3045319 - RNA, 19 nt, Artificial Sequence
  Description of Artificial Sequence: Synthetic oligonucleotide
gugccauggugcagccgga

SEQ ID NO: 3045320 - RNA, 19 nt, Artificial Sequence
  Description of Artificial Sequence: Synthetic oligonucleotide
gcccuagcgacagaccacu

SEQ ID NO: 3045321 - RNA, 19 nt, Artificial Sequence
  Description of Artificial Sequence: Synthetic oligonucleotide
ggaccguuugugccauggu

SEQ ID NO: 3045322 - RNA, 19 nt, Artificial Sequence
  Description of Artificial Sequence: Synthetic oligonucleotide
gggucagugcggaagucau

SEQ ID NO: 3045323 - RNA, 19 nt, Artificial Sequence
  Description of Artificial Sequence: Synthetic oligonucleotide
cguuugugccauggugcag

SEQ ID NO: 3045324 - RNA, 19 nt, Artificial Sequence
  Description of Artificial Sequence: Synthetic oligonucleotide
ccugggucagugcggaagu

SEQ ID NO: 3045325 - RNA, 19 nt, Artificial Sequence
  Description of Artificial Sequence: Synthetic oligonucleotide
gacgccaguacggcaccuu

SEQ ID NO: 3045326 - RNA, 19 nt, Artificial Sequence
  Description of Artificial Sequence: Synthetic oligonucleotide
guccccagaugacgccagu

SEQ ID NO: 3045327 - RNA, 19 nt, Artificial Sequence
  Description of Artificial Sequence: Synthetic oligonucleotide
gccucgguucugccucuuc

SEQ ID NO: 3045328 - RNA, 19 nt, Artificial Sequence
  Description of Artificial Sequence: Synthetic oligonucleotide
gccaagcuggucugggauu

SEQ ID NO: 3045329 - RNA, 19 nt, Artificial Sequence
  Description of Artificial Sequence: Synthetic oligonucleotide
gguucccggccucgguucu

SEQ ID NO: 3045330 - RNA, 19 nt, Artificial Sequence
  Description of Artificial Sequence: Synthetic oligonucleotide
gccccugggucagugcgga

SEQ ID NO: 3045331 - RNA, 19 nt, Artificial Sequence
  Description of Artificial Sequence: Synthetic oligonucleotide
cggaagucaucgcagccgu

SEQ ID NO: 3045332 - RNA, 19 nt, Artificial Sequence
  Description of Artificial Sequence: Synthetic oligonucleotide
gccggaagccacaggcugu

SEQ ID NO: 3045333 - RNA, 19 nt, Artificial Sequence
  Description of Artificial Sequence: Synthetic oligonucleotide
ggcgcuugaaagggaccgu

SEQ ID NO: 3045334 - RNA, 19 nt, Artificial Sequence
  Description of Artificial Sequence: Synthetic oligonucleotide
ggaagucaucgcagccgua

SEQ ID NO: 3045335 - RNA, 19 nt, Artificial Sequence
  Description of Artificial Sequence: Synthetic oligonucleotide
ccacagacaggcgcuugaa

SEQ ID NO: 3045336 - RNA, 19 nt, Artificial Sequence
  Description of Artificial Sequence: Synthetic oligonucleotide
cuucuccagccagugccuu

SEQ ID NO: 3045337 - RNA, 19 nt, Artificial Sequence
  Description of Artificial Sequence: Synthetic oligonucleotide
cccucuguccagacacagu

SEQ ID NO: 3045338 - RNA, 19 nt, Artificial Sequence
  Description of Artificial Sequence: Synthetic oligonucleotide
ccaguacggcaccuucgcu

SEQ ID NO: 3045339 - RNA, 19 nt, Artificial Sequence
  Description of Artificial Sequence: Synthetic oligonucleotide
gcgcuugaaagggaccguu

SEQ ID NO: 3045340 - RNA, 19 nt, Artificial Sequence
  Description of Artificial Sequence: Synthetic oligonucleotide
ccagugccuucugcagcuc

SEQ ID NO: 3045341 - RNA, 19 nt, Artificial Sequence
  Description of Artificial Sequence: Synthetic oligonucleotide
gggauucgcuccagccccu

SEQ ID NO: 3045342 - RNA, 19 nt, Artificial Sequence
  Description of Artificial Sequence: Synthetic oligonucleotide
cggaagccacaggcugugc

SEQ ID NO: 3045343 - RNA, 19 nt, Artificial Sequence
  Description of Artificial Sequence: Synthetic oligonucleotide
cggcaccuucgcucagcac

SEQ ID NO: 3045344 - RNA, 19 nt, Artificial Sequence
  Description of Artificial Sequence: Synthetic oligonucleotide
cccggccucgguucugccu

SEQ ID NO: 3045345 - RNA, 19 nt, Artificial Sequence
  Description of Artificial Sequence: Synthetic oligonucleotide
cgcuugaaagggaccguuu

SEQ ID NO: 3045346 - RNA, 19 nt, Artificial Sequence
  Description of Artificial Sequence: Synthetic oligonucleotide
ccccugggucagugcggaa

SEQ ID NO: 3045347 - RNA, 19 nt, Artificial Sequence
  Description of Artificial Sequence: Synthetic oligonucleotide
cccuagcgacagaccacuu

SEQ ID NO: 3045348 - RNA, 19 nt, Artificial Sequence
  Description of Artificial Sequence: Synthetic oligonucleotide
cuccagccccugggucagu

SEQ ID NO: 3045349 - RNA, 19 nt, Artificial Sequence
  Description of Artificial Sequence: Synthetic oligonucleotide
ggccucgguucugccucuu

SEQ ID NO: 3045350 - RNA, 19 nt, Artificial Sequence
  Description of Artificial Sequence: Synthetic oligonucleotide
cggccucgguucugccucu

SEQ ID NO: 3045351 - RNA, 19 nt, Artificial Sequence
  Description of Artificial Sequence: Synthetic oligonucleotide
aguguguucaaccaucucc

SEQ ID NO: 3045352 - RNA, 19 nt, Artificial Sequence
  Description of Artificial Sequence: Synthetic oligonucleotide
uuugcuagcuccuuguagg

SEQ ID NO: 3045353 - RNA, 19 nt, Artificial Sequence
  Description of Artificial Sequence: Synthetic oligonucleotide
caaagaacagccuugcccg

SEQ ID NO: 3045354 - RNA, 19 nt, Artificial Sequence
  Description of Artificial Sequence: Synthetic oligonucleotide
aauguacgaaaucuccacg

SEQ ID NO: 3045355 - RNA, 19 nt, Artificial Sequence
  Description of Artificial Sequence: Synthetic oligonucleotide
gauuaagccagcugacacg

SEQ ID NO: 3045356 - RNA, 19 nt, Artificial Sequence
  Description of Artificial Sequence: Synthetic oligonucleotide
aaucuccacgucugggucc

SEQ ID NO: 3045357 - RNA, 19 nt, Artificial Sequence
  Description of Artificial Sequence: Synthetic oligonucleotide
gauauuguguuucuuggca

SEQ ID NO: 3045358 - RNA, 19 nt, Artificial Sequence
  Description of Artificial Sequence: Synthetic oligonucleotide
cuuugcucgguucaggucc

SEQ ID NO: 3045359 - RNA, 19 nt, Artificial Sequence
  Description of Artificial Sequence: Synthetic oligonucleotide
uguuucuuggcaaacuccu

SEQ ID NO: 3045360 - RNA, 19 nt, Artificial Sequence
  Description of Artificial Sequence: Synthetic oligonucleotide
uggcaaacuccuuugcucg

SEQ ID NO: 3045361 - RNA, 19 nt, Artificial Sequence
  Description of Artificial Sequence: Synthetic oligonucleotide
ugugugaguguguucaacc

SEQ ID NO: 3045362 - RNA, 19 nt, Artificial Sequence
  Description of Artificial Sequence: Synthetic oligonucleotide
agucgugggcgauuaagcc

SEQ ID NO: 3045363 - RNA, 19 nt, Artificial Sequence
  Description of Artificial Sequence: Synthetic oligonucleotide
accucugcugcauucacac

SEQ ID NO: 3045364 - RNA, 19 nt, Artificial Sequence
  Description of Artificial Sequence: Synthetic oligonucleotide
aaagaacagccuugcccgc

SEQ ID NO: 3045365 - RNA, 19 nt, Artificial Sequence
  Description of Artificial Sequence: Synthetic oligonucleotide
uuugugcuggggaugcugg

SEQ ID NO: 3045366 - RNA, 19 nt, Artificial Sequence
  Description of Artificial Sequence: Synthetic oligonucleotide
uacgaaaucuccacgucug

SEQ ID NO: 3045367 - RNA, 19 nt, Artificial Sequence
  Description of Artificial Sequence: Synthetic oligonucleotide
  modified_base (15)..(15): a, c, u, g, unknown or other
ugcauucacacccangggu

SEQ ID NO: 3045368 - RNA, 19 nt, Artificial Sequence
  Description of Artificial Sequence: Synthetic oligonucleotide
ucaaccaucucccgaaccu

SEQ ID NO: 3045369 - RNA, 19 nt, Artificial Sequence
  Description of Artificial Sequence: Synthetic oligonucleotide
aagucgugggcgauuaagc

SEQ ID NO: 3045370 - RNA, 19 nt, Artificial Sequence
  Description of Artificial Sequence: Synthetic oligonucleotide
uucgcaaagaacagccuug

SEQ ID NO: 3045371 - RNA, 19 nt, Artificial Sequence
  Description of Artificial Sequence: Synthetic oligonucleotide
cuuguaggagccauaugcc

SEQ ID NO: 3045372 - RNA, 19 nt, Artificial Sequence
  Description of Artificial Sequence: Synthetic oligonucleotide
aagccagcugacacgaugc

SEQ ID NO: 3045373 - RNA, 19 nt, Artificial Sequence
  Description of Artificial Sequence: Synthetic oligonucleotide
ucgugggcgauuaagccag

SEQ ID NO: 3045374 - RNA, 19 nt, Artificial Sequence
  Description of Artificial Sequence: Synthetic oligonucleotide
aaagucgugggcgauuaag

SEQ ID NO: 3045375 - RNA, 19 nt, Artificial Sequence
  Description of Artificial Sequence: Synthetic oligonucleotide
  modified_base (17)..(17): a, c, u, g, unknown or other
gcugcauucacacccangg

SEQ ID NO: 3045376 - RNA, 19 nt, Artificial Sequence
  Description of Artificial Sequence: Synthetic oligonucleotide
uaagccagcugacacgaug

SEQ ID NO: 3045377 - RNA, 19 nt, Artificial Sequence
  Description of Artificial Sequence: Synthetic oligonucleotide
uguguuucuuggcaaacuc

SEQ ID NO: 3045378 - RNA, 19 nt, Artificial Sequence
  Description of Artificial Sequence: Synthetic oligonucleotide
uguucaaccaucucccgaa

SEQ ID NO: 3045379 - RNA, 19 nt, Artificial Sequence
  Description of Artificial Sequence: Synthetic oligonucleotide
caauguacgaaaucuccac

SEQ ID NO: 3045380 - RNA, 19 nt, Artificial Sequence
  Description of Artificial Sequence: Synthetic oligonucleotide
auggugguaaagucguggg

SEQ ID NO: 3045381 - RNA, 19 nt, Artificial Sequence
  Description of Artificial Sequence: Synthetic oligonucleotide
uaugccuuggggauauugu

SEQ ID NO: 3045382 - RNA, 19 nt, Artificial Sequence
  Description of Artificial Sequence: Synthetic oligonucleotide
gggauauuguguuucuugg

SEQ ID NO: 3045383 - RNA, 19 nt, Artificial Sequence
  Description of Artificial Sequence: Synthetic oligonucleotide
agugagcacagcauggugg

SEQ ID NO: 3045384 - RNA, 19 nt, Artificial Sequence
  Description of Artificial Sequence: Synthetic oligonucleotide
gcaaagaacagccuugccc

SEQ ID NO: 3045385 - RNA, 19 nt, Artificial Sequence
  Description of Artificial Sequence: Synthetic oligonucleotide
aagcaccgcugauuugugc

SEQ ID NO: 3045386 - RNA, 19 nt, Artificial Sequence
  Description of Artificial Sequence: Synthetic oligonucleotide
auguacgaaaucuccacgu

SEQ ID NO: 3045387 - RNA, 19 nt, Artificial Sequence
  Description of Artificial Sequence: Synthetic oligonucleotide
ggugguaaagucgugggcg

SEQ ID NO: 3045388 - RNA, 19 nt, Artificial Sequence
  Description of Artificial Sequence: Synthetic oligonucleotide
uuucgcaaagaacagccuu

SEQ ID NO: 3045389 - RNA, 19 nt, Artificial Sequence
  Description of Artificial Sequence: Synthetic oligonucleotide
uuggcaaacuccuuugcuc

SEQ ID NO: 3045390 - RNA, 19 nt, Artificial Sequence
  Description of Artificial Sequence: Synthetic oligonucleotide
cagcauggugguaaagucg

SEQ ID NO: 3045391 - RNA, 19 nt, Artificial Sequence
  Description of Artificial Sequence: Synthetic oligonucleotide
uuucuuggcaaacuccuuu

SEQ ID NO: 3045392 - RNA, 19 nt, Artificial Sequence
  Description of Artificial Sequence: Synthetic oligonucleotide
cuaccugguguuccgaggg

SEQ ID NO: 3045393 - RNA, 19 nt, Artificial Sequence
  Description of Artificial Sequence: Synthetic oligonucleotide
aacagccuugcccgcugcc

SEQ ID NO: 3045394 - RNA, 19 nt, Artificial Sequence
  Description of Artificial Sequence: Synthetic oligonucleotide
ucucccgaaccucugcugc

SEQ ID NO: 3045395 - RNA, 19 nt, Artificial Sequence
  Description of Artificial Sequence: Synthetic oligonucleotide
cuuugcuagcuccuuguag

SEQ ID NO: 3045396 - RNA, 19 nt, Artificial Sequence
  Description of Artificial Sequence: Synthetic oligonucleotide
cauggugguaaagucgugg

SEQ ID NO: 3045397 - RNA, 19 nt, Artificial Sequence
  Description of Artificial Sequence: Synthetic oligonucleotide
uguacgaaaucuccacguc

SEQ ID NO: 3045398 - RNA, 19 nt, Artificial Sequence
  Description of Artificial Sequence: Synthetic oligonucleotide
gacacgaugccccaucgca

SEQ ID NO: 3045399 - RNA, 19 nt, Artificial Sequence
  Description of Artificial Sequence: Synthetic oligonucleotide
acuaccugguguuccgagg

SEQ ID NO: 3045400 - RNA, 19 nt, Artificial Sequence
  Description of Artificial Sequence: Synthetic oligonucleotide
uguguucaaccaucucccg

SEQ ID NO: 3045401 - RNA, 19 nt, Artificial Sequence
  Description of Artificial Sequence: Synthetic oligonucleotide
ugauuugugcuggggaugc

SEQ ID NO: 3045402 - RNA, 19 nt, Artificial Sequence
  Description of Artificial Sequence: Synthetic oligonucleotide
uucaaccaucucccgaacc

SEQ ID NO: 3045403 - RNA, 19 nt, Artificial Sequence
  Description of Artificial Sequence: Synthetic oligonucleotide
uuccgagggaggcagugag

SEQ ID NO: 3045404 - RNA, 19 nt, Artificial Sequence
  Description of Artificial Sequence: Synthetic oligonucleotide
auuaagccagcugacacga

SEQ ID NO: 3045405 - RNA, 19 nt, Artificial Sequence
  Description of Artificial Sequence: Synthetic oligonucleotide
uauuguguuucuuggcaaa

SEQ ID NO: 3045406 - RNA, 19 nt, Artificial Sequence
  Description of Artificial Sequence: Synthetic oligonucleotide
agaagcaccgcugauuugu

SEQ ID NO: 3045407 - RNA, 19 nt, Artificial Sequence
  Description of Artificial Sequence: Synthetic oligonucleotide
ugaguguguucaaccaucu

SEQ ID NO: 3045408 - RNA, 19 nt, Artificial Sequence
  Description of Artificial Sequence: Synthetic oligonucleotide
uguaggagccauaugccuu

SEQ ID NO: 3045409 - RNA, 19 nt, Artificial Sequence
  Description of Artificial Sequence: Synthetic oligonucleotide
uuguaggagccauaugccu

SEQ ID NO: 3045410 - RNA, 19 nt, Artificial Sequence
  Description of Artificial Sequence: Synthetic oligonucleotide
agagaagcaccgcugauuu

SEQ ID NO: 3045411 - RNA, 19 nt, Artificial Sequence
  Description of Artificial Sequence: Synthetic oligonucleotide
acugcuacuaccugguguu

SEQ ID NO: 3045412 - RNA, 19 nt, Artificial Sequence
  Description of Artificial Sequence: Synthetic oligonucleotide
ggagccauaugccuugggg

SEQ ID NO: 3045413 - RNA, 19 nt, Artificial Sequence
  Description of Artificial Sequence: Synthetic oligonucleotide
agccacugcuacuaccugg

SEQ ID NO: 3045414 - RNA, 19 nt, Artificial Sequence
  Description of Artificial Sequence: Synthetic oligonucleotide
  modified_base (16)..(16): a, c, u, g, unknown or other
cugcauucacacccanggg

SEQ ID NO: 3045415 - RNA, 19 nt, Artificial Sequence
  Description of Artificial Sequence: Synthetic oligonucleotide
auauuguguuucuuggcaa

SEQ ID NO: 3045416 - RNA, 19 nt, Artificial Sequence
  Description of Artificial Sequence: Synthetic oligonucleotide
uuuucgcaaagaacagccu

SEQ ID NO: 3045417 - RNA, 19 nt, Artificial Sequence
  Description of Artificial Sequence: Synthetic oligonucleotide
guguguucaaccaucuccc

SEQ ID NO: 3045418 - RNA, 19 nt, Artificial Sequence
  Description of Artificial Sequence: Synthetic oligonucleotide
guucaggucccuugcagcc

SEQ ID NO: 3045419 - RNA, 19 nt, Artificial Sequence
  Description of Artificial Sequence: Synthetic oligonucleotide
agcaccgcugauuugugcu

SEQ ID NO: 3045420 - RNA, 19 nt, Artificial Sequence
  Description of Artificial Sequence: Synthetic oligonucleotide
cuagcuccuuguaggagcc

SEQ ID NO: 3045421 - RNA, 19 nt, Artificial Sequence
  Description of Artificial Sequence: Synthetic oligonucleotide
ugccuuggggauauugugu

SEQ ID NO: 3045422 - RNA, 19 nt, Artificial Sequence
  Description of Artificial Sequence: Synthetic oligonucleotide
gagccauaugccuugggga

SEQ ID NO: 3045423 - RNA, 19 nt, Artificial Sequence
  Description of Artificial Sequence: Synthetic oligonucleotide
ugccaggcagagaagcacc

SEQ ID NO: 3045424 - RNA, 19 nt, Artificial Sequence
  Description of Artificial Sequence: Synthetic oligonucleotide
guaggagccauaugccuug

SEQ ID NO: 3045425 - RNA, 19 nt, Artificial Sequence
  Description of Artificial Sequence: Synthetic oligonucleotide
augccuuggggauauugug

SEQ ID NO: 3045426 - RNA, 19 nt, Artificial Sequence
  Description of Artificial Sequence: Synthetic oligonucleotide
uggugguaaagucgugggc

SEQ ID NO: 3045427 - RNA, 19 nt, Artificial Sequence
  Description of Artificial Sequence: Synthetic oligonucleotide
ugggcgauuaagccagcug

SEQ ID NO: 3045428 - RNA, 19 nt, Artificial Sequence
  Description of Artificial Sequence: Synthetic oligonucleotide
acgaaaucuccacgucugg

SEQ ID NO: 3045429 - RNA, 19 nt, Artificial Sequence
  Description of Artificial Sequence: Synthetic oligonucleotide
gugugugugugugugagug

SEQ ID NO: 3045430 - RNA, 19 nt, Artificial Sequence
  Description of Artificial Sequence: Synthetic oligonucleotide
ggggauauuguguuucuug

SEQ ID NO: 3045431 - RNA, 19 nt, Artificial Sequence
  Description of Artificial Sequence: Synthetic oligonucleotide
  modified_base (18)..(18): a, c, u, g, unknown or other
ugcugcauucacacccang

SEQ ID NO: 3045432 - RNA, 19 nt, Artificial Sequence
  Description of Artificial Sequence: Synthetic oligonucleotide
guaugugugugugugugug

SEQ ID NO: 3045433 - RNA, 19 nt, Artificial Sequence
  Description of Artificial Sequence: Synthetic oligonucleotide
uggguccuuugcuagcucc

SEQ ID NO: 3045434 - RNA, 19 nt, Artificial Sequence
  Description of Artificial Sequence: Synthetic oligonucleotide
uccuuugcuagcuccuugu

SEQ ID NO: 3045435 - RNA, 19 nt, Artificial Sequence
  Description of Artificial Sequence: Synthetic oligonucleotide
uacuaccugguguuccgag

SEQ ID NO: 3045436 - RNA, 19 nt, Artificial Sequence
  Description of Artificial Sequence: Synthetic oligonucleotide
uuugcucgguucagguccc

SEQ ID NO: 3045437 - RNA, 19 nt, Artificial Sequence
  Description of Artificial Sequence: Synthetic oligonucleotide
cuuggggauauuguguuuc

SEQ ID NO: 3045438 - RNA, 19 nt, Artificial Sequence
  Description of Artificial Sequence: Synthetic oligonucleotide
uggcaauguacgaaaucuc

SEQ ID NO: 3045439 - RNA, 19 nt, Artificial Sequence
  Description of Artificial Sequence: Synthetic oligonucleotide
uguaugugugugugugugu

SEQ ID NO: 3045440 - RNA, 19 nt, Artificial Sequence
  Description of Artificial Sequence: Synthetic oligonucleotide
gaaaucuccacgucugggu

SEQ ID NO: 3045441 - RNA, 19 nt, Artificial Sequence
  Description of Artificial Sequence: Synthetic oligonucleotide
uguguaugugugugugugu

SEQ ID NO: 3045442 - RNA, 19 nt, Artificial Sequence
  Description of Artificial Sequence: Synthetic oligonucleotide
agccauaugccuuggggau

SEQ ID NO: 3045443 - RNA, 19 nt, Artificial Sequence
  Description of Artificial Sequence: Synthetic oligonucleotide
uccuuugcucgguucaggu

SEQ ID NO: 3045444 - RNA, 19 nt, Artificial Sequence
  Description of Artificial Sequence: Synthetic oligonucleotide
ggcaauguacgaaaucucc

SEQ ID NO: 3045445 - RNA, 19 nt, Artificial Sequence
  Description of Artificial Sequence: Synthetic oligonucleotide
agcauggugguaaagucgu

SEQ ID NO: 3045446 - RNA, 19 nt, Artificial Sequence
  Description of Artificial Sequence: Synthetic oligonucleotide
gaugccccaucgcagcgcc

SEQ ID NO: 3045447 - RNA, 19 nt, Artificial Sequence
  Description of Artificial Sequence: Synthetic oligonucleotide
ggauauuguguuucuuggc

SEQ ID NO: 3045448 - RNA, 19 nt, Artificial Sequence
  Description of Artificial Sequence: Synthetic oligonucleotide
gcuagcuccuuguaggagc

SEQ ID NO: 3045449 - RNA, 19 nt, Artificial Sequence
  Description of Artificial Sequence: Synthetic oligonucleotide
agccagcugacacgaugcc

SEQ ID NO: 3045450 - RNA, 19 nt, Artificial Sequence
  Description of Artificial Sequence: Synthetic oligonucleotide
ccagcugacacgaugcccc

SEQ ID NO: 3045451 - RNA, 19 nt, Artificial Sequence
  Description of Artificial Sequence: Synthetic oligonucleotide
guguaugugugugugugug

SEQ ID NO: 3045452 - RNA, 19 nt, Artificial Sequence
  Description of Artificial Sequence: Synthetic oligonucleotide
cacgaugccccaucgcagc

SEQ ID NO: 3045453 - RNA, 19 nt, Artificial Sequence
  Description of Artificial Sequence: Synthetic oligonucleotide
ugcuacuaccugguguucc

SEQ ID NO: 3045454 - RNA, 19 nt, Artificial Sequence
  Description of Artificial Sequence: Synthetic oligonucleotide
ucgcaaagaacagccuugc

SEQ ID NO: 3045455 - RNA, 19 nt, Artificial Sequence
  Description of Artificial Sequence: Synthetic oligonucleotide
guguuucuuggcaaacucc

SEQ ID NO: 3045456 - RNA, 19 nt, Artificial Sequence
  Description of Artificial Sequence: Synthetic oligonucleotide
uaugugugugugugugugu

SEQ ID NO: 3045457 - RNA, 19 nt, Artificial Sequence
  Description of Artificial Sequence: Synthetic oligonucleotide
ucaggucccuugcagccac

SEQ ID NO: 3045458 - RNA, 19 nt, Artificial Sequence
  Description of Artificial Sequence: Synthetic oligonucleotide
auaugccuuggggauauug

SEQ ID NO: 3045459 - RNA, 19 nt, Artificial Sequence
  Description of Artificial Sequence: Synthetic oligonucleotide
cucgguucaggucccuugc

SEQ ID NO: 3045460 - RNA, 19 nt, Artificial Sequence
  Description of Artificial Sequence: Synthetic oligonucleotide
augugugugugugugugug

SEQ ID NO: 3045461 - RNA, 19 nt, Artificial Sequence
  Description of Artificial Sequence: Synthetic oligonucleotide
cugacacgaugccccaucg

SEQ ID NO: 3045462 - RNA, 19 nt, Artificial Sequence
  Description of Artificial Sequence: Synthetic oligonucleotide
gugugugugugugugugag

SEQ ID NO: 3045463 - RNA, 19 nt, Artificial Sequence
  Description of Artificial Sequence: Synthetic oligonucleotide
uguguguguguguguguga

SEQ ID NO: 3045464 - RNA, 19 nt, Artificial Sequence
  Description of Artificial Sequence: Synthetic oligonucleotide
uugugcuggggaugcuggg

SEQ ID NO: 3045465 - RNA, 19 nt, Artificial Sequence
  Description of Artificial Sequence: Synthetic oligonucleotide
uuggggauauuguguuucu

SEQ ID NO: 3045466 - RNA, 19 nt, Artificial Sequence
  Description of Artificial Sequence: Synthetic oligonucleotide
gugugugugugugagugug

SEQ ID NO: 3045467 - RNA, 19 nt, Artificial Sequence
  Description of Artificial Sequence: Synthetic oligonucleotide
ugacacgaugccccaucgc

SEQ ID NO: 3045468 - RNA, 19 nt, Artificial Sequence
  Description of Artificial Sequence: Synthetic oligonucleotide
auuugugcuggggaugcug

SEQ ID NO: 3045469 - RNA, 19 nt, Artificial Sequence
  Description of Artificial Sequence: Synthetic oligonucleotide
guggcaauguacgaaaucu

SEQ ID NO: 3045470 - RNA, 19 nt, Artificial Sequence
  Description of Artificial Sequence: Synthetic oligonucleotide
gcuacuaccugguguuccg

SEQ ID NO: 3045471 - RNA, 19 nt, Artificial Sequence
  Description of Artificial Sequence: Synthetic oligonucleotide
ugugugugugugagugugu

SEQ ID NO: 3045472 - RNA, 19 nt, Artificial Sequence
  Description of Artificial Sequence: Synthetic oligonucleotide
gugugaguguguucaacca

SEQ ID NO: 3045473 - RNA, 19 nt, Artificial Sequence
  Description of Artificial Sequence: Synthetic oligonucleotide
agaacagccuugcccgcug

SEQ ID NO: 3045474 - RNA, 19 nt, Artificial Sequence
  Description of Artificial Sequence: Synthetic oligonucleotide
gguucaggucccuugcagc

SEQ ID NO: 3045475 - RNA, 19 nt, Artificial Sequence
  Description of Artificial Sequence: Synthetic oligonucleotide
gucgugggcgauuaagcca

SEQ ID NO: 3045476 - RNA, 19 nt, Artificial Sequence
  Description of Artificial Sequence: Synthetic oligonucleotide
ucuggguccuuugcuagcu

SEQ ID NO: 3045477 - RNA, 19 nt, Artificial Sequence
  Description of Artificial Sequence: Synthetic oligonucleotide
gagggaggcagugagcaca

SEQ ID NO: 3045478 - RNA, 19 nt, Artificial Sequence
  Description of Artificial Sequence: Synthetic oligonucleotide
ugugugugugugugagugu

SEQ ID NO: 3045479 - RNA, 19 nt, Artificial Sequence
  Description of Artificial Sequence: Synthetic oligonucleotide
aagaacagccuugcccgcu

SEQ ID NO: 3045480 - RNA, 19 nt, Artificial Sequence
  Description of Artificial Sequence: Synthetic oligonucleotide
gggcgauuaagccagcuga

SEQ ID NO: 3045481 - RNA, 19 nt, Artificial Sequence
  Description of Artificial Sequence: Synthetic oligonucleotide
acgaugccccaucgcagcg

SEQ ID NO: 3045482 - RNA, 19 nt, Artificial Sequence
  Description of Artificial Sequence: Synthetic oligonucleotide
uguuccgagggaggcagug

SEQ ID NO: 3045483 - RNA, 19 nt, Artificial Sequence
  Description of Artificial Sequence: Synthetic oligonucleotide
gugaguguguucaaccauc

SEQ ID NO: 3045484 - RNA, 19 nt, Artificial Sequence
  Description of Artificial Sequence: Synthetic oligonucleotide
aaccaucucccgaaccucu

SEQ ID NO: 3045485 - RNA, 19 nt, Artificial Sequence
  Description of Artificial Sequence: Synthetic oligonucleotide
cuugcccgcugccaggcag

SEQ ID NO: 3045486 - RNA, 19 nt, Artificial Sequence
  Description of Artificial Sequence: Synthetic oligonucleotide
ugcuagcuccuuguaggag

SEQ ID NO: 3045487 - RNA, 19 nt, Artificial Sequence
  Description of Artificial Sequence: Synthetic oligonucleotide
cugauuugugcuggggaug

SEQ ID NO: 3045488 - RNA, 19 nt, Artificial Sequence
  Description of Artificial Sequence: Synthetic oligonucleotide
ugugugugugaguguguuc

SEQ ID NO: 3045489 - RNA, 19 nt, Artificial Sequence
  Description of Artificial Sequence: Synthetic oligonucleotide
ugugugugugugugugagu

SEQ ID NO: 3045490 - RNA, 19 nt, Artificial Sequence
  Description of Artificial Sequence: Synthetic oligonucleotide
guacgaaaucuccacgucu

SEQ ID NO: 3045491 - RNA, 19 nt, Artificial Sequence
  Description of Artificial Sequence: Synthetic oligonucleotide
aucucccgaaccucugcug

SEQ ID NO: 3045492 - RNA, 19 nt, Artificial Sequence
  Description of Artificial Sequence: Synthetic oligonucleotide
guguucaaccaucucccga

SEQ ID NO: 3045493 - RNA, 19 nt, Artificial Sequence
  Description of Artificial Sequence: Synthetic oligonucleotide
uccgagggaggcagugagc

SEQ ID NO: 3045494 - RNA, 19 nt, Artificial Sequence
  Description of Artificial Sequence: Synthetic oligonucleotide
cugguguuccgagggaggc

SEQ ID NO: 3045495 - RNA, 19 nt, Artificial Sequence
  Description of Artificial Sequence: Synthetic oligonucleotide
ggcagugagcacagcaugg

SEQ ID NO: 3045496 - RNA, 19 nt, Artificial Sequence
  Description of Artificial Sequence: Synthetic oligonucleotide
gguguuccgagggaggcag

SEQ ID NO: 3045497 - RNA, 19 nt, Artificial Sequence
  Description of Artificial Sequence: Synthetic oligonucleotide
gugguaaagucgugggcga

SEQ ID NO: 3045498 - RNA, 19 nt, Artificial Sequence
  Description of Artificial Sequence: Synthetic oligonucleotide
accgcugauuugugcuggg

SEQ ID NO: 3045499 - RNA, 19 nt, Artificial Sequence
  Description of Artificial Sequence: Synthetic oligonucleotide
gagcacagcauggugguaa

SEQ ID NO: 3045500 - RNA, 19 nt, Artificial Sequence
  Description of Artificial Sequence: Synthetic oligonucleotide
ugugugugaguguguucaa

SEQ ID NO: 3045501 - RNA, 19 nt, Artificial Sequence
  Description of Artificial Sequence: Synthetic oligonucleotide
gagaagcaccgcugauuug

SEQ ID NO: 3045502 - RNA, 19 nt, Artificial Sequence
  Description of Artificial Sequence: Synthetic oligonucleotide
ggaggcagugagcacagca

SEQ ID NO: 3045503 - RNA, 19 nt, Artificial Sequence
  Description of Artificial Sequence: Synthetic oligonucleotide
gugcuggggaugcugggug

SEQ ID NO: 3045504 - RNA, 19 nt, Artificial Sequence
  Description of Artificial Sequence: Synthetic oligonucleotide
cagugagcacagcauggug

SEQ ID NO: 3045505 - RNA, 19 nt, Artificial Sequence
  Description of Artificial Sequence: Synthetic oligonucleotide
ggcaaacuccuuugcucgg

SEQ ID NO: 3045506 - RNA, 19 nt, Artificial Sequence
  Description of Artificial Sequence: Synthetic oligonucleotide
accugguguuccgagggag

SEQ ID NO: 3045507 - RNA, 19 nt, Artificial Sequence
  Description of Artificial Sequence: Synthetic oligonucleotide
uaccugguguuccgaggga

SEQ ID NO: 3045508 - RNA, 19 nt, Artificial Sequence
  Description of Artificial Sequence: Synthetic oligonucleotide
acacgaugccccaucgcag

SEQ ID NO: 3045509 - RNA, 19 nt, Artificial Sequence
  Description of Artificial Sequence: Synthetic oligonucleotide
gguggcaauguacgaaauc

SEQ ID NO: 3045510 - RNA, 19 nt, Artificial Sequence
  Description of Artificial Sequence: Synthetic oligonucleotide
cuugcagccacugcuacua

SEQ ID NO: 3045511 - RNA, 19 nt, Artificial Sequence
  Description of Artificial Sequence: Synthetic oligonucleotide
gaagcaccgcugauuugug

SEQ ID NO: 3045512 - RNA, 19 nt, Artificial Sequence
  Description of Artificial Sequence: Synthetic oligonucleotide
cgauuaagccagcugacac

SEQ ID NO: 3045513 - RNA, 19 nt, Artificial Sequence
  Description of Artificial Sequence: Synthetic oligonucleotide
uucaggucccuugcagcca

SEQ ID NO: 3045514 - RNA, 19 nt, Artificial Sequence
  Description of Artificial Sequence: Synthetic oligonucleotide
ucccuugcagccacugcua

SEQ ID NO: 3045515 - RNA, 19 nt, Artificial Sequence
  Description of Artificial Sequence: Synthetic oligonucleotide
caccgcugauuugugcugg

SEQ ID NO: 3045516 - RNA, 19 nt, Artificial Sequence
  Description of Artificial Sequence: Synthetic oligonucleotide
gaguguguucaaccaucuc

SEQ ID NO: 3045517 - RNA, 19 nt, Artificial Sequence
  Description of Artificial Sequence: Synthetic oligonucleotide
acuccuuugcucgguucag

SEQ ID NO: 3045518 - RNA, 19 nt, Artificial Sequence
  Description of Artificial Sequence: Synthetic oligonucleotide
gucuggguccuuugcuagc

SEQ ID NO: 3045519 - RNA, 19 nt, Artificial Sequence
  Description of Artificial Sequence: Synthetic oligonucleotide
uaaagucgugggcgauuaa

SEQ ID NO: 3045520 - RNA, 19 nt, Artificial Sequence
  Description of Artificial Sequence: Synthetic oligonucleotide
acgucuggguccuuugcua

SEQ ID NO: 3045521 - RNA, 19 nt, Artificial Sequence
  Description of Artificial Sequence: Synthetic oligonucleotide
uaggagccauaugccuugg

SEQ ID NO: 3045522 - RNA, 19 nt, Artificial Sequence
  Description of Artificial Sequence: Synthetic oligonucleotide
guucaaccaucucccgaac

SEQ ID NO: 3045523 - RNA, 19 nt, Artificial Sequence
  Description of Artificial Sequence: Synthetic oligonucleotide
gaacagccuugcccgcugc

SEQ ID NO: 3045524 - RNA, 19 nt, Artificial Sequence
  Description of Artificial Sequence: Synthetic oligonucleotide
cuccuuugcucgguucagg

SEQ ID NO: 3045525 - RNA, 19 nt, Artificial Sequence
  Description of Artificial Sequence: Synthetic oligonucleotide
gcaauguacgaaaucucca

SEQ ID NO: 3045526 - RNA, 19 nt, Artificial Sequence
  Description of Artificial Sequence: Synthetic oligonucleotide
uugcccgcugccaggcaga

SEQ ID NO: 3045527 - RNA, 19 nt, Artificial Sequence
  Description of Artificial Sequence: Synthetic oligonucleotide
guaaagucgugggcgauua

SEQ ID NO: 3045528 - RNA, 19 nt, Artificial Sequence
  Description of Artificial Sequence: Synthetic oligonucleotide
agcacagcauggugguaaa

SEQ ID NO: 3045529 - RNA, 19 nt, Artificial Sequence
  Description of Artificial Sequence: Synthetic oligonucleotide
gucccuugcagccacugcu

SEQ ID NO: 3045530 - RNA, 19 nt, Artificial Sequence
  Description of Artificial Sequence: Synthetic oligonucleotide
gugagcacagcaugguggu

SEQ ID NO: 3045531 - RNA, 19 nt, Artificial Sequence
  Description of Artificial Sequence: Synthetic oligonucleotide
ccugguguuccgagggagg

SEQ ID NO: 3045532 - RNA, 19 nt, Artificial Sequence
  Description of Artificial Sequence: Synthetic oligonucleotide
uuaagccagcugacacgau

SEQ ID NO: 3045533 - RNA, 19 nt, Artificial Sequence
  Description of Artificial Sequence: Synthetic oligonucleotide
aucuccacgucuggguccu

SEQ ID NO: 3045534 - RNA, 19 nt, Artificial Sequence
  Description of Artificial Sequence: Synthetic oligonucleotide
caaccaucucccgaaccuc

SEQ ID NO: 3045535 - RNA, 19 nt, Artificial Sequence
  Description of Artificial Sequence: Synthetic oligonucleotide
ggcagagaagcaccgcuga

SEQ ID NO: 3045536 - RNA, 19 nt, Artificial Sequence
  Description of Artificial Sequence: Synthetic oligonucleotide
aggcagagaagcaccgcug

SEQ ID NO: 3045537 - RNA, 19 nt, Artificial Sequence
  Description of Artificial Sequence: Synthetic oligonucleotide
  modified_base (12)..(12): a, c, u, g, unknown or other
auucacacccanggguuuu

SEQ ID NO: 3045538 - RNA, 19 nt, Artificial Sequence
  Description of Artificial Sequence: Synthetic oligonucleotide
gugugugaguguguucaac

SEQ ID NO: 3045539 - RNA, 19 nt, Artificial Sequence
  Description of Artificial Sequence: Synthetic oligonucleotide
uugcagccacugcuacuac

SEQ ID NO: 3045540 - RNA, 19 nt, Artificial Sequence
  Description of Artificial Sequence: Synthetic oligonucleotide
ugguguuccgagggaggca

SEQ ID NO: 3045541 - RNA, 19 nt, Artificial Sequence
  Description of Artificial Sequence: Synthetic oligonucleotide
acagccuugcccgcugcca

SEQ ID NO: 3045542 - RNA, 19 nt, Artificial Sequence
  Description of Artificial Sequence: Synthetic oligonucleotide
gcucgguucaggucccuug

SEQ ID NO: 3045543 - RNA, 19 nt, Artificial Sequence
  Description of Artificial Sequence: Synthetic oligonucleotide
gcugacacgaugccccauc

SEQ ID NO: 3045544 - RNA, 19 nt, Artificial Sequence
  Description of Artificial Sequence: Synthetic oligonucleotide
ugccccaucgcagcgccau

SEQ ID NO: 3045545 - RNA, 19 nt, Artificial Sequence
  Description of Artificial Sequence: Synthetic oligonucleotide
ugguaaagucgugggcgau

SEQ ID NO: 3045546 - RNA, 19 nt, Artificial Sequence
  Description of Artificial Sequence: Synthetic oligonucleotide
ggcgauuaagccagcugac

SEQ ID NO: 3045547 - RNA, 19 nt, Artificial Sequence
  Description of Artificial Sequence: Synthetic oligonucleotide
uggggaugcuggguggcaa

SEQ ID NO: 3045548 - RNA, 19 nt, Artificial Sequence
  Description of Artificial Sequence: Synthetic oligonucleotide
cgaaaucuccacgucuggg

SEQ ID NO: 3045549 - RNA, 19 nt, Artificial Sequence
  Description of Artificial Sequence: Synthetic oligonucleotide
cuggguggcaauguacgaa

SEQ ID NO: 3045550 - RNA, 19 nt, Artificial Sequence
  Description of Artificial Sequence: Synthetic oligonucleotide
uggggauauuguguuucuu

SEQ ID NO: 3045551 - RNA, 19 nt, Artificial Sequence
  Description of Artificial Sequence: Synthetic oligonucleotide
cagccacugcuacuaccug

SEQ ID NO: 3045552 - RNA, 19 nt, Artificial Sequence
  Description of Artificial Sequence: Synthetic oligonucleotide
gaggcagugagcacagcau

SEQ ID NO: 3045553 - RNA, 19 nt, Artificial Sequence
  Description of Artificial Sequence: Synthetic oligonucleotide
gccaggcagagaagcaccg

SEQ ID NO: 3045554 - RNA, 19 nt, Artificial Sequence
  Description of Artificial Sequence: Synthetic oligonucleotide
cccgcugccaggcagagaa

SEQ ID NO: 3045555 - RNA, 19 nt, Artificial Sequence
  Description of Artificial Sequence: Synthetic oligonucleotide
gcaccgcugauuugugcug

SEQ ID NO: 3045556 - RNA, 19 nt, Artificial Sequence
  Description of Artificial Sequence: Synthetic oligonucleotide
accaucucccgaaccucug

SEQ ID NO: 3045557 - RNA, 19 nt, Artificial Sequence
  Description of Artificial Sequence: Synthetic oligonucleotide
aggucccuugcagccacug

SEQ ID NO: 3045558 - RNA, 19 nt, Artificial Sequence
  Description of Artificial Sequence: Synthetic oligonucleotide
gcugauuugugcuggggau

SEQ ID NO: 3045559 - RNA, 19 nt, Artificial Sequence
  Description of Artificial Sequence: Synthetic oligonucleotide
ggucccuugcagccacugc

SEQ ID NO: 3045560 - RNA, 19 nt, Artificial Sequence
  Description of Artificial Sequence: Synthetic oligonucleotide
ucccgaaccucugcugcau

SEQ ID NO: 3045561 - RNA, 19 nt, Artificial Sequence
  Description of Artificial Sequence: Synthetic oligonucleotide
cucccgaaccucugcugca

SEQ ID NO: 3045562 - RNA, 19 nt, Artificial Sequence
  Description of Artificial Sequence: Synthetic oligonucleotide
cgucuggguccuuugcuag

SEQ ID NO: 3045563 - RNA, 19 nt, Artificial Sequence
  Description of Artificial Sequence: Synthetic oligonucleotide
gccagcugacacgaugccc

SEQ ID NO: 3045564 - RNA, 19 nt, Artificial Sequence
  Description of Artificial Sequence: Synthetic oligonucleotide
ccuuugcucgguucagguc

SEQ ID NO: 3045565 - RNA, 19 nt, Artificial Sequence
  Description of Artificial Sequence: Synthetic oligonucleotide
cuggguccuuugcuagcuc

SEQ ID NO: 3045566 - RNA, 19 nt, Artificial Sequence
  Description of Artificial Sequence: Synthetic oligonucleotide
gcuggguggcaauguacga

SEQ ID NO: 3045567 - RNA, 19 nt, Artificial Sequence
  Description of Artificial Sequence: Synthetic oligonucleotide
gcgauuaagccagcugaca

SEQ ID NO: 3045568 - RNA, 19 nt, Artificial Sequence
  Description of Artificial Sequence: Synthetic oligonucleotide
ugagcacagcaugguggua

SEQ ID NO: 3045569 - RNA, 19 nt, Artificial Sequence
  Description of Artificial Sequence: Synthetic oligonucleotide
  modified_base (14)..(14): a, c, u, g, unknown or other
gcauucacacccanggguu

SEQ ID NO: 3045570 - RNA, 19 nt, Artificial Sequence
  Description of Artificial Sequence: Synthetic oligonucleotide
caucucccgaaccucugcu

SEQ ID NO: 3045571 - RNA, 19 nt, Artificial Sequence
  Description of Artificial Sequence: Synthetic oligonucleotide
cacgucuggguccuuugcu

SEQ ID NO: 3045572 - RNA, 19 nt, Artificial Sequence
  Description of Artificial Sequence: Synthetic oligonucleotide
ccacgucuggguccuuugc

SEQ ID NO: 3045573 - RNA, 19 nt, Artificial Sequence
  Description of Artificial Sequence: Synthetic oligonucleotide
uagcuccuuguaggagcca

SEQ ID NO: 3045574 - RNA, 19 nt, Artificial Sequence
  Description of Artificial Sequence: Synthetic oligonucleotide
  modified_base (13)..(13): a, c, u, g, unknown or other
cauucacacccanggguuu

SEQ ID NO: 3045575 - RNA, 19 nt, Artificial Sequence
  Description of Artificial Sequence: Synthetic oligonucleotide
cuacuaccugguguuccga

SEQ ID NO: 3045576 - RNA, 19 nt, Artificial Sequence
  Description of Artificial Sequence: Synthetic oligonucleotide
cgguucaggucccuugcag

SEQ ID NO: 3045577 - RNA, 19 nt, Artificial Sequence
  Description of Artificial Sequence: Synthetic oligonucleotide
gcagccacugcuacuaccu

SEQ ID NO: 3045578 - RNA, 19 nt, Artificial Sequence
  Description of Artificial Sequence: Synthetic oligonucleotide
cugcuacuaccugguguuc

SEQ ID NO: 3045579 - RNA, 19 nt, Artificial Sequence
  Description of Artificial Sequence: Synthetic oligonucleotide
ccgagggaggcagugagca

SEQ ID NO: 3045580 - RNA, 19 nt, Artificial Sequence
  Description of Artificial Sequence: Synthetic oligonucleotide
cagcugacacgaugcccca

SEQ ID NO: 3045581 - RNA, 19 nt, Artificial Sequence
  Description of Artificial Sequence: Synthetic oligonucleotide
cuccuuguaggagccauau

SEQ ID NO: 3045582 - RNA, 19 nt, Artificial Sequence
  Description of Artificial Sequence: Synthetic oligonucleotide
cgcaaagaacagccuugcc

SEQ ID NO: 3045583 - RNA, 19 nt, Artificial Sequence
  Description of Artificial Sequence: Synthetic oligonucleotide
cccuugcagccacugcuac

SEQ ID NO: 3045584 - RNA, 19 nt, Artificial Sequence
  Description of Artificial Sequence: Synthetic oligonucleotide
cagagaagcaccgcugauu

SEQ ID NO: 3045585 - RNA, 19 nt, Artificial Sequence
  Description of Artificial Sequence: Synthetic oligonucleotide
gcugccaggcagagaagca

SEQ ID NO: 3045586 - RNA, 19 nt, Artificial Sequence
  Description of Artificial Sequence: Synthetic oligonucleotide
gugugugugugaguguguu

SEQ ID NO: 3045587 - RNA, 19 nt, Artificial Sequence
  Description of Artificial Sequence: Synthetic oligonucleotide
ccaggcagagaagcaccgc

SEQ ID NO: 3045588 - RNA, 19 nt, Artificial Sequence
  Description of Artificial Sequence: Synthetic oligonucleotide
gccuuggggauauuguguu

SEQ ID NO: 3045589 - RNA, 19 nt, Artificial Sequence
  Description of Artificial Sequence: Synthetic oligonucleotide
cgcugauuugugcugggga

SEQ ID NO: 3045590 - RNA, 19 nt, Artificial Sequence
  Description of Artificial Sequence: Synthetic oligonucleotide
guuucuuggcaaacuccuu

SEQ ID NO: 3045591 - RNA, 19 nt, Artificial Sequence
  Description of Artificial Sequence: Synthetic oligonucleotide
gauuugugcuggggaugcu

SEQ ID NO: 3045592 - RNA, 19 nt, Artificial Sequence
  Description of Artificial Sequence: Synthetic oligonucleotide
agcugacacgaugccccau

SEQ ID NO: 3045593 - RNA, 19 nt, Artificial Sequence
  Description of Artificial Sequence: Synthetic oligonucleotide
gcauggugguaaagucgug

SEQ ID NO: 3045594 - RNA, 19 nt, Artificial Sequence
  Description of Artificial Sequence: Synthetic oligonucleotide
ccgcugauuugugcugggg

SEQ ID NO: 3045595 - RNA, 19 nt, Artificial Sequence
  Description of Artificial Sequence: Synthetic oligonucleotide
uugcucgguucaggucccu

SEQ ID NO: 3045596 - RNA, 19 nt, Artificial Sequence
  Description of Artificial Sequence: Synthetic oligonucleotide
gccacugcuacuaccuggu

SEQ ID NO: 3045597 - RNA, 19 nt, Artificial Sequence
  Description of Artificial Sequence: Synthetic oligonucleotide
gccuugcccgcugccaggc

SEQ ID NO: 3045598 - RNA, 19 nt, Artificial Sequence
  Description of Artificial Sequence: Synthetic oligonucleotide
gguaaagucgugggcgauu

SEQ ID NO: 3045599 - RNA, 19 nt, Artificial Sequence
  Description of Artificial Sequence: Synthetic oligonucleotide
gcaaacuccuuugcucggu

SEQ ID NO: 3045600 - RNA, 19 nt, Artificial Sequence
  Description of Artificial Sequence: Synthetic oligonucleotide
gugggcgauuaagccagcu

SEQ ID NO: 3045601 - RNA, 19 nt, Artificial Sequence
  Description of Artificial Sequence: Synthetic oligonucleotide
gcagagaagcaccgcugau

SEQ ID NO: 3045602 - RNA, 19 nt, Artificial Sequence
  Description of Artificial Sequence: Synthetic oligonucleotide
gccauaugccuuggggaua

SEQ ID NO: 3045603 - RNA, 19 nt, Artificial Sequence
  Description of Artificial Sequence: Synthetic oligonucleotide
ccuuugcuagcuccuugua

SEQ ID NO: 3045604 - RNA, 19 nt, Artificial Sequence
  Description of Artificial Sequence: Synthetic oligonucleotide
cgaugccccaucgcagcgc

SEQ ID NO: 3045605 - RNA, 19 nt, Artificial Sequence
  Description of Artificial Sequence: Synthetic oligonucleotide
ggggaugcuggguggcaau

SEQ ID NO: 3045606 - RNA, 19 nt, Artificial Sequence
  Description of Artificial Sequence: Synthetic oligonucleotide
ccauaugccuuggggauau

SEQ ID NO: 3045607 - RNA, 19 nt, Artificial Sequence
  Description of Artificial Sequence: Synthetic oligonucleotide
ccgcugccaggcagagaag

SEQ ID NO: 3045608 - RNA, 19 nt, Artificial Sequence
  Description of Artificial Sequence: Synthetic oligonucleotide
ccuugcagccacugcuacu

SEQ ID NO: 3045609 - RNA, 19 nt, Artificial Sequence
  Description of Artificial Sequence: Synthetic oligonucleotide
cgugggcgauuaagccagc

SEQ ID NO: 3045610 - RNA, 19 nt, Artificial Sequence
  Description of Artificial Sequence: Synthetic oligonucleotide
gcuccuuguaggagccaua

SEQ ID NO: 3045611 - RNA, 19 nt, Artificial Sequence
  Description of Artificial Sequence: Synthetic oligonucleotide
gguccuuugcuagcuccuu

SEQ ID NO: 3045612 - RNA, 19 nt, Artificial Sequence
  Description of Artificial Sequence: Synthetic oligonucleotide
ggguggcaauguacgaaau

SEQ ID NO: 3045613 - RNA, 19 nt, Artificial Sequence
  Description of Artificial Sequence: Synthetic oligonucleotide
ucuccacgucuggguccuu

SEQ ID NO: 3045614 - RNA, 19 nt, Artificial Sequence
  Description of Artificial Sequence: Synthetic oligonucleotide
cuccacgucuggguccuuu

SEQ ID NO: 3045615 - RNA, 19 nt, Artificial Sequence
  Description of Artificial Sequence: Synthetic oligonucleotide
guguuccgagggaggcagu

SEQ ID NO: 3045616 - RNA, 19 nt, Artificial Sequence
  Description of Artificial Sequence: Synthetic oligonucleotide
ccuuggggauauuguguuu

SEQ ID NO: 3045617 - RNA, 19 nt, Artificial Sequence
  Description of Artificial Sequence: Synthetic oligonucleotide
caggucccuugcagccacu

SEQ ID NO: 3045618 - RNA, 19 nt, Artificial Sequence
  Description of Artificial Sequence: Synthetic oligonucleotide
ccuugcccgcugccaggca

SEQ ID NO: 3045619 - RNA, 19 nt, Artificial Sequence
  Description of Artificial Sequence: Synthetic oligonucleotide
cauaugccuuggggauauu

SEQ ID NO: 3045620 - RNA, 19 nt, Artificial Sequence
  Description of Artificial Sequence: Synthetic oligonucleotide
cccgaaccucugcugcauu

SEQ ID NO: 3045621 - RNA, 19 nt, Artificial Sequence
  Description of Artificial Sequence: Synthetic oligonucleotide
aaaagaaacauuuuaauac

SEQ ID NO: 3045622 - RNA, 19 nt, Artificial Sequence
  Description of Artificial Sequence: Synthetic oligonucleotide
aauaaguuaaauuggauac

SEQ ID NO: 3045623 - RNA, 19 nt, Artificial Sequence
  Description of Artificial Sequence: Synthetic oligonucleotide
aaaauuauuuucuucaaac

SEQ ID NO: 3045624 - RNA, 19 nt, Artificial Sequence
  Description of Artificial Sequence: Synthetic oligonucleotide
gagaaaauaaguuaaauug

SEQ ID NO: 3045625 - RNA, 19 nt, Artificial Sequence
  Description of Artificial Sequence: Synthetic oligonucleotide
uacagaaucaggcagaagg

SEQ ID NO: 3045626 - RNA, 19 nt, Artificial Sequence
  Description of Artificial Sequence: Synthetic oligonucleotide
uuaaauuggauacaaauac

SEQ ID NO: 3045627 - RNA, 19 nt, Artificial Sequence
  Description of Artificial Sequence: Synthetic oligonucleotide
acagaauguacacaaaucc

SEQ ID NO: 3045628 - RNA, 19 nt, Artificial Sequence
  Description of Artificial Sequence: Synthetic oligonucleotide
auuggauacaaauacugcc

SEQ ID NO: 3045629 - RNA, 19 nt, Artificial Sequence
  Description of Artificial Sequence: Synthetic oligonucleotide
auuuucuucaaacuauucc

SEQ ID NO: 3045630 - RNA, 19 nt, Artificial Sequence
  Description of Artificial Sequence: Synthetic oligonucleotide
uauagaguugguaugaaag

SEQ ID NO: 3045631 - RNA, 19 nt, Artificial Sequence
  Description of Artificial Sequence: Synthetic oligonucleotide
aauccaaacucguauagag

SEQ ID NO: 3045632 - RNA, 19 nt, Artificial Sequence
  Description of Artificial Sequence: Synthetic oligonucleotide
aauguacacaaauccaaac

SEQ ID NO: 3045633 - RNA, 19 nt, Artificial Sequence
  Description of Artificial Sequence: Synthetic oligonucleotide
aacauuuuaauacuugaga

SEQ ID NO: 3045634 - RNA, 19 nt, Artificial Sequence
  Description of Artificial Sequence: Synthetic oligonucleotide
cagauuuuaaguuaggcag

SEQ ID NO: 3045635 - RNA, 19 nt, Artificial Sequence
  Description of Artificial Sequence: Synthetic oligonucleotide
aaagaaacauuuuaauacu

SEQ ID NO: 3045636 - RNA, 19 nt, Artificial Sequence
  Description of Artificial Sequence: Synthetic oligonucleotide
ugguaugaaaguuagaugu

SEQ ID NO: 3045637 - RNA, 19 nt, Artificial Sequence
  Description of Artificial Sequence: Synthetic oligonucleotide
uuggauacaaauacugccg

SEQ ID NO: 3045638 - RNA, 19 nt, Artificial Sequence
  Description of Artificial Sequence: Synthetic oligonucleotide
aaauaaguuaaauuggaua

SEQ ID NO: 3045639 - RNA, 19 nt, Artificial Sequence
  Description of Artificial Sequence: Synthetic oligonucleotide
uaagaguacaucauaaccu

SEQ ID NO: 3045640 - RNA, 19 nt, Artificial Sequence
  Description of Artificial Sequence: Synthetic oligonucleotide
aaaucugcaaacccagcac

SEQ ID NO: 3045641 - RNA, 19 nt, Artificial Sequence
  Description of Artificial Sequence: Synthetic oligonucleotide
aacagauuuuaaguuaggc

SEQ ID NO: 3045642 - RNA, 19 nt, Artificial Sequence
  Description of Artificial Sequence: Synthetic oligonucleotide
uuuucuucaaacuauuccu

SEQ ID NO: 3045643 - RNA, 19 nt, Artificial Sequence
  Description of Artificial Sequence: Synthetic oligonucleotide
aaacccagcacucaaggag

SEQ ID NO: 3045644 - RNA, 19 nt, Artificial Sequence
  Description of Artificial Sequence: Synthetic oligonucleotide
aaacuacagaaucaggcag

SEQ ID NO: 3045645 - RNA, 19 nt, Artificial Sequence
  Description of Artificial Sequence: Synthetic oligonucleotide
aauacuugagaaaauaagu

SEQ ID NO: 3045646 - RNA, 19 nt, Artificial Sequence
  Description of Artificial Sequence: Synthetic oligonucleotide
aauuggauacaaauacugc

SEQ ID NO: 3045647 - RNA, 19 nt, Artificial Sequence
  Description of Artificial Sequence: Synthetic oligonucleotide
ugaaaguuagauguaagag

SEQ ID NO: 3045648 - RNA, 19 nt, Artificial Sequence
  Description of Artificial Sequence: Synthetic oligonucleotide
agaacugcaaacuacagaa

SEQ ID NO: 3045649 - RNA, 19 nt, Artificial Sequence
  Description of Artificial Sequence: Synthetic oligonucleotide
aggaaaauuauuuucuuca

SEQ ID NO: 3045650 - RNA, 19 nt, Artificial Sequence
  Description of Artificial Sequence: Synthetic oligonucleotide
agaaaauaaguuaaauugg

SEQ ID NO: 3045651 - RNA, 19 nt, Artificial Sequence
  Description of Artificial Sequence: Synthetic oligonucleotide
aguuaaauuggauacaaau

SEQ ID NO: 3045652 - RNA, 19 nt, Artificial Sequence
  Description of Artificial Sequence: Synthetic oligonucleotide
cuauuuaagaacugcaaac

SEQ ID NO: 3045653 - RNA, 19 nt, Artificial Sequence
  Description of Artificial Sequence: Synthetic oligonucleotide
uuaaggaaguaacagauuu

SEQ ID NO: 3045654 - RNA, 19 nt, Artificial Sequence
  Description of Artificial Sequence: Synthetic oligonucleotide
uuaaguuaggcagacauga

SEQ ID NO: 3045655 - RNA, 19 nt, Artificial Sequence
  Description of Artificial Sequence: Synthetic oligonucleotide
ucuuaaggaaguaacagau

SEQ ID NO: 3045656 - RNA, 19 nt, Artificial Sequence
  Description of Artificial Sequence: Synthetic oligonucleotide
guaagaguacaucauaacc

SEQ ID NO: 3045657 - RNA, 19 nt, Artificial Sequence
  Description of Artificial Sequence: Synthetic oligonucleotide
aaauuggauacaaauacug

SEQ ID NO: 3045658 - RNA, 19 nt, Artificial Sequence
  Description of Artificial Sequence: Synthetic oligonucleotide
aaggugguggcucaaaucu

SEQ ID NO: 3045659 - RNA, 19 nt, Artificial Sequence
  Description of Artificial Sequence: Synthetic oligonucleotide
ucaaacuauuccuuuaucu

SEQ ID NO: 3045660 - RNA, 19 nt, Artificial Sequence
  Description of Artificial Sequence: Synthetic oligonucleotide
ucuauuuaagaacugcaaa

SEQ ID NO: 3045661 - RNA, 19 nt, Artificial Sequence
  Description of Artificial Sequence: Synthetic oligonucleotide
uauuccuuuaucuauuuaa

SEQ ID NO: 3045662 - RNA, 19 nt, Artificial Sequence
  Description of Artificial Sequence: Synthetic oligonucleotide
uagauguaagaguacauca

SEQ ID NO: 3045663 - RNA, 19 nt, Artificial Sequence
  Description of Artificial Sequence: Synthetic oligonucleotide
aaacagaauguacacaaau

SEQ ID NO: 3045664 - RNA, 19 nt, Artificial Sequence
  Description of Artificial Sequence: Synthetic oligonucleotide
acaucauaaccuuuguuag

SEQ ID NO: 3045665 - RNA, 19 nt, Artificial Sequence
  Description of Artificial Sequence: Synthetic oligonucleotide
uccuuuaucuauuuaagaa

SEQ ID NO: 3045666 - RNA, 19 nt, Artificial Sequence
  Description of Artificial Sequence: Synthetic oligonucleotide
uuaauacuugagaaaauaa

SEQ ID NO: 3045667 - RNA, 19 nt, Artificial Sequence
  Description of Artificial Sequence: Synthetic oligonucleotide
uaugaaaguuagauguaag

SEQ ID NO: 3045668 - RNA, 19 nt, Artificial Sequence
  Description of Artificial Sequence: Synthetic oligonucleotide
aaacuauuccuuuaucuau

SEQ ID NO: 3045669 - RNA, 19 nt, Artificial Sequence
  Description of Artificial Sequence: Synthetic oligonucleotide
acauuuuaauacuugagaa

SEQ ID NO: 3045670 - RNA, 19 nt, Artificial Sequence
  Description of Artificial Sequence: Synthetic oligonucleotide
aaauacugccggcacacag

SEQ ID NO: 3045671 - RNA, 19 nt, Artificial Sequence
  Description of Artificial Sequence: Synthetic oligonucleotide
aacagaauguacacaaauc

SEQ ID NO: 3045672 - RNA, 19 nt, Artificial Sequence
  Description of Artificial Sequence: Synthetic oligonucleotide
auuuuaauacuugagaaaa

SEQ ID NO: 3045673 - RNA, 19 nt, Artificial Sequence
  Description of Artificial Sequence: Synthetic oligonucleotide
uggauacaaauacugccgg

SEQ ID NO: 3045674 - RNA, 19 nt, Artificial Sequence
  Description of Artificial Sequence: Synthetic oligonucleotide
uuguuagcuccucuuaagg

SEQ ID NO: 3045675 - RNA, 19 nt, Artificial Sequence
  Description of Artificial Sequence: Synthetic oligonucleotide
aaaguuagauguaagagua

SEQ ID NO: 3045676 - RNA, 19 nt, Artificial Sequence
  Description of Artificial Sequence: Synthetic oligonucleotide
acagauuuuaaguuaggca

SEQ ID NO: 3045677 - RNA, 19 nt, Artificial Sequence
  Description of Artificial Sequence: Synthetic oligonucleotide
uuaucuauuuaagaacugc

SEQ ID NO: 3045678 - RNA, 19 nt, Artificial Sequence
  Description of Artificial Sequence: Synthetic oligonucleotide
uaaauuggauacaaauacu

SEQ ID NO: 3045679 - RNA, 19 nt, Artificial Sequence
  Description of Artificial Sequence: Synthetic oligonucleotide
uauuuaagaacugcaaacu

SEQ ID NO: 3045680 - RNA, 19 nt, Artificial Sequence
  Description of Artificial Sequence: Synthetic oligonucleotide
ggaaguaacagauuuuaag

SEQ ID NO: 3045681 - RNA, 19 nt, Artificial Sequence
  Description of Artificial Sequence: Synthetic oligonucleotide
aaguaacagauuuuaaguu

SEQ ID NO: 3045682 - RNA, 19 nt, Artificial Sequence
  Description of Artificial Sequence: Synthetic oligonucleotide
aagaacugcaaacuacaga

SEQ ID NO: 3045683 - RNA, 19 nt, Artificial Sequence
  Description of Artificial Sequence: Synthetic oligonucleotide
acaugaaaugauugcagag

SEQ ID NO: 3045684 - RNA, 19 nt, Artificial Sequence
  Description of Artificial Sequence: Synthetic oligonucleotide
uuuaucuauuuaagaacug

SEQ ID NO: 3045685 - RNA, 19 nt, Artificial Sequence
  Description of Artificial Sequence: Synthetic oligonucleotide
uuuaauacuugagaaaaua

SEQ ID NO: 3045686 - RNA, 19 nt, Artificial Sequence
  Description of Artificial Sequence: Synthetic oligonucleotide
uuuguuagcuccucuuaag

SEQ ID NO: 3045687 - RNA, 19 nt, Artificial Sequence
  Description of Artificial Sequence: Synthetic oligonucleotide
aaucugcaaacccagcacu

SEQ ID NO: 3045688 - RNA, 19 nt, Artificial Sequence
  Description of Artificial Sequence: Synthetic oligonucleotide
cauaaccuuuguuagcucc

SEQ ID NO: 3045689 - RNA, 19 nt, Artificial Sequence
  Description of Artificial Sequence: Synthetic oligonucleotide
augaaaugauugcagagga

SEQ ID NO: 3045690 - RNA, 19 nt, Artificial Sequence
  Description of Artificial Sequence: Synthetic oligonucleotide
aagaguacaucauaaccuu

SEQ ID NO: 3045691 - RNA, 19 nt, Artificial Sequence
  Description of Artificial Sequence: Synthetic oligonucleotide
guaacagauuuuaaguuag

SEQ ID NO: 3045692 - RNA, 19 nt, Artificial Sequence
  Description of Artificial Sequence: Synthetic oligonucleotide
augaaaguuagauguaaga

SEQ ID NO: 3045693 - RNA, 19 nt, Artificial Sequence
  Description of Artificial Sequence: Synthetic oligonucleotide
uacuugagaaaauaaguua

SEQ ID NO: 3045694 - RNA, 19 nt, Artificial Sequence
  Description of Artificial Sequence: Synthetic oligonucleotide
aguaacagauuuuaaguua

SEQ ID NO: 3045695 - RNA, 19 nt, Artificial Sequence
  Description of Artificial Sequence: Synthetic oligonucleotide
uccaaacucguauagaguu

SEQ ID NO: 3045696 - RNA, 19 nt, Artificial Sequence
  Description of Artificial Sequence: Synthetic oligonucleotide
uguaagaguacaucauaac

SEQ ID NO: 3045697 - RNA, 19 nt, Artificial Sequence
  Description of Artificial Sequence: Synthetic oligonucleotide
acaaauacugccggcacac

SEQ ID NO: 3045698 - RNA, 19 nt, Artificial Sequence
  Description of Artificial Sequence: Synthetic oligonucleotide
gaaaguuagauguaagagu

SEQ ID NO: 3045699 - RNA, 19 nt, Artificial Sequence
  Description of Artificial Sequence: Synthetic oligonucleotide
uugguaugaaaguuagaug

SEQ ID NO: 3045700 - RNA, 19 nt, Artificial Sequence
  Description of Artificial Sequence: Synthetic oligonucleotide
cacucaaggaggcugaggc

SEQ ID NO: 3045701 - RNA, 19 nt, Artificial Sequence
  Description of Artificial Sequence: Synthetic oligonucleotide
cucaaaucugcaaacccag

SEQ ID NO: 3045702 - RNA, 19 nt, Artificial Sequence
  Description of Artificial Sequence: Synthetic oligonucleotide
auagaguugguaugaaagu

SEQ ID NO: 3045703 - RNA, 19 nt, Artificial Sequence
  Description of Artificial Sequence: Synthetic oligonucleotide
ugcaaacuacagaaucagg

SEQ ID NO: 3045704 - RNA, 19 nt, Artificial Sequence
  Description of Artificial Sequence: Synthetic oligonucleotide
uaaguuaaauuggauacaa

SEQ ID NO: 3045705 - RNA, 19 nt, Artificial Sequence
  Description of Artificial Sequence: Synthetic oligonucleotide
aaguuaggcagacaugaaa

SEQ ID NO: 3045706 - RNA, 19 nt, Artificial Sequence
  Description of Artificial Sequence: Synthetic oligonucleotide
uaacagauuuuaaguuagg

SEQ ID NO: 3045707 - RNA, 19 nt, Artificial Sequence
  Description of Artificial Sequence: Synthetic oligonucleotide
guacacaaauccaaacucg

SEQ ID NO: 3045708 - RNA, 19 nt, Artificial Sequence
  Description of Artificial Sequence: Synthetic oligonucleotide
acucguauagaguugguau

SEQ ID NO: 3045709 - RNA, 19 nt, Artificial Sequence
  Description of Artificial Sequence: Synthetic oligonucleotide
uuaggcagacaugaaauga

SEQ ID NO: 3045710 - RNA, 19 nt, Artificial Sequence
  Description of Artificial Sequence: Synthetic oligonucleotide
auuauuuucuucaaacuau

SEQ ID NO: 3045711 - RNA, 19 nt, Artificial Sequence
  Description of Artificial Sequence: Synthetic oligonucleotide
agaaucaggcagaaggugg

SEQ ID NO: 3045712 - RNA, 19 nt, Artificial Sequence
  Description of Artificial Sequence: Synthetic oligonucleotide
uguuagcuccucuuaagga

SEQ ID NO: 3045713 - RNA, 19 nt, Artificial Sequence
  Description of Artificial Sequence: Synthetic oligonucleotide
uuccuuuaucuauuuaaga

SEQ ID NO: 3045714 - RNA, 19 nt, Artificial Sequence
  Description of Artificial Sequence: Synthetic oligonucleotide
caaauccaaacucguauag

SEQ ID NO: 3045715 - RNA, 19 nt, Artificial Sequence
  Description of Artificial Sequence: Synthetic oligonucleotide
uuagauguaagaguacauc

SEQ ID NO: 3045716 - RNA, 19 nt, Artificial Sequence
  Description of Artificial Sequence: Synthetic oligonucleotide
auacugccggcacacagac

SEQ ID NO: 3045717 - RNA, 19 nt, Artificial Sequence
  Description of Artificial Sequence: Synthetic oligonucleotide
aaaauaaguuaaauuggau

SEQ ID NO: 3045718 - RNA, 19 nt, Artificial Sequence
  Description of Artificial Sequence: Synthetic oligonucleotide
caaacucguauagaguugg

SEQ ID NO: 3045719 - RNA, 19 nt, Artificial Sequence
  Description of Artificial Sequence: Synthetic oligonucleotide
aaugauugcagaggaaaau

SEQ ID NO: 3045720 - RNA, 19 nt, Artificial Sequence
  Description of Artificial Sequence: Synthetic oligonucleotide
aucauaaccuuuguuagcu

SEQ ID NO: 3045721 - RNA, 19 nt, Artificial Sequence
  Description of Artificial Sequence: Synthetic oligonucleotide
acugccggcacacagacaa

SEQ ID NO: 3045722 - RNA, 19 nt, Artificial Sequence
  Description of Artificial Sequence: Synthetic oligonucleotide
gaaaauuauuuucuucaaa

SEQ ID NO: 3045723 - RNA, 19 nt, Artificial Sequence
  Description of Artificial Sequence: Synthetic oligonucleotide
uuuuaauacuugagaaaau

SEQ ID NO: 3045724 - RNA, 19 nt, Artificial Sequence
  Description of Artificial Sequence: Synthetic oligonucleotide
uuauuuucuucaaacuauu

SEQ ID NO: 3045725 - RNA, 19 nt, Artificial Sequence
  Description of Artificial Sequence: Synthetic oligonucleotide
uccucuuaaggaaguaaca

SEQ ID NO: 3045726 - RNA, 19 nt, Artificial Sequence
  Description of Artificial Sequence: Synthetic oligonucleotide
gacaugaaaugauugcaga

SEQ ID NO: 3045727 - RNA, 19 nt, Artificial Sequence
  Description of Artificial Sequence: Synthetic oligonucleotide
gauacaaauacugccggca

SEQ ID NO: 3045728 - RNA, 19 nt, Artificial Sequence
  Description of Artificial Sequence: Synthetic oligonucleotide
cuuuaucuauuuaagaacu

SEQ ID NO: 3045729 - RNA, 19 nt, Artificial Sequence
  Description of Artificial Sequence: Synthetic oligonucleotide
aguuagauguaagaguaca

SEQ ID NO: 3045730 - RNA, 19 nt, Artificial Sequence
  Description of Artificial Sequence: Synthetic oligonucleotide
uauuuucuucaaacuauuc

SEQ ID NO: 3045731 - RNA, 19 nt, Artificial Sequence
  Description of Artificial Sequence: Synthetic oligonucleotide
acuugagaaaauaaguuaa

SEQ ID NO: 3045732 - RNA, 19 nt, Artificial Sequence
  Description of Artificial Sequence: Synthetic oligonucleotide
gaguacaucauaaccuuug

SEQ ID NO: 3045733 - RNA, 19 nt, Artificial Sequence
  Description of Artificial Sequence: Synthetic oligonucleotide
auuccuuuaucuauuuaag

SEQ ID NO: 3045734 - RNA, 19 nt, Artificial Sequence
  Description of Artificial Sequence: Synthetic oligonucleotide
aacccagcacucaaggagg

SEQ ID NO: 3045735 - RNA, 19 nt, Artificial Sequence
  Description of Artificial Sequence: Synthetic oligonucleotide
ugauugcagaggaaaauua

SEQ ID NO: 3045736 - RNA, 19 nt, Artificial Sequence
  Description of Artificial Sequence: Synthetic oligonucleotide
gaguugguaugaaaguuag

SEQ ID NO: 3045737 - RNA, 19 nt, Artificial Sequence
  Description of Artificial Sequence: Synthetic oligonucleotide
gauuuuaaguuaggcagac

SEQ ID NO: 3045738 - RNA, 19 nt, Artificial Sequence
  Description of Artificial Sequence: Synthetic oligonucleotide
caaacuacagaaucaggca

SEQ ID NO: 3045739 - RNA, 19 nt, Artificial Sequence
  Description of Artificial Sequence: Synthetic oligonucleotide
cuccucuuaaggaaguaac

SEQ ID NO: 3045740 - RNA, 19 nt, Artificial Sequence
  Description of Artificial Sequence: Synthetic oligonucleotide
aaguuagauguaagaguac

SEQ ID NO: 3045741 - RNA, 19 nt, Artificial Sequence
  Description of Artificial Sequence: Synthetic oligonucleotide
uacaaauacugccggcaca

SEQ ID NO: 3045742 - RNA, 19 nt, Artificial Sequence
  Description of Artificial Sequence: Synthetic oligonucleotide
uugagaaaauaaguuaaau

SEQ ID NO: 3045743 - RNA, 19 nt, Artificial Sequence
  Description of Artificial Sequence: Synthetic oligonucleotide
gcaaacuacagaaucaggc

SEQ ID NO: 3045744 - RNA, 19 nt, Artificial Sequence
  Description of Artificial Sequence: Synthetic oligonucleotide
aaauccaaacucguauaga

SEQ ID NO: 3045745 - RNA, 19 nt, Artificial Sequence
  Description of Artificial Sequence: Synthetic oligonucleotide
gauguaagaguacaucaua

SEQ ID NO: 3045746 - RNA, 19 nt, Artificial Sequence
  Description of Artificial Sequence: Synthetic oligonucleotide
ucaaaucugcaaacccagc

SEQ ID NO: 3045747 - RNA, 19 nt, Artificial Sequence
  Description of Artificial Sequence: Synthetic oligonucleotide
ccuuuaucuauuuaagaac

SEQ ID NO: 3045748 - RNA, 19 nt, Artificial Sequence
  Description of Artificial Sequence: Synthetic oligonucleotide
cucguauagaguugguaug

SEQ ID NO: 3045749 - RNA, 19 nt, Artificial Sequence
  Description of Artificial Sequence: Synthetic oligonucleotide
guuaggcagacaugaaaug

SEQ ID NO: 3045750 - RNA, 19 nt, Artificial Sequence
  Description of Artificial Sequence: Synthetic oligonucleotide
ucuucaaacuauuccuuua

SEQ ID NO: 3045751 - RNA, 19 nt, Artificial Sequence
  Description of Artificial Sequence: Synthetic oligonucleotide
auaaguuaaauuggauaca

SEQ ID NO: 3045752 - RNA, 19 nt, Artificial Sequence
  Description of Artificial Sequence: Synthetic oligonucleotide
guuaaauuggauacaaaua

SEQ ID NO: 3045753 - RNA, 19 nt, Artificial Sequence
  Description of Artificial Sequence: Synthetic oligonucleotide
aguacaucauaaccuuugu

SEQ ID NO: 3045754 - RNA, 19 nt, Artificial Sequence
  Description of Artificial Sequence: Synthetic oligonucleotide
uaggcagacaugaaaugau

SEQ ID NO: 3045755 - RNA, 19 nt, Artificial Sequence
  Description of Artificial Sequence: Synthetic oligonucleotide
uucaaacuauuccuuuauc

SEQ ID NO: 3045756 - RNA, 19 nt, Artificial Sequence
  Description of Artificial Sequence: Synthetic oligonucleotide
agaauguacacaaauccaa

SEQ ID NO: 3045757 - RNA, 19 nt, Artificial Sequence
  Description of Artificial Sequence: Synthetic oligonucleotide
agacaugaaaugauugcag

SEQ ID NO: 3045758 - RNA, 19 nt, Artificial Sequence
  Description of Artificial Sequence: Synthetic oligonucleotide
ugcaaacccagcacucaag

SEQ ID NO: 3045759 - RNA, 19 nt, Artificial Sequence
  Description of Artificial Sequence: Synthetic oligonucleotide
ucguauagaguugguauga

SEQ ID NO: 3045760 - RNA, 19 nt, Artificial Sequence
  Description of Artificial Sequence: Synthetic oligonucleotide
cucaaggaggcugaggcag

SEQ ID NO: 3045761 - RNA, 19 nt, Artificial Sequence
  Description of Artificial Sequence: Synthetic oligonucleotide
aacuacagaaucaggcaga

SEQ ID NO: 3045762 - RNA, 19 nt, Artificial Sequence
  Description of Artificial Sequence: Synthetic oligonucleotide
aguuaggcagacaugaaau

SEQ ID NO: 3045763 - RNA, 19 nt, Artificial Sequence
  Description of Artificial Sequence: Synthetic oligonucleotide
aaaugauugcagaggaaaa

SEQ ID NO: 3045764 - RNA, 19 nt, Artificial Sequence
  Description of Artificial Sequence: Synthetic oligonucleotide
ugcagaggaaaauuauuuu

SEQ ID NO: 3045765 - RNA, 19 nt, Artificial Sequence
  Description of Artificial Sequence: Synthetic oligonucleotide
auacuugagaaaauaaguu

SEQ ID NO: 3045766 - RNA, 19 nt, Artificial Sequence
  Description of Artificial Sequence: Synthetic oligonucleotide
uaaggaaguaacagauuuu

SEQ ID NO: 3045767 - RNA, 19 nt, Artificial Sequence
  Description of Artificial Sequence: Synthetic oligonucleotide
cucuuaaggaaguaacaga

SEQ ID NO: 3045768 - RNA, 19 nt, Artificial Sequence
  Description of Artificial Sequence: Synthetic oligonucleotide
caaacuauuccuuuaucua

SEQ ID NO: 3045769 - RNA, 19 nt, Artificial Sequence
  Description of Artificial Sequence: Synthetic oligonucleotide
acaaauccaaacucguaua

SEQ ID NO: 3045770 - RNA, 19 nt, Artificial Sequence
  Description of Artificial Sequence: Synthetic oligonucleotide
ugaaaugauugcagaggaa

SEQ ID NO: 3045771 - RNA, 19 nt, Artificial Sequence
  Description of Artificial Sequence: Synthetic oligonucleotide
caaaucugcaaacccagca

SEQ ID NO: 3045772 - RNA, 19 nt, Artificial Sequence
  Description of Artificial Sequence: Synthetic oligonucleotide
gcagacaugaaaugauugc

SEQ ID NO: 3045773 - RNA, 19 nt, Artificial Sequence
  Description of Artificial Sequence: Synthetic oligonucleotide
aauacugccggcacacaga

SEQ ID NO: 3045774 - RNA, 19 nt, Artificial Sequence
  Description of Artificial Sequence: Synthetic oligonucleotide
ucaggcagaaggugguggc

SEQ ID NO: 3045775 - RNA, 19 nt, Artificial Sequence
  Description of Artificial Sequence: Synthetic oligonucleotide
guugguaugaaaguuagau

SEQ ID NO: 3045776 - RNA, 19 nt, Artificial Sequence
  Description of Artificial Sequence: Synthetic oligonucleotide
cugcaaacuacagaaucag

SEQ ID NO: 3045777 - RNA, 19 nt, Artificial Sequence
  Description of Artificial Sequence: Synthetic oligonucleotide
acugcaaacuacagaauca

SEQ ID NO: 3045778 - RNA, 19 nt, Artificial Sequence
  Description of Artificial Sequence: Synthetic oligonucleotide
gcaaacccagcacucaagg

SEQ ID NO: 3045779 - RNA, 19 nt, Artificial Sequence
  Description of Artificial Sequence: Synthetic oligonucleotide
gaaggugguggcucaaauc

SEQ ID NO: 3045780 - RNA, 19 nt, Artificial Sequence
  Description of Artificial Sequence: Synthetic oligonucleotide
uagaguugguaugaaaguu

SEQ ID NO: 3045781 - RNA, 19 nt, Artificial Sequence
  Description of Artificial Sequence: Synthetic oligonucleotide
uaaguuaggcagacaugaa

SEQ ID NO: 3045782 - RNA, 19 nt, Artificial Sequence
  Description of Artificial Sequence: Synthetic oligonucleotide
aaccuuuguuagcuccucu

SEQ ID NO: 3045783 - RNA, 19 nt, Artificial Sequence
  Description of Artificial Sequence: Synthetic oligonucleotide
agauuuuaaguuaggcaga

SEQ ID NO: 3045784 - RNA, 19 nt, Artificial Sequence
  Description of Artificial Sequence: Synthetic oligonucleotide
aacuauuccuuuaucuauu

SEQ ID NO: 3045785 - RNA, 19 nt, Artificial Sequence
  Description of Artificial Sequence: Synthetic oligonucleotide
aaaacagaauguacacaaa

SEQ ID NO: 3045786 - RNA, 19 nt, Artificial Sequence
  Description of Artificial Sequence: Synthetic oligonucleotide
aucuauuuaagaacugcaa

SEQ ID NO: 3045787 - RNA, 19 nt, Artificial Sequence
  Description of Artificial Sequence: Synthetic oligonucleotide
ggcucaaaucugcaaaccc

SEQ ID NO: 3045788 - RNA, 19 nt, Artificial Sequence
  Description of Artificial Sequence: Synthetic oligonucleotide
gaauguacacaaauccaaa

SEQ ID NO: 3045789 - RNA, 19 nt, Artificial Sequence
  Description of Artificial Sequence: Synthetic oligonucleotide
auguaagaguacaucauaa

SEQ ID NO: 3045790 - RNA, 19 nt, Artificial Sequence
  Description of Artificial Sequence: Synthetic oligonucleotide
ucugcaaacccagcacuca

SEQ ID NO: 3045791 - RNA, 19 nt, Artificial Sequence
  Description of Artificial Sequence: Synthetic oligonucleotide
guggcucaaaucugcaaac

SEQ ID NO: 3045792 - RNA, 19 nt, Artificial Sequence
  Description of Artificial Sequence: Synthetic oligonucleotide
guaugaaaguuagauguaa

SEQ ID NO: 3045793 - RNA, 19 nt, Artificial Sequence
  Description of Artificial Sequence: Synthetic oligonucleotide
augauugcagaggaaaauu

SEQ ID NO: 3045794 - RNA, 19 nt, Artificial Sequence
  Description of Artificial Sequence: Synthetic oligonucleotide
cagacaugaaaugauugca

SEQ ID NO: 3045795 - RNA, 19 nt, Artificial Sequence
  Description of Artificial Sequence: Synthetic oligonucleotide
acagaaucaggcagaaggu

SEQ ID NO: 3045796 - RNA, 19 nt, Artificial Sequence
  Description of Artificial Sequence: Synthetic oligonucleotide
agauguaagaguacaucau

SEQ ID NO: 3045797 - RNA, 19 nt, Artificial Sequence
  Description of Artificial Sequence: Synthetic oligonucleotide
aacucguauagaguuggua

SEQ ID NO: 3045798 - RNA, 19 nt, Artificial Sequence
  Description of Artificial Sequence: Synthetic oligonucleotide
uggcucaaaucugcaaacc

SEQ ID NO: 3045799 - RNA, 19 nt, Artificial Sequence
  Description of Artificial Sequence: Synthetic oligonucleotide
agaaggugguggcucaaau

SEQ ID NO: 3045800 - RNA, 19 nt, Artificial Sequence
  Description of Artificial Sequence: Synthetic oligonucleotide
aucugcaaacccagcacuc

SEQ ID NO: 3045801 - RNA, 19 nt, Artificial Sequence
  Description of Artificial Sequence: Synthetic oligonucleotide
ccucuuaaggaaguaacag

SEQ ID NO: 3045802 - RNA, 19 nt, Artificial Sequence
  Description of Artificial Sequence: Synthetic oligonucleotide
guauagaguugguaugaaa

SEQ ID NO: 3045803 - RNA, 19 nt, Artificial Sequence
  Description of Artificial Sequence: Synthetic oligonucleotide
cuuuguuagcuccucuuaa

SEQ ID NO: 3045804 - RNA, 19 nt, Artificial Sequence
  Description of Artificial Sequence: Synthetic oligonucleotide
cagaaucaggcagaaggug

SEQ ID NO: 3045805 - RNA, 19 nt, Artificial Sequence
  Description of Artificial Sequence: Synthetic oligonucleotide
auaaccuuuguuagcuccu

SEQ ID NO: 3045806 - RNA, 19 nt, Artificial Sequence
  Description of Artificial Sequence: Synthetic oligonucleotide
aaguuaaauuggauacaaa

SEQ ID NO: 3045807 - RNA, 19 nt, Artificial Sequence
  Description of Artificial Sequence: Synthetic oligonucleotide
ggauacaaauacugccggc

SEQ ID NO: 3045808 - RNA, 19 nt, Artificial Sequence
  Description of Artificial Sequence: Synthetic oligonucleotide
cacaaauccaaacucguau

SEQ ID NO: 3045809 - RNA, 19 nt, Artificial Sequence
  Description of Artificial Sequence: Synthetic oligonucleotide
ucauaaccuuuguuagcuc

SEQ ID NO: 3045810 - RNA, 19 nt, Artificial Sequence
  Description of Artificial Sequence: Synthetic oligonucleotide
ugccggcacacagacaagc

SEQ ID NO: 3045811 - RNA, 19 nt, Artificial Sequence
  Description of Artificial Sequence: Synthetic oligonucleotide
ggcagacaugaaaugauug

SEQ ID NO: 3045812 - RNA, 19 nt, Artificial Sequence
  Description of Artificial Sequence: Synthetic oligonucleotide
aggcagaaggugguggcuc

SEQ ID NO: 3045813 - RNA, 19 nt, Artificial Sequence
  Description of Artificial Sequence: Synthetic oligonucleotide
uagcuccucuuaaggaagu

SEQ ID NO: 3045814 - RNA, 19 nt, Artificial Sequence
  Description of Artificial Sequence: Synthetic oligonucleotide
gguggcucaaaucugcaaa

SEQ ID NO: 3045815 - RNA, 19 nt, Artificial Sequence
  Description of Artificial Sequence: Synthetic oligonucleotide
acucaaggaggcugaggca

SEQ ID NO: 3045816 - RNA, 19 nt, Artificial Sequence
  Description of Artificial Sequence: Synthetic oligonucleotide
accuuuguuagcuccucuu

SEQ ID NO: 3045817 - RNA, 19 nt, Artificial Sequence
  Description of Artificial Sequence: Synthetic oligonucleotide
aaggaggcugaggcagggg

SEQ ID NO: 3045818 - RNA, 19 nt, Artificial Sequence
  Description of Artificial Sequence: Synthetic oligonucleotide
gauugcagaggaaaauuau

SEQ ID NO: 3045819 - RNA, 19 nt, Artificial Sequence
  Description of Artificial Sequence: Synthetic oligonucleotide
ggugguggcucaaaucugc

SEQ ID NO: 3045820 - RNA, 19 nt, Artificial Sequence
  Description of Artificial Sequence: Synthetic oligonucleotide
auccaaacucguauagagu

SEQ ID NO: 3045821 - RNA, 19 nt, Artificial Sequence
  Description of Artificial Sequence: Synthetic oligonucleotide
ugguggcucaaaucugcaa

SEQ ID NO: 3045822 - RNA, 19 nt, Artificial Sequence
  Description of Artificial Sequence: Synthetic oligonucleotide
uaaccuuuguuagcuccuc

SEQ ID NO: 3045823 - RNA, 19 nt, Artificial Sequence
  Description of Artificial Sequence: Synthetic oligonucleotide
caaacccagcacucaagga

SEQ ID NO: 3045824 - RNA, 19 nt, Artificial Sequence
  Description of Artificial Sequence: Synthetic oligonucleotide
acccagcacucaaggaggc

SEQ ID NO: 3045825 - RNA, 19 nt, Artificial Sequence
  Description of Artificial Sequence: Synthetic oligonucleotide
ccaaacucguauagaguug

SEQ ID NO: 3045826 - RNA, 19 nt, Artificial Sequence
  Description of Artificial Sequence: Synthetic oligonucleotide
cuucaaacuauuccuuuau

SEQ ID NO: 3045827 - RNA, 19 nt, Artificial Sequence
  Description of Artificial Sequence: Synthetic oligonucleotide
gcucaaaucugcaaaccca

SEQ ID NO: 3045828 - RNA, 19 nt, Artificial Sequence
  Description of Artificial Sequence: Synthetic oligonucleotide
aaacucguauagaguuggu

SEQ ID NO: 3045829 - RNA, 19 nt, Artificial Sequence
  Description of Artificial Sequence: Synthetic oligonucleotide
aggaaguaacagauuuuaa

SEQ ID NO: 3045830 - RNA, 19 nt, Artificial Sequence
  Description of Artificial Sequence: Synthetic oligonucleotide
aguugguaugaaaguuaga

SEQ ID NO: 3045831 - RNA, 19 nt, Artificial Sequence
  Description of Artificial Sequence: Synthetic oligonucleotide
guuagauguaagaguacau

SEQ ID NO: 3045832 - RNA, 19 nt, Artificial Sequence
  Description of Artificial Sequence: Synthetic oligonucleotide
acacaaauccaaacucgua

SEQ ID NO: 3045833 - RNA, 19 nt, Artificial Sequence
  Description of Artificial Sequence: Synthetic oligonucleotide
cuuaaggaaguaacagauu

SEQ ID NO: 3045834 - RNA, 19 nt, Artificial Sequence
  Description of Artificial Sequence: Synthetic oligonucleotide
agaguacaucauaaccuuu

SEQ ID NO: 3045835 - RNA, 19 nt, Artificial Sequence
  Description of Artificial Sequence: Synthetic oligonucleotide
ggcacacagacaagcacac

SEQ ID NO: 3045836 - RNA, 19 nt, Artificial Sequence
  Description of Artificial Sequence: Synthetic oligonucleotide
aggugguggcucaaaucug

SEQ ID NO: 3045837 - RNA, 19 nt, Artificial Sequence
  Description of Artificial Sequence: Synthetic oligonucleotide
ccagcacucaaggaggcug

SEQ ID NO: 3045838 - RNA, 19 nt, Artificial Sequence
  Description of Artificial Sequence: Synthetic oligonucleotide
cagcacucaaggaggcuga

SEQ ID NO: 3045839 - RNA, 19 nt, Artificial Sequence
  Description of Artificial Sequence: Synthetic oligonucleotide
uacugccggcacacagaca

SEQ ID NO: 3045840 - RNA, 19 nt, Artificial Sequence
  Description of Artificial Sequence: Synthetic oligonucleotide
agcacucaaggaggcugag

SEQ ID NO: 3045841 - RNA, 19 nt, Artificial Sequence
  Description of Artificial Sequence: Synthetic oligonucleotide
gguaugaaaguuagaugua

SEQ ID NO: 3045842 - RNA, 19 nt, Artificial Sequence
  Description of Artificial Sequence: Synthetic oligonucleotide
cugcaaacccagcacucaa

SEQ ID NO: 3045843 - RNA, 19 nt, Artificial Sequence
  Description of Artificial Sequence: Synthetic oligonucleotide
guacaucauaaccuuuguu

SEQ ID NO: 3045844 - RNA, 19 nt, Artificial Sequence
  Description of Artificial Sequence: Synthetic oligonucleotide
aggcagacaugaaaugauu

SEQ ID NO: 3045845 - RNA, 19 nt, Artificial Sequence
  Description of Artificial Sequence: Synthetic oligonucleotide
ggggauugcuacgagccca

SEQ ID NO: 3045846 - RNA, 19 nt, Artificial Sequence
  Description of Artificial Sequence: Synthetic oligonucleotide
cugccggcacacagacaag

SEQ ID NO: 3045847 - RNA, 19 nt, Artificial Sequence
  Description of Artificial Sequence: Synthetic oligonucleotide
ccggcacacagacaagcac

SEQ ID NO: 3045848 - RNA, 19 nt, Artificial Sequence
  Description of Artificial Sequence: Synthetic oligonucleotide
gcacucaaggaggcugagg

SEQ ID NO: 3045849 - RNA, 19 nt, Artificial Sequence
  Description of Artificial Sequence: Synthetic oligonucleotide
caaauacugccggcacaca

SEQ ID NO: 3045850 - RNA, 19 nt, Artificial Sequence
  Description of Artificial Sequence: Synthetic oligonucleotide
gcuccucuuaaggaaguaa

SEQ ID NO: 3045851 - RNA, 19 nt, Artificial Sequence
  Description of Artificial Sequence: Synthetic oligonucleotide
ccuuuguuagcuccucuua

SEQ ID NO: 3045852 - RNA, 19 nt, Artificial Sequence
  Description of Artificial Sequence: Synthetic oligonucleotide
agcuccucuuaaggaagua

SEQ ID NO: 3045853 - RNA, 19 nt, Artificial Sequence
  Description of Artificial Sequence: Synthetic oligonucleotide
ggauugcuacgagcccaag

SEQ ID NO: 3045854 - RNA, 19 nt, Artificial Sequence
  Description of Artificial Sequence: Synthetic oligonucleotide
cagaaggugguggcucaaa

SEQ ID NO: 3045855 - RNA, 19 nt, Artificial Sequence
  Description of Artificial Sequence: Synthetic oligonucleotide
gggauugcuacgagcccaa

SEQ ID NO: 3045856 - RNA, 19 nt, Artificial Sequence
  Description of Artificial Sequence: Synthetic oligonucleotide
gccggcacacagacaagca

SEQ ID NO: 3045857 - RNA, 19 nt, Artificial Sequence
  Description of Artificial Sequence: Synthetic oligonucleotide
gcagaaggugguggcucaa

SEQ ID NO: 3045858 - RNA, 19 nt, Artificial Sequence
  Description of Artificial Sequence: Synthetic oligonucleotide
cccagcacucaaggaggcu

SEQ ID NO: 3045859 - RNA, 19 nt, Artificial Sequence
  Description of Artificial Sequence: Synthetic oligonucleotide
uguucauguucauagagag

SEQ ID NO: 3045860 - RNA, 19 nt, Artificial Sequence
  Description of Artificial Sequence: Synthetic oligonucleotide
uucauagagaguauaggcc

SEQ ID NO: 3045861 - RNA, 19 nt, Artificial Sequence
  Description of Artificial Sequence: Synthetic oligonucleotide
aauguccucucucuggaac

SEQ ID NO: 3045862 - RNA, 19 nt, Artificial Sequence
  Description of Artificial Sequence: Synthetic oligonucleotide
gagguguucauguucauag

SEQ ID NO: 3045863 - RNA, 19 nt, Artificial Sequence
  Description of Artificial Sequence: Synthetic oligonucleotide
guaauugagagcaaugucc

SEQ ID NO: 3045864 - RNA, 19 nt, Artificial Sequence
  Description of Artificial Sequence: Synthetic oligonucleotide
guucauagagaguauaggc

SEQ ID NO: 3045865 - RNA, 19 nt, Artificial Sequence
  Description of Artificial Sequence: Synthetic oligonucleotide
gagaguauaggccuuuugc

SEQ ID NO: 3045866 - RNA, 19 nt, Artificial Sequence
  Description of Artificial Sequence: Synthetic oligonucleotide
ucauagagaguauaggccu

SEQ ID NO: 3045867 - RNA, 19 nt, Artificial Sequence
  Description of Artificial Sequence: Synthetic oligonucleotide
guaguuguccuucugagug

SEQ ID NO: 3045868 - RNA, 19 nt, Artificial Sequence
  Description of Artificial Sequence: Synthetic oligonucleotide
uucauguucauagagagua

SEQ ID NO: 3045869 - RNA, 19 nt, Artificial Sequence
  Description of Artificial Sequence: Synthetic oligonucleotide
uaauugagagcaauguccu

SEQ ID NO: 3045870 - RNA, 19 nt, Artificial Sequence
  Description of Artificial Sequence: Synthetic oligonucleotide
uguucauagagaguauagg

SEQ ID NO: 3045871 - RNA, 19 nt, Artificial Sequence
  Description of Artificial Sequence: Synthetic oligonucleotide
caggucuuugaacagaggg

SEQ ID NO: 3045872 - RNA, 19 nt, Artificial Sequence
  Description of Artificial Sequence: Synthetic oligonucleotide
accccaaugacucagggca

SEQ ID NO: 3045873 - RNA, 19 nt, Artificial Sequence
  Description of Artificial Sequence: Synthetic oligonucleotide
gaagaggcgcuucuggagg

SEQ ID NO: 3045874 - RNA, 19 nt, Artificial Sequence
  Description of Artificial Sequence: Synthetic oligonucleotide
agugacauguagcuuccac

SEQ ID NO: 3045875 - RNA, 19 nt, Artificial Sequence
  Description of Artificial Sequence: Synthetic oligonucleotide
uguagcuuccacgugaaga

SEQ ID NO: 3045876 - RNA, 19 nt, Artificial Sequence
  Description of Artificial Sequence: Synthetic oligonucleotide
uucugagugacauguagcu

SEQ ID NO: 3045877 - RNA, 19 nt, Artificial Sequence
  Description of Artificial Sequence: Synthetic oligonucleotide
gaguauaggccuuuugcug

SEQ ID NO: 3045878 - RNA, 19 nt, Artificial Sequence
  Description of Artificial Sequence: Synthetic oligonucleotide
aguauaggccuuuugcuga

SEQ ID NO: 3045879 - RNA, 19 nt, Artificial Sequence
  Description of Artificial Sequence: Synthetic oligonucleotide
ugacauguagcuuccacgu

SEQ ID NO: 3045880 - RNA, 19 nt, Artificial Sequence
  Description of Artificial Sequence: Synthetic oligonucleotide
gugacauguagcuuccacg

SEQ ID NO: 3045881 - RNA, 19 nt, Artificial Sequence
  Description of Artificial Sequence: Synthetic oligonucleotide
agaguauaggccuuuugcu

SEQ ID NO: 3045882 - RNA, 19 nt, Artificial Sequence
  Description of Artificial Sequence: Synthetic oligonucleotide
cugagugacauguagcuuc

SEQ ID NO: 3045883 - RNA, 19 nt, Artificial Sequence
  Description of Artificial Sequence: Synthetic oligonucleotide
aauugagagcaauguccuc

SEQ ID NO: 3045884 - RNA, 19 nt, Artificial Sequence
  Description of Artificial Sequence: Synthetic oligonucleotide
ucugacaguagccgaacca

SEQ ID NO: 3045885 - RNA, 19 nt, Artificial Sequence
  Description of Artificial Sequence: Synthetic oligonucleotide
uggaacucacgccucauga

SEQ ID NO: 3045886 - RNA, 19 nt, Artificial Sequence
  Description of Artificial Sequence: Synthetic oligonucleotide
gaacucacgccucaugagc

SEQ ID NO: 3045887 - RNA, 19 nt, Artificial Sequence
  Description of Artificial Sequence: Synthetic oligonucleotide
ucuuugaacagaggggugc

SEQ ID NO: 3045888 - RNA, 19 nt, Artificial Sequence
  Description of Artificial Sequence: Synthetic oligonucleotide
ugaagaggcgcuucuggag

SEQ ID NO: 3045889 - RNA, 19 nt, Artificial Sequence
  Description of Artificial Sequence: Synthetic oligonucleotide
aggccuuuugcugagcacc

SEQ ID NO: 3045890 - RNA, 19 nt, Artificial Sequence
  Description of Artificial Sequence: Synthetic oligonucleotide
acauguagcuuccacguga

SEQ ID NO: 3045891 - RNA, 19 nt, Artificial Sequence
  Description of Artificial Sequence: Synthetic oligonucleotide
cuucugagugacauguagc

SEQ ID NO: 3045892 - RNA, 19 nt, Artificial Sequence
  Description of Artificial Sequence: Synthetic oligonucleotide
caccaugaguuccacaucc

SEQ ID NO: 3045893 - RNA, 19 nt, Artificial Sequence
  Description of Artificial Sequence: Synthetic oligonucleotide
aacucacgccucaugagcg

SEQ ID NO: 3045894 - RNA, 19 nt, Artificial Sequence
  Description of Artificial Sequence: Synthetic oligonucleotide
auccugguaauugagagca

SEQ ID NO: 3045895 - RNA, 19 nt, Artificial Sequence
  Description of Artificial Sequence: Synthetic oligonucleotide
ugacaguagccgaaccagg

SEQ ID NO: 3045896 - RNA, 19 nt, Artificial Sequence
  Description of Artificial Sequence: Synthetic oligonucleotide
aacagaggggugcuguuga

SEQ ID NO: 3045897 - RNA, 19 nt, Artificial Sequence
  Description of Artificial Sequence: Synthetic oligonucleotide
gagguuugcaccucauccc

SEQ ID NO: 3045898 - RNA, 19 nt, Artificial Sequence
  Description of Artificial Sequence: Synthetic oligonucleotide
agagcaauguccucucucu

SEQ ID NO: 3045899 - RNA, 19 nt, Artificial Sequence
  Description of Artificial Sequence: Synthetic oligonucleotide
ggagguuugcaccucaucc

SEQ ID NO: 3045900 - RNA, 19 nt, Artificial Sequence
  Description of Artificial Sequence: Synthetic oligonucleotide
ugguaauugagagcaaugu

SEQ ID NO: 3045901 - RNA, 19 nt, Artificial Sequence
  Description of Artificial Sequence: Synthetic oligonucleotide
aagaggcgcuucuggaggg

SEQ ID NO: 3045902 - RNA, 19 nt, Artificial Sequence
  Description of Artificial Sequence: Synthetic oligonucleotide
acuguaguuguccuucuga

SEQ ID NO: 3045903 - RNA, 19 nt, Artificial Sequence
  Description of Artificial Sequence: Synthetic oligonucleotide
ucagcauccugguaauuga

SEQ ID NO: 3045904 - RNA, 19 nt, Artificial Sequence
  Description of Artificial Sequence: Synthetic oligonucleotide
ugagugacauguagcuucc

SEQ ID NO: 3045905 - RNA, 19 nt, Artificial Sequence
  Description of Artificial Sequence: Synthetic oligonucleotide
acagggaccccaaugacuc

SEQ ID NO: 3045906 - RNA, 19 nt, Artificial Sequence
  Description of Artificial Sequence: Synthetic oligonucleotide
gguguucauguucauagag

SEQ ID NO: 3045907 - RNA, 19 nt, Artificial Sequence
  Description of Artificial Sequence: Synthetic oligonucleotide
cuguaguuguccuucugag

SEQ ID NO: 3045908 - RNA, 19 nt, Artificial Sequence
  Description of Artificial Sequence: Synthetic oligonucleotide
caguagccgaaccaggucc

SEQ ID NO: 3045909 - RNA, 19 nt, Artificial Sequence
  Description of Artificial Sequence: Synthetic oligonucleotide
cucucucuggaacucacgc

SEQ ID NO: 3045910 - RNA, 19 nt, Artificial Sequence
  Description of Artificial Sequence: Synthetic oligonucleotide
uuccacauccucaucugac

SEQ ID NO: 3045911 - RNA, 19 nt, Artificial Sequence
  Description of Artificial Sequence: Synthetic oligonucleotide
aucugacaguagccgaacc

SEQ ID NO: 3045912 - RNA, 19 nt, Artificial Sequence
  Description of Artificial Sequence: Synthetic oligonucleotide
agcuuccacgugaagaggc

SEQ ID NO: 3045913 - RNA, 19 nt, Artificial Sequence
  Description of Artificial Sequence: Synthetic oligonucleotide
guagacacuguaguugucc

SEQ ID NO: 3045914 - RNA, 19 nt, Artificial Sequence
  Description of Artificial Sequence: Synthetic oligonucleotide
ucaucugacaguagccgaa

SEQ ID NO: 3045915 - RNA, 19 nt, Artificial Sequence
  Description of Artificial Sequence: Synthetic oligonucleotide
uuugcaccucaucccagcc

SEQ ID NO: 3045916 - RNA, 19 nt, Artificial Sequence
  Description of Artificial Sequence: Synthetic oligonucleotide
acaguagccgaaccagguc

SEQ ID NO: 3045917 - RNA, 19 nt, Artificial Sequence
  Description of Artificial Sequence: Synthetic oligonucleotide
cugguaauugagagcaaug

SEQ ID NO: 3045918 - RNA, 19 nt, Artificial Sequence
  Description of Artificial Sequence: Synthetic oligonucleotide
ucucucuggaacucacgcc

SEQ ID NO: 3045919 - RNA, 19 nt, Artificial Sequence
  Description of Artificial Sequence: Synthetic oligonucleotide
auguucauagagaguauag

SEQ ID NO: 3045920 - RNA, 19 nt, Artificial Sequence
  Description of Artificial Sequence: Synthetic oligonucleotide
ugcaccucaucccagccuc

SEQ ID NO: 3045921 - RNA, 19 nt, Artificial Sequence
  Description of Artificial Sequence: Synthetic oligonucleotide
cauccugguaauugagagc

SEQ ID NO: 3045922 - RNA, 19 nt, Artificial Sequence
  Description of Artificial Sequence: Synthetic oligonucleotide
uguuguagacacuguaguu

SEQ ID NO: 3045923 - RNA, 19 nt, Artificial Sequence
  Description of Artificial Sequence: Synthetic oligonucleotide
aguuccacauccucaucug

SEQ ID NO: 3045924 - RNA, 19 nt, Artificial Sequence
  Description of Artificial Sequence: Synthetic oligonucleotide
gacacuguaguuguccuuc

SEQ ID NO: 3045925 - RNA, 19 nt, Artificial Sequence
  Description of Artificial Sequence: Synthetic oligonucleotide
gcuagcaggucuuugaaca

SEQ ID NO: 3045926 - RNA, 19 nt, Artificial Sequence
  Description of Artificial Sequence: Synthetic oligonucleotide
aguuguccuucugagugac

SEQ ID NO: 3045927 - RNA, 19 nt, Artificial Sequence
  Description of Artificial Sequence: Synthetic oligonucleotide
augaguuccacauccucau

SEQ ID NO: 3045928 - RNA, 19 nt, Artificial Sequence
  Description of Artificial Sequence: Synthetic oligonucleotide
cugacaguagccgaaccag

SEQ ID NO: 3045929 - RNA, 19 nt, Artificial Sequence
  Description of Artificial Sequence: Synthetic oligonucleotide
caugaguuccacauccuca

SEQ ID NO: 3045930 - RNA, 19 nt, Artificial Sequence
  Description of Artificial Sequence: Synthetic oligonucleotide
agggaggccucgcaccugc

SEQ ID NO: 3045931 - RNA, 19 nt, Artificial Sequence
  Description of Artificial Sequence: Synthetic oligonucleotide
acucacgccucaugagcgc

SEQ ID NO: 3045932 - RNA, 19 nt, Artificial Sequence
  Description of Artificial Sequence: Synthetic oligonucleotide
agagaguauaggccuuuug

SEQ ID NO: 3045933 - RNA, 19 nt, Artificial Sequence
  Description of Artificial Sequence: Synthetic oligonucleotide
cuagcaggucuuugaacag

SEQ ID NO: 3045934 - RNA, 19 nt, Artificial Sequence
  Description of Artificial Sequence: Synthetic oligonucleotide
uagacacuguaguuguccu

SEQ ID NO: 3045935 - RNA, 19 nt, Artificial Sequence
  Description of Artificial Sequence: Synthetic oligonucleotide
gcuguugaggucuuccucc

SEQ ID NO: 3045936 - RNA, 19 nt, Artificial Sequence
  Description of Artificial Sequence: Synthetic oligonucleotide
cucagcauccugguaauug

SEQ ID NO: 3045937 - RNA, 19 nt, Artificial Sequence
  Description of Artificial Sequence: Synthetic oligonucleotide
gguaauugagagcaauguc

SEQ ID NO: 3045938 - RNA, 19 nt, Artificial Sequence
  Description of Artificial Sequence: Synthetic oligonucleotide
auaggccuuuugcugagca

SEQ ID NO: 3045939 - RNA, 19 nt, Artificial Sequence
  Description of Artificial Sequence: Synthetic oligonucleotide
agguuugcaccucauccca

SEQ ID NO: 3045940 - RNA, 19 nt, Artificial Sequence
  Description of Artificial Sequence: Synthetic oligonucleotide
uuccuccacugcaaugucc

SEQ ID NO: 3045941 - RNA, 19 nt, Artificial Sequence
  Description of Artificial Sequence: Synthetic oligonucleotide
aguagccgaaccagguccc

SEQ ID NO: 3045942 - RNA, 19 nt, Artificial Sequence
  Description of Artificial Sequence: Synthetic oligonucleotide
uugaacagaggggugcugu

SEQ ID NO: 3045943 - RNA, 19 nt, Artificial Sequence
  Description of Artificial Sequence: Synthetic oligonucleotide
uuguccuucugagugacau

SEQ ID NO: 3045944 - RNA, 19 nt, Artificial Sequence
  Description of Artificial Sequence: Synthetic oligonucleotide
gagagcaauguccucucuc

SEQ ID NO: 3045945 - RNA, 19 nt, Artificial Sequence
  Description of Artificial Sequence: Synthetic oligonucleotide
guuugcaccucaucccagc

SEQ ID NO: 3045946 - RNA, 19 nt, Artificial Sequence
  Description of Artificial Sequence: Synthetic oligonucleotide
agcgcuagcaggucuuuga

SEQ ID NO: 3045947 - RNA, 19 nt, Artificial Sequence
  Description of Artificial Sequence: Synthetic oligonucleotide
uggagggaggccucgcacc

SEQ ID NO: 3045948 - RNA, 19 nt, Artificial Sequence
  Description of Artificial Sequence: Synthetic oligonucleotide
ggcaccguguuguagacac

SEQ ID NO: 3045949 - RNA, 19 nt, Artificial Sequence
  Description of Artificial Sequence: Synthetic oligonucleotide
guauaggccuuuugcugag

SEQ ID NO: 3045950 - RNA, 19 nt, Artificial Sequence
  Description of Artificial Sequence: Synthetic oligonucleotide
gaccccaaugacucagggc

SEQ ID NO: 3045951 - RNA, 19 nt, Artificial Sequence
  Description of Artificial Sequence: Synthetic oligonucleotide
uuccacgugaagaggcgcu

SEQ ID NO: 3045952 - RNA, 19 nt, Artificial Sequence
  Description of Artificial Sequence: Synthetic oligonucleotide
gacauguagcuuccacgug

SEQ ID NO: 3045953 - RNA, 19 nt, Artificial Sequence
  Description of Artificial Sequence: Synthetic oligonucleotide
ugaggucuuccuccacugc

SEQ ID NO: 3045954 - RNA, 19 nt, Artificial Sequence
  Description of Artificial Sequence: Synthetic oligonucleotide
auguccucucucuggaacu

SEQ ID NO: 3045955 - RNA, 19 nt, Artificial Sequence
  Description of Artificial Sequence: Synthetic oligonucleotide
ucauguucauagagaguau

SEQ ID NO: 3045956 - RNA, 19 nt, Artificial Sequence
  Description of Artificial Sequence: Synthetic oligonucleotide
uugagagcaauguccucuc

SEQ ID NO: 3045957 - RNA, 19 nt, Artificial Sequence
  Description of Artificial Sequence: Synthetic oligonucleotide
agcaggucuuugaacagag

SEQ ID NO: 3045958 - RNA, 19 nt, Artificial Sequence
  Description of Artificial Sequence: Synthetic oligonucleotide
ccucaugagcgcuagcagg

SEQ ID NO: 3045959 - RNA, 19 nt, Artificial Sequence
  Description of Artificial Sequence: Synthetic oligonucleotide
agggcaccguguuguagac

SEQ ID NO: 3045960 - RNA, 19 nt, Artificial Sequence
  Description of Artificial Sequence: Synthetic oligonucleotide
cucaccaugaguuccacau

SEQ ID NO: 3045961 - RNA, 19 nt, Artificial Sequence
  Description of Artificial Sequence: Synthetic oligonucleotide
aggggugcuguugaggucu

SEQ ID NO: 3045962 - RNA, 19 nt, Artificial Sequence
  Description of Artificial Sequence: Synthetic oligonucleotide
acucagggcaccguguugu

SEQ ID NO: 3045963 - RNA, 19 nt, Artificial Sequence
  Description of Artificial Sequence: Synthetic oligonucleotide
acauccucaucugacagua

SEQ ID NO: 3045964 - RNA, 19 nt, Artificial Sequence
  Description of Artificial Sequence: Synthetic oligonucleotide
uagcuuccacgugaagagg

SEQ ID NO: 3045965 - RNA, 19 nt, Artificial Sequence
  Description of Artificial Sequence: Synthetic oligonucleotide
ucaccaugaguuccacauc

SEQ ID NO: 3045966 - RNA, 19 nt, Artificial Sequence
  Description of Artificial Sequence: Synthetic oligonucleotide
uccucucucuggaacucac

SEQ ID NO: 3045967 - RNA, 19 nt, Artificial Sequence
  Description of Artificial Sequence: Synthetic oligonucleotide
cagcauccugguaauugag

SEQ ID NO: 3045968 - RNA, 19 nt, Artificial Sequence
  Description of Artificial Sequence: Synthetic oligonucleotide
ccuucugagugacauguag

SEQ ID NO: 3045969 - RNA, 19 nt, Artificial Sequence
  Description of Artificial Sequence: Synthetic oligonucleotide
ggaacucacgccucaugag

SEQ ID NO: 3045970 - RNA, 19 nt, Artificial Sequence
  Description of Artificial Sequence: Synthetic oligonucleotide
gaacagaggggugcuguug

SEQ ID NO: 3045971 - RNA, 19 nt, Artificial Sequence
  Description of Artificial Sequence: Synthetic oligonucleotide
ugccucaccaugaguucca

SEQ ID NO: 3045972 - RNA, 19 nt, Artificial Sequence
  Description of Artificial Sequence: Synthetic oligonucleotide
guguucauguucauagaga

SEQ ID NO: 3045973 - RNA, 19 nt, Artificial Sequence
  Description of Artificial Sequence: Synthetic oligonucleotide
caccguguuguagacacug

SEQ ID NO: 3045974 - RNA, 19 nt, Artificial Sequence
  Description of Artificial Sequence: Synthetic oligonucleotide
uguagacacuguaguuguc

SEQ ID NO: 3045975 - RNA, 19 nt, Artificial Sequence
  Description of Artificial Sequence: Synthetic oligonucleotide
cucaucugacaguagccga

SEQ ID NO: 3045976 - RNA, 19 nt, Artificial Sequence
  Description of Artificial Sequence: Synthetic oligonucleotide
uuugaacagaggggugcug

SEQ ID NO: 3045977 - RNA, 19 nt, Artificial Sequence
  Description of Artificial Sequence: Synthetic oligonucleotide
uagcaggucuuugaacaga

SEQ ID NO: 3045978 - RNA, 19 nt, Artificial Sequence
  Description of Artificial Sequence: Synthetic oligonucleotide
caucccagccucccugagg

SEQ ID NO: 3045979 - RNA, 19 nt, Artificial Sequence
  Description of Artificial Sequence: Synthetic oligonucleotide
uguugaggucuuccuccac

SEQ ID NO: 3045980 - RNA, 19 nt, Artificial Sequence
  Description of Artificial Sequence: Synthetic oligonucleotide
cguguuguagacacuguag

SEQ ID NO: 3045981 - RNA, 19 nt, Artificial Sequence
  Description of Artificial Sequence: Synthetic oligonucleotide
ugacucagggcaccguguu

SEQ ID NO: 3045982 - RNA, 19 nt, Artificial Sequence
  Description of Artificial Sequence: Synthetic oligonucleotide
ucucuggaacucacgccuc

SEQ ID NO: 3045983 - RNA, 19 nt, Artificial Sequence
  Description of Artificial Sequence: Synthetic oligonucleotide
cuuccacgugaagaggcgc

SEQ ID NO: 3045984 - RNA, 19 nt, Artificial Sequence
  Description of Artificial Sequence: Synthetic oligonucleotide
agggaccccaaugacucag

SEQ ID NO: 3045985 - RNA, 19 nt, Artificial Sequence
  Description of Artificial Sequence: Synthetic oligonucleotide
acagaggggugcuguugag

SEQ ID NO: 3045986 - RNA, 19 nt, Artificial Sequence
  Description of Artificial Sequence: Synthetic oligonucleotide
ucgcaccugccucaccaug

SEQ ID NO: 3045987 - RNA, 19 nt, Artificial Sequence
  Description of Artificial Sequence: Synthetic oligonucleotide
ugagguguucauguucaua

SEQ ID NO: 3045988 - RNA, 19 nt, Artificial Sequence
  Description of Artificial Sequence: Synthetic oligonucleotide
cucucuggaacucacgccu

SEQ ID NO: 3045989 - RNA, 19 nt, Artificial Sequence
  Description of Artificial Sequence: Synthetic oligonucleotide
gacucagggcaccguguug

SEQ ID NO: 3045990 - RNA, 19 nt, Artificial Sequence
  Description of Artificial Sequence: Synthetic oligonucleotide
cugccucaccaugaguucc

SEQ ID NO: 3045991 - RNA, 19 nt, Artificial Sequence
  Description of Artificial Sequence: Synthetic oligonucleotide
gucuuccuccacugcaaug

SEQ ID NO: 3045992 - RNA, 19 nt, Artificial Sequence
  Description of Artificial Sequence: Synthetic oligonucleotide
ucagggcaccguguuguag

SEQ ID NO: 3045993 - RNA, 19 nt, Artificial Sequence
  Description of Artificial Sequence: Synthetic oligonucleotide
cagaggggugcuguugagg

SEQ ID NO: 3045994 - RNA, 19 nt, Artificial Sequence
  Description of Artificial Sequence: Synthetic oligonucleotide
gaggccucgcaccugccuc

SEQ ID NO: 3045995 - RNA, 19 nt, Artificial Sequence
  Description of Artificial Sequence: Synthetic oligonucleotide
ggugcuguugaggucuucc

SEQ ID NO: 3045996 - RNA, 19 nt, Artificial Sequence
  Description of Artificial Sequence: Synthetic oligonucleotide
accugccucaccaugaguu

SEQ ID NO: 3045997 - RNA, 19 nt, Artificial Sequence
  Description of Artificial Sequence: Synthetic oligonucleotide
ugaacagaggggugcuguu

SEQ ID NO: 3045998 - RNA, 19 nt, Artificial Sequence
  Description of Artificial Sequence: Synthetic oligonucleotide
ccucaucugacaguagccg

SEQ ID NO: 3045999 - RNA, 19 nt, Artificial Sequence
  Description of Artificial Sequence: Synthetic oligonucleotide
ucugagugacauguagcuu

SEQ ID NO: 3046000 - RNA, 19 nt, Artificial Sequence
  Description of Artificial Sequence: Synthetic oligonucleotide
guugaggucuuccuccacu

SEQ ID NO: 3046001 - RNA, 19 nt, Artificial Sequence
  Description of Artificial Sequence: Synthetic oligonucleotide
cagggcaccguguuguaga

SEQ ID NO: 3046002 - RNA, 19 nt, Artificial Sequence
  Description of Artificial Sequence: Synthetic oligonucleotide
cuggaacucacgccucaug

SEQ ID NO: 3046003 - RNA, 19 nt, Artificial Sequence
  Description of Artificial Sequence: Synthetic oligonucleotide
guuccacauccucaucuga

SEQ ID NO: 3046004 - RNA, 19 nt, Artificial Sequence
  Description of Artificial Sequence: Synthetic oligonucleotide
ggaccccaaugacucaggg

SEQ ID NO: 3046005 - RNA, 19 nt, Artificial Sequence
  Description of Artificial Sequence: Synthetic oligonucleotide
agcauccugguaauugaga

SEQ ID NO: 3046006 - RNA, 19 nt, Artificial Sequence
  Description of Artificial Sequence: Synthetic oligonucleotide
cucaugagcgcuagcaggu

SEQ ID NO: 3046007 - RNA, 19 nt, Artificial Sequence
  Description of Artificial Sequence: Synthetic oligonucleotide
caucugacaguagccgaac

SEQ ID NO: 3046008 - RNA, 19 nt, Artificial Sequence
  Description of Artificial Sequence: Synthetic oligonucleotide
auguagcuuccacgugaag

SEQ ID NO: 3046009 - RNA, 19 nt, Artificial Sequence
  Description of Artificial Sequence: Synthetic oligonucleotide
uauaggccuuuugcugagc

SEQ ID NO: 3046010 - RNA, 19 nt, Artificial Sequence
  Description of Artificial Sequence: Synthetic oligonucleotide
cuggagggaggccucgcac

SEQ ID NO: 3046011 - RNA, 19 nt, Artificial Sequence
  Description of Artificial Sequence: Synthetic oligonucleotide
cauguagcuuccacgugaa

SEQ ID NO: 3046012 - RNA, 19 nt, Artificial Sequence
  Description of Artificial Sequence: Synthetic oligonucleotide
guccuucugagugacaugu

SEQ ID NO: 3046013 - RNA, 19 nt, Artificial Sequence
  Description of Artificial Sequence: Synthetic oligonucleotide
ccugagguguucauguuca

SEQ ID NO: 3046014 - RNA, 19 nt, Artificial Sequence
  Description of Artificial Sequence: Synthetic oligonucleotide
gccacagggaccccaauga

SEQ ID NO: 3046015 - RNA, 19 nt, Artificial Sequence
  Description of Artificial Sequence: Synthetic oligonucleotide
gcaauguccucucucugga

SEQ ID NO: 3046016 - RNA, 19 nt, Artificial Sequence
  Description of Artificial Sequence: Synthetic oligonucleotide
cauccucaucugacaguag

SEQ ID NO: 3046017 - RNA, 19 nt, Artificial Sequence
  Description of Artificial Sequence: Synthetic oligonucleotide
gucuuugaacagaggggug

SEQ ID NO: 3046018 - RNA, 19 nt, Artificial Sequence
  Description of Artificial Sequence: Synthetic oligonucleotide
cacuguaguuguccuucug

SEQ ID NO: 3046019 - RNA, 19 nt, Artificial Sequence
  Description of Artificial Sequence: Synthetic oligonucleotide
auagagaguauaggccuuu

SEQ ID NO: 3046020 - RNA, 19 nt, Artificial Sequence
  Description of Artificial Sequence: Synthetic oligonucleotide
uguccucucucuggaacuc

SEQ ID NO: 3046021 - RNA, 19 nt, Artificial Sequence
  Description of Artificial Sequence: Synthetic oligonucleotide
cauguucauagagaguaua

SEQ ID NO: 3046022 - RNA, 19 nt, Artificial Sequence
  Description of Artificial Sequence: Synthetic oligonucleotide
cgugaagaggcgcuucugg

SEQ ID NO: 3046023 - RNA, 19 nt, Artificial Sequence
  Description of Artificial Sequence: Synthetic oligonucleotide
ggucuuugaacagaggggu

SEQ ID NO: 3046024 - RNA, 19 nt, Artificial Sequence
  Description of Artificial Sequence: Synthetic oligonucleotide
agacacuguaguuguccuu

SEQ ID NO: 3046025 - RNA, 19 nt, Artificial Sequence
  Description of Artificial Sequence: Synthetic oligonucleotide
cucccugagguguucaugu

SEQ ID NO: 3046026 - RNA, 19 nt, Artificial Sequence
  Description of Artificial Sequence: Synthetic oligonucleotide
cuucuggagggaggccucg

SEQ ID NO: 3046027 - RNA, 19 nt, Artificial Sequence
  Description of Artificial Sequence: Synthetic oligonucleotide
cuuccuccacugcaauguc

SEQ ID NO: 3046028 - RNA, 19 nt, Artificial Sequence
  Description of Artificial Sequence: Synthetic oligonucleotide
gaggcgcuucuggagggag

SEQ ID NO: 3046029 - RNA, 19 nt, Artificial Sequence
  Description of Artificial Sequence: Synthetic oligonucleotide
gccucaugagcgcuagcag

SEQ ID NO: 3046030 - RNA, 19 nt, Artificial Sequence
  Description of Artificial Sequence: Synthetic oligonucleotide
cuguugaggucuuccucca

SEQ ID NO: 3046031 - RNA, 19 nt, Artificial Sequence
  Description of Artificial Sequence: Synthetic oligonucleotide
uccuucugagugacaugua

SEQ ID NO: 3046032 - RNA, 19 nt, Artificial Sequence
  Description of Artificial Sequence: Synthetic oligonucleotide
uccugguaauugagagcaa

SEQ ID NO: 3046033 - RNA, 19 nt, Artificial Sequence
  Description of Artificial Sequence: Synthetic oligonucleotide
cccuccuugccacagggac

SEQ ID NO: 3046034 - RNA, 19 nt, Artificial Sequence
  Description of Artificial Sequence: Synthetic oligonucleotide
gcuuccacgugaagaggcg

SEQ ID NO: 3046035 - RNA, 19 nt, Artificial Sequence
  Description of Artificial Sequence: Synthetic oligonucleotide
augacucagggcaccgugu

SEQ ID NO: 3046036 - RNA, 19 nt, Artificial Sequence
  Description of Artificial Sequence: Synthetic oligonucleotide
ucuggaacucacgccucau

SEQ ID NO: 3046037 - RNA, 19 nt, Artificial Sequence
  Description of Artificial Sequence: Synthetic oligonucleotide
acgccucaugagcgcuagc

SEQ ID NO: 3046038 - RNA, 19 nt, Artificial Sequence
  Description of Artificial Sequence: Synthetic oligonucleotide
ucaugagcgcuagcagguc

SEQ ID NO: 3046039 - RNA, 19 nt, Artificial Sequence
  Description of Artificial Sequence: Synthetic oligonucleotide
cacagggaccccaaugacu

SEQ ID NO: 3046040 - RNA, 19 nt, Artificial Sequence
  Description of Artificial Sequence: Synthetic oligonucleotide
ccuccuugccacagggacc

SEQ ID NO: 3046041 - RNA, 19 nt, Artificial Sequence
  Description of Artificial Sequence: Synthetic oligonucleotide
aggccucgcaccugccuca

SEQ ID NO: 3046042 - RNA, 19 nt, Artificial Sequence
  Description of Artificial Sequence: Synthetic oligonucleotide
uucuggagggaggccucgc

SEQ ID NO: 3046043 - RNA, 19 nt, Artificial Sequence
  Description of Artificial Sequence: Synthetic oligonucleotide
accucaucccagccucccu

SEQ ID NO: 3046044 - RNA, 19 nt, Artificial Sequence
  Description of Artificial Sequence: Synthetic oligonucleotide
cacgccucaugagcgcuag

SEQ ID NO: 3046045 - RNA, 19 nt, Artificial Sequence
  Description of Artificial Sequence: Synthetic oligonucleotide
caccucaucccagccuccc

SEQ ID NO: 3046046 - RNA, 19 nt, Artificial Sequence
  Description of Artificial Sequence: Synthetic oligonucleotide
cuugccacagggaccccaa

SEQ ID NO: 3046047 - RNA, 19 nt, Artificial Sequence
  Description of Artificial Sequence: Synthetic oligonucleotide
ggcgcuucuggagggaggc

SEQ ID NO: 3046048 - RNA, 19 nt, Artificial Sequence
  Description of Artificial Sequence: Synthetic oligonucleotide
accaugaguuccacauccu

SEQ ID NO: 3046049 - RNA, 19 nt, Artificial Sequence
  Description of Artificial Sequence: Synthetic oligonucleotide
uagagaguauaggccuuuu

SEQ ID NO: 3046050 - RNA, 19 nt, Artificial Sequence
  Description of Artificial Sequence: Synthetic oligonucleotide
cucuggaacucacgccuca

SEQ ID NO: 3046051 - RNA, 19 nt, Artificial Sequence
  Description of Artificial Sequence: Synthetic oligonucleotide
ucacgccucaugagcgcua

SEQ ID NO: 3046052 - RNA, 19 nt, Artificial Sequence
  Description of Artificial Sequence: Synthetic oligonucleotide
ccaugaguuccacauccuc

SEQ ID NO: 3046053 - RNA, 19 nt, Artificial Sequence
  Description of Artificial Sequence: Synthetic oligonucleotide
ccucucucuggaacucacg

SEQ ID NO: 3046054 - RNA, 19 nt, Artificial Sequence
  Description of Artificial Sequence: Synthetic oligonucleotide
gguuugcaccucaucccag

SEQ ID NO: 3046055 - RNA, 19 nt, Artificial Sequence
  Description of Artificial Sequence: Synthetic oligonucleotide
aggucuuccuccacugcaa

SEQ ID NO: 3046056 - RNA, 19 nt, Artificial Sequence
  Description of Artificial Sequence: Synthetic oligonucleotide
ccaaugacucagggcaccg

SEQ ID NO: 3046057 - RNA, 19 nt, Artificial Sequence
  Description of Artificial Sequence: Synthetic oligonucleotide
gagcgcuagcaggucuuug

SEQ ID NO: 3046058 - RNA, 19 nt, Artificial Sequence
  Description of Artificial Sequence: Synthetic oligonucleotide
guagccgaaccaggucccc

SEQ ID NO: 3046059 - RNA, 19 nt, Artificial Sequence
  Description of Artificial Sequence: Synthetic oligonucleotide
ggccuuuugcugagcaccc

SEQ ID NO: 3046060 - RNA, 19 nt, Artificial Sequence
  Description of Artificial Sequence: Synthetic oligonucleotide
gcaccugccucaccaugag

SEQ ID NO: 3046061 - RNA, 19 nt, Artificial Sequence
  Description of Artificial Sequence: Synthetic oligonucleotide
aggcgcuucuggagggagg

SEQ ID NO: 3046062 - RNA, 19 nt, Artificial Sequence
  Description of Artificial Sequence: Synthetic oligonucleotide
uccacgugaagaggcgcuu

SEQ ID NO: 3046063 - RNA, 19 nt, Artificial Sequence
  Description of Artificial Sequence: Synthetic oligonucleotide
guucauguucauagagagu

SEQ ID NO: 3046064 - RNA, 19 nt, Artificial Sequence
  Description of Artificial Sequence: Synthetic oligonucleotide
cauagagaguauaggccuu

SEQ ID NO: 3046065 - RNA, 19 nt, Artificial Sequence
  Description of Artificial Sequence: Synthetic oligonucleotide
ccucaucccagccucccug

SEQ ID NO: 3046066 - RNA, 19 nt, Artificial Sequence
  Description of Artificial Sequence: Synthetic oligonucleotide
cccugagguguucauguuc

SEQ ID NO: 3046067 - RNA, 19 nt, Artificial Sequence
  Description of Artificial Sequence: Synthetic oligonucleotide
caugagcgcuagcaggucu

SEQ ID NO: 3046068 - RNA, 19 nt, Artificial Sequence
  Description of Artificial Sequence: Synthetic oligonucleotide
gcaggucuuugaacagagg

SEQ ID NO: 3046069 - RNA, 19 nt, Artificial Sequence
  Description of Artificial Sequence: Synthetic oligonucleotide
accguguuguagacacugu

SEQ ID NO: 3046070 - RNA, 19 nt, Artificial Sequence
  Description of Artificial Sequence: Synthetic oligonucleotide
cacauccucaucugacagu

SEQ ID NO: 3046071 - RNA, 19 nt, Artificial Sequence
  Description of Artificial Sequence: Synthetic oligonucleotide
cuuugaacagaggggugcu

SEQ ID NO: 3046072 - RNA, 19 nt, Artificial Sequence
  Description of Artificial Sequence: Synthetic oligonucleotide
cccaaugacucagggcacc

SEQ ID NO: 3046073 - RNA, 19 nt, Artificial Sequence
  Description of Artificial Sequence: Synthetic oligonucleotide
uugccacagggaccccaau

SEQ ID NO: 3046074 - RNA, 19 nt, Artificial Sequence
  Description of Artificial Sequence: Synthetic oligonucleotide
caauguccucucucuggaa

SEQ ID NO: 3046075 - RNA, 19 nt, Artificial Sequence
  Description of Artificial Sequence: Synthetic oligonucleotide
ccugccucaccaugaguuc

SEQ ID NO: 3046076 - RNA, 19 nt, Artificial Sequence
  Description of Artificial Sequence: Synthetic oligonucleotide
augagcgcuagcaggucuu

SEQ ID NO: 3046077 - RNA, 19 nt, Artificial Sequence
  Description of Artificial Sequence: Synthetic oligonucleotide
ugagcgcuagcaggucuuu

SEQ ID NO: 3046078 - RNA, 19 nt, Artificial Sequence
  Description of Artificial Sequence: Synthetic oligonucleotide
gggaccccaaugacucagg

SEQ ID NO: 3046079 - RNA, 19 nt, Artificial Sequence
  Description of Artificial Sequence: Synthetic oligonucleotide
ucccagccucccugaggug

SEQ ID NO: 3046080 - RNA, 19 nt, Artificial Sequence
  Description of Artificial Sequence: Synthetic oligonucleotide
ccccucagcauccugguaa

SEQ ID NO: 3046081 - RNA, 19 nt, Artificial Sequence
  Description of Artificial Sequence: Synthetic oligonucleotide
agaggcgcuucuggaggga

SEQ ID NO: 3046082 - RNA, 19 nt, Artificial Sequence
  Description of Artificial Sequence: Synthetic oligonucleotide
ccacagggaccccaaugac

SEQ ID NO: 3046083 - RNA, 19 nt, Artificial Sequence
  Description of Artificial Sequence: Synthetic oligonucleotide
ccucgcaccugccucacca

SEQ ID NO: 3046084 - RNA, 19 nt, Artificial Sequence
  Description of Artificial Sequence: Synthetic oligonucleotide
gagggaggccucgcaccug

SEQ ID NO: 3046085 - RNA, 19 nt, Artificial Sequence
  Description of Artificial Sequence: Synthetic oligonucleotide
cacgugaagaggcgcuucu

SEQ ID NO: 3046086 - RNA, 19 nt, Artificial Sequence
  Description of Artificial Sequence: Synthetic oligonucleotide
gagugacauguagcuucca

SEQ ID NO: 3046087 - RNA, 19 nt, Artificial Sequence
  Description of Artificial Sequence: Synthetic oligonucleotide
guccucucucuggaacuca

SEQ ID NO: 3046088 - RNA, 19 nt, Artificial Sequence
  Description of Artificial Sequence: Synthetic oligonucleotide
cgcuagcaggucuuugaac

SEQ ID NO: 3046089 - RNA, 19 nt, Artificial Sequence
  Description of Artificial Sequence: Synthetic oligonucleotide
ccccaaugacucagggcac

SEQ ID NO: 3046090 - RNA, 19 nt, Artificial Sequence
  Description of Artificial Sequence: Synthetic oligonucleotide
agccucccugagguguuca

SEQ ID NO: 3046091 - RNA, 19 nt, Artificial Sequence
  Description of Artificial Sequence: Synthetic oligonucleotide
cagggaccccaaugacuca

SEQ ID NO: 3046092 - RNA, 19 nt, Artificial Sequence
  Description of Artificial Sequence: Synthetic oligonucleotide
ggagggaggccucgcaccu

SEQ ID NO: 3046093 - RNA, 19 nt, Artificial Sequence
  Description of Artificial Sequence: Synthetic oligonucleotide
gcgcuagcaggucuuugaa

SEQ ID NO: 3046094 - RNA, 19 nt, Artificial Sequence
  Description of Artificial Sequence: Synthetic oligonucleotide
gccuuuugcugagcacccc

SEQ ID NO: 3046095 - RNA, 19 nt, Artificial Sequence
  Description of Artificial Sequence: Synthetic oligonucleotide
ccucccugagguguucaug

SEQ ID NO: 3046096 - RNA, 19 nt, Artificial Sequence
  Description of Artificial Sequence: Synthetic oligonucleotide
ccguguuguagacacugua

SEQ ID NO: 3046097 - RNA, 19 nt, Artificial Sequence
  Description of Artificial Sequence: Synthetic oligonucleotide
gcuucuggagggaggccuc

SEQ ID NO: 3046098 - RNA, 19 nt, Artificial Sequence
  Description of Artificial Sequence: Synthetic oligonucleotide
cucagggcaccguguugua

SEQ ID NO: 3046099 - RNA, 19 nt, Artificial Sequence
  Description of Artificial Sequence: Synthetic oligonucleotide
uccuugccacagggacccc

SEQ ID NO: 3046100 - RNA, 19 nt, Artificial Sequence
  Description of Artificial Sequence: Synthetic oligonucleotide
cucacgccucaugagcgcu

SEQ ID NO: 3046101 - RNA, 19 nt, Artificial Sequence
  Description of Artificial Sequence: Synthetic oligonucleotide
cgcaccugccucaccauga

SEQ ID NO: 3046102 - RNA, 19 nt, Artificial Sequence
  Description of Artificial Sequence: Synthetic oligonucleotide
ccugguaauugagagcaau

SEQ ID NO: 3046103 - RNA, 19 nt, Artificial Sequence
  Description of Artificial Sequence: Synthetic oligonucleotide
ccacgugaagaggcgcuuc

SEQ ID NO: 3046104 - RNA, 19 nt, Artificial Sequence
  Description of Artificial Sequence: Synthetic oligonucleotide
caaugacucagggcaccgu

SEQ ID NO: 3046105 - RNA, 19 nt, Artificial Sequence
  Description of Artificial Sequence: Synthetic oligonucleotide
cgccucaugagcgcuagca

SEQ ID NO: 3046106 - RNA, 19 nt, Artificial Sequence
  Description of Artificial Sequence: Synthetic oligonucleotide
cugagguguucauguucau

SEQ ID NO: 3046107 - RNA, 19 nt, Artificial Sequence
  Description of Artificial Sequence: Synthetic oligonucleotide
ccucaccaugaguuccaca

SEQ ID NO: 3046108 - RNA, 19 nt, Artificial Sequence
  Description of Artificial Sequence: Synthetic oligonucleotide
gcaccucaucccagccucc

SEQ ID NO: 3046109 - RNA, 19 nt, Artificial Sequence
  Description of Artificial Sequence: Synthetic oligonucleotide
ggaggccucgcaccugccu

SEQ ID NO: 3046110 - RNA, 19 nt, Artificial Sequence
  Description of Artificial Sequence: Synthetic oligonucleotide
cagccucccugagguguuc

SEQ ID NO: 3046111 - RNA, 19 nt, Artificial Sequence
  Description of Artificial Sequence: Synthetic oligonucleotide
gccucaccaugaguuccac

SEQ ID NO: 3046112 - RNA, 19 nt, Artificial Sequence
  Description of Artificial Sequence: Synthetic oligonucleotide
cucgcaccugccucaccau

SEQ ID NO: 3046113 - RNA, 19 nt, Artificial Sequence
  Description of Artificial Sequence: Synthetic oligonucleotide
caccugccucaccaugagu

SEQ ID NO: 3046114 - RNA, 19 nt, Artificial Sequence
  Description of Artificial Sequence: Synthetic oligonucleotide
ccuugccacagggacccca

SEQ ID NO: 3046115 - RNA, 19 nt, Artificial Sequence
  Description of Artificial Sequence: Synthetic oligonucleotide
gggcaccguguuguagaca

SEQ ID NO: 3046116 - RNA, 19 nt, Artificial Sequence
  Description of Artificial Sequence: Synthetic oligonucleotide
gccucgcaccugccucacc

SEQ ID NO: 3046117 - RNA, 19 nt, Artificial Sequence
  Description of Artificial Sequence: Synthetic oligonucleotide
gcgcuucuggagggaggcc

SEQ ID NO: 3046118 - RNA, 19 nt, Artificial Sequence
  Description of Artificial Sequence: Synthetic oligonucleotide
gggaggccucgcaccugcc

SEQ ID NO: 3046119 - RNA, 19 nt, Artificial Sequence
  Description of Artificial Sequence: Synthetic oligonucleotide
ggccucgcaccugccucac

SEQ ID NO: 3046120 - RNA, 19 nt, Artificial Sequence
  Description of Artificial Sequence: Synthetic oligonucleotide
cccagccucccugaggugu

SEQ ID NO: 3046121 - RNA, 19 nt, Artificial Sequence
  Description of Artificial Sequence: Synthetic oligonucleotide
ccccuccuugccacaggga

SEQ ID NO: 3046122 - RNA, 19 nt, Artificial Sequence
  Description of Artificial Sequence: Synthetic oligonucleotide
cccucagcauccugguaau

SEQ ID NO: 3046123 - RNA, 19 nt, Artificial Sequence
  Description of Artificial Sequence: Synthetic oligonucleotide
cgcuucuggagggaggccu

SEQ ID NO: 3046124 - RNA, 19 nt, Artificial Sequence
  Description of Artificial Sequence: Synthetic oligonucleotide
gccucccugagguguucau

SEQ ID NO: 3046125 - RNA, 19 nt, Artificial Sequence
  Description of Artificial Sequence: Synthetic oligonucleotide
gcaccguguuguagacacu

SEQ ID NO: 3046126 - RNA, 19 nt, Artificial Sequence
  Description of Artificial Sequence: Synthetic oligonucleotide
ccagccucccugagguguu

SEQ ID NO: 3046127 - RNA, 19 nt, Artificial Sequence
  Description of Artificial Sequence: Synthetic oligonucleotide
ggggugcuguugaggucuu

SEQ ID NO: 3046128 - RNA, 19 nt, Artificial Sequence
  Description of Artificial Sequence: Synthetic oligonucleotide
ccucagcauccugguaauu

SEQ ID NO: 3046129 - RNA, 19 nt, Artificial Sequence
  Description of Artificial Sequence: Synthetic oligonucleotide
aaugaauucacccacuggc

SEQ ID NO: 3046130 - RNA, 19 nt, Artificial Sequence
  Description of Artificial Sequence: Synthetic oligonucleotide
agaaagaccaccuuuauuc

SEQ ID NO: 3046131 - RNA, 19 nt, Artificial Sequence
  Description of Artificial Sequence: Synthetic oligonucleotide
uuauucuccagguauguag

SEQ ID NO: 3046132 - RNA, 19 nt, Artificial Sequence
  Description of Artificial Sequence: Synthetic oligonucleotide
aacaagggaaacuugucca

SEQ ID NO: 3046133 - RNA, 19 nt, Artificial Sequence
  Description of Artificial Sequence: Synthetic oligonucleotide
aagaccaccuuuauucucc

SEQ ID NO: 3046134 - RNA, 19 nt, Artificial Sequence
  Description of Artificial Sequence: Synthetic oligonucleotide
agcgaaugaauucacccac

SEQ ID NO: 3046135 - RNA, 19 nt, Artificial Sequence
  Description of Artificial Sequence: Synthetic oligonucleotide
uuuagaaagaccaccuuua

SEQ ID NO: 3046136 - RNA, 19 nt, Artificial Sequence
  Description of Artificial Sequence: Synthetic oligonucleotide
aaagaccaccuuuauucuc

SEQ ID NO: 3046137 - RNA, 19 nt, Artificial Sequence
  Description of Artificial Sequence: Synthetic oligonucleotide
agguauguagcugagcccc

SEQ ID NO: 3046138 - RNA, 19 nt, Artificial Sequence
  Description of Artificial Sequence: Synthetic oligonucleotide
gaaacuuguccacaaggcc

SEQ ID NO: 3046139 - RNA, 19 nt, Artificial Sequence
  Description of Artificial Sequence: Synthetic oligonucleotide
uuucuuuagaaagaccacc

SEQ ID NO: 3046140 - RNA, 19 nt, Artificial Sequence
  Description of Artificial Sequence: Synthetic oligonucleotide
gaacaagggaaacuugucc

SEQ ID NO: 3046141 - RNA, 19 nt, Artificial Sequence
  Description of Artificial Sequence: Synthetic oligonucleotide
ucuucguuggggcaaaaga

SEQ ID NO: 3046142 - RNA, 19 nt, Artificial Sequence
  Description of Artificial Sequence: Synthetic oligonucleotide
uucuuuagaaagaccaccu

SEQ ID NO: 3046143 - RNA, 19 nt, Artificial Sequence
  Description of Artificial Sequence: Synthetic oligonucleotide
uauucuccagguauguagc

SEQ ID NO: 3046144 - RNA, 19 nt, Artificial Sequence
  Description of Artificial Sequence: Synthetic oligonucleotide
ucacauguguucugggugg

SEQ ID NO: 3046145 - RNA, 19 nt, Artificial Sequence
  Description of Artificial Sequence: Synthetic oligonucleotide
accaccuuuauucuccagg

SEQ ID NO: 3046146 - RNA, 19 nt, Artificial Sequence
  Description of Artificial Sequence: Synthetic oligonucleotide
gaauucacccacuggcugg

SEQ ID NO: 3046147 - RNA, 19 nt, Artificial Sequence
  Description of Artificial Sequence: Synthetic oligonucleotide
gaaugaauucacccacugg

SEQ ID NO: 3046148 - RNA, 19 nt, Artificial Sequence
  Description of Artificial Sequence: Synthetic oligonucleotide
uccucaguggccuucagug

SEQ ID NO: 3046149 - RNA, 19 nt, Artificial Sequence
  Description of Artificial Sequence: Synthetic oligonucleotide
cuucguuggggcaaaagag

SEQ ID NO: 3046150 - RNA, 19 nt, Artificial Sequence
  Description of Artificial Sequence: Synthetic oligonucleotide
uuuucuuuagaaagaccac

SEQ ID NO: 3046151 - RNA, 19 nt, Artificial Sequence
  Description of Artificial Sequence: Synthetic oligonucleotide
uuguacacagcagugaaca

SEQ ID NO: 3046152 - RNA, 19 nt, Artificial Sequence
  Description of Artificial Sequence: Synthetic oligonucleotide
uucguuggggcaaaagagc

SEQ ID NO: 3046153 - RNA, 19 nt, Artificial Sequence
  Description of Artificial Sequence: Synthetic oligonucleotide
gaugcuguggagcucccgg

SEQ ID NO: 3046154 - RNA, 19 nt, Artificial Sequence
  Description of Artificial Sequence: Synthetic oligonucleotide
ucauagcacaccuuguaca

SEQ ID NO: 3046155 - RNA, 19 nt, Artificial Sequence
  Description of Artificial Sequence: Synthetic oligonucleotide
ugaauucacccacuggcug

SEQ ID NO: 3046156 - RNA, 19 nt, Artificial Sequence
  Description of Artificial Sequence: Synthetic oligonucleotide
guagcugagccccacagcc

SEQ ID NO: 3046157 - RNA, 19 nt, Artificial Sequence
  Description of Artificial Sequence: Synthetic oligonucleotide
uucggcuugucuucguugg

SEQ ID NO: 3046158 - RNA, 19 nt, Artificial Sequence
  Description of Artificial Sequence: Synthetic oligonucleotide
aauucacccacuggcuggc

SEQ ID NO: 3046159 - RNA, 19 nt, Artificial Sequence
  Description of Artificial Sequence: Synthetic oligonucleotide
uagcacaccuuguacacag

SEQ ID NO: 3046160 - RNA, 19 nt, Artificial Sequence
  Description of Artificial Sequence: Synthetic oligonucleotide
cuggagagcauucugauga

SEQ ID NO: 3046161 - RNA, 19 nt, Artificial Sequence
  Description of Artificial Sequence: Synthetic oligonucleotide
accuuuauucuccagguau

SEQ ID NO: 3046162 - RNA, 19 nt, Artificial Sequence
  Description of Artificial Sequence: Synthetic oligonucleotide
aaggcccuuguguuggagg

SEQ ID NO: 3046163 - RNA, 19 nt, Artificial Sequence
  Description of Artificial Sequence: Synthetic oligonucleotide
gagagcauucugaugacag

SEQ ID NO: 3046164 - RNA, 19 nt, Artificial Sequence
  Description of Artificial Sequence: Synthetic oligonucleotide
uuguguuggaggaugcugu

SEQ ID NO: 3046165 - RNA, 19 nt, Artificial Sequence
  Description of Artificial Sequence: Synthetic oligonucleotide
acagcuucggcuugucuuc

SEQ ID NO: 3046166 - RNA, 19 nt, Artificial Sequence
  Description of Artificial Sequence: Synthetic oligonucleotide
ucuccagguauguagcuga

SEQ ID NO: 3046167 - RNA, 19 nt, Artificial Sequence
  Description of Artificial Sequence: Synthetic oligonucleotide
uucagugaggacccuguug

SEQ ID NO: 3046168 - RNA, 19 nt, Artificial Sequence
  Description of Artificial Sequence: Synthetic oligonucleotide
cauagcacaccuuguacac

SEQ ID NO: 3046169 - RNA, 19 nt, Artificial Sequence
  Description of Artificial Sequence: Synthetic oligonucleotide
acaccuuguacacagcagu

SEQ ID NO: 3046170 - RNA, 19 nt, Artificial Sequence
  Description of Artificial Sequence: Synthetic oligonucleotide
agagcauucugaugacagg

SEQ ID NO: 3046171 - RNA, 19 nt, Artificial Sequence
  Description of Artificial Sequence: Synthetic oligonucleotide
uguccuggggcccuggccc

SEQ ID NO: 3046172 - RNA, 19 nt, Artificial Sequence
  Description of Artificial Sequence: Synthetic oligonucleotide
ugaacaagggaaacuuguc

SEQ ID NO: 3046173 - RNA, 19 nt, Artificial Sequence
  Description of Artificial Sequence: Synthetic oligonucleotide
gggaaacuuguccacaagg

SEQ ID NO: 3046174 - RNA, 19 nt, Artificial Sequence
  Description of Artificial Sequence: Synthetic oligonucleotide
ucguuggggcaaaagagcu

SEQ ID NO: 3046175 - RNA, 19 nt, Artificial Sequence
  Description of Artificial Sequence: Synthetic oligonucleotide
ugacaggugucacagcuuc

SEQ ID NO: 3046176 - RNA, 19 nt, Artificial Sequence
  Description of Artificial Sequence: Synthetic oligonucleotide
acagcagugaacaagggaa

SEQ ID NO: 3046177 - RNA, 19 nt, Artificial Sequence
  Description of Artificial Sequence: Synthetic oligonucleotide
cucacauguguucugggug

SEQ ID NO: 3046178 - RNA, 19 nt, Artificial Sequence
  Description of Artificial Sequence: Synthetic oligonucleotide
cugaugacaggugucacag

SEQ ID NO: 3046179 - RNA, 19 nt, Artificial Sequence
  Description of Artificial Sequence: Synthetic oligonucleotide
ucugaugacaggugucaca

SEQ ID NO: 3046180 - RNA, 19 nt, Artificial Sequence
  Description of Artificial Sequence: Synthetic oligonucleotide
uuagaaagaccaccuuuau

SEQ ID NO: 3046181 - RNA, 19 nt, Artificial Sequence
  Description of Artificial Sequence: Synthetic oligonucleotide
gaugacaggugucacagcu

SEQ ID NO: 3046182 - RNA, 19 nt, Artificial Sequence
  Description of Artificial Sequence: Synthetic oligonucleotide
guuggggcaaaagagcugc

SEQ ID NO: 3046183 - RNA, 19 nt, Artificial Sequence
  Description of Artificial Sequence: Synthetic oligonucleotide
aagggaaacuuguccacaa

SEQ ID NO: 3046184 - RNA, 19 nt, Artificial Sequence
  Description of Artificial Sequence: Synthetic oligonucleotide
cucaguggccuucagugag

SEQ ID NO: 3046185 - RNA, 19 nt, Artificial Sequence
  Description of Artificial Sequence: Synthetic oligonucleotide
guacacagcagugaacaag

SEQ ID NO: 3046186 - RNA, 19 nt, Artificial Sequence
  Description of Artificial Sequence: Synthetic oligonucleotide
ucaguggccuucagugagg

SEQ ID NO: 3046187 - RNA, 19 nt, Artificial Sequence
  Description of Artificial Sequence: Synthetic oligonucleotide
uguagcugagccccacagc

SEQ ID NO: 3046188 - RNA, 19 nt, Artificial Sequence
  Description of Artificial Sequence: Synthetic oligonucleotide
gcagcgaaugaauucaccc

SEQ ID NO: 3046189 - RNA, 19 nt, Artificial Sequence
  Description of Artificial Sequence: Synthetic oligonucleotide
ccagguauguagcugagcc

SEQ ID NO: 3046190 - RNA, 19 nt, Artificial Sequence
  Description of Artificial Sequence: Synthetic oligonucleotide
auguagcugagccccacag

SEQ ID NO: 3046191 - RNA, 19 nt, Artificial Sequence
  Description of Artificial Sequence: Synthetic oligonucleotide
uggaggaugcuguggagcu

SEQ ID NO: 3046192 - RNA, 19 nt, Artificial Sequence
  Description of Artificial Sequence: Synthetic oligonucleotide
uggccuucagugaggaccc

SEQ ID NO: 3046193 - RNA, 19 nt, Artificial Sequence
  Description of Artificial Sequence: Synthetic oligonucleotide
acaggugucacagcuucgg

SEQ ID NO: 3046194 - RNA, 19 nt, Artificial Sequence
  Description of Artificial Sequence: Synthetic oligonucleotide
agcagugaacaagggaaac

SEQ ID NO: 3046195 - RNA, 19 nt, Artificial Sequence
  Description of Artificial Sequence: Synthetic oligonucleotide
uuggaggaugcuguggagc

SEQ ID NO: 3046196 - RNA, 19 nt, Artificial Sequence
  Description of Artificial Sequence: Synthetic oligonucleotide
auucugaugacagguguca

SEQ ID NO: 3046197 - RNA, 19 nt, Artificial Sequence
  Description of Artificial Sequence: Synthetic oligonucleotide
uccacaaggcccuuguguu

SEQ ID NO: 3046198 - RNA, 19 nt, Artificial Sequence
  Description of Artificial Sequence: Synthetic oligonucleotide
ucuuuagaaagaccaccuu

SEQ ID NO: 3046199 - RNA, 19 nt, Artificial Sequence
  Description of Artificial Sequence: Synthetic oligonucleotide
acucacauguguucugggu

SEQ ID NO: 3046200 - RNA, 19 nt, Artificial Sequence
  Description of Artificial Sequence: Synthetic oligonucleotide
uagaaagaccaccuuuauu

SEQ ID NO: 3046201 - RNA, 19 nt, Artificial Sequence
  Description of Artificial Sequence: Synthetic oligonucleotide
cuuguacacagcagugaac

SEQ ID NO: 3046202 - RNA, 19 nt, Artificial Sequence
  Description of Artificial Sequence: Synthetic oligonucleotide
gaggaugcuguggagcucc

SEQ ID NO: 3046203 - RNA, 19 nt, Artificial Sequence
  Description of Artificial Sequence: Synthetic oligonucleotide
ucugggugguucugcaggc

SEQ ID NO: 3046204 - RNA, 19 nt, Artificial Sequence
  Description of Artificial Sequence: Synthetic oligonucleotide
gacccuguuggcuggggag

SEQ ID NO: 3046205 - RNA, 19 nt, Artificial Sequence
  Description of Artificial Sequence: Synthetic oligonucleotide
uguucugggugguucugca

SEQ ID NO: 3046206 - RNA, 19 nt, Artificial Sequence
  Description of Artificial Sequence: Synthetic oligonucleotide
ggaaacuuguccacaaggc

SEQ ID NO: 3046207 - RNA, 19 nt, Artificial Sequence
  Description of Artificial Sequence: Synthetic oligonucleotide
cauucugaugacagguguc

SEQ ID NO: 3046208 - RNA, 19 nt, Artificial Sequence
  Description of Artificial Sequence: Synthetic oligonucleotide
cacaccuuguacacagcag

SEQ ID NO: 3046209 - RNA, 19 nt, Artificial Sequence
  Description of Artificial Sequence: Synthetic oligonucleotide
cuuguguuggaggaugcug

SEQ ID NO: 3046210 - RNA, 19 nt, Artificial Sequence
  Description of Artificial Sequence: Synthetic oligonucleotide
uuguccacaaggcccuugu

SEQ ID NO: 3046211 - RNA, 19 nt, Artificial Sequence
  Description of Artificial Sequence: Synthetic oligonucleotide
uggggaguccuggagagca

SEQ ID NO: 3046212 - RNA, 19 nt, Artificial Sequence
  Description of Artificial Sequence: Synthetic oligonucleotide
aguccuggagagcauucug

SEQ ID NO: 3046213 - RNA, 19 nt, Artificial Sequence
  Description of Artificial Sequence: Synthetic oligonucleotide
aggugucacagcuucggcu

SEQ ID NO: 3046214 - RNA, 19 nt, Artificial Sequence
  Description of Artificial Sequence: Synthetic oligonucleotide
ucugcaggcagcgaaugaa

SEQ ID NO: 3046215 - RNA, 19 nt, Artificial Sequence
  Description of Artificial Sequence: Synthetic oligonucleotide
uauguagcugagccccaca

SEQ ID NO: 3046216 - RNA, 19 nt, Artificial Sequence
  Description of Artificial Sequence: Synthetic oligonucleotide
cagguauguagcugagccc

SEQ ID NO: 3046217 - RNA, 19 nt, Artificial Sequence
  Description of Artificial Sequence: Synthetic oligonucleotide
uucacccacuggcuggccc

SEQ ID NO: 3046218 - RNA, 19 nt, Artificial Sequence
  Description of Artificial Sequence: Synthetic oligonucleotide
agggaaacuuguccacaag

SEQ ID NO: 3046219 - RNA, 19 nt, Artificial Sequence
  Description of Artificial Sequence: Synthetic oligonucleotide
ugcuguggagcucccgggc

SEQ ID NO: 3046220 - RNA, 19 nt, Artificial Sequence
  Description of Artificial Sequence: Synthetic oligonucleotide
ucggcuugucuucguuggg

SEQ ID NO: 3046221 - RNA, 19 nt, Artificial Sequence
  Description of Artificial Sequence: Synthetic oligonucleotide
gaaagaccaccuuuauucu

SEQ ID NO: 3046222 - RNA, 19 nt, Artificial Sequence
  Description of Artificial Sequence: Synthetic oligonucleotide
augcuguggagcucccggg

SEQ ID NO: 3046223 - RNA, 19 nt, Artificial Sequence
  Description of Artificial Sequence: Synthetic oligonucleotide
uucugcaggcagcgaauga

SEQ ID NO: 3046224 - RNA, 19 nt, Artificial Sequence
  Description of Artificial Sequence: Synthetic oligonucleotide
caccuuguacacagcagug

SEQ ID NO: 3046225 - RNA, 19 nt, Artificial Sequence
  Description of Artificial Sequence: Synthetic oligonucleotide
uccuggagagcauucugau

SEQ ID NO: 3046226 - RNA, 19 nt, Artificial Sequence
  Description of Artificial Sequence: Synthetic oligonucleotide
agugaacaagggaaacuug

SEQ ID NO: 3046227 - RNA, 19 nt, Artificial Sequence
  Description of Artificial Sequence: Synthetic oligonucleotide
augaauucacccacuggcu

SEQ ID NO: 3046228 - RNA, 19 nt, Artificial Sequence
  Description of Artificial Sequence: Synthetic oligonucleotide
cagcgaaugaauucaccca

SEQ ID NO: 3046229 - RNA, 19 nt, Artificial Sequence
  Description of Artificial Sequence: Synthetic oligonucleotide
aggcccuuguguuggagga

SEQ ID NO: 3046230 - RNA, 19 nt, Artificial Sequence
  Description of Artificial Sequence: Synthetic oligonucleotide
guuggcuggggaguccugg

SEQ ID NO: 3046231 - RNA, 19 nt, Artificial Sequence
  Description of Artificial Sequence: Synthetic oligonucleotide
uuuauucuccagguaugua

SEQ ID NO: 3046232 - RNA, 19 nt, Artificial Sequence
  Description of Artificial Sequence: Synthetic oligonucleotide
ugaugacaggugucacagc

SEQ ID NO: 3046233 - RNA, 19 nt, Artificial Sequence
  Description of Artificial Sequence: Synthetic oligonucleotide
ugcaggcagcgaaugaauu

SEQ ID NO: 3046234 - RNA, 19 nt, Artificial Sequence
  Description of Artificial Sequence: Synthetic oligonucleotide
cuuuagaaagaccaccuuu

SEQ ID NO: 3046235 - RNA, 19 nt, Artificial Sequence
  Description of Artificial Sequence: Synthetic oligonucleotide
uggagagcauucugaugac

SEQ ID NO: 3046236 - RNA, 19 nt, Artificial Sequence
  Description of Artificial Sequence: Synthetic oligonucleotide
ggugguucugcaggcagcg

SEQ ID NO: 3046237 - RNA, 19 nt, Artificial Sequence
  Description of Artificial Sequence: Synthetic oligonucleotide
ccuuuauucuccagguaug

SEQ ID NO: 3046238 - RNA, 19 nt, Artificial Sequence
  Description of Artificial Sequence: Synthetic oligonucleotide
uguccacaaggcccuugug

SEQ ID NO: 3046239 - RNA, 19 nt, Artificial Sequence
  Description of Artificial Sequence: Synthetic oligonucleotide
gagcauucugaugacaggu

SEQ ID NO: 3046240 - RNA, 19 nt, Artificial Sequence
  Description of Artificial Sequence: Synthetic oligonucleotide
ucacccacuggcuggcccu

SEQ ID NO: 3046241 - RNA, 19 nt, Artificial Sequence
  Description of Artificial Sequence: Synthetic oligonucleotide
agcauucugaugacaggug

SEQ ID NO: 3046242 - RNA, 19 nt, Artificial Sequence
  Description of Artificial Sequence: Synthetic oligonucleotide
gacaggugucacagcuucg

SEQ ID NO: 3046243 - RNA, 19 nt, Artificial Sequence
  Description of Artificial Sequence: Synthetic oligonucleotide
agccuccuguccucagugg

SEQ ID NO: 3046244 - RNA, 19 nt, Artificial Sequence
  Description of Artificial Sequence: Synthetic oligonucleotide
caggcagcgaaugaauuca

SEQ ID NO: 3046245 - RNA, 19 nt, Artificial Sequence
  Description of Artificial Sequence: Synthetic oligonucleotide
gugaacaagggaaacuugu

SEQ ID NO: 3046246 - RNA, 19 nt, Artificial Sequence
  Description of Artificial Sequence: Synthetic oligonucleotide
accuuguacacagcaguga

SEQ ID NO: 3046247 - RNA, 19 nt, Artificial Sequence
  Description of Artificial Sequence: Synthetic oligonucleotide
gcccucauagcacaccuug

SEQ ID NO: 3046248 - RNA, 19 nt, Artificial Sequence
  Description of Artificial Sequence: Synthetic oligonucleotide
gcuggggaguccuggagag

SEQ ID NO: 3046249 - RNA, 19 nt, Artificial Sequence
  Description of Artificial Sequence: Synthetic oligonucleotide
aguggccuucagugaggac

SEQ ID NO: 3046250 - RNA, 19 nt, Artificial Sequence
  Description of Artificial Sequence: Synthetic oligonucleotide
uucugaugacaggugucac

SEQ ID NO: 3046251 - RNA, 19 nt, Artificial Sequence
  Description of Artificial Sequence: Synthetic oligonucleotide
uccagguauguagcugagc

SEQ ID NO: 3046252 - RNA, 19 nt, Artificial Sequence
  Description of Artificial Sequence: Synthetic oligonucleotide
uuggggcaaaagagcugcc

SEQ ID NO: 3046253 - RNA, 19 nt, Artificial Sequence
  Description of Artificial Sequence: Synthetic oligonucleotide
ucacagcuucggcuugucu

SEQ ID NO: 3046254 - RNA, 19 nt, Artificial Sequence
  Description of Artificial Sequence: Synthetic oligonucleotide
uuggcuggggaguccugga

SEQ ID NO: 3046255 - RNA, 19 nt, Artificial Sequence
  Description of Artificial Sequence: Synthetic oligonucleotide
uagcugagccccacagccu

SEQ ID NO: 3046256 - RNA, 19 nt, Artificial Sequence
  Description of Artificial Sequence: Synthetic oligonucleotide
gagcugccuguccuggggc

SEQ ID NO: 3046257 - RNA, 19 nt, Artificial Sequence
  Description of Artificial Sequence: Synthetic oligonucleotide
gcaaaagagcugccugucc

SEQ ID NO: 3046258 - RNA, 19 nt, Artificial Sequence
  Description of Artificial Sequence: Synthetic oligonucleotide
ggcuugucuucguuggggc

SEQ ID NO: 3046259 - RNA, 19 nt, Artificial Sequence
  Description of Artificial Sequence: Synthetic oligonucleotide
gaccaccuuuauucuccag

SEQ ID NO: 3046260 - RNA, 19 nt, Artificial Sequence
  Description of Artificial Sequence: Synthetic oligonucleotide
agaccaccuuuauucucca

SEQ ID NO: 3046261 - RNA, 19 nt, Artificial Sequence
  Description of Artificial Sequence: Synthetic oligonucleotide
cuccagguauguagcugag

SEQ ID NO: 3046262 - RNA, 19 nt, Artificial Sequence
  Description of Artificial Sequence: Synthetic oligonucleotide
caggugucacagcuucggc

SEQ ID NO: 3046263 - RNA, 19 nt, Artificial Sequence
  Description of Artificial Sequence: Synthetic oligonucleotide
uggccccacucacaugugu

SEQ ID NO: 3046264 - RNA, 19 nt, Artificial Sequence
  Description of Artificial Sequence: Synthetic oligonucleotide
auagcacaccuuguacaca

SEQ ID NO: 3046265 - RNA, 19 nt, Artificial Sequence
  Description of Artificial Sequence: Synthetic oligonucleotide
acagccuccuguccucagu

SEQ ID NO: 3046266 - RNA, 19 nt, Artificial Sequence
  Description of Artificial Sequence: Synthetic oligonucleotide
guccacaaggcccuugugu

SEQ ID NO: 3046267 - RNA, 19 nt, Artificial Sequence
  Description of Artificial Sequence: Synthetic oligonucleotide
gcaggcagcgaaugaauuc

SEQ ID NO: 3046268 - RNA, 19 nt, Artificial Sequence
  Description of Artificial Sequence: Synthetic oligonucleotide
guucugcaggcagcgaaug

SEQ ID NO: 3046269 - RNA, 19 nt, Artificial Sequence
  Description of Artificial Sequence: Synthetic oligonucleotide
agcacaccuuguacacagc

SEQ ID NO: 3046270 - RNA, 19 nt, Artificial Sequence
  Description of Artificial Sequence: Synthetic oligonucleotide
gucuucguuggggcaaaag

SEQ ID NO: 3046271 - RNA, 19 nt, Artificial Sequence
  Description of Artificial Sequence: Synthetic oligonucleotide
uguuggcuggggaguccug

SEQ ID NO: 3046272 - RNA, 19 nt, Artificial Sequence
  Description of Artificial Sequence: Synthetic oligonucleotide
cuguccuggggcccuggcc

SEQ ID NO: 3046273 - RNA, 19 nt, Artificial Sequence
  Description of Artificial Sequence: Synthetic oligonucleotide
aggcagcgaaugaauucac

SEQ ID NO: 3046274 - RNA, 19 nt, Artificial Sequence
  Description of Artificial Sequence: Synthetic oligonucleotide
cagugaggacccuguuggc

SEQ ID NO: 3046275 - RNA, 19 nt, Artificial Sequence
  Description of Artificial Sequence: Synthetic oligonucleotide
cuugucuucguuggggcaa

SEQ ID NO: 3046276 - RNA, 19 nt, Artificial Sequence
  Description of Artificial Sequence: Synthetic oligonucleotide
caagggaaacuuguccaca

SEQ ID NO: 3046277 - RNA, 19 nt, Artificial Sequence
  Description of Artificial Sequence: Synthetic oligonucleotide
ugucacagcuucggcuugu

SEQ ID NO: 3046278 - RNA, 19 nt, Artificial Sequence
  Description of Artificial Sequence: Synthetic oligonucleotide
gagcucccgggcugucugg

SEQ ID NO: 3046279 - RNA, 19 nt, Artificial Sequence
  Description of Artificial Sequence: Synthetic oligonucleotide
cuguggagcucccgggcug

SEQ ID NO: 3046280 - RNA, 19 nt, Artificial Sequence
  Description of Artificial Sequence: Synthetic oligonucleotide
auucacccacuggcuggcc

SEQ ID NO: 3046281 - RNA, 19 nt, Artificial Sequence
  Description of Artificial Sequence: Synthetic oligonucleotide
guccuggagagcauucuga

SEQ ID NO: 3046282 - RNA, 19 nt, Artificial Sequence
  Description of Artificial Sequence: Synthetic oligonucleotide
gcacaccuuguacacagca

SEQ ID NO: 3046283 - RNA, 19 nt, Artificial Sequence
  Description of Artificial Sequence: Synthetic oligonucleotide
guguucugggugguucugc

SEQ ID NO: 3046284 - RNA, 19 nt, Artificial Sequence
  Description of Artificial Sequence: Synthetic oligonucleotide
gugucacagcuucggcuug

SEQ ID NO: 3046285 - RNA, 19 nt, Artificial Sequence
  Description of Artificial Sequence: Synthetic oligonucleotide
cuuuauucuccagguaugu

SEQ ID NO: 3046286 - RNA, 19 nt, Artificial Sequence
  Description of Artificial Sequence: Synthetic oligonucleotide
uguggagcucccgggcugu

SEQ ID NO: 3046287 - RNA, 19 nt, Artificial Sequence
  Description of Artificial Sequence: Synthetic oligonucleotide
guauguagcugagccccac

SEQ ID NO: 3046288 - RNA, 19 nt, Artificial Sequence
  Description of Artificial Sequence: Synthetic oligonucleotide
cgaaugaauucacccacug

SEQ ID NO: 3046289 - RNA, 19 nt, Artificial Sequence
  Description of Artificial Sequence: Synthetic oligonucleotide
gccuccuguccucaguggc

SEQ ID NO: 3046290 - RNA, 19 nt, Artificial Sequence
  Description of Artificial Sequence: Synthetic oligonucleotide
cuggcccucauagcacacc

SEQ ID NO: 3046291 - RNA, 19 nt, Artificial Sequence
  Description of Artificial Sequence: Synthetic oligonucleotide
ggagcucccgggcugucug

SEQ ID NO: 3046292 - RNA, 19 nt, Artificial Sequence
  Description of Artificial Sequence: Synthetic oligonucleotide
uugucuucguuggggcaaa

SEQ ID NO: 3046293 - RNA, 19 nt, Artificial Sequence
  Description of Artificial Sequence: Synthetic oligonucleotide
ccuccuguccucaguggcc

SEQ ID NO: 3046294 - RNA, 19 nt, Artificial Sequence
  Description of Artificial Sequence: Synthetic oligonucleotide
cacagcuucggcuugucuu

SEQ ID NO: 3046295 - RNA, 19 nt, Artificial Sequence
  Description of Artificial Sequence: Synthetic oligonucleotide
ccacucacauguguucugg

SEQ ID NO: 3046296 - RNA, 19 nt, Artificial Sequence
  Description of Artificial Sequence: Synthetic oligonucleotide
gcauucugaugacaggugu

SEQ ID NO: 3046297 - RNA, 19 nt, Artificial Sequence
  Description of Artificial Sequence: Synthetic oligonucleotide
cagcuucggcuugucuucg

SEQ ID NO: 3046298 - RNA, 19 nt, Artificial Sequence
  Description of Artificial Sequence: Synthetic oligonucleotide
ggcagcgaaugaauucacc

SEQ ID NO: 3046299 - RNA, 19 nt, Artificial Sequence
  Description of Artificial Sequence: Synthetic oligonucleotide
ccuggagagcauucugaug

SEQ ID NO: 3046300 - RNA, 19 nt, Artificial Sequence
  Description of Artificial Sequence: Synthetic oligonucleotide
acccuguuggcuggggagu

SEQ ID NO: 3046301 - RNA, 19 nt, Artificial Sequence
  Description of Artificial Sequence: Synthetic oligonucleotide
ccuuguacacagcagugaa

SEQ ID NO: 3046302 - RNA, 19 nt, Artificial Sequence
  Description of Artificial Sequence: Synthetic oligonucleotide
aggaugcuguggagcuccc

SEQ ID NO: 3046303 - RNA, 19 nt, Artificial Sequence
  Description of Artificial Sequence: Synthetic oligonucleotide
cacagccuccuguccucag

SEQ ID NO: 3046304 - RNA, 19 nt, Artificial Sequence
  Description of Artificial Sequence: Synthetic oligonucleotide
caaggcccuuguguuggag

SEQ ID NO: 3046305 - RNA, 19 nt, Artificial Sequence
  Description of Artificial Sequence: Synthetic oligonucleotide
ggugucacagcuucggcuu

SEQ ID NO: 3046306 - RNA, 19 nt, Artificial Sequence
  Description of Artificial Sequence: Synthetic oligonucleotide
acaaggcccuuguguugga

SEQ ID NO: 3046307 - RNA, 19 nt, Artificial Sequence
  Description of Artificial Sequence: Synthetic oligonucleotide
cagugaacaagggaaacuu

SEQ ID NO: 3046308 - RNA, 19 nt, Artificial Sequence
  Description of Artificial Sequence: Synthetic oligonucleotide
agcuucggcuugucuucgu

SEQ ID NO: 3046309 - RNA, 19 nt, Artificial Sequence
  Description of Artificial Sequence: Synthetic oligonucleotide
ggcuggggaguccuggaga

SEQ ID NO: 3046310 - RNA, 19 nt, Artificial Sequence
  Description of Artificial Sequence: Synthetic oligonucleotide
aggacccuguuggcugggg

SEQ ID NO: 3046311 - RNA, 19 nt, Artificial Sequence
  Description of Artificial Sequence: Synthetic oligonucleotide
cccuuguguuggaggaugc

SEQ ID NO: 3046312 - RNA, 19 nt, Artificial Sequence
  Description of Artificial Sequence: Synthetic oligonucleotide
gcccuuguguuggaggaug

SEQ ID NO: 3046313 - RNA, 19 nt, Artificial Sequence
  Description of Artificial Sequence: Synthetic oligonucleotide
gcuugucuucguuggggca

SEQ ID NO: 3046314 - RNA, 19 nt, Artificial Sequence
  Description of Artificial Sequence: Synthetic oligonucleotide
guccuggggcccuggcccc

SEQ ID NO: 3046315 - RNA, 19 nt, Artificial Sequence
  Description of Artificial Sequence: Synthetic oligonucleotide
uggagcucccgggcugucu

SEQ ID NO: 3046316 - RNA, 19 nt, Artificial Sequence
  Description of Artificial Sequence: Synthetic oligonucleotide
augacaggugucacagcuu

SEQ ID NO: 3046317 - RNA, 19 nt, Artificial Sequence
  Description of Artificial Sequence: Synthetic oligonucleotide
gggcaaaagagcugccugu

SEQ ID NO: 3046318 - RNA, 19 nt, Artificial Sequence
  Description of Artificial Sequence: Synthetic oligonucleotide
ggagagcauucugaugaca

SEQ ID NO: 3046319 - RNA, 19 nt, Artificial Sequence
  Description of Artificial Sequence: Synthetic oligonucleotide
cuggccccacucacaugug

SEQ ID NO: 3046320 - RNA, 19 nt, Artificial Sequence
  Description of Artificial Sequence: Synthetic oligonucleotide
uggggcccuggccccacuc

SEQ ID NO: 3046321 - RNA, 19 nt, Artificial Sequence
  Description of Artificial Sequence: Synthetic oligonucleotide
gaguccuggagagcauucu

SEQ ID NO: 3046322 - RNA, 19 nt, Artificial Sequence
  Description of Artificial Sequence: Synthetic oligonucleotide
caccuuuauucuccaggua

SEQ ID NO: 3046323 - RNA, 19 nt, Artificial Sequence
  Description of Artificial Sequence: Synthetic oligonucleotide
cccacucacauguguucug

SEQ ID NO: 3046324 - RNA, 19 nt, Artificial Sequence
  Description of Artificial Sequence: Synthetic oligonucleotide
gccccacucacauguguuc

SEQ ID NO: 3046325 - RNA, 19 nt, Artificial Sequence
  Description of Artificial Sequence: Synthetic oligonucleotide
ccaccuuuauucuccaggu

SEQ ID NO: 3046326 - RNA, 19 nt, Artificial Sequence
  Description of Artificial Sequence: Synthetic oligonucleotide
gcagugaacaagggaaacu

SEQ ID NO: 3046327 - RNA, 19 nt, Artificial Sequence
  Description of Artificial Sequence: Synthetic oligonucleotide
ggaguccuggagagcauuc

SEQ ID NO: 3046328 - RNA, 19 nt, Artificial Sequence
  Description of Artificial Sequence: Synthetic oligonucleotide
gggugguucugcaggcagc

SEQ ID NO: 3046329 - RNA, 19 nt, Artificial Sequence
  Description of Artificial Sequence: Synthetic oligonucleotide
ccuggccccacucacaugu

SEQ ID NO: 3046330 - RNA, 19 nt, Artificial Sequence
  Description of Artificial Sequence: Synthetic oligonucleotide
caguggccuucagugagga

SEQ ID NO: 3046331 - RNA, 19 nt, Artificial Sequence
  Description of Artificial Sequence: Synthetic oligonucleotide
cugcaggcagcgaaugaau

SEQ ID NO: 3046332 - RNA, 19 nt, Artificial Sequence
  Description of Artificial Sequence: Synthetic oligonucleotide
acauguguucugggugguu

SEQ ID NO: 3046333 - RNA, 19 nt, Artificial Sequence
  Description of Artificial Sequence: Synthetic oligonucleotide
ggacccuguuggcugggga

SEQ ID NO: 3046334 - RNA, 19 nt, Artificial Sequence
  Description of Artificial Sequence: Synthetic oligonucleotide
ugucuucguuggggcaaaa

SEQ ID NO: 3046335 - RNA, 19 nt, Artificial Sequence
  Description of Artificial Sequence: Synthetic oligonucleotide
gcucccgggcugucugggg

SEQ ID NO: 3046336 - RNA, 19 nt, Artificial Sequence
  Description of Artificial Sequence: Synthetic oligonucleotide
cggcuugucuucguugggg

SEQ ID NO: 3046337 - RNA, 19 nt, Artificial Sequence
  Description of Artificial Sequence: Synthetic oligonucleotide
gguauguagcugagcccca

SEQ ID NO: 3046338 - RNA, 19 nt, Artificial Sequence
  Description of Artificial Sequence: Synthetic oligonucleotide
gucacagcuucggcuuguc

SEQ ID NO: 3046339 - RNA, 19 nt, Artificial Sequence
  Description of Artificial Sequence: Synthetic oligonucleotide
cuguccucaguggccuuca

SEQ ID NO: 3046340 - RNA, 19 nt, Artificial Sequence
  Description of Artificial Sequence: Synthetic oligonucleotide
ccucaguggccuucaguga

SEQ ID NO: 3046341 - RNA, 19 nt, Artificial Sequence
  Description of Artificial Sequence: Synthetic oligonucleotide
gggcccuggccccacucac

SEQ ID NO: 3046342 - RNA, 19 nt, Artificial Sequence
  Description of Artificial Sequence: Synthetic oligonucleotide
uccuguccucaguggccuu

SEQ ID NO: 3046343 - RNA, 19 nt, Artificial Sequence
  Description of Artificial Sequence: Synthetic oligonucleotide
gcugccuguccuggggccc

SEQ ID NO: 3046344 - RNA, 19 nt, Artificial Sequence
  Description of Artificial Sequence: Synthetic oligonucleotide
cuccuguccucaguggccu

SEQ ID NO: 3046345 - RNA, 19 nt, Artificial Sequence
  Description of Artificial Sequence: Synthetic oligonucleotide
cugggugguucugcaggca

SEQ ID NO: 3046346 - RNA, 19 nt, Artificial Sequence
  Description of Artificial Sequence: Synthetic oligonucleotide
uccuggggcccuggcccca

SEQ ID NO: 3046347 - RNA, 19 nt, Artificial Sequence
  Description of Artificial Sequence: Synthetic oligonucleotide
ccuguuggcuggggagucc

SEQ ID NO: 3046348 - RNA, 19 nt, Artificial Sequence
  Description of Artificial Sequence: Synthetic oligonucleotide
gugguucugcaggcagcga

SEQ ID NO: 3046349 - RNA, 19 nt, Artificial Sequence
  Description of Artificial Sequence: Synthetic oligonucleotide
ugccuguccuggggcccug

SEQ ID NO: 3046350 - RNA, 19 nt, Artificial Sequence
  Description of Artificial Sequence: Synthetic oligonucleotide
cuguuggcuggggaguccu

SEQ ID NO: 3046351 - RNA, 19 nt, Artificial Sequence
  Description of Artificial Sequence: Synthetic oligonucleotide
ggggcccuggccccacuca

SEQ ID NO: 3046352 - RNA, 19 nt, Artificial Sequence
  Description of Artificial Sequence: Synthetic oligonucleotide
gcgaaugaauucacccacu

SEQ ID NO: 3046353 - RNA, 19 nt, Artificial Sequence
  Description of Artificial Sequence: Synthetic oligonucleotide
gguucugcaggcagcgaau

SEQ ID NO: 3046354 - RNA, 19 nt, Artificial Sequence
  Description of Artificial Sequence: Synthetic oligonucleotide
cuucagugaggacccuguu

SEQ ID NO: 3046355 - RNA, 19 nt, Artificial Sequence
  Description of Artificial Sequence: Synthetic oligonucleotide
cacccacuggcuggcccuc

SEQ ID NO: 3046356 - RNA, 19 nt, Artificial Sequence
  Description of Artificial Sequence: Synthetic oligonucleotide
cacauguguucuggguggu

SEQ ID NO: 3046357 - RNA, 19 nt, Artificial Sequence
  Description of Artificial Sequence: Synthetic oligonucleotide
acccacuggcuggcccuca

SEQ ID NO: 3046358 - RNA, 19 nt, Artificial Sequence
  Description of Artificial Sequence: Synthetic oligonucleotide
gcuggcccucauagcacac

SEQ ID NO: 3046359 - RNA, 19 nt, Artificial Sequence
  Description of Artificial Sequence: Synthetic oligonucleotide
cccuguuggcuggggaguc

SEQ ID NO: 3046360 - RNA, 19 nt, Artificial Sequence
  Description of Artificial Sequence: Synthetic oligonucleotide
gcuucggcuugucuucguu

SEQ ID NO: 3046361 - RNA, 19 nt, Artificial Sequence
  Description of Artificial Sequence: Synthetic oligonucleotide
gccuguccuggggcccugg

SEQ ID NO: 3046362 - RNA, 19 nt, Artificial Sequence
  Description of Artificial Sequence: Synthetic oligonucleotide
ggcccuggccccacucaca

SEQ ID NO: 3046363 - RNA, 19 nt, Artificial Sequence
  Description of Artificial Sequence: Synthetic oligonucleotide
gcccuggccccacucacau

SEQ ID NO: 3046364 - RNA, 19 nt, Artificial Sequence
  Description of Artificial Sequence: Synthetic oligonucleotide
guggagcucccgggcuguc

SEQ ID NO: 3046365 - RNA, 19 nt, Artificial Sequence
  Description of Artificial Sequence: Synthetic oligonucleotide
cccuggccccacucacaug

SEQ ID NO: 3046366 - RNA, 19 nt, Artificial Sequence
  Description of Artificial Sequence: Synthetic oligonucleotide
gggaguccuggagagcauu

SEQ ID NO: 3046367 - RNA, 19 nt, Artificial Sequence
  Description of Artificial Sequence: Synthetic oligonucleotide
ggccccacucacauguguu

SEQ ID NO: 3046368 - RNA, 19 nt, Artificial Sequence
  Description of Artificial Sequence: Synthetic oligonucleotide
ccuuguguuggaggaugcu

SEQ ID NO: 3046369 - RNA, 19 nt, Artificial Sequence
  Description of Artificial Sequence: Synthetic oligonucleotide
ggcccuuguguuggaggau

SEQ ID NO: 3046370 - RNA, 19 nt, Artificial Sequence
  Description of Artificial Sequence: Synthetic oligonucleotide
ggggaguccuggagagcau

SEQ ID NO: 3046371 - RNA, 19 nt, Artificial Sequence
  Description of Artificial Sequence: Synthetic oligonucleotide
ggcccucauagcacaccuu

SEQ ID NO: 3046372 - RNA, 19 nt, Artificial Sequence
  Description of Artificial Sequence: Synthetic oligonucleotide
cuggggcccuggccccacu

SEQ ID NO: 3046373 - RNA, 19 nt, Artificial Sequence
  Description of Artificial Sequence: Synthetic oligonucleotide
ggccuucagugaggacccu

SEQ ID NO: 3046374 - RNA, 19 nt, Artificial Sequence
  Description of Artificial Sequence: Synthetic oligonucleotide
uuaacaaucaaucuccucc

SEQ ID NO: 3046375 - RNA, 19 nt, Artificial Sequence
  Description of Artificial Sequence: Synthetic oligonucleotide
uauuuaacaaucaaucucc

SEQ ID NO: 3046376 - RNA, 19 nt, Artificial Sequence
  Description of Artificial Sequence: Synthetic oligonucleotide
uucuaugucaucuaggucc

SEQ ID NO: 3046377 - RNA, 19 nt, Artificial Sequence
  Description of Artificial Sequence: Synthetic oligonucleotide
ucuggaaauaaauauacag

SEQ ID NO: 3046378 - RNA, 19 nt, Artificial Sequence
  Description of Artificial Sequence: Synthetic oligonucleotide
gaauuaauucuccacaccg

SEQ ID NO: 3046379 - RNA, 19 nt, Artificial Sequence
  Description of Artificial Sequence: Synthetic oligonucleotide
aauaaauauacaguuaucu

SEQ ID NO: 3046380 - RNA, 19 nt, Artificial Sequence
  Description of Artificial Sequence: Synthetic oligonucleotide
uaaauauacaguuaucuca

SEQ ID NO: 3046381 - RNA, 19 nt, Artificial Sequence
  Description of Artificial Sequence: Synthetic oligonucleotide
aacagaauuaauucuccac

SEQ ID NO: 3046382 - RNA, 19 nt, Artificial Sequence
  Description of Artificial Sequence: Synthetic oligonucleotide
aagccuaagguuuucuugc

SEQ ID NO: 3046383 - RNA, 19 nt, Artificial Sequence
  Description of Artificial Sequence: Synthetic oligonucleotide
aucucaauguauuuauugc

SEQ ID NO: 3046384 - RNA, 19 nt, Artificial Sequence
  Description of Artificial Sequence: Synthetic oligonucleotide
auaaauauacaguuaucuc

SEQ ID NO: 3046385 - RNA, 19 nt, Artificial Sequence
  Description of Artificial Sequence: Synthetic oligonucleotide
uuagccaugacauucaauc

SEQ ID NO: 3046386 - RNA, 19 nt, Artificial Sequence
  Description of Artificial Sequence: Synthetic oligonucleotide
ucuuauuauuuccuuuucg

SEQ ID NO: 3046387 - RNA, 19 nt, Artificial Sequence
  Description of Artificial Sequence: Synthetic oligonucleotide
uauacaguuaucucaaugu

SEQ ID NO: 3046388 - RNA, 19 nt, Artificial Sequence
  Description of Artificial Sequence: Synthetic oligonucleotide
uccuauuuaacaaucaauc

SEQ ID NO: 3046389 - RNA, 19 nt, Artificial Sequence
  Description of Artificial Sequence: Synthetic oligonucleotide
uuuauugcauuacaggaac

SEQ ID NO: 3046390 - RNA, 19 nt, Artificial Sequence
  Description of Artificial Sequence: Synthetic oligonucleotide
agaucuucaauucucuuuc

SEQ ID NO: 3046391 - RNA, 19 nt, Artificial Sequence
  Description of Artificial Sequence: Synthetic oligonucleotide
aauucucuuuccaaugugc

SEQ ID NO: 3046392 - RNA, 19 nt, Artificial Sequence
  Description of Artificial Sequence: Synthetic oligonucleotide
augacauucaaucaguagu

SEQ ID NO: 3046393 - RNA, 19 nt, Artificial Sequence
  Description of Artificial Sequence: Synthetic oligonucleotide
uauuauuuccuuuucgaga

SEQ ID NO: 3046394 - RNA, 19 nt, Artificial Sequence
  Description of Artificial Sequence: Synthetic oligonucleotide
agaauuaauucuccacacc

SEQ ID NO: 3046395 - RNA, 19 nt, Artificial Sequence
  Description of Artificial Sequence: Synthetic oligonucleotide
uugcauuacaggaacauca

SEQ ID NO: 3046396 - RNA, 19 nt, Artificial Sequence
  Description of Artificial Sequence: Synthetic oligonucleotide
uuugccuuagccaugacau

SEQ ID NO: 3046397 - RNA, 19 nt, Artificial Sequence
  Description of Artificial Sequence: Synthetic oligonucleotide
uaucucaauguauuuauug

SEQ ID NO: 3046398 - RNA, 19 nt, Artificial Sequence
  Description of Artificial Sequence: Synthetic oligonucleotide
uucguuuucaucuucuaug

SEQ ID NO: 3046399 - RNA, 19 nt, Artificial Sequence
  Description of Artificial Sequence: Synthetic oligonucleotide
uuauuauuuccuuuucgag

SEQ ID NO: 3046400 - RNA, 19 nt, Artificial Sequence
  Description of Artificial Sequence: Synthetic oligonucleotide
uccaacaacuuucaaaaga

SEQ ID NO: 3046401 - RNA, 19 nt, Artificial Sequence
  Description of Artificial Sequence: Synthetic oligonucleotide
uggaaauaaauauacaguu

SEQ ID NO: 3046402 - RNA, 19 nt, Artificial Sequence
  Description of Artificial Sequence: Synthetic oligonucleotide
cuauuuaacaaucaaucuc

SEQ ID NO: 3046403 - RNA, 19 nt, Artificial Sequence
  Description of Artificial Sequence: Synthetic oligonucleotide
uaauucuccacaccgagcu

SEQ ID NO: 3046404 - RNA, 19 nt, Artificial Sequence
  Description of Artificial Sequence: Synthetic oligonucleotide
uacaggaacaucaucuuug

SEQ ID NO: 3046405 - RNA, 19 nt, Artificial Sequence
  Description of Artificial Sequence: Synthetic oligonucleotide
ucuucuuuaucuugcauca

SEQ ID NO: 3046406 - RNA, 19 nt, Artificial Sequence
  Description of Artificial Sequence: Synthetic oligonucleotide
ucuugcaucagccucacaa

SEQ ID NO: 3046407 - RNA, 19 nt, Artificial Sequence
  Description of Artificial Sequence: Synthetic oligonucleotide
ucuuuaucuugcaucagcc

SEQ ID NO: 3046408 - RNA, 19 nt, Artificial Sequence
  Description of Artificial Sequence: Synthetic oligonucleotide
auuaauucuccacaccgag

SEQ ID NO: 3046409 - RNA, 19 nt, Artificial Sequence
  Description of Artificial Sequence: Synthetic oligonucleotide
uccaaugugcuacuugagg

SEQ ID NO: 3046410 - RNA, 19 nt, Artificial Sequence
  Description of Artificial Sequence: Synthetic oligonucleotide
uuuaucuugcaucagccuc

SEQ ID NO: 3046411 - RNA, 19 nt, Artificial Sequence
  Description of Artificial Sequence: Synthetic oligonucleotide
uaguuguucguuuucaucu

SEQ ID NO: 3046412 - RNA, 19 nt, Artificial Sequence
  Description of Artificial Sequence: Synthetic oligonucleotide
aggaacaucaucuuugccu

SEQ ID NO: 3046413 - RNA, 19 nt, Artificial Sequence
  Description of Artificial Sequence: Synthetic oligonucleotide
auuauuuccuuuucgagau

SEQ ID NO: 3046414 - RNA, 19 nt, Artificial Sequence
  Description of Artificial Sequence: Synthetic oligonucleotide
acagaauuaauucuccaca

SEQ ID NO: 3046415 - RNA, 19 nt, Artificial Sequence
  Description of Artificial Sequence: Synthetic oligonucleotide
ucuucuaugucaucuaggu

SEQ ID NO: 3046416 - RNA, 19 nt, Artificial Sequence
  Description of Artificial Sequence: Synthetic oligonucleotide
uucuuuaucuugcaucagc

SEQ ID NO: 3046417 - RNA, 19 nt, Artificial Sequence
  Description of Artificial Sequence: Synthetic oligonucleotide
uuuccaaugugcuacuuga

SEQ ID NO: 3046418 - RNA, 19 nt, Artificial Sequence
  Description of Artificial Sequence: Synthetic oligonucleotide
aaauaaauauacaguuauc

SEQ ID NO: 3046419 - RNA, 19 nt, Artificial Sequence
  Description of Artificial Sequence: Synthetic oligonucleotide
ucucaauguauuuauugca

SEQ ID NO: 3046420 - RNA, 19 nt, Artificial Sequence
  Description of Artificial Sequence: Synthetic oligonucleotide
ucaaaagaguuuuauuuuc

SEQ ID NO: 3046421 - RNA, 19 nt, Artificial Sequence
  Description of Artificial Sequence: Synthetic oligonucleotide
acaggaacaucaucuuugc

SEQ ID NO: 3046422 - RNA, 19 nt, Artificial Sequence
  Description of Artificial Sequence: Synthetic oligonucleotide
caaaagaguuuuauuuucc

SEQ ID NO: 3046423 - RNA, 19 nt, Artificial Sequence
  Description of Artificial Sequence: Synthetic oligonucleotide
auauacaguuaucucaaug

SEQ ID NO: 3046424 - RNA, 19 nt, Artificial Sequence
  Description of Artificial Sequence: Synthetic oligonucleotide
uucaauucucuuuccaaug

SEQ ID NO: 3046425 - RNA, 19 nt, Artificial Sequence
  Description of Artificial Sequence: Synthetic oligonucleotide
uauuuuccugcuuuaguug

SEQ ID NO: 3046426 - RNA, 19 nt, Artificial Sequence
  Description of Artificial Sequence: Synthetic oligonucleotide
aaauauacaguuaucucaa

SEQ ID NO: 3046427 - RNA, 19 nt, Artificial Sequence
  Description of Artificial Sequence: Synthetic oligonucleotide
uuaucuugcaucagccuca

SEQ ID NO: 3046428 - RNA, 19 nt, Artificial Sequence
  Description of Artificial Sequence: Synthetic oligonucleotide
cuuauuauuuccuuuucga

SEQ ID NO: 3046429 - RNA, 19 nt, Artificial Sequence
  Description of Artificial Sequence: Synthetic oligonucleotide
uucuucuuuaucuugcauc

SEQ ID NO: 3046430 - RNA, 19 nt, Artificial Sequence
  Description of Artificial Sequence: Synthetic oligonucleotide
gagccuucuaccuugucag

SEQ ID NO: 3046431 - RNA, 19 nt, Artificial Sequence
  Description of Artificial Sequence: Synthetic oligonucleotide
ucaaucuccuccuugaguu

SEQ ID NO: 3046432 - RNA, 19 nt, Artificial Sequence
  Description of Artificial Sequence: Synthetic oligonucleotide
ucaauucucuuuccaaugu

SEQ ID NO: 3046433 - RNA, 19 nt, Artificial Sequence
  Description of Artificial Sequence: Synthetic oligonucleotide
ucuagguccuauuuaacaa

SEQ ID NO: 3046434 - RNA, 19 nt, Artificial Sequence
  Description of Artificial Sequence: Synthetic oligonucleotide
ucaucuagguccuauuuaa

SEQ ID NO: 3046435 - RNA, 19 nt, Artificial Sequence
  Description of Artificial Sequence: Synthetic oligonucleotide
uuuucgagaucuucaauuc

SEQ ID NO: 3046436 - RNA, 19 nt, Artificial Sequence
  Description of Artificial Sequence: Synthetic oligonucleotide
agccaugacauucaaucag

SEQ ID NO: 3046437 - RNA, 19 nt, Artificial Sequence
  Description of Artificial Sequence: Synthetic oligonucleotide
aacaacuuucaaaagaguu

SEQ ID NO: 3046438 - RNA, 19 nt, Artificial Sequence
  Description of Artificial Sequence: Synthetic oligonucleotide
ucauuucuucuuuaucuug

SEQ ID NO: 3046439 - RNA, 19 nt, Artificial Sequence
  Description of Artificial Sequence: Synthetic oligonucleotide
ucucuuuccaaugugcuac

SEQ ID NO: 3046440 - RNA, 19 nt, Artificial Sequence
  Description of Artificial Sequence: Synthetic oligonucleotide
uuuuauuuuccugcuuuag

SEQ ID NO: 3046441 - RNA, 19 nt, Artificial Sequence
  Description of Artificial Sequence: Synthetic oligonucleotide
uuaauucuccacaccgagc

SEQ ID NO: 3046442 - RNA, 19 nt, Artificial Sequence
  Description of Artificial Sequence: Synthetic oligonucleotide
uucgagaucuucaauucuc

SEQ ID NO: 3046443 - RNA, 19 nt, Artificial Sequence
  Description of Artificial Sequence: Synthetic oligonucleotide
uuccuuuucgagaucuuca

SEQ ID NO: 3046444 - RNA, 19 nt, Artificial Sequence
  Description of Artificial Sequence: Synthetic oligonucleotide
aucuagguccuauuuaaca

SEQ ID NO: 3046445 - RNA, 19 nt, Artificial Sequence
  Description of Artificial Sequence: Synthetic oligonucleotide
uacaguuaucucaauguau

SEQ ID NO: 3046446 - RNA, 19 nt, Artificial Sequence
  Description of Artificial Sequence: Synthetic oligonucleotide
caugacauucaaucaguag

SEQ ID NO: 3046447 - RNA, 19 nt, Artificial Sequence
  Description of Artificial Sequence: Synthetic oligonucleotide
ucuucaauucucuuuccaa

SEQ ID NO: 3046448 - RNA, 19 nt, Artificial Sequence
  Description of Artificial Sequence: Synthetic oligonucleotide
aacaucaucuuugccuuag

SEQ ID NO: 3046449 - RNA, 19 nt, Artificial Sequence
  Description of Artificial Sequence: Synthetic oligonucleotide
ucguuuucaucuucuaugu

SEQ ID NO: 3046450 - RNA, 19 nt, Artificial Sequence
  Description of Artificial Sequence: Synthetic oligonucleotide
uaacaaucaaucuccuccu

SEQ ID NO: 3046451 - RNA, 19 nt, Artificial Sequence
  Description of Artificial Sequence: Synthetic oligonucleotide
ugacauucaaucaguaguu

SEQ ID NO: 3046452 - RNA, 19 nt, Artificial Sequence
  Description of Artificial Sequence: Synthetic oligonucleotide
ucucuuauuauuuccuuuu

SEQ ID NO: 3046453 - RNA, 19 nt, Artificial Sequence
  Description of Artificial Sequence: Synthetic oligonucleotide
ugcaucagccucacaagcc

SEQ ID NO: 3046454 - RNA, 19 nt, Artificial Sequence
  Description of Artificial Sequence: Synthetic oligonucleotide
auguauuuauugcauuaca

SEQ ID NO: 3046455 - RNA, 19 nt, Artificial Sequence
  Description of Artificial Sequence: Synthetic oligonucleotide
cauuacaggaacaucaucu

SEQ ID NO: 3046456 - RNA, 19 nt, Artificial Sequence
  Description of Artificial Sequence: Synthetic oligonucleotide
acaaucaaucuccuccuug

SEQ ID NO: 3046457 - RNA, 19 nt, Artificial Sequence
  Description of Artificial Sequence: Synthetic oligonucleotide
agaguuuuauuuuccugcu

SEQ ID NO: 3046458 - RNA, 19 nt, Artificial Sequence
  Description of Artificial Sequence: Synthetic oligonucleotide
ugucagcuguccaacaacu

SEQ ID NO: 3046459 - RNA, 19 nt, Artificial Sequence
  Description of Artificial Sequence: Synthetic oligonucleotide
aauuaauucuccacaccga

SEQ ID NO: 3046460 - RNA, 19 nt, Artificial Sequence
  Description of Artificial Sequence: Synthetic oligonucleotide
ucuaugucaucuagguccu

SEQ ID NO: 3046461 - RNA, 19 nt, Artificial Sequence
  Description of Artificial Sequence: Synthetic oligonucleotide
uccuugaguuuuccgauca

SEQ ID NO: 3046462 - RNA, 19 nt, Artificial Sequence
  Description of Artificial Sequence: Synthetic oligonucleotide
uuuuccgaucauuucuucu

SEQ ID NO: 3046463 - RNA, 19 nt, Artificial Sequence
  Description of Artificial Sequence: Synthetic oligonucleotide
uuucgagaucuucaauucu

SEQ ID NO: 3046464 - RNA, 19 nt, Artificial Sequence
  Description of Artificial Sequence: Synthetic oligonucleotide
caagccuaagguuuucuug

SEQ ID NO: 3046465 - RNA, 19 nt, Artificial Sequence
  Description of Artificial Sequence: Synthetic oligonucleotide
cuugcaucagccucacaag

SEQ ID NO: 3046466 - RNA, 19 nt, Artificial Sequence
  Description of Artificial Sequence: Synthetic oligonucleotide
agccucacaagccuaaggu

SEQ ID NO: 3046467 - RNA, 19 nt, Artificial Sequence
  Description of Artificial Sequence: Synthetic oligonucleotide
uucaaucaguaguuuaaaa

SEQ ID NO: 3046468 - RNA, 19 nt, Artificial Sequence
  Description of Artificial Sequence: Synthetic oligonucleotide
uuuaacaaucaaucuccuc

SEQ ID NO: 3046469 - RNA, 19 nt, Artificial Sequence
  Description of Artificial Sequence: Synthetic oligonucleotide
auugcauuacaggaacauc

SEQ ID NO: 3046470 - RNA, 19 nt, Artificial Sequence
  Description of Artificial Sequence: Synthetic oligonucleotide
agccuaagguuuucuugcc

SEQ ID NO: 3046471 - RNA, 19 nt, Artificial Sequence
  Description of Artificial Sequence: Synthetic oligonucleotide
caucaucuuugccuuagcc

SEQ ID NO: 3046472 - RNA, 19 nt, Artificial Sequence
  Description of Artificial Sequence: Synthetic oligonucleotide
uuauugcauuacaggaaca

SEQ ID NO: 3046473 - RNA, 19 nt, Artificial Sequence
  Description of Artificial Sequence: Synthetic oligonucleotide
uuucuugccuuucucuuau

SEQ ID NO: 3046474 - RNA, 19 nt, Artificial Sequence
  Description of Artificial Sequence: Synthetic oligonucleotide
uuuccgaucauuucuucuu

SEQ ID NO: 3046475 - RNA, 19 nt, Artificial Sequence
  Description of Artificial Sequence: Synthetic oligonucleotide
uccacaccgagcuucgagc

SEQ ID NO: 3046476 - RNA, 19 nt, Artificial Sequence
  Description of Artificial Sequence: Synthetic oligonucleotide
uagguccuauuuaacaauc

SEQ ID NO: 3046477 - RNA, 19 nt, Artificial Sequence
  Description of Artificial Sequence: Synthetic oligonucleotide
cauucaaucaguaguuuaa

SEQ ID NO: 3046478 - RNA, 19 nt, Artificial Sequence
  Description of Artificial Sequence: Synthetic oligonucleotide
auucuccacaccgagcuuc

SEQ ID NO: 3046479 - RNA, 19 nt, Artificial Sequence
  Description of Artificial Sequence: Synthetic oligonucleotide
ucgagaucuucaauucucu

SEQ ID NO: 3046480 - RNA, 19 nt, Artificial Sequence
  Description of Artificial Sequence: Synthetic oligonucleotide
aauauacaguuaucucaau

SEQ ID NO: 3046481 - RNA, 19 nt, Artificial Sequence
  Description of Artificial Sequence: Synthetic oligonucleotide
uauugcauuacaggaacau

SEQ ID NO: 3046482 - RNA, 19 nt, Artificial Sequence
  Description of Artificial Sequence: Synthetic oligonucleotide
ucaauguauuuauugcauu

SEQ ID NO: 3046483 - RNA, 19 nt, Artificial Sequence
  Description of Artificial Sequence: Synthetic oligonucleotide
uuguucguuuucaucuucu

SEQ ID NO: 3046484 - RNA, 19 nt, Artificial Sequence
  Description of Artificial Sequence: Synthetic oligonucleotide
uugucagcuguccaacaac

SEQ ID NO: 3046485 - RNA, 19 nt, Artificial Sequence
  Description of Artificial Sequence: Synthetic oligonucleotide
uuuaguuguucguuuucau

SEQ ID NO: 3046486 - RNA, 19 nt, Artificial Sequence
  Description of Artificial Sequence: Synthetic oligonucleotide
cuggaaauaaauauacagu

SEQ ID NO: 3046487 - RNA, 19 nt, Artificial Sequence
  Description of Artificial Sequence: Synthetic oligonucleotide
acaucaucuuugccuuagc

SEQ ID NO: 3046488 - RNA, 19 nt, Artificial Sequence
  Description of Artificial Sequence: Synthetic oligonucleotide
auuacaggaacaucaucuu

SEQ ID NO: 3046489 - RNA, 19 nt, Artificial Sequence
  Description of Artificial Sequence: Synthetic oligonucleotide
caucuucuaugucaucuag

SEQ ID NO: 3046490 - RNA, 19 nt, Artificial Sequence
  Description of Artificial Sequence: Synthetic oligonucleotide
cuuuccaaugugcuacuug

SEQ ID NO: 3046491 - RNA, 19 nt, Artificial Sequence
  Description of Artificial Sequence: Synthetic oligonucleotide
uuccaaugugcuacuugag

SEQ ID NO: 3046492 - RNA, 19 nt, Artificial Sequence
  Description of Artificial Sequence: Synthetic oligonucleotide
uucuccacaccgagcuucg

SEQ ID NO: 3046493 - RNA, 19 nt, Artificial Sequence
  Description of Artificial Sequence: Synthetic oligonucleotide
ugcauuacaggaacaucau

SEQ ID NO: 3046494 - RNA, 19 nt, Artificial Sequence
  Description of Artificial Sequence: Synthetic oligonucleotide
auuuauugcauuacaggaa

SEQ ID NO: 3046495 - RNA, 19 nt, Artificial Sequence
  Description of Artificial Sequence: Synthetic oligonucleotide
gaucuucaauucucuuucc

SEQ ID NO: 3046496 - RNA, 19 nt, Artificial Sequence
  Description of Artificial Sequence: Synthetic oligonucleotide
auacaguuaucucaaugua

SEQ ID NO: 3046497 - RNA, 19 nt, Artificial Sequence
  Description of Artificial Sequence: Synthetic oligonucleotide
aucuucaauucucuuucca

SEQ ID NO: 3046498 - RNA, 19 nt, Artificial Sequence
  Description of Artificial Sequence: Synthetic oligonucleotide
uagccaugacauucaauca

SEQ ID NO: 3046499 - RNA, 19 nt, Artificial Sequence
  Description of Artificial Sequence: Synthetic oligonucleotide
uugccuuucucuuauuauu

SEQ ID NO: 3046500 - RNA, 19 nt, Artificial Sequence
  Description of Artificial Sequence: Synthetic oligonucleotide
acauucaaucaguaguuua

SEQ ID NO: 3046501 - RNA, 19 nt, Artificial Sequence
  Description of Artificial Sequence: Synthetic oligonucleotide
acuuucaaaagaguuuuau

SEQ ID NO: 3046502 - RNA, 19 nt, Artificial Sequence
  Description of Artificial Sequence: Synthetic oligonucleotide
ucuugccuuucucuuauua

SEQ ID NO: 3046503 - RNA, 19 nt, Artificial Sequence
  Description of Artificial Sequence: Synthetic oligonucleotide
cuucgagccuucuaccuug

SEQ ID NO: 3046504 - RNA, 19 nt, Artificial Sequence
  Description of Artificial Sequence: Synthetic oligonucleotide
uuccugcuuuaguuguucg

SEQ ID NO: 3046505 - RNA, 19 nt, Artificial Sequence
  Description of Artificial Sequence: Synthetic oligonucleotide
caaucaaucuccuccuuga

SEQ ID NO: 3046506 - RNA, 19 nt, Artificial Sequence
  Description of Artificial Sequence: Synthetic oligonucleotide
guuaucucaauguauuuau

SEQ ID NO: 3046507 - RNA, 19 nt, Artificial Sequence
  Description of Artificial Sequence: Synthetic oligonucleotide
ugucaucuagguccuauuu

SEQ ID NO: 3046508 - RNA, 19 nt, Artificial Sequence
  Description of Artificial Sequence: Synthetic oligonucleotide
uuuucuugccuuucucuua

SEQ ID NO: 3046509 - RNA, 19 nt, Artificial Sequence
  Description of Artificial Sequence: Synthetic oligonucleotide
uuacaggaacaucaucuuu

SEQ ID NO: 3046510 - RNA, 19 nt, Artificial Sequence
  Description of Artificial Sequence: Synthetic oligonucleotide
acaguuaucucaauguauu

SEQ ID NO: 3046511 - RNA, 19 nt, Artificial Sequence
  Description of Artificial Sequence: Synthetic oligonucleotide
uuucucuuauuauuuccuu

SEQ ID NO: 3046512 - RNA, 19 nt, Artificial Sequence
  Description of Artificial Sequence: Synthetic oligonucleotide
uccuuuucgagaucuucaa

SEQ ID NO: 3046513 - RNA, 19 nt, Artificial Sequence
  Description of Artificial Sequence: Synthetic oligonucleotide
caauguauuuauugcauua

SEQ ID NO: 3046514 - RNA, 19 nt, Artificial Sequence
  Description of Artificial Sequence: Synthetic oligonucleotide
ugccuuagccaugacauuc

SEQ ID NO: 3046515 - RNA, 19 nt, Artificial Sequence
  Description of Artificial Sequence: Synthetic oligonucleotide
aguuaucucaauguauuua

SEQ ID NO: 3046516 - RNA, 19 nt, Artificial Sequence
  Description of Artificial Sequence: Synthetic oligonucleotide
uuaucucaauguauuuauu

SEQ ID NO: 3046517 - RNA, 19 nt, Artificial Sequence
  Description of Artificial Sequence: Synthetic oligonucleotide
ucaucuucuaugucaucua

SEQ ID NO: 3046518 - RNA, 19 nt, Artificial Sequence
  Description of Artificial Sequence: Synthetic oligonucleotide
cucuuauuauuuccuuuuc

SEQ ID NO: 3046519 - RNA, 19 nt, Artificial Sequence
  Description of Artificial Sequence: Synthetic oligonucleotide
cuguccaacaacuuucaaa

SEQ ID NO: 3046520 - RNA, 19 nt, Artificial Sequence
  Description of Artificial Sequence: Synthetic oligonucleotide
uaugucaucuagguccuau

SEQ ID NO: 3046521 - RNA, 19 nt, Artificial Sequence
  Description of Artificial Sequence: Synthetic oligonucleotide
agccuucuaccuugucagc

SEQ ID NO: 3046522 - RNA, 19 nt, Artificial Sequence
  Description of Artificial Sequence: Synthetic oligonucleotide
uucucuuuccaaugugcua

SEQ ID NO: 3046523 - RNA, 19 nt, Artificial Sequence
  Description of Artificial Sequence: Synthetic oligonucleotide
aacaaucaaucuccuccuu

SEQ ID NO: 3046524 - RNA, 19 nt, Artificial Sequence
  Description of Artificial Sequence: Synthetic oligonucleotide
caucuagguccuauuuaac

SEQ ID NO: 3046525 - RNA, 19 nt, Artificial Sequence
  Description of Artificial Sequence: Synthetic oligonucleotide
cuuuucgagaucuucaauu

SEQ ID NO: 3046526 - RNA, 19 nt, Artificial Sequence
  Description of Artificial Sequence: Synthetic oligonucleotide
gagcuucgagccuucuacc

SEQ ID NO: 3046527 - RNA, 19 nt, Artificial Sequence
  Description of Artificial Sequence: Synthetic oligonucleotide
agcuucgagccuucuaccu

SEQ ID NO: 3046528 - RNA, 19 nt, Artificial Sequence
  Description of Artificial Sequence: Synthetic oligonucleotide
uccugcuuuaguuguucgu

SEQ ID NO: 3046529 - RNA, 19 nt, Artificial Sequence
  Description of Artificial Sequence: Synthetic oligonucleotide
cuucuaugucaucuagguc

SEQ ID NO: 3046530 - RNA, 19 nt, Artificial Sequence
  Description of Artificial Sequence: Synthetic oligonucleotide
ugcuuuaguuguucguuuu

SEQ ID NO: 3046531 - RNA, 19 nt, Artificial Sequence
  Description of Artificial Sequence: Synthetic oligonucleotide
cuuugccuuagccaugaca

SEQ ID NO: 3046532 - RNA, 19 nt, Artificial Sequence
  Description of Artificial Sequence: Synthetic oligonucleotide
gagaucuucaauucucuuu

SEQ ID NO: 3046533 - RNA, 19 nt, Artificial Sequence
  Description of Artificial Sequence: Synthetic oligonucleotide
auuuaacaaucaaucuccu

SEQ ID NO: 3046534 - RNA, 19 nt, Artificial Sequence
  Description of Artificial Sequence: Synthetic oligonucleotide
auucaaucaguaguuuaaa

SEQ ID NO: 3046535 - RNA, 19 nt, Artificial Sequence
  Description of Artificial Sequence: Synthetic oligonucleotide
uguucguuuucaucuucua

SEQ ID NO: 3046536 - RNA, 19 nt, Artificial Sequence
  Description of Artificial Sequence: Synthetic oligonucleotide
uuauuuccuuuucgagauc

SEQ ID NO: 3046537 - RNA, 19 nt, Artificial Sequence
  Description of Artificial Sequence: Synthetic oligonucleotide
uuuccugcuuuaguuguuc

SEQ ID NO: 3046538 - RNA, 19 nt, Artificial Sequence
  Description of Artificial Sequence: Synthetic oligonucleotide
uuccgaucauuucuucuuu

SEQ ID NO: 3046539 - RNA, 19 nt, Artificial Sequence
  Description of Artificial Sequence: Synthetic oligonucleotide
guuguucguuuucaucuuc

SEQ ID NO: 3046540 - RNA, 19 nt, Artificial Sequence
  Description of Artificial Sequence: Synthetic oligonucleotide
aguuguucguuuucaucuu

SEQ ID NO: 3046541 - RNA, 19 nt, Artificial Sequence
  Description of Artificial Sequence: Synthetic oligonucleotide
uaagguuuucuugccuuuc

SEQ ID NO: 3046542 - RNA, 19 nt, Artificial Sequence
  Description of Artificial Sequence: Synthetic oligonucleotide
cagccucacaagccuaagg

SEQ ID NO: 3046543 - RNA, 19 nt, Artificial Sequence
  Description of Artificial Sequence: Synthetic oligonucleotide
guuuuauuuuccugcuuua

SEQ ID NO: 3046544 - RNA, 19 nt, Artificial Sequence
  Description of Artificial Sequence: Synthetic oligonucleotide
cuccacaccgagcuucgag

SEQ ID NO: 3046545 - RNA, 19 nt, Artificial Sequence
  Description of Artificial Sequence: Synthetic oligonucleotide
acaagccuaagguuuucuu

SEQ ID NO: 3046546 - RNA, 19 nt, Artificial Sequence
  Description of Artificial Sequence: Synthetic oligonucleotide
uuuuccugcuuuaguuguu

SEQ ID NO: 3046547 - RNA, 19 nt, Artificial Sequence
  Description of Artificial Sequence: Synthetic oligonucleotide
aauucuccacaccgagcuu

SEQ ID NO: 3046548 - RNA, 19 nt, Artificial Sequence
  Description of Artificial Sequence: Synthetic oligonucleotide
aucuuugccuuagccauga

SEQ ID NO: 3046549 - RNA, 19 nt, Artificial Sequence
  Description of Artificial Sequence: Synthetic oligonucleotide
gucaucuagguccuauuua

SEQ ID NO: 3046550 - RNA, 19 nt, Artificial Sequence
  Description of Artificial Sequence: Synthetic oligonucleotide
caggaacaucaucuuugcc

SEQ ID NO: 3046551 - RNA, 19 nt, Artificial Sequence
  Description of Artificial Sequence: Synthetic oligonucleotide
guuuuccgaucauuucuuc

SEQ ID NO: 3046552 - RNA, 19 nt, Artificial Sequence
  Description of Artificial Sequence: Synthetic oligonucleotide
ggaaauaaauauacaguua

SEQ ID NO: 3046553 - RNA, 19 nt, Artificial Sequence
  Description of Artificial Sequence: Synthetic oligonucleotide
cuucaauucucuuuccaau

SEQ ID NO: 3046554 - RNA, 19 nt, Artificial Sequence
  Description of Artificial Sequence: Synthetic oligonucleotide
cuccuccuugaguuuuccg

SEQ ID NO: 3046555 - RNA, 19 nt, Artificial Sequence
  Description of Artificial Sequence: Synthetic oligonucleotide
uccgaucauuucuucuuua

SEQ ID NO: 3046556 - RNA, 19 nt, Artificial Sequence
  Description of Artificial Sequence: Synthetic oligonucleotide
gguccuauuuaacaaucaa

SEQ ID NO: 3046557 - RNA, 19 nt, Artificial Sequence
  Description of Artificial Sequence: Synthetic oligonucleotide
cuucuuuaucuugcaucag

SEQ ID NO: 3046558 - RNA, 19 nt, Artificial Sequence
  Description of Artificial Sequence: Synthetic oligonucleotide
aguuuuccgaucauuucuu

SEQ ID NO: 3046559 - RNA, 19 nt, Artificial Sequence
  Description of Artificial Sequence: Synthetic oligonucleotide
cuugucagcuguccaacaa

SEQ ID NO: 3046560 - RNA, 19 nt, Artificial Sequence
  Description of Artificial Sequence: Synthetic oligonucleotide
ucagccucacaagccuaag

SEQ ID NO: 3046561 - RNA, 19 nt, Artificial Sequence
  Description of Artificial Sequence: Synthetic oligonucleotide
uaucuugcaucagccucac

SEQ ID NO: 3046562 - RNA, 19 nt, Artificial Sequence
  Description of Artificial Sequence: Synthetic oligonucleotide
ucuccuccuugaguuuucc

SEQ ID NO: 3046563 - RNA, 19 nt, Artificial Sequence
  Description of Artificial Sequence: Synthetic oligonucleotide
uucuaccuugucagcuguc

SEQ ID NO: 3046564 - RNA, 19 nt, Artificial Sequence
  Description of Artificial Sequence: Synthetic oligonucleotide
agguccuauuuaacaauca

SEQ ID NO: 3046565 - RNA, 19 nt, Artificial Sequence
  Description of Artificial Sequence: Synthetic oligonucleotide
cuuuaucuugcaucagccu

SEQ ID NO: 3046566 - RNA, 19 nt, Artificial Sequence
  Description of Artificial Sequence: Synthetic oligonucleotide
aacuuucaaaagaguuuua

SEQ ID NO: 3046567 - RNA, 19 nt, Artificial Sequence
  Description of Artificial Sequence: Synthetic oligonucleotide
ccuauuuaacaaucaaucu

SEQ ID NO: 3046568 - RNA, 19 nt, Artificial Sequence
  Description of Artificial Sequence: Synthetic oligonucleotide
cgagcuucgagccuucuac

SEQ ID NO: 3046569 - RNA, 19 nt, Artificial Sequence
  Description of Artificial Sequence: Synthetic oligonucleotide
cuagguccuauuuaacaau

SEQ ID NO: 3046570 - RNA, 19 nt, Artificial Sequence
  Description of Artificial Sequence: Synthetic oligonucleotide
guucguuuucaucuucuau

SEQ ID NO: 3046571 - RNA, 19 nt, Artificial Sequence
  Description of Artificial Sequence: Synthetic oligonucleotide
cuugccuuucucuuauuau

SEQ ID NO: 3046572 - RNA, 19 nt, Artificial Sequence
  Description of Artificial Sequence: Synthetic oligonucleotide
guccuauuuaacaaucaau

SEQ ID NO: 3046573 - RNA, 19 nt, Artificial Sequence
  Description of Artificial Sequence: Synthetic oligonucleotide
cuaccuugucagcugucca

SEQ ID NO: 3046574 - RNA, 19 nt, Artificial Sequence
  Description of Artificial Sequence: Synthetic oligonucleotide
ccuucuaccuugucagcug

SEQ ID NO: 3046575 - RNA, 19 nt, Artificial Sequence
  Description of Artificial Sequence: Synthetic oligonucleotide
caacaacuuucaaaagagu

SEQ ID NO: 3046576 - RNA, 19 nt, Artificial Sequence
  Description of Artificial Sequence: Synthetic oligonucleotide
ccacaccgagcuucgagcc

SEQ ID NO: 3046577 - RNA, 19 nt, Artificial Sequence
  Description of Artificial Sequence: Synthetic oligonucleotide
aucuccuccuugaguuuuc

SEQ ID NO: 3046578 - RNA, 19 nt, Artificial Sequence
  Description of Artificial Sequence: Synthetic oligonucleotide
uugccuuagccaugacauu

SEQ ID NO: 3046579 - RNA, 19 nt, Artificial Sequence
  Description of Artificial Sequence: Synthetic oligonucleotide
ucuuugccuuagccaugac

SEQ ID NO: 3046580 - RNA, 19 nt, Artificial Sequence
  Description of Artificial Sequence: Synthetic oligonucleotide
ucacaagccuaagguuuuc

SEQ ID NO: 3046581 - RNA, 19 nt, Artificial Sequence
  Description of Artificial Sequence: Synthetic oligonucleotide
ucuuuccaaugugcuacuu

SEQ ID NO: 3046582 - RNA, 19 nt, Artificial Sequence
  Description of Artificial Sequence: Synthetic oligonucleotide
gaacaucaucuuugccuua

SEQ ID NO: 3046583 - RNA, 19 nt, Artificial Sequence
  Description of Artificial Sequence: Synthetic oligonucleotide
acaccgagcuucgagccuu

SEQ ID NO: 3046584 - RNA, 19 nt, Artificial Sequence
  Description of Artificial Sequence: Synthetic oligonucleotide
aucagccucacaagccuaa

SEQ ID NO: 3046585 - RNA, 19 nt, Artificial Sequence
  Description of Artificial Sequence: Synthetic oligonucleotide
cgaucauuucuucuuuauc

SEQ ID NO: 3046586 - RNA, 19 nt, Artificial Sequence
  Description of Artificial Sequence: Synthetic oligonucleotide
cuucuaccuugucagcugu

SEQ ID NO: 3046587 - RNA, 19 nt, Artificial Sequence
  Description of Artificial Sequence: Synthetic oligonucleotide
ucgagccuucuaccuuguc

SEQ ID NO: 3046588 - RNA, 19 nt, Artificial Sequence
  Description of Artificial Sequence: Synthetic oligonucleotide
gacauucaaucaguaguuu

SEQ ID NO: 3046589 - RNA, 19 nt, Artificial Sequence
  Description of Artificial Sequence: Synthetic oligonucleotide
gcaucagccucacaagccu

SEQ ID NO: 3046590 - RNA, 19 nt, Artificial Sequence
  Description of Artificial Sequence: Synthetic oligonucleotide
cuuagccaugacauucaau

SEQ ID NO: 3046591 - RNA, 19 nt, Artificial Sequence
  Description of Artificial Sequence: Synthetic oligonucleotide
cucacaagccuaagguuuu

SEQ ID NO: 3046592 - RNA, 19 nt, Artificial Sequence
  Description of Artificial Sequence: Synthetic oligonucleotide
caucagccucacaagccua

SEQ ID NO: 3046593 - RNA, 19 nt, Artificial Sequence
  Description of Artificial Sequence: Synthetic oligonucleotide
uucuugccuuucucuuauu

SEQ ID NO: 3046594 - RNA, 19 nt, Artificial Sequence
  Description of Artificial Sequence: Synthetic oligonucleotide
cuugaguuuuccgaucauu

SEQ ID NO: 3046595 - RNA, 19 nt, Artificial Sequence
  Description of Artificial Sequence: Synthetic oligonucleotide
caguuaucucaauguauuu

SEQ ID NO: 3046596 - RNA, 19 nt, Artificial Sequence
  Description of Artificial Sequence: Synthetic oligonucleotide
cgagccuucuaccuuguca

SEQ ID NO: 3046597 - RNA, 19 nt, Artificial Sequence
  Description of Artificial Sequence: Synthetic oligonucleotide
ccucacaagccuaagguuu

SEQ ID NO: 3046598 - RNA, 19 nt, Artificial Sequence
  Description of Artificial Sequence: Synthetic oligonucleotide
cugcuuuaguuguucguuu

SEQ ID NO: 3046599 - RNA, 19 nt, Artificial Sequence
  Description of Artificial Sequence: Synthetic oligonucleotide
aucuugcaucagccucaca

SEQ ID NO: 3046600 - RNA, 19 nt, Artificial Sequence
  Description of Artificial Sequence: Synthetic oligonucleotide
ucuccacaccgagcuucga

SEQ ID NO: 3046601 - RNA, 19 nt, Artificial Sequence
  Description of Artificial Sequence: Synthetic oligonucleotide
cucuuuccaaugugcuacu

SEQ ID NO: 3046602 - RNA, 19 nt, Artificial Sequence
  Description of Artificial Sequence: Synthetic oligonucleotide
gccaugacauucaaucagu

SEQ ID NO: 3046603 - RNA, 19 nt, Artificial Sequence
  Description of Artificial Sequence: Synthetic oligonucleotide
gccuuagccaugacauuca

SEQ ID NO: 3046604 - RNA, 19 nt, Artificial Sequence
  Description of Artificial Sequence: Synthetic oligonucleotide
ccaugacauucaaucagua

SEQ ID NO: 3046605 - RNA, 19 nt, Artificial Sequence
  Description of Artificial Sequence: Synthetic oligonucleotide
ccuaagguuuucuugccuu

SEQ ID NO: 3046606 - RNA, 19 nt, Artificial Sequence
  Description of Artificial Sequence: Synthetic oligonucleotide
caccgagcuucgagccuuc

SEQ ID NO: 3046607 - RNA, 19 nt, Artificial Sequence
  Description of Artificial Sequence: Synthetic oligonucleotide
cacaagccuaagguuuucu

SEQ ID NO: 3046608 - RNA, 19 nt, Artificial Sequence
  Description of Artificial Sequence: Synthetic oligonucleotide
gcuguccaacaacuuucaa

SEQ ID NO: 3046609 - RNA, 19 nt, Artificial Sequence
  Description of Artificial Sequence: Synthetic oligonucleotide
gccuaagguuuucuugccu

SEQ ID NO: 3046610 - RNA, 19 nt, Artificial Sequence
  Description of Artificial Sequence: Synthetic oligonucleotide
gccuucuaccuugucagcu

SEQ ID NO: 3046611 - RNA, 19 nt, Artificial Sequence
  Description of Artificial Sequence: Synthetic oligonucleotide
caaucuccuccuugaguuu

SEQ ID NO: 3046612 - RNA, 19 nt, Artificial Sequence
  Description of Artificial Sequence: Synthetic oligonucleotide
cacaccgagcuucgagccu

SEQ ID NO: 3046613 - RNA, 19 nt, Artificial Sequence
  Description of Artificial Sequence: Synthetic oligonucleotide
ccuccuugaguuuuccgau

SEQ ID NO: 3046614 - RNA, 19 nt, Artificial Sequence
  Description of Artificial Sequence: Synthetic oligonucleotide
accgagcuucgagccuucu

SEQ ID NO: 3046615 - RNA, 19 nt, Artificial Sequence
  Description of Artificial Sequence: Synthetic oligonucleotide
gccucacaagccuaagguu

SEQ ID NO: 3046616 - RNA, 19 nt, Artificial Sequence
  Description of Artificial Sequence: Synthetic oligonucleotide
ccgaucauuucuucuuuau

SEQ ID NO: 3046617 - RNA, 19 nt, Artificial Sequence
  Description of Artificial Sequence: Synthetic oligonucleotide
gcuucgagccuucuaccuu

SEQ ID NO: 3046618 - RNA, 19 nt, Artificial Sequence
  Description of Artificial Sequence: Synthetic oligonucleotide
ccuuagccaugacauucaa

SEQ ID NO: 3046619 - RNA, 19 nt, Artificial Sequence
  Description of Artificial Sequence: Synthetic oligonucleotide
gucagcuguccaacaacuu

SEQ ID NO: 3046620 - RNA, 19 nt, Artificial Sequence
  Description of Artificial Sequence: Synthetic oligonucleotide
ccuuuucgagaucuucaau

SEQ ID NO: 3046621 - RNA, 19 nt, Artificial Sequence
  Description of Artificial Sequence: Synthetic oligonucleotide
cuaugucaucuagguccua

SEQ ID NO: 3046622 - RNA, 19 nt, Artificial Sequence
  Description of Artificial Sequence: Synthetic oligonucleotide
ccgagcuucgagccuucua

SEQ ID NO: 3046623 - RNA, 19 nt, Artificial Sequence
  Description of Artificial Sequence: Synthetic oligonucleotide
ccuugaguuuuccgaucau

SEQ ID NO: 3046624 - RNA, 19 nt, Artificial Sequence
  Description of Artificial Sequence: Synthetic oligonucleotide
aaaauguccuuuucguugc

SEQ ID NO: 3046625 - RNA, 19 nt, Artificial Sequence
  Description of Artificial Sequence: Synthetic oligonucleotide
uggaaaugaucucaaaugg

SEQ ID NO: 3046626 - RNA, 19 nt, Artificial Sequence
  Description of Artificial Sequence: Synthetic oligonucleotide
aaugaucucaaauggcccg

SEQ ID NO: 3046627 - RNA, 19 nt, Artificial Sequence
  Description of Artificial Sequence: Synthetic oligonucleotide
uaaaauguccuuuucguug

SEQ ID NO: 3046628 - RNA, 19 nt, Artificial Sequence
  Description of Artificial Sequence: Synthetic oligonucleotide
uuuucuucagggcugaaca

SEQ ID NO: 3046629 - RNA, 19 nt, Artificial Sequence
  Description of Artificial Sequence: Synthetic oligonucleotide
aaaugaucucaaauggccc

SEQ ID NO: 3046630 - RNA, 19 nt, Artificial Sequence
  Description of Artificial Sequence: Synthetic oligonucleotide
gaaaugaucucaaauggcc

SEQ ID NO: 3046631 - RNA, 19 nt, Artificial Sequence
  Description of Artificial Sequence: Synthetic oligonucleotide
aaaggcacaucacuucuuc

SEQ ID NO: 3046632 - RNA, 19 nt, Artificial Sequence
  Description of Artificial Sequence: Synthetic oligonucleotide
acaggcuagaacgacaugc

SEQ ID NO: 3046633 - RNA, 19 nt, Artificial Sequence
  Description of Artificial Sequence: Synthetic oligonucleotide
gacucaucaacuuccaaag

SEQ ID NO: 3046634 - RNA, 19 nt, Artificial Sequence
  Description of Artificial Sequence: Synthetic oligonucleotide
uuggaugaaguuuucagga

SEQ ID NO: 3046635 - RNA, 19 nt, Artificial Sequence
  Description of Artificial Sequence: Synthetic oligonucleotide
uccagaauacugaacuggg

SEQ ID NO: 3046636 - RNA, 19 nt, Artificial Sequence
  Description of Artificial Sequence: Synthetic oligonucleotide
ucucaaauggcccgcagag

SEQ ID NO: 3046637 - RNA, 19 nt, Artificial Sequence
  Description of Artificial Sequence: Synthetic oligonucleotide
cuguacauuuucuucaggg

SEQ ID NO: 3046638 - RNA, 19 nt, Artificial Sequence
  Description of Artificial Sequence: Synthetic oligonucleotide
cuggaaaugaucucaaaug

SEQ ID NO: 3046639 - RNA, 19 nt, Artificial Sequence
  Description of Artificial Sequence: Synthetic oligonucleotide
cuuggaugaaguuuucagg

SEQ ID NO: 3046640 - RNA, 19 nt, Artificial Sequence
  Description of Artificial Sequence: Synthetic oligonucleotide
ucagccaucuccaagggac

SEQ ID NO: 3046641 - RNA, 19 nt, Artificial Sequence
  Description of Artificial Sequence: Synthetic oligonucleotide
gaugugagagaccacgugc

SEQ ID NO: 3046642 - RNA, 19 nt, Artificial Sequence
  Description of Artificial Sequence: Synthetic oligonucleotide
ucaaauggcccgcagaggu

SEQ ID NO: 3046643 - RNA, 19 nt, Artificial Sequence
  Description of Artificial Sequence: Synthetic oligonucleotide
acugcaguaacucgggcgg

SEQ ID NO: 3046644 - RNA, 19 nt, Artificial Sequence
  Description of Artificial Sequence: Synthetic oligonucleotide
cucaucaacuuccaaaggc

SEQ ID NO: 3046645 - RNA, 19 nt, Artificial Sequence
  Description of Artificial Sequence: Synthetic oligonucleotide
ucaucaacuuccaaaggca

SEQ ID NO: 3046646 - RNA, 19 nt, Artificial Sequence
  Description of Artificial Sequence: Synthetic oligonucleotide
uuucguugcaacaagcguc

SEQ ID NO: 3046647 - RNA, 19 nt, Artificial Sequence
  Description of Artificial Sequence: Synthetic oligonucleotide
acuuggaugaaguuuucag

SEQ ID NO: 3046648 - RNA, 19 nt, Artificial Sequence
  Description of Artificial Sequence: Synthetic oligonucleotide
ggcugaacaggcuagaacg

SEQ ID NO: 3046649 - RNA, 19 nt, Artificial Sequence
  Description of Artificial Sequence: Synthetic oligonucleotide
cuuuucguugcaacaagcg

SEQ ID NO: 3046650 - RNA, 19 nt, Artificial Sequence
  Description of Artificial Sequence: Synthetic oligonucleotide
ucuggaaaugaucucaaau

SEQ ID NO: 3046651 - RNA, 19 nt, Artificial Sequence
  Description of Artificial Sequence: Synthetic oligonucleotide
uguacauuuucuucagggc

SEQ ID NO: 3046652 - RNA, 19 nt, Artificial Sequence
  Description of Artificial Sequence: Synthetic oligonucleotide
aucaagaugucucuguaca

SEQ ID NO: 3046653 - RNA, 19 nt, Artificial Sequence
  Description of Artificial Sequence: Synthetic oligonucleotide
ugggacugcaguaacucgg

SEQ ID NO: 3046654 - RNA, 19 nt, Artificial Sequence
  Description of Artificial Sequence: Synthetic oligonucleotide
uacauuuucuucagggcug

SEQ ID NO: 3046655 - RNA, 19 nt, Artificial Sequence
  Description of Artificial Sequence: Synthetic oligonucleotide
uagaacgacaugcuguccc

SEQ ID NO: 3046656 - RNA, 19 nt, Artificial Sequence
  Description of Artificial Sequence: Synthetic oligonucleotide
aaggcacaucacuucuucc

SEQ ID NO: 3046657 - RNA, 19 nt, Artificial Sequence
  Description of Artificial Sequence: Synthetic oligonucleotide
aacuuccaaaggcacauca

SEQ ID NO: 3046658 - RNA, 19 nt, Artificial Sequence
  Description of Artificial Sequence: Synthetic oligonucleotide
uuuucguugcaacaagcgu

SEQ ID NO: 3046659 - RNA, 19 nt, Artificial Sequence
  Description of Artificial Sequence: Synthetic oligonucleotide
uuuugguccacgcugacuu

SEQ ID NO: 3046660 - RNA, 19 nt, Artificial Sequence
  Description of Artificial Sequence: Synthetic oligonucleotide
agguagaccaccaagagcu

SEQ ID NO: 3046661 - RNA, 19 nt, Artificial Sequence
  Description of Artificial Sequence: Synthetic oligonucleotide
gacugcaguaacucgggcg

SEQ ID NO: 3046662 - RNA, 19 nt, Artificial Sequence
  Description of Artificial Sequence: Synthetic oligonucleotide
ucuuccucguaucaagaug

SEQ ID NO: 3046663 - RNA, 19 nt, Artificial Sequence
  Description of Artificial Sequence: Synthetic oligonucleotide
cagaauacugaacugggac

SEQ ID NO: 3046664 - RNA, 19 nt, Artificial Sequence
  Description of Artificial Sequence: Synthetic oligonucleotide
ugacucaucaacuuccaaa

SEQ ID NO: 3046665 - RNA, 19 nt, Artificial Sequence
  Description of Artificial Sequence: Synthetic oligonucleotide
aucuccaagggacuuuugg

SEQ ID NO: 3046666 - RNA, 19 nt, Artificial Sequence
  Description of Artificial Sequence: Synthetic oligonucleotide
ugaaguuuucaggaccugg

SEQ ID NO: 3046667 - RNA, 19 nt, Artificial Sequence
  Description of Artificial Sequence: Synthetic oligonucleotide
aauacugaacugggacugc

SEQ ID NO: 3046668 - RNA, 19 nt, Artificial Sequence
  Description of Artificial Sequence: Synthetic oligonucleotide
acuucuuccucguaucaag

SEQ ID NO: 3046669 - RNA, 19 nt, Artificial Sequence
  Description of Artificial Sequence: Synthetic oligonucleotide
ucuucagggcugaacaggc

SEQ ID NO: 3046670 - RNA, 19 nt, Artificial Sequence
  Description of Artificial Sequence: Synthetic oligonucleotide
agaauacugaacugggacu

SEQ ID NO: 3046671 - RNA, 19 nt, Artificial Sequence
  Description of Artificial Sequence: Synthetic oligonucleotide
uccaagggacuuuuggucc

SEQ ID NO: 3046672 - RNA, 19 nt, Artificial Sequence
  Description of Artificial Sequence: Synthetic oligonucleotide
gaauacugaacugggacug

SEQ ID NO: 3046673 - RNA, 19 nt, Artificial Sequence
  Description of Artificial Sequence: Synthetic oligonucleotide
gcauaaaauguccuuuucg

SEQ ID NO: 3046674 - RNA, 19 nt, Artificial Sequence
  Description of Artificial Sequence: Synthetic oligonucleotide
uccacgcugacuuggauga

SEQ ID NO: 3046675 - RNA, 19 nt, Artificial Sequence
  Description of Artificial Sequence: Synthetic oligonucleotide
ugagagaccacgugcuucc

SEQ ID NO: 3046676 - RNA, 19 nt, Artificial Sequence
  Description of Artificial Sequence: Synthetic oligonucleotide
aucacuucuuccucguauc

SEQ ID NO: 3046677 - RNA, 19 nt, Artificial Sequence
  Description of Artificial Sequence: Synthetic oligonucleotide
aguuuucaggaccuggaug

SEQ ID NO: 3046678 - RNA, 19 nt, Artificial Sequence
  Description of Artificial Sequence: Synthetic oligonucleotide
ucuguacauuuucuucagg

SEQ ID NO: 3046679 - RNA, 19 nt, Artificial Sequence
  Description of Artificial Sequence: Synthetic oligonucleotide
agagguagaccaccaagag

SEQ ID NO: 3046680 - RNA, 19 nt, Artificial Sequence
  Description of Artificial Sequence: Synthetic oligonucleotide
aagaugucucuguacauuu

SEQ ID NO: 3046681 - RNA, 19 nt, Artificial Sequence
  Description of Artificial Sequence: Synthetic oligonucleotide
ugaacaggcuagaacgaca

SEQ ID NO: 3046682 - RNA, 19 nt, Artificial Sequence
  Description of Artificial Sequence: Synthetic oligonucleotide
auguccuuuucguugcaac

SEQ ID NO: 3046683 - RNA, 19 nt, Artificial Sequence
  Description of Artificial Sequence: Synthetic oligonucleotide
uucuucagggcugaacagg

SEQ ID NO: 3046684 - RNA, 19 nt, Artificial Sequence
  Description of Artificial Sequence: Synthetic oligonucleotide
ugcaacaagcgucuggaaa

SEQ ID NO: 3046685 - RNA, 19 nt, Artificial Sequence
  Description of Artificial Sequence: Synthetic oligonucleotide
uucguugcaacaagcgucu

SEQ ID NO: 3046686 - RNA, 19 nt, Artificial Sequence
  Description of Artificial Sequence: Synthetic oligonucleotide
aaauggcccgcagagguag

SEQ ID NO: 3046687 - RNA, 19 nt, Artificial Sequence
  Description of Artificial Sequence: Synthetic oligonucleotide
uccaugauggcaucagcca

SEQ ID NO: 3046688 - RNA, 19 nt, Artificial Sequence
  Description of Artificial Sequence: Synthetic oligonucleotide
cuggaugugagagaccacg

SEQ ID NO: 3046689 - RNA, 19 nt, Artificial Sequence
  Description of Artificial Sequence: Synthetic oligonucleotide
uccuuuucguugcaacaag

SEQ ID NO: 3046690 - RNA, 19 nt, Artificial Sequence
  Description of Artificial Sequence: Synthetic oligonucleotide
agaacgacaugcugucccg

SEQ ID NO: 3046691 - RNA, 19 nt, Artificial Sequence
  Description of Artificial Sequence: Synthetic oligonucleotide
aacgacaugcugucccgag

SEQ ID NO: 3046692 - RNA, 19 nt, Artificial Sequence
  Description of Artificial Sequence: Synthetic oligonucleotide
guccagaauacugaacugg

SEQ ID NO: 3046693 - RNA, 19 nt, Artificial Sequence
  Description of Artificial Sequence: Synthetic oligonucleotide
acucgggcggcauaaaaug

SEQ ID NO: 3046694 - RNA, 19 nt, Artificial Sequence
  Description of Artificial Sequence: Synthetic oligonucleotide
uuucuucagggcugaacag

SEQ ID NO: 3046695 - RNA, 19 nt, Artificial Sequence
  Description of Artificial Sequence: Synthetic oligonucleotide
ucuccaagggacuuuuggu

SEQ ID NO: 3046696 - RNA, 19 nt, Artificial Sequence
  Description of Artificial Sequence: Synthetic oligonucleotide
uguccuuuucguugcaaca

SEQ ID NO: 3046697 - RNA, 19 nt, Artificial Sequence
  Description of Artificial Sequence: Synthetic oligonucleotide
gagguagaccaccaagagc

SEQ ID NO: 3046698 - RNA, 19 nt, Artificial Sequence
  Description of Artificial Sequence: Synthetic oligonucleotide
uaucaagaugucucuguac

SEQ ID NO: 3046699 - RNA, 19 nt, Artificial Sequence
  Description of Artificial Sequence: Synthetic oligonucleotide
gcaucagccaucuccaagg

SEQ ID NO: 3046700 - RNA, 19 nt, Artificial Sequence
  Description of Artificial Sequence: Synthetic oligonucleotide
agggacuuuugguccacgc

SEQ ID NO: 3046701 - RNA, 19 nt, Artificial Sequence
  Description of Artificial Sequence: Synthetic oligonucleotide
ucagggcugaacaggcuag

SEQ ID NO: 3046702 - RNA, 19 nt, Artificial Sequence
  Description of Artificial Sequence: Synthetic oligonucleotide
aagcgucuggaaaugaucu

SEQ ID NO: 3046703 - RNA, 19 nt, Artificial Sequence
  Description of Artificial Sequence: Synthetic oligonucleotide
auaaaauguccuuuucguu

SEQ ID NO: 3046704 - RNA, 19 nt, Artificial Sequence
  Description of Artificial Sequence: Synthetic oligonucleotide
ggaugaaguuuucaggacc

SEQ ID NO: 3046705 - RNA, 19 nt, Artificial Sequence
  Description of Artificial Sequence: Synthetic oligonucleotide
ucaacuuccaaaggcacau

SEQ ID NO: 3046706 - RNA, 19 nt, Artificial Sequence
  Description of Artificial Sequence: Synthetic oligonucleotide
accaccaagagcugcucuc

SEQ ID NO: 3046707 - RNA, 19 nt, Artificial Sequence
  Description of Artificial Sequence: Synthetic oligonucleotide
acugggacugcaguaacuc

SEQ ID NO: 3046708 - RNA, 19 nt, Artificial Sequence
  Description of Artificial Sequence: Synthetic oligonucleotide
cauaaaauguccuuuucgu

SEQ ID NO: 3046709 - RNA, 19 nt, Artificial Sequence
  Description of Artificial Sequence: Synthetic oligonucleotide
uuugcugacucaucaacuu

SEQ ID NO: 3046710 - RNA, 19 nt, Artificial Sequence
  Description of Artificial Sequence: Synthetic oligonucleotide
augaucucaaauggcccgc

SEQ ID NO: 3046711 - RNA, 19 nt, Artificial Sequence
  Description of Artificial Sequence: Synthetic oligonucleotide
aaguuuucaggaccuggau

SEQ ID NO: 3046712 - RNA, 19 nt, Artificial Sequence
  Description of Artificial Sequence: Synthetic oligonucleotide
gagaccacgugcuuccaug

SEQ ID NO: 3046713 - RNA, 19 nt, Artificial Sequence
  Description of Artificial Sequence: Synthetic oligonucleotide
caucaacuuccaaaggcac

SEQ ID NO: 3046714 - RNA, 19 nt, Artificial Sequence
  Description of Artificial Sequence: Synthetic oligonucleotide
uccaaaggcacaucacuuc

SEQ ID NO: 3046715 - RNA, 19 nt, Artificial Sequence
  Description of Artificial Sequence: Synthetic oligonucleotide
uggaugaaguuuucaggac

SEQ ID NO: 3046716 - RNA, 19 nt, Artificial Sequence
  Description of Artificial Sequence: Synthetic oligonucleotide
aggcacaucacuucuuccu

SEQ ID NO: 3046717 - RNA, 19 nt, Artificial Sequence
  Description of Artificial Sequence: Synthetic oligonucleotide
uuccaaaggcacaucacuu

SEQ ID NO: 3046718 - RNA, 19 nt, Artificial Sequence
  Description of Artificial Sequence: Synthetic oligonucleotide
aagagcugcucuccggcca

SEQ ID NO: 3046719 - RNA, 19 nt, Artificial Sequence
  Description of Artificial Sequence: Synthetic oligonucleotide
uagaccaccaagagcugcu

SEQ ID NO: 3046720 - RNA, 19 nt, Artificial Sequence
  Description of Artificial Sequence: Synthetic oligonucleotide
cuccaagggacuuuugguc

SEQ ID NO: 3046721 - RNA, 19 nt, Artificial Sequence
  Description of Artificial Sequence: Synthetic oligonucleotide
ucacuucuuccucguauca

SEQ ID NO: 3046722 - RNA, 19 nt, Artificial Sequence
  Description of Artificial Sequence: Synthetic oligonucleotide
ugaacugggacugcaguaa

SEQ ID NO: 3046723 - RNA, 19 nt, Artificial Sequence
  Description of Artificial Sequence: Synthetic oligonucleotide
uacugaacugggacugcag

SEQ ID NO: 3046724 - RNA, 19 nt, Artificial Sequence
  Description of Artificial Sequence: Synthetic oligonucleotide
ggacuuuugguccacgcug

SEQ ID NO: 3046725 - RNA, 19 nt, Artificial Sequence
  Description of Artificial Sequence: Synthetic oligonucleotide
uucagggcugaacaggcua

SEQ ID NO: 3046726 - RNA, 19 nt, Artificial Sequence
  Description of Artificial Sequence: Synthetic oligonucleotide
agcuggaugugagagacca

SEQ ID NO: 3046727 - RNA, 19 nt, Artificial Sequence
  Description of Artificial Sequence: Synthetic oligonucleotide
guacauuuucuucagggcu

SEQ ID NO: 3046728 - RNA, 19 nt, Artificial Sequence
  Description of Artificial Sequence: Synthetic oligonucleotide
gaaguuuucaggaccugga

SEQ ID NO: 3046729 - RNA, 19 nt, Artificial Sequence
  Description of Artificial Sequence: Synthetic oligonucleotide
caagcgucuggaaaugauc

SEQ ID NO: 3046730 - RNA, 19 nt, Artificial Sequence
  Description of Artificial Sequence: Synthetic oligonucleotide
accaagagcugcucuccgg

SEQ ID NO: 3046731 - RNA, 19 nt, Artificial Sequence
  Description of Artificial Sequence: Synthetic oligonucleotide
acuuccaaaggcacaucac

SEQ ID NO: 3046732 - RNA, 19 nt, Artificial Sequence
  Description of Artificial Sequence: Synthetic oligonucleotide
uugguccacgcugacuugg

SEQ ID NO: 3046733 - RNA, 19 nt, Artificial Sequence
  Description of Artificial Sequence: Synthetic oligonucleotide
ucuccggccagccuuuccu

SEQ ID NO: 3046734 - RNA, 19 nt, Artificial Sequence
  Description of Artificial Sequence: Synthetic oligonucleotide
guugcaacaagcgucugga

SEQ ID NO: 3046735 - RNA, 19 nt, Artificial Sequence
  Description of Artificial Sequence: Synthetic oligonucleotide
accacgugcuuccaugaug

SEQ ID NO: 3046736 - RNA, 19 nt, Artificial Sequence
  Description of Artificial Sequence: Synthetic oligonucleotide
caugauggcaucagccauc

SEQ ID NO: 3046737 - RNA, 19 nt, Artificial Sequence
  Description of Artificial Sequence: Synthetic oligonucleotide
agcgucuggaaaugaucuc

SEQ ID NO: 3046738 - RNA, 19 nt, Artificial Sequence
  Description of Artificial Sequence: Synthetic oligonucleotide
aucucaaauggcccgcaga

SEQ ID NO: 3046739 - RNA, 19 nt, Artificial Sequence
  Description of Artificial Sequence: Synthetic oligonucleotide
ucaagaugucucuguacau

SEQ ID NO: 3046740 - RNA, 19 nt, Artificial Sequence
  Description of Artificial Sequence: Synthetic oligonucleotide
ggaaaugaucucaaauggc

SEQ ID NO: 3046741 - RNA, 19 nt, Artificial Sequence
  Description of Artificial Sequence: Synthetic oligonucleotide
uugcugacucaucaacuuc

SEQ ID NO: 3046742 - RNA, 19 nt, Artificial Sequence
  Description of Artificial Sequence: Synthetic oligonucleotide
uggaugugagagaccacgu

SEQ ID NO: 3046743 - RNA, 19 nt, Artificial Sequence
  Description of Artificial Sequence: Synthetic oligonucleotide
acuuuugguccacgcugac

SEQ ID NO: 3046744 - RNA, 19 nt, Artificial Sequence
  Description of Artificial Sequence: Synthetic oligonucleotide
acgacaugcugucccgagg

SEQ ID NO: 3046745 - RNA, 19 nt, Artificial Sequence
  Description of Artificial Sequence: Synthetic oligonucleotide
ccacgugcuuccaugaugg

SEQ ID NO: 3046746 - RNA, 19 nt, Artificial Sequence
  Description of Artificial Sequence: Synthetic oligonucleotide
cugggacugcaguaacucg

SEQ ID NO: 3046747 - RNA, 19 nt, Artificial Sequence
  Description of Artificial Sequence: Synthetic oligonucleotide
cuuccucguaucaagaugu

SEQ ID NO: 3046748 - RNA, 19 nt, Artificial Sequence
  Description of Artificial Sequence: Synthetic oligonucleotide
cagagguagaccaccaaga

SEQ ID NO: 3046749 - RNA, 19 nt, Artificial Sequence
  Description of Artificial Sequence: Synthetic oligonucleotide
aacaggcuagaacgacaug

SEQ ID NO: 3046750 - RNA, 19 nt, Artificial Sequence
  Description of Artificial Sequence: Synthetic oligonucleotide
gaucucaaauggcccgcag

SEQ ID NO: 3046751 - RNA, 19 nt, Artificial Sequence
  Description of Artificial Sequence: Synthetic oligonucleotide
gcagagguagaccaccaag

SEQ ID NO: 3046752 - RNA, 19 nt, Artificial Sequence
  Description of Artificial Sequence: Synthetic oligonucleotide
ucgggcggcauaaaauguc

SEQ ID NO: 3046753 - RNA, 19 nt, Artificial Sequence
  Description of Artificial Sequence: Synthetic oligonucleotide
cuuccaugauggcaucagc

SEQ ID NO: 3046754 - RNA, 19 nt, Artificial Sequence
  Description of Artificial Sequence: Synthetic oligonucleotide
uucuuccucguaucaagau

SEQ ID NO: 3046755 - RNA, 19 nt, Artificial Sequence
  Description of Artificial Sequence: Synthetic oligonucleotide
ccucguaucaagaugucuc

SEQ ID NO: 3046756 - RNA, 19 nt, Artificial Sequence
  Description of Artificial Sequence: Synthetic oligonucleotide
gaugaaguuuucaggaccu

SEQ ID NO: 3046757 - RNA, 19 nt, Artificial Sequence
  Description of Artificial Sequence: Synthetic oligonucleotide
uaacucgggcggcauaaaa

SEQ ID NO: 3046758 - RNA, 19 nt, Artificial Sequence
  Description of Artificial Sequence: Synthetic oligonucleotide
guccacgcugacuuggaug

SEQ ID NO: 3046759 - RNA, 19 nt, Artificial Sequence
  Description of Artificial Sequence: Synthetic oligonucleotide
caucagccaucuccaaggg

SEQ ID NO: 3046760 - RNA, 19 nt, Artificial Sequence
  Description of Artificial Sequence: Synthetic oligonucleotide
aacucgggcggcauaaaau

SEQ ID NO: 3046761 - RNA, 19 nt, Artificial Sequence
  Description of Artificial Sequence: Synthetic oligonucleotide
aacaagcgucuggaaauga

SEQ ID NO: 3046762 - RNA, 19 nt, Artificial Sequence
  Description of Artificial Sequence: Synthetic oligonucleotide
gaacugggacugcaguaac

SEQ ID NO: 3046763 - RNA, 19 nt, Artificial Sequence
  Description of Artificial Sequence: Synthetic oligonucleotide
aggcuagaacgacaugcug

SEQ ID NO: 3046764 - RNA, 19 nt, Artificial Sequence
  Description of Artificial Sequence: Synthetic oligonucleotide
caugcugucccgaggccac

SEQ ID NO: 3046765 - RNA, 19 nt, Artificial Sequence
  Description of Artificial Sequence: Synthetic oligonucleotide
uuugguccacgcugacuug

SEQ ID NO: 3046766 - RNA, 19 nt, Artificial Sequence
  Description of Artificial Sequence: Synthetic oligonucleotide
agagcugcucuccggccag

SEQ ID NO: 3046767 - RNA, 19 nt, Artificial Sequence
  Description of Artificial Sequence: Synthetic oligonucleotide
ucguaucaagaugucucug

SEQ ID NO: 3046768 - RNA, 19 nt, Artificial Sequence
  Description of Artificial Sequence: Synthetic oligonucleotide
gcuagaacgacaugcuguc

SEQ ID NO: 3046769 - RNA, 19 nt, Artificial Sequence
  Description of Artificial Sequence: Synthetic oligonucleotide
aguaacucgggcggcauaa

SEQ ID NO: 3046770 - RNA, 19 nt, Artificial Sequence
  Description of Artificial Sequence: Synthetic oligonucleotide
caagagcugcucuccggcc

SEQ ID NO: 3046771 - RNA, 19 nt, Artificial Sequence
  Description of Artificial Sequence: Synthetic oligonucleotide
gcacaucacuucuuccucg

SEQ ID NO: 3046772 - RNA, 19 nt, Artificial Sequence
  Description of Artificial Sequence: Synthetic oligonucleotide
cucaaauggcccgcagagg

SEQ ID NO: 3046773 - RNA, 19 nt, Artificial Sequence
  Description of Artificial Sequence: Synthetic oligonucleotide
guagaccaccaagagcugc

SEQ ID NO: 3046774 - RNA, 19 nt, Artificial Sequence
  Description of Artificial Sequence: Synthetic oligonucleotide
agaccacgugcuuccauga

SEQ ID NO: 3046775 - RNA, 19 nt, Artificial Sequence
  Description of Artificial Sequence: Synthetic oligonucleotide
uccucguaucaagaugucu

SEQ ID NO: 3046776 - RNA, 19 nt, Artificial Sequence
  Description of Artificial Sequence: Synthetic oligonucleotide
augugagagaccacgugcu

SEQ ID NO: 3046777 - RNA, 19 nt, Artificial Sequence
  Description of Artificial Sequence: Synthetic oligonucleotide
cugaacaggcuagaacgac

SEQ ID NO: 3046778 - RNA, 19 nt, Artificial Sequence
  Description of Artificial Sequence: Synthetic oligonucleotide
aagggacuuuugguccacg

SEQ ID NO: 3046779 - RNA, 19 nt, Artificial Sequence
  Description of Artificial Sequence: Synthetic oligonucleotide
aauguccuuuucguugcaa

SEQ ID NO: 3046780 - RNA, 19 nt, Artificial Sequence
  Description of Artificial Sequence: Synthetic oligonucleotide
cuuccaaaggcacaucacu

SEQ ID NO: 3046781 - RNA, 19 nt, Artificial Sequence
  Description of Artificial Sequence: Synthetic oligonucleotide
aucaacuuccaaaggcaca

SEQ ID NO: 3046782 - RNA, 19 nt, Artificial Sequence
  Description of Artificial Sequence: Synthetic oligonucleotide
gacaugcugucccgaggcc

SEQ ID NO: 3046783 - RNA, 19 nt, Artificial Sequence
  Description of Artificial Sequence: Synthetic oligonucleotide
uccuuugcugacucaucaa

SEQ ID NO: 3046784 - RNA, 19 nt, Artificial Sequence
  Description of Artificial Sequence: Synthetic oligonucleotide
auggcaucagccaucucca

SEQ ID NO: 3046785 - RNA, 19 nt, Artificial Sequence
  Description of Artificial Sequence: Synthetic oligonucleotide
ugucccgaggccacgucuc

SEQ ID NO: 3046786 - RNA, 19 nt, Artificial Sequence
  Description of Artificial Sequence: Synthetic oligonucleotide
ggcaucagccaucuccaag

SEQ ID NO: 3046787 - RNA, 19 nt, Artificial Sequence
  Description of Artificial Sequence: Synthetic oligonucleotide
ccuuuucguugcaacaagc

SEQ ID NO: 3046788 - RNA, 19 nt, Artificial Sequence
  Description of Artificial Sequence: Synthetic oligonucleotide
cuucuuccucguaucaaga

SEQ ID NO: 3046789 - RNA, 19 nt, Artificial Sequence
  Description of Artificial Sequence: Synthetic oligonucleotide
gacuuuugguccacgcuga

SEQ ID NO: 3046790 - RNA, 19 nt, Artificial Sequence
  Description of Artificial Sequence: Synthetic oligonucleotide
cugacuuggaugaaguuuu

SEQ ID NO: 3046791 - RNA, 19 nt, Artificial Sequence
  Description of Artificial Sequence: Synthetic oligonucleotide
ugugagagaccacgugcuu

SEQ ID NO: 3046792 - RNA, 19 nt, Artificial Sequence
  Description of Artificial Sequence: Synthetic oligonucleotide
ugacuuggaugaaguuuuc

SEQ ID NO: 3046793 - RNA, 19 nt, Artificial Sequence
  Description of Artificial Sequence: Synthetic oligonucleotide
augauggcaucagccaucu

SEQ ID NO: 3046794 - RNA, 19 nt, Artificial Sequence
  Description of Artificial Sequence: Synthetic oligonucleotide
ggaugugagagaccacgug

SEQ ID NO: 3046795 - RNA, 19 nt, Artificial Sequence
  Description of Artificial Sequence: Synthetic oligonucleotide
aacugggacugcaguaacu

SEQ ID NO: 3046796 - RNA, 19 nt, Artificial Sequence
  Description of Artificial Sequence: Synthetic oligonucleotide
acauuuucuucagggcuga

SEQ ID NO: 3046797 - RNA, 19 nt, Artificial Sequence
  Description of Artificial Sequence: Synthetic oligonucleotide
ccuuugcugacucaucaac

SEQ ID NO: 3046798 - RNA, 19 nt, Artificial Sequence
  Description of Artificial Sequence: Synthetic oligonucleotide
aucagccaucuccaaggga

SEQ ID NO: 3046799 - RNA, 19 nt, Artificial Sequence
  Description of Artificial Sequence: Synthetic oligonucleotide
caccaagagcugcucuccg

SEQ ID NO: 3046800 - RNA, 19 nt, Artificial Sequence
  Description of Artificial Sequence: Synthetic oligonucleotide
cacgcugacuuggaugaag

SEQ ID NO: 3046801 - RNA, 19 nt, Artificial Sequence
  Description of Artificial Sequence: Synthetic oligonucleotide
auacugaacugggacugca

SEQ ID NO: 3046802 - RNA, 19 nt, Artificial Sequence
  Description of Artificial Sequence: Synthetic oligonucleotide
ggcauaaaauguccuuuuc

SEQ ID NO: 3046803 - RNA, 19 nt, Artificial Sequence
  Description of Artificial Sequence: Synthetic oligonucleotide
gacuuggaugaaguuuuca

SEQ ID NO: 3046804 - RNA, 19 nt, Artificial Sequence
  Description of Artificial Sequence: Synthetic oligonucleotide
ugaucucaaauggcccgca

SEQ ID NO: 3046805 - RNA, 19 nt, Artificial Sequence
  Description of Artificial Sequence: Synthetic oligonucleotide
cagccuuuccuuugcugac

SEQ ID NO: 3046806 - RNA, 19 nt, Artificial Sequence
  Description of Artificial Sequence: Synthetic oligonucleotide
acgugcuuccaugauggca

SEQ ID NO: 3046807 - RNA, 19 nt, Artificial Sequence
  Description of Artificial Sequence: Synthetic oligonucleotide
ugcaguaacucgggcggca

SEQ ID NO: 3046808 - RNA, 19 nt, Artificial Sequence
  Description of Artificial Sequence: Synthetic oligonucleotide
caacaagcgucuggaaaug

SEQ ID NO: 3046809 - RNA, 19 nt, Artificial Sequence
  Description of Artificial Sequence: Synthetic oligonucleotide
cuagaacgacaugcugucc

SEQ ID NO: 3046810 - RNA, 19 nt, Artificial Sequence
  Description of Artificial Sequence: Synthetic oligonucleotide
acaugcugucccgaggcca

SEQ ID NO: 3046811 - RNA, 19 nt, Artificial Sequence
  Description of Artificial Sequence: Synthetic oligonucleotide
uuccucguaucaagauguc

SEQ ID NO: 3046812 - RNA, 19 nt, Artificial Sequence
  Description of Artificial Sequence: Synthetic oligonucleotide
ugguccacgcugacuugga

SEQ ID NO: 3046813 - RNA, 19 nt, Artificial Sequence
  Description of Artificial Sequence: Synthetic oligonucleotide
gcguccagaauacugaacu

SEQ ID NO: 3046814 - RNA, 19 nt, Artificial Sequence
  Description of Artificial Sequence: Synthetic oligonucleotide
ccaagagcugcucuccggc

SEQ ID NO: 3046815 - RNA, 19 nt, Artificial Sequence
  Description of Artificial Sequence: Synthetic oligonucleotide
gugagagaccacgugcuuc

SEQ ID NO: 3046816 - RNA, 19 nt, Artificial Sequence
  Description of Artificial Sequence: Synthetic oligonucleotide
agcugcucuccggccagcc

SEQ ID NO: 3046817 - RNA, 19 nt, Artificial Sequence
  Description of Artificial Sequence: Synthetic oligonucleotide
augaaguuuucaggaccug

SEQ ID NO: 3046818 - RNA, 19 nt, Artificial Sequence
  Description of Artificial Sequence: Synthetic oligonucleotide
gggacugcaguaacucggg

SEQ ID NO: 3046819 - RNA, 19 nt, Artificial Sequence
  Description of Artificial Sequence: Synthetic oligonucleotide
gcaacaagcgucuggaaau

SEQ ID NO: 3046820 - RNA, 19 nt, Artificial Sequence
  Description of Artificial Sequence: Synthetic oligonucleotide
auggcccgcagagguagac

SEQ ID NO: 3046821 - RNA, 19 nt, Artificial Sequence
  Description of Artificial Sequence: Synthetic oligonucleotide
agaccaccaagagcugcuc

SEQ ID NO: 3046822 - RNA, 19 nt, Artificial Sequence
  Description of Artificial Sequence: Synthetic oligonucleotide
cucguaucaagaugucucu

SEQ ID NO: 3046823 - RNA, 19 nt, Artificial Sequence
  Description of Artificial Sequence: Synthetic oligonucleotide
acaagcgucuggaaaugau

SEQ ID NO: 3046824 - RNA, 19 nt, Artificial Sequence
  Description of Artificial Sequence: Synthetic oligonucleotide
agagaccacgugcuuccau

SEQ ID NO: 3046825 - RNA, 19 nt, Artificial Sequence
  Description of Artificial Sequence: Synthetic oligonucleotide
uugcaacaagcgucuggaa

SEQ ID NO: 3046826 - RNA, 19 nt, Artificial Sequence
  Description of Artificial Sequence: Synthetic oligonucleotide
gaacaggcuagaacgacau

SEQ ID NO: 3046827 - RNA, 19 nt, Artificial Sequence
  Description of Artificial Sequence: Synthetic oligonucleotide
gggcugaacaggcuagaac

SEQ ID NO: 3046828 - RNA, 19 nt, Artificial Sequence
  Description of Artificial Sequence: Synthetic oligonucleotide
acgcugacuuggaugaagu

SEQ ID NO: 3046829 - RNA, 19 nt, Artificial Sequence
  Description of Artificial Sequence: Synthetic oligonucleotide
ccagccuuuccuuugcuga

SEQ ID NO: 3046830 - RNA, 19 nt, Artificial Sequence
  Description of Artificial Sequence: Synthetic oligonucleotide
caucacuucuuccucguau

SEQ ID NO: 3046831 - RNA, 19 nt, Artificial Sequence
  Description of Artificial Sequence: Synthetic oligonucleotide
cguugcaacaagcgucugg

SEQ ID NO: 3046832 - RNA, 19 nt, Artificial Sequence
  Description of Artificial Sequence: Synthetic oligonucleotide
caucuccaagggacuuuug

SEQ ID NO: 3046833 - RNA, 19 nt, Artificial Sequence
  Description of Artificial Sequence: Synthetic oligonucleotide
cgacaugcugucccgaggc

SEQ ID NO: 3046834 - RNA, 19 nt, Artificial Sequence
  Description of Artificial Sequence: Synthetic oligonucleotide
gucuggaaaugaucucaaa

SEQ ID NO: 3046835 - RNA, 19 nt, Artificial Sequence
  Description of Artificial Sequence: Synthetic oligonucleotide
gcgucuggaaaugaucuca

SEQ ID NO: 3046836 - RNA, 19 nt, Artificial Sequence
  Description of Artificial Sequence: Synthetic oligonucleotide
cacgugcuuccaugauggc

SEQ ID NO: 3046837 - RNA, 19 nt, Artificial Sequence
  Description of Artificial Sequence: Synthetic oligonucleotide
ggcccgcagagguagacca

SEQ ID NO: 3046838 - RNA, 19 nt, Artificial Sequence
  Description of Artificial Sequence: Synthetic oligonucleotide
agccuuuccuuugcugacu

SEQ ID NO: 3046839 - RNA, 19 nt, Artificial Sequence
  Description of Artificial Sequence: Synthetic oligonucleotide
caggcuagaacgacaugcu

SEQ ID NO: 3046840 - RNA, 19 nt, Artificial Sequence
  Description of Artificial Sequence: Synthetic oligonucleotide
cagcuggaugugagagacc

SEQ ID NO: 3046841 - RNA, 19 nt, Artificial Sequence
  Description of Artificial Sequence: Synthetic oligonucleotide
ggcuagaacgacaugcugu

SEQ ID NO: 3046842 - RNA, 19 nt, Artificial Sequence
  Description of Artificial Sequence: Synthetic oligonucleotide
acaucacuucuuccucgua

SEQ ID NO: 3046843 - RNA, 19 nt, Artificial Sequence
  Description of Artificial Sequence: Synthetic oligonucleotide
gaacgacaugcugucccga

SEQ ID NO: 3046844 - RNA, 19 nt, Artificial Sequence
  Description of Artificial Sequence: Synthetic oligonucleotide
cucuccggccagccuuucc

SEQ ID NO: 3046845 - RNA, 19 nt, Artificial Sequence
  Description of Artificial Sequence: Synthetic oligonucleotide
caagggacuuuugguccac

SEQ ID NO: 3046846 - RNA, 19 nt, Artificial Sequence
  Description of Artificial Sequence: Synthetic oligonucleotide
ggacugcaguaacucgggc

SEQ ID NO: 3046847 - RNA, 19 nt, Artificial Sequence
  Description of Artificial Sequence: Synthetic oligonucleotide
cgggcggcauaaaaugucc

SEQ ID NO: 3046848 - RNA, 19 nt, Artificial Sequence
  Description of Artificial Sequence: Synthetic oligonucleotide
cugcaguaacucgggcggc

SEQ ID NO: 3046849 - RNA, 19 nt, Artificial Sequence
  Description of Artificial Sequence: Synthetic oligonucleotide
ggggcguccagaauacuga

SEQ ID NO: 3046850 - RNA, 19 nt, Artificial Sequence
  Description of Artificial Sequence: Synthetic oligonucleotide
uggcaucagccaucuccaa

SEQ ID NO: 3046851 - RNA, 19 nt, Artificial Sequence
  Description of Artificial Sequence: Synthetic oligonucleotide
aauggcccgcagagguaga

SEQ ID NO: 3046852 - RNA, 19 nt, Artificial Sequence
  Description of Artificial Sequence: Synthetic oligonucleotide
uccggccagccuuuccuuu

SEQ ID NO: 3046853 - RNA, 19 nt, Artificial Sequence
  Description of Artificial Sequence: Synthetic oligonucleotide
cacaucacuucuuccucgu

SEQ ID NO: 3046854 - RNA, 19 nt, Artificial Sequence
  Description of Artificial Sequence: Synthetic oligonucleotide
agaugucucuguacauuuu

SEQ ID NO: 3046855 - RNA, 19 nt, Artificial Sequence
  Description of Artificial Sequence: Synthetic oligonucleotide
ccagaauacugaacuggga

SEQ ID NO: 3046856 - RNA, 19 nt, Artificial Sequence
  Description of Artificial Sequence: Synthetic oligonucleotide
caaauggcccgcagaggua

SEQ ID NO: 3046857 - RNA, 19 nt, Artificial Sequence
  Description of Artificial Sequence: Synthetic oligonucleotide
ucguugcaacaagcgucug

SEQ ID NO: 3046858 - RNA, 19 nt, Artificial Sequence
  Description of Artificial Sequence: Synthetic oligonucleotide
ugcugucccgaggccacgu

SEQ ID NO: 3046859 - RNA, 19 nt, Artificial Sequence
  Description of Artificial Sequence: Synthetic oligonucleotide
gcugaacaggcuagaacga

SEQ ID NO: 3046860 - RNA, 19 nt, Artificial Sequence
  Description of Artificial Sequence: Synthetic oligonucleotide
cguccagaauacugaacug

SEQ ID NO: 3046861 - RNA, 19 nt, Artificial Sequence
  Description of Artificial Sequence: Synthetic oligonucleotide
caagaugucucuguacauu

SEQ ID NO: 3046862 - RNA, 19 nt, Artificial Sequence
  Description of Artificial Sequence: Synthetic oligonucleotide
cucgggcggcauaaaaugu

SEQ ID NO: 3046863 - RNA, 19 nt, Artificial Sequence
  Description of Artificial Sequence: Synthetic oligonucleotide
ucccgaggccacgucucug

SEQ ID NO: 3046864 - RNA, 19 nt, Artificial Sequence
  Description of Artificial Sequence: Synthetic oligonucleotide
caacuuccaaaggcacauc

SEQ ID NO: 3046865 - RNA, 19 nt, Artificial Sequence
  Description of Artificial Sequence: Synthetic oligonucleotide
cacuucuuccucguaucaa

SEQ ID NO: 3046866 - RNA, 19 nt, Artificial Sequence
  Description of Artificial Sequence: Synthetic oligonucleotide
gccuuuccuuugcugacuc

SEQ ID NO: 3046867 - RNA, 19 nt, Artificial Sequence
  Description of Artificial Sequence: Synthetic oligonucleotide
gggacuuuugguccacgcu

SEQ ID NO: 3046868 - RNA, 19 nt, Artificial Sequence
  Description of Artificial Sequence: Synthetic oligonucleotide
augcugucccgaggccacg

SEQ ID NO: 3046869 - RNA, 19 nt, Artificial Sequence
  Description of Artificial Sequence: Synthetic oligonucleotide
cccgcagagguagaccacc

SEQ ID NO: 3046870 - RNA, 19 nt, Artificial Sequence
  Description of Artificial Sequence: Synthetic oligonucleotide
gcugacuuggaugaaguuu

SEQ ID NO: 3046871 - RNA, 19 nt, Artificial Sequence
  Description of Artificial Sequence: Synthetic oligonucleotide
gguagaccaccaagagcug

SEQ ID NO: 3046872 - RNA, 19 nt, Artificial Sequence
  Description of Artificial Sequence: Synthetic oligonucleotide
gugcuuccaugauggcauc

SEQ ID NO: 3046873 - RNA, 19 nt, Artificial Sequence
  Description of Artificial Sequence: Synthetic oligonucleotide
ccaagggacuuuuggucca

SEQ ID NO: 3046874 - RNA, 19 nt, Artificial Sequence
  Description of Artificial Sequence: Synthetic oligonucleotide
ccaaaggcacaucacuucu

SEQ ID NO: 3046875 - RNA, 19 nt, Artificial Sequence
  Description of Artificial Sequence: Synthetic oligonucleotide
ggcguccagaauacugaac

SEQ ID NO: 3046876 - RNA, 19 nt, Artificial Sequence
  Description of Artificial Sequence: Synthetic oligonucleotide
gagagaccacgugcuucca

SEQ ID NO: 3046877 - RNA, 19 nt, Artificial Sequence
  Description of Artificial Sequence: Synthetic oligonucleotide
cguaucaagaugucucugu

SEQ ID NO: 3046878 - RNA, 19 nt, Artificial Sequence
  Description of Artificial Sequence: Synthetic oligonucleotide
caaaggcacaucacuucuu

SEQ ID NO: 3046879 - RNA, 19 nt, Artificial Sequence
  Description of Artificial Sequence: Synthetic oligonucleotide
gaccacgugcuuccaugau

SEQ ID NO: 3046880 - RNA, 19 nt, Artificial Sequence
  Description of Artificial Sequence: Synthetic oligonucleotide
gggcguccagaauacugaa

SEQ ID NO: 3046881 - RNA, 19 nt, Artificial Sequence
  Description of Artificial Sequence: Synthetic oligonucleotide
ccggccagccuuuccuuug

SEQ ID NO: 3046882 - RNA, 19 nt, Artificial Sequence
  Description of Artificial Sequence: Synthetic oligonucleotide
guaacucgggcggcauaaa

SEQ ID NO: 3046883 - RNA, 19 nt, Artificial Sequence
  Description of Artificial Sequence: Synthetic oligonucleotide
ggcggcauaaaauguccuu

SEQ ID NO: 3046884 - RNA, 19 nt, Artificial Sequence
  Description of Artificial Sequence: Synthetic oligonucleotide
gagcugcucuccggccagc

SEQ ID NO: 3046885 - RNA, 19 nt, Artificial Sequence
  Description of Artificial Sequence: Synthetic oligonucleotide
cugcucuccggccagccuu

SEQ ID NO: 3046886 - RNA, 19 nt, Artificial Sequence
  Description of Artificial Sequence: Synthetic oligonucleotide
caguaacucgggcggcaua

SEQ ID NO: 3046887 - RNA, 19 nt, Artificial Sequence
  Description of Artificial Sequence: Synthetic oligonucleotide
gcggcauaaaauguccuuu

SEQ ID NO: 3046888 - RNA, 19 nt, Artificial Sequence
  Description of Artificial Sequence: Synthetic oligonucleotide
cgucuggaaaugaucucaa

SEQ ID NO: 3046889 - RNA, 19 nt, Artificial Sequence
  Description of Artificial Sequence: Synthetic oligonucleotide
gcuggaugugagagaccac

SEQ ID NO: 3046890 - RNA, 19 nt, Artificial Sequence
  Description of Artificial Sequence: Synthetic oligonucleotide
ccaugauggcaucagccau

SEQ ID NO: 3046891 - RNA, 19 nt, Artificial Sequence
  Description of Artificial Sequence: Synthetic oligonucleotide
ccuuuccuuugcugacuca

SEQ ID NO: 3046892 - RNA, 19 nt, Artificial Sequence
  Description of Artificial Sequence: Synthetic oligonucleotide
gucccgaggccacgucucu

SEQ ID NO: 3046893 - RNA, 19 nt, Artificial Sequence
  Description of Artificial Sequence: Synthetic oligonucleotide
gcugucccgaggccacguc

SEQ ID NO: 3046894 - RNA, 19 nt, Artificial Sequence
  Description of Artificial Sequence: Synthetic oligonucleotide
ccgcagagguagaccacca

SEQ ID NO: 3046895 - RNA, 19 nt, Artificial Sequence
  Description of Artificial Sequence: Synthetic oligonucleotide
gguccacgcugacuuggau

SEQ ID NO: 3046896 - RNA, 19 nt, Artificial Sequence
  Description of Artificial Sequence: Synthetic oligonucleotide
gggcggcauaaaauguccu

SEQ ID NO: 3046897 - RNA, 19 nt, Artificial Sequence
  Description of Artificial Sequence: Synthetic oligonucleotide
gcccgcagagguagaccac

SEQ ID NO: 3046898 - RNA, 19 nt, Artificial Sequence
  Description of Artificial Sequence: Synthetic oligonucleotide
gcugcucuccggccagccu

SEQ ID NO: 3046899 - RNA, 19 nt, Artificial Sequence
  Description of Artificial Sequence: Synthetic oligonucleotide
cuccggccagccuuuccuu

SEQ ID NO: 3046900 - RNA, 19 nt, Artificial Sequence
  Description of Artificial Sequence: Synthetic oligonucleotide
cggcauaaaauguccuuuu

SEQ ID NO: 3046901 - RNA, 19 nt, Artificial Sequence
  Description of Artificial Sequence: Synthetic oligonucleotide
gcaguaacucgggcggcau

SEQ ID NO: 3046902 - RNA, 19 nt, Artificial Sequence
  Description of Artificial Sequence: Synthetic oligonucleotide
ggccagccuuuccuuugcu

SEQ ID NO: 3046903 - RNA, 19 nt, Artificial Sequence
  Description of Artificial Sequence: Synthetic oligonucleotide
cgcagagguagaccaccaa

SEQ ID NO: 3046904 - RNA, 19 nt, Artificial Sequence
  Description of Artificial Sequence: Synthetic oligonucleotide
ccaucuccaagggacuuuu

SEQ ID NO: 3046905 - RNA, 19 nt, Artificial Sequence
  Description of Artificial Sequence: Synthetic oligonucleotide
gcucuccggccagccuuuc

SEQ ID NO: 3046906 - RNA, 19 nt, Artificial Sequence
  Description of Artificial Sequence: Synthetic oligonucleotide
cgcugacuuggaugaaguu

SEQ ID NO: 3046907 - RNA, 19 nt, Artificial Sequence
  Description of Artificial Sequence: Synthetic oligonucleotide
ccacgcugacuuggaugaa

SEQ ID NO: 3046908 - RNA, 19 nt, Artificial Sequence
  Description of Artificial Sequence: Synthetic oligonucleotide
aagcuaguuaacuagagac

SEQ ID NO: 3046909 - RNA, 19 nt, Artificial Sequence
  Description of Artificial Sequence: Synthetic oligonucleotide
aagaguuaagugcauaaac

SEQ ID NO: 3046910 - RNA, 19 nt, Artificial Sequence
  Description of Artificial Sequence: Synthetic oligonucleotide
aaugcuacuaaguggacag

SEQ ID NO: 3046911 - RNA, 19 nt, Artificial Sequence
  Description of Artificial Sequence: Synthetic oligonucleotide
ugcauaaacggcauaaagg

SEQ ID NO: 3046912 - RNA, 19 nt, Artificial Sequence
  Description of Artificial Sequence: Synthetic oligonucleotide
ugacaaaagaaccuaaggc

SEQ ID NO: 3046913 - RNA, 19 nt, Artificial Sequence
  Description of Artificial Sequence: Synthetic oligonucleotide
uuuaugcagaaccagagug

SEQ ID NO: 3046914 - RNA, 19 nt, Artificial Sequence
  Description of Artificial Sequence: Synthetic oligonucleotide
uaagggaccacuauuaaga

SEQ ID NO: 3046915 - RNA, 19 nt, Artificial Sequence
  Description of Artificial Sequence: Synthetic oligonucleotide
gaguuaagugcauaaacgg

SEQ ID NO: 3046916 - RNA, 19 nt, Artificial Sequence
  Description of Artificial Sequence: Synthetic oligonucleotide
gacaaaagaaccuaaggca

SEQ ID NO: 3046917 - RNA, 19 nt, Artificial Sequence
  Description of Artificial Sequence: Synthetic oligonucleotide
uccaaugcuacuaagugga

SEQ ID NO: 3046918 - RNA, 19 nt, Artificial Sequence
  Description of Artificial Sequence: Synthetic oligonucleotide
ugagcaaacaaacauucac

SEQ ID NO: 3046919 - RNA, 19 nt, Artificial Sequence
  Description of Artificial Sequence: Synthetic oligonucleotide
aaguggacaggcuucuccc

SEQ ID NO: 3046920 - RNA, 19 nt, Artificial Sequence
  Description of Artificial Sequence: Synthetic oligonucleotide
guuaacuagagacugaaca

SEQ ID NO: 3046921 - RNA, 19 nt, Artificial Sequence
  Description of Artificial Sequence: Synthetic oligonucleotide
uuaugcagaaccagagugg

SEQ ID NO: 3046922 - RNA, 19 nt, Artificial Sequence
  Description of Artificial Sequence: Synthetic oligonucleotide
aagaaccuaaggcaagagg

SEQ ID NO: 3046923 - RNA, 19 nt, Artificial Sequence
  Description of Artificial Sequence: Synthetic oligonucleotide
uuaacuagagacugaacac

SEQ ID NO: 3046924 - RNA, 19 nt, Artificial Sequence
  Description of Artificial Sequence: Synthetic oligonucleotide
cacaccuuuaugcagaacc

SEQ ID NO: 3046925 - RNA, 19 nt, Artificial Sequence
  Description of Artificial Sequence: Synthetic oligonucleotide
aacuagagacugaacaccc

SEQ ID NO: 3046926 - RNA, 19 nt, Artificial Sequence
  Description of Artificial Sequence: Synthetic oligonucleotide
accacuauuaagauggugg

SEQ ID NO: 3046927 - RNA, 19 nt, Artificial Sequence
  Description of Artificial Sequence: Synthetic oligonucleotide
ucuccaaugcuacuaagug

SEQ ID NO: 3046928 - RNA, 19 nt, Artificial Sequence
  Description of Artificial Sequence: Synthetic oligonucleotide
ucauacagagcaguaaggg

SEQ ID NO: 3046929 - RNA, 19 nt, Artificial Sequence
  Description of Artificial Sequence: Synthetic oligonucleotide
aauggaguugggucacacc

SEQ ID NO: 3046930 - RNA, 19 nt, Artificial Sequence
  Description of Artificial Sequence: Synthetic oligonucleotide
agaguuaagugcauaaacg

SEQ ID NO: 3046931 - RNA, 19 nt, Artificial Sequence
  Description of Artificial Sequence: Synthetic oligonucleotide
agucauacagagcaguaag

SEQ ID NO: 3046932 - RNA, 19 nt, Artificial Sequence
  Description of Artificial Sequence: Synthetic oligonucleotide
auacagagcaguaagggac

SEQ ID NO: 3046933 - RNA, 19 nt, Artificial Sequence
  Description of Artificial Sequence: Synthetic oligonucleotide
auaaacggcauaaaggcuc

SEQ ID NO: 3046934 - RNA, 19 nt, Artificial Sequence
  Description of Artificial Sequence: Synthetic oligonucleotide
uugggucacaccuuuaugc

SEQ ID NO: 3046935 - RNA, 19 nt, Artificial Sequence
  Description of Artificial Sequence: Synthetic oligonucleotide
aguuaagugcauaaacggc

SEQ ID NO: 3046936 - RNA, 19 nt, Artificial Sequence
  Description of Artificial Sequence: Synthetic oligonucleotide
acuauuaagauggugggug

SEQ ID NO: 3046937 - RNA, 19 nt, Artificial Sequence
  Description of Artificial Sequence: Synthetic oligonucleotide
gggaccacuauuaagaugg

SEQ ID NO: 3046938 - RNA, 19 nt, Artificial Sequence
  Description of Artificial Sequence: Synthetic oligonucleotide
cugacaaaagaaccuaagg

SEQ ID NO: 3046939 - RNA, 19 nt, Artificial Sequence
  Description of Artificial Sequence: Synthetic oligonucleotide
uggucacacagucauacag

SEQ ID NO: 3046940 - RNA, 19 nt, Artificial Sequence
  Description of Artificial Sequence: Synthetic oligonucleotide
uuacucugagcaaacaaac

SEQ ID NO: 3046941 - RNA, 19 nt, Artificial Sequence
  Description of Artificial Sequence: Synthetic oligonucleotide
caagaggucagccaauggg

SEQ ID NO: 3046942 - RNA, 19 nt, Artificial Sequence
  Description of Artificial Sequence: Synthetic oligonucleotide
gcauaaacggcauaaaggc

SEQ ID NO: 3046943 - RNA, 19 nt, Artificial Sequence
  Description of Artificial Sequence: Synthetic oligonucleotide
aacauucacaaacugucaa

SEQ ID NO: 3046944 - RNA, 19 nt, Artificial Sequence
  Description of Artificial Sequence: Synthetic oligonucleotide
ucaaguucuccaaugcuac

SEQ ID NO: 3046945 - RNA, 19 nt, Artificial Sequence
  Description of Artificial Sequence: Synthetic oligonucleotide
ucaagcuaguuaacuagag

SEQ ID NO: 3046946 - RNA, 19 nt, Artificial Sequence
  Description of Artificial Sequence: Synthetic oligonucleotide
aaaggcuccuguuacucug

SEQ ID NO: 3046947 - RNA, 19 nt, Artificial Sequence
  Description of Artificial Sequence: Synthetic oligonucleotide
aguggucacacagucauac

SEQ ID NO: 3046948 - RNA, 19 nt, Artificial Sequence
  Description of Artificial Sequence: Synthetic oligonucleotide
ugcagaaccagagugguca

SEQ ID NO: 3046949 - RNA, 19 nt, Artificial Sequence
  Description of Artificial Sequence: Synthetic oligonucleotide
ugaagaguuaagugcauaa

SEQ ID NO: 3046950 - RNA, 19 nt, Artificial Sequence
  Description of Artificial Sequence: Synthetic oligonucleotide
agaaccuaaggcaagaggu

SEQ ID NO: 3046951 - RNA, 19 nt, Artificial Sequence
  Description of Artificial Sequence: Synthetic oligonucleotide
uaacuagagacugaacacc

SEQ ID NO: 3046952 - RNA, 19 nt, Artificial Sequence
  Description of Artificial Sequence: Synthetic oligonucleotide
acuugccugagcuugaagu

SEQ ID NO: 3046953 - RNA, 19 nt, Artificial Sequence
  Description of Artificial Sequence: Synthetic oligonucleotide
uguuacucugagcaaacaa

SEQ ID NO: 3046954 - RNA, 19 nt, Artificial Sequence
  Description of Artificial Sequence: Synthetic oligonucleotide
acauucacaaacugucaag

SEQ ID NO: 3046955 - RNA, 19 nt, Artificial Sequence
  Description of Artificial Sequence: Synthetic oligonucleotide
aaggcaagaggucagccaa

SEQ ID NO: 3046956 - RNA, 19 nt, Artificial Sequence
  Description of Artificial Sequence: Synthetic oligonucleotide
ugagggacuugccugagcu

SEQ ID NO: 3046957 - RNA, 19 nt, Artificial Sequence
  Description of Artificial Sequence: Synthetic oligonucleotide
cuauuaagauggugggugg

SEQ ID NO: 3046958 - RNA, 19 nt, Artificial Sequence
  Description of Artificial Sequence: Synthetic oligonucleotide
acucugagcaaacaaacau

SEQ ID NO: 3046959 - RNA, 19 nt, Artificial Sequence
  Description of Artificial Sequence: Synthetic oligonucleotide
aaacaaacauucacaaacu

SEQ ID NO: 3046960 - RNA, 19 nt, Artificial Sequence
  Description of Artificial Sequence: Synthetic oligonucleotide
agaguggucacacagucau

SEQ ID NO: 3046961 - RNA, 19 nt, Artificial Sequence
  Description of Artificial Sequence: Synthetic oligonucleotide
cuccaaugcuacuaagugg

SEQ ID NO: 3046962 - RNA, 19 nt, Artificial Sequence
  Description of Artificial Sequence: Synthetic oligonucleotide
agugcaccugugcucaagc

SEQ ID NO: 3046963 - RNA, 19 nt, Artificial Sequence
  Description of Artificial Sequence: Synthetic oligonucleotide
aaaagaaccuaaggcaaga

SEQ ID NO: 3046964 - RNA, 19 nt, Artificial Sequence
  Description of Artificial Sequence: Synthetic oligonucleotide
cuauccucgccuuaggcug

SEQ ID NO: 3046965 - RNA, 19 nt, Artificial Sequence
  Description of Artificial Sequence: Synthetic oligonucleotide
agaaccagaguggucacac

SEQ ID NO: 3046966 - RNA, 19 nt, Artificial Sequence
  Description of Artificial Sequence: Synthetic oligonucleotide
uaaacggcauaaaggcucc

SEQ ID NO: 3046967 - RNA, 19 nt, Artificial Sequence
  Description of Artificial Sequence: Synthetic oligonucleotide
acugucaaguucuccaaug

SEQ ID NO: 3046968 - RNA, 19 nt, Artificial Sequence
  Description of Artificial Sequence: Synthetic oligonucleotide
gucacacagucauacagag

SEQ ID NO: 3046969 - RNA, 19 nt, Artificial Sequence
  Description of Artificial Sequence: Synthetic oligonucleotide
ucuauccucgccuuaggcu

SEQ ID NO: 3046970 - RNA, 19 nt, Artificial Sequence
  Description of Artificial Sequence: Synthetic oligonucleotide
aggucagccaaugggaggc

SEQ ID NO: 3046971 - RNA, 19 nt, Artificial Sequence
  Description of Artificial Sequence: Synthetic oligonucleotide
caaacugucaaguucucca

SEQ ID NO: 3046972 - RNA, 19 nt, Artificial Sequence
  Description of Artificial Sequence: Synthetic oligonucleotide
caaaagaaccuaaggcaag

SEQ ID NO: 3046973 - RNA, 19 nt, Artificial Sequence
  Description of Artificial Sequence: Synthetic oligonucleotide
auaaaggcuccuguuacuc

SEQ ID NO: 3046974 - RNA, 19 nt, Artificial Sequence
  Description of Artificial Sequence: Synthetic oligonucleotide
guaagggaccacuauuaag

SEQ ID NO: 3046975 - RNA, 19 nt, Artificial Sequence
  Description of Artificial Sequence: Synthetic oligonucleotide
uacagagcaguaagggacc

SEQ ID NO: 3046976 - RNA, 19 nt, Artificial Sequence
  Description of Artificial Sequence: Synthetic oligonucleotide
guuaagugcauaaacggca

SEQ ID NO: 3046977 - RNA, 19 nt, Artificial Sequence
  Description of Artificial Sequence: Synthetic oligonucleotide
gugcauaaacggcauaaag

SEQ ID NO: 3046978 - RNA, 19 nt, Artificial Sequence
  Description of Artificial Sequence: Synthetic oligonucleotide
uauuaagaugguggguggg

SEQ ID NO: 3046979 - RNA, 19 nt, Artificial Sequence
  Description of Artificial Sequence: Synthetic oligonucleotide
ugucaaguucuccaaugcu

SEQ ID NO: 3046980 - RNA, 19 nt, Artificial Sequence
  Description of Artificial Sequence: Synthetic oligonucleotide
uuaagugcauaaacggcau

SEQ ID NO: 3046981 - RNA, 19 nt, Artificial Sequence
  Description of Artificial Sequence: Synthetic oligonucleotide
auuaagauggugggugggg

SEQ ID NO: 3046982 - RNA, 19 nt, Artificial Sequence
  Description of Artificial Sequence: Synthetic oligonucleotide
aaagaaccuaaggcaagag

SEQ ID NO: 3046983 - RNA, 19 nt, Artificial Sequence
  Description of Artificial Sequence: Synthetic oligonucleotide
uacucugagcaaacaaaca

SEQ ID NO: 3046984 - RNA, 19 nt, Artificial Sequence
  Description of Artificial Sequence: Synthetic oligonucleotide
acaaacugucaaguucucc

SEQ ID NO: 3046985 - RNA, 19 nt, Artificial Sequence
  Description of Artificial Sequence: Synthetic oligonucleotide
gaagggacggagaauggag

SEQ ID NO: 3046986 - RNA, 19 nt, Artificial Sequence
  Description of Artificial Sequence: Synthetic oligonucleotide
ucucccgacugacaaaaga

SEQ ID NO: 3046987 - RNA, 19 nt, Artificial Sequence
  Description of Artificial Sequence: Synthetic oligonucleotide
aagugcauaaacggcauaa

SEQ ID NO: 3046988 - RNA, 19 nt, Artificial Sequence
  Description of Artificial Sequence: Synthetic oligonucleotide
ugaagugcaccugugcuca

SEQ ID NO: 3046989 - RNA, 19 nt, Artificial Sequence
  Description of Artificial Sequence: Synthetic oligonucleotide
aaacugucaaguucuccaa

SEQ ID NO: 3046990 - RNA, 19 nt, Artificial Sequence
  Description of Artificial Sequence: Synthetic oligonucleotide
uucuauccucgccuuaggc

SEQ ID NO: 3046991 - RNA, 19 nt, Artificial Sequence
  Description of Artificial Sequence: Synthetic oligonucleotide
aaccuaaggcaagagguca

SEQ ID NO: 3046992 - RNA, 19 nt, Artificial Sequence
  Description of Artificial Sequence: Synthetic oligonucleotide
uacuaaguggacaggcuuc

SEQ ID NO: 3046993 - RNA, 19 nt, Artificial Sequence
  Description of Artificial Sequence: Synthetic oligonucleotide
aagaggucagccaauggga

SEQ ID NO: 3046994 - RNA, 19 nt, Artificial Sequence
  Description of Artificial Sequence: Synthetic oligonucleotide
ugcuacuaaguggacaggc

SEQ ID NO: 3046995 - RNA, 19 nt, Artificial Sequence
  Description of Artificial Sequence: Synthetic oligonucleotide
cuugccugagcuugaagug

SEQ ID NO: 3046996 - RNA, 19 nt, Artificial Sequence
  Description of Artificial Sequence: Synthetic oligonucleotide
uaugcagaaccagaguggu

SEQ ID NO: 3046997 - RNA, 19 nt, Artificial Sequence
  Description of Artificial Sequence: Synthetic oligonucleotide
cugucaaguucuccaaugc

SEQ ID NO: 3046998 - RNA, 19 nt, Artificial Sequence
  Description of Artificial Sequence: Synthetic oligonucleotide
gaggucagccaaugggagg

SEQ ID NO: 3046999 - RNA, 19 nt, Artificial Sequence
  Description of Artificial Sequence: Synthetic oligonucleotide
ugggucacaccuuuaugca

SEQ ID NO: 3047000 - RNA, 19 nt, Artificial Sequence
  Description of Artificial Sequence: Synthetic oligonucleotide
gagcaaacaaacauucaca

SEQ ID NO: 3047001 - RNA, 19 nt, Artificial Sequence
  Description of Artificial Sequence: Synthetic oligonucleotide
gcuccuguuacucugagca

SEQ ID NO: 3047002 - RNA, 19 nt, Artificial Sequence
  Description of Artificial Sequence: Synthetic oligonucleotide
acugacaaaagaaccuaag

SEQ ID NO: 3047003 - RNA, 19 nt, Artificial Sequence
  Description of Artificial Sequence: Synthetic oligonucleotide
gcucaagcuaguuaacuag

SEQ ID NO: 3047004 - RNA, 19 nt, Artificial Sequence
  Description of Artificial Sequence: Synthetic oligonucleotide
ucccgacugacaaaagaac

SEQ ID NO: 3047005 - RNA, 19 nt, Artificial Sequence
  Description of Artificial Sequence: Synthetic oligonucleotide
uaguuaacuagagacugaa

SEQ ID NO: 3047006 - RNA, 19 nt, Artificial Sequence
  Description of Artificial Sequence: Synthetic oligonucleotide
gcuaguuaacuagagacug

SEQ ID NO: 3047007 - RNA, 19 nt, Artificial Sequence
  Description of Artificial Sequence: Synthetic oligonucleotide
gucauacagagcaguaagg

SEQ ID NO: 3047008 - RNA, 19 nt, Artificial Sequence
  Description of Artificial Sequence: Synthetic oligonucleotide
ugggguuucuauccucgcc

SEQ ID NO: 3047009 - RNA, 19 nt, Artificial Sequence
  Description of Artificial Sequence: Synthetic oligonucleotide
aagggaccacuauuaagau

SEQ ID NO: 3047010 - RNA, 19 nt, Artificial Sequence
  Description of Artificial Sequence: Synthetic oligonucleotide
uugaagugcaccugugcuc

SEQ ID NO: 3047011 - RNA, 19 nt, Artificial Sequence
  Description of Artificial Sequence: Synthetic oligonucleotide
uauccucgccuuaggcugg

SEQ ID NO: 3047012 - RNA, 19 nt, Artificial Sequence
  Description of Artificial Sequence: Synthetic oligonucleotide
ccuuaggcuggcaugaggg

SEQ ID NO: 3047013 - RNA, 19 nt, Artificial Sequence
  Description of Artificial Sequence: Synthetic oligonucleotide
aguggacaggcuucucccg

SEQ ID NO: 3047014 - RNA, 19 nt, Artificial Sequence
  Description of Artificial Sequence: Synthetic oligonucleotide
ugcucaagcuaguuaacua

SEQ ID NO: 3047015 - RNA, 19 nt, Artificial Sequence
  Description of Artificial Sequence: Synthetic oligonucleotide
cauacagagcaguaaggga

SEQ ID NO: 3047016 - RNA, 19 nt, Artificial Sequence
  Description of Artificial Sequence: Synthetic oligonucleotide
aacugucaaguucuccaau

SEQ ID NO: 3047017 - RNA, 19 nt, Artificial Sequence
  Description of Artificial Sequence: Synthetic oligonucleotide
ccuuuaugcagaaccagag

SEQ ID NO: 3047018 - RNA, 19 nt, Artificial Sequence
  Description of Artificial Sequence: Synthetic oligonucleotide
aguugggucacaccuuuau

SEQ ID NO: 3047019 - RNA, 19 nt, Artificial Sequence
  Description of Artificial Sequence: Synthetic oligonucleotide
guuacucugagcaaacaaa

SEQ ID NO: 3047020 - RNA, 19 nt, Artificial Sequence
  Description of Artificial Sequence: Synthetic oligonucleotide
aguaagggaccacuauuaa

SEQ ID NO: 3047021 - RNA, 19 nt, Artificial Sequence
  Description of Artificial Sequence: Synthetic oligonucleotide
uaaaggcuccuguuacucu

SEQ ID NO: 3047022 - RNA, 19 nt, Artificial Sequence
  Description of Artificial Sequence: Synthetic oligonucleotide
uuaggcuggcaugagggac

SEQ ID NO: 3047023 - RNA, 19 nt, Artificial Sequence
  Description of Artificial Sequence: Synthetic oligonucleotide
cugugcucaagcuaguuaa

SEQ ID NO: 3047024 - RNA, 19 nt, Artificial Sequence
  Description of Artificial Sequence: Synthetic oligonucleotide
ugugcucaagcuaguuaac

SEQ ID NO: 3047025 - RNA, 19 nt, Artificial Sequence
  Description of Artificial Sequence: Synthetic oligonucleotide
aaguucuccaaugcuacua

SEQ ID NO: 3047026 - RNA, 19 nt, Artificial Sequence
  Description of Artificial Sequence: Synthetic oligonucleotide
aguuaacuagagacugaac

SEQ ID NO: 3047027 - RNA, 19 nt, Artificial Sequence
  Description of Artificial Sequence: Synthetic oligonucleotide
ugccugagcuugaagugca

SEQ ID NO: 3047028 - RNA, 19 nt, Artificial Sequence
  Description of Artificial Sequence: Synthetic oligonucleotide
ucagccaaugggaggcccc

SEQ ID NO: 3047029 - RNA, 19 nt, Artificial Sequence
  Description of Artificial Sequence: Synthetic oligonucleotide
ccacuauuaagaugguggg

SEQ ID NO: 3047030 - RNA, 19 nt, Artificial Sequence
  Description of Artificial Sequence: Synthetic oligonucleotide
uuaagaugguggguggggu

SEQ ID NO: 3047031 - RNA, 19 nt, Artificial Sequence
  Description of Artificial Sequence: Synthetic oligonucleotide
aguucuccaaugcuacuaa

SEQ ID NO: 3047032 - RNA, 19 nt, Artificial Sequence
  Description of Artificial Sequence: Synthetic oligonucleotide
augagggacuugccugagc

SEQ ID NO: 3047033 - RNA, 19 nt, Artificial Sequence
  Description of Artificial Sequence: Synthetic oligonucleotide
aacggcauaaaggcuccug

SEQ ID NO: 3047034 - RNA, 19 nt, Artificial Sequence
  Description of Artificial Sequence: Synthetic oligonucleotide
agagcaguaagggaccacu

SEQ ID NO: 3047035 - RNA, 19 nt, Artificial Sequence
  Description of Artificial Sequence: Synthetic oligonucleotide
ggagaauggaguuggguca

SEQ ID NO: 3047036 - RNA, 19 nt, Artificial Sequence
  Description of Artificial Sequence: Synthetic oligonucleotide
uggcaugagggacuugccu

SEQ ID NO: 3047037 - RNA, 19 nt, Artificial Sequence
  Description of Artificial Sequence: Synthetic oligonucleotide
acggcauaaaggcuccugu

SEQ ID NO: 3047038 - RNA, 19 nt, Artificial Sequence
  Description of Artificial Sequence: Synthetic oligonucleotide
ugcaccugugcucaagcua

SEQ ID NO: 3047039 - RNA, 19 nt, Artificial Sequence
  Description of Artificial Sequence: Synthetic oligonucleotide
uugccugagcuugaagugc

SEQ ID NO: 3047040 - RNA, 19 nt, Artificial Sequence
  Description of Artificial Sequence: Synthetic oligonucleotide
agggacuugccugagcuug

SEQ ID NO: 3047041 - RNA, 19 nt, Artificial Sequence
  Description of Artificial Sequence: Synthetic oligonucleotide
uccuguuacucugagcaaa

SEQ ID NO: 3047042 - RNA, 19 nt, Artificial Sequence
  Description of Artificial Sequence: Synthetic oligonucleotide
agggaccacuauuaagaug

SEQ ID NO: 3047043 - RNA, 19 nt, Artificial Sequence
  Description of Artificial Sequence: Synthetic oligonucleotide
guugggucacaccuuuaug

SEQ ID NO: 3047044 - RNA, 19 nt, Artificial Sequence
  Description of Artificial Sequence: Synthetic oligonucleotide
cucaagcuaguuaacuaga

SEQ ID NO: 3047045 - RNA, 19 nt, Artificial Sequence
  Description of Artificial Sequence: Synthetic oligonucleotide
gcauaaaggcuccuguuac

SEQ ID NO: 3047046 - RNA, 19 nt, Artificial Sequence
  Description of Artificial Sequence: Synthetic oligonucleotide
ggcaugagggacuugccug

SEQ ID NO: 3047047 - RNA, 19 nt, Artificial Sequence
  Description of Artificial Sequence: Synthetic oligonucleotide
cuaaggcaagaggucagcc

SEQ ID NO: 3047048 - RNA, 19 nt, Artificial Sequence
  Description of Artificial Sequence: Synthetic oligonucleotide
agcuaguuaacuagagacu

SEQ ID NO: 3047049 - RNA, 19 nt, Artificial Sequence
  Description of Artificial Sequence: Synthetic oligonucleotide
agcaguaagggaccacuau

SEQ ID NO: 3047050 - RNA, 19 nt, Artificial Sequence
  Description of Artificial Sequence: Synthetic oligonucleotide
guucuccaaugcuacuaag

SEQ ID NO: 3047051 - RNA, 19 nt, Artificial Sequence
  Description of Artificial Sequence: Synthetic oligonucleotide
gaagaguuaagugcauaaa

SEQ ID NO: 3047052 - RNA, 19 nt, Artificial Sequence
  Description of Artificial Sequence: Synthetic oligonucleotide
gaaccuaaggcaagagguc

SEQ ID NO: 3047053 - RNA, 19 nt, Artificial Sequence
  Description of Artificial Sequence: Synthetic oligonucleotide
caagcuaguuaacuagaga

SEQ ID NO: 3047054 - RNA, 19 nt, Artificial Sequence
  Description of Artificial Sequence: Synthetic oligonucleotide
ggacggagaauggaguugg

SEQ ID NO: 3047055 - RNA, 19 nt, Artificial Sequence
  Description of Artificial Sequence: Synthetic oligonucleotide
cuaguuaacuagagacuga

SEQ ID NO: 3047056 - RNA, 19 nt, Artificial Sequence
  Description of Artificial Sequence: Synthetic oligonucleotide
aagggacggagaauggagu

SEQ ID NO: 3047057 - RNA, 19 nt, Artificial Sequence
  Description of Artificial Sequence: Synthetic oligonucleotide
acuaaguggacaggcuucu

SEQ ID NO: 3047058 - RNA, 19 nt, Artificial Sequence
  Description of Artificial Sequence: Synthetic oligonucleotide
gacaggcuucucccgacug

SEQ ID NO: 3047059 - RNA, 19 nt, Artificial Sequence
  Description of Artificial Sequence: Synthetic oligonucleotide
cucgccuuaggcuggcaug

SEQ ID NO: 3047060 - RNA, 19 nt, Artificial Sequence
  Description of Artificial Sequence: Synthetic oligonucleotide
accuuuaugcagaaccaga

SEQ ID NO: 3047061 - RNA, 19 nt, Artificial Sequence
  Description of Artificial Sequence: Synthetic oligonucleotide
cucccgacugacaaaagaa

SEQ ID NO: 3047062 - RNA, 19 nt, Artificial Sequence
  Description of Artificial Sequence: Synthetic oligonucleotide
gagaauggaguugggucac

SEQ ID NO: 3047063 - RNA, 19 nt, Artificial Sequence
  Description of Artificial Sequence: Synthetic oligonucleotide
aagugcaccugugcucaag

SEQ ID NO: 3047064 - RNA, 19 nt, Artificial Sequence
  Description of Artificial Sequence: Synthetic oligonucleotide
gaccacuauuaagauggug

SEQ ID NO: 3047065 - RNA, 19 nt, Artificial Sequence
  Description of Artificial Sequence: Synthetic oligonucleotide
cuugaagugcaccugugcu

SEQ ID NO: 3047066 - RNA, 19 nt, Artificial Sequence
  Description of Artificial Sequence: Synthetic oligonucleotide
ggugggguuucuauccucg

SEQ ID NO: 3047067 - RNA, 19 nt, Artificial Sequence
  Description of Artificial Sequence: Synthetic oligonucleotide
caguaagggaccacuauua

SEQ ID NO: 3047068 - RNA, 19 nt, Artificial Sequence
  Description of Artificial Sequence: Synthetic oligonucleotide
aagauggugggugggguuu

SEQ ID NO: 3047069 - RNA, 19 nt, Artificial Sequence
  Description of Artificial Sequence: Synthetic oligonucleotide
uaagugcauaaacggcaua

SEQ ID NO: 3047070 - RNA, 19 nt, Artificial Sequence
  Description of Artificial Sequence: Synthetic oligonucleotide
caccuuuaugcagaaccag

SEQ ID NO: 3047071 - RNA, 19 nt, Artificial Sequence
  Description of Artificial Sequence: Synthetic oligonucleotide
ggggaagggacggagaaug

SEQ ID NO: 3047072 - RNA, 19 nt, Artificial Sequence
  Description of Artificial Sequence: Synthetic oligonucleotide
gaauggaguugggucacac

SEQ ID NO: 3047073 - RNA, 19 nt, Artificial Sequence
  Description of Artificial Sequence: Synthetic oligonucleotide
ucgccuuaggcuggcauga

SEQ ID NO: 3047074 - RNA, 19 nt, Artificial Sequence
  Description of Artificial Sequence: Synthetic oligonucleotide
acaccuuuaugcagaacca

SEQ ID NO: 3047075 - RNA, 19 nt, Artificial Sequence
  Description of Artificial Sequence: Synthetic oligonucleotide
gucaaguucuccaaugcua

SEQ ID NO: 3047076 - RNA, 19 nt, Artificial Sequence
  Description of Artificial Sequence: Synthetic oligonucleotide
gacuugccugagcuugaag

SEQ ID NO: 3047077 - RNA, 19 nt, Artificial Sequence
  Description of Artificial Sequence: Synthetic oligonucleotide
gcaccugugcucaagcuag

SEQ ID NO: 3047078 - RNA, 19 nt, Artificial Sequence
  Description of Artificial Sequence: Synthetic oligonucleotide
uaagauggugggugggguu

SEQ ID NO: 3047079 - RNA, 19 nt, Artificial Sequence
  Description of Artificial Sequence: Synthetic oligonucleotide
uucucccgacugacaaaag

SEQ ID NO: 3047080 - RNA, 19 nt, Artificial Sequence
  Description of Artificial Sequence: Synthetic oligonucleotide
acaggcuucucccgacuga

SEQ ID NO: 3047081 - RNA, 19 nt, Artificial Sequence
  Description of Artificial Sequence: Synthetic oligonucleotide
cugagcaaacaaacauuca

SEQ ID NO: 3047082 - RNA, 19 nt, Artificial Sequence
  Description of Artificial Sequence: Synthetic oligonucleotide
ugggugggguuucuauccu

SEQ ID NO: 3047083 - RNA, 19 nt, Artificial Sequence
  Description of Artificial Sequence: Synthetic oligonucleotide
gcuggcaugagggacuugc

SEQ ID NO: 3047084 - RNA, 19 nt, Artificial Sequence
  Description of Artificial Sequence: Synthetic oligonucleotide
cuggcaugagggacuugcc

SEQ ID NO: 3047085 - RNA, 19 nt, Artificial Sequence
  Description of Artificial Sequence: Synthetic oligonucleotide
cauaaacggcauaaaggcu

SEQ ID NO: 3047086 - RNA, 19 nt, Artificial Sequence
  Description of Artificial Sequence: Synthetic oligonucleotide
agugcauaaacggcauaaa

SEQ ID NO: 3047087 - RNA, 19 nt, Artificial Sequence
  Description of Artificial Sequence: Synthetic oligonucleotide
uggacaggcuucucccgac

SEQ ID NO: 3047088 - RNA, 19 nt, Artificial Sequence
  Description of Artificial Sequence: Synthetic oligonucleotide
gggucacaccuuuaugcag

SEQ ID NO: 3047089 - RNA, 19 nt, Artificial Sequence
  Description of Artificial Sequence: Synthetic oligonucleotide
caaugcuacuaaguggaca

SEQ ID NO: 3047090 - RNA, 19 nt, Artificial Sequence
  Description of Artificial Sequence: Synthetic oligonucleotide
gcaagaggucagccaaugg

SEQ ID NO: 3047091 - RNA, 19 nt, Artificial Sequence
  Description of Artificial Sequence: Synthetic oligonucleotide
cauucacaaacugucaagu

SEQ ID NO: 3047092 - RNA, 19 nt, Artificial Sequence
  Description of Artificial Sequence: Synthetic oligonucleotide
uggaguugggucacaccuu

SEQ ID NO: 3047093 - RNA, 19 nt, Artificial Sequence
  Description of Artificial Sequence: Synthetic oligonucleotide
gacugacaaaagaaccuaa

SEQ ID NO: 3047094 - RNA, 19 nt, Artificial Sequence
  Description of Artificial Sequence: Synthetic oligonucleotide
uggugggugggguuucuau

SEQ ID NO: 3047095 - RNA, 19 nt, Artificial Sequence
  Description of Artificial Sequence: Synthetic oligonucleotide
accuaaggcaagaggucag

SEQ ID NO: 3047096 - RNA, 19 nt, Artificial Sequence
  Description of Artificial Sequence: Synthetic oligonucleotide
augcuacuaaguggacagg

SEQ ID NO: 3047097 - RNA, 19 nt, Artificial Sequence
  Description of Artificial Sequence: Synthetic oligonucleotide
cacaaacugucaaguucuc

SEQ ID NO: 3047098 - RNA, 19 nt, Artificial Sequence
  Description of Artificial Sequence: Synthetic oligonucleotide
cuuaggcuggcaugaggga

SEQ ID NO: 3047099 - RNA, 19 nt, Artificial Sequence
  Description of Artificial Sequence: Synthetic oligonucleotide
acggagaauggaguugggu

SEQ ID NO: 3047100 - RNA, 19 nt, Artificial Sequence
  Description of Artificial Sequence: Synthetic oligonucleotide
cugagcuugaagugcaccu

SEQ ID NO: 3047101 - RNA, 19 nt, Artificial Sequence
  Description of Artificial Sequence: Synthetic oligonucleotide
cuuuaugcagaaccagagu

SEQ ID NO: 3047102 - RNA, 19 nt, Artificial Sequence
  Description of Artificial Sequence: Synthetic oligonucleotide
ggcauaaaggcuccuguua

SEQ ID NO: 3047103 - RNA, 19 nt, Artificial Sequence
  Description of Artificial Sequence: Synthetic oligonucleotide
cuucucccgacugacaaaa

SEQ ID NO: 3047104 - RNA, 19 nt, Artificial Sequence
  Description of Artificial Sequence: Synthetic oligonucleotide
agauggugggugggguuuc

SEQ ID NO: 3047105 - RNA, 19 nt, Artificial Sequence
  Description of Artificial Sequence: Synthetic oligonucleotide
ccagaguggucacacaguc

SEQ ID NO: 3047106 - RNA, 19 nt, Artificial Sequence
  Description of Artificial Sequence: Synthetic oligonucleotide
cggagaauggaguuggguc

SEQ ID NO: 3047107 - RNA, 19 nt, Artificial Sequence
  Description of Artificial Sequence: Synthetic oligonucleotide
gacggagaauggaguuggg

SEQ ID NO: 3047108 - RNA, 19 nt, Artificial Sequence
  Description of Artificial Sequence: Synthetic oligonucleotide
gagcuugaagugcaccugu

SEQ ID NO: 3047109 - RNA, 19 nt, Artificial Sequence
  Description of Artificial Sequence: Synthetic oligonucleotide
aaggcuccuguuacucuga

SEQ ID NO: 3047110 - RNA, 19 nt, Artificial Sequence
  Description of Artificial Sequence: Synthetic oligonucleotide
ggucacaccuuuaugcaga

SEQ ID NO: 3047111 - RNA, 19 nt, Artificial Sequence
  Description of Artificial Sequence: Synthetic oligonucleotide
ccuguuacucugagcaaac

SEQ ID NO: 3047112 - RNA, 19 nt, Artificial Sequence
  Description of Artificial Sequence: Synthetic oligonucleotide
aggcuccuguuacucugag

SEQ ID NO: 3047113 - RNA, 19 nt, Artificial Sequence
  Description of Artificial Sequence: Synthetic oligonucleotide
gugggguuucuauccucgc

SEQ ID NO: 3047114 - RNA, 19 nt, Artificial Sequence
  Description of Artificial Sequence: Synthetic oligonucleotide
gcaaacaaacauucacaaa

SEQ ID NO: 3047115 - RNA, 19 nt, Artificial Sequence
  Description of Artificial Sequence: Synthetic oligonucleotide
caggcuucucccgacugac

SEQ ID NO: 3047116 - RNA, 19 nt, Artificial Sequence
  Description of Artificial Sequence: Synthetic oligonucleotide
acacagucauacagagcag

SEQ ID NO: 3047117 - RNA, 19 nt, Artificial Sequence
  Description of Artificial Sequence: Synthetic oligonucleotide
guggacaggcuucucccga

SEQ ID NO: 3047118 - RNA, 19 nt, Artificial Sequence
  Description of Artificial Sequence: Synthetic oligonucleotide
gccuuaggcuggcaugagg

SEQ ID NO: 3047119 - RNA, 19 nt, Artificial Sequence
  Description of Artificial Sequence: Synthetic oligonucleotide
acagucauacagagcagua

SEQ ID NO: 3047120 - RNA, 19 nt, Artificial Sequence
  Description of Artificial Sequence: Synthetic oligonucleotide
cauaaaggcuccuguuacu

SEQ ID NO: 3047121 - RNA, 19 nt, Artificial Sequence
  Description of Artificial Sequence: Synthetic oligonucleotide
ggugggugggguuucuauc

SEQ ID NO: 3047122 - RNA, 19 nt, Artificial Sequence
  Description of Artificial Sequence: Synthetic oligonucleotide
acagagcaguaagggacca

SEQ ID NO: 3047123 - RNA, 19 nt, Artificial Sequence
  Description of Artificial Sequence: Synthetic oligonucleotide
agcuugaagugcaccugug

SEQ ID NO: 3047124 - RNA, 19 nt, Artificial Sequence
  Description of Artificial Sequence: Synthetic oligonucleotide
caugagggacuugccugag

SEQ ID NO: 3047125 - RNA, 19 nt, Artificial Sequence
  Description of Artificial Sequence: Synthetic oligonucleotide
augcagaaccagagugguc

SEQ ID NO: 3047126 - RNA, 19 nt, Artificial Sequence
  Description of Artificial Sequence: Synthetic oligonucleotide
guggucacacagucauaca

SEQ ID NO: 3047127 - RNA, 19 nt, Artificial Sequence
  Description of Artificial Sequence: Synthetic oligonucleotide
ggcaagaggucagccaaug

SEQ ID NO: 3047128 - RNA, 19 nt, Artificial Sequence
  Description of Artificial Sequence: Synthetic oligonucleotide
cuacuaaguggacaggcuu

SEQ ID NO: 3047129 - RNA, 19 nt, Artificial Sequence
  Description of Artificial Sequence: Synthetic oligonucleotide
ggcuucucccgacugacaa

SEQ ID NO: 3047130 - RNA, 19 nt, Artificial Sequence
  Description of Artificial Sequence: Synthetic oligonucleotide
aaacggcauaaaggcuccu

SEQ ID NO: 3047131 - RNA, 19 nt, Artificial Sequence
  Description of Artificial Sequence: Synthetic oligonucleotide
gcaugagggacuugccuga

SEQ ID NO: 3047132 - RNA, 19 nt, Artificial Sequence
  Description of Artificial Sequence: Synthetic oligonucleotide
gucagccaaugggaggccc

SEQ ID NO: 3047133 - RNA, 19 nt, Artificial Sequence
  Description of Artificial Sequence: Synthetic oligonucleotide
gggguuucuauccucgccu

SEQ ID NO: 3047134 - RNA, 19 nt, Artificial Sequence
  Description of Artificial Sequence: Synthetic oligonucleotide
gucacaccuuuaugcagaa

SEQ ID NO: 3047135 - RNA, 19 nt, Artificial Sequence
  Description of Artificial Sequence: Synthetic oligonucleotide
auccucgccuuaggcuggc

SEQ ID NO: 3047136 - RNA, 19 nt, Artificial Sequence
  Description of Artificial Sequence: Synthetic oligonucleotide
cagucauacagagcaguaa

SEQ ID NO: 3047137 - RNA, 19 nt, Artificial Sequence
  Description of Artificial Sequence: Synthetic oligonucleotide
gggacggagaauggaguug

SEQ ID NO: 3047138 - RNA, 19 nt, Artificial Sequence
  Description of Artificial Sequence: Synthetic oligonucleotide
gggaagggacggagaaugg

SEQ ID NO: 3047139 - RNA, 19 nt, Artificial Sequence
  Description of Artificial Sequence: Synthetic oligonucleotide
ggaagggacggagaaugga

SEQ ID NO: 3047140 - RNA, 19 nt, Artificial Sequence
  Description of Artificial Sequence: Synthetic oligonucleotide
cacagucauacagagcagu

SEQ ID NO: 3047141 - RNA, 19 nt, Artificial Sequence
  Description of Artificial Sequence: Synthetic oligonucleotide
ccugagcuugaagugcacc

SEQ ID NO: 3047142 - RNA, 19 nt, Artificial Sequence
  Description of Artificial Sequence: Synthetic oligonucleotide
cugaagaguuaagugcaua

SEQ ID NO: 3047143 - RNA, 19 nt, Artificial Sequence
  Description of Artificial Sequence: Synthetic oligonucleotide
ccuaaggcaagaggucagc

SEQ ID NO: 3047144 - RNA, 19 nt, Artificial Sequence
  Description of Artificial Sequence: Synthetic oligonucleotide
cuaaguggacaggcuucuc

SEQ ID NO: 3047145 - RNA, 19 nt, Artificial Sequence
  Description of Artificial Sequence: Synthetic oligonucleotide
ggcuccuguuacucugagc

SEQ ID NO: 3047146 - RNA, 19 nt, Artificial Sequence
  Description of Artificial Sequence: Synthetic oligonucleotide
gugcucaagcuaguuaacu

SEQ ID NO: 3047147 - RNA, 19 nt, Artificial Sequence
  Description of Artificial Sequence: Synthetic oligonucleotide
cuguuacucugagcaaaca

SEQ ID NO: 3047148 - RNA, 19 nt, Artificial Sequence
  Description of Artificial Sequence: Synthetic oligonucleotide
cagagcaguaagggaccac

SEQ ID NO: 3047149 - RNA, 19 nt, Artificial Sequence
  Description of Artificial Sequence: Synthetic oligonucleotide
ccaaugcuacuaaguggac

SEQ ID NO: 3047150 - RNA, 19 nt, Artificial Sequence
  Description of Artificial Sequence: Synthetic oligonucleotide
cuccuguuacucugagcaa

SEQ ID NO: 3047151 - RNA, 19 nt, Artificial Sequence
  Description of Artificial Sequence: Synthetic oligonucleotide
gcagaaccagaguggucac

SEQ ID NO: 3047152 - RNA, 19 nt, Artificial Sequence
  Description of Artificial Sequence: Synthetic oligonucleotide
caaguucuccaaugcuacu

SEQ ID NO: 3047153 - RNA, 19 nt, Artificial Sequence
  Description of Artificial Sequence: Synthetic oligonucleotide
ccgacugacaaaagaaccu

SEQ ID NO: 3047154 - RNA, 19 nt, Artificial Sequence
  Description of Artificial Sequence: Synthetic oligonucleotide
gagcaguaagggaccacua

SEQ ID NO: 3047155 - RNA, 19 nt, Artificial Sequence
  Description of Artificial Sequence: Synthetic oligonucleotide
cacuauuaagauggugggu

SEQ ID NO: 3047156 - RNA, 19 nt, Artificial Sequence
  Description of Artificial Sequence: Synthetic oligonucleotide
gcaguaagggaccacuauu

SEQ ID NO: 3047157 - RNA, 19 nt, Artificial Sequence
  Description of Artificial Sequence: Synthetic oligonucleotide
gaagugcaccugugcucaa

SEQ ID NO: 3047158 - RNA, 19 nt, Artificial Sequence
  Description of Artificial Sequence: Synthetic oligonucleotide
accugugcucaagcuaguu

SEQ ID NO: 3047159 - RNA, 19 nt, Artificial Sequence
  Description of Artificial Sequence: Synthetic oligonucleotide
ggaguugggucacaccuuu

SEQ ID NO: 3047160 - RNA, 19 nt, Artificial Sequence
  Description of Artificial Sequence: Synthetic oligonucleotide
gggugggguuucuauccuc

SEQ ID NO: 3047161 - RNA, 19 nt, Artificial Sequence
  Description of Artificial Sequence: Synthetic oligonucleotide
gguuucuauccucgccuua

SEQ ID NO: 3047162 - RNA, 19 nt, Artificial Sequence
  Description of Artificial Sequence: Synthetic oligonucleotide
cagaaccagaguggucaca

SEQ ID NO: 3047163 - RNA, 19 nt, Artificial Sequence
  Description of Artificial Sequence: Synthetic oligonucleotide
gcuacuaaguggacaggcu

SEQ ID NO: 3047164 - RNA, 19 nt, Artificial Sequence
  Description of Artificial Sequence: Synthetic oligonucleotide
gugcaccugugcucaagcu

SEQ ID NO: 3047165 - RNA, 19 nt, Artificial Sequence
  Description of Artificial Sequence: Synthetic oligonucleotide
aggcaagaggucagccaau

SEQ ID NO: 3047166 - RNA, 19 nt, Artificial Sequence
  Description of Artificial Sequence: Synthetic oligonucleotide
ccugugcucaagcuaguua

SEQ ID NO: 3047167 - RNA, 19 nt, Artificial Sequence
  Description of Artificial Sequence: Synthetic oligonucleotide
gcuucucccgacugacaaa

SEQ ID NO: 3047168 - RNA, 19 nt, Artificial Sequence
  Description of Artificial Sequence: Synthetic oligonucleotide
gaguggucacacagucaua

SEQ ID NO: 3047169 - RNA, 19 nt, Artificial Sequence
  Description of Artificial Sequence: Synthetic oligonucleotide
aggcuucucccgacugaca

SEQ ID NO: 3047170 - RNA, 19 nt, Artificial Sequence
  Description of Artificial Sequence: Synthetic oligonucleotide
gagggacuugccugagcuu

SEQ ID NO: 3047171 - RNA, 19 nt, Artificial Sequence
  Description of Artificial Sequence: Synthetic oligonucleotide
gaguugggucacaccuuua

SEQ ID NO: 3047172 - RNA, 19 nt, Artificial Sequence
  Description of Artificial Sequence: Synthetic oligonucleotide
gauggugggugggguuucu

SEQ ID NO: 3047173 - RNA, 19 nt, Artificial Sequence
  Description of Artificial Sequence: Synthetic oligonucleotide
aggcuggcaugagggacuu

SEQ ID NO: 3047174 - RNA, 19 nt, Artificial Sequence
  Description of Artificial Sequence: Synthetic oligonucleotide
gggacuugccugagcuuga

SEQ ID NO: 3047175 - RNA, 19 nt, Artificial Sequence
  Description of Artificial Sequence: Synthetic oligonucleotide
uccucgccuuaggcuggca

SEQ ID NO: 3047176 - RNA, 19 nt, Artificial Sequence
  Description of Artificial Sequence: Synthetic oligonucleotide
auggugggugggguuucua

SEQ ID NO: 3047177 - RNA, 19 nt, Artificial Sequence
  Description of Artificial Sequence: Synthetic oligonucleotide
cgacugacaaaagaaccua

SEQ ID NO: 3047178 - RNA, 19 nt, Artificial Sequence
  Description of Artificial Sequence: Synthetic oligonucleotide
ggacaggcuucucccgacu

SEQ ID NO: 3047179 - RNA, 19 nt, Artificial Sequence
  Description of Artificial Sequence: Synthetic oligonucleotide
ggguuucuauccucgccuu

SEQ ID NO: 3047180 - RNA, 19 nt, Artificial Sequence
  Description of Artificial Sequence: Synthetic oligonucleotide
ggacuugccugagcuugaa

SEQ ID NO: 3047181 - RNA, 19 nt, Artificial Sequence
  Description of Artificial Sequence: Synthetic oligonucleotide
caccugugcucaagcuagu

SEQ ID NO: 3047182 - RNA, 19 nt, Artificial Sequence
  Description of Artificial Sequence: Synthetic oligonucleotide
gcugaagaguuaagugcau

SEQ ID NO: 3047183 - RNA, 19 nt, Artificial Sequence
  Description of Artificial Sequence: Synthetic oligonucleotide
gccugagcuugaagugcac

SEQ ID NO: 3047184 - RNA, 19 nt, Artificial Sequence
  Description of Artificial Sequence: Synthetic oligonucleotide
ggaccacuauuaagauggu

SEQ ID NO: 3047185 - RNA, 19 nt, Artificial Sequence
  Description of Artificial Sequence: Synthetic oligonucleotide
ggcuggcaugagggacuug

SEQ ID NO: 3047186 - RNA, 19 nt, Artificial Sequence
  Description of Artificial Sequence: Synthetic oligonucleotide
cgccuuaggcuggcaugag

SEQ ID NO: 3047187 - RNA, 19 nt, Artificial Sequence
  Description of Artificial Sequence: Synthetic oligonucleotide
ccucgccuuaggcuggcau

SEQ ID NO: 3047188 - RNA, 19 nt, Artificial Sequence
  Description of Artificial Sequence: Synthetic oligonucleotide
cggcauaaaggcuccuguu

SEQ ID NO: 3047189 - RNA, 19 nt, Artificial Sequence
  Description of Artificial Sequence: Synthetic oligonucleotide
aacucaucgaagucaaugc

SEQ ID NO: 3047190 - RNA, 19 nt, Artificial Sequence
  Description of Artificial Sequence: Synthetic oligonucleotide
gaaaaucucagccagcucc

SEQ ID NO: 3047191 - RNA, 19 nt, Artificial Sequence
  Description of Artificial Sequence: Synthetic oligonucleotide
aacuccucaaagucgaugg

SEQ ID NO: 3047192 - RNA, 19 nt, Artificial Sequence
  Description of Artificial Sequence: Synthetic oligonucleotide
ugcggaaacacucugccag

SEQ ID NO: 3047193 - RNA, 19 nt, Artificial Sequence
  Description of Artificial Sequence: Synthetic oligonucleotide
aauguagccgucugcguuc

SEQ ID NO: 3047194 - RNA, 19 nt, Artificial Sequence
  Description of Artificial Sequence: Synthetic oligonucleotide
aagucgauggugccgcugc

SEQ ID NO: 3047195 - RNA, 19 nt, Artificial Sequence
  Description of Artificial Sequence: Synthetic oligonucleotide
agcccggaaaaucucagcc

SEQ ID NO: 3047196 - RNA, 19 nt, Artificial Sequence
  Description of Artificial Sequence: Synthetic oligonucleotide
uggguggaagcaaaggccg

SEQ ID NO: 3047197 - RNA, 19 nt, Artificial Sequence
  Description of Artificial Sequence: Synthetic oligonucleotide
aaugcggccaucguuguuc

SEQ ID NO: 3047198 - RNA, 19 nt, Artificial Sequence
  Description of Artificial Sequence: Synthetic oligonucleotide
gaaacacucugccagcucc

SEQ ID NO: 3047199 - RNA, 19 nt, Artificial Sequence
  Description of Artificial Sequence: Synthetic oligonucleotide
ucaucgaagucaaugcggc

SEQ ID NO: 3047200 - RNA, 19 nt, Artificial Sequence
  Description of Artificial Sequence: Synthetic oligonucleotide
ucagcaucaauguagccgu

SEQ ID NO: 3047201 - RNA, 19 nt, Artificial Sequence
  Description of Artificial Sequence: Synthetic oligonucleotide
ucuccguccuucaucaggg

SEQ ID NO: 3047202 - RNA, 19 nt, Artificial Sequence
  Description of Artificial Sequence: Synthetic oligonucleotide
uucgcauccucuuucaucu

SEQ ID NO: 3047203 - RNA, 19 nt, Artificial Sequence
  Description of Artificial Sequence: Synthetic oligonucleotide
caagaacuccucaaagucg

SEQ ID NO: 3047204 - RNA, 19 nt, Artificial Sequence
  Description of Artificial Sequence: Synthetic oligonucleotide
uuaucuccguccuucauca

SEQ ID NO: 3047205 - RNA, 19 nt, Artificial Sequence
  Description of Artificial Sequence: Synthetic oligonucleotide
cucaucgaagucaaugcgg

SEQ ID NO: 3047206 - RNA, 19 nt, Artificial Sequence
  Description of Artificial Sequence: Synthetic oligonucleotide
gaugcggaaacacucugcc

SEQ ID NO: 3047207 - RNA, 19 nt, Artificial Sequence
  Description of Artificial Sequence: Synthetic oligonucleotide
uggcgcaccaucaugacca

SEQ ID NO: 3047208 - RNA, 19 nt, Artificial Sequence
  Description of Artificial Sequence: Synthetic oligonucleotide
cucagcaucaauguagccg

SEQ ID NO: 3047209 - RNA, 19 nt, Artificial Sequence
  Description of Artificial Sequence: Synthetic oligonucleotide
ucuucaggaacucaucgaa

SEQ ID NO: 3047210 - RNA, 19 nt, Artificial Sequence
  Description of Artificial Sequence: Synthetic oligonucleotide
uuccucaucugucacgugc

SEQ ID NO: 3047211 - RNA, 19 nt, Artificial Sequence
  Description of Artificial Sequence: Synthetic oligonucleotide
caaagaugcggaaacacuc

SEQ ID NO: 3047212 - RNA, 19 nt, Artificial Sequence
  Description of Artificial Sequence: Synthetic oligonucleotide
guuccugucaaagaugcgg

SEQ ID NO: 3047213 - RNA, 19 nt, Artificial Sequence
  Description of Artificial Sequence: Synthetic oligonucleotide
aucaauguagccgucugcg

SEQ ID NO: 3047214 - RNA, 19 nt, Artificial Sequence
  Description of Artificial Sequence: Synthetic oligonucleotide
gauuuccucaucugucacg

SEQ ID NO: 3047215 - RNA, 19 nt, Artificial Sequence
  Description of Artificial Sequence: Synthetic oligonucleotide
ucacgugcuccccagaagc

SEQ ID NO: 3047216 - RNA, 19 nt, Artificial Sequence
  Description of Artificial Sequence: Synthetic oligonucleotide
acucaucgaagucaaugcg

SEQ ID NO: 3047217 - RNA, 19 nt, Artificial Sequence
  Description of Artificial Sequence: Synthetic oligonucleotide
caucuucaggaacucaucg

SEQ ID NO: 3047218 - RNA, 19 nt, Artificial Sequence
  Description of Artificial Sequence: Synthetic oligonucleotide
cuccucagcaucaauguag

SEQ ID NO: 3047219 - RNA, 19 nt, Artificial Sequence
  Description of Artificial Sequence: Synthetic oligonucleotide
gaacucaucgaagucaaug

SEQ ID NO: 3047220 - RNA, 19 nt, Artificial Sequence
  Description of Artificial Sequence: Synthetic oligonucleotide
uucaucagggauucgauuu

SEQ ID NO: 3047221 - RNA, 19 nt, Artificial Sequence
  Description of Artificial Sequence: Synthetic oligonucleotide
aagcccggaaaaucucagc

SEQ ID NO: 3047222 - RNA, 19 nt, Artificial Sequence
  Description of Artificial Sequence: Synthetic oligonucleotide
guuguucuuaucuccgucc

SEQ ID NO: 3047223 - RNA, 19 nt, Artificial Sequence
  Description of Artificial Sequence: Synthetic oligonucleotide
uucgauuuccucaucuguc

SEQ ID NO: 3047224 - RNA, 19 nt, Artificial Sequence
  Description of Artificial Sequence: Synthetic oligonucleotide
gaagucaaugcggccaucg

SEQ ID NO: 3047225 - RNA, 19 nt, Artificial Sequence
  Description of Artificial Sequence: Synthetic oligonucleotide
gaccaagaacuccucaaag

SEQ ID NO: 3047226 - RNA, 19 nt, Artificial Sequence
  Description of Artificial Sequence: Synthetic oligonucleotide
ucaucugucacgugcuccc

SEQ ID NO: 3047227 - RNA, 19 nt, Artificial Sequence
  Description of Artificial Sequence: Synthetic oligonucleotide
caucguuguucuuaucucc

SEQ ID NO: 3047228 - RNA, 19 nt, Artificial Sequence
  Description of Artificial Sequence: Synthetic oligonucleotide
ucaaagucgauggugccgc

SEQ ID NO: 3047229 - RNA, 19 nt, Artificial Sequence
  Description of Artificial Sequence: Synthetic oligonucleotide
uuacuggacgccuccauca

SEQ ID NO: 3047230 - RNA, 19 nt, Artificial Sequence
  Description of Artificial Sequence: Synthetic oligonucleotide
gauucgauuuccucaucug

SEQ ID NO: 3047231 - RNA, 19 nt, Artificial Sequence
  Description of Artificial Sequence: Synthetic oligonucleotide
aagaacuccucaaagucga

SEQ ID NO: 3047232 - RNA, 19 nt, Artificial Sequence
  Description of Artificial Sequence: Synthetic oligonucleotide
aucuccguccuucaucagg

SEQ ID NO: 3047233 - RNA, 19 nt, Artificial Sequence
  Description of Artificial Sequence: Synthetic oligonucleotide
auucgauuuccucaucugu

SEQ ID NO: 3047234 - RNA, 19 nt, Artificial Sequence
  Description of Artificial Sequence: Synthetic oligonucleotide
cugucaaagaugcggaaac

SEQ ID NO: 3047235 - RNA, 19 nt, Artificial Sequence
  Description of Artificial Sequence: Synthetic oligonucleotide
accaagaacuccucaaagu

SEQ ID NO: 3047236 - RNA, 19 nt, Artificial Sequence
  Description of Artificial Sequence: Synthetic oligonucleotide
ucgauuuccucaucuguca

SEQ ID NO: 3047237 - RNA, 19 nt, Artificial Sequence
  Description of Artificial Sequence: Synthetic oligonucleotide
ucuuucaucuggcgcacca

SEQ ID NO: 3047238 - RNA, 19 nt, Artificial Sequence
  Description of Artificial Sequence: Synthetic oligonucleotide
uuccugucaaagaugcgga

SEQ ID NO: 3047239 - RNA, 19 nt, Artificial Sequence
  Description of Artificial Sequence: Synthetic oligonucleotide
gauggugccgcugccaucc

SEQ ID NO: 3047240 - RNA, 19 nt, Artificial Sequence
  Description of Artificial Sequence: Synthetic oligonucleotide
uucaucuggcgcaccauca

SEQ ID NO: 3047241 - RNA, 19 nt, Artificial Sequence
  Description of Artificial Sequence: Synthetic oligonucleotide
aaagaugcggaaacacucu

SEQ ID NO: 3047242 - RNA, 19 nt, Artificial Sequence
  Description of Artificial Sequence: Synthetic oligonucleotide
aaggguggaguuguccacg

SEQ ID NO: 3047243 - RNA, 19 nt, Artificial Sequence
  Description of Artificial Sequence: Synthetic oligonucleotide
cuuaucuccguccuucauc

SEQ ID NO: 3047244 - RNA, 19 nt, Artificial Sequence
  Description of Artificial Sequence: Synthetic oligonucleotide
aaggcaaggguggaguugu

SEQ ID NO: 3047245 - RNA, 19 nt, Artificial Sequence
  Description of Artificial Sequence: Synthetic oligonucleotide
ucugcguuccugucaaaga

SEQ ID NO: 3047246 - RNA, 19 nt, Artificial Sequence
  Description of Artificial Sequence: Synthetic oligonucleotide
ugaccaagaacuccucaaa

SEQ ID NO: 3047247 - RNA, 19 nt, Artificial Sequence
  Description of Artificial Sequence: Synthetic oligonucleotide
gucaaugcggccaucguug

SEQ ID NO: 3047248 - RNA, 19 nt, Artificial Sequence
  Description of Artificial Sequence: Synthetic oligonucleotide
ugcguuccugucaaagaug

SEQ ID NO: 3047249 - RNA, 19 nt, Artificial Sequence
  Description of Artificial Sequence: Synthetic oligonucleotide
cuucaggaacucaucgaag

SEQ ID NO: 3047250 - RNA, 19 nt, Artificial Sequence
  Description of Artificial Sequence: Synthetic oligonucleotide
gaguuguccacgcccgggg

SEQ ID NO: 3047251 - RNA, 19 nt, Artificial Sequence
  Description of Artificial Sequence: Synthetic oligonucleotide
aucaugaccaagaacuccu

SEQ ID NO: 3047252 - RNA, 19 nt, Artificial Sequence
  Description of Artificial Sequence: Synthetic oligonucleotide
auuuccucaucugucacgu

SEQ ID NO: 3047253 - RNA, 19 nt, Artificial Sequence
  Description of Artificial Sequence: Synthetic oligonucleotide
aaaaucucagccagcuccu

SEQ ID NO: 3047254 - RNA, 19 nt, Artificial Sequence
  Description of Artificial Sequence: Synthetic oligonucleotide
uuucaucuggcgcaccauc

SEQ ID NO: 3047255 - RNA, 19 nt, Artificial Sequence
  Description of Artificial Sequence: Synthetic oligonucleotide
ucaucuucaggaacucauc

SEQ ID NO: 3047256 - RNA, 19 nt, Artificial Sequence
  Description of Artificial Sequence: Synthetic oligonucleotide
ucaucagggauucgauuuc

SEQ ID NO: 3047257 - RNA, 19 nt, Artificial Sequence
  Description of Artificial Sequence: Synthetic oligonucleotide
aucguuguucuuaucuccg

SEQ ID NO: 3047258 - RNA, 19 nt, Artificial Sequence
  Description of Artificial Sequence: Synthetic oligonucleotide
uccuucaucagggauucga

SEQ ID NO: 3047259 - RNA, 19 nt, Artificial Sequence
  Description of Artificial Sequence: Synthetic oligonucleotide
ggaccugcgaucugggugg

SEQ ID NO: 3047260 - RNA, 19 nt, Artificial Sequence
  Description of Artificial Sequence: Synthetic oligonucleotide
augaccaagaacuccucaa

SEQ ID NO: 3047261 - RNA, 19 nt, Artificial Sequence
  Description of Artificial Sequence: Synthetic oligonucleotide
agaugcggaaacacucugc

SEQ ID NO: 3047262 - RNA, 19 nt, Artificial Sequence
  Description of Artificial Sequence: Synthetic oligonucleotide
cucaaagucgauggugccg

SEQ ID NO: 3047263 - RNA, 19 nt, Artificial Sequence
  Description of Artificial Sequence: Synthetic oligonucleotide
caucaugaccaagaacucc

SEQ ID NO: 3047264 - RNA, 19 nt, Artificial Sequence
  Description of Artificial Sequence: Synthetic oligonucleotide
ucugucacgugcuccccag

SEQ ID NO: 3047265 - RNA, 19 nt, Artificial Sequence
  Description of Artificial Sequence: Synthetic oligonucleotide
aucgaagucaaugcggcca

SEQ ID NO: 3047266 - RNA, 19 nt, Artificial Sequence
  Description of Artificial Sequence: Synthetic oligonucleotide
aggguggaguuguccacgc

SEQ ID NO: 3047267 - RNA, 19 nt, Artificial Sequence
  Description of Artificial Sequence: Synthetic oligonucleotide
gccuccaucaucuucagga

SEQ ID NO: 3047268 - RNA, 19 nt, Artificial Sequence
  Description of Artificial Sequence: Synthetic oligonucleotide
cuucgcauccucuuucauc

SEQ ID NO: 3047269 - RNA, 19 nt, Artificial Sequence
  Description of Artificial Sequence: Synthetic oligonucleotide
uccucaucugucacgugcu

SEQ ID NO: 3047270 - RNA, 19 nt, Artificial Sequence
  Description of Artificial Sequence: Synthetic oligonucleotide
cuccucuucgcucuucccc

SEQ ID NO: 3047271 - RNA, 19 nt, Artificial Sequence
  Description of Artificial Sequence: Synthetic oligonucleotide
gucaaagaugcggaaacac

SEQ ID NO: 3047272 - RNA, 19 nt, Artificial Sequence
  Description of Artificial Sequence: Synthetic oligonucleotide
cagggauucgauuuccuca

SEQ ID NO: 3047273 - RNA, 19 nt, Artificial Sequence
  Description of Artificial Sequence: Synthetic oligonucleotide
agggauucgauuuccucau

SEQ ID NO: 3047274 - RNA, 19 nt, Artificial Sequence
  Description of Artificial Sequence: Synthetic oligonucleotide
ucagggauucgauuuccuc

SEQ ID NO: 3047275 - RNA, 19 nt, Artificial Sequence
  Description of Artificial Sequence: Synthetic oligonucleotide
gguggaguuguccacgccc

SEQ ID NO: 3047276 - RNA, 19 nt, Artificial Sequence
  Description of Artificial Sequence: Synthetic oligonucleotide
caucaauguagccgucugc

SEQ ID NO: 3047277 - RNA, 19 nt, Artificial Sequence
  Description of Artificial Sequence: Synthetic oligonucleotide
guucuuaucuccguccuuc

SEQ ID NO: 3047278 - RNA, 19 nt, Artificial Sequence
  Description of Artificial Sequence: Synthetic oligonucleotide
ugucaaagaugcggaaaca

SEQ ID NO: 3047279 - RNA, 19 nt, Artificial Sequence
  Description of Artificial Sequence: Synthetic oligonucleotide
gacgccuccaucaucuuca

SEQ ID NO: 3047280 - RNA, 19 nt, Artificial Sequence
  Description of Artificial Sequence: Synthetic oligonucleotide
ucaauguagccgucugcgu

SEQ ID NO: 3047281 - RNA, 19 nt, Artificial Sequence
  Description of Artificial Sequence: Synthetic oligonucleotide
ccaagaacuccucaaaguc

SEQ ID NO: 3047282 - RNA, 19 nt, Artificial Sequence
  Description of Artificial Sequence: Synthetic oligonucleotide
gaacuccucaaagucgaug

SEQ ID NO: 3047283 - RNA, 19 nt, Artificial Sequence
  Description of Artificial Sequence: Synthetic oligonucleotide
uucgcucuuccccuucgca

SEQ ID NO: 3047284 - RNA, 19 nt, Artificial Sequence
  Description of Artificial Sequence: Synthetic oligonucleotide
gaagcccggaaaaucucag

SEQ ID NO: 3047285 - RNA, 19 nt, Artificial Sequence
  Description of Artificial Sequence: Synthetic oligonucleotide
aucaucuucaggaacucau

SEQ ID NO: 3047286 - RNA, 19 nt, Artificial Sequence
  Description of Artificial Sequence: Synthetic oligonucleotide
cuuacuggacgccuccauc

SEQ ID NO: 3047287 - RNA, 19 nt, Artificial Sequence
  Description of Artificial Sequence: Synthetic oligonucleotide
uccccagaagcccggaaaa

SEQ ID NO: 3047288 - RNA, 19 nt, Artificial Sequence
  Description of Artificial Sequence: Synthetic oligonucleotide
uucuuaucuccguccuuca

SEQ ID NO: 3047289 - RNA, 19 nt, Artificial Sequence
  Description of Artificial Sequence: Synthetic oligonucleotide
aaaucucagccagcuccuc

SEQ ID NO: 3047290 - RNA, 19 nt, Artificial Sequence
  Description of Artificial Sequence: Synthetic oligonucleotide
acuggacgccuccaucauc

SEQ ID NO: 3047291 - RNA, 19 nt, Artificial Sequence
  Description of Artificial Sequence: Synthetic oligonucleotide
acgugcuccccagaagccc

SEQ ID NO: 3047292 - RNA, 19 nt, Artificial Sequence
  Description of Artificial Sequence: Synthetic oligonucleotide
uggaguuguccacgcccgg

SEQ ID NO: 3047293 - RNA, 19 nt, Artificial Sequence
  Description of Artificial Sequence: Synthetic oligonucleotide
gaaggcaaggguggaguug

SEQ ID NO: 3047294 - RNA, 19 nt, Artificial Sequence
  Description of Artificial Sequence: Synthetic oligonucleotide
ucgaagucaaugcggccau

SEQ ID NO: 3047295 - RNA, 19 nt, Artificial Sequence
  Description of Artificial Sequence: Synthetic oligonucleotide
agucaaugcggccaucguu

SEQ ID NO: 3047296 - RNA, 19 nt, Artificial Sequence
  Description of Artificial Sequence: Synthetic oligonucleotide
aaagucgauggugccgcug

SEQ ID NO: 3047297 - RNA, 19 nt, Artificial Sequence
  Description of Artificial Sequence: Synthetic oligonucleotide
guggaguuguccacgcccg

SEQ ID NO: 3047298 - RNA, 19 nt, Artificial Sequence
  Description of Artificial Sequence: Synthetic oligonucleotide
cucaucugucacgugcucc

SEQ ID NO: 3047299 - RNA, 19 nt, Artificial Sequence
  Description of Artificial Sequence: Synthetic oligonucleotide
caucgaagucaaugcggcc

SEQ ID NO: 3047300 - RNA, 19 nt, Artificial Sequence
  Description of Artificial Sequence: Synthetic oligonucleotide
ucuuaucuccguccuucau

SEQ ID NO: 3047301 - RNA, 19 nt, Artificial Sequence
  Description of Artificial Sequence: Synthetic oligonucleotide
ucaucuggcgcaccaucau

SEQ ID NO: 3047302 - RNA, 19 nt, Artificial Sequence
  Description of Artificial Sequence: Synthetic oligonucleotide
caucagggauucgauuucc

SEQ ID NO: 3047303 - RNA, 19 nt, Artificial Sequence
  Description of Artificial Sequence: Synthetic oligonucleotide
ucaugaccaagaacuccuc

SEQ ID NO: 3047304 - RNA, 19 nt, Artificial Sequence
  Description of Artificial Sequence: Synthetic oligonucleotide
ucguuguucuuaucuccgu

SEQ ID NO: 3047305 - RNA, 19 nt, Artificial Sequence
  Description of Artificial Sequence: Synthetic oligonucleotide
caaggguggaguuguccac

SEQ ID NO: 3047306 - RNA, 19 nt, Artificial Sequence
  Description of Artificial Sequence: Synthetic oligonucleotide
gucugcguuccugucaaag

SEQ ID NO: 3047307 - RNA, 19 nt, Artificial Sequence
  Description of Artificial Sequence: Synthetic oligonucleotide
cugcgaucuggguggaagc

SEQ ID NO: 3047308 - RNA, 19 nt, Artificial Sequence
  Description of Artificial Sequence: Synthetic oligonucleotide
ucaaugcggccaucguugu

SEQ ID NO: 3047309 - RNA, 19 nt, Artificial Sequence
  Description of Artificial Sequence: Synthetic oligonucleotide
ucgauggugccgcugccau

SEQ ID NO: 3047310 - RNA, 19 nt, Artificial Sequence
  Description of Artificial Sequence: Synthetic oligonucleotide
gggaccugcgaucugggug

SEQ ID NO: 3047311 - RNA, 19 nt, Artificial Sequence
  Description of Artificial Sequence: Synthetic oligonucleotide
auguagccgucugcguucc

SEQ ID NO: 3047312 - RNA, 19 nt, Artificial Sequence
  Description of Artificial Sequence: Synthetic oligonucleotide
cuccuuacuggacgccucc

SEQ ID NO: 3047313 - RNA, 19 nt, Artificial Sequence
  Description of Artificial Sequence: Synthetic oligonucleotide
caccaucaugaccaagaac

SEQ ID NO: 3047314 - RNA, 19 nt, Artificial Sequence
  Description of Artificial Sequence: Synthetic oligonucleotide
ugcgaucuggguggaagca

SEQ ID NO: 3047315 - RNA, 19 nt, Artificial Sequence
  Description of Artificial Sequence: Synthetic oligonucleotide
gucacgugcuccccagaag

SEQ ID NO: 3047316 - RNA, 19 nt, Artificial Sequence
  Description of Artificial Sequence: Synthetic oligonucleotide
cccggaaaaucucagccag

SEQ ID NO: 3047317 - RNA, 19 nt, Artificial Sequence
  Description of Artificial Sequence: Synthetic oligonucleotide
cacgugcuccccagaagcc

SEQ ID NO: 3047318 - RNA, 19 nt, Artificial Sequence
  Description of Artificial Sequence: Synthetic oligonucleotide
aucuggcgcaccaucauga

SEQ ID NO: 3047319 - RNA, 19 nt, Artificial Sequence
  Description of Artificial Sequence: Synthetic oligonucleotide
uggaagcaaaggccggcuc

SEQ ID NO: 3047320 - RNA, 19 nt, Artificial Sequence
  Description of Artificial Sequence: Synthetic oligonucleotide
cuggcgcaccaucaugacc

SEQ ID NO: 3047321 - RNA, 19 nt, Artificial Sequence
  Description of Artificial Sequence: Synthetic oligonucleotide
agcaucaauguagccgucu

SEQ ID NO: 3047322 - RNA, 19 nt, Artificial Sequence
  Description of Artificial Sequence: Synthetic oligonucleotide
aaacacucugccagcuccu

SEQ ID NO: 3047323 - RNA, 19 nt, Artificial Sequence
  Description of Artificial Sequence: Synthetic oligonucleotide
agaagcccggaaaaucuca

SEQ ID NO: 3047324 - RNA, 19 nt, Artificial Sequence
  Description of Artificial Sequence: Synthetic oligonucleotide
ucuggcgcaccaucaugac

SEQ ID NO: 3047325 - RNA, 19 nt, Artificial Sequence
  Description of Artificial Sequence: Synthetic oligonucleotide
caucuggcgcaccaucaug

SEQ ID NO: 3047326 - RNA, 19 nt, Artificial Sequence
  Description of Artificial Sequence: Synthetic oligonucleotide
ucgcucuuccccuucgcau

SEQ ID NO: 3047327 - RNA, 19 nt, Artificial Sequence
  Description of Artificial Sequence: Synthetic oligonucleotide
uccugucaaagaugcggaa

SEQ ID NO: 3047328 - RNA, 19 nt, Artificial Sequence
  Description of Artificial Sequence: Synthetic oligonucleotide
caugaccaagaacuccuca

SEQ ID NO: 3047329 - RNA, 19 nt, Artificial Sequence
  Description of Artificial Sequence: Synthetic oligonucleotide
gcaucaauguagccgucug

SEQ ID NO: 3047330 - RNA, 19 nt, Artificial Sequence
  Description of Artificial Sequence: Synthetic oligonucleotide
uagccgucugcguuccugu

SEQ ID NO: 3047331 - RNA, 19 nt, Artificial Sequence
  Description of Artificial Sequence: Synthetic oligonucleotide
augcggaaacacucugcca

SEQ ID NO: 3047332 - RNA, 19 nt, Artificial Sequence
  Description of Artificial Sequence: Synthetic oligonucleotide
aggaacucaucgaagucaa

SEQ ID NO: 3047333 - RNA, 19 nt, Artificial Sequence
  Description of Artificial Sequence: Synthetic oligonucleotide
gcguuccugucaaagaugc

SEQ ID NO: 3047334 - RNA, 19 nt, Artificial Sequence
  Description of Artificial Sequence: Synthetic oligonucleotide
uacuggacgccuccaucau

SEQ ID NO: 3047335 - RNA, 19 nt, Artificial Sequence
  Description of Artificial Sequence: Synthetic oligonucleotide
gccggcuccuuacuggacg

SEQ ID NO: 3047336 - RNA, 19 nt, Artificial Sequence
  Description of Artificial Sequence: Synthetic oligonucleotide
gcaaggguggaguugucca

SEQ ID NO: 3047337 - RNA, 19 nt, Artificial Sequence
  Description of Artificial Sequence: Synthetic oligonucleotide
uaucuccguccuucaucag

SEQ ID NO: 3047338 - RNA, 19 nt, Artificial Sequence
  Description of Artificial Sequence: Synthetic oligonucleotide
uuuccucaucugucacgug

SEQ ID NO: 3047339 - RNA, 19 nt, Artificial Sequence
  Description of Artificial Sequence: Synthetic oligonucleotide
cuggacgccuccaucaucu

SEQ ID NO: 3047340 - RNA, 19 nt, Artificial Sequence
  Description of Artificial Sequence: Synthetic oligonucleotide
guagccgucugcguuccug

SEQ ID NO: 3047341 - RNA, 19 nt, Artificial Sequence
  Description of Artificial Sequence: Synthetic oligonucleotide
ucuuccccuucgcauccuc

SEQ ID NO: 3047342 - RNA, 19 nt, Artificial Sequence
  Description of Artificial Sequence: Synthetic oligonucleotide
uuccccuucgcauccucuu

SEQ ID NO: 3047343 - RNA, 19 nt, Artificial Sequence
  Description of Artificial Sequence: Synthetic oligonucleotide
cuucgcucuuccccuucgc

SEQ ID NO: 3047344 - RNA, 19 nt, Artificial Sequence
  Description of Artificial Sequence: Synthetic oligonucleotide
ccaucguuguucuuaucuc

SEQ ID NO: 3047345 - RNA, 19 nt, Artificial Sequence
  Description of Artificial Sequence: Synthetic oligonucleotide
gccaucguuguucuuaucu

SEQ ID NO: 3047346 - RNA, 19 nt, Artificial Sequence
  Description of Artificial Sequence: Synthetic oligonucleotide
gcaaaggccggcuccuuac

SEQ ID NO: 3047347 - RNA, 19 nt, Artificial Sequence
  Description of Artificial Sequence: Synthetic oligonucleotide
ggauucgauuuccucaucu

SEQ ID NO: 3047348 - RNA, 19 nt, Artificial Sequence
  Description of Artificial Sequence: Synthetic oligonucleotide
ggaguuguccacgcccggg

SEQ ID NO: 3047349 - RNA, 19 nt, Artificial Sequence
  Description of Artificial Sequence: Synthetic oligonucleotide
agccgucugcguuccuguc

SEQ ID NO: 3047350 - RNA, 19 nt, Artificial Sequence
  Description of Artificial Sequence: Synthetic oligonucleotide
aggccggcuccuuacugga

SEQ ID NO: 3047351 - RNA, 19 nt, Artificial Sequence
  Description of Artificial Sequence: Synthetic oligonucleotide
agcaaaggccggcuccuua

SEQ ID NO: 3047352 - RNA, 19 nt, Artificial Sequence
  Description of Artificial Sequence: Synthetic oligonucleotide
ccucaaagucgauggugcc

SEQ ID NO: 3047353 - RNA, 19 nt, Artificial Sequence
  Description of Artificial Sequence: Synthetic oligonucleotide
gaagcaaaggccggcuccu

SEQ ID NO: 3047354 - RNA, 19 nt, Artificial Sequence
  Description of Artificial Sequence: Synthetic oligonucleotide
uccccuucgcauccucuuu

SEQ ID NO: 3047355 - RNA, 19 nt, Artificial Sequence
  Description of Artificial Sequence: Synthetic oligonucleotide
augcggccaucguuguucu

SEQ ID NO: 3047356 - RNA, 19 nt, Artificial Sequence
  Description of Artificial Sequence: Synthetic oligonucleotide
uccuuacuggacgccucca

SEQ ID NO: 3047357 - RNA, 19 nt, Artificial Sequence
  Description of Artificial Sequence: Synthetic oligonucleotide
ggaaaaucucagccagcuc

SEQ ID NO: 3047358 - RNA, 19 nt, Artificial Sequence
  Description of Artificial Sequence: Synthetic oligonucleotide
ucgcauccucuuucaucug

SEQ ID NO: 3047359 - RNA, 19 nt, Artificial Sequence
  Description of Artificial Sequence: Synthetic oligonucleotide
ggcggggaaggcaagggug

SEQ ID NO: 3047360 - RNA, 19 nt, Artificial Sequence
  Description of Artificial Sequence: Synthetic oligonucleotide
acgccuccaucaucuucag

SEQ ID NO: 3047361 - RNA, 19 nt, Artificial Sequence
  Description of Artificial Sequence: Synthetic oligonucleotide
ccaucaugaccaagaacuc

SEQ ID NO: 3047362 - RNA, 19 nt, Artificial Sequence
  Description of Artificial Sequence: Synthetic oligonucleotide
gcggggaaggcaagggugg

SEQ ID NO: 3047363 - RNA, 19 nt, Artificial Sequence
  Description of Artificial Sequence: Synthetic oligonucleotide
ccugcgaucuggguggaag

SEQ ID NO: 3047364 - RNA, 19 nt, Artificial Sequence
  Description of Artificial Sequence: Synthetic oligonucleotide
aucagggauucgauuuccu

SEQ ID NO: 3047365 - RNA, 19 nt, Artificial Sequence
  Description of Artificial Sequence: Synthetic oligonucleotide
gcggaaacacucugccagc

SEQ ID NO: 3047366 - RNA, 19 nt, Artificial Sequence
  Description of Artificial Sequence: Synthetic oligonucleotide
caucugucacgugcucccc

SEQ ID NO: 3047367 - RNA, 19 nt, Artificial Sequence
  Description of Artificial Sequence: Synthetic oligonucleotide
gcucuuccccuucgcaucc

SEQ ID NO: 3047368 - RNA, 19 nt, Artificial Sequence
  Description of Artificial Sequence: Synthetic oligonucleotide
ggcaaggguggaguugucc

SEQ ID NO: 3047369 - RNA, 19 nt, Artificial Sequence
  Description of Artificial Sequence: Synthetic oligonucleotide
ggaaacacucugccagcuc

SEQ ID NO: 3047370 - RNA, 19 nt, Artificial Sequence
  Description of Artificial Sequence: Synthetic oligonucleotide
gcauccucuuucaucuggc

SEQ ID NO: 3047371 - RNA, 19 nt, Artificial Sequence
  Description of Artificial Sequence: Synthetic oligonucleotide
cuccccagaagcccggaaa

SEQ ID NO: 3047372 - RNA, 19 nt, Artificial Sequence
  Description of Artificial Sequence: Synthetic oligonucleotide
caauguagccgucugcguu

SEQ ID NO: 3047373 - RNA, 19 nt, Artificial Sequence
  Description of Artificial Sequence: Synthetic oligonucleotide
cgcaccaucaugaccaaga

SEQ ID NO: 3047374 - RNA, 19 nt, Artificial Sequence
  Description of Artificial Sequence: Synthetic oligonucleotide
cugcguuccugucaaagau

SEQ ID NO: 3047375 - RNA, 19 nt, Artificial Sequence
  Description of Artificial Sequence: Synthetic oligonucleotide
caucaucuucaggaacuca

SEQ ID NO: 3047376 - RNA, 19 nt, Artificial Sequence
  Description of Artificial Sequence: Synthetic oligonucleotide
cgugcuccccagaagcccg

SEQ ID NO: 3047377 - RNA, 19 nt, Artificial Sequence
  Description of Artificial Sequence: Synthetic oligonucleotide
cucuucgcucuuccccuuc

SEQ ID NO: 3047378 - RNA, 19 nt, Artificial Sequence
  Description of Artificial Sequence: Synthetic oligonucleotide
ccggaaaaucucagccagc

SEQ ID NO: 3047379 - RNA, 19 nt, Artificial Sequence
  Description of Artificial Sequence: Synthetic oligonucleotide
gcccggaaaaucucagcca

SEQ ID NO: 3047380 - RNA, 19 nt, Artificial Sequence
  Description of Artificial Sequence: Synthetic oligonucleotide
cucuuucaucuggcgcacc

SEQ ID NO: 3047381 - RNA, 19 nt, Artificial Sequence
  Description of Artificial Sequence: Synthetic oligonucleotide
cuucaucagggauucgauu

SEQ ID NO: 3047382 - RNA, 19 nt, Artificial Sequence
  Description of Artificial Sequence: Synthetic oligonucleotide
ggacgccuccaucaucuuc

SEQ ID NO: 3047383 - RNA, 19 nt, Artificial Sequence
  Description of Artificial Sequence: Synthetic oligonucleotide
uguagccgucugcguuccu

SEQ ID NO: 3047384 - RNA, 19 nt, Artificial Sequence
  Description of Artificial Sequence: Synthetic oligonucleotide
ccucagcaucaauguagcc

SEQ ID NO: 3047385 - RNA, 19 nt, Artificial Sequence
  Description of Artificial Sequence: Synthetic oligonucleotide
cguuguucuuaucuccguc

SEQ ID NO: 3047386 - RNA, 19 nt, Artificial Sequence
  Description of Artificial Sequence: Synthetic oligonucleotide
cagcaucaauguagccguc

SEQ ID NO: 3047387 - RNA, 19 nt, Artificial Sequence
  Description of Artificial Sequence: Synthetic oligonucleotide
gucgauggugccgcugcca

SEQ ID NO: 3047388 - RNA, 19 nt, Artificial Sequence
  Description of Artificial Sequence: Synthetic oligonucleotide
gcaccaucaugaccaagaa

SEQ ID NO: 3047389 - RNA, 19 nt, Artificial Sequence
  Description of Artificial Sequence: Synthetic oligonucleotide
ccggcuccuuacuggacgc

SEQ ID NO: 3047390 - RNA, 19 nt, Artificial Sequence
  Description of Artificial Sequence: Synthetic oligonucleotide
aagcaaaggccggcuccuu

SEQ ID NO: 3047391 - RNA, 19 nt, Artificial Sequence
  Description of Artificial Sequence: Synthetic oligonucleotide
cgauuuccucaucugucac

SEQ ID NO: 3047392 - RNA, 19 nt, Artificial Sequence
  Description of Artificial Sequence: Synthetic oligonucleotide
ggggaaggcaaggguggag

SEQ ID NO: 3047393 - RNA, 19 nt, Artificial Sequence
  Description of Artificial Sequence: Synthetic oligonucleotide
agaacuccucaaagucgau

SEQ ID NO: 3047394 - RNA, 19 nt, Artificial Sequence
  Description of Artificial Sequence: Synthetic oligonucleotide
gcuccucuucgcucuuccc

SEQ ID NO: 3047395 - RNA, 19 nt, Artificial Sequence
  Description of Artificial Sequence: Synthetic oligonucleotide
gugcuccccagaagcccgg

SEQ ID NO: 3047396 - RNA, 19 nt, Artificial Sequence
  Description of Artificial Sequence: Synthetic oligonucleotide
ggguggaguuguccacgcc

SEQ ID NO: 3047397 - RNA, 19 nt, Artificial Sequence
  Description of Artificial Sequence: Synthetic oligonucleotide
cguuccugucaaagaugcg

SEQ ID NO: 3047398 - RNA, 19 nt, Artificial Sequence
  Description of Artificial Sequence: Synthetic oligonucleotide
gccgucugcguuccuguca

SEQ ID NO: 3047399 - RNA, 19 nt, Artificial Sequence
  Description of Artificial Sequence: Synthetic oligonucleotide
guccuucaucagggauucg

SEQ ID NO: 3047400 - RNA, 19 nt, Artificial Sequence
  Description of Artificial Sequence: Synthetic oligonucleotide
ccugucaaagaugcggaaa

SEQ ID NO: 3047401 - RNA, 19 nt, Artificial Sequence
  Description of Artificial Sequence: Synthetic oligonucleotide
ugcuccccagaagcccgga

SEQ ID NO: 3047402 - RNA, 19 nt, Artificial Sequence
  Description of Artificial Sequence: Synthetic oligonucleotide
gggauucgauuuccucauc

SEQ ID NO: 3047403 - RNA, 19 nt, Artificial Sequence
  Description of Artificial Sequence: Synthetic oligonucleotide
uggacgccuccaucaucuu

SEQ ID NO: 3047404 - RNA, 19 nt, Artificial Sequence
  Description of Artificial Sequence: Synthetic oligonucleotide
cgcucuuccccuucgcauc

SEQ ID NO: 3047405 - RNA, 19 nt, Artificial Sequence
  Description of Artificial Sequence: Synthetic oligonucleotide
gggaaggcaaggguggagu

SEQ ID NO: 3047406 - RNA, 19 nt, Artificial Sequence
  Description of Artificial Sequence: Synthetic oligonucleotide
ccuccaucaucuucaggaa

SEQ ID NO: 3047407 - RNA, 19 nt, Artificial Sequence
  Description of Artificial Sequence: Synthetic oligonucleotide
aggcaaggguggaguuguc

SEQ ID NO: 3047408 - RNA, 19 nt, Artificial Sequence
  Description of Artificial Sequence: Synthetic oligonucleotide
ccccuucgcauccucuuuc

SEQ ID NO: 3047409 - RNA, 19 nt, Artificial Sequence
  Description of Artificial Sequence: Synthetic oligonucleotide
gcggccaucguuguucuua

SEQ ID NO: 3047410 - RNA, 19 nt, Artificial Sequence
  Description of Artificial Sequence: Synthetic oligonucleotide
auggugccgcugccauccu

SEQ ID NO: 3047411 - RNA, 19 nt, Artificial Sequence
  Description of Artificial Sequence: Synthetic oligonucleotide
ccucuuucaucuggcgcac

SEQ ID NO: 3047412 - RNA, 19 nt, Artificial Sequence
  Description of Artificial Sequence: Synthetic oligonucleotide
caaaggccggcuccuuacu

SEQ ID NO: 3047413 - RNA, 19 nt, Artificial Sequence
  Description of Artificial Sequence: Synthetic oligonucleotide
gcuccucagcaucaaugua

SEQ ID NO: 3047414 - RNA, 19 nt, Artificial Sequence
  Description of Artificial Sequence: Synthetic oligonucleotide
cugucacgugcuccccaga

SEQ ID NO: 3047415 - RNA, 19 nt, Artificial Sequence
  Description of Artificial Sequence: Synthetic oligonucleotide
cugccagcuccucuucgcu

SEQ ID NO: 3047416 - RNA, 19 nt, Artificial Sequence
  Description of Artificial Sequence: Synthetic oligonucleotide
gcuccuuacuggacgccuc

SEQ ID NO: 3047417 - RNA, 19 nt, Artificial Sequence
  Description of Artificial Sequence: Synthetic oligonucleotide
cuuucaucuggcgcaccau

SEQ ID NO: 3047418 - RNA, 19 nt, Artificial Sequence
  Description of Artificial Sequence: Synthetic oligonucleotide
cccuucgcauccucuuuca

SEQ ID NO: 3047419 - RNA, 19 nt, Artificial Sequence
  Description of Artificial Sequence: Synthetic oligonucleotide
ccuucaucagggauucgau

SEQ ID NO: 3047420 - RNA, 19 nt, Artificial Sequence
  Description of Artificial Sequence: Synthetic oligonucleotide
ccgucugcguuccugucaa

SEQ ID NO: 3047421 - RNA, 19 nt, Artificial Sequence
  Description of Artificial Sequence: Synthetic oligonucleotide
ggaaggcaaggguggaguu

SEQ ID NO: 3047422 - RNA, 19 nt, Artificial Sequence
  Description of Artificial Sequence: Synthetic oligonucleotide
caaagucgauggugccgcu

SEQ ID NO: 3047423 - RNA, 19 nt, Artificial Sequence
  Description of Artificial Sequence: Synthetic oligonucleotide
gcgaucuggguggaagcaa

SEQ ID NO: 3047424 - RNA, 19 nt, Artificial Sequence
  Description of Artificial Sequence: Synthetic oligonucleotide
ugcggccaucguuguucuu

SEQ ID NO: 3047425 - RNA, 19 nt, Artificial Sequence
  Description of Artificial Sequence: Synthetic oligonucleotide
gaccugcgaucugggugga

SEQ ID NO: 3047426 - RNA, 19 nt, Artificial Sequence
  Description of Artificial Sequence: Synthetic oligonucleotide
cggaaaaucucagccagcu

SEQ ID NO: 3047427 - RNA, 19 nt, Artificial Sequence
  Description of Artificial Sequence: Synthetic oligonucleotide
ggcuccuuacuggacgccu

SEQ ID NO: 3047428 - RNA, 19 nt, Artificial Sequence
  Description of Artificial Sequence: Synthetic oligonucleotide
ggccaucguuguucuuauc

SEQ ID NO: 3047429 - RNA, 19 nt, Artificial Sequence
  Description of Artificial Sequence: Synthetic oligonucleotide
gcgcaccaucaugaccaag

SEQ ID NO: 3047430 - RNA, 19 nt, Artificial Sequence
  Description of Artificial Sequence: Synthetic oligonucleotide
ggcgcaccaucaugaccaa

SEQ ID NO: 3047431 - RNA, 19 nt, Artificial Sequence
  Description of Artificial Sequence: Synthetic oligonucleotide
gcuccccagaagcccggaa

SEQ ID NO: 3047432 - RNA, 19 nt, Artificial Sequence
  Description of Artificial Sequence: Synthetic oligonucleotide
accugcgaucuggguggaa

SEQ ID NO: 3047433 - RNA, 19 nt, Artificial Sequence
  Description of Artificial Sequence: Synthetic oligonucleotide
caaugcggccaucguuguu

SEQ ID NO: 3047434 - RNA, 19 nt, Artificial Sequence
  Description of Artificial Sequence: Synthetic oligonucleotide
ggggaccugcgaucugggu

SEQ ID NO: 3047435 - RNA, 19 nt, Artificial Sequence
  Description of Artificial Sequence: Synthetic oligonucleotide
cgauggugccgcugccauc

SEQ ID NO: 3047436 - RNA, 19 nt, Artificial Sequence
  Description of Artificial Sequence: Synthetic oligonucleotide
ggccggcuccuuacuggac

SEQ ID NO: 3047437 - RNA, 19 nt, Artificial Sequence
  Description of Artificial Sequence: Synthetic oligonucleotide
ccuuacuggacgccuccau

SEQ ID NO: 3047438 - RNA, 19 nt, Artificial Sequence
  Description of Artificial Sequence: Synthetic oligonucleotide
gccagcuccucagcaucaa

SEQ ID NO: 3047439 - RNA, 19 nt, Artificial Sequence
  Description of Artificial Sequence: Synthetic oligonucleotide
ggaacucaucgaagucaau

SEQ ID NO: 3047440 - RNA, 19 nt, Artificial Sequence
  Description of Artificial Sequence: Synthetic oligonucleotide
cggcuccuuacuggacgcc

SEQ ID NO: 3047441 - RNA, 19 nt, Artificial Sequence
  Description of Artificial Sequence: Synthetic oligonucleotide
ccuucgcauccucuuucau

SEQ ID NO: 3047442 - RNA, 19 nt, Artificial Sequence
  Description of Artificial Sequence: Synthetic oligonucleotide
cggaaacacucugccagcu

SEQ ID NO: 3047443 - RNA, 19 nt, Artificial Sequence
  Description of Artificial Sequence: Synthetic oligonucleotide
cggggaaggcaagggugga

SEQ ID NO: 3047444 - RNA, 19 nt, Artificial Sequence
  Description of Artificial Sequence: Synthetic oligonucleotide
cggccaucguuguucuuau

SEQ ID NO: 3047445 - RNA, 19 nt, Artificial Sequence
  Description of Artificial Sequence: Synthetic oligonucleotide
ccucuucgcucuuccccuu

SEQ ID NO: 3047446 - RNA, 19 nt, Artificial Sequence
  Description of Artificial Sequence: Synthetic oligonucleotide
cgucugcguuccugucaaa

SEQ ID NO: 3047447 - RNA, 19 nt, Artificial Sequence
  Description of Artificial Sequence: Synthetic oligonucleotide
aaaccuauuuuccagcuuc

SEQ ID NO: 3047448 - RNA, 19 nt, Artificial Sequence
  Description of Artificial Sequence: Synthetic oligonucleotide
ucacuuuucauucaagggc

SEQ ID NO: 3047449 - RNA, 19 nt, Artificial Sequence
  Description of Artificial Sequence: Synthetic oligonucleotide
aaguuaaucaaggcguugc

SEQ ID NO: 3047450 - RNA, 19 nt, Artificial Sequence
  Description of Artificial Sequence: Synthetic oligonucleotide
aguaaaccuauuuuccagc

SEQ ID NO: 3047451 - RNA, 19 nt, Artificial Sequence
  Description of Artificial Sequence: Synthetic oligonucleotide
uuugugacauuccuuaagc

SEQ ID NO: 3047452 - RNA, 19 nt, Artificial Sequence
  Description of Artificial Sequence: Synthetic oligonucleotide
aaaauuucagaauguugug

SEQ ID NO: 3047453 - RNA, 19 nt, Artificial Sequence
  Description of Artificial Sequence: Synthetic oligonucleotide
aauuucagaauguugugau

SEQ ID NO: 3047454 - RNA, 19 nt, Artificial Sequence
  Description of Artificial Sequence: Synthetic oligonucleotide
aauaccaugcucccugcuc

SEQ ID NO: 3047455 - RNA, 19 nt, Artificial Sequence
  Description of Artificial Sequence: Synthetic oligonucleotide
uccuuaagcaaguuaauca

SEQ ID NO: 3047456 - RNA, 19 nt, Artificial Sequence
  Description of Artificial Sequence: Synthetic oligonucleotide
ucaggaugcaucuuuuagg

SEQ ID NO: 3047457 - RNA, 19 nt, Artificial Sequence
  Description of Artificial Sequence: Synthetic oligonucleotide
cauggcaauaccaugcucc

SEQ ID NO: 3047458 - RNA, 19 nt, Artificial Sequence
  Description of Artificial Sequence: Synthetic oligonucleotide
auucaagggcuguagagac

SEQ ID NO: 3047459 - RNA, 19 nt, Artificial Sequence
  Description of Artificial Sequence: Synthetic oligonucleotide
cauuucccggucaagaucg

SEQ ID NO: 3047460 - RNA, 19 nt, Artificial Sequence
  Description of Artificial Sequence: Synthetic oligonucleotide
uccaguaaaccuauuuucc

SEQ ID NO: 3047461 - RNA, 19 nt, Artificial Sequence
  Description of Artificial Sequence: Synthetic oligonucleotide
uuuugugacauuccuuaag

SEQ ID NO: 3047462 - RNA, 19 nt, Artificial Sequence
  Description of Artificial Sequence: Synthetic oligonucleotide
auccaguaaaccuauuuuc

SEQ ID NO: 3047463 - RNA, 19 nt, Artificial Sequence
  Description of Artificial Sequence: Synthetic oligonucleotide
uguguacucauucuucaag

SEQ ID NO: 3047464 - RNA, 19 nt, Artificial Sequence
  Description of Artificial Sequence: Synthetic oligonucleotide
agcacuuucucauuucccg

SEQ ID NO: 3047465 - RNA, 19 nt, Artificial Sequence
  Description of Artificial Sequence: Synthetic oligonucleotide
auaccaugcucccugcucc

SEQ ID NO: 3047466 - RNA, 19 nt, Artificial Sequence
  Description of Artificial Sequence: Synthetic oligonucleotide
gucacuuuucauucaaggg

SEQ ID NO: 3047467 - RNA, 19 nt, Artificial Sequence
  Description of Artificial Sequence: Synthetic oligonucleotide
uacucauucuucaagcacu

SEQ ID NO: 3047468 - RNA, 19 nt, Artificial Sequence
  Description of Artificial Sequence: Synthetic oligonucleotide
ucauucaagggcuguagag

SEQ ID NO: 3047469 - RNA, 19 nt, Artificial Sequence
  Description of Artificial Sequence: Synthetic oligonucleotide
ucauucuucaagcacuuuc

SEQ ID NO: 3047470 - RNA, 19 nt, Artificial Sequence
  Description of Artificial Sequence: Synthetic oligonucleotide
aucggaaagccucuuucgc

SEQ ID NO: 3047471 - RNA, 19 nt, Artificial Sequence
  Description of Artificial Sequence: Synthetic oligonucleotide
ucuucaagcacuuucucau

SEQ ID NO: 3047472 - RNA, 19 nt, Artificial Sequence
  Description of Artificial Sequence: Synthetic oligonucleotide
uggaagaucggaaagccuc

SEQ ID NO: 3047473 - RNA, 19 nt, Artificial Sequence
  Description of Artificial Sequence: Synthetic oligonucleotide
aagaucguugcaaugacca

SEQ ID NO: 3047474 - RNA, 19 nt, Artificial Sequence
  Description of Artificial Sequence: Synthetic oligonucleotide
uaagcaaguuaaucaaggc

SEQ ID NO: 3047475 - RNA, 19 nt, Artificial Sequence
  Description of Artificial Sequence: Synthetic oligonucleotide
guggagacaagucaggaug

SEQ ID NO: 3047476 - RNA, 19 nt, Artificial Sequence
  Description of Artificial Sequence: Synthetic oligonucleotide
gaucggaaagccucuuucg

SEQ ID NO: 3047477 - RNA, 19 nt, Artificial Sequence
  Description of Artificial Sequence: Synthetic oligonucleotide
agaucggaaagccucuuuc

SEQ ID NO: 3047478 - RNA, 19 nt, Artificial Sequence
  Description of Artificial Sequence: Synthetic oligonucleotide
uuuuccagcuaccagccgu

SEQ ID NO: 3047479 - RNA, 19 nt, Artificial Sequence
  Description of Artificial Sequence: Synthetic oligonucleotide
cuuaagcaaguuaaucaag

SEQ ID NO: 3047480 - RNA, 19 nt, Artificial Sequence
  Description of Artificial Sequence: Synthetic oligonucleotide
aaucaaggcguugcauucc

SEQ ID NO: 3047481 - RNA, 19 nt, Artificial Sequence
  Description of Artificial Sequence: Synthetic oligonucleotide
auggcaauaccaugcuccc

SEQ ID NO: 3047482 - RNA, 19 nt, Artificial Sequence
  Description of Artificial Sequence: Synthetic oligonucleotide
agcaaguuaaucaaggcgu

SEQ ID NO: 3047483 - RNA, 19 nt, Artificial Sequence
  Description of Artificial Sequence: Synthetic oligonucleotide
uuaaucaaggcguugcauu

SEQ ID NO: 3047484 - RNA, 19 nt, Artificial Sequence
  Description of Artificial Sequence: Synthetic oligonucleotide
ucgcauggcaauaccaugc

SEQ ID NO: 3047485 - RNA, 19 nt, Artificial Sequence
  Description of Artificial Sequence: Synthetic oligonucleotide
ucuguguacucauucuuca

SEQ ID NO: 3047486 - RNA, 19 nt, Artificial Sequence
  Description of Artificial Sequence: Synthetic oligonucleotide
gaaagccucuuucgcaugg

SEQ ID NO: 3047487 - RNA, 19 nt, Artificial Sequence
  Description of Artificial Sequence: Synthetic oligonucleotide
gugacauuccuuaagcaag

SEQ ID NO: 3047488 - RNA, 19 nt, Artificial Sequence
  Description of Artificial Sequence: Synthetic oligonucleotide
ucuggaagaucggaaagcc

SEQ ID NO: 3047489 - RNA, 19 nt, Artificial Sequence
  Description of Artificial Sequence: Synthetic oligonucleotide
uguacucauucuucaagca

SEQ ID NO: 3047490 - RNA, 19 nt, Artificial Sequence
  Description of Artificial Sequence: Synthetic oligonucleotide
caguaaaccuauuuuccag

SEQ ID NO: 3047491 - RNA, 19 nt, Artificial Sequence
  Description of Artificial Sequence: Synthetic oligonucleotide
aaggcguugcauuccucgg

SEQ ID NO: 3047492 - RNA, 19 nt, Artificial Sequence
  Description of Artificial Sequence: Synthetic oligonucleotide
ggucacuuuucauucaagg

SEQ ID NO: 3047493 - RNA, 19 nt, Artificial Sequence
  Description of Artificial Sequence: Synthetic oligonucleotide
uuuuccagcuuccucugga

SEQ ID NO: 3047494 - RNA, 19 nt, Artificial Sequence
  Description of Artificial Sequence: Synthetic oligonucleotide
uuucagaauguugugauuu

SEQ ID NO: 3047495 - RNA, 19 nt, Artificial Sequence
  Description of Artificial Sequence: Synthetic oligonucleotide
guguacucauucuucaagc

SEQ ID NO: 3047496 - RNA, 19 nt, Artificial Sequence
  Description of Artificial Sequence: Synthetic oligonucleotide
gucaggaugcaucuuuuag

SEQ ID NO: 3047497 - RNA, 19 nt, Artificial Sequence
  Description of Artificial Sequence: Synthetic oligonucleotide
aagcacuuucucauuuccc

SEQ ID NO: 3047498 - RNA, 19 nt, Artificial Sequence
  Description of Artificial Sequence: Synthetic oligonucleotide
ucaagaucguugcaaugac

SEQ ID NO: 3047499 - RNA, 19 nt, Artificial Sequence
  Description of Artificial Sequence: Synthetic oligonucleotide
uggagacaagucaggaugc

SEQ ID NO: 3047500 - RNA, 19 nt, Artificial Sequence
  Description of Artificial Sequence: Synthetic oligonucleotide
ucaagggcuguagagacca

SEQ ID NO: 3047501 - RNA, 19 nt, Artificial Sequence
  Description of Artificial Sequence: Synthetic oligonucleotide
caugggucacuuuucauuc

SEQ ID NO: 3047502 - RNA, 19 nt, Artificial Sequence
  Description of Artificial Sequence: Synthetic oligonucleotide
uaaucaaggcguugcauuc

SEQ ID NO: 3047503 - RNA, 19 nt, Artificial Sequence
  Description of Artificial Sequence: Synthetic oligonucleotide
uuucauucaagggcuguag

SEQ ID NO: 3047504 - RNA, 19 nt, Artificial Sequence
  Description of Artificial Sequence: Synthetic oligonucleotide
aaccuauuuuccagcuucc

SEQ ID NO: 3047505 - RNA, 19 nt, Artificial Sequence
  Description of Artificial Sequence: Synthetic oligonucleotide
uucccggucaagaucguug

SEQ ID NO: 3047506 - RNA, 19 nt, Artificial Sequence
  Description of Artificial Sequence: Synthetic oligonucleotide
cuucaggucucccagucag

SEQ ID NO: 3047507 - RNA, 19 nt, Artificial Sequence
  Description of Artificial Sequence: Synthetic oligonucleotide
uuucgcauggcaauaccau

SEQ ID NO: 3047508 - RNA, 19 nt, Artificial Sequence
  Description of Artificial Sequence: Synthetic oligonucleotide
ugacauuccuuaagcaagu

SEQ ID NO: 3047509 - RNA, 19 nt, Artificial Sequence
  Description of Artificial Sequence: Synthetic oligonucleotide
agacaagucaggaugcauc

SEQ ID NO: 3047510 - RNA, 19 nt, Artificial Sequence
  Description of Artificial Sequence: Synthetic oligonucleotide
ugugcaaguguggagacaa

SEQ ID NO: 3047511 - RNA, 19 nt, Artificial Sequence
  Description of Artificial Sequence: Synthetic oligonucleotide
ucaggucucccagucaggg

SEQ ID NO: 3047512 - RNA, 19 nt, Artificial Sequence
  Description of Artificial Sequence: Synthetic oligonucleotide
uccagcuuccucuggaaga

SEQ ID NO: 3047513 - RNA, 19 nt, Artificial Sequence
  Description of Artificial Sequence: Synthetic oligonucleotide
ucaugggucacuuuucauu

SEQ ID NO: 3047514 - RNA, 19 nt, Artificial Sequence
  Description of Artificial Sequence: Synthetic oligonucleotide
uucauucaagggcuguaga

SEQ ID NO: 3047515 - RNA, 19 nt, Artificial Sequence
  Description of Artificial Sequence: Synthetic oligonucleotide
caagcacuuucucauuucc

SEQ ID NO: 3047516 - RNA, 19 nt, Artificial Sequence
  Description of Artificial Sequence: Synthetic oligonucleotide
uccucggugugcaagugug

SEQ ID NO: 3047517 - RNA, 19 nt, Artificial Sequence
  Description of Artificial Sequence: Synthetic oligonucleotide
ucucauuucccggucaaga

SEQ ID NO: 3047518 - RNA, 19 nt, Artificial Sequence
  Description of Artificial Sequence: Synthetic oligonucleotide
uauuuuccagcuuccucug

SEQ ID NO: 3047519 - RNA, 19 nt, Artificial Sequence
  Description of Artificial Sequence: Synthetic oligonucleotide
ucauuucccggucaagauc

SEQ ID NO: 3047520 - RNA, 19 nt, Artificial Sequence
  Description of Artificial Sequence: Synthetic oligonucleotide
ucuuucgcauggcaauacc

SEQ ID NO: 3047521 - RNA, 19 nt, Artificial Sequence
  Description of Artificial Sequence: Synthetic oligonucleotide
uucgcauggcaauaccaug

SEQ ID NO: 3047522 - RNA, 19 nt, Artificial Sequence
  Description of Artificial Sequence: Synthetic oligonucleotide
uugugacauuccuuaagca

SEQ ID NO: 3047523 - RNA, 19 nt, Artificial Sequence
  Description of Artificial Sequence: Synthetic oligonucleotide
aggucucccagucagggca

SEQ ID NO: 3047524 - RNA, 19 nt, Artificial Sequence
  Description of Artificial Sequence: Synthetic oligonucleotide
ucggaaagccucuuucgca

SEQ ID NO: 3047525 - RNA, 19 nt, Artificial Sequence
  Description of Artificial Sequence: Synthetic oligonucleotide
guacucauucuucaagcac

SEQ ID NO: 3047526 - RNA, 19 nt, Artificial Sequence
  Description of Artificial Sequence: Synthetic oligonucleotide
caagaucguugcaaugacc

SEQ ID NO: 3047527 - RNA, 19 nt, Artificial Sequence
  Description of Artificial Sequence: Synthetic oligonucleotide
aguuaaucaaggcguugca

SEQ ID NO: 3047528 - RNA, 19 nt, Artificial Sequence
  Description of Artificial Sequence: Synthetic oligonucleotide
cuauuuuccagcuuccucu

SEQ ID NO: 3047529 - RNA, 19 nt, Artificial Sequence
  Description of Artificial Sequence: Synthetic oligonucleotide
ucuucaugggucacuuuuc

SEQ ID NO: 3047530 - RNA, 19 nt, Artificial Sequence
  Description of Artificial Sequence: Synthetic oligonucleotide
uucaagcacuuucucauuu

SEQ ID NO: 3047531 - RNA, 19 nt, Artificial Sequence
  Description of Artificial Sequence: Synthetic oligonucleotide
agucagggcauccaguaaa

SEQ ID NO: 3047532 - RNA, 19 nt, Artificial Sequence
  Description of Artificial Sequence: Synthetic oligonucleotide
caggaugcaucuuuuagga

SEQ ID NO: 3047533 - RNA, 19 nt, Artificial Sequence
  Description of Artificial Sequence: Synthetic oligonucleotide
uucagcucuucauggguca

SEQ ID NO: 3047534 - RNA, 19 nt, Artificial Sequence
  Description of Artificial Sequence: Synthetic oligonucleotide
gucaagaucguugcaauga

SEQ ID NO: 3047535 - RNA, 19 nt, Artificial Sequence
  Description of Artificial Sequence: Synthetic oligonucleotide
agcuuccucuggaagaucg

SEQ ID NO: 3047536 - RNA, 19 nt, Artificial Sequence
  Description of Artificial Sequence: Synthetic oligonucleotide
ggcaauaccaugcucccug

SEQ ID NO: 3047537 - RNA, 19 nt, Artificial Sequence
  Description of Artificial Sequence: Synthetic oligonucleotide
uuucucauuucccggucaa

SEQ ID NO: 3047538 - RNA, 19 nt, Artificial Sequence
  Description of Artificial Sequence: Synthetic oligonucleotide
ucucuguguacucauucuu

SEQ ID NO: 3047539 - RNA, 19 nt, Artificial Sequence
  Description of Artificial Sequence: Synthetic oligonucleotide
cucuguguacucauucuuc

SEQ ID NO: 3047540 - RNA, 19 nt, Artificial Sequence
  Description of Artificial Sequence: Synthetic oligonucleotide
uccucuggaagaucggaaa

SEQ ID NO: 3047541 - RNA, 19 nt, Artificial Sequence
  Description of Artificial Sequence: Synthetic oligonucleotide
uucaggucucccagucagg

SEQ ID NO: 3047542 - RNA, 19 nt, Artificial Sequence
  Description of Artificial Sequence: Synthetic oligonucleotide
ugcucccugcuccuggucc

SEQ ID NO: 3047543 - RNA, 19 nt, Artificial Sequence
  Description of Artificial Sequence: Synthetic oligonucleotide
uucaagggcuguagagacc

SEQ ID NO: 3047544 - RNA, 19 nt, Artificial Sequence
  Description of Artificial Sequence: Synthetic oligonucleotide
ucaagcacuuucucauuuc

SEQ ID NO: 3047545 - RNA, 19 nt, Artificial Sequence
  Description of Artificial Sequence: Synthetic oligonucleotide
uguggagacaagucaggau

SEQ ID NO: 3047546 - RNA, 19 nt, Artificial Sequence
  Description of Artificial Sequence: Synthetic oligonucleotide
cucuggaagaucggaaagc

SEQ ID NO: 3047547 - RNA, 19 nt, Artificial Sequence
  Description of Artificial Sequence: Synthetic oligonucleotide
ugggucacuuuucauucaa

SEQ ID NO: 3047548 - RNA, 19 nt, Artificial Sequence
  Description of Artificial Sequence: Synthetic oligonucleotide
ucccggucaagaucguugc

SEQ ID NO: 3047549 - RNA, 19 nt, Artificial Sequence
  Description of Artificial Sequence: Synthetic oligonucleotide
ucuucaggucucccaguca

SEQ ID NO: 3047550 - RNA, 19 nt, Artificial Sequence
  Description of Artificial Sequence: Synthetic oligonucleotide
aguguggagacaagucagg

SEQ ID NO: 3047551 - RNA, 19 nt, Artificial Sequence
  Description of Artificial Sequence: Synthetic oligonucleotide
cuuucgcauggcaauacca

SEQ ID NO: 3047552 - RNA, 19 nt, Artificial Sequence
  Description of Artificial Sequence: Synthetic oligonucleotide
gacaagucaggaugcaucu

SEQ ID NO: 3047553 - RNA, 19 nt, Artificial Sequence
  Description of Artificial Sequence: Synthetic oligonucleotide
aggaugcaucuuuuaggag

SEQ ID NO: 3047554 - RNA, 19 nt, Artificial Sequence
  Description of Artificial Sequence: Synthetic oligonucleotide
uaaaccuauuuuccagcuu

SEQ ID NO: 3047555 - RNA, 19 nt, Artificial Sequence
  Description of Artificial Sequence: Synthetic oligonucleotide
uuuccagcuaccagccguc

SEQ ID NO: 3047556 - RNA, 19 nt, Artificial Sequence
  Description of Artificial Sequence: Synthetic oligonucleotide
aagccucuuucgcauggca

SEQ ID NO: 3047557 - RNA, 19 nt, Artificial Sequence
  Description of Artificial Sequence: Synthetic oligonucleotide
uuccucuggaagaucggaa

SEQ ID NO: 3047558 - RNA, 19 nt, Artificial Sequence
  Description of Artificial Sequence: Synthetic oligonucleotide
gaucguugcaaugaccaaa

SEQ ID NO: 3047559 - RNA, 19 nt, Artificial Sequence
  Description of Artificial Sequence: Synthetic oligonucleotide
acauuccuuaagcaaguua

SEQ ID NO: 3047560 - RNA, 19 nt, Artificial Sequence
  Description of Artificial Sequence: Synthetic oligonucleotide
ucggugugcaaguguggag

SEQ ID NO: 3047561 - RNA, 19 nt, Artificial Sequence
  Description of Artificial Sequence: Synthetic oligonucleotide
aucaaggcguugcauuccu

SEQ ID NO: 3047562 - RNA, 19 nt, Artificial Sequence
  Description of Artificial Sequence: Synthetic oligonucleotide
uucagaauguugugauuuu

SEQ ID NO: 3047563 - RNA, 19 nt, Artificial Sequence
  Description of Artificial Sequence: Synthetic oligonucleotide
aagaucggaaagccucuuu

SEQ ID NO: 3047564 - RNA, 19 nt, Artificial Sequence
  Description of Artificial Sequence: Synthetic oligonucleotide
gcuaccagccgucuucagg

SEQ ID NO: 3047565 - RNA, 19 nt, Artificial Sequence
  Description of Artificial Sequence: Synthetic oligonucleotide
ugguccuccucucugugua

SEQ ID NO: 3047566 - RNA, 19 nt, Artificial Sequence
  Description of Artificial Sequence: Synthetic oligonucleotide
auuucagaauguugugauu

SEQ ID NO: 3047567 - RNA, 19 nt, Artificial Sequence
  Description of Artificial Sequence: Synthetic oligonucleotide
cauucaagggcuguagaga

SEQ ID NO: 3047568 - RNA, 19 nt, Artificial Sequence
  Description of Artificial Sequence: Synthetic oligonucleotide
guugcauuccucggugugc

SEQ ID NO: 3047569 - RNA, 19 nt, Artificial Sequence
  Description of Artificial Sequence: Synthetic oligonucleotide
gcacuuucucauuucccgg

SEQ ID NO: 3047570 - RNA, 19 nt, Artificial Sequence
  Description of Artificial Sequence: Synthetic oligonucleotide
uugcauuccucggugugca

SEQ ID NO: 3047571 - RNA, 19 nt, Artificial Sequence
  Description of Artificial Sequence: Synthetic oligonucleotide
guaaaccuauuuuccagcu

SEQ ID NO: 3047572 - RNA, 19 nt, Artificial Sequence
  Description of Artificial Sequence: Synthetic oligonucleotide
uuuccagcuuccucuggaa

SEQ ID NO: 3047573 - RNA, 19 nt, Artificial Sequence
  Description of Artificial Sequence: Synthetic oligonucleotide
caaguuaaucaaggcguug

SEQ ID NO: 3047574 - RNA, 19 nt, Artificial Sequence
  Description of Artificial Sequence: Synthetic oligonucleotide
cuucaugggucacuuuuca

SEQ ID NO: 3047575 - RNA, 19 nt, Artificial Sequence
  Description of Artificial Sequence: Synthetic oligonucleotide
uucucauuucccggucaag

SEQ ID NO: 3047576 - RNA, 19 nt, Artificial Sequence
  Description of Artificial Sequence: Synthetic oligonucleotide
uuccucggugugcaagugu

SEQ ID NO: 3047577 - RNA, 19 nt, Artificial Sequence
  Description of Artificial Sequence: Synthetic oligonucleotide
uucaugggucacuuuucau

SEQ ID NO: 3047578 - RNA, 19 nt, Artificial Sequence
  Description of Artificial Sequence: Synthetic oligonucleotide
ucagggcauccaguaaacc

SEQ ID NO: 3047579 - RNA, 19 nt, Artificial Sequence
  Description of Artificial Sequence: Synthetic oligonucleotide
gucuucaggucucccaguc

SEQ ID NO: 3047580 - RNA, 19 nt, Artificial Sequence
  Description of Artificial Sequence: Synthetic oligonucleotide
aucguugcaaugaccaaaa

SEQ ID NO: 3047581 - RNA, 19 nt, Artificial Sequence
  Description of Artificial Sequence: Synthetic oligonucleotide
cuaccagccgucuucaggu

SEQ ID NO: 3047582 - RNA, 19 nt, Artificial Sequence
  Description of Artificial Sequence: Synthetic oligonucleotide
ccuuaagcaaguuaaucaa

SEQ ID NO: 3047583 - RNA, 19 nt, Artificial Sequence
  Description of Artificial Sequence: Synthetic oligonucleotide
aagggcuguagagaccaaa

SEQ ID NO: 3047584 - RNA, 19 nt, Artificial Sequence
  Description of Artificial Sequence: Synthetic oligonucleotide
agaucguugcaaugaccaa

SEQ ID NO: 3047585 - RNA, 19 nt, Artificial Sequence
  Description of Artificial Sequence: Synthetic oligonucleotide
accagccgucuucaggucu

SEQ ID NO: 3047586 - RNA, 19 nt, Artificial Sequence
  Description of Artificial Sequence: Synthetic oligonucleotide
ggucaagaucguugcaaug

SEQ ID NO: 3047587 - RNA, 19 nt, Artificial Sequence
  Description of Artificial Sequence: Synthetic oligonucleotide
cuuucucauuucccgguca

SEQ ID NO: 3047588 - RNA, 19 nt, Artificial Sequence
  Description of Artificial Sequence: Synthetic oligonucleotide
aggcguugcauuccucggu

SEQ ID NO: 3047589 - RNA, 19 nt, Artificial Sequence
  Description of Artificial Sequence: Synthetic oligonucleotide
uccugguccuccucucugu

SEQ ID NO: 3047590 - RNA, 19 nt, Artificial Sequence
  Description of Artificial Sequence: Synthetic oligonucleotide
agggcauccaguaaaccua

SEQ ID NO: 3047591 - RNA, 19 nt, Artificial Sequence
  Description of Artificial Sequence: Synthetic oligonucleotide
cucuuucgcauggcaauac

SEQ ID NO: 3047592 - RNA, 19 nt, Artificial Sequence
  Description of Artificial Sequence: Synthetic oligonucleotide
cagggcauccaguaaaccu

SEQ ID NO: 3047593 - RNA, 19 nt, Artificial Sequence
  Description of Artificial Sequence: Synthetic oligonucleotide
ccuauuuuccagcuuccuc

SEQ ID NO: 3047594 - RNA, 19 nt, Artificial Sequence
  Description of Artificial Sequence: Synthetic oligonucleotide
agucaggaugcaucuuuua

SEQ ID NO: 3047595 - RNA, 19 nt, Artificial Sequence
  Description of Artificial Sequence: Synthetic oligonucleotide
guucagcucuucauggguc

SEQ ID NO: 3047596 - RNA, 19 nt, Artificial Sequence
  Description of Artificial Sequence: Synthetic oligonucleotide
ggcguugcauuccucggug

SEQ ID NO: 3047597 - RNA, 19 nt, Artificial Sequence
  Description of Artificial Sequence: Synthetic oligonucleotide
ccaguaaaccuauuuucca

SEQ ID NO: 3047598 - RNA, 19 nt, Artificial Sequence
  Description of Artificial Sequence: Synthetic oligonucleotide
acuuuucauucaagggcug

SEQ ID NO: 3047599 - RNA, 19 nt, Artificial Sequence
  Description of Artificial Sequence: Synthetic oligonucleotide
ccucuggaagaucggaaag

SEQ ID NO: 3047600 - RNA, 19 nt, Artificial Sequence
  Description of Artificial Sequence: Synthetic oligonucleotide
caggucucccagucagggc

SEQ ID NO: 3047601 - RNA, 19 nt, Artificial Sequence
  Description of Artificial Sequence: Synthetic oligonucleotide
cauccaguaaaccuauuuu

SEQ ID NO: 3047602 - RNA, 19 nt, Artificial Sequence
  Description of Artificial Sequence: Synthetic oligonucleotide
ucucccagucagggcaucc

SEQ ID NO: 3047603 - RNA, 19 nt, Artificial Sequence
  Description of Artificial Sequence: Synthetic oligonucleotide
ucaaggcguugcauuccuc

SEQ ID NO: 3047604 - RNA, 19 nt, Artificial Sequence
  Description of Artificial Sequence: Synthetic oligonucleotide
uaccaugcucccugcuccu

SEQ ID NO: 3047605 - RNA, 19 nt, Artificial Sequence
  Description of Artificial Sequence: Synthetic oligonucleotide
ggugugcaaguguggagac

SEQ ID NO: 3047606 - RNA, 19 nt, Artificial Sequence
  Description of Artificial Sequence: Synthetic oligonucleotide
accuauuuuccagcuuccu

SEQ ID NO: 3047607 - RNA, 19 nt, Artificial Sequence
  Description of Artificial Sequence: Synthetic oligonucleotide
gucagggcauccaguaaac

SEQ ID NO: 3047608 - RNA, 19 nt, Artificial Sequence
  Description of Artificial Sequence: Synthetic oligonucleotide
cuccugguccuccucucug

SEQ ID NO: 3047609 - RNA, 19 nt, Artificial Sequence
  Description of Artificial Sequence: Synthetic oligonucleotide
agggcuguagagaccaaaa

SEQ ID NO: 3047610 - RNA, 19 nt, Artificial Sequence
  Description of Artificial Sequence: Synthetic oligonucleotide
guguggagacaagucagga

SEQ ID NO: 3047611 - RNA, 19 nt, Artificial Sequence
  Description of Artificial Sequence: Synthetic oligonucleotide
ucagcucuucaugggucac

SEQ ID NO: 3047612 - RNA, 19 nt, Artificial Sequence
  Description of Artificial Sequence: Synthetic oligonucleotide
uccuccucucuguguacuc

SEQ ID NO: 3047613 - RNA, 19 nt, Artificial Sequence
  Description of Artificial Sequence: Synthetic oligonucleotide
ggaaagccucuuucgcaug

SEQ ID NO: 3047614 - RNA, 19 nt, Artificial Sequence
  Description of Artificial Sequence: Synthetic oligonucleotide
cuuccucuggaagaucgga

SEQ ID NO: 3047615 - RNA, 19 nt, Artificial Sequence
  Description of Artificial Sequence: Synthetic oligonucleotide
ccagcuaccagccgucuuc

SEQ ID NO: 3047616 - RNA, 19 nt, Artificial Sequence
  Description of Artificial Sequence: Synthetic oligonucleotide
augcucccugcuccugguc

SEQ ID NO: 3047617 - RNA, 19 nt, Artificial Sequence
  Description of Artificial Sequence: Synthetic oligonucleotide
auuccucggugugcaagug

SEQ ID NO: 3047618 - RNA, 19 nt, Artificial Sequence
  Description of Artificial Sequence: Synthetic oligonucleotide
cuguguacucauucuucaa

SEQ ID NO: 3047619 - RNA, 19 nt, Artificial Sequence
  Description of Artificial Sequence: Synthetic oligonucleotide
gcaauaccaugcucccugc

SEQ ID NO: 3047620 - RNA, 19 nt, Artificial Sequence
  Description of Artificial Sequence: Synthetic oligonucleotide
caagucaggaugcaucuuu

SEQ ID NO: 3047621 - RNA, 19 nt, Artificial Sequence
  Description of Artificial Sequence: Synthetic oligonucleotide
cucggugugcaagugugga

SEQ ID NO: 3047622 - RNA, 19 nt, Artificial Sequence
  Description of Artificial Sequence: Synthetic oligonucleotide
acucauucuucaagcacuu

SEQ ID NO: 3047623 - RNA, 19 nt, Artificial Sequence
  Description of Artificial Sequence: Synthetic oligonucleotide
agcucuucaugggucacuu

SEQ ID NO: 3047624 - RNA, 19 nt, Artificial Sequence
  Description of Artificial Sequence: Synthetic oligonucleotide
ccucucuguguacucauuc

SEQ ID NO: 3047625 - RNA, 19 nt, Artificial Sequence
  Description of Artificial Sequence: Synthetic oligonucleotide
uccagcuaccagccgucuu

SEQ ID NO: 3047626 - RNA, 19 nt, Artificial Sequence
  Description of Artificial Sequence: Synthetic oligonucleotide
cacuuucucauuucccggu

SEQ ID NO: 3047627 - RNA, 19 nt, Artificial Sequence
  Description of Artificial Sequence: Synthetic oligonucleotide
ugcuccugguccuccucuc

SEQ ID NO: 3047628 - RNA, 19 nt, Artificial Sequence
  Description of Artificial Sequence: Synthetic oligonucleotide
ccgucuucaggucucccag

SEQ ID NO: 3047629 - RNA, 19 nt, Artificial Sequence
  Description of Artificial Sequence: Synthetic oligonucleotide
guuaaucaaggcguugcau

SEQ ID NO: 3047630 - RNA, 19 nt, Artificial Sequence
  Description of Artificial Sequence: Synthetic oligonucleotide
uggcaauaccaugcucccu

SEQ ID NO: 3047631 - RNA, 19 nt, Artificial Sequence
  Description of Artificial Sequence: Synthetic oligonucleotide
agcuaccagccgucuucag

SEQ ID NO: 3047632 - RNA, 19 nt, Artificial Sequence
  Description of Artificial Sequence: Synthetic oligonucleotide
cauuccucggugugcaagu

SEQ ID NO: 3047633 - RNA, 19 nt, Artificial Sequence
  Description of Artificial Sequence: Synthetic oligonucleotide
agccgucuucaggucuccc

SEQ ID NO: 3047634 - RNA, 19 nt, Artificial Sequence
  Description of Artificial Sequence: Synthetic oligonucleotide
cucauuucccggucaagau

SEQ ID NO: 3047635 - RNA, 19 nt, Artificial Sequence
  Description of Artificial Sequence: Synthetic oligonucleotide
agccucuuucgcauggcaa

SEQ ID NO: 3047636 - RNA, 19 nt, Artificial Sequence
  Description of Artificial Sequence: Synthetic oligonucleotide
ccaugcucccugcuccugg

SEQ ID NO: 3047637 - RNA, 19 nt, Artificial Sequence
  Description of Artificial Sequence: Synthetic oligonucleotide
uaccagccgucuucagguc

SEQ ID NO: 3047638 - RNA, 19 nt, Artificial Sequence
  Description of Artificial Sequence: Synthetic oligonucleotide
cuuuucauucaagggcugu

SEQ ID NO: 3047639 - RNA, 19 nt, Artificial Sequence
  Description of Artificial Sequence: Synthetic oligonucleotide
gggucacuuuucauucaag

SEQ ID NO: 3047640 - RNA, 19 nt, Artificial Sequence
  Description of Artificial Sequence: Synthetic oligonucleotide
gcuuccucuggaagaucgg

SEQ ID NO: 3047641 - RNA, 19 nt, Artificial Sequence
  Description of Artificial Sequence: Synthetic oligonucleotide
cuggaagaucggaaagccu

SEQ ID NO: 3047642 - RNA, 19 nt, Artificial Sequence
  Description of Artificial Sequence: Synthetic oligonucleotide
uuucccggucaagaucguu

SEQ ID NO: 3047643 - RNA, 19 nt, Artificial Sequence
  Description of Artificial Sequence: Synthetic oligonucleotide
ugcauuccucggugugcaa

SEQ ID NO: 3047644 - RNA, 19 nt, Artificial Sequence
  Description of Artificial Sequence: Synthetic oligonucleotide
uuccagcuaccagccgucu

SEQ ID NO: 3047645 - RNA, 19 nt, Artificial Sequence
  Description of Artificial Sequence: Synthetic oligonucleotide
gagacaagucaggaugcau

SEQ ID NO: 3047646 - RNA, 19 nt, Artificial Sequence
  Description of Artificial Sequence: Synthetic oligonucleotide
ccucggugugcaagugugg

SEQ ID NO: 3047647 - RNA, 19 nt, Artificial Sequence
  Description of Artificial Sequence: Synthetic oligonucleotide
gugcaaguguggagacaag

SEQ ID NO: 3047648 - RNA, 19 nt, Artificial Sequence
  Description of Artificial Sequence: Synthetic oligonucleotide
acaagucaggaugcaucuu

SEQ ID NO: 3047649 - RNA, 19 nt, Artificial Sequence
  Description of Artificial Sequence: Synthetic oligonucleotide
gcauccaguaaaccuauuu

SEQ ID NO: 3047650 - RNA, 19 nt, Artificial Sequence
  Description of Artificial Sequence: Synthetic oligonucleotide
gcauggcaauaccaugcuc

SEQ ID NO: 3047651 - RNA, 19 nt, Artificial Sequence
  Description of Artificial Sequence: Synthetic oligonucleotide
gccgucuucaggucuccca

SEQ ID NO: 3047652 - RNA, 19 nt, Artificial Sequence
  Description of Artificial Sequence: Synthetic oligonucleotide
accaugcucccugcuccug

SEQ ID NO: 3047653 - RNA, 19 nt, Artificial Sequence
  Description of Artificial Sequence: Synthetic oligonucleotide
ggagacaagucaggaugca

SEQ ID NO: 3047654 - RNA, 19 nt, Artificial Sequence
  Description of Artificial Sequence: Synthetic oligonucleotide
cguugcauuccucggugug

SEQ ID NO: 3047655 - RNA, 19 nt, Artificial Sequence
  Description of Artificial Sequence: Synthetic oligonucleotide
gugugcaaguguggagaca

SEQ ID NO: 3047656 - RNA, 19 nt, Artificial Sequence
  Description of Artificial Sequence: Synthetic oligonucleotide
ccagccgucuucaggucuc

SEQ ID NO: 3047657 - RNA, 19 nt, Artificial Sequence
  Description of Artificial Sequence: Synthetic oligonucleotide
cagucagggcauccaguaa

SEQ ID NO: 3047658 - RNA, 19 nt, Artificial Sequence
  Description of Artificial Sequence: Synthetic oligonucleotide
gguccuccucucuguguac

SEQ ID NO: 3047659 - RNA, 19 nt, Artificial Sequence
  Description of Artificial Sequence: Synthetic oligonucleotide
ggaagaucggaaagccucu

SEQ ID NO: 3047660 - RNA, 19 nt, Artificial Sequence
  Description of Artificial Sequence: Synthetic oligonucleotide
cuucaagcacuuucucauu

SEQ ID NO: 3047661 - RNA, 19 nt, Artificial Sequence
  Description of Artificial Sequence: Synthetic oligonucleotide
gccucuuucgcauggcaau

SEQ ID NO: 3047662 - RNA, 19 nt, Artificial Sequence
  Description of Artificial Sequence: Synthetic oligonucleotide
auuucccggucaagaucgu

SEQ ID NO: 3047663 - RNA, 19 nt, Artificial Sequence
  Description of Artificial Sequence: Synthetic oligonucleotide
cagccgucuucaggucucc

SEQ ID NO: 3047664 - RNA, 19 nt, Artificial Sequence
  Description of Artificial Sequence: Synthetic oligonucleotide
ccugguccuccucucugug

SEQ ID NO: 3047665 - RNA, 19 nt, Artificial Sequence
  Description of Artificial Sequence: Synthetic oligonucleotide
gaagaucggaaagccucuu

SEQ ID NO: 3047666 - RNA, 19 nt, Artificial Sequence
  Description of Artificial Sequence: Synthetic oligonucleotide
cagcuaccagccgucuuca

SEQ ID NO: 3047667 - RNA, 19 nt, Artificial Sequence
  Description of Artificial Sequence: Synthetic oligonucleotide
caauaccaugcucccugcu

SEQ ID NO: 3047668 - RNA, 19 nt, Artificial Sequence
  Description of Artificial Sequence: Synthetic oligonucleotide
gacauuccuuaagcaaguu

SEQ ID NO: 3047669 - RNA, 19 nt, Artificial Sequence
  Description of Artificial Sequence: Synthetic oligonucleotide
caugcucccugcuccuggu

SEQ ID NO: 3047670 - RNA, 19 nt, Artificial Sequence
  Description of Artificial Sequence: Synthetic oligonucleotide
cugguccuccucucugugu

SEQ ID NO: 3047671 - RNA, 19 nt, Artificial Sequence
  Description of Artificial Sequence: Synthetic oligonucleotide
cagcuuccucuggaagauc

SEQ ID NO: 3047672 - RNA, 19 nt, Artificial Sequence
  Description of Artificial Sequence: Synthetic oligonucleotide
ccggucaagaucguugcaa

SEQ ID NO: 3047673 - RNA, 19 nt, Artificial Sequence
  Description of Artificial Sequence: Synthetic oligonucleotide
cggugugcaaguguggaga

SEQ ID NO: 3047674 - RNA, 19 nt, Artificial Sequence
  Description of Artificial Sequence: Synthetic oligonucleotide
guccuccucucuguguacu

SEQ ID NO: 3047675 - RNA, 19 nt, Artificial Sequence
  Description of Artificial Sequence: Synthetic oligonucleotide
gcaaguuaaucaaggcguu

SEQ ID NO: 3047676 - RNA, 19 nt, Artificial Sequence
  Description of Artificial Sequence: Synthetic oligonucleotide
caagggcuguagagaccaa

SEQ ID NO: 3047677 - RNA, 19 nt, Artificial Sequence
  Description of Artificial Sequence: Synthetic oligonucleotide
cucccugcuccugguccuc

SEQ ID NO: 3047678 - RNA, 19 nt, Artificial Sequence
  Description of Artificial Sequence: Synthetic oligonucleotide
gucucccagucagggcauc

SEQ ID NO: 3047679 - RNA, 19 nt, Artificial Sequence
  Description of Artificial Sequence: Synthetic oligonucleotide
ccuccucucuguguacuca

SEQ ID NO: 3047680 - RNA, 19 nt, Artificial Sequence
  Description of Artificial Sequence: Synthetic oligonucleotide
cagcucuucaugggucacu

SEQ ID NO: 3047681 - RNA, 19 nt, Artificial Sequence
  Description of Artificial Sequence: Synthetic oligonucleotide
cggaaagccucuuucgcau

SEQ ID NO: 3047682 - RNA, 19 nt, Artificial Sequence
  Description of Artificial Sequence: Synthetic oligonucleotide
gggcauccaguaaaccuau

SEQ ID NO: 3047683 - RNA, 19 nt, Artificial Sequence
  Description of Artificial Sequence: Synthetic oligonucleotide
gcuccugguccuccucucu

SEQ ID NO: 3047684 - RNA, 19 nt, Artificial Sequence
  Description of Artificial Sequence: Synthetic oligonucleotide
ccucuuucgcauggcaaua

SEQ ID NO: 3047685 - RNA, 19 nt, Artificial Sequence
  Description of Artificial Sequence: Synthetic oligonucleotide
gcguugcauuccucggugu

SEQ ID NO: 3047686 - RNA, 19 nt, Artificial Sequence
  Description of Artificial Sequence: Synthetic oligonucleotide
cucauucuucaagcacuuu

SEQ ID NO: 3047687 - RNA, 19 nt, Artificial Sequence
  Description of Artificial Sequence: Synthetic oligonucleotide
ccagcuuccucuggaagau

SEQ ID NO: 3047688 - RNA, 19 nt, Artificial Sequence
  Description of Artificial Sequence: Synthetic oligonucleotide
cccggucaagaucguugca

SEQ ID NO: 3047689 - RNA, 19 nt, Artificial Sequence
  Description of Artificial Sequence: Synthetic oligonucleotide
cggucaagaucguugcaau

SEQ ID NO: 3047690 - RNA, 19 nt, Artificial Sequence
  Description of Artificial Sequence: Synthetic oligonucleotide
cgcauggcaauaccaugcu

SEQ ID NO: 3047691 - RNA, 19 nt, Artificial Sequence
  Description of Artificial Sequence: Synthetic oligonucleotide
ggucucccagucagggcau

SEQ ID NO: 3047692 - RNA, 19 nt, Artificial Sequence
  Description of Artificial Sequence: Synthetic oligonucleotide
gcucuucaugggucacuuu

SEQ ID NO: 3047693 - RNA, 19 nt, Artificial Sequence
  Description of Artificial Sequence: Synthetic oligonucleotide
cgucuucaggucucccagu

SEQ ID NO: 3047694 - RNA, 19 nt, Artificial Sequence
  Description of Artificial Sequence: Synthetic oligonucleotide
ggcauccaguaaaccuauu

SEQ ID NO: 3047695 - RNA, 19 nt, Artificial Sequence
  Description of Artificial Sequence: Synthetic oligonucleotide
aaugucauguuccucaagu

SEQ ID NO: 3047696 - RNA, 19 nt, Artificial Sequence
  Description of Artificial Sequence: Synthetic oligonucleotide
aagaccaaaggacauuuuc

SEQ ID NO: 3047697 - RNA, 19 nt, Artificial Sequence
  Description of Artificial Sequence: Synthetic oligonucleotide
auguuccucaaguagagcg

SEQ ID NO: 3047698 - RNA, 19 nt, Artificial Sequence
  Description of Artificial Sequence: Synthetic oligonucleotide
ugucccaacauagagaaag

SEQ ID NO: 3047699 - RNA, 19 nt, Artificial Sequence
  Description of Artificial Sequence: Synthetic oligonucleotide
aacauagagaaaggggacc

SEQ ID NO: 3047700 - RNA, 19 nt, Artificial Sequence
  Description of Artificial Sequence: Synthetic oligonucleotide
cuugcagcgauccaaaccc

SEQ ID NO: 3047701 - RNA, 19 nt, Artificial Sequence
  Description of Artificial Sequence: Synthetic oligonucleotide
aaaggacauuuucaccggc

SEQ ID NO: 3047702 - RNA, 19 nt, Artificial Sequence
  Description of Artificial Sequence: Synthetic oligonucleotide
ugagugucccaacauagag

SEQ ID NO: 3047703 - RNA, 19 nt, Artificial Sequence
  Description of Artificial Sequence: Synthetic oligonucleotide
aaaucgccaccucucuucc

SEQ ID NO: 3047704 - RNA, 19 nt, Artificial Sequence
  Description of Artificial Sequence: Synthetic oligonucleotide
aaugagugucccaacauag

SEQ ID NO: 3047705 - RNA, 19 nt, Artificial Sequence
  Description of Artificial Sequence: Synthetic oligonucleotide
agagcggcaaaguucuugc

SEQ ID NO: 3047706 - RNA, 19 nt, Artificial Sequence
  Description of Artificial Sequence: Synthetic oligonucleotide
auuuucaccggcuugggca

SEQ ID NO: 3047707 - RNA, 19 nt, Artificial Sequence
  Description of Artificial Sequence: Synthetic oligonucleotide
cugcuaaucgucaucgucg

SEQ ID NO: 3047708 - RNA, 19 nt, Artificial Sequence
  Description of Artificial Sequence: Synthetic oligonucleotide
gagaaaggggaccacaaug

SEQ ID NO: 3047709 - RNA, 19 nt, Artificial Sequence
  Description of Artificial Sequence: Synthetic oligonucleotide
uguuccucaaguagagcgg

SEQ ID NO: 3047710 - RNA, 19 nt, Artificial Sequence
  Description of Artificial Sequence: Synthetic oligonucleotide
gugacgaugacugaccucg

SEQ ID NO: 3047711 - RNA, 19 nt, Artificial Sequence
  Description of Artificial Sequence: Synthetic oligonucleotide
accaaaggacauuuucacc

SEQ ID NO: 3047712 - RNA, 19 nt, Artificial Sequence
  Description of Artificial Sequence: Synthetic oligonucleotide
ccaaaggacauuuucaccg

SEQ ID NO: 3047713 - RNA, 19 nt, Artificial Sequence
  Description of Artificial Sequence: Synthetic oligonucleotide
ucauguuccucaaguagag

SEQ ID NO: 3047714 - RNA, 19 nt, Artificial Sequence
  Description of Artificial Sequence: Synthetic oligonucleotide
aaguagagcggcaaaguuc

SEQ ID NO: 3047715 - RNA, 19 nt, Artificial Sequence
  Description of Artificial Sequence: Synthetic oligonucleotide
gacauuuucaccggcuugg

SEQ ID NO: 3047716 - RNA, 19 nt, Artificial Sequence
  Description of Artificial Sequence: Synthetic oligonucleotide
aaaauggcgccgcugcgag

SEQ ID NO: 3047717 - RNA, 19 nt, Artificial Sequence
  Description of Artificial Sequence: Synthetic oligonucleotide
agugucccaacauagagaa

SEQ ID NO: 3047718 - RNA, 19 nt, Artificial Sequence
  Description of Artificial Sequence: Synthetic oligonucleotide
caaaguucuugcuaaugag

SEQ ID NO: 3047719 - RNA, 19 nt, Artificial Sequence
  Description of Artificial Sequence: Synthetic oligonucleotide
agaaaggggaccacaaugg

SEQ ID NO: 3047720 - RNA, 19 nt, Artificial Sequence
  Description of Artificial Sequence: Synthetic oligonucleotide
acggagaagaccaaaggac

SEQ ID NO: 3047721 - RNA, 19 nt, Artificial Sequence
  Description of Artificial Sequence: Synthetic oligonucleotide
aucgccaccucucuucccc

SEQ ID NO: 3047722 - RNA, 19 nt, Artificial Sequence
  Description of Artificial Sequence: Synthetic oligonucleotide
aaaguucuugcuaaugagu

SEQ ID NO: 3047723 - RNA, 19 nt, Artificial Sequence
  Description of Artificial Sequence: Synthetic oligonucleotide
acgaugacugaccucgacg

SEQ ID NO: 3047724 - RNA, 19 nt, Artificial Sequence
  Description of Artificial Sequence: Synthetic oligonucleotide
gaccaaaggacauuuucac

SEQ ID NO: 3047725 - RNA, 19 nt, Artificial Sequence
  Description of Artificial Sequence: Synthetic oligonucleotide
ugagcugcccgguacgacg

SEQ ID NO: 3047726 - RNA, 19 nt, Artificial Sequence
  Description of Artificial Sequence: Synthetic oligonucleotide
agaacacacggagaagacc

SEQ ID NO: 3047727 - RNA, 19 nt, Artificial Sequence
  Description of Artificial Sequence: Synthetic oligonucleotide
uccagacagccccuggucg

SEQ ID NO: 3047728 - RNA, 19 nt, Artificial Sequence
  Description of Artificial Sequence: Synthetic oligonucleotide
aaggggaccacaauggaga

SEQ ID NO: 3047729 - RNA, 19 nt, Artificial Sequence
  Description of Artificial Sequence: Synthetic oligonucleotide
gaaaucgccaccucucuuc

SEQ ID NO: 3047730 - RNA, 19 nt, Artificial Sequence
  Description of Artificial Sequence: Synthetic oligonucleotide
gaacacacggagaagacca

SEQ ID NO: 3047731 - RNA, 19 nt, Artificial Sequence
  Description of Artificial Sequence: Synthetic oligonucleotide
caaaggacauuuucaccgg

SEQ ID NO: 3047732 - RNA, 19 nt, Artificial Sequence
  Description of Artificial Sequence: Synthetic oligonucleotide
acgacggagaaaucgccac

SEQ ID NO: 3047733 - RNA, 19 nt, Artificial Sequence
  Description of Artificial Sequence: Synthetic oligonucleotide
aaaugucauguuccucaag

SEQ ID NO: 3047734 - RNA, 19 nt, Artificial Sequence
  Description of Artificial Sequence: Synthetic oligonucleotide
cugcgagugacgaugacug

SEQ ID NO: 3047735 - RNA, 19 nt, Artificial Sequence
  Description of Artificial Sequence: Synthetic oligonucleotide
aaaaugucauguuccucaa

SEQ ID NO: 3047736 - RNA, 19 nt, Artificial Sequence
  Description of Artificial Sequence: Synthetic oligonucleotide
aaaggggaccacaauggag

SEQ ID NO: 3047737 - RNA, 19 nt, Artificial Sequence
  Description of Artificial Sequence: Synthetic oligonucleotide
aguagagcggcaaaguucu

SEQ ID NO: 3047738 - RNA, 19 nt, Artificial Sequence
  Description of Artificial Sequence: Synthetic oligonucleotide
accggcuugggcaaaaugg

SEQ ID NO: 3047739 - RNA, 19 nt, Artificial Sequence
  Description of Artificial Sequence: Synthetic oligonucleotide
uaaugagugucccaacaua

SEQ ID NO: 3047740 - RNA, 19 nt, Artificial Sequence
  Description of Artificial Sequence: Synthetic oligonucleotide
gacgguaccaggcugcgac

SEQ ID NO: 3047741 - RNA, 19 nt, Artificial Sequence
  Description of Artificial Sequence: Synthetic oligonucleotide
caacauagagaaaggggac

SEQ ID NO: 3047742 - RNA, 19 nt, Artificial Sequence
  Description of Artificial Sequence: Synthetic oligonucleotide
aauggcgccgcugcgagug

SEQ ID NO: 3047743 - RNA, 19 nt, Artificial Sequence
  Description of Artificial Sequence: Synthetic oligonucleotide
ucccaacauagagaaaggg

SEQ ID NO: 3047744 - RNA, 19 nt, Artificial Sequence
  Description of Artificial Sequence: Synthetic oligonucleotide
aaucgccaccucucuuccc

SEQ ID NO: 3047745 - RNA, 19 nt, Artificial Sequence
  Description of Artificial Sequence: Synthetic oligonucleotide
uagagaaaggggaccacaa

SEQ ID NO: 3047746 - RNA, 19 nt, Artificial Sequence
  Description of Artificial Sequence: Synthetic oligonucleotide
aucgucgucauccucugga

SEQ ID NO: 3047747 - RNA, 19 nt, Artificial Sequence
  Description of Artificial Sequence: Synthetic oligonucleotide
cccaacauagagaaagggg

SEQ ID NO: 3047748 - RNA, 19 nt, Artificial Sequence
  Description of Artificial Sequence: Synthetic oligonucleotide
cacacggagaagaccaaag

SEQ ID NO: 3047749 - RNA, 19 nt, Artificial Sequence
  Description of Artificial Sequence: Synthetic oligonucleotide
cuaaucgucaucgucguca

SEQ ID NO: 3047750 - RNA, 19 nt, Artificial Sequence
  Description of Artificial Sequence: Synthetic oligonucleotide
uucuugcuaaugagugucc

SEQ ID NO: 3047751 - RNA, 19 nt, Artificial Sequence
  Description of Artificial Sequence: Synthetic oligonucleotide
uacgacggagaaaucgcca

SEQ ID NO: 3047752 - RNA, 19 nt, Artificial Sequence
  Description of Artificial Sequence: Synthetic oligonucleotide
ucaaguagagcggcaaagu

SEQ ID NO: 3047753 - RNA, 19 nt, Artificial Sequence
  Description of Artificial Sequence: Synthetic oligonucleotide
aguucuugcuaaugagugu

SEQ ID NO: 3047754 - RNA, 19 nt, Artificial Sequence
  Description of Artificial Sequence: Synthetic oligonucleotide
ucuugcuaaugaguguccc

SEQ ID NO: 3047755 - RNA, 19 nt, Artificial Sequence
  Description of Artificial Sequence: Synthetic oligonucleotide
ccaacauagagaaagggga

SEQ ID NO: 3047756 - RNA, 19 nt, Artificial Sequence
  Description of Artificial Sequence: Synthetic oligonucleotide
agugacgaugacugaccuc

SEQ ID NO: 3047757 - RNA, 19 nt, Artificial Sequence
  Description of Artificial Sequence: Synthetic oligonucleotide
gucgucauccucuggaaca

SEQ ID NO: 3047758 - RNA, 19 nt, Artificial Sequence
  Description of Artificial Sequence: Synthetic oligonucleotide
guucuugcuaaugaguguc

SEQ ID NO: 3047759 - RNA, 19 nt, Artificial Sequence
  Description of Artificial Sequence: Synthetic oligonucleotide
cucaaguagagcggcaaag

SEQ ID NO: 3047760 - RNA, 19 nt, Artificial Sequence
  Description of Artificial Sequence: Synthetic oligonucleotide
uugcuaaugagugucccaa

SEQ ID NO: 3047761 - RNA, 19 nt, Artificial Sequence
  Description of Artificial Sequence: Synthetic oligonucleotide
agaccaaaggacauuuuca

SEQ ID NO: 3047762 - RNA, 19 nt, Artificial Sequence
  Description of Artificial Sequence: Synthetic oligonucleotide
acauagagaaaggggacca

SEQ ID NO: 3047763 - RNA, 19 nt, Artificial Sequence
  Description of Artificial Sequence: Synthetic oligonucleotide
ugacugaccucgacgguac

SEQ ID NO: 3047764 - RNA, 19 nt, Artificial Sequence
  Description of Artificial Sequence: Synthetic oligonucleotide
ugcuaaucgucaucgucgu

SEQ ID NO: 3047765 - RNA, 19 nt, Artificial Sequence
  Description of Artificial Sequence: Synthetic oligonucleotide
uuuucaccggcuugggcaa

SEQ ID NO: 3047766 - RNA, 19 nt, Artificial Sequence
  Description of Artificial Sequence: Synthetic oligonucleotide
ggcaaaauggcgccgcugc

SEQ ID NO: 3047767 - RNA, 19 nt, Artificial Sequence
  Description of Artificial Sequence: Synthetic oligonucleotide
agcuccgccccuugcagcg

SEQ ID NO: 3047768 - RNA, 19 nt, Artificial Sequence
  Description of Artificial Sequence: Synthetic oligonucleotide
gaaaggggaccacaaugga

SEQ ID NO: 3047769 - RNA, 19 nt, Artificial Sequence
  Description of Artificial Sequence: Synthetic oligonucleotide
auagagaaaggggaccaca

SEQ ID NO: 3047770 - RNA, 19 nt, Artificial Sequence
  Description of Artificial Sequence: Synthetic oligonucleotide
uagagcggcaaaguucuug

SEQ ID NO: 3047771 - RNA, 19 nt, Artificial Sequence
  Description of Artificial Sequence: Synthetic oligonucleotide
cacggagaagaccaaagga

SEQ ID NO: 3047772 - RNA, 19 nt, Artificial Sequence
  Description of Artificial Sequence: Synthetic oligonucleotide
cucgacgguaccaggcugc

SEQ ID NO: 3047773 - RNA, 19 nt, Artificial Sequence
  Description of Artificial Sequence: Synthetic oligonucleotide
aaggacauuuucaccggcu

SEQ ID NO: 3047774 - RNA, 19 nt, Artificial Sequence
  Description of Artificial Sequence: Synthetic oligonucleotide
ucaucgucgucauccucug

SEQ ID NO: 3047775 - RNA, 19 nt, Artificial Sequence
  Description of Artificial Sequence: Synthetic oligonucleotide
gacgccaucuccagcuccg

SEQ ID NO: 3047776 - RNA, 19 nt, Artificial Sequence
  Description of Artificial Sequence: Synthetic oligonucleotide
ugcucuccaggcccgccgg

SEQ ID NO: 3047777 - RNA, 19 nt, Artificial Sequence
  Description of Artificial Sequence: Synthetic oligonucleotide
ugcgaccugagcugcccgg

SEQ ID NO: 3047778 - RNA, 19 nt, Artificial Sequence
  Description of Artificial Sequence: Synthetic oligonucleotide
cauuuucaccggcuugggc

SEQ ID NO: 3047779 - RNA, 19 nt, Artificial Sequence
  Description of Artificial Sequence: Synthetic oligonucleotide
acgguaccaggcugcgacc

SEQ ID NO: 3047780 - RNA, 19 nt, Artificial Sequence
  Description of Artificial Sequence: Synthetic oligonucleotide
accugagcugcccgguacg

SEQ ID NO: 3047781 - RNA, 19 nt, Artificial Sequence
  Description of Artificial Sequence: Synthetic oligonucleotide
ugaccucgacgguaccagg

SEQ ID NO: 3047782 - RNA, 19 nt, Artificial Sequence
  Description of Artificial Sequence: Synthetic oligonucleotide
gguacgacggagaaaucgc

SEQ ID NO: 3047783 - RNA, 19 nt, Artificial Sequence
  Description of Artificial Sequence: Synthetic oligonucleotide
ucggacugcucuccaggcc

SEQ ID NO: 3047784 - RNA, 19 nt, Artificial Sequence
  Description of Artificial Sequence: Synthetic oligonucleotide
agagaaaggggaccacaau

SEQ ID NO: 3047785 - RNA, 19 nt, Artificial Sequence
  Description of Artificial Sequence: Synthetic oligonucleotide
uccagcuccgccccuugca

SEQ ID NO: 3047786 - RNA, 19 nt, Artificial Sequence
  Description of Artificial Sequence: Synthetic oligonucleotide
cgaugacugaccucgacgg

SEQ ID NO: 3047787 - RNA, 19 nt, Artificial Sequence
  Description of Artificial Sequence: Synthetic oligonucleotide
guuccucaaguagagcggc

SEQ ID NO: 3047788 - RNA, 19 nt, Artificial Sequence
  Description of Artificial Sequence: Synthetic oligonucleotide
uaaucgucaucgucgucau

SEQ ID NO: 3047789 - RNA, 19 nt, Artificial Sequence
  Description of Artificial Sequence: Synthetic oligonucleotide
uugggcaaaauggcgccgc

SEQ ID NO: 3047790 - RNA, 19 nt, Artificial Sequence
  Description of Artificial Sequence: Synthetic oligonucleotide
uggagaacacacggagaag

SEQ ID NO: 3047791 - RNA, 19 nt, Artificial Sequence
  Description of Artificial Sequence: Synthetic oligonucleotide
caggcugcgaccugagcug

SEQ ID NO: 3047792 - RNA, 19 nt, Artificial Sequence
  Description of Artificial Sequence: Synthetic oligonucleotide
ugcuaaugagugucccaac

SEQ ID NO: 3047793 - RNA, 19 nt, Artificial Sequence
  Description of Artificial Sequence: Synthetic oligonucleotide
gagaacacacggagaagac

SEQ ID NO: 3047794 - RNA, 19 nt, Artificial Sequence
  Description of Artificial Sequence: Synthetic oligonucleotide
cuugcuaaugaguguccca

SEQ ID NO: 3047795 - RNA, 19 nt, Artificial Sequence
  Description of Artificial Sequence: Synthetic oligonucleotide
acauuuucaccggcuuggg

SEQ ID NO: 3047796 - RNA, 19 nt, Artificial Sequence
  Description of Artificial Sequence: Synthetic oligonucleotide
agcggcaaaguucuugcua

SEQ ID NO: 3047797 - RNA, 19 nt, Artificial Sequence
  Description of Artificial Sequence: Synthetic oligonucleotide
ggucggacugcucuccagg

SEQ ID NO: 3047798 - RNA, 19 nt, Artificial Sequence
  Description of Artificial Sequence: Synthetic oligonucleotide
gcuaaugagugucccaaca

SEQ ID NO: 3047799 - RNA, 19 nt, Artificial Sequence
  Description of Artificial Sequence: Synthetic oligonucleotide
uugcagcgauccaaacccc

SEQ ID NO: 3047800 - RNA, 19 nt, Artificial Sequence
  Description of Artificial Sequence: Synthetic oligonucleotide
aggacauuuucaccggcuu

SEQ ID NO: 3047801 - RNA, 19 nt, Artificial Sequence
  Description of Artificial Sequence: Synthetic oligonucleotide
gacgaugacugaccucgac

SEQ ID NO: 3047802 - RNA, 19 nt, Artificial Sequence
  Description of Artificial Sequence: Synthetic oligonucleotide
augucauguuccucaagua

SEQ ID NO: 3047803 - RNA, 19 nt, Artificial Sequence
  Description of Artificial Sequence: Synthetic oligonucleotide
cugaccucgacgguaccag

SEQ ID NO: 3047804 - RNA, 19 nt, Artificial Sequence
  Description of Artificial Sequence: Synthetic oligonucleotide
acggagaaaucgccaccuc

SEQ ID NO: 3047805 - RNA, 19 nt, Artificial Sequence
  Description of Artificial Sequence: Synthetic oligonucleotide
uuccucaaguagagcggca

SEQ ID NO: 3047806 - RNA, 19 nt, Artificial Sequence
  Description of Artificial Sequence: Synthetic oligonucleotide
uccucaaguagagcggcaa

SEQ ID NO: 3047807 - RNA, 19 nt, Artificial Sequence
  Description of Artificial Sequence: Synthetic oligonucleotide
ccuugcagcgauccaaacc

SEQ ID NO: 3047808 - RNA, 19 nt, Artificial Sequence
  Description of Artificial Sequence: Synthetic oligonucleotide
gaccucgacgguaccaggc

SEQ ID NO: 3047809 - RNA, 19 nt, Artificial Sequence
  Description of Artificial Sequence: Synthetic oligonucleotide
accaggcugcgaccugagc

SEQ ID NO: 3047810 - RNA, 19 nt, Artificial Sequence
  Description of Artificial Sequence: Synthetic oligonucleotide
ggacauuuucaccggcuug

SEQ ID NO: 3047811 - RNA, 19 nt, Artificial Sequence
  Description of Artificial Sequence: Synthetic oligonucleotide
accucgacgguaccaggcu

SEQ ID NO: 3047812 - RNA, 19 nt, Artificial Sequence
  Description of Artificial Sequence: Synthetic oligonucleotide
guacgacggagaaaucgcc

SEQ ID NO: 3047813 - RNA, 19 nt, Artificial Sequence
  Description of Artificial Sequence: Synthetic oligonucleotide
gcuugggcaaaauggcgcc

SEQ ID NO: 3047814 - RNA, 19 nt, Artificial Sequence
  Description of Artificial Sequence: Synthetic oligonucleotide
cuugggcaaaauggcgccg

SEQ ID NO: 3047815 - RNA, 19 nt, Artificial Sequence
  Description of Artificial Sequence: Synthetic oligonucleotide
cauguuccucaaguagagc

SEQ ID NO: 3047816 - RNA, 19 nt, Artificial Sequence
  Description of Artificial Sequence: Synthetic oligonucleotide
gaccugagcugcccgguac

SEQ ID NO: 3047817 - RNA, 19 nt, Artificial Sequence
  Description of Artificial Sequence: Synthetic oligonucleotide
aggcccgccggcaagccgc

SEQ ID NO: 3047818 - RNA, 19 nt, Artificial Sequence
  Description of Artificial Sequence: Synthetic oligonucleotide
gagcugcccgguacgacgg

SEQ ID NO: 3047819 - RNA, 19 nt, Artificial Sequence
  Description of Artificial Sequence: Synthetic oligonucleotide
agaaaucgccaccucucuu

SEQ ID NO: 3047820 - RNA, 19 nt, Artificial Sequence
  Description of Artificial Sequence: Synthetic oligonucleotide
ucgacgguaccaggcugcg

SEQ ID NO: 3047821 - RNA, 19 nt, Artificial Sequence
  Description of Artificial Sequence: Synthetic oligonucleotide
uggucggacugcucuccag

SEQ ID NO: 3047822 - RNA, 19 nt, Artificial Sequence
  Description of Artificial Sequence: Synthetic oligonucleotide
ggcuugggcaaaauggcgc

SEQ ID NO: 3047823 - RNA, 19 nt, Artificial Sequence
  Description of Artificial Sequence: Synthetic oligonucleotide
cauagagaaaggggaccac

SEQ ID NO: 3047824 - RNA, 19 nt, Artificial Sequence
  Description of Artificial Sequence: Synthetic oligonucleotide
ucgucgucauccucuggaa

SEQ ID NO: 3047825 - RNA, 19 nt, Artificial Sequence
  Description of Artificial Sequence: Synthetic oligonucleotide
ggagaaaucgccaccucuc

SEQ ID NO: 3047826 - RNA, 19 nt, Artificial Sequence
  Description of Artificial Sequence: Synthetic oligonucleotide
gagaaaucgccaccucucu

SEQ ID NO: 3047827 - RNA, 19 nt, Artificial Sequence
  Description of Artificial Sequence: Synthetic oligonucleotide
ucgucaucgucgucauccu

SEQ ID NO: 3047828 - RNA, 19 nt, Artificial Sequence
  Description of Artificial Sequence: Synthetic oligonucleotide
gcaaaauggcgccgcugcg

SEQ ID NO: 3047829 - RNA, 19 nt, Artificial Sequence
  Description of Artificial Sequence: Synthetic oligonucleotide
ugcccgguacgacggagaa

SEQ ID NO: 3047830 - RNA, 19 nt, Artificial Sequence
  Description of Artificial Sequence: Synthetic oligonucleotide
ccggcuugggcaaaauggc

SEQ ID NO: 3047831 - RNA, 19 nt, Artificial Sequence
  Description of Artificial Sequence: Synthetic oligonucleotide
augacugaccucgacggua

SEQ ID NO: 3047832 - RNA, 19 nt, Artificial Sequence
  Description of Artificial Sequence: Synthetic oligonucleotide
ucgucauccucuggaacaa

SEQ ID NO: 3047833 - RNA, 19 nt, Artificial Sequence
  Description of Artificial Sequence: Synthetic oligonucleotide
ugcgagugacgaugacuga

SEQ ID NO: 3047834 - RNA, 19 nt, Artificial Sequence
  Description of Artificial Sequence: Synthetic oligonucleotide
ggcaaaguucuugcuaaug

SEQ ID NO: 3047835 - RNA, 19 nt, Artificial Sequence
  Description of Artificial Sequence: Synthetic oligonucleotide
ugggcaaaauggcgccgcu

SEQ ID NO: 3047836 - RNA, 19 nt, Artificial Sequence
  Description of Artificial Sequence: Synthetic oligonucleotide
augagugucccaacauaga

SEQ ID NO: 3047837 - RNA, 19 nt, Artificial Sequence
  Description of Artificial Sequence: Synthetic oligonucleotide
aaauggcgccgcugcgagu

SEQ ID NO: 3047838 - RNA, 19 nt, Artificial Sequence
  Description of Artificial Sequence: Synthetic oligonucleotide
aggcugcgaccugagcugc

SEQ ID NO: 3047839 - RNA, 19 nt, Artificial Sequence
  Description of Artificial Sequence: Synthetic oligonucleotide
acugcucuccaggcccgcc

SEQ ID NO: 3047840 - RNA, 19 nt, Artificial Sequence
  Description of Artificial Sequence: Synthetic oligonucleotide
cugcucuccaggcccgccg

SEQ ID NO: 3047841 - RNA, 19 nt, Artificial Sequence
  Description of Artificial Sequence: Synthetic oligonucleotide
ugacgaugacugaccucga

SEQ ID NO: 3047842 - RNA, 19 nt, Artificial Sequence
  Description of Artificial Sequence: Synthetic oligonucleotide
ccugcuaaucgucaucguc

SEQ ID NO: 3047843 - RNA, 19 nt, Artificial Sequence
  Description of Artificial Sequence: Synthetic oligonucleotide
acugaccucgacgguacca

SEQ ID NO: 3047844 - RNA, 19 nt, Artificial Sequence
  Description of Artificial Sequence: Synthetic oligonucleotide
cuccagacagccccugguc

SEQ ID NO: 3047845 - RNA, 19 nt, Artificial Sequence
  Description of Artificial Sequence: Synthetic oligonucleotide
cuaaugagugucccaacau

SEQ ID NO: 3047846 - RNA, 19 nt, Artificial Sequence
  Description of Artificial Sequence: Synthetic oligonucleotide
caaaauggcgccgcugcga

SEQ ID NO: 3047847 - RNA, 19 nt, Artificial Sequence
  Description of Artificial Sequence: Synthetic oligonucleotide
ccagacagccccuggucgg

SEQ ID NO: 3047848 - RNA, 19 nt, Artificial Sequence
  Description of Artificial Sequence: Synthetic oligonucleotide
gcggcaaaguucuugcuaa

SEQ ID NO: 3047849 - RNA, 19 nt, Artificial Sequence
  Description of Artificial Sequence: Synthetic oligonucleotide
gacggagaaaucgccaccu

SEQ ID NO: 3047850 - RNA, 19 nt, Artificial Sequence
  Description of Artificial Sequence: Synthetic oligonucleotide
gagugacgaugacugaccu

SEQ ID NO: 3047851 - RNA, 19 nt, Artificial Sequence
  Description of Artificial Sequence: Synthetic oligonucleotide
cgagugacgaugacugacc

SEQ ID NO: 3047852 - RNA, 19 nt, Artificial Sequence
  Description of Artificial Sequence: Synthetic oligonucleotide
aggggaccacaauggagaa

SEQ ID NO: 3047853 - RNA, 19 nt, Artificial Sequence
  Description of Artificial Sequence: Synthetic oligonucleotide
caucgucgucauccucugg

SEQ ID NO: 3047854 - RNA, 19 nt, Artificial Sequence
  Description of Artificial Sequence: Synthetic oligonucleotide
ucuccaggcccgccggcaa

SEQ ID NO: 3047855 - RNA, 19 nt, Artificial Sequence
  Description of Artificial Sequence: Synthetic oligonucleotide
aacacacggagaagaccaa

SEQ ID NO: 3047856 - RNA, 19 nt, Artificial Sequence
  Description of Artificial Sequence: Synthetic oligonucleotide
gucauccucuggaacaaaa

SEQ ID NO: 3047857 - RNA, 19 nt, Artificial Sequence
  Description of Artificial Sequence: Synthetic oligonucleotide
cgguacgacggagaaaucg

SEQ ID NO: 3047858 - RNA, 19 nt, Artificial Sequence
  Description of Artificial Sequence: Synthetic oligonucleotide
cagcccgcuccagacagcc

SEQ ID NO: 3047859 - RNA, 19 nt, Artificial Sequence
  Description of Artificial Sequence: Synthetic oligonucleotide
gcccgcuccagacagcccc

SEQ ID NO: 3047860 - RNA, 19 nt, Artificial Sequence
  Description of Artificial Sequence: Synthetic oligonucleotide
cugcgaccugagcugcccg

SEQ ID NO: 3047861 - RNA, 19 nt, Artificial Sequence
  Description of Artificial Sequence: Synthetic oligonucleotide
gacugaccucgacgguacc

SEQ ID NO: 3047862 - RNA, 19 nt, Artificial Sequence
  Description of Artificial Sequence: Synthetic oligonucleotide
gaugacugaccucgacggu

SEQ ID NO: 3047863 - RNA, 19 nt, Artificial Sequence
  Description of Artificial Sequence: Synthetic oligonucleotide
caccggcuugggcaaaaug

SEQ ID NO: 3047864 - RNA, 19 nt, Artificial Sequence
  Description of Artificial Sequence: Synthetic oligonucleotide
gccgcugcgagugacgaug

SEQ ID NO: 3047865 - RNA, 19 nt, Artificial Sequence
  Description of Artificial Sequence: Synthetic oligonucleotide
cagcuccgccccuugcagc

SEQ ID NO: 3047866 - RNA, 19 nt, Artificial Sequence
  Description of Artificial Sequence: Synthetic oligonucleotide
gcgagugacgaugacugac

SEQ ID NO: 3047867 - RNA, 19 nt, Artificial Sequence
  Description of Artificial Sequence: Synthetic oligonucleotide
uccaggcccgccggcaagc

SEQ ID NO: 3047868 - RNA, 19 nt, Artificial Sequence
  Description of Artificial Sequence: Synthetic oligonucleotide
agacagccccuggucggac

SEQ ID NO: 3047869 - RNA, 19 nt, Artificial Sequence
  Description of Artificial Sequence: Synthetic oligonucleotide
cggacugcucuccaggccc

SEQ ID NO: 3047870 - RNA, 19 nt, Artificial Sequence
  Description of Artificial Sequence: Synthetic oligonucleotide
cggagaagaccaaaggaca

SEQ ID NO: 3047871 - RNA, 19 nt, Artificial Sequence
  Description of Artificial Sequence: Synthetic oligonucleotide
ggacgccaucuccagcucc

SEQ ID NO: 3047872 - RNA, 19 nt, Artificial Sequence
  Description of Artificial Sequence: Synthetic oligonucleotide
caaguagagcggcaaaguu

SEQ ID NO: 3047873 - RNA, 19 nt, Artificial Sequence
  Description of Artificial Sequence: Synthetic oligonucleotide
guaccaggcugcgaccuga

SEQ ID NO: 3047874 - RNA, 19 nt, Artificial Sequence
  Description of Artificial Sequence: Synthetic oligonucleotide
uucaccggcuugggcaaaa

SEQ ID NO: 3047875 - RNA, 19 nt, Artificial Sequence
  Description of Artificial Sequence: Synthetic oligonucleotide
gguaccaggcugcgaccug

SEQ ID NO: 3047876 - RNA, 19 nt, Artificial Sequence
  Description of Artificial Sequence: Synthetic oligonucleotide
cggcuugggcaaaauggcg

SEQ ID NO: 3047877 - RNA, 19 nt, Artificial Sequence
  Description of Artificial Sequence: Synthetic oligonucleotide
cuccagcuccgccccuugc

SEQ ID NO: 3047878 - RNA, 19 nt, Artificial Sequence
  Description of Artificial Sequence: Synthetic oligonucleotide
cugagcugcccgguacgac

SEQ ID NO: 3047879 - RNA, 19 nt, Artificial Sequence
  Description of Artificial Sequence: Synthetic oligonucleotide
cuccaggcccgccggcaag

SEQ ID NO: 3047880 - RNA, 19 nt, Artificial Sequence
  Description of Artificial Sequence: Synthetic oligonucleotide
caggcccgccggcaagccg

SEQ ID NO: 3047881 - RNA, 19 nt, Artificial Sequence
  Description of Artificial Sequence: Synthetic oligonucleotide
ccagcuccgccccuugcag

SEQ ID NO: 3047882 - RNA, 19 nt, Artificial Sequence
  Description of Artificial Sequence: Synthetic oligonucleotide
ggacugcucuccaggcccg

SEQ ID NO: 3047883 - RNA, 19 nt, Artificial Sequence
  Description of Artificial Sequence: Synthetic oligonucleotide
cugcccgguacgacggaga

SEQ ID NO: 3047884 - RNA, 19 nt, Artificial Sequence
  Description of Artificial Sequence: Synthetic oligonucleotide
gcggacgccaucuccagcu

SEQ ID NO: 3047885 - RNA, 19 nt, Artificial Sequence
  Description of Artificial Sequence: Synthetic oligonucleotide
gacugcucuccaggcccgc

SEQ ID NO: 3047886 - RNA, 19 nt, Artificial Sequence
  Description of Artificial Sequence: Synthetic oligonucleotide
agcccgcuccagacagccc

SEQ ID NO: 3047887 - RNA, 19 nt, Artificial Sequence
  Description of Artificial Sequence: Synthetic oligonucleotide
gagcggcaaaguucuugcu

SEQ ID NO: 3047888 - RNA, 19 nt, Artificial Sequence
  Description of Artificial Sequence: Synthetic oligonucleotide
ggagaagaccaaaggacau

SEQ ID NO: 3047889 - RNA, 19 nt, Artificial Sequence
  Description of Artificial Sequence: Synthetic oligonucleotide
uuucaccggcuugggcaaa

SEQ ID NO: 3047890 - RNA, 19 nt, Artificial Sequence
  Description of Artificial Sequence: Synthetic oligonucleotide
gcugcgaccugagcugccc

SEQ ID NO: 3047891 - RNA, 19 nt, Artificial Sequence
  Description of Artificial Sequence: Synthetic oligonucleotide
ccuggucggacugcucucc

SEQ ID NO: 3047892 - RNA, 19 nt, Artificial Sequence
  Description of Artificial Sequence: Synthetic oligonucleotide
cgacggagaaaucgccacc

SEQ ID NO: 3047893 - RNA, 19 nt, Artificial Sequence
  Description of Artificial Sequence: Synthetic oligonucleotide
ccaggcugcgaccugagcu

SEQ ID NO: 3047894 - RNA, 19 nt, Artificial Sequence
  Description of Artificial Sequence: Synthetic oligonucleotide
ccucgacgguaccaggcug

SEQ ID NO: 3047895 - RNA, 19 nt, Artificial Sequence
  Description of Artificial Sequence: Synthetic oligonucleotide
gggcaaaauggcgccgcug

SEQ ID NO: 3047896 - RNA, 19 nt, Artificial Sequence
  Description of Artificial Sequence: Synthetic oligonucleotide
gaagaccaaaggacauuuu

SEQ ID NO: 3047897 - RNA, 19 nt, Artificial Sequence
  Description of Artificial Sequence: Synthetic oligonucleotide
ucaccggcuugggcaaaau

SEQ ID NO: 3047898 - RNA, 19 nt, Artificial Sequence
  Description of Artificial Sequence: Synthetic oligonucleotide
cuggucggacugcucucca

SEQ ID NO: 3047899 - RNA, 19 nt, Artificial Sequence
  Description of Artificial Sequence: Synthetic oligonucleotide
agcugcccgguacgacgga

SEQ ID NO: 3047900 - RNA, 19 nt, Artificial Sequence
  Description of Artificial Sequence: Synthetic oligonucleotide
gcuaaucgucaucgucguc

SEQ ID NO: 3047901 - RNA, 19 nt, Artificial Sequence
  Description of Artificial Sequence: Synthetic oligonucleotide
gacagccccuggucggacu

SEQ ID NO: 3047902 - RNA, 19 nt, Artificial Sequence
  Description of Artificial Sequence: Synthetic oligonucleotide
agccccuggucggacugcu

SEQ ID NO: 3047903 - RNA, 19 nt, Artificial Sequence
  Description of Artificial Sequence: Synthetic oligonucleotide
gcugcgagugacgaugacu

SEQ ID NO: 3047904 - RNA, 19 nt, Artificial Sequence
  Description of Artificial Sequence: Synthetic oligonucleotide
cccgguacgacggagaaau

SEQ ID NO: 3047905 - RNA, 19 nt, Artificial Sequence
  Description of Artificial Sequence: Synthetic oligonucleotide
uccgccccuugcagcgauc

SEQ ID NO: 3047906 - RNA, 19 nt, Artificial Sequence
  Description of Artificial Sequence: Synthetic oligonucleotide
gcugcccgguacgacggag

SEQ ID NO: 3047907 - RNA, 19 nt, Artificial Sequence
  Description of Artificial Sequence: Synthetic oligonucleotide
cgucgucauccucuggaac

SEQ ID NO: 3047908 - RNA, 19 nt, Artificial Sequence
  Description of Artificial Sequence: Synthetic oligonucleotide
auggcgccgcugcgaguga

SEQ ID NO: 3047909 - RNA, 19 nt, Artificial Sequence
  Description of Artificial Sequence: Synthetic oligonucleotide
aucuccagcuccgccccuu

SEQ ID NO: 3047910 - RNA, 19 nt, Artificial Sequence
  Description of Artificial Sequence: Synthetic oligonucleotide
uggcgccgcugcgagugac

SEQ ID NO: 3047911 - RNA, 19 nt, Artificial Sequence
  Description of Artificial Sequence: Synthetic oligonucleotide
cagacagccccuggucgga

SEQ ID NO: 3047912 - RNA, 19 nt, Artificial Sequence
  Description of Artificial Sequence: Synthetic oligonucleotide
ggcgccgcugcgagugacg

SEQ ID NO: 3047913 - RNA, 19 nt, Artificial Sequence
  Description of Artificial Sequence: Synthetic oligonucleotide
cucuccaggcccgccggca

SEQ ID NO: 3047914 - RNA, 19 nt, Artificial Sequence
  Description of Artificial Sequence: Synthetic oligonucleotide
ggggaccacaauggagaac

SEQ ID NO: 3047915 - RNA, 19 nt, Artificial Sequence
  Description of Artificial Sequence: Synthetic oligonucleotide
cccuugcagcgauccaaac

SEQ ID NO: 3047916 - RNA, 19 nt, Artificial Sequence
  Description of Artificial Sequence: Synthetic oligonucleotide
cagccccuggucggacugc

SEQ ID NO: 3047917 - RNA, 19 nt, Artificial Sequence
  Description of Artificial Sequence: Synthetic oligonucleotide
gcuccagacagccccuggu

SEQ ID NO: 3047918 - RNA, 19 nt, Artificial Sequence
  Description of Artificial Sequence: Synthetic oligonucleotide
gccccuugcagcgauccaa

SEQ ID NO: 3047919 - RNA, 19 nt, Artificial Sequence
  Description of Artificial Sequence: Synthetic oligonucleotide
gccgcggacgccaucucca

SEQ ID NO: 3047920 - RNA, 19 nt, Artificial Sequence
  Description of Artificial Sequence: Synthetic oligonucleotide
ccucaaguagagcggcaaa

SEQ ID NO: 3047921 - RNA, 19 nt, Artificial Sequence
  Description of Artificial Sequence: Synthetic oligonucleotide
cccgccggcaagccgccgc

SEQ ID NO: 3047922 - RNA, 19 nt, Artificial Sequence
  Description of Artificial Sequence: Synthetic oligonucleotide
ccgccccuugcagcgaucc

SEQ ID NO: 3047923 - RNA, 19 nt, Artificial Sequence
  Description of Artificial Sequence: Synthetic oligonucleotide
gcucuccaggcccgccggc

SEQ ID NO: 3047924 - RNA, 19 nt, Artificial Sequence
  Description of Artificial Sequence: Synthetic oligonucleotide
gugucccaacauagagaaa

SEQ ID NO: 3047925 - RNA, 19 nt, Artificial Sequence
  Description of Artificial Sequence: Synthetic oligonucleotide
cccuggucggacugcucuc

SEQ ID NO: 3047926 - RNA, 19 nt, Artificial Sequence
  Description of Artificial Sequence: Synthetic oligonucleotide
ccgcggacgccaucuccag

SEQ ID NO: 3047927 - RNA, 19 nt, Artificial Sequence
  Description of Artificial Sequence: Synthetic oligonucleotide
ccgccggcaagccgccgcg

SEQ ID NO: 3047928 - RNA, 19 nt, Artificial Sequence
  Description of Artificial Sequence: Synthetic oligonucleotide
ccagcccgcuccagacagc

SEQ ID NO: 3047929 - RNA, 19 nt, Artificial Sequence
  Description of Artificial Sequence: Synthetic oligonucleotide
cgcuccagacagccccugg

SEQ ID NO: 3047930 - RNA, 19 nt, Artificial Sequence
  Description of Artificial Sequence: Synthetic oligonucleotide
ccccuugcagcgauccaaa

SEQ ID NO: 3047931 - RNA, 19 nt, Artificial Sequence
  Description of Artificial Sequence: Synthetic oligonucleotide
cgccaucuccagcuccgcc

SEQ ID NO: 3047932 - RNA, 19 nt, Artificial Sequence
  Description of Artificial Sequence: Synthetic oligonucleotide
cggagaaaucgccaccucu

SEQ ID NO: 3047933 - RNA, 19 nt, Artificial Sequence
  Description of Artificial Sequence: Synthetic oligonucleotide
ggcugcgaccugagcugcc

SEQ ID NO: 3047934 - RNA, 19 nt, Artificial Sequence
  Description of Artificial Sequence: Synthetic oligonucleotide
cgccgcggacgccaucucc

SEQ ID NO: 3047935 - RNA, 19 nt, Artificial Sequence
  Description of Artificial Sequence: Synthetic oligonucleotide
ccgguacgacggagaaauc

SEQ ID NO: 3047936 - RNA, 19 nt, Artificial Sequence
  Description of Artificial Sequence: Synthetic oligonucleotide
cgcggacgccaucuccagc

SEQ ID NO: 3047937 - RNA, 19 nt, Artificial Sequence
  Description of Artificial Sequence: Synthetic oligonucleotide
gcgccgcugcgagugacga

SEQ ID NO: 3047938 - RNA, 19 nt, Artificial Sequence
  Description of Artificial Sequence: Synthetic oligonucleotide
ccugagcugcccgguacga

SEQ ID NO: 3047939 - RNA, 19 nt, Artificial Sequence
  Description of Artificial Sequence: Synthetic oligonucleotide
ccgcugcgagugacgauga

SEQ ID NO: 3047940 - RNA, 19 nt, Artificial Sequence
  Description of Artificial Sequence: Synthetic oligonucleotide
ccaggcccgccggcaagcc

SEQ ID NO: 3047941 - RNA, 19 nt, Artificial Sequence
  Description of Artificial Sequence: Synthetic oligonucleotide
gccgccgcggacgccaucu

SEQ ID NO: 3047942 - RNA, 19 nt, Artificial Sequence
  Description of Artificial Sequence: Synthetic oligonucleotide
gcaagccgccgcggacgcc

SEQ ID NO: 3047943 - RNA, 19 nt, Artificial Sequence
  Description of Artificial Sequence: Synthetic oligonucleotide
cuccgccccuugcagcgau

SEQ ID NO: 3047944 - RNA, 19 nt, Artificial Sequence
  Description of Artificial Sequence: Synthetic oligonucleotide
cggacgccaucuccagcuc

SEQ ID NO: 3047945 - RNA, 19 nt, Artificial Sequence
  Description of Artificial Sequence: Synthetic oligonucleotide
cgcugcgagugacgaugac

SEQ ID NO: 3047946 - RNA, 19 nt, Artificial Sequence
  Description of Artificial Sequence: Synthetic oligonucleotide
gcgaccugagcugcccggu

SEQ ID NO: 3047947 - RNA, 19 nt, Artificial Sequence
  Description of Artificial Sequence: Synthetic oligonucleotide
guagagcggcaaaguucuu

SEQ ID NO: 3047948 - RNA, 19 nt, Artificial Sequence
  Description of Artificial Sequence: Synthetic oligonucleotide
gcccgguacgacggagaaa

SEQ ID NO: 3047949 - RNA, 19 nt, Artificial Sequence
  Description of Artificial Sequence: Synthetic oligonucleotide
ccgcuccagacagccccug

SEQ ID NO: 3047950 - RNA, 19 nt, Artificial Sequence
  Description of Artificial Sequence: Synthetic oligonucleotide
gcuccgccccuugcagcga

SEQ ID NO: 3047951 - RNA, 19 nt, Artificial Sequence
  Description of Artificial Sequence: Synthetic oligonucleotide
gccccuggucggacugcuc

SEQ ID NO: 3047952 - RNA, 19 nt, Artificial Sequence
  Description of Artificial Sequence: Synthetic oligonucleotide
gcccgccggcaagccgccg

SEQ ID NO: 3047953 - RNA, 19 nt, Artificial Sequence
  Description of Artificial Sequence: Synthetic oligonucleotide
cgguaccaggcugcgaccu

SEQ ID NO: 3047954 - RNA, 19 nt, Artificial Sequence
  Description of Artificial Sequence: Synthetic oligonucleotide
cgucauccucuggaacaaa

SEQ ID NO: 3047955 - RNA, 19 nt, Artificial Sequence
  Description of Artificial Sequence: Synthetic oligonucleotide
ccgccgcggacgccaucuc

SEQ ID NO: 3047956 - RNA, 19 nt, Artificial Sequence
  Description of Artificial Sequence: Synthetic oligonucleotide
cggcaaaguucuugcuaau

SEQ ID NO: 3047957 - RNA, 19 nt, Artificial Sequence
  Description of Artificial Sequence: Synthetic oligonucleotide
cgaccugagcugcccggua

SEQ ID NO: 3047958 - RNA, 19 nt, Artificial Sequence
  Description of Artificial Sequence: Synthetic oligonucleotide
cgccccuugcagcgaucca

SEQ ID NO: 3047959 - RNA, 19 nt, Artificial Sequence
  Description of Artificial Sequence: Synthetic oligonucleotide
cgacgguaccaggcugcga

SEQ ID NO: 3047960 - RNA, 19 nt, Artificial Sequence
  Description of Artificial Sequence: Synthetic oligonucleotide
cgccgcugcgagugacgau

SEQ ID NO: 3047961 - RNA, 19 nt, Artificial Sequence
  Description of Artificial Sequence: Synthetic oligonucleotide
aaaaucaugauagaaaugc

SEQ ID NO: 3047962 - RNA, 19 nt, Artificial Sequence
  Description of Artificial Sequence: Synthetic oligonucleotide
aauuuuacacaucagaagg

SEQ ID NO: 3047963 - RNA, 19 nt, Artificial Sequence
  Description of Artificial Sequence: Synthetic oligonucleotide
aaugaugaagcacagaagg

SEQ ID NO: 3047964 - RNA, 19 nt, Artificial Sequence
  Description of Artificial Sequence: Synthetic oligonucleotide
uuaaguauguaccacauag

SEQ ID NO: 3047965 - RNA, 19 nt, Artificial Sequence
  Description of Artificial Sequence: Synthetic oligonucleotide
aaaacaguaaaccugggag

SEQ ID NO: 3047966 - RNA, 19 nt, Artificial Sequence
  Description of Artificial Sequence: Synthetic oligonucleotide
uuaauaguaaaauuuaagc

SEQ ID NO: 3047967 - RNA, 19 nt, Artificial Sequence
  Description of Artificial Sequence: Synthetic oligonucleotide
aaaauaauuuuacacauca

SEQ ID NO: 3047968 - RNA, 19 nt, Artificial Sequence
  Description of Artificial Sequence: Synthetic oligonucleotide
uaaaauuuaagcaaacacc

SEQ ID NO: 3047969 - RNA, 19 nt, Artificial Sequence
  Description of Artificial Sequence: Synthetic oligonucleotide
ugaugaaauacuaagaucu

SEQ ID NO: 3047970 - RNA, 19 nt, Artificial Sequence
  Description of Artificial Sequence: Synthetic oligonucleotide
aauaguaaaauuuaagcaa

SEQ ID NO: 3047971 - RNA, 19 nt, Artificial Sequence
  Description of Artificial Sequence: Synthetic oligonucleotide
agaaaugcaaacuaaguac

SEQ ID NO: 3047972 - RNA, 19 nt, Artificial Sequence
  Description of Artificial Sequence: Synthetic oligonucleotide
ucuaacuugacauucaaag

SEQ ID NO: 3047973 - RNA, 19 nt, Artificial Sequence
  Description of Artificial Sequence: Synthetic oligonucleotide
aaacuaaguaccaaguacc

SEQ ID NO: 3047974 - RNA, 19 nt, Artificial Sequence
  Description of Artificial Sequence: Synthetic oligonucleotide
uaauaguaaaauuuaagca

SEQ ID NO: 3047975 - RNA, 19 nt, Artificial Sequence
  Description of Artificial Sequence: Synthetic oligonucleotide
aaguaaaugcaagagauuc

SEQ ID NO: 3047976 - RNA, 19 nt, Artificial Sequence
  Description of Artificial Sequence: Synthetic oligonucleotide
aauacuaagaucucuagua

SEQ ID NO: 3047977 - RNA, 19 nt, Artificial Sequence
  Description of Artificial Sequence: Synthetic oligonucleotide
uggccuauaaaacaggccg

SEQ ID NO: 3047978 - RNA, 19 nt, Artificial Sequence
  Description of Artificial Sequence: Synthetic oligonucleotide
aaaauuuaagcaaacaccu

SEQ ID NO: 3047979 - RNA, 19 nt, Artificial Sequence
  Description of Artificial Sequence: Synthetic oligonucleotide
ugacauucaaaguaaaugc

SEQ ID NO: 3047980 - RNA, 19 nt, Artificial Sequence
  Description of Artificial Sequence: Synthetic oligonucleotide
aacaccuauaguaacaugg

SEQ ID NO: 3047981 - RNA, 19 nt, Artificial Sequence
  Description of Artificial Sequence: Synthetic oligonucleotide
uacaugaugaaauacuaag

SEQ ID NO: 3047982 - RNA, 19 nt, Artificial Sequence
  Description of Artificial Sequence: Synthetic oligonucleotide
uaucaugcaaugaugaagc

SEQ ID NO: 3047983 - RNA, 19 nt, Artificial Sequence
  Description of Artificial Sequence: Synthetic oligonucleotide
aagguaaauuauuacauga

SEQ ID NO: 3047984 - RNA, 19 nt, Artificial Sequence
  Description of Artificial Sequence: Synthetic oligonucleotide
aaauggaaaauaauuuuac

SEQ ID NO: 3047985 - RNA, 19 nt, Artificial Sequence
  Description of Artificial Sequence: Synthetic oligonucleotide
aauuuaagcaaacaccuau

SEQ ID NO: 3047986 - RNA, 19 nt, Artificial Sequence
  Description of Artificial Sequence: Synthetic oligonucleotide
cuuaauaguaaaauuuaag

SEQ ID NO: 3047987 - RNA, 19 nt, Artificial Sequence
  Description of Artificial Sequence: Synthetic oligonucleotide
aaaacuacuuaauaguaaa

SEQ ID NO: 3047988 - RNA, 19 nt, Artificial Sequence
  Description of Artificial Sequence: Synthetic oligonucleotide
accaaguacccuuugauac

SEQ ID NO: 3047989 - RNA, 19 nt, Artificial Sequence
  Description of Artificial Sequence: Synthetic oligonucleotide
uaacaguuaaguauguacc

SEQ ID NO: 3047990 - RNA, 19 nt, Artificial Sequence
  Description of Artificial Sequence: Synthetic oligonucleotide
uauuacaugaugaaauacu

SEQ ID NO: 3047991 - RNA, 19 nt, Artificial Sequence
  Description of Artificial Sequence: Synthetic oligonucleotide
guaaaauuuaagcaaacac

SEQ ID NO: 3047992 - RNA, 19 nt, Artificial Sequence
  Description of Artificial Sequence: Synthetic oligonucleotide
aauuauuacaugaugaaau

SEQ ID NO: 3047993 - RNA, 19 nt, Artificial Sequence
  Description of Artificial Sequence: Synthetic oligonucleotide
aaaugcaagagauucacaa

SEQ ID NO: 3047994 - RNA, 19 nt, Artificial Sequence
  Description of Artificial Sequence: Synthetic oligonucleotide
auucacaaaaucaugauag

SEQ ID NO: 3047995 - RNA, 19 nt, Artificial Sequence
  Description of Artificial Sequence: Synthetic oligonucleotide
uacccuuugauacacaagc

SEQ ID NO: 3047996 - RNA, 19 nt, Artificial Sequence
  Description of Artificial Sequence: Synthetic oligonucleotide
aaguauguaccacauagca

SEQ ID NO: 3047997 - RNA, 19 nt, Artificial Sequence
  Description of Artificial Sequence: Synthetic oligonucleotide
uaauuuuacacaucagaag

SEQ ID NO: 3047998 - RNA, 19 nt, Artificial Sequence
  Description of Artificial Sequence: Synthetic oligonucleotide
uuuaagcaaacaccuauag

SEQ ID NO: 3047999 - RNA, 19 nt, Artificial Sequence
  Description of Artificial Sequence: Synthetic oligonucleotide
aauggaaaauaauuuuaca

SEQ ID NO: 3048000 - RNA, 19 nt, Artificial Sequence
  Description of Artificial Sequence: Synthetic oligonucleotide
augaaaacuacuuaauagu

SEQ ID NO: 3048001 - RNA, 19 nt, Artificial Sequence
  Description of Artificial Sequence: Synthetic oligonucleotide
aaagaaauggaaaauaauu

SEQ ID NO: 3048002 - RNA, 19 nt, Artificial Sequence
  Description of Artificial Sequence: Synthetic oligonucleotide
uaccacauagcacugaaug

SEQ ID NO: 3048003 - RNA, 19 nt, Artificial Sequence
  Description of Artificial Sequence: Synthetic oligonucleotide
cuaacaguuaaguauguac

SEQ ID NO: 3048004 - RNA, 19 nt, Artificial Sequence
  Description of Artificial Sequence: Synthetic oligonucleotide
ugauaucaugcaaugauga

SEQ ID NO: 3048005 - RNA, 19 nt, Artificial Sequence
  Description of Artificial Sequence: Synthetic oligonucleotide
uugacauucaaaguaaaug

SEQ ID NO: 3048006 - RNA, 19 nt, Artificial Sequence
  Description of Artificial Sequence: Synthetic oligonucleotide
aaagguggccuauaaaaca

SEQ ID NO: 3048007 - RNA, 19 nt, Artificial Sequence
  Description of Artificial Sequence: Synthetic oligonucleotide
acaaaaucaugauagaaau

SEQ ID NO: 3048008 - RNA, 19 nt, Artificial Sequence
  Description of Artificial Sequence: Synthetic oligonucleotide
ugauacacaagccauguaa

SEQ ID NO: 3048009 - RNA, 19 nt, Artificial Sequence
  Description of Artificial Sequence: Synthetic oligonucleotide
uucaaaguaaaugcaagag

SEQ ID NO: 3048010 - RNA, 19 nt, Artificial Sequence
  Description of Artificial Sequence: Synthetic oligonucleotide
augaugaaauacuaagauc

SEQ ID NO: 3048011 - RNA, 19 nt, Artificial Sequence
  Description of Artificial Sequence: Synthetic oligonucleotide
aaaagguggccuauaaaac

SEQ ID NO: 3048012 - RNA, 19 nt, Artificial Sequence
  Description of Artificial Sequence: Synthetic oligonucleotide
uaaauuauuacaugaugaa

SEQ ID NO: 3048013 - RNA, 19 nt, Artificial Sequence
  Description of Artificial Sequence: Synthetic oligonucleotide
gaaaagguggccuauaaaa

SEQ ID NO: 3048014 - RNA, 19 nt, Artificial Sequence
  Description of Artificial Sequence: Synthetic oligonucleotide
gauagaaaugcaaacuaag

SEQ ID NO: 3048015 - RNA, 19 nt, Artificial Sequence
  Description of Artificial Sequence: Synthetic oligonucleotide
aaauacuaagaucucuagu

SEQ ID NO: 3048016 - RNA, 19 nt, Artificial Sequence
  Description of Artificial Sequence: Synthetic oligonucleotide
uuacacaucagaaggaaaa

SEQ ID NO: 3048017 - RNA, 19 nt, Artificial Sequence
  Description of Artificial Sequence: Synthetic oligonucleotide
aacaguuaaguauguacca

SEQ ID NO: 3048018 - RNA, 19 nt, Artificial Sequence
  Description of Artificial Sequence: Synthetic oligonucleotide
ugcucuaacaguuaaguau

SEQ ID NO: 3048019 - RNA, 19 nt, Artificial Sequence
  Description of Artificial Sequence: Synthetic oligonucleotide
caaacuaaguaccaaguac

SEQ ID NO: 3048020 - RNA, 19 nt, Artificial Sequence
  Description of Artificial Sequence: Synthetic oligonucleotide
aagcacagaagguugagga

SEQ ID NO: 3048021 - RNA, 19 nt, Artificial Sequence
  Description of Artificial Sequence: Synthetic oligonucleotide
aacaguaaaccugggaguc

SEQ ID NO: 3048022 - RNA, 19 nt, Artificial Sequence
  Description of Artificial Sequence: Synthetic oligonucleotide
uagaaaugcaaacuaagua

SEQ ID NO: 3048023 - RNA, 19 nt, Artificial Sequence
  Description of Artificial Sequence: Synthetic oligonucleotide
gaaaugcaaacuaaguacc

SEQ ID NO: 3048024 - RNA, 19 nt, Artificial Sequence
  Description of Artificial Sequence: Synthetic oligonucleotide
gaaauacuaagaucucuag

SEQ ID NO: 3048025 - RNA, 19 nt, Artificial Sequence
  Description of Artificial Sequence: Synthetic oligonucleotide
aacuaaguaccaaguaccc

SEQ ID NO: 3048026 - RNA, 19 nt, Artificial Sequence
  Description of Artificial Sequence: Synthetic oligonucleotide
aaacaguaaaccugggagu

SEQ ID NO: 3048027 - RNA, 19 nt, Artificial Sequence
  Description of Artificial Sequence: Synthetic oligonucleotide
cauucaaaguaaaugcaag

SEQ ID NO: 3048028 - RNA, 19 nt, Artificial Sequence
  Description of Artificial Sequence: Synthetic oligonucleotide
uacuuaauaguaaaauuua

SEQ ID NO: 3048029 - RNA, 19 nt, Artificial Sequence
  Description of Artificial Sequence: Synthetic oligonucleotide
agccauguaacuaucagac

SEQ ID NO: 3048030 - RNA, 19 nt, Artificial Sequence
  Description of Artificial Sequence: Synthetic oligonucleotide
aggaagguaaauuauuaca

SEQ ID NO: 3048031 - RNA, 19 nt, Artificial Sequence
  Description of Artificial Sequence: Synthetic oligonucleotide
ugaaaacuacuuaauagua

SEQ ID NO: 3048032 - RNA, 19 nt, Artificial Sequence
  Description of Artificial Sequence: Synthetic oligonucleotide
agaaauggaaaauaauuuu

SEQ ID NO: 3048033 - RNA, 19 nt, Artificial Sequence
  Description of Artificial Sequence: Synthetic oligonucleotide
guaaauuauuacaugauga

SEQ ID NO: 3048034 - RNA, 19 nt, Artificial Sequence
  Description of Artificial Sequence: Synthetic oligonucleotide
ugaaauacuaagaucucua

SEQ ID NO: 3048035 - RNA, 19 nt, Artificial Sequence
  Description of Artificial Sequence: Synthetic oligonucleotide
aagaaauggaaaauaauuu

SEQ ID NO: 3048036 - RNA, 19 nt, Artificial Sequence
  Description of Artificial Sequence: Synthetic oligonucleotide
aacuacuuaauaguaaaau

SEQ ID NO: 3048037 - RNA, 19 nt, Artificial Sequence
  Description of Artificial Sequence: Synthetic oligonucleotide
auaucaugcaaugaugaag

SEQ ID NO: 3048038 - RNA, 19 nt, Artificial Sequence
  Description of Artificial Sequence: Synthetic oligonucleotide
ucaugauagaaaugcaaac

SEQ ID NO: 3048039 - RNA, 19 nt, Artificial Sequence
  Description of Artificial Sequence: Synthetic oligonucleotide
ugaaugaaaacuacuuaau

SEQ ID NO: 3048040 - RNA, 19 nt, Artificial Sequence
  Description of Artificial Sequence: Synthetic oligonucleotide
aaaacaggccgaucuaacu

SEQ ID NO: 3048041 - RNA, 19 nt, Artificial Sequence
  Description of Artificial Sequence: Synthetic oligonucleotide
agcaaacaccuauaguaac

SEQ ID NO: 3048042 - RNA, 19 nt, Artificial Sequence
  Description of Artificial Sequence: Synthetic oligonucleotide
ugauagaaaugcaaacuaa

SEQ ID NO: 3048043 - RNA, 19 nt, Artificial Sequence
  Description of Artificial Sequence: Synthetic oligonucleotide
uaaguauguaccacauagc

SEQ ID NO: 3048044 - RNA, 19 nt, Artificial Sequence
  Description of Artificial Sequence: Synthetic oligonucleotide
aacaggccgaucuaacuug

SEQ ID NO: 3048045 - RNA, 19 nt, Artificial Sequence
  Description of Artificial Sequence: Synthetic oligonucleotide
aaauuauuacaugaugaaa

SEQ ID NO: 3048046 - RNA, 19 nt, Artificial Sequence
  Description of Artificial Sequence: Synthetic oligonucleotide
acuacuuaauaguaaaauu

SEQ ID NO: 3048047 - RNA, 19 nt, Artificial Sequence
  Description of Artificial Sequence: Synthetic oligonucleotide
aagagauucacaaaaucau

SEQ ID NO: 3048048 - RNA, 19 nt, Artificial Sequence
  Description of Artificial Sequence: Synthetic oligonucleotide
uuaagcaaacaccuauagu

SEQ ID NO: 3048049 - RNA, 19 nt, Artificial Sequence
  Description of Artificial Sequence: Synthetic oligonucleotide
aaaccugggaguccugcuc

SEQ ID NO: 3048050 - RNA, 19 nt, Artificial Sequence
  Description of Artificial Sequence: Synthetic oligonucleotide
gguaaauuauuacaugaug

SEQ ID NO: 3048051 - RNA, 19 nt, Artificial Sequence
  Description of Artificial Sequence: Synthetic oligonucleotide
ugcaaacuaaguaccaagu

SEQ ID NO: 3048052 - RNA, 19 nt, Artificial Sequence
  Description of Artificial Sequence: Synthetic oligonucleotide
aaugcaagagauucacaaa

SEQ ID NO: 3048053 - RNA, 19 nt, Artificial Sequence
  Description of Artificial Sequence: Synthetic oligonucleotide
augcaaacuaaguaccaag

SEQ ID NO: 3048054 - RNA, 19 nt, Artificial Sequence
  Description of Artificial Sequence: Synthetic oligonucleotide
aaaagaaauggaaaauaau

SEQ ID NO: 3048055 - RNA, 19 nt, Artificial Sequence
  Description of Artificial Sequence: Synthetic oligonucleotide
guauguaccacauagcacu

SEQ ID NO: 3048056 - RNA, 19 nt, Artificial Sequence
  Description of Artificial Sequence: Synthetic oligonucleotide
ugaggaagguaaauuauua

SEQ ID NO: 3048057 - RNA, 19 nt, Artificial Sequence
  Description of Artificial Sequence: Synthetic oligonucleotide
aagccauguaacuaucaga

SEQ ID NO: 3048058 - RNA, 19 nt, Artificial Sequence
  Description of Artificial Sequence: Synthetic oligonucleotide
auagcacugaaugaaaacu

SEQ ID NO: 3048059 - RNA, 19 nt, Artificial Sequence
  Description of Artificial Sequence: Synthetic oligonucleotide
aaauaauuuuacacaucag

SEQ ID NO: 3048060 - RNA, 19 nt, Artificial Sequence
  Description of Artificial Sequence: Synthetic oligonucleotide
auuauuacaugaugaaaua

SEQ ID NO: 3048061 - RNA, 19 nt, Artificial Sequence
  Description of Artificial Sequence: Synthetic oligonucleotide
uuauuacaugaugaaauac

SEQ ID NO: 3048062 - RNA, 19 nt, Artificial Sequence
  Description of Artificial Sequence: Synthetic oligonucleotide
augauagaaaugcaaacua

SEQ ID NO: 3048063 - RNA, 19 nt, Artificial Sequence
  Description of Artificial Sequence: Synthetic oligonucleotide
uuugauacacaagccaugu

SEQ ID NO: 3048064 - RNA, 19 nt, Artificial Sequence
  Description of Artificial Sequence: Synthetic oligonucleotide
gaugaagcacagaagguug

SEQ ID NO: 3048065 - RNA, 19 nt, Artificial Sequence
  Description of Artificial Sequence: Synthetic oligonucleotide
augcaagagauucacaaaa

SEQ ID NO: 3048066 - RNA, 19 nt, Artificial Sequence
  Description of Artificial Sequence: Synthetic oligonucleotide
acaguuaaguauguaccac

SEQ ID NO: 3048067 - RNA, 19 nt, Artificial Sequence
  Description of Artificial Sequence: Synthetic oligonucleotide
aaucaugauagaaaugcaa

SEQ ID NO: 3048068 - RNA, 19 nt, Artificial Sequence
  Description of Artificial Sequence: Synthetic oligonucleotide
uuacaugaugaaauacuaa

SEQ ID NO: 3048069 - RNA, 19 nt, Artificial Sequence
  Description of Artificial Sequence: Synthetic oligonucleotide
aagguggccuauaaaacag

SEQ ID NO: 3048070 - RNA, 19 nt, Artificial Sequence
  Description of Artificial Sequence: Synthetic oligonucleotide
cugaaugaaaacuacuuaa

SEQ ID NO: 3048071 - RNA, 19 nt, Artificial Sequence
  Description of Artificial Sequence: Synthetic oligonucleotide
aguaaaauuuaagcaaaca

SEQ ID NO: 3048072 - RNA, 19 nt, Artificial Sequence
  Description of Artificial Sequence: Synthetic oligonucleotide
uaguaaaauuuaagcaaac

SEQ ID NO: 3048073 - RNA, 19 nt, Artificial Sequence
  Description of Artificial Sequence: Synthetic oligonucleotide
gagauucacaaaaucauga

SEQ ID NO: 3048074 - RNA, 19 nt, Artificial Sequence
  Description of Artificial Sequence: Synthetic oligonucleotide
aaacaggccgaucuaacuu

SEQ ID NO: 3048075 - RNA, 19 nt, Artificial Sequence
  Description of Artificial Sequence: Synthetic oligonucleotide
aguauguaccacauagcac

SEQ ID NO: 3048076 - RNA, 19 nt, Artificial Sequence
  Description of Artificial Sequence: Synthetic oligonucleotide
gaggaagguaaauuauuac

SEQ ID NO: 3048077 - RNA, 19 nt, Artificial Sequence
  Description of Artificial Sequence: Synthetic oligonucleotide
uaaaacaggccgaucuaac

SEQ ID NO: 3048078 - RNA, 19 nt, Artificial Sequence
  Description of Artificial Sequence: Synthetic oligonucleotide
cauagcacugaaugaaaac

SEQ ID NO: 3048079 - RNA, 19 nt, Artificial Sequence
  Description of Artificial Sequence: Synthetic oligonucleotide
guaaaugcaagagauucac

SEQ ID NO: 3048080 - RNA, 19 nt, Artificial Sequence
  Description of Artificial Sequence: Synthetic oligonucleotide
gaaugaaaacuacuuaaua

SEQ ID NO: 3048081 - RNA, 19 nt, Artificial Sequence
  Description of Artificial Sequence: Synthetic oligonucleotide
cacaaaaucaugauagaaa

SEQ ID NO: 3048082 - RNA, 19 nt, Artificial Sequence
  Description of Artificial Sequence: Synthetic oligonucleotide
accuauaguaacaugggug

SEQ ID NO: 3048083 - RNA, 19 nt, Artificial Sequence
  Description of Artificial Sequence: Synthetic oligonucleotide
uuuuacacaucagaaggaa

SEQ ID NO: 3048084 - RNA, 19 nt, Artificial Sequence
  Description of Artificial Sequence: Synthetic oligonucleotide
uauaaaacaggccgaucua

SEQ ID NO: 3048085 - RNA, 19 nt, Artificial Sequence
  Description of Artificial Sequence: Synthetic oligonucleotide
caaaaucaugauagaaaug

SEQ ID NO: 3048086 - RNA, 19 nt, Artificial Sequence
  Description of Artificial Sequence: Synthetic oligonucleotide
auaguaaaauuuaagcaaa

SEQ ID NO: 3048087 - RNA, 19 nt, Artificial Sequence
  Description of Artificial Sequence: Synthetic oligonucleotide
aaacaccuauaguaacaug

SEQ ID NO: 3048088 - RNA, 19 nt, Artificial Sequence
  Description of Artificial Sequence: Synthetic oligonucleotide
uuuacacaucagaaggaaa

SEQ ID NO: 3048089 - RNA, 19 nt, Artificial Sequence
  Description of Artificial Sequence: Synthetic oligonucleotide
caaaguaaaugcaagagau

SEQ ID NO: 3048090 - RNA, 19 nt, Artificial Sequence
  Description of Artificial Sequence: Synthetic oligonucleotide
uguaccacauagcacugaa

SEQ ID NO: 3048091 - RNA, 19 nt, Artificial Sequence
  Description of Artificial Sequence: Synthetic oligonucleotide
uucacaaaaucaugauaga

SEQ ID NO: 3048092 - RNA, 19 nt, Artificial Sequence
  Description of Artificial Sequence: Synthetic oligonucleotide
gauacacaagccauguaac

SEQ ID NO: 3048093 - RNA, 19 nt, Artificial Sequence
  Description of Artificial Sequence: Synthetic oligonucleotide
caaugaugaagcacagaag

SEQ ID NO: 3048094 - RNA, 19 nt, Artificial Sequence
  Description of Artificial Sequence: Synthetic oligonucleotide
ucacaaaaucaugauagaa

SEQ ID NO: 3048095 - RNA, 19 nt, Artificial Sequence
  Description of Artificial Sequence: Synthetic oligonucleotide
auagaaaugcaaacuaagu

SEQ ID NO: 3048096 - RNA, 19 nt, Artificial Sequence
  Description of Artificial Sequence: Synthetic oligonucleotide
acugaaugaaaacuacuua

SEQ ID NO: 3048097 - RNA, 19 nt, Artificial Sequence
  Description of Artificial Sequence: Synthetic oligonucleotide
cuuugauacacaagccaug

SEQ ID NO: 3048098 - RNA, 19 nt, Artificial Sequence
  Description of Artificial Sequence: Synthetic oligonucleotide
uacacaucagaaggaaaag

SEQ ID NO: 3048099 - RNA, 19 nt, Artificial Sequence
  Description of Artificial Sequence: Synthetic oligonucleotide
uacuaagaucucuaguaaa

SEQ ID NO: 3048100 - RNA, 19 nt, Artificial Sequence
  Description of Artificial Sequence: Synthetic oligonucleotide
cacagaagguugaggaagg

SEQ ID NO: 3048101 - RNA, 19 nt, Artificial Sequence
  Description of Artificial Sequence: Synthetic oligonucleotide
agcacugaaugaaaacuac

SEQ ID NO: 3048102 - RNA, 19 nt, Artificial Sequence
  Description of Artificial Sequence: Synthetic oligonucleotide
auacuaagaucucuaguaa

SEQ ID NO: 3048103 - RNA, 19 nt, Artificial Sequence
  Description of Artificial Sequence: Synthetic oligonucleotide
gauucacaaaaucaugaua

SEQ ID NO: 3048104 - RNA, 19 nt, Artificial Sequence
  Description of Artificial Sequence: Synthetic oligonucleotide
caagccauguaacuaucag

SEQ ID NO: 3048105 - RNA, 19 nt, Artificial Sequence
  Description of Artificial Sequence: Synthetic oligonucleotide
aaaucaugauagaaaugca

SEQ ID NO: 3048106 - RNA, 19 nt, Artificial Sequence
  Description of Artificial Sequence: Synthetic oligonucleotide
agauucacaaaaucaugau

SEQ ID NO: 3048107 - RNA, 19 nt, Artificial Sequence
  Description of Artificial Sequence: Synthetic oligonucleotide
aaugcaaacuaaguaccaa

SEQ ID NO: 3048108 - RNA, 19 nt, Artificial Sequence
  Description of Artificial Sequence: Synthetic oligonucleotide
guaacauggguguuuaaaa

SEQ ID NO: 3048109 - RNA, 19 nt, Artificial Sequence
  Description of Artificial Sequence: Synthetic oligonucleotide
auacacaagccauguaacu

SEQ ID NO: 3048110 - RNA, 19 nt, Artificial Sequence
  Description of Artificial Sequence: Synthetic oligonucleotide
agaagguugaggaagguaa

SEQ ID NO: 3048111 - RNA, 19 nt, Artificial Sequence
  Description of Artificial Sequence: Synthetic oligonucleotide
cuacuuaauaguaaaauuu

SEQ ID NO: 3048112 - RNA, 19 nt, Artificial Sequence
  Description of Artificial Sequence: Synthetic oligonucleotide
uauguaccacauagcacug

SEQ ID NO: 3048113 - RNA, 19 nt, Artificial Sequence
  Description of Artificial Sequence: Synthetic oligonucleotide
gacauucaaaguaaaugca

SEQ ID NO: 3048114 - RNA, 19 nt, Artificial Sequence
  Description of Artificial Sequence: Synthetic oligonucleotide
aaaugcaaacuaaguacca

SEQ ID NO: 3048115 - RNA, 19 nt, Artificial Sequence
  Description of Artificial Sequence: Synthetic oligonucleotide
cuauaaaacaggccgaucu

SEQ ID NO: 3048116 - RNA, 19 nt, Artificial Sequence
  Description of Artificial Sequence: Synthetic oligonucleotide
uagcacugaaugaaaacua

SEQ ID NO: 3048117 - RNA, 19 nt, Artificial Sequence
  Description of Artificial Sequence: Synthetic oligonucleotide
gaaaacuacuuaauaguaa

SEQ ID NO: 3048118 - RNA, 19 nt, Artificial Sequence
  Description of Artificial Sequence: Synthetic oligonucleotide
augaaauacuaagaucucu

SEQ ID NO: 3048119 - RNA, 19 nt, Artificial Sequence
  Description of Artificial Sequence: Synthetic oligonucleotide
acaccuauaguaacauggg

SEQ ID NO: 3048120 - RNA, 19 nt, Artificial Sequence
  Description of Artificial Sequence: Synthetic oligonucleotide
ucaugcaaugaugaagcac

SEQ ID NO: 3048121 - RNA, 19 nt, Artificial Sequence
  Description of Artificial Sequence: Synthetic oligonucleotide
agagauucacaaaaucaug

SEQ ID NO: 3048122 - RNA, 19 nt, Artificial Sequence
  Description of Artificial Sequence: Synthetic oligonucleotide
accacauagcacugaauga

SEQ ID NO: 3048123 - RNA, 19 nt, Artificial Sequence
  Description of Artificial Sequence: Synthetic oligonucleotide
aguaccaaguacccuuuga

SEQ ID NO: 3048124 - RNA, 19 nt, Artificial Sequence
  Description of Artificial Sequence: Synthetic oligonucleotide
aguaacauggguguuuaaa

SEQ ID NO: 3048125 - RNA, 19 nt, Artificial Sequence
  Description of Artificial Sequence: Synthetic oligonucleotide
aucaugauagaaaugcaaa

SEQ ID NO: 3048126 - RNA, 19 nt, Artificial Sequence
  Description of Artificial Sequence: Synthetic oligonucleotide
gauaucaugcaaugaugaa

SEQ ID NO: 3048127 - RNA, 19 nt, Artificial Sequence
  Description of Artificial Sequence: Synthetic oligonucleotide
aguacccuuugauacacaa

SEQ ID NO: 3048128 - RNA, 19 nt, Artificial Sequence
  Description of Artificial Sequence: Synthetic oligonucleotide
aaccugggaguccugcucu

SEQ ID NO: 3048129 - RNA, 19 nt, Artificial Sequence
  Description of Artificial Sequence: Synthetic oligonucleotide
auuacaugaugaaauacua

SEQ ID NO: 3048130 - RNA, 19 nt, Artificial Sequence
  Description of Artificial Sequence: Synthetic oligonucleotide
augauaucaugcaaugaug

SEQ ID NO: 3048131 - RNA, 19 nt, Artificial Sequence
  Description of Artificial Sequence: Synthetic oligonucleotide
acaugaugaaauacuaaga

SEQ ID NO: 3048132 - RNA, 19 nt, Artificial Sequence
  Description of Artificial Sequence: Synthetic oligonucleotide
acuaagaucucuaguaaaa

SEQ ID NO: 3048133 - RNA, 19 nt, Artificial Sequence
  Description of Artificial Sequence: Synthetic oligonucleotide
acaguaaaccugggagucc

SEQ ID NO: 3048134 - RNA, 19 nt, Artificial Sequence
  Description of Artificial Sequence: Synthetic oligonucleotide
uauaguaacauggguguuu

SEQ ID NO: 3048135 - RNA, 19 nt, Artificial Sequence
  Description of Artificial Sequence: Synthetic oligonucleotide
caugaugaaauacuaagau

SEQ ID NO: 3048136 - RNA, 19 nt, Artificial Sequence
  Description of Artificial Sequence: Synthetic oligonucleotide
gaugaaauacuaagaucuc

SEQ ID NO: 3048137 - RNA, 19 nt, Artificial Sequence
  Description of Artificial Sequence: Synthetic oligonucleotide
uacacaagccauguaacua

SEQ ID NO: 3048138 - RNA, 19 nt, Artificial Sequence
  Description of Artificial Sequence: Synthetic oligonucleotide
aaacuacuuaauaguaaaa

SEQ ID NO: 3048139 - RNA, 19 nt, Artificial Sequence
  Description of Artificial Sequence: Synthetic oligonucleotide
auuuuacacaucagaagga

SEQ ID NO: 3048140 - RNA, 19 nt, Artificial Sequence
  Description of Artificial Sequence: Synthetic oligonucleotide
acauucaaaguaaaugcaa

SEQ ID NO: 3048141 - RNA, 19 nt, Artificial Sequence
  Description of Artificial Sequence: Synthetic oligonucleotide
acccuuugauacacaagcc

SEQ ID NO: 3048142 - RNA, 19 nt, Artificial Sequence
  Description of Artificial Sequence: Synthetic oligonucleotide
aguaaaugcaagagauuca

SEQ ID NO: 3048143 - RNA, 19 nt, Artificial Sequence
  Description of Artificial Sequence: Synthetic oligonucleotide
aaaguaaaugcaagagauu

SEQ ID NO: 3048144 - RNA, 19 nt, Artificial Sequence
  Description of Artificial Sequence: Synthetic oligonucleotide
gaucuaacuugacauucaa

SEQ ID NO: 3048145 - RNA, 19 nt, Artificial Sequence
  Description of Artificial Sequence: Synthetic oligonucleotide
aaguaccaaguacccuuug

SEQ ID NO: 3048146 - RNA, 19 nt, Artificial Sequence
  Description of Artificial Sequence: Synthetic oligonucleotide
caguuaaguauguaccaca

SEQ ID NO: 3048147 - RNA, 19 nt, Artificial Sequence
  Description of Artificial Sequence: Synthetic oligonucleotide
ugggaguccugcucuaaca

SEQ ID NO: 3048148 - RNA, 19 nt, Artificial Sequence
  Description of Artificial Sequence: Synthetic oligonucleotide
uaccaaguacccuuugaua

SEQ ID NO: 3048149 - RNA, 19 nt, Artificial Sequence
  Description of Artificial Sequence: Synthetic oligonucleotide
gcucuaacaguuaaguaug

SEQ ID NO: 3048150 - RNA, 19 nt, Artificial Sequence
  Description of Artificial Sequence: Synthetic oligonucleotide
auaaaacaggccgaucuaa

SEQ ID NO: 3048151 - RNA, 19 nt, Artificial Sequence
  Description of Artificial Sequence: Synthetic oligonucleotide
cacaucagaaggaaaaggu

SEQ ID NO: 3048152 - RNA, 19 nt, Artificial Sequence
  Description of Artificial Sequence: Synthetic oligonucleotide
uaaaccugggaguccugcu

SEQ ID NO: 3048153 - RNA, 19 nt, Artificial Sequence
  Description of Artificial Sequence: Synthetic oligonucleotide
agaaggaaaagguggccua

SEQ ID NO: 3048154 - RNA, 19 nt, Artificial Sequence
  Description of Artificial Sequence: Synthetic oligonucleotide
uaaguaccaaguacccuuu

SEQ ID NO: 3048155 - RNA, 19 nt, Artificial Sequence
  Description of Artificial Sequence: Synthetic oligonucleotide
caaguacccuuugauacac

SEQ ID NO: 3048156 - RNA, 19 nt, Artificial Sequence
  Description of Artificial Sequence: Synthetic oligonucleotide
aguuaaguauguaccacau

SEQ ID NO: 3048157 - RNA, 19 nt, Artificial Sequence
  Description of Artificial Sequence: Synthetic oligonucleotide
aggaaaagguggccuauaa

SEQ ID NO: 3048158 - RNA, 19 nt, Artificial Sequence
  Description of Artificial Sequence: Synthetic oligonucleotide
caugauagaaaugcaaacu

SEQ ID NO: 3048159 - RNA, 19 nt, Artificial Sequence
  Description of Artificial Sequence: Synthetic oligonucleotide
cuaaguaccaaguacccuu

SEQ ID NO: 3048160 - RNA, 19 nt, Artificial Sequence
  Description of Artificial Sequence: Synthetic oligonucleotide
aagguugaggaagguaaau

SEQ ID NO: 3048161 - RNA, 19 nt, Artificial Sequence
  Description of Artificial Sequence: Synthetic oligonucleotide
aggccgaucuaacuugaca

SEQ ID NO: 3048162 - RNA, 19 nt, Artificial Sequence
  Description of Artificial Sequence: Synthetic oligonucleotide
agguaaauuauuacaugau

SEQ ID NO: 3048163 - RNA, 19 nt, Artificial Sequence
  Description of Artificial Sequence: Synthetic oligonucleotide
acuaaguaccaaguacccu

SEQ ID NO: 3048164 - RNA, 19 nt, Artificial Sequence
  Description of Artificial Sequence: Synthetic oligonucleotide
gguugaggaagguaaauua

SEQ ID NO: 3048165 - RNA, 19 nt, Artificial Sequence
  Description of Artificial Sequence: Synthetic oligonucleotide
ucuaacaguuaaguaugua

SEQ ID NO: 3048166 - RNA, 19 nt, Artificial Sequence
  Description of Artificial Sequence: Synthetic oligonucleotide
gcacagaagguugaggaag

SEQ ID NO: 3048167 - RNA, 19 nt, Artificial Sequence
  Description of Artificial Sequence: Synthetic oligonucleotide
guaaaccugggaguccugc

SEQ ID NO: 3048168 - RNA, 19 nt, Artificial Sequence
  Description of Artificial Sequence: Synthetic oligonucleotide
aucaugcaaugaugaagca

SEQ ID NO: 3048169 - RNA, 19 nt, Artificial Sequence
  Description of Artificial Sequence: Synthetic oligonucleotide
auaguaacauggguguuua

SEQ ID NO: 3048170 - RNA, 19 nt, Artificial Sequence
  Description of Artificial Sequence: Synthetic oligonucleotide
auuuaagcaaacaccuaua

SEQ ID NO: 3048171 - RNA, 19 nt, Artificial Sequence
  Description of Artificial Sequence: Synthetic oligonucleotide
agcacagaagguugaggaa

SEQ ID NO: 3048172 - RNA, 19 nt, Artificial Sequence
  Description of Artificial Sequence: Synthetic oligonucleotide
uugauacacaagccaugua

SEQ ID NO: 3048173 - RNA, 19 nt, Artificial Sequence
  Description of Artificial Sequence: Synthetic oligonucleotide
guacccuuugauacacaag

SEQ ID NO: 3048174 - RNA, 19 nt, Artificial Sequence
  Description of Artificial Sequence: Synthetic oligonucleotide
guggccuauaaaacaggcc

SEQ ID NO: 3048175 - RNA, 19 nt, Artificial Sequence
  Description of Artificial Sequence: Synthetic oligonucleotide
cacaagccauguaacuauc

SEQ ID NO: 3048176 - RNA, 19 nt, Artificial Sequence
  Description of Artificial Sequence: Synthetic oligonucleotide
gguggccuauaaaacaggc

SEQ ID NO: 3048177 - RNA, 19 nt, Artificial Sequence
  Description of Artificial Sequence: Synthetic oligonucleotide
acauagcacugaaugaaaa

SEQ ID NO: 3048178 - RNA, 19 nt, Artificial Sequence
  Description of Artificial Sequence: Synthetic oligonucleotide
ggaagguaaauuauuacau

SEQ ID NO: 3048179 - RNA, 19 nt, Artificial Sequence
  Description of Artificial Sequence: Synthetic oligonucleotide
agguggccuauaaaacagg

SEQ ID NO: 3048180 - RNA, 19 nt, Artificial Sequence
  Description of Artificial Sequence: Synthetic oligonucleotide
guuaaguauguaccacaua

SEQ ID NO: 3048181 - RNA, 19 nt, Artificial Sequence
  Description of Artificial Sequence: Synthetic oligonucleotide
agguugaggaagguaaauu

SEQ ID NO: 3048182 - RNA, 19 nt, Artificial Sequence
  Description of Artificial Sequence: Synthetic oligonucleotide
gaagguugaggaagguaaa

SEQ ID NO: 3048183 - RNA, 19 nt, Artificial Sequence
  Description of Artificial Sequence: Synthetic oligonucleotide
ccuauaguaacaugggugu

SEQ ID NO: 3048184 - RNA, 19 nt, Artificial Sequence
  Description of Artificial Sequence: Synthetic oligonucleotide
gcaaacaccuauaguaaca

SEQ ID NO: 3048185 - RNA, 19 nt, Artificial Sequence
  Description of Artificial Sequence: Synthetic oligonucleotide
acaagccauguaacuauca

SEQ ID NO: 3048186 - RNA, 19 nt, Artificial Sequence
  Description of Artificial Sequence: Synthetic oligonucleotide
guaccaaguacccuuugau

SEQ ID NO: 3048187 - RNA, 19 nt, Artificial Sequence
  Description of Artificial Sequence: Synthetic oligonucleotide
aaggaaaagguggccuaua

SEQ ID NO: 3048188 - RNA, 19 nt, Artificial Sequence
  Description of Artificial Sequence: Synthetic oligonucleotide
augaagcacagaagguuga

SEQ ID NO: 3048189 - RNA, 19 nt, Artificial Sequence
  Description of Artificial Sequence: Synthetic oligonucleotide
cugggaguccugcucuaac

SEQ ID NO: 3048190 - RNA, 19 nt, Artificial Sequence
  Description of Artificial Sequence: Synthetic oligonucleotide
gcaaacuaaguaccaagua

SEQ ID NO: 3048191 - RNA, 19 nt, Artificial Sequence
  Description of Artificial Sequence: Synthetic oligonucleotide
acuugacauucaaaguaaa

SEQ ID NO: 3048192 - RNA, 19 nt, Artificial Sequence
  Description of Artificial Sequence: Synthetic oligonucleotide
aucuaacuugacauucaaa

SEQ ID NO: 3048193 - RNA, 19 nt, Artificial Sequence
  Description of Artificial Sequence: Synthetic oligonucleotide
ggaaaagguggccuauaaa

SEQ ID NO: 3048194 - RNA, 19 nt, Artificial Sequence
  Description of Artificial Sequence: Synthetic oligonucleotide
cccuuugauacacaagcca

SEQ ID NO: 3048195 - RNA, 19 nt, Artificial Sequence
  Description of Artificial Sequence: Synthetic oligonucleotide
ccgaucuaacuugacauuc

SEQ ID NO: 3048196 - RNA, 19 nt, Artificial Sequence
  Description of Artificial Sequence: Synthetic oligonucleotide
uaguaacauggguguuuaa

SEQ ID NO: 3048197 - RNA, 19 nt, Artificial Sequence
  Description of Artificial Sequence: Synthetic oligonucleotide
acagaagguugaggaaggu

SEQ ID NO: 3048198 - RNA, 19 nt, Artificial Sequence
  Description of Artificial Sequence: Synthetic oligonucleotide
ggccgaucuaacuugacau

SEQ ID NO: 3048199 - RNA, 19 nt, Artificial Sequence
  Description of Artificial Sequence: Synthetic oligonucleotide
guccugcucuaacaguuaa

SEQ ID NO: 3048200 - RNA, 19 nt, Artificial Sequence
  Description of Artificial Sequence: Synthetic oligonucleotide
auguaccacauagcacuga

SEQ ID NO: 3048201 - RNA, 19 nt, Artificial Sequence
  Description of Artificial Sequence: Synthetic oligonucleotide
aaguacccuuugauacaca

SEQ ID NO: 3048202 - RNA, 19 nt, Artificial Sequence
  Description of Artificial Sequence: Synthetic oligonucleotide
gaguccugcucuaacaguu

SEQ ID NO: 3048203 - RNA, 19 nt, Artificial Sequence
  Description of Artificial Sequence: Synthetic oligonucleotide
caaacaccuauaguaacau

SEQ ID NO: 3048204 - RNA, 19 nt, Artificial Sequence
  Description of Artificial Sequence: Synthetic oligonucleotide
ccaaguacccuuugauaca

SEQ ID NO: 3048205 - RNA, 19 nt, Artificial Sequence
  Description of Artificial Sequence: Synthetic oligonucleotide
acaggccgaucuaacuuga

SEQ ID NO: 3048206 - RNA, 19 nt, Artificial Sequence
  Description of Artificial Sequence: Synthetic oligonucleotide
gaaggaaaagguggccuau

SEQ ID NO: 3048207 - RNA, 19 nt, Artificial Sequence
  Description of Artificial Sequence: Synthetic oligonucleotide
caccuauaguaacaugggu

SEQ ID NO: 3048208 - RNA, 19 nt, Artificial Sequence
  Description of Artificial Sequence: Synthetic oligonucleotide
caggccgaucuaacuugac

SEQ ID NO: 3048209 - RNA, 19 nt, Artificial Sequence
  Description of Artificial Sequence: Synthetic oligonucleotide
cucuaacaguuaaguaugu

SEQ ID NO: 3048210 - RNA, 19 nt, Artificial Sequence
  Description of Artificial Sequence: Synthetic oligonucleotide
aguaaaccugggaguccug

SEQ ID NO: 3048211 - RNA, 19 nt, Artificial Sequence
  Description of Artificial Sequence: Synthetic oligonucleotide
ccuuugauacacaagccau

SEQ ID NO: 3048212 - RNA, 19 nt, Artificial Sequence
  Description of Artificial Sequence: Synthetic oligonucleotide
ggccuauaaaacaggccga

SEQ ID NO: 3048213 - RNA, 19 nt, Artificial Sequence
  Description of Artificial Sequence: Synthetic oligonucleotide
cagaagguugaggaaggua

SEQ ID NO: 3048214 - RNA, 19 nt, Artificial Sequence
  Description of Artificial Sequence: Synthetic oligonucleotide
caguaaaccugggaguccu

SEQ ID NO: 3048215 - RNA, 19 nt, Artificial Sequence
  Description of Artificial Sequence: Synthetic oligonucleotide
ccuauaaaacaggccgauc

SEQ ID NO: 3048216 - RNA, 19 nt, Artificial Sequence
  Description of Artificial Sequence: Synthetic oligonucleotide
aguccugcucuaacaguua

SEQ ID NO: 3048217 - RNA, 19 nt, Artificial Sequence
  Description of Artificial Sequence: Synthetic oligonucleotide
ccugcucuaacaguuaagu

SEQ ID NO: 3048218 - RNA, 19 nt, Artificial Sequence
  Description of Artificial Sequence: Synthetic oligonucleotide
cgaucuaacuugacauuca

SEQ ID NO: 3048219 - RNA, 19 nt, Artificial Sequence
  Description of Artificial Sequence: Synthetic oligonucleotide
ggaguccugcucuaacagu

SEQ ID NO: 3048220 - RNA, 19 nt, Artificial Sequence
  Description of Artificial Sequence: Synthetic oligonucleotide
guaccacauagcacugaau

SEQ ID NO: 3048221 - RNA, 19 nt, Artificial Sequence
  Description of Artificial Sequence: Synthetic oligonucleotide
gccuauaaaacaggccgau

SEQ ID NO: 3048222 - RNA, 19 nt, Artificial Sequence
  Description of Artificial Sequence: Synthetic oligonucleotide
gccgaucuaacuugacauu

SEQ ID NO: 3048223 - RNA, 19 nt, Artificial Sequence
  Description of Artificial Sequence: Synthetic oligonucleotide
ccugggaguccugcucuaa

SEQ ID NO: 3048224 - RNA, 19 nt, Artificial Sequence
  Description of Artificial Sequence: Synthetic oligonucleotide
aauaguuaggaauugcucu

SEQ ID NO: 3048225 - RNA, 19 nt, Artificial Sequence
  Description of Artificial Sequence: Synthetic oligonucleotide
uguaagucuucaaugagug

SEQ ID NO: 3048226 - RNA, 19 nt, Artificial Sequence
  Description of Artificial Sequence: Synthetic oligonucleotide
uuuguugaaggcuucauga

SEQ ID NO: 3048227 - RNA, 19 nt, Artificial Sequence
  Description of Artificial Sequence: Synthetic oligonucleotide
gagcaugucauccaugucg

SEQ ID NO: 3048228 - RNA, 19 nt, Artificial Sequence
  Description of Artificial Sequence: Synthetic oligonucleotide
ggauuuguuccuuagaacg

SEQ ID NO: 3048229 - RNA, 19 nt, Artificial Sequence
  Description of Artificial Sequence: Synthetic oligonucleotide
uguugaaggcuucaugagg

SEQ ID NO: 3048230 - RNA, 19 nt, Artificial Sequence
  Description of Artificial Sequence: Synthetic oligonucleotide
ucuucaaugagugacacaa

SEQ ID NO: 3048231 - RNA, 19 nt, Artificial Sequence
  Description of Artificial Sequence: Synthetic oligonucleotide
uuaggaauugcucuagcac

SEQ ID NO: 3048232 - RNA, 19 nt, Artificial Sequence
  Description of Artificial Sequence: Synthetic oligonucleotide
uucaaugagugacacaacu

SEQ ID NO: 3048233 - RNA, 19 nt, Artificial Sequence
  Description of Artificial Sequence: Synthetic oligonucleotide
aagagcaugucauccaugu

SEQ ID NO: 3048234 - RNA, 19 nt, Artificial Sequence
  Description of Artificial Sequence: Synthetic oligonucleotide
uaagucuucaaugagugac

SEQ ID NO: 3048235 - RNA, 19 nt, Artificial Sequence
  Description of Artificial Sequence: Synthetic oligonucleotide
uuuggcuucagccacugac

SEQ ID NO: 3048236 - RNA, 19 nt, Artificial Sequence
  Description of Artificial Sequence: Synthetic oligonucleotide
uguucccucacccaggucu

SEQ ID NO: 3048237 - RNA, 19 nt, Artificial Sequence
  Description of Artificial Sequence: Synthetic oligonucleotide
ucuguaagucuucaaugag

SEQ ID NO: 3048238 - RNA, 19 nt, Artificial Sequence
  Description of Artificial Sequence: Synthetic oligonucleotide
acuggaacugccugaagcg

SEQ ID NO: 3048239 - RNA, 19 nt, Artificial Sequence
  Description of Artificial Sequence: Synthetic oligonucleotide
uacuggaacugccugaagc

SEQ ID NO: 3048240 - RNA, 19 nt, Artificial Sequence
  Description of Artificial Sequence: Synthetic oligonucleotide
ucucuguaagucuucaaug

SEQ ID NO: 3048241 - RNA, 19 nt, Artificial Sequence
  Description of Artificial Sequence: Synthetic oligonucleotide
uaggaauugcucuagcaca

SEQ ID NO: 3048242 - RNA, 19 nt, Artificial Sequence
  Description of Artificial Sequence: Synthetic oligonucleotide
auugcucuagcacaagcag

SEQ ID NO: 3048243 - RNA, 19 nt, Artificial Sequence
  Description of Artificial Sequence: Synthetic oligonucleotide
ucuuccaagagcaugucau

SEQ ID NO: 3048244 - RNA, 19 nt, Artificial Sequence
  Description of Artificial Sequence: Synthetic oligonucleotide
aggauuuguuccuuagaac

SEQ ID NO: 3048245 - RNA, 19 nt, Artificial Sequence
  Description of Artificial Sequence: Synthetic oligonucleotide
aacuggugccaguucuucc

SEQ ID NO: 3048246 - RNA, 19 nt, Artificial Sequence
  Description of Artificial Sequence: Synthetic oligonucleotide
auugucugggcaguguucc

SEQ ID NO: 3048247 - RNA, 19 nt, Artificial Sequence
  Description of Artificial Sequence: Synthetic oligonucleotide
gacagcaaagcucccagag

SEQ ID NO: 3048248 - RNA, 19 nt, Artificial Sequence
  Description of Artificial Sequence: Synthetic oligonucleotide
cuuagaacgcaucuuuggc

SEQ ID NO: 3048249 - RNA, 19 nt, Artificial Sequence
  Description of Artificial Sequence: Synthetic oligonucleotide
uguuccuuagaacgcaucu

SEQ ID NO: 3048250 - RNA, 19 nt, Artificial Sequence
  Description of Artificial Sequence: Synthetic oligonucleotide
aacucuuucucuauugucu

SEQ ID NO: 3048251 - RNA, 19 nt, Artificial Sequence
  Description of Artificial Sequence: Synthetic oligonucleotide
ucuuucucuauugucuggg

SEQ ID NO: 3048252 - RNA, 19 nt, Artificial Sequence
  Description of Artificial Sequence: Synthetic oligonucleotide
agcacaagcaguuccagga

SEQ ID NO: 3048253 - RNA, 19 nt, Artificial Sequence
  Description of Artificial Sequence: Synthetic oligonucleotide
uacuguuccaacuggugcc

SEQ ID NO: 3048254 - RNA, 19 nt, Artificial Sequence
  Description of Artificial Sequence: Synthetic oligonucleotide
uuagaacgcaucuuuggcu

SEQ ID NO: 3048255 - RNA, 19 nt, Artificial Sequence
  Description of Artificial Sequence: Synthetic oligonucleotide
ugucggaaagacuucgcag

SEQ ID NO: 3048256 - RNA, 19 nt, Artificial Sequence
  Description of Artificial Sequence: Synthetic oligonucleotide
aguuaggaauugcucuagc

SEQ ID NO: 3048257 - RNA, 19 nt, Artificial Sequence
  Description of Artificial Sequence: Synthetic oligonucleotide
uguguacuggaacugccug

SEQ ID NO: 3048258 - RNA, 19 nt, Artificial Sequence
  Description of Artificial Sequence: Synthetic oligonucleotide
ucuagcacaagcaguucca

SEQ ID NO: 3048259 - RNA, 19 nt, Artificial Sequence
  Description of Artificial Sequence: Synthetic oligonucleotide
uuucucuauugucugggca

SEQ ID NO: 3048260 - RNA, 19 nt, Artificial Sequence
  Description of Artificial Sequence: Synthetic oligonucleotide
ucccagaguuuguugaagg

SEQ ID NO: 3048261 - RNA, 19 nt, Artificial Sequence
  Description of Artificial Sequence: Synthetic oligonucleotide
guugaaggcuucaugaggc

SEQ ID NO: 3048262 - RNA, 19 nt, Artificial Sequence
  Description of Artificial Sequence: Synthetic oligonucleotide
ucauccaugucgaucugug

SEQ ID NO: 3048263 - RNA, 19 nt, Artificial Sequence
  Description of Artificial Sequence: Synthetic oligonucleotide
uuguugaaggcuucaugag

SEQ ID NO: 3048264 - RNA, 19 nt, Artificial Sequence
  Description of Artificial Sequence: Synthetic oligonucleotide
ucaaugagugacacaacuc

SEQ ID NO: 3048265 - RNA, 19 nt, Artificial Sequence
  Description of Artificial Sequence: Synthetic oligonucleotide
gaauugcucuagcacaagc

SEQ ID NO: 3048266 - RNA, 19 nt, Artificial Sequence
  Description of Artificial Sequence: Synthetic oligonucleotide
uggguacuguuccaacugg

SEQ ID NO: 3048267 - RNA, 19 nt, Artificial Sequence
  Description of Artificial Sequence: Synthetic oligonucleotide
uccaggugcaaguugggug

SEQ ID NO: 3048268 - RNA, 19 nt, Artificial Sequence
  Description of Artificial Sequence: Synthetic oligonucleotide
aauugcucuagcacaagca

SEQ ID NO: 3048269 - RNA, 19 nt, Artificial Sequence
  Description of Artificial Sequence: Synthetic oligonucleotide
gauuuguuccuuagaacgc

SEQ ID NO: 3048270 - RNA, 19 nt, Artificial Sequence
  Description of Artificial Sequence: Synthetic oligonucleotide
agcuucuguguacuggaac

SEQ ID NO: 3048271 - RNA, 19 nt, Artificial Sequence
  Description of Artificial Sequence: Synthetic oligonucleotide
ugguucugguaucucaagc

SEQ ID NO: 3048272 - RNA, 19 nt, Artificial Sequence
  Description of Artificial Sequence: Synthetic oligonucleotide
guacuguuccaacuggugc

SEQ ID NO: 3048273 - RNA, 19 nt, Artificial Sequence
  Description of Artificial Sequence: Synthetic oligonucleotide
aggucucuauuucuguggg

SEQ ID NO: 3048274 - RNA, 19 nt, Artificial Sequence
  Description of Artificial Sequence: Synthetic oligonucleotide
auccaugucgaucuguggu

SEQ ID NO: 3048275 - RNA, 19 nt, Artificial Sequence
  Description of Artificial Sequence: Synthetic oligonucleotide
uccaacuggugccaguucu

SEQ ID NO: 3048276 - RNA, 19 nt, Artificial Sequence
  Description of Artificial Sequence: Synthetic oligonucleotide
uucugguaucucaagcucu

SEQ ID NO: 3048277 - RNA, 19 nt, Artificial Sequence
  Description of Artificial Sequence: Synthetic oligonucleotide
cugugggcagaauaguuag

SEQ ID NO: 3048278 - RNA, 19 nt, Artificial Sequence
  Description of Artificial Sequence: Synthetic oligonucleotide
gaauaguuaggaauugcuc

SEQ ID NO: 3048279 - RNA, 19 nt, Artificial Sequence
  Description of Artificial Sequence: Synthetic oligonucleotide
agaauaguuaggaauugcu

SEQ ID NO: 3048280 - RNA, 19 nt, Artificial Sequence
  Description of Artificial Sequence: Synthetic oligonucleotide
acucuuucucuauugucug

SEQ ID NO: 3048281 - RNA, 19 nt, Artificial Sequence
  Description of Artificial Sequence: Synthetic oligonucleotide
auggguacuguuccaacug

SEQ ID NO: 3048282 - RNA, 19 nt, Artificial Sequence
  Description of Artificial Sequence: Synthetic oligonucleotide
guuuguugaaggcuucaug

SEQ ID NO: 3048283 - RNA, 19 nt, Artificial Sequence
  Description of Artificial Sequence: Synthetic oligonucleotide
uuccuuagaacgcaucuuu

SEQ ID NO: 3048284 - RNA, 19 nt, Artificial Sequence
  Description of Artificial Sequence: Synthetic oligonucleotide
ugagugacacaacucuuuc

SEQ ID NO: 3048285 - RNA, 19 nt, Artificial Sequence
  Description of Artificial Sequence: Synthetic oligonucleotide
ugugguucugguaucucaa

SEQ ID NO: 3048286 - RNA, 19 nt, Artificial Sequence
  Description of Artificial Sequence: Synthetic oligonucleotide
ugugggcagaauaguuagg

SEQ ID NO: 3048287 - RNA, 19 nt, Artificial Sequence
  Description of Artificial Sequence: Synthetic oligonucleotide
ucugugggcagaauaguua

SEQ ID NO: 3048288 - RNA, 19 nt, Artificial Sequence
  Description of Artificial Sequence: Synthetic oligonucleotide
uccaggauuuguuccuuag

SEQ ID NO: 3048289 - RNA, 19 nt, Artificial Sequence
  Description of Artificial Sequence: Synthetic oligonucleotide
ugcucuagcacaagcaguu

SEQ ID NO: 3048290 - RNA, 19 nt, Artificial Sequence
  Description of Artificial Sequence: Synthetic oligonucleotide
cucuagcacaagcaguucc

SEQ ID NO: 3048291 - RNA, 19 nt, Artificial Sequence
  Description of Artificial Sequence: Synthetic oligonucleotide
uccuuagaacgcaucuuug

SEQ ID NO: 3048292 - RNA, 19 nt, Artificial Sequence
  Description of Artificial Sequence: Synthetic oligonucleotide
agucuucaaugagugacac

SEQ ID NO: 3048293 - RNA, 19 nt, Artificial Sequence
  Description of Artificial Sequence: Synthetic oligonucleotide
aguuccaggauuuguuccu

SEQ ID NO: 3048294 - RNA, 19 nt, Artificial Sequence
  Description of Artificial Sequence: Synthetic oligonucleotide
auaguuaggaauugcucua

SEQ ID NO: 3048295 - RNA, 19 nt, Artificial Sequence
  Description of Artificial Sequence: Synthetic oligonucleotide
cacaacucuuucucuauug

SEQ ID NO: 3048296 - RNA, 19 nt, Artificial Sequence
  Description of Artificial Sequence: Synthetic oligonucleotide
guuaggaauugcucuagca

SEQ ID NO: 3048297 - RNA, 19 nt, Artificial Sequence
  Description of Artificial Sequence: Synthetic oligonucleotide
cucuguaagucuucaauga

SEQ ID NO: 3048298 - RNA, 19 nt, Artificial Sequence
  Description of Artificial Sequence: Synthetic oligonucleotide
ucugguaucucaagcucuc

SEQ ID NO: 3048299 - RNA, 19 nt, Artificial Sequence
  Description of Artificial Sequence: Synthetic oligonucleotide
ucucuauuucugugggcag

SEQ ID NO: 3048300 - RNA, 19 nt, Artificial Sequence
  Description of Artificial Sequence: Synthetic oligonucleotide
uccaagagcaugucaucca

SEQ ID NO: 3048301 - RNA, 19 nt, Artificial Sequence
  Description of Artificial Sequence: Synthetic oligonucleotide
uggcgauggguacuguucc

SEQ ID NO: 3048302 - RNA, 19 nt, Artificial Sequence
  Description of Artificial Sequence: Synthetic oligonucleotide
caucuuuggcuucagccac

SEQ ID NO: 3048303 - RNA, 19 nt, Artificial Sequence
  Description of Artificial Sequence: Synthetic oligonucleotide
uagaacgcaucuuuggcuu

SEQ ID NO: 3048304 - RNA, 19 nt, Artificial Sequence
  Description of Artificial Sequence: Synthetic oligonucleotide
cucaagcucucucuguaag

SEQ ID NO: 3048305 - RNA, 19 nt, Artificial Sequence
  Description of Artificial Sequence: Synthetic oligonucleotide
uugcucuagcacaagcagu

SEQ ID NO: 3048306 - RNA, 19 nt, Artificial Sequence
  Description of Artificial Sequence: Synthetic oligonucleotide
cugacagcaaagcucccag

SEQ ID NO: 3048307 - RNA, 19 nt, Artificial Sequence
  Description of Artificial Sequence: Synthetic oligonucleotide
guaucucaagcucucucug

SEQ ID NO: 3048308 - RNA, 19 nt, Artificial Sequence
  Description of Artificial Sequence: Synthetic oligonucleotide
ugacacaacucuuucucua

SEQ ID NO: 3048309 - RNA, 19 nt, Artificial Sequence
  Description of Artificial Sequence: Synthetic oligonucleotide
auuuguuccuuagaacgca

SEQ ID NO: 3048310 - RNA, 19 nt, Artificial Sequence
  Description of Artificial Sequence: Synthetic oligonucleotide
ucaagcucucucuguaagu

SEQ ID NO: 3048311 - RNA, 19 nt, Artificial Sequence
  Description of Artificial Sequence: Synthetic oligonucleotide
uaguuaggaauugcucuag

SEQ ID NO: 3048312 - RNA, 19 nt, Artificial Sequence
  Description of Artificial Sequence: Synthetic oligonucleotide
cucuuucucuauugucugg

SEQ ID NO: 3048313 - RNA, 19 nt, Artificial Sequence
  Description of Artificial Sequence: Synthetic oligonucleotide
ugaaggcuucaugaggccc

SEQ ID NO: 3048314 - RNA, 19 nt, Artificial Sequence
  Description of Artificial Sequence: Synthetic oligonucleotide
cagaauaguuaggaauugc

SEQ ID NO: 3048315 - RNA, 19 nt, Artificial Sequence
  Description of Artificial Sequence: Synthetic oligonucleotide
cuuucucuauugucugggc

SEQ ID NO: 3048316 - RNA, 19 nt, Artificial Sequence
  Description of Artificial Sequence: Synthetic oligonucleotide
agcucccagaguuuguuga

SEQ ID NO: 3048317 - RNA, 19 nt, Artificial Sequence
  Description of Artificial Sequence: Synthetic oligonucleotide
agcagcuucuguguacugg

SEQ ID NO: 3048318 - RNA, 19 nt, Artificial Sequence
  Description of Artificial Sequence: Synthetic oligonucleotide
aagucuucaaugagugaca

SEQ ID NO: 3048319 - RNA, 19 nt, Artificial Sequence
  Description of Artificial Sequence: Synthetic oligonucleotide
ccuuagaacgcaucuuugg

SEQ ID NO: 3048320 - RNA, 19 nt, Artificial Sequence
  Description of Artificial Sequence: Synthetic oligonucleotide
ugguaucucaagcucucuc

SEQ ID NO: 3048321 - RNA, 19 nt, Artificial Sequence
  Description of Artificial Sequence: Synthetic oligonucleotide
caacucuuucucuauuguc

SEQ ID NO: 3048322 - RNA, 19 nt, Artificial Sequence
  Description of Artificial Sequence: Synthetic oligonucleotide
ucggaaagacuucgcaguc

SEQ ID NO: 3048323 - RNA, 19 nt, Artificial Sequence
  Description of Artificial Sequence: Synthetic oligonucleotide
gucucuauuucugugggca

SEQ ID NO: 3048324 - RNA, 19 nt, Artificial Sequence
  Description of Artificial Sequence: Synthetic oligonucleotide
uguacuggaacugccugaa

SEQ ID NO: 3048325 - RNA, 19 nt, Artificial Sequence
  Description of Artificial Sequence: Synthetic oligonucleotide
ugucgaucugugguucugg

SEQ ID NO: 3048326 - RNA, 19 nt, Artificial Sequence
  Description of Artificial Sequence: Synthetic oligonucleotide
uugaaggcuucaugaggcc

SEQ ID NO: 3048327 - RNA, 19 nt, Artificial Sequence
  Description of Artificial Sequence: Synthetic oligonucleotide
agaacgcaucuuuggcuuc

SEQ ID NO: 3048328 - RNA, 19 nt, Artificial Sequence
  Description of Artificial Sequence: Synthetic oligonucleotide
ucacccaggucucuauuuc

SEQ ID NO: 3048329 - RNA, 19 nt, Artificial Sequence
  Description of Artificial Sequence: Synthetic oligonucleotide
caggauuuguuccuuagaa

SEQ ID NO: 3048330 - RNA, 19 nt, Artificial Sequence
  Description of Artificial Sequence: Synthetic oligonucleotide
uucugugggcagaauaguu

SEQ ID NO: 3048331 - RNA, 19 nt, Artificial Sequence
  Description of Artificial Sequence: Synthetic oligonucleotide
caaugagugacacaacucu

SEQ ID NO: 3048332 - RNA, 19 nt, Artificial Sequence
  Description of Artificial Sequence: Synthetic oligonucleotide
aagcucccagaguuuguug

SEQ ID NO: 3048333 - RNA, 19 nt, Artificial Sequence
  Description of Artificial Sequence: Synthetic oligonucleotide
ccaggugcaaguugggugg

SEQ ID NO: 3048334 - RNA, 19 nt, Artificial Sequence
  Description of Artificial Sequence: Synthetic oligonucleotide
cauccaugucgaucugugg

SEQ ID NO: 3048335 - RNA, 19 nt, Artificial Sequence
  Description of Artificial Sequence: Synthetic oligonucleotide
aaugagugacacaacucuu

SEQ ID NO: 3048336 - RNA, 19 nt, Artificial Sequence
  Description of Artificial Sequence: Synthetic oligonucleotide
aggcccagcagcuucugug

SEQ ID NO: 3048337 - RNA, 19 nt, Artificial Sequence
  Description of Artificial Sequence: Synthetic oligonucleotide
agcgcugucggaaagacuu

SEQ ID NO: 3048338 - RNA, 19 nt, Artificial Sequence
  Description of Artificial Sequence: Synthetic oligonucleotide
ucuauugucugggcagugu

SEQ ID NO: 3048339 - RNA, 19 nt, Artificial Sequence
  Description of Artificial Sequence: Synthetic oligonucleotide
uuucugugggcagaauagu

SEQ ID NO: 3048340 - RNA, 19 nt, Artificial Sequence
  Description of Artificial Sequence: Synthetic oligonucleotide
ugggcaguguucccucacc

SEQ ID NO: 3048341 - RNA, 19 nt, Artificial Sequence
  Description of Artificial Sequence: Synthetic oligonucleotide
aaagcucccagaguuuguu

SEQ ID NO: 3048342 - RNA, 19 nt, Artificial Sequence
  Description of Artificial Sequence: Synthetic oligonucleotide
gcuucagccacugacagca

SEQ ID NO: 3048343 - RNA, 19 nt, Artificial Sequence
  Description of Artificial Sequence: Synthetic oligonucleotide
cuucaaugagugacacaac

SEQ ID NO: 3048344 - RNA, 19 nt, Artificial Sequence
  Description of Artificial Sequence: Synthetic oligonucleotide
uccaugucgaucugugguu

SEQ ID NO: 3048345 - RNA, 19 nt, Artificial Sequence
  Description of Artificial Sequence: Synthetic oligonucleotide
uucagccacugacagcaaa

SEQ ID NO: 3048346 - RNA, 19 nt, Artificial Sequence
  Description of Artificial Sequence: Synthetic oligonucleotide
aagcaguuccaggauuugu

SEQ ID NO: 3048347 - RNA, 19 nt, Artificial Sequence
  Description of Artificial Sequence: Synthetic oligonucleotide
caugaggcccagcagcuuc

SEQ ID NO: 3048348 - RNA, 19 nt, Artificial Sequence
  Description of Artificial Sequence: Synthetic oligonucleotide
aucucaagcucucucugua

SEQ ID NO: 3048349 - RNA, 19 nt, Artificial Sequence
  Description of Artificial Sequence: Synthetic oligonucleotide
gauggguacuguuccaacu

SEQ ID NO: 3048350 - RNA, 19 nt, Artificial Sequence
  Description of Artificial Sequence: Synthetic oligonucleotide
uuguuccuuagaacgcauc

SEQ ID NO: 3048351 - RNA, 19 nt, Artificial Sequence
  Description of Artificial Sequence: Synthetic oligonucleotide
agaguuuguugaaggcuuc

SEQ ID NO: 3048352 - RNA, 19 nt, Artificial Sequence
  Description of Artificial Sequence: Synthetic oligonucleotide
agccacugacagcaaagcu

SEQ ID NO: 3048353 - RNA, 19 nt, Artificial Sequence
  Description of Artificial Sequence: Synthetic oligonucleotide
gcaguguucccucacccag

SEQ ID NO: 3048354 - RNA, 19 nt, Artificial Sequence
  Description of Artificial Sequence: Synthetic oligonucleotide
gaaggcuucaugaggccca

SEQ ID NO: 3048355 - RNA, 19 nt, Artificial Sequence
  Description of Artificial Sequence: Synthetic oligonucleotide
ugcaaguuggguggcgaug

SEQ ID NO: 3048356 - RNA, 19 nt, Artificial Sequence
  Description of Artificial Sequence: Synthetic oligonucleotide
gugguucugguaucucaag

SEQ ID NO: 3048357 - RNA, 19 nt, Artificial Sequence
  Description of Artificial Sequence: Synthetic oligonucleotide
caagagcaugucauccaug

SEQ ID NO: 3048358 - RNA, 19 nt, Artificial Sequence
  Description of Artificial Sequence: Synthetic oligonucleotide
ucucaagcucucucuguaa

SEQ ID NO: 3048359 - RNA, 19 nt, Artificial Sequence
  Description of Artificial Sequence: Synthetic oligonucleotide
gucggaaagacuucgcagu

SEQ ID NO: 3048360 - RNA, 19 nt, Artificial Sequence
  Description of Artificial Sequence: Synthetic oligonucleotide
gaagcgcugucggaaagac

SEQ ID NO: 3048361 - RNA, 19 nt, Artificial Sequence
  Description of Artificial Sequence: Synthetic oligonucleotide
caguucuuccaagagcaug

SEQ ID NO: 3048362 - RNA, 19 nt, Artificial Sequence
  Description of Artificial Sequence: Synthetic oligonucleotide
ucucuauugucugggcagu

SEQ ID NO: 3048363 - RNA, 19 nt, Artificial Sequence
  Description of Artificial Sequence: Synthetic oligonucleotide
acgcaucuuuggcuucagc

SEQ ID NO: 3048364 - RNA, 19 nt, Artificial Sequence
  Description of Artificial Sequence: Synthetic oligonucleotide
cgcaucuuuggcuucagcc

SEQ ID NO: 3048365 - RNA, 19 nt, Artificial Sequence
  Description of Artificial Sequence: Synthetic oligonucleotide
agcaugucauccaugucga

SEQ ID NO: 3048366 - RNA, 19 nt, Artificial Sequence
  Description of Artificial Sequence: Synthetic oligonucleotide
gcaucuuuggcuucagcca

SEQ ID NO: 3048367 - RNA, 19 nt, Artificial Sequence
  Description of Artificial Sequence: Synthetic oligonucleotide
ugaagcgcugucggaaaga

SEQ ID NO: 3048368 - RNA, 19 nt, Artificial Sequence
  Description of Artificial Sequence: Synthetic oligonucleotide
acugacagcaaagcuccca

SEQ ID NO: 3048369 - RNA, 19 nt, Artificial Sequence
  Description of Artificial Sequence: Synthetic oligonucleotide
cuucuguguacuggaacug

SEQ ID NO: 3048370 - RNA, 19 nt, Artificial Sequence
  Description of Artificial Sequence: Synthetic oligonucleotide
aaguuggguggcgaugggu

SEQ ID NO: 3048371 - RNA, 19 nt, Artificial Sequence
  Description of Artificial Sequence: Synthetic oligonucleotide
ugacagcaaagcucccaga

SEQ ID NO: 3048372 - RNA, 19 nt, Artificial Sequence
  Description of Artificial Sequence: Synthetic oligonucleotide
uguuccaacuggugccagu

SEQ ID NO: 3048373 - RNA, 19 nt, Artificial Sequence
  Description of Artificial Sequence: Synthetic oligonucleotide
cuguaagucuucaaugagu

SEQ ID NO: 3048374 - RNA, 19 nt, Artificial Sequence
  Description of Artificial Sequence: Synthetic oligonucleotide
guaagucuucaaugaguga

SEQ ID NO: 3048375 - RNA, 19 nt, Artificial Sequence
  Description of Artificial Sequence: Synthetic oligonucleotide
cuagcacaagcaguuccag

SEQ ID NO: 3048376 - RNA, 19 nt, Artificial Sequence
  Description of Artificial Sequence: Synthetic oligonucleotide
cuggaacugccugaagcgc

SEQ ID NO: 3048377 - RNA, 19 nt, Artificial Sequence
  Description of Artificial Sequence: Synthetic oligonucleotide
gaucugugguucugguauc

SEQ ID NO: 3048378 - RNA, 19 nt, Artificial Sequence
  Description of Artificial Sequence: Synthetic oligonucleotide
aaggcuucaugaggcccag

SEQ ID NO: 3048379 - RNA, 19 nt, Artificial Sequence
  Description of Artificial Sequence: Synthetic oligonucleotide
ugucugggcaguguucccu

SEQ ID NO: 3048380 - RNA, 19 nt, Artificial Sequence
  Description of Artificial Sequence: Synthetic oligonucleotide
cugaagcgcugucggaaag

SEQ ID NO: 3048381 - RNA, 19 nt, Artificial Sequence
  Description of Artificial Sequence: Synthetic oligonucleotide
cugugguucugguaucuca

SEQ ID NO: 3048382 - RNA, 19 nt, Artificial Sequence
  Description of Artificial Sequence: Synthetic oligonucleotide
uggugccaguucuuccaag

SEQ ID NO: 3048383 - RNA, 19 nt, Artificial Sequence
  Description of Artificial Sequence: Synthetic oligonucleotide
ucucucuguaagucuucaa

SEQ ID NO: 3048384 - RNA, 19 nt, Artificial Sequence
  Description of Artificial Sequence: Synthetic oligonucleotide
guguacuggaacugccuga

SEQ ID NO: 3048385 - RNA, 19 nt, Artificial Sequence
  Description of Artificial Sequence: Synthetic oligonucleotide
guuggguggcgauggguac

SEQ ID NO: 3048386 - RNA, 19 nt, Artificial Sequence
  Description of Artificial Sequence: Synthetic oligonucleotide
aggaauugcucuagcacaa

SEQ ID NO: 3048387 - RNA, 19 nt, Artificial Sequence
  Description of Artificial Sequence: Synthetic oligonucleotide
cugucggaaagacuucgca

SEQ ID NO: 3048388 - RNA, 19 nt, Artificial Sequence
  Description of Artificial Sequence: Synthetic oligonucleotide
aacgcaucuuuggcuucag

SEQ ID NO: 3048389 - RNA, 19 nt, Artificial Sequence
  Description of Artificial Sequence: Synthetic oligonucleotide
gguacuguuccaacuggug

SEQ ID NO: 3048390 - RNA, 19 nt, Artificial Sequence
  Description of Artificial Sequence: Synthetic oligonucleotide
gguucugguaucucaagcu

SEQ ID NO: 3048391 - RNA, 19 nt, Artificial Sequence
  Description of Artificial Sequence: Synthetic oligonucleotide
ggcuucaugaggcccagca

SEQ ID NO: 3048392 - RNA, 19 nt, Artificial Sequence
  Description of Artificial Sequence: Synthetic oligonucleotide
augagugacacaacucuuu

SEQ ID NO: 3048393 - RNA, 19 nt, Artificial Sequence
  Description of Artificial Sequence: Synthetic oligonucleotide
uugucugggcaguguuccc

SEQ ID NO: 3048394 - RNA, 19 nt, Artificial Sequence
  Description of Artificial Sequence: Synthetic oligonucleotide
aguuuguugaaggcuucau

SEQ ID NO: 3048395 - RNA, 19 nt, Artificial Sequence
  Description of Artificial Sequence: Synthetic oligonucleotide
gacacaacucuuucucuau

SEQ ID NO: 3048396 - RNA, 19 nt, Artificial Sequence
  Description of Artificial Sequence: Synthetic oligonucleotide
ucgaucugugguucuggua

SEQ ID NO: 3048397 - RNA, 19 nt, Artificial Sequence
  Description of Artificial Sequence: Synthetic oligonucleotide
cagccacugacagcaaagc

SEQ ID NO: 3048398 - RNA, 19 nt, Artificial Sequence
  Description of Artificial Sequence: Synthetic oligonucleotide
ggugccaguucuuccaaga

SEQ ID NO: 3048399 - RNA, 19 nt, Artificial Sequence
  Description of Artificial Sequence: Synthetic oligonucleotide
acacaacucuuucucuauu

SEQ ID NO: 3048400 - RNA, 19 nt, Artificial Sequence
  Description of Artificial Sequence: Synthetic oligonucleotide
cucccagaguuuguugaag

SEQ ID NO: 3048401 - RNA, 19 nt, Artificial Sequence
  Description of Artificial Sequence: Synthetic oligonucleotide
agcaguuccaggauuuguu

SEQ ID NO: 3048402 - RNA, 19 nt, Artificial Sequence
  Description of Artificial Sequence: Synthetic oligonucleotide
gaguuuguugaaggcuuca

SEQ ID NO: 3048403 - RNA, 19 nt, Artificial Sequence
  Description of Artificial Sequence: Synthetic oligonucleotide
ucugggcaguguucccuca

SEQ ID NO: 3048404 - RNA, 19 nt, Artificial Sequence
  Description of Artificial Sequence: Synthetic oligonucleotide
gcagaauaguuaggaauug

SEQ ID NO: 3048405 - RNA, 19 nt, Artificial Sequence
  Description of Artificial Sequence: Synthetic oligonucleotide
gcuucaugaggcccagcag

SEQ ID NO: 3048406 - RNA, 19 nt, Artificial Sequence
  Description of Artificial Sequence: Synthetic oligonucleotide
cucucuguaagucuucaau

SEQ ID NO: 3048407 - RNA, 19 nt, Artificial Sequence
  Description of Artificial Sequence: Synthetic oligonucleotide
cccagaguuuguugaaggc

SEQ ID NO: 3048408 - RNA, 19 nt, Artificial Sequence
  Description of Artificial Sequence: Synthetic oligonucleotide
gagugacacaacucuuucu

SEQ ID NO: 3048409 - RNA, 19 nt, Artificial Sequence
  Description of Artificial Sequence: Synthetic oligonucleotide
guggcgauggguacuguuc

SEQ ID NO: 3048410 - RNA, 19 nt, Artificial Sequence
  Description of Artificial Sequence: Synthetic oligonucleotide
aguuggguggcgaugggua

SEQ ID NO: 3048411 - RNA, 19 nt, Artificial Sequence
  Description of Artificial Sequence: Synthetic oligonucleotide
gaacgcaucuuuggcuuca

SEQ ID NO: 3048412 - RNA, 19 nt, Artificial Sequence
  Description of Artificial Sequence: Synthetic oligonucleotide
gcuucuguguacuggaacu

SEQ ID NO: 3048413 - RNA, 19 nt, Artificial Sequence
  Description of Artificial Sequence: Synthetic oligonucleotide
gcagcuucuguguacugga

SEQ ID NO: 3048414 - RNA, 19 nt, Artificial Sequence
  Description of Artificial Sequence: Synthetic oligonucleotide
aucugugguucugguaucu

SEQ ID NO: 3048415 - RNA, 19 nt, Artificial Sequence
  Description of Artificial Sequence: Synthetic oligonucleotide
gcaguuccaggauuuguuc

SEQ ID NO: 3048416 - RNA, 19 nt, Artificial Sequence
  Description of Artificial Sequence: Synthetic oligonucleotide
guacuggaacugccugaag

SEQ ID NO: 3048417 - RNA, 19 nt, Artificial Sequence
  Description of Artificial Sequence: Synthetic oligonucleotide
uggguggcgauggguacug

SEQ ID NO: 3048418 - RNA, 19 nt, Artificial Sequence
  Description of Artificial Sequence: Synthetic oligonucleotide
uuggguggcgauggguacu

SEQ ID NO: 3048419 - RNA, 19 nt, Artificial Sequence
  Description of Artificial Sequence: Synthetic oligonucleotide
gucuucaaugagugacaca

SEQ ID NO: 3048420 - RNA, 19 nt, Artificial Sequence
  Description of Artificial Sequence: Synthetic oligonucleotide
cagaguuuguugaaggcuu

SEQ ID NO: 3048421 - RNA, 19 nt, Artificial Sequence
  Description of Artificial Sequence: Synthetic oligonucleotide
uuccaggauuuguuccuua

SEQ ID NO: 3048422 - RNA, 19 nt, Artificial Sequence
  Description of Artificial Sequence: Synthetic oligonucleotide
augucgaucugugguucug

SEQ ID NO: 3048423 - RNA, 19 nt, Artificial Sequence
  Description of Artificial Sequence: Synthetic oligonucleotide
gggcagaauaguuaggaau

SEQ ID NO: 3048424 - RNA, 19 nt, Artificial Sequence
  Description of Artificial Sequence: Synthetic oligonucleotide
caagcaguuccaggauuug

SEQ ID NO: 3048425 - RNA, 19 nt, Artificial Sequence
  Description of Artificial Sequence: Synthetic oligonucleotide
cucuauuucugugggcaga

SEQ ID NO: 3048426 - RNA, 19 nt, Artificial Sequence
  Description of Artificial Sequence: Synthetic oligonucleotide
ggucucuauuucugugggc

SEQ ID NO: 3048427 - RNA, 19 nt, Artificial Sequence
  Description of Artificial Sequence: Synthetic oligonucleotide
ucugugguucugguaucuc

SEQ ID NO: 3048428 - RNA, 19 nt, Artificial Sequence
  Description of Artificial Sequence: Synthetic oligonucleotide
caacuggugccaguucuuc

SEQ ID NO: 3048429 - RNA, 19 nt, Artificial Sequence
  Description of Artificial Sequence: Synthetic oligonucleotide
gugacacaacucuuucucu

SEQ ID NO: 3048430 - RNA, 19 nt, Artificial Sequence
  Description of Artificial Sequence: Synthetic oligonucleotide
aggugcaaguuggguggcg

SEQ ID NO: 3048431 - RNA, 19 nt, Artificial Sequence
  Description of Artificial Sequence: Synthetic oligonucleotide
cucuauugucugggcagug

SEQ ID NO: 3048432 - RNA, 19 nt, Artificial Sequence
  Description of Artificial Sequence: Synthetic oligonucleotide
ggaauugcucuagcacaag

SEQ ID NO: 3048433 - RNA, 19 nt, Artificial Sequence
  Description of Artificial Sequence: Synthetic oligonucleotide
cugggcaguguucccucac

SEQ ID NO: 3048434 - RNA, 19 nt, Artificial Sequence
  Description of Artificial Sequence: Synthetic oligonucleotide
gucugggcaguguucccuc

SEQ ID NO: 3048435 - RNA, 19 nt, Artificial Sequence
  Description of Artificial Sequence: Synthetic oligonucleotide
cacugacagcaaagcuccc

SEQ ID NO: 3048436 - RNA, 19 nt, Artificial Sequence
  Description of Artificial Sequence: Synthetic oligonucleotide
aagcgcugucggaaagacu

SEQ ID NO: 3048437 - RNA, 19 nt, Artificial Sequence
  Description of Artificial Sequence: Synthetic oligonucleotide
ggcagaauaguuaggaauu

SEQ ID NO: 3048438 - RNA, 19 nt, Artificial Sequence
  Description of Artificial Sequence: Synthetic oligonucleotide
cucucucuguaagucuuca

SEQ ID NO: 3048439 - RNA, 19 nt, Artificial Sequence
  Description of Artificial Sequence: Synthetic oligonucleotide
ggcuucagccacugacagc

SEQ ID NO: 3048440 - RNA, 19 nt, Artificial Sequence
  Description of Artificial Sequence: Synthetic oligonucleotide
cuguguacuggaacugccu

SEQ ID NO: 3048441 - RNA, 19 nt, Artificial Sequence
  Description of Artificial Sequence: Synthetic oligonucleotide
guucuuccaagagcauguc

SEQ ID NO: 3048442 - RNA, 19 nt, Artificial Sequence
  Description of Artificial Sequence: Synthetic oligonucleotide
ggcaguguucccucaccca

SEQ ID NO: 3048443 - RNA, 19 nt, Artificial Sequence
  Description of Artificial Sequence: Synthetic oligonucleotide
cuguuccaacuggugccag

SEQ ID NO: 3048444 - RNA, 19 nt, Artificial Sequence
  Description of Artificial Sequence: Synthetic oligonucleotide
guucccucacccaggucuc

SEQ ID NO: 3048445 - RNA, 19 nt, Artificial Sequence
  Description of Artificial Sequence: Synthetic oligonucleotide
caggugcaaguuggguggc

SEQ ID NO: 3048446 - RNA, 19 nt, Artificial Sequence
  Description of Artificial Sequence: Synthetic oligonucleotide
aggcuucaugaggcccagc

SEQ ID NO: 3048447 - RNA, 19 nt, Artificial Sequence
  Description of Artificial Sequence: Synthetic oligonucleotide
ggugcaaguuggguggcga

SEQ ID NO: 3048448 - RNA, 19 nt, Artificial Sequence
  Description of Artificial Sequence: Synthetic oligonucleotide
gucgaucugugguucuggu

SEQ ID NO: 3048449 - RNA, 19 nt, Artificial Sequence
  Description of Artificial Sequence: Synthetic oligonucleotide
cagcagcuucuguguacug

SEQ ID NO: 3048450 - RNA, 19 nt, Artificial Sequence
  Description of Artificial Sequence: Synthetic oligonucleotide
cccagcagcuucuguguac

SEQ ID NO: 3048451 - RNA, 19 nt, Artificial Sequence
  Description of Artificial Sequence: Synthetic oligonucleotide
gcugucggaaagacuucgc

SEQ ID NO: 3048452 - RNA, 19 nt, Artificial Sequence
  Description of Artificial Sequence: Synthetic oligonucleotide
caugucgaucugugguucu

SEQ ID NO: 3048453 - RNA, 19 nt, Artificial Sequence
  Description of Artificial Sequence: Synthetic oligonucleotide
ccaggauuuguuccuuaga

SEQ ID NO: 3048454 - RNA, 19 nt, Artificial Sequence
  Description of Artificial Sequence: Synthetic oligonucleotide
caaagcucccagaguuugu

SEQ ID NO: 3048455 - RNA, 19 nt, Artificial Sequence
  Description of Artificial Sequence: Synthetic oligonucleotide
cacccaggucucuauuucu

SEQ ID NO: 3048456 - RNA, 19 nt, Artificial Sequence
  Description of Artificial Sequence: Synthetic oligonucleotide
cucacccaggucucuauuu

SEQ ID NO: 3048457 - RNA, 19 nt, Artificial Sequence
  Description of Artificial Sequence: Synthetic oligonucleotide
ggcgauggguacuguucca

SEQ ID NO: 3048458 - RNA, 19 nt, Artificial Sequence
  Description of Artificial Sequence: Synthetic oligonucleotide
guuccaacuggugccaguu

SEQ ID NO: 3048459 - RNA, 19 nt, Artificial Sequence
  Description of Artificial Sequence: Synthetic oligonucleotide
uucccucacccaggucucu

SEQ ID NO: 3048460 - RNA, 19 nt, Artificial Sequence
  Description of Artificial Sequence: Synthetic oligonucleotide
cuggugccaguucuuccaa

SEQ ID NO: 3048461 - RNA, 19 nt, Artificial Sequence
  Description of Artificial Sequence: Synthetic oligonucleotide
cgcugucggaaagacuucg

SEQ ID NO: 3048462 - RNA, 19 nt, Artificial Sequence
  Description of Artificial Sequence: Synthetic oligonucleotide
gucauccaugucgaucugu

SEQ ID NO: 3048463 - RNA, 19 nt, Artificial Sequence
  Description of Artificial Sequence: Synthetic oligonucleotide
cacaagcaguuccaggauu

SEQ ID NO: 3048464 - RNA, 19 nt, Artificial Sequence
  Description of Artificial Sequence: Synthetic oligonucleotide
ccaugucgaucugugguuc

SEQ ID NO: 3048465 - RNA, 19 nt, Artificial Sequence
  Description of Artificial Sequence: Synthetic oligonucleotide
cgauggguacuguuccaac

SEQ ID NO: 3048466 - RNA, 19 nt, Artificial Sequence
  Description of Artificial Sequence: Synthetic oligonucleotide
cagcuucuguguacuggaa

SEQ ID NO: 3048467 - RNA, 19 nt, Artificial Sequence
  Description of Artificial Sequence: Synthetic oligonucleotide
ucccucacccaggucucua

SEQ ID NO: 3048468 - RNA, 19 nt, Artificial Sequence
  Description of Artificial Sequence: Synthetic oligonucleotide
cgaucugugguucugguau

SEQ ID NO: 3048469 - RNA, 19 nt, Artificial Sequence
  Description of Artificial Sequence: Synthetic oligonucleotide
gcucccagaguuuguugaa

SEQ ID NO: 3048470 - RNA, 19 nt, Artificial Sequence
  Description of Artificial Sequence: Synthetic oligonucleotide
cuuuggcuucagccacuga

SEQ ID NO: 3048471 - RNA, 19 nt, Artificial Sequence
  Description of Artificial Sequence: Synthetic oligonucleotide
ccagaguuuguugaaggcu

SEQ ID NO: 3048472 - RNA, 19 nt, Artificial Sequence
  Description of Artificial Sequence: Synthetic oligonucleotide
guguucccucacccagguc

SEQ ID NO: 3048473 - RNA, 19 nt, Artificial Sequence
  Description of Artificial Sequence: Synthetic oligonucleotide
ccugaagcgcugucggaaa

SEQ ID NO: 3048474 - RNA, 19 nt, Artificial Sequence
  Description of Artificial Sequence: Synthetic oligonucleotide
gugcaaguuggguggcgau

SEQ ID NO: 3048475 - RNA, 19 nt, Artificial Sequence
  Description of Artificial Sequence: Synthetic oligonucleotide
cuucagccacugacagcaa

SEQ ID NO: 3048476 - RNA, 19 nt, Artificial Sequence
  Description of Artificial Sequence: Synthetic oligonucleotide
gcgauggguacuguuccaa

SEQ ID NO: 3048477 - RNA, 19 nt, Artificial Sequence
  Description of Artificial Sequence: Synthetic oligonucleotide
gcucuagcacaagcaguuc

SEQ ID NO: 3048478 - RNA, 19 nt, Artificial Sequence
  Description of Artificial Sequence: Synthetic oligonucleotide
gcacaagcaguuccaggau

SEQ ID NO: 3048479 - RNA, 19 nt, Artificial Sequence
  Description of Artificial Sequence: Synthetic oligonucleotide
ggguacuguuccaacuggu

SEQ ID NO: 3048480 - RNA, 19 nt, Artificial Sequence
  Description of Artificial Sequence: Synthetic oligonucleotide
guuccaggauuuguuccuu

SEQ ID NO: 3048481 - RNA, 19 nt, Artificial Sequence
  Description of Artificial Sequence: Synthetic oligonucleotide
ccaagagcaugucauccau

SEQ ID NO: 3048482 - RNA, 19 nt, Artificial Sequence
  Description of Artificial Sequence: Synthetic oligonucleotide
gguggcgauggguacuguu

SEQ ID NO: 3048483 - RNA, 19 nt, Artificial Sequence
  Description of Artificial Sequence: Synthetic oligonucleotide
cugguaucucaagcucucu

SEQ ID NO: 3048484 - RNA, 19 nt, Artificial Sequence
  Description of Artificial Sequence: Synthetic oligonucleotide
ccagcagcuucuguguacu

SEQ ID NO: 3048485 - RNA, 19 nt, Artificial Sequence
  Description of Artificial Sequence: Synthetic oligonucleotide
gcgcugucggaaagacuuc

SEQ ID NO: 3048486 - RNA, 19 nt, Artificial Sequence
  Description of Artificial Sequence: Synthetic oligonucleotide
gcccagcagcuucugugua

SEQ ID NO: 3048487 - RNA, 19 nt, Artificial Sequence
  Description of Artificial Sequence: Synthetic oligonucleotide
ccaacuggugccaguucuu

SEQ ID NO: 3048488 - RNA, 19 nt, Artificial Sequence
  Description of Artificial Sequence: Synthetic oligonucleotide
gcaugucauccaugucgau

SEQ ID NO: 3048489 - RNA, 19 nt, Artificial Sequence
  Description of Artificial Sequence: Synthetic oligonucleotide
ccaguucuuccaagagcau

SEQ ID NO: 3048490 - RNA, 19 nt, Artificial Sequence
  Description of Artificial Sequence: Synthetic oligonucleotide
cccucacccaggucucuau

SEQ ID NO: 3048491 - RNA, 19 nt, Artificial Sequence
  Description of Artificial Sequence: Synthetic oligonucleotide
ccucacccaggucucuauu

SEQ ID NO: 3048492 - RNA, 19 nt, Artificial Sequence
  Description of Artificial Sequence: Synthetic oligonucleotide
ggguggcgauggguacugu

SEQ ID NO: 3048493 - RNA, 19 nt, Artificial Sequence
  Description of Artificial Sequence: Synthetic oligonucleotide
ugaguaauuaauuuauucc

SEQ ID NO: 3048494 - RNA, 19 nt, Artificial Sequence
  Description of Artificial Sequence: Synthetic oligonucleotide
gaguaauuaauuuauuccc

SEQ ID NO: 3048495 - RNA, 19 nt, Artificial Sequence
  Description of Artificial Sequence: Synthetic oligonucleotide
uuaauuuauucccugauuc

SEQ ID NO: 3048496 - RNA, 19 nt, Artificial Sequence
  Description of Artificial Sequence: Synthetic oligonucleotide
uuuuaguggguuaacacag

SEQ ID NO: 3048497 - RNA, 19 nt, Artificial Sequence
  Description of Artificial Sequence: Synthetic oligonucleotide
uccauaaacaugucaaugg

SEQ ID NO: 3048498 - RNA, 19 nt, Artificial Sequence
  Description of Artificial Sequence: Synthetic oligonucleotide
aacaugucaauggagcucc

SEQ ID NO: 3048499 - RNA, 19 nt, Artificial Sequence
  Description of Artificial Sequence: Synthetic oligonucleotide
auaaacaugucaauggagc

SEQ ID NO: 3048500 - RNA, 19 nt, Artificial Sequence
  Description of Artificial Sequence: Synthetic oligonucleotide
uuuuguuugaguaauuaau

SEQ ID NO: 3048501 - RNA, 19 nt, Artificial Sequence
  Description of Artificial Sequence: Synthetic oligonucleotide
cuugccaguaauuucaagc

SEQ ID NO: 3048502 - RNA, 19 nt, Artificial Sequence
  Description of Artificial Sequence: Synthetic oligonucleotide
aguaauuucaagcugccgu

SEQ ID NO: 3048503 - RNA, 19 nt, Artificial Sequence
  Description of Artificial Sequence: Synthetic oligonucleotide
aauuuauucccugauucuc

SEQ ID NO: 3048504 - RNA, 19 nt, Artificial Sequence
  Description of Artificial Sequence: Synthetic oligonucleotide
ugauucuccacccagcaug

SEQ ID NO: 3048505 - RNA, 19 nt, Artificial Sequence
  Description of Artificial Sequence: Synthetic oligonucleotide
aauuucaagcugccguugg

SEQ ID NO: 3048506 - RNA, 19 nt, Artificial Sequence
  Description of Artificial Sequence: Synthetic oligonucleotide
aauuaauuuauucccugau

SEQ ID NO: 3048507 - RNA, 19 nt, Artificial Sequence
  Description of Artificial Sequence: Synthetic oligonucleotide
aggguuaccacucuccaac

SEQ ID NO: 3048508 - RNA, 19 nt, Artificial Sequence
  Description of Artificial Sequence: Synthetic oligonucleotide
ucuguugucuucuugccag

SEQ ID NO: 3048509 - RNA, 19 nt, Artificial Sequence
  Description of Artificial Sequence: Synthetic oligonucleotide
caauggagcuccuugaugc

SEQ ID NO: 3048510 - RNA, 19 nt, Artificial Sequence
  Description of Artificial Sequence: Synthetic oligonucleotide
uugaguaauuaauuuauuc

SEQ ID NO: 3048511 - RNA, 19 nt, Artificial Sequence
  Description of Artificial Sequence: Synthetic oligonucleotide
cucacgauauccuugugcc

SEQ ID NO: 3048512 - RNA, 19 nt, Artificial Sequence
  Description of Artificial Sequence: Synthetic oligonucleotide
uuuguuugaguaauuaauu

SEQ ID NO: 3048513 - RNA, 19 nt, Artificial Sequence
  Description of Artificial Sequence: Synthetic oligonucleotide
guaauuaauuuauucccug

SEQ ID NO: 3048514 - RNA, 19 nt, Artificial Sequence
  Description of Artificial Sequence: Synthetic oligonucleotide
uaauuaauuuauucccuga

SEQ ID NO: 3048515 - RNA, 19 nt, Artificial Sequence
  Description of Artificial Sequence: Synthetic oligonucleotide
aaacaugucaauggagcuc

SEQ ID NO: 3048516 - RNA, 19 nt, Artificial Sequence
  Description of Artificial Sequence: Synthetic oligonucleotide
uguuugaguaauuaauuua

SEQ ID NO: 3048517 - RNA, 19 nt, Artificial Sequence
  Description of Artificial Sequence: Synthetic oligonucleotide
uugcuuggaaaucugcgag

SEQ ID NO: 3048518 - RNA, 19 nt, Artificial Sequence
  Description of Artificial Sequence: Synthetic oligonucleotide
auuuauucccugauucucc

SEQ ID NO: 3048519 - RNA, 19 nt, Artificial Sequence
  Description of Artificial Sequence: Synthetic oligonucleotide
uuaccacucuccaacaucu

SEQ ID NO: 3048520 - RNA, 19 nt, Artificial Sequence
  Description of Artificial Sequence: Synthetic oligonucleotide
cauaaacaugucaauggag

SEQ ID NO: 3048521 - RNA, 19 nt, Artificial Sequence
  Description of Artificial Sequence: Synthetic oligonucleotide
aagauggcaggguuaccac

SEQ ID NO: 3048522 - RNA, 19 nt, Artificial Sequence
  Description of Artificial Sequence: Synthetic oligonucleotide
uauucccugauucuccacc

SEQ ID NO: 3048523 - RNA, 19 nt, Artificial Sequence
  Description of Artificial Sequence: Synthetic oligonucleotide
uccaacaucucuuccagcu

SEQ ID NO: 3048524 - RNA, 19 nt, Artificial Sequence
  Description of Artificial Sequence: Synthetic oligonucleotide
ucuccaacaucucuuccag

SEQ ID NO: 3048525 - RNA, 19 nt, Artificial Sequence
  Description of Artificial Sequence: Synthetic oligonucleotide
uaauuuauucccugauucu

SEQ ID NO: 3048526 - RNA, 19 nt, Artificial Sequence
  Description of Artificial Sequence: Synthetic oligonucleotide
gagucgaugauuccagaag

SEQ ID NO: 3048527 - RNA, 19 nt, Artificial Sequence
  Description of Artificial Sequence: Synthetic oligonucleotide
uaaacaugucaauggagcu

SEQ ID NO: 3048528 - RNA, 19 nt, Artificial Sequence
  Description of Artificial Sequence: Synthetic oligonucleotide
auucccugauucuccaccc

SEQ ID NO: 3048529 - RNA, 19 nt, Artificial Sequence
  Description of Artificial Sequence: Synthetic oligonucleotide
uugccaguaauuucaagcu

SEQ ID NO: 3048530 - RNA, 19 nt, Artificial Sequence
  Description of Artificial Sequence: Synthetic oligonucleotide
uaacacagauauuuuauua

SEQ ID NO: 3048531 - RNA, 19 nt, Artificial Sequence
  Description of Artificial Sequence: Synthetic oligonucleotide
gaaaucugcgagucgauga

SEQ ID NO: 3048532 - RNA, 19 nt, Artificial Sequence
  Description of Artificial Sequence: Synthetic oligonucleotide
agucgaugauuccagaagu

SEQ ID NO: 3048533 - RNA, 19 nt, Artificial Sequence
  Description of Artificial Sequence: Synthetic oligonucleotide
ucaagcugccguuggaugc

SEQ ID NO: 3048534 - RNA, 19 nt, Artificial Sequence
  Description of Artificial Sequence: Synthetic oligonucleotide
cucacugagggcuugcuug

SEQ ID NO: 3048535 - RNA, 19 nt, Artificial Sequence
  Description of Artificial Sequence: Synthetic oligonucleotide
ucgucuguugucuucuugc

SEQ ID NO: 3048536 - RNA, 19 nt, Artificial Sequence
  Description of Artificial Sequence: Synthetic oligonucleotide
ucaauggagcuccuugaug

SEQ ID NO: 3048537 - RNA, 19 nt, Artificial Sequence
  Description of Artificial Sequence: Synthetic oligonucleotide
cuucuugccaguaauuuca

SEQ ID NO: 3048538 - RNA, 19 nt, Artificial Sequence
  Description of Artificial Sequence: Synthetic oligonucleotide
uuuauucccugauucucca

SEQ ID NO: 3048539 - RNA, 19 nt, Artificial Sequence
  Description of Artificial Sequence: Synthetic oligonucleotide
uuggaaaucugcgagucga

SEQ ID NO: 3048540 - RNA, 19 nt, Artificial Sequence
  Description of Artificial Sequence: Synthetic oligonucleotide
auuaauuuauucccugauu

SEQ ID NO: 3048541 - RNA, 19 nt, Artificial Sequence
  Description of Artificial Sequence: Synthetic oligonucleotide
cuugaugcugcucuccagc

SEQ ID NO: 3048542 - RNA, 19 nt, Artificial Sequence
  Description of Artificial Sequence: Synthetic oligonucleotide
uuguuugaguaauuaauuu

SEQ ID NO: 3048543 - RNA, 19 nt, Artificial Sequence
  Description of Artificial Sequence: Synthetic oligonucleotide
aguaauuaauuuauucccu

SEQ ID NO: 3048544 - RNA, 19 nt, Artificial Sequence
  Description of Artificial Sequence: Synthetic oligonucleotide
augucaauggagcuccuug

SEQ ID NO: 3048545 - RNA, 19 nt, Artificial Sequence
  Description of Artificial Sequence: Synthetic oligonucleotide
aaaucugcgagucgaugau

SEQ ID NO: 3048546 - RNA, 19 nt, Artificial Sequence
  Description of Artificial Sequence: Synthetic oligonucleotide
caacaucucuuccagcucc

SEQ ID NO: 3048547 - RNA, 19 nt, Artificial Sequence
  Description of Artificial Sequence: Synthetic oligonucleotide
uuaacacagauauuuuauu

SEQ ID NO: 3048548 - RNA, 19 nt, Artificial Sequence
  Description of Artificial Sequence: Synthetic oligonucleotide
cacgauauccuugugccgg

SEQ ID NO: 3048549 - RNA, 19 nt, Artificial Sequence
  Description of Artificial Sequence: Synthetic oligonucleotide
gauguccauaaacauguca

SEQ ID NO: 3048550 - RNA, 19 nt, Artificial Sequence
  Description of Artificial Sequence: Synthetic oligonucleotide
cagaagugaagauggcagg

SEQ ID NO: 3048551 - RNA, 19 nt, Artificial Sequence
  Description of Artificial Sequence: Synthetic oligonucleotide
uuugaguaauuaauuuauu

SEQ ID NO: 3048552 - RNA, 19 nt, Artificial Sequence
  Description of Artificial Sequence: Synthetic oligonucleotide
ugucaauggagcuccuuga

SEQ ID NO: 3048553 - RNA, 19 nt, Artificial Sequence
  Description of Artificial Sequence: Synthetic oligonucleotide
uuaguggguuaacacagau

SEQ ID NO: 3048554 - RNA, 19 nt, Artificial Sequence
  Description of Artificial Sequence: Synthetic oligonucleotide
cauggcgauguccauaaac

SEQ ID NO: 3048555 - RNA, 19 nt, Artificial Sequence
  Description of Artificial Sequence: Synthetic oligonucleotide
ucuucuugccaguaauuuc

SEQ ID NO: 3048556 - RNA, 19 nt, Artificial Sequence
  Description of Artificial Sequence: Synthetic oligonucleotide
uuuaguggguuaacacaga

SEQ ID NO: 3048557 - RNA, 19 nt, Artificial Sequence
  Description of Artificial Sequence: Synthetic oligonucleotide
ugccaguaauuucaagcug

SEQ ID NO: 3048558 - RNA, 19 nt, Artificial Sequence
  Description of Artificial Sequence: Synthetic oligonucleotide
cccucaaucucacugaggg

SEQ ID NO: 3048559 - RNA, 19 nt, Artificial Sequence
  Description of Artificial Sequence: Synthetic oligonucleotide
gauucuccacccagcaugg

SEQ ID NO: 3048560 - RNA, 19 nt, Artificial Sequence
  Description of Artificial Sequence: Synthetic oligonucleotide
aaucucacugagggcuugc

SEQ ID NO: 3048561 - RNA, 19 nt, Artificial Sequence
  Description of Artificial Sequence: Synthetic oligonucleotide
ucgaugauuccagaaguga

SEQ ID NO: 3048562 - RNA, 19 nt, Artificial Sequence
  Description of Artificial Sequence: Synthetic oligonucleotide
gaagauggcaggguuacca

SEQ ID NO: 3048563 - RNA, 19 nt, Artificial Sequence
  Description of Artificial Sequence: Synthetic oligonucleotide
uucaagcugccguuggaug

SEQ ID NO: 3048564 - RNA, 19 nt, Artificial Sequence
  Description of Artificial Sequence: Synthetic oligonucleotide
uugucuucuugccaguaau

SEQ ID NO: 3048565 - RNA, 19 nt, Artificial Sequence
  Description of Artificial Sequence: Synthetic oligonucleotide
uggagcuccuugaugcugc

SEQ ID NO: 3048566 - RNA, 19 nt, Artificial Sequence
  Description of Artificial Sequence: Synthetic oligonucleotide
ucacgauauccuugugccg

SEQ ID NO: 3048567 - RNA, 19 nt, Artificial Sequence
  Description of Artificial Sequence: Synthetic oligonucleotide
aagugaagauggcaggguu

SEQ ID NO: 3048568 - RNA, 19 nt, Artificial Sequence
  Description of Artificial Sequence: Synthetic oligonucleotide
aauggagcuccuugaugcu

SEQ ID NO: 3048569 - RNA, 19 nt, Artificial Sequence
  Description of Artificial Sequence: Synthetic oligonucleotide
auguccauaaacaugucaa

SEQ ID NO: 3048570 - RNA, 19 nt, Artificial Sequence
  Description of Artificial Sequence: Synthetic oligonucleotide
ucccugauucuccacccag

SEQ ID NO: 3048571 - RNA, 19 nt, Artificial Sequence
  Description of Artificial Sequence: Synthetic oligonucleotide
guccauaaacaugucaaug

SEQ ID NO: 3048572 - RNA, 19 nt, Artificial Sequence
  Description of Artificial Sequence: Synthetic oligonucleotide
uccagaagugaagauggca

SEQ ID NO: 3048573 - RNA, 19 nt, Artificial Sequence
  Description of Artificial Sequence: Synthetic oligonucleotide
uugaugcugcucuccagcc

SEQ ID NO: 3048574 - RNA, 19 nt, Artificial Sequence
  Description of Artificial Sequence: Synthetic oligonucleotide
acgauauccuugugccggc

SEQ ID NO: 3048575 - RNA, 19 nt, Artificial Sequence
  Description of Artificial Sequence: Synthetic oligonucleotide
gauauccuugugccggccc

SEQ ID NO: 3048576 - RNA, 19 nt, Artificial Sequence
  Description of Artificial Sequence: Synthetic oligonucleotide
cuuggaaaucugcgagucg

SEQ ID NO: 3048577 - RNA, 19 nt, Artificial Sequence
  Description of Artificial Sequence: Synthetic oligonucleotide
guuaccacucuccaacauc

SEQ ID NO: 3048578 - RNA, 19 nt, Artificial Sequence
  Description of Artificial Sequence: Synthetic oligonucleotide
auggcgauguccauaaaca

SEQ ID NO: 3048579 - RNA, 19 nt, Artificial Sequence
  Description of Artificial Sequence: Synthetic oligonucleotide
uguccauaaacaugucaau

SEQ ID NO: 3048580 - RNA, 19 nt, Artificial Sequence
  Description of Artificial Sequence: Synthetic oligonucleotide
cuugcuuggaaaucugcga

SEQ ID NO: 3048581 - RNA, 19 nt, Artificial Sequence
  Description of Artificial Sequence: Synthetic oligonucleotide
aucugcgagucgaugauuc

SEQ ID NO: 3048582 - RNA, 19 nt, Artificial Sequence
  Description of Artificial Sequence: Synthetic oligonucleotide
ucuugccaguaauuucaag

SEQ ID NO: 3048583 - RNA, 19 nt, Artificial Sequence
  Description of Artificial Sequence: Synthetic oligonucleotide
uaauuucaagcugccguug

SEQ ID NO: 3048584 - RNA, 19 nt, Artificial Sequence
  Description of Artificial Sequence: Synthetic oligonucleotide
accacucuccaacaucucu

SEQ ID NO: 3048585 - RNA, 19 nt, Artificial Sequence
  Description of Artificial Sequence: Synthetic oligonucleotide
agcauggcgauguccauaa

SEQ ID NO: 3048586 - RNA, 19 nt, Artificial Sequence
  Description of Artificial Sequence: Synthetic oligonucleotide
guuugaguaauuaauuuau

SEQ ID NO: 3048587 - RNA, 19 nt, Artificial Sequence
  Description of Artificial Sequence: Synthetic oligonucleotide
ugcuuggaaaucugcgagu

SEQ ID NO: 3048588 - RNA, 19 nt, Artificial Sequence
  Description of Artificial Sequence: Synthetic oligonucleotide
auuucaagcugccguugga

SEQ ID NO: 3048589 - RNA, 19 nt, Artificial Sequence
  Description of Artificial Sequence: Synthetic oligonucleotide
gauggcaggguuaccacuc

SEQ ID NO: 3048590 - RNA, 19 nt, Artificial Sequence
  Description of Artificial Sequence: Synthetic oligonucleotide
ucugcgagucgaugauucc

SEQ ID NO: 3048591 - RNA, 19 nt, Artificial Sequence
  Description of Artificial Sequence: Synthetic oligonucleotide
auauccuugugccggcccu

SEQ ID NO: 3048592 - RNA, 19 nt, Artificial Sequence
  Description of Artificial Sequence: Synthetic oligonucleotide
uuccagaagugaagauggc

SEQ ID NO: 3048593 - RNA, 19 nt, Artificial Sequence
  Description of Artificial Sequence: Synthetic oligonucleotide
gccaguaauuucaagcugc

SEQ ID NO: 3048594 - RNA, 19 nt, Artificial Sequence
  Description of Artificial Sequence: Synthetic oligonucleotide
guuaacacagauauuuuau

SEQ ID NO: 3048595 - RNA, 19 nt, Artificial Sequence
  Description of Artificial Sequence: Synthetic oligonucleotide
agccucacgauauccuugu

SEQ ID NO: 3048596 - RNA, 19 nt, Artificial Sequence
  Description of Artificial Sequence: Synthetic oligonucleotide
ugugccggcccucaaucuc

SEQ ID NO: 3048597 - RNA, 19 nt, Artificial Sequence
  Description of Artificial Sequence: Synthetic oligonucleotide
agauggcaggguuaccacu

SEQ ID NO: 3048598 - RNA, 19 nt, Artificial Sequence
  Description of Artificial Sequence: Synthetic oligonucleotide
cuugugccggcccucaauc

SEQ ID NO: 3048599 - RNA, 19 nt, Artificial Sequence
  Description of Artificial Sequence: Synthetic oligonucleotide
gugaagauggcaggguuac

SEQ ID NO: 3048600 - RNA, 19 nt, Artificial Sequence
  Description of Artificial Sequence: Synthetic oligonucleotide
uaguggguuaacacagaua

SEQ ID NO: 3048601 - RNA, 19 nt, Artificial Sequence
  Description of Artificial Sequence: Synthetic oligonucleotide
gcuugcuuggaaaucugcg

SEQ ID NO: 3048602 - RNA, 19 nt, Artificial Sequence
  Description of Artificial Sequence: Synthetic oligonucleotide
ugucuucuugccaguaauu

SEQ ID NO: 3048603 - RNA, 19 nt, Artificial Sequence
  Description of Artificial Sequence: Synthetic oligonucleotide
uuucaagcugccguuggau

SEQ ID NO: 3048604 - RNA, 19 nt, Artificial Sequence
  Description of Artificial Sequence: Synthetic oligonucleotide
uggcgauguccauaaacau

SEQ ID NO: 3048605 - RNA, 19 nt, Artificial Sequence
  Description of Artificial Sequence: Synthetic oligonucleotide
caguaauuucaagcugccg

SEQ ID NO: 3048606 - RNA, 19 nt, Artificial Sequence
  Description of Artificial Sequence: Synthetic oligonucleotide
uucuugccaguaauuucaa

SEQ ID NO: 3048607 - RNA, 19 nt, Artificial Sequence
  Description of Artificial Sequence: Synthetic oligonucleotide
gguuaacacagauauuuua

SEQ ID NO: 3048608 - RNA, 19 nt, Artificial Sequence
  Description of Artificial Sequence: Synthetic oligonucleotide
uuauucccugauucuccac

SEQ ID NO: 3048609 - RNA, 19 nt, Artificial Sequence
  Description of Artificial Sequence: Synthetic oligonucleotide
caagcugccguuggaugcg

SEQ ID NO: 3048610 - RNA, 19 nt, Artificial Sequence
  Description of Artificial Sequence: Synthetic oligonucleotide
gucgaugauuccagaagug

SEQ ID NO: 3048611 - RNA, 19 nt, Artificial Sequence
  Description of Artificial Sequence: Synthetic oligonucleotide
uggaaaucugcgagucgau

SEQ ID NO: 3048612 - RNA, 19 nt, Artificial Sequence
  Description of Artificial Sequence: Synthetic oligonucleotide
aagcugccguuggaugcgc

SEQ ID NO: 3048613 - RNA, 19 nt, Artificial Sequence
  Description of Artificial Sequence: Synthetic oligonucleotide
uucccugauucuccaccca

SEQ ID NO: 3048614 - RNA, 19 nt, Artificial Sequence
  Description of Artificial Sequence: Synthetic oligonucleotide
ccucacgauauccuugugc

SEQ ID NO: 3048615 - RNA, 19 nt, Artificial Sequence
  Description of Artificial Sequence: Synthetic oligonucleotide
cugcucuccagccucacga

SEQ ID NO: 3048616 - RNA, 19 nt, Artificial Sequence
  Description of Artificial Sequence: Synthetic oligonucleotide
ggcgauguccauaaacaug

SEQ ID NO: 3048617 - RNA, 19 nt, Artificial Sequence
  Description of Artificial Sequence: Synthetic oligonucleotide
ccaguaauuucaagcugcc

SEQ ID NO: 3048618 - RNA, 19 nt, Artificial Sequence
  Description of Artificial Sequence: Synthetic oligonucleotide
cagccucacgauauccuug

SEQ ID NO: 3048619 - RNA, 19 nt, Artificial Sequence
  Description of Artificial Sequence: Synthetic oligonucleotide
uccucgucuguugucuucu

SEQ ID NO: 3048620 - RNA, 19 nt, Artificial Sequence
  Description of Artificial Sequence: Synthetic oligonucleotide
acccagcauggcgaugucc

SEQ ID NO: 3048621 - RNA, 19 nt, Artificial Sequence
  Description of Artificial Sequence: Synthetic oligonucleotide
guaauuucaagcugccguu

SEQ ID NO: 3048622 - RNA, 19 nt, Artificial Sequence
  Description of Artificial Sequence: Synthetic oligonucleotide
aacaucucuuccagcuccu

SEQ ID NO: 3048623 - RNA, 19 nt, Artificial Sequence
  Description of Artificial Sequence: Synthetic oligonucleotide
gucuguugucuucuugcca

SEQ ID NO: 3048624 - RNA, 19 nt, Artificial Sequence
  Description of Artificial Sequence: Synthetic oligonucleotide
cucgucuguugucuucuug

SEQ ID NO: 3048625 - RNA, 19 nt, Artificial Sequence
  Description of Artificial Sequence: Synthetic oligonucleotide
ucucacugagggcuugcuu

SEQ ID NO: 3048626 - RNA, 19 nt, Artificial Sequence
  Description of Artificial Sequence: Synthetic oligonucleotide
guugucuucuugccaguaa

SEQ ID NO: 3048627 - RNA, 19 nt, Artificial Sequence
  Description of Artificial Sequence: Synthetic oligonucleotide
agcuccucgucuguugucu

SEQ ID NO: 3048628 - RNA, 19 nt, Artificial Sequence
  Description of Artificial Sequence: Synthetic oligonucleotide
ccauaaacaugucaaugga

SEQ ID NO: 3048629 - RNA, 19 nt, Artificial Sequence
  Description of Artificial Sequence: Synthetic oligonucleotide
ugaagauggcaggguuacc

SEQ ID NO: 3048630 - RNA, 19 nt, Artificial Sequence
  Description of Artificial Sequence: Synthetic oligonucleotide
uugugccggcccucaaucu

SEQ ID NO: 3048631 - RNA, 19 nt, Artificial Sequence
  Description of Artificial Sequence: Synthetic oligonucleotide
ucuccagccucacgauauc

SEQ ID NO: 3048632 - RNA, 19 nt, Artificial Sequence
  Description of Artificial Sequence: Synthetic oligonucleotide
auggagcuccuugaugcug

SEQ ID NO: 3048633 - RNA, 19 nt, Artificial Sequence
  Description of Artificial Sequence: Synthetic oligonucleotide
aaucugcgagucgaugauu

SEQ ID NO: 3048634 - RNA, 19 nt, Artificial Sequence
  Description of Artificial Sequence: Synthetic oligonucleotide
cuccagccucacgauaucc

SEQ ID NO: 3048635 - RNA, 19 nt, Artificial Sequence
  Description of Artificial Sequence: Synthetic oligonucleotide
gcgauguccauaaacaugu

SEQ ID NO: 3048636 - RNA, 19 nt, Artificial Sequence
  Description of Artificial Sequence: Synthetic oligonucleotide
ggaaaucugcgagucgaug

SEQ ID NO: 3048637 - RNA, 19 nt, Artificial Sequence
  Description of Artificial Sequence: Synthetic oligonucleotide
uguugucuucuugccagua

SEQ ID NO: 3048638 - RNA, 19 nt, Artificial Sequence
  Description of Artificial Sequence: Synthetic oligonucleotide
gaagugaagauggcagggu

SEQ ID NO: 3048639 - RNA, 19 nt, Artificial Sequence
  Description of Artificial Sequence: Synthetic oligonucleotide
ggcaggguuaccacucucc

SEQ ID NO: 3048640 - RNA, 19 nt, Artificial Sequence
  Description of Artificial Sequence: Synthetic oligonucleotide
ugcucuccagccucacgau

SEQ ID NO: 3048641 - RNA, 19 nt, Artificial Sequence
  Description of Artificial Sequence: Synthetic oligonucleotide
gcuuggaaaucugcgaguc

SEQ ID NO: 3048642 - RNA, 19 nt, Artificial Sequence
  Description of Artificial Sequence: Synthetic oligonucleotide
uaccacucuccaacaucuc

SEQ ID NO: 3048643 - RNA, 19 nt, Artificial Sequence
  Description of Artificial Sequence: Synthetic oligonucleotide
cugagggcuugcuuggaaa

SEQ ID NO: 3048644 - RNA, 19 nt, Artificial Sequence
  Description of Artificial Sequence: Synthetic oligonucleotide
uggcaggguuaccacucuc

SEQ ID NO: 3048645 - RNA, 19 nt, Artificial Sequence
  Description of Artificial Sequence: Synthetic oligonucleotide
ggcccucaaucucacugag

SEQ ID NO: 3048646 - RNA, 19 nt, Artificial Sequence
  Description of Artificial Sequence: Synthetic oligonucleotide
cuccucgucuguugucuuc

SEQ ID NO: 3048647 - RNA, 19 nt, Artificial Sequence
  Description of Artificial Sequence: Synthetic oligonucleotide
cugcgagucgaugauucca

SEQ ID NO: 3048648 - RNA, 19 nt, Artificial Sequence
  Description of Artificial Sequence: Synthetic oligonucleotide
caaucucacugagggcuug

SEQ ID NO: 3048649 - RNA, 19 nt, Artificial Sequence
  Description of Artificial Sequence: Synthetic oligonucleotide
ccggcccucaaucucacug

SEQ ID NO: 3048650 - RNA, 19 nt, Artificial Sequence
  Description of Artificial Sequence: Synthetic oligonucleotide
cucuccagccucacgauau

SEQ ID NO: 3048651 - RNA, 19 nt, Artificial Sequence
  Description of Artificial Sequence: Synthetic oligonucleotide
ccucaaucucacugagggc

SEQ ID NO: 3048652 - RNA, 19 nt, Artificial Sequence
  Description of Artificial Sequence: Synthetic oligonucleotide
uauccuugugccggcccuc

SEQ ID NO: 3048653 - RNA, 19 nt, Artificial Sequence
  Description of Artificial Sequence: Synthetic oligonucleotide
gucaauggagcuccuugau

SEQ ID NO: 3048654 - RNA, 19 nt, Artificial Sequence
  Description of Artificial Sequence: Synthetic oligonucleotide
gcaggguuaccacucucca

SEQ ID NO: 3048655 - RNA, 19 nt, Artificial Sequence
  Description of Artificial Sequence: Synthetic oligonucleotide
cccugauucuccacccagc

SEQ ID NO: 3048656 - RNA, 19 nt, Artificial Sequence
  Description of Artificial Sequence: Synthetic oligonucleotide
ggcuugcuuggaaaucugc

SEQ ID NO: 3048657 - RNA, 19 nt, Artificial Sequence
  Description of Artificial Sequence: Synthetic oligonucleotide
cgucuguugucuucuugcc

SEQ ID NO: 3048658 - RNA, 19 nt, Artificial Sequence
  Description of Artificial Sequence: Synthetic oligonucleotide
aucucacugagggcuugcu

SEQ ID NO: 3048659 - RNA, 19 nt, Artificial Sequence
  Description of Artificial Sequence: Synthetic oligonucleotide
ccugauucuccacccagca

SEQ ID NO: 3048660 - RNA, 19 nt, Artificial Sequence
  Description of Artificial Sequence: Synthetic oligonucleotide
gucuucuugccaguaauuu

SEQ ID NO: 3048661 - RNA, 19 nt, Artificial Sequence
  Description of Artificial Sequence: Synthetic oligonucleotide
ugccggcccucaaucucac

SEQ ID NO: 3048662 - RNA, 19 nt, Artificial Sequence
  Description of Artificial Sequence: Synthetic oligonucleotide
agcugccguuggaugcgcc

SEQ ID NO: 3048663 - RNA, 19 nt, Artificial Sequence
  Description of Artificial Sequence: Synthetic oligonucleotide
caggguuaccacucuccaa

SEQ ID NO: 3048664 - RNA, 19 nt, Artificial Sequence
  Description of Artificial Sequence: Synthetic oligonucleotide
ggguuaccacucuccaaca

SEQ ID NO: 3048665 - RNA, 19 nt, Artificial Sequence
  Description of Artificial Sequence: Synthetic oligonucleotide
cgaugauuccagaagugaa

SEQ ID NO: 3048666 - RNA, 19 nt, Artificial Sequence
  Description of Artificial Sequence: Synthetic oligonucleotide
auccuugugccggcccuca

SEQ ID NO: 3048667 - RNA, 19 nt, Artificial Sequence
  Description of Artificial Sequence: Synthetic oligonucleotide
uccuugugccggcccucaa

SEQ ID NO: 3048668 - RNA, 19 nt, Artificial Sequence
  Description of Artificial Sequence: Synthetic oligonucleotide
gugccggcccucaaucuca

SEQ ID NO: 3048669 - RNA, 19 nt, Artificial Sequence
  Description of Artificial Sequence: Synthetic oligonucleotide
uccacccagcauggcgaug

SEQ ID NO: 3048670 - RNA, 19 nt, Artificial Sequence
  Description of Artificial Sequence: Synthetic oligonucleotide
gcccucaaucucacugagg

SEQ ID NO: 3048671 - RNA, 19 nt, Artificial Sequence
  Description of Artificial Sequence: Synthetic oligonucleotide
gagcuccuugaugcugcuc

SEQ ID NO: 3048672 - RNA, 19 nt, Artificial Sequence
  Description of Artificial Sequence: Synthetic oligonucleotide
acaugucaauggagcuccu

SEQ ID NO: 3048673 - RNA, 19 nt, Artificial Sequence
  Description of Artificial Sequence: Synthetic oligonucleotide
gguuaccacucuccaacau

SEQ ID NO: 3048674 - RNA, 19 nt, Artificial Sequence
  Description of Artificial Sequence: Synthetic oligonucleotide
cuguugucuucuugccagu

SEQ ID NO: 3048675 - RNA, 19 nt, Artificial Sequence
  Description of Artificial Sequence: Synthetic oligonucleotide
cgagucgaugauuccagaa

SEQ ID NO: 3048676 - RNA, 19 nt, Artificial Sequence
  Description of Artificial Sequence: Synthetic oligonucleotide
cugauucuccacccagcau

SEQ ID NO: 3048677 - RNA, 19 nt, Artificial Sequence
  Description of Artificial Sequence: Synthetic oligonucleotide
cagcauggcgauguccaua

SEQ ID NO: 3048678 - RNA, 19 nt, Artificial Sequence
  Description of Artificial Sequence: Synthetic oligonucleotide
cacccagcauggcgauguc

SEQ ID NO: 3048679 - RNA, 19 nt, Artificial Sequence
  Description of Artificial Sequence: Synthetic oligonucleotide
gccucacgauauccuugug

SEQ ID NO: 3048680 - RNA, 19 nt, Artificial Sequence
  Description of Artificial Sequence: Synthetic oligonucleotide
gcucuccagccucacgaua

SEQ ID NO: 3048681 - RNA, 19 nt, Artificial Sequence
  Description of Artificial Sequence: Synthetic oligonucleotide
cgauguccauaaacauguc

SEQ ID NO: 3048682 - RNA, 19 nt, Artificial Sequence
  Description of Artificial Sequence: Synthetic oligonucleotide
caugucaauggagcuccuu

SEQ ID NO: 3048683 - RNA, 19 nt, Artificial Sequence
  Description of Artificial Sequence: Synthetic oligonucleotide
cgauauccuugugccggcc

SEQ ID NO: 3048684 - RNA, 19 nt, Artificial Sequence
  Description of Artificial Sequence: Synthetic oligonucleotide
ccacccagcauggcgaugu

SEQ ID NO: 3048685 - RNA, 19 nt, Artificial Sequence
  Description of Artificial Sequence: Synthetic oligonucleotide
cggcccucaaucucacuga

SEQ ID NO: 3048686 - RNA, 19 nt, Artificial Sequence
  Description of Artificial Sequence: Synthetic oligonucleotide
ggagcuccuugaugcugcu

SEQ ID NO: 3048687 - RNA, 19 nt, Artificial Sequence
  Description of Artificial Sequence: Synthetic oligonucleotide
cuccacccagcauggcgau

SEQ ID NO: 3048688 - RNA, 19 nt, Artificial Sequence
  Description of Artificial Sequence: Synthetic oligonucleotide
gcauggcgauguccauaaa

SEQ ID NO: 3048689 - RNA, 19 nt, Artificial Sequence
  Description of Artificial Sequence: Synthetic oligonucleotide
ccuugugccggcccucaau

SEQ ID NO: 3048690 - RNA, 19 nt, Artificial Sequence
  Description of Artificial Sequence: Synthetic oligonucleotide
gcuccucgucuguugucuu

SEQ ID NO: 3048691 - RNA, 19 nt, Artificial Sequence
  Description of Artificial Sequence: Synthetic oligonucleotide
ccagcauggcgauguccau

SEQ ID NO: 3048692 - RNA, 19 nt, Artificial Sequence
  Description of Artificial Sequence: Synthetic oligonucleotide
gccggcccucaaucucacu

SEQ ID NO: 3048693 - RNA, 19 nt, Artificial Sequence
  Description of Artificial Sequence: Synthetic oligonucleotide
ccucgucuguugucuucuu

SEQ ID NO: 3048694 - RNA, 19 nt, Artificial Sequence
  Description of Artificial Sequence: Synthetic oligonucleotide
aacacaaauguacaaaggg

SEQ ID NO: 3048695 - RNA, 19 nt, Artificial Sequence
  Description of Artificial Sequence: Synthetic oligonucleotide
aaaaucaaaagaaaaggac

SEQ ID NO: 3048696 - RNA, 19 nt, Artificial Sequence
  Description of Artificial Sequence: Synthetic oligonucleotide
ugugguaaaacauagaaaa

SEQ ID NO: 3048697 - RNA, 19 nt, Artificial Sequence
  Description of Artificial Sequence: Synthetic oligonucleotide
aagaaggaaacacaaaugu

SEQ ID NO: 3048698 - RNA, 19 nt, Artificial Sequence
  Description of Artificial Sequence: Synthetic oligonucleotide
auuuauuuccuauagaaaa

SEQ ID NO: 3048699 - RNA, 19 nt, Artificial Sequence
  Description of Artificial Sequence: Synthetic oligonucleotide
aaauuuuccaauaagccug

SEQ ID NO: 3048700 - RNA, 19 nt, Artificial Sequence
  Description of Artificial Sequence: Synthetic oligonucleotide
ucaaaagaaaaggacaggg

SEQ ID NO: 3048701 - RNA, 19 nt, Artificial Sequence
  Description of Artificial Sequence: Synthetic oligonucleotide
aaucaaaagaaaaggacag

SEQ ID NO: 3048702 - RNA, 19 nt, Artificial Sequence
  Description of Artificial Sequence: Synthetic oligonucleotide
ucuuccuccaacaugcagg

SEQ ID NO: 3048703 - RNA, 19 nt, Artificial Sequence
  Description of Artificial Sequence: Synthetic oligonucleotide
aagaaaaggacagggaggg

SEQ ID NO: 3048704 - RNA, 19 nt, Artificial Sequence
  Description of Artificial Sequence: Synthetic oligonucleotide
aguaaaauuuuccaauaag

SEQ ID NO: 3048705 - RNA, 19 nt, Artificial Sequence
  Description of Artificial Sequence: Synthetic oligonucleotide
aguuguuguuuucaaaucg

SEQ ID NO: 3048706 - RNA, 19 nt, Artificial Sequence
  Description of Artificial Sequence: Synthetic oligonucleotide
aaacagaguaaaauuuucc

SEQ ID NO: 3048707 - RNA, 19 nt, Artificial Sequence
  Description of Artificial Sequence: Synthetic oligonucleotide
aaaucaaaagaaaaggaca

SEQ ID NO: 3048708 - RNA, 19 nt, Artificial Sequence
  Description of Artificial Sequence: Synthetic oligonucleotide
uucaguuuaacaauggaau

SEQ ID NO: 3048709 - RNA, 19 nt, Artificial Sequence
  Description of Artificial Sequence: Synthetic oligonucleotide
aaugcuggaaaggaugggc

SEQ ID NO: 3048710 - RNA, 19 nt, Artificial Sequence
  Description of Artificial Sequence: Synthetic oligonucleotide
aacagaguaaaauuuucca

SEQ ID NO: 3048711 - RNA, 19 nt, Artificial Sequence
  Description of Artificial Sequence: Synthetic oligonucleotide
aauguacuaaacaagcuug

SEQ ID NO: 3048712 - RNA, 19 nt, Artificial Sequence
  Description of Artificial Sequence: Synthetic oligonucleotide
aaagcuauuuauuuccuau

SEQ ID NO: 3048713 - RNA, 19 nt, Artificial Sequence
  Description of Artificial Sequence: Synthetic oligonucleotide
uuguuuucaaaucguaacc

SEQ ID NO: 3048714 - RNA, 19 nt, Artificial Sequence
  Description of Artificial Sequence: Synthetic oligonucleotide
aaauguacuaaacaagcuu

SEQ ID NO: 3048715 - RNA, 19 nt, Artificial Sequence
  Description of Artificial Sequence: Synthetic oligonucleotide
aguagcaagaaggaaacac

SEQ ID NO: 3048716 - RNA, 19 nt, Artificial Sequence
  Description of Artificial Sequence: Synthetic oligonucleotide
guaacauucaguuuaacaa

SEQ ID NO: 3048717 - RNA, 19 nt, Artificial Sequence
  Description of Artificial Sequence: Synthetic oligonucleotide
aaaacagaguaaaauuuuc

SEQ ID NO: 3048718 - RNA, 19 nt, Artificial Sequence
  Description of Artificial Sequence: Synthetic oligonucleotide
uacuaaacaagcuugguau

SEQ ID NO: 3048719 - RNA, 19 nt, Artificial Sequence
  Description of Artificial Sequence: Synthetic oligonucleotide
cagaaagcuauuuauuucc

SEQ ID NO: 3048720 - RNA, 19 nt, Artificial Sequence
  Description of Artificial Sequence: Synthetic oligonucleotide
cuugguauaaaacagagua

SEQ ID NO: 3048721 - RNA, 19 nt, Artificial Sequence
  Description of Artificial Sequence: Synthetic oligonucleotide
acagaaagcuauuuauuuc

SEQ ID NO: 3048722 - RNA, 19 nt, Artificial Sequence
  Description of Artificial Sequence: Synthetic oligonucleotide
uuuuccaauaagccugagg

SEQ ID NO: 3048723 - RNA, 19 nt, Artificial Sequence
  Description of Artificial Sequence: Synthetic oligonucleotide
ugaggagaaagcacaaugc

SEQ ID NO: 3048724 - RNA, 19 nt, Artificial Sequence
  Description of Artificial Sequence: Synthetic oligonucleotide
aaaggaagaggaaggacac

SEQ ID NO: 3048725 - RNA, 19 nt, Artificial Sequence
  Description of Artificial Sequence: Synthetic oligonucleotide
uuuucaaaucguaaccugu

SEQ ID NO: 3048726 - RNA, 19 nt, Artificial Sequence
  Description of Artificial Sequence: Synthetic oligonucleotide
caagcuugguauaaaacag

SEQ ID NO: 3048727 - RNA, 19 nt, Artificial Sequence
  Description of Artificial Sequence: Synthetic oligonucleotide
uucaaaucguaaccugugg

SEQ ID NO: 3048728 - RNA, 19 nt, Artificial Sequence
  Description of Artificial Sequence: Synthetic oligonucleotide
auaguuguuguuuucaaau

SEQ ID NO: 3048729 - RNA, 19 nt, Artificial Sequence
  Description of Artificial Sequence: Synthetic oligonucleotide
aaaauaguuguuguuuuca

SEQ ID NO: 3048730 - RNA, 19 nt, Artificial Sequence
  Description of Artificial Sequence: Synthetic oligonucleotide
agcuauuuauuuccuauag

SEQ ID NO: 3048731 - RNA, 19 nt, Artificial Sequence
  Description of Artificial Sequence: Synthetic oligonucleotide
cuauuuauuuccuauagaa

SEQ ID NO: 3048732 - RNA, 19 nt, Artificial Sequence
  Description of Artificial Sequence: Synthetic oligonucleotide
uuucaaaucguaaccugug

SEQ ID NO: 3048733 - RNA, 19 nt, Artificial Sequence
  Description of Artificial Sequence: Synthetic oligonucleotide
uauuuauuuccuauagaaa

SEQ ID NO: 3048734 - RNA, 19 nt, Artificial Sequence
  Description of Artificial Sequence: Synthetic oligonucleotide
aacaagcuugguauaaaac

SEQ ID NO: 3048735 - RNA, 19 nt, Artificial Sequence
  Description of Artificial Sequence: Synthetic oligonucleotide
aaacacaaauguacaaagg

SEQ ID NO: 3048736 - RNA, 19 nt, Artificial Sequence
  Description of Artificial Sequence: Synthetic oligonucleotide
aaagcacaaugcuggaaag

SEQ ID NO: 3048737 - RNA, 19 nt, Artificial Sequence
  Description of Artificial Sequence: Synthetic oligonucleotide
aauaagccugaggagaaag

SEQ ID NO: 3048738 - RNA, 19 nt, Artificial Sequence
  Description of Artificial Sequence: Synthetic oligonucleotide
aaauguacaaaggggucuc

SEQ ID NO: 3048739 - RNA, 19 nt, Artificial Sequence
  Description of Artificial Sequence: Synthetic oligonucleotide
ugguauaaaacagaguaaa

SEQ ID NO: 3048740 - RNA, 19 nt, Artificial Sequence
  Description of Artificial Sequence: Synthetic oligonucleotide
aauaguuguuguuuucaaa

SEQ ID NO: 3048741 - RNA, 19 nt, Artificial Sequence
  Description of Artificial Sequence: Synthetic oligonucleotide
aguggagacgguaacauuc

SEQ ID NO: 3048742 - RNA, 19 nt, Artificial Sequence
  Description of Artificial Sequence: Synthetic oligonucleotide
uccaauaagccugaggaga

SEQ ID NO: 3048743 - RNA, 19 nt, Artificial Sequence
  Description of Artificial Sequence: Synthetic oligonucleotide
ucaaaucguaaccuguggu

SEQ ID NO: 3048744 - RNA, 19 nt, Artificial Sequence
  Description of Artificial Sequence: Synthetic oligonucleotide
acacaaauguacaaagggg

SEQ ID NO: 3048745 - RNA, 19 nt, Artificial Sequence
  Description of Artificial Sequence: Synthetic oligonucleotide
aacauucaguuuaacaaug

SEQ ID NO: 3048746 - RNA, 19 nt, Artificial Sequence
  Description of Artificial Sequence: Synthetic oligonucleotide
aagaguagcaagaaggaaa

SEQ ID NO: 3048747 - RNA, 19 nt, Artificial Sequence
  Description of Artificial Sequence: Synthetic oligonucleotide
gacgguaacauucaguuua

SEQ ID NO: 3048748 - RNA, 19 nt, Artificial Sequence
  Description of Artificial Sequence: Synthetic oligonucleotide
caagaaggaaacacaaaug

SEQ ID NO: 3048749 - RNA, 19 nt, Artificial Sequence
  Description of Artificial Sequence: Synthetic oligonucleotide
agaguagcaagaaggaaac

SEQ ID NO: 3048750 - RNA, 19 nt, Artificial Sequence
  Description of Artificial Sequence: Synthetic oligonucleotide
uaacauucaguuuaacaau

SEQ ID NO: 3048751 - RNA, 19 nt, Artificial Sequence
  Description of Artificial Sequence: Synthetic oligonucleotide
uacagaaagcuauuuauuu

SEQ ID NO: 3048752 - RNA, 19 nt, Artificial Sequence
  Description of Artificial Sequence: Synthetic oligonucleotide
uguuguuuucaaaucguaa

SEQ ID NO: 3048753 - RNA, 19 nt, Artificial Sequence
  Description of Artificial Sequence: Synthetic oligonucleotide
guuguuggaguggagacgg

SEQ ID NO: 3048754 - RNA, 19 nt, Artificial Sequence
  Description of Artificial Sequence: Synthetic oligonucleotide
aaaauguacuaaacaagcu

SEQ ID NO: 3048755 - RNA, 19 nt, Artificial Sequence
  Description of Artificial Sequence: Synthetic oligonucleotide
aaauaguuguuguuuucaa

SEQ ID NO: 3048756 - RNA, 19 nt, Artificial Sequence
  Description of Artificial Sequence: Synthetic oligonucleotide
caacaugcagggaacaaag

SEQ ID NO: 3048757 - RNA, 19 nt, Artificial Sequence
  Description of Artificial Sequence: Synthetic oligonucleotide
gaaagcacaaugcuggaaa

SEQ ID NO: 3048758 - RNA, 19 nt, Artificial Sequence
  Description of Artificial Sequence: Synthetic oligonucleotide
uguuuucaaaucguaaccu

SEQ ID NO: 3048759 - RNA, 19 nt, Artificial Sequence
  Description of Artificial Sequence: Synthetic oligonucleotide
aaacaagcuugguauaaaa

SEQ ID NO: 3048760 - RNA, 19 nt, Artificial Sequence
  Description of Artificial Sequence: Synthetic oligonucleotide
caaaggaagaggaaggaca

SEQ ID NO: 3048761 - RNA, 19 nt, Artificial Sequence
  Description of Artificial Sequence: Synthetic oligonucleotide
cacaaugcuggaaaggaug

SEQ ID NO: 3048762 - RNA, 19 nt, Artificial Sequence
  Description of Artificial Sequence: Synthetic oligonucleotide
uccuccaacaugcagggaa

SEQ ID NO: 3048763 - RNA, 19 nt, Artificial Sequence
  Description of Artificial Sequence: Synthetic oligonucleotide
acagaguaaaauuuuccaa

SEQ ID NO: 3048764 - RNA, 19 nt, Artificial Sequence
  Description of Artificial Sequence: Synthetic oligonucleotide
cugaggagaaagcacaaug

SEQ ID NO: 3048765 - RNA, 19 nt, Artificial Sequence
  Description of Artificial Sequence: Synthetic oligonucleotide
uugguauaaaacagaguaa

SEQ ID NO: 3048766 - RNA, 19 nt, Artificial Sequence
  Description of Artificial Sequence: Synthetic oligonucleotide
guuuucaaaucguaaccug

SEQ ID NO: 3048767 - RNA, 19 nt, Artificial Sequence
  Description of Artificial Sequence: Synthetic oligonucleotide
ggaacaaaggaagaggaag

SEQ ID NO: 3048768 - RNA, 19 nt, Artificial Sequence
  Description of Artificial Sequence: Synthetic oligonucleotide
uagcaagaaggaaacacaa

SEQ ID NO: 3048769 - RNA, 19 nt, Artificial Sequence
  Description of Artificial Sequence: Synthetic oligonucleotide
gucucuuccuccaacaugc

SEQ ID NO: 3048770 - RNA, 19 nt, Artificial Sequence
  Description of Artificial Sequence: Synthetic oligonucleotide
cuuccuccaacaugcaggg

SEQ ID NO: 3048771 - RNA, 19 nt, Artificial Sequence
  Description of Artificial Sequence: Synthetic oligonucleotide
ucaguuuaacaauggaaua

SEQ ID NO: 3048772 - RNA, 19 nt, Artificial Sequence
  Description of Artificial Sequence: Synthetic oligonucleotide
gaaggacacugguuguugg

SEQ ID NO: 3048773 - RNA, 19 nt, Artificial Sequence
  Description of Artificial Sequence: Synthetic oligonucleotide
guacaaaggggucucuucc

SEQ ID NO: 3048774 - RNA, 19 nt, Artificial Sequence
  Description of Artificial Sequence: Synthetic oligonucleotide
aaaucguaaccugugguaa

SEQ ID NO: 3048775 - RNA, 19 nt, Artificial Sequence
  Description of Artificial Sequence: Synthetic oligonucleotide
acaaaggaagaggaaggac

SEQ ID NO: 3048776 - RNA, 19 nt, Artificial Sequence
  Description of Artificial Sequence: Synthetic oligonucleotide
aucaaaagaaaaggacagg

SEQ ID NO: 3048777 - RNA, 19 nt, Artificial Sequence
  Description of Artificial Sequence: Synthetic oligonucleotide
aaccugugguaaaacauag

SEQ ID NO: 3048778 - RNA, 19 nt, Artificial Sequence
  Description of Artificial Sequence: Synthetic oligonucleotide
agaguaaaauuuuccaaua

SEQ ID NO: 3048779 - RNA, 19 nt, Artificial Sequence
  Description of Artificial Sequence: Synthetic oligonucleotide
uaaccugugguaaaacaua

SEQ ID NO: 3048780 - RNA, 19 nt, Artificial Sequence
  Description of Artificial Sequence: Synthetic oligonucleotide
aagcacaaugcuggaaagg

SEQ ID NO: 3048781 - RNA, 19 nt, Artificial Sequence
  Description of Artificial Sequence: Synthetic oligonucleotide
acaaauguacaaagggguc

SEQ ID NO: 3048782 - RNA, 19 nt, Artificial Sequence
  Description of Artificial Sequence: Synthetic oligonucleotide
uaagccugaggagaaagca

SEQ ID NO: 3048783 - RNA, 19 nt, Artificial Sequence
  Description of Artificial Sequence: Synthetic oligonucleotide
aacaaaggaagaggaagga

SEQ ID NO: 3048784 - RNA, 19 nt, Artificial Sequence
  Description of Artificial Sequence: Synthetic oligonucleotide
acaaugcuggaaaggaugg

SEQ ID NO: 3048785 - RNA, 19 nt, Artificial Sequence
  Description of Artificial Sequence: Synthetic oligonucleotide
gacacugguuguuggagug

SEQ ID NO: 3048786 - RNA, 19 nt, Artificial Sequence
  Description of Artificial Sequence: Synthetic oligonucleotide
gauggaggagaagaguagc

SEQ ID NO: 3048787 - RNA, 19 nt, Artificial Sequence
  Description of Artificial Sequence: Synthetic oligonucleotide
aagccugaggagaaagcac

SEQ ID NO: 3048788 - RNA, 19 nt, Artificial Sequence
  Description of Artificial Sequence: Synthetic oligonucleotide
uguacaaaggggucucuuc

SEQ ID NO: 3048789 - RNA, 19 nt, Artificial Sequence
  Description of Artificial Sequence: Synthetic oligonucleotide
acaaaggggucucuuccuc

SEQ ID NO: 3048790 - RNA, 19 nt, Artificial Sequence
  Description of Artificial Sequence: Synthetic oligonucleotide
aaaggggucucuuccucca

SEQ ID NO: 3048791 - RNA, 19 nt, Artificial Sequence
  Description of Artificial Sequence: Synthetic oligonucleotide
aggaagaggaaggacacug

SEQ ID NO: 3048792 - RNA, 19 nt, Artificial Sequence
  Description of Artificial Sequence: Synthetic oligonucleotide
auaagccugaggagaaagc

SEQ ID NO: 3048793 - RNA, 19 nt, Artificial Sequence
  Description of Artificial Sequence: Synthetic oligonucleotide
uaguuguuguuuucaaauc

SEQ ID NO: 3048794 - RNA, 19 nt, Artificial Sequence
  Description of Artificial Sequence: Synthetic oligonucleotide
agcuugguauaaaacagag

SEQ ID NO: 3048795 - RNA, 19 nt, Artificial Sequence
  Description of Artificial Sequence: Synthetic oligonucleotide
aagcuauuuauuuccuaua

SEQ ID NO: 3048796 - RNA, 19 nt, Artificial Sequence
  Description of Artificial Sequence: Synthetic oligonucleotide
cagggaacaaaggaagagg

SEQ ID NO: 3048797 - RNA, 19 nt, Artificial Sequence
  Description of Artificial Sequence: Synthetic oligonucleotide
gaguaaaauuuuccaauaa

SEQ ID NO: 3048798 - RNA, 19 nt, Artificial Sequence
  Description of Artificial Sequence: Synthetic oligonucleotide
auucaguuuaacaauggaa

SEQ ID NO: 3048799 - RNA, 19 nt, Artificial Sequence
  Description of Artificial Sequence: Synthetic oligonucleotide
aacaugcagggaacaaagg

SEQ ID NO: 3048800 - RNA, 19 nt, Artificial Sequence
  Description of Artificial Sequence: Synthetic oligonucleotide
aaucguaaccugugguaaa

SEQ ID NO: 3048801 - RNA, 19 nt, Artificial Sequence
  Description of Artificial Sequence: Synthetic oligonucleotide
acauucaguuuaacaaugg

SEQ ID NO: 3048802 - RNA, 19 nt, Artificial Sequence
  Description of Artificial Sequence: Synthetic oligonucleotide
agcacaaugcuggaaagga

SEQ ID NO: 3048803 - RNA, 19 nt, Artificial Sequence
  Description of Artificial Sequence: Synthetic oligonucleotide
ugguuguuggaguggagac

SEQ ID NO: 3048804 - RNA, 19 nt, Artificial Sequence
  Description of Artificial Sequence: Synthetic oligonucleotide
augcuggaaaggaugggcc

SEQ ID NO: 3048805 - RNA, 19 nt, Artificial Sequence
  Description of Artificial Sequence: Synthetic oligonucleotide
auguacuaaacaagcuugg

SEQ ID NO: 3048806 - RNA, 19 nt, Artificial Sequence
  Description of Artificial Sequence: Synthetic oligonucleotide
gaaaaggacagggagggaa

SEQ ID NO: 3048807 - RNA, 19 nt, Artificial Sequence
  Description of Artificial Sequence: Synthetic oligonucleotide
aauuuuccaauaagccuga

SEQ ID NO: 3048808 - RNA, 19 nt, Artificial Sequence
  Description of Artificial Sequence: Synthetic oligonucleotide
uuguuguuuucaaaucgua

SEQ ID NO: 3048809 - RNA, 19 nt, Artificial Sequence
  Description of Artificial Sequence: Synthetic oligonucleotide
ugcagggaacaaaggaaga

SEQ ID NO: 3048810 - RNA, 19 nt, Artificial Sequence
  Description of Artificial Sequence: Synthetic oligonucleotide
cacaaauguacaaaggggu

SEQ ID NO: 3048811 - RNA, 19 nt, Artificial Sequence
  Description of Artificial Sequence: Synthetic oligonucleotide
uguacuaaacaagcuuggu

SEQ ID NO: 3048812 - RNA, 19 nt, Artificial Sequence
  Description of Artificial Sequence: Synthetic oligonucleotide
ggaggagaagaguagcaag

SEQ ID NO: 3048813 - RNA, 19 nt, Artificial Sequence
  Description of Artificial Sequence: Synthetic oligonucleotide
gagacgguaacauucaguu

SEQ ID NO: 3048814 - RNA, 19 nt, Artificial Sequence
  Description of Artificial Sequence: Synthetic oligonucleotide
agaagaguagcaagaagga

SEQ ID NO: 3048815 - RNA, 19 nt, Artificial Sequence
  Description of Artificial Sequence: Synthetic oligonucleotide
guauaaaacagaguaaaau

SEQ ID NO: 3048816 - RNA, 19 nt, Artificial Sequence
  Description of Artificial Sequence: Synthetic oligonucleotide
augcagggaacaaaggaag

SEQ ID NO: 3048817 - RNA, 19 nt, Artificial Sequence
  Description of Artificial Sequence: Synthetic oligonucleotide
caugcagggaacaaaggaa

SEQ ID NO: 3048818 - RNA, 19 nt, Artificial Sequence
  Description of Artificial Sequence: Synthetic oligonucleotide
aguuuaacaauggaauauu

SEQ ID NO: 3048819 - RNA, 19 nt, Artificial Sequence
  Description of Artificial Sequence: Synthetic oligonucleotide
uacaaaggggucucuuccu

SEQ ID NO: 3048820 - RNA, 19 nt, Artificial Sequence
  Description of Artificial Sequence: Synthetic oligonucleotide
guagcaagaaggaaacaca

SEQ ID NO: 3048821 - RNA, 19 nt, Artificial Sequence
  Description of Artificial Sequence: Synthetic oligonucleotide
aagcuugguauaaaacaga

SEQ ID NO: 3048822 - RNA, 19 nt, Artificial Sequence
  Description of Artificial Sequence: Synthetic oligonucleotide
caaaggggucucuuccucc

SEQ ID NO: 3048823 - RNA, 19 nt, Artificial Sequence
  Description of Artificial Sequence: Synthetic oligonucleotide
uuggaguggagacgguaac

SEQ ID NO: 3048824 - RNA, 19 nt, Artificial Sequence
  Description of Artificial Sequence: Synthetic oligonucleotide
guacuaaacaagcuuggua

SEQ ID NO: 3048825 - RNA, 19 nt, Artificial Sequence
  Description of Artificial Sequence: Synthetic oligonucleotide
agggaacaaaggaagagga

SEQ ID NO: 3048826 - RNA, 19 nt, Artificial Sequence
  Description of Artificial Sequence: Synthetic oligonucleotide
acagggagggaagauggag

SEQ ID NO: 3048827 - RNA, 19 nt, Artificial Sequence
  Description of Artificial Sequence: Synthetic oligonucleotide
gaggagaaagcacaaugcu

SEQ ID NO: 3048828 - RNA, 19 nt, Artificial Sequence
  Description of Artificial Sequence: Synthetic oligonucleotide
uggagacgguaacauucag

SEQ ID NO: 3048829 - RNA, 19 nt, Artificial Sequence
  Description of Artificial Sequence: Synthetic oligonucleotide
acuaaacaagcuugguaua

SEQ ID NO: 3048830 - RNA, 19 nt, Artificial Sequence
  Description of Artificial Sequence: Synthetic oligonucleotide
cauucaguuuaacaaugga

SEQ ID NO: 3048831 - RNA, 19 nt, Artificial Sequence
  Description of Artificial Sequence: Synthetic oligonucleotide
aggggucucuuccuccaac

SEQ ID NO: 3048832 - RNA, 19 nt, Artificial Sequence
  Description of Artificial Sequence: Synthetic oligonucleotide
gaaagcuauuuauuuccua

SEQ ID NO: 3048833 - RNA, 19 nt, Artificial Sequence
  Description of Artificial Sequence: Synthetic oligonucleotide
cagaguaaaauuuuccaau

SEQ ID NO: 3048834 - RNA, 19 nt, Artificial Sequence
  Description of Artificial Sequence: Synthetic oligonucleotide
caaaucguaaccuguggua

SEQ ID NO: 3048835 - RNA, 19 nt, Artificial Sequence
  Description of Artificial Sequence: Synthetic oligonucleotide
gggaagauggaggagaaga

SEQ ID NO: 3048836 - RNA, 19 nt, Artificial Sequence
  Description of Artificial Sequence: Synthetic oligonucleotide
cugugguaaaacauagaaa

SEQ ID NO: 3048837 - RNA, 19 nt, Artificial Sequence
  Description of Artificial Sequence: Synthetic oligonucleotide
aggacacugguuguuggag

SEQ ID NO: 3048838 - RNA, 19 nt, Artificial Sequence
  Description of Artificial Sequence: Synthetic oligonucleotide
aauguacaaaggggucucu

SEQ ID NO: 3048839 - RNA, 19 nt, Artificial Sequence
  Description of Artificial Sequence: Synthetic oligonucleotide
agaaagcuauuuauuuccu

SEQ ID NO: 3048840 - RNA, 19 nt, Artificial Sequence
  Description of Artificial Sequence: Synthetic oligonucleotide
gcaagaaggaaacacaaau

SEQ ID NO: 3048841 - RNA, 19 nt, Artificial Sequence
  Description of Artificial Sequence: Synthetic oligonucleotide
gaagaguagcaagaaggaa

SEQ ID NO: 3048842 - RNA, 19 nt, Artificial Sequence
  Description of Artificial Sequence: Synthetic oligonucleotide
cucuuccuccaacaugcag

SEQ ID NO: 3048843 - RNA, 19 nt, Artificial Sequence
  Description of Artificial Sequence: Synthetic oligonucleotide
gagaaagcacaaugcugga

SEQ ID NO: 3048844 - RNA, 19 nt, Artificial Sequence
  Description of Artificial Sequence: Synthetic oligonucleotide
uggaguggagacgguaaca

SEQ ID NO: 3048845 - RNA, 19 nt, Artificial Sequence
  Description of Artificial Sequence: Synthetic oligonucleotide
cuaaacaagcuugguauaa

SEQ ID NO: 3048846 - RNA, 19 nt, Artificial Sequence
  Description of Artificial Sequence: Synthetic oligonucleotide
agccugaggagaaagcaca

SEQ ID NO: 3048847 - RNA, 19 nt, Artificial Sequence
  Description of Artificial Sequence: Synthetic oligonucleotide
gcuauuuauuuccuauaga

SEQ ID NO: 3048848 - RNA, 19 nt, Artificial Sequence
  Description of Artificial Sequence: Synthetic oligonucleotide
gguuguuggaguggagacg

SEQ ID NO: 3048849 - RNA, 19 nt, Artificial Sequence
  Description of Artificial Sequence: Synthetic oligonucleotide
ccugugguaaaacauagaa

SEQ ID NO: 3048850 - RNA, 19 nt, Artificial Sequence
  Description of Artificial Sequence: Synthetic oligonucleotide
ggucucuuccuccaacaug

SEQ ID NO: 3048851 - RNA, 19 nt, Artificial Sequence
  Description of Artificial Sequence: Synthetic oligonucleotide
caaugcuggaaaggauggg

SEQ ID NO: 3048852 - RNA, 19 nt, Artificial Sequence
  Description of Artificial Sequence: Synthetic oligonucleotide
acacugguuguuggagugg

SEQ ID NO: 3048853 - RNA, 19 nt, Artificial Sequence
  Description of Artificial Sequence: Synthetic oligonucleotide
gcagggaacaaaggaagag

SEQ ID NO: 3048854 - RNA, 19 nt, Artificial Sequence
  Description of Artificial Sequence: Synthetic oligonucleotide
uccaacaugcagggaacaa

SEQ ID NO: 3048855 - RNA, 19 nt, Artificial Sequence
  Description of Artificial Sequence: Synthetic oligonucleotide
uguuggaguggagacggua

SEQ ID NO: 3048856 - RNA, 19 nt, Artificial Sequence
  Description of Artificial Sequence: Synthetic oligonucleotide
guuguuguuuucaaaucgu

SEQ ID NO: 3048857 - RNA, 19 nt, Artificial Sequence
  Description of Artificial Sequence: Synthetic oligonucleotide
guaaccugugguaaaacau

SEQ ID NO: 3048858 - RNA, 19 nt, Artificial Sequence
  Description of Artificial Sequence: Synthetic oligonucleotide
ucucuuccuccaacaugca

SEQ ID NO: 3048859 - RNA, 19 nt, Artificial Sequence
  Description of Artificial Sequence: Synthetic oligonucleotide
agaaagcacaaugcuggaa

SEQ ID NO: 3048860 - RNA, 19 nt, Artificial Sequence
  Description of Artificial Sequence: Synthetic oligonucleotide
aucguaaccugugguaaaa

SEQ ID NO: 3048861 - RNA, 19 nt, Artificial Sequence
  Description of Artificial Sequence: Synthetic oligonucleotide
caaauguacaaaggggucu

SEQ ID NO: 3048862 - RNA, 19 nt, Artificial Sequence
  Description of Artificial Sequence: Synthetic oligonucleotide
ucguaaccugugguaaaac

SEQ ID NO: 3048863 - RNA, 19 nt, Artificial Sequence
  Description of Artificial Sequence: Synthetic oligonucleotide
cugguuguuggaguggaga

SEQ ID NO: 3048864 - RNA, 19 nt, Artificial Sequence
  Description of Artificial Sequence: Synthetic oligonucleotide
guuggaguggagacgguaa

SEQ ID NO: 3048865 - RNA, 19 nt, Artificial Sequence
  Description of Artificial Sequence: Synthetic oligonucleotide
agacgguaacauucaguuu

SEQ ID NO: 3048866 - RNA, 19 nt, Artificial Sequence
  Description of Artificial Sequence: Synthetic oligonucleotide
agcaagaaggaaacacaaa

SEQ ID NO: 3048867 - RNA, 19 nt, Artificial Sequence
  Description of Artificial Sequence: Synthetic oligonucleotide
caguuuaacaauggaauau

SEQ ID NO: 3048868 - RNA, 19 nt, Artificial Sequence
  Description of Artificial Sequence: Synthetic oligonucleotide
ggaaggacacugguuguug

SEQ ID NO: 3048869 - RNA, 19 nt, Artificial Sequence
  Description of Artificial Sequence: Synthetic oligonucleotide
auuuuccaauaagccugag

SEQ ID NO: 3048870 - RNA, 19 nt, Artificial Sequence
  Description of Artificial Sequence: Synthetic oligonucleotide
aaggggucucuuccuccaa

SEQ ID NO: 3048871 - RNA, 19 nt, Artificial Sequence
  Description of Artificial Sequence: Synthetic oligonucleotide
guggagacgguaacauuca

SEQ ID NO: 3048872 - RNA, 19 nt, Artificial Sequence
  Description of Artificial Sequence: Synthetic oligonucleotide
uuguuggaguggagacggu

SEQ ID NO: 3048873 - RNA, 19 nt, Artificial Sequence
  Description of Artificial Sequence: Synthetic oligonucleotide
gaguagcaagaaggaaaca

SEQ ID NO: 3048874 - RNA, 19 nt, Artificial Sequence
  Description of Artificial Sequence: Synthetic oligonucleotide
agaaaaggacagggaggga

SEQ ID NO: 3048875 - RNA, 19 nt, Artificial Sequence
  Description of Artificial Sequence: Synthetic oligonucleotide
ccuccaacaugcagggaac

SEQ ID NO: 3048876 - RNA, 19 nt, Artificial Sequence
  Description of Artificial Sequence: Synthetic oligonucleotide
auguacaaaggggucucuu

SEQ ID NO: 3048877 - RNA, 19 nt, Artificial Sequence
  Description of Artificial Sequence: Synthetic oligonucleotide
accugugguaaaacauaga

SEQ ID NO: 3048878 - RNA, 19 nt, Artificial Sequence
  Description of Artificial Sequence: Synthetic oligonucleotide
acugguuguuggaguggag

SEQ ID NO: 3048879 - RNA, 19 nt, Artificial Sequence
  Description of Artificial Sequence: Synthetic oligonucleotide
ccaauaagccugaggagaa

SEQ ID NO: 3048880 - RNA, 19 nt, Artificial Sequence
  Description of Artificial Sequence: Synthetic oligonucleotide
acgguaacauucaguuuaa

SEQ ID NO: 3048881 - RNA, 19 nt, Artificial Sequence
  Description of Artificial Sequence: Synthetic oligonucleotide
cacugguuguuggagugga

SEQ ID NO: 3048882 - RNA, 19 nt, Artificial Sequence
  Description of Artificial Sequence: Synthetic oligonucleotide
gacagggagggaagaugga

SEQ ID NO: 3048883 - RNA, 19 nt, Artificial Sequence
  Description of Artificial Sequence: Synthetic oligonucleotide
cguaaccugugguaaaaca

SEQ ID NO: 3048884 - RNA, 19 nt, Artificial Sequence
  Description of Artificial Sequence: Synthetic oligonucleotide
ggggucucuuccuccaaca

SEQ ID NO: 3048885 - RNA, 19 nt, Artificial Sequence
  Description of Artificial Sequence: Synthetic oligonucleotide
gggaacaaaggaagaggaa

SEQ ID NO: 3048886 - RNA, 19 nt, Artificial Sequence
  Description of Artificial Sequence: Synthetic oligonucleotide
cuccaacaugcagggaaca

SEQ ID NO: 3048887 - RNA, 19 nt, Artificial Sequence
  Description of Artificial Sequence: Synthetic oligonucleotide
gaguggagacgguaacauu

SEQ ID NO: 3048888 - RNA, 19 nt, Artificial Sequence
  Description of Artificial Sequence: Synthetic oligonucleotide
uuccuccaacaugcaggga

SEQ ID NO: 3048889 - RNA, 19 nt, Artificial Sequence
  Description of Artificial Sequence: Synthetic oligonucleotide
ggacacugguuguuggagu

SEQ ID NO: 3048890 - RNA, 19 nt, Artificial Sequence
  Description of Artificial Sequence: Synthetic oligonucleotide
caauaagccugaggagaaa

SEQ ID NO: 3048891 - RNA, 19 nt, Artificial Sequence
  Description of Artificial Sequence: Synthetic oligonucleotide
ggagacgguaacauucagu

SEQ ID NO: 3048892 - RNA, 19 nt, Artificial Sequence
  Description of Artificial Sequence: Synthetic oligonucleotide
uggaaaggaugggccuuuu

SEQ ID NO: 3048893 - RNA, 19 nt, Artificial Sequence
  Description of Artificial Sequence: Synthetic oligonucleotide
ggaguggagacgguaacau

SEQ ID NO: 3048894 - RNA, 19 nt, Artificial Sequence
  Description of Artificial Sequence: Synthetic oligonucleotide
ccaacaugcagggaacaaa

SEQ ID NO: 3048895 - RNA, 19 nt, Artificial Sequence
  Description of Artificial Sequence: Synthetic oligonucleotide
gcuugguauaaaacagagu

SEQ ID NO: 3048896 - RNA, 19 nt, Artificial Sequence
  Description of Artificial Sequence: Synthetic oligonucleotide
gggucucuuccuccaacau

SEQ ID NO: 3048897 - RNA, 19 nt, Artificial Sequence
  Description of Artificial Sequence: Synthetic oligonucleotide
cuggaaaggaugggccuuu

SEQ ID NO: 3048898 - RNA, 19 nt, Artificial Sequence
  Description of Artificial Sequence: Synthetic oligonucleotide
gcacaaugcuggaaaggau

SEQ ID NO: 3048899 - RNA, 19 nt, Artificial Sequence
  Description of Artificial Sequence: Synthetic oligonucleotide
gcuggaaaggaugggccuu

SEQ ID NO: 3048900 - RNA, 19 nt, Artificial Sequence
  Description of Artificial Sequence: Synthetic oligonucleotide
ccugaggagaaagcacaau

SEQ ID NO: 3048901 - RNA, 19 nt, Artificial Sequence
  Description of Artificial Sequence: Synthetic oligonucleotide
acauauauccuaaagagcc

SEQ ID NO: 3048902 - RNA, 19 nt, Artificial Sequence
  Description of Artificial Sequence: Synthetic oligonucleotide
uuuucuguugugaaccugg

SEQ ID NO: 3048903 - RNA, 19 nt, Artificial Sequence
  Description of Artificial Sequence: Synthetic oligonucleotide
acacacacggaacaguggc

SEQ ID NO: 3048904 - RNA, 19 nt, Artificial Sequence
  Description of Artificial Sequence: Synthetic oligonucleotide
gcacauauauccuaaagag

SEQ ID NO: 3048905 - RNA, 19 nt, Artificial Sequence
  Description of Artificial Sequence: Synthetic oligonucleotide
ucuguugugaaccuggcuu

SEQ ID NO: 3048906 - RNA, 19 nt, Artificial Sequence
  Description of Artificial Sequence: Synthetic oligonucleotide
uauauccuaaagagccugg

SEQ ID NO: 3048907 - RNA, 19 nt, Artificial Sequence
  Description of Artificial Sequence: Synthetic oligonucleotide
cacacacacacacacacgg

SEQ ID NO: 3048908 - RNA, 19 nt, Artificial Sequence
  Description of Artificial Sequence: Synthetic oligonucleotide
ugugaaccuggcuugaucu

SEQ ID NO: 3048909 - RNA, 19 nt, Artificial Sequence
  Description of Artificial Sequence: Synthetic oligonucleotide
cacauauauccuaaagagc

SEQ ID NO: 3048910 - RNA, 19 nt, Artificial Sequence
  Description of Artificial Sequence: Synthetic oligonucleotide
gaagcucugauuccucagg

SEQ ID NO: 3048911 - RNA, 19 nt, Artificial Sequence
  Description of Artificial Sequence: Synthetic oligonucleotide
aucucugcaggauugucuc

SEQ ID NO: 3048912 - RNA, 19 nt, Artificial Sequence
  Description of Artificial Sequence: Synthetic oligonucleotide
uauccuaaagagccuggag

SEQ ID NO: 3048913 - RNA, 19 nt, Artificial Sequence
  Description of Artificial Sequence: Synthetic oligonucleotide
uguucaaugcugccacccg

SEQ ID NO: 3048914 - RNA, 19 nt, Artificial Sequence
  Description of Artificial Sequence: Synthetic oligonucleotide
auccuaaagagccuggaga

SEQ ID NO: 3048915 - RNA, 19 nt, Artificial Sequence
  Description of Artificial Sequence: Synthetic oligonucleotide
ucucaguccgcccugggug

SEQ ID NO: 3048916 - RNA, 19 nt, Artificial Sequence
  Description of Artificial Sequence: Synthetic oligonucleotide
cuggagaugauucggcugc

SEQ ID NO: 3048917 - RNA, 19 nt, Artificial Sequence
  Description of Artificial Sequence: Synthetic oligonucleotide
ugcaggauugucucagucc

SEQ ID NO: 3048918 - RNA, 19 nt, Artificial Sequence
  Description of Artificial Sequence: Synthetic oligonucleotide
cacacacacacacacacac

SEQ ID NO: 3048919 - RNA, 19 nt, Artificial Sequence
  Description of Artificial Sequence: Synthetic oligonucleotide
gagaugauucggcugcucc

SEQ ID NO: 3048920 - RNA, 19 nt, Artificial Sequence
  Description of Artificial Sequence: Synthetic oligonucleotide
uccucugccuccccuaggg

SEQ ID NO: 3048921 - RNA, 19 nt, Artificial Sequence
  Description of Artificial Sequence: Synthetic oligonucleotide
ugugucugcuccugggagg

SEQ ID NO: 3048922 - RNA, 19 nt, Artificial Sequence
  Description of Artificial Sequence: Synthetic oligonucleotide
aggauugucucaguccgcc

SEQ ID NO: 3048923 - RNA, 19 nt, Artificial Sequence
  Description of Artificial Sequence: Synthetic oligonucleotide
uccuaaagagccuggagau

SEQ ID NO: 3048924 - RNA, 19 nt, Artificial Sequence
  Description of Artificial Sequence: Synthetic oligonucleotide
gacuguucaaugcugccac

SEQ ID NO: 3048925 - RNA, 19 nt, Artificial Sequence
  Description of Artificial Sequence: Synthetic oligonucleotide
agagccuggagaugauucg

SEQ ID NO: 3048926 - RNA, 19 nt, Artificial Sequence
  Description of Artificial Sequence: Synthetic oligonucleotide
agggugaugccuguaauuc

SEQ ID NO: 3048927 - RNA, 19 nt, Artificial Sequence
  Description of Artificial Sequence: Synthetic oligonucleotide
gacaccacaguccggccgg

SEQ ID NO: 3048928 - RNA, 19 nt, Artificial Sequence
  Description of Artificial Sequence: Synthetic oligonucleotide
gcaggauugucucaguccg

SEQ ID NO: 3048929 - RNA, 19 nt, Artificial Sequence
  Description of Artificial Sequence: Synthetic oligonucleotide
auauauccuaaagagccug

SEQ ID NO: 3048930 - RNA, 19 nt, Artificial Sequence
  Description of Artificial Sequence: Synthetic oligonucleotide
uucaaugcugccacccgca

SEQ ID NO: 3048931 - RNA, 19 nt, Artificial Sequence
  Description of Artificial Sequence: Synthetic oligonucleotide
auuccucaggcgccaaugg

SEQ ID NO: 3048932 - RNA, 19 nt, Artificial Sequence
  Description of Artificial Sequence: Synthetic oligonucleotide
uccucaggcgccaauggac

SEQ ID NO: 3048933 - RNA, 19 nt, Artificial Sequence
  Description of Artificial Sequence: Synthetic oligonucleotide
acuguucaaugcugccacc

SEQ ID NO: 3048934 - RNA, 19 nt, Artificial Sequence
  Description of Artificial Sequence: Synthetic oligonucleotide
uuucuguugugaaccuggc

SEQ ID NO: 3048935 - RNA, 19 nt, Artificial Sequence
  Description of Artificial Sequence: Synthetic oligonucleotide
gaucuuggguuccucugcc

SEQ ID NO: 3048936 - RNA, 19 nt, Artificial Sequence
  Description of Artificial Sequence: Synthetic oligonucleotide
uggcucagaccccugcccg

SEQ ID NO: 3048937 - RNA, 19 nt, Artificial Sequence
  Description of Artificial Sequence: Synthetic oligonucleotide
cuaaagagccuggagauga

SEQ ID NO: 3048938 - RNA, 19 nt, Artificial Sequence
  Description of Artificial Sequence: Synthetic oligonucleotide
agcucugauuccucaggcg

SEQ ID NO: 3048939 - RNA, 19 nt, Artificial Sequence
  Description of Artificial Sequence: Synthetic oligonucleotide
ugaaccuggcuugaucuug

SEQ ID NO: 3048940 - RNA, 19 nt, Artificial Sequence
  Description of Artificial Sequence: Synthetic oligonucleotide
ucugccuccccuaggggca

SEQ ID NO: 3048941 - RNA, 19 nt, Artificial Sequence
  Description of Artificial Sequence: Synthetic oligonucleotide
gaugauucggcugcuccug

SEQ ID NO: 3048942 - RNA, 19 nt, Artificial Sequence
  Description of Artificial Sequence: Synthetic oligonucleotide
cuguugugaaccuggcuug

SEQ ID NO: 3048943 - RNA, 19 nt, Artificial Sequence
  Description of Artificial Sequence: Synthetic oligonucleotide
agaugauucggcugcuccu

SEQ ID NO: 3048944 - RNA, 19 nt, Artificial Sequence
  Description of Artificial Sequence: Synthetic oligonucleotide
cuuggguuccucugccucc

SEQ ID NO: 3048945 - RNA, 19 nt, Artificial Sequence
  Description of Artificial Sequence: Synthetic oligonucleotide
uucggcugcuccugggagg

SEQ ID NO: 3048946 - RNA, 19 nt, Artificial Sequence
  Description of Artificial Sequence: Synthetic oligonucleotide
gggaggacaccacaguccg

SEQ ID NO: 3048947 - RNA, 19 nt, Artificial Sequence
  Description of Artificial Sequence: Synthetic oligonucleotide
guucaaugcugccacccgc

SEQ ID NO: 3048948 - RNA, 19 nt, Artificial Sequence
  Description of Artificial Sequence: Synthetic oligonucleotide
auggacacucgcccgacug

SEQ ID NO: 3048949 - RNA, 19 nt, Artificial Sequence
  Description of Artificial Sequence: Synthetic oligonucleotide
gaaccuggcuugaucuugg

SEQ ID NO: 3048950 - RNA, 19 nt, Artificial Sequence
  Description of Artificial Sequence: Synthetic oligonucleotide
ugauucggcugcuccuggg

SEQ ID NO: 3048951 - RNA, 19 nt, Artificial Sequence
  Description of Artificial Sequence: Synthetic oligonucleotide
cucugccuccccuaggggc

SEQ ID NO: 3048952 - RNA, 19 nt, Artificial Sequence
  Description of Artificial Sequence: Synthetic oligonucleotide
acggaacaguggcucagac

SEQ ID NO: 3048953 - RNA, 19 nt, Artificial Sequence
  Description of Artificial Sequence: Synthetic oligonucleotide
cacacacacggaacagugg

SEQ ID NO: 3048954 - RNA, 19 nt, Artificial Sequence
  Description of Artificial Sequence: Synthetic oligonucleotide
uucuguugugaaccuggcu

SEQ ID NO: 3048955 - RNA, 19 nt, Artificial Sequence
  Description of Artificial Sequence: Synthetic oligonucleotide
gccacccgcacauauaucc

SEQ ID NO: 3048956 - RNA, 19 nt, Artificial Sequence
  Description of Artificial Sequence: Synthetic oligonucleotide
uugugaaccuggcuugauc

SEQ ID NO: 3048957 - RNA, 19 nt, Artificial Sequence
  Description of Artificial Sequence: Synthetic oligonucleotide
accacaguccggccggagg

SEQ ID NO: 3048958 - RNA, 19 nt, Artificial Sequence
  Description of Artificial Sequence: Synthetic oligonucleotide
acacacacacacacggaac

SEQ ID NO: 3048959 - RNA, 19 nt, Artificial Sequence
  Description of Artificial Sequence: Synthetic oligonucleotide
ugcuugugucugcuccugg

SEQ ID NO: 3048960 - RNA, 19 nt, Artificial Sequence
  Description of Artificial Sequence: Synthetic oligonucleotide
gagccuggagaugauucgg

SEQ ID NO: 3048961 - RNA, 19 nt, Artificial Sequence
  Description of Artificial Sequence: Synthetic oligonucleotide
aaccuggcuugaucuuggg

SEQ ID NO: 3048962 - RNA, 19 nt, Artificial Sequence
  Description of Artificial Sequence: Synthetic oligonucleotide
auucggcugcuccugggag

SEQ ID NO: 3048963 - RNA, 19 nt, Artificial Sequence
  Description of Artificial Sequence: Synthetic oligonucleotide
cuguucaaugcugccaccc

SEQ ID NO: 3048964 - RNA, 19 nt, Artificial Sequence
  Description of Artificial Sequence: Synthetic oligonucleotide
auugucucaguccgcccug

SEQ ID NO: 3048965 - RNA, 19 nt, Artificial Sequence
  Description of Artificial Sequence: Synthetic oligonucleotide
augauucggcugcuccugg

SEQ ID NO: 3048966 - RNA, 19 nt, Artificial Sequence
  Description of Artificial Sequence: Synthetic oligonucleotide
uuccucaggcgccaaugga

SEQ ID NO: 3048967 - RNA, 19 nt, Artificial Sequence
  Description of Artificial Sequence: Synthetic oligonucleotide
cuggcuugaucuuggguuc

SEQ ID NO: 3048968 - RNA, 19 nt, Artificial Sequence
  Description of Artificial Sequence: Synthetic oligonucleotide
aggacaccacaguccggcc

SEQ ID NO: 3048969 - RNA, 19 nt, Artificial Sequence
  Description of Artificial Sequence: Synthetic oligonucleotide
ucugcuccugggaggacac

SEQ ID NO: 3048970 - RNA, 19 nt, Artificial Sequence
  Description of Artificial Sequence: Synthetic oligonucleotide
cucugcaggauugucucag

SEQ ID NO: 3048971 - RNA, 19 nt, Artificial Sequence
  Description of Artificial Sequence: Synthetic oligonucleotide
aauggacacucgcccgacu

SEQ ID NO: 3048972 - RNA, 19 nt, Artificial Sequence
  Description of Artificial Sequence: Synthetic oligonucleotide
cacacacacacacggaaca

SEQ ID NO: 3048973 - RNA, 19 nt, Artificial Sequence
  Description of Artificial Sequence: Synthetic oligonucleotide
ucugauuccucaggcgcca

SEQ ID NO: 3048974 - RNA, 19 nt, Artificial Sequence
  Description of Artificial Sequence: Synthetic oligonucleotide
ucgcccgacuguucaaugc

SEQ ID NO: 3048975 - RNA, 19 nt, Artificial Sequence
  Description of Artificial Sequence: Synthetic oligonucleotide
agccuggagaugauucggc

SEQ ID NO: 3048976 - RNA, 19 nt, Artificial Sequence
  Description of Artificial Sequence: Synthetic oligonucleotide
gauugucucaguccgcccu

SEQ ID NO: 3048977 - RNA, 19 nt, Artificial Sequence
  Description of Artificial Sequence: Synthetic oligonucleotide
agaucucugcaggauuguc

SEQ ID NO: 3048978 - RNA, 19 nt, Artificial Sequence
  Description of Artificial Sequence: Synthetic oligonucleotide
ugucucaguccgcccuggg

SEQ ID NO: 3048979 - RNA, 19 nt, Artificial Sequence
  Description of Artificial Sequence: Synthetic oligonucleotide
cucaguccgcccugggugc

SEQ ID NO: 3048980 - RNA, 19 nt, Artificial Sequence
  Description of Artificial Sequence: Synthetic oligonucleotide
cugggaggacaccacaguc

SEQ ID NO: 3048981 - RNA, 19 nt, Artificial Sequence
  Description of Artificial Sequence: Synthetic oligonucleotide
auauccuaaagagccugga

SEQ ID NO: 3048982 - RNA, 19 nt, Artificial Sequence
  Description of Artificial Sequence: Synthetic oligonucleotide
ucaaugcugccacccgcac

SEQ ID NO: 3048983 - RNA, 19 nt, Artificial Sequence
  Description of Artificial Sequence: Synthetic oligonucleotide
gauucggcugcuccuggga

SEQ ID NO: 3048984 - RNA, 19 nt, Artificial Sequence
  Description of Artificial Sequence: Synthetic oligonucleotide
ugcuccugggaggacacca

SEQ ID NO: 3048985 - RNA, 19 nt, Artificial Sequence
  Description of Artificial Sequence: Synthetic oligonucleotide
uuccucugccuccccuagg

SEQ ID NO: 3048986 - RNA, 19 nt, Artificial Sequence
  Description of Artificial Sequence: Synthetic oligonucleotide
gggugcgaagcucugauuc

SEQ ID NO: 3048987 - RNA, 19 nt, Artificial Sequence
  Description of Artificial Sequence: Synthetic oligonucleotide
aacgccggcgccggcggcc

SEQ ID NO: 3048988 - RNA, 19 nt, Artificial Sequence
  Description of Artificial Sequence: Synthetic oligonucleotide
ccuaggggcagccaggcag

SEQ ID NO: 3048989 - RNA, 19 nt, Artificial Sequence
  Description of Artificial Sequence: Synthetic oligonucleotide
acacucgcccgacuguuca

SEQ ID NO: 3048990 - RNA, 19 nt, Artificial Sequence
  Description of Artificial Sequence: Synthetic oligonucleotide
uggacacucgcccgacugu

SEQ ID NO: 3048991 - RNA, 19 nt, Artificial Sequence
  Description of Artificial Sequence: Synthetic oligonucleotide
gcuugugucugcuccuggg

SEQ ID NO: 3048992 - RNA, 19 nt, Artificial Sequence
  Description of Artificial Sequence: Synthetic oligonucleotide
acacacacacacacacacg

SEQ ID NO: 3048993 - RNA, 19 nt, Artificial Sequence
  Description of Artificial Sequence: Synthetic oligonucleotide
ggcugcuugugucugcucc

SEQ ID NO: 3048994 - RNA, 19 nt, Artificial Sequence
  Description of Artificial Sequence: Synthetic oligonucleotide
uguugugaaccuggcuuga

SEQ ID NO: 3048995 - RNA, 19 nt, Artificial Sequence
  Description of Artificial Sequence: Synthetic oligonucleotide
acacacacacacggaacag

SEQ ID NO: 3048996 - RNA, 19 nt, Artificial Sequence
  Description of Artificial Sequence: Synthetic oligonucleotide
cacacacacacacacggaa

SEQ ID NO: 3048997 - RNA, 19 nt, Artificial Sequence
  Description of Artificial Sequence: Synthetic oligonucleotide
cagccaggcagaucucugc

SEQ ID NO: 3048998 - RNA, 19 nt, Artificial Sequence
  Description of Artificial Sequence: Synthetic oligonucleotide
uaaagagccuggagaugau

SEQ ID NO: 3048999 - RNA, 19 nt, Artificial Sequence
  Description of Artificial Sequence: Synthetic oligonucleotide
ggugcgaagcucugauucc

SEQ ID NO: 3049000 - RNA, 19 nt, Artificial Sequence
  Description of Artificial Sequence: Synthetic oligonucleotide
acaguccggccggaggacc

SEQ ID NO: 3049001 - RNA, 19 nt, Artificial Sequence
  Description of Artificial Sequence: Synthetic oligonucleotide
gccaauggacacucgcccg

SEQ ID NO: 3049002 - RNA, 19 nt, Artificial Sequence
  Description of Artificial Sequence: Synthetic oligonucleotide
ugaugccuguaauucuuuu

SEQ ID NO: 3049003 - RNA, 19 nt, Artificial Sequence
  Description of Artificial Sequence: Synthetic oligonucleotide
guuccucugccuccccuag

SEQ ID NO: 3049004 - RNA, 19 nt, Artificial Sequence
  Description of Artificial Sequence: Synthetic oligonucleotide
ggacaccacaguccggccg

SEQ ID NO: 3049005 - RNA, 19 nt, Artificial Sequence
  Description of Artificial Sequence: Synthetic oligonucleotide
ucugcaggauugucucagu

SEQ ID NO: 3049006 - RNA, 19 nt, Artificial Sequence
  Description of Artificial Sequence: Synthetic oligonucleotide
ucggcugcuccugggaggc

SEQ ID NO: 3049007 - RNA, 19 nt, Artificial Sequence
  Description of Artificial Sequence: Synthetic oligonucleotide
aaagagccuggagaugauu

SEQ ID NO: 3049008 - RNA, 19 nt, Artificial Sequence
  Description of Artificial Sequence: Synthetic oligonucleotide
uugucucaguccgcccugg

SEQ ID NO: 3049009 - RNA, 19 nt, Artificial Sequence
  Description of Artificial Sequence: Synthetic oligonucleotide
ugcgaagcucugauuccuc

SEQ ID NO: 3049010 - RNA, 19 nt, Artificial Sequence
  Description of Artificial Sequence: Synthetic oligonucleotide
ugcugccacccgcacauau

SEQ ID NO: 3049011 - RNA, 19 nt, Artificial Sequence
  Description of Artificial Sequence: Synthetic oligonucleotide
caggauugucucaguccgc

SEQ ID NO: 3049012 - RNA, 19 nt, Artificial Sequence
  Description of Artificial Sequence: Synthetic oligonucleotide
cauauauccuaaagagccu

SEQ ID NO: 3049013 - RNA, 19 nt, Artificial Sequence
  Description of Artificial Sequence: Synthetic oligonucleotide
cugcaggauugucucaguc

SEQ ID NO: 3049014 - RNA, 19 nt, Artificial Sequence
  Description of Artificial Sequence: Synthetic oligonucleotide
gaucucugcaggauugucu

SEQ ID NO: 3049015 - RNA, 19 nt, Artificial Sequence
  Description of Artificial Sequence: Synthetic oligonucleotide
acacggaacaguggcucag

SEQ ID NO: 3049016 - RNA, 19 nt, Artificial Sequence
  Description of Artificial Sequence: Synthetic oligonucleotide
accuggcuugaucuugggu

SEQ ID NO: 3049017 - RNA, 19 nt, Artificial Sequence
  Description of Artificial Sequence: Synthetic oligonucleotide
uccgcccugggugcgaagc

SEQ ID NO: 3049018 - RNA, 19 nt, Artificial Sequence
  Description of Artificial Sequence: Synthetic oligonucleotide
ggcgccaauggacacucgc

SEQ ID NO: 3049019 - RNA, 19 nt, Artificial Sequence
  Description of Artificial Sequence: Synthetic oligonucleotide
caguccggccggaggaccg

SEQ ID NO: 3049020 - RNA, 19 nt, Artificial Sequence
  Description of Artificial Sequence: Synthetic oligonucleotide
ucaggcgccaauggacacu

SEQ ID NO: 3049021 - RNA, 19 nt, Artificial Sequence
  Description of Artificial Sequence: Synthetic oligonucleotide
gcuccugggaggcuggggc

SEQ ID NO: 3049022 - RNA, 19 nt, Artificial Sequence
  Description of Artificial Sequence: Synthetic oligonucleotide
gcagaucucugcaggauug

SEQ ID NO: 3049023 - RNA, 19 nt, Artificial Sequence
  Description of Artificial Sequence: Synthetic oligonucleotide
ugauuccucaggcgccaau

SEQ ID NO: 3049024 - RNA, 19 nt, Artificial Sequence
  Description of Artificial Sequence: Synthetic oligonucleotide
cucaggcgccaauggacac

SEQ ID NO: 3049025 - RNA, 19 nt, Artificial Sequence
  Description of Artificial Sequence: Synthetic oligonucleotide
ccuggagaugauucggcug

SEQ ID NO: 3049026 - RNA, 19 nt, Artificial Sequence
  Description of Artificial Sequence: Synthetic oligonucleotide
caguggcucagaccccugc

SEQ ID NO: 3049027 - RNA, 19 nt, Artificial Sequence
  Description of Artificial Sequence: Synthetic oligonucleotide
ccgcacauauauccuaaag

SEQ ID NO: 3049028 - RNA, 19 nt, Artificial Sequence
  Description of Artificial Sequence: Synthetic oligonucleotide
cgcacauauauccuaaaga

SEQ ID NO: 3049029 - RNA, 19 nt, Artificial Sequence
  Description of Artificial Sequence: Synthetic oligonucleotide
cucgcccgacuguucaaug

SEQ ID NO: 3049030 - RNA, 19 nt, Artificial Sequence
  Description of Artificial Sequence: Synthetic oligonucleotide
cuaggggcagccaggcaga

SEQ ID NO: 3049031 - RNA, 19 nt, Artificial Sequence
  Description of Artificial Sequence: Synthetic oligonucleotide
guccgugggccagggaacg

SEQ ID NO: 3049032 - RNA, 19 nt, Artificial Sequence
  Description of Artificial Sequence: Synthetic oligonucleotide
cccgacuguucaaugcugc

SEQ ID NO: 3049033 - RNA, 19 nt, Artificial Sequence
  Description of Artificial Sequence: Synthetic oligonucleotide
gaggcuggggcugcuugug

SEQ ID NO: 3049034 - RNA, 19 nt, Artificial Sequence
  Description of Artificial Sequence: Synthetic oligonucleotide
ugcccggagggugaugccu

SEQ ID NO: 3049035 - RNA, 19 nt, Artificial Sequence
  Description of Artificial Sequence: Synthetic oligonucleotide
caggcagaucucugcagga

SEQ ID NO: 3049036 - RNA, 19 nt, Artificial Sequence
  Description of Artificial Sequence: Synthetic oligonucleotide
ggauugucucaguccgccc

SEQ ID NO: 3049037 - RNA, 19 nt, Artificial Sequence
  Description of Artificial Sequence: Synthetic oligonucleotide
uccggccggaggaccgucc

SEQ ID NO: 3049038 - RNA, 19 nt, Artificial Sequence
  Description of Artificial Sequence: Synthetic oligonucleotide
gaccccugcccggagggug

SEQ ID NO: 3049039 - RNA, 19 nt, Artificial Sequence
  Description of Artificial Sequence: Synthetic oligonucleotide
caauggacacucgcccgac

SEQ ID NO: 3049040 - RNA, 19 nt, Artificial Sequence
  Description of Artificial Sequence: Synthetic oligonucleotide
uggagaugauucggcugcu

SEQ ID NO: 3049041 - RNA, 19 nt, Artificial Sequence
  Description of Artificial Sequence: Synthetic oligonucleotide
gagggugaugccuguaauu

SEQ ID NO: 3049042 - RNA, 19 nt, Artificial Sequence
  Description of Artificial Sequence: Synthetic oligonucleotide
acacacacacacacacgga

SEQ ID NO: 3049043 - RNA, 19 nt, Artificial Sequence
  Description of Artificial Sequence: Synthetic oligonucleotide
ggcucagaccccugcccgg

SEQ ID NO: 3049044 - RNA, 19 nt, Artificial Sequence
  Description of Artificial Sequence: Synthetic oligonucleotide
caggcgccaauggacacuc

SEQ ID NO: 3049045 - RNA, 19 nt, Artificial Sequence
  Description of Artificial Sequence: Synthetic oligonucleotide
aggaccguccgugggccag

SEQ ID NO: 3049046 - RNA, 19 nt, Artificial Sequence
  Description of Artificial Sequence: Synthetic oligonucleotide
cacacggaacaguggcuca

SEQ ID NO: 3049047 - RNA, 19 nt, Artificial Sequence
  Description of Artificial Sequence: Synthetic oligonucleotide
ggaacgccggcgccggcgg

SEQ ID NO: 3049048 - RNA, 19 nt, Artificial Sequence
  Description of Artificial Sequence: Synthetic oligonucleotide
ugccacccgcacauauauc

SEQ ID NO: 3049049 - RNA, 19 nt, Artificial Sequence
  Description of Artificial Sequence: Synthetic oligonucleotide
ccgacuguucaaugcugcc

SEQ ID NO: 3049050 - RNA, 19 nt, Artificial Sequence
  Description of Artificial Sequence: Synthetic oligonucleotide
cagggaacgccggcgccgg

SEQ ID NO: 3049051 - RNA, 19 nt, Artificial Sequence
  Description of Artificial Sequence: Synthetic oligonucleotide
cgccaauggacacucgccc

SEQ ID NO: 3049052 - RNA, 19 nt, Artificial Sequence
  Description of Artificial Sequence: Synthetic oligonucleotide
gucugcuccugggaggaca

SEQ ID NO: 3049053 - RNA, 19 nt, Artificial Sequence
  Description of Artificial Sequence: Synthetic oligonucleotide
uggguuccucugccucccc

SEQ ID NO: 3049054 - RNA, 19 nt, Artificial Sequence
  Description of Artificial Sequence: Synthetic oligonucleotide
cugcuugugucugcuccug

SEQ ID NO: 3049055 - RNA, 19 nt, Artificial Sequence
  Description of Artificial Sequence: Synthetic oligonucleotide
aggcagaucucugcaggau

SEQ ID NO: 3049056 - RNA, 19 nt, Artificial Sequence
  Description of Artificial Sequence: Synthetic oligonucleotide
ugggugcgaagcucugauu

SEQ ID NO: 3049057 - RNA, 19 nt, Artificial Sequence
  Description of Artificial Sequence: Synthetic oligonucleotide
ggaggaccguccgugggcc

SEQ ID NO: 3049058 - RNA, 19 nt, Artificial Sequence
  Description of Artificial Sequence: Synthetic oligonucleotide
acccgcacauauauccuaa

SEQ ID NO: 3049059 - RNA, 19 nt, Artificial Sequence
  Description of Artificial Sequence: Synthetic oligonucleotide
cgaagcucugauuccucag

SEQ ID NO: 3049060 - RNA, 19 nt, Artificial Sequence
  Description of Artificial Sequence: Synthetic oligonucleotide
agggaacgccggcgccggc

SEQ ID NO: 3049061 - RNA, 19 nt, Artificial Sequence
  Description of Artificial Sequence: Synthetic oligonucleotide
ccugcccggagggugaugc

SEQ ID NO: 3049062 - RNA, 19 nt, Artificial Sequence
  Description of Artificial Sequence: Synthetic oligonucleotide
cucagaccccugcccggag

SEQ ID NO: 3049063 - RNA, 19 nt, Artificial Sequence
  Description of Artificial Sequence: Synthetic oligonucleotide
cuccugggaggacaccaca

SEQ ID NO: 3049064 - RNA, 19 nt, Artificial Sequence
  Description of Artificial Sequence: Synthetic oligonucleotide
cggaacaguggcucagacc

SEQ ID NO: 3049065 - RNA, 19 nt, Artificial Sequence
  Description of Artificial Sequence: Synthetic oligonucleotide
gcgaagcucugauuccuca

SEQ ID NO: 3049066 - RNA, 19 nt, Artificial Sequence
  Description of Artificial Sequence: Synthetic oligonucleotide
gacacucgcccgacuguuc

SEQ ID NO: 3049067 - RNA, 19 nt, Artificial Sequence
  Description of Artificial Sequence: Synthetic oligonucleotide
ccuggcuugaucuuggguu

SEQ ID NO: 3049068 - RNA, 19 nt, Artificial Sequence
  Description of Artificial Sequence: Synthetic oligonucleotide
gcgccaauggacacucgcc

SEQ ID NO: 3049069 - RNA, 19 nt, Artificial Sequence
  Description of Artificial Sequence: Synthetic oligonucleotide
ccuaaagagccuggagaug

SEQ ID NO: 3049070 - RNA, 19 nt, Artificial Sequence
  Description of Artificial Sequence: Synthetic oligonucleotide
gaccguccgugggccaggg

SEQ ID NO: 3049071 - RNA, 19 nt, Artificial Sequence
  Description of Artificial Sequence: Synthetic oligonucleotide
cacccgcacauauauccua

SEQ ID NO: 3049072 - RNA, 19 nt, Artificial Sequence
  Description of Artificial Sequence: Synthetic oligonucleotide
acucgcccgacuguucaau

SEQ ID NO: 3049073 - RNA, 19 nt, Artificial Sequence
  Description of Artificial Sequence: Synthetic oligonucleotide
gggaacgccggcgccggcg

SEQ ID NO: 3049074 - RNA, 19 nt, Artificial Sequence
  Description of Artificial Sequence: Synthetic oligonucleotide
gugggccagggaacgccgg

SEQ ID NO: 3049075 - RNA, 19 nt, Artificial Sequence
  Description of Artificial Sequence: Synthetic oligonucleotide
uccgugggccagggaacgc

SEQ ID NO: 3049076 - RNA, 19 nt, Artificial Sequence
  Description of Artificial Sequence: Synthetic oligonucleotide
cugcccggagggugaugcc

SEQ ID NO: 3049077 - RNA, 19 nt, Artificial Sequence
  Description of Artificial Sequence: Synthetic oligonucleotide
cugccacccgcacauauau

SEQ ID NO: 3049078 - RNA, 19 nt, Artificial Sequence
  Description of Artificial Sequence: Synthetic oligonucleotide
ccucaggcgccaauggaca

SEQ ID NO: 3049079 - RNA, 19 nt, Artificial Sequence
  Description of Artificial Sequence: Synthetic oligonucleotide
aggggcagccaggcagauc

SEQ ID NO: 3049080 - RNA, 19 nt, Artificial Sequence
  Description of Artificial Sequence: Synthetic oligonucleotide
cacaguccggccggaggac

SEQ ID NO: 3049081 - RNA, 19 nt, Artificial Sequence
  Description of Artificial Sequence: Synthetic oligonucleotide
ggcuggggcugcuuguguc

SEQ ID NO: 3049082 - RNA, 19 nt, Artificial Sequence
  Description of Artificial Sequence: Synthetic oligonucleotide
gccggaggaccguccgugg

SEQ ID NO: 3049083 - RNA, 19 nt, Artificial Sequence
  Description of Artificial Sequence: Synthetic oligonucleotide
ccaauggacacucgcccga

SEQ ID NO: 3049084 - RNA, 19 nt, Artificial Sequence
  Description of Artificial Sequence: Synthetic oligonucleotide
gucucaguccgcccugggu

SEQ ID NO: 3049085 - RNA, 19 nt, Artificial Sequence
  Description of Artificial Sequence: Synthetic oligonucleotide
ccagggaacgccggcgccg

SEQ ID NO: 3049086 - RNA, 19 nt, Artificial Sequence
  Description of Artificial Sequence: Synthetic oligonucleotide
gggugaugccuguaauucu

SEQ ID NO: 3049087 - RNA, 19 nt, Artificial Sequence
  Description of Artificial Sequence: Synthetic oligonucleotide
gcagccaggcagaucucug

SEQ ID NO: 3049088 - RNA, 19 nt, Artificial Sequence
  Description of Artificial Sequence: Synthetic oligonucleotide
gugcgaagcucugauuccu

SEQ ID NO: 3049089 - RNA, 19 nt, Artificial Sequence
  Description of Artificial Sequence: Synthetic oligonucleotide
ggccggaggaccguccgug

SEQ ID NO: 3049090 - RNA, 19 nt, Artificial Sequence
  Description of Artificial Sequence: Synthetic oligonucleotide
gcugcuccugggaggcugg

SEQ ID NO: 3049091 - RNA, 19 nt, Artificial Sequence
  Description of Artificial Sequence: Synthetic oligonucleotide
cugggugcgaagcucugau

SEQ ID NO: 3049092 - RNA, 19 nt, Artificial Sequence
  Description of Artificial Sequence: Synthetic oligonucleotide
gaacgccggcgccggcggc

SEQ ID NO: 3049093 - RNA, 19 nt, Artificial Sequence
  Description of Artificial Sequence: Synthetic oligonucleotide
cgugggccagggaacgccg

SEQ ID NO: 3049094 - RNA, 19 nt, Artificial Sequence
  Description of Artificial Sequence: Synthetic oligonucleotide
ccggaggaccguccguggg

SEQ ID NO: 3049095 - RNA, 19 nt, Artificial Sequence
  Description of Artificial Sequence: Synthetic oligonucleotide
gaggaccguccgugggcca

SEQ ID NO: 3049096 - RNA, 19 nt, Artificial Sequence
  Description of Artificial Sequence: Synthetic oligonucleotide
cacggaacaguggcucaga

SEQ ID NO: 3049097 - RNA, 19 nt, Artificial Sequence
  Description of Artificial Sequence: Synthetic oligonucleotide
ccacaguccggccggagga

SEQ ID NO: 3049098 - RNA, 19 nt, Artificial Sequence
  Description of Artificial Sequence: Synthetic oligonucleotide
acaguggcucagaccccug

SEQ ID NO: 3049099 - RNA, 19 nt, Artificial Sequence
  Description of Artificial Sequence: Synthetic oligonucleotide
ugucugcuccugggaggac

SEQ ID NO: 3049100 - RNA, 19 nt, Artificial Sequence
  Description of Artificial Sequence: Synthetic oligonucleotide
ccucugccuccccuagggg

SEQ ID NO: 3049101 - RNA, 19 nt, Artificial Sequence
  Description of Artificial Sequence: Synthetic oligonucleotide
ggagaugauucggcugcuc

SEQ ID NO: 3049102 - RNA, 19 nt, Artificial Sequence
  Description of Artificial Sequence: Synthetic oligonucleotide
gccagggaacgccggcgcc

SEQ ID NO: 3049103 - RNA, 19 nt, Artificial Sequence
  Description of Artificial Sequence: Synthetic oligonucleotide
gugaaccuggcuugaucuu

SEQ ID NO: 3049104 - RNA, 19 nt, Artificial Sequence
  Description of Artificial Sequence: Synthetic oligonucleotide
gcccgacuguucaaugcug

SEQ ID NO: 3049105 - RNA, 19 nt, Artificial Sequence
  Description of Artificial Sequence: Synthetic oligonucleotide
ggcagaucucugcaggauu

SEQ ID NO: 3049106 - RNA, 19 nt, Artificial Sequence
  Description of Artificial Sequence: Synthetic oligonucleotide
cugccuccccuaggggcag

SEQ ID NO: 3049107 - RNA, 19 nt, Artificial Sequence
  Description of Artificial Sequence: Synthetic oligonucleotide
cggaggaccguccgugggc

SEQ ID NO: 3049108 - RNA, 19 nt, Artificial Sequence
  Description of Artificial Sequence: Synthetic oligonucleotide
caccacaguccggccggag

SEQ ID NO: 3049109 - RNA, 19 nt, Artificial Sequence
  Description of Artificial Sequence: Synthetic oligonucleotide
ggagggugaugccuguaau

SEQ ID NO: 3049110 - RNA, 19 nt, Artificial Sequence
  Description of Artificial Sequence: Synthetic oligonucleotide
gcugcuugugucugcuccu

SEQ ID NO: 3049111 - RNA, 19 nt, Artificial Sequence
  Description of Artificial Sequence: Synthetic oligonucleotide
ccguccgugggccagggaa

SEQ ID NO: 3049112 - RNA, 19 nt, Artificial Sequence
  Description of Artificial Sequence: Synthetic oligonucleotide
aguccggccggaggaccgu

SEQ ID NO: 3049113 - RNA, 19 nt, Artificial Sequence
  Description of Artificial Sequence: Synthetic oligonucleotide
cugcuccugggaggacacc

SEQ ID NO: 3049114 - RNA, 19 nt, Artificial Sequence
  Description of Artificial Sequence: Synthetic oligonucleotide
gccuggagaugauucggcu

SEQ ID NO: 3049115 - RNA, 19 nt, Artificial Sequence
  Description of Artificial Sequence: Synthetic oligonucleotide
cguccgugggccagggaac

SEQ ID NO: 3049116 - RNA, 19 nt, Artificial Sequence
  Description of Artificial Sequence: Synthetic oligonucleotide
accccugcccggaggguga

SEQ ID NO: 3049117 - RNA, 19 nt, Artificial Sequence
  Description of Artificial Sequence: Synthetic oligonucleotide
ggaccguccgugggccagg

SEQ ID NO: 3049118 - RNA, 19 nt, Artificial Sequence
  Description of Artificial Sequence: Synthetic oligonucleotide
ccgugggccagggaacgcc

SEQ ID NO: 3049119 - RNA, 19 nt, Artificial Sequence
  Description of Artificial Sequence: Synthetic oligonucleotide
ccggccggaggaccguccg

SEQ ID NO: 3049120 - RNA, 19 nt, Artificial Sequence
  Description of Artificial Sequence: Synthetic oligonucleotide
guugugaaccuggcuugau

SEQ ID NO: 3049121 - RNA, 19 nt, Artificial Sequence
  Description of Artificial Sequence: Synthetic oligonucleotide
gcuugaucuuggguuccuc

SEQ ID NO: 3049122 - RNA, 19 nt, Artificial Sequence
  Description of Artificial Sequence: Synthetic oligonucleotide
gcuccugggaggacaccac

SEQ ID NO: 3049123 - RNA, 19 nt, Artificial Sequence
  Description of Artificial Sequence: Synthetic oligonucleotide
gcccggagggugaugccug

SEQ ID NO: 3049124 - RNA, 19 nt, Artificial Sequence
  Description of Artificial Sequence: Synthetic oligonucleotide
agaccccugcccggagggu

SEQ ID NO: 3049125 - RNA, 19 nt, Artificial Sequence
  Description of Artificial Sequence: Synthetic oligonucleotide
cacucgcccgacuguucaa

SEQ ID NO: 3049126 - RNA, 19 nt, Artificial Sequence
  Description of Artificial Sequence: Synthetic oligonucleotide
aggcgccaauggacacucg

SEQ ID NO: 3049127 - RNA, 19 nt, Artificial Sequence
  Description of Artificial Sequence: Synthetic oligonucleotide
guccgcccugggugcgaag

SEQ ID NO: 3049128 - RNA, 19 nt, Artificial Sequence
  Description of Artificial Sequence: Synthetic oligonucleotide
acaccacaguccggccgga

SEQ ID NO: 3049129 - RNA, 19 nt, Artificial Sequence
  Description of Artificial Sequence: Synthetic oligonucleotide
accguccgugggccaggga

SEQ ID NO: 3049130 - RNA, 19 nt, Artificial Sequence
  Description of Artificial Sequence: Synthetic oligonucleotide
cagaucucugcaggauugu

SEQ ID NO: 3049131 - RNA, 19 nt, Artificial Sequence
  Description of Artificial Sequence: Synthetic oligonucleotide
ccccuaggggcagccaggc

SEQ ID NO: 3049132 - RNA, 19 nt, Artificial Sequence
  Description of Artificial Sequence: Synthetic oligonucleotide
aguccgcccugggugcgaa

SEQ ID NO: 3049133 - RNA, 19 nt, Artificial Sequence
  Description of Artificial Sequence: Synthetic oligonucleotide
ggaggcuggggcugcuugu

SEQ ID NO: 3049134 - RNA, 19 nt, Artificial Sequence
  Description of Artificial Sequence: Synthetic oligonucleotide
cgacuguucaaugcugcca

SEQ ID NO: 3049135 - RNA, 19 nt, Artificial Sequence
  Description of Artificial Sequence: Synthetic oligonucleotide
ugccuccccuaggggcagc

SEQ ID NO: 3049136 - RNA, 19 nt, Artificial Sequence
  Description of Artificial Sequence: Synthetic oligonucleotide
gcucagaccccugcccgga

SEQ ID NO: 3049137 - RNA, 19 nt, Artificial Sequence
  Description of Artificial Sequence: Synthetic oligonucleotide
ggcagccaggcagaucucu

SEQ ID NO: 3049138 - RNA, 19 nt, Artificial Sequence
  Description of Artificial Sequence: Synthetic oligonucleotide
ccugggaggacaccacagu

SEQ ID NO: 3049139 - RNA, 19 nt, Artificial Sequence
  Description of Artificial Sequence: Synthetic oligonucleotide
cccugggugcgaagcucug

SEQ ID NO: 3049140 - RNA, 19 nt, Artificial Sequence
  Description of Artificial Sequence: Synthetic oligonucleotide
gcugccacccgcacauaua

SEQ ID NO: 3049141 - RNA, 19 nt, Artificial Sequence
  Description of Artificial Sequence: Synthetic oligonucleotide
cugauuccucaggcgccaa

SEQ ID NO: 3049142 - RNA, 19 nt, Artificial Sequence
  Description of Artificial Sequence: Synthetic oligonucleotide
cccgcacauauauccuaaa

SEQ ID NO: 3049143 - RNA, 19 nt, Artificial Sequence
  Description of Artificial Sequence: Synthetic oligonucleotide
gggcugcuugugucugcuc

SEQ ID NO: 3049144 - RNA, 19 nt, Artificial Sequence
  Description of Artificial Sequence: Synthetic oligonucleotide
ggguuccucugccuccccu

SEQ ID NO: 3049145 - RNA, 19 nt, Artificial Sequence
  Description of Artificial Sequence: Synthetic oligonucleotide
gccuccccuaggggcagcc

SEQ ID NO: 3049146 - RNA, 19 nt, Artificial Sequence
  Description of Artificial Sequence: Synthetic oligonucleotide
ccacccgcacauauauccu

SEQ ID NO: 3049147 - RNA, 19 nt, Artificial Sequence
  Description of Artificial Sequence: Synthetic oligonucleotide
cggagggugaugccuguaa

SEQ ID NO: 3049148 - RNA, 19 nt, Artificial Sequence
  Description of Artificial Sequence: Synthetic oligonucleotide
guccggccggaggaccguc

SEQ ID NO: 3049149 - RNA, 19 nt, Artificial Sequence
  Description of Artificial Sequence: Synthetic oligonucleotide
ggggcugcuugugucugcu

SEQ ID NO: 3049150 - RNA, 19 nt, Artificial Sequence
  Description of Artificial Sequence: Synthetic oligonucleotide
ggacacucgcccgacuguu

SEQ ID NO: 3049151 - RNA, 19 nt, Artificial Sequence
  Description of Artificial Sequence: Synthetic oligonucleotide
ggcuugaucuuggguuccu

SEQ ID NO: 3049152 - RNA, 19 nt, Artificial Sequence
  Description of Artificial Sequence: Synthetic oligonucleotide
gcccugggugcgaagcucu

SEQ ID NO: 3049153 - RNA, 19 nt, Artificial Sequence
  Description of Artificial Sequence: Synthetic oligonucleotide
augcugccacccgcacaua

SEQ ID NO: 3049154 - RNA, 19 nt, Artificial Sequence
  Description of Artificial Sequence: Synthetic oligonucleotide
cgcccgacuguucaaugcu

SEQ ID NO: 3049155 - RNA, 19 nt, Artificial Sequence
  Description of Artificial Sequence: Synthetic oligonucleotide
cgcccugggugcgaagcuc

SEQ ID NO: 3049156 - RNA, 19 nt, Artificial Sequence
  Description of Artificial Sequence: Synthetic oligonucleotide
cccuaggggcagccaggca

SEQ ID NO: 3049157 - RNA, 19 nt, Artificial Sequence
  Description of Artificial Sequence: Synthetic oligonucleotide
gggcagccaggcagaucuc

SEQ ID NO: 3049158 - RNA, 19 nt, Artificial Sequence
  Description of Artificial Sequence: Synthetic oligonucleotide
cccggagggugaugccugu

SEQ ID NO: 3049159 - RNA, 19 nt, Artificial Sequence
  Description of Artificial Sequence: Synthetic oligonucleotide
ccuccccuaggggcagcca

SEQ ID NO: 3049160 - RNA, 19 nt, Artificial Sequence
  Description of Artificial Sequence: Synthetic oligonucleotide
cccugcccggagggugaug

SEQ ID NO: 3049161 - RNA, 19 nt, Artificial Sequence
  Description of Artificial Sequence: Synthetic oligonucleotide
ccgcccugggugcgaagcu

SEQ ID NO: 3049162 - RNA, 19 nt, Artificial Sequence
  Description of Artificial Sequence: Synthetic oligonucleotide
ccggagggugaugccugua

SEQ ID NO: 3049163 - RNA, 19 nt, Artificial Sequence
  Description of Artificial Sequence: Synthetic oligonucleotide
cggccggaggaccguccgu

SEQ ID NO: 3049164 - RNA, 19 nt, Artificial Sequence
  Description of Artificial Sequence: Synthetic oligonucleotide
ccccugcccggagggugau

SEQ ID NO: 3049165 - RNA, 19 nt, Artificial Sequence
  Description of Artificial Sequence: Synthetic oligonucleotide
ugaaaauucacgaagacca

SEQ ID NO: 3049166 - RNA, 19 nt, Artificial Sequence
  Description of Artificial Sequence: Synthetic oligonucleotide
ucaaccuuaauccucacgg

SEQ ID NO: 3049167 - RNA, 19 nt, Artificial Sequence
  Description of Artificial Sequence: Synthetic oligonucleotide
aaaggaaccuccaacaacc

SEQ ID NO: 3049168 - RNA, 19 nt, Artificial Sequence
  Description of Artificial Sequence: Synthetic oligonucleotide
aguuauuuuauucucuuuc

SEQ ID NO: 3049169 - RNA, 19 nt, Artificial Sequence
  Description of Artificial Sequence: Synthetic oligonucleotide
ucaggaucaaccuuaaucc

SEQ ID NO: 3049170 - RNA, 19 nt, Artificial Sequence
  Description of Artificial Sequence: Synthetic oligonucleotide
ucuaaaguuauuuuauucu

SEQ ID NO: 3049171 - RNA, 19 nt, Artificial Sequence
  Description of Artificial Sequence: Synthetic oligonucleotide
aacauagggaccccguagc

SEQ ID NO: 3049172 - RNA, 19 nt, Artificial Sequence
  Description of Artificial Sequence: Synthetic oligonucleotide
uucaggaucaaccuuaauc

SEQ ID NO: 3049173 - RNA, 19 nt, Artificial Sequence
  Description of Artificial Sequence: Synthetic oligonucleotide
aaccuuaauccucacggcg

SEQ ID NO: 3049174 - RNA, 19 nt, Artificial Sequence
  Description of Artificial Sequence: Synthetic oligonucleotide
aagaacugagcacagucag

SEQ ID NO: 3049175 - RNA, 19 nt, Artificial Sequence
  Description of Artificial Sequence: Synthetic oligonucleotide
uuccaauucaggaucaacc

SEQ ID NO: 3049176 - RNA, 19 nt, Artificial Sequence
  Description of Artificial Sequence: Synthetic oligonucleotide
aauucacgaagaccaaagg

SEQ ID NO: 3049177 - RNA, 19 nt, Artificial Sequence
  Description of Artificial Sequence: Synthetic oligonucleotide
acaaccagcaacaacauag

SEQ ID NO: 3049178 - RNA, 19 nt, Artificial Sequence
  Description of Artificial Sequence: Synthetic oligonucleotide
accuccaacaaccagcaac

SEQ ID NO: 3049179 - RNA, 19 nt, Artificial Sequence
  Description of Artificial Sequence: Synthetic oligonucleotide
uucacgaagaccaaaggaa

SEQ ID NO: 3049180 - RNA, 19 nt, Artificial Sequence
  Description of Artificial Sequence: Synthetic oligonucleotide
agcaacaacauagggaccc

SEQ ID NO: 3049181 - RNA, 19 nt, Artificial Sequence
  Description of Artificial Sequence: Synthetic oligonucleotide
gauuugugaaaauucacga

SEQ ID NO: 3049182 - RNA, 19 nt, Artificial Sequence
  Description of Artificial Sequence: Synthetic oligonucleotide
cuuguucuugcgcagagcg

SEQ ID NO: 3049183 - RNA, 19 nt, Artificial Sequence
  Description of Artificial Sequence: Synthetic oligonucleotide
agaaguucaggaucuuccc

SEQ ID NO: 3049184 - RNA, 19 nt, Artificial Sequence
  Description of Artificial Sequence: Synthetic oligonucleotide
uauucuuccagucuucaaa

SEQ ID NO: 3049185 - RNA, 19 nt, Artificial Sequence
  Description of Artificial Sequence: Synthetic oligonucleotide
aaauucacgaagaccaaag

SEQ ID NO: 3049186 - RNA, 19 nt, Artificial Sequence
  Description of Artificial Sequence: Synthetic oligonucleotide
aaaguuauuuuauucucuu

SEQ ID NO: 3049187 - RNA, 19 nt, Artificial Sequence
  Description of Artificial Sequence: Synthetic oligonucleotide
uguucuugcgcagagcgcg

SEQ ID NO: 3049188 - RNA, 19 nt, Artificial Sequence
  Description of Artificial Sequence: Synthetic oligonucleotide
uauucugacucuaaaguua

SEQ ID NO: 3049189 - RNA, 19 nt, Artificial Sequence
  Description of Artificial Sequence: Synthetic oligonucleotide
uugugaaaauucacgaaga

SEQ ID NO: 3049190 - RNA, 19 nt, Artificial Sequence
  Description of Artificial Sequence: Synthetic oligonucleotide
aaaguggaguccuuuauuu

SEQ ID NO: 3049191 - RNA, 19 nt, Artificial Sequence
  Description of Artificial Sequence: Synthetic oligonucleotide
cuaccaugguugaagaugc

SEQ ID NO: 3049192 - RNA, 19 nt, Artificial Sequence
  Description of Artificial Sequence: Synthetic oligonucleotide
uucaggaucuucccaaggc

SEQ ID NO: 3049193 - RNA, 19 nt, Artificial Sequence
  Description of Artificial Sequence: Synthetic oligonucleotide
ucggauuugugaaaauuca

SEQ ID NO: 3049194 - RNA, 19 nt, Artificial Sequence
  Description of Artificial Sequence: Synthetic oligonucleotide
uuccagucuucaaaagugg

SEQ ID NO: 3049195 - RNA, 19 nt, Artificial Sequence
  Description of Artificial Sequence: Synthetic oligonucleotide
ucuuccagucuucaaaagu

SEQ ID NO: 3049196 - RNA, 19 nt, Artificial Sequence
  Description of Artificial Sequence: Synthetic oligonucleotide
uaggcuuaaggguuucugg

SEQ ID NO: 3049197 - RNA, 19 nt, Artificial Sequence
  Description of Artificial Sequence: Synthetic oligonucleotide
ugugaaaauucacgaagac

SEQ ID NO: 3049198 - RNA, 19 nt, Artificial Sequence
  Description of Artificial Sequence: Synthetic oligonucleotide
aaccagcaacaacauaggg

SEQ ID NO: 3049199 - RNA, 19 nt, Artificial Sequence
  Description of Artificial Sequence: Synthetic oligonucleotide
cucuaaaguuauuuuauuc

SEQ ID NO: 3049200 - RNA, 19 nt, Artificial Sequence
  Description of Artificial Sequence: Synthetic oligonucleotide
auucacgaagaccaaagga

SEQ ID NO: 3049201 - RNA, 19 nt, Artificial Sequence
  Description of Artificial Sequence: Synthetic oligonucleotide
uuuauucucuuucaauuuu

SEQ ID NO: 3049202 - RNA, 19 nt, Artificial Sequence
  Description of Artificial Sequence: Synthetic oligonucleotide
uuauuuuauucucuuucaa

SEQ ID NO: 3049203 - RNA, 19 nt, Artificial Sequence
  Description of Artificial Sequence: Synthetic oligonucleotide
uuggagaaguucaggaucu

SEQ ID NO: 3049204 - RNA, 19 nt, Artificial Sequence
  Description of Artificial Sequence: Synthetic oligonucleotide
uccaauucaggaucaaccu

SEQ ID NO: 3049205 - RNA, 19 nt, Artificial Sequence
  Description of Artificial Sequence: Synthetic oligonucleotide
ucgaauauucuuccagucu

SEQ ID NO: 3049206 - RNA, 19 nt, Artificial Sequence
  Description of Artificial Sequence: Synthetic oligonucleotide
ucaggaucuucccaaggcc

SEQ ID NO: 3049207 - RNA, 19 nt, Artificial Sequence
  Description of Artificial Sequence: Synthetic oligonucleotide
agucuucaaaaguggaguc

SEQ ID NO: 3049208 - RNA, 19 nt, Artificial Sequence
  Description of Artificial Sequence: Synthetic oligonucleotide
aggcuuaaggguuucuggg

SEQ ID NO: 3049209 - RNA, 19 nt, Artificial Sequence
  Description of Artificial Sequence: Synthetic oligonucleotide
guuauuuuauucucuuuca

SEQ ID NO: 3049210 - RNA, 19 nt, Artificial Sequence
  Description of Artificial Sequence: Synthetic oligonucleotide
gagaaguucaggaucuucc

SEQ ID NO: 3049211 - RNA, 19 nt, Artificial Sequence
  Description of Artificial Sequence: Synthetic oligonucleotide
ucacgaagaccaaaggaac

SEQ ID NO: 3049212 - RNA, 19 nt, Artificial Sequence
  Description of Artificial Sequence: Synthetic oligonucleotide
gaacugagcacagucaggc

SEQ ID NO: 3049213 - RNA, 19 nt, Artificial Sequence
  Description of Artificial Sequence: Synthetic oligonucleotide
aaguucaggaucuucccaa

SEQ ID NO: 3049214 - RNA, 19 nt, Artificial Sequence
  Description of Artificial Sequence: Synthetic oligonucleotide
ggauuugugaaaauucacg

SEQ ID NO: 3049215 - RNA, 19 nt, Artificial Sequence
  Description of Artificial Sequence: Synthetic oligonucleotide
ucguccuuggagaaguuca

SEQ ID NO: 3049216 - RNA, 19 nt, Artificial Sequence
  Description of Artificial Sequence: Synthetic oligonucleotide
accaaaggaaccuccaaca

SEQ ID NO: 3049217 - RNA, 19 nt, Artificial Sequence
  Description of Artificial Sequence: Synthetic oligonucleotide
aucggauuugugaaaauuc

SEQ ID NO: 3049218 - RNA, 19 nt, Artificial Sequence
  Description of Artificial Sequence: Synthetic oligonucleotide
cuuggagaaguucaggauc

SEQ ID NO: 3049219 - RNA, 19 nt, Artificial Sequence
  Description of Artificial Sequence: Synthetic oligonucleotide
aaaaguggaguccuuuauu

SEQ ID NO: 3049220 - RNA, 19 nt, Artificial Sequence
  Description of Artificial Sequence: Synthetic oligonucleotide
gcugccuuaggcuuaaggg

SEQ ID NO: 3049221 - RNA, 19 nt, Artificial Sequence
  Description of Artificial Sequence: Synthetic oligonucleotide
uccucacggcgucauaucg

SEQ ID NO: 3049222 - RNA, 19 nt, Artificial Sequence
  Description of Artificial Sequence: Synthetic oligonucleotide
acugagcacagucaggcug

SEQ ID NO: 3049223 - RNA, 19 nt, Artificial Sequence
  Description of Artificial Sequence: Synthetic oligonucleotide
ccagcaacaacauagggac

SEQ ID NO: 3049224 - RNA, 19 nt, Artificial Sequence
  Description of Artificial Sequence: Synthetic oligonucleotide
ucuucaaaaguggaguccu

SEQ ID NO: 3049225 - RNA, 19 nt, Artificial Sequence
  Description of Artificial Sequence: Synthetic oligonucleotide
uggguuucguccuuggaga

SEQ ID NO: 3049226 - RNA, 19 nt, Artificial Sequence
  Description of Artificial Sequence: Synthetic oligonucleotide
auuugugaaaauucacgaa

SEQ ID NO: 3049227 - RNA, 19 nt, Artificial Sequence
  Description of Artificial Sequence: Synthetic oligonucleotide
gugaaaauucacgaagacc

SEQ ID NO: 3049228 - RNA, 19 nt, Artificial Sequence
  Description of Artificial Sequence: Synthetic oligonucleotide
auauucugacucuaaaguu

SEQ ID NO: 3049229 - RNA, 19 nt, Artificial Sequence
  Description of Artificial Sequence: Synthetic oligonucleotide
aucaaccuuaauccucacg

SEQ ID NO: 3049230 - RNA, 19 nt, Artificial Sequence
  Description of Artificial Sequence: Synthetic oligonucleotide
ugguugaagaugcggccgg

SEQ ID NO: 3049231 - RNA, 19 nt, Artificial Sequence
  Description of Artificial Sequence: Synthetic oligonucleotide
caugguugaagaugcggcc

SEQ ID NO: 3049232 - RNA, 19 nt, Artificial Sequence
  Description of Artificial Sequence: Synthetic oligonucleotide
aaagaacugagcacaguca

SEQ ID NO: 3049233 - RNA, 19 nt, Artificial Sequence
  Description of Artificial Sequence: Synthetic oligonucleotide
uagcguagggucuuguucu

SEQ ID NO: 3049234 - RNA, 19 nt, Artificial Sequence
  Description of Artificial Sequence: Synthetic oligonucleotide
ccaacaaccagcaacaaca

SEQ ID NO: 3049235 - RNA, 19 nt, Artificial Sequence
  Description of Artificial Sequence: Synthetic oligonucleotide
gaccaaaggaaccuccaac

SEQ ID NO: 3049236 - RNA, 19 nt, Artificial Sequence
  Description of Artificial Sequence: Synthetic oligonucleotide
caaccagcaacaacauagg

SEQ ID NO: 3049237 - RNA, 19 nt, Artificial Sequence
  Description of Artificial Sequence: Synthetic oligonucleotide
ucugacucuaaaguuauuu

SEQ ID NO: 3049238 - RNA, 19 nt, Artificial Sequence
  Description of Artificial Sequence: Synthetic oligonucleotide
auuuucucauauucugacu

SEQ ID NO: 3049239 - RNA, 19 nt, Artificial Sequence
  Description of Artificial Sequence: Synthetic oligonucleotide
cacgaagaccaaaggaacc

SEQ ID NO: 3049240 - RNA, 19 nt, Artificial Sequence
  Description of Artificial Sequence: Synthetic oligonucleotide
caaaggaaccuccaacaac

SEQ ID NO: 3049241 - RNA, 19 nt, Artificial Sequence
  Description of Artificial Sequence: Synthetic oligonucleotide
uccaacaaccagcaacaac

SEQ ID NO: 3049242 - RNA, 19 nt, Artificial Sequence
  Description of Artificial Sequence: Synthetic oligonucleotide
uccagucuucaaaagugga

SEQ ID NO: 3049243 - RNA, 19 nt, Artificial Sequence
  Description of Artificial Sequence: Synthetic oligonucleotide
cauauucugacucuaaagu

SEQ ID NO: 3049244 - RNA, 19 nt, Artificial Sequence
  Description of Artificial Sequence: Synthetic oligonucleotide
aaaauucacgaagaccaaa

SEQ ID NO: 3049245 - RNA, 19 nt, Artificial Sequence
  Description of Artificial Sequence: Synthetic oligonucleotide
gucauaucggauuugugaa

SEQ ID NO: 3049246 - RNA, 19 nt, Artificial Sequence
  Description of Artificial Sequence: Synthetic oligonucleotide
aaguuauuuuauucucuuu

SEQ ID NO: 3049247 - RNA, 19 nt, Artificial Sequence
  Description of Artificial Sequence: Synthetic oligonucleotide
ugggccucgaauauucuuc

SEQ ID NO: 3049248 - RNA, 19 nt, Artificial Sequence
  Description of Artificial Sequence: Synthetic oligonucleotide
uuaggcuuaaggguuucug

SEQ ID NO: 3049249 - RNA, 19 nt, Artificial Sequence
  Description of Artificial Sequence: Synthetic oligonucleotide
gaagaccaaaggaaccucc

SEQ ID NO: 3049250 - RNA, 19 nt, Artificial Sequence
  Description of Artificial Sequence: Synthetic oligonucleotide
acauagggaccccguagcg

SEQ ID NO: 3049251 - RNA, 19 nt, Artificial Sequence
  Description of Artificial Sequence: Synthetic oligonucleotide
ccuuuauuuucucauauuc

SEQ ID NO: 3049252 - RNA, 19 nt, Artificial Sequence
  Description of Artificial Sequence: Synthetic oligonucleotide
aggaucaaccuuaauccuc

SEQ ID NO: 3049253 - RNA, 19 nt, Artificial Sequence
  Description of Artificial Sequence: Synthetic oligonucleotide
ucaaaaguggaguccuuua

SEQ ID NO: 3049254 - RNA, 19 nt, Artificial Sequence
  Description of Artificial Sequence: Synthetic oligonucleotide
aaggccuugggccucgaau

SEQ ID NO: 3049255 - RNA, 19 nt, Artificial Sequence
  Description of Artificial Sequence: Synthetic oligonucleotide
caacauagggaccccguag

SEQ ID NO: 3049256 - RNA, 19 nt, Artificial Sequence
  Description of Artificial Sequence: Synthetic oligonucleotide
cucgaauauucuuccaguc

SEQ ID NO: 3049257 - RNA, 19 nt, Artificial Sequence
  Description of Artificial Sequence: Synthetic oligonucleotide
accaugguugaagaugcgg

SEQ ID NO: 3049258 - RNA, 19 nt, Artificial Sequence
  Description of Artificial Sequence: Synthetic oligonucleotide
ucuucccaaggccuugggc

SEQ ID NO: 3049259 - RNA, 19 nt, Artificial Sequence
  Description of Artificial Sequence: Synthetic oligonucleotide
agggucuuguucuugcgca

SEQ ID NO: 3049260 - RNA, 19 nt, Artificial Sequence
  Description of Artificial Sequence: Synthetic oligonucleotide
augguugaagaugcggccg

SEQ ID NO: 3049261 - RNA, 19 nt, Artificial Sequence
  Description of Artificial Sequence: Synthetic oligonucleotide
aguucaggaucuucccaag

SEQ ID NO: 3049262 - RNA, 19 nt, Artificial Sequence
  Description of Artificial Sequence: Synthetic oligonucleotide
aggguuucuggguuucguc

SEQ ID NO: 3049263 - RNA, 19 nt, Artificial Sequence
  Description of Artificial Sequence: Synthetic oligonucleotide
ugccuuaggcuuaaggguu

SEQ ID NO: 3049264 - RNA, 19 nt, Artificial Sequence
  Description of Artificial Sequence: Synthetic oligonucleotide
gaaguucaggaucuuccca

SEQ ID NO: 3049265 - RNA, 19 nt, Artificial Sequence
  Description of Artificial Sequence: Synthetic oligonucleotide
guucaggaucuucccaagg

SEQ ID NO: 3049266 - RNA, 19 nt, Artificial Sequence
  Description of Artificial Sequence: Synthetic oligonucleotide
caaccuuaauccucacggc

SEQ ID NO: 3049267 - RNA, 19 nt, Artificial Sequence
  Description of Artificial Sequence: Synthetic oligonucleotide
ggaaccuccaacaaccagc

SEQ ID NO: 3049268 - RNA, 19 nt, Artificial Sequence
  Description of Artificial Sequence: Synthetic oligonucleotide
aauccucacggcgucauau

SEQ ID NO: 3049269 - RNA, 19 nt, Artificial Sequence
  Description of Artificial Sequence: Synthetic oligonucleotide
ucauaucggauuugugaaa

SEQ ID NO: 3049270 - RNA, 19 nt, Artificial Sequence
  Description of Artificial Sequence: Synthetic oligonucleotide
guagcguagggucuuguuc

SEQ ID NO: 3049271 - RNA, 19 nt, Artificial Sequence
  Description of Artificial Sequence: Synthetic oligonucleotide
uuuccaauucaggaucaac

SEQ ID NO: 3049272 - RNA, 19 nt, Artificial Sequence
  Description of Artificial Sequence: Synthetic oligonucleotide
agucaggcugccuuaggcu

SEQ ID NO: 3049273 - RNA, 19 nt, Artificial Sequence
  Description of Artificial Sequence: Synthetic oligonucleotide
gcuaccaugguugaagaug

SEQ ID NO: 3049274 - RNA, 19 nt, Artificial Sequence
  Description of Artificial Sequence: Synthetic oligonucleotide
aggaaccuccaacaaccag

SEQ ID NO: 3049275 - RNA, 19 nt, Artificial Sequence
  Description of Artificial Sequence: Synthetic oligonucleotide
uaucggauuugugaaaauu

SEQ ID NO: 3049276 - RNA, 19 nt, Artificial Sequence
  Description of Artificial Sequence: Synthetic oligonucleotide
uuguucuugcgcagagcgc

SEQ ID NO: 3049277 - RNA, 19 nt, Artificial Sequence
  Description of Artificial Sequence: Synthetic oligonucleotide
gaagaugcggccggcuuag

SEQ ID NO: 3049278 - RNA, 19 nt, Artificial Sequence
  Description of Artificial Sequence: Synthetic oligonucleotide
acgaagaccaaaggaaccu

SEQ ID NO: 3049279 - RNA, 19 nt, Artificial Sequence
  Description of Artificial Sequence: Synthetic oligonucleotide
gucuucaaaaguggagucc

SEQ ID NO: 3049280 - RNA, 19 nt, Artificial Sequence
  Description of Artificial Sequence: Synthetic oligonucleotide
guagggucuuguucuugcg

SEQ ID NO: 3049281 - RNA, 19 nt, Artificial Sequence
  Description of Artificial Sequence: Synthetic oligonucleotide
ugaagaugcggccggcuua

SEQ ID NO: 3049282 - RNA, 19 nt, Artificial Sequence
  Description of Artificial Sequence: Synthetic oligonucleotide
aacaacauagggaccccgu

SEQ ID NO: 3049283 - RNA, 19 nt, Artificial Sequence
  Description of Artificial Sequence: Synthetic oligonucleotide
agcacagucaggcugccuu

SEQ ID NO: 3049284 - RNA, 19 nt, Artificial Sequence
  Description of Artificial Sequence: Synthetic oligonucleotide
cagucaggcugccuuaggc

SEQ ID NO: 3049285 - RNA, 19 nt, Artificial Sequence
  Description of Artificial Sequence: Synthetic oligonucleotide
gaccccguagcguaggguc

SEQ ID NO: 3049286 - RNA, 19 nt, Artificial Sequence
  Description of Artificial Sequence: Synthetic oligonucleotide
uucuggguuucguccuugg

SEQ ID NO: 3049287 - RNA, 19 nt, Artificial Sequence
  Description of Artificial Sequence: Synthetic oligonucleotide
aagaccaaaggaaccucca

SEQ ID NO: 3049288 - RNA, 19 nt, Artificial Sequence
  Description of Artificial Sequence: Synthetic oligonucleotide
auagggaccccguagcgua

SEQ ID NO: 3049289 - RNA, 19 nt, Artificial Sequence
  Description of Artificial Sequence: Synthetic oligonucleotide
aacugagcacagucaggcu

SEQ ID NO: 3049290 - RNA, 19 nt, Artificial Sequence
  Description of Artificial Sequence: Synthetic oligonucleotide
aacaaccagcaacaacaua

SEQ ID NO: 3049291 - RNA, 19 nt, Artificial Sequence
  Description of Artificial Sequence: Synthetic oligonucleotide
uaccaugguugaagaugcg

SEQ ID NO: 3049292 - RNA, 19 nt, Artificial Sequence
  Description of Artificial Sequence: Synthetic oligonucleotide
cagagcgcgcaacacggcg

SEQ ID NO: 3049293 - RNA, 19 nt, Artificial Sequence
  Description of Artificial Sequence: Synthetic oligonucleotide
uccuuuauuuucucauauu

SEQ ID NO: 3049294 - RNA, 19 nt, Artificial Sequence
  Description of Artificial Sequence: Synthetic oligonucleotide
gaauauucuuccagucuuc

SEQ ID NO: 3049295 - RNA, 19 nt, Artificial Sequence
  Description of Artificial Sequence: Synthetic oligonucleotide
gaaccuccaacaaccagca

SEQ ID NO: 3049296 - RNA, 19 nt, Artificial Sequence
  Description of Artificial Sequence: Synthetic oligonucleotide
ucuggguuucguccuugga

SEQ ID NO: 3049297 - RNA, 19 nt, Artificial Sequence
  Description of Artificial Sequence: Synthetic oligonucleotide
ggguuucuggguuucgucc

SEQ ID NO: 3049298 - RNA, 19 nt, Artificial Sequence
  Description of Artificial Sequence: Synthetic oligonucleotide
uucaaaaguggaguccuuu

SEQ ID NO: 3049299 - RNA, 19 nt, Artificial Sequence
  Description of Artificial Sequence: Synthetic oligonucleotide
auccucacggcgucauauc

SEQ ID NO: 3049300 - RNA, 19 nt, Artificial Sequence
  Description of Artificial Sequence: Synthetic oligonucleotide
auucugacucuaaaguuau

SEQ ID NO: 3049301 - RNA, 19 nt, Artificial Sequence
  Description of Artificial Sequence: Synthetic oligonucleotide
gaucuucccaaggccuugg

SEQ ID NO: 3049302 - RNA, 19 nt, Artificial Sequence
  Description of Artificial Sequence: Synthetic oligonucleotide
gacucuaaaguuauuuuau

SEQ ID NO: 3049303 - RNA, 19 nt, Artificial Sequence
  Description of Artificial Sequence: Synthetic oligonucleotide
uucccaaggccuugggccu

SEQ ID NO: 3049304 - RNA, 19 nt, Artificial Sequence
  Description of Artificial Sequence: Synthetic oligonucleotide
uugaagaugcggccggcuu

SEQ ID NO: 3049305 - RNA, 19 nt, Artificial Sequence
  Description of Artificial Sequence: Synthetic oligonucleotide
acagucaggcugccuuagg

SEQ ID NO: 3049306 - RNA, 19 nt, Artificial Sequence
  Description of Artificial Sequence: Synthetic oligonucleotide
aauucaggaucaaccuuaa

SEQ ID NO: 3049307 - RNA, 19 nt, Artificial Sequence
  Description of Artificial Sequence: Synthetic oligonucleotide
gccucgaauauucuuccag

SEQ ID NO: 3049308 - RNA, 19 nt, Artificial Sequence
  Description of Artificial Sequence: Synthetic oligonucleotide
gagcgcgcaacacggcggg

SEQ ID NO: 3049309 - RNA, 19 nt, Artificial Sequence
  Description of Artificial Sequence: Synthetic oligonucleotide
aaggguuucuggguuucgu

SEQ ID NO: 3049310 - RNA, 19 nt, Artificial Sequence
  Description of Artificial Sequence: Synthetic oligonucleotide
aacacggcgggcgcuacca

SEQ ID NO: 3049311 - RNA, 19 nt, Artificial Sequence
  Description of Artificial Sequence: Synthetic oligonucleotide
auauucuuccagucuucaa

SEQ ID NO: 3049312 - RNA, 19 nt, Artificial Sequence
  Description of Artificial Sequence: Synthetic oligonucleotide
ccagucuucaaaaguggag

SEQ ID NO: 3049313 - RNA, 19 nt, Artificial Sequence
  Description of Artificial Sequence: Synthetic oligonucleotide
uuaaggguuucuggguuuc

SEQ ID NO: 3049314 - RNA, 19 nt, Artificial Sequence
  Description of Artificial Sequence: Synthetic oligonucleotide
uaaggguuucuggguuucg

SEQ ID NO: 3049315 - RNA, 19 nt, Artificial Sequence
  Description of Artificial Sequence: Synthetic oligonucleotide
cauaucggauuugugaaaa

SEQ ID NO: 3049316 - RNA, 19 nt, Artificial Sequence
  Description of Artificial Sequence: Synthetic oligonucleotide
ucuuguucuugcgcagagc

SEQ ID NO: 3049317 - RNA, 19 nt, Artificial Sequence
  Description of Artificial Sequence: Synthetic oligonucleotide
cucauauucugacucuaaa

SEQ ID NO: 3049318 - RNA, 19 nt, Artificial Sequence
  Description of Artificial Sequence: Synthetic oligonucleotide
accuuaauccucacggcgu

SEQ ID NO: 3049319 - RNA, 19 nt, Artificial Sequence
  Description of Artificial Sequence: Synthetic oligonucleotide
agaccaaaggaaccuccaa

SEQ ID NO: 3049320 - RNA, 19 nt, Artificial Sequence
  Description of Artificial Sequence: Synthetic oligonucleotide
uuaauccucacggcgucau

SEQ ID NO: 3049321 - RNA, 19 nt, Artificial Sequence
  Description of Artificial Sequence: Synthetic oligonucleotide
acaacauagggaccccgua

SEQ ID NO: 3049322 - RNA, 19 nt, Artificial Sequence
  Description of Artificial Sequence: Synthetic oligonucleotide
caacaacauagggaccccg

SEQ ID NO: 3049323 - RNA, 19 nt, Artificial Sequence
  Description of Artificial Sequence: Synthetic oligonucleotide
auaucggauuugugaaaau

SEQ ID NO: 3049324 - RNA, 19 nt, Artificial Sequence
  Description of Artificial Sequence: Synthetic oligonucleotide
aucuucccaaggccuuggg

SEQ ID NO: 3049325 - RNA, 19 nt, Artificial Sequence
  Description of Artificial Sequence: Synthetic oligonucleotide
ggcgcuaccaugguugaag

SEQ ID NO: 3049326 - RNA, 19 nt, Artificial Sequence
  Description of Artificial Sequence: Synthetic oligonucleotide
gaaaauucacgaagaccaa

SEQ ID NO: 3049327 - RNA, 19 nt, Artificial Sequence
  Description of Artificial Sequence: Synthetic oligonucleotide
uugcgcagagcgcgcaaca

SEQ ID NO: 3049328 - RNA, 19 nt, Artificial Sequence
  Description of Artificial Sequence: Synthetic oligonucleotide
aggccuugggccucgaaua

SEQ ID NO: 3049329 - RNA, 19 nt, Artificial Sequence
  Description of Artificial Sequence: Synthetic oligonucleotide
guccuuggagaaguucagg

SEQ ID NO: 3049330 - RNA, 19 nt, Artificial Sequence
  Description of Artificial Sequence: Synthetic oligonucleotide
cucacggcgucauaucgga

SEQ ID NO: 3049331 - RNA, 19 nt, Artificial Sequence
  Description of Artificial Sequence: Synthetic oligonucleotide
agagcgcgcaacacggcgg

SEQ ID NO: 3049332 - RNA, 19 nt, Artificial Sequence
  Description of Artificial Sequence: Synthetic oligonucleotide
ggaucaaccuuaauccuca

SEQ ID NO: 3049333 - RNA, 19 nt, Artificial Sequence
  Description of Artificial Sequence: Synthetic oligonucleotide
cagcaacaacauagggacc

SEQ ID NO: 3049334 - RNA, 19 nt, Artificial Sequence
  Description of Artificial Sequence: Synthetic oligonucleotide
uuucuggguuucguccuug

SEQ ID NO: 3049335 - RNA, 19 nt, Artificial Sequence
  Description of Artificial Sequence: Synthetic oligonucleotide
aaggaaccuccaacaacca

SEQ ID NO: 3049336 - RNA, 19 nt, Artificial Sequence
  Description of Artificial Sequence: Synthetic oligonucleotide
uggaguccuuuauuuucuc

SEQ ID NO: 3049337 - RNA, 19 nt, Artificial Sequence
  Description of Artificial Sequence: Synthetic oligonucleotide
ucaggcugccuuaggcuua

SEQ ID NO: 3049338 - RNA, 19 nt, Artificial Sequence
  Description of Artificial Sequence: Synthetic oligonucleotide
gaucaaccuuaauccucac

SEQ ID NO: 3049339 - RNA, 19 nt, Artificial Sequence
  Description of Artificial Sequence: Synthetic oligonucleotide
acggcgggcgcuaccaugg

SEQ ID NO: 3049340 - RNA, 19 nt, Artificial Sequence
  Description of Artificial Sequence: Synthetic oligonucleotide
cgucauaucggauuuguga

SEQ ID NO: 3049341 - RNA, 19 nt, Artificial Sequence
  Description of Artificial Sequence: Synthetic oligonucleotide
uagggaccccguagcguag

SEQ ID NO: 3049342 - RNA, 19 nt, Artificial Sequence
  Description of Artificial Sequence: Synthetic oligonucleotide
acggcgucauaucggauuu

SEQ ID NO: 3049343 - RNA, 19 nt, Artificial Sequence
  Description of Artificial Sequence: Synthetic oligonucleotide
guuucguccuuggagaagu

SEQ ID NO: 3049344 - RNA, 19 nt, Artificial Sequence
  Description of Artificial Sequence: Synthetic oligonucleotide
gggccucgaauauucuucc

SEQ ID NO: 3049345 - RNA, 19 nt, Artificial Sequence
  Description of Artificial Sequence: Synthetic oligonucleotide
cagucuucaaaaguggagu

SEQ ID NO: 3049346 - RNA, 19 nt, Artificial Sequence
  Description of Artificial Sequence: Synthetic oligonucleotide
ccuugggccucgaauauuc

SEQ ID NO: 3049347 - RNA, 19 nt, Artificial Sequence
  Description of Artificial Sequence: Synthetic oligonucleotide
ucuugcgcagagcgcgcaa

SEQ ID NO: 3049348 - RNA, 19 nt, Artificial Sequence
  Description of Artificial Sequence: Synthetic oligonucleotide
cgcagagcgcgcaacacgg

SEQ ID NO: 3049349 - RNA, 19 nt, Artificial Sequence
  Description of Artificial Sequence: Synthetic oligonucleotide
ggaguccuuuauuuucuca

SEQ ID NO: 3049350 - RNA, 19 nt, Artificial Sequence
  Description of Artificial Sequence: Synthetic oligonucleotide
ccucacggcgucauaucgg

SEQ ID NO: 3049351 - RNA, 19 nt, Artificial Sequence
  Description of Artificial Sequence: Synthetic oligonucleotide
cggauuugugaaaauucac

SEQ ID NO: 3049352 - RNA, 19 nt, Artificial Sequence
  Description of Artificial Sequence: Synthetic oligonucleotide
cacagucaggcugccuuag

SEQ ID NO: 3049353 - RNA, 19 nt, Artificial Sequence
  Description of Artificial Sequence: Synthetic oligonucleotide
cugacucuaaaguuauuuu

SEQ ID NO: 3049354 - RNA, 19 nt, Artificial Sequence
  Description of Artificial Sequence: Synthetic oligonucleotide
caaaaguggaguccuuuau

SEQ ID NO: 3049355 - RNA, 19 nt, Artificial Sequence
  Description of Artificial Sequence: Synthetic oligonucleotide
gcgcagagcgcgcaacacg

SEQ ID NO: 3049356 - RNA, 19 nt, Artificial Sequence
  Description of Artificial Sequence: Synthetic oligonucleotide
uucugacucuaaaguuauu

SEQ ID NO: 3049357 - RNA, 19 nt, Artificial Sequence
  Description of Artificial Sequence: Synthetic oligonucleotide
uaauccucacggcgucaua

SEQ ID NO: 3049358 - RNA, 19 nt, Artificial Sequence
  Description of Artificial Sequence: Synthetic oligonucleotide
ugcgcagagcgcgcaacac

SEQ ID NO: 3049359 - RNA, 19 nt, Artificial Sequence
  Description of Artificial Sequence: Synthetic oligonucleotide
cuugcgcagagcgcgcaac

SEQ ID NO: 3049360 - RNA, 19 nt, Artificial Sequence
  Description of Artificial Sequence: Synthetic oligonucleotide
uucuugcgcagagcgcgca

SEQ ID NO: 3049361 - RNA, 19 nt, Artificial Sequence
  Description of Artificial Sequence: Synthetic oligonucleotide
ugagcacagucaggcugcc

SEQ ID NO: 3049362 - RNA, 19 nt, Artificial Sequence
  Description of Artificial Sequence: Synthetic oligonucleotide
cacggcgggcgcuaccaug

SEQ ID NO: 3049363 - RNA, 19 nt, Artificial Sequence
  Description of Artificial Sequence: Synthetic oligonucleotide
caggaucaaccuuaauccu

SEQ ID NO: 3049364 - RNA, 19 nt, Artificial Sequence
  Description of Artificial Sequence: Synthetic oligonucleotide
gguuucguccuuggagaag

SEQ ID NO: 3049365 - RNA, 19 nt, Artificial Sequence
  Description of Artificial Sequence: Synthetic oligonucleotide
ggagaaguucaggaucuuc

SEQ ID NO: 3049366 - RNA, 19 nt, Artificial Sequence
  Description of Artificial Sequence: Synthetic oligonucleotide
aaccuccaacaaccagcaa

SEQ ID NO: 3049367 - RNA, 19 nt, Artificial Sequence
  Description of Artificial Sequence: Synthetic oligonucleotide
uuucguccuuggagaaguu

SEQ ID NO: 3049368 - RNA, 19 nt, Artificial Sequence
  Description of Artificial Sequence: Synthetic oligonucleotide
agggaccccguagcguagg

SEQ ID NO: 3049369 - RNA, 19 nt, Artificial Sequence
  Description of Artificial Sequence: Synthetic oligonucleotide
gcgggcgcuaccaugguug

SEQ ID NO: 3049370 - RNA, 19 nt, Artificial Sequence
  Description of Artificial Sequence: Synthetic oligonucleotide
guggaguccuuuauuuucu

SEQ ID NO: 3049371 - RNA, 19 nt, Artificial Sequence
  Description of Artificial Sequence: Synthetic oligonucleotide
ccuuaauccucacggcguc

SEQ ID NO: 3049372 - RNA, 19 nt, Artificial Sequence
  Description of Artificial Sequence: Synthetic oligonucleotide
guucuugcgcagagcgcgc

SEQ ID NO: 3049373 - RNA, 19 nt, Artificial Sequence
  Description of Artificial Sequence: Synthetic oligonucleotide
cuuaauccucacggcguca

SEQ ID NO: 3049374 - RNA, 19 nt, Artificial Sequence
  Description of Artificial Sequence: Synthetic oligonucleotide
ucacggcgucauaucggau

SEQ ID NO: 3049375 - RNA, 19 nt, Artificial Sequence
  Description of Artificial Sequence: Synthetic oligonucleotide
agcguagggucuuguucuu

SEQ ID NO: 3049376 - RNA, 19 nt, Artificial Sequence
  Description of Artificial Sequence: Synthetic oligonucleotide
gucaggcugccuuaggcuu

SEQ ID NO: 3049377 - RNA, 19 nt, Artificial Sequence
  Description of Artificial Sequence: Synthetic oligonucleotide
caacacggcgggcgcuacc

SEQ ID NO: 3049378 - RNA, 19 nt, Artificial Sequence
  Description of Artificial Sequence: Synthetic oligonucleotide
ggaucuucccaaggccuug

SEQ ID NO: 3049379 - RNA, 19 nt, Artificial Sequence
  Description of Artificial Sequence: Synthetic oligonucleotide
ggcuuaaggguuucugggu

SEQ ID NO: 3049380 - RNA, 19 nt, Artificial Sequence
  Description of Artificial Sequence: Synthetic oligonucleotide
gcaacaacauagggacccc

SEQ ID NO: 3049381 - RNA, 19 nt, Artificial Sequence
  Description of Artificial Sequence: Synthetic oligonucleotide
aggaucuucccaaggccuu

SEQ ID NO: 3049382 - RNA, 19 nt, Artificial Sequence
  Description of Artificial Sequence: Synthetic oligonucleotide
caacaaccagcaacaacau

SEQ ID NO: 3049383 - RNA, 19 nt, Artificial Sequence
  Description of Artificial Sequence: Synthetic oligonucleotide
cacggcgucauaucggauu

SEQ ID NO: 3049384 - RNA, 19 nt, Artificial Sequence
  Description of Artificial Sequence: Synthetic oligonucleotide
gguugaagaugcggccggc

SEQ ID NO: 3049385 - RNA, 19 nt, Artificial Sequence
  Description of Artificial Sequence: Synthetic oligonucleotide
agcgcgcaacacggcgggc

SEQ ID NO: 3049386 - RNA, 19 nt, Artificial Sequence
  Description of Artificial Sequence: Synthetic oligonucleotide
ccaaaggaaccuccaacaa

SEQ ID NO: 3049387 - RNA, 19 nt, Artificial Sequence
  Description of Artificial Sequence: Synthetic oligonucleotide
gggaccccguagcguaggg

SEQ ID NO: 3049388 - RNA, 19 nt, Artificial Sequence
  Description of Artificial Sequence: Synthetic oligonucleotide
uggagaaguucaggaucuu

SEQ ID NO: 3049389 - RNA, 19 nt, Artificial Sequence
  Description of Artificial Sequence: Synthetic oligonucleotide
gcgcgcaacacggcgggcg

SEQ ID NO: 3049390 - RNA, 19 nt, Artificial Sequence
  Description of Artificial Sequence: Synthetic oligonucleotide
gcuuaaggguuucuggguu

SEQ ID NO: 3049391 - RNA, 19 nt, Artificial Sequence
  Description of Artificial Sequence: Synthetic oligonucleotide
accccguagcguagggucu

SEQ ID NO: 3049392 - RNA, 19 nt, Artificial Sequence
  Description of Artificial Sequence: Synthetic oligonucleotide
ccucgaauauucuuccagu

SEQ ID NO: 3049393 - RNA, 19 nt, Artificial Sequence
  Description of Artificial Sequence: Synthetic oligonucleotide
cauagggaccccguagcgu

SEQ ID NO: 3049394 - RNA, 19 nt, Artificial Sequence
  Description of Artificial Sequence: Synthetic oligonucleotide
guugaagaugcggccggcu

SEQ ID NO: 3049395 - RNA, 19 nt, Artificial Sequence
  Description of Artificial Sequence: Synthetic oligonucleotide
ggguuucguccuuggagaa

SEQ ID NO: 3049396 - RNA, 19 nt, Artificial Sequence
  Description of Artificial Sequence: Synthetic oligonucleotide
gcgcuaccaugguugaaga

SEQ ID NO: 3049397 - RNA, 19 nt, Artificial Sequence
  Description of Artificial Sequence: Synthetic oligonucleotide
cuugggccucgaauauucu

SEQ ID NO: 3049398 - RNA, 19 nt, Artificial Sequence
  Description of Artificial Sequence: Synthetic oligonucleotide
cgaauauucuuccagucuu

SEQ ID NO: 3049399 - RNA, 19 nt, Artificial Sequence
  Description of Artificial Sequence: Synthetic oligonucleotide
gcgucauaucggauuugug

SEQ ID NO: 3049400 - RNA, 19 nt, Artificial Sequence
  Description of Artificial Sequence: Synthetic oligonucleotide
ggcgucauaucggauuugu

SEQ ID NO: 3049401 - RNA, 19 nt, Artificial Sequence
  Description of Artificial Sequence: Synthetic oligonucleotide
ggccucgaauauucuucca

SEQ ID NO: 3049402 - RNA, 19 nt, Artificial Sequence
  Description of Artificial Sequence: Synthetic oligonucleotide
guuucuggguuucguccuu

SEQ ID NO: 3049403 - RNA, 19 nt, Artificial Sequence
  Description of Artificial Sequence: Synthetic oligonucleotide
cuucaaaaguggaguccuu

SEQ ID NO: 3049404 - RNA, 19 nt, Artificial Sequence
  Description of Artificial Sequence: Synthetic oligonucleotide
cuuaggcuuaaggguuucu

SEQ ID NO: 3049405 - RNA, 19 nt, Artificial Sequence
  Description of Artificial Sequence: Synthetic oligonucleotide
acacggcgggcgcuaccau

SEQ ID NO: 3049406 - RNA, 19 nt, Artificial Sequence
  Description of Artificial Sequence: Synthetic oligonucleotide
ccuuggagaaguucaggau

SEQ ID NO: 3049407 - RNA, 19 nt, Artificial Sequence
  Description of Artificial Sequence: Synthetic oligonucleotide
cgaagaccaaaggaaccuc

SEQ ID NO: 3049408 - RNA, 19 nt, Artificial Sequence
  Description of Artificial Sequence: Synthetic oligonucleotide
cuccaacaaccagcaacaa

SEQ ID NO: 3049409 - RNA, 19 nt, Artificial Sequence
  Description of Artificial Sequence: Synthetic oligonucleotide
gcacagucaggcugccuua

SEQ ID NO: 3049410 - RNA, 19 nt, Artificial Sequence
  Description of Artificial Sequence: Synthetic oligonucleotide
ccuuaggcuuaaggguuuc

SEQ ID NO: 3049411 - RNA, 19 nt, Artificial Sequence
  Description of Artificial Sequence: Synthetic oligonucleotide
gcagagcgcgcaacacggc

SEQ ID NO: 3049412 - RNA, 19 nt, Artificial Sequence
  Description of Artificial Sequence: Synthetic oligonucleotide
ccaauucaggaucaaccuu

SEQ ID NO: 3049413 - RNA, 19 nt, Artificial Sequence
  Description of Artificial Sequence: Synthetic oligonucleotide
caggcugccuuaggcuuaa

SEQ ID NO: 3049414 - RNA, 19 nt, Artificial Sequence
  Description of Artificial Sequence: Synthetic oligonucleotide
cgcgcaacacggcgggcgc

SEQ ID NO: 3049415 - RNA, 19 nt, Artificial Sequence
  Description of Artificial Sequence: Synthetic oligonucleotide
cccaaggccuugggccucg

SEQ ID NO: 3049416 - RNA, 19 nt, Artificial Sequence
  Description of Artificial Sequence: Synthetic oligonucleotide
caaggccuugggccucgaa

SEQ ID NO: 3049417 - RNA, 19 nt, Artificial Sequence
  Description of Artificial Sequence: Synthetic oligonucleotide
ggccuugggccucgaauau

SEQ ID NO: 3049418 - RNA, 19 nt, Artificial Sequence
  Description of Artificial Sequence: Synthetic oligonucleotide
gagcacagucaggcugccu

SEQ ID NO: 3049419 - RNA, 19 nt, Artificial Sequence
  Description of Artificial Sequence: Synthetic oligonucleotide
gcaacacggcgggcgcuac

SEQ ID NO: 3049420 - RNA, 19 nt, Artificial Sequence
  Description of Artificial Sequence: Synthetic oligonucleotide
cccguagcguagggucuug

SEQ ID NO: 3049421 - RNA, 19 nt, Artificial Sequence
  Description of Artificial Sequence: Synthetic oligonucleotide
ggaccccguagcguagggu

SEQ ID NO: 3049422 - RNA, 19 nt, Artificial Sequence
  Description of Artificial Sequence: Synthetic oligonucleotide
gccuuaggcuuaaggguuu

SEQ ID NO: 3049423 - RNA, 19 nt, Artificial Sequence
  Description of Artificial Sequence: Synthetic oligonucleotide
cgggcgcuaccaugguuga

SEQ ID NO: 3049424 - RNA, 19 nt, Artificial Sequence
  Description of Artificial Sequence: Synthetic oligonucleotide
ggcgggcgcuaccaugguu

SEQ ID NO: 3049425 - RNA, 19 nt, Artificial Sequence
  Description of Artificial Sequence: Synthetic oligonucleotide
gggcgcuaccaugguugaa

SEQ ID NO: 3049426 - RNA, 19 nt, Artificial Sequence
  Description of Artificial Sequence: Synthetic oligonucleotide
cggcgucauaucggauuug

SEQ ID NO: 3049427 - RNA, 19 nt, Artificial Sequence
  Description of Artificial Sequence: Synthetic oligonucleotide
cguagcguagggucuuguu

SEQ ID NO: 3049428 - RNA, 19 nt, Artificial Sequence
  Description of Artificial Sequence: Synthetic oligonucleotide
gccuugggccucgaauauu

SEQ ID NO: 3049429 - RNA, 19 nt, Artificial Sequence
  Description of Artificial Sequence: Synthetic oligonucleotide
cgcuaccaugguugaagau

SEQ ID NO: 3049430 - RNA, 19 nt, Artificial Sequence
  Description of Artificial Sequence: Synthetic oligonucleotide
cgcaacacggcgggcgcua

SEQ ID NO: 3049431 - RNA, 19 nt, Artificial Sequence
  Description of Artificial Sequence: Synthetic oligonucleotide
gcgcaacacggcgggcgcu

SEQ ID NO: 3049432 - RNA, 19 nt, Artificial Sequence
  Description of Artificial Sequence: Synthetic oligonucleotide
ccguagcguagggucuugu

SEQ ID NO: 3049433 - RNA, 19 nt, Artificial Sequence
  Description of Artificial Sequence: Synthetic oligonucleotide
ccaaggccuugggccucga

SEQ ID NO: 3049434 - RNA, 19 nt, Artificial Sequence
  Description of Artificial Sequence: Synthetic oligonucleotide
ccccguagcguagggucuu

SEQ ID NO: 3049435 - RNA, 19 nt, Artificial Sequence
  Description of Artificial Sequence: Synthetic oligonucleotide
cggcgggcgcuaccauggu

SEQ ID NO: 3049436 - RNA, 19 nt, Artificial Sequence
  Description of Artificial Sequence: Synthetic oligonucleotide
aaaacuuccgcccacaccc

SEQ ID NO: 3049437 - RNA, 19 nt, Artificial Sequence
  Description of Artificial Sequence: Synthetic oligonucleotide
aaacuuuuaaacuuccaac

SEQ ID NO: 3049438 - RNA, 19 nt, Artificial Sequence
  Description of Artificial Sequence: Synthetic oligonucleotide
aacuuuuaaacuuccaacg

SEQ ID NO: 3049439 - RNA, 19 nt, Artificial Sequence
  Description of Artificial Sequence: Synthetic oligonucleotide
uaaacuuccaacgagaacc

SEQ ID NO: 3049440 - RNA, 19 nt, Artificial Sequence
  Description of Artificial Sequence: Synthetic oligonucleotide
cagaagaucacugagaggg

SEQ ID NO: 3049441 - RNA, 19 nt, Artificial Sequence
  Description of Artificial Sequence: Synthetic oligonucleotide
aguucucccaguuaaaggg

SEQ ID NO: 3049442 - RNA, 19 nt, Artificial Sequence
  Description of Artificial Sequence: Synthetic oligonucleotide
aaaacuuuuaaacuuccaa

SEQ ID NO: 3049443 - RNA, 19 nt, Artificial Sequence
  Description of Artificial Sequence: Synthetic oligonucleotide
uuuuaaacuuccaacgaga

SEQ ID NO: 3049444 - RNA, 19 nt, Artificial Sequence
  Description of Artificial Sequence: Synthetic oligonucleotide
aggcggaaaacuuuuaaac

SEQ ID NO: 3049445 - RNA, 19 nt, Artificial Sequence
  Description of Artificial Sequence: Synthetic oligonucleotide
uagaguuccgggaaugugg

SEQ ID NO: 3049446 - RNA, 19 nt, Artificial Sequence
  Description of Artificial Sequence: Synthetic oligonucleotide
caguuaaagggacacagcg

SEQ ID NO: 3049447 - RNA, 19 nt, Artificial Sequence
  Description of Artificial Sequence: Synthetic oligonucleotide
agaaccaccccuucguggc

SEQ ID NO: 3049448 - RNA, 19 nt, Artificial Sequence
  Description of Artificial Sequence: Synthetic oligonucleotide
uauugcacgcaccggaagg

SEQ ID NO: 3049449 - RNA, 19 nt, Artificial Sequence
  Description of Artificial Sequence: Synthetic oligonucleotide
guuaaagggacacagcgac

SEQ ID NO: 3049450 - RNA, 19 nt, Artificial Sequence
  Description of Artificial Sequence: Synthetic oligonucleotide
cuugaaggaacccucaaac

SEQ ID NO: 3049451 - RNA, 19 nt, Artificial Sequence
  Description of Artificial Sequence: Synthetic oligonucleotide
cuuuuaaacuuccaacgag

SEQ ID NO: 3049452 - RNA, 19 nt, Artificial Sequence
  Description of Artificial Sequence: Synthetic oligonucleotide
cuuccaacgagaaccaccc

SEQ ID NO: 3049453 - RNA, 19 nt, Artificial Sequence
  Description of Artificial Sequence: Synthetic oligonucleotide
uuugcccaaguuucgaucc

SEQ ID NO: 3049454 - RNA, 19 nt, Artificial Sequence
  Description of Artificial Sequence: Synthetic oligonucleotide
auaaugcgcguccagcugg

SEQ ID NO: 3049455 - RNA, 19 nt, Artificial Sequence
  Description of Artificial Sequence: Synthetic oligonucleotide
aacgagaaccaccccuucg

SEQ ID NO: 3049456 - RNA, 19 nt, Artificial Sequence
  Description of Artificial Sequence: Synthetic oligonucleotide
uaaagggacacagcgaccc

SEQ ID NO: 3049457 - RNA, 19 nt, Artificial Sequence
  Description of Artificial Sequence: Synthetic oligonucleotide
aguuccgggaauguggagc

SEQ ID NO: 3049458 - RNA, 19 nt, Artificial Sequence
  Description of Artificial Sequence: Synthetic oligonucleotide
acuuuuaaacuuccaacga

SEQ ID NO: 3049459 - RNA, 19 nt, Artificial Sequence
  Description of Artificial Sequence: Synthetic oligonucleotide
uucgaucccaccaggacug

SEQ ID NO: 3049460 - RNA, 19 nt, Artificial Sequence
  Description of Artificial Sequence: Synthetic oligonucleotide
uuucgaucccaccaggacu

SEQ ID NO: 3049461 - RNA, 19 nt, Artificial Sequence
  Description of Artificial Sequence: Synthetic oligonucleotide
accaggacuggauaaugcg

SEQ ID NO: 3049462 - RNA, 19 nt, Artificial Sequence
  Description of Artificial Sequence: Synthetic oligonucleotide
caggacuggauaaugcgcg

SEQ ID NO: 3049463 - RNA, 19 nt, Artificial Sequence
  Description of Artificial Sequence: Synthetic oligonucleotide
aguuccugcgcucuuuggg

SEQ ID NO: 3049464 - RNA, 19 nt, Artificial Sequence
  Description of Artificial Sequence: Synthetic oligonucleotide
aaguuucgaucccaccagg

SEQ ID NO: 3049465 - RNA, 19 nt, Artificial Sequence
  Description of Artificial Sequence: Synthetic oligonucleotide
acuuccaacgagaaccacc

SEQ ID NO: 3049466 - RNA, 19 nt, Artificial Sequence
  Description of Artificial Sequence: Synthetic oligonucleotide
cuucggaaaacuuccgccc

SEQ ID NO: 3049467 - RNA, 19 nt, Artificial Sequence
  Description of Artificial Sequence: Synthetic oligonucleotide
uuaaacuuccaacgagaac

SEQ ID NO: 3049468 - RNA, 19 nt, Artificial Sequence
  Description of Artificial Sequence: Synthetic oligonucleotide
aaagggacacagcgacccc

SEQ ID NO: 3049469 - RNA, 19 nt, Artificial Sequence
  Description of Artificial Sequence: Synthetic oligonucleotide
accggaagggagucuagcc

SEQ ID NO: 3049470 - RNA, 19 nt, Artificial Sequence
  Description of Artificial Sequence: Synthetic oligonucleotide
guggcuauugcacgcaccg

SEQ ID NO: 3049471 - RNA, 19 nt, Artificial Sequence
  Description of Artificial Sequence: Synthetic oligonucleotide
cuuugggcgaggaaguccc

SEQ ID NO: 3049472 - RNA, 19 nt, Artificial Sequence
  Description of Artificial Sequence: Synthetic oligonucleotide
aagggagucuagccguugg

SEQ ID NO: 3049473 - RNA, 19 nt, Artificial Sequence
  Description of Artificial Sequence: Synthetic oligonucleotide
uguguugcaguuccugcgc

SEQ ID NO: 3049474 - RNA, 19 nt, Artificial Sequence
  Description of Artificial Sequence: Synthetic oligonucleotide
acggcuucggaaaacuucc

SEQ ID NO: 3049475 - RNA, 19 nt, Artificial Sequence
  Description of Artificial Sequence: Synthetic oligonucleotide
gagaaccaccccuucgugg

SEQ ID NO: 3049476 - RNA, 19 nt, Artificial Sequence
  Description of Artificial Sequence: Synthetic oligonucleotide
gaaaacuuccgcccacacc

SEQ ID NO: 3049477 - RNA, 19 nt, Artificial Sequence
  Description of Artificial Sequence: Synthetic oligonucleotide
uuugucgcaucuguguugc

SEQ ID NO: 3049478 - RNA, 19 nt, Artificial Sequence
  Description of Artificial Sequence: Synthetic oligonucleotide
aauauggcgggcgacggga

SEQ ID NO: 3049479 - RNA, 19 nt, Artificial Sequence
  Description of Artificial Sequence: Synthetic oligonucleotide
gauaaugcgcguccagcug

SEQ ID NO: 3049480 - RNA, 19 nt, Artificial Sequence
  Description of Artificial Sequence: Synthetic oligonucleotide
gacuggauaaugcgcgucc

SEQ ID NO: 3049481 - RNA, 19 nt, Artificial Sequence
  Description of Artificial Sequence: Synthetic oligonucleotide
caguucucccaguuaaagg

SEQ ID NO: 3049482 - RNA, 19 nt, Artificial Sequence
  Description of Artificial Sequence: Synthetic oligonucleotide
uuaaagggacacagcgacc

SEQ ID NO: 3049483 - RNA, 19 nt, Artificial Sequence
  Description of Artificial Sequence: Synthetic oligonucleotide
cuguguugcaguuccugcg

SEQ ID NO: 3049484 - RNA, 19 nt, Artificial Sequence
  Description of Artificial Sequence: Synthetic oligonucleotide
caaguuucgaucccaccag

SEQ ID NO: 3049485 - RNA, 19 nt, Artificial Sequence
  Description of Artificial Sequence: Synthetic oligonucleotide
uucggaaaacuuccgccca

SEQ ID NO: 3049486 - RNA, 19 nt, Artificial Sequence
  Description of Artificial Sequence: Synthetic oligonucleotide
gggaauguggagcagaaga

SEQ ID NO: 3049487 - RNA, 19 nt, Artificial Sequence
  Description of Artificial Sequence: Synthetic oligonucleotide
aagucccuugaaggaaccc

SEQ ID NO: 3049488 - RNA, 19 nt, Artificial Sequence
  Description of Artificial Sequence: Synthetic oligonucleotide
gaggaagucccuugaagga

SEQ ID NO: 3049489 - RNA, 19 nt, Artificial Sequence
  Description of Artificial Sequence: Synthetic oligonucleotide
uggauaaugcgcguccagc

SEQ ID NO: 3049490 - RNA, 19 nt, Artificial Sequence
  Description of Artificial Sequence: Synthetic oligonucleotide
agggagucuagccguuggc

SEQ ID NO: 3049491 - RNA, 19 nt, Artificial Sequence
  Description of Artificial Sequence: Synthetic oligonucleotide
gagucuagccguuggccag

SEQ ID NO: 3049492 - RNA, 19 nt, Artificial Sequence
  Description of Artificial Sequence: Synthetic oligonucleotide
uucucccaguuaaagggac

SEQ ID NO: 3049493 - RNA, 19 nt, Artificial Sequence
  Description of Artificial Sequence: Synthetic oligonucleotide
ugucgcaucuguguugcag

SEQ ID NO: 3049494 - RNA, 19 nt, Artificial Sequence
  Description of Artificial Sequence: Synthetic oligonucleotide
guuccugcgcucuuugggc

SEQ ID NO: 3049495 - RNA, 19 nt, Artificial Sequence
  Description of Artificial Sequence: Synthetic oligonucleotide
uuccugcgcucuuugggcg

SEQ ID NO: 3049496 - RNA, 19 nt, Artificial Sequence
  Description of Artificial Sequence: Synthetic oligonucleotide
uccgcccacacccaauaug

SEQ ID NO: 3049497 - RNA, 19 nt, Artificial Sequence
  Description of Artificial Sequence: Synthetic oligonucleotide
auugcacgcaccggaaggg

SEQ ID NO: 3049498 - RNA, 19 nt, Artificial Sequence
  Description of Artificial Sequence: Synthetic oligonucleotide
acgagaaccaccccuucgu

SEQ ID NO: 3049499 - RNA, 19 nt, Artificial Sequence
  Description of Artificial Sequence: Synthetic oligonucleotide
ucuuugggcgaggaagucc

SEQ ID NO: 3049500 - RNA, 19 nt, Artificial Sequence
  Description of Artificial Sequence: Synthetic oligonucleotide
cuuugucgcaucuguguug

SEQ ID NO: 3049501 - RNA, 19 nt, Artificial Sequence
  Description of Artificial Sequence: Synthetic oligonucleotide
accccuucguggcuauugc

SEQ ID NO: 3049502 - RNA, 19 nt, Artificial Sequence
  Description of Artificial Sequence: Synthetic oligonucleotide
cuucguggcuauugcacgc

SEQ ID NO: 3049503 - RNA, 19 nt, Artificial Sequence
  Description of Artificial Sequence: Synthetic oligonucleotide
cuuugcccaaguuucgauc

SEQ ID NO: 3049504 - RNA, 19 nt, Artificial Sequence
  Description of Artificial Sequence: Synthetic oligonucleotide
gcaucuguguugcaguucc

SEQ ID NO: 3049505 - RNA, 19 nt, Artificial Sequence
  Description of Artificial Sequence: Synthetic oligonucleotide
gaauguggagcagaagauc

SEQ ID NO: 3049506 - RNA, 19 nt, Artificial Sequence
  Description of Artificial Sequence: Synthetic oligonucleotide
uguggagcagaagaucacu

SEQ ID NO: 3049507 - RNA, 19 nt, Artificial Sequence
  Description of Artificial Sequence: Synthetic oligonucleotide
guuucgaucccaccaggac

SEQ ID NO: 3049508 - RNA, 19 nt, Artificial Sequence
  Description of Artificial Sequence: Synthetic oligonucleotide
uuuuauccccacggcuucg

SEQ ID NO: 3049509 - RNA, 19 nt, Artificial Sequence
  Description of Artificial Sequence: Synthetic oligonucleotide
uuuauccccacggcuucgg

SEQ ID NO: 3049510 - RNA, 19 nt, Artificial Sequence
  Description of Artificial Sequence: Synthetic oligonucleotide
augcgcguccagcuggcgc

SEQ ID NO: 3049511 - RNA, 19 nt, Artificial Sequence
  Description of Artificial Sequence: Synthetic oligonucleotide
gcuucggaaaacuuccgcc

SEQ ID NO: 3049512 - RNA, 19 nt, Artificial Sequence
  Description of Artificial Sequence: Synthetic oligonucleotide
aaacuuccaacgagaacca

SEQ ID NO: 3049513 - RNA, 19 nt, Artificial Sequence
  Description of Artificial Sequence: Synthetic oligonucleotide
cacggcuucggaaaacuuc

SEQ ID NO: 3049514 - RNA, 19 nt, Artificial Sequence
  Description of Artificial Sequence: Synthetic oligonucleotide
gaggcggaaaacuuuuaaa

SEQ ID NO: 3049515 - RNA, 19 nt, Artificial Sequence
  Description of Artificial Sequence: Synthetic oligonucleotide
gagcggguagaguuccggg

SEQ ID NO: 3049516 - RNA, 19 nt, Artificial Sequence
  Description of Artificial Sequence: Synthetic oligonucleotide
caccaggacuggauaaugc

SEQ ID NO: 3049517 - RNA, 19 nt, Artificial Sequence
  Description of Artificial Sequence: Synthetic oligonucleotide
aacuuccaacgagaaccac

SEQ ID NO: 3049518 - RNA, 19 nt, Artificial Sequence
  Description of Artificial Sequence: Synthetic oligonucleotide
ggaaaacuuuuaaacuucc

SEQ ID NO: 3049519 - RNA, 19 nt, Artificial Sequence
  Description of Artificial Sequence: Synthetic oligonucleotide
ucucccaguuaaagggaca

SEQ ID NO: 3049520 - RNA, 19 nt, Artificial Sequence
  Description of Artificial Sequence: Synthetic oligonucleotide
cgaggaagucccuugaagg

SEQ ID NO: 3049521 - RNA, 19 nt, Artificial Sequence
  Description of Artificial Sequence: Synthetic oligonucleotide
acacccaauauggcgggcg

SEQ ID NO: 3049522 - RNA, 19 nt, Artificial Sequence
  Description of Artificial Sequence: Synthetic oligonucleotide
aguuaaagggacacagcga

SEQ ID NO: 3049523 - RNA, 19 nt, Artificial Sequence
  Description of Artificial Sequence: Synthetic oligonucleotide
cccacacccaauauggcgg

SEQ ID NO: 3049524 - RNA, 19 nt, Artificial Sequence
  Description of Artificial Sequence: Synthetic oligonucleotide
cuauugcacgcaccggaag

SEQ ID NO: 3049525 - RNA, 19 nt, Artificial Sequence
  Description of Artificial Sequence: Synthetic oligonucleotide
uaaugcgcguccagcuggc

SEQ ID NO: 3049526 - RNA, 19 nt, Artificial Sequence
  Description of Artificial Sequence: Synthetic oligonucleotide
ucggaaaacuuccgcccac

SEQ ID NO: 3049527 - RNA, 19 nt, Artificial Sequence
  Description of Artificial Sequence: Synthetic oligonucleotide
ucccuugaaggaacccuca

SEQ ID NO: 3049528 - RNA, 19 nt, Artificial Sequence
  Description of Artificial Sequence: Synthetic oligonucleotide
ugggcgaggaagucccuug

SEQ ID NO: 3049529 - RNA, 19 nt, Artificial Sequence
  Description of Artificial Sequence: Synthetic oligonucleotide
agaagaucacugagagggg

SEQ ID NO: 3049530 - RNA, 19 nt, Artificial Sequence
  Description of Artificial Sequence: Synthetic oligonucleotide
agucccuugaaggaacccu

SEQ ID NO: 3049531 - RNA, 19 nt, Artificial Sequence
  Description of Artificial Sequence: Synthetic oligonucleotide
uugcccaaguuucgauccc

SEQ ID NO: 3049532 - RNA, 19 nt, Artificial Sequence
  Description of Artificial Sequence: Synthetic oligonucleotide
guuccgggaauguggagca

SEQ ID NO: 3049533 - RNA, 19 nt, Artificial Sequence
  Description of Artificial Sequence: Synthetic oligonucleotide
gcccacacccaauauggcg

SEQ ID NO: 3049534 - RNA, 19 nt, Artificial Sequence
  Description of Artificial Sequence: Synthetic oligonucleotide
ugcgcguccagcuggcgcu

SEQ ID NO: 3049535 - RNA, 19 nt, Artificial Sequence
  Description of Artificial Sequence: Synthetic oligonucleotide
agcggguagaguuccggga

SEQ ID NO: 3049536 - RNA, 19 nt, Artificial Sequence
  Description of Artificial Sequence: Synthetic oligonucleotide
ccagcuggcgcuuugucgc

SEQ ID NO: 3049537 - RNA, 19 nt, Artificial Sequence
  Description of Artificial Sequence: Synthetic oligonucleotide
aucuguguugcaguuccug

SEQ ID NO: 3049538 - RNA, 19 nt, Artificial Sequence
  Description of Artificial Sequence: Synthetic oligonucleotide
ccgcccacacccaauaugg

SEQ ID NO: 3049539 - RNA, 19 nt, Artificial Sequence
  Description of Artificial Sequence: Synthetic oligonucleotide
cucccaguuaaagggacac

SEQ ID NO: 3049540 - RNA, 19 nt, Artificial Sequence
  Description of Artificial Sequence: Synthetic oligonucleotide
agccguuggccaguucucc

SEQ ID NO: 3049541 - RNA, 19 nt, Artificial Sequence
  Description of Artificial Sequence: Synthetic oligonucleotide
caauauggcgggcgacggg

SEQ ID NO: 3049542 - RNA, 19 nt, Artificial Sequence
  Description of Artificial Sequence: Synthetic oligonucleotide
cuggauaaugcgcguccag

SEQ ID NO: 3049543 - RNA, 19 nt, Artificial Sequence
  Description of Artificial Sequence: Synthetic oligonucleotide
guagaguuccgggaaugug

SEQ ID NO: 3049544 - RNA, 19 nt, Artificial Sequence
  Description of Artificial Sequence: Synthetic oligonucleotide
auguggagcagaagaucac

SEQ ID NO: 3049545 - RNA, 19 nt, Artificial Sequence
  Description of Artificial Sequence: Synthetic oligonucleotide
auccccacggcuucggaaa

SEQ ID NO: 3049546 - RNA, 19 nt, Artificial Sequence
  Description of Artificial Sequence: Synthetic oligonucleotide
gaagucccuugaaggaacc

SEQ ID NO: 3049547 - RNA, 19 nt, Artificial Sequence
  Description of Artificial Sequence: Synthetic oligonucleotide
uauggcgggcgacgggagc

SEQ ID NO: 3049548 - RNA, 19 nt, Artificial Sequence
  Description of Artificial Sequence: Synthetic oligonucleotide
cccaguuaaagggacacag

SEQ ID NO: 3049549 - RNA, 19 nt, Artificial Sequence
  Description of Artificial Sequence: Synthetic oligonucleotide
ccaggacuggauaaugcgc

SEQ ID NO: 3049550 - RNA, 19 nt, Artificial Sequence
  Description of Artificial Sequence: Synthetic oligonucleotide
ccuucguggcuauugcacg

SEQ ID NO: 3049551 - RNA, 19 nt, Artificial Sequence
  Description of Artificial Sequence: Synthetic oligonucleotide
uauccccacggcuucggaa

SEQ ID NO: 3049552 - RNA, 19 nt, Artificial Sequence
  Description of Artificial Sequence: Synthetic oligonucleotide
guggagcagaagaucacug

SEQ ID NO: 3049553 - RNA, 19 nt, Artificial Sequence
  Description of Artificial Sequence: Synthetic oligonucleotide
uccgggaauguggagcaga

SEQ ID NO: 3049554 - RNA, 19 nt, Artificial Sequence
  Description of Artificial Sequence: Synthetic oligonucleotide
uggggaggcggaaaacuuu

SEQ ID NO: 3049555 - RNA, 19 nt, Artificial Sequence
  Description of Artificial Sequence: Synthetic oligonucleotide
uuggccaguucucccaguu

SEQ ID NO: 3049556 - RNA, 19 nt, Artificial Sequence
  Description of Artificial Sequence: Synthetic oligonucleotide
gcagaagaucacugagagg

SEQ ID NO: 3049557 - RNA, 19 nt, Artificial Sequence
  Description of Artificial Sequence: Synthetic oligonucleotide
auggcgggcgacgggagcg

SEQ ID NO: 3049558 - RNA, 19 nt, Artificial Sequence
  Description of Artificial Sequence: Synthetic oligonucleotide
agaguuccgggaaugugga

SEQ ID NO: 3049559 - RNA, 19 nt, Artificial Sequence
  Description of Artificial Sequence: Synthetic oligonucleotide
uguugcaguuccugcgcuc

SEQ ID NO: 3049560 - RNA, 19 nt, Artificial Sequence
  Description of Artificial Sequence: Synthetic oligonucleotide
uccuuugcccaaguuucga

SEQ ID NO: 3049561 - RNA, 19 nt, Artificial Sequence
  Description of Artificial Sequence: Synthetic oligonucleotide
aggacuggauaaugcgcgu

SEQ ID NO: 3049562 - RNA, 19 nt, Artificial Sequence
  Description of Artificial Sequence: Synthetic oligonucleotide
ccaaguuucgaucccacca

SEQ ID NO: 3049563 - RNA, 19 nt, Artificial Sequence
  Description of Artificial Sequence: Synthetic oligonucleotide
ucccaccaggacuggauaa

SEQ ID NO: 3049564 - RNA, 19 nt, Artificial Sequence
  Description of Artificial Sequence: Synthetic oligonucleotide
gcgaggaagucccuugaag

SEQ ID NO: 3049565 - RNA, 19 nt, Artificial Sequence
  Description of Artificial Sequence: Synthetic oligonucleotide
ggcggaaaacuuuuaaacu

SEQ ID NO: 3049566 - RNA, 19 nt, Artificial Sequence
  Description of Artificial Sequence: Synthetic oligonucleotide
uuauccccacggcuucgga

SEQ ID NO: 3049567 - RNA, 19 nt, Artificial Sequence
  Description of Artificial Sequence: Synthetic oligonucleotide
ggcuauugcacgcaccgga

SEQ ID NO: 3049568 - RNA, 19 nt, Artificial Sequence
  Description of Artificial Sequence: Synthetic oligonucleotide
aggaagucccuugaaggaa

SEQ ID NO: 3049569 - RNA, 19 nt, Artificial Sequence
  Description of Artificial Sequence: Synthetic oligonucleotide
uggcuauugcacgcaccgg

SEQ ID NO: 3049570 - RNA, 19 nt, Artificial Sequence
  Description of Artificial Sequence: Synthetic oligonucleotide
ccaguuaaagggacacagc

SEQ ID NO: 3049571 - RNA, 19 nt, Artificial Sequence
  Description of Artificial Sequence: Synthetic oligonucleotide
uuccaacgagaaccacccc

SEQ ID NO: 3049572 - RNA, 19 nt, Artificial Sequence
  Description of Artificial Sequence: Synthetic oligonucleotide
uucguggcuauugcacgca

SEQ ID NO: 3049573 - RNA, 19 nt, Artificial Sequence
  Description of Artificial Sequence: Synthetic oligonucleotide
aaugcgcguccagcuggcg

SEQ ID NO: 3049574 - RNA, 19 nt, Artificial Sequence
  Description of Artificial Sequence: Synthetic oligonucleotide
ggcuucggaaaacuuccgc

SEQ ID NO: 3049575 - RNA, 19 nt, Artificial Sequence
  Description of Artificial Sequence: Synthetic oligonucleotide
gacgggagcggguagaguu

SEQ ID NO: 3049576 - RNA, 19 nt, Artificial Sequence
  Description of Artificial Sequence: Synthetic oligonucleotide
ccggaagggagucuagccg

SEQ ID NO: 3049577 - RNA, 19 nt, Artificial Sequence
  Description of Artificial Sequence: Synthetic oligonucleotide
aguuucgaucccaccagga

SEQ ID NO: 3049578 - RNA, 19 nt, Artificial Sequence
  Description of Artificial Sequence: Synthetic oligonucleotide
gaguuccgggaauguggag

SEQ ID NO: 3049579 - RNA, 19 nt, Artificial Sequence
  Description of Artificial Sequence: Synthetic oligonucleotide
caguuccugcgcucuuugg

SEQ ID NO: 3049580 - RNA, 19 nt, Artificial Sequence
  Description of Artificial Sequence: Synthetic oligonucleotide
ggagucuagccguuggcca

SEQ ID NO: 3049581 - RNA, 19 nt, Artificial Sequence
  Description of Artificial Sequence: Synthetic oligonucleotide
ugcccaaguuucgauccca

SEQ ID NO: 3049582 - RNA, 19 nt, Artificial Sequence
  Description of Artificial Sequence: Synthetic oligonucleotide
cggaaaacuuuuaaacuuc

SEQ ID NO: 3049583 - RNA, 19 nt, Artificial Sequence
  Description of Artificial Sequence: Synthetic oligonucleotide
ucguggcuauugcacgcac

SEQ ID NO: 3049584 - RNA, 19 nt, Artificial Sequence
  Description of Artificial Sequence: Synthetic oligonucleotide
acuggauaaugcgcgucca

SEQ ID NO: 3049585 - RNA, 19 nt, Artificial Sequence
  Description of Artificial Sequence: Synthetic oligonucleotide
uagccguuggccaguucuc

SEQ ID NO: 3049586 - RNA, 19 nt, Artificial Sequence
  Description of Artificial Sequence: Synthetic oligonucleotide
gaagggagucuagccguug

SEQ ID NO: 3049587 - RNA, 19 nt, Artificial Sequence
  Description of Artificial Sequence: Synthetic oligonucleotide
acccaauauggcgggcgac

SEQ ID NO: 3049588 - RNA, 19 nt, Artificial Sequence
  Description of Artificial Sequence: Synthetic oligonucleotide
ggcggagccuccuuugccc

SEQ ID NO: 3049589 - RNA, 19 nt, Artificial Sequence
  Description of Artificial Sequence: Synthetic oligonucleotide
guucucccaguuaaaggga

SEQ ID NO: 3049590 - RNA, 19 nt, Artificial Sequence
  Description of Artificial Sequence: Synthetic oligonucleotide
ucccaguuaaagggacaca

SEQ ID NO: 3049591 - RNA, 19 nt, Artificial Sequence
  Description of Artificial Sequence: Synthetic oligonucleotide
ggaagucccuugaaggaac

SEQ ID NO: 3049592 - RNA, 19 nt, Artificial Sequence
  Description of Artificial Sequence: Synthetic oligonucleotide
uccugcgcucuuugggcga

SEQ ID NO: 3049593 - RNA, 19 nt, Artificial Sequence
  Description of Artificial Sequence: Synthetic oligonucleotide
ggaaaacuuccgcccacac

SEQ ID NO: 3049594 - RNA, 19 nt, Artificial Sequence
  Description of Artificial Sequence: Synthetic oligonucleotide
cccuucguggcuauugcac

SEQ ID NO: 3049595 - RNA, 19 nt, Artificial Sequence
  Description of Artificial Sequence: Synthetic oligonucleotide
uuugggcgaggaagucccu

SEQ ID NO: 3049596 - RNA, 19 nt, Artificial Sequence
  Description of Artificial Sequence: Synthetic oligonucleotide
ccaguucucccaguuaaag

SEQ ID NO: 3049597 - RNA, 19 nt, Artificial Sequence
  Description of Artificial Sequence: Synthetic oligonucleotide
gcggaaaacuuuuaaacuu

SEQ ID NO: 3049598 - RNA, 19 nt, Artificial Sequence
  Description of Artificial Sequence: Synthetic oligonucleotide
ggccaguucucccaguuaa

SEQ ID NO: 3049599 - RNA, 19 nt, Artificial Sequence
  Description of Artificial Sequence: Synthetic oligonucleotide
aaacuuccgcccacaccca

SEQ ID NO: 3049600 - RNA, 19 nt, Artificial Sequence
  Description of Artificial Sequence: Synthetic oligonucleotide
gucccuugaaggaacccuc

SEQ ID NO: 3049601 - RNA, 19 nt, Artificial Sequence
  Description of Artificial Sequence: Synthetic oligonucleotide
ggaggcggaaaacuuuuaa

SEQ ID NO: 3049602 - RNA, 19 nt, Artificial Sequence
  Description of Artificial Sequence: Synthetic oligonucleotide
ggauaaugcgcguccagcu

SEQ ID NO: 3049603 - RNA, 19 nt, Artificial Sequence
  Description of Artificial Sequence: Synthetic oligonucleotide
gucgcaucuguguugcagu

SEQ ID NO: 3049604 - RNA, 19 nt, Artificial Sequence
  Description of Artificial Sequence: Synthetic oligonucleotide
gggagucuagccguuggcc

SEQ ID NO: 3049605 - RNA, 19 nt, Artificial Sequence
  Description of Artificial Sequence: Synthetic oligonucleotide
cccaauauggcgggcgacg

SEQ ID NO: 3049606 - RNA, 19 nt, Artificial Sequence
  Description of Artificial Sequence: Synthetic oligonucleotide
ucgcaucuguguugcaguu

SEQ ID NO: 3049607 - RNA, 19 nt, Artificial Sequence
  Description of Artificial Sequence: Synthetic oligonucleotide
caccggaagggagucuagc

SEQ ID NO: 3049608 - RNA, 19 nt, Artificial Sequence
  Description of Artificial Sequence: Synthetic oligonucleotide
uugcacgcaccggaaggga

SEQ ID NO: 3049609 - RNA, 19 nt, Artificial Sequence
  Description of Artificial Sequence: Synthetic oligonucleotide
ggagcggguagaguuccgg

SEQ ID NO: 3049610 - RNA, 19 nt, Artificial Sequence
  Description of Artificial Sequence: Synthetic oligonucleotide
aucccaccaggacuggaua

SEQ ID NO: 3049611 - RNA, 19 nt, Artificial Sequence
  Description of Artificial Sequence: Synthetic oligonucleotide
acgggagcggguagaguuc

SEQ ID NO: 3049612 - RNA, 19 nt, Artificial Sequence
  Description of Artificial Sequence: Synthetic oligonucleotide
caccccuucguggcuauug

SEQ ID NO: 3049613 - RNA, 19 nt, Artificial Sequence
  Description of Artificial Sequence: Synthetic oligonucleotide
uggccaguucucccaguua

SEQ ID NO: 3049614 - RNA, 19 nt, Artificial Sequence
  Description of Artificial Sequence: Synthetic oligonucleotide
caacgagaaccaccccuuc

SEQ ID NO: 3049615 - RNA, 19 nt, Artificial Sequence
  Description of Artificial Sequence: Synthetic oligonucleotide
ugcgcucuuugggcgagga

SEQ ID NO: 3049616 - RNA, 19 nt, Artificial Sequence
  Description of Artificial Sequence: Synthetic oligonucleotide
ucgaucccaccaggacugg

SEQ ID NO: 3049617 - RNA, 19 nt, Artificial Sequence
  Description of Artificial Sequence: Synthetic oligonucleotide
cgcucuuugggcgaggaag

SEQ ID NO: 3049618 - RNA, 19 nt, Artificial Sequence
  Description of Artificial Sequence: Synthetic oligonucleotide
ccaauauggcgggcgacgg

SEQ ID NO: 3049619 - RNA, 19 nt, Artificial Sequence
  Description of Artificial Sequence: Synthetic oligonucleotide
uccccacggcuucggaaaa

SEQ ID NO: 3049620 - RNA, 19 nt, Artificial Sequence
  Description of Artificial Sequence: Synthetic oligonucleotide
ccacacccaauauggcggg

SEQ ID NO: 3049621 - RNA, 19 nt, Artificial Sequence
  Description of Artificial Sequence: Synthetic oligonucleotide
uuccgcccacacccaauau

SEQ ID NO: 3049622 - RNA, 19 nt, Artificial Sequence
  Description of Artificial Sequence: Synthetic oligonucleotide
cccaaguuucgaucccacc

SEQ ID NO: 3049623 - RNA, 19 nt, Artificial Sequence
  Description of Artificial Sequence: Synthetic oligonucleotide
gcaguuccugcgcucuuug

SEQ ID NO: 3049624 - RNA, 19 nt, Artificial Sequence
  Description of Artificial Sequence: Synthetic oligonucleotide
agucuagccguuggccagu

SEQ ID NO: 3049625 - RNA, 19 nt, Artificial Sequence
  Description of Artificial Sequence: Synthetic oligonucleotide
auauggcgggcgacgggag

SEQ ID NO: 3049626 - RNA, 19 nt, Artificial Sequence
  Description of Artificial Sequence: Synthetic oligonucleotide
ugcaguuccugcgcucuuu

SEQ ID NO: 3049627 - RNA, 19 nt, Artificial Sequence
  Description of Artificial Sequence: Synthetic oligonucleotide
ggguagaguuccgggaaug

SEQ ID NO: 3049628 - RNA, 19 nt, Artificial Sequence
  Description of Artificial Sequence: Synthetic oligonucleotide
guugcaguuccugcgcucu

SEQ ID NO: 3049629 - RNA, 19 nt, Artificial Sequence
  Description of Artificial Sequence: Synthetic oligonucleotide
cucuuugggcgaggaaguc

SEQ ID NO: 3049630 - RNA, 19 nt, Artificial Sequence
  Description of Artificial Sequence: Synthetic oligonucleotide
aaccaccccuucguggcua

SEQ ID NO: 3049631 - RNA, 19 nt, Artificial Sequence
  Description of Artificial Sequence: Synthetic oligonucleotide
cacccaauauggcgggcga

SEQ ID NO: 3049632 - RNA, 19 nt, Artificial Sequence
  Description of Artificial Sequence: Synthetic oligonucleotide
uggcgcuuugucgcaucug

SEQ ID NO: 3049633 - RNA, 19 nt, Artificial Sequence
  Description of Artificial Sequence: Synthetic oligonucleotide
gccguuggccaguucuccc

SEQ ID NO: 3049634 - RNA, 19 nt, Artificial Sequence
  Description of Artificial Sequence: Synthetic oligonucleotide
ggcgcuuugucgcaucugu

SEQ ID NO: 3049635 - RNA, 19 nt, Artificial Sequence
  Description of Artificial Sequence: Synthetic oligonucleotide
gaucccaccaggacuggau

SEQ ID NO: 3049636 - RNA, 19 nt, Artificial Sequence
  Description of Artificial Sequence: Synthetic oligonucleotide
cuuccgcccacacccaaua

SEQ ID NO: 3049637 - RNA, 19 nt, Artificial Sequence
  Description of Artificial Sequence: Synthetic oligonucleotide
cacgcaccggaagggaguc

SEQ ID NO: 3049638 - RNA, 19 nt, Artificial Sequence
  Description of Artificial Sequence: Synthetic oligonucleotide
uugggcgaggaagucccuu

SEQ ID NO: 3049639 - RNA, 19 nt, Artificial Sequence
  Description of Artificial Sequence: Synthetic oligonucleotide
uugucgcaucuguguugca

SEQ ID NO: 3049640 - RNA, 19 nt, Artificial Sequence
  Description of Artificial Sequence: Synthetic oligonucleotide
uugcaguuccugcgcucuu

SEQ ID NO: 3049641 - RNA, 19 nt, Artificial Sequence
  Description of Artificial Sequence: Synthetic oligonucleotide
uggcgggcgacgggagcgg

SEQ ID NO: 3049642 - RNA, 19 nt, Artificial Sequence
  Description of Artificial Sequence: Synthetic oligonucleotide
cacacccaauauggcgggc

SEQ ID NO: 3049643 - RNA, 19 nt, Artificial Sequence
  Description of Artificial Sequence: Synthetic oligonucleotide
ggaauguggagcagaagau

SEQ ID NO: 3049644 - RNA, 19 nt, Artificial Sequence
  Description of Artificial Sequence: Synthetic oligonucleotide
ggagccuccuuugcccaag

SEQ ID NO: 3049645 - RNA, 19 nt, Artificial Sequence
  Description of Artificial Sequence: Synthetic oligonucleotide
gcggguagaguuccgggaa

SEQ ID NO: 3049646 - RNA, 19 nt, Artificial Sequence
  Description of Artificial Sequence: Synthetic oligonucleotide
gggcggagccuccuuugcc

SEQ ID NO: 3049647 - RNA, 19 nt, Artificial Sequence
  Description of Artificial Sequence: Synthetic oligonucleotide
cguggcuauugcacgcacc

SEQ ID NO: 3049648 - RNA, 19 nt, Artificial Sequence
  Description of Artificial Sequence: Synthetic oligonucleotide
ggacuggauaaugcgcguc

SEQ ID NO: 3049649 - RNA, 19 nt, Artificial Sequence
  Description of Artificial Sequence: Synthetic oligonucleotide
ggggcggagccuccuuugc

SEQ ID NO: 3049650 - RNA, 19 nt, Artificial Sequence
  Description of Artificial Sequence: Synthetic oligonucleotide
guguugcaguuccugcgcu

SEQ ID NO: 3049651 - RNA, 19 nt, Artificial Sequence
  Description of Artificial Sequence: Synthetic oligonucleotide
gguggggaggcggaaaacu

SEQ ID NO: 3049652 - RNA, 19 nt, Artificial Sequence
  Description of Artificial Sequence: Synthetic oligonucleotide
accaccccuucguggcuau

SEQ ID NO: 3049653 - RNA, 19 nt, Artificial Sequence
  Description of Artificial Sequence: Synthetic oligonucleotide
acuuccgcccacacccaau

SEQ ID NO: 3049654 - RNA, 19 nt, Artificial Sequence
  Description of Artificial Sequence: Synthetic oligonucleotide
gaaccaccccuucguggcu

SEQ ID NO: 3049655 - RNA, 19 nt, Artificial Sequence
  Description of Artificial Sequence: Synthetic oligonucleotide
ccaccaggacuggauaaug

SEQ ID NO: 3049656 - RNA, 19 nt, Artificial Sequence
  Description of Artificial Sequence: Synthetic oligonucleotide
agccuccuuugcccaaguu

SEQ ID NO: 3049657 - RNA, 19 nt, Artificial Sequence
  Description of Artificial Sequence: Synthetic oligonucleotide
gcuauugcacgcaccggaa

SEQ ID NO: 3049658 - RNA, 19 nt, Artificial Sequence
  Description of Artificial Sequence: Synthetic oligonucleotide
gcuuugucgcaucuguguu

SEQ ID NO: 3049659 - RNA, 19 nt, Artificial Sequence
  Description of Artificial Sequence: Synthetic oligonucleotide
gggcgaggaagucccuuga

SEQ ID NO: 3049660 - RNA, 19 nt, Artificial Sequence
  Description of Artificial Sequence: Synthetic oligonucleotide
gccuccuuugcccaaguuu

SEQ ID NO: 3049661 - RNA, 19 nt, Artificial Sequence
  Description of Artificial Sequence: Synthetic oligonucleotide
gguagaguuccgggaaugu

SEQ ID NO: 3049662 - RNA, 19 nt, Artificial Sequence
  Description of Artificial Sequence: Synthetic oligonucleotide
ggcgaggaagucccuugaa

SEQ ID NO: 3049663 - RNA, 19 nt, Artificial Sequence
  Description of Artificial Sequence: Synthetic oligonucleotide
cgagaaccaccccuucgug

SEQ ID NO: 3049664 - RNA, 19 nt, Artificial Sequence
  Description of Artificial Sequence: Synthetic oligonucleotide
cguuggccaguucucccag

SEQ ID NO: 3049665 - RNA, 19 nt, Artificial Sequence
  Description of Artificial Sequence: Synthetic oligonucleotide
guuggccaguucucccagu

SEQ ID NO: 3049666 - RNA, 19 nt, Artificial Sequence
  Description of Artificial Sequence: Synthetic oligonucleotide
cggcuucggaaaacuuccg

SEQ ID NO: 3049667 - RNA, 19 nt, Artificial Sequence
  Description of Artificial Sequence: Synthetic oligonucleotide
gcucuuugggcgaggaagu

SEQ ID NO: 3049668 - RNA, 19 nt, Artificial Sequence
  Description of Artificial Sequence: Synthetic oligonucleotide
gcgacgggagcggguagag

SEQ ID NO: 3049669 - RNA, 19 nt, Artificial Sequence
  Description of Artificial Sequence: Synthetic oligonucleotide
gcggagccuccuuugccca

SEQ ID NO: 3049670 - RNA, 19 nt, Artificial Sequence
  Description of Artificial Sequence: Synthetic oligonucleotide
ccguuggccaguucuccca

SEQ ID NO: 3049671 - RNA, 19 nt, Artificial Sequence
  Description of Artificial Sequence: Synthetic oligonucleotide
gcgcuuugucgcaucugug

SEQ ID NO: 3049672 - RNA, 19 nt, Artificial Sequence
  Description of Artificial Sequence: Synthetic oligonucleotide
cugcgcucuuugggcgagg

SEQ ID NO: 3049673 - RNA, 19 nt, Artificial Sequence
  Description of Artificial Sequence: Synthetic oligonucleotide
gcccaaguuucgaucccac

SEQ ID NO: 3049674 - RNA, 19 nt, Artificial Sequence
  Description of Artificial Sequence: Synthetic oligonucleotide
gcuggcgcuuugucgcauc

SEQ ID NO: 3049675 - RNA, 19 nt, Artificial Sequence
  Description of Artificial Sequence: Synthetic oligonucleotide
gggagcggguagaguuccg

SEQ ID NO: 3049676 - RNA, 19 nt, Artificial Sequence
  Description of Artificial Sequence: Synthetic oligonucleotide
gagccuccuuugcccaagu

SEQ ID NO: 3049677 - RNA, 19 nt, Artificial Sequence
  Description of Artificial Sequence: Synthetic oligonucleotide
guggggaggcggaaaacuu

SEQ ID NO: 3049678 - RNA, 19 nt, Artificial Sequence
  Description of Artificial Sequence: Synthetic oligonucleotide
gcaccggaagggagucuag

SEQ ID NO: 3049679 - RNA, 19 nt, Artificial Sequence
  Description of Artificial Sequence: Synthetic oligonucleotide
caucuguguugcaguuccu

SEQ ID NO: 3049680 - RNA, 19 nt, Artificial Sequence
  Description of Artificial Sequence: Synthetic oligonucleotide
ccgggaauguggagcagaa

SEQ ID NO: 3049681 - RNA, 19 nt, Artificial Sequence
  Description of Artificial Sequence: Synthetic oligonucleotide
agcuggcgcuuugucgcau

SEQ ID NO: 3049682 - RNA, 19 nt, Artificial Sequence
  Description of Artificial Sequence: Synthetic oligonucleotide
cuggcgcuuugucgcaucu

SEQ ID NO: 3049683 - RNA, 19 nt, Artificial Sequence
  Description of Artificial Sequence: Synthetic oligonucleotide
cgcccacacccaauauggc

SEQ ID NO: 3049684 - RNA, 19 nt, Artificial Sequence
  Description of Artificial Sequence: Synthetic oligonucleotide
gcguccagcuggcgcuuug

SEQ ID NO: 3049685 - RNA, 19 nt, Artificial Sequence
  Description of Artificial Sequence: Synthetic oligonucleotide
cgcuuugucgcaucugugu

SEQ ID NO: 3049686 - RNA, 19 nt, Artificial Sequence
  Description of Artificial Sequence: Synthetic oligonucleotide
ggguggggaggcggaaaac

SEQ ID NO: 3049687 - RNA, 19 nt, Artificial Sequence
  Description of Artificial Sequence: Synthetic oligonucleotide
gggcgacgggagcggguag

SEQ ID NO: 3049688 - RNA, 19 nt, Artificial Sequence
  Description of Artificial Sequence: Synthetic oligonucleotide
ccugcgcucuuugggcgag

SEQ ID NO: 3049689 - RNA, 19 nt, Artificial Sequence
  Description of Artificial Sequence: Synthetic oligonucleotide
ggcgacgggagcggguaga

SEQ ID NO: 3049690 - RNA, 19 nt, Artificial Sequence
  Description of Artificial Sequence: Synthetic oligonucleotide
acgcaccggaagggagucu

SEQ ID NO: 3049691 - RNA, 19 nt, Artificial Sequence
  Description of Artificial Sequence: Synthetic oligonucleotide
cgggagcggguagaguucc

SEQ ID NO: 3049692 - RNA, 19 nt, Artificial Sequence
  Description of Artificial Sequence: Synthetic oligonucleotide
cggaagggagucuagccgu

SEQ ID NO: 3049693 - RNA, 19 nt, Artificial Sequence
  Description of Artificial Sequence: Synthetic oligonucleotide
ccccuucguggcuauugca

SEQ ID NO: 3049694 - RNA, 19 nt, Artificial Sequence
  Description of Artificial Sequence: Synthetic oligonucleotide
cccuugaaggaacccucaa

SEQ ID NO: 3049695 - RNA, 19 nt, Artificial Sequence
  Description of Artificial Sequence: Synthetic oligonucleotide
ggggaggcggaaaacuuuu

SEQ ID NO: 3049696 - RNA, 19 nt, Artificial Sequence
  Description of Artificial Sequence: Synthetic oligonucleotide
gccaguucucccaguuaaa

SEQ ID NO: 3049697 - RNA, 19 nt, Artificial Sequence
  Description of Artificial Sequence: Synthetic oligonucleotide
ggcgggcgacgggagcggg

SEQ ID NO: 3049698 - RNA, 19 nt, Artificial Sequence
  Description of Artificial Sequence: Synthetic oligonucleotide
ccuuugcccaaguuucgau

SEQ ID NO: 3049699 - RNA, 19 nt, Artificial Sequence
  Description of Artificial Sequence: Synthetic oligonucleotide
cgggaauguggagcagaag

SEQ ID NO: 3049700 - RNA, 19 nt, Artificial Sequence
  Description of Artificial Sequence: Synthetic oligonucleotide
cgcaucuguguugcaguuc

SEQ ID NO: 3049701 - RNA, 19 nt, Artificial Sequence
  Description of Artificial Sequence: Synthetic oligonucleotide
gggaggcggaaaacuuuua

SEQ ID NO: 3049702 - RNA, 19 nt, Artificial Sequence
  Description of Artificial Sequence: Synthetic oligonucleotide
gcacgcaccggaagggagu

SEQ ID NO: 3049703 - RNA, 19 nt, Artificial Sequence
  Description of Artificial Sequence: Synthetic oligonucleotide
cggaaaacuuccgcccaca

SEQ ID NO: 3049704 - RNA, 19 nt, Artificial Sequence
  Description of Artificial Sequence: Synthetic oligonucleotide
ccccacggcuucggaaaac

SEQ ID NO: 3049705 - RNA, 19 nt, Artificial Sequence
  Description of Artificial Sequence: Synthetic oligonucleotide
gcgcucuuugggcgaggaa

SEQ ID NO: 3049706 - RNA, 19 nt, Artificial Sequence
  Description of Artificial Sequence: Synthetic oligonucleotide
cccacggcuucggaaaacu

SEQ ID NO: 3049707 - RNA, 19 nt, Artificial Sequence
  Description of Artificial Sequence: Synthetic oligonucleotide
ggaagggagucuagccguu

SEQ ID NO: 3049708 - RNA, 19 nt, Artificial Sequence
  Description of Artificial Sequence: Synthetic oligonucleotide
cgcaccggaagggagucua

SEQ ID NO: 3049709 - RNA, 19 nt, Artificial Sequence
  Description of Artificial Sequence: Synthetic oligonucleotide
gucuagccguuggccaguu

SEQ ID NO: 3049710 - RNA, 19 nt, Artificial Sequence
  Description of Artificial Sequence: Synthetic oligonucleotide
cccaccaggacuggauaau

SEQ ID NO: 3049711 - RNA, 19 nt, Artificial Sequence
  Description of Artificial Sequence: Synthetic oligonucleotide
ccacggcuucggaaaacuu

SEQ ID NO: 3049712 - RNA, 19 nt, Artificial Sequence
  Description of Artificial Sequence: Synthetic oligonucleotide
cgaucccaccaggacugga

SEQ ID NO: 3049713 - RNA, 19 nt, Artificial Sequence
  Description of Artificial Sequence: Synthetic oligonucleotide
cggagccuccuuugcccaa

SEQ ID NO: 3049714 - RNA, 19 nt, Artificial Sequence
  Description of Artificial Sequence: Synthetic oligonucleotide
cggguagaguuccgggaau

SEQ ID NO: 3049715 - RNA, 19 nt, Artificial Sequence
  Description of Artificial Sequence: Synthetic oligonucleotide
cgggcgacgggagcgggua

SEQ ID NO: 3049716 - RNA, 19 nt, Artificial Sequence
  Description of Artificial Sequence: Synthetic oligonucleotide
gcgggcgacgggagcgggu

SEQ ID NO: 3049717 - RNA, 19 nt, Artificial Sequence
  Description of Artificial Sequence: Synthetic oligonucleotide
cguccagcuggcgcuuugu

SEQ ID NO: 3049718 - RNA, 19 nt, Artificial Sequence
  Description of Artificial Sequence: Synthetic oligonucleotide
cgacgggagcggguagagu

SEQ ID NO: 3049719 - RNA, 19 nt, Artificial Sequence
  Description of Artificial Sequence: Synthetic oligonucleotide
gcgcguccagcuggcgcuu

SEQ ID NO: 3049720 - RNA, 19 nt, Artificial Sequence
  Description of Artificial Sequence: Synthetic oligonucleotide
ccaccccuucguggcuauu

SEQ ID NO: 3049721 - RNA, 19 nt, Artificial Sequence
  Description of Artificial Sequence: Synthetic oligonucleotide
cgcguccagcuggcgcuuu

SEQ ID NO: 3049722 - RNA, 19 nt, Artificial Sequence
  Description of Artificial Sequence: Synthetic oligonucleotide
uugaaaaugugcuacuugg

SEQ ID NO: 3049723 - RNA, 19 nt, Artificial Sequence
  Description of Artificial Sequence: Synthetic oligonucleotide
aaaugugcuacuuggagug

SEQ ID NO: 3049724 - RNA, 19 nt, Artificial Sequence
  Description of Artificial Sequence: Synthetic oligonucleotide
aaaccuaugaugcugggga

SEQ ID NO: 3049725 - RNA, 19 nt, Artificial Sequence
  Description of Artificial Sequence: Synthetic oligonucleotide
auauucuuccauuagcagg

SEQ ID NO: 3049726 - RNA, 19 nt, Artificial Sequence
  Description of Artificial Sequence: Synthetic oligonucleotide
gaagccaacagcucuaggg

SEQ ID NO: 3049727 - RNA, 19 nt, Artificial Sequence
  Description of Artificial Sequence: Synthetic oligonucleotide
uguugcauucuucagaaca

SEQ ID NO: 3049728 - RNA, 19 nt, Artificial Sequence
  Description of Artificial Sequence: Synthetic oligonucleotide
guugaaaauccacagaagc

SEQ ID NO: 3049729 - RNA, 19 nt, Artificial Sequence
  Description of Artificial Sequence: Synthetic oligonucleotide
uugaaaauccacagaagcc

SEQ ID NO: 3049730 - RNA, 19 nt, Artificial Sequence
  Description of Artificial Sequence: Synthetic oligonucleotide
acaucauuugugcuguugc

SEQ ID NO: 3049731 - RNA, 19 nt, Artificial Sequence
  Description of Artificial Sequence: Synthetic oligonucleotide
uauucuuccauuagcaggu

SEQ ID NO: 3049732 - RNA, 19 nt, Artificial Sequence
  Description of Artificial Sequence: Synthetic oligonucleotide
ugugaacuguauuuggagg

SEQ ID NO: 3049733 - RNA, 19 nt, Artificial Sequence
  Description of Artificial Sequence: Synthetic oligonucleotide
ucauuguugaaaccuauga

SEQ ID NO: 3049734 - RNA, 19 nt, Artificial Sequence
  Description of Artificial Sequence: Synthetic oligonucleotide
gauccaaccauacucauca

SEQ ID NO: 3049735 - RNA, 19 nt, Artificial Sequence
  Description of Artificial Sequence: Synthetic oligonucleotide
aagccaacagcucuagggg

SEQ ID NO: 3049736 - RNA, 19 nt, Artificial Sequence
  Description of Artificial Sequence: Synthetic oligonucleotide
cauauauucuuccauuagc

SEQ ID NO: 3049737 - RNA, 19 nt, Artificial Sequence
  Description of Artificial Sequence: Synthetic oligonucleotide
ugaaaauccacagaagcca

SEQ ID NO: 3049738 - RNA, 19 nt, Artificial Sequence
  Description of Artificial Sequence: Synthetic oligonucleotide
uugaaaccuaugaugcugg

SEQ ID NO: 3049739 - RNA, 19 nt, Artificial Sequence
  Description of Artificial Sequence: Synthetic oligonucleotide
cugguuauuuccuuuauug

SEQ ID NO: 3049740 - RNA, 19 nt, Artificial Sequence
  Description of Artificial Sequence: Synthetic oligonucleotide
aacaugaagucucccauca

SEQ ID NO: 3049741 - RNA, 19 nt, Artificial Sequence
  Description of Artificial Sequence: Synthetic oligonucleotide
cuucagaacagccugcagg

SEQ ID NO: 3049742 - RNA, 19 nt, Artificial Sequence
  Description of Artificial Sequence: Synthetic oligonucleotide
uauauucuuccauuagcag

SEQ ID NO: 3049743 - RNA, 19 nt, Artificial Sequence
  Description of Artificial Sequence: Synthetic oligonucleotide
gugaacuguauuuggaggg

SEQ ID NO: 3049744 - RNA, 19 nt, Artificial Sequence
  Description of Artificial Sequence: Synthetic oligonucleotide
auccacagaagccaacagc

SEQ ID NO: 3049745 - RNA, 19 nt, Artificial Sequence
  Description of Artificial Sequence: Synthetic oligonucleotide
acagguugaaaauccacag

SEQ ID NO: 3049746 - RNA, 19 nt, Artificial Sequence
  Description of Artificial Sequence: Synthetic oligonucleotide
uauuuggaggguuugggga

SEQ ID NO: 3049747 - RNA, 19 nt, Artificial Sequence
  Description of Artificial Sequence: Synthetic oligonucleotide
ugugcuguugcauucuuca

SEQ ID NO: 3049748 - RNA, 19 nt, Artificial Sequence
  Description of Artificial Sequence: Synthetic oligonucleotide
uguauuuggaggguuuggg

SEQ ID NO: 3049749 - RNA, 19 nt, Artificial Sequence
  Description of Artificial Sequence: Synthetic oligonucleotide
ggucacuacacucaggagg

SEQ ID NO: 3049750 - RNA, 19 nt, Artificial Sequence
  Description of Artificial Sequence: Synthetic oligonucleotide
gaggcaacaucauuugugc

SEQ ID NO: 3049751 - RNA, 19 nt, Artificial Sequence
  Description of Artificial Sequence: Synthetic oligonucleotide
guuuucucugguuauuucc

SEQ ID NO: 3049752 - RNA, 19 nt, Artificial Sequence
  Description of Artificial Sequence: Synthetic oligonucleotide
acuguuuaccaccguaggg

SEQ ID NO: 3049753 - RNA, 19 nt, Artificial Sequence
  Description of Artificial Sequence: Synthetic oligonucleotide
agguugaaaauccacagaa

SEQ ID NO: 3049754 - RNA, 19 nt, Artificial Sequence
  Description of Artificial Sequence: Synthetic oligonucleotide
uuuucucugguuauuuccu

SEQ ID NO: 3049755 - RNA, 19 nt, Artificial Sequence
  Description of Artificial Sequence: Synthetic oligonucleotide
accaccguagggaugaucc

SEQ ID NO: 3049756 - RNA, 19 nt, Artificial Sequence
  Description of Artificial Sequence: Synthetic oligonucleotide
cauucuucagaacagccug

SEQ ID NO: 3049757 - RNA, 19 nt, Artificial Sequence
  Description of Artificial Sequence: Synthetic oligonucleotide
uacucaucauuguugaaac

SEQ ID NO: 3049758 - RNA, 19 nt, Artificial Sequence
  Description of Artificial Sequence: Synthetic oligonucleotide
ucucccaucaucucuguga

SEQ ID NO: 3049759 - RNA, 19 nt, Artificial Sequence
  Description of Artificial Sequence: Synthetic oligonucleotide
aucgcaaacaugaagucuc

SEQ ID NO: 3049760 - RNA, 19 nt, Artificial Sequence
  Description of Artificial Sequence: Synthetic oligonucleotide
ugaugcuggggacagguug

SEQ ID NO: 3049761 - RNA, 19 nt, Artificial Sequence
  Description of Artificial Sequence: Synthetic oligonucleotide
ucugugaacuguauuugga

SEQ ID NO: 3049762 - RNA, 19 nt, Artificial Sequence
  Description of Artificial Sequence: Synthetic oligonucleotide
aauccacagaagccaacag

SEQ ID NO: 3049763 - RNA, 19 nt, Artificial Sequence
  Description of Artificial Sequence: Synthetic oligonucleotide
uucagaacagccugcaggu

SEQ ID NO: 3049764 - RNA, 19 nt, Artificial Sequence
  Description of Artificial Sequence: Synthetic oligonucleotide
ucuuccauuagcaggucac

SEQ ID NO: 3049765 - RNA, 19 nt, Artificial Sequence
  Description of Artificial Sequence: Synthetic oligonucleotide
ucaggaggcaacaucauuu

SEQ ID NO: 3049766 - RNA, 19 nt, Artificial Sequence
  Description of Artificial Sequence: Synthetic oligonucleotide
guauuuggaggguuugggg

SEQ ID NO: 3049767 - RNA, 19 nt, Artificial Sequence
  Description of Artificial Sequence: Synthetic oligonucleotide
ugggaucgcaaacaugaag

SEQ ID NO: 3049768 - RNA, 19 nt, Artificial Sequence
  Description of Artificial Sequence: Synthetic oligonucleotide
aaccuaugaugcuggggac

SEQ ID NO: 3049769 - RNA, 19 nt, Artificial Sequence
  Description of Artificial Sequence: Synthetic oligonucleotide
guugaaaaugugcuacuug

SEQ ID NO: 3049770 - RNA, 19 nt, Artificial Sequence
  Description of Artificial Sequence: Synthetic oligonucleotide
auauauucuuccauuagca

SEQ ID NO: 3049771 - RNA, 19 nt, Artificial Sequence
  Description of Artificial Sequence: Synthetic oligonucleotide
ugcuguugcauucuucaga

SEQ ID NO: 3049772 - RNA, 19 nt, Artificial Sequence
  Description of Artificial Sequence: Synthetic oligonucleotide
aaauccacagaagccaaca

SEQ ID NO: 3049773 - RNA, 19 nt, Artificial Sequence
  Description of Artificial Sequence: Synthetic oligonucleotide
acucaucauuguugaaacc

SEQ ID NO: 3049774 - RNA, 19 nt, Artificial Sequence
  Description of Artificial Sequence: Synthetic oligonucleotide
uccuuuauugucugggcac

SEQ ID NO: 3049775 - RNA, 19 nt, Artificial Sequence
  Description of Artificial Sequence: Synthetic oligonucleotide
uuccuuuauugucugggca

SEQ ID NO: 3049776 - RNA, 19 nt, Artificial Sequence
  Description of Artificial Sequence: Synthetic oligonucleotide
uuagcaggucacuacacuc

SEQ ID NO: 3049777 - RNA, 19 nt, Artificial Sequence
  Description of Artificial Sequence: Synthetic oligonucleotide
guugaaaccuaugaugcug

SEQ ID NO: 3049778 - RNA, 19 nt, Artificial Sequence
  Description of Artificial Sequence: Synthetic oligonucleotide
uuuccuuuauugucugggc

SEQ ID NO: 3049779 - RNA, 19 nt, Artificial Sequence
  Description of Artificial Sequence: Synthetic oligonucleotide
ugguuauuuccuuuauugu

SEQ ID NO: 3049780 - RNA, 19 nt, Artificial Sequence
  Description of Artificial Sequence: Synthetic oligonucleotide
aucucugugaacuguauuu

SEQ ID NO: 3049781 - RNA, 19 nt, Artificial Sequence
  Description of Artificial Sequence: Synthetic oligonucleotide
cucugugaacuguauuugg

SEQ ID NO: 3049782 - RNA, 19 nt, Artificial Sequence
  Description of Artificial Sequence: Synthetic oligonucleotide
aaugugcuacuuggagugc

SEQ ID NO: 3049783 - RNA, 19 nt, Artificial Sequence
  Description of Artificial Sequence: Synthetic oligonucleotide
gguuauuuccuuuauuguc

SEQ ID NO: 3049784 - RNA, 19 nt, Artificial Sequence
  Description of Artificial Sequence: Synthetic oligonucleotide
aaaauccacagaagccaac

SEQ ID NO: 3049785 - RNA, 19 nt, Artificial Sequence
  Description of Artificial Sequence: Synthetic oligonucleotide
gaaaccuaugaugcugggg

SEQ ID NO: 3049786 - RNA, 19 nt, Artificial Sequence
  Description of Artificial Sequence: Synthetic oligonucleotide
uccauuagcaggucacuac

SEQ ID NO: 3049787 - RNA, 19 nt, Artificial Sequence
  Description of Artificial Sequence: Synthetic oligonucleotide
gaugauccaaccauacuca

SEQ ID NO: 3049788 - RNA, 19 nt, Artificial Sequence
  Description of Artificial Sequence: Synthetic oligonucleotide
auuagcaggucacuacacu

SEQ ID NO: 3049789 - RNA, 19 nt, Artificial Sequence
  Description of Artificial Sequence: Synthetic oligonucleotide
acuuggagugcugggaucg

SEQ ID NO: 3049790 - RNA, 19 nt, Artificial Sequence
  Description of Artificial Sequence: Synthetic oligonucleotide
caugaagucucccaucauc

SEQ ID NO: 3049791 - RNA, 19 nt, Artificial Sequence
  Description of Artificial Sequence: Synthetic oligonucleotide
guugcauucuucagaacag

SEQ ID NO: 3049792 - RNA, 19 nt, Artificial Sequence
  Description of Artificial Sequence: Synthetic oligonucleotide
acacucaggaggcaacauc

SEQ ID NO: 3049793 - RNA, 19 nt, Artificial Sequence
  Description of Artificial Sequence: Synthetic oligonucleotide
aaccauacucaucauuguu

SEQ ID NO: 3049794 - RNA, 19 nt, Artificial Sequence
  Description of Artificial Sequence: Synthetic oligonucleotide
acagccugcagguuuucuc

SEQ ID NO: 3049795 - RNA, 19 nt, Artificial Sequence
  Description of Artificial Sequence: Synthetic oligonucleotide
uaugaugcuggggacaggu

SEQ ID NO: 3049796 - RNA, 19 nt, Artificial Sequence
  Description of Artificial Sequence: Synthetic oligonucleotide
ccaaccauacucaucauug

SEQ ID NO: 3049797 - RNA, 19 nt, Artificial Sequence
  Description of Artificial Sequence: Synthetic oligonucleotide
uagcaggucacuacacuca

SEQ ID NO: 3049798 - RNA, 19 nt, Artificial Sequence
  Description of Artificial Sequence: Synthetic oligonucleotide
ugcagguuuucucugguua

SEQ ID NO: 3049799 - RNA, 19 nt, Artificial Sequence
  Description of Artificial Sequence: Synthetic oligonucleotide
uuuggggauccucaguguc

SEQ ID NO: 3049800 - RNA, 19 nt, Artificial Sequence
  Description of Artificial Sequence: Synthetic oligonucleotide
ucaucauuguugaaaccua

SEQ ID NO: 3049801 - RNA, 19 nt, Artificial Sequence
  Description of Artificial Sequence: Synthetic oligonucleotide
ugaaaccuaugaugcuggg

SEQ ID NO: 3049802 - RNA, 19 nt, Artificial Sequence
  Description of Artificial Sequence: Synthetic oligonucleotide
ucucugugaacuguauuug

SEQ ID NO: 3049803 - RNA, 19 nt, Artificial Sequence
  Description of Artificial Sequence: Synthetic oligonucleotide
auacucaucauuguugaaa

SEQ ID NO: 3049804 - RNA, 19 nt, Artificial Sequence
  Description of Artificial Sequence: Synthetic oligonucleotide
uuggggauccucagugucc

SEQ ID NO: 3049805 - RNA, 19 nt, Artificial Sequence
  Description of Artificial Sequence: Synthetic oligonucleotide
ggcaacaucauuugugcug

SEQ ID NO: 3049806 - RNA, 19 nt, Artificial Sequence
  Description of Artificial Sequence: Synthetic oligonucleotide
uguugaaaccuaugaugcu

SEQ ID NO: 3049807 - RNA, 19 nt, Artificial Sequence
  Description of Artificial Sequence: Synthetic oligonucleotide
gacagguugaaaauccaca

SEQ ID NO: 3049808 - RNA, 19 nt, Artificial Sequence
  Description of Artificial Sequence: Synthetic oligonucleotide
accauacucaucauuguug

SEQ ID NO: 3049809 - RNA, 19 nt, Artificial Sequence
  Description of Artificial Sequence: Synthetic oligonucleotide
cacuguuuaccaccguagg

SEQ ID NO: 3049810 - RNA, 19 nt, Artificial Sequence
  Description of Artificial Sequence: Synthetic oligonucleotide
aacagcucuaggggaugcc

SEQ ID NO: 3049811 - RNA, 19 nt, Artificial Sequence
  Description of Artificial Sequence: Synthetic oligonucleotide
ugcuacuuggagugcuggg

SEQ ID NO: 3049812 - RNA, 19 nt, Artificial Sequence
  Description of Artificial Sequence: Synthetic oligonucleotide
auucuucagaacagccugc

SEQ ID NO: 3049813 - RNA, 19 nt, Artificial Sequence
  Description of Artificial Sequence: Synthetic oligonucleotide
auugucugggcacuguuua

SEQ ID NO: 3049814 - RNA, 19 nt, Artificial Sequence
  Description of Artificial Sequence: Synthetic oligonucleotide
ucuucagaacagccugcag

SEQ ID NO: 3049815 - RNA, 19 nt, Artificial Sequence
  Description of Artificial Sequence: Synthetic oligonucleotide
ucauuugugcuguugcauu

SEQ ID NO: 3049816 - RNA, 19 nt, Artificial Sequence
  Description of Artificial Sequence: Synthetic oligonucleotide
gguuuggggauccucagug

SEQ ID NO: 3049817 - RNA, 19 nt, Artificial Sequence
  Description of Artificial Sequence: Synthetic oligonucleotide
uggguaggaacucuccguc

SEQ ID NO: 3049818 - RNA, 19 nt, Artificial Sequence
  Description of Artificial Sequence: Synthetic oligonucleotide
auuuggaggguuuggggau

SEQ ID NO: 3049819 - RNA, 19 nt, Artificial Sequence
  Description of Artificial Sequence: Synthetic oligonucleotide
aagucucccaucaucucug

SEQ ID NO: 3049820 - RNA, 19 nt, Artificial Sequence
  Description of Artificial Sequence: Synthetic oligonucleotide
agcaggucacuacacucag

SEQ ID NO: 3049821 - RNA, 19 nt, Artificial Sequence
  Description of Artificial Sequence: Synthetic oligonucleotide
cacucaggaggcaacauca

SEQ ID NO: 3049822 - RNA, 19 nt, Artificial Sequence
  Description of Artificial Sequence: Synthetic oligonucleotide
uguuuaccaccguagggau

SEQ ID NO: 3049823 - RNA, 19 nt, Artificial Sequence
  Description of Artificial Sequence: Synthetic oligonucleotide
guuauuuccuuuauugucu

SEQ ID NO: 3049824 - RNA, 19 nt, Artificial Sequence
  Description of Artificial Sequence: Synthetic oligonucleotide
cuaggggaugccuggguag

SEQ ID NO: 3049825 - RNA, 19 nt, Artificial Sequence
  Description of Artificial Sequence: Synthetic oligonucleotide
augaagucucccaucaucu

SEQ ID NO: 3049826 - RNA, 19 nt, Artificial Sequence
  Description of Artificial Sequence: Synthetic oligonucleotide
ugauccaaccauacucauc

SEQ ID NO: 3049827 - RNA, 19 nt, Artificial Sequence
  Description of Artificial Sequence: Synthetic oligonucleotide
ugugcuacuuggagugcug

SEQ ID NO: 3049828 - RNA, 19 nt, Artificial Sequence
  Description of Artificial Sequence: Synthetic oligonucleotide
cauuugugcuguugcauuc

SEQ ID NO: 3049829 - RNA, 19 nt, Artificial Sequence
  Description of Artificial Sequence: Synthetic oligonucleotide
gaacucuccguccaccaca

SEQ ID NO: 3049830 - RNA, 19 nt, Artificial Sequence
  Description of Artificial Sequence: Synthetic oligonucleotide
cauuagcaggucacuacac

SEQ ID NO: 3049831 - RNA, 19 nt, Artificial Sequence
  Description of Artificial Sequence: Synthetic oligonucleotide
ucugguuauuuccuuuauu

SEQ ID NO: 3049832 - RNA, 19 nt, Artificial Sequence
  Description of Artificial Sequence: Synthetic oligonucleotide
ugucugggcacuguuuacc

SEQ ID NO: 3049833 - RNA, 19 nt, Artificial Sequence
  Description of Artificial Sequence: Synthetic oligonucleotide
caggucacuacacucagga

SEQ ID NO: 3049834 - RNA, 19 nt, Artificial Sequence
  Description of Artificial Sequence: Synthetic oligonucleotide
acuacacucaggaggcaac

SEQ ID NO: 3049835 - RNA, 19 nt, Artificial Sequence
  Description of Artificial Sequence: Synthetic oligonucleotide
agggaugauccaaccauac

SEQ ID NO: 3049836 - RNA, 19 nt, Artificial Sequence
  Description of Artificial Sequence: Synthetic oligonucleotide
ugaacuguauuuggagggu

SEQ ID NO: 3049837 - RNA, 19 nt, Artificial Sequence
  Description of Artificial Sequence: Synthetic oligonucleotide
ucgcaaacaugaagucucc

SEQ ID NO: 3049838 - RNA, 19 nt, Artificial Sequence
  Description of Artificial Sequence: Synthetic oligonucleotide
uuuauugucugggcacugu

SEQ ID NO: 3049839 - RNA, 19 nt, Artificial Sequence
  Description of Artificial Sequence: Synthetic oligonucleotide
uccaaccauacucaucauu

SEQ ID NO: 3049840 - RNA, 19 nt, Artificial Sequence
  Description of Artificial Sequence: Synthetic oligonucleotide
ucucugguuauuuccuuua

SEQ ID NO: 3049841 - RNA, 19 nt, Artificial Sequence
  Description of Artificial Sequence: Synthetic oligonucleotide
ucuaggggaugccugggua

SEQ ID NO: 3049842 - RNA, 19 nt, Artificial Sequence
  Description of Artificial Sequence: Synthetic oligonucleotide
cuguuuaccaccguaggga

SEQ ID NO: 3049843 - RNA, 19 nt, Artificial Sequence
  Description of Artificial Sequence: Synthetic oligonucleotide
caggaggcaacaucauuug

SEQ ID NO: 3049844 - RNA, 19 nt, Artificial Sequence
  Description of Artificial Sequence: Synthetic oligonucleotide
gaagucucccaucaucucu

SEQ ID NO: 3049845 - RNA, 19 nt, Artificial Sequence
  Description of Artificial Sequence: Synthetic oligonucleotide
gcugggaucgcaaacauga

SEQ ID NO: 3049846 - RNA, 19 nt, Artificial Sequence
  Description of Artificial Sequence: Synthetic oligonucleotide
acuguauuuggaggguuug

SEQ ID NO: 3049847 - RNA, 19 nt, Artificial Sequence
  Description of Artificial Sequence: Synthetic oligonucleotide
uucuucagaacagccugca

SEQ ID NO: 3049848 - RNA, 19 nt, Artificial Sequence
  Description of Artificial Sequence: Synthetic oligonucleotide
agaagccaacagcucuagg

SEQ ID NO: 3049849 - RNA, 19 nt, Artificial Sequence
  Description of Artificial Sequence: Synthetic oligonucleotide
ggaggcaacaucauuugug

SEQ ID NO: 3049850 - RNA, 19 nt, Artificial Sequence
  Description of Artificial Sequence: Synthetic oligonucleotide
uaggggaugccuggguagg

SEQ ID NO: 3049851 - RNA, 19 nt, Artificial Sequence
  Description of Artificial Sequence: Synthetic oligonucleotide
uagggaugauccaaccaua

SEQ ID NO: 3049852 - RNA, 19 nt, Artificial Sequence
  Description of Artificial Sequence: Synthetic oligonucleotide
cuguauuuggaggguuugg

SEQ ID NO: 3049853 - RNA, 19 nt, Artificial Sequence
  Description of Artificial Sequence: Synthetic oligonucleotide
aucauuguugaaaccuaug

SEQ ID NO: 3049854 - RNA, 19 nt, Artificial Sequence
  Description of Artificial Sequence: Synthetic oligonucleotide
guagggaugauccaaccau

SEQ ID NO: 3049855 - RNA, 19 nt, Artificial Sequence
  Description of Artificial Sequence: Synthetic oligonucleotide
ucaucucugugaacuguau

SEQ ID NO: 3049856 - RNA, 19 nt, Artificial Sequence
  Description of Artificial Sequence: Synthetic oligonucleotide
cucaucauuguugaaaccu

SEQ ID NO: 3049857 - RNA, 19 nt, Artificial Sequence
  Description of Artificial Sequence: Synthetic oligonucleotide
gaaaauccacagaagccaa

SEQ ID NO: 3049858 - RNA, 19 nt, Artificial Sequence
  Description of Artificial Sequence: Synthetic oligonucleotide
ugaagucucccaucaucuc

SEQ ID NO: 3049859 - RNA, 19 nt, Artificial Sequence
  Description of Artificial Sequence: Synthetic oligonucleotide
uggggauccucaguguccc

SEQ ID NO: 3049860 - RNA, 19 nt, Artificial Sequence
  Description of Artificial Sequence: Synthetic oligonucleotide
ugcugggaucgcaaacaug

SEQ ID NO: 3049861 - RNA, 19 nt, Artificial Sequence
  Description of Artificial Sequence: Synthetic oligonucleotide
ccauauauucuuccauuag

SEQ ID NO: 3049862 - RNA, 19 nt, Artificial Sequence
  Description of Artificial Sequence: Synthetic oligonucleotide
uucucugguuauuuccuuu

SEQ ID NO: 3049863 - RNA, 19 nt, Artificial Sequence
  Description of Artificial Sequence: Synthetic oligonucleotide
aucauuugugcuguugcau

SEQ ID NO: 3049864 - RNA, 19 nt, Artificial Sequence
  Description of Artificial Sequence: Synthetic oligonucleotide
agccaacagcucuagggga

SEQ ID NO: 3049865 - RNA, 19 nt, Artificial Sequence
  Description of Artificial Sequence: Synthetic oligonucleotide
accguagggaugauccaac

SEQ ID NO: 3049866 - RNA, 19 nt, Artificial Sequence
  Description of Artificial Sequence: Synthetic oligonucleotide
ggcguugaaaaugugcuac

SEQ ID NO: 3049867 - RNA, 19 nt, Artificial Sequence
  Description of Artificial Sequence: Synthetic oligonucleotide
gaugcuggggacagguuga

SEQ ID NO: 3049868 - RNA, 19 nt, Artificial Sequence
  Description of Artificial Sequence: Synthetic oligonucleotide
aggucacuacacucaggag

SEQ ID NO: 3049869 - RNA, 19 nt, Artificial Sequence
  Description of Artificial Sequence: Synthetic oligonucleotide
uggagugcugggaucgcaa

SEQ ID NO: 3049870 - RNA, 19 nt, Artificial Sequence
  Description of Artificial Sequence: Synthetic oligonucleotide
aggaacucuccguccacca

SEQ ID NO: 3049871 - RNA, 19 nt, Artificial Sequence
  Description of Artificial Sequence: Synthetic oligonucleotide
uaggaacucuccguccacc

SEQ ID NO: 3049872 - RNA, 19 nt, Artificial Sequence
  Description of Artificial Sequence: Synthetic oligonucleotide
caucauuugugcuguugca

SEQ ID NO: 3049873 - RNA, 19 nt, Artificial Sequence
  Description of Artificial Sequence: Synthetic oligonucleotide
uuucucugguuauuuccuu

SEQ ID NO: 3049874 - RNA, 19 nt, Artificial Sequence
  Description of Artificial Sequence: Synthetic oligonucleotide
uuugugcuguugcauucuu

SEQ ID NO: 3049875 - RNA, 19 nt, Artificial Sequence
  Description of Artificial Sequence: Synthetic oligonucleotide
gaggguuuggggauccuca

SEQ ID NO: 3049876 - RNA, 19 nt, Artificial Sequence
  Description of Artificial Sequence: Synthetic oligonucleotide
uugugcuguugcauucuuc

SEQ ID NO: 3049877 - RNA, 19 nt, Artificial Sequence
  Description of Artificial Sequence: Synthetic oligonucleotide
uugucugggcacuguuuac

SEQ ID NO: 3049878 - RNA, 19 nt, Artificial Sequence
  Description of Artificial Sequence: Synthetic oligonucleotide
ggggacagguugaaaaucc

SEQ ID NO: 3049879 - RNA, 19 nt, Artificial Sequence
  Description of Artificial Sequence: Synthetic oligonucleotide
aggaggcaacaucauuugu

SEQ ID NO: 3049880 - RNA, 19 nt, Artificial Sequence
  Description of Artificial Sequence: Synthetic oligonucleotide
aacuguauuuggaggguuu

SEQ ID NO: 3049881 - RNA, 19 nt, Artificial Sequence
  Description of Artificial Sequence: Synthetic oligonucleotide
uggggacagguugaaaauc

SEQ ID NO: 3049882 - RNA, 19 nt, Artificial Sequence
  Description of Artificial Sequence: Synthetic oligonucleotide
aggcaacaucauuugugcu

SEQ ID NO: 3049883 - RNA, 19 nt, Artificial Sequence
  Description of Artificial Sequence: Synthetic oligonucleotide
gaucgcaaacaugaagucu

SEQ ID NO: 3049884 - RNA, 19 nt, Artificial Sequence
  Description of Artificial Sequence: Synthetic oligonucleotide
gguaggaacucuccgucca

SEQ ID NO: 3049885 - RNA, 19 nt, Artificial Sequence
  Description of Artificial Sequence: Synthetic oligonucleotide
uacuuggagugcugggauc

SEQ ID NO: 3049886 - RNA, 19 nt, Artificial Sequence
  Description of Artificial Sequence: Synthetic oligonucleotide
cagguugaaaauccacaga

SEQ ID NO: 3049887 - RNA, 19 nt, Artificial Sequence
  Description of Artificial Sequence: Synthetic oligonucleotide
cauuguugaaaccuaugau

SEQ ID NO: 3049888 - RNA, 19 nt, Artificial Sequence
  Description of Artificial Sequence: Synthetic oligonucleotide
cuuuauugucugggcacug

SEQ ID NO: 3049889 - RNA, 19 nt, Artificial Sequence
  Description of Artificial Sequence: Synthetic oligonucleotide
gugcuacuuggagugcugg

SEQ ID NO: 3049890 - RNA, 19 nt, Artificial Sequence
  Description of Artificial Sequence: Synthetic oligonucleotide
cacagaagccaacagcucu

SEQ ID NO: 3049891 - RNA, 19 nt, Artificial Sequence
  Description of Artificial Sequence: Synthetic oligonucleotide
gaugccuggguaggaacuc

SEQ ID NO: 3049892 - RNA, 19 nt, Artificial Sequence
  Description of Artificial Sequence: Synthetic oligonucleotide
ggaucgcaaacaugaaguc

SEQ ID NO: 3049893 - RNA, 19 nt, Artificial Sequence
  Description of Artificial Sequence: Synthetic oligonucleotide
gucugggcacuguuuacca

SEQ ID NO: 3049894 - RNA, 19 nt, Artificial Sequence
  Description of Artificial Sequence: Synthetic oligonucleotide
acagcucuaggggaugccu

SEQ ID NO: 3049895 - RNA, 19 nt, Artificial Sequence
  Description of Artificial Sequence: Synthetic oligonucleotide
accuaugaugcuggggaca

SEQ ID NO: 3049896 - RNA, 19 nt, Artificial Sequence
  Description of Artificial Sequence: Synthetic oligonucleotide
aacagccugcagguuuucu

SEQ ID NO: 3049897 - RNA, 19 nt, Artificial Sequence
  Description of Artificial Sequence: Synthetic oligonucleotide
cagcucuaggggaugccug

SEQ ID NO: 3049898 - RNA, 19 nt, Artificial Sequence
  Description of Artificial Sequence: Synthetic oligonucleotide
gguuuucucugguuauuuc

SEQ ID NO: 3049899 - RNA, 19 nt, Artificial Sequence
  Description of Artificial Sequence: Synthetic oligonucleotide
auucuuccauuagcagguc

SEQ ID NO: 3049900 - RNA, 19 nt, Artificial Sequence
  Description of Artificial Sequence: Synthetic oligonucleotide
ccauacucaucauuguuga

SEQ ID NO: 3049901 - RNA, 19 nt, Artificial Sequence
  Description of Artificial Sequence: Synthetic oligonucleotide
guaggaacucuccguccac

SEQ ID NO: 3049902 - RNA, 19 nt, Artificial Sequence
  Description of Artificial Sequence: Synthetic oligonucleotide
ccuggguaggaacucuccg

SEQ ID NO: 3049903 - RNA, 19 nt, Artificial Sequence
  Description of Artificial Sequence: Synthetic oligonucleotide
uuuggaggguuuggggauc

SEQ ID NO: 3049904 - RNA, 19 nt, Artificial Sequence
  Description of Artificial Sequence: Synthetic oligonucleotide
augugcuacuuggagugcu

SEQ ID NO: 3049905 - RNA, 19 nt, Artificial Sequence
  Description of Artificial Sequence: Synthetic oligonucleotide
gcacuguuuaccaccguag

SEQ ID NO: 3049906 - RNA, 19 nt, Artificial Sequence
  Description of Artificial Sequence: Synthetic oligonucleotide
gggaucgcaaacaugaagu

SEQ ID NO: 3049907 - RNA, 19 nt, Artificial Sequence
  Description of Artificial Sequence: Synthetic oligonucleotide
agccugcagguuuucucug

SEQ ID NO: 3049908 - RNA, 19 nt, Artificial Sequence
  Description of Artificial Sequence: Synthetic oligonucleotide
acaugaagucucccaucau

SEQ ID NO: 3049909 - RNA, 19 nt, Artificial Sequence
  Description of Artificial Sequence: Synthetic oligonucleotide
uuggagugcugggaucgca

SEQ ID NO: 3049910 - RNA, 19 nt, Artificial Sequence
  Description of Artificial Sequence: Synthetic oligonucleotide
ugccuggguaggaacucuc

SEQ ID NO: 3049911 - RNA, 19 nt, Artificial Sequence
  Description of Artificial Sequence: Synthetic oligonucleotide
cagaagccaacagcucuag

SEQ ID NO: 3049912 - RNA, 19 nt, Artificial Sequence
  Description of Artificial Sequence: Synthetic oligonucleotide
caacagcucuaggggaugc

SEQ ID NO: 3049913 - RNA, 19 nt, Artificial Sequence
  Description of Artificial Sequence: Synthetic oligonucleotide
ccuaugaugcuggggacag

SEQ ID NO: 3049914 - RNA, 19 nt, Artificial Sequence
  Description of Artificial Sequence: Synthetic oligonucleotide
cucccaucaucucugugaa

SEQ ID NO: 3049915 - RNA, 19 nt, Artificial Sequence
  Description of Artificial Sequence: Synthetic oligonucleotide
agguuuucucugguuauuu

SEQ ID NO: 3049916 - RNA, 19 nt, Artificial Sequence
  Description of Artificial Sequence: Synthetic oligonucleotide
uacacucaggaggcaacau

SEQ ID NO: 3049917 - RNA, 19 nt, Artificial Sequence
  Description of Artificial Sequence: Synthetic oligonucleotide
ggguaggaacucuccgucc

SEQ ID NO: 3049918 - RNA, 19 nt, Artificial Sequence
  Description of Artificial Sequence: Synthetic oligonucleotide
ggacagguugaaaauccac

SEQ ID NO: 3049919 - RNA, 19 nt, Artificial Sequence
  Description of Artificial Sequence: Synthetic oligonucleotide
cuguugcauucuucagaac

SEQ ID NO: 3049920 - RNA, 19 nt, Artificial Sequence
  Description of Artificial Sequence: Synthetic oligonucleotide
gccugcagguuuucucugg

SEQ ID NO: 3049921 - RNA, 19 nt, Artificial Sequence
  Description of Artificial Sequence: Synthetic oligonucleotide
agucucccaucaucucugu

SEQ ID NO: 3049922 - RNA, 19 nt, Artificial Sequence
  Description of Artificial Sequence: Synthetic oligonucleotide
aucaucucugugaacugua

SEQ ID NO: 3049923 - RNA, 19 nt, Artificial Sequence
  Description of Artificial Sequence: Synthetic oligonucleotide
acagaagccaacagcucua

SEQ ID NO: 3049924 - RNA, 19 nt, Artificial Sequence
  Description of Artificial Sequence: Synthetic oligonucleotide
agaacagccugcagguuuu

SEQ ID NO: 3049925 - RNA, 19 nt, Artificial Sequence
  Description of Artificial Sequence: Synthetic oligonucleotide
cuaugaugcuggggacagg

SEQ ID NO: 3049926 - RNA, 19 nt, Artificial Sequence
  Description of Artificial Sequence: Synthetic oligonucleotide
cauacucaucauuguugaa

SEQ ID NO: 3049927 - RNA, 19 nt, Artificial Sequence
  Description of Artificial Sequence: Synthetic oligonucleotide
caucauuguugaaaccuau

SEQ ID NO: 3049928 - RNA, 19 nt, Artificial Sequence
  Description of Artificial Sequence: Synthetic oligonucleotide
cuuggagugcugggaucgc

SEQ ID NO: 3049929 - RNA, 19 nt, Artificial Sequence
  Description of Artificial Sequence: Synthetic oligonucleotide
ccauuagcaggucacuaca

SEQ ID NO: 3049930 - RNA, 19 nt, Artificial Sequence
  Description of Artificial Sequence: Synthetic oligonucleotide
gcuacuuggagugcuggga

SEQ ID NO: 3049931 - RNA, 19 nt, Artificial Sequence
  Description of Artificial Sequence: Synthetic oligonucleotide
cuggguaggaacucuccgu

SEQ ID NO: 3049932 - RNA, 19 nt, Artificial Sequence
  Description of Artificial Sequence: Synthetic oligonucleotide
cuacacucaggaggcaaca

SEQ ID NO: 3049933 - RNA, 19 nt, Artificial Sequence
  Description of Artificial Sequence: Synthetic oligonucleotide
ucccaucaucucugugaac

SEQ ID NO: 3049934 - RNA, 19 nt, Artificial Sequence
  Description of Artificial Sequence: Synthetic oligonucleotide
ggcacuguuuaccaccgua

SEQ ID NO: 3049935 - RNA, 19 nt, Artificial Sequence
  Description of Artificial Sequence: Synthetic oligonucleotide
caaccauacucaucauugu

SEQ ID NO: 3049936 - RNA, 19 nt, Artificial Sequence
  Description of Artificial Sequence: Synthetic oligonucleotide
ggaacucuccguccaccac

SEQ ID NO: 3049937 - RNA, 19 nt, Artificial Sequence
  Description of Artificial Sequence: Synthetic oligonucleotide
ccaucaucucugugaacug

SEQ ID NO: 3049938 - RNA, 19 nt, Artificial Sequence
  Description of Artificial Sequence: Synthetic oligonucleotide
ucacuacacucaggaggca

SEQ ID NO: 3049939 - RNA, 19 nt, Artificial Sequence
  Description of Artificial Sequence: Synthetic oligonucleotide
guuuggggauccucagugu

SEQ ID NO: 3049940 - RNA, 19 nt, Artificial Sequence
  Description of Artificial Sequence: Synthetic oligonucleotide
gcaacaucauuugugcugu

SEQ ID NO: 3049941 - RNA, 19 nt, Artificial Sequence
  Description of Artificial Sequence: Synthetic oligonucleotide
cagccugcagguuuucucu

SEQ ID NO: 3049942 - RNA, 19 nt, Artificial Sequence
  Description of Artificial Sequence: Synthetic oligonucleotide
ggggcguugaaaaugugcu

SEQ ID NO: 3049943 - RNA, 19 nt, Artificial Sequence
  Description of Artificial Sequence: Synthetic oligonucleotide
auccaaccauacucaucau

SEQ ID NO: 3049944 - RNA, 19 nt, Artificial Sequence
  Description of Artificial Sequence: Synthetic oligonucleotide
augccuggguaggaacucu

SEQ ID NO: 3049945 - RNA, 19 nt, Artificial Sequence
  Description of Artificial Sequence: Synthetic oligonucleotide
ccguagggaugauccaacc

SEQ ID NO: 3049946 - RNA, 19 nt, Artificial Sequence
  Description of Artificial Sequence: Synthetic oligonucleotide
cuacuuggagugcugggau

SEQ ID NO: 3049947 - RNA, 19 nt, Artificial Sequence
  Description of Artificial Sequence: Synthetic oligonucleotide
cagaacagccugcagguuu

SEQ ID NO: 3049948 - RNA, 19 nt, Artificial Sequence
  Description of Artificial Sequence: Synthetic oligonucleotide
cacuacacucaggaggcaa

SEQ ID NO: 3049949 - RNA, 19 nt, Artificial Sequence
  Description of Artificial Sequence: Synthetic oligonucleotide
cccaucaucucugugaacu

SEQ ID NO: 3049950 - RNA, 19 nt, Artificial Sequence
  Description of Artificial Sequence: Synthetic oligonucleotide
caccguagggaugauccaa

SEQ ID NO: 3049951 - RNA, 19 nt, Artificial Sequence
  Description of Artificial Sequence: Synthetic oligonucleotide
cugggaucgcaaacaugaa

SEQ ID NO: 3049952 - RNA, 19 nt, Artificial Sequence
  Description of Artificial Sequence: Synthetic oligonucleotide
acucaggaggcaacaucau

SEQ ID NO: 3049953 - RNA, 19 nt, Artificial Sequence
  Description of Artificial Sequence: Synthetic oligonucleotide
caucaucucugugaacugu

SEQ ID NO: 3049954 - RNA, 19 nt, Artificial Sequence
  Description of Artificial Sequence: Synthetic oligonucleotide
uaccaccguagggaugauc

SEQ ID NO: 3049955 - RNA, 19 nt, Artificial Sequence
  Description of Artificial Sequence: Synthetic oligonucleotide
gcaggucacuacacucagg

SEQ ID NO: 3049956 - RNA, 19 nt, Artificial Sequence
  Description of Artificial Sequence: Synthetic oligonucleotide
gaacuguauuuggaggguu

SEQ ID NO: 3049957 - RNA, 19 nt, Artificial Sequence
  Description of Artificial Sequence: Synthetic oligonucleotide
gcucuaggggaugccuggg

SEQ ID NO: 3049958 - RNA, 19 nt, Artificial Sequence
  Description of Artificial Sequence: Synthetic oligonucleotide
gggacagguugaaaaucca

SEQ ID NO: 3049959 - RNA, 19 nt, Artificial Sequence
  Description of Artificial Sequence: Synthetic oligonucleotide
ggagugcugggaucgcaaa

SEQ ID NO: 3049960 - RNA, 19 nt, Artificial Sequence
  Description of Artificial Sequence: Synthetic oligonucleotide
cuuccauuagcaggucacu

SEQ ID NO: 3049961 - RNA, 19 nt, Artificial Sequence
  Description of Artificial Sequence: Synthetic oligonucleotide
ugcuggggacagguugaaa

SEQ ID NO: 3049962 - RNA, 19 nt, Artificial Sequence
  Description of Artificial Sequence: Synthetic oligonucleotide
aggggaugccuggguagga

SEQ ID NO: 3049963 - RNA, 19 nt, Artificial Sequence
  Description of Artificial Sequence: Synthetic oligonucleotide
ggaggguuuggggauccuc

SEQ ID NO: 3049964 - RNA, 19 nt, Artificial Sequence
  Description of Artificial Sequence: Synthetic oligonucleotide
gaacagccugcagguuuuc

SEQ ID NO: 3049965 - RNA, 19 nt, Artificial Sequence
  Description of Artificial Sequence: Synthetic oligonucleotide
caucucugugaacuguauu

SEQ ID NO: 3049966 - RNA, 19 nt, Artificial Sequence
  Description of Artificial Sequence: Synthetic oligonucleotide
gcagguuuucucugguuau

SEQ ID NO: 3049967 - RNA, 19 nt, Artificial Sequence
  Description of Artificial Sequence: Synthetic oligonucleotide
gccuggguaggaacucucc

SEQ ID NO: 3049968 - RNA, 19 nt, Artificial Sequence
  Description of Artificial Sequence: Synthetic oligonucleotide
cucugguuauuuccuuuau

SEQ ID NO: 3049969 - RNA, 19 nt, Artificial Sequence
  Description of Artificial Sequence: Synthetic oligonucleotide
cucaggaggcaacaucauu

SEQ ID NO: 3049970 - RNA, 19 nt, Artificial Sequence
  Description of Artificial Sequence: Synthetic oligonucleotide
cguagggaugauccaacca

SEQ ID NO: 3049971 - RNA, 19 nt, Artificial Sequence
  Description of Artificial Sequence: Synthetic oligonucleotide
gggcguugaaaaugugcua

SEQ ID NO: 3049972 - RNA, 19 nt, Artificial Sequence
  Description of Artificial Sequence: Synthetic oligonucleotide
uggaggguuuggggauccu

SEQ ID NO: 3049973 - RNA, 19 nt, Artificial Sequence
  Description of Artificial Sequence: Synthetic oligonucleotide
gcguugaaaaugugcuacu

SEQ ID NO: 3049974 - RNA, 19 nt, Artificial Sequence
  Description of Artificial Sequence: Synthetic oligonucleotide
gugcugggaucgcaaacau

SEQ ID NO: 3049975 - RNA, 19 nt, Artificial Sequence
  Description of Artificial Sequence: Synthetic oligonucleotide
ccaacagcucuaggggaug

SEQ ID NO: 3049976 - RNA, 19 nt, Artificial Sequence
  Description of Artificial Sequence: Synthetic oligonucleotide
cucuaggggaugccugggu

SEQ ID NO: 3049977 - RNA, 19 nt, Artificial Sequence
  Description of Artificial Sequence: Synthetic oligonucleotide
augcuggggacagguugaa

SEQ ID NO: 3049978 - RNA, 19 nt, Artificial Sequence
  Description of Artificial Sequence: Synthetic oligonucleotide
ggaugccuggguaggaacu

SEQ ID NO: 3049979 - RNA, 19 nt, Artificial Sequence
  Description of Artificial Sequence: Synthetic oligonucleotide
augaugcuggggacagguu

SEQ ID NO: 3049980 - RNA, 19 nt, Artificial Sequence
  Description of Artificial Sequence: Synthetic oligonucleotide
cgcaaacaugaagucuccc

SEQ ID NO: 3049981 - RNA, 19 nt, Artificial Sequence
  Description of Artificial Sequence: Synthetic oligonucleotide
uuaccaccguagggaugau

SEQ ID NO: 3049982 - RNA, 19 nt, Artificial Sequence
  Description of Artificial Sequence: Synthetic oligonucleotide
ccccauauauucuuccauu

SEQ ID NO: 3049983 - RNA, 19 nt, Artificial Sequence
  Description of Artificial Sequence: Synthetic oligonucleotide
ccuuuauugucugggcacu

SEQ ID NO: 3049984 - RNA, 19 nt, Artificial Sequence
  Description of Artificial Sequence: Synthetic oligonucleotide
ggggaugccuggguaggaa

SEQ ID NO: 3049985 - RNA, 19 nt, Artificial Sequence
  Description of Artificial Sequence: Synthetic oligonucleotide
ccaccguagggaugaucca

SEQ ID NO: 3049986 - RNA, 19 nt, Artificial Sequence
  Description of Artificial Sequence: Synthetic oligonucleotide
cugcagguuuucucugguu

SEQ ID NO: 3049987 - RNA, 19 nt, Artificial Sequence
  Description of Artificial Sequence: Synthetic oligonucleotide
cagguuuucucugguuauu

SEQ ID NO: 3049988 - RNA, 19 nt, Artificial Sequence
  Description of Artificial Sequence: Synthetic oligonucleotide
gccaacagcucuaggggau

SEQ ID NO: 3049989 - RNA, 19 nt, Artificial Sequence
  Description of Artificial Sequence: Synthetic oligonucleotide
ccugcagguuuucucuggu

SEQ ID NO: 3049990 - RNA, 19 nt, Artificial Sequence
  Description of Artificial Sequence: Synthetic oligonucleotide
cguugaaaaugugcuacuu

SEQ ID NO: 3049991 - RNA, 19 nt, Artificial Sequence
  Description of Artificial Sequence: Synthetic oligonucleotide
gggcacuguuuaccaccgu

SEQ ID NO: 3049992 - RNA, 19 nt, Artificial Sequence
  Description of Artificial Sequence: Synthetic oligonucleotide
auuuucaauaaauaguccc

SEQ ID NO: 3049993 - RNA, 19 nt, Artificial Sequence
  Description of Artificial Sequence: Synthetic oligonucleotide
ucaaauauguuuauagucu

SEQ ID NO: 3049994 - RNA, 19 nt, Artificial Sequence
  Description of Artificial Sequence: Synthetic oligonucleotide
cuuucaaauauguuuauag

SEQ ID NO: 3049995 - RNA, 19 nt, Artificial Sequence
  Description of Artificial Sequence: Synthetic oligonucleotide
aauaaauagucccaccaug

SEQ ID NO: 3049996 - RNA, 19 nt, Artificial Sequence
  Description of Artificial Sequence: Synthetic oligonucleotide
ugagccaucagacuuuugg

SEQ ID NO: 3049997 - RNA, 19 nt, Artificial Sequence
  Description of Artificial Sequence: Synthetic oligonucleotide
ucgauaauugggcagauca

SEQ ID NO: 3049998 - RNA, 19 nt, Artificial Sequence
  Description of Artificial Sequence: Synthetic oligonucleotide
uuaacaauugugcuuguca

SEQ ID NO: 3049999 - RNA, 19 nt, Artificial Sequence
  Description of Artificial Sequence: Synthetic oligonucleotide
acauuuucaauaaauaguc

SEQ ID NO: 3050000 - RNA, 19 nt, Artificial Sequence
  Description of Artificial Sequence: Synthetic oligonucleotide
uuuucaauaaauaguccca

SEQ ID NO: 3050001 - RNA, 19 nt, Artificial Sequence
  Description of Artificial Sequence: Synthetic oligonucleotide
uucaaauauguuuauaguc

SEQ ID NO: 3050002 - RNA, 19 nt, Artificial Sequence
  Description of Artificial Sequence: Synthetic oligonucleotide
ugauguuucuuucaaauau

SEQ ID NO: 3050003 - RNA, 19 nt, Artificial Sequence
  Description of Artificial Sequence: Synthetic oligonucleotide
aucacugcacucuauuagc

SEQ ID NO: 3050004 - RNA, 19 nt, Artificial Sequence
  Description of Artificial Sequence: Synthetic oligonucleotide
aauugggcagaucacucuc

SEQ ID NO: 3050005 - RNA, 19 nt, Artificial Sequence
  Description of Artificial Sequence: Synthetic oligonucleotide
aaauagucccaccauguca

SEQ ID NO: 3050006 - RNA, 19 nt, Artificial Sequence
  Description of Artificial Sequence: Synthetic oligonucleotide
uuuauagucuccuccagcu

SEQ ID NO: 3050007 - RNA, 19 nt, Artificial Sequence
  Description of Artificial Sequence: Synthetic oligonucleotide
aaucuucucguggugaugg

SEQ ID NO: 3050008 - RNA, 19 nt, Artificial Sequence
  Description of Artificial Sequence: Synthetic oligonucleotide
uauagucuccuccagcugc

SEQ ID NO: 3050009 - RNA, 19 nt, Artificial Sequence
  Description of Artificial Sequence: Synthetic oligonucleotide
aauagucccaccaugucag

SEQ ID NO: 3050010 - RNA, 19 nt, Artificial Sequence
  Description of Artificial Sequence: Synthetic oligonucleotide
ugaugguucuccaaguccc

SEQ ID NO: 3050011 - RNA, 19 nt, Artificial Sequence
  Description of Artificial Sequence: Synthetic oligonucleotide
aauauguuuauagucuccu

SEQ ID NO: 3050012 - RNA, 19 nt, Artificial Sequence
  Description of Artificial Sequence: Synthetic oligonucleotide
acggcauuaacaauugugc

SEQ ID NO: 3050013 - RNA, 19 nt, Artificial Sequence
  Description of Artificial Sequence: Synthetic oligonucleotide
ugcuugucacaaaagacgc

SEQ ID NO: 3050014 - RNA, 19 nt, Artificial Sequence
  Description of Artificial Sequence: Synthetic oligonucleotide
uucuucucgauaauugggc

SEQ ID NO: 3050015 - RNA, 19 nt, Artificial Sequence
  Description of Artificial Sequence: Synthetic oligonucleotide
aauugugcuugucacaaaa

SEQ ID NO: 3050016 - RNA, 19 nt, Artificial Sequence
  Description of Artificial Sequence: Synthetic oligonucleotide
ucuauuagcuucuucucga

SEQ ID NO: 3050017 - RNA, 19 nt, Artificial Sequence
  Description of Artificial Sequence: Synthetic oligonucleotide
aucaggcaaguccucaucc

SEQ ID NO: 3050018 - RNA, 19 nt, Artificial Sequence
  Description of Artificial Sequence: Synthetic oligonucleotide
acugcacucuauuagcuuc

SEQ ID NO: 3050019 - RNA, 19 nt, Artificial Sequence
  Description of Artificial Sequence: Synthetic oligonucleotide
ugugcuugucacaaaagac

SEQ ID NO: 3050020 - RNA, 19 nt, Artificial Sequence
  Description of Artificial Sequence: Synthetic oligonucleotide
uuggacauuuucaauaaau

SEQ ID NO: 3050021 - RNA, 19 nt, Artificial Sequence
  Description of Artificial Sequence: Synthetic oligonucleotide
auuagcuucuucucgauaa

SEQ ID NO: 3050022 - RNA, 19 nt, Artificial Sequence
  Description of Artificial Sequence: Synthetic oligonucleotide
agugauguuucuuucaaau

SEQ ID NO: 3050023 - RNA, 19 nt, Artificial Sequence
  Description of Artificial Sequence: Synthetic oligonucleotide
ggacauuuucaauaaauag

SEQ ID NO: 3050024 - RNA, 19 nt, Artificial Sequence
  Description of Artificial Sequence: Synthetic oligonucleotide
uugugcuugucacaaaaga

SEQ ID NO: 3050025 - RNA, 19 nt, Artificial Sequence
  Description of Artificial Sequence: Synthetic oligonucleotide
uccaucucguucuugagga

SEQ ID NO: 3050026 - RNA, 19 nt, Artificial Sequence
  Description of Artificial Sequence: Synthetic oligonucleotide
uaacaauugugcuugucac

SEQ ID NO: 3050027 - RNA, 19 nt, Artificial Sequence
  Description of Artificial Sequence: Synthetic oligonucleotide
agugaugucaucacugcac

SEQ ID NO: 3050028 - RNA, 19 nt, Artificial Sequence
  Description of Artificial Sequence: Synthetic oligonucleotide
gaucuccagaaucuucucg

SEQ ID NO: 3050029 - RNA, 19 nt, Artificial Sequence
  Description of Artificial Sequence: Synthetic oligonucleotide
aaaagacgcccgcacauca

SEQ ID NO: 3050030 - RNA, 19 nt, Artificial Sequence
  Description of Artificial Sequence: Synthetic oligonucleotide
ucaugcgaugccccgacgg

SEQ ID NO: 3050031 - RNA, 19 nt, Artificial Sequence
  Description of Artificial Sequence: Synthetic oligonucleotide
cucuauuagcuucuucucg

SEQ ID NO: 3050032 - RNA, 19 nt, Artificial Sequence
  Description of Artificial Sequence: Synthetic oligonucleotide
cauuuucaauaaauagucc

SEQ ID NO: 3050033 - RNA, 19 nt, Artificial Sequence
  Description of Artificial Sequence: Synthetic oligonucleotide
gugcuugucacaaaagacg

SEQ ID NO: 3050034 - RNA, 19 nt, Artificial Sequence
  Description of Artificial Sequence: Synthetic oligonucleotide
uucaauaaauagucccacc

SEQ ID NO: 3050035 - RNA, 19 nt, Artificial Sequence
  Description of Artificial Sequence: Synthetic oligonucleotide
uucuugaggaucuucucca

SEQ ID NO: 3050036 - RNA, 19 nt, Artificial Sequence
  Description of Artificial Sequence: Synthetic oligonucleotide
acucuauuagcuucuucuc

SEQ ID NO: 3050037 - RNA, 19 nt, Artificial Sequence
  Description of Artificial Sequence: Synthetic oligonucleotide
aacaauugugcuugucaca

SEQ ID NO: 3050038 - RNA, 19 nt, Artificial Sequence
  Description of Artificial Sequence: Synthetic oligonucleotide
uguuuauagucuccuccag

SEQ ID NO: 3050039 - RNA, 19 nt, Artificial Sequence
  Description of Artificial Sequence: Synthetic oligonucleotide
uggacauuuucaauaaaua

SEQ ID NO: 3050040 - RNA, 19 nt, Artificial Sequence
  Description of Artificial Sequence: Synthetic oligonucleotide
caaauauguuuauagucuc

SEQ ID NO: 3050041 - RNA, 19 nt, Artificial Sequence
  Description of Artificial Sequence: Synthetic oligonucleotide
uugaacaggucagugaugu

SEQ ID NO: 3050042 - RNA, 19 nt, Artificial Sequence
  Description of Artificial Sequence: Synthetic oligonucleotide
ucauccaucucguucuuga

SEQ ID NO: 3050043 - RNA, 19 nt, Artificial Sequence
  Description of Artificial Sequence: Synthetic oligonucleotide
ucagugaugucaucacugc

SEQ ID NO: 3050044 - RNA, 19 nt, Artificial Sequence
  Description of Artificial Sequence: Synthetic oligonucleotide
auauguuuauagucuccuc

SEQ ID NO: 3050045 - RNA, 19 nt, Artificial Sequence
  Description of Artificial Sequence: Synthetic oligonucleotide
gacauuuucaauaaauagu

SEQ ID NO: 3050046 - RNA, 19 nt, Artificial Sequence
  Description of Artificial Sequence: Synthetic oligonucleotide
gacggcauuaacaauugug

SEQ ID NO: 3050047 - RNA, 19 nt, Artificial Sequence
  Description of Artificial Sequence: Synthetic oligonucleotide
guuucuuucaaauauguuu

SEQ ID NO: 3050048 - RNA, 19 nt, Artificial Sequence
  Description of Artificial Sequence: Synthetic oligonucleotide
caucacugcacucuauuag

SEQ ID NO: 3050049 - RNA, 19 nt, Artificial Sequence
  Description of Artificial Sequence: Synthetic oligonucleotide
uuucaauaaauagucccac

SEQ ID NO: 3050050 - RNA, 19 nt, Artificial Sequence
  Description of Artificial Sequence: Synthetic oligonucleotide
ugcaucuccagcgucauga

SEQ ID NO: 3050051 - RNA, 19 nt, Artificial Sequence
  Description of Artificial Sequence: Synthetic oligonucleotide
aagacgcccgcacaucauc

SEQ ID NO: 3050052 - RNA, 19 nt, Artificial Sequence
  Description of Artificial Sequence: Synthetic oligonucleotide
guucuugaggaucuucucc

SEQ ID NO: 3050053 - RNA, 19 nt, Artificial Sequence
  Description of Artificial Sequence: Synthetic oligonucleotide
ucagugauguuucuuucaa

SEQ ID NO: 3050054 - RNA, 19 nt, Artificial Sequence
  Description of Artificial Sequence: Synthetic oligonucleotide
guuuauagucuccuccagc

SEQ ID NO: 3050055 - RNA, 19 nt, Artificial Sequence
  Description of Artificial Sequence: Synthetic oligonucleotide
uugucacaaaagacgcccg

SEQ ID NO: 3050056 - RNA, 19 nt, Artificial Sequence
  Description of Artificial Sequence: Synthetic oligonucleotide
uccagaaucuucucguggu

SEQ ID NO: 3050057 - RNA, 19 nt, Artificial Sequence
  Description of Artificial Sequence: Synthetic oligonucleotide
gauggcgaucuccagaauc

SEQ ID NO: 3050058 - RNA, 19 nt, Artificial Sequence
  Description of Artificial Sequence: Synthetic oligonucleotide
auaauugggcagaucacuc

SEQ ID NO: 3050059 - RNA, 19 nt, Artificial Sequence
  Description of Artificial Sequence: Synthetic oligonucleotide
ucuucucgauaauugggca

SEQ ID NO: 3050060 - RNA, 19 nt, Artificial Sequence
  Description of Artificial Sequence: Synthetic oligonucleotide
ucguucuugaggaucuucu

SEQ ID NO: 3050061 - RNA, 19 nt, Artificial Sequence
  Description of Artificial Sequence: Synthetic oligonucleotide
uugauggcgaucuccagaa

SEQ ID NO: 3050062 - RNA, 19 nt, Artificial Sequence
  Description of Artificial Sequence: Synthetic oligonucleotide
auaaauagucccaccaugu

SEQ ID NO: 3050063 - RNA, 19 nt, Artificial Sequence
  Description of Artificial Sequence: Synthetic oligonucleotide
aucuccagaaucuucucgu

SEQ ID NO: 3050064 - RNA, 19 nt, Artificial Sequence
  Description of Artificial Sequence: Synthetic oligonucleotide
ucacaaaagacgcccgcac

SEQ ID NO: 3050065 - RNA, 19 nt, Artificial Sequence
  Description of Artificial Sequence: Synthetic oligonucleotide
aggucagugaugucaucac

SEQ ID NO: 3050066 - RNA, 19 nt, Artificial Sequence
  Description of Artificial Sequence: Synthetic oligonucleotide
uaaauagucccaccauguc

SEQ ID NO: 3050067 - RNA, 19 nt, Artificial Sequence
  Description of Artificial Sequence: Synthetic oligonucleotide
ugucacaaaagacgcccgc

SEQ ID NO: 3050068 - RNA, 19 nt, Artificial Sequence
  Description of Artificial Sequence: Synthetic oligonucleotide
gacuuuuggacauuuucaa

SEQ ID NO: 3050069 - RNA, 19 nt, Artificial Sequence
  Description of Artificial Sequence: Synthetic oligonucleotide
gaacaggucagugauguca

SEQ ID NO: 3050070 - RNA, 19 nt, Artificial Sequence
  Description of Artificial Sequence: Synthetic oligonucleotide
cagacuuuuggacauuuuc

SEQ ID NO: 3050071 - RNA, 19 nt, Artificial Sequence
  Description of Artificial Sequence: Synthetic oligonucleotide
cuucucgauaauugggcag

SEQ ID NO: 3050072 - RNA, 19 nt, Artificial Sequence
  Description of Artificial Sequence: Synthetic oligonucleotide
guggugaugguucuccaag

SEQ ID NO: 3050073 - RNA, 19 nt, Artificial Sequence
  Description of Artificial Sequence: Synthetic oligonucleotide
caagucccggcacugagcc

SEQ ID NO: 3050074 - RNA, 19 nt, Artificial Sequence
  Description of Artificial Sequence: Synthetic oligonucleotide
uuauagucuccuccagcug

SEQ ID NO: 3050075 - RNA, 19 nt, Artificial Sequence
  Description of Artificial Sequence: Synthetic oligonucleotide
gaggaucuucuccagggug

SEQ ID NO: 3050076 - RNA, 19 nt, Artificial Sequence
  Description of Artificial Sequence: Synthetic oligonucleotide
uaauugggcagaucacucu

SEQ ID NO: 3050077 - RNA, 19 nt, Artificial Sequence
  Description of Artificial Sequence: Synthetic oligonucleotide
gcauuaacaauugugcuug

SEQ ID NO: 3050078 - RNA, 19 nt, Artificial Sequence
  Description of Artificial Sequence: Synthetic oligonucleotide
uucucgauaauugggcaga

SEQ ID NO: 3050079 - RNA, 19 nt, Artificial Sequence
  Description of Artificial Sequence: Synthetic oligonucleotide
gcuucuucucgauaauugg

SEQ ID NO: 3050080 - RNA, 19 nt, Artificial Sequence
  Description of Artificial Sequence: Synthetic oligonucleotide
acaaaagacgcccgcacau

SEQ ID NO: 3050081 - RNA, 19 nt, Artificial Sequence
  Description of Artificial Sequence: Synthetic oligonucleotide
auuaacaauugugcuuguc

SEQ ID NO: 3050082 - RNA, 19 nt, Artificial Sequence
  Description of Artificial Sequence: Synthetic oligonucleotide
cuugaggaucuucuccagg

SEQ ID NO: 3050083 - RNA, 19 nt, Artificial Sequence
  Description of Artificial Sequence: Synthetic oligonucleotide
acaauugugcuugucacaa

SEQ ID NO: 3050084 - RNA, 19 nt, Artificial Sequence
  Description of Artificial Sequence: Synthetic oligonucleotide
agacuuuuggacauuuuca

SEQ ID NO: 3050085 - RNA, 19 nt, Artificial Sequence
  Description of Artificial Sequence: Synthetic oligonucleotide
aucuccagcgucaugagca

SEQ ID NO: 3050086 - RNA, 19 nt, Artificial Sequence
  Description of Artificial Sequence: Synthetic oligonucleotide
cuucucguggugaugguuc

SEQ ID NO: 3050087 - RNA, 19 nt, Artificial Sequence
  Description of Artificial Sequence: Synthetic oligonucleotide
ucacugcacucuauuagcu

SEQ ID NO: 3050088 - RNA, 19 nt, Artificial Sequence
  Description of Artificial Sequence: Synthetic oligonucleotide
gagcacguugaacagguca

SEQ ID NO: 3050089 - RNA, 19 nt, Artificial Sequence
  Description of Artificial Sequence: Synthetic oligonucleotide
gucagugaugucaucacug

SEQ ID NO: 3050090 - RNA, 19 nt, Artificial Sequence
  Description of Artificial Sequence: Synthetic oligonucleotide
cuccagaaucuucucgugg

SEQ ID NO: 3050091 - RNA, 19 nt, Artificial Sequence
  Description of Artificial Sequence: Synthetic oligonucleotide
acaucaucaggcaaguccu

SEQ ID NO: 3050092 - RNA, 19 nt, Artificial Sequence
  Description of Artificial Sequence: Synthetic oligonucleotide
uccagcgucaugagcacgu

SEQ ID NO: 3050093 - RNA, 19 nt, Artificial Sequence
  Description of Artificial Sequence: Synthetic oligonucleotide
augucagugauguuucuuu

SEQ ID NO: 3050094 - RNA, 19 nt, Artificial Sequence
  Description of Artificial Sequence: Synthetic oligonucleotide
uuuggacauuuucaauaaa

SEQ ID NO: 3050095 - RNA, 19 nt, Artificial Sequence
  Description of Artificial Sequence: Synthetic oligonucleotide
ugccccgacggcauuaaca

SEQ ID NO: 3050096 - RNA, 19 nt, Artificial Sequence
  Description of Artificial Sequence: Synthetic oligonucleotide
agucccaccaugucaguga

SEQ ID NO: 3050097 - RNA, 19 nt, Artificial Sequence
  Description of Artificial Sequence: Synthetic oligonucleotide
accaugucagugauguuuc

SEQ ID NO: 3050098 - RNA, 19 nt, Artificial Sequence
  Description of Artificial Sequence: Synthetic oligonucleotide
gauaauugggcagaucacu

SEQ ID NO: 3050099 - RNA, 19 nt, Artificial Sequence
  Description of Artificial Sequence: Synthetic oligonucleotide
guugauggcgaucuccaga

SEQ ID NO: 3050100 - RNA, 19 nt, Artificial Sequence
  Description of Artificial Sequence: Synthetic oligonucleotide
agcuucuucucgauaauug

SEQ ID NO: 3050101 - RNA, 19 nt, Artificial Sequence
  Description of Artificial Sequence: Synthetic oligonucleotide
cacucuauuagcuucuucu

SEQ ID NO: 3050102 - RNA, 19 nt, Artificial Sequence
  Description of Artificial Sequence: Synthetic oligonucleotide
agcacguugaacaggucag

SEQ ID NO: 3050103 - RNA, 19 nt, Artificial Sequence
  Description of Artificial Sequence: Synthetic oligonucleotide
ucuccagaaucuucucgug

SEQ ID NO: 3050104 - RNA, 19 nt, Artificial Sequence
  Description of Artificial Sequence: Synthetic oligonucleotide
ucaggcaaguccucaucca

SEQ ID NO: 3050105 - RNA, 19 nt, Artificial Sequence
  Description of Artificial Sequence: Synthetic oligonucleotide
ugucagugauguuucuuuc

SEQ ID NO: 3050106 - RNA, 19 nt, Artificial Sequence
  Description of Artificial Sequence: Synthetic oligonucleotide
uguugauggcgaucuccag

SEQ ID NO: 3050107 - RNA, 19 nt, Artificial Sequence
  Description of Artificial Sequence: Synthetic oligonucleotide
gaugguucuccaagucccg

SEQ ID NO: 3050108 - RNA, 19 nt, Artificial Sequence
  Description of Artificial Sequence: Synthetic oligonucleotide
acguugaacaggucaguga

SEQ ID NO: 3050109 - RNA, 19 nt, Artificial Sequence
  Description of Artificial Sequence: Synthetic oligonucleotide
ucaucacugcacucuauua

SEQ ID NO: 3050110 - RNA, 19 nt, Artificial Sequence
  Description of Artificial Sequence: Synthetic oligonucleotide
agaaucuucucguggugau

SEQ ID NO: 3050111 - RNA, 19 nt, Artificial Sequence
  Description of Artificial Sequence: Synthetic oligonucleotide
uauuagcuucuucucgaua

SEQ ID NO: 3050112 - RNA, 19 nt, Artificial Sequence
  Description of Artificial Sequence: Synthetic oligonucleotide
uuagcuucuucucgauaau

SEQ ID NO: 3050113 - RNA, 19 nt, Artificial Sequence
  Description of Artificial Sequence: Synthetic oligonucleotide
gagccaucagacuuuugga

SEQ ID NO: 3050114 - RNA, 19 nt, Artificial Sequence
  Description of Artificial Sequence: Synthetic oligonucleotide
caugagcacguugaacagg

SEQ ID NO: 3050115 - RNA, 19 nt, Artificial Sequence
  Description of Artificial Sequence: Synthetic oligonucleotide
aggguguugauggcgaucu

SEQ ID NO: 3050116 - RNA, 19 nt, Artificial Sequence
  Description of Artificial Sequence: Synthetic oligonucleotide
auugugcuugucacaaaag

SEQ ID NO: 3050117 - RNA, 19 nt, Artificial Sequence
  Description of Artificial Sequence: Synthetic oligonucleotide
ugguucuccaagucccggc

SEQ ID NO: 3050118 - RNA, 19 nt, Artificial Sequence
  Description of Artificial Sequence: Synthetic oligonucleotide
augagcacguugaacaggu

SEQ ID NO: 3050119 - RNA, 19 nt, Artificial Sequence
  Description of Artificial Sequence: Synthetic oligonucleotide
agcgucaugagcacguuga

SEQ ID NO: 3050120 - RNA, 19 nt, Artificial Sequence
  Description of Artificial Sequence: Synthetic oligonucleotide
uggugaugguucuccaagu

SEQ ID NO: 3050121 - RNA, 19 nt, Artificial Sequence
  Description of Artificial Sequence: Synthetic oligonucleotide
cucguggugaugguucucc

SEQ ID NO: 3050122 - RNA, 19 nt, Artificial Sequence
  Description of Artificial Sequence: Synthetic oligonucleotide
gucagugauguuucuuuca

SEQ ID NO: 3050123 - RNA, 19 nt, Artificial Sequence
  Description of Artificial Sequence: Synthetic oligonucleotide
caugcgaugccccgacggc

SEQ ID NO: 3050124 - RNA, 19 nt, Artificial Sequence
  Description of Artificial Sequence: Synthetic oligonucleotide
aucuucuccaggguguuga

SEQ ID NO: 3050125 - RNA, 19 nt, Artificial Sequence
  Description of Artificial Sequence: Synthetic oligonucleotide
guccucauccaucucguuc

SEQ ID NO: 3050126 - RNA, 19 nt, Artificial Sequence
  Description of Artificial Sequence: Synthetic oligonucleotide
auggcgaucuccagaaucu

SEQ ID NO: 3050127 - RNA, 19 nt, Artificial Sequence
  Description of Artificial Sequence: Synthetic oligonucleotide
aaguccucauccaucucgu

SEQ ID NO: 3050128 - RNA, 19 nt, Artificial Sequence
  Description of Artificial Sequence: Synthetic oligonucleotide
ucaucaggcaaguccucau

SEQ ID NO: 3050129 - RNA, 19 nt, Artificial Sequence
  Description of Artificial Sequence: Synthetic oligonucleotide
gguguugauggcgaucucc

SEQ ID NO: 3050130 - RNA, 19 nt, Artificial Sequence
  Description of Artificial Sequence: Synthetic oligonucleotide
uucucguggugaugguucu

SEQ ID NO: 3050131 - RNA, 19 nt, Artificial Sequence
  Description of Artificial Sequence: Synthetic oligonucleotide
acgcccgcacaucaucagg

SEQ ID NO: 3050132 - RNA, 19 nt, Artificial Sequence
  Description of Artificial Sequence: Synthetic oligonucleotide
aucucguucuugaggaucu

SEQ ID NO: 3050133 - RNA, 19 nt, Artificial Sequence
  Description of Artificial Sequence: Synthetic oligonucleotide
gaaucuucucguggugaug

SEQ ID NO: 3050134 - RNA, 19 nt, Artificial Sequence
  Description of Artificial Sequence: Synthetic oligonucleotide
ugaugucaucacugcacuc

SEQ ID NO: 3050135 - RNA, 19 nt, Artificial Sequence
  Description of Artificial Sequence: Synthetic oligonucleotide
caucuccagcgucaugagc

SEQ ID NO: 3050136 - RNA, 19 nt, Artificial Sequence
  Description of Artificial Sequence: Synthetic oligonucleotide
caucucguucuugaggauc

SEQ ID NO: 3050137 - RNA, 19 nt, Artificial Sequence
  Description of Artificial Sequence: Synthetic oligonucleotide
gacgcccgcacaucaucag

SEQ ID NO: 3050138 - RNA, 19 nt, Artificial Sequence
  Description of Artificial Sequence: Synthetic oligonucleotide
augguucuccaagucccgg

SEQ ID NO: 3050139 - RNA, 19 nt, Artificial Sequence
  Description of Artificial Sequence: Synthetic oligonucleotide
ucuccagcgucaugagcac

SEQ ID NO: 3050140 - RNA, 19 nt, Artificial Sequence
  Description of Artificial Sequence: Synthetic oligonucleotide
gccaucagacuuuuggaca

SEQ ID NO: 3050141 - RNA, 19 nt, Artificial Sequence
  Description of Artificial Sequence: Synthetic oligonucleotide
cacguugaacaggucagug

SEQ ID NO: 3050142 - RNA, 19 nt, Artificial Sequence
  Description of Artificial Sequence: Synthetic oligonucleotide
uagucccaccaugucagug

SEQ ID NO: 3050143 - RNA, 19 nt, Artificial Sequence
  Description of Artificial Sequence: Synthetic oligonucleotide
ucagacuuuuggacauuuu

SEQ ID NO: 3050144 - RNA, 19 nt, Artificial Sequence
  Description of Artificial Sequence: Synthetic oligonucleotide
cuccaggguguugauggcg

SEQ ID NO: 3050145 - RNA, 19 nt, Artificial Sequence
  Description of Artificial Sequence: Synthetic oligonucleotide
caucaggcaaguccucauc

SEQ ID NO: 3050146 - RNA, 19 nt, Artificial Sequence
  Description of Artificial Sequence: Synthetic oligonucleotide
uugggcagaucacucucuu

SEQ ID NO: 3050147 - RNA, 19 nt, Artificial Sequence
  Description of Artificial Sequence: Synthetic oligonucleotide
ugucaucacugcacucuau

SEQ ID NO: 3050148 - RNA, 19 nt, Artificial Sequence
  Description of Artificial Sequence: Synthetic oligonucleotide
caggucagugaugucauca

SEQ ID NO: 3050149 - RNA, 19 nt, Artificial Sequence
  Description of Artificial Sequence: Synthetic oligonucleotide
guugaacaggucagugaug

SEQ ID NO: 3050150 - RNA, 19 nt, Artificial Sequence
  Description of Artificial Sequence: Synthetic oligonucleotide
cacaaaagacgcccgcaca

SEQ ID NO: 3050151 - RNA, 19 nt, Artificial Sequence
  Description of Artificial Sequence: Synthetic oligonucleotide
guguugauggcgaucucca

SEQ ID NO: 3050152 - RNA, 19 nt, Artificial Sequence
  Description of Artificial Sequence: Synthetic oligonucleotide
agucccggcacugagccau

SEQ ID NO: 3050153 - RNA, 19 nt, Artificial Sequence
  Description of Artificial Sequence: Synthetic oligonucleotide
ugcgaugccccgacggcau

SEQ ID NO: 3050154 - RNA, 19 nt, Artificial Sequence
  Description of Artificial Sequence: Synthetic oligonucleotide
augucaucacugcacucua

SEQ ID NO: 3050155 - RNA, 19 nt, Artificial Sequence
  Description of Artificial Sequence: Synthetic oligonucleotide
gugaugucaucacugcacu

SEQ ID NO: 3050156 - RNA, 19 nt, Artificial Sequence
  Description of Artificial Sequence: Synthetic oligonucleotide
gucacaaaagacgcccgca

SEQ ID NO: 3050157 - RNA, 19 nt, Artificial Sequence
  Description of Artificial Sequence: Synthetic oligonucleotide
caauaaauagucccaccau

SEQ ID NO: 3050158 - RNA, 19 nt, Artificial Sequence
  Description of Artificial Sequence: Synthetic oligonucleotide
caaaagacgcccgcacauc

SEQ ID NO: 3050159 - RNA, 19 nt, Artificial Sequence
  Description of Artificial Sequence: Synthetic oligonucleotide
ugaacaggucagugauguc

SEQ ID NO: 3050160 - RNA, 19 nt, Artificial Sequence
  Description of Artificial Sequence: Synthetic oligonucleotide
ucguggugaugguucucca

SEQ ID NO: 3050161 - RNA, 19 nt, Artificial Sequence
  Description of Artificial Sequence: Synthetic oligonucleotide
ccgcacaucaucaggcaag

SEQ ID NO: 3050162 - RNA, 19 nt, Artificial Sequence
  Description of Artificial Sequence: Synthetic oligonucleotide
ugggcagaucacucucuuc

SEQ ID NO: 3050163 - RNA, 19 nt, Artificial Sequence
  Description of Artificial Sequence: Synthetic oligonucleotide
auugggcagaucacucucu

SEQ ID NO: 3050164 - RNA, 19 nt, Artificial Sequence
  Description of Artificial Sequence: Synthetic oligonucleotide
caucaucaggcaaguccuc

SEQ ID NO: 3050165 - RNA, 19 nt, Artificial Sequence
  Description of Artificial Sequence: Synthetic oligonucleotide
aucagacuuuuggacauuu

SEQ ID NO: 3050166 - RNA, 19 nt, Artificial Sequence
  Description of Artificial Sequence: Synthetic oligonucleotide
guucuccaagucccggcac

SEQ ID NO: 3050167 - RNA, 19 nt, Artificial Sequence
  Description of Artificial Sequence: Synthetic oligonucleotide
uagcuucuucucgauaauu

SEQ ID NO: 3050168 - RNA, 19 nt, Artificial Sequence
  Description of Artificial Sequence: Synthetic oligonucleotide
aaagacgcccgcacaucau

SEQ ID NO: 3050169 - RNA, 19 nt, Artificial Sequence
  Description of Artificial Sequence: Synthetic oligonucleotide
gucaugcgaugccccgacg

SEQ ID NO: 3050170 - RNA, 19 nt, Artificial Sequence
  Description of Artificial Sequence: Synthetic oligonucleotide
ggcauuaacaauugugcuu

SEQ ID NO: 3050171 - RNA, 19 nt, Artificial Sequence
  Description of Artificial Sequence: Synthetic oligonucleotide
auagucccaccaugucagu

SEQ ID NO: 3050172 - RNA, 19 nt, Artificial Sequence
  Description of Artificial Sequence: Synthetic oligonucleotide
auagucuccuccagcugcu

SEQ ID NO: 3050173 - RNA, 19 nt, Artificial Sequence
  Description of Artificial Sequence: Synthetic oligonucleotide
cagugaugucaucacugca

SEQ ID NO: 3050174 - RNA, 19 nt, Artificial Sequence
  Description of Artificial Sequence: Synthetic oligonucleotide
cucguucuugaggaucuuc

SEQ ID NO: 3050175 - RNA, 19 nt, Artificial Sequence
  Description of Artificial Sequence: Synthetic oligonucleotide
gguucuccaagucccggca

SEQ ID NO: 3050176 - RNA, 19 nt, Artificial Sequence
  Description of Artificial Sequence: Synthetic oligonucleotide
aagucccggcacugagcca

SEQ ID NO: 3050177 - RNA, 19 nt, Artificial Sequence
  Description of Artificial Sequence: Synthetic oligonucleotide
aucuucucguggugauggu

SEQ ID NO: 3050178 - RNA, 19 nt, Artificial Sequence
  Description of Artificial Sequence: Synthetic oligonucleotide
ucucgauaauugggcagau

SEQ ID NO: 3050179 - RNA, 19 nt, Artificial Sequence
  Description of Artificial Sequence: Synthetic oligonucleotide
ugagcacguugaacagguc

SEQ ID NO: 3050180 - RNA, 19 nt, Artificial Sequence
  Description of Artificial Sequence: Synthetic oligonucleotide
ucccaccaugucagugaug

SEQ ID NO: 3050181 - RNA, 19 nt, Artificial Sequence
  Description of Artificial Sequence: Synthetic oligonucleotide
ugauggcgaucuccagaau

SEQ ID NO: 3050182 - RNA, 19 nt, Artificial Sequence
  Description of Artificial Sequence: Synthetic oligonucleotide
cagcgucaugagcacguug

SEQ ID NO: 3050183 - RNA, 19 nt, Artificial Sequence
  Description of Artificial Sequence: Synthetic oligonucleotide
augccccgacggcauuaac

SEQ ID NO: 3050184 - RNA, 19 nt, Artificial Sequence
  Description of Artificial Sequence: Synthetic oligonucleotide
cgauaauugggcagaucac

SEQ ID NO: 3050185 - RNA, 19 nt, Artificial Sequence
  Description of Artificial Sequence: Synthetic oligonucleotide
cucgauaauugggcagauc

SEQ ID NO: 3050186 - RNA, 19 nt, Artificial Sequence
  Description of Artificial Sequence: Synthetic oligonucleotide
augcgaugccccgacggca

SEQ ID NO: 3050187 - RNA, 19 nt, Artificial Sequence
  Description of Artificial Sequence: Synthetic oligonucleotide
ccgacggcauuaacaauug

SEQ ID NO: 3050188 - RNA, 19 nt, Artificial Sequence
  Description of Artificial Sequence: Synthetic oligonucleotide
agacgcccgcacaucauca

SEQ ID NO: 3050189 - RNA, 19 nt, Artificial Sequence
  Description of Artificial Sequence: Synthetic oligonucleotide
cuccagcgucaugagcacg

SEQ ID NO: 3050190 - RNA, 19 nt, Artificial Sequence
  Description of Artificial Sequence: Synthetic oligonucleotide
gucaucacugcacucuauu

SEQ ID NO: 3050191 - RNA, 19 nt, Artificial Sequence
  Description of Artificial Sequence: Synthetic oligonucleotide
ccaagucccggcacugagc

SEQ ID NO: 3050192 - RNA, 19 nt, Artificial Sequence
  Description of Artificial Sequence: Synthetic oligonucleotide
gcaucuccagcgucaugag

SEQ ID NO: 3050193 - RNA, 19 nt, Artificial Sequence
  Description of Artificial Sequence: Synthetic oligonucleotide
gccccgacggcauuaacaa

SEQ ID NO: 3050194 - RNA, 19 nt, Artificial Sequence
  Description of Artificial Sequence: Synthetic oligonucleotide
acugagccaucagacuuuu

SEQ ID NO: 3050195 - RNA, 19 nt, Artificial Sequence
  Description of Artificial Sequence: Synthetic oligonucleotide
caccaugucagugauguuu

SEQ ID NO: 3050196 - RNA, 19 nt, Artificial Sequence
  Description of Artificial Sequence: Synthetic oligonucleotide
cuauuagcuucuucucgau

SEQ ID NO: 3050197 - RNA, 19 nt, Artificial Sequence
  Description of Artificial Sequence: Synthetic oligonucleotide
caauugugcuugucacaaa

SEQ ID NO: 3050198 - RNA, 19 nt, Artificial Sequence
  Description of Artificial Sequence: Synthetic oligonucleotide
caggguguugauggcgauc

SEQ ID NO: 3050199 - RNA, 19 nt, Artificial Sequence
  Description of Artificial Sequence: Synthetic oligonucleotide
cugagccaucagacuuuug

SEQ ID NO: 3050200 - RNA, 19 nt, Artificial Sequence
  Description of Artificial Sequence: Synthetic oligonucleotide
cugcacucuauuagcuucu

SEQ ID NO: 3050201 - RNA, 19 nt, Artificial Sequence
  Description of Artificial Sequence: Synthetic oligonucleotide
ugcacucuauuagcuucuu

SEQ ID NO: 3050202 - RNA, 19 nt, Artificial Sequence
  Description of Artificial Sequence: Synthetic oligonucleotide
aguccucauccaucucguu

SEQ ID NO: 3050203 - RNA, 19 nt, Artificial Sequence
  Description of Artificial Sequence: Synthetic oligonucleotide
cggcacugagccaucagac

SEQ ID NO: 3050204 - RNA, 19 nt, Artificial Sequence
  Description of Artificial Sequence: Synthetic oligonucleotide
cgcccgcacaucaucaggc

SEQ ID NO: 3050205 - RNA, 19 nt, Artificial Sequence
  Description of Artificial Sequence: Synthetic oligonucleotide
gcacugagccaucagacuu

SEQ ID NO: 3050206 - RNA, 19 nt, Artificial Sequence
  Description of Artificial Sequence: Synthetic oligonucleotide
gaugccccgacggcauuaa

SEQ ID NO: 3050207 - RNA, 19 nt, Artificial Sequence
  Description of Artificial Sequence: Synthetic oligonucleotide
ggcgaucuccagaaucuuc

SEQ ID NO: 3050208 - RNA, 19 nt, Artificial Sequence
  Description of Artificial Sequence: Synthetic oligonucleotide
ccaccagcugcaucuccag

SEQ ID NO: 3050209 - RNA, 19 nt, Artificial Sequence
  Description of Artificial Sequence: Synthetic oligonucleotide
uggcgaucuccagaaucuu

SEQ ID NO: 3050210 - RNA, 19 nt, Artificial Sequence
  Description of Artificial Sequence: Synthetic oligonucleotide
cauuaacaauugugcuugu

SEQ ID NO: 3050211 - RNA, 19 nt, Artificial Sequence
  Description of Artificial Sequence: Synthetic oligonucleotide
gcacucuauuagcuucuuc

SEQ ID NO: 3050212 - RNA, 19 nt, Artificial Sequence
  Description of Artificial Sequence: Synthetic oligonucleotide
ggcacugagccaucagacu

SEQ ID NO: 3050213 - RNA, 19 nt, Artificial Sequence
  Description of Artificial Sequence: Synthetic oligonucleotide
cugcaucuccagcgucaug

SEQ ID NO: 3050214 - RNA, 19 nt, Artificial Sequence
  Description of Artificial Sequence: Synthetic oligonucleotide
ucccggcacugagccauca

SEQ ID NO: 3050215 - RNA, 19 nt, Artificial Sequence
  Description of Artificial Sequence: Synthetic oligonucleotide
ucucguucuugaggaucuu

SEQ ID NO: 3050216 - RNA, 19 nt, Artificial Sequence
  Description of Artificial Sequence: Synthetic oligonucleotide
cacugagccaucagacuuu

SEQ ID NO: 3050217 - RNA, 19 nt, Artificial Sequence
  Description of Artificial Sequence: Synthetic oligonucleotide
cacugcacucuauuagcuu

SEQ ID NO: 3050218 - RNA, 19 nt, Artificial Sequence
  Description of Artificial Sequence: Synthetic oligonucleotide
ccaucagacuuuuggacau

SEQ ID NO: 3050219 - RNA, 19 nt, Artificial Sequence
  Description of Artificial Sequence: Synthetic oligonucleotide
caugucagugauguuucuu

SEQ ID NO: 3050220 - RNA, 19 nt, Artificial Sequence
  Description of Artificial Sequence: Synthetic oligonucleotide
cccgacggcauuaacaauu

SEQ ID NO: 3050221 - RNA, 19 nt, Artificial Sequence
  Description of Artificial Sequence: Synthetic oligonucleotide
gucccaccaugucagugau

SEQ ID NO: 3050222 - RNA, 19 nt, Artificial Sequence
  Description of Artificial Sequence: Synthetic oligonucleotide
ccggcacugagccaucaga

SEQ ID NO: 3050223 - RNA, 19 nt, Artificial Sequence
  Description of Artificial Sequence: Synthetic oligonucleotide
gcccgcacaucaucaggca

SEQ ID NO: 3050224 - RNA, 19 nt, Artificial Sequence
  Description of Artificial Sequence: Synthetic oligonucleotide
gcgucaugagcacguugaa

SEQ ID NO: 3050225 - RNA, 19 nt, Artificial Sequence
  Description of Artificial Sequence: Synthetic oligonucleotide
cggcauuaacaauugugcu

SEQ ID NO: 3050226 - RNA, 19 nt, Artificial Sequence
  Description of Artificial Sequence: Synthetic oligonucleotide
cccggcacugagccaucag

SEQ ID NO: 3050227 - RNA, 19 nt, Artificial Sequence
  Description of Artificial Sequence: Synthetic oligonucleotide
ggguguugauggcgaucuc

SEQ ID NO: 3050228 - RNA, 19 nt, Artificial Sequence
  Description of Artificial Sequence: Synthetic oligonucleotide
cccgcacaucaucaggcaa

SEQ ID NO: 3050229 - RNA, 19 nt, Artificial Sequence
  Description of Artificial Sequence: Synthetic oligonucleotide
cguggugaugguucuccaa

SEQ ID NO: 3050230 - RNA, 19 nt, Artificial Sequence
  Description of Artificial Sequence: Synthetic oligonucleotide
gcacaucaucaggcaaguc

SEQ ID NO: 3050231 - RNA, 19 nt, Artificial Sequence
  Description of Artificial Sequence: Synthetic oligonucleotide
ccagcugcaucuccagcgu

SEQ ID NO: 3050232 - RNA, 19 nt, Artificial Sequence
  Description of Artificial Sequence: Synthetic oligonucleotide
gcacguugaacaggucagu

SEQ ID NO: 3050233 - RNA, 19 nt, Artificial Sequence
  Description of Artificial Sequence: Synthetic oligonucleotide
caucagacuuuuggacauu

SEQ ID NO: 3050234 - RNA, 19 nt, Artificial Sequence
  Description of Artificial Sequence: Synthetic oligonucleotide
gucccggcacugagccauc

SEQ ID NO: 3050235 - RNA, 19 nt, Artificial Sequence
  Description of Artificial Sequence: Synthetic oligonucleotide
ccaugucagugauguuucu

SEQ ID NO: 3050236 - RNA, 19 nt, Artificial Sequence
  Description of Artificial Sequence: Synthetic oligonucleotide
cgcacaucaucaggcaagu

SEQ ID NO: 3050237 - RNA, 19 nt, Artificial Sequence
  Description of Artificial Sequence: Synthetic oligonucleotide
ccaucucguucuugaggau

SEQ ID NO: 3050238 - RNA, 19 nt, Artificial Sequence
  Description of Artificial Sequence: Synthetic oligonucleotide
ccaggguguugauggcgau

SEQ ID NO: 3050239 - RNA, 19 nt, Artificial Sequence
  Description of Artificial Sequence: Synthetic oligonucleotide
cgacggcauuaacaauugu

SEQ ID NO: 3050240 - RNA, 19 nt, Artificial Sequence
  Description of Artificial Sequence: Synthetic oligonucleotide
ccccgacggcauuaacaau

SEQ ID NO: 3050241 - RNA, 19 nt, Artificial Sequence
  Description of Artificial Sequence: Synthetic oligonucleotide
cgaugccccgacggcauua

SEQ ID NO: 3050242 - RNA, 19 nt, Artificial Sequence
  Description of Artificial Sequence: Synthetic oligonucleotide
gcgaugccccgacggcauu

SEQ ID NO: 3050243 - RNA, 19 nt, Artificial Sequence
  Description of Artificial Sequence: Synthetic oligonucleotide
ccaccaugucagugauguu

SEQ ID NO: 3050244 - RNA, 19 nt, Artificial Sequence
  Description of Artificial Sequence: Synthetic oligonucleotide
ccagcgucaugagcacguu

SEQ ID NO: 3050245 - RNA, 19 nt, Artificial Sequence
  Description of Artificial Sequence: Synthetic oligonucleotide
uucuguuucacccacagag

SEQ ID NO: 3050246 - RNA, 19 nt, Artificial Sequence
  Description of Artificial Sequence: Synthetic oligonucleotide
aauucuuuggaccacccag

SEQ ID NO: 3050247 - RNA, 19 nt, Artificial Sequence
  Description of Artificial Sequence: Synthetic oligonucleotide
ucuacuaccucucauuugc

SEQ ID NO: 3050248 - RNA, 19 nt, Artificial Sequence
  Description of Artificial Sequence: Synthetic oligonucleotide
uuuguuuucggcuugacau

SEQ ID NO: 3050249 - RNA, 19 nt, Artificial Sequence
  Description of Artificial Sequence: Synthetic oligonucleotide
agggagaacaucuugucgc

SEQ ID NO: 3050250 - RNA, 19 nt, Artificial Sequence
  Description of Artificial Sequence: Synthetic oligonucleotide
gaaaggaaugauuacauuc

SEQ ID NO: 3050251 - RNA, 19 nt, Artificial Sequence
  Description of Artificial Sequence: Synthetic oligonucleotide
auuacauucuccccagacc

SEQ ID NO: 3050252 - RNA, 19 nt, Artificial Sequence
  Description of Artificial Sequence: Synthetic oligonucleotide
aacacaguccucuuguuug

SEQ ID NO: 3050253 - RNA, 19 nt, Artificial Sequence
  Description of Artificial Sequence: Synthetic oligonucleotide
ucauuugccaauucuuugg

SEQ ID NO: 3050254 - RNA, 19 nt, Artificial Sequence
  Description of Artificial Sequence: Synthetic oligonucleotide
uuugccaauucuuuggacc

SEQ ID NO: 3050255 - RNA, 19 nt, Artificial Sequence
  Description of Artificial Sequence: Synthetic oligonucleotide
aggaaagccuucuacuacc

SEQ ID NO: 3050256 - RNA, 19 nt, Artificial Sequence
  Description of Artificial Sequence: Synthetic oligonucleotide
acagcgauuguucuguuuc

SEQ ID NO: 3050257 - RNA, 19 nt, Artificial Sequence
  Description of Artificial Sequence: Synthetic oligonucleotide
aaggaaugauuacauucuc

SEQ ID NO: 3050258 - RNA, 19 nt, Artificial Sequence
  Description of Artificial Sequence: Synthetic oligonucleotide
cugugugaggacaagacgc

SEQ ID NO: 3050259 - RNA, 19 nt, Artificial Sequence
  Description of Artificial Sequence: Synthetic oligonucleotide
aaaggaaugauuacauucu

SEQ ID NO: 3050260 - RNA, 19 nt, Artificial Sequence
  Description of Artificial Sequence: Synthetic oligonucleotide
auuguucuguuucacccac

SEQ ID NO: 3050261 - RNA, 19 nt, Artificial Sequence
  Description of Artificial Sequence: Synthetic oligonucleotide
uucuugagggagaacaucu

SEQ ID NO: 3050262 - RNA, 19 nt, Artificial Sequence
  Description of Artificial Sequence: Synthetic oligonucleotide
ugugaggacaagacgcagg

SEQ ID NO: 3050263 - RNA, 19 nt, Artificial Sequence
  Description of Artificial Sequence: Synthetic oligonucleotide
uguucuguuucacccacag

SEQ ID NO: 3050264 - RNA, 19 nt, Artificial Sequence
  Description of Artificial Sequence: Synthetic oligonucleotide
gcagguaucgcacucaacg

SEQ ID NO: 3050265 - RNA, 19 nt, Artificial Sequence
  Description of Artificial Sequence: Synthetic oligonucleotide
ggaaugauuacauucuccc

SEQ ID NO: 3050266 - RNA, 19 nt, Artificial Sequence
  Description of Artificial Sequence: Synthetic oligonucleotide
uucggcuugacaucugagg

SEQ ID NO: 3050267 - RNA, 19 nt, Artificial Sequence
  Description of Artificial Sequence: Synthetic oligonucleotide
ucggcuugacaucugaggc

SEQ ID NO: 3050268 - RNA, 19 nt, Artificial Sequence
  Description of Artificial Sequence: Synthetic oligonucleotide
acuuggagcccgcaguccc

SEQ ID NO: 3050269 - RNA, 19 nt, Artificial Sequence
  Description of Artificial Sequence: Synthetic oligonucleotide
gaaugauuacauucucccc

SEQ ID NO: 3050270 - RNA, 19 nt, Artificial Sequence
  Description of Artificial Sequence: Synthetic oligonucleotide
agagacaugcagcaguugu

SEQ ID NO: 3050271 - RNA, 19 nt, Artificial Sequence
  Description of Artificial Sequence: Synthetic oligonucleotide
gagggagaacaucuugucg

SEQ ID NO: 3050272 - RNA, 19 nt, Artificial Sequence
  Description of Artificial Sequence: Synthetic oligonucleotide
caugcagcaguugugaaag

SEQ ID NO: 3050273 - RNA, 19 nt, Artificial Sequence
  Description of Artificial Sequence: Synthetic oligonucleotide
aauggcgcagguaucgcac

SEQ ID NO: 3050274 - RNA, 19 nt, Artificial Sequence
  Description of Artificial Sequence: Synthetic oligonucleotide
cacucaacgucccagcucc

SEQ ID NO: 3050275 - RNA, 19 nt, Artificial Sequence
  Description of Artificial Sequence: Synthetic oligonucleotide
aggaaugauuacauucucc

SEQ ID NO: 3050276 - RNA, 19 nt, Artificial Sequence
  Description of Artificial Sequence: Synthetic oligonucleotide
acaucugaggcaggcaucc

SEQ ID NO: 3050277 - RNA, 19 nt, Artificial Sequence
  Description of Artificial Sequence: Synthetic oligonucleotide
augauuacauucuccccag

SEQ ID NO: 3050278 - RNA, 19 nt, Artificial Sequence
  Description of Artificial Sequence: Synthetic oligonucleotide
gcauccaucaccuggaccc

SEQ ID NO: 3050279 - RNA, 19 nt, Artificial Sequence
  Description of Artificial Sequence: Synthetic oligonucleotide
auuugccaauucuuuggac

SEQ ID NO: 3050280 - RNA, 19 nt, Artificial Sequence
  Description of Artificial Sequence: Synthetic oligonucleotide
accuggacccugcaaaugg

SEQ ID NO: 3050281 - RNA, 19 nt, Artificial Sequence
  Description of Artificial Sequence: Synthetic oligonucleotide
gagaacaucuugucgcccc

SEQ ID NO: 3050282 - RNA, 19 nt, Artificial Sequence
  Description of Artificial Sequence: Synthetic oligonucleotide
uucacccacagagacaugc

SEQ ID NO: 3050283 - RNA, 19 nt, Artificial Sequence
  Description of Artificial Sequence: Synthetic oligonucleotide
uugccaauucuuuggacca

SEQ ID NO: 3050284 - RNA, 19 nt, Artificial Sequence
  Description of Artificial Sequence: Synthetic oligonucleotide
agguaucgcacucaacguc

SEQ ID NO: 3050285 - RNA, 19 nt, Artificial Sequence
  Description of Artificial Sequence: Synthetic oligonucleotide
ugugugaggacaagacgca

SEQ ID NO: 3050286 - RNA, 19 nt, Artificial Sequence
  Description of Artificial Sequence: Synthetic oligonucleotide
cacaaccacaccaggaaag

SEQ ID NO: 3050287 - RNA, 19 nt, Artificial Sequence
  Description of Artificial Sequence: Synthetic oligonucleotide
ucuguuucacccacagaga

SEQ ID NO: 3050288 - RNA, 19 nt, Artificial Sequence
  Description of Artificial Sequence: Synthetic oligonucleotide
ucucauuugccaauucuuu

SEQ ID NO: 3050289 - RNA, 19 nt, Artificial Sequence
  Description of Artificial Sequence: Synthetic oligonucleotide
uuuucggcuugacaucuga

SEQ ID NO: 3050290 - RNA, 19 nt, Artificial Sequence
  Description of Artificial Sequence: Synthetic oligonucleotide
uucuccccagaccacaaca

SEQ ID NO: 3050291 - RNA, 19 nt, Artificial Sequence
  Description of Artificial Sequence: Synthetic oligonucleotide
ugacaucugaggcaggcau

SEQ ID NO: 3050292 - RNA, 19 nt, Artificial Sequence
  Description of Artificial Sequence: Synthetic oligonucleotide
accaggaaagccuucuacu

SEQ ID NO: 3050293 - RNA, 19 nt, Artificial Sequence
  Description of Artificial Sequence: Synthetic oligonucleotide
aaauggcgcagguaucgca

SEQ ID NO: 3050294 - RNA, 19 nt, Artificial Sequence
  Description of Artificial Sequence: Synthetic oligonucleotide
uguuucacccacagagaca

SEQ ID NO: 3050295 - RNA, 19 nt, Artificial Sequence
  Description of Artificial Sequence: Synthetic oligonucleotide
cuguuucacccacagagac

SEQ ID NO: 3050296 - RNA, 19 nt, Artificial Sequence
  Description of Artificial Sequence: Synthetic oligonucleotide
uugugaaaggaaugauuac

SEQ ID NO: 3050297 - RNA, 19 nt, Artificial Sequence
  Description of Artificial Sequence: Synthetic oligonucleotide
ucuuuggaccacccagucc

SEQ ID NO: 3050298 - RNA, 19 nt, Artificial Sequence
  Description of Artificial Sequence: Synthetic oligonucleotide
uccucuuguuuguuuucgg

SEQ ID NO: 3050299 - RNA, 19 nt, Artificial Sequence
  Description of Artificial Sequence: Synthetic oligonucleotide
gauuguucuguuucaccca

SEQ ID NO: 3050300 - RNA, 19 nt, Artificial Sequence
  Description of Artificial Sequence: Synthetic oligonucleotide
aucaccuggacccugcaaa

SEQ ID NO: 3050301 - RNA, 19 nt, Artificial Sequence
  Description of Artificial Sequence: Synthetic oligonucleotide
uguuuucggcuugacaucu

SEQ ID NO: 3050302 - RNA, 19 nt, Artificial Sequence
  Description of Artificial Sequence: Synthetic oligonucleotide
uucuacuaccucucauuug

SEQ ID NO: 3050303 - RNA, 19 nt, Artificial Sequence
  Description of Artificial Sequence: Synthetic oligonucleotide
uuucggcuugacaucugag

SEQ ID NO: 3050304 - RNA, 19 nt, Artificial Sequence
  Description of Artificial Sequence: Synthetic oligonucleotide
auggcuaccgcguuccacu

SEQ ID NO: 3050305 - RNA, 19 nt, Artificial Sequence
  Description of Artificial Sequence: Synthetic oligonucleotide
cuugacaucugaggcaggc

SEQ ID NO: 3050306 - RNA, 19 nt, Artificial Sequence
  Description of Artificial Sequence: Synthetic oligonucleotide
agcuccacauggcuaccgc

SEQ ID NO: 3050307 - RNA, 19 nt, Artificial Sequence
  Description of Artificial Sequence: Synthetic oligonucleotide
acuaccucucauuugccaa

SEQ ID NO: 3050308 - RNA, 19 nt, Artificial Sequence
  Description of Artificial Sequence: Synthetic oligonucleotide
acccacagagacaugcagc

SEQ ID NO: 3050309 - RNA, 19 nt, Artificial Sequence
  Description of Artificial Sequence: Synthetic oligonucleotide
uggacccugcaaauggcgc

SEQ ID NO: 3050310 - RNA, 19 nt, Artificial Sequence
  Description of Artificial Sequence: Synthetic oligonucleotide
gcaggcauccaucaccugg

SEQ ID NO: 3050311 - RNA, 19 nt, Artificial Sequence
  Description of Artificial Sequence: Synthetic oligonucleotide
uacuaccucucauuugcca

SEQ ID NO: 3050312 - RNA, 19 nt, Artificial Sequence
  Description of Artificial Sequence: Synthetic oligonucleotide
acgucccagcuccacaugg

SEQ ID NO: 3050313 - RNA, 19 nt, Artificial Sequence
  Description of Artificial Sequence: Synthetic oligonucleotide
ucaacgucccagcuccaca

SEQ ID NO: 3050314 - RNA, 19 nt, Artificial Sequence
  Description of Artificial Sequence: Synthetic oligonucleotide
aguccucuuguuuguuuuc

SEQ ID NO: 3050315 - RNA, 19 nt, Artificial Sequence
  Description of Artificial Sequence: Synthetic oligonucleotide
ucugaggcaggcauccauc

SEQ ID NO: 3050316 - RNA, 19 nt, Artificial Sequence
  Description of Artificial Sequence: Synthetic oligonucleotide
ugaaaggaaugauuacauu

SEQ ID NO: 3050317 - RNA, 19 nt, Artificial Sequence
  Description of Artificial Sequence: Synthetic oligonucleotide
ucacaaccacaccaggaaa

SEQ ID NO: 3050318 - RNA, 19 nt, Artificial Sequence
  Description of Artificial Sequence: Synthetic oligonucleotide
ugcagcaguugugaaagga

SEQ ID NO: 3050319 - RNA, 19 nt, Artificial Sequence
  Description of Artificial Sequence: Synthetic oligonucleotide
cuggacccugcaaauggcg

SEQ ID NO: 3050320 - RNA, 19 nt, Artificial Sequence
  Description of Artificial Sequence: Synthetic oligonucleotide
cuuguuuguuuucggcuug

SEQ ID NO: 3050321 - RNA, 19 nt, Artificial Sequence
  Description of Artificial Sequence: Synthetic oligonucleotide
caggaaagccuucuacuac

SEQ ID NO: 3050322 - RNA, 19 nt, Artificial Sequence
  Description of Artificial Sequence: Synthetic oligonucleotide
cuuuggaccacccaguccu

SEQ ID NO: 3050323 - RNA, 19 nt, Artificial Sequence
  Description of Artificial Sequence: Synthetic oligonucleotide
ucuccccagaccacaacac

SEQ ID NO: 3050324 - RNA, 19 nt, Artificial Sequence
  Description of Artificial Sequence: Synthetic oligonucleotide
uuguuuucggcuugacauc

SEQ ID NO: 3050325 - RNA, 19 nt, Artificial Sequence
  Description of Artificial Sequence: Synthetic oligonucleotide
cacuucuugagggagaaca

SEQ ID NO: 3050326 - RNA, 19 nt, Artificial Sequence
  Description of Artificial Sequence: Synthetic oligonucleotide
uucuuuggaccacccaguc

SEQ ID NO: 3050327 - RNA, 19 nt, Artificial Sequence
  Description of Artificial Sequence: Synthetic oligonucleotide
gcugugugaggacaagacg

SEQ ID NO: 3050328 - RNA, 19 nt, Artificial Sequence
  Description of Artificial Sequence: Synthetic oligonucleotide
gaggacagcgauuguucug

SEQ ID NO: 3050329 - RNA, 19 nt, Artificial Sequence
  Description of Artificial Sequence: Synthetic oligonucleotide
gucacaaccacaccaggaa

SEQ ID NO: 3050330 - RNA, 19 nt, Artificial Sequence
  Description of Artificial Sequence: Synthetic oligonucleotide
agcgauuguucuguuucac

SEQ ID NO: 3050331 - RNA, 19 nt, Artificial Sequence
  Description of Artificial Sequence: Synthetic oligonucleotide
auucuccccagaccacaac

SEQ ID NO: 3050332 - RNA, 19 nt, Artificial Sequence
  Description of Artificial Sequence: Synthetic oligonucleotide
gaggacaagacgcagguuu

SEQ ID NO: 3050333 - RNA, 19 nt, Artificial Sequence
  Description of Artificial Sequence: Synthetic oligonucleotide
aggacagcgauuguucugu

SEQ ID NO: 3050334 - RNA, 19 nt, Artificial Sequence
  Description of Artificial Sequence: Synthetic oligonucleotide
acaugcagcaguugugaaa

SEQ ID NO: 3050335 - RNA, 19 nt, Artificial Sequence
  Description of Artificial Sequence: Synthetic oligonucleotide
guuuguuuucggcuugaca

SEQ ID NO: 3050336 - RNA, 19 nt, Artificial Sequence
  Description of Artificial Sequence: Synthetic oligonucleotide
gcaaauggcgcagguaucg

SEQ ID NO: 3050337 - RNA, 19 nt, Artificial Sequence
  Description of Artificial Sequence: Synthetic oligonucleotide
gagacaugcagcaguugug

SEQ ID NO: 3050338 - RNA, 19 nt, Artificial Sequence
  Description of Artificial Sequence: Synthetic oligonucleotide
gagaggacagcgauuguuc

SEQ ID NO: 3050339 - RNA, 19 nt, Artificial Sequence
  Description of Artificial Sequence: Synthetic oligonucleotide
accgcguuccacuucuuga

SEQ ID NO: 3050340 - RNA, 19 nt, Artificial Sequence
  Description of Artificial Sequence: Synthetic oligonucleotide
cgauuguucuguuucaccc

SEQ ID NO: 3050341 - RNA, 19 nt, Artificial Sequence
  Description of Artificial Sequence: Synthetic oligonucleotide
agacaugcagcaguuguga

SEQ ID NO: 3050342 - RNA, 19 nt, Artificial Sequence
  Description of Artificial Sequence: Synthetic oligonucleotide
uggcagagaggacagcgau

SEQ ID NO: 3050343 - RNA, 19 nt, Artificial Sequence
  Description of Artificial Sequence: Synthetic oligonucleotide
agcaguugugaaaggaaug

SEQ ID NO: 3050344 - RNA, 19 nt, Artificial Sequence
  Description of Artificial Sequence: Synthetic oligonucleotide
guccucuuguuuguuuucg

SEQ ID NO: 3050345 - RNA, 19 nt, Artificial Sequence
  Description of Artificial Sequence: Synthetic oligonucleotide
gguaucgcacucaacgucc

SEQ ID NO: 3050346 - RNA, 19 nt, Artificial Sequence
  Description of Artificial Sequence: Synthetic oligonucleotide
cagaccacaacacaguccu

SEQ ID NO: 3050347 - RNA, 19 nt, Artificial Sequence
  Description of Artificial Sequence: Synthetic oligonucleotide
cagggucacaaccacacca

SEQ ID NO: 3050348 - RNA, 19 nt, Artificial Sequence
  Description of Artificial Sequence: Synthetic oligonucleotide
uacauucuccccagaccac

SEQ ID NO: 3050349 - RNA, 19 nt, Artificial Sequence
  Description of Artificial Sequence: Synthetic oligonucleotide
caccaggaaagccuucuac

SEQ ID NO: 3050350 - RNA, 19 nt, Artificial Sequence
  Description of Artificial Sequence: Synthetic oligonucleotide
ugcaaauggcgcagguauc

SEQ ID NO: 3050351 - RNA, 19 nt, Artificial Sequence
  Description of Artificial Sequence: Synthetic oligonucleotide
cuacuaccucucauuugcc

SEQ ID NO: 3050352 - RNA, 19 nt, Artificial Sequence
  Description of Artificial Sequence: Synthetic oligonucleotide
aucgcacucaacgucccag

SEQ ID NO: 3050353 - RNA, 19 nt, Artificial Sequence
  Description of Artificial Sequence: Synthetic oligonucleotide
aacgucccagcuccacaug

SEQ ID NO: 3050354 - RNA, 19 nt, Artificial Sequence
  Description of Artificial Sequence: Synthetic oligonucleotide
aggacaagacgcagguuuc

SEQ ID NO: 3050355 - RNA, 19 nt, Artificial Sequence
  Description of Artificial Sequence: Synthetic oligonucleotide
ugauuacauucuccccaga

SEQ ID NO: 3050356 - RNA, 19 nt, Artificial Sequence
  Description of Artificial Sequence: Synthetic oligonucleotide
uaccgcguuccacuucuug

SEQ ID NO: 3050357 - RNA, 19 nt, Artificial Sequence
  Description of Artificial Sequence: Synthetic oligonucleotide
cuuggagcccgcagucccg

SEQ ID NO: 3050358 - RNA, 19 nt, Artificial Sequence
  Description of Artificial Sequence: Synthetic oligonucleotide
gcguuccacuucuugaggg

SEQ ID NO: 3050359 - RNA, 19 nt, Artificial Sequence
  Description of Artificial Sequence: Synthetic oligonucleotide
cacccacagagacaugcag

SEQ ID NO: 3050360 - RNA, 19 nt, Artificial Sequence
  Description of Artificial Sequence: Synthetic oligonucleotide
auucuuuggaccacccagu

SEQ ID NO: 3050361 - RNA, 19 nt, Artificial Sequence
  Description of Artificial Sequence: Synthetic oligonucleotide
cauuugccaauucuuugga

SEQ ID NO: 3050362 - RNA, 19 nt, Artificial Sequence
  Description of Artificial Sequence: Synthetic oligonucleotide
accucucauuugccaauuc

SEQ ID NO: 3050363 - RNA, 19 nt, Artificial Sequence
  Description of Artificial Sequence: Synthetic oligonucleotide
gcuggcagagaggacagcg

SEQ ID NO: 3050364 - RNA, 19 nt, Artificial Sequence
  Description of Artificial Sequence: Synthetic oligonucleotide
ggcuugacaucugaggcag

SEQ ID NO: 3050365 - RNA, 19 nt, Artificial Sequence
  Description of Artificial Sequence: Synthetic oligonucleotide
agggucacaaccacaccag

SEQ ID NO: 3050366 - RNA, 19 nt, Artificial Sequence
  Description of Artificial Sequence: Synthetic oligonucleotide
ucgcacucaacgucccagc

SEQ ID NO: 3050367 - RNA, 19 nt, Artificial Sequence
  Description of Artificial Sequence: Synthetic oligonucleotide
cuucuugagggagaacauc

SEQ ID NO: 3050368 - RNA, 19 nt, Artificial Sequence
  Description of Artificial Sequence: Synthetic oligonucleotide
uuuggaccacccaguccug

SEQ ID NO: 3050369 - RNA, 19 nt, Artificial Sequence
  Description of Artificial Sequence: Synthetic oligonucleotide
uccacuucuugagggagaa

SEQ ID NO: 3050370 - RNA, 19 nt, Artificial Sequence
  Description of Artificial Sequence: Synthetic oligonucleotide
uuguucuguuucacccaca

SEQ ID NO: 3050371 - RNA, 19 nt, Artificial Sequence
  Description of Artificial Sequence: Synthetic oligonucleotide
aucugaggcaggcauccau

SEQ ID NO: 3050372 - RNA, 19 nt, Artificial Sequence
  Description of Artificial Sequence: Synthetic oligonucleotide
agucccgcugugugaggac

SEQ ID NO: 3050373 - RNA, 19 nt, Artificial Sequence
  Description of Artificial Sequence: Synthetic oligonucleotide
agagaggacagcgauuguu

SEQ ID NO: 3050374 - RNA, 19 nt, Artificial Sequence
  Description of Artificial Sequence: Synthetic oligonucleotide
guuucacccacagagacau

SEQ ID NO: 3050375 - RNA, 19 nt, Artificial Sequence
  Description of Artificial Sequence: Synthetic oligonucleotide
gacccugcaaauggcgcag

SEQ ID NO: 3050376 - RNA, 19 nt, Artificial Sequence
  Description of Artificial Sequence: Synthetic oligonucleotide
ucaccuggacccugcaaau

SEQ ID NO: 3050377 - RNA, 19 nt, Artificial Sequence
  Description of Artificial Sequence: Synthetic oligonucleotide
gggagaacaucuugucgcc

SEQ ID NO: 3050378 - RNA, 19 nt, Artificial Sequence
  Description of Artificial Sequence: Synthetic oligonucleotide
uaucgcacucaacguccca

SEQ ID NO: 3050379 - RNA, 19 nt, Artificial Sequence
  Description of Artificial Sequence: Synthetic oligonucleotide
uugacaucugaggcaggca

SEQ ID NO: 3050380 - RNA, 19 nt, Artificial Sequence
  Description of Artificial Sequence: Synthetic oligonucleotide
acauucuccccagaccaca

SEQ ID NO: 3050381 - RNA, 19 nt, Artificial Sequence
  Description of Artificial Sequence: Synthetic oligonucleotide
caaccacaccaggaaagcc

SEQ ID NO: 3050382 - RNA, 19 nt, Artificial Sequence
  Description of Artificial Sequence: Synthetic oligonucleotide
cacccaguccugcuggcag

SEQ ID NO: 3050383 - RNA, 19 nt, Artificial Sequence
  Description of Artificial Sequence: Synthetic oligonucleotide
aggcauccaucaccuggac

SEQ ID NO: 3050384 - RNA, 19 nt, Artificial Sequence
  Description of Artificial Sequence: Synthetic oligonucleotide
cucuuguuuguuuucggcu

SEQ ID NO: 3050385 - RNA, 19 nt, Artificial Sequence
  Description of Artificial Sequence: Synthetic oligonucleotide
ccucuuguuuguuuucggc

SEQ ID NO: 3050386 - RNA, 19 nt, Artificial Sequence
  Description of Artificial Sequence: Synthetic oligonucleotide
uuguuuguuuucggcuuga

SEQ ID NO: 3050387 - RNA, 19 nt, Artificial Sequence
  Description of Artificial Sequence: Synthetic oligonucleotide
augcagcaguugugaaagg

SEQ ID NO: 3050388 - RNA, 19 nt, Artificial Sequence
  Description of Artificial Sequence: Synthetic oligonucleotide
uggaccacccaguccugcu

SEQ ID NO: 3050389 - RNA, 19 nt, Artificial Sequence
  Description of Artificial Sequence: Synthetic oligonucleotide
gcaguugugaaaggaauga

SEQ ID NO: 3050390 - RNA, 19 nt, Artificial Sequence
  Description of Artificial Sequence: Synthetic oligonucleotide
caggcauccaucaccugga

SEQ ID NO: 3050391 - RNA, 19 nt, Artificial Sequence
  Description of Artificial Sequence: Synthetic oligonucleotide
gcgauuguucuguuucacc

SEQ ID NO: 3050392 - RNA, 19 nt, Artificial Sequence
  Description of Artificial Sequence: Synthetic oligonucleotide
gaccacaacacaguccucu

SEQ ID NO: 3050393 - RNA, 19 nt, Artificial Sequence
  Description of Artificial Sequence: Synthetic oligonucleotide
cacaacacaguccucuugu

SEQ ID NO: 3050394 - RNA, 19 nt, Artificial Sequence
  Description of Artificial Sequence: Synthetic oligonucleotide
caaauggcgcagguaucgc

SEQ ID NO: 3050395 - RNA, 19 nt, Artificial Sequence
  Description of Artificial Sequence: Synthetic oligonucleotide
cugcaaauggcgcagguau

SEQ ID NO: 3050396 - RNA, 19 nt, Artificial Sequence
  Description of Artificial Sequence: Synthetic oligonucleotide
acaguccucuuguuuguuu

SEQ ID NO: 3050397 - RNA, 19 nt, Artificial Sequence
  Description of Artificial Sequence: Synthetic oligonucleotide
gugaggacaagacgcaggu

SEQ ID NO: 3050398 - RNA, 19 nt, Artificial Sequence
  Description of Artificial Sequence: Synthetic oligonucleotide
gugaaaggaaugauuacau

SEQ ID NO: 3050399 - RNA, 19 nt, Artificial Sequence
  Description of Artificial Sequence: Synthetic oligonucleotide
ccagaccacaacacagucc

SEQ ID NO: 3050400 - RNA, 19 nt, Artificial Sequence
  Description of Artificial Sequence: Synthetic oligonucleotide
uguuuguuuucggcuugac

SEQ ID NO: 3050401 - RNA, 19 nt, Artificial Sequence
  Description of Artificial Sequence: Synthetic oligonucleotide
uccacauggcuaccgcguu

SEQ ID NO: 3050402 - RNA, 19 nt, Artificial Sequence
  Description of Artificial Sequence: Synthetic oligonucleotide
gcuccacauggcuaccgcg

SEQ ID NO: 3050403 - RNA, 19 nt, Artificial Sequence
  Description of Artificial Sequence: Synthetic oligonucleotide
gacaucugaggcaggcauc

SEQ ID NO: 3050404 - RNA, 19 nt, Artificial Sequence
  Description of Artificial Sequence: Synthetic oligonucleotide
caauucuuuggaccaccca

SEQ ID NO: 3050405 - RNA, 19 nt, Artificial Sequence
  Description of Artificial Sequence: Synthetic oligonucleotide
gugugaggacaagacgcag

SEQ ID NO: 3050406 - RNA, 19 nt, Artificial Sequence
  Description of Artificial Sequence: Synthetic oligonucleotide
gacuuggagcccgcagucc

SEQ ID NO: 3050407 - RNA, 19 nt, Artificial Sequence
  Description of Artificial Sequence: Synthetic oligonucleotide
ucccagcuccacauggcua

SEQ ID NO: 3050408 - RNA, 19 nt, Artificial Sequence
  Description of Artificial Sequence: Synthetic oligonucleotide
acaacacaguccucuuguu

SEQ ID NO: 3050409 - RNA, 19 nt, Artificial Sequence
  Description of Artificial Sequence: Synthetic oligonucleotide
gggucacaaccacaccagg

SEQ ID NO: 3050410 - RNA, 19 nt, Artificial Sequence
  Description of Artificial Sequence: Synthetic oligonucleotide
acuucuugagggagaacau

SEQ ID NO: 3050411 - RNA, 19 nt, Artificial Sequence
  Description of Artificial Sequence: Synthetic oligonucleotide
uuggaccacccaguccugc

SEQ ID NO: 3050412 - RNA, 19 nt, Artificial Sequence
  Description of Artificial Sequence: Synthetic oligonucleotide
auggcgcagguaucgcacu

SEQ ID NO: 3050413 - RNA, 19 nt, Artificial Sequence
  Description of Artificial Sequence: Synthetic oligonucleotide
accacaacacaguccucuu

SEQ ID NO: 3050414 - RNA, 19 nt, Artificial Sequence
  Description of Artificial Sequence: Synthetic oligonucleotide
guccugcuggcagagagga

SEQ ID NO: 3050415 - RNA, 19 nt, Artificial Sequence
  Description of Artificial Sequence: Synthetic oligonucleotide
uuucacccacagagacaug

SEQ ID NO: 3050416 - RNA, 19 nt, Artificial Sequence
  Description of Artificial Sequence: Synthetic oligonucleotide
guaucgcacucaacguccc

SEQ ID NO: 3050417 - RNA, 19 nt, Artificial Sequence
  Description of Artificial Sequence: Synthetic oligonucleotide
aggcaggcauccaucaccu

SEQ ID NO: 3050418 - RNA, 19 nt, Artificial Sequence
  Description of Artificial Sequence: Synthetic oligonucleotide
cccagcuccacauggcuac

SEQ ID NO: 3050419 - RNA, 19 nt, Artificial Sequence
  Description of Artificial Sequence: Synthetic oligonucleotide
ugccaauucuuuggaccac

SEQ ID NO: 3050420 - RNA, 19 nt, Artificial Sequence
  Description of Artificial Sequence: Synthetic oligonucleotide
ggcauccaucaccuggacc

SEQ ID NO: 3050421 - RNA, 19 nt, Artificial Sequence
  Description of Artificial Sequence: Synthetic oligonucleotide
acagagacaugcagcaguu

SEQ ID NO: 3050422 - RNA, 19 nt, Artificial Sequence
  Description of Artificial Sequence: Synthetic oligonucleotide
cauggcuaccgcguuccac

SEQ ID NO: 3050423 - RNA, 19 nt, Artificial Sequence
  Description of Artificial Sequence: Synthetic oligonucleotide
cccacagagacaugcagca

SEQ ID NO: 3050424 - RNA, 19 nt, Artificial Sequence
  Description of Artificial Sequence: Synthetic oligonucleotide
guucuguuucacccacaga

SEQ ID NO: 3050425 - RNA, 19 nt, Artificial Sequence
  Description of Artificial Sequence: Synthetic oligonucleotide
uggcgcagguaucgcacuc

SEQ ID NO: 3050426 - RNA, 19 nt, Artificial Sequence
  Description of Artificial Sequence: Synthetic oligonucleotide
uuggagcccgcagucccgc

SEQ ID NO: 3050427 - RNA, 19 nt, Artificial Sequence
  Description of Artificial Sequence: Synthetic oligonucleotide
agccuucuacuaccucuca

SEQ ID NO: 3050428 - RNA, 19 nt, Artificial Sequence
  Description of Artificial Sequence: Synthetic oligonucleotide
cuggcagagaggacagcga

SEQ ID NO: 3050429 - RNA, 19 nt, Artificial Sequence
  Description of Artificial Sequence: Synthetic oligonucleotide
ucccgcugugugaggacaa

SEQ ID NO: 3050430 - RNA, 19 nt, Artificial Sequence
  Description of Artificial Sequence: Synthetic oligonucleotide
cucaacgucccagcuccac

SEQ ID NO: 3050431 - RNA, 19 nt, Artificial Sequence
  Description of Artificial Sequence: Synthetic oligonucleotide
cagcgauuguucuguuuca

SEQ ID NO: 3050432 - RNA, 19 nt, Artificial Sequence
  Description of Artificial Sequence: Synthetic oligonucleotide
ccgcguuccacuucuugag

SEQ ID NO: 3050433 - RNA, 19 nt, Artificial Sequence
  Description of Artificial Sequence: Synthetic oligonucleotide
ggucacaaccacaccagga

SEQ ID NO: 3050434 - RNA, 19 nt, Artificial Sequence
  Description of Artificial Sequence: Synthetic oligonucleotide
cuucuacuaccucucauuu

SEQ ID NO: 3050435 - RNA, 19 nt, Artificial Sequence
  Description of Artificial Sequence: Synthetic oligonucleotide
ggacccugcaaauggcgca

SEQ ID NO: 3050436 - RNA, 19 nt, Artificial Sequence
  Description of Artificial Sequence: Synthetic oligonucleotide
gccaauucuuuggaccacc

SEQ ID NO: 3050437 - RNA, 19 nt, Artificial Sequence
  Description of Artificial Sequence: Synthetic oligonucleotide
acccaguccugcuggcaga

SEQ ID NO: 3050438 - RNA, 19 nt, Artificial Sequence
  Description of Artificial Sequence: Synthetic oligonucleotide
ccuggacccugcaaauggc

SEQ ID NO: 3050439 - RNA, 19 nt, Artificial Sequence
  Description of Artificial Sequence: Synthetic oligonucleotide
acaccaggaaagccuucua

SEQ ID NO: 3050440 - RNA, 19 nt, Artificial Sequence
  Description of Artificial Sequence: Synthetic oligonucleotide
cagcaguugugaaaggaau

SEQ ID NO: 3050441 - RNA, 19 nt, Artificial Sequence
  Description of Artificial Sequence: Synthetic oligonucleotide
cagguaucgcacucaacgu

SEQ ID NO: 3050442 - RNA, 19 nt, Artificial Sequence
  Description of Artificial Sequence: Synthetic oligonucleotide
ggagaacaucuugucgccc

SEQ ID NO: 3050443 - RNA, 19 nt, Artificial Sequence
  Description of Artificial Sequence: Synthetic oligonucleotide
uaccucucauuugccaauu

SEQ ID NO: 3050444 - RNA, 19 nt, Artificial Sequence
  Description of Artificial Sequence: Synthetic oligonucleotide
cauucuccccagaccacaa

SEQ ID NO: 3050445 - RNA, 19 nt, Artificial Sequence
  Description of Artificial Sequence: Synthetic oligonucleotide
guuuucggcuugacaucug

SEQ ID NO: 3050446 - RNA, 19 nt, Artificial Sequence
  Description of Artificial Sequence: Synthetic oligonucleotide
ccugcuggcagagaggaca

SEQ ID NO: 3050447 - RNA, 19 nt, Artificial Sequence
  Description of Artificial Sequence: Synthetic oligonucleotide
accacaccaggaaagccuu

SEQ ID NO: 3050448 - RNA, 19 nt, Artificial Sequence
  Description of Artificial Sequence: Synthetic oligonucleotide
cuccacauggcuaccgcgu

SEQ ID NO: 3050449 - RNA, 19 nt, Artificial Sequence
  Description of Artificial Sequence: Synthetic oligonucleotide
uccugcuggcagagaggac

SEQ ID NO: 3050450 - RNA, 19 nt, Artificial Sequence
  Description of Artificial Sequence: Synthetic oligonucleotide
cgcugugugaggacaagac

SEQ ID NO: 3050451 - RNA, 19 nt, Artificial Sequence
  Description of Artificial Sequence: Synthetic oligonucleotide
ggaccacccaguccugcug

SEQ ID NO: 3050452 - RNA, 19 nt, Artificial Sequence
  Description of Artificial Sequence: Synthetic oligonucleotide
caccuggacccugcaaaug

SEQ ID NO: 3050453 - RNA, 19 nt, Artificial Sequence
  Description of Artificial Sequence: Synthetic oligonucleotide
acccugcaaauggcgcagg

SEQ ID NO: 3050454 - RNA, 19 nt, Artificial Sequence
  Description of Artificial Sequence: Synthetic oligonucleotide
ugaggacaagacgcagguu

SEQ ID NO: 3050455 - RNA, 19 nt, Artificial Sequence
  Description of Artificial Sequence: Synthetic oligonucleotide
gcagcaguugugaaaggaa

SEQ ID NO: 3050456 - RNA, 19 nt, Artificial Sequence
  Description of Artificial Sequence: Synthetic oligonucleotide
agaccacaacacaguccuc

SEQ ID NO: 3050457 - RNA, 19 nt, Artificial Sequence
  Description of Artificial Sequence: Synthetic oligonucleotide
ccaggaaagccuucuacua

SEQ ID NO: 3050458 - RNA, 19 nt, Artificial Sequence
  Description of Artificial Sequence: Synthetic oligonucleotide
gcacucaacgucccagcuc

SEQ ID NO: 3050459 - RNA, 19 nt, Artificial Sequence
  Description of Artificial Sequence: Synthetic oligonucleotide
cccagaccacaacacaguc

SEQ ID NO: 3050460 - RNA, 19 nt, Artificial Sequence
  Description of Artificial Sequence: Synthetic oligonucleotide
gcuaccgcguuccacuucu

SEQ ID NO: 3050461 - RNA, 19 nt, Artificial Sequence
  Description of Artificial Sequence: Synthetic oligonucleotide
cuaccucucauuugccaau

SEQ ID NO: 3050462 - RNA, 19 nt, Artificial Sequence
  Description of Artificial Sequence: Synthetic oligonucleotide
ccacaacacaguccucuug

SEQ ID NO: 3050463 - RNA, 19 nt, Artificial Sequence
  Description of Artificial Sequence: Synthetic oligonucleotide
ugcuggcagagaggacagc

SEQ ID NO: 3050464 - RNA, 19 nt, Artificial Sequence
  Description of Artificial Sequence: Synthetic oligonucleotide
gacagcgauuguucuguuu

SEQ ID NO: 3050465 - RNA, 19 nt, Artificial Sequence
  Description of Artificial Sequence: Synthetic oligonucleotide
uggcuaccgcguuccacuu

SEQ ID NO: 3050466 - RNA, 19 nt, Artificial Sequence
  Description of Artificial Sequence: Synthetic oligonucleotide
gucccagcuccacauggcu

SEQ ID NO: 3050467 - RNA, 19 nt, Artificial Sequence
  Description of Artificial Sequence: Synthetic oligonucleotide
caacgucccagcuccacau

SEQ ID NO: 3050468 - RNA, 19 nt, Artificial Sequence
  Description of Artificial Sequence: Synthetic oligonucleotide
ggagcccgcagucccgcug

SEQ ID NO: 3050469 - RNA, 19 nt, Artificial Sequence
  Description of Artificial Sequence: Synthetic oligonucleotide
gucccgcugugugaggaca

SEQ ID NO: 3050470 - RNA, 19 nt, Artificial Sequence
  Description of Artificial Sequence: Synthetic oligonucleotide
cacaccaggaaagccuucu

SEQ ID NO: 3050471 - RNA, 19 nt, Artificial Sequence
  Description of Artificial Sequence: Synthetic oligonucleotide
caguccucuuguuuguuuu

SEQ ID NO: 3050472 - RNA, 19 nt, Artificial Sequence
  Description of Artificial Sequence: Synthetic oligonucleotide
cccgcagucccgcugugug

SEQ ID NO: 3050473 - RNA, 19 nt, Artificial Sequence
  Description of Artificial Sequence: Synthetic oligonucleotide
caucaccuggacccugcaa

SEQ ID NO: 3050474 - RNA, 19 nt, Artificial Sequence
  Description of Artificial Sequence: Synthetic oligonucleotide
cgcguuccacuucuugagg

SEQ ID NO: 3050475 - RNA, 19 nt, Artificial Sequence
  Description of Artificial Sequence: Synthetic oligonucleotide
ccagggucacaaccacacc

SEQ ID NO: 3050476 - RNA, 19 nt, Artificial Sequence
  Description of Artificial Sequence: Synthetic oligonucleotide
gagcccgcagucccgcugu

SEQ ID NO: 3050477 - RNA, 19 nt, Artificial Sequence
  Description of Artificial Sequence: Synthetic oligonucleotide
cagucccgcugugugagga

SEQ ID NO: 3050478 - RNA, 19 nt, Artificial Sequence
  Description of Artificial Sequence: Synthetic oligonucleotide
cccgacuuggagcccgcag

SEQ ID NO: 3050479 - RNA, 19 nt, Artificial Sequence
  Description of Artificial Sequence: Synthetic oligonucleotide
uggagcccgcagucccgcu

SEQ ID NO: 3050480 - RNA, 19 nt, Artificial Sequence
  Description of Artificial Sequence: Synthetic oligonucleotide
gcagucccgcugugugagg

SEQ ID NO: 3050481 - RNA, 19 nt, Artificial Sequence
  Description of Artificial Sequence: Synthetic oligonucleotide
ccucucauuugccaauucu

SEQ ID NO: 3050482 - RNA, 19 nt, Artificial Sequence
  Description of Artificial Sequence: Synthetic oligonucleotide
cgucccagcuccacauggc

SEQ ID NO: 3050483 - RNA, 19 nt, Artificial Sequence
  Description of Artificial Sequence: Synthetic oligonucleotide
gcuugacaucugaggcagg

SEQ ID NO: 3050484 - RNA, 19 nt, Artificial Sequence
  Description of Artificial Sequence: Synthetic oligonucleotide
caguugugaaaggaaugau

SEQ ID NO: 3050485 - RNA, 19 nt, Artificial Sequence
  Description of Artificial Sequence: Synthetic oligonucleotide
ggaaagccuucuacuaccu

SEQ ID NO: 3050486 - RNA, 19 nt, Artificial Sequence
  Description of Artificial Sequence: Synthetic oligonucleotide
ccacagagacaugcagcag

SEQ ID NO: 3050487 - RNA, 19 nt, Artificial Sequence
  Description of Artificial Sequence: Synthetic oligonucleotide
cgcagucccgcugugugag

SEQ ID NO: 3050488 - RNA, 19 nt, Artificial Sequence
  Description of Artificial Sequence: Synthetic oligonucleotide
ccacauggcuaccgcguuc

SEQ ID NO: 3050489 - RNA, 19 nt, Artificial Sequence
  Description of Artificial Sequence: Synthetic oligonucleotide
cgacuuggagcccgcaguc

SEQ ID NO: 3050490 - RNA, 19 nt, Artificial Sequence
  Description of Artificial Sequence: Synthetic oligonucleotide
agcccgcagucccgcugug

SEQ ID NO: 3050491 - RNA, 19 nt, Artificial Sequence
  Description of Artificial Sequence: Synthetic oligonucleotide
cguuccacuucuugaggga

SEQ ID NO: 3050492 - RNA, 19 nt, Artificial Sequence
  Description of Artificial Sequence: Synthetic oligonucleotide
ggcaggcauccaucaccug

SEQ ID NO: 3050493 - RNA, 19 nt, Artificial Sequence
  Description of Artificial Sequence: Synthetic oligonucleotide
ggcgcagguaucgcacuca

SEQ ID NO: 3050494 - RNA, 19 nt, Artificial Sequence
  Description of Artificial Sequence: Synthetic oligonucleotide
cccaguccugcuggcagag

SEQ ID NO: 3050495 - RNA, 19 nt, Artificial Sequence
  Description of Artificial Sequence: Synthetic oligonucleotide
ggcuaccgcguuccacuuc

SEQ ID NO: 3050496 - RNA, 19 nt, Artificial Sequence
  Description of Artificial Sequence: Synthetic oligonucleotide
caucugaggcaggcaucca

SEQ ID NO: 3050497 - RNA, 19 nt, Artificial Sequence
  Description of Artificial Sequence: Synthetic oligonucleotide
acucaacgucccagcucca

SEQ ID NO: 3050498 - RNA, 19 nt, Artificial Sequence
  Description of Artificial Sequence: Synthetic oligonucleotide
cggcuugacaucugaggca

SEQ ID NO: 3050499 - RNA, 19 nt, Artificial Sequence
  Description of Artificial Sequence: Synthetic oligonucleotide
gcgcagguaucgcacucaa

SEQ ID NO: 3050500 - RNA, 19 nt, Artificial Sequence
  Description of Artificial Sequence: Synthetic oligonucleotide
ccacaccaggaaagccuuc

SEQ ID NO: 3050501 - RNA, 19 nt, Artificial Sequence
  Description of Artificial Sequence: Synthetic oligonucleotide
gccuucuacuaccucucau

SEQ ID NO: 3050502 - RNA, 19 nt, Artificial Sequence
  Description of Artificial Sequence: Synthetic oligonucleotide
cauccaucaccuggacccu

SEQ ID NO: 3050503 - RNA, 19 nt, Artificial Sequence
  Description of Artificial Sequence: Synthetic oligonucleotide
ccgacuuggagcccgcagu

SEQ ID NO: 3050504 - RNA, 19 nt, Artificial Sequence
  Description of Artificial Sequence: Synthetic oligonucleotide
ccagcuccacauggcuacc

SEQ ID NO: 3050505 - RNA, 19 nt, Artificial Sequence
  Description of Artificial Sequence: Synthetic oligonucleotide
cgcagguaucgcacucaac

SEQ ID NO: 3050506 - RNA, 19 nt, Artificial Sequence
  Description of Artificial Sequence: Synthetic oligonucleotide
cccgcugugugaggacaag

SEQ ID NO: 3050507 - RNA, 19 nt, Artificial Sequence
  Description of Artificial Sequence: Synthetic oligonucleotide
cagagaggacagcgauugu

SEQ ID NO: 3050508 - RNA, 19 nt, Artificial Sequence
  Description of Artificial Sequence: Synthetic oligonucleotide
ccccagaccacaacacagu

SEQ ID NO: 3050509 - RNA, 19 nt, Artificial Sequence
  Description of Artificial Sequence: Synthetic oligonucleotide
ccugcaaauggcgcaggua

SEQ ID NO: 3050510 - RNA, 19 nt, Artificial Sequence
  Description of Artificial Sequence: Synthetic oligonucleotide
ccacuucuugagggagaac

SEQ ID NO: 3050511 - RNA, 19 nt, Artificial Sequence
  Description of Artificial Sequence: Synthetic oligonucleotide
ccaucaccuggacccugca

SEQ ID NO: 3050512 - RNA, 19 nt, Artificial Sequence
  Description of Artificial Sequence: Synthetic oligonucleotide
ccgcugugugaggacaaga

SEQ ID NO: 3050513 - RNA, 19 nt, Artificial Sequence
  Description of Artificial Sequence: Synthetic oligonucleotide
ccgcagucccgcuguguga

SEQ ID NO: 3050514 - RNA, 19 nt, Artificial Sequence
  Description of Artificial Sequence: Synthetic oligonucleotide
ggcagagaggacagcgauu

SEQ ID NO: 3050515 - RNA, 19 nt, Artificial Sequence
  Description of Artificial Sequence: Synthetic oligonucleotide
cacaguccucuuguuuguu

SEQ ID NO: 3050516 - RNA, 19 nt, Artificial Sequence
  Description of Artificial Sequence: Synthetic oligonucleotide
ccacccaguccugcuggca

SEQ ID NO: 3050517 - RNA, 19 nt, Artificial Sequence
  Description of Artificial Sequence: Synthetic oligonucleotide
ggacagcgauuguucuguu

SEQ ID NO: 3050518 - RNA, 19 nt, Artificial Sequence
  Description of Artificial Sequence: Synthetic oligonucleotide
cccugcaaauggcgcaggu

SEQ ID NO: 3050519 - RNA, 19 nt, Artificial Sequence
  Description of Artificial Sequence: Synthetic oligonucleotide
cgcacucaacgucccagcu

SEQ ID NO: 3050520 - RNA, 19 nt, Artificial Sequence
  Description of Artificial Sequence: Synthetic oligonucleotide
cuaccgcguuccacuucuu

SEQ ID NO: 3050521 - RNA, 19 nt, Artificial Sequence
  Description of Artificial Sequence: Synthetic oligonucleotide
gcccgcagucccgcugugu

SEQ ID NO: 3050522 - RNA, 19 nt, Artificial Sequence
  Description of Artificial Sequence: Synthetic oligonucleotide
ccccgacuuggagcccgca

SEQ ID NO: 3050523 - RNA, 19 nt, Artificial Sequence
  Description of Artificial Sequence: Synthetic oligonucleotide
aaaaugauauuccaaggac

SEQ ID NO: 3050524 - RNA, 19 nt, Artificial Sequence
  Description of Artificial Sequence: Synthetic oligonucleotide
aagaaaaugauauuccaag

SEQ ID NO: 3050525 - RNA, 19 nt, Artificial Sequence
  Description of Artificial Sequence: Synthetic oligonucleotide
aaccaauuuggccaaaacc

SEQ ID NO: 3050526 - RNA, 19 nt, Artificial Sequence
  Description of Artificial Sequence: Synthetic oligonucleotide
agagaaaaugcguagagac

SEQ ID NO: 3050527 - RNA, 19 nt, Artificial Sequence
  Description of Artificial Sequence: Synthetic oligonucleotide
ucucacaacauccacaggg

SEQ ID NO: 3050528 - RNA, 19 nt, Artificial Sequence
  Description of Artificial Sequence: Synthetic oligonucleotide
aaaacccuuauauagagca

SEQ ID NO: 3050529 - RNA, 19 nt, Artificial Sequence
  Description of Artificial Sequence: Synthetic oligonucleotide
ugucaaaagaaaaugauau

SEQ ID NO: 3050530 - RNA, 19 nt, Artificial Sequence
  Description of Artificial Sequence: Synthetic oligonucleotide
aaaugauauuccaaggacc

SEQ ID NO: 3050531 - RNA, 19 nt, Artificial Sequence
  Description of Artificial Sequence: Synthetic oligonucleotide
uauuccaaggaccaaggcg

SEQ ID NO: 3050532 - RNA, 19 nt, Artificial Sequence
  Description of Artificial Sequence: Synthetic oligonucleotide
accaauuuggccaaaaccc

SEQ ID NO: 3050533 - RNA, 19 nt, Artificial Sequence
  Description of Artificial Sequence: Synthetic oligonucleotide
aaaagaaaaugauauucca

SEQ ID NO: 3050534 - RNA, 19 nt, Artificial Sequence
  Description of Artificial Sequence: Synthetic oligonucleotide
cuuugauucaucauacgcg

SEQ ID NO: 3050535 - RNA, 19 nt, Artificial Sequence
  Description of Artificial Sequence: Synthetic oligonucleotide
ucuuugauucaucauacgc

SEQ ID NO: 3050536 - RNA, 19 nt, Artificial Sequence
  Description of Artificial Sequence: Synthetic oligonucleotide
gaugucauagacuggaagc

SEQ ID NO: 3050537 - RNA, 19 nt, Artificial Sequence
  Description of Artificial Sequence: Synthetic oligonucleotide
caaaagaaaaugauauucc

SEQ ID NO: 3050538 - RNA, 19 nt, Artificial Sequence
  Description of Artificial Sequence: Synthetic oligonucleotide
agaaaaugcguagagacgg

SEQ ID NO: 3050539 - RNA, 19 nt, Artificial Sequence
  Description of Artificial Sequence: Synthetic oligonucleotide
agaaaaugauauuccaagg

SEQ ID NO: 3050540 - RNA, 19 nt, Artificial Sequence
  Description of Artificial Sequence: Synthetic oligonucleotide
auuccaaggaccaaggcgc

SEQ ID NO: 3050541 - RNA, 19 nt, Artificial Sequence
  Description of Artificial Sequence: Synthetic oligonucleotide
uaugucaaaagaaaaugau

SEQ ID NO: 3050542 - RNA, 19 nt, Artificial Sequence
  Description of Artificial Sequence: Synthetic oligonucleotide
gaaaaugauauuccaagga

SEQ ID NO: 3050543 - RNA, 19 nt, Artificial Sequence
  Description of Artificial Sequence: Synthetic oligonucleotide
uuugauucaucauacgcgu

SEQ ID NO: 3050544 - RNA, 19 nt, Artificial Sequence
  Description of Artificial Sequence: Synthetic oligonucleotide
uaccuuuguagccagagca

SEQ ID NO: 3050545 - RNA, 19 nt, Artificial Sequence
  Description of Artificial Sequence: Synthetic oligonucleotide
aauaggcaauccaagguac

SEQ ID NO: 3050546 - RNA, 19 nt, Artificial Sequence
  Description of Artificial Sequence: Synthetic oligonucleotide
ugcaauaggcaauccaagg

SEQ ID NO: 3050547 - RNA, 19 nt, Artificial Sequence
  Description of Artificial Sequence: Synthetic oligonucleotide
aaugcguagagacgguguc

SEQ ID NO: 3050548 - RNA, 19 nt, Artificial Sequence
  Description of Artificial Sequence: Synthetic oligonucleotide
uuccaugucugcaauaggc

SEQ ID NO: 3050549 - RNA, 19 nt, Artificial Sequence
  Description of Artificial Sequence: Synthetic oligonucleotide
aaugauauuccaaggacca

SEQ ID NO: 3050550 - RNA, 19 nt, Artificial Sequence
  Description of Artificial Sequence: Synthetic oligonucleotide
uccacaccaacaacaaugg

SEQ ID NO: 3050551 - RNA, 19 nt, Artificial Sequence
  Description of Artificial Sequence: Synthetic oligonucleotide
ucauaugucaaaagaaaau

SEQ ID NO: 3050552 - RNA, 19 nt, Artificial Sequence
  Description of Artificial Sequence: Synthetic oligonucleotide
cauaugucaaaagaaaaug

SEQ ID NO: 3050553 - RNA, 19 nt, Artificial Sequence
  Description of Artificial Sequence: Synthetic oligonucleotide
ucugcaauaggcaauccaa

SEQ ID NO: 3050554 - RNA, 19 nt, Artificial Sequence
  Description of Artificial Sequence: Synthetic oligonucleotide
caaggcgcaaccaauuugg

SEQ ID NO: 3050555 - RNA, 19 nt, Artificial Sequence
  Description of Artificial Sequence: Synthetic oligonucleotide
ugaugucauagacuggaag

SEQ ID NO: 3050556 - RNA, 19 nt, Artificial Sequence
  Description of Artificial Sequence: Synthetic oligonucleotide
guucucacaacauccacag

SEQ ID NO: 3050557 - RNA, 19 nt, Artificial Sequence
  Description of Artificial Sequence: Synthetic oligonucleotide
ucgaaggacucuuugauuc

SEQ ID NO: 3050558 - RNA, 19 nt, Artificial Sequence
  Description of Artificial Sequence: Synthetic oligonucleotide
ugcucauaugucaaaagaa

SEQ ID NO: 3050559 - RNA, 19 nt, Artificial Sequence
  Description of Artificial Sequence: Synthetic oligonucleotide
uccaagguaccuuuguagc

SEQ ID NO: 3050560 - RNA, 19 nt, Artificial Sequence
  Description of Artificial Sequence: Synthetic oligonucleotide
ugaagcuggagagaaaaug

SEQ ID NO: 3050561 - RNA, 19 nt, Artificial Sequence
  Description of Artificial Sequence: Synthetic oligonucleotide
acauccacaggguuugagg

SEQ ID NO: 3050562 - RNA, 19 nt, Artificial Sequence
  Description of Artificial Sequence: Synthetic oligonucleotide
auauuccaaggaccaaggc

SEQ ID NO: 3050563 - RNA, 19 nt, Artificial Sequence
  Description of Artificial Sequence: Synthetic oligonucleotide
ucuuggugaugucauagac

SEQ ID NO: 3050564 - RNA, 19 nt, Artificial Sequence
  Description of Artificial Sequence: Synthetic oligonucleotide
gacggugucucccaucagg

SEQ ID NO: 3050565 - RNA, 19 nt, Artificial Sequence
  Description of Artificial Sequence: Synthetic oligonucleotide
gagaaaaugcguagagacg

SEQ ID NO: 3050566 - RNA, 19 nt, Artificial Sequence
  Description of Artificial Sequence: Synthetic oligonucleotide
acucuuugauucaucauac

SEQ ID NO: 3050567 - RNA, 19 nt, Artificial Sequence
  Description of Artificial Sequence: Synthetic oligonucleotide
ggccaaaacccuuauauag

SEQ ID NO: 3050568 - RNA, 19 nt, Artificial Sequence
  Description of Artificial Sequence: Synthetic oligonucleotide
auccaagguaccuuuguag

SEQ ID NO: 3050569 - RNA, 19 nt, Artificial Sequence
  Description of Artificial Sequence: Synthetic oligonucleotide
cauccacaggguuugaggc

SEQ ID NO: 3050570 - RNA, 19 nt, Artificial Sequence
  Description of Artificial Sequence: Synthetic oligonucleotide
uagacuggaagcuccacac

SEQ ID NO: 3050571 - RNA, 19 nt, Artificial Sequence
  Description of Artificial Sequence: Synthetic oligonucleotide
cuuuguagccagagcaucc

SEQ ID NO: 3050572 - RNA, 19 nt, Artificial Sequence
  Description of Artificial Sequence: Synthetic oligonucleotide
uaucaggugcuucuuggug

SEQ ID NO: 3050573 - RNA, 19 nt, Artificial Sequence
  Description of Artificial Sequence: Synthetic oligonucleotide
aggguuugaggccaaagcu

SEQ ID NO: 3050574 - RNA, 19 nt, Artificial Sequence
  Description of Artificial Sequence: Synthetic oligonucleotide
uuuguagccagagcauccg

SEQ ID NO: 3050575 - RNA, 19 nt, Artificial Sequence
  Description of Artificial Sequence: Synthetic oligonucleotide
gacucuuugauucaucaua

SEQ ID NO: 3050576 - RNA, 19 nt, Artificial Sequence
  Description of Artificial Sequence: Synthetic oligonucleotide
uccgccaucucgaaggacu

SEQ ID NO: 3050577 - RNA, 19 nt, Artificial Sequence
  Description of Artificial Sequence: Synthetic oligonucleotide
aaacccuucguucuuccau

SEQ ID NO: 3050578 - RNA, 19 nt, Artificial Sequence
  Description of Artificial Sequence: Synthetic oligonucleotide
uguagccagagcauccgcc

SEQ ID NO: 3050579 - RNA, 19 nt, Artificial Sequence
  Description of Artificial Sequence: Synthetic oligonucleotide
uccaugucugcaauaggca

SEQ ID NO: 3050580 - RNA, 19 nt, Artificial Sequence
  Description of Artificial Sequence: Synthetic oligonucleotide
cagagcauccgccaucucg

SEQ ID NO: 3050581 - RNA, 19 nt, Artificial Sequence
  Description of Artificial Sequence: Synthetic oligonucleotide
aacccuucguucuuccaug

SEQ ID NO: 3050582 - RNA, 19 nt, Artificial Sequence
  Description of Artificial Sequence: Synthetic oligonucleotide
aggcgcaaccaauuuggcc

SEQ ID NO: 3050583 - RNA, 19 nt, Artificial Sequence
  Description of Artificial Sequence: Synthetic oligonucleotide
cacaggugaagcuggagag

SEQ ID NO: 3050584 - RNA, 19 nt, Artificial Sequence
  Description of Artificial Sequence: Synthetic oligonucleotide
auccacaggguuugaggcc

SEQ ID NO: 3050585 - RNA, 19 nt, Artificial Sequence
  Description of Artificial Sequence: Synthetic oligonucleotide
ucaucauacgcguucucac

SEQ ID NO: 3050586 - RNA, 19 nt, Artificial Sequence
  Description of Artificial Sequence: Synthetic oligonucleotide
cucccaucaggccugagag

SEQ ID NO: 3050587 - RNA, 19 nt, Artificial Sequence
  Description of Artificial Sequence: Synthetic oligonucleotide
aggacucuuugauucauca

SEQ ID NO: 3050588 - RNA, 19 nt, Artificial Sequence
  Description of Artificial Sequence: Synthetic oligonucleotide
aaaaugcguagagacggug

SEQ ID NO: 3050589 - RNA, 19 nt, Artificial Sequence
  Description of Artificial Sequence: Synthetic oligonucleotide
aaagcucccaccagaccac

SEQ ID NO: 3050590 - RNA, 19 nt, Artificial Sequence
  Description of Artificial Sequence: Synthetic oligonucleotide
agacuggaagcuccacacc

SEQ ID NO: 3050591 - RNA, 19 nt, Artificial Sequence
  Description of Artificial Sequence: Synthetic oligonucleotide
aucaggugcuucuugguga

SEQ ID NO: 3050592 - RNA, 19 nt, Artificial Sequence
  Description of Artificial Sequence: Synthetic oligonucleotide
cacaaguccaguuucuuca

SEQ ID NO: 3050593 - RNA, 19 nt, Artificial Sequence
  Description of Artificial Sequence: Synthetic oligonucleotide
aacccuuauauagagcaaa

SEQ ID NO: 3050594 - RNA, 19 nt, Artificial Sequence
  Description of Artificial Sequence: Synthetic oligonucleotide
acgcguucucacaacaucc

SEQ ID NO: 3050595 - RNA, 19 nt, Artificial Sequence
  Description of Artificial Sequence: Synthetic oligonucleotide
gcauccgccaucucgaagg

SEQ ID NO: 3050596 - RNA, 19 nt, Artificial Sequence
  Description of Artificial Sequence: Synthetic oligonucleotide
caaagcucccaccagacca

SEQ ID NO: 3050597 - RNA, 19 nt, Artificial Sequence
  Description of Artificial Sequence: Synthetic oligonucleotide
auagacuggaagcuccaca

SEQ ID NO: 3050598 - RNA, 19 nt, Artificial Sequence
  Description of Artificial Sequence: Synthetic oligonucleotide
cuucuuggugaugucauag

SEQ ID NO: 3050599 - RNA, 19 nt, Artificial Sequence
  Description of Artificial Sequence: Synthetic oligonucleotide
cucauaugucaaaagaaaa

SEQ ID NO: 3050600 - RNA, 19 nt, Artificial Sequence
  Description of Artificial Sequence: Synthetic oligonucleotide
ggagagaaaaugcguagag

SEQ ID NO: 3050601 - RNA, 19 nt, Artificial Sequence
  Description of Artificial Sequence: Synthetic oligonucleotide
caaaacccuuauauagagc

SEQ ID NO: 3050602 - RNA, 19 nt, Artificial Sequence
  Description of Artificial Sequence: Synthetic oligonucleotide
caggguuugaggccaaagc

SEQ ID NO: 3050603 - RNA, 19 nt, Artificial Sequence
  Description of Artificial Sequence: Synthetic oligonucleotide
cuucguucuuccaugucug

SEQ ID NO: 3050604 - RNA, 19 nt, Artificial Sequence
  Description of Artificial Sequence: Synthetic oligonucleotide
ucucccaucaggccugaga

SEQ ID NO: 3050605 - RNA, 19 nt, Artificial Sequence
  Description of Artificial Sequence: Synthetic oligonucleotide
cugcaauaggcaauccaag

SEQ ID NO: 3050606 - RNA, 19 nt, Artificial Sequence
  Description of Artificial Sequence: Synthetic oligonucleotide
ggcgcaaccaauuuggcca

SEQ ID NO: 3050607 - RNA, 19 nt, Artificial Sequence
  Description of Artificial Sequence: Synthetic oligonucleotide
cucuuugauucaucauacg

SEQ ID NO: 3050608 - RNA, 19 nt, Artificial Sequence
  Description of Artificial Sequence: Synthetic oligonucleotide
aagcuccacaccaacaaca

SEQ ID NO: 3050609 - RNA, 19 nt, Artificial Sequence
  Description of Artificial Sequence: Synthetic oligonucleotide
auaggcaauccaagguacc

SEQ ID NO: 3050610 - RNA, 19 nt, Artificial Sequence
  Description of Artificial Sequence: Synthetic oligonucleotide
augucugcaauaggcaauc

SEQ ID NO: 3050611 - RNA, 19 nt, Artificial Sequence
  Description of Artificial Sequence: Synthetic oligonucleotide
acaaguccaguuucuucag

SEQ ID NO: 3050612 - RNA, 19 nt, Artificial Sequence
  Description of Artificial Sequence: Synthetic oligonucleotide
uacgcguucucacaacauc

SEQ ID NO: 3050613 - RNA, 19 nt, Artificial Sequence
  Description of Artificial Sequence: Synthetic oligonucleotide
aaaugcguagagacggugu

SEQ ID NO: 3050614 - RNA, 19 nt, Artificial Sequence
  Description of Artificial Sequence: Synthetic oligonucleotide
uggucacaaguccaguuuc

SEQ ID NO: 3050615 - RNA, 19 nt, Artificial Sequence
  Description of Artificial Sequence: Synthetic oligonucleotide
aaaacccuucguucuucca

SEQ ID NO: 3050616 - RNA, 19 nt, Artificial Sequence
  Description of Artificial Sequence: Synthetic oligonucleotide
ccaaaacccuuauauagag

SEQ ID NO: 3050617 - RNA, 19 nt, Artificial Sequence
  Description of Artificial Sequence: Synthetic oligonucleotide
ucauagacuggaagcucca

SEQ ID NO: 3050618 - RNA, 19 nt, Artificial Sequence
  Description of Artificial Sequence: Synthetic oligonucleotide
gagacggugucucccauca

SEQ ID NO: 3050619 - RNA, 19 nt, Artificial Sequence
  Description of Artificial Sequence: Synthetic oligonucleotide
aucucgaaggacucuuuga

SEQ ID NO: 3050620 - RNA, 19 nt, Artificial Sequence
  Description of Artificial Sequence: Synthetic oligonucleotide
augucauagacuggaagcu

SEQ ID NO: 3050621 - RNA, 19 nt, Artificial Sequence
  Description of Artificial Sequence: Synthetic oligonucleotide
uuucuucagcugcucauau

SEQ ID NO: 3050622 - RNA, 19 nt, Artificial Sequence
  Description of Artificial Sequence: Synthetic oligonucleotide
gaggccaaagcucccacca

SEQ ID NO: 3050623 - RNA, 19 nt, Artificial Sequence
  Description of Artificial Sequence: Synthetic oligonucleotide
ucacaaguccaguuucuuc

SEQ ID NO: 3050624 - RNA, 19 nt, Artificial Sequence
  Description of Artificial Sequence: Synthetic oligonucleotide
uggagagaaaaugcguaga

SEQ ID NO: 3050625 - RNA, 19 nt, Artificial Sequence
  Description of Artificial Sequence: Synthetic oligonucleotide
aacauccacaggguuugag

SEQ ID NO: 3050626 - RNA, 19 nt, Artificial Sequence
  Description of Artificial Sequence: Synthetic oligonucleotide
aucauacgcguucucacaa

SEQ ID NO: 3050627 - RNA, 19 nt, Artificial Sequence
  Description of Artificial Sequence: Synthetic oligonucleotide
uucucacaacauccacagg

SEQ ID NO: 3050628 - RNA, 19 nt, Artificial Sequence
  Description of Artificial Sequence: Synthetic oligonucleotide
uggaagcuccacaccaaca

SEQ ID NO: 3050629 - RNA, 19 nt, Artificial Sequence
  Description of Artificial Sequence: Synthetic oligonucleotide
acggugucucccaucaggc

SEQ ID NO: 3050630 - RNA, 19 nt, Artificial Sequence
  Description of Artificial Sequence: Synthetic oligonucleotide
aaggcgcaaccaauuuggc

SEQ ID NO: 3050631 - RNA, 19 nt, Artificial Sequence
  Description of Artificial Sequence: Synthetic oligonucleotide
cugcucauaugucaaaaga

SEQ ID NO: 3050632 - RNA, 19 nt, Artificial Sequence
  Description of Artificial Sequence: Synthetic oligonucleotide
uggugaugucauagacugg

SEQ ID NO: 3050633 - RNA, 19 nt, Artificial Sequence
  Description of Artificial Sequence: Synthetic oligonucleotide
aguccaguuucuucagcug

SEQ ID NO: 3050634 - RNA, 19 nt, Artificial Sequence
  Description of Artificial Sequence: Synthetic oligonucleotide
uccacaggguuugaggcca

SEQ ID NO: 3050635 - RNA, 19 nt, Artificial Sequence
  Description of Artificial Sequence: Synthetic oligonucleotide
gagaguaucaggugcuucu

SEQ ID NO: 3050636 - RNA, 19 nt, Artificial Sequence
  Description of Artificial Sequence: Synthetic oligonucleotide
uuugaggccaaagcuccca

SEQ ID NO: 3050637 - RNA, 19 nt, Artificial Sequence
  Description of Artificial Sequence: Synthetic oligonucleotide
gguuugaggccaaagcucc

SEQ ID NO: 3050638 - RNA, 19 nt, Artificial Sequence
  Description of Artificial Sequence: Synthetic oligonucleotide
augucaaaagaaaaugaua

SEQ ID NO: 3050639 - RNA, 19 nt, Artificial Sequence
  Description of Artificial Sequence: Synthetic oligonucleotide
aauuuggccaaaacccuua

SEQ ID NO: 3050640 - RNA, 19 nt, Artificial Sequence
  Description of Artificial Sequence: Synthetic oligonucleotide
uaggcaauccaagguaccu

SEQ ID NO: 3050641 - RNA, 19 nt, Artificial Sequence
  Description of Artificial Sequence: Synthetic oligonucleotide
caaccaauuuggccaaaac

SEQ ID NO: 3050642 - RNA, 19 nt, Artificial Sequence
  Description of Artificial Sequence: Synthetic oligonucleotide
ggugaugucauagacugga

SEQ ID NO: 3050643 - RNA, 19 nt, Artificial Sequence
  Description of Artificial Sequence: Synthetic oligonucleotide
agagacggugucucccauc

SEQ ID NO: 3050644 - RNA, 19 nt, Artificial Sequence
  Description of Artificial Sequence: Synthetic oligonucleotide
gagagaaaaugcguagaga

SEQ ID NO: 3050645 - RNA, 19 nt, Artificial Sequence
  Description of Artificial Sequence: Synthetic oligonucleotide
uuguagccagagcauccgc

SEQ ID NO: 3050646 - RNA, 19 nt, Artificial Sequence
  Description of Artificial Sequence: Synthetic oligonucleotide
aggccugagaguaucaggu

SEQ ID NO: 3050647 - RNA, 19 nt, Artificial Sequence
  Description of Artificial Sequence: Synthetic oligonucleotide
caucucgaaggacucuuug

SEQ ID NO: 3050648 - RNA, 19 nt, Artificial Sequence
  Description of Artificial Sequence: Synthetic oligonucleotide
guaccuuuguagccagagc

SEQ ID NO: 3050649 - RNA, 19 nt, Artificial Sequence
  Description of Artificial Sequence: Synthetic oligonucleotide
ucauacgcguucucacaac

SEQ ID NO: 3050650 - RNA, 19 nt, Artificial Sequence
  Description of Artificial Sequence: Synthetic oligonucleotide
uucguucuuccaugucugc

SEQ ID NO: 3050651 - RNA, 19 nt, Artificial Sequence
  Description of Artificial Sequence: Synthetic oligonucleotide
ugucauagacuggaagcuc

SEQ ID NO: 3050652 - RNA, 19 nt, Artificial Sequence
  Description of Artificial Sequence: Synthetic oligonucleotide
aggaccaaggcgcaaccaa

SEQ ID NO: 3050653 - RNA, 19 nt, Artificial Sequence
  Description of Artificial Sequence: Synthetic oligonucleotide
agccagagcauccgccauc

SEQ ID NO: 3050654 - RNA, 19 nt, Artificial Sequence
  Description of Artificial Sequence: Synthetic oligonucleotide
uggccaaaacccuuauaua

SEQ ID NO: 3050655 - RNA, 19 nt, Artificial Sequence
  Description of Artificial Sequence: Synthetic oligonucleotide
agagcauccgccaucucga

SEQ ID NO: 3050656 - RNA, 19 nt, Artificial Sequence
  Description of Artificial Sequence: Synthetic oligonucleotide
ucacaacauccacaggguu

SEQ ID NO: 3050657 - RNA, 19 nt, Artificial Sequence
  Description of Artificial Sequence: Synthetic oligonucleotide
gucugcaauaggcaaucca

SEQ ID NO: 3050658 - RNA, 19 nt, Artificial Sequence
  Description of Artificial Sequence: Synthetic oligonucleotide
caaggaccaaggcgcaacc

SEQ ID NO: 3050659 - RNA, 19 nt, Artificial Sequence
  Description of Artificial Sequence: Synthetic oligonucleotide
aggugcuucuuggugaugu

SEQ ID NO: 3050660 - RNA, 19 nt, Artificial Sequence
  Description of Artificial Sequence: Synthetic oligonucleotide
ucguucuuccaugucugca

SEQ ID NO: 3050661 - RNA, 19 nt, Artificial Sequence
  Description of Artificial Sequence: Synthetic oligonucleotide
uugaggccaaagcucccac

SEQ ID NO: 3050662 - RNA, 19 nt, Artificial Sequence
  Description of Artificial Sequence: Synthetic oligonucleotide
guagccagagcauccgcca

SEQ ID NO: 3050663 - RNA, 19 nt, Artificial Sequence
  Description of Artificial Sequence: Synthetic oligonucleotide
uuuggccaaaacccuuaua

SEQ ID NO: 3050664 - RNA, 19 nt, Artificial Sequence
  Description of Artificial Sequence: Synthetic oligonucleotide
gcugcucauaugucaaaag

SEQ ID NO: 3050665 - RNA, 19 nt, Artificial Sequence
  Description of Artificial Sequence: Synthetic oligonucleotide
ugcguagagacggugucuc

SEQ ID NO: 3050666 - RNA, 19 nt, Artificial Sequence
  Description of Artificial Sequence: Synthetic oligonucleotide
ccaagguaccuuuguagcc

SEQ ID NO: 3050667 - RNA, 19 nt, Artificial Sequence
  Description of Artificial Sequence: Synthetic oligonucleotide
uuccaaggaccaaggcgca

SEQ ID NO: 3050668 - RNA, 19 nt, Artificial Sequence
  Description of Artificial Sequence: Synthetic oligonucleotide
cauacgcguucucacaaca

SEQ ID NO: 3050669 - RNA, 19 nt, Artificial Sequence
  Description of Artificial Sequence: Synthetic oligonucleotide
caucauacgcguucucaca

SEQ ID NO: 3050670 - RNA, 19 nt, Artificial Sequence
  Description of Artificial Sequence: Synthetic oligonucleotide
cuggaagcuccacaccaac

SEQ ID NO: 3050671 - RNA, 19 nt, Artificial Sequence
  Description of Artificial Sequence: Synthetic oligonucleotide
caagguaccuuuguagcca

SEQ ID NO: 3050672 - RNA, 19 nt, Artificial Sequence
  Description of Artificial Sequence: Synthetic oligonucleotide
agcauccgccaucucgaag

SEQ ID NO: 3050673 - RNA, 19 nt, Artificial Sequence
  Description of Artificial Sequence: Synthetic oligonucleotide
aaacccuuauauagagcaa

SEQ ID NO: 3050674 - RNA, 19 nt, Artificial Sequence
  Description of Artificial Sequence: Synthetic oligonucleotide
acaggguuugaggccaaag

SEQ ID NO: 3050675 - RNA, 19 nt, Artificial Sequence
  Description of Artificial Sequence: Synthetic oligonucleotide
ugagaguaucaggugcuuc

SEQ ID NO: 3050676 - RNA, 19 nt, Artificial Sequence
  Description of Artificial Sequence: Synthetic oligonucleotide
guagagacggugucuccca

SEQ ID NO: 3050677 - RNA, 19 nt, Artificial Sequence
  Description of Artificial Sequence: Synthetic oligonucleotide
ucccaccagaccacaggug

SEQ ID NO: 3050678 - RNA, 19 nt, Artificial Sequence
  Description of Artificial Sequence: Synthetic oligonucleotide
auuuggccaaaacccuuau

SEQ ID NO: 3050679 - RNA, 19 nt, Artificial Sequence
  Description of Artificial Sequence: Synthetic oligonucleotide
agcuggagagaaaaugcgu

SEQ ID NO: 3050680 - RNA, 19 nt, Artificial Sequence
  Description of Artificial Sequence: Synthetic oligonucleotide
ggugaagcuggagagaaaa

SEQ ID NO: 3050681 - RNA, 19 nt, Artificial Sequence
  Description of Artificial Sequence: Synthetic oligonucleotide
aggccaaagcucccaccag

SEQ ID NO: 3050682 - RNA, 19 nt, Artificial Sequence
  Description of Artificial Sequence: Synthetic oligonucleotide
gcucauaugucaaaagaaa

SEQ ID NO: 3050683 - RNA, 19 nt, Artificial Sequence
  Description of Artificial Sequence: Synthetic oligonucleotide
accaaggcgcaaccaauuu

SEQ ID NO: 3050684 - RNA, 19 nt, Artificial Sequence
  Description of Artificial Sequence: Synthetic oligonucleotide
gcucccaccagaccacagg

SEQ ID NO: 3050685 - RNA, 19 nt, Artificial Sequence
  Description of Artificial Sequence: Synthetic oligonucleotide
gucaaaagaaaaugauauu

SEQ ID NO: 3050686 - RNA, 19 nt, Artificial Sequence
  Description of Artificial Sequence: Synthetic oligonucleotide
caccagaccacaggugaag

SEQ ID NO: 3050687 - RNA, 19 nt, Artificial Sequence
  Description of Artificial Sequence: Synthetic oligonucleotide
gcaauaggcaauccaaggu

SEQ ID NO: 3050688 - RNA, 19 nt, Artificial Sequence
  Description of Artificial Sequence: Synthetic oligonucleotide
agcugcucauaugucaaaa

SEQ ID NO: 3050689 - RNA, 19 nt, Artificial Sequence
  Description of Artificial Sequence: Synthetic oligonucleotide
acaggugaagcuggagaga

SEQ ID NO: 3050690 - RNA, 19 nt, Artificial Sequence
  Description of Artificial Sequence: Synthetic oligonucleotide
ugucugcaauaggcaaucc

SEQ ID NO: 3050691 - RNA, 19 nt, Artificial Sequence
  Description of Artificial Sequence: Synthetic oligonucleotide
caucaggccugagaguauc

SEQ ID NO: 3050692 - RNA, 19 nt, Artificial Sequence
  Description of Artificial Sequence: Synthetic oligonucleotide
cauagacuggaagcuccac

SEQ ID NO: 3050693 - RNA, 19 nt, Artificial Sequence
  Description of Artificial Sequence: Synthetic oligonucleotide
cucacaacauccacagggu

SEQ ID NO: 3050694 - RNA, 19 nt, Artificial Sequence
  Description of Artificial Sequence: Synthetic oligonucleotide
ucccaucaggccugagagu

SEQ ID NO: 3050695 - RNA, 19 nt, Artificial Sequence
  Description of Artificial Sequence: Synthetic oligonucleotide
acccuucguucuuccaugu

SEQ ID NO: 3050696 - RNA, 19 nt, Artificial Sequence
  Description of Artificial Sequence: Synthetic oligonucleotide
ggguuugaggccaaagcuc

SEQ ID NO: 3050697 - RNA, 19 nt, Artificial Sequence
  Description of Artificial Sequence: Synthetic oligonucleotide
uagccagagcauccgccau

SEQ ID NO: 3050698 - RNA, 19 nt, Artificial Sequence
  Description of Artificial Sequence: Synthetic oligonucleotide
uagagacggugucucccau

SEQ ID NO: 3050699 - RNA, 19 nt, Artificial Sequence
  Description of Artificial Sequence: Synthetic oligonucleotide
ggugucucccaucaggccu

SEQ ID NO: 3050700 - RNA, 19 nt, Artificial Sequence
  Description of Artificial Sequence: Synthetic oligonucleotide
accacaggugaagcuggag

SEQ ID NO: 3050701 - RNA, 19 nt, Artificial Sequence
  Description of Artificial Sequence: Synthetic oligonucleotide
gccaaaacccuuauauaga

SEQ ID NO: 3050702 - RNA, 19 nt, Artificial Sequence
  Description of Artificial Sequence: Synthetic oligonucleotide
gugucucccaucaggccug

SEQ ID NO: 3050703 - RNA, 19 nt, Artificial Sequence
  Description of Artificial Sequence: Synthetic oligonucleotide
guuugaggccaaagcuccc

SEQ ID NO: 3050704 - RNA, 19 nt, Artificial Sequence
  Description of Artificial Sequence: Synthetic oligonucleotide
ccaaggcgcaaccaauuug

SEQ ID NO: 3050705 - RNA, 19 nt, Artificial Sequence
  Description of Artificial Sequence: Synthetic oligonucleotide
acccuuauauagagcaaaa

SEQ ID NO: 3050706 - RNA, 19 nt, Artificial Sequence
  Description of Artificial Sequence: Synthetic oligonucleotide
caugucugcaauaggcaau

SEQ ID NO: 3050707 - RNA, 19 nt, Artificial Sequence
  Description of Artificial Sequence: Synthetic oligonucleotide
augcguagagacggugucu

SEQ ID NO: 3050708 - RNA, 19 nt, Artificial Sequence
  Description of Artificial Sequence: Synthetic oligonucleotide
accuuuguagccagagcau

SEQ ID NO: 3050709 - RNA, 19 nt, Artificial Sequence
  Description of Artificial Sequence: Synthetic oligonucleotide
agcuccacaccaacaacaa

SEQ ID NO: 3050710 - RNA, 19 nt, Artificial Sequence
  Description of Artificial Sequence: Synthetic oligonucleotide
guaucaggugcuucuuggu

SEQ ID NO: 3050711 - RNA, 19 nt, Artificial Sequence
  Description of Artificial Sequence: Synthetic oligonucleotide
agacggugucucccaucag

SEQ ID NO: 3050712 - RNA, 19 nt, Artificial Sequence
  Description of Artificial Sequence: Synthetic oligonucleotide
caauccaagguaccuuugu

SEQ ID NO: 3050713 - RNA, 19 nt, Artificial Sequence
  Description of Artificial Sequence: Synthetic oligonucleotide
cacaacauccacaggguuu

SEQ ID NO: 3050714 - RNA, 19 nt, Artificial Sequence
  Description of Artificial Sequence: Synthetic oligonucleotide
agaguaucaggugcuucuu

SEQ ID NO: 3050715 - RNA, 19 nt, Artificial Sequence
  Description of Artificial Sequence: Synthetic oligonucleotide
gaaaaugcguagagacggu

SEQ ID NO: 3050716 - RNA, 19 nt, Artificial Sequence
  Description of Artificial Sequence: Synthetic oligonucleotide
ggccaaagcucccaccaga

SEQ ID NO: 3050717 - RNA, 19 nt, Artificial Sequence
  Description of Artificial Sequence: Synthetic oligonucleotide
ggccugagaguaucaggug

SEQ ID NO: 3050718 - RNA, 19 nt, Artificial Sequence
  Description of Artificial Sequence: Synthetic oligonucleotide
auccgccaucucgaaggac

SEQ ID NO: 3050719 - RNA, 19 nt, Artificial Sequence
  Description of Artificial Sequence: Synthetic oligonucleotide
aagcucccaccagaccaca

SEQ ID NO: 3050720 - RNA, 19 nt, Artificial Sequence
  Description of Artificial Sequence: Synthetic oligonucleotide
acuggaagcuccacaccaa

SEQ ID NO: 3050721 - RNA, 19 nt, Artificial Sequence
  Description of Artificial Sequence: Synthetic oligonucleotide
auacgcguucucacaacau

SEQ ID NO: 3050722 - RNA, 19 nt, Artificial Sequence
  Description of Artificial Sequence: Synthetic oligonucleotide
cccaccagaccacagguga

SEQ ID NO: 3050723 - RNA, 19 nt, Artificial Sequence
  Description of Artificial Sequence: Synthetic oligonucleotide
ccaaagcucccaccagacc

SEQ ID NO: 3050724 - RNA, 19 nt, Artificial Sequence
  Description of Artificial Sequence: Synthetic oligonucleotide
aggcaauccaagguaccuu

SEQ ID NO: 3050725 - RNA, 19 nt, Artificial Sequence
  Description of Artificial Sequence: Synthetic oligonucleotide
gaaggacucuuugauucau

SEQ ID NO: 3050726 - RNA, 19 nt, Artificial Sequence
  Description of Artificial Sequence: Synthetic oligonucleotide
gcguucucacaacauccac

SEQ ID NO: 3050727 - RNA, 19 nt, Artificial Sequence
  Description of Artificial Sequence: Synthetic oligonucleotide
caauuuggccaaaacccuu

SEQ ID NO: 3050728 - RNA, 19 nt, Artificial Sequence
  Description of Artificial Sequence: Synthetic oligonucleotide
ccuuuguagccagagcauc

SEQ ID NO: 3050729 - RNA, 19 nt, Artificial Sequence
  Description of Artificial Sequence: Synthetic oligonucleotide
ccaugucugcaauaggcaa

SEQ ID NO: 3050730 - RNA, 19 nt, Artificial Sequence
  Description of Artificial Sequence: Synthetic oligonucleotide
uccaaggaccaaggcgcaa

SEQ ID NO: 3050731 - RNA, 19 nt, Artificial Sequence
  Description of Artificial Sequence: Synthetic oligonucleotide
ccaaggaccaaggcgcaac

SEQ ID NO: 3050732 - RNA, 19 nt, Artificial Sequence
  Description of Artificial Sequence: Synthetic oligonucleotide
cguucucacaacauccaca

SEQ ID NO: 3050733 - RNA, 19 nt, Artificial Sequence
  Description of Artificial Sequence: Synthetic oligonucleotide
ccaauuuggccaaaacccu

SEQ ID NO: 3050734 - RNA, 19 nt, Artificial Sequence
  Description of Artificial Sequence: Synthetic oligonucleotide
aucaggccugagaguauca

SEQ ID NO: 3050735 - RNA, 19 nt, Artificial Sequence
  Description of Artificial Sequence: Synthetic oligonucleotide
ccuucguucuuccaugucu

SEQ ID NO: 3050736 - RNA, 19 nt, Artificial Sequence
  Description of Artificial Sequence: Synthetic oligonucleotide
cucccaccagaccacaggu

SEQ ID NO: 3050737 - RNA, 19 nt, Artificial Sequence
  Description of Artificial Sequence: Synthetic oligonucleotide
gcaauccaagguaccuuug

SEQ ID NO: 3050738 - RNA, 19 nt, Artificial Sequence
  Description of Artificial Sequence: Synthetic oligonucleotide
ggugcuucuuggugauguc

SEQ ID NO: 3050739 - RNA, 19 nt, Artificial Sequence
  Description of Artificial Sequence: Synthetic oligonucleotide
cauccgccaucucgaagga

SEQ ID NO: 3050740 - RNA, 19 nt, Artificial Sequence
  Description of Artificial Sequence: Synthetic oligonucleotide
ggcaauccaagguaccuuu

SEQ ID NO: 3050741 - RNA, 19 nt, Artificial Sequence
  Description of Artificial Sequence: Synthetic oligonucleotide
gugaugucauagacuggaa

SEQ ID NO: 3050742 - RNA, 19 nt, Artificial Sequence
  Description of Artificial Sequence: Synthetic oligonucleotide
cucgaaggacucuuugauu

SEQ ID NO: 3050743 - RNA, 19 nt, Artificial Sequence
  Description of Artificial Sequence: Synthetic oligonucleotide
gagcauccgccaucucgaa

SEQ ID NO: 3050744 - RNA, 19 nt, Artificial Sequence
  Description of Artificial Sequence: Synthetic oligonucleotide
agcucccaccagaccacag

SEQ ID NO: 3050745 - RNA, 19 nt, Artificial Sequence
  Description of Artificial Sequence: Synthetic oligonucleotide
gcguagagacggugucucc

SEQ ID NO: 3050746 - RNA, 19 nt, Artificial Sequence
  Description of Artificial Sequence: Synthetic oligonucleotide
ugucucccaucaggccuga

SEQ ID NO: 3050747 - RNA, 19 nt, Artificial Sequence
  Description of Artificial Sequence: Synthetic oligonucleotide
ccugagaguaucaggugcu

SEQ ID NO: 3050748 - RNA, 19 nt, Artificial Sequence
  Description of Artificial Sequence: Synthetic oligonucleotide
cccaucaggccugagagua

SEQ ID NO: 3050749 - RNA, 19 nt, Artificial Sequence
  Description of Artificial Sequence: Synthetic oligonucleotide
gaccaaggcgcaaccaauu

SEQ ID NO: 3050750 - RNA, 19 nt, Artificial Sequence
  Description of Artificial Sequence: Synthetic oligonucleotide
cagcugcucauaugucaaa

SEQ ID NO: 3050751 - RNA, 19 nt, Artificial Sequence
  Description of Artificial Sequence: Synthetic oligonucleotide
gcaaccaauuuggccaaaa

SEQ ID NO: 3050752 - RNA, 19 nt, Artificial Sequence
  Description of Artificial Sequence: Synthetic oligonucleotide
ggacucuuugauucaucau

SEQ ID NO: 3050753 - RNA, 19 nt, Artificial Sequence
  Description of Artificial Sequence: Synthetic oligonucleotide
aggugaagcuggagagaaa

SEQ ID NO: 3050754 - RNA, 19 nt, Artificial Sequence
  Description of Artificial Sequence: Synthetic oligonucleotide
cgaaggacucuuugauuca

SEQ ID NO: 3050755 - RNA, 19 nt, Artificial Sequence
  Description of Artificial Sequence: Synthetic oligonucleotide
gucacaaguccaguuucuu

SEQ ID NO: 3050756 - RNA, 19 nt, Artificial Sequence
  Description of Artificial Sequence: Synthetic oligonucleotide
ggucacaaguccaguuucu

SEQ ID NO: 3050757 - RNA, 19 nt, Artificial Sequence
  Description of Artificial Sequence: Synthetic oligonucleotide
gugaagcuggagagaaaau

SEQ ID NO: 3050758 - RNA, 19 nt, Artificial Sequence
  Description of Artificial Sequence: Synthetic oligonucleotide
ccgccaucucgaaggacuc

SEQ ID NO: 3050759 - RNA, 19 nt, Artificial Sequence
  Description of Artificial Sequence: Synthetic oligonucleotide
cggugucucccaucaggcc

SEQ ID NO: 3050760 - RNA, 19 nt, Artificial Sequence
  Description of Artificial Sequence: Synthetic oligonucleotide
agguaccuuuguagccaga

SEQ ID NO: 3050761 - RNA, 19 nt, Artificial Sequence
  Description of Artificial Sequence: Synthetic oligonucleotide
gcgcaaccaauuuggccaa

SEQ ID NO: 3050762 - RNA, 19 nt, Artificial Sequence
  Description of Artificial Sequence: Synthetic oligonucleotide
cgcguucucacaacaucca

SEQ ID NO: 3050763 - RNA, 19 nt, Artificial Sequence
  Description of Artificial Sequence: Synthetic oligonucleotide
ggaccaaggcgcaaccaau

SEQ ID NO: 3050764 - RNA, 19 nt, Artificial Sequence
  Description of Artificial Sequence: Synthetic oligonucleotide
caacauccacaggguuuga

SEQ ID NO: 3050765 - RNA, 19 nt, Artificial Sequence
  Description of Artificial Sequence: Synthetic oligonucleotide
gucucccaucaggccugag

SEQ ID NO: 3050766 - RNA, 19 nt, Artificial Sequence
  Description of Artificial Sequence: Synthetic oligonucleotide
ccagaccacaggugaagcu

SEQ ID NO: 3050767 - RNA, 19 nt, Artificial Sequence
  Description of Artificial Sequence: Synthetic oligonucleotide
ccaccagaccacaggugaa

SEQ ID NO: 3050768 - RNA, 19 nt, Artificial Sequence
  Description of Artificial Sequence: Synthetic oligonucleotide
cugagaguaucaggugcuu

SEQ ID NO: 3050769 - RNA, 19 nt, Artificial Sequence
  Description of Artificial Sequence: Synthetic oligonucleotide
gcuccacaccaacaacaau

SEQ ID NO: 3050770 - RNA, 19 nt, Artificial Sequence
  Description of Artificial Sequence: Synthetic oligonucleotide
cacaggguuugaggccaaa

SEQ ID NO: 3050771 - RNA, 19 nt, Artificial Sequence
  Description of Artificial Sequence: Synthetic oligonucleotide
gccaucucgaaggacucuu

SEQ ID NO: 3050772 - RNA, 19 nt, Artificial Sequence
  Description of Artificial Sequence: Synthetic oligonucleotide
ccagagcauccgccaucuc

SEQ ID NO: 3050773 - RNA, 19 nt, Artificial Sequence
  Description of Artificial Sequence: Synthetic oligonucleotide
ccaucucgaaggacucuuu

SEQ ID NO: 3050774 - RNA, 19 nt, Artificial Sequence
  Description of Artificial Sequence: Synthetic oligonucleotide
ccaucaggccugagaguau

SEQ ID NO: 3050775 - RNA, 19 nt, Artificial Sequence
  Description of Artificial Sequence: Synthetic oligonucleotide
ccacaggguuugaggccaa

SEQ ID NO: 3050776 - RNA, 19 nt, Artificial Sequence
  Description of Artificial Sequence: Synthetic oligonucleotide
cgccaucucgaaggacucu

SEQ ID NO: 3050777 - RNA, 19 nt, Artificial Sequence
  Description of Artificial Sequence: Synthetic oligonucleotide
uaaagcaacacaaauggcg

SEQ ID NO: 3050778 - RNA, 19 nt, Artificial Sequence
  Description of Artificial Sequence: Synthetic oligonucleotide
uauugugucuucaagauac

SEQ ID NO: 3050779 - RNA, 19 nt, Artificial Sequence
  Description of Artificial Sequence: Synthetic oligonucleotide
gauaccacaauguagacuc

SEQ ID NO: 3050780 - RNA, 19 nt, Artificial Sequence
  Description of Artificial Sequence: Synthetic oligonucleotide
agaagggucuuucaaaggc

SEQ ID NO: 3050781 - RNA, 19 nt, Artificial Sequence
  Description of Artificial Sequence: Synthetic oligonucleotide
gaaacugucauccagaugu

SEQ ID NO: 3050782 - RNA, 19 nt, Artificial Sequence
  Description of Artificial Sequence: Synthetic oligonucleotide
ucaagauaccacaauguag

SEQ ID NO: 3050783 - RNA, 19 nt, Artificial Sequence
  Description of Artificial Sequence: Synthetic oligonucleotide
ucuucaagauaccacaaug

SEQ ID NO: 3050784 - RNA, 19 nt, Artificial Sequence
  Description of Artificial Sequence: Synthetic oligonucleotide
acaauguagacuccucucc

SEQ ID NO: 3050785 - RNA, 19 nt, Artificial Sequence
  Description of Artificial Sequence: Synthetic oligonucleotide
aaagcaacacaaauggcgg

SEQ ID NO: 3050786 - RNA, 19 nt, Artificial Sequence
  Description of Artificial Sequence: Synthetic oligonucleotide
uuuuggaccgcucaaacuc

SEQ ID NO: 3050787 - RNA, 19 nt, Artificial Sequence
  Description of Artificial Sequence: Synthetic oligonucleotide
guguagaucagauaaagca

SEQ ID NO: 3050788 - RNA, 19 nt, Artificial Sequence
  Description of Artificial Sequence: Synthetic oligonucleotide
uuuauugugucuucaagau

SEQ ID NO: 3050789 - RNA, 19 nt, Artificial Sequence
  Description of Artificial Sequence: Synthetic oligonucleotide
caagauaccacaauguaga

SEQ ID NO: 3050790 - RNA, 19 nt, Artificial Sequence
  Description of Artificial Sequence: Synthetic oligonucleotide
agagaagggucuuucaaag

SEQ ID NO: 3050791 - RNA, 19 nt, Artificial Sequence
  Description of Artificial Sequence: Synthetic oligonucleotide
uuugcugaagaagugcggg

SEQ ID NO: 3050792 - RNA, 19 nt, Artificial Sequence
  Description of Artificial Sequence: Synthetic oligonucleotide
aagcaacacaaauggcggc

SEQ ID NO: 3050793 - RNA, 19 nt, Artificial Sequence
  Description of Artificial Sequence: Synthetic oligonucleotide
aagauaccacaauguagac

SEQ ID NO: 3050794 - RNA, 19 nt, Artificial Sequence
  Description of Artificial Sequence: Synthetic oligonucleotide
aaaggcaggaaacugucau

SEQ ID NO: 3050795 - RNA, 19 nt, Artificial Sequence
  Description of Artificial Sequence: Synthetic oligonucleotide
aguuuauugugucuucaag

SEQ ID NO: 3050796 - RNA, 19 nt, Artificial Sequence
  Description of Artificial Sequence: Synthetic oligonucleotide
uugucguuugcguacuugg

SEQ ID NO: 3050797 - RNA, 19 nt, Artificial Sequence
  Description of Artificial Sequence: Synthetic oligonucleotide
ugugucuucaagauaccac

SEQ ID NO: 3050798 - RNA, 19 nt, Artificial Sequence
  Description of Artificial Sequence: Synthetic oligonucleotide
ucagauucccaaacucgcg

SEQ ID NO: 3050799 - RNA, 19 nt, Artificial Sequence
  Description of Artificial Sequence: Synthetic oligonucleotide
guuuauugugucuucaaga

SEQ ID NO: 3050800 - RNA, 19 nt, Artificial Sequence
  Description of Artificial Sequence: Synthetic oligonucleotide
uggauucuccuuuuggacc

SEQ ID NO: 3050801 - RNA, 19 nt, Artificial Sequence
  Description of Artificial Sequence: Synthetic oligonucleotide
aggcaggaaacugucaucc

SEQ ID NO: 3050802 - RNA, 19 nt, Artificial Sequence
  Description of Artificial Sequence: Synthetic oligonucleotide
agauucccaaacucgcggc

SEQ ID NO: 3050803 - RNA, 19 nt, Artificial Sequence
  Description of Artificial Sequence: Synthetic oligonucleotide
agauaaagcaacacaaaug

SEQ ID NO: 3050804 - RNA, 19 nt, Artificial Sequence
  Description of Artificial Sequence: Synthetic oligonucleotide
aguaguuuauugugucuuc

SEQ ID NO: 3050805 - RNA, 19 nt, Artificial Sequence
  Description of Artificial Sequence: Synthetic oligonucleotide
uucaagauaccacaaugua

SEQ ID NO: 3050806 - RNA, 19 nt, Artificial Sequence
  Description of Artificial Sequence: Synthetic oligonucleotide
aaacucgcggcccauggug

SEQ ID NO: 3050807 - RNA, 19 nt, Artificial Sequence
  Description of Artificial Sequence: Synthetic oligonucleotide
gaugccuuugcugaagaag

SEQ ID NO: 3050808 - RNA, 19 nt, Artificial Sequence
  Description of Artificial Sequence: Synthetic oligonucleotide
aaggcaggaaacugucauc

SEQ ID NO: 3050809 - RNA, 19 nt, Artificial Sequence
  Description of Artificial Sequence: Synthetic oligonucleotide
aauguagacuccucuccca

SEQ ID NO: 3050810 - RNA, 19 nt, Artificial Sequence
  Description of Artificial Sequence: Synthetic oligonucleotide
uguaggagaucacgugccg

SEQ ID NO: 3050811 - RNA, 19 nt, Artificial Sequence
  Description of Artificial Sequence: Synthetic oligonucleotide
uuggggaugccuuugcuga

SEQ ID NO: 3050812 - RNA, 19 nt, Artificial Sequence
  Description of Artificial Sequence: Synthetic oligonucleotide
agaucagauaaagcaacac

SEQ ID NO: 3050813 - RNA, 19 nt, Artificial Sequence
  Description of Artificial Sequence: Synthetic oligonucleotide
auaaagcaacacaaauggc

SEQ ID NO: 3050814 - RNA, 19 nt, Artificial Sequence
  Description of Artificial Sequence: Synthetic oligonucleotide
gagaagggucuuucaaagg

SEQ ID NO: 3050815 - RNA, 19 nt, Artificial Sequence
  Description of Artificial Sequence: Synthetic oligonucleotide
uagaucagauaaagcaaca

SEQ ID NO: 3050816 - RNA, 19 nt, Artificial Sequence
  Description of Artificial Sequence: Synthetic oligonucleotide
uuuggaccgcucaaacucc

SEQ ID NO: 3050817 - RNA, 19 nt, Artificial Sequence
  Description of Artificial Sequence: Synthetic oligonucleotide
aaauggcggcgccacgcgc

SEQ ID NO: 3050818 - RNA, 19 nt, Artificial Sequence
  Description of Artificial Sequence: Synthetic oligonucleotide
acaaauggcggcgccacgc

SEQ ID NO: 3050819 - RNA, 19 nt, Artificial Sequence
  Description of Artificial Sequence: Synthetic oligonucleotide
gaagaagugcgggaaggcg

SEQ ID NO: 3050820 - RNA, 19 nt, Artificial Sequence
  Description of Artificial Sequence: Synthetic oligonucleotide
uaaguaguuuauugugucu

SEQ ID NO: 3050821 - RNA, 19 nt, Artificial Sequence
  Description of Artificial Sequence: Synthetic oligonucleotide
caagcuguaggagaucacg

SEQ ID NO: 3050822 - RNA, 19 nt, Artificial Sequence
  Description of Artificial Sequence: Synthetic oligonucleotide
ugcucgaagggugacaagc

SEQ ID NO: 3050823 - RNA, 19 nt, Artificial Sequence
  Description of Artificial Sequence: Synthetic oligonucleotide
ucguuugcguacuuggcug

SEQ ID NO: 3050824 - RNA, 19 nt, Artificial Sequence
  Description of Artificial Sequence: Synthetic oligonucleotide
ucuccuuuuggaccgcuca

SEQ ID NO: 3050825 - RNA, 19 nt, Artificial Sequence
  Description of Artificial Sequence: Synthetic oligonucleotide
guagaucagauaaagcaac

SEQ ID NO: 3050826 - RNA, 19 nt, Artificial Sequence
  Description of Artificial Sequence: Synthetic oligonucleotide
cagauucccaaacucgcgg

SEQ ID NO: 3050827 - RNA, 19 nt, Artificial Sequence
  Description of Artificial Sequence: Synthetic oligonucleotide
ucgaagggugacaagcugu

SEQ ID NO: 3050828 - RNA, 19 nt, Artificial Sequence
  Description of Artificial Sequence: Synthetic oligonucleotide
ggauucuccuuuuggaccg

SEQ ID NO: 3050829 - RNA, 19 nt, Artificial Sequence
  Description of Artificial Sequence: Synthetic oligonucleotide
acuccucucccagagaagg

SEQ ID NO: 3050830 - RNA, 19 nt, Artificial Sequence
  Description of Artificial Sequence: Synthetic oligonucleotide
gagaucacgugccgcaucc

SEQ ID NO: 3050831 - RNA, 19 nt, Artificial Sequence
  Description of Artificial Sequence: Synthetic oligonucleotide
cuuugcugaagaagugcgg

SEQ ID NO: 3050832 - RNA, 19 nt, Artificial Sequence
  Description of Artificial Sequence: Synthetic oligonucleotide
guagacuccucucccagag

SEQ ID NO: 3050833 - RNA, 19 nt, Artificial Sequence
  Description of Artificial Sequence: Synthetic oligonucleotide
cugucauccagaugugugc

SEQ ID NO: 3050834 - RNA, 19 nt, Artificial Sequence
  Description of Artificial Sequence: Synthetic oligonucleotide
gugucuucaagauaccaca

SEQ ID NO: 3050835 - RNA, 19 nt, Artificial Sequence
  Description of Artificial Sequence: Synthetic oligonucleotide
caauguagacuccucuccc

SEQ ID NO: 3050836 - RNA, 19 nt, Artificial Sequence
  Description of Artificial Sequence: Synthetic oligonucleotide
cuguaggagaucacgugcc

SEQ ID NO: 3050837 - RNA, 19 nt, Artificial Sequence
  Description of Artificial Sequence: Synthetic oligonucleotide
aaguaguuuauugugucuu

SEQ ID NO: 3050838 - RNA, 19 nt, Artificial Sequence
  Description of Artificial Sequence: Synthetic oligonucleotide
ucacuugucguuugcguac

SEQ ID NO: 3050839 - RNA, 19 nt, Artificial Sequence
  Description of Artificial Sequence: Synthetic oligonucleotide
ugugcugcucacuugucgu

SEQ ID NO: 3050840 - RNA, 19 nt, Artificial Sequence
  Description of Artificial Sequence: Synthetic oligonucleotide
acguguagaucagauaaag

SEQ ID NO: 3050841 - RNA, 19 nt, Artificial Sequence
  Description of Artificial Sequence: Synthetic oligonucleotide
cuggauucuccuuuuggac

SEQ ID NO: 3050842 - RNA, 19 nt, Artificial Sequence
  Description of Artificial Sequence: Synthetic oligonucleotide
agggugacaagcuguagga

SEQ ID NO: 3050843 - RNA, 19 nt, Artificial Sequence
  Description of Artificial Sequence: Synthetic oligonucleotide
uccagaugugugcugcuca

SEQ ID NO: 3050844 - RNA, 19 nt, Artificial Sequence
  Description of Artificial Sequence: Synthetic oligonucleotide
uaggagaucacgugccgca

SEQ ID NO: 3050845 - RNA, 19 nt, Artificial Sequence
  Description of Artificial Sequence: Synthetic oligonucleotide
ugucguuugcguacuuggc

SEQ ID NO: 3050846 - RNA, 19 nt, Artificial Sequence
  Description of Artificial Sequence: Synthetic oligonucleotide
uuauugugucuucaagaua

SEQ ID NO: 3050847 - RNA, 19 nt, Artificial Sequence
  Description of Artificial Sequence: Synthetic oligonucleotide
aaggcgcgcugcucgaagg

SEQ ID NO: 3050848 - RNA, 19 nt, Artificial Sequence
  Description of Artificial Sequence: Synthetic oligonucleotide
auucccaaacucgcggccc

SEQ ID NO: 3050849 - RNA, 19 nt, Artificial Sequence
  Description of Artificial Sequence: Synthetic oligonucleotide
gauucccaaacucgcggcc

SEQ ID NO: 3050850 - RNA, 19 nt, Artificial Sequence
  Description of Artificial Sequence: Synthetic oligonucleotide
cugaagaagugcgggaagg

SEQ ID NO: 3050851 - RNA, 19 nt, Artificial Sequence
  Description of Artificial Sequence: Synthetic oligonucleotide
auguagacuccucucccag

SEQ ID NO: 3050852 - RNA, 19 nt, Artificial Sequence
  Description of Artificial Sequence: Synthetic oligonucleotide
augugugcugcucacuugu

SEQ ID NO: 3050853 - RNA, 19 nt, Artificial Sequence
  Description of Artificial Sequence: Synthetic oligonucleotide
ugucuucaagauaccacaa

SEQ ID NO: 3050854 - RNA, 19 nt, Artificial Sequence
  Description of Artificial Sequence: Synthetic oligonucleotide
gucagauucccaaacucgc

SEQ ID NO: 3050855 - RNA, 19 nt, Artificial Sequence
  Description of Artificial Sequence: Synthetic oligonucleotide
cacaauguagacuccucuc

SEQ ID NO: 3050856 - RNA, 19 nt, Artificial Sequence
  Description of Artificial Sequence: Synthetic oligonucleotide
agcuguaggagaucacgug

SEQ ID NO: 3050857 - RNA, 19 nt, Artificial Sequence
  Description of Artificial Sequence: Synthetic oligonucleotide
uaguuuauugugucuucaa

SEQ ID NO: 3050858 - RNA, 19 nt, Artificial Sequence
  Description of Artificial Sequence: Synthetic oligonucleotide
guuggggaugccuuugcug

SEQ ID NO: 3050859 - RNA, 19 nt, Artificial Sequence
  Description of Artificial Sequence: Synthetic oligonucleotide
ugaagaagugcgggaaggc

SEQ ID NO: 3050860 - RNA, 19 nt, Artificial Sequence
  Description of Artificial Sequence: Synthetic oligonucleotide
gaucacgugccgcauccgc

SEQ ID NO: 3050861 - RNA, 19 nt, Artificial Sequence
  Description of Artificial Sequence: Synthetic oligonucleotide
acacaaauggcggcgccac

SEQ ID NO: 3050862 - RNA, 19 nt, Artificial Sequence
  Description of Artificial Sequence: Synthetic oligonucleotide
gugugcugcucacuugucg

SEQ ID NO: 3050863 - RNA, 19 nt, Artificial Sequence
  Description of Artificial Sequence: Synthetic oligonucleotide
gaugugugcugcucacuug

SEQ ID NO: 3050864 - RNA, 19 nt, Artificial Sequence
  Description of Artificial Sequence: Synthetic oligonucleotide
agacuccucucccagagaa

SEQ ID NO: 3050865 - RNA, 19 nt, Artificial Sequence
  Description of Artificial Sequence: Synthetic oligonucleotide
auugugucuucaagauacc

SEQ ID NO: 3050866 - RNA, 19 nt, Artificial Sequence
  Description of Artificial Sequence: Synthetic oligonucleotide
acugucauccagaugugug

SEQ ID NO: 3050867 - RNA, 19 nt, Artificial Sequence
  Description of Artificial Sequence: Synthetic oligonucleotide
gcuguaggagaucacgugc

SEQ ID NO: 3050868 - RNA, 19 nt, Artificial Sequence
  Description of Artificial Sequence: Synthetic oligonucleotide
augccuuugcugaagaagu

SEQ ID NO: 3050869 - RNA, 19 nt, Artificial Sequence
  Description of Artificial Sequence: Synthetic oligonucleotide
acguuggggaugccuuugc

SEQ ID NO: 3050870 - RNA, 19 nt, Artificial Sequence
  Description of Artificial Sequence: Synthetic oligonucleotide
agaagugcgggaaggcgcg

SEQ ID NO: 3050871 - RNA, 19 nt, Artificial Sequence
  Description of Artificial Sequence: Synthetic oligonucleotide
ugccuuugcugaagaagug

SEQ ID NO: 3050872 - RNA, 19 nt, Artificial Sequence
  Description of Artificial Sequence: Synthetic oligonucleotide
aacacaaauggcggcgcca

SEQ ID NO: 3050873 - RNA, 19 nt, Artificial Sequence
  Description of Artificial Sequence: Synthetic oligonucleotide
agaugugugcugcucacuu

SEQ ID NO: 3050874 - RNA, 19 nt, Artificial Sequence
  Description of Artificial Sequence: Synthetic oligonucleotide
aacucgcggcccauggugg

SEQ ID NO: 3050875 - RNA, 19 nt, Artificial Sequence
  Description of Artificial Sequence: Synthetic oligonucleotide
ugcucacuugucguuugcg

SEQ ID NO: 3050876 - RNA, 19 nt, Artificial Sequence
  Description of Artificial Sequence: Synthetic oligonucleotide
cuucaagauaccacaaugu

SEQ ID NO: 3050877 - RNA, 19 nt, Artificial Sequence
  Description of Artificial Sequence: Synthetic oligonucleotide
ggugacaagcuguaggaga

SEQ ID NO: 3050878 - RNA, 19 nt, Artificial Sequence
  Description of Artificial Sequence: Synthetic oligonucleotide
ugcguacuuggcuggauuc

SEQ ID NO: 3050879 - RNA, 19 nt, Artificial Sequence
  Description of Artificial Sequence: Synthetic oligonucleotide
ugucauccagaugugugcu

SEQ ID NO: 3050880 - RNA, 19 nt, Artificial Sequence
  Description of Artificial Sequence: Synthetic oligonucleotide
uugcugaagaagugcggga

SEQ ID NO: 3050881 - RNA, 19 nt, Artificial Sequence
  Description of Artificial Sequence: Synthetic oligonucleotide
uguagacuccucucccaga

SEQ ID NO: 3050882 - RNA, 19 nt, Artificial Sequence
  Description of Artificial Sequence: Synthetic oligonucleotide
aagcuguaggagaucacgu

SEQ ID NO: 3050883 - RNA, 19 nt, Artificial Sequence
  Description of Artificial Sequence: Synthetic oligonucleotide
aggaaacugucauccagau

SEQ ID NO: 3050884 - RNA, 19 nt, Artificial Sequence
  Description of Artificial Sequence: Synthetic oligonucleotide
agugcggcgcagcacguug

SEQ ID NO: 3050885 - RNA, 19 nt, Artificial Sequence
  Description of Artificial Sequence: Synthetic oligonucleotide
gaagggucuuucaaaggca

SEQ ID NO: 3050886 - RNA, 19 nt, Artificial Sequence
  Description of Artificial Sequence: Synthetic oligonucleotide
uacuuggcuggauucuccu

SEQ ID NO: 3050887 - RNA, 19 nt, Artificial Sequence
  Description of Artificial Sequence: Synthetic oligonucleotide
ggcuggauucuccuuuugg

SEQ ID NO: 3050888 - RNA, 19 nt, Artificial Sequence
  Description of Artificial Sequence: Synthetic oligonucleotide
ugcugaagaagugcgggaa

SEQ ID NO: 3050889 - RNA, 19 nt, Artificial Sequence
  Description of Artificial Sequence: Synthetic oligonucleotide
gaaggcgcgcugcucgaag

SEQ ID NO: 3050890 - RNA, 19 nt, Artificial Sequence
  Description of Artificial Sequence: Synthetic oligonucleotide
caggaaacugucauccaga

SEQ ID NO: 3050891 - RNA, 19 nt, Artificial Sequence
  Description of Artificial Sequence: Synthetic oligonucleotide
caaauggcggcgccacgcg

SEQ ID NO: 3050892 - RNA, 19 nt, Artificial Sequence
  Description of Artificial Sequence: Synthetic oligonucleotide
uaccacaauguagacuccu

SEQ ID NO: 3050893 - RNA, 19 nt, Artificial Sequence
  Description of Artificial Sequence: Synthetic oligonucleotide
gucuuucaaaggcaggaaa

SEQ ID NO: 3050894 - RNA, 19 nt, Artificial Sequence
  Description of Artificial Sequence: Synthetic oligonucleotide
guaguuuauugugucuuca

SEQ ID NO: 3050895 - RNA, 19 nt, Artificial Sequence
  Description of Artificial Sequence: Synthetic oligonucleotide
ggaccgcucaaacuccugg

SEQ ID NO: 3050896 - RNA, 19 nt, Artificial Sequence
  Description of Artificial Sequence: Synthetic oligonucleotide
acucgcggcccaugguggc

SEQ ID NO: 3050897 - RNA, 19 nt, Artificial Sequence
  Description of Artificial Sequence: Synthetic oligonucleotide
cgucagauucccaaacucg

SEQ ID NO: 3050898 - RNA, 19 nt, Artificial Sequence
  Description of Artificial Sequence: Synthetic oligonucleotide
cucgaagggugacaagcug

SEQ ID NO: 3050899 - RNA, 19 nt, Artificial Sequence
  Description of Artificial Sequence: Synthetic oligonucleotide
uucccaaacucgcggccca

SEQ ID NO: 3050900 - RNA, 19 nt, Artificial Sequence
  Description of Artificial Sequence: Synthetic oligonucleotide
aaacugucauccagaugug

SEQ ID NO: 3050901 - RNA, 19 nt, Artificial Sequence
  Description of Artificial Sequence: Synthetic oligonucleotide
accacaauguagacuccuc

SEQ ID NO: 3050902 - RNA, 19 nt, Artificial Sequence
  Description of Artificial Sequence: Synthetic oligonucleotide
uccucucccagagaagggu

SEQ ID NO: 3050903 - RNA, 19 nt, Artificial Sequence
  Description of Artificial Sequence: Synthetic oligonucleotide
ugcggcgcagcacguuggg

SEQ ID NO: 3050904 - RNA, 19 nt, Artificial Sequence
  Description of Artificial Sequence: Synthetic oligonucleotide
ucacgugccgcauccgcgu

SEQ ID NO: 3050905 - RNA, 19 nt, Artificial Sequence
  Description of Artificial Sequence: Synthetic oligonucleotide
cagagaagggucuuucaaa

SEQ ID NO: 3050906 - RNA, 19 nt, Artificial Sequence
  Description of Artificial Sequence: Synthetic oligonucleotide
auaccacaauguagacucc

SEQ ID NO: 3050907 - RNA, 19 nt, Artificial Sequence
  Description of Artificial Sequence: Synthetic oligonucleotide
aucacgugccgcauccgcg

SEQ ID NO: 3050908 - RNA, 19 nt, Artificial Sequence
  Description of Artificial Sequence: Synthetic oligonucleotide
uuggaccgcucaaacuccu

SEQ ID NO: 3050909 - RNA, 19 nt, Artificial Sequence
  Description of Artificial Sequence: Synthetic oligonucleotide
gcgagugcggcgcagcacg

SEQ ID NO: 3050910 - RNA, 19 nt, Artificial Sequence
  Description of Artificial Sequence: Synthetic oligonucleotide
aauggcggcgccacgcgca

SEQ ID NO: 3050911 - RNA, 19 nt, Artificial Sequence
  Description of Artificial Sequence: Synthetic oligonucleotide
cuugucguuugcguacuug

SEQ ID NO: 3050912 - RNA, 19 nt, Artificial Sequence
  Description of Artificial Sequence: Synthetic oligonucleotide
auccgcgucagauucccaa

SEQ ID NO: 3050913 - RNA, 19 nt, Artificial Sequence
  Description of Artificial Sequence: Synthetic oligonucleotide
gaagggugacaagcuguag

SEQ ID NO: 3050914 - RNA, 19 nt, Artificial Sequence
  Description of Artificial Sequence: Synthetic oligonucleotide
gcuggauucuccuuuugga

SEQ ID NO: 3050915 - RNA, 19 nt, Artificial Sequence
  Description of Artificial Sequence: Synthetic oligonucleotide
cuccucucccagagaaggg

SEQ ID NO: 3050916 - RNA, 19 nt, Artificial Sequence
  Description of Artificial Sequence: Synthetic oligonucleotide
ccacguguagaucagauaa

SEQ ID NO: 3050917 - RNA, 19 nt, Artificial Sequence
  Description of Artificial Sequence: Synthetic oligonucleotide
guaggagaucacgugccgc

SEQ ID NO: 3050918 - RNA, 19 nt, Artificial Sequence
  Description of Artificial Sequence: Synthetic oligonucleotide
auccagaugugugcugcuc

SEQ ID NO: 3050919 - RNA, 19 nt, Artificial Sequence
  Description of Artificial Sequence: Synthetic oligonucleotide
gaugcgcucgcgagugcgg

SEQ ID NO: 3050920 - RNA, 19 nt, Artificial Sequence
  Description of Artificial Sequence: Synthetic oligonucleotide
uagacuccucucccagaga

SEQ ID NO: 3050921 - RNA, 19 nt, Artificial Sequence
  Description of Artificial Sequence: Synthetic oligonucleotide
uccuuuuggaccgcucaaa

SEQ ID NO: 3050922 - RNA, 19 nt, Artificial Sequence
  Description of Artificial Sequence: Synthetic oligonucleotide
aggcgcgcugcucgaaggg

SEQ ID NO: 3050923 - RNA, 19 nt, Artificial Sequence
  Description of Artificial Sequence: Synthetic oligonucleotide
uccgcgucagauucccaaa

SEQ ID NO: 3050924 - RNA, 19 nt, Artificial Sequence
  Description of Artificial Sequence: Synthetic oligonucleotide
cucacuugucguuugcgua

SEQ ID NO: 3050925 - RNA, 19 nt, Artificial Sequence
  Description of Artificial Sequence: Synthetic oligonucleotide
acgcgcaggaugcgcucgc

SEQ ID NO: 3050926 - RNA, 19 nt, Artificial Sequence
  Description of Artificial Sequence: Synthetic oligonucleotide
ugugugcugcucacuuguc

SEQ ID NO: 3050927 - RNA, 19 nt, Artificial Sequence
  Description of Artificial Sequence: Synthetic oligonucleotide
uggaccgcucaaacuccug

SEQ ID NO: 3050928 - RNA, 19 nt, Artificial Sequence
  Description of Artificial Sequence: Synthetic oligonucleotide
agggucuuucaaaggcagg

SEQ ID NO: 3050929 - RNA, 19 nt, Artificial Sequence
  Description of Artificial Sequence: Synthetic oligonucleotide
aggaugcgcucgcgagugc

SEQ ID NO: 3050930 - RNA, 19 nt, Artificial Sequence
  Description of Artificial Sequence: Synthetic oligonucleotide
augcgcucgcgagugcggc

SEQ ID NO: 3050931 - RNA, 19 nt, Artificial Sequence
  Description of Artificial Sequence: Synthetic oligonucleotide
cuuucaaaggcaggaaacu

SEQ ID NO: 3050932 - RNA, 19 nt, Artificial Sequence
  Description of Artificial Sequence: Synthetic oligonucleotide
gucguuugcguacuuggcu

SEQ ID NO: 3050933 - RNA, 19 nt, Artificial Sequence
  Description of Artificial Sequence: Synthetic oligonucleotide
cguguagaucagauaaagc

SEQ ID NO: 3050934 - RNA, 19 nt, Artificial Sequence
  Description of Artificial Sequence: Synthetic oligonucleotide
ggaaacugucauccagaug

SEQ ID NO: 3050935 - RNA, 19 nt, Artificial Sequence
  Description of Artificial Sequence: Synthetic oligonucleotide
caggaugcgcucgcgagug

SEQ ID NO: 3050936 - RNA, 19 nt, Artificial Sequence
  Description of Artificial Sequence: Synthetic oligonucleotide
ugcgcucgcgagugcggcg

SEQ ID NO: 3050937 - RNA, 19 nt, Artificial Sequence
  Description of Artificial Sequence: Synthetic oligonucleotide
uucuccuuuuggaccgcuc

SEQ ID NO: 3050938 - RNA, 19 nt, Artificial Sequence
  Description of Artificial Sequence: Synthetic oligonucleotide
uggcuggauucuccuuuug

SEQ ID NO: 3050939 - RNA, 19 nt, Artificial Sequence
  Description of Artificial Sequence: Synthetic oligonucleotide
caaaggcaggaaacuguca

SEQ ID NO: 3050940 - RNA, 19 nt, Artificial Sequence
  Description of Artificial Sequence: Synthetic oligonucleotide
cacaaauggcggcgccacg

SEQ ID NO: 3050941 - RNA, 19 nt, Artificial Sequence
  Description of Artificial Sequence: Synthetic oligonucleotide
agugcgggaaggcgcgcug

SEQ ID NO: 3050942 - RNA, 19 nt, Artificial Sequence
  Description of Artificial Sequence: Synthetic oligonucleotide
ccaaacucgcggcccaugg

SEQ ID NO: 3050943 - RNA, 19 nt, Artificial Sequence
  Description of Artificial Sequence: Synthetic oligonucleotide
gacuccucucccagagaag

SEQ ID NO: 3050944 - RNA, 19 nt, Artificial Sequence
  Description of Artificial Sequence: Synthetic oligonucleotide
ccuuuuggaccgcucaaac

SEQ ID NO: 3050945 - RNA, 19 nt, Artificial Sequence
  Description of Artificial Sequence: Synthetic oligonucleotide
cuuuuggaccgcucaaacu

SEQ ID NO: 3050946 - RNA, 19 nt, Artificial Sequence
  Description of Artificial Sequence: Synthetic oligonucleotide
ucccagagaagggucuuuc

SEQ ID NO: 3050947 - RNA, 19 nt, Artificial Sequence
  Description of Artificial Sequence: Synthetic oligonucleotide
gggucuuucaaaggcagga

SEQ ID NO: 3050948 - RNA, 19 nt, Artificial Sequence
  Description of Artificial Sequence: Synthetic oligonucleotide
ugccgcauccgcgucagau

SEQ ID NO: 3050949 - RNA, 19 nt, Artificial Sequence
  Description of Artificial Sequence: Synthetic oligonucleotide
gccuuugcugaagaagugc

SEQ ID NO: 3050950 - RNA, 19 nt, Artificial Sequence
  Description of Artificial Sequence: Synthetic oligonucleotide
cugcucacuugucguuugc

SEQ ID NO: 3050951 - RNA, 19 nt, Artificial Sequence
  Description of Artificial Sequence: Synthetic oligonucleotide
aagugcgggaaggcgcgcu

SEQ ID NO: 3050952 - RNA, 19 nt, Artificial Sequence
  Description of Artificial Sequence: Synthetic oligonucleotide
ugcgggaaggcgcgcugcu

SEQ ID NO: 3050953 - RNA, 19 nt, Artificial Sequence
  Description of Artificial Sequence: Synthetic oligonucleotide
gcgucagauucccaaacuc

SEQ ID NO: 3050954 - RNA, 19 nt, Artificial Sequence
  Description of Artificial Sequence: Synthetic oligonucleotide
gauucuccuuuuggaccgc

SEQ ID NO: 3050955 - RNA, 19 nt, Artificial Sequence
  Description of Artificial Sequence: Synthetic oligonucleotide
agaucacgugccgcauccg

SEQ ID NO: 3050956 - RNA, 19 nt, Artificial Sequence
  Description of Artificial Sequence: Synthetic oligonucleotide
cacguguagaucagauaaa

SEQ ID NO: 3050957 - RNA, 19 nt, Artificial Sequence
  Description of Artificial Sequence: Synthetic oligonucleotide
ggaugcgcucgcgagugcg

SEQ ID NO: 3050958 - RNA, 19 nt, Artificial Sequence
  Description of Artificial Sequence: Synthetic oligonucleotide
uuugcguacuuggcuggau

SEQ ID NO: 3050959 - RNA, 19 nt, Artificial Sequence
  Description of Artificial Sequence: Synthetic oligonucleotide
cgcucaaacuccugguucc

SEQ ID NO: 3050960 - RNA, 19 nt, Artificial Sequence
  Description of Artificial Sequence: Synthetic oligonucleotide
ucgcgagugcggcgcagca

SEQ ID NO: 3050961 - RNA, 19 nt, Artificial Sequence
  Description of Artificial Sequence: Synthetic oligonucleotide
ucgcggcccaugguggcgg

SEQ ID NO: 3050962 - RNA, 19 nt, Artificial Sequence
  Description of Artificial Sequence: Synthetic oligonucleotide
uggggaugccuuugcugaa

SEQ ID NO: 3050963 - RNA, 19 nt, Artificial Sequence
  Description of Artificial Sequence: Synthetic oligonucleotide
ugacaagcuguaggagauc

SEQ ID NO: 3050964 - RNA, 19 nt, Artificial Sequence
  Description of Artificial Sequence: Synthetic oligonucleotide
agcacguuggggaugccuu

SEQ ID NO: 3050965 - RNA, 19 nt, Artificial Sequence
  Description of Artificial Sequence: Synthetic oligonucleotide
gucuucaagauaccacaau

SEQ ID NO: 3050966 - RNA, 19 nt, Artificial Sequence
  Description of Artificial Sequence: Synthetic oligonucleotide
ugcugcucacuugucguuu

SEQ ID NO: 3050967 - RNA, 19 nt, Artificial Sequence
  Description of Artificial Sequence: Synthetic oligonucleotide
cacguuggggaugccuuug

SEQ ID NO: 3050968 - RNA, 19 nt, Artificial Sequence
  Description of Artificial Sequence: Synthetic oligonucleotide
auggcggcgccacgcgcag

SEQ ID NO: 3050969 - RNA, 19 nt, Artificial Sequence
  Description of Artificial Sequence: Synthetic oligonucleotide
gugacaagcuguaggagau

SEQ ID NO: 3050970 - RNA, 19 nt, Artificial Sequence
  Description of Artificial Sequence: Synthetic oligonucleotide
gaccgcucaaacuccuggu

SEQ ID NO: 3050971 - RNA, 19 nt, Artificial Sequence
  Description of Artificial Sequence: Synthetic oligonucleotide
cacgcgcaggaugcgcucg

SEQ ID NO: 3050972 - RNA, 19 nt, Artificial Sequence
  Description of Artificial Sequence: Synthetic oligonucleotide
gcugcucacuugucguuug

SEQ ID NO: 3050973 - RNA, 19 nt, Artificial Sequence
  Description of Artificial Sequence: Synthetic oligonucleotide
gcaacacaaauggcggcgc

SEQ ID NO: 3050974 - RNA, 19 nt, Artificial Sequence
  Description of Artificial Sequence: Synthetic oligonucleotide
ggcgccacgcgcaggaugc

SEQ ID NO: 3050975 - RNA, 19 nt, Artificial Sequence
  Description of Artificial Sequence: Synthetic oligonucleotide
cguuugcguacuuggcugg

SEQ ID NO: 3050976 - RNA, 19 nt, Artificial Sequence
  Description of Artificial Sequence: Synthetic oligonucleotide
gggugacaagcuguaggag

SEQ ID NO: 3050977 - RNA, 19 nt, Artificial Sequence
  Description of Artificial Sequence: Synthetic oligonucleotide
auucuccuuuuggaccgcu

SEQ ID NO: 3050978 - RNA, 19 nt, Artificial Sequence
  Description of Artificial Sequence: Synthetic oligonucleotide
cuccuuuuggaccgcucaa

SEQ ID NO: 3050979 - RNA, 19 nt, Artificial Sequence
  Description of Artificial Sequence: Synthetic oligonucleotide
acgugccgcauccgcguca

SEQ ID NO: 3050980 - RNA, 19 nt, Artificial Sequence
  Description of Artificial Sequence: Synthetic oligonucleotide
gcauccgcgucagauuccc

SEQ ID NO: 3050981 - RNA, 19 nt, Artificial Sequence
  Description of Artificial Sequence: Synthetic oligonucleotide
cucgcggcccaugguggcg

SEQ ID NO: 3050982 - RNA, 19 nt, Artificial Sequence
  Description of Artificial Sequence: Synthetic oligonucleotide
gaagugcgggaaggcgcgc

SEQ ID NO: 3050983 - RNA, 19 nt, Artificial Sequence
  Description of Artificial Sequence: Synthetic oligonucleotide
cucgcgagugcggcgcagc

SEQ ID NO: 3050984 - RNA, 19 nt, Artificial Sequence
  Description of Artificial Sequence: Synthetic oligonucleotide
gugcggcgcagcacguugg

SEQ ID NO: 3050985 - RNA, 19 nt, Artificial Sequence
  Description of Artificial Sequence: Synthetic oligonucleotide
ggggaugccuuugcugaag

SEQ ID NO: 3050986 - RNA, 19 nt, Artificial Sequence
  Description of Artificial Sequence: Synthetic oligonucleotide
ggagaucacgugccgcauc

SEQ ID NO: 3050987 - RNA, 19 nt, Artificial Sequence
  Description of Artificial Sequence: Synthetic oligonucleotide
ccgcucaaacuccugguuc

SEQ ID NO: 3050988 - RNA, 19 nt, Artificial Sequence
  Description of Artificial Sequence: Synthetic oligonucleotide
gggaugccuuugcugaaga

SEQ ID NO: 3050989 - RNA, 19 nt, Artificial Sequence
  Description of Artificial Sequence: Synthetic oligonucleotide
guuugcguacuuggcugga

SEQ ID NO: 3050990 - RNA, 19 nt, Artificial Sequence
  Description of Artificial Sequence: Synthetic oligonucleotide
ccgcauccgcgucagauuc

SEQ ID NO: 3050991 - RNA, 19 nt, Artificial Sequence
  Description of Artificial Sequence: Synthetic oligonucleotide
ccagagaagggucuuucaa

SEQ ID NO: 3050992 - RNA, 19 nt, Artificial Sequence
  Description of Artificial Sequence: Synthetic oligonucleotide
aggagaucacgugccgcau

SEQ ID NO: 3050993 - RNA, 19 nt, Artificial Sequence
  Description of Artificial Sequence: Synthetic oligonucleotide
cucucccagagaagggucu

SEQ ID NO: 3050994 - RNA, 19 nt, Artificial Sequence
  Description of Artificial Sequence: Synthetic oligonucleotide
cgcaggaugcgcucgcgag

SEQ ID NO: 3050995 - RNA, 19 nt, Artificial Sequence
  Description of Artificial Sequence: Synthetic oligonucleotide
ggucuuucaaaggcaggaa

SEQ ID NO: 3050996 - RNA, 19 nt, Artificial Sequence
  Description of Artificial Sequence: Synthetic oligonucleotide
ccucucccagagaaggguc

SEQ ID NO: 3050997 - RNA, 19 nt, Artificial Sequence
  Description of Artificial Sequence: Synthetic oligonucleotide
gcugcucgaagggugacaa

SEQ ID NO: 3050998 - RNA, 19 nt, Artificial Sequence
  Description of Artificial Sequence: Synthetic oligonucleotide
gcucacuugucguuugcgu

SEQ ID NO: 3050999 - RNA, 19 nt, Artificial Sequence
  Description of Artificial Sequence: Synthetic oligonucleotide
gugcgggaaggcgcgcugc

SEQ ID NO: 3051000 - RNA, 19 nt, Artificial Sequence
  Description of Artificial Sequence: Synthetic oligonucleotide
ccgcgucagauucccaaac

SEQ ID NO: 3051001 - RNA, 19 nt, Artificial Sequence
  Description of Artificial Sequence: Synthetic oligonucleotide
cacgugccgcauccgcguc

SEQ ID NO: 3051002 - RNA, 19 nt, Artificial Sequence
  Description of Artificial Sequence: Synthetic oligonucleotide
caaacucgcggcccauggu

SEQ ID NO: 3051003 - RNA, 19 nt, Artificial Sequence
  Description of Artificial Sequence: Synthetic oligonucleotide
ucccaaacucgcggcccau

SEQ ID NO: 3051004 - RNA, 19 nt, Artificial Sequence
  Description of Artificial Sequence: Synthetic oligonucleotide
ccacaauguagacuccucu

SEQ ID NO: 3051005 - RNA, 19 nt, Artificial Sequence
  Description of Artificial Sequence: Synthetic oligonucleotide
cguacuuggcuggauucuc

SEQ ID NO: 3051006 - RNA, 19 nt, Artificial Sequence
  Description of Artificial Sequence: Synthetic oligonucleotide
cgcagcacguuggggaugc

SEQ ID NO: 3051007 - RNA, 19 nt, Artificial Sequence
  Description of Artificial Sequence: Synthetic oligonucleotide
cauccgcgucagauuccca

SEQ ID NO: 3051008 - RNA, 19 nt, Artificial Sequence
  Description of Artificial Sequence: Synthetic oligonucleotide
uggcggcgccacgcgcagg

SEQ ID NO: 3051009 - RNA, 19 nt, Artificial Sequence
  Description of Artificial Sequence: Synthetic oligonucleotide
gcgcgcugcucgaagggug

SEQ ID NO: 3051010 - RNA, 19 nt, Artificial Sequence
  Description of Artificial Sequence: Synthetic oligonucleotide
cacuugucguuugcguacu

SEQ ID NO: 3051011 - RNA, 19 nt, Artificial Sequence
  Description of Artificial Sequence: Synthetic oligonucleotide
gcaggaugcgcucgcgagu

SEQ ID NO: 3051012 - RNA, 19 nt, Artificial Sequence
  Description of Artificial Sequence: Synthetic oligonucleotide
gcucgaagggugacaagcu

SEQ ID NO: 3051013 - RNA, 19 nt, Artificial Sequence
  Description of Artificial Sequence: Synthetic oligonucleotide
gcgcucgcgagugcggcgc

SEQ ID NO: 3051014 - RNA, 19 nt, Artificial Sequence
  Description of Artificial Sequence: Synthetic oligonucleotide
cgaagggugacaagcugua

SEQ ID NO: 3051015 - RNA, 19 nt, Artificial Sequence
  Description of Artificial Sequence: Synthetic oligonucleotide
cggcgcagcacguugggga

SEQ ID NO: 3051016 - RNA, 19 nt, Artificial Sequence
  Description of Artificial Sequence: Synthetic oligonucleotide
cgcauccgcgucagauucc

SEQ ID NO: 3051017 - RNA, 19 nt, Artificial Sequence
  Description of Artificial Sequence: Synthetic oligonucleotide
gcggcgcagcacguugggg

SEQ ID NO: 3051018 - RNA, 19 nt, Artificial Sequence
  Description of Artificial Sequence: Synthetic oligonucleotide
gugcugcucacuugucguu

SEQ ID NO: 3051019 - RNA, 19 nt, Artificial Sequence
  Description of Artificial Sequence: Synthetic oligonucleotide
cccacguguagaucagaua

SEQ ID NO: 3051020 - RNA, 19 nt, Artificial Sequence
  Description of Artificial Sequence: Synthetic oligonucleotide
cagaugugugcugcucacu

SEQ ID NO: 3051021 - RNA, 19 nt, Artificial Sequence
  Description of Artificial Sequence: Synthetic oligonucleotide
gcgcaggaugcgcucgcga

SEQ ID NO: 3051022 - RNA, 19 nt, Artificial Sequence
  Description of Artificial Sequence: Synthetic oligonucleotide
cagcacguuggggaugccu

SEQ ID NO: 3051023 - RNA, 19 nt, Artificial Sequence
  Description of Artificial Sequence: Synthetic oligonucleotide
ggcgcagcacguuggggau

SEQ ID NO: 3051024 - RNA, 19 nt, Artificial Sequence
  Description of Artificial Sequence: Synthetic oligonucleotide
gcguacuuggcuggauucu

SEQ ID NO: 3051025 - RNA, 19 nt, Artificial Sequence
  Description of Artificial Sequence: Synthetic oligonucleotide
ccacgcgcaggaugcgcuc

SEQ ID NO: 3051026 - RNA, 19 nt, Artificial Sequence
  Description of Artificial Sequence: Synthetic oligonucleotide
cgugccgcauccgcgucag

SEQ ID NO: 3051027 - RNA, 19 nt, Artificial Sequence
  Description of Artificial Sequence: Synthetic oligonucleotide
cccaaacucgcggcccaug

SEQ ID NO: 3051028 - RNA, 19 nt, Artificial Sequence
  Description of Artificial Sequence: Synthetic oligonucleotide
gcucgcgagugcggcgcag

SEQ ID NO: 3051029 - RNA, 19 nt, Artificial Sequence
  Description of Artificial Sequence: Synthetic oligonucleotide
gcgcagcacguuggggaug

SEQ ID NO: 3051030 - RNA, 19 nt, Artificial Sequence
  Description of Artificial Sequence: Synthetic oligonucleotide
ccccacguguagaucagau

SEQ ID NO: 3051031 - RNA, 19 nt, Artificial Sequence
  Description of Artificial Sequence: Synthetic oligonucleotide
ggaaggcgcgcugcucgaa

SEQ ID NO: 3051032 - RNA, 19 nt, Artificial Sequence
  Description of Artificial Sequence: Synthetic oligonucleotide
gccgcauccgcgucagauu

SEQ ID NO: 3051033 - RNA, 19 nt, Artificial Sequence
  Description of Artificial Sequence: Synthetic oligonucleotide
cgcgcugcucgaaggguga

SEQ ID NO: 3051034 - RNA, 19 nt, Artificial Sequence
  Description of Artificial Sequence: Synthetic oligonucleotide
gcgccacgcgcaggaugcg

SEQ ID NO: 3051035 - RNA, 19 nt, Artificial Sequence
  Description of Artificial Sequence: Synthetic oligonucleotide
gccacgcgcaggaugcgcu

SEQ ID NO: 3051036 - RNA, 19 nt, Artificial Sequence
  Description of Artificial Sequence: Synthetic oligonucleotide
gcacguuggggaugccuuu

SEQ ID NO: 3051037 - RNA, 19 nt, Artificial Sequence
  Description of Artificial Sequence: Synthetic oligonucleotide
cggcgccacgcgcaggaug

SEQ ID NO: 3051038 - RNA, 19 nt, Artificial Sequence
  Description of Artificial Sequence: Synthetic oligonucleotide
cgcgucagauucccaaacu

SEQ ID NO: 3051039 - RNA, 19 nt, Artificial Sequence
  Description of Artificial Sequence: Synthetic oligonucleotide
gcgggaaggcgcgcugcuc

SEQ ID NO: 3051040 - RNA, 19 nt, Artificial Sequence
  Description of Artificial Sequence: Synthetic oligonucleotide
gagugcggcgcagcacguu

SEQ ID NO: 3051041 - RNA, 19 nt, Artificial Sequence
  Description of Artificial Sequence: Synthetic oligonucleotide
gcgcugcucgaagggugac

SEQ ID NO: 3051042 - RNA, 19 nt, Artificial Sequence
  Description of Artificial Sequence: Synthetic oligonucleotide
cgcgcaggaugcgcucgcg

SEQ ID NO: 3051043 - RNA, 19 nt, Artificial Sequence
  Description of Artificial Sequence: Synthetic oligonucleotide
ggcgcgcugcucgaagggu

SEQ ID NO: 3051044 - RNA, 19 nt, Artificial Sequence
  Description of Artificial Sequence: Synthetic oligonucleotide
cucccagagaagggucuuu

SEQ ID NO: 3051045 - RNA, 19 nt, Artificial Sequence
  Description of Artificial Sequence: Synthetic oligonucleotide
cgccacgcgcaggaugcgc

SEQ ID NO: 3051046 - RNA, 19 nt, Artificial Sequence
  Description of Artificial Sequence: Synthetic oligonucleotide
gugccgcauccgcgucaga

SEQ ID NO: 3051047 - RNA, 19 nt, Artificial Sequence
  Description of Artificial Sequence: Synthetic oligonucleotide
gcagcacguuggggaugcc

SEQ ID NO: 3051048 - RNA, 19 nt, Artificial Sequence
  Description of Artificial Sequence: Synthetic oligonucleotide
cgcgagugcggcgcagcac

SEQ ID NO: 3051049 - RNA, 19 nt, Artificial Sequence
  Description of Artificial Sequence: Synthetic oligonucleotide
gcggcccaugguggcggug

SEQ ID NO: 3051050 - RNA, 19 nt, Artificial Sequence
  Description of Artificial Sequence: Synthetic oligonucleotide
cgcugcucgaagggugaca

SEQ ID NO: 3051051 - RNA, 19 nt, Artificial Sequence
  Description of Artificial Sequence: Synthetic oligonucleotide
cgagugcggcgcagcacgu

SEQ ID NO: 3051052 - RNA, 19 nt, Artificial Sequence
  Description of Artificial Sequence: Synthetic oligonucleotide
cgcucgcgagugcggcgca

SEQ ID NO: 3051053 - RNA, 19 nt, Artificial Sequence
  Description of Artificial Sequence: Synthetic oligonucleotide
gcggcgccacgcgcaggau

SEQ ID NO: 3051054 - RNA, 19 nt, Artificial Sequence
  Description of Artificial Sequence: Synthetic oligonucleotide
cgcggcccaugguggcggu

SEQ ID NO: 3051055 - RNA, 19 nt, Artificial Sequence
  Description of Artificial Sequence: Synthetic oligonucleotide
aaaaugaucugccacauuc

SEQ ID NO: 3051056 - RNA, 19 nt, Artificial Sequence
  Description of Artificial Sequence: Synthetic oligonucleotide
uuuagaagaucuaaggacc

SEQ ID NO: 3051057 - RNA, 19 nt, Artificial Sequence
  Description of Artificial Sequence: Synthetic oligonucleotide
uguuuuagaagaucuaagg

SEQ ID NO: 3051058 - RNA, 19 nt, Artificial Sequence
  Description of Artificial Sequence: Synthetic oligonucleotide
guugcuucagcauugaagg

SEQ ID NO: 3051059 - RNA, 19 nt, Artificial Sequence
  Description of Artificial Sequence: Synthetic oligonucleotide
uuuuagaagaucuaaggac

SEQ ID NO: 3051060 - RNA, 19 nt, Artificial Sequence
  Description of Artificial Sequence: Synthetic oligonucleotide
uagaaaguguuuuagaaga

SEQ ID NO: 3051061 - RNA, 19 nt, Artificial Sequence
  Description of Artificial Sequence: Synthetic oligonucleotide
uugaaggauaguaaaauga

SEQ ID NO: 3051062 - RNA, 19 nt, Artificial Sequence
  Description of Artificial Sequence: Synthetic oligonucleotide
aaagugaugagcauguaag

SEQ ID NO: 3051063 - RNA, 19 nt, Artificial Sequence
  Description of Artificial Sequence: Synthetic oligonucleotide
aguuuucuaauucuccagc

SEQ ID NO: 3051064 - RNA, 19 nt, Artificial Sequence
  Description of Artificial Sequence: Synthetic oligonucleotide
aaggauaguaaaaugaucu

SEQ ID NO: 3051065 - RNA, 19 nt, Artificial Sequence
  Description of Artificial Sequence: Synthetic oligonucleotide
uauagaaaguguuuuagaa

SEQ ID NO: 3051066 - RNA, 19 nt, Artificial Sequence
  Description of Artificial Sequence: Synthetic oligonucleotide
uguugcuucagcauugaag

SEQ ID NO: 3051067 - RNA, 19 nt, Artificial Sequence
  Description of Artificial Sequence: Synthetic oligonucleotide
gauaguaaaaugaucugcc

SEQ ID NO: 3051068 - RNA, 19 nt, Artificial Sequence
  Description of Artificial Sequence: Synthetic oligonucleotide
auagaaaguguuuuagaag

SEQ ID NO: 3051069 - RNA, 19 nt, Artificial Sequence
  Description of Artificial Sequence: Synthetic oligonucleotide
cuuaugacauucuuuacac

SEQ ID NO: 3051070 - RNA, 19 nt, Artificial Sequence
  Description of Artificial Sequence: Synthetic oligonucleotide
agaucuaaggaccuuacca

SEQ ID NO: 3051071 - RNA, 19 nt, Artificial Sequence
  Description of Artificial Sequence: Synthetic oligonucleotide
aagaucuaaggaccuuacc

SEQ ID NO: 3051072 - RNA, 19 nt, Artificial Sequence
  Description of Artificial Sequence: Synthetic oligonucleotide
uguauagaaaguguuuuag

SEQ ID NO: 3051073 - RNA, 19 nt, Artificial Sequence
  Description of Artificial Sequence: Synthetic oligonucleotide
aaguuuucuaauucuccag

SEQ ID NO: 3051074 - RNA, 19 nt, Artificial Sequence
  Description of Artificial Sequence: Synthetic oligonucleotide
aagugaugagcauguaagg

SEQ ID NO: 3051075 - RNA, 19 nt, Artificial Sequence
  Description of Artificial Sequence: Synthetic oligonucleotide
aaaguguuuuagaagaucu

SEQ ID NO: 3051076 - RNA, 19 nt, Artificial Sequence
  Description of Artificial Sequence: Synthetic oligonucleotide
ugaucugccacauucuuca

SEQ ID NO: 3051077 - RNA, 19 nt, Artificial Sequence
  Description of Artificial Sequence: Synthetic oligonucleotide
agugaugagcauguaaggc

SEQ ID NO: 3051078 - RNA, 19 nt, Artificial Sequence
  Description of Artificial Sequence: Synthetic oligonucleotide
uaaguuuucuaauucucca

SEQ ID NO: 3051079 - RNA, 19 nt, Artificial Sequence
  Description of Artificial Sequence: Synthetic oligonucleotide
gaaugaauucuuuugaugu

SEQ ID NO: 3051080 - RNA, 19 nt, Artificial Sequence
  Description of Artificial Sequence: Synthetic oligonucleotide
uaugacauucuuuacacuu

SEQ ID NO: 3051081 - RNA, 19 nt, Artificial Sequence
  Description of Artificial Sequence: Synthetic oligonucleotide
ugaaggauaguaaaaugau

SEQ ID NO: 3051082 - RNA, 19 nt, Artificial Sequence
  Description of Artificial Sequence: Synthetic oligonucleotide
auugaaggauaguaaaaug

SEQ ID NO: 3051083 - RNA, 19 nt, Artificial Sequence
  Description of Artificial Sequence: Synthetic oligonucleotide
aaaagugaugagcauguaa

SEQ ID NO: 3051084 - RNA, 19 nt, Artificial Sequence
  Description of Artificial Sequence: Synthetic oligonucleotide
agaaugaauucuuuugaug

SEQ ID NO: 3051085 - RNA, 19 nt, Artificial Sequence
  Description of Artificial Sequence: Synthetic oligonucleotide
uaguaaaaugaucugccac

SEQ ID NO: 3051086 - RNA, 19 nt, Artificial Sequence
  Description of Artificial Sequence: Synthetic oligonucleotide
gaucuaaggaccuuaccac

SEQ ID NO: 3051087 - RNA, 19 nt, Artificial Sequence
  Description of Artificial Sequence: Synthetic oligonucleotide
ugaauucuuuugauguugc

SEQ ID NO: 3051088 - RNA, 19 nt, Artificial Sequence
  Description of Artificial Sequence: Synthetic oligonucleotide
uguagagguacccucugug

SEQ ID NO: 3051089 - RNA, 19 nt, Artificial Sequence
  Description of Artificial Sequence: Synthetic oligonucleotide
guuuuagaagaucuaagga

SEQ ID NO: 3051090 - RNA, 19 nt, Artificial Sequence
  Description of Artificial Sequence: Synthetic oligonucleotide
ucugguguauagaaagugu

SEQ ID NO: 3051091 - RNA, 19 nt, Artificial Sequence
  Description of Artificial Sequence: Synthetic oligonucleotide
gugaugagcauguaaggcc

SEQ ID NO: 3051092 - RNA, 19 nt, Artificial Sequence
  Description of Artificial Sequence: Synthetic oligonucleotide
ugaugagcauguaaggccu

SEQ ID NO: 3051093 - RNA, 19 nt, Artificial Sequence
  Description of Artificial Sequence: Synthetic oligonucleotide
uuagaagaucuaaggaccu

SEQ ID NO: 3051094 - RNA, 19 nt, Artificial Sequence
  Description of Artificial Sequence: Synthetic oligonucleotide
agcauguaaggccuuauga

SEQ ID NO: 3051095 - RNA, 19 nt, Artificial Sequence
  Description of Artificial Sequence: Synthetic oligonucleotide
aaugaauucuuuugauguu

SEQ ID NO: 3051096 - RNA, 19 nt, Artificial Sequence
  Description of Artificial Sequence: Synthetic oligonucleotide
ugauguugcuucagcauug

SEQ ID NO: 3051097 - RNA, 19 nt, Artificial Sequence
  Description of Artificial Sequence: Synthetic oligonucleotide
ucuaaggaccuuaccacac

SEQ ID NO: 3051098 - RNA, 19 nt, Artificial Sequence
  Description of Artificial Sequence: Synthetic oligonucleotide
ucagcauugaaggauagua

SEQ ID NO: 3051099 - RNA, 19 nt, Artificial Sequence
  Description of Artificial Sequence: Synthetic oligonucleotide
agcauugaaggauaguaaa

SEQ ID NO: 3051100 - RNA, 19 nt, Artificial Sequence
  Description of Artificial Sequence: Synthetic oligonucleotide
guaaguuuucuaauucucc

SEQ ID NO: 3051101 - RNA, 19 nt, Artificial Sequence
  Description of Artificial Sequence: Synthetic oligonucleotide
auaguaaaaugaucugcca

SEQ ID NO: 3051102 - RNA, 19 nt, Artificial Sequence
  Description of Artificial Sequence: Synthetic oligonucleotide
aggauaguaaaaugaucug

SEQ ID NO: 3051103 - RNA, 19 nt, Artificial Sequence
  Description of Artificial Sequence: Synthetic oligonucleotide
gaccuuaccacacuccuca

SEQ ID NO: 3051104 - RNA, 19 nt, Artificial Sequence
  Description of Artificial Sequence: Synthetic oligonucleotide
cuuuugauguugcuucagc

SEQ ID NO: 3051105 - RNA, 19 nt, Artificial Sequence
  Description of Artificial Sequence: Synthetic oligonucleotide
uagagguacccucugugca

SEQ ID NO: 3051106 - RNA, 19 nt, Artificial Sequence
  Description of Artificial Sequence: Synthetic oligonucleotide
aaugaucugccacauucuu

SEQ ID NO: 3051107 - RNA, 19 nt, Artificial Sequence
  Description of Artificial Sequence: Synthetic oligonucleotide
ugaagucucugguguauag

SEQ ID NO: 3051108 - RNA, 19 nt, Artificial Sequence
  Description of Artificial Sequence: Synthetic oligonucleotide
aaggaccuuaccacacucc

SEQ ID NO: 3051109 - RNA, 19 nt, Artificial Sequence
  Description of Artificial Sequence: Synthetic oligonucleotide
uugauguugcuucagcauu

SEQ ID NO: 3051110 - RNA, 19 nt, Artificial Sequence
  Description of Artificial Sequence: Synthetic oligonucleotide
cauguaaggccuuaugaca

SEQ ID NO: 3051111 - RNA, 19 nt, Artificial Sequence
  Description of Artificial Sequence: Synthetic oligonucleotide
augaauucuuuugauguug

SEQ ID NO: 3051112 - RNA, 19 nt, Artificial Sequence
  Description of Artificial Sequence: Synthetic oligonucleotide
acuuguaaguuuucuaauu

SEQ ID NO: 3051113 - RNA, 19 nt, Artificial Sequence
  Description of Artificial Sequence: Synthetic oligonucleotide
aguguuuuagaagaucuaa

SEQ ID NO: 3051114 - RNA, 19 nt, Artificial Sequence
  Description of Artificial Sequence: Synthetic oligonucleotide
guauagaaaguguuuuaga

SEQ ID NO: 3051115 - RNA, 19 nt, Artificial Sequence
  Description of Artificial Sequence: Synthetic oligonucleotide
cuuaaggaacgaaggauca

SEQ ID NO: 3051116 - RNA, 19 nt, Artificial Sequence
  Description of Artificial Sequence: Synthetic oligonucleotide
ggaacgaaggaucauaaaa

SEQ ID NO: 3051117 - RNA, 19 nt, Artificial Sequence
  Description of Artificial Sequence: Synthetic oligonucleotide
ggauaguaaaaugaucugc

SEQ ID NO: 3051118 - RNA, 19 nt, Artificial Sequence
  Description of Artificial Sequence: Synthetic oligonucleotide
gaaaguguuuuagaagauc

SEQ ID NO: 3051119 - RNA, 19 nt, Artificial Sequence
  Description of Artificial Sequence: Synthetic oligonucleotide
agagguacccucugugcag

SEQ ID NO: 3051120 - RNA, 19 nt, Artificial Sequence
  Description of Artificial Sequence: Synthetic oligonucleotide
aucuaaggaccuuaccaca

SEQ ID NO: 3051121 - RNA, 19 nt, Artificial Sequence
  Description of Artificial Sequence: Synthetic oligonucleotide
gaaggauaguaaaaugauc

SEQ ID NO: 3051122 - RNA, 19 nt, Artificial Sequence
  Description of Artificial Sequence: Synthetic oligonucleotide
guguuuuagaagaucuaag

SEQ ID NO: 3051123 - RNA, 19 nt, Artificial Sequence
  Description of Artificial Sequence: Synthetic oligonucleotide
guuuucuaauucuccagca

SEQ ID NO: 3051124 - RNA, 19 nt, Artificial Sequence
  Description of Artificial Sequence: Synthetic oligonucleotide
guagagguacccucugugc

SEQ ID NO: 3051125 - RNA, 19 nt, Artificial Sequence
  Description of Artificial Sequence: Synthetic oligonucleotide
aaaugaucugccacauucu

SEQ ID NO: 3051126 - RNA, 19 nt, Artificial Sequence
  Description of Artificial Sequence: Synthetic oligonucleotide
uaaggaccuuaccacacuc

SEQ ID NO: 3051127 - RNA, 19 nt, Artificial Sequence
  Description of Artificial Sequence: Synthetic oligonucleotide
uuaugacauucuuuacacu

SEQ ID NO: 3051128 - RNA, 19 nt, Artificial Sequence
  Description of Artificial Sequence: Synthetic oligonucleotide
ugguguauagaaaguguuu

SEQ ID NO: 3051129 - RNA, 19 nt, Artificial Sequence
  Description of Artificial Sequence: Synthetic oligonucleotide
uaaggaacgaaggaucaua

SEQ ID NO: 3051130 - RNA, 19 nt, Artificial Sequence
  Description of Artificial Sequence: Synthetic oligonucleotide
aggaccuuaccacacuccu

SEQ ID NO: 3051131 - RNA, 19 nt, Artificial Sequence
  Description of Artificial Sequence: Synthetic oligonucleotide
ucuuuugauguugcuucag

SEQ ID NO: 3051132 - RNA, 19 nt, Artificial Sequence
  Description of Artificial Sequence: Synthetic oligonucleotide
ugcuucagcauugaaggau

SEQ ID NO: 3051133 - RNA, 19 nt, Artificial Sequence
  Description of Artificial Sequence: Synthetic oligonucleotide
uaccacacuccucacacuu

SEQ ID NO: 3051134 - RNA, 19 nt, Artificial Sequence
  Description of Artificial Sequence: Synthetic oligonucleotide
gcauguaaggccuuaugac

SEQ ID NO: 3051135 - RNA, 19 nt, Artificial Sequence
  Description of Artificial Sequence: Synthetic oligonucleotide
gaagaucuaaggaccuuac

SEQ ID NO: 3051136 - RNA, 19 nt, Artificial Sequence
  Description of Artificial Sequence: Synthetic oligonucleotide
gagcauguaaggccuuaug

SEQ ID NO: 3051137 - RNA, 19 nt, Artificial Sequence
  Description of Artificial Sequence: Synthetic oligonucleotide
aaggaacgaaggaucauaa

SEQ ID NO: 3051138 - RNA, 19 nt, Artificial Sequence
  Description of Artificial Sequence: Synthetic oligonucleotide
augaucugccacauucuuc

SEQ ID NO: 3051139 - RNA, 19 nt, Artificial Sequence
  Description of Artificial Sequence: Synthetic oligonucleotide
cuucagcauugaaggauag

SEQ ID NO: 3051140 - RNA, 19 nt, Artificial Sequence
  Description of Artificial Sequence: Synthetic oligonucleotide
ucuaauucuccagcaucac

SEQ ID NO: 3051141 - RNA, 19 nt, Artificial Sequence
  Description of Artificial Sequence: Synthetic oligonucleotide
auguaaggccuuaugacau

SEQ ID NO: 3051142 - RNA, 19 nt, Artificial Sequence
  Description of Artificial Sequence: Synthetic oligonucleotide
gagguacccucugugcagg

SEQ ID NO: 3051143 - RNA, 19 nt, Artificial Sequence
  Description of Artificial Sequence: Synthetic oligonucleotide
agaagaucuaaggaccuua

SEQ ID NO: 3051144 - RNA, 19 nt, Artificial Sequence
  Description of Artificial Sequence: Synthetic oligonucleotide
uaaaaugaucugccacauu

SEQ ID NO: 3051145 - RNA, 19 nt, Artificial Sequence
  Description of Artificial Sequence: Synthetic oligonucleotide
uacccucugugcagguucc

SEQ ID NO: 3051146 - RNA, 19 nt, Artificial Sequence
  Description of Artificial Sequence: Synthetic oligonucleotide
ggccuuaugacauucuuua

SEQ ID NO: 3051147 - RNA, 19 nt, Artificial Sequence
  Description of Artificial Sequence: Synthetic oligonucleotide
uugcuucagcauugaagga

SEQ ID NO: 3051148 - RNA, 19 nt, Artificial Sequence
  Description of Artificial Sequence: Synthetic oligonucleotide
uuaaggaacgaaggaucau

SEQ ID NO: 3051149 - RNA, 19 nt, Artificial Sequence
  Description of Artificial Sequence: Synthetic oligonucleotide
ucccuguagagguacccuc

SEQ ID NO: 3051150 - RNA, 19 nt, Artificial Sequence
  Description of Artificial Sequence: Synthetic oligonucleotide
ccuuaugacauucuuuaca

SEQ ID NO: 3051151 - RNA, 19 nt, Artificial Sequence
  Description of Artificial Sequence: Synthetic oligonucleotide
gaagucucugguguauaga

SEQ ID NO: 3051152 - RNA, 19 nt, Artificial Sequence
  Description of Artificial Sequence: Synthetic oligonucleotide
uucagcauugaaggauagu

SEQ ID NO: 3051153 - RNA, 19 nt, Artificial Sequence
  Description of Artificial Sequence: Synthetic oligonucleotide
guguauagaaaguguuuua

SEQ ID NO: 3051154 - RNA, 19 nt, Artificial Sequence
  Description of Artificial Sequence: Synthetic oligonucleotide
uguaaggccuuaugacauu

SEQ ID NO: 3051155 - RNA, 19 nt, Artificial Sequence
  Description of Artificial Sequence: Synthetic oligonucleotide
cauugaaggauaguaaaau

SEQ ID NO: 3051156 - RNA, 19 nt, Artificial Sequence
  Description of Artificial Sequence: Synthetic oligonucleotide
guaaggccuuaugacauuc

SEQ ID NO: 3051157 - RNA, 19 nt, Artificial Sequence
  Description of Artificial Sequence: Synthetic oligonucleotide
aggaacgaaggaucauaaa

SEQ ID NO: 3051158 - RNA, 19 nt, Artificial Sequence
  Description of Artificial Sequence: Synthetic oligonucleotide
cagcauugaaggauaguaa

SEQ ID NO: 3051159 - RNA, 19 nt, Artificial Sequence
  Description of Artificial Sequence: Synthetic oligonucleotide
ccagaaugaauucuuuuga

SEQ ID NO: 3051160 - RNA, 19 nt, Artificial Sequence
  Description of Artificial Sequence: Synthetic oligonucleotide
agaaaguguuuuagaagau

SEQ ID NO: 3051161 - RNA, 19 nt, Artificial Sequence
  Description of Artificial Sequence: Synthetic oligonucleotide
gauguugcuucagcauuga

SEQ ID NO: 3051162 - RNA, 19 nt, Artificial Sequence
  Description of Artificial Sequence: Synthetic oligonucleotide
ugagcauguaaggccuuau

SEQ ID NO: 3051163 - RNA, 19 nt, Artificial Sequence
  Description of Artificial Sequence: Synthetic oligonucleotide
cagaaugaauucuuuugau

SEQ ID NO: 3051164 - RNA, 19 nt, Artificial Sequence
  Description of Artificial Sequence: Synthetic oligonucleotide
uagaagaucuaaggaccuu

SEQ ID NO: 3051165 - RNA, 19 nt, Artificial Sequence
  Description of Artificial Sequence: Synthetic oligonucleotide
aucccuguagagguacccu

SEQ ID NO: 3051166 - RNA, 19 nt, Artificial Sequence
  Description of Artificial Sequence: Synthetic oligonucleotide
guaaaaugaucugccacau

SEQ ID NO: 3051167 - RNA, 19 nt, Artificial Sequence
  Description of Artificial Sequence: Synthetic oligonucleotide
cugguguauagaaaguguu

SEQ ID NO: 3051168 - RNA, 19 nt, Artificial Sequence
  Description of Artificial Sequence: Synthetic oligonucleotide
gguguauagaaaguguuuu

SEQ ID NO: 3051169 - RNA, 19 nt, Artificial Sequence
  Description of Artificial Sequence: Synthetic oligonucleotide
cacuuguaaguuuucuaau

SEQ ID NO: 3051170 - RNA, 19 nt, Artificial Sequence
  Description of Artificial Sequence: Synthetic oligonucleotide
gcauugaaggauaguaaaa

SEQ ID NO: 3051171 - RNA, 19 nt, Artificial Sequence
  Description of Artificial Sequence: Synthetic oligonucleotide
auguugcuucagcauugaa

SEQ ID NO: 3051172 - RNA, 19 nt, Artificial Sequence
  Description of Artificial Sequence: Synthetic oligonucleotide
gccuuaugacauucuuuac

SEQ ID NO: 3051173 - RNA, 19 nt, Artificial Sequence
  Description of Artificial Sequence: Synthetic oligonucleotide
aggccuuaugacauucuuu

SEQ ID NO: 3051174 - RNA, 19 nt, Artificial Sequence
  Description of Artificial Sequence: Synthetic oligonucleotide
cuaaggaccuuaccacacu

SEQ ID NO: 3051175 - RNA, 19 nt, Artificial Sequence
  Description of Artificial Sequence: Synthetic oligonucleotide
augagcauguaaggccuua

SEQ ID NO: 3051176 - RNA, 19 nt, Artificial Sequence
  Description of Artificial Sequence: Synthetic oligonucleotide
ccuguagagguacccucug

SEQ ID NO: 3051177 - RNA, 19 nt, Artificial Sequence
  Description of Artificial Sequence: Synthetic oligonucleotide
agguacccucugugcaggu

SEQ ID NO: 3051178 - RNA, 19 nt, Artificial Sequence
  Description of Artificial Sequence: Synthetic oligonucleotide
gcuucagcauugaaggaua

SEQ ID NO: 3051179 - RNA, 19 nt, Artificial Sequence
  Description of Artificial Sequence: Synthetic oligonucleotide
cuguagagguacccucugu

SEQ ID NO: 3051180 - RNA, 19 nt, Artificial Sequence
  Description of Artificial Sequence: Synthetic oligonucleotide
ggaccuuaccacacuccuc

SEQ ID NO: 3051181 - RNA, 19 nt, Artificial Sequence
  Description of Artificial Sequence: Synthetic oligonucleotide
gaugagcauguaaggccuu

SEQ ID NO: 3051182 - RNA, 19 nt, Artificial Sequence
  Description of Artificial Sequence: Synthetic oligonucleotide
cccuguagagguacccucu

SEQ ID NO: 3051183 - RNA, 19 nt, Artificial Sequence
  Description of Artificial Sequence: Synthetic oligonucleotide
gguacccucugugcagguu

SEQ ID NO: 3051184 - RNA, 19 nt, Artificial Sequence
  Description of Artificial Sequence: Synthetic oligonucleotide
uuugacugcaaguagaagg

SEQ ID NO: 3051185 - RNA, 19 nt, Artificial Sequence
  Description of Artificial Sequence: Synthetic oligonucleotide
aaugaucugggccagguac

SEQ ID NO: 3051186 - RNA, 19 nt, Artificial Sequence
  Description of Artificial Sequence: Synthetic oligonucleotide
uaucguucaccuuaaauag

SEQ ID NO: 3051187 - RNA, 19 nt, Artificial Sequence
  Description of Artificial Sequence: Synthetic oligonucleotide
agagguuggaugcagcugc

SEQ ID NO: 3051188 - RNA, 19 nt, Artificial Sequence
  Description of Artificial Sequence: Synthetic oligonucleotide
gacguugagaaucugcugg

SEQ ID NO: 3051189 - RNA, 19 nt, Artificial Sequence
  Description of Artificial Sequence: Synthetic oligonucleotide
aaaggcucugcccaccacc

SEQ ID NO: 3051190 - RNA, 19 nt, Artificial Sequence
  Description of Artificial Sequence: Synthetic oligonucleotide
aaacuccugccucagggcc

SEQ ID NO: 3051191 - RNA, 19 nt, Artificial Sequence
  Description of Artificial Sequence: Synthetic oligonucleotide
uuaucguucaccuuaaaua

SEQ ID NO: 3051192 - RNA, 19 nt, Artificial Sequence
  Description of Artificial Sequence: Synthetic oligonucleotide
aaauaggugcucauaauuc

SEQ ID NO: 3051193 - RNA, 19 nt, Artificial Sequence
  Description of Artificial Sequence: Synthetic oligonucleotide
aauaggugcucauaauucu

SEQ ID NO: 3051194 - RNA, 19 nt, Artificial Sequence
  Description of Artificial Sequence: Synthetic oligonucleotide
cucauaauucuucuggacc

SEQ ID NO: 3051195 - RNA, 19 nt, Artificial Sequence
  Description of Artificial Sequence: Synthetic oligonucleotide
aucacaaugaucugggcca

SEQ ID NO: 3051196 - RNA, 19 nt, Artificial Sequence
  Description of Artificial Sequence: Synthetic oligonucleotide
ucaggguucagcuuggaga

SEQ ID NO: 3051197 - RNA, 19 nt, Artificial Sequence
  Description of Artificial Sequence: Synthetic oligonucleotide
acagauuuaucguucaccu

SEQ ID NO: 3051198 - RNA, 19 nt, Artificial Sequence
  Description of Artificial Sequence: Synthetic oligonucleotide
acugcaaguagaaggagcc

SEQ ID NO: 3051199 - RNA, 19 nt, Artificial Sequence
  Description of Artificial Sequence: Synthetic oligonucleotide
uaaauaggugcucauaauu

SEQ ID NO: 3051200 - RNA, 19 nt, Artificial Sequence
  Description of Artificial Sequence: Synthetic oligonucleotide
uugacugcaaguagaagga

SEQ ID NO: 3051201 - RNA, 19 nt, Artificial Sequence
  Description of Artificial Sequence: Synthetic oligonucleotide
uucaccuuaaauaggugcu

SEQ ID NO: 3051202 - RNA, 19 nt, Artificial Sequence
  Description of Artificial Sequence: Synthetic oligonucleotide
agauuuaucguucaccuua

SEQ ID NO: 3051203 - RNA, 19 nt, Artificial Sequence
  Description of Artificial Sequence: Synthetic oligonucleotide
uuuaucguucaccuuaaau

SEQ ID NO: 3051204 - RNA, 19 nt, Artificial Sequence
  Description of Artificial Sequence: Synthetic oligonucleotide
guucaccuuaaauaggugc

SEQ ID NO: 3051205 - RNA, 19 nt, Artificial Sequence
  Description of Artificial Sequence: Synthetic oligonucleotide
uauucggaguuccucaucu

SEQ ID NO: 3051206 - RNA, 19 nt, Artificial Sequence
  Description of Artificial Sequence: Synthetic oligonucleotide
ugcagcugcagacuggugc

SEQ ID NO: 3051207 - RNA, 19 nt, Artificial Sequence
  Description of Artificial Sequence: Synthetic oligonucleotide
caucacaaugaucugggcc

SEQ ID NO: 3051208 - RNA, 19 nt, Artificial Sequence
  Description of Artificial Sequence: Synthetic oligonucleotide
ucguucaccuuaaauaggu

SEQ ID NO: 3051209 - RNA, 19 nt, Artificial Sequence
  Description of Artificial Sequence: Synthetic oligonucleotide
aaccuuugacugcaaguag

SEQ ID NO: 3051210 - RNA, 19 nt, Artificial Sequence
  Description of Artificial Sequence: Synthetic oligonucleotide
uucggaguuccucaucuag

SEQ ID NO: 3051211 - RNA, 19 nt, Artificial Sequence
  Description of Artificial Sequence: Synthetic oligonucleotide
cuugcugcaaacuccugcc

SEQ ID NO: 3051212 - RNA, 19 nt, Artificial Sequence
  Description of Artificial Sequence: Synthetic oligonucleotide
uucuuggucuuguauucgg

SEQ ID NO: 3051213 - RNA, 19 nt, Artificial Sequence
  Description of Artificial Sequence: Synthetic oligonucleotide
ucggaguuccucaucuagg

SEQ ID NO: 3051214 - RNA, 19 nt, Artificial Sequence
  Description of Artificial Sequence: Synthetic oligonucleotide
cuaggcguuccuuugcacg

SEQ ID NO: 3051215 - RNA, 19 nt, Artificial Sequence
  Description of Artificial Sequence: Synthetic oligonucleotide
uuguauucggaguuccuca

SEQ ID NO: 3051216 - RNA, 19 nt, Artificial Sequence
  Description of Artificial Sequence: Synthetic oligonucleotide
uuccuuugcacggacaacc

SEQ ID NO: 3051217 - RNA, 19 nt, Artificial Sequence
  Description of Artificial Sequence: Synthetic oligonucleotide
ugcacacccaucacaauga

SEQ ID NO: 3051218 - RNA, 19 nt, Artificial Sequence
  Description of Artificial Sequence: Synthetic oligonucleotide
cuuaaauaggugcucauaa

SEQ ID NO: 3051219 - RNA, 19 nt, Artificial Sequence
  Description of Artificial Sequence: Synthetic oligonucleotide
cuuggagacguugagaauc

SEQ ID NO: 3051220 - RNA, 19 nt, Artificial Sequence
  Description of Artificial Sequence: Synthetic oligonucleotide
uaggcguuccuuugcacgg

SEQ ID NO: 3051221 - RNA, 19 nt, Artificial Sequence
  Description of Artificial Sequence: Synthetic oligonucleotide
aucugggccagguacuugg

SEQ ID NO: 3051222 - RNA, 19 nt, Artificial Sequence
  Description of Artificial Sequence: Synthetic oligonucleotide
auaauucuucuggaccugc

SEQ ID NO: 3051223 - RNA, 19 nt, Artificial Sequence
  Description of Artificial Sequence: Synthetic oligonucleotide
ucuucuuggucuuguauuc

SEQ ID NO: 3051224 - RNA, 19 nt, Artificial Sequence
  Description of Artificial Sequence: Synthetic oligonucleotide
acaaccuuugacugcaagu

SEQ ID NO: 3051225 - RNA, 19 nt, Artificial Sequence
  Description of Artificial Sequence: Synthetic oligonucleotide
uuaaauaggugcucauaau

SEQ ID NO: 3051226 - RNA, 19 nt, Artificial Sequence
  Description of Artificial Sequence: Synthetic oligonucleotide
ugcacggacaaccuuugac

SEQ ID NO: 3051227 - RNA, 19 nt, Artificial Sequence
  Description of Artificial Sequence: Synthetic oligonucleotide
cuuggucuuguauucggag

SEQ ID NO: 3051228 - RNA, 19 nt, Artificial Sequence
  Description of Artificial Sequence: Synthetic oligonucleotide
cagacuggugcccagcacg

SEQ ID NO: 3051229 - RNA, 19 nt, Artificial Sequence
  Description of Artificial Sequence: Synthetic oligonucleotide
acggacaaccuuugacugc

SEQ ID NO: 3051230 - RNA, 19 nt, Artificial Sequence
  Description of Artificial Sequence: Synthetic oligonucleotide
agcuuggagacguugagaa

SEQ ID NO: 3051231 - RNA, 19 nt, Artificial Sequence
  Description of Artificial Sequence: Synthetic oligonucleotide
uagaaggagccacccacag

SEQ ID NO: 3051232 - RNA, 19 nt, Artificial Sequence
  Description of Artificial Sequence: Synthetic oligonucleotide
agguacuuggccauggcgg

SEQ ID NO: 3051233 - RNA, 19 nt, Artificial Sequence
  Description of Artificial Sequence: Synthetic oligonucleotide
cacagauuuaucguucacc

SEQ ID NO: 3051234 - RNA, 19 nt, Artificial Sequence
  Description of Artificial Sequence: Synthetic oligonucleotide
ucaucuaggcguuccuuug

SEQ ID NO: 3051235 - RNA, 19 nt, Artificial Sequence
  Description of Artificial Sequence: Synthetic oligonucleotide
uuugcacggacaaccuuug

SEQ ID NO: 3051236 - RNA, 19 nt, Artificial Sequence
  Description of Artificial Sequence: Synthetic oligonucleotide
guuggaugcagcugcagac

SEQ ID NO: 3051237 - RNA, 19 nt, Artificial Sequence
  Description of Artificial Sequence: Synthetic oligonucleotide
caggguucagcuuggagac

SEQ ID NO: 3051238 - RNA, 19 nt, Artificial Sequence
  Description of Artificial Sequence: Synthetic oligonucleotide
acguugagaaucugcuggg

SEQ ID NO: 3051239 - RNA, 19 nt, Artificial Sequence
  Description of Artificial Sequence: Synthetic oligonucleotide
cuggcuugcugcaaacucc

SEQ ID NO: 3051240 - RNA, 19 nt, Artificial Sequence
  Description of Artificial Sequence: Synthetic oligonucleotide
gcaaacuccugccucaggg

SEQ ID NO: 3051241 - RNA, 19 nt, Artificial Sequence
  Description of Artificial Sequence: Synthetic oligonucleotide
ugcaaguagaaggagccac

SEQ ID NO: 3051242 - RNA, 19 nt, Artificial Sequence
  Description of Artificial Sequence: Synthetic oligonucleotide
gaaggagccacccacagau

SEQ ID NO: 3051243 - RNA, 19 nt, Artificial Sequence
  Description of Artificial Sequence: Synthetic oligonucleotide
uuggucuuguauucggagu

SEQ ID NO: 3051244 - RNA, 19 nt, Artificial Sequence
  Description of Artificial Sequence: Synthetic oligonucleotide
uucuucuggaccugcucag

SEQ ID NO: 3051245 - RNA, 19 nt, Artificial Sequence
  Description of Artificial Sequence: Synthetic oligonucleotide
gacugcaaguagaaggagc

SEQ ID NO: 3051246 - RNA, 19 nt, Artificial Sequence
  Description of Artificial Sequence: Synthetic oligonucleotide
gccacccacagauuuaucg

SEQ ID NO: 3051247 - RNA, 19 nt, Artificial Sequence
  Description of Artificial Sequence: Synthetic oligonucleotide
uggucuuguauucggaguu

SEQ ID NO: 3051248 - RNA, 19 nt, Artificial Sequence
  Description of Artificial Sequence: Synthetic oligonucleotide
uuggagacguugagaaucu

SEQ ID NO: 3051249 - RNA, 19 nt, Artificial Sequence
  Description of Artificial Sequence: Synthetic oligonucleotide
uggaugcagcugcagacug

SEQ ID NO: 3051250 - RNA, 19 nt, Artificial Sequence
  Description of Artificial Sequence: Synthetic oligonucleotide
uaggugcucauaauucuuc

SEQ ID NO: 3051251 - RNA, 19 nt, Artificial Sequence
  Description of Artificial Sequence: Synthetic oligonucleotide
ucuuggucuuguauucgga

SEQ ID NO: 3051252 - RNA, 19 nt, Artificial Sequence
  Description of Artificial Sequence: Synthetic oligonucleotide
ucagcagcugccuggcuug

SEQ ID NO: 3051253 - RNA, 19 nt, Artificial Sequence
  Description of Artificial Sequence: Synthetic oligonucleotide
aaguagaaggagccaccca

SEQ ID NO: 3051254 - RNA, 19 nt, Artificial Sequence
  Description of Artificial Sequence: Synthetic oligonucleotide
aacuccugccucagggccc

SEQ ID NO: 3051255 - RNA, 19 nt, Artificial Sequence
  Description of Artificial Sequence: Synthetic oligonucleotide
cuucuggaccugcucaggg

SEQ ID NO: 3051256 - RNA, 19 nt, Artificial Sequence
  Description of Artificial Sequence: Synthetic oligonucleotide
acccaucacaaugaucugg

SEQ ID NO: 3051257 - RNA, 19 nt, Artificial Sequence
  Description of Artificial Sequence: Synthetic oligonucleotide
cacggacaaccuuugacug

SEQ ID NO: 3051258 - RNA, 19 nt, Artificial Sequence
  Description of Artificial Sequence: Synthetic oligonucleotide
caaacuccugccucagggc

SEQ ID NO: 3051259 - RNA, 19 nt, Artificial Sequence
  Description of Artificial Sequence: Synthetic oligonucleotide
cagguacuuggccauggcg

SEQ ID NO: 3051260 - RNA, 19 nt, Artificial Sequence
  Description of Artificial Sequence: Synthetic oligonucleotide
ucuuguauucggaguuccu

SEQ ID NO: 3051261 - RNA, 19 nt, Artificial Sequence
  Description of Artificial Sequence: Synthetic oligonucleotide
caaguagaaggagccaccc

SEQ ID NO: 3051262 - RNA, 19 nt, Artificial Sequence
  Description of Artificial Sequence: Synthetic oligonucleotide
gaguuccucaucuaggcgu

SEQ ID NO: 3051263 - RNA, 19 nt, Artificial Sequence
  Description of Artificial Sequence: Synthetic oligonucleotide
cuuguauucggaguuccuc

SEQ ID NO: 3051264 - RNA, 19 nt, Artificial Sequence
  Description of Artificial Sequence: Synthetic oligonucleotide
uguauucggaguuccucau

SEQ ID NO: 3051265 - RNA, 19 nt, Artificial Sequence
  Description of Artificial Sequence: Synthetic oligonucleotide
agacguugagaaucugcug

SEQ ID NO: 3051266 - RNA, 19 nt, Artificial Sequence
  Description of Artificial Sequence: Synthetic oligonucleotide
uggcuugcugcaaacuccu

SEQ ID NO: 3051267 - RNA, 19 nt, Artificial Sequence
  Description of Artificial Sequence: Synthetic oligonucleotide
ugcugcaaacuccugccuc

SEQ ID NO: 3051268 - RNA, 19 nt, Artificial Sequence
  Description of Artificial Sequence: Synthetic oligonucleotide
ucuggaccugcucaggguu

SEQ ID NO: 3051269 - RNA, 19 nt, Artificial Sequence
  Description of Artificial Sequence: Synthetic oligonucleotide
aucguucaccuuaaauagg

SEQ ID NO: 3051270 - RNA, 19 nt, Artificial Sequence
  Description of Artificial Sequence: Synthetic oligonucleotide
cccaucacaaugaucuggg

SEQ ID NO: 3051271 - RNA, 19 nt, Artificial Sequence
  Description of Artificial Sequence: Synthetic oligonucleotide
cuucuuggucuuguauucg

SEQ ID NO: 3051272 - RNA, 19 nt, Artificial Sequence
  Description of Artificial Sequence: Synthetic oligonucleotide
ucugcccaccaccugcaca

SEQ ID NO: 3051273 - RNA, 19 nt, Artificial Sequence
  Description of Artificial Sequence: Synthetic oligonucleotide
ugcagacuggugcccagca

SEQ ID NO: 3051274 - RNA, 19 nt, Artificial Sequence
  Description of Artificial Sequence: Synthetic oligonucleotide
gaccccgagcaucagcagc

SEQ ID NO: 3051275 - RNA, 19 nt, Artificial Sequence
  Description of Artificial Sequence: Synthetic oligonucleotide
aggugcucauaauucuucu

SEQ ID NO: 3051276 - RNA, 19 nt, Artificial Sequence
  Description of Artificial Sequence: Synthetic oligonucleotide
caucuaggcguuccuuugc

SEQ ID NO: 3051277 - RNA, 19 nt, Artificial Sequence
  Description of Artificial Sequence: Synthetic oligonucleotide
uccuuugcacggacaaccu

SEQ ID NO: 3051278 - RNA, 19 nt, Artificial Sequence
  Description of Artificial Sequence: Synthetic oligonucleotide
ugacugcaaguagaaggag

SEQ ID NO: 3051279 - RNA, 19 nt, Artificial Sequence
  Description of Artificial Sequence: Synthetic oligonucleotide
uucucucugucuucuuggu

SEQ ID NO: 3051280 - RNA, 19 nt, Artificial Sequence
  Description of Artificial Sequence: Synthetic oligonucleotide
aucuaggcguuccuuugca

SEQ ID NO: 3051281 - RNA, 19 nt, Artificial Sequence
  Description of Artificial Sequence: Synthetic oligonucleotide
acaaugaucugggccaggu

SEQ ID NO: 3051282 - RNA, 19 nt, Artificial Sequence
  Description of Artificial Sequence: Synthetic oligonucleotide
ucucucugucuucuugguc

SEQ ID NO: 3051283 - RNA, 19 nt, Artificial Sequence
  Description of Artificial Sequence: Synthetic oligonucleotide
acccacagauuuaucguuc

SEQ ID NO: 3051284 - RNA, 19 nt, Artificial Sequence
  Description of Artificial Sequence: Synthetic oligonucleotide
ggaguuccucaucuaggcg

SEQ ID NO: 3051285 - RNA, 19 nt, Artificial Sequence
  Description of Artificial Sequence: Synthetic oligonucleotide
uuggaugcagcugcagacu

SEQ ID NO: 3051286 - RNA, 19 nt, Artificial Sequence
  Description of Artificial Sequence: Synthetic oligonucleotide
gcuugcugcaaacuccugc

SEQ ID NO: 3051287 - RNA, 19 nt, Artificial Sequence
  Description of Artificial Sequence: Synthetic oligonucleotide
uucuggaccugcucagggu

SEQ ID NO: 3051288 - RNA, 19 nt, Artificial Sequence
  Description of Artificial Sequence: Synthetic oligonucleotide
cuuugacugcaaguagaag

SEQ ID NO: 3051289 - RNA, 19 nt, Artificial Sequence
  Description of Artificial Sequence: Synthetic oligonucleotide
aggagccacccacagauuu

SEQ ID NO: 3051290 - RNA, 19 nt, Artificial Sequence
  Description of Artificial Sequence: Synthetic oligonucleotide
ucuaggcguuccuuugcac

SEQ ID NO: 3051291 - RNA, 19 nt, Artificial Sequence
  Description of Artificial Sequence: Synthetic oligonucleotide
gucuuguauucggaguucc

SEQ ID NO: 3051292 - RNA, 19 nt, Artificial Sequence
  Description of Artificial Sequence: Synthetic oligonucleotide
cauaauucuucuggaccug

SEQ ID NO: 3051293 - RNA, 19 nt, Artificial Sequence
  Description of Artificial Sequence: Synthetic oligonucleotide
ucaccuuaaauaggugcuc

SEQ ID NO: 3051294 - RNA, 19 nt, Artificial Sequence
  Description of Artificial Sequence: Synthetic oligonucleotide
gagagguuggaugcagcug

SEQ ID NO: 3051295 - RNA, 19 nt, Artificial Sequence
  Description of Artificial Sequence: Synthetic oligonucleotide
uuccucaucuaggcguucc

SEQ ID NO: 3051296 - RNA, 19 nt, Artificial Sequence
  Description of Artificial Sequence: Synthetic oligonucleotide
aucagcagcugccuggcuu

SEQ ID NO: 3051297 - RNA, 19 nt, Artificial Sequence
  Description of Artificial Sequence: Synthetic oligonucleotide
gauuuaucguucaccuuaa

SEQ ID NO: 3051298 - RNA, 19 nt, Artificial Sequence
  Description of Artificial Sequence: Synthetic oligonucleotide
cucaggguucagcuuggag

SEQ ID NO: 3051299 - RNA, 19 nt, Artificial Sequence
  Description of Artificial Sequence: Synthetic oligonucleotide
ugagaaucugcugggccuc

SEQ ID NO: 3051300 - RNA, 19 nt, Artificial Sequence
  Description of Artificial Sequence: Synthetic oligonucleotide
uugcugcaaacuccugccu

SEQ ID NO: 3051301 - RNA, 19 nt, Artificial Sequence
  Description of Artificial Sequence: Synthetic oligonucleotide
ggugcucauaauucuucug

SEQ ID NO: 3051302 - RNA, 19 nt, Artificial Sequence
  Description of Artificial Sequence: Synthetic oligonucleotide
gcucauaauucuucuggac

SEQ ID NO: 3051303 - RNA, 19 nt, Artificial Sequence
  Description of Artificial Sequence: Synthetic oligonucleotide
ucugggccagguacuuggc

SEQ ID NO: 3051304 - RNA, 19 nt, Artificial Sequence
  Description of Artificial Sequence: Synthetic oligonucleotide
accuuaaauaggugcucau

SEQ ID NO: 3051305 - RNA, 19 nt, Artificial Sequence
  Description of Artificial Sequence: Synthetic oligonucleotide
uccucaucuaggcguuccu

SEQ ID NO: 3051306 - RNA, 19 nt, Artificial Sequence
  Description of Artificial Sequence: Synthetic oligonucleotide
caaccuuugacugcaagua

SEQ ID NO: 3051307 - RNA, 19 nt, Artificial Sequence
  Description of Artificial Sequence: Synthetic oligonucleotide
gcagcugcagacuggugcc

SEQ ID NO: 3051308 - RNA, 19 nt, Artificial Sequence
  Description of Artificial Sequence: Synthetic oligonucleotide
guucagcuuggagacguug

SEQ ID NO: 3051309 - RNA, 19 nt, Artificial Sequence
  Description of Artificial Sequence: Synthetic oligonucleotide
cacacccaucacaaugauc

SEQ ID NO: 3051310 - RNA, 19 nt, Artificial Sequence
  Description of Artificial Sequence: Synthetic oligonucleotide
gagcaucagcagcugccug

SEQ ID NO: 3051311 - RNA, 19 nt, Artificial Sequence
  Description of Artificial Sequence: Synthetic oligonucleotide
ugggccuccuggaggggcc

SEQ ID NO: 3051312 - RNA, 19 nt, Artificial Sequence
  Description of Artificial Sequence: Synthetic oligonucleotide
gguuggaugcagcugcaga

SEQ ID NO: 3051313 - RNA, 19 nt, Artificial Sequence
  Description of Artificial Sequence: Synthetic oligonucleotide
guauucggaguuccucauc

SEQ ID NO: 3051314 - RNA, 19 nt, Artificial Sequence
  Description of Artificial Sequence: Synthetic oligonucleotide
cuuugcacggacaaccuuu

SEQ ID NO: 3051315 - RNA, 19 nt, Artificial Sequence
  Description of Artificial Sequence: Synthetic oligonucleotide
cugggccagguacuuggcc

SEQ ID NO: 3051316 - RNA, 19 nt, Artificial Sequence
  Description of Artificial Sequence: Synthetic oligonucleotide
auuuaucguucaccuuaaa

SEQ ID NO: 3051317 - RNA, 19 nt, Artificial Sequence
  Description of Artificial Sequence: Synthetic oligonucleotide
gucuucuuggucuuguauu

SEQ ID NO: 3051318 - RNA, 19 nt, Artificial Sequence
  Description of Artificial Sequence: Synthetic oligonucleotide
acuccugccucagggcccg

SEQ ID NO: 3051319 - RNA, 19 nt, Artificial Sequence
  Description of Artificial Sequence: Synthetic oligonucleotide
ccgagcaucagcagcugcc

SEQ ID NO: 3051320 - RNA, 19 nt, Artificial Sequence
  Description of Artificial Sequence: Synthetic oligonucleotide
uugcacggacaaccuuuga

SEQ ID NO: 3051321 - RNA, 19 nt, Artificial Sequence
  Description of Artificial Sequence: Synthetic oligonucleotide
accugcacacccaucacaa

SEQ ID NO: 3051322 - RNA, 19 nt, Artificial Sequence
  Description of Artificial Sequence: Synthetic oligonucleotide
augaucugggccagguacu

SEQ ID NO: 3051323 - RNA, 19 nt, Artificial Sequence
  Description of Artificial Sequence: Synthetic oligonucleotide
ugccucagggcccgggcaa

SEQ ID NO: 3051324 - RNA, 19 nt, Artificial Sequence
  Description of Artificial Sequence: Synthetic oligonucleotide
guagaaggagccacccaca

SEQ ID NO: 3051325 - RNA, 19 nt, Artificial Sequence
  Description of Artificial Sequence: Synthetic oligonucleotide
caccuuaaauaggugcuca

SEQ ID NO: 3051326 - RNA, 19 nt, Artificial Sequence
  Description of Artificial Sequence: Synthetic oligonucleotide
gcaaguagaaggagccacc

SEQ ID NO: 3051327 - RNA, 19 nt, Artificial Sequence
  Description of Artificial Sequence: Synthetic oligonucleotide
ugcccagcacgaccccgag

SEQ ID NO: 3051328 - RNA, 19 nt, Artificial Sequence
  Description of Artificial Sequence: Synthetic oligonucleotide
agggcccgggcaaaggcuc

SEQ ID NO: 3051329 - RNA, 19 nt, Artificial Sequence
  Description of Artificial Sequence: Synthetic oligonucleotide
accccgagcaucagcagcu

SEQ ID NO: 3051330 - RNA, 19 nt, Artificial Sequence
  Description of Artificial Sequence: Synthetic oligonucleotide
gaucugggccagguacuug

SEQ ID NO: 3051331 - RNA, 19 nt, Artificial Sequence
  Description of Artificial Sequence: Synthetic oligonucleotide
gggccggagagguuggaug

SEQ ID NO: 3051332 - RNA, 19 nt, Artificial Sequence
  Description of Artificial Sequence: Synthetic oligonucleotide
ccuggcuugcugcaaacuc

SEQ ID NO: 3051333 - RNA, 19 nt, Artificial Sequence
  Description of Artificial Sequence: Synthetic oligonucleotide
guuccuuugcacggacaac

SEQ ID NO: 3051334 - RNA, 19 nt, Artificial Sequence
  Description of Artificial Sequence: Synthetic oligonucleotide
gcacggacaaccuuugacu

SEQ ID NO: 3051335 - RNA, 19 nt, Artificial Sequence
  Description of Artificial Sequence: Synthetic oligonucleotide
gaccugcucaggguucagc

SEQ ID NO: 3051336 - RNA, 19 nt, Artificial Sequence
  Description of Artificial Sequence: Synthetic oligonucleotide
cccagcacgaccccgagca

SEQ ID NO: 3051337 - RNA, 19 nt, Artificial Sequence
  Description of Artificial Sequence: Synthetic oligonucleotide
cacaaugaucugggccagg

SEQ ID NO: 3051338 - RNA, 19 nt, Artificial Sequence
  Description of Artificial Sequence: Synthetic oligonucleotide
auucggaguuccucaucua

SEQ ID NO: 3051339 - RNA, 19 nt, Artificial Sequence
  Description of Artificial Sequence: Synthetic oligonucleotide
caaaggcucugcccaccac

SEQ ID NO: 3051340 - RNA, 19 nt, Artificial Sequence
  Description of Artificial Sequence: Synthetic oligonucleotide
aggguucagcuuggagacg

SEQ ID NO: 3051341 - RNA, 19 nt, Artificial Sequence
  Description of Artificial Sequence: Synthetic oligonucleotide
ggaugcagcugcagacugg

SEQ ID NO: 3051342 - RNA, 19 nt, Artificial Sequence
  Description of Artificial Sequence: Synthetic oligonucleotide
agacuggugcccagcacga

SEQ ID NO: 3051343 - RNA, 19 nt, Artificial Sequence
  Description of Artificial Sequence: Synthetic oligonucleotide
agguuggaugcagcugcag

SEQ ID NO: 3051344 - RNA, 19 nt, Artificial Sequence
  Description of Artificial Sequence: Synthetic oligonucleotide
uggagacguugagaaucug

SEQ ID NO: 3051345 - RNA, 19 nt, Artificial Sequence
  Description of Artificial Sequence: Synthetic oligonucleotide
cucagggcccgggcaaagg

SEQ ID NO: 3051346 - RNA, 19 nt, Artificial Sequence
  Description of Artificial Sequence: Synthetic oligonucleotide
aguuccucaucuaggcguu

SEQ ID NO: 3051347 - RNA, 19 nt, Artificial Sequence
  Description of Artificial Sequence: Synthetic oligonucleotide
gaggggccggagagguugg

SEQ ID NO: 3051348 - RNA, 19 nt, Artificial Sequence
  Description of Artificial Sequence: Synthetic oligonucleotide
ggagagguuggaugcagcu

SEQ ID NO: 3051349 - RNA, 19 nt, Artificial Sequence
  Description of Artificial Sequence: Synthetic oligonucleotide
ccuuugacugcaaguagaa

SEQ ID NO: 3051350 - RNA, 19 nt, Artificial Sequence
  Description of Artificial Sequence: Synthetic oligonucleotide
gccagguacuuggccaugg

SEQ ID NO: 3051351 - RNA, 19 nt, Artificial Sequence
  Description of Artificial Sequence: Synthetic oligonucleotide
ccaucacaaugaucugggc

SEQ ID NO: 3051352 - RNA, 19 nt, Artificial Sequence
  Description of Artificial Sequence: Synthetic oligonucleotide
agcugcagacuggugccca

SEQ ID NO: 3051353 - RNA, 19 nt, Artificial Sequence
  Description of Artificial Sequence: Synthetic oligonucleotide
cucaucuaggcguuccuuu

SEQ ID NO: 3051354 - RNA, 19 nt, Artificial Sequence
  Description of Artificial Sequence: Synthetic oligonucleotide
ccgggcaaaggcucugccc

SEQ ID NO: 3051355 - RNA, 19 nt, Artificial Sequence
  Description of Artificial Sequence: Synthetic oligonucleotide
gagguuggaugcagcugca

SEQ ID NO: 3051356 - RNA, 19 nt, Artificial Sequence
  Description of Artificial Sequence: Synthetic oligonucleotide
ggucuuguauucggaguuc

SEQ ID NO: 3051357 - RNA, 19 nt, Artificial Sequence
  Description of Artificial Sequence: Synthetic oligonucleotide
aggcucugcccaccaccug

SEQ ID NO: 3051358 - RNA, 19 nt, Artificial Sequence
  Description of Artificial Sequence: Synthetic oligonucleotide
ccacagauuuaucguucac

SEQ ID NO: 3051359 - RNA, 19 nt, Artificial Sequence
  Description of Artificial Sequence: Synthetic oligonucleotide
cugcaaguagaaggagcca

SEQ ID NO: 3051360 - RNA, 19 nt, Artificial Sequence
  Description of Artificial Sequence: Synthetic oligonucleotide
cccacagauuuaucguuca

SEQ ID NO: 3051361 - RNA, 19 nt, Artificial Sequence
  Description of Artificial Sequence: Synthetic oligonucleotide
cagcugcagacuggugccc

SEQ ID NO: 3051362 - RNA, 19 nt, Artificial Sequence
  Description of Artificial Sequence: Synthetic oligonucleotide
ccagguacuuggccauggc

SEQ ID NO: 3051363 - RNA, 19 nt, Artificial Sequence
  Description of Artificial Sequence: Synthetic oligonucleotide
cguucaccuuaaauaggug

SEQ ID NO: 3051364 - RNA, 19 nt, Artificial Sequence
  Description of Artificial Sequence: Synthetic oligonucleotide
caaugaucugggccaggua

SEQ ID NO: 3051365 - RNA, 19 nt, Artificial Sequence
  Description of Artificial Sequence: Synthetic oligonucleotide
gagccacccacagauuuau

SEQ ID NO: 3051366 - RNA, 19 nt, Artificial Sequence
  Description of Artificial Sequence: Synthetic oligonucleotide
ggcguuccuuugcacggac

SEQ ID NO: 3051367 - RNA, 19 nt, Artificial Sequence
  Description of Artificial Sequence: Synthetic oligonucleotide
agccacccacagauuuauc

SEQ ID NO: 3051368 - RNA, 19 nt, Artificial Sequence
  Description of Artificial Sequence: Synthetic oligonucleotide
gacuggugcccagcacgac

SEQ ID NO: 3051369 - RNA, 19 nt, Artificial Sequence
  Description of Artificial Sequence: Synthetic oligonucleotide
aaggagccacccacagauu

SEQ ID NO: 3051370 - RNA, 19 nt, Artificial Sequence
  Description of Artificial Sequence: Synthetic oligonucleotide
aggcguuccuuugcacgga

SEQ ID NO: 3051371 - RNA, 19 nt, Artificial Sequence
  Description of Artificial Sequence: Synthetic oligonucleotide
cucugcccaccaccugcac

SEQ ID NO: 3051372 - RNA, 19 nt, Artificial Sequence
  Description of Artificial Sequence: Synthetic oligonucleotide
gcccaccaccugcacaccc

SEQ ID NO: 3051373 - RNA, 19 nt, Artificial Sequence
  Description of Artificial Sequence: Synthetic oligonucleotide
gggcaaaggcucugcccac

SEQ ID NO: 3051374 - RNA, 19 nt, Artificial Sequence
  Description of Artificial Sequence: Synthetic oligonucleotide
ggguucagcuuggagacgu

SEQ ID NO: 3051375 - RNA, 19 nt, Artificial Sequence
  Description of Artificial Sequence: Synthetic oligonucleotide
cagauuuaucguucaccuu

SEQ ID NO: 3051376 - RNA, 19 nt, Artificial Sequence
  Description of Artificial Sequence: Synthetic oligonucleotide
ccuuaaauaggugcucaua

SEQ ID NO: 3051377 - RNA, 19 nt, Artificial Sequence
  Description of Artificial Sequence: Synthetic oligonucleotide
cguuccuuugcacggacaa

SEQ ID NO: 3051378 - RNA, 19 nt, Artificial Sequence
  Description of Artificial Sequence: Synthetic oligonucleotide
cguugagaaucugcugggc

SEQ ID NO: 3051379 - RNA, 19 nt, Artificial Sequence
  Description of Artificial Sequence: Synthetic oligonucleotide
cccgagcaucagcagcugc

SEQ ID NO: 3051380 - RNA, 19 nt, Artificial Sequence
  Description of Artificial Sequence: Synthetic oligonucleotide
ccacccacagauuuaucgu

SEQ ID NO: 3051381 - RNA, 19 nt, Artificial Sequence
  Description of Artificial Sequence: Synthetic oligonucleotide
cggagagguuggaugcagc

SEQ ID NO: 3051382 - RNA, 19 nt, Artificial Sequence
  Description of Artificial Sequence: Synthetic oligonucleotide
uggaggggccggagagguu

SEQ ID NO: 3051383 - RNA, 19 nt, Artificial Sequence
  Description of Artificial Sequence: Synthetic oligonucleotide
gugcccagcacgaccccga

SEQ ID NO: 3051384 - RNA, 19 nt, Artificial Sequence
  Description of Artificial Sequence: Synthetic oligonucleotide
ccggagagguuggaugcag

SEQ ID NO: 3051385 - RNA, 19 nt, Artificial Sequence
  Description of Artificial Sequence: Synthetic oligonucleotide
guuccucaucuaggcguuc

SEQ ID NO: 3051386 - RNA, 19 nt, Artificial Sequence
  Description of Artificial Sequence: Synthetic oligonucleotide
cggacaaccuuugacugca

SEQ ID NO: 3051387 - RNA, 19 nt, Artificial Sequence
  Description of Artificial Sequence: Synthetic oligonucleotide
cccgggcaaaggcucugcc

SEQ ID NO: 3051388 - RNA, 19 nt, Artificial Sequence
  Description of Artificial Sequence: Synthetic oligonucleotide
ggagccacccacagauuua

SEQ ID NO: 3051389 - RNA, 19 nt, Artificial Sequence
  Description of Artificial Sequence: Synthetic oligonucleotide
gcuuggagacguugagaau

SEQ ID NO: 3051390 - RNA, 19 nt, Artificial Sequence
  Description of Artificial Sequence: Synthetic oligonucleotide
ggccagguacuuggccaug

SEQ ID NO: 3051391 - RNA, 19 nt, Artificial Sequence
  Description of Artificial Sequence: Synthetic oligonucleotide
aggggccggagagguugga

SEQ ID NO: 3051392 - RNA, 19 nt, Artificial Sequence
  Description of Artificial Sequence: Synthetic oligonucleotide
gggccagguacuuggccau

SEQ ID NO: 3051393 - RNA, 19 nt, Artificial Sequence
  Description of Artificial Sequence: Synthetic oligonucleotide
ggccuccuggaggggccgg

SEQ ID NO: 3051394 - RNA, 19 nt, Artificial Sequence
  Description of Artificial Sequence: Synthetic oligonucleotide
ggcccgggcaaaggcucug

SEQ ID NO: 3051395 - RNA, 19 nt, Artificial Sequence
  Description of Artificial Sequence: Synthetic oligonucleotide
gcguuccuuugcacggaca

SEQ ID NO: 3051396 - RNA, 19 nt, Artificial Sequence
  Description of Artificial Sequence: Synthetic oligonucleotide
gcccgggcaaaggcucugc

SEQ ID NO: 3051397 - RNA, 19 nt, Artificial Sequence
  Description of Artificial Sequence: Synthetic oligonucleotide
caucagcagcugccuggcu

SEQ ID NO: 3051398 - RNA, 19 nt, Artificial Sequence
  Description of Artificial Sequence: Synthetic oligonucleotide
cuccugccucagggcccgg

SEQ ID NO: 3051399 - RNA, 19 nt, Artificial Sequence
  Description of Artificial Sequence: Synthetic oligonucleotide
ccccgagcaucagcagcug

SEQ ID NO: 3051400 - RNA, 19 nt, Artificial Sequence
  Description of Artificial Sequence: Synthetic oligonucleotide
gccucagggcccgggcaaa

SEQ ID NO: 3051401 - RNA, 19 nt, Artificial Sequence
  Description of Artificial Sequence: Synthetic oligonucleotide
ggggccggagagguuggau

SEQ ID NO: 3051402 - RNA, 19 nt, Artificial Sequence
  Description of Artificial Sequence: Synthetic oligonucleotide
gguucagcuuggagacguu

SEQ ID NO: 3051403 - RNA, 19 nt, Artificial Sequence
  Description of Artificial Sequence: Synthetic oligonucleotide
ccucaucuaggcguuccuu

SEQ ID NO: 3051404 - RNA, 19 nt, Artificial Sequence
  Description of Artificial Sequence: Synthetic oligonucleotide
gggcccgggcaaaggcucu

SEQ ID NO: 3051405 - RNA, 19 nt, Artificial Sequence
  Description of Artificial Sequence: Synthetic oligonucleotide
ccagcacgaccccgagcau

SEQ ID NO: 3051406 - RNA, 19 nt, Artificial Sequence
  Description of Artificial Sequence: Synthetic oligonucleotide
  modified_base (5)..(5): a, c, u, g, unknown or other
aaacncuugcuucacauug

SEQ ID NO: 3051407 - RNA, 19 nt, Artificial Sequence
  Description of Artificial Sequence: Synthetic oligonucleotide
aaaaccaagaucaucagca

SEQ ID NO: 3051408 - RNA, 19 nt, Artificial Sequence
  Description of Artificial Sequence: Synthetic oligonucleotide
aagacucaaaaccaagauc

SEQ ID NO: 3051409 - RNA, 19 nt, Artificial Sequence
  Description of Artificial Sequence: Synthetic oligonucleotide
uugucugacaacuacagac

SEQ ID NO: 3051410 - RNA, 19 nt, Artificial Sequence
  Description of Artificial Sequence: Synthetic oligonucleotide
ugggguaucuccaagagcu

SEQ ID NO: 3051411 - RNA, 19 nt, Artificial Sequence
  Description of Artificial Sequence: Synthetic oligonucleotide
uuuugucugacaacuacag

SEQ ID NO: 3051412 - RNA, 19 nt, Artificial Sequence
  Description of Artificial Sequence: Synthetic oligonucleotide
uucacaggcagguucaagg

SEQ ID NO: 3051413 - RNA, 19 nt, Artificial Sequence
  Description of Artificial Sequence: Synthetic oligonucleotide
  modified_base (18)..(18): a, c, u, g, unknown or other
uugauauucuccuuggcnc

SEQ ID NO: 3051414 - RNA, 19 nt, Artificial Sequence
  Description of Artificial Sequence: Synthetic oligonucleotide
uucacauugauauucuccu

SEQ ID NO: 3051415 - RNA, 19 nt, Artificial Sequence
  Description of Artificial Sequence: Synthetic oligonucleotide
ucaagggccacccuuaaca

SEQ ID NO: 3051416 - RNA, 19 nt, Artificial Sequence
  Description of Artificial Sequence: Synthetic oligonucleotide
aaagacucaaaaccaagau

SEQ ID NO: 3051417 - RNA, 19 nt, Artificial Sequence
  Description of Artificial Sequence: Synthetic oligonucleotide
ucaaagacucaaaaccaag

SEQ ID NO: 3051418 - RNA, 19 nt, Artificial Sequence
  Description of Artificial Sequence: Synthetic oligonucleotide
agacucaaaaccaagauca

SEQ ID NO: 3051419 - RNA, 19 nt, Artificial Sequence
  Description of Artificial Sequence: Synthetic oligonucleotide
acaacuacagaccugccug

SEQ ID NO: 3051420 - RNA, 19 nt, Artificial Sequence
  Description of Artificial Sequence: Synthetic oligonucleotide
  modified_base (19)..(19): a, c, u, g, unknown or other
auugauauucuccuuggcn

SEQ ID NO: 3051421 - RNA, 19 nt, Artificial Sequence
  Description of Artificial Sequence: Synthetic oligonucleotide
accaagaucaucagcaagc

SEQ ID NO: 3051422 - RNA, 19 nt, Artificial Sequence
  Description of Artificial Sequence: Synthetic oligonucleotide
cuucacauugauauucucc

SEQ ID NO: 3051423 - RNA, 19 nt, Artificial Sequence
  Description of Artificial Sequence: Synthetic oligonucleotide
ugucugacaacuacagacc

SEQ ID NO: 3051424 - RNA, 19 nt, Artificial Sequence
  Description of Artificial Sequence: Synthetic oligonucleotide
acauugauauucuccuugg

SEQ ID NO: 3051425 - RNA, 19 nt, Artificial Sequence
  Description of Artificial Sequence: Synthetic oligonucleotide
cuacagucaguucacaggc

SEQ ID NO: 3051426 - RNA, 19 nt, Artificial Sequence
  Description of Artificial Sequence: Synthetic oligonucleotide
aagagcugggcccuuuccg

SEQ ID NO: 3051427 - RNA, 19 nt, Artificial Sequence
  Description of Artificial Sequence: Synthetic oligonucleotide
  modified_base (7)..(7): a, c, u, g, unknown or other
ucaaacncuugcuucacau

SEQ ID NO: 3051428 - RNA, 19 nt, Artificial Sequence
  Description of Artificial Sequence: Synthetic oligonucleotide
gccucaaagacucaaaacc

SEQ ID NO: 3051429 - RNA, 19 nt, Artificial Sequence
  Description of Artificial Sequence: Synthetic oligonucleotide
gacucagucaucuucucac

SEQ ID NO: 3051430 - RNA, 19 nt, Artificial Sequence
  Description of Artificial Sequence: Synthetic oligonucleotide
aagggccacccuuaacagc

SEQ ID NO: 3051431 - RNA, 19 nt, Artificial Sequence
  Description of Artificial Sequence: Synthetic oligonucleotide
uguauccuuggcuacaguc

SEQ ID NO: 3051432 - RNA, 19 nt, Artificial Sequence
  Description of Artificial Sequence: Synthetic oligonucleotide
acagaugguguccaccagg

SEQ ID NO: 3051433 - RNA, 19 nt, Artificial Sequence
  Description of Artificial Sequence: Synthetic oligonucleotide
ucaguucacaggcagguuc

SEQ ID NO: 3051434 - RNA, 19 nt, Artificial Sequence
  Description of Artificial Sequence: Synthetic oligonucleotide
aaggccaagcugguggacc

SEQ ID NO: 3051435 - RNA, 19 nt, Artificial Sequence
  Description of Artificial Sequence: Synthetic oligonucleotide
acagucaguucacaggcag

SEQ ID NO: 3051436 - RNA, 19 nt, Artificial Sequence
  Description of Artificial Sequence: Synthetic oligonucleotide
  modified_base (7)..(7): a, c, u, g, unknown or other
cuuggcncuggccucaaag

SEQ ID NO: 3051437 - RNA, 19 nt, Artificial Sequence
  Description of Artificial Sequence: Synthetic oligonucleotide
cugacaacuacagaccugc

SEQ ID NO: 3051438 - RNA, 19 nt, Artificial Sequence
  Description of Artificial Sequence: Synthetic oligonucleotide
agggccacccuuaacagcc

SEQ ID NO: 3051439 - RNA, 19 nt, Artificial Sequence
  Description of Artificial Sequence: Synthetic oligonucleotide
agguucaaggccaagcugg

SEQ ID NO: 3051440 - RNA, 19 nt, Artificial Sequence
  Description of Artificial Sequence: Synthetic oligonucleotide
cuuggcuacagucaguuca

SEQ ID NO: 3051441 - RNA, 19 nt, Artificial Sequence
  Description of Artificial Sequence: Synthetic oligonucleotide
uccucagcagguacaagcc

SEQ ID NO: 3051442 - RNA, 19 nt, Artificial Sequence
  Description of Artificial Sequence: Synthetic oligonucleotide
ucacagaugguguccacca

SEQ ID NO: 3051443 - RNA, 19 nt, Artificial Sequence
  Description of Artificial Sequence: Synthetic oligonucleotide
  modified_base (17)..(17): a, c, u, g, unknown or other
ugauauucuccuuggcncu

SEQ ID NO: 3051444 - RNA, 19 nt, Artificial Sequence
  Description of Artificial Sequence: Synthetic oligonucleotide
gcuacagucaguucacagg

SEQ ID NO: 3051445 - RNA, 19 nt, Artificial Sequence
  Description of Artificial Sequence: Synthetic oligonucleotide
aucagcaagccucuggcca

SEQ ID NO: 3051446 - RNA, 19 nt, Artificial Sequence
  Description of Artificial Sequence: Synthetic oligonucleotide
uuugucugacaacuacaga

SEQ ID NO: 3051447 - RNA, 19 nt, Artificial Sequence
  Description of Artificial Sequence: Synthetic oligonucleotide
ucuggccauccucagcagg

SEQ ID NO: 3051448 - RNA, 19 nt, Artificial Sequence
  Description of Artificial Sequence: Synthetic oligonucleotide
ucugacaacuacagaccug

SEQ ID NO: 3051449 - RNA, 19 nt, Artificial Sequence
  Description of Artificial Sequence: Synthetic oligonucleotide
acucaaaaccaagaucauc

SEQ ID NO: 3051450 - RNA, 19 nt, Artificial Sequence
  Description of Artificial Sequence: Synthetic oligonucleotide
aaaccaagaucaucagcaa

SEQ ID NO: 3051451 - RNA, 19 nt, Artificial Sequence
  Description of Artificial Sequence: Synthetic oligonucleotide
caaagacucaaaaccaaga

SEQ ID NO: 3051452 - RNA, 19 nt, Artificial Sequence
  Description of Artificial Sequence: Synthetic oligonucleotide
uugcuucacauugauauuc

SEQ ID NO: 3051453 - RNA, 19 nt, Artificial Sequence
  Description of Artificial Sequence: Synthetic oligonucleotide
uacagaccugccuguaucc

SEQ ID NO: 3051454 - RNA, 19 nt, Artificial Sequence
  Description of Artificial Sequence: Synthetic oligonucleotide
  modified_base (16)..(16): a, c, u, g, unknown or other
gauauucuccuuggcncug

SEQ ID NO: 3051455 - RNA, 19 nt, Artificial Sequence
  Description of Artificial Sequence: Synthetic oligonucleotide
  modified_base (6)..(6): a, c, u, g, unknown or other
uuggcncuggccucaaaga

SEQ ID NO: 3051456 - RNA, 19 nt, Artificial Sequence
  Description of Artificial Sequence: Synthetic oligonucleotide
acccuuaacagccgcagcu

SEQ ID NO: 3051457 - RNA, 19 nt, Artificial Sequence
  Description of Artificial Sequence: Synthetic oligonucleotide
ugcuucacauugauauucu

SEQ ID NO: 3051458 - RNA, 19 nt, Artificial Sequence
  Description of Artificial Sequence: Synthetic oligonucleotide
uuggcuacagucaguucac

SEQ ID NO: 3051459 - RNA, 19 nt, Artificial Sequence
  Description of Artificial Sequence: Synthetic oligonucleotide
  modified_base (5)..(5): a, c, u, g, unknown or other
uggcncuggccucaaagac

SEQ ID NO: 3051460 - RNA, 19 nt, Artificial Sequence
  Description of Artificial Sequence: Synthetic oligonucleotide
aacagccgcagcugcuagg

SEQ ID NO: 3051461 - RNA, 19 nt, Artificial Sequence
  Description of Artificial Sequence: Synthetic oligonucleotide
acagccgcagcugcuaggc

SEQ ID NO: 3051462 - RNA, 19 nt, Artificial Sequence
  Description of Artificial Sequence: Synthetic oligonucleotide
caucuucucacagauggug

SEQ ID NO: 3051463 - RNA, 19 nt, Artificial Sequence
  Description of Artificial Sequence: Synthetic oligonucleotide
  modified_base (14)..(14): a, c, u, g, unknown or other
caggcgcucaaacncuugc

SEQ ID NO: 3051464 - RNA, 19 nt, Artificial Sequence
  Description of Artificial Sequence: Synthetic oligonucleotide
ucuucucacagaugguguc

SEQ ID NO: 3051465 - RNA, 19 nt, Artificial Sequence
  Description of Artificial Sequence: Synthetic oligonucleotide
cauugauauucuccuuggc

SEQ ID NO: 3051466 - RNA, 19 nt, Artificial Sequence
  Description of Artificial Sequence: Synthetic oligonucleotide
cucagucaucuucucacag

SEQ ID NO: 3051467 - RNA, 19 nt, Artificial Sequence
  Description of Artificial Sequence: Synthetic oligonucleotide
uggccucaaagacucaaaa

SEQ ID NO: 3051468 - RNA, 19 nt, Artificial Sequence
  Description of Artificial Sequence: Synthetic oligonucleotide
  modified_base (4)..(4): a, c, u, g, unknown or other
aacncuugcuucacauuga

SEQ ID NO: 3051469 - RNA, 19 nt, Artificial Sequence
  Description of Artificial Sequence: Synthetic oligonucleotide
agcugggcccuuuccgugc

SEQ ID NO: 3051470 - RNA, 19 nt, Artificial Sequence
  Description of Artificial Sequence: Synthetic oligonucleotide
caagggccacccuuaacag

SEQ ID NO: 3051471 - RNA, 19 nt, Artificial Sequence
  Description of Artificial Sequence: Synthetic oligonucleotide
agucaguucacaggcaggu

SEQ ID NO: 3051472 - RNA, 19 nt, Artificial Sequence
  Description of Artificial Sequence: Synthetic oligonucleotide
cuacagaccugccuguauc

SEQ ID NO: 3051473 - RNA, 19 nt, Artificial Sequence
  Description of Artificial Sequence: Synthetic oligonucleotide
ucaaggccaagcuggugga

SEQ ID NO: 3051474 - RNA, 19 nt, Artificial Sequence
  Description of Artificial Sequence: Synthetic oligonucleotide
ggugugggcaggucaaggg

SEQ ID NO: 3051475 - RNA, 19 nt, Artificial Sequence
  Description of Artificial Sequence: Synthetic oligonucleotide
uaacagccgcagcugcuag

SEQ ID NO: 3051476 - RNA, 19 nt, Artificial Sequence
  Description of Artificial Sequence: Synthetic oligonucleotide
ugcugcccacgcuagagcu

SEQ ID NO: 3051477 - RNA, 19 nt, Artificial Sequence
  Description of Artificial Sequence: Synthetic oligonucleotide
uccagggacucagucaucu

SEQ ID NO: 3051478 - RNA, 19 nt, Artificial Sequence
  Description of Artificial Sequence: Synthetic oligonucleotide
uacagucaguucacaggca

SEQ ID NO: 3051479 - RNA, 19 nt, Artificial Sequence
  Description of Artificial Sequence: Synthetic oligonucleotide
cuucucacagauggugucc

SEQ ID NO: 3051480 - RNA, 19 nt, Artificial Sequence
  Description of Artificial Sequence: Synthetic oligonucleotide
cacaggcagguucaaggcc

SEQ ID NO: 3051481 - RNA, 19 nt, Artificial Sequence
  Description of Artificial Sequence: Synthetic oligonucleotide
cagucaguucacaggcagg

SEQ ID NO: 3051482 - RNA, 19 nt, Artificial Sequence
  Description of Artificial Sequence: Synthetic oligonucleotide
agagcugggcccuuuccgu

SEQ ID NO: 3051483 - RNA, 19 nt, Artificial Sequence
  Description of Artificial Sequence: Synthetic oligonucleotide
cuuuccgugcugcccacgc

SEQ ID NO: 3051484 - RNA, 19 nt, Artificial Sequence
  Description of Artificial Sequence: Synthetic oligonucleotide
agaugguguccaccaggcg

SEQ ID NO: 3051485 - RNA, 19 nt, Artificial Sequence
  Description of Artificial Sequence: Synthetic oligonucleotide
agcugguggaccugagcag

SEQ ID NO: 3051486 - RNA, 19 nt, Artificial Sequence
  Description of Artificial Sequence: Synthetic oligonucleotide
guauccuuggcuacaguca

SEQ ID NO: 3051487 - RNA, 19 nt, Artificial Sequence
  Description of Artificial Sequence: Synthetic oligonucleotide
cagggacucagucaucuuc

SEQ ID NO: 3051488 - RNA, 19 nt, Artificial Sequence
  Description of Artificial Sequence: Synthetic oligonucleotide
ggugggguaucuccaagag

SEQ ID NO: 3051489 - RNA, 19 nt, Artificial Sequence
  Description of Artificial Sequence: Synthetic oligonucleotide
agccgcagcugcuaggcug

SEQ ID NO: 3051490 - RNA, 19 nt, Artificial Sequence
  Description of Artificial Sequence: Synthetic oligonucleotide
cacgcuagagcuggguucc

SEQ ID NO: 3051491 - RNA, 19 nt, Artificial Sequence
  Description of Artificial Sequence: Synthetic oligonucleotide
gugugggcaggucaagggc

SEQ ID NO: 3051492 - RNA, 19 nt, Artificial Sequence
  Description of Artificial Sequence: Synthetic oligonucleotide
uucucacagauggugucca

SEQ ID NO: 3051493 - RNA, 19 nt, Artificial Sequence
  Description of Artificial Sequence: Synthetic oligonucleotide
  modified_base (3)..(3): a, c, u, g, unknown or other
acncuugcuucacauugau

SEQ ID NO: 3051494 - RNA, 19 nt, Artificial Sequence
  Description of Artificial Sequence: Synthetic oligonucleotide
acucagucaucuucucaca

SEQ ID NO: 3051495 - RNA, 19 nt, Artificial Sequence
  Description of Artificial Sequence: Synthetic oligonucleotide
  modified_base (15)..(15): a, c, u, g, unknown or other
auauucuccuuggcncugg

SEQ ID NO: 3051496 - RNA, 19 nt, Artificial Sequence
  Description of Artificial Sequence: Synthetic oligonucleotide
ucagcaagccucuggccau

SEQ ID NO: 3051497 - RNA, 19 nt, Artificial Sequence
  Description of Artificial Sequence: Synthetic oligonucleotide
caucagcaagccucuggcc

SEQ ID NO: 3051498 - RNA, 19 nt, Artificial Sequence
  Description of Artificial Sequence: Synthetic oligonucleotide
gacaacuacagaccugccu

SEQ ID NO: 3051499 - RNA, 19 nt, Artificial Sequence
  Description of Artificial Sequence: Synthetic oligonucleotide
gaccugagcaggugugggc

SEQ ID NO: 3051500 - RNA, 19 nt, Artificial Sequence
  Description of Artificial Sequence: Synthetic oligonucleotide
ugacaacuacagaccugcc

SEQ ID NO: 3051501 - RNA, 19 nt, Artificial Sequence
  Description of Artificial Sequence: Synthetic oligonucleotide
uccgugcugcccacgcuag

SEQ ID NO: 3051502 - RNA, 19 nt, Artificial Sequence
  Description of Artificial Sequence: Synthetic oligonucleotide
ggcuacagucaguucacag

SEQ ID NO: 3051503 - RNA, 19 nt, Artificial Sequence
  Description of Artificial Sequence: Synthetic oligonucleotide
gugggguaucuccaagagc

SEQ ID NO: 3051504 - RNA, 19 nt, Artificial Sequence
  Description of Artificial Sequence: Synthetic oligonucleotide
gguaucuccaagagcuggg

SEQ ID NO: 3051505 - RNA, 19 nt, Artificial Sequence
  Description of Artificial Sequence: Synthetic oligonucleotide
cagguucaaggccaagcug

SEQ ID NO: 3051506 - RNA, 19 nt, Artificial Sequence
  Description of Artificial Sequence: Synthetic oligonucleotide
cuggguuccagggacucag

SEQ ID NO: 3051507 - RNA, 19 nt, Artificial Sequence
  Description of Artificial Sequence: Synthetic oligonucleotide
caagagcugggcccuuucc

SEQ ID NO: 3051508 - RNA, 19 nt, Artificial Sequence
  Description of Artificial Sequence: Synthetic oligonucleotide
gcuagagcuggguuccagg

SEQ ID NO: 3051509 - RNA, 19 nt, Artificial Sequence
  Description of Artificial Sequence: Synthetic oligonucleotide
caagcugguggaccugagc

SEQ ID NO: 3051510 - RNA, 19 nt, Artificial Sequence
  Description of Artificial Sequence: Synthetic oligonucleotide
uuaacagccgcagcugcua

SEQ ID NO: 3051511 - RNA, 19 nt, Artificial Sequence
  Description of Artificial Sequence: Synthetic oligonucleotide
acuacagaccugccuguau

SEQ ID NO: 3051512 - RNA, 19 nt, Artificial Sequence
  Description of Artificial Sequence: Synthetic oligonucleotide
uuccgugcugcccacgcua

SEQ ID NO: 3051513 - RNA, 19 nt, Artificial Sequence
  Description of Artificial Sequence: Synthetic oligonucleotide
caagccucuggccauccuc

SEQ ID NO: 3051514 - RNA, 19 nt, Artificial Sequence
  Description of Artificial Sequence: Synthetic oligonucleotide
ggguaucuccaagagcugg

SEQ ID NO: 3051515 - RNA, 19 nt, Artificial Sequence
  Description of Artificial Sequence: Synthetic oligonucleotide
ccucaaagacucaaaacca

SEQ ID NO: 3051516 - RNA, 19 nt, Artificial Sequence
  Description of Artificial Sequence: Synthetic oligonucleotide
aucuucucacagauggugu

SEQ ID NO: 3051517 - RNA, 19 nt, Artificial Sequence
  Description of Artificial Sequence: Synthetic oligonucleotide
uccuuggcuacagucaguu

SEQ ID NO: 3051518 - RNA, 19 nt, Artificial Sequence
  Description of Artificial Sequence: Synthetic oligonucleotide
agggacucagucaucuucu

SEQ ID NO: 3051519 - RNA, 19 nt, Artificial Sequence
  Description of Artificial Sequence: Synthetic oligonucleotide
ggccucaaagacucaaaac

SEQ ID NO: 3051520 - RNA, 19 nt, Artificial Sequence
  Description of Artificial Sequence: Synthetic oligonucleotide
ucagcagguacaagccguu

SEQ ID NO: 3051521 - RNA, 19 nt, Artificial Sequence
  Description of Artificial Sequence: Synthetic oligonucleotide
aggugugggcaggucaagg

SEQ ID NO: 3051522 - RNA, 19 nt, Artificial Sequence
  Description of Artificial Sequence: Synthetic oligonucleotide
caguucacaggcagguuca

SEQ ID NO: 3051523 - RNA, 19 nt, Artificial Sequence
  Description of Artificial Sequence: Synthetic oligonucleotide
agaccugccuguauccuug

SEQ ID NO: 3051524 - RNA, 19 nt, Artificial Sequence
  Description of Artificial Sequence: Synthetic oligonucleotide
aggccaagcugguggaccu

SEQ ID NO: 3051525 - RNA, 19 nt, Artificial Sequence
  Description of Artificial Sequence: Synthetic oligonucleotide
accugagcaggugugggca

SEQ ID NO: 3051526 - RNA, 19 nt, Artificial Sequence
  Description of Artificial Sequence: Synthetic oligonucleotide
ugccuguauccuuggcuac

SEQ ID NO: 3051527 - RNA, 19 nt, Artificial Sequence
  Description of Artificial Sequence: Synthetic oligonucleotide
gaccugccuguauccuugg

SEQ ID NO: 3051528 - RNA, 19 nt, Artificial Sequence
  Description of Artificial Sequence: Synthetic oligonucleotide
uuuccgugcugcccacgcu

SEQ ID NO: 3051529 - RNA, 19 nt, Artificial Sequence
  Description of Artificial Sequence: Synthetic oligonucleotide
gcugguggaccugagcagg

SEQ ID NO: 3051530 - RNA, 19 nt, Artificial Sequence
  Description of Artificial Sequence: Synthetic oligonucleotide
  modified_base (18)..(18): a, c, u, g, unknown or other
ccaccaggcgcucaaacnc

SEQ ID NO: 3051531 - RNA, 19 nt, Artificial Sequence
  Description of Artificial Sequence: Synthetic oligonucleotide
gagcugggcccuuuccgug

SEQ ID NO: 3051532 - RNA, 19 nt, Artificial Sequence
  Description of Artificial Sequence: Synthetic oligonucleotide
augguguccaccaggcgcu

SEQ ID NO: 3051533 - RNA, 19 nt, Artificial Sequence
  Description of Artificial Sequence: Synthetic oligonucleotide
cacagaugguguccaccag

SEQ ID NO: 3051534 - RNA, 19 nt, Artificial Sequence
  Description of Artificial Sequence: Synthetic oligonucleotide
cugccuguauccuuggcua

SEQ ID NO: 3051535 - RNA, 19 nt, Artificial Sequence
  Description of Artificial Sequence: Synthetic oligonucleotide
gucugacaacuacagaccu

SEQ ID NO: 3051536 - RNA, 19 nt, Artificial Sequence
  Description of Artificial Sequence: Synthetic oligonucleotide
agcuggguuccagggacuc

SEQ ID NO: 3051537 - RNA, 19 nt, Artificial Sequence
  Description of Artificial Sequence: Synthetic oligonucleotide
ccaagaucaucagcaagcc

SEQ ID NO: 3051538 - RNA, 19 nt, Artificial Sequence
  Description of Artificial Sequence: Synthetic oligonucleotide
ggcagguucaaggccaagc

SEQ ID NO: 3051539 - RNA, 19 nt, Artificial Sequence
  Description of Artificial Sequence: Synthetic oligonucleotide
guucacaggcagguucaag

SEQ ID NO: 3051540 - RNA, 19 nt, Artificial Sequence
  Description of Artificial Sequence: Synthetic oligonucleotide
ucucacagaugguguccac

SEQ ID NO: 3051541 - RNA, 19 nt, Artificial Sequence
  Description of Artificial Sequence: Synthetic oligonucleotide
cacccuuaacagccgcagc

SEQ ID NO: 3051542 - RNA, 19 nt, Artificial Sequence
  Description of Artificial Sequence: Synthetic oligonucleotide
cucagcagguacaagccgu

SEQ ID NO: 3051543 - RNA, 19 nt, Artificial Sequence
  Description of Artificial Sequence: Synthetic oligonucleotide
ccuuaacagccgcagcugc

SEQ ID NO: 3051544 - RNA, 19 nt, Artificial Sequence
  Description of Artificial Sequence: Synthetic oligonucleotide
cugagcaggugugggcagg

SEQ ID NO: 3051545 - RNA, 19 nt, Artificial Sequence
  Description of Artificial Sequence: Synthetic oligonucleotide
aacuacagaccugccugua

SEQ ID NO: 3051546 - RNA, 19 nt, Artificial Sequence
  Description of Artificial Sequence: Synthetic oligonucleotide
  modified_base (8)..(8): a, c, u, g, unknown or other
cucaaacncuugcuucaca

SEQ ID NO: 3051547 - RNA, 19 nt, Artificial Sequence
  Description of Artificial Sequence: Synthetic oligonucleotide
ugggcccuuuccgugcugc

SEQ ID NO: 3051548 - RNA, 19 nt, Artificial Sequence
  Description of Artificial Sequence: Synthetic oligonucleotide
acagaccugccuguauccu

SEQ ID NO: 3051549 - RNA, 19 nt, Artificial Sequence
  Description of Artificial Sequence: Synthetic oligonucleotide
ugagcaggugugggcaggu

SEQ ID NO: 3051550 - RNA, 19 nt, Artificial Sequence
  Description of Artificial Sequence: Synthetic oligonucleotide
cagucaucuucucacagau

SEQ ID NO: 3051551 - RNA, 19 nt, Artificial Sequence
  Description of Artificial Sequence: Synthetic oligonucleotide
agucaucuucucacagaug

SEQ ID NO: 3051552 - RNA, 19 nt, Artificial Sequence
  Description of Artificial Sequence: Synthetic oligonucleotide
  modified_base (3)..(3): a, c, u, g, unknown or other
gcncuggccucaaagacuc

SEQ ID NO: 3051553 - RNA, 19 nt, Artificial Sequence
  Description of Artificial Sequence: Synthetic oligonucleotide
ggaccugagcagguguggg

SEQ ID NO: 3051554 - RNA, 19 nt, Artificial Sequence
  Description of Artificial Sequence: Synthetic oligonucleotide
ccucagcagguacaagccg

SEQ ID NO: 3051555 - RNA, 19 nt, Artificial Sequence
  Description of Artificial Sequence: Synthetic oligonucleotide
gucaagggccacccuuaac

SEQ ID NO: 3051556 - RNA, 19 nt, Artificial Sequence
  Description of Artificial Sequence: Synthetic oligonucleotide
gaucaucagcaagccucug

SEQ ID NO: 3051557 - RNA, 19 nt, Artificial Sequence
  Description of Artificial Sequence: Synthetic oligonucleotide
ugguggaccugagcaggug

SEQ ID NO: 3051558 - RNA, 19 nt, Artificial Sequence
  Description of Artificial Sequence: Synthetic oligonucleotide
ggacucagucaucuucuca

SEQ ID NO: 3051559 - RNA, 19 nt, Artificial Sequence
  Description of Artificial Sequence: Synthetic oligonucleotide
cucuggccauccucagcag

SEQ ID NO: 3051560 - RNA, 19 nt, Artificial Sequence
  Description of Artificial Sequence: Synthetic oligonucleotide
uggguuccagggacucagu

SEQ ID NO: 3051561 - RNA, 19 nt, Artificial Sequence
  Description of Artificial Sequence: Synthetic oligonucleotide
cuuaacagccgcagcugcu

SEQ ID NO: 3051562 - RNA, 19 nt, Artificial Sequence
  Description of Artificial Sequence: Synthetic oligonucleotide
cuggccauccucagcaggu

SEQ ID NO: 3051563 - RNA, 19 nt, Artificial Sequence
  Description of Artificial Sequence: Synthetic oligonucleotide
gcuucacauugauauucuc

SEQ ID NO: 3051564 - RNA, 19 nt, Artificial Sequence
  Description of Artificial Sequence: Synthetic oligonucleotide
  modified_base (13)..(13): a, c, u, g, unknown or other
aggcgcucaaacncuugcu

SEQ ID NO: 3051565 - RNA, 19 nt, Artificial Sequence
  Description of Artificial Sequence: Synthetic oligonucleotide
ccacgcuagagcuggguuc

SEQ ID NO: 3051566 - RNA, 19 nt, Artificial Sequence
  Description of Artificial Sequence: Synthetic oligonucleotide
uuccagggacucagucauc

SEQ ID NO: 3051567 - RNA, 19 nt, Artificial Sequence
  Description of Artificial Sequence: Synthetic oligonucleotide
cuggccucaaagacucaaa

SEQ ID NO: 3051568 - RNA, 19 nt, Artificial Sequence
  Description of Artificial Sequence: Synthetic oligonucleotide
uggcuacagucaguucaca

SEQ ID NO: 3051569 - RNA, 19 nt, Artificial Sequence
  Description of Artificial Sequence: Synthetic oligonucleotide
ggggugggguaucuccaag

SEQ ID NO: 3051570 - RNA, 19 nt, Artificial Sequence
  Description of Artificial Sequence: Synthetic oligonucleotide
gggugggguaucuccaaga

SEQ ID NO: 3051571 - RNA, 19 nt, Artificial Sequence
  Description of Artificial Sequence: Synthetic oligonucleotide
ugcccacgcuagagcuggg

SEQ ID NO: 3051572 - RNA, 19 nt, Artificial Sequence
  Description of Artificial Sequence: Synthetic oligonucleotide
ccuguauccuuggcuacag

SEQ ID NO: 3051573 - RNA, 19 nt, Artificial Sequence
  Description of Artificial Sequence: Synthetic oligonucleotide
cuugcuucacauugauauu

SEQ ID NO: 3051574 - RNA, 19 nt, Artificial Sequence
  Description of Artificial Sequence: Synthetic oligonucleotide
ggguuccagggacucaguc

SEQ ID NO: 3051575 - RNA, 19 nt, Artificial Sequence
  Description of Artificial Sequence: Synthetic oligonucleotide
aggucaagggccacccuua

SEQ ID NO: 3051576 - RNA, 19 nt, Artificial Sequence
  Description of Artificial Sequence: Synthetic oligonucleotide
  modified_base (6)..(6): a, c, u, g, unknown or other
caaacncuugcuucacauu

SEQ ID NO: 3051577 - RNA, 19 nt, Artificial Sequence
  Description of Artificial Sequence: Synthetic oligonucleotide
ggccauccucagcagguac

SEQ ID NO: 3051578 - RNA, 19 nt, Artificial Sequence
  Description of Artificial Sequence: Synthetic oligonucleotide
caacuacagaccugccugu

SEQ ID NO: 3051579 - RNA, 19 nt, Artificial Sequence
  Description of Artificial Sequence: Synthetic oligonucleotide
ccacccuuaacagccgcag

SEQ ID NO: 3051580 - RNA, 19 nt, Artificial Sequence
  Description of Artificial Sequence: Synthetic oligonucleotide
  modified_base (9)..(9): a, c, u, g, unknown or other
gcucaaacncuugcuucac

SEQ ID NO: 3051581 - RNA, 19 nt, Artificial Sequence
  Description of Artificial Sequence: Synthetic oligonucleotide
gacucaaaaccaagaucau

SEQ ID NO: 3051582 - RNA, 19 nt, Artificial Sequence
  Description of Artificial Sequence: Synthetic oligonucleotide
guguccaccaggcgcucaa

SEQ ID NO: 3051583 - RNA, 19 nt, Artificial Sequence
  Description of Artificial Sequence: Synthetic oligonucleotide
caaggccaagcugguggac

SEQ ID NO: 3051584 - RNA, 19 nt, Artificial Sequence
  Description of Artificial Sequence: Synthetic oligonucleotide
  modified_base (16)..(16): a, c, u, g, unknown or other
accaggcgcucaaacncuu

SEQ ID NO: 3051585 - RNA, 19 nt, Artificial Sequence
  Description of Artificial Sequence: Synthetic oligonucleotide
  modified_base (2)..(2): a, c, u, g, unknown or other
cncuugcuucacauugaua

SEQ ID NO: 3051586 - RNA, 19 nt, Artificial Sequence
  Description of Artificial Sequence: Synthetic oligonucleotide
caggugugggcaggucaag

SEQ ID NO: 3051587 - RNA, 19 nt, Artificial Sequence
  Description of Artificial Sequence: Synthetic oligonucleotide
aguucacaggcagguucaa

SEQ ID NO: 3051588 - RNA, 19 nt, Artificial Sequence
  Description of Artificial Sequence: Synthetic oligonucleotide
gcccuuuccgugcugccca

SEQ ID NO: 3051589 - RNA, 19 nt, Artificial Sequence
  Description of Artificial Sequence: Synthetic oligonucleotide
gugggcaggucaagggcca

SEQ ID NO: 3051590 - RNA, 19 nt, Artificial Sequence
  Description of Artificial Sequence: Synthetic oligonucleotide
gguggaccugagcaggugu

SEQ ID NO: 3051591 - RNA, 19 nt, Artificial Sequence
  Description of Artificial Sequence: Synthetic oligonucleotide
ccugagcaggugugggcag

SEQ ID NO: 3051592 - RNA, 19 nt, Artificial Sequence
  Description of Artificial Sequence: Synthetic oligonucleotide
ggccacccuuaacagccgc

SEQ ID NO: 3051593 - RNA, 19 nt, Artificial Sequence
  Description of Artificial Sequence: Synthetic oligonucleotide
  modified_base (4)..(4): a, c, u, g, unknown or other
ggcncuggccucaaagacu

SEQ ID NO: 3051594 - RNA, 19 nt, Artificial Sequence
  Description of Artificial Sequence: Synthetic oligonucleotide
gggacucagucaucuucuc

SEQ ID NO: 3051595 - RNA, 19 nt, Artificial Sequence
  Description of Artificial Sequence: Synthetic oligonucleotide
uccaagagcugggcccuuu

SEQ ID NO: 3051596 - RNA, 19 nt, Artificial Sequence
  Description of Artificial Sequence: Synthetic oligonucleotide
uguccaccaggcgcucaaa

SEQ ID NO: 3051597 - RNA, 19 nt, Artificial Sequence
  Description of Artificial Sequence: Synthetic oligonucleotide
auccuuggcuacagucagu

SEQ ID NO: 3051598 - RNA, 19 nt, Artificial Sequence
  Description of Artificial Sequence: Synthetic oligonucleotide
  modified_base (17)..(17): a, c, u, g, unknown or other
caccaggcgcucaaacncu

SEQ ID NO: 3051599 - RNA, 19 nt, Artificial Sequence
  Description of Artificial Sequence: Synthetic oligonucleotide
uggccauccucagcaggua

SEQ ID NO: 3051600 - RNA, 19 nt, Artificial Sequence
  Description of Artificial Sequence: Synthetic oligonucleotide
cccuuaacagccgcagcug

SEQ ID NO: 3051601 - RNA, 19 nt, Artificial Sequence
  Description of Artificial Sequence: Synthetic oligonucleotide
ggcccuuuccgugcugccc

SEQ ID NO: 3051602 - RNA, 19 nt, Artificial Sequence
  Description of Artificial Sequence: Synthetic oligonucleotide
ugggcaggucaagggccac

SEQ ID NO: 3051603 - RNA, 19 nt, Artificial Sequence
  Description of Artificial Sequence: Synthetic oligonucleotide
aggcagguucaaggccaag

SEQ ID NO: 3051604 - RNA, 19 nt, Artificial Sequence
  Description of Artificial Sequence: Synthetic oligonucleotide
gggguaucuccaagagcug

SEQ ID NO: 3051605 - RNA, 19 nt, Artificial Sequence
  Description of Artificial Sequence: Synthetic oligonucleotide
cgugcugcccacgcuagag

SEQ ID NO: 3051606 - RNA, 19 nt, Artificial Sequence
  Description of Artificial Sequence: Synthetic oligonucleotide
caggucaagggccacccuu

SEQ ID NO: 3051607 - RNA, 19 nt, Artificial Sequence
  Description of Artificial Sequence: Synthetic oligonucleotide
gccauccucagcagguaca

SEQ ID NO: 3051608 - RNA, 19 nt, Artificial Sequence
  Description of Artificial Sequence: Synthetic oligonucleotide
caggcagguucaaggccaa

SEQ ID NO: 3051609 - RNA, 19 nt, Artificial Sequence
  Description of Artificial Sequence: Synthetic oligonucleotide
  modified_base (15)..(15): a, c, u, g, unknown or other
ccaggcgcucaaacncuug

SEQ ID NO: 3051610 - RNA, 19 nt, Artificial Sequence
  Description of Artificial Sequence: Synthetic oligonucleotide
ggucaagggccacccuuaa

SEQ ID NO: 3051611 - RNA, 19 nt, Artificial Sequence
  Description of Artificial Sequence: Synthetic oligonucleotide
gcaggugugggcaggucaa

SEQ ID NO: 3051612 - RNA, 19 nt, Artificial Sequence
  Description of Artificial Sequence: Synthetic oligonucleotide
gccuguauccuuggcuaca

SEQ ID NO: 3051613 - RNA, 19 nt, Artificial Sequence
  Description of Artificial Sequence: Synthetic oligonucleotide
  modified_base (9)..(9): a, c, u, g, unknown or other
uccuuggcncuggccucaa

SEQ ID NO: 3051614 - RNA, 19 nt, Artificial Sequence
  Description of Artificial Sequence: Synthetic oligonucleotide
gagcaggugugggcagguc

SEQ ID NO: 3051615 - RNA, 19 nt, Artificial Sequence
  Description of Artificial Sequence: Synthetic oligonucleotide
ccaagagcugggcccuuuc

SEQ ID NO: 3051616 - RNA, 19 nt, Artificial Sequence
  Description of Artificial Sequence: Synthetic oligonucleotide
ccuuggcuacagucaguuc

SEQ ID NO: 3051617 - RNA, 19 nt, Artificial Sequence
  Description of Artificial Sequence: Synthetic oligonucleotide
cugguggaccugagcaggu

SEQ ID NO: 3051618 - RNA, 19 nt, Artificial Sequence
  Description of Artificial Sequence: Synthetic oligonucleotide
gcugcccacgcuagagcug

SEQ ID NO: 3051619 - RNA, 19 nt, Artificial Sequence
  Description of Artificial Sequence: Synthetic oligonucleotide
gggcccuuuccgugcugcc

SEQ ID NO: 3051620 - RNA, 19 nt, Artificial Sequence
  Description of Artificial Sequence: Synthetic oligonucleotide
cagaccugccuguauccuu

SEQ ID NO: 3051621 - RNA, 19 nt, Artificial Sequence
  Description of Artificial Sequence: Synthetic oligonucleotide
gggccacccuuaacagccg

SEQ ID NO: 3051622 - RNA, 19 nt, Artificial Sequence
  Description of Artificial Sequence: Synthetic oligonucleotide
gccaagcugguggaccuga

SEQ ID NO: 3051623 - RNA, 19 nt, Artificial Sequence
  Description of Artificial Sequence: Synthetic oligonucleotide
gggcaggucaagggccacc

SEQ ID NO: 3051624 - RNA, 19 nt, Artificial Sequence
  Description of Artificial Sequence: Synthetic oligonucleotide
ugguguccaccaggcgcuc

SEQ ID NO: 3051625 - RNA, 19 nt, Artificial Sequence
  Description of Artificial Sequence: Synthetic oligonucleotide
  modified_base (2)..(2): a, c, u, g, unknown or other
cncuggccucaaagacuca

SEQ ID NO: 3051626 - RNA, 19 nt, Artificial Sequence
  Description of Artificial Sequence: Synthetic oligonucleotide
cugggcccuuuccgugcug

SEQ ID NO: 3051627 - RNA, 19 nt, Artificial Sequence
  Description of Artificial Sequence: Synthetic oligonucleotide
cuguauccuuggcuacagu

SEQ ID NO: 3051628 - RNA, 19 nt, Artificial Sequence
  Description of Artificial Sequence: Synthetic oligonucleotide
ccuuuccgugcugcccacg

SEQ ID NO: 3051629 - RNA, 19 nt, Artificial Sequence
  Description of Artificial Sequence: Synthetic oligonucleotide
gccacccuuaacagccgca

SEQ ID NO: 3051630 - RNA, 19 nt, Artificial Sequence
  Description of Artificial Sequence: Synthetic oligonucleotide
acgcuagagcuggguucca

SEQ ID NO: 3051631 - RNA, 19 nt, Artificial Sequence
  Description of Artificial Sequence: Synthetic oligonucleotide
ggccaagcugguggaccug

SEQ ID NO: 3051632 - RNA, 19 nt, Artificial Sequence
  Description of Artificial Sequence: Synthetic oligonucleotide
gcuggguuccagggacuca

SEQ ID NO: 3051633 - RNA, 19 nt, Artificial Sequence
  Description of Artificial Sequence: Synthetic oligonucleotide
gucaguucacaggcagguu

SEQ ID NO: 3051634 - RNA, 19 nt, Artificial Sequence
  Description of Artificial Sequence: Synthetic oligonucleotide
gguguccaccaggcgcuca

SEQ ID NO: 3051635 - RNA, 19 nt, Artificial Sequence
  Description of Artificial Sequence: Synthetic oligonucleotide
cccuuuccgugcugcccac

SEQ ID NO: 3051636 - RNA, 19 nt, Artificial Sequence
  Description of Artificial Sequence: Synthetic oligonucleotide
cgcuagagcuggguuccag

SEQ ID NO: 3051637 - RNA, 19 nt, Artificial Sequence
  Description of Artificial Sequence: Synthetic oligonucleotide
gcugggcccuuuccgugcu

SEQ ID NO: 3051638 - RNA, 19 nt, Artificial Sequence
  Description of Artificial Sequence: Synthetic oligonucleotide
gcaggucaagggccacccu

SEQ ID NO: 3051639 - RNA, 19 nt, Artificial Sequence
  Description of Artificial Sequence: Synthetic oligonucleotide
gcaagccucuggccauccu

SEQ ID NO: 3051640 - RNA, 19 nt, Artificial Sequence
  Description of Artificial Sequence: Synthetic oligonucleotide
cagccgcagcugcuaggcu

SEQ ID NO: 3051641 - RNA, 19 nt, Artificial Sequence
  Description of Artificial Sequence: Synthetic oligonucleotide
cccacgcuagagcuggguu

SEQ ID NO: 3051642 - RNA, 19 nt, Artificial Sequence
  Description of Artificial Sequence: Synthetic oligonucleotide
ccgugcugcccacgcuaga

SEQ ID NO: 3051643 - RNA, 19 nt, Artificial Sequence
  Description of Artificial Sequence: Synthetic oligonucleotide
gcccacgcuagagcugggu

SEQ ID NO: 3051644 - RNA, 19 nt, Artificial Sequence
  Description of Artificial Sequence: Synthetic oligonucleotide
  modified_base (8)..(8): a, c, u, g, unknown or other
ccuuggcncuggccucaaa

SEQ ID NO: 3051645 - RNA, 19 nt, Artificial Sequence
  Description of Artificial Sequence: Synthetic oligonucleotide
ccagggacucagucaucuu

SEQ ID NO: 3051646 - RNA, 19 nt, Artificial Sequence
  Description of Artificial Sequence: Synthetic oligonucleotide
  modified_base (1)..(1): a, c, u, g, unknown or other
ncuugcuucacauugauau

SEQ ID NO: 3051647 - RNA, 19 nt, Artificial Sequence
  Description of Artificial Sequence: Synthetic oligonucleotide
  modified_base (1)..(1): a, c, u, g, unknown or other
ncuggccucaaagacucaa

SEQ ID NO: 3051648 - RNA, 19 nt, Artificial Sequence
  Description of Artificial Sequence: Synthetic oligonucleotide
ucaagguucauaaaguugc

SEQ ID NO: 3051649 - RNA, 19 nt, Artificial Sequence
  Description of Artificial Sequence: Synthetic oligonucleotide
aaguucaucagaucaguac

SEQ ID NO: 3051650 - RNA, 19 nt, Artificial Sequence
  Description of Artificial Sequence: Synthetic oligonucleotide
aguacuagcuuucuugacc

SEQ ID NO: 3051651 - RNA, 19 nt, Artificial Sequence
  Description of Artificial Sequence: Synthetic oligonucleotide
ugaaaauacugacugaaca

SEQ ID NO: 3051652 - RNA, 19 nt, Artificial Sequence
  Description of Artificial Sequence: Synthetic oligonucleotide
gaaaauacugacugaacag

SEQ ID NO: 3051653 - RNA, 19 nt, Artificial Sequence
  Description of Artificial Sequence: Synthetic oligonucleotide
aaaauacugacugaacagg

SEQ ID NO: 3051654 - RNA, 19 nt, Artificial Sequence
  Description of Artificial Sequence: Synthetic oligonucleotide
aaauacugacugaacaggc

SEQ ID NO: 3051655 - RNA, 19 nt, Artificial Sequence
  Description of Artificial Sequence: Synthetic oligonucleotide
ugucuuuucaaaguaagcc

SEQ ID NO: 3051656 - RNA, 19 nt, Artificial Sequence
  Description of Artificial Sequence: Synthetic oligonucleotide
uucaaaguaagccuuggcu

SEQ ID NO: 3051657 - RNA, 19 nt, Artificial Sequence
  Description of Artificial Sequence: Synthetic oligonucleotide
ugugucuuuucaaaguaag

SEQ ID NO: 3051658 - RNA, 19 nt, Artificial Sequence
  Description of Artificial Sequence: Synthetic oligonucleotide
aaguccuugccauagucag

SEQ ID NO: 3051659 - RNA, 19 nt, Artificial Sequence
  Description of Artificial Sequence: Synthetic oligonucleotide
uucauaaaguugcucaaga

SEQ ID NO: 3051660 - RNA, 19 nt, Artificial Sequence
  Description of Artificial Sequence: Synthetic oligonucleotide
aucaguacuagcuuucuug

SEQ ID NO: 3051661 - RNA, 19 nt, Artificial Sequence
  Description of Artificial Sequence: Synthetic oligonucleotide
aagacugcugucugacgcc

SEQ ID NO: 3051662 - RNA, 19 nt, Artificial Sequence
  Description of Artificial Sequence: Synthetic oligonucleotide
cugucugcgaaccaaagcc

SEQ ID NO: 3051663 - RNA, 19 nt, Artificial Sequence
  Description of Artificial Sequence: Synthetic oligonucleotide
ucaugcucugaaaauacug

SEQ ID NO: 3051664 - RNA, 19 nt, Artificial Sequence
  Description of Artificial Sequence: Synthetic oligonucleotide
auaaaguugcucaagaagu

SEQ ID NO: 3051665 - RNA, 19 nt, Artificial Sequence
  Description of Artificial Sequence: Synthetic oligonucleotide
aguucaucagaucaguacu

SEQ ID NO: 3051666 - RNA, 19 nt, Artificial Sequence
  Description of Artificial Sequence: Synthetic oligonucleotide
aaucuccgagcucuuggcc

SEQ ID NO: 3051667 - RNA, 19 nt, Artificial Sequence
  Description of Artificial Sequence: Synthetic oligonucleotide
ucacuuagcagcaggagcu

SEQ ID NO: 3051668 - RNA, 19 nt, Artificial Sequence
  Description of Artificial Sequence: Synthetic oligonucleotide
uugcucaagaaguucauca

SEQ ID NO: 3051669 - RNA, 19 nt, Artificial Sequence
  Description of Artificial Sequence: Synthetic oligonucleotide
gaagacugcugucugacgc

SEQ ID NO: 3051670 - RNA, 19 nt, Artificial Sequence
  Description of Artificial Sequence: Synthetic oligonucleotide
aaaguugcucaagaaguuc

SEQ ID NO: 3051671 - RNA, 19 nt, Artificial Sequence
  Description of Artificial Sequence: Synthetic oligonucleotide
agguucauaaaguugcuca

SEQ ID NO: 3051672 - RNA, 19 nt, Artificial Sequence
  Description of Artificial Sequence: Synthetic oligonucleotide
uucucaagguucauaaagu

SEQ ID NO: 3051673 - RNA, 19 nt, Artificial Sequence
  Description of Artificial Sequence: Synthetic oligonucleotide
gacugaacaggcuuugcag

SEQ ID NO: 3051674 - RNA, 19 nt, Artificial Sequence
  Description of Artificial Sequence: Synthetic oligonucleotide
aguacaaccauugcaagca

SEQ ID NO: 3051675 - RNA, 19 nt, Artificial Sequence
  Description of Artificial Sequence: Synthetic oligonucleotide
gaacaggcuuugcagaccg

SEQ ID NO: 3051676 - RNA, 19 nt, Artificial Sequence
  Description of Artificial Sequence: Synthetic oligonucleotide
caagaaguucaucagauca

SEQ ID NO: 3051677 - RNA, 19 nt, Artificial Sequence
  Description of Artificial Sequence: Synthetic oligonucleotide
augcucugaaaauacugac

SEQ ID NO: 3051678 - RNA, 19 nt, Artificial Sequence
  Description of Artificial Sequence: Synthetic oligonucleotide
ugucugacgccucacuuag

SEQ ID NO: 3051679 - RNA, 19 nt, Artificial Sequence
  Description of Artificial Sequence: Synthetic oligonucleotide
ucuugugucuuuucaaagu

SEQ ID NO: 3051680 - RNA, 19 nt, Artificial Sequence
  Description of Artificial Sequence: Synthetic oligonucleotide
ucugacgccucacuuagca

SEQ ID NO: 3051681 - RNA, 19 nt, Artificial Sequence
  Description of Artificial Sequence: Synthetic oligonucleotide
ucuuuucaaaguaagccuu

SEQ ID NO: 3051682 - RNA, 19 nt, Artificial Sequence
  Description of Artificial Sequence: Synthetic oligonucleotide
uaagccuuggcuugggucu

SEQ ID NO: 3051683 - RNA, 19 nt, Artificial Sequence
  Description of Artificial Sequence: Synthetic oligonucleotide
uuuucaaaguaagccuugg

SEQ ID NO: 3051684 - RNA, 19 nt, Artificial Sequence
  Description of Artificial Sequence: Synthetic oligonucleotide
cuuggcuugggucugaauc

SEQ ID NO: 3051685 - RNA, 19 nt, Artificial Sequence
  Description of Artificial Sequence: Synthetic oligonucleotide
ucaguacuagcuuucuuga

SEQ ID NO: 3051686 - RNA, 19 nt, Artificial Sequence
  Description of Artificial Sequence: Synthetic oligonucleotide
aagaaguucaucagaucag

SEQ ID NO: 3051687 - RNA, 19 nt, Artificial Sequence
  Description of Artificial Sequence: Synthetic oligonucleotide
uuggccuucuccaucaagu

SEQ ID NO: 3051688 - RNA, 19 nt, Artificial Sequence
  Description of Artificial Sequence: Synthetic oligonucleotide
uugggucugaaucuccgag

SEQ ID NO: 3051689 - RNA, 19 nt, Artificial Sequence
  Description of Artificial Sequence: Synthetic oligonucleotide
ugacgccucacuuagcagc

SEQ ID NO: 3051690 - RNA, 19 nt, Artificial Sequence
  Description of Artificial Sequence: Synthetic oligonucleotide
ugcucaagaaguucaucag

SEQ ID NO: 3051691 - RNA, 19 nt, Artificial Sequence
  Description of Artificial Sequence: Synthetic oligonucleotide
cucaagguucauaaaguug

SEQ ID NO: 3051692 - RNA, 19 nt, Artificial Sequence
  Description of Artificial Sequence: Synthetic oligonucleotide
aaaguaagccuuggcuugg

SEQ ID NO: 3051693 - RNA, 19 nt, Artificial Sequence
  Description of Artificial Sequence: Synthetic oligonucleotide
uaggauaggaagacugcug

SEQ ID NO: 3051694 - RNA, 19 nt, Artificial Sequence
  Description of Artificial Sequence: Synthetic oligonucleotide
cucacuuagcagcaggagc

SEQ ID NO: 3051695 - RNA, 19 nt, Artificial Sequence
  Description of Artificial Sequence: Synthetic oligonucleotide
ugcucugaaaauacugacu

SEQ ID NO: 3051696 - RNA, 19 nt, Artificial Sequence
  Description of Artificial Sequence: Synthetic oligonucleotide
aggagcugguuucucaagg

SEQ ID NO: 3051697 - RNA, 19 nt, Artificial Sequence
  Description of Artificial Sequence: Synthetic oligonucleotide
gaaccaaagccccuuccag

SEQ ID NO: 3051698 - RNA, 19 nt, Artificial Sequence
  Description of Artificial Sequence: Synthetic oligonucleotide
gcucugaaaauacugacug

SEQ ID NO: 3051699 - RNA, 19 nt, Artificial Sequence
  Description of Artificial Sequence: Synthetic oligonucleotide
aggauaggaagacugcugu

SEQ ID NO: 3051700 - RNA, 19 nt, Artificial Sequence
  Description of Artificial Sequence: Synthetic oligonucleotide
agucaugcucugaaaauac

SEQ ID NO: 3051701 - RNA, 19 nt, Artificial Sequence
  Description of Artificial Sequence: Synthetic oligonucleotide
agcagcaggagcugguuuc

SEQ ID NO: 3051702 - RNA, 19 nt, Artificial Sequence
  Description of Artificial Sequence: Synthetic oligonucleotide
gauggugacgagcaguaca

SEQ ID NO: 3051703 - RNA, 19 nt, Artificial Sequence
  Description of Artificial Sequence: Synthetic oligonucleotide
aagguucauaaaguugcuc

SEQ ID NO: 3051704 - RNA, 19 nt, Artificial Sequence
  Description of Artificial Sequence: Synthetic oligonucleotide
ucauaaaguugcucaagaa

SEQ ID NO: 3051705 - RNA, 19 nt, Artificial Sequence
  Description of Artificial Sequence: Synthetic oligonucleotide
ugucugcgaaccaaagccc

SEQ ID NO: 3051706 - RNA, 19 nt, Artificial Sequence
  Description of Artificial Sequence: Synthetic oligonucleotide
acugaacaggcuuugcaga

SEQ ID NO: 3051707 - RNA, 19 nt, Artificial Sequence
  Description of Artificial Sequence: Synthetic oligonucleotide
uuggcuugggucugaaucu

SEQ ID NO: 3051708 - RNA, 19 nt, Artificial Sequence
  Description of Artificial Sequence: Synthetic oligonucleotide
uucaucagaucaguacuag

SEQ ID NO: 3051709 - RNA, 19 nt, Artificial Sequence
  Description of Artificial Sequence: Synthetic oligonucleotide
uaaaguugcucaagaaguu

SEQ ID NO: 3051710 - RNA, 19 nt, Artificial Sequence
  Description of Artificial Sequence: Synthetic oligonucleotide
caguacaaccauugcaagc

SEQ ID NO: 3051711 - RNA, 19 nt, Artificial Sequence
  Description of Artificial Sequence: Synthetic oligonucleotide
aaguugcucaagaaguuca

SEQ ID NO: 3051712 - RNA, 19 nt, Artificial Sequence
  Description of Artificial Sequence: Synthetic oligonucleotide
ucaucagaucaguacuagc

SEQ ID NO: 3051713 - RNA, 19 nt, Artificial Sequence
  Description of Artificial Sequence: Synthetic oligonucleotide
ucaaguccuugccauaguc

SEQ ID NO: 3051714 - RNA, 19 nt, Artificial Sequence
  Description of Artificial Sequence: Synthetic oligonucleotide
uacaaccauugcaagcagc

SEQ ID NO: 3051715 - RNA, 19 nt, Artificial Sequence
  Description of Artificial Sequence: Synthetic oligonucleotide
aauacugacugaacaggcu

SEQ ID NO: 3051716 - RNA, 19 nt, Artificial Sequence
  Description of Artificial Sequence: Synthetic oligonucleotide
cugaaaauacugacugaac

SEQ ID NO: 3051717 - RNA, 19 nt, Artificial Sequence
  Description of Artificial Sequence: Synthetic oligonucleotide
auaggaagacugcugucug

SEQ ID NO: 3051718 - RNA, 19 nt, Artificial Sequence
  Description of Artificial Sequence: Synthetic oligonucleotide
acuagcuuucuugaccagg

SEQ ID NO: 3051719 - RNA, 19 nt, Artificial Sequence
  Description of Artificial Sequence: Synthetic oligonucleotide
uagucagucaugcucugaa

SEQ ID NO: 3051720 - RNA, 19 nt, Artificial Sequence
  Description of Artificial Sequence: Synthetic oligonucleotide
uccaucaaguccuugccau

SEQ ID NO: 3051721 - RNA, 19 nt, Artificial Sequence
  Description of Artificial Sequence: Synthetic oligonucleotide
gaaucuccgagcucuuggc

SEQ ID NO: 3051722 - RNA, 19 nt, Artificial Sequence
  Description of Artificial Sequence: Synthetic oligonucleotide
guacuagcuuucuugacca

SEQ ID NO: 3051723 - RNA, 19 nt, Artificial Sequence
  Description of Artificial Sequence: Synthetic oligonucleotide
cuugccauagucagucaug

SEQ ID NO: 3051724 - RNA, 19 nt, Artificial Sequence
  Description of Artificial Sequence: Synthetic oligonucleotide
aggaagacugcugucugac

SEQ ID NO: 3051725 - RNA, 19 nt, Artificial Sequence
  Description of Artificial Sequence: Synthetic oligonucleotide
gagcaguacaaccauugca

SEQ ID NO: 3051726 - RNA, 19 nt, Artificial Sequence
  Description of Artificial Sequence: Synthetic oligonucleotide
ccuuccaggcuacagaugg

SEQ ID NO: 3051727 - RNA, 19 nt, Artificial Sequence
  Description of Artificial Sequence: Synthetic oligonucleotide
ucagaucaguacuagcuuu

SEQ ID NO: 3051728 - RNA, 19 nt, Artificial Sequence
  Description of Artificial Sequence: Synthetic oligonucleotide
caugcucugaaaauacuga

SEQ ID NO: 3051729 - RNA, 19 nt, Artificial Sequence
  Description of Artificial Sequence: Synthetic oligonucleotide
agcuuucuugaccaggggu

SEQ ID NO: 3051730 - RNA, 19 nt, Artificial Sequence
  Description of Artificial Sequence: Synthetic oligonucleotide
uugccauagucagucaugc

SEQ ID NO: 3051731 - RNA, 19 nt, Artificial Sequence
  Description of Artificial Sequence: Synthetic oligonucleotide
ucucaagguucauaaaguu

SEQ ID NO: 3051732 - RNA, 19 nt, Artificial Sequence
  Description of Artificial Sequence: Synthetic oligonucleotide
cuacagauggugacgagca

SEQ ID NO: 3051733 - RNA, 19 nt, Artificial Sequence
  Description of Artificial Sequence: Synthetic oligonucleotide
uugaccaggggugucagcu

SEQ ID NO: 3051734 - RNA, 19 nt, Artificial Sequence
  Description of Artificial Sequence: Synthetic oligonucleotide
uugugucuuuucaaaguaa

SEQ ID NO: 3051735 - RNA, 19 nt, Artificial Sequence
  Description of Artificial Sequence: Synthetic oligonucleotide
agcaguacaaccauugcaa

SEQ ID NO: 3051736 - RNA, 19 nt, Artificial Sequence
  Description of Artificial Sequence: Synthetic oligonucleotide
ugcaagcagcuucaugaug

SEQ ID NO: 3051737 - RNA, 19 nt, Artificial Sequence
  Description of Artificial Sequence: Synthetic oligonucleotide
agcuaggauaggaagacug

SEQ ID NO: 3051738 - RNA, 19 nt, Artificial Sequence
  Description of Artificial Sequence: Synthetic oligonucleotide
auacugacugaacaggcuu

SEQ ID NO: 3051739 - RNA, 19 nt, Artificial Sequence
  Description of Artificial Sequence: Synthetic oligonucleotide
ucaagaaguucaucagauc

SEQ ID NO: 3051740 - RNA, 19 nt, Artificial Sequence
  Description of Artificial Sequence: Synthetic oligonucleotide
cugaacaggcuuugcagac

SEQ ID NO: 3051741 - RNA, 19 nt, Artificial Sequence
  Description of Artificial Sequence: Synthetic oligonucleotide
guucauaaaguugcucaag

SEQ ID NO: 3051742 - RNA, 19 nt, Artificial Sequence
  Description of Artificial Sequence: Synthetic oligonucleotide
agcugguuucucaagguuc

SEQ ID NO: 3051743 - RNA, 19 nt, Artificial Sequence
  Description of Artificial Sequence: Synthetic oligonucleotide
agaaguucaucagaucagu

SEQ ID NO: 3051744 - RNA, 19 nt, Artificial Sequence
  Description of Artificial Sequence: Synthetic oligonucleotide
acaaccauugcaagcagcu

SEQ ID NO: 3051745 - RNA, 19 nt, Artificial Sequence
  Description of Artificial Sequence: Synthetic oligonucleotide
ugggucugaaucuccgagc

SEQ ID NO: 3051746 - RNA, 19 nt, Artificial Sequence
  Description of Artificial Sequence: Synthetic oligonucleotide
ggugacgagcaguacaacc

SEQ ID NO: 3051747 - RNA, 19 nt, Artificial Sequence
  Description of Artificial Sequence: Synthetic oligonucleotide
acaggcuuugcagaccggg

SEQ ID NO: 3051748 - RNA, 19 nt, Artificial Sequence
  Description of Artificial Sequence: Synthetic oligonucleotide
caucagaucaguacuagcu

SEQ ID NO: 3051749 - RNA, 19 nt, Artificial Sequence
  Description of Artificial Sequence: Synthetic oligonucleotide
uagcuuucuugaccagggg

SEQ ID NO: 3051750 - RNA, 19 nt, Artificial Sequence
  Description of Artificial Sequence: Synthetic oligonucleotide
uugcagaccgggcuccucc

SEQ ID NO: 3051751 - RNA, 19 nt, Artificial Sequence
  Description of Artificial Sequence: Synthetic oligonucleotide
gucuuuucaaaguaagccu

SEQ ID NO: 3051752 - RNA, 19 nt, Artificial Sequence
  Description of Artificial Sequence: Synthetic oligonucleotide
caucaaguccuugccauag

SEQ ID NO: 3051753 - RNA, 19 nt, Artificial Sequence
  Description of Artificial Sequence: Synthetic oligonucleotide
gguuucucaagguucauaa

SEQ ID NO: 3051754 - RNA, 19 nt, Artificial Sequence
  Description of Artificial Sequence: Synthetic oligonucleotide
aucagaucaguacuagcuu

SEQ ID NO: 3051755 - RNA, 19 nt, Artificial Sequence
  Description of Artificial Sequence: Synthetic oligonucleotide
aucuccgagcucuuggccu

SEQ ID NO: 3051756 - RNA, 19 nt, Artificial Sequence
  Description of Artificial Sequence: Synthetic oligonucleotide
uacagauggugacgagcag

SEQ ID NO: 3051757 - RNA, 19 nt, Artificial Sequence
  Description of Artificial Sequence: Synthetic oligonucleotide
ugcucuugugucuuuucaa

SEQ ID NO: 3051758 - RNA, 19 nt, Artificial Sequence
  Description of Artificial Sequence: Synthetic oligonucleotide
gauaggaagacugcugucu

SEQ ID NO: 3051759 - RNA, 19 nt, Artificial Sequence
  Description of Artificial Sequence: Synthetic oligonucleotide
cagaucaguacuagcuuuc

SEQ ID NO: 3051760 - RNA, 19 nt, Artificial Sequence
  Description of Artificial Sequence: Synthetic oligonucleotide
uccaggcuacagaugguga

SEQ ID NO: 3051761 - RNA, 19 nt, Artificial Sequence
  Description of Artificial Sequence: Synthetic oligonucleotide
guaagccuuggcuuggguc

SEQ ID NO: 3051762 - RNA, 19 nt, Artificial Sequence
  Description of Artificial Sequence: Synthetic oligonucleotide
gucagucaugcucugaaaa

SEQ ID NO: 3051763 - RNA, 19 nt, Artificial Sequence
  Description of Artificial Sequence: Synthetic oligonucleotide
ugacgagcaguacaaccau

SEQ ID NO: 3051764 - RNA, 19 nt, Artificial Sequence
  Description of Artificial Sequence: Synthetic oligonucleotide
gccauagucagucaugcuc

SEQ ID NO: 3051765 - RNA, 19 nt, Artificial Sequence
  Description of Artificial Sequence: Synthetic oligonucleotide
acgagcaguacaaccauug

SEQ ID NO: 3051766 - RNA, 19 nt, Artificial Sequence
  Description of Artificial Sequence: Synthetic oligonucleotide
ugaacaggcuuugcagacc

SEQ ID NO: 3051767 - RNA, 19 nt, Artificial Sequence
  Description of Artificial Sequence: Synthetic oligonucleotide
ucugcgaaccaaagccccu

SEQ ID NO: 3051768 - RNA, 19 nt, Artificial Sequence
  Description of Artificial Sequence: Synthetic oligonucleotide
acagauggugacgagcagu

SEQ ID NO: 3051769 - RNA, 19 nt, Artificial Sequence
  Description of Artificial Sequence: Synthetic oligonucleotide
gugucuuuucaaaguaagc

SEQ ID NO: 3051770 - RNA, 19 nt, Artificial Sequence
  Description of Artificial Sequence: Synthetic oligonucleotide
cuugugucuuuucaaagua

SEQ ID NO: 3051771 - RNA, 19 nt, Artificial Sequence
  Description of Artificial Sequence: Synthetic oligonucleotide
aaguaagccuuggcuuggg

SEQ ID NO: 3051772 - RNA, 19 nt, Artificial Sequence
  Description of Artificial Sequence: Synthetic oligonucleotide
caggcuacagauggugacg

SEQ ID NO: 3051773 - RNA, 19 nt, Artificial Sequence
  Description of Artificial Sequence: Synthetic oligonucleotide
uaggaagacugcugucuga

SEQ ID NO: 3051774 - RNA, 19 nt, Artificial Sequence
  Description of Artificial Sequence: Synthetic oligonucleotide
aggcuuugcagaccgggcu

SEQ ID NO: 3051775 - RNA, 19 nt, Artificial Sequence
  Description of Artificial Sequence: Synthetic oligonucleotide
uacugacugaacaggcuuu

SEQ ID NO: 3051776 - RNA, 19 nt, Artificial Sequence
  Description of Artificial Sequence: Synthetic oligonucleotide
aaagccccuuccaggcuac

SEQ ID NO: 3051777 - RNA, 19 nt, Artificial Sequence
  Description of Artificial Sequence: Synthetic oligonucleotide
cauugcaagcagcuucaug

SEQ ID NO: 3051778 - RNA, 19 nt, Artificial Sequence
  Description of Artificial Sequence: Synthetic oligonucleotide
guacaaccauugcaagcag

SEQ ID NO: 3051779 - RNA, 19 nt, Artificial Sequence
  Description of Artificial Sequence: Synthetic oligonucleotide
acuuagcagcaggagcugg

SEQ ID NO: 3051780 - RNA, 19 nt, Artificial Sequence
  Description of Artificial Sequence: Synthetic oligonucleotide
caagcagcuucaugauggc

SEQ ID NO: 3051781 - RNA, 19 nt, Artificial Sequence
  Description of Artificial Sequence: Synthetic oligonucleotide
caaguccuugccauaguca

SEQ ID NO: 3051782 - RNA, 19 nt, Artificial Sequence
  Description of Artificial Sequence: Synthetic oligonucleotide
cucaagaaguucaucagau

SEQ ID NO: 3051783 - RNA, 19 nt, Artificial Sequence
  Description of Artificial Sequence: Synthetic oligonucleotide
uucuugaccagggguguca

SEQ ID NO: 3051784 - RNA, 19 nt, Artificial Sequence
  Description of Artificial Sequence: Synthetic oligonucleotide
ugcagaccgggcuccuccg

SEQ ID NO: 3051785 - RNA, 19 nt, Artificial Sequence
  Description of Artificial Sequence: Synthetic oligonucleotide
acugacugaacaggcuuug

SEQ ID NO: 3051786 - RNA, 19 nt, Artificial Sequence
  Description of Artificial Sequence: Synthetic oligonucleotide
cuuggccuucuccaucaag

SEQ ID NO: 3051787 - RNA, 19 nt, Artificial Sequence
  Description of Artificial Sequence: Synthetic oligonucleotide
caggcuuugcagaccgggc

SEQ ID NO: 3051788 - RNA, 19 nt, Artificial Sequence
  Description of Artificial Sequence: Synthetic oligonucleotide
uacuagcuuucuugaccag

SEQ ID NO: 3051789 - RNA, 19 nt, Artificial Sequence
  Description of Artificial Sequence: Synthetic oligonucleotide
gcuuucuugaccaggggug

SEQ ID NO: 3051790 - RNA, 19 nt, Artificial Sequence
  Description of Artificial Sequence: Synthetic oligonucleotide
ucuugaccaggggugucag

SEQ ID NO: 3051791 - RNA, 19 nt, Artificial Sequence
  Description of Artificial Sequence: Synthetic oligonucleotide
gguggggcagcuaggauag

SEQ ID NO: 3051792 - RNA, 19 nt, Artificial Sequence
  Description of Artificial Sequence: Synthetic oligonucleotide
caguacuagcuuucuugac

SEQ ID NO: 3051793 - RNA, 19 nt, Artificial Sequence
  Description of Artificial Sequence: Synthetic oligonucleotide
uugcaagcagcuucaugau

SEQ ID NO: 3051794 - RNA, 19 nt, Artificial Sequence
  Description of Artificial Sequence: Synthetic oligonucleotide
gcaguacaaccauugcaag

SEQ ID NO: 3051795 - RNA, 19 nt, Artificial Sequence
  Description of Artificial Sequence: Synthetic oligonucleotide
cauagucagucaugcucug

SEQ ID NO: 3051796 - RNA, 19 nt, Artificial Sequence
  Description of Artificial Sequence: Synthetic oligonucleotide
gucugcgaaccaaagcccc

SEQ ID NO: 3051797 - RNA, 19 nt, Artificial Sequence
  Description of Artificial Sequence: Synthetic oligonucleotide
uggggcagcuaggauagga

SEQ ID NO: 3051798 - RNA, 19 nt, Artificial Sequence
  Description of Artificial Sequence: Synthetic oligonucleotide
uccuccgccugucugcgaa

SEQ ID NO: 3051799 - RNA, 19 nt, Artificial Sequence
  Description of Artificial Sequence: Synthetic oligonucleotide
ugcugucugacgccucacu

SEQ ID NO: 3051800 - RNA, 19 nt, Artificial Sequence
  Description of Artificial Sequence: Synthetic oligonucleotide
accauugcaagcagcuuca

SEQ ID NO: 3051801 - RNA, 19 nt, Artificial Sequence
  Description of Artificial Sequence: Synthetic oligonucleotide
uggccuucuccaucaaguc

SEQ ID NO: 3051802 - RNA, 19 nt, Artificial Sequence
  Description of Artificial Sequence: Synthetic oligonucleotide
gcuacagauggugacgagc

SEQ ID NO: 3051803 - RNA, 19 nt, Artificial Sequence
  Description of Artificial Sequence: Synthetic oligonucleotide
agaucaguacuagcuuucu

SEQ ID NO: 3051804 - RNA, 19 nt, Artificial Sequence
  Description of Artificial Sequence: Synthetic oligonucleotide
gucugaaucuccgagcucu

SEQ ID NO: 3051805 - RNA, 19 nt, Artificial Sequence
  Description of Artificial Sequence: Synthetic oligonucleotide
ggaagacugcugucugacg

SEQ ID NO: 3051806 - RNA, 19 nt, Artificial Sequence
  Description of Artificial Sequence: Synthetic oligonucleotide
aucaaguccuugccauagu

SEQ ID NO: 3051807 - RNA, 19 nt, Artificial Sequence
  Description of Artificial Sequence: Synthetic oligonucleotide
gggcagcuaggauaggaag

SEQ ID NO: 3051808 - RNA, 19 nt, Artificial Sequence
  Description of Artificial Sequence: Synthetic oligonucleotide
ugaccaggggugucagcug

SEQ ID NO: 3051809 - RNA, 19 nt, Artificial Sequence
  Description of Artificial Sequence: Synthetic oligonucleotide
agauggugacgagcaguac

SEQ ID NO: 3051810 - RNA, 19 nt, Artificial Sequence
  Description of Artificial Sequence: Synthetic oligonucleotide
gguucauaaaguugcucaa

SEQ ID NO: 3051811 - RNA, 19 nt, Artificial Sequence
  Description of Artificial Sequence: Synthetic oligonucleotide
cugacgccucacuuagcag

SEQ ID NO: 3051812 - RNA, 19 nt, Artificial Sequence
  Description of Artificial Sequence: Synthetic oligonucleotide
agucagucaugcucugaaa

SEQ ID NO: 3051813 - RNA, 19 nt, Artificial Sequence
  Description of Artificial Sequence: Synthetic oligonucleotide
auggugacgagcaguacaa

SEQ ID NO: 3051814 - RNA, 19 nt, Artificial Sequence
  Description of Artificial Sequence: Synthetic oligonucleotide
gcucaagaaguucaucaga

SEQ ID NO: 3051815 - RNA, 19 nt, Artificial Sequence
  Description of Artificial Sequence: Synthetic oligonucleotide
guuucucaagguucauaaa

SEQ ID NO: 3051816 - RNA, 19 nt, Artificial Sequence
  Description of Artificial Sequence: Synthetic oligonucleotide
gcuaggauaggaagacugc

SEQ ID NO: 3051817 - RNA, 19 nt, Artificial Sequence
  Description of Artificial Sequence: Synthetic oligonucleotide
ugcgaaccaaagccccuuc

SEQ ID NO: 3051818 - RNA, 19 nt, Artificial Sequence
  Description of Artificial Sequence: Synthetic oligonucleotide
gcagcuaggauaggaagac

SEQ ID NO: 3051819 - RNA, 19 nt, Artificial Sequence
  Description of Artificial Sequence: Synthetic oligonucleotide
aggcuacagauggugacga

SEQ ID NO: 3051820 - RNA, 19 nt, Artificial Sequence
  Description of Artificial Sequence: Synthetic oligonucleotide
ugccauagucagucaugcu

SEQ ID NO: 3051821 - RNA, 19 nt, Artificial Sequence
  Description of Artificial Sequence: Synthetic oligonucleotide
cagauggugacgagcagua

SEQ ID NO: 3051822 - RNA, 19 nt, Artificial Sequence
  Description of Artificial Sequence: Synthetic oligonucleotide
aacaggcuuugcagaccgg

SEQ ID NO: 3051823 - RNA, 19 nt, Artificial Sequence
  Description of Artificial Sequence: Synthetic oligonucleotide
cuugaccaggggugucagc

SEQ ID NO: 3051824 - RNA, 19 nt, Artificial Sequence
  Description of Artificial Sequence: Synthetic oligonucleotide
ccugucugcgaaccaaagc

SEQ ID NO: 3051825 - RNA, 19 nt, Artificial Sequence
  Description of Artificial Sequence: Synthetic oligonucleotide
guugcucaagaaguucauc

SEQ ID NO: 3051826 - RNA, 19 nt, Artificial Sequence
  Description of Artificial Sequence: Synthetic oligonucleotide
aagccuuggcuugggucug

SEQ ID NO: 3051827 - RNA, 19 nt, Artificial Sequence
  Description of Artificial Sequence: Synthetic oligonucleotide
aggggugucagcugcucuu

SEQ ID NO: 3051828 - RNA, 19 nt, Artificial Sequence
  Description of Artificial Sequence: Synthetic oligonucleotide
ugguuucucaagguucaua

SEQ ID NO: 3051829 - RNA, 19 nt, Artificial Sequence
  Description of Artificial Sequence: Synthetic oligonucleotide
gaaguucaucagaucagua

SEQ ID NO: 3051830 - RNA, 19 nt, Artificial Sequence
  Description of Artificial Sequence: Synthetic oligonucleotide
cugacugaacaggcuuugc

SEQ ID NO: 3051831 - RNA, 19 nt, Artificial Sequence
  Description of Artificial Sequence: Synthetic oligonucleotide
gacgccucacuuagcagca

SEQ ID NO: 3051832 - RNA, 19 nt, Artificial Sequence
  Description of Artificial Sequence: Synthetic oligonucleotide
ggugucagcugcucuugug

SEQ ID NO: 3051833 - RNA, 19 nt, Artificial Sequence
  Description of Artificial Sequence: Synthetic oligonucleotide
auagucagucaugcucuga

SEQ ID NO: 3051834 - RNA, 19 nt, Artificial Sequence
  Description of Artificial Sequence: Synthetic oligonucleotide
ucugaaucuccgagcucuu

SEQ ID NO: 3051835 - RNA, 19 nt, Artificial Sequence
  Description of Artificial Sequence: Synthetic oligonucleotide
cugcucuugugucuuuuca

SEQ ID NO: 3051836 - RNA, 19 nt, Artificial Sequence
  Description of Artificial Sequence: Synthetic oligonucleotide
gcuugggucugaaucuccg

SEQ ID NO: 3051837 - RNA, 19 nt, Artificial Sequence
  Description of Artificial Sequence: Synthetic oligonucleotide
cagaccgggcuccuccgcc

SEQ ID NO: 3051838 - RNA, 19 nt, Artificial Sequence
  Description of Artificial Sequence: Synthetic oligonucleotide
ucuccgagcucuuggccuu

SEQ ID NO: 3051839 - RNA, 19 nt, Artificial Sequence
  Description of Artificial Sequence: Synthetic oligonucleotide
cuugggucugaaucuccga

SEQ ID NO: 3051840 - RNA, 19 nt, Artificial Sequence
  Description of Artificial Sequence: Synthetic oligonucleotide
uagcagcaggagcugguuu

SEQ ID NO: 3051841 - RNA, 19 nt, Artificial Sequence
  Description of Artificial Sequence: Synthetic oligonucleotide
gcucuugugucuuuucaaa

SEQ ID NO: 3051842 - RNA, 19 nt, Artificial Sequence
  Description of Artificial Sequence: Synthetic oligonucleotide
ccaggcuacagauggugac

SEQ ID NO: 3051843 - RNA, 19 nt, Artificial Sequence
  Description of Artificial Sequence: Synthetic oligonucleotide
cuccaucaaguccuugcca

SEQ ID NO: 3051844 - RNA, 19 nt, Artificial Sequence
  Description of Artificial Sequence: Synthetic oligonucleotide
uccuugccauagucaguca

SEQ ID NO: 3051845 - RNA, 19 nt, Artificial Sequence
  Description of Artificial Sequence: Synthetic oligonucleotide
aguugcucaagaaguucau

SEQ ID NO: 3051846 - RNA, 19 nt, Artificial Sequence
  Description of Artificial Sequence: Synthetic oligonucleotide
uccgccugucugcgaacca

SEQ ID NO: 3051847 - RNA, 19 nt, Artificial Sequence
  Description of Artificial Sequence: Synthetic oligonucleotide
agacugcugucugacgccu

SEQ ID NO: 3051848 - RNA, 19 nt, Artificial Sequence
  Description of Artificial Sequence: Synthetic oligonucleotide
cuaggauaggaagacugcu

SEQ ID NO: 3051849 - RNA, 19 nt, Artificial Sequence
  Description of Artificial Sequence: Synthetic oligonucleotide
cagucaugcucugaaaaua

SEQ ID NO: 3051850 - RNA, 19 nt, Artificial Sequence
  Description of Artificial Sequence: Synthetic oligonucleotide
ggauaggaagacugcuguc

SEQ ID NO: 3051851 - RNA, 19 nt, Artificial Sequence
  Description of Artificial Sequence: Synthetic oligonucleotide
ggcagcuaggauaggaaga

SEQ ID NO: 3051852 - RNA, 19 nt, Artificial Sequence
  Description of Artificial Sequence: Synthetic oligonucleotide
cugucugacgccucacuua

SEQ ID NO: 3051853 - RNA, 19 nt, Artificial Sequence
  Description of Artificial Sequence: Synthetic oligonucleotide
gcugguuucucaagguuca

SEQ ID NO: 3051854 - RNA, 19 nt, Artificial Sequence
  Description of Artificial Sequence: Synthetic oligonucleotide
cugaaucuccgagcucuug

SEQ ID NO: 3051855 - RNA, 19 nt, Artificial Sequence
  Description of Artificial Sequence: Synthetic oligonucleotide
uggcuugggucugaaucuc

SEQ ID NO: 3051856 - RNA, 19 nt, Artificial Sequence
  Description of Artificial Sequence: Synthetic oligonucleotide
agaccgggcuccuccgccu

SEQ ID NO: 3051857 - RNA, 19 nt, Artificial Sequence
  Description of Artificial Sequence: Synthetic oligonucleotide
ggcuccuccgccugucugc

SEQ ID NO: 3051858 - RNA, 19 nt, Artificial Sequence
  Description of Artificial Sequence: Synthetic oligonucleotide
cuuagcagcaggagcuggu

SEQ ID NO: 3051859 - RNA, 19 nt, Artificial Sequence
  Description of Artificial Sequence: Synthetic oligonucleotide
cacuuagcagcaggagcug

SEQ ID NO: 3051860 - RNA, 19 nt, Artificial Sequence
  Description of Artificial Sequence: Synthetic oligonucleotide
ucuuggccuucuccaucaa

SEQ ID NO: 3051861 - RNA, 19 nt, Artificial Sequence
  Description of Artificial Sequence: Synthetic oligonucleotide
caaagccccuuccaggcua

SEQ ID NO: 3051862 - RNA, 19 nt, Artificial Sequence
  Description of Artificial Sequence: Synthetic oligonucleotide
cuccgccugucugcgaacc

SEQ ID NO: 3051863 - RNA, 19 nt, Artificial Sequence
  Description of Artificial Sequence: Synthetic oligonucleotide
caagguucauaaaguugcu

SEQ ID NO: 3051864 - RNA, 19 nt, Artificial Sequence
  Description of Artificial Sequence: Synthetic oligonucleotide
gcgaaccaaagccccuucc

SEQ ID NO: 3051865 - RNA, 19 nt, Artificial Sequence
  Description of Artificial Sequence: Synthetic oligonucleotide
agccccuuccaggcuacag

SEQ ID NO: 3051866 - RNA, 19 nt, Artificial Sequence
  Description of Artificial Sequence: Synthetic oligonucleotide
gggucugaaucuccgagcu

SEQ ID NO: 3051867 - RNA, 19 nt, Artificial Sequence
  Description of Artificial Sequence: Synthetic oligonucleotide
ggcuuugcagaccgggcuc

SEQ ID NO: 3051868 - RNA, 19 nt, Artificial Sequence
  Description of Artificial Sequence: Synthetic oligonucleotide
uggugacgagcaguacaac

SEQ ID NO: 3051869 - RNA, 19 nt, Artificial Sequence
  Description of Artificial Sequence: Synthetic oligonucleotide
ccauagucagucaugcucu

SEQ ID NO: 3051870 - RNA, 19 nt, Artificial Sequence
  Description of Artificial Sequence: Synthetic oligonucleotide
aguccuugccauagucagu

SEQ ID NO: 3051871 - RNA, 19 nt, Artificial Sequence
  Description of Artificial Sequence: Synthetic oligonucleotide
gaucaguacuagcuuucuu

SEQ ID NO: 3051872 - RNA, 19 nt, Artificial Sequence
  Description of Artificial Sequence: Synthetic oligonucleotide
gucagcugcucuugugucu

SEQ ID NO: 3051873 - RNA, 19 nt, Artificial Sequence
  Description of Artificial Sequence: Synthetic oligonucleotide
uuugcagaccgggcuccuc

SEQ ID NO: 3051874 - RNA, 19 nt, Artificial Sequence
  Description of Artificial Sequence: Synthetic oligonucleotide
cgagcucuuggccuucucc

SEQ ID NO: 3051875 - RNA, 19 nt, Artificial Sequence
  Description of Artificial Sequence: Synthetic oligonucleotide
gagcugguuucucaagguu

SEQ ID NO: 3051876 - RNA, 19 nt, Artificial Sequence
  Description of Artificial Sequence: Synthetic oligonucleotide
gaccgggcuccuccgccug

SEQ ID NO: 3051877 - RNA, 19 nt, Artificial Sequence
  Description of Artificial Sequence: Synthetic oligonucleotide
cgagcaguacaaccauugc

SEQ ID NO: 3051878 - RNA, 19 nt, Artificial Sequence
  Description of Artificial Sequence: Synthetic oligonucleotide
cuuucuugaccaggggugu

SEQ ID NO: 3051879 - RNA, 19 nt, Artificial Sequence
  Description of Artificial Sequence: Synthetic oligonucleotide
ccucacuuagcagcaggag

SEQ ID NO: 3051880 - RNA, 19 nt, Artificial Sequence
  Description of Artificial Sequence: Synthetic oligonucleotide
gucaugcucugaaaauacu

SEQ ID NO: 3051881 - RNA, 19 nt, Artificial Sequence
  Description of Artificial Sequence: Synthetic oligonucleotide
gcugcucuugugucuuuuc

SEQ ID NO: 3051882 - RNA, 19 nt, Artificial Sequence
  Description of Artificial Sequence: Synthetic oligonucleotide
ggucugaaucuccgagcuc

SEQ ID NO: 3051883 - RNA, 19 nt, Artificial Sequence
  Description of Artificial Sequence: Synthetic oligonucleotide
gccccuuccaggcuacaga

SEQ ID NO: 3051884 - RNA, 19 nt, Artificial Sequence
  Description of Artificial Sequence: Synthetic oligonucleotide
ggcuugggucugaaucucc

SEQ ID NO: 3051885 - RNA, 19 nt, Artificial Sequence
  Description of Artificial Sequence: Synthetic oligonucleotide
gcuccuccgccugucugcg

SEQ ID NO: 3051886 - RNA, 19 nt, Artificial Sequence
  Description of Artificial Sequence: Synthetic oligonucleotide
ggggugucagcugcucuug

SEQ ID NO: 3051887 - RNA, 19 nt, Artificial Sequence
  Description of Artificial Sequence: Synthetic oligonucleotide
gccugucugcgaaccaaag

SEQ ID NO: 3051888 - RNA, 19 nt, Artificial Sequence
  Description of Artificial Sequence: Synthetic oligonucleotide
agcugcucuugugucuuuu

SEQ ID NO: 3051889 - RNA, 19 nt, Artificial Sequence
  Description of Artificial Sequence: Synthetic oligonucleotide
cgccucacuuagcagcagg

SEQ ID NO: 3051890 - RNA, 19 nt, Artificial Sequence
  Description of Artificial Sequence: Synthetic oligonucleotide
uccgagcucuuggccuucu

SEQ ID NO: 3051891 - RNA, 19 nt, Artificial Sequence
  Description of Artificial Sequence: Synthetic oligonucleotide
gucugacgccucacuuagc

SEQ ID NO: 3051892 - RNA, 19 nt, Artificial Sequence
  Description of Artificial Sequence: Synthetic oligonucleotide
cgaaccaaagccccuucca

SEQ ID NO: 3051893 - RNA, 19 nt, Artificial Sequence
  Description of Artificial Sequence: Synthetic oligonucleotide
acgccucacuuagcagcag

SEQ ID NO: 3051894 - RNA, 19 nt, Artificial Sequence
  Description of Artificial Sequence: Synthetic oligonucleotide
gacugcugucugacgccuc

SEQ ID NO: 3051895 - RNA, 19 nt, Artificial Sequence
  Description of Artificial Sequence: Synthetic oligonucleotide
cugcugucugacgccucac

SEQ ID NO: 3051896 - RNA, 19 nt, Artificial Sequence
  Description of Artificial Sequence: Synthetic oligonucleotide
cuuccaggcuacagauggu

SEQ ID NO: 3051897 - RNA, 19 nt, Artificial Sequence
  Description of Artificial Sequence: Synthetic oligonucleotide
gccucacuuagcagcagga

SEQ ID NO: 3051898 - RNA, 19 nt, Artificial Sequence
  Description of Artificial Sequence: Synthetic oligonucleotide
gggcuccuccgccugucug

SEQ ID NO: 3051899 - RNA, 19 nt, Artificial Sequence
  Description of Artificial Sequence: Synthetic oligonucleotide
accgggcuccuccgccugu

SEQ ID NO: 3051900 - RNA, 19 nt, Artificial Sequence
  Description of Artificial Sequence: Synthetic oligonucleotide
ggggcagcuaggauaggaa

SEQ ID NO: 3051901 - RNA, 19 nt, Artificial Sequence
  Description of Artificial Sequence: Synthetic oligonucleotide
gcagaccgggcuccuccgc

SEQ ID NO: 3051902 - RNA, 19 nt, Artificial Sequence
  Description of Artificial Sequence: Synthetic oligonucleotide
aagccccuuccaggcuaca

SEQ ID NO: 3051903 - RNA, 19 nt, Artificial Sequence
  Description of Artificial Sequence: Synthetic oligonucleotide
cccuuccaggcuacagaug

SEQ ID NO: 3051904 - RNA, 19 nt, Artificial Sequence
  Description of Artificial Sequence: Synthetic oligonucleotide
gacgagcaguacaaccauu

SEQ ID NO: 3051905 - RNA, 19 nt, Artificial Sequence
  Description of Artificial Sequence: Synthetic oligonucleotide
guggggcagcuaggauagg

SEQ ID NO: 3051906 - RNA, 19 nt, Artificial Sequence
  Description of Artificial Sequence: Synthetic oligonucleotide
gcugucugacgccucacuu

SEQ ID NO: 3051907 - RNA, 19 nt, Artificial Sequence
  Description of Artificial Sequence: Synthetic oligonucleotide
agccuuggcuugggucuga

SEQ ID NO: 3051908 - RNA, 19 nt, Artificial Sequence
  Description of Artificial Sequence: Synthetic oligonucleotide
caggggugucagcugcucu

SEQ ID NO: 3051909 - RNA, 19 nt, Artificial Sequence
  Description of Artificial Sequence: Synthetic oligonucleotide
cuccgagcucuuggccuuc

SEQ ID NO: 3051910 - RNA, 19 nt, Artificial Sequence
  Description of Artificial Sequence: Synthetic oligonucleotide
ccaucaaguccuugccaua

SEQ ID NO: 3051911 - RNA, 19 nt, Artificial Sequence
  Description of Artificial Sequence: Synthetic oligonucleotide
gccgguggggcagcuagga

SEQ ID NO: 3051912 - RNA, 19 nt, Artificial Sequence
  Description of Artificial Sequence: Synthetic oligonucleotide
ggccgguggggcagcuagg

SEQ ID NO: 3051913 - RNA, 19 nt, Artificial Sequence
  Description of Artificial Sequence: Synthetic oligonucleotide
cgguggggcagcuaggaua

SEQ ID NO: 3051914 - RNA, 19 nt, Artificial Sequence
  Description of Artificial Sequence: Synthetic oligonucleotide
cagcuaggauaggaagacu

SEQ ID NO: 3051915 - RNA, 19 nt, Artificial Sequence
  Description of Artificial Sequence: Synthetic oligonucleotide
ccuugccauagucagucau

SEQ ID NO: 3051916 - RNA, 19 nt, Artificial Sequence
  Description of Artificial Sequence: Synthetic oligonucleotide
caaccauugcaagcagcuu

SEQ ID NO: 3051917 - RNA, 19 nt, Artificial Sequence
  Description of Artificial Sequence: Synthetic oligonucleotide
ccuccgccugucugcgaac

SEQ ID NO: 3051918 - RNA, 19 nt, Artificial Sequence
  Description of Artificial Sequence: Synthetic oligonucleotide
ccccuuccaggcuacagau

SEQ ID NO: 3051919 - RNA, 19 nt, Artificial Sequence
  Description of Artificial Sequence: Synthetic oligonucleotide
cuuugcagaccgggcuccu

SEQ ID NO: 3051920 - RNA, 19 nt, Artificial Sequence
  Description of Artificial Sequence: Synthetic oligonucleotide
cugcgaaccaaagccccuu

SEQ ID NO: 3051921 - RNA, 19 nt, Artificial Sequence
  Description of Artificial Sequence: Synthetic oligonucleotide
gggugucagcugcucuugu

SEQ ID NO: 3051922 - RNA, 19 nt, Artificial Sequence
  Description of Artificial Sequence: Synthetic oligonucleotide
cuccuccgccugucugcga

SEQ ID NO: 3051923 - RNA, 19 nt, Artificial Sequence
  Description of Artificial Sequence: Synthetic oligonucleotide
cugguuucucaagguucau

SEQ ID NO: 3051924 - RNA, 19 nt, Artificial Sequence
  Description of Artificial Sequence: Synthetic oligonucleotide
ccgagcucuuggccuucuc

SEQ ID NO: 3051925 - RNA, 19 nt, Artificial Sequence
  Description of Artificial Sequence: Synthetic oligonucleotide
ccaaagccccuuccaggcu

SEQ ID NO: 3051926 - RNA, 19 nt, Artificial Sequence
  Description of Artificial Sequence: Synthetic oligonucleotide
ccgccugucugcgaaccaa

SEQ ID NO: 3051927 - RNA, 19 nt, Artificial Sequence
  Description of Artificial Sequence: Synthetic oligonucleotide
cgccugucugcgaaccaaa

SEQ ID NO: 3051928 - RNA, 19 nt, Artificial Sequence
  Description of Artificial Sequence: Synthetic oligonucleotide
ccgggcuccuccgccuguc

SEQ ID NO: 3051929 - RNA, 19 nt, Artificial Sequence
  Description of Artificial Sequence: Synthetic oligonucleotide
cagcugcucuugugucuuu

SEQ ID NO: 3051930 - RNA, 19 nt, Artificial Sequence
  Description of Artificial Sequence: Synthetic oligonucleotide
ccuuggcuugggucugaau

SEQ ID NO: 3051931 - RNA, 19 nt, Artificial Sequence
  Description of Artificial Sequence: Synthetic oligonucleotide
ccauugcaagcagcuucau

SEQ ID NO: 3051932 - RNA, 19 nt, Artificial Sequence
  Description of Artificial Sequence: Synthetic oligonucleotide
ccgguggggcagcuaggau

SEQ ID NO: 3051933 - RNA, 19 nt, Artificial Sequence
  Description of Artificial Sequence: Synthetic oligonucleotide
cgggcuccuccgccugucu

SEQ ID NO: 3051934 - RNA, 19 nt, Artificial Sequence
  Description of Artificial Sequence: Synthetic oligonucleotide
uaauaaaccgcauuauugg

SEQ ID NO: 3051935 - RNA, 19 nt, Artificial Sequence
  Description of Artificial Sequence: Synthetic oligonucleotide
ugugaaaacugcuagaugu

SEQ ID NO: 3051936 - RNA, 19 nt, Artificial Sequence
  Description of Artificial Sequence: Synthetic oligonucleotide
aauaaaccgcauuauuggg

SEQ ID NO: 3051937 - RNA, 19 nt, Artificial Sequence
  Description of Artificial Sequence: Synthetic oligonucleotide
uguguagugacuuaauuug

SEQ ID NO: 3051938 - RNA, 19 nt, Artificial Sequence
  Description of Artificial Sequence: Synthetic oligonucleotide
auugcaacuuccuaaacuc

SEQ ID NO: 3051939 - RNA, 19 nt, Artificial Sequence
  Description of Artificial Sequence: Synthetic oligonucleotide
uguuacaauaauaaaccgc

SEQ ID NO: 3051940 - RNA, 19 nt, Artificial Sequence
  Description of Artificial Sequence: Synthetic oligonucleotide
uuugcuuugagcagcagcc

SEQ ID NO: 3051941 - RNA, 19 nt, Artificial Sequence
  Description of Artificial Sequence: Synthetic oligonucleotide
augucauucuuacagacgg

SEQ ID NO: 3051942 - RNA, 19 nt, Artificial Sequence
  Description of Artificial Sequence: Synthetic oligonucleotide
uguguaacaauccacugca

SEQ ID NO: 3051943 - RNA, 19 nt, Artificial Sequence
  Description of Artificial Sequence: Synthetic oligonucleotide
aauucuauggccugugugu

SEQ ID NO: 3051944 - RNA, 19 nt, Artificial Sequence
  Description of Artificial Sequence: Synthetic oligonucleotide
uaauuuuccucuuucaugu

SEQ ID NO: 3051945 - RNA, 19 nt, Artificial Sequence
  Description of Artificial Sequence: Synthetic oligonucleotide
aauugcaacuuccuaaacu

SEQ ID NO: 3051946 - RNA, 19 nt, Artificial Sequence
  Description of Artificial Sequence: Synthetic oligonucleotide
cagaaugucauucuuacag

SEQ ID NO: 3051947 - RNA, 19 nt, Artificial Sequence
  Description of Artificial Sequence: Synthetic oligonucleotide
uuugugaacauuucuguca

SEQ ID NO: 3051948 - RNA, 19 nt, Artificial Sequence
  Description of Artificial Sequence: Synthetic oligonucleotide
auugcaucuguguagugac

SEQ ID NO: 3051949 - RNA, 19 nt, Artificial Sequence
  Description of Artificial Sequence: Synthetic oligonucleotide
aauaauaaaccgcauuauu

SEQ ID NO: 3051950 - RNA, 19 nt, Artificial Sequence
  Description of Artificial Sequence: Synthetic oligonucleotide
aauugaucagccuuuccca

SEQ ID NO: 3051951 - RNA, 19 nt, Artificial Sequence
  Description of Artificial Sequence: Synthetic oligonucleotide
aaaacugucuccaagcacu

SEQ ID NO: 3051952 - RNA, 19 nt, Artificial Sequence
  Description of Artificial Sequence: Synthetic oligonucleotide
uguaacaauccacugcagc

SEQ ID NO: 3051953 - RNA, 19 nt, Artificial Sequence
  Description of Artificial Sequence: Synthetic oligonucleotide
ugaacauuucugucaaagg

SEQ ID NO: 3051954 - RNA, 19 nt, Artificial Sequence
  Description of Artificial Sequence: Synthetic oligonucleotide
aguguaauuuuccucuuuc

SEQ ID NO: 3051955 - RNA, 19 nt, Artificial Sequence
  Description of Artificial Sequence: Synthetic oligonucleotide
uugggguccaauucuaugg

SEQ ID NO: 3051956 - RNA, 19 nt, Artificial Sequence
  Description of Artificial Sequence: Synthetic oligonucleotide
ucuucagguacugaguugg

SEQ ID NO: 3051957 - RNA, 19 nt, Artificial Sequence
  Description of Artificial Sequence: Synthetic oligonucleotide
auaauaaaccgcauuauug

SEQ ID NO: 3051958 - RNA, 19 nt, Artificial Sequence
  Description of Artificial Sequence: Synthetic oligonucleotide
acaauaauaaaccgcauua

SEQ ID NO: 3051959 - RNA, 19 nt, Artificial Sequence
  Description of Artificial Sequence: Synthetic oligonucleotide
guuacaauaauaaaccgca

SEQ ID NO: 3051960 - RNA, 19 nt, Artificial Sequence
  Description of Artificial Sequence: Synthetic oligonucleotide
ccuguuacaauaauaaacc

SEQ ID NO: 3051961 - RNA, 19 nt, Artificial Sequence
  Description of Artificial Sequence: Synthetic oligonucleotide
uuaauuugcuuugagcagc

SEQ ID NO: 3051962 - RNA, 19 nt, Artificial Sequence
  Description of Artificial Sequence: Synthetic oligonucleotide
caauugaucagccuuuccc

SEQ ID NO: 3051963 - RNA, 19 nt, Artificial Sequence
  Description of Artificial Sequence: Synthetic oligonucleotide
guuggaaaggggcagaaug

SEQ ID NO: 3051964 - RNA, 19 nt, Artificial Sequence
  Description of Artificial Sequence: Synthetic oligonucleotide
auuuuccucuuucaugugg

SEQ ID NO: 3051965 - RNA, 19 nt, Artificial Sequence
  Description of Artificial Sequence: Synthetic oligonucleotide
guaauuuuccucuuucaug

SEQ ID NO: 3051966 - RNA, 19 nt, Artificial Sequence
  Description of Artificial Sequence: Synthetic oligonucleotide
agcaguguaauuuuccucu

SEQ ID NO: 3051967 - RNA, 19 nt, Artificial Sequence
  Description of Artificial Sequence: Synthetic oligonucleotide
auuauugggguccaauucu

SEQ ID NO: 3051968 - RNA, 19 nt, Artificial Sequence
  Description of Artificial Sequence: Synthetic oligonucleotide
cuuaauuugcuuugagcag

SEQ ID NO: 3051969 - RNA, 19 nt, Artificial Sequence
  Description of Artificial Sequence: Synthetic oligonucleotide
aaccgcauuauuggggucc

SEQ ID NO: 3051970 - RNA, 19 nt, Artificial Sequence
  Description of Artificial Sequence: Synthetic oligonucleotide
gacuuaauuugcuuugagc

SEQ ID NO: 3051971 - RNA, 19 nt, Artificial Sequence
  Description of Artificial Sequence: Synthetic oligonucleotide
uacugaguuggaaaggggc

SEQ ID NO: 3051972 - RNA, 19 nt, Artificial Sequence
  Description of Artificial Sequence: Synthetic oligonucleotide
aaaacugcuagauguguau

SEQ ID NO: 3051973 - RNA, 19 nt, Artificial Sequence
  Description of Artificial Sequence: Synthetic oligonucleotide
agauguguaucuucugaac

SEQ ID NO: 3051974 - RNA, 19 nt, Artificial Sequence
  Description of Artificial Sequence: Synthetic oligonucleotide
aaugucauucuuacagacg

SEQ ID NO: 3051975 - RNA, 19 nt, Artificial Sequence
  Description of Artificial Sequence: Synthetic oligonucleotide
agugacuuaauuugcuuug

SEQ ID NO: 3051976 - RNA, 19 nt, Artificial Sequence
  Description of Artificial Sequence: Synthetic oligonucleotide
uguaauuuuccucuuucau

SEQ ID NO: 3051977 - RNA, 19 nt, Artificial Sequence
  Description of Artificial Sequence: Synthetic oligonucleotide
uguuugugaacauuucugu

SEQ ID NO: 3051978 - RNA, 19 nt, Artificial Sequence
  Description of Artificial Sequence: Synthetic oligonucleotide
uucugaacugaucuuaaaa

SEQ ID NO: 3051979 - RNA, 19 nt, Artificial Sequence
  Description of Artificial Sequence: Synthetic oligonucleotide
cuguuacaauaauaaaccg

SEQ ID NO: 3051980 - RNA, 19 nt, Artificial Sequence
  Description of Artificial Sequence: Synthetic oligonucleotide
aacauuucugucaaaggcu

SEQ ID NO: 3051981 - RNA, 19 nt, Artificial Sequence
  Description of Artificial Sequence: Synthetic oligonucleotide
uguagugacuuaauuugcu

SEQ ID NO: 3051982 - RNA, 19 nt, Artificial Sequence
  Description of Artificial Sequence: Synthetic oligonucleotide
gaaugucauucuuacagac

SEQ ID NO: 3051983 - RNA, 19 nt, Artificial Sequence
  Description of Artificial Sequence: Synthetic oligonucleotide
aacugcuagauguguaucu

SEQ ID NO: 3051984 - RNA, 19 nt, Artificial Sequence
  Description of Artificial Sequence: Synthetic oligonucleotide
acuuccuaaacucucuugu

SEQ ID NO: 3051985 - RNA, 19 nt, Artificial Sequence
  Description of Artificial Sequence: Synthetic oligonucleotide
uccuaaacucucuuguuca

SEQ ID NO: 3051986 - RNA, 19 nt, Artificial Sequence
  Description of Artificial Sequence: Synthetic oligonucleotide
auugccuucaucuuucaau

SEQ ID NO: 3051987 - RNA, 19 nt, Artificial Sequence
  Description of Artificial Sequence: Synthetic oligonucleotide
ugaauugcaacuuccuaaa

SEQ ID NO: 3051988 - RNA, 19 nt, Artificial Sequence
  Description of Artificial Sequence: Synthetic oligonucleotide
cacaucuucagguacugag

SEQ ID NO: 3051989 - RNA, 19 nt, Artificial Sequence
  Description of Artificial Sequence: Synthetic oligonucleotide
uacaauaauaaaccgcauu

SEQ ID NO: 3051990 - RNA, 19 nt, Artificial Sequence
  Description of Artificial Sequence: Synthetic oligonucleotide
uaaaccgcauuauuggggu

SEQ ID NO: 3051991 - RNA, 19 nt, Artificial Sequence
  Description of Artificial Sequence: Synthetic oligonucleotide
ugagcagcagcccuguuac

SEQ ID NO: 3051992 - RNA, 19 nt, Artificial Sequence
  Description of Artificial Sequence: Synthetic oligonucleotide
guaacaauccacugcagca

SEQ ID NO: 3051993 - RNA, 19 nt, Artificial Sequence
  Description of Artificial Sequence: Synthetic oligonucleotide
auguguaucuucugaacug

SEQ ID NO: 3051994 - RNA, 19 nt, Artificial Sequence
  Description of Artificial Sequence: Synthetic oligonucleotide
uuacagacgguguuuguga

SEQ ID NO: 3051995 - RNA, 19 nt, Artificial Sequence
  Description of Artificial Sequence: Synthetic oligonucleotide
uuuuccucuuucauguggu

SEQ ID NO: 3051996 - RNA, 19 nt, Artificial Sequence
  Description of Artificial Sequence: Synthetic oligonucleotide
aacuuccuaaacucucuug

SEQ ID NO: 3051997 - RNA, 19 nt, Artificial Sequence
  Description of Artificial Sequence: Synthetic oligonucleotide
ugcuagauguguaucuucu

SEQ ID NO: 3051998 - RNA, 19 nt, Artificial Sequence
  Description of Artificial Sequence: Synthetic oligonucleotide
ugacuuaauuugcuuugag

SEQ ID NO: 3051999 - RNA, 19 nt, Artificial Sequence
  Description of Artificial Sequence: Synthetic oligonucleotide
ugcagcaguguaauuuucc

SEQ ID NO: 3052000 - RNA, 19 nt, Artificial Sequence
  Description of Artificial Sequence: Synthetic oligonucleotide
auaaaccgcauuauugggg

SEQ ID NO: 3052001 - RNA, 19 nt, Artificial Sequence
  Description of Artificial Sequence: Synthetic oligonucleotide
gugaacauuucugucaaag

SEQ ID NO: 3052002 - RNA, 19 nt, Artificial Sequence
  Description of Artificial Sequence: Synthetic oligonucleotide
uguguguaacaauccacug

SEQ ID NO: 3052003 - RNA, 19 nt, Artificial Sequence
  Description of Artificial Sequence: Synthetic oligonucleotide
aaggggcagaaugucauuc

SEQ ID NO: 3052004 - RNA, 19 nt, Artificial Sequence
  Description of Artificial Sequence: Synthetic oligonucleotide
agcacugaauugcaacuuc

SEQ ID NO: 3052005 - RNA, 19 nt, Artificial Sequence
  Description of Artificial Sequence: Synthetic oligonucleotide
uuccuaaacucucuuguuc

SEQ ID NO: 3052006 - RNA, 19 nt, Artificial Sequence
  Description of Artificial Sequence: Synthetic oligonucleotide
uugugaacauuucugucaa

SEQ ID NO: 3052007 - RNA, 19 nt, Artificial Sequence
  Description of Artificial Sequence: Synthetic oligonucleotide
guguguaacaauccacugc

SEQ ID NO: 3052008 - RNA, 19 nt, Artificial Sequence
  Description of Artificial Sequence: Synthetic oligonucleotide
aaacugcuagauguguauc

SEQ ID NO: 3052009 - RNA, 19 nt, Artificial Sequence
  Description of Artificial Sequence: Synthetic oligonucleotide
uuucaauugaucagccuuu

SEQ ID NO: 3052010 - RNA, 19 nt, Artificial Sequence
  Description of Artificial Sequence: Synthetic oligonucleotide
uaacaauccacugcagcag

SEQ ID NO: 3052011 - RNA, 19 nt, Artificial Sequence
  Description of Artificial Sequence: Synthetic oligonucleotide
aacaauccacugcagcagu

SEQ ID NO: 3052012 - RNA, 19 nt, Artificial Sequence
  Description of Artificial Sequence: Synthetic oligonucleotide
cauuauugggguccaauuc

SEQ ID NO: 3052013 - RNA, 19 nt, Artificial Sequence
  Description of Artificial Sequence: Synthetic oligonucleotide
agaaugucauucuuacaga

SEQ ID NO: 3052014 - RNA, 19 nt, Artificial Sequence
  Description of Artificial Sequence: Synthetic oligonucleotide
guaucuucugaacugaucu

SEQ ID NO: 3052015 - RNA, 19 nt, Artificial Sequence
  Description of Artificial Sequence: Synthetic oligonucleotide
gugguuauugccuucaucu

SEQ ID NO: 3052016 - RNA, 19 nt, Artificial Sequence
  Description of Artificial Sequence: Synthetic oligonucleotide
ugcaacuuccuaaacucuc

SEQ ID NO: 3052017 - RNA, 19 nt, Artificial Sequence
  Description of Artificial Sequence: Synthetic oligonucleotide
aauuuuccucuuucaugug

SEQ ID NO: 3052018 - RNA, 19 nt, Artificial Sequence
  Description of Artificial Sequence: Synthetic oligonucleotide
ucauucuuacagacggugu

SEQ ID NO: 3052019 - RNA, 19 nt, Artificial Sequence
  Description of Artificial Sequence: Synthetic oligonucleotide
cccuguuacaauaauaaac

SEQ ID NO: 3052020 - RNA, 19 nt, Artificial Sequence
  Description of Artificial Sequence: Synthetic oligonucleotide
uguaucuucugaacugauc

SEQ ID NO: 3052021 - RNA, 19 nt, Artificial Sequence
  Description of Artificial Sequence: Synthetic oligonucleotide
uaauuugcuuugagcagca

SEQ ID NO: 3052022 - RNA, 19 nt, Artificial Sequence
  Description of Artificial Sequence: Synthetic oligonucleotide
aucuuucaauugaucagcc

SEQ ID NO: 3052023 - RNA, 19 nt, Artificial Sequence
  Description of Artificial Sequence: Synthetic oligonucleotide
ucaauugaucagccuuucc

SEQ ID NO: 3052024 - RNA, 19 nt, Artificial Sequence
  Description of Artificial Sequence: Synthetic oligonucleotide
aggcugugaaaacugcuag

SEQ ID NO: 3052025 - RNA, 19 nt, Artificial Sequence
  Description of Artificial Sequence: Synthetic oligonucleotide
uagauguguaucuucugaa

SEQ ID NO: 3052026 - RNA, 19 nt, Artificial Sequence
  Description of Artificial Sequence: Synthetic oligonucleotide
uguguaucuucugaacuga

SEQ ID NO: 3052027 - RNA, 19 nt, Artificial Sequence
  Description of Artificial Sequence: Synthetic oligonucleotide
uggccuguguguaacaauc

SEQ ID NO: 3052028 - RNA, 19 nt, Artificial Sequence
  Description of Artificial Sequence: Synthetic oligonucleotide
gauguguaucuucugaacu

SEQ ID NO: 3052029 - RNA, 19 nt, Artificial Sequence
  Description of Artificial Sequence: Synthetic oligonucleotide
cugaauugcaacuuccuaa

SEQ ID NO: 3052030 - RNA, 19 nt, Artificial Sequence
  Description of Artificial Sequence: Synthetic oligonucleotide
auugggguccaauucuaug

SEQ ID NO: 3052031 - RNA, 19 nt, Artificial Sequence
  Description of Artificial Sequence: Synthetic oligonucleotide
guguuugugaacauuucug

SEQ ID NO: 3052032 - RNA, 19 nt, Artificial Sequence
  Description of Artificial Sequence: Synthetic oligonucleotide
ucuguguagugacuuaauu

SEQ ID NO: 3052033 - RNA, 19 nt, Artificial Sequence
  Description of Artificial Sequence: Synthetic oligonucleotide
ugaaaacugcuagaugugu

SEQ ID NO: 3052034 - RNA, 19 nt, Artificial Sequence
  Description of Artificial Sequence: Synthetic oligonucleotide
uccucuuucaugugguuau

SEQ ID NO: 3052035 - RNA, 19 nt, Artificial Sequence
  Description of Artificial Sequence: Synthetic oligonucleotide
gguacugaguuggaaaggg

SEQ ID NO: 3052036 - RNA, 19 nt, Artificial Sequence
  Description of Artificial Sequence: Synthetic oligonucleotide
ugggguccaauucuauggc

SEQ ID NO: 3052037 - RNA, 19 nt, Artificial Sequence
  Description of Artificial Sequence: Synthetic oligonucleotide
caauucuauggccugugug

SEQ ID NO: 3052038 - RNA, 19 nt, Artificial Sequence
  Description of Artificial Sequence: Synthetic oligonucleotide
cuagauguguaucuucuga

SEQ ID NO: 3052039 - RNA, 19 nt, Artificial Sequence
  Description of Artificial Sequence: Synthetic oligonucleotide
aaaccgcauuauugggguc

SEQ ID NO: 3052040 - RNA, 19 nt, Artificial Sequence
  Description of Artificial Sequence: Synthetic oligonucleotide
uagugacuuaauuugcuuu

SEQ ID NO: 3052041 - RNA, 19 nt, Artificial Sequence
  Description of Artificial Sequence: Synthetic oligonucleotide
uugccuucaucuuucaauu

SEQ ID NO: 3052042 - RNA, 19 nt, Artificial Sequence
  Description of Artificial Sequence: Synthetic oligonucleotide
guuugugaacauuucuguc

SEQ ID NO: 3052043 - RNA, 19 nt, Artificial Sequence
  Description of Artificial Sequence: Synthetic oligonucleotide
acagacgguguuugugaac

SEQ ID NO: 3052044 - RNA, 19 nt, Artificial Sequence
  Description of Artificial Sequence: Synthetic oligonucleotide
ucuuucaauugaucagccu

SEQ ID NO: 3052045 - RNA, 19 nt, Artificial Sequence
  Description of Artificial Sequence: Synthetic oligonucleotide
auuucugucaaaggcugug

SEQ ID NO: 3052046 - RNA, 19 nt, Artificial Sequence
  Description of Artificial Sequence: Synthetic oligonucleotide
ugugguuauugccuucauc

SEQ ID NO: 3052047 - RNA, 19 nt, Artificial Sequence
  Description of Artificial Sequence: Synthetic oligonucleotide
acauuucugucaaaggcug

SEQ ID NO: 3052048 - RNA, 19 nt, Artificial Sequence
  Description of Artificial Sequence: Synthetic oligonucleotide
ucugucaaaggcugugaaa

SEQ ID NO: 3052049 - RNA, 19 nt, Artificial Sequence
  Description of Artificial Sequence: Synthetic oligonucleotide
cuuacagacgguguuugug

SEQ ID NO: 3052050 - RNA, 19 nt, Artificial Sequence
  Description of Artificial Sequence: Synthetic oligonucleotide
gucauucuuacagacggug

SEQ ID NO: 3052051 - RNA, 19 nt, Artificial Sequence
  Description of Artificial Sequence: Synthetic oligonucleotide
aaaggcugugaaaacugcu

SEQ ID NO: 3052052 - RNA, 19 nt, Artificial Sequence
  Description of Artificial Sequence: Synthetic oligonucleotide
acugucuccaagcacugaa

SEQ ID NO: 3052053 - RNA, 19 nt, Artificial Sequence
  Description of Artificial Sequence: Synthetic oligonucleotide
ugucaaaggcugugaaaac

SEQ ID NO: 3052054 - RNA, 19 nt, Artificial Sequence
  Description of Artificial Sequence: Synthetic oligonucleotide
uucuuacagacgguguuug

SEQ ID NO: 3052055 - RNA, 19 nt, Artificial Sequence
  Description of Artificial Sequence: Synthetic oligonucleotide
uugcaacuuccuaaacucu

SEQ ID NO: 3052056 - RNA, 19 nt, Artificial Sequence
  Description of Artificial Sequence: Synthetic oligonucleotide
uaccucauugcaucugugu

SEQ ID NO: 3052057 - RNA, 19 nt, Artificial Sequence
  Description of Artificial Sequence: Synthetic oligonucleotide
ugaucagccuuucccacau

SEQ ID NO: 3052058 - RNA, 19 nt, Artificial Sequence
  Description of Artificial Sequence: Synthetic oligonucleotide
ggcagaaugucauucuuac

SEQ ID NO: 3052059 - RNA, 19 nt, Artificial Sequence
  Description of Artificial Sequence: Synthetic oligonucleotide
uuauugggguccaauucua

SEQ ID NO: 3052060 - RNA, 19 nt, Artificial Sequence
  Description of Artificial Sequence: Synthetic oligonucleotide
uccccuaccucauugcauc

SEQ ID NO: 3052061 - RNA, 19 nt, Artificial Sequence
  Description of Artificial Sequence: Synthetic oligonucleotide
ugucuccaagcacugaauu

SEQ ID NO: 3052062 - RNA, 19 nt, Artificial Sequence
  Description of Artificial Sequence: Synthetic oligonucleotide
uugagcagcagcccuguua

SEQ ID NO: 3052063 - RNA, 19 nt, Artificial Sequence
  Description of Artificial Sequence: Synthetic oligonucleotide
acugaauugcaacuuccua

SEQ ID NO: 3052064 - RNA, 19 nt, Artificial Sequence
  Description of Artificial Sequence: Synthetic oligonucleotide
uucccacaucuucagguac

SEQ ID NO: 3052065 - RNA, 19 nt, Artificial Sequence
  Description of Artificial Sequence: Synthetic oligonucleotide
gaauugcaacuuccuaaac

SEQ ID NO: 3052066 - RNA, 19 nt, Artificial Sequence
  Description of Artificial Sequence: Synthetic oligonucleotide
uguccccuaccucauugca

SEQ ID NO: 3052067 - RNA, 19 nt, Artificial Sequence
  Description of Artificial Sequence: Synthetic oligonucleotide
agcccuguuacaauaauaa

SEQ ID NO: 3052068 - RNA, 19 nt, Artificial Sequence
  Description of Artificial Sequence: Synthetic oligonucleotide
cugucaaaggcugugaaaa

SEQ ID NO: 3052069 - RNA, 19 nt, Artificial Sequence
  Description of Artificial Sequence: Synthetic oligonucleotide
ucccacaucuucagguacu

SEQ ID NO: 3052070 - RNA, 19 nt, Artificial Sequence
  Description of Artificial Sequence: Synthetic oligonucleotide
uucaugugguuauugccuu

SEQ ID NO: 3052071 - RNA, 19 nt, Artificial Sequence
  Description of Artificial Sequence: Synthetic oligonucleotide
ugucauucuuacagacggu

SEQ ID NO: 3052072 - RNA, 19 nt, Artificial Sequence
  Description of Artificial Sequence: Synthetic oligonucleotide
uuucccacaucuucaggua

SEQ ID NO: 3052073 - RNA, 19 nt, Artificial Sequence
  Description of Artificial Sequence: Synthetic oligonucleotide
guguagugacuuaauuugc

SEQ ID NO: 3052074 - RNA, 19 nt, Artificial Sequence
  Description of Artificial Sequence: Synthetic oligonucleotide
uuucugucaaaggcuguga

SEQ ID NO: 3052075 - RNA, 19 nt, Artificial Sequence
  Description of Artificial Sequence: Synthetic oligonucleotide
cugugaaaacugcuagaug

SEQ ID NO: 3052076 - RNA, 19 nt, Artificial Sequence
  Description of Artificial Sequence: Synthetic oligonucleotide
accucauugcaucugugua

SEQ ID NO: 3052077 - RNA, 19 nt, Artificial Sequence
  Description of Artificial Sequence: Synthetic oligonucleotide
agguacugaguuggaaagg

SEQ ID NO: 3052078 - RNA, 19 nt, Artificial Sequence
  Description of Artificial Sequence: Synthetic oligonucleotide
gugaaaacugcuagaugug

SEQ ID NO: 3052079 - RNA, 19 nt, Artificial Sequence
  Description of Artificial Sequence: Synthetic oligonucleotide
cuuucaauugaucagccuu

SEQ ID NO: 3052080 - RNA, 19 nt, Artificial Sequence
  Description of Artificial Sequence: Synthetic oligonucleotide
cugaguuggaaaggggcag

SEQ ID NO: 3052081 - RNA, 19 nt, Artificial Sequence
  Description of Artificial Sequence: Synthetic oligonucleotide
aaggcugugaaaacugcua

SEQ ID NO: 3052082 - RNA, 19 nt, Artificial Sequence
  Description of Artificial Sequence: Synthetic oligonucleotide
uccacugcagcaguguaau

SEQ ID NO: 3052083 - RNA, 19 nt, Artificial Sequence
  Description of Artificial Sequence: Synthetic oligonucleotide
acugaguuggaaaggggca

SEQ ID NO: 3052084 - RNA, 19 nt, Artificial Sequence
  Description of Artificial Sequence: Synthetic oligonucleotide
uauugggguccaauucuau

SEQ ID NO: 3052085 - RNA, 19 nt, Artificial Sequence
  Description of Artificial Sequence: Synthetic oligonucleotide
ugccuucaucuuucaauug

SEQ ID NO: 3052086 - RNA, 19 nt, Artificial Sequence
  Description of Artificial Sequence: Synthetic oligonucleotide
aaacugucuccaagcacug

SEQ ID NO: 3052087 - RNA, 19 nt, Artificial Sequence
  Description of Artificial Sequence: Synthetic oligonucleotide
guacugaguuggaaagggg

SEQ ID NO: 3052088 - RNA, 19 nt, Artificial Sequence
  Description of Artificial Sequence: Synthetic oligonucleotide
uauugccuucaucuuucaa

SEQ ID NO: 3052089 - RNA, 19 nt, Artificial Sequence
  Description of Artificial Sequence: Synthetic oligonucleotide
ucuuacagacgguguuugu

SEQ ID NO: 3052090 - RNA, 19 nt, Artificial Sequence
  Description of Artificial Sequence: Synthetic oligonucleotide
uaucuucugaacugaucuu

SEQ ID NO: 3052091 - RNA, 19 nt, Artificial Sequence
  Description of Artificial Sequence: Synthetic oligonucleotide
ccaagcacugaauugcaac

SEQ ID NO: 3052092 - RNA, 19 nt, Artificial Sequence
  Description of Artificial Sequence: Synthetic oligonucleotide
uuauugccuucaucuuuca

SEQ ID NO: 3052093 - RNA, 19 nt, Artificial Sequence
  Description of Artificial Sequence: Synthetic oligonucleotide
cagccuuucccacaucuuc

SEQ ID NO: 3052094 - RNA, 19 nt, Artificial Sequence
  Description of Artificial Sequence: Synthetic oligonucleotide
aaaggggcagaaugucauu

SEQ ID NO: 3052095 - RNA, 19 nt, Artificial Sequence
  Description of Artificial Sequence: Synthetic oligonucleotide
uacagacgguguuugugaa

SEQ ID NO: 3052096 - RNA, 19 nt, Artificial Sequence
  Description of Artificial Sequence: Synthetic oligonucleotide
aauuugcuuugagcagcag

SEQ ID NO: 3052097 - RNA, 19 nt, Artificial Sequence
  Description of Artificial Sequence: Synthetic oligonucleotide
ugcaucuguguagugacuu

SEQ ID NO: 3052098 - RNA, 19 nt, Artificial Sequence
  Description of Artificial Sequence: Synthetic oligonucleotide
uggaaaggggcagaauguc

SEQ ID NO: 3052099 - RNA, 19 nt, Artificial Sequence
  Description of Artificial Sequence: Synthetic oligonucleotide
ugaguuggaaaggggcaga

SEQ ID NO: 3052100 - RNA, 19 nt, Artificial Sequence
  Description of Artificial Sequence: Synthetic oligonucleotide
uucaauugaucagccuuuc

SEQ ID NO: 3052101 - RNA, 19 nt, Artificial Sequence
  Description of Artificial Sequence: Synthetic oligonucleotide
cuguguguaacaauccacu

SEQ ID NO: 3052102 - RNA, 19 nt, Artificial Sequence
  Description of Artificial Sequence: Synthetic oligonucleotide
acaucuucagguacugagu

SEQ ID NO: 3052103 - RNA, 19 nt, Artificial Sequence
  Description of Artificial Sequence: Synthetic oligonucleotide
uccaagcacugaauugcaa

SEQ ID NO: 3052104 - RNA, 19 nt, Artificial Sequence
  Description of Artificial Sequence: Synthetic oligonucleotide
cagacgguguuugugaaca

SEQ ID NO: 3052105 - RNA, 19 nt, Artificial Sequence
  Description of Artificial Sequence: Synthetic oligonucleotide
cugcuagauguguaucuuc

SEQ ID NO: 3052106 - RNA, 19 nt, Artificial Sequence
  Description of Artificial Sequence: Synthetic oligonucleotide
aagcacugaauugcaacuu

SEQ ID NO: 3052107 - RNA, 19 nt, Artificial Sequence
  Description of Artificial Sequence: Synthetic oligonucleotide
gaaaacugcuagaugugua

SEQ ID NO: 3052108 - RNA, 19 nt, Artificial Sequence
  Description of Artificial Sequence: Synthetic oligonucleotide
uauggccuguguguaacaa

SEQ ID NO: 3052109 - RNA, 19 nt, Artificial Sequence
  Description of Artificial Sequence: Synthetic oligonucleotide
ccuguguguaacaauccac

SEQ ID NO: 3052110 - RNA, 19 nt, Artificial Sequence
  Description of Artificial Sequence: Synthetic oligonucleotide
cucuuucaugugguuauug

SEQ ID NO: 3052111 - RNA, 19 nt, Artificial Sequence
  Description of Artificial Sequence: Synthetic oligonucleotide
caagcacugaauugcaacu

SEQ ID NO: 3052112 - RNA, 19 nt, Artificial Sequence
  Description of Artificial Sequence: Synthetic oligonucleotide
uucagguacugaguuggaa

SEQ ID NO: 3052113 - RNA, 19 nt, Artificial Sequence
  Description of Artificial Sequence: Synthetic oligonucleotide
ucauugcaucuguguagug

SEQ ID NO: 3052114 - RNA, 19 nt, Artificial Sequence
  Description of Artificial Sequence: Synthetic oligonucleotide
ucaugugguuauugccuuc

SEQ ID NO: 3052115 - RNA, 19 nt, Artificial Sequence
  Description of Artificial Sequence: Synthetic oligonucleotide
uugcuuugagcagcagccc

SEQ ID NO: 3052116 - RNA, 19 nt, Artificial Sequence
  Description of Artificial Sequence: Synthetic oligonucleotide
uugcaucuguguagugacu

SEQ ID NO: 3052117 - RNA, 19 nt, Artificial Sequence
  Description of Artificial Sequence: Synthetic oligonucleotide
uuccucuuucaugugguua

SEQ ID NO: 3052118 - RNA, 19 nt, Artificial Sequence
  Description of Artificial Sequence: Synthetic oligonucleotide
gccuucaucuuucaauuga

SEQ ID NO: 3052119 - RNA, 19 nt, Artificial Sequence
  Description of Artificial Sequence: Synthetic oligonucleotide
gguccaauucuauggccug

SEQ ID NO: 3052120 - RNA, 19 nt, Artificial Sequence
  Description of Artificial Sequence: Synthetic oligonucleotide
auucuuacagacgguguuu

SEQ ID NO: 3052121 - RNA, 19 nt, Artificial Sequence
  Description of Artificial Sequence: Synthetic oligonucleotide
cuaccucauugcaucugug

SEQ ID NO: 3052122 - RNA, 19 nt, Artificial Sequence
  Description of Artificial Sequence: Synthetic oligonucleotide
cuguguagugacuuaauuu

SEQ ID NO: 3052123 - RNA, 19 nt, Artificial Sequence
  Description of Artificial Sequence: Synthetic oligonucleotide
agcagcagcccuguuacaa

SEQ ID NO: 3052124 - RNA, 19 nt, Artificial Sequence
  Description of Artificial Sequence: Synthetic oligonucleotide
ugugaacauuucugucaaa

SEQ ID NO: 3052125 - RNA, 19 nt, Artificial Sequence
  Description of Artificial Sequence: Synthetic oligonucleotide
gaaaggggcagaaugucau

SEQ ID NO: 3052126 - RNA, 19 nt, Artificial Sequence
  Description of Artificial Sequence: Synthetic oligonucleotide
acgguguuugugaacauuu

SEQ ID NO: 3052127 - RNA, 19 nt, Artificial Sequence
  Description of Artificial Sequence: Synthetic oligonucleotide
gguguuugugaacauuucu

SEQ ID NO: 3052128 - RNA, 19 nt, Artificial Sequence
  Description of Artificial Sequence: Synthetic oligonucleotide
gucaaaggcugugaaaacu

SEQ ID NO: 3052129 - RNA, 19 nt, Artificial Sequence
  Description of Artificial Sequence: Synthetic oligonucleotide
auggccuguguguaacaau

SEQ ID NO: 3052130 - RNA, 19 nt, Artificial Sequence
  Description of Artificial Sequence: Synthetic oligonucleotide
gcuagauguguaucuucug

SEQ ID NO: 3052131 - RNA, 19 nt, Artificial Sequence
  Description of Artificial Sequence: Synthetic oligonucleotide
caugugguuauugccuuca

SEQ ID NO: 3052132 - RNA, 19 nt, Artificial Sequence
  Description of Artificial Sequence: Synthetic oligonucleotide
auucuauggccugugugua

SEQ ID NO: 3052133 - RNA, 19 nt, Artificial Sequence
  Description of Artificial Sequence: Synthetic oligonucleotide
acugcuagauguguaucuu

SEQ ID NO: 3052134 - RNA, 19 nt, Artificial Sequence
  Description of Artificial Sequence: Synthetic oligonucleotide
gugacuuaauuugcuuuga

SEQ ID NO: 3052135 - RNA, 19 nt, Artificial Sequence
  Description of Artificial Sequence: Synthetic oligonucleotide
agccuuucccacaucuuca

SEQ ID NO: 3052136 - RNA, 19 nt, Artificial Sequence
  Description of Artificial Sequence: Synthetic oligonucleotide
aacugucuccaagcacuga

SEQ ID NO: 3052137 - RNA, 19 nt, Artificial Sequence
  Description of Artificial Sequence: Synthetic oligonucleotide
uuuccucuuucaugugguu

SEQ ID NO: 3052138 - RNA, 19 nt, Artificial Sequence
  Description of Artificial Sequence: Synthetic oligonucleotide
gcuguccccuaccucauug

SEQ ID NO: 3052139 - RNA, 19 nt, Artificial Sequence
  Description of Artificial Sequence: Synthetic oligonucleotide
cuccaagcacugaauugca

SEQ ID NO: 3052140 - RNA, 19 nt, Artificial Sequence
  Description of Artificial Sequence: Synthetic oligonucleotide
gcacugaauugcaacuucc

SEQ ID NO: 3052141 - RNA, 19 nt, Artificial Sequence
  Description of Artificial Sequence: Synthetic oligonucleotide
cugcagcaguguaauuuuc

SEQ ID NO: 3052142 - RNA, 19 nt, Artificial Sequence
  Description of Artificial Sequence: Synthetic oligonucleotide
gggguccaauucuauggcc

SEQ ID NO: 3052143 - RNA, 19 nt, Artificial Sequence
  Description of Artificial Sequence: Synthetic oligonucleotide
guguaacaauccacugcag

SEQ ID NO: 3052144 - RNA, 19 nt, Artificial Sequence
  Description of Artificial Sequence: Synthetic oligonucleotide
acaauccacugcagcagug

SEQ ID NO: 3052145 - RNA, 19 nt, Artificial Sequence
  Description of Artificial Sequence: Synthetic oligonucleotide
guagugacuuaauuugcuu

SEQ ID NO: 3052146 - RNA, 19 nt, Artificial Sequence
  Description of Artificial Sequence: Synthetic oligonucleotide
gccuuucccacaucuucag

SEQ ID NO: 3052147 - RNA, 19 nt, Artificial Sequence
  Description of Artificial Sequence: Synthetic oligonucleotide
caauaauaaaccgcauuau

SEQ ID NO: 3052148 - RNA, 19 nt, Artificial Sequence
  Description of Artificial Sequence: Synthetic oligonucleotide
ggcugugaaaacugcuaga

SEQ ID NO: 3052149 - RNA, 19 nt, Artificial Sequence
  Description of Artificial Sequence: Synthetic oligonucleotide
caucuguguagugacuuaa

SEQ ID NO: 3052150 - RNA, 19 nt, Artificial Sequence
  Description of Artificial Sequence: Synthetic oligonucleotide
cauucuuacagacgguguu

SEQ ID NO: 3052151 - RNA, 19 nt, Artificial Sequence
  Description of Artificial Sequence: Synthetic oligonucleotide
cacugaauugcaacuuccu

SEQ ID NO: 3052152 - RNA, 19 nt, Artificial Sequence
  Description of Artificial Sequence: Synthetic oligonucleotide
ggaaaggggcagaauguca

SEQ ID NO: 3052153 - RNA, 19 nt, Artificial Sequence
  Description of Artificial Sequence: Synthetic oligonucleotide
cucauugcaucuguguagu

SEQ ID NO: 3052154 - RNA, 19 nt, Artificial Sequence
  Description of Artificial Sequence: Synthetic oligonucleotide
gguuauugccuucaucuuu

SEQ ID NO: 3052155 - RNA, 19 nt, Artificial Sequence
  Description of Artificial Sequence: Synthetic oligonucleotide
augugguuauugccuucau

SEQ ID NO: 3052156 - RNA, 19 nt, Artificial Sequence
  Description of Artificial Sequence: Synthetic oligonucleotide
caucuucagguacugaguu

SEQ ID NO: 3052157 - RNA, 19 nt, Artificial Sequence
  Description of Artificial Sequence: Synthetic oligonucleotide
aguuggaaaggggcagaau

SEQ ID NO: 3052158 - RNA, 19 nt, Artificial Sequence
  Description of Artificial Sequence: Synthetic oligonucleotide
gaguuggaaaggggcagaa

SEQ ID NO: 3052159 - RNA, 19 nt, Artificial Sequence
  Description of Artificial Sequence: Synthetic oligonucleotide
gcagaaugucauucuuaca

SEQ ID NO: 3052160 - RNA, 19 nt, Artificial Sequence
  Description of Artificial Sequence: Synthetic oligonucleotide
ccuuucccacaucuucagg

SEQ ID NO: 3052161 - RNA, 19 nt, Artificial Sequence
  Description of Artificial Sequence: Synthetic oligonucleotide
cagcccuguuacaauaaua

SEQ ID NO: 3052162 - RNA, 19 nt, Artificial Sequence
  Description of Artificial Sequence: Synthetic oligonucleotide
cuauggccuguguguaaca

SEQ ID NO: 3052163 - RNA, 19 nt, Artificial Sequence
  Description of Artificial Sequence: Synthetic oligonucleotide
cuucagguacugaguugga

SEQ ID NO: 3052164 - RNA, 19 nt, Artificial Sequence
  Description of Artificial Sequence: Synthetic oligonucleotide
agacgguguuugugaacau

SEQ ID NO: 3052165 - RNA, 19 nt, Artificial Sequence
  Description of Artificial Sequence: Synthetic oligonucleotide
gcuuugagcagcagcccug

SEQ ID NO: 3052166 - RNA, 19 nt, Artificial Sequence
  Description of Artificial Sequence: Synthetic oligonucleotide
gcagcaguguaauuuuccu

SEQ ID NO: 3052167 - RNA, 19 nt, Artificial Sequence
  Description of Artificial Sequence: Synthetic oligonucleotide
accgcauuauuggggucca

SEQ ID NO: 3052168 - RNA, 19 nt, Artificial Sequence
  Description of Artificial Sequence: Synthetic oligonucleotide
uuugagcagcagcccuguu

SEQ ID NO: 3052169 - RNA, 19 nt, Artificial Sequence
  Description of Artificial Sequence: Synthetic oligonucleotide
auccacugcagcaguguaa

SEQ ID NO: 3052170 - RNA, 19 nt, Artificial Sequence
  Description of Artificial Sequence: Synthetic oligonucleotide
ggccuguguguaacaaucc

SEQ ID NO: 3052171 - RNA, 19 nt, Artificial Sequence
  Description of Artificial Sequence: Synthetic oligonucleotide
gcugugaaaacugcuagau

SEQ ID NO: 3052172 - RNA, 19 nt, Artificial Sequence
  Description of Artificial Sequence: Synthetic oligonucleotide
cuuccuaaacucucuuguu

SEQ ID NO: 3052173 - RNA, 19 nt, Artificial Sequence
  Description of Artificial Sequence: Synthetic oligonucleotide
gaucagccuuucccacauc

SEQ ID NO: 3052174 - RNA, 19 nt, Artificial Sequence
  Description of Artificial Sequence: Synthetic oligonucleotide
cauuucugucaaaggcugu

SEQ ID NO: 3052175 - RNA, 19 nt, Artificial Sequence
  Description of Artificial Sequence: Synthetic oligonucleotide
agcagcccuguuacaauaa

SEQ ID NO: 3052176 - RNA, 19 nt, Artificial Sequence
  Description of Artificial Sequence: Synthetic oligonucleotide
cacugcagcaguguaauuu

SEQ ID NO: 3052177 - RNA, 19 nt, Artificial Sequence
  Description of Artificial Sequence: Synthetic oligonucleotide
cagcagcccuguuacaaua

SEQ ID NO: 3052178 - RNA, 19 nt, Artificial Sequence
  Description of Artificial Sequence: Synthetic oligonucleotide
gcccuguuacaauaauaaa

SEQ ID NO: 3052179 - RNA, 19 nt, Artificial Sequence
  Description of Artificial Sequence: Synthetic oligonucleotide
gcauuauugggguccaauu

SEQ ID NO: 3052180 - RNA, 19 nt, Artificial Sequence
  Description of Artificial Sequence: Synthetic oligonucleotide
ugcuguccccuaccucauu

SEQ ID NO: 3052181 - RNA, 19 nt, Artificial Sequence
  Description of Artificial Sequence: Synthetic oligonucleotide
ggguccaauucuauggccu

SEQ ID NO: 3052182 - RNA, 19 nt, Artificial Sequence
  Description of Artificial Sequence: Synthetic oligonucleotide
caauccacugcagcagugu

SEQ ID NO: 3052183 - RNA, 19 nt, Artificial Sequence
  Description of Artificial Sequence: Synthetic oligonucleotide
gacgguguuugugaacauu

SEQ ID NO: 3052184 - RNA, 19 nt, Artificial Sequence
  Description of Artificial Sequence: Synthetic oligonucleotide
gcaacuuccuaaacucucu

SEQ ID NO: 3052185 - RNA, 19 nt, Artificial Sequence
  Description of Artificial Sequence: Synthetic oligonucleotide
cugucuccaagcacugaau

SEQ ID NO: 3052186 - RNA, 19 nt, Artificial Sequence
  Description of Artificial Sequence: Synthetic oligonucleotide
cuuugagcagcagcccugu

SEQ ID NO: 3052187 - RNA, 19 nt, Artificial Sequence
  Description of Artificial Sequence: Synthetic oligonucleotide
gcaucuguguagugacuua

SEQ ID NO: 3052188 - RNA, 19 nt, Artificial Sequence
  Description of Artificial Sequence: Synthetic oligonucleotide
cccacaucuucagguacug

SEQ ID NO: 3052189 - RNA, 19 nt, Artificial Sequence
  Description of Artificial Sequence: Synthetic oligonucleotide
caacuuccuaaacucucuu

SEQ ID NO: 3052190 - RNA, 19 nt, Artificial Sequence
  Description of Artificial Sequence: Synthetic oligonucleotide
gggcagaaugucauucuua

SEQ ID NO: 3052191 - RNA, 19 nt, Artificial Sequence
  Description of Artificial Sequence: Synthetic oligonucleotide
guccaauucuauggccugu

SEQ ID NO: 3052192 - RNA, 19 nt, Artificial Sequence
  Description of Artificial Sequence: Synthetic oligonucleotide
cgguguuugugaacauuuc

SEQ ID NO: 3052193 - RNA, 19 nt, Artificial Sequence
  Description of Artificial Sequence: Synthetic oligonucleotide
caguguaauuuuccucuuu

SEQ ID NO: 3052194 - RNA, 19 nt, Artificial Sequence
  Description of Artificial Sequence: Synthetic oligonucleotide
ccuaccucauugcaucugu

SEQ ID NO: 3052195 - RNA, 19 nt, Artificial Sequence
  Description of Artificial Sequence: Synthetic oligonucleotide
cccuaccucauugcaucug

SEQ ID NO: 3052196 - RNA, 19 nt, Artificial Sequence
  Description of Artificial Sequence: Synthetic oligonucleotide
ggggcagaaugucauucuu

SEQ ID NO: 3052197 - RNA, 19 nt, Artificial Sequence
  Description of Artificial Sequence: Synthetic oligonucleotide
guccccuaccucauugcau

SEQ ID NO: 3052198 - RNA, 19 nt, Artificial Sequence
  Description of Artificial Sequence: Synthetic oligonucleotide
gcagcagcccuguuacaau

SEQ ID NO: 3052199 - RNA, 19 nt, Artificial Sequence
  Description of Artificial Sequence: Synthetic oligonucleotide
gcaguguaauuuuccucuu

SEQ ID NO: 3052200 - RNA, 19 nt, Artificial Sequence
  Description of Artificial Sequence: Synthetic oligonucleotide
ccuaaacucucuuguucau

SEQ ID NO: 3052201 - RNA, 19 nt, Artificial Sequence
  Description of Artificial Sequence: Synthetic oligonucleotide
gcagcccuguuacaauaau

SEQ ID NO: 3052202 - RNA, 19 nt, Artificial Sequence
  Description of Artificial Sequence: Synthetic oligonucleotide
ccaauucuauggccugugu

SEQ ID NO: 3052203 - RNA, 19 nt, Artificial Sequence
  Description of Artificial Sequence: Synthetic oligonucleotide
ccacaucuucagguacuga

SEQ ID NO: 3052204 - RNA, 19 nt, Artificial Sequence
  Description of Artificial Sequence: Synthetic oligonucleotide
gugcuguccccuaccucau

SEQ ID NO: 3052205 - RNA, 19 nt, Artificial Sequence
  Description of Artificial Sequence: Synthetic oligonucleotide
cgcauuauugggguccaau

SEQ ID NO: 3052206 - RNA, 19 nt, Artificial Sequence
  Description of Artificial Sequence: Synthetic oligonucleotide
ccccuaccucauugcaucu

SEQ ID NO: 3052207 - RNA, 19 nt, Artificial Sequence
  Description of Artificial Sequence: Synthetic oligonucleotide
ccucuuucaugugguuauu

SEQ ID NO: 3052208 - RNA, 19 nt, Artificial Sequence
  Description of Artificial Sequence: Synthetic oligonucleotide
ccacugcagcaguguaauu

SEQ ID NO: 3052209 - RNA, 19 nt, Artificial Sequence
  Description of Artificial Sequence: Synthetic oligonucleotide
ccgcauuauugggguccaa

SEQ ID NO: 3052210 - RNA, 19 nt, Artificial Sequence
  Description of Artificial Sequence: Synthetic oligonucleotide
uuaauuaaauuccacaucc

SEQ ID NO: 3052211 - RNA, 19 nt, Artificial Sequence
  Description of Artificial Sequence: Synthetic oligonucleotide
auuuguuaacucuugaccc

SEQ ID NO: 3052212 - RNA, 19 nt, Artificial Sequence
  Description of Artificial Sequence: Synthetic oligonucleotide
aaauuaauuaaauuccaca

SEQ ID NO: 3052213 - RNA, 19 nt, Artificial Sequence
  Description of Artificial Sequence: Synthetic oligonucleotide
ugaaauaaccuucacacac

SEQ ID NO: 3052214 - RNA, 19 nt, Artificial Sequence
  Description of Artificial Sequence: Synthetic oligonucleotide
gauuuguuaacucuugacc

SEQ ID NO: 3052215 - RNA, 19 nt, Artificial Sequence
  Description of Artificial Sequence: Synthetic oligonucleotide
auuaauuaaauuccacauc

SEQ ID NO: 3052216 - RNA, 19 nt, Artificial Sequence
  Description of Artificial Sequence: Synthetic oligonucleotide
aaaauuaauuaaauuccac

SEQ ID NO: 3052217 - RNA, 19 nt, Artificial Sequence
  Description of Artificial Sequence: Synthetic oligonucleotide
ucuugaaccugaaauaacc

SEQ ID NO: 3052218 - RNA, 19 nt, Artificial Sequence
  Description of Artificial Sequence: Synthetic oligonucleotide
aauuaaauuccacauccgu

SEQ ID NO: 3052219 - RNA, 19 nt, Artificial Sequence
  Description of Artificial Sequence: Synthetic oligonucleotide
acauccgucucuuuggucc

SEQ ID NO: 3052220 - RNA, 19 nt, Artificial Sequence
  Description of Artificial Sequence: Synthetic oligonucleotide
uuaaauuccacauccgucu

SEQ ID NO: 3052221 - RNA, 19 nt, Artificial Sequence
  Description of Artificial Sequence: Synthetic oligonucleotide
aaauaaccuucacacacuc

SEQ ID NO: 3052222 - RNA, 19 nt, Artificial Sequence
  Description of Artificial Sequence: Synthetic oligonucleotide
auaaccuucacacacucug

SEQ ID NO: 3052223 - RNA, 19 nt, Artificial Sequence
  Description of Artificial Sequence: Synthetic oligonucleotide
uuuguuaacucuugacccg

SEQ ID NO: 3052224 - RNA, 19 nt, Artificial Sequence
  Description of Artificial Sequence: Synthetic oligonucleotide
uaauuaaauuccacauccg

SEQ ID NO: 3052225 - RNA, 19 nt, Artificial Sequence
  Description of Artificial Sequence: Synthetic oligonucleotide
ugugcacucacacucugcg

SEQ ID NO: 3052226 - RNA, 19 nt, Artificial Sequence
  Description of Artificial Sequence: Synthetic oligonucleotide
uugaaugucccaaagucac

SEQ ID NO: 3052227 - RNA, 19 nt, Artificial Sequence
  Description of Artificial Sequence: Synthetic oligonucleotide
aagcucaaguuuuccgucc

SEQ ID NO: 3052228 - RNA, 19 nt, Artificial Sequence
  Description of Artificial Sequence: Synthetic oligonucleotide
ugaaccugaaauaaccuuc

SEQ ID NO: 3052229 - RNA, 19 nt, Artificial Sequence
  Description of Artificial Sequence: Synthetic oligonucleotide
cuuaagcucaaguuuuccg

SEQ ID NO: 3052230 - RNA, 19 nt, Artificial Sequence
  Description of Artificial Sequence: Synthetic oligonucleotide
cauugaaugucccaaaguc

SEQ ID NO: 3052231 - RNA, 19 nt, Artificial Sequence
  Description of Artificial Sequence: Synthetic oligonucleotide
ccugaaauaaccuucacac

SEQ ID NO: 3052232 - RNA, 19 nt, Artificial Sequence
  Description of Artificial Sequence: Synthetic oligonucleotide
uuaagcucaaguuuuccgu

SEQ ID NO: 3052233 - RNA, 19 nt, Artificial Sequence
  Description of Artificial Sequence: Synthetic oligonucleotide
auuaaauuccacauccguc

SEQ ID NO: 3052234 - RNA, 19 nt, Artificial Sequence
  Description of Artificial Sequence: Synthetic oligonucleotide
ucaaguuuuccguccagag

SEQ ID NO: 3052235 - RNA, 19 nt, Artificial Sequence
  Description of Artificial Sequence: Synthetic oligonucleotide
aacccugauuuguuaacuc

SEQ ID NO: 3052236 - RNA, 19 nt, Artificial Sequence
  Description of Artificial Sequence: Synthetic oligonucleotide
acucugaucauugaauguc

SEQ ID NO: 3052237 - RNA, 19 nt, Artificial Sequence
  Description of Artificial Sequence: Synthetic oligonucleotide
ugauuuguuaacucuugac

SEQ ID NO: 3052238 - RNA, 19 nt, Artificial Sequence
  Description of Artificial Sequence: Synthetic oligonucleotide
uuugguccccuucuuaagc

SEQ ID NO: 3052239 - RNA, 19 nt, Artificial Sequence
  Description of Artificial Sequence: Synthetic oligonucleotide
uaacucuugacccggcuug

SEQ ID NO: 3052240 - RNA, 19 nt, Artificial Sequence
  Description of Artificial Sequence: Synthetic oligonucleotide
ucacacacucugcagaugu

SEQ ID NO: 3052241 - RNA, 19 nt, Artificial Sequence
  Description of Artificial Sequence: Synthetic oligonucleotide
uuuuacaacccugauuugu

SEQ ID NO: 3052242 - RNA, 19 nt, Artificial Sequence
  Description of Artificial Sequence: Synthetic oligonucleotide
aucauugaaugucccaaag

SEQ ID NO: 3052243 - RNA, 19 nt, Artificial Sequence
  Description of Artificial Sequence: Synthetic oligonucleotide
ucacacucugcguugcugg

SEQ ID NO: 3052244 - RNA, 19 nt, Artificial Sequence
  Description of Artificial Sequence: Synthetic oligonucleotide
gagcaaggcuucuugaacc

SEQ ID NO: 3052245 - RNA, 19 nt, Artificial Sequence
  Description of Artificial Sequence: Synthetic oligonucleotide
ucauugaaugucccaaagu

SEQ ID NO: 3052246 - RNA, 19 nt, Artificial Sequence
  Description of Artificial Sequence: Synthetic oligonucleotide
accaggcacacuugggucc

SEQ ID NO: 3052247 - RNA, 19 nt, Artificial Sequence
  Description of Artificial Sequence: Synthetic oligonucleotide
gaaugucccaaagucacag

SEQ ID NO: 3052248 - RNA, 19 nt, Artificial Sequence
  Description of Artificial Sequence: Synthetic oligonucleotide
ugcagauguugcaguaugg

SEQ ID NO: 3052249 - RNA, 19 nt, Artificial Sequence
  Description of Artificial Sequence: Synthetic oligonucleotide
acaacccugauuuguuaac

SEQ ID NO: 3052250 - RNA, 19 nt, Artificial Sequence
  Description of Artificial Sequence: Synthetic oligonucleotide
ugcaguauggcuguccacc

SEQ ID NO: 3052251 - RNA, 19 nt, Artificial Sequence
  Description of Artificial Sequence: Synthetic oligonucleotide
uccuuuucgcaccaggcac

SEQ ID NO: 3052252 - RNA, 19 nt, Artificial Sequence
  Description of Artificial Sequence: Synthetic oligonucleotide
ucugaucauugaauguccc

SEQ ID NO: 3052253 - RNA, 19 nt, Artificial Sequence
  Description of Artificial Sequence: Synthetic oligonucleotide
cuugcaguccuuuucgcac

SEQ ID NO: 3052254 - RNA, 19 nt, Artificial Sequence
  Description of Artificial Sequence: Synthetic oligonucleotide
agauguugcaguauggcug

SEQ ID NO: 3052255 - RNA, 19 nt, Artificial Sequence
  Description of Artificial Sequence: Synthetic oligonucleotide
uuuacaacccugauuuguu

SEQ ID NO: 3052256 - RNA, 19 nt, Artificial Sequence
  Description of Artificial Sequence: Synthetic oligonucleotide
cucugaucauugaaugucc

SEQ ID NO: 3052257 - RNA, 19 nt, Artificial Sequence
  Description of Artificial Sequence: Synthetic oligonucleotide
uuccacauccgucucuuug

SEQ ID NO: 3052258 - RNA, 19 nt, Artificial Sequence
  Description of Artificial Sequence: Synthetic oligonucleotide
uuguuaacucuugacccgg

SEQ ID NO: 3052259 - RNA, 19 nt, Artificial Sequence
  Description of Artificial Sequence: Synthetic oligonucleotide
ugaucauugaaugucccaa

SEQ ID NO: 3052260 - RNA, 19 nt, Artificial Sequence
  Description of Artificial Sequence: Synthetic oligonucleotide
uuucgcaccaggcacacuu

SEQ ID NO: 3052261 - RNA, 19 nt, Artificial Sequence
  Description of Artificial Sequence: Synthetic oligonucleotide
aaccuucacacacucugca

SEQ ID NO: 3052262 - RNA, 19 nt, Artificial Sequence
  Description of Artificial Sequence: Synthetic oligonucleotide
accugaaauaaccuucaca

SEQ ID NO: 3052263 - RNA, 19 nt, Artificial Sequence
  Description of Artificial Sequence: Synthetic oligonucleotide
uucuugaaccugaaauaac

SEQ ID NO: 3052264 - RNA, 19 nt, Artificial Sequence
  Description of Artificial Sequence: Synthetic oligonucleotide
aaauuccacauccgucucu

SEQ ID NO: 3052265 - RNA, 19 nt, Artificial Sequence
  Description of Artificial Sequence: Synthetic oligonucleotide
uaaccuucacacacucugc

SEQ ID NO: 3052266 - RNA, 19 nt, Artificial Sequence
  Description of Artificial Sequence: Synthetic oligonucleotide
ucuuugguccccuucuuaa

SEQ ID NO: 3052267 - RNA, 19 nt, Artificial Sequence
  Description of Artificial Sequence: Synthetic oligonucleotide
aguccuuuucgcaccaggc

SEQ ID NO: 3052268 - RNA, 19 nt, Artificial Sequence
  Description of Artificial Sequence: Synthetic oligonucleotide
agcaguuuguccagggucg

SEQ ID NO: 3052269 - RNA, 19 nt, Artificial Sequence
  Description of Artificial Sequence: Synthetic oligonucleotide
uccagagagcaguuugucc

SEQ ID NO: 3052270 - RNA, 19 nt, Artificial Sequence
  Description of Artificial Sequence: Synthetic oligonucleotide
aacucuugacccggcuugc

SEQ ID NO: 3052271 - RNA, 19 nt, Artificial Sequence
  Description of Artificial Sequence: Synthetic oligonucleotide
uugaaccugaaauaaccuu

SEQ ID NO: 3052272 - RNA, 19 nt, Artificial Sequence
  Description of Artificial Sequence: Synthetic oligonucleotide
uaagcucaaguuuuccguc

SEQ ID NO: 3052273 - RNA, 19 nt, Artificial Sequence
  Description of Artificial Sequence: Synthetic oligonucleotide
auugaaugucccaaaguca

SEQ ID NO: 3052274 - RNA, 19 nt, Artificial Sequence
  Description of Artificial Sequence: Synthetic oligonucleotide
ugcacucacacucugcguu

SEQ ID NO: 3052275 - RNA, 19 nt, Artificial Sequence
  Description of Artificial Sequence: Synthetic oligonucleotide
uuuccguccagagagcagu

SEQ ID NO: 3052276 - RNA, 19 nt, Artificial Sequence
  Description of Artificial Sequence: Synthetic oligonucleotide
ucuuaagcucaaguuuucc

SEQ ID NO: 3052277 - RNA, 19 nt, Artificial Sequence
  Description of Artificial Sequence: Synthetic oligonucleotide
uggcuguccacccuugcug

SEQ ID NO: 3052278 - RNA, 19 nt, Artificial Sequence
  Description of Artificial Sequence: Synthetic oligonucleotide
uuuuccguccagagagcag

SEQ ID NO: 3052279 - RNA, 19 nt, Artificial Sequence
  Description of Artificial Sequence: Synthetic oligonucleotide
uacaacccugauuuguuaa

SEQ ID NO: 3052280 - RNA, 19 nt, Artificial Sequence
  Description of Artificial Sequence: Synthetic oligonucleotide
gagcaguuuguccaggguc

SEQ ID NO: 3052281 - RNA, 19 nt, Artificial Sequence
  Description of Artificial Sequence: Synthetic oligonucleotide
cacucugcguugcuggucg

SEQ ID NO: 3052282 - RNA, 19 nt, Artificial Sequence
  Description of Artificial Sequence: Synthetic oligonucleotide
cacacucugcagauguugc

SEQ ID NO: 3052283 - RNA, 19 nt, Artificial Sequence
  Description of Artificial Sequence: Synthetic oligonucleotide
ugaaugucccaaagucaca

SEQ ID NO: 3052284 - RNA, 19 nt, Artificial Sequence
  Description of Artificial Sequence: Synthetic oligonucleotide
uuaacucuugacccggcuu

SEQ ID NO: 3052285 - RNA, 19 nt, Artificial Sequence
  Description of Artificial Sequence: Synthetic oligonucleotide
uaaauuccacauccgucuc

SEQ ID NO: 3052286 - RNA, 19 nt, Artificial Sequence
  Description of Artificial Sequence: Synthetic oligonucleotide
agucccucugugcacucac

SEQ ID NO: 3052287 - RNA, 19 nt, Artificial Sequence
  Description of Artificial Sequence: Synthetic oligonucleotide
acccugauuuguuaacucu

SEQ ID NO: 3052288 - RNA, 19 nt, Artificial Sequence
  Description of Artificial Sequence: Synthetic oligonucleotide
ugcguugcuggucggggag

SEQ ID NO: 3052289 - RNA, 19 nt, Artificial Sequence
  Description of Artificial Sequence: Synthetic oligonucleotide
uucuuaagcucaaguuuuc

SEQ ID NO: 3052290 - RNA, 19 nt, Artificial Sequence
  Description of Artificial Sequence: Synthetic oligonucleotide
ucuugacccggcuugcagu

SEQ ID NO: 3052291 - RNA, 19 nt, Artificial Sequence
  Description of Artificial Sequence: Synthetic oligonucleotide
ucgcaccaggcacacuugg

SEQ ID NO: 3052292 - RNA, 19 nt, Artificial Sequence
  Description of Artificial Sequence: Synthetic oligonucleotide
ucugcguugcuggucgggg

SEQ ID NO: 3052293 - RNA, 19 nt, Artificial Sequence
  Description of Artificial Sequence: Synthetic oligonucleotide
cuuugguccccuucuuaag

SEQ ID NO: 3052294 - RNA, 19 nt, Artificial Sequence
  Description of Artificial Sequence: Synthetic oligonucleotide
uguuaacucuugacccggc

SEQ ID NO: 3052295 - RNA, 19 nt, Artificial Sequence
  Description of Artificial Sequence: Synthetic oligonucleotide
uugcaguccuuuucgcacc

SEQ ID NO: 3052296 - RNA, 19 nt, Artificial Sequence
  Description of Artificial Sequence: Synthetic oligonucleotide
ugcuggucggggagcaagg

SEQ ID NO: 3052297 - RNA, 19 nt, Artificial Sequence
  Description of Artificial Sequence: Synthetic oligonucleotide
gaaccugaaauaaccuuca

SEQ ID NO: 3052298 - RNA, 19 nt, Artificial Sequence
  Description of Artificial Sequence: Synthetic oligonucleotide
accuucacacacucugcag

SEQ ID NO: 3052299 - RNA, 19 nt, Artificial Sequence
  Description of Artificial Sequence: Synthetic oligonucleotide
augucccaaagucacaguu

SEQ ID NO: 3052300 - RNA, 19 nt, Artificial Sequence
  Description of Artificial Sequence: Synthetic oligonucleotide
ugucccaaagucacaguuu

SEQ ID NO: 3052301 - RNA, 19 nt, Artificial Sequence
  Description of Artificial Sequence: Synthetic oligonucleotide
aauuccacauccgucucuu

SEQ ID NO: 3052302 - RNA, 19 nt, Artificial Sequence
  Description of Artificial Sequence: Synthetic oligonucleotide
gauguugcaguauggcugu

SEQ ID NO: 3052303 - RNA, 19 nt, Artificial Sequence
  Description of Artificial Sequence: Synthetic oligonucleotide
uguugcaguauggcugucc

SEQ ID NO: 3052304 - RNA, 19 nt, Artificial Sequence
  Description of Artificial Sequence: Synthetic oligonucleotide
gaucauugaaugucccaaa

SEQ ID NO: 3052305 - RNA, 19 nt, Artificial Sequence
  Description of Artificial Sequence: Synthetic oligonucleotide
guugcaguauggcugucca

SEQ ID NO: 3052306 - RNA, 19 nt, Artificial Sequence
  Description of Artificial Sequence: Synthetic oligonucleotide
ucccucugugcacucacac

SEQ ID NO: 3052307 - RNA, 19 nt, Artificial Sequence
  Description of Artificial Sequence: Synthetic oligonucleotide
uggucggggagcaaggcuu

SEQ ID NO: 3052308 - RNA, 19 nt, Artificial Sequence
  Description of Artificial Sequence: Synthetic oligonucleotide
cugaaauaaccuucacaca

SEQ ID NO: 3052309 - RNA, 19 nt, Artificial Sequence
  Description of Artificial Sequence: Synthetic oligonucleotide
cuucuugaaccugaaauaa

SEQ ID NO: 3052310 - RNA, 19 nt, Artificial Sequence
  Description of Artificial Sequence: Synthetic oligonucleotide
uauggcuguccacccuugc

SEQ ID NO: 3052311 - RNA, 19 nt, Artificial Sequence
  Description of Artificial Sequence: Synthetic oligonucleotide
caguccuuuucgcaccagg

SEQ ID NO: 3052312 - RNA, 19 nt, Artificial Sequence
  Description of Artificial Sequence: Synthetic oligonucleotide
aguuuuccguccagagagc

SEQ ID NO: 3052313 - RNA, 19 nt, Artificial Sequence
  Description of Artificial Sequence: Synthetic oligonucleotide
acacacucugcagauguug

SEQ ID NO: 3052314 - RNA, 19 nt, Artificial Sequence
  Description of Artificial Sequence: Synthetic oligonucleotide
uuacaacccugauuuguua

SEQ ID NO: 3052315 - RNA, 19 nt, Artificial Sequence
  Description of Artificial Sequence: Synthetic oligonucleotide
aguauggcuguccacccuu

SEQ ID NO: 3052316 - RNA, 19 nt, Artificial Sequence
  Description of Artificial Sequence: Synthetic oligonucleotide
ugggucccaaggcagugga

SEQ ID NO: 3052317 - RNA, 19 nt, Artificial Sequence
  Description of Artificial Sequence: Synthetic oligonucleotide
ucggcaggugccaccacca

SEQ ID NO: 3052318 - RNA, 19 nt, Artificial Sequence
  Description of Artificial Sequence: Synthetic oligonucleotide
cagagagcaguuuguccag

SEQ ID NO: 3052319 - RNA, 19 nt, Artificial Sequence
  Description of Artificial Sequence: Synthetic oligonucleotide
guuuguccagggucggcag

SEQ ID NO: 3052320 - RNA, 19 nt, Artificial Sequence
  Description of Artificial Sequence: Synthetic oligonucleotide
aguuuguccagggucggca

SEQ ID NO: 3052321 - RNA, 19 nt, Artificial Sequence
  Description of Artificial Sequence: Synthetic oligonucleotide
agagcaguuuguccagggu

SEQ ID NO: 3052322 - RNA, 19 nt, Artificial Sequence
  Description of Artificial Sequence: Synthetic oligonucleotide
cuugacccggcuugcaguc

SEQ ID NO: 3052323 - RNA, 19 nt, Artificial Sequence
  Description of Artificial Sequence: Synthetic oligonucleotide
caaggcuucuugaaccuga

SEQ ID NO: 3052324 - RNA, 19 nt, Artificial Sequence
  Description of Artificial Sequence: Synthetic oligonucleotide
accaccacucugaucauug

SEQ ID NO: 3052325 - RNA, 19 nt, Artificial Sequence
  Description of Artificial Sequence: Synthetic oligonucleotide
agcucaaguuuuccgucca

SEQ ID NO: 3052326 - RNA, 19 nt, Artificial Sequence
  Description of Artificial Sequence: Synthetic oligonucleotide
cuucuuaagcucaaguuuu

SEQ ID NO: 3052327 - RNA, 19 nt, Artificial Sequence
  Description of Artificial Sequence: Synthetic oligonucleotide
agggucggcaggugccacc

SEQ ID NO: 3052328 - RNA, 19 nt, Artificial Sequence
  Description of Artificial Sequence: Synthetic oligonucleotide
gaaauaaccuucacacacu

SEQ ID NO: 3052329 - RNA, 19 nt, Artificial Sequence
  Description of Artificial Sequence: Synthetic oligonucleotide
ugcaguccuuuucgcacca

SEQ ID NO: 3052330 - RNA, 19 nt, Artificial Sequence
  Description of Artificial Sequence: Synthetic oligonucleotide
uugcuggucggggagcaag

SEQ ID NO: 3052331 - RNA, 19 nt, Artificial Sequence
  Description of Artificial Sequence: Synthetic oligonucleotide
ggagcaaggcuucuugaac

SEQ ID NO: 3052332 - RNA, 19 nt, Artificial Sequence
  Description of Artificial Sequence: Synthetic oligonucleotide
caaguuuuccguccagaga

SEQ ID NO: 3052333 - RNA, 19 nt, Artificial Sequence
  Description of Artificial Sequence: Synthetic oligonucleotide
cugaucauugaauguccca

SEQ ID NO: 3052334 - RNA, 19 nt, Artificial Sequence
  Description of Artificial Sequence: Synthetic oligonucleotide
uucgcaccaggcacacuug

SEQ ID NO: 3052335 - RNA, 19 nt, Artificial Sequence
  Description of Artificial Sequence: Synthetic oligonucleotide
cauccgucucuuugguccc

SEQ ID NO: 3052336 - RNA, 19 nt, Artificial Sequence
  Description of Artificial Sequence: Synthetic oligonucleotide
cugauuuguuaacucuuga

SEQ ID NO: 3052337 - RNA, 19 nt, Artificial Sequence
  Description of Artificial Sequence: Synthetic oligonucleotide
accacucugaucauugaau

SEQ ID NO: 3052338 - RNA, 19 nt, Artificial Sequence
  Description of Artificial Sequence: Synthetic oligonucleotide
cuugaaccugaaauaaccu

SEQ ID NO: 3052339 - RNA, 19 nt, Artificial Sequence
  Description of Artificial Sequence: Synthetic oligonucleotide
acacucugcagauguugca

SEQ ID NO: 3052340 - RNA, 19 nt, Artificial Sequence
  Description of Artificial Sequence: Synthetic oligonucleotide
cucuugacccggcuugcag

SEQ ID NO: 3052341 - RNA, 19 nt, Artificial Sequence
  Description of Artificial Sequence: Synthetic oligonucleotide
uguccacccuugcuggagu

SEQ ID NO: 3052342 - RNA, 19 nt, Artificial Sequence
  Description of Artificial Sequence: Synthetic oligonucleotide
uugggucccaaggcagugg

SEQ ID NO: 3052343 - RNA, 19 nt, Artificial Sequence
  Description of Artificial Sequence: Synthetic oligonucleotide
ugacccggcuugcaguccu

SEQ ID NO: 3052344 - RNA, 19 nt, Artificial Sequence
  Description of Artificial Sequence: Synthetic oligonucleotide
ccugauuuguuaacucuug

SEQ ID NO: 3052345 - RNA, 19 nt, Artificial Sequence
  Description of Artificial Sequence: Synthetic oligonucleotide
auggcuguccacccuugcu

SEQ ID NO: 3052346 - RNA, 19 nt, Artificial Sequence
  Description of Artificial Sequence: Synthetic oligonucleotide
ccagagagcaguuugucca

SEQ ID NO: 3052347 - RNA, 19 nt, Artificial Sequence
  Description of Artificial Sequence: Synthetic oligonucleotide
ccacucugaucauugaaug

SEQ ID NO: 3052348 - RNA, 19 nt, Artificial Sequence
  Description of Artificial Sequence: Synthetic oligonucleotide
ggcuucuugaaccugaaau

SEQ ID NO: 3052349 - RNA, 19 nt, Artificial Sequence
  Description of Artificial Sequence: Synthetic oligonucleotide
ggcuguccacccuugcugg

SEQ ID NO: 3052350 - RNA, 19 nt, Artificial Sequence
  Description of Artificial Sequence: Synthetic oligonucleotide
guccuuuucgcaccaggca

SEQ ID NO: 3052351 - RNA, 19 nt, Artificial Sequence
  Description of Artificial Sequence: Synthetic oligonucleotide
caguggagucccucugugc

SEQ ID NO: 3052352 - RNA, 19 nt, Artificial Sequence
  Description of Artificial Sequence: Synthetic oligonucleotide
gcuucuugaaccugaaaua

SEQ ID NO: 3052353 - RNA, 19 nt, Artificial Sequence
  Description of Artificial Sequence: Synthetic oligonucleotide
gucggcaggugccaccacc

SEQ ID NO: 3052354 - RNA, 19 nt, Artificial Sequence
  Description of Artificial Sequence: Synthetic oligonucleotide
caccaggcacacuuggguc

SEQ ID NO: 3052355 - RNA, 19 nt, Artificial Sequence
  Description of Artificial Sequence: Synthetic oligonucleotide
ucccaaggcaguggagucc

SEQ ID NO: 3052356 - RNA, 19 nt, Artificial Sequence
  Description of Artificial Sequence: Synthetic oligonucleotide
uucacacacucugcagaug

SEQ ID NO: 3052357 - RNA, 19 nt, Artificial Sequence
  Description of Artificial Sequence: Synthetic oligonucleotide
gcagauguugcaguauggc

SEQ ID NO: 3052358 - RNA, 19 nt, Artificial Sequence
  Description of Artificial Sequence: Synthetic oligonucleotide
uuguccagggucggcaggu

SEQ ID NO: 3052359 - RNA, 19 nt, Artificial Sequence
  Description of Artificial Sequence: Synthetic oligonucleotide
uggagucccucugugcacu

SEQ ID NO: 3052360 - RNA, 19 nt, Artificial Sequence
  Description of Artificial Sequence: Synthetic oligonucleotide
guuuuccguccagagagca

SEQ ID NO: 3052361 - RNA, 19 nt, Artificial Sequence
  Description of Artificial Sequence: Synthetic oligonucleotide
ucucuuugguccccuucuu

SEQ ID NO: 3052362 - RNA, 19 nt, Artificial Sequence
  Description of Artificial Sequence: Synthetic oligonucleotide
cuuuucgcaccaggcacac

SEQ ID NO: 3052363 - RNA, 19 nt, Artificial Sequence
  Description of Artificial Sequence: Synthetic oligonucleotide
uccacccuugcuggaguag

SEQ ID NO: 3052364 - RNA, 19 nt, Artificial Sequence
  Description of Artificial Sequence: Synthetic oligonucleotide
uugcaguauggcuguccac

SEQ ID NO: 3052365 - RNA, 19 nt, Artificial Sequence
  Description of Artificial Sequence: Synthetic oligonucleotide
ugguccccuucuuaagcuc

SEQ ID NO: 3052366 - RNA, 19 nt, Artificial Sequence
  Description of Artificial Sequence: Synthetic oligonucleotide
cagauguugcaguauggcu

SEQ ID NO: 3052367 - RNA, 19 nt, Artificial Sequence
  Description of Artificial Sequence: Synthetic oligonucleotide
gcaguauggcuguccaccc

SEQ ID NO: 3052368 - RNA, 19 nt, Artificial Sequence
  Description of Artificial Sequence: Synthetic oligonucleotide
aggcaguggagucccucug

SEQ ID NO: 3052369 - RNA, 19 nt, Artificial Sequence
  Description of Artificial Sequence: Synthetic oligonucleotide
gucucuuugguccccuucu

SEQ ID NO: 3052370 - RNA, 19 nt, Artificial Sequence
  Description of Artificial Sequence: Synthetic oligonucleotide
gucccaaggcaguggaguc

SEQ ID NO: 3052371 - RNA, 19 nt, Artificial Sequence
  Description of Artificial Sequence: Synthetic oligonucleotide
cccuugcuggaguaggugc

SEQ ID NO: 3052372 - RNA, 19 nt, Artificial Sequence
  Description of Artificial Sequence: Synthetic oligonucleotide
cuugggucccaaggcagug

SEQ ID NO: 3052373 - RNA, 19 nt, Artificial Sequence
  Description of Artificial Sequence: Synthetic oligonucleotide
ggugccaccaccacucuga

SEQ ID NO: 3052374 - RNA, 19 nt, Artificial Sequence
  Description of Artificial Sequence: Synthetic oligonucleotide
guggagucccucugugcac

SEQ ID NO: 3052375 - RNA, 19 nt, Artificial Sequence
  Description of Artificial Sequence: Synthetic oligonucleotide
cuguccacccuugcuggag

SEQ ID NO: 3052376 - RNA, 19 nt, Artificial Sequence
  Description of Artificial Sequence: Synthetic oligonucleotide
auccgucucuuuggucccc

SEQ ID NO: 3052377 - RNA, 19 nt, Artificial Sequence
  Description of Artificial Sequence: Synthetic oligonucleotide
aaggcuucuugaaccugaa

SEQ ID NO: 3052378 - RNA, 19 nt, Artificial Sequence
  Description of Artificial Sequence: Synthetic oligonucleotide
cacucacacucugcguugc

SEQ ID NO: 3052379 - RNA, 19 nt, Artificial Sequence
  Description of Artificial Sequence: Synthetic oligonucleotide
guuaacucuugacccggcu

SEQ ID NO: 3052380 - RNA, 19 nt, Artificial Sequence
  Description of Artificial Sequence: Synthetic oligonucleotide
cacauccgucucuuugguc

SEQ ID NO: 3052381 - RNA, 19 nt, Artificial Sequence
  Description of Artificial Sequence: Synthetic oligonucleotide
aggugccaccaccacucug

SEQ ID NO: 3052382 - RNA, 19 nt, Artificial Sequence
  Description of Artificial Sequence: Synthetic oligonucleotide
acucugcguugcuggucgg

SEQ ID NO: 3052383 - RNA, 19 nt, Artificial Sequence
  Description of Artificial Sequence: Synthetic oligonucleotide
uccccuucuuaagcucaag

SEQ ID NO: 3052384 - RNA, 19 nt, Artificial Sequence
  Description of Artificial Sequence: Synthetic oligonucleotide
gcuugcaguccuuuucgca

SEQ ID NO: 3052385 - RNA, 19 nt, Artificial Sequence
  Description of Artificial Sequence: Synthetic oligonucleotide
gcaggugccaccaccacuc

SEQ ID NO: 3052386 - RNA, 19 nt, Artificial Sequence
  Description of Artificial Sequence: Synthetic oligonucleotide
cucugcguugcuggucggg

SEQ ID NO: 3052387 - RNA, 19 nt, Artificial Sequence
  Description of Artificial Sequence: Synthetic oligonucleotide
cacucugaucauugaaugu

SEQ ID NO: 3052388 - RNA, 19 nt, Artificial Sequence
  Description of Artificial Sequence: Synthetic oligonucleotide
acccuugcuggaguaggug

SEQ ID NO: 3052389 - RNA, 19 nt, Artificial Sequence
  Description of Artificial Sequence: Synthetic oligonucleotide
caccacucugaucauugaa

SEQ ID NO: 3052390 - RNA, 19 nt, Artificial Sequence
  Description of Artificial Sequence: Synthetic oligonucleotide
cuucacacacucugcagau

SEQ ID NO: 3052391 - RNA, 19 nt, Artificial Sequence
  Description of Artificial Sequence: Synthetic oligonucleotide
ccguccagagagcaguuug

SEQ ID NO: 3052392 - RNA, 19 nt, Artificial Sequence
  Description of Artificial Sequence: Synthetic oligonucleotide
gcacucacacucugcguug

SEQ ID NO: 3052393 - RNA, 19 nt, Artificial Sequence
  Description of Artificial Sequence: Synthetic oligonucleotide
guccagagagcaguuuguc

SEQ ID NO: 3052394 - RNA, 19 nt, Artificial Sequence
  Description of Artificial Sequence: Synthetic oligonucleotide
uugacccggcuugcagucc

SEQ ID NO: 3052395 - RNA, 19 nt, Artificial Sequence
  Description of Artificial Sequence: Synthetic oligonucleotide
guauggcuguccacccuug

SEQ ID NO: 3052396 - RNA, 19 nt, Artificial Sequence
  Description of Artificial Sequence: Synthetic oligonucleotide
caaggcaguggagucccuc

SEQ ID NO: 3052397 - RNA, 19 nt, Artificial Sequence
  Description of Artificial Sequence: Synthetic oligonucleotide
ggcuugcaguccuuuucgc

SEQ ID NO: 3052398 - RNA, 19 nt, Artificial Sequence
  Description of Artificial Sequence: Synthetic oligonucleotide
gggagcaaggcuucuugaa

SEQ ID NO: 3052399 - RNA, 19 nt, Artificial Sequence
  Description of Artificial Sequence: Synthetic oligonucleotide
uuccguccagagagcaguu

SEQ ID NO: 3052400 - RNA, 19 nt, Artificial Sequence
  Description of Artificial Sequence: Synthetic oligonucleotide
aggcuucuugaaccugaaa

SEQ ID NO: 3052401 - RNA, 19 nt, Artificial Sequence
  Description of Artificial Sequence: Synthetic oligonucleotide
caguuuguccagggucggc

SEQ ID NO: 3052402 - RNA, 19 nt, Artificial Sequence
  Description of Artificial Sequence: Synthetic oligonucleotide
cggcuugcaguccuuuucg

SEQ ID NO: 3052403 - RNA, 19 nt, Artificial Sequence
  Description of Artificial Sequence: Synthetic oligonucleotide
gcaguuuguccagggucgg

SEQ ID NO: 3052404 - RNA, 19 nt, Artificial Sequence
  Description of Artificial Sequence: Synthetic oligonucleotide
cccaaggcaguggaguccc

SEQ ID NO: 3052405 - RNA, 19 nt, Artificial Sequence
  Description of Artificial Sequence: Synthetic oligonucleotide
cucuuugguccccuucuua

SEQ ID NO: 3052406 - RNA, 19 nt, Artificial Sequence
  Description of Artificial Sequence: Synthetic oligonucleotide
ccuucuuaagcucaaguuu

SEQ ID NO: 3052407 - RNA, 19 nt, Artificial Sequence
  Description of Artificial Sequence: Synthetic oligonucleotide
ccacccuugcuggaguagg

SEQ ID NO: 3052408 - RNA, 19 nt, Artificial Sequence
  Description of Artificial Sequence: Synthetic oligonucleotide
uccgucucuuugguccccu

SEQ ID NO: 3052409 - RNA, 19 nt, Artificial Sequence
  Description of Artificial Sequence: Synthetic oligonucleotide
ggcacacuugggucccaag

SEQ ID NO: 3052410 - RNA, 19 nt, Artificial Sequence
  Description of Artificial Sequence: Synthetic oligonucleotide
acucuugacccggcuugca

SEQ ID NO: 3052411 - RNA, 19 nt, Artificial Sequence
  Description of Artificial Sequence: Synthetic oligonucleotide
auguugcaguauggcuguc

SEQ ID NO: 3052412 - RNA, 19 nt, Artificial Sequence
  Description of Artificial Sequence: Synthetic oligonucleotide
caacccugauuuguuaacu

SEQ ID NO: 3052413 - RNA, 19 nt, Artificial Sequence
  Description of Artificial Sequence: Synthetic oligonucleotide
uuuucgcaccaggcacacu

SEQ ID NO: 3052414 - RNA, 19 nt, Artificial Sequence
  Description of Artificial Sequence: Synthetic oligonucleotide
gguccccuucuuaagcuca

SEQ ID NO: 3052415 - RNA, 19 nt, Artificial Sequence
  Description of Artificial Sequence: Synthetic oligonucleotide
ccuuuucgcaccaggcaca

SEQ ID NO: 3052416 - RNA, 19 nt, Artificial Sequence
  Description of Artificial Sequence: Synthetic oligonucleotide
ggggagcaaggcuucuuga

SEQ ID NO: 3052417 - RNA, 19 nt, Artificial Sequence
  Description of Artificial Sequence: Synthetic oligonucleotide
auuccacauccgucucuuu

SEQ ID NO: 3052418 - RNA, 19 nt, Artificial Sequence
  Description of Artificial Sequence: Synthetic oligonucleotide
ccggcuugcaguccuuuuc

SEQ ID NO: 3052419 - RNA, 19 nt, Artificial Sequence
  Description of Artificial Sequence: Synthetic oligonucleotide
cugcguugcuggucgggga

SEQ ID NO: 3052420 - RNA, 19 nt, Artificial Sequence
  Description of Artificial Sequence: Synthetic oligonucleotide
ggucccaaggcaguggagu

SEQ ID NO: 3052421 - RNA, 19 nt, Artificial Sequence
  Description of Artificial Sequence: Synthetic oligonucleotide
gcaccaggcacacuugggu

SEQ ID NO: 3052422 - RNA, 19 nt, Artificial Sequence
  Description of Artificial Sequence: Synthetic oligonucleotide
gcaaggcuucuugaaccug

SEQ ID NO: 3052423 - RNA, 19 nt, Artificial Sequence
  Description of Artificial Sequence: Synthetic oligonucleotide
uccguccagagagcaguuu

SEQ ID NO: 3052424 - RNA, 19 nt, Artificial Sequence
  Description of Artificial Sequence: Synthetic oligonucleotide
gagucccucugugcacuca

SEQ ID NO: 3052425 - RNA, 19 nt, Artificial Sequence
  Description of Artificial Sequence: Synthetic oligonucleotide
ucggggagcaaggcuucuu

SEQ ID NO: 3052426 - RNA, 19 nt, Artificial Sequence
  Description of Artificial Sequence: Synthetic oligonucleotide
ccaggcacacuuggguccc

SEQ ID NO: 3052427 - RNA, 19 nt, Artificial Sequence
  Description of Artificial Sequence: Synthetic oligonucleotide
cuggucggggagcaaggcu

SEQ ID NO: 3052428 - RNA, 19 nt, Artificial Sequence
  Description of Artificial Sequence: Synthetic oligonucleotide
gcuggucggggagcaaggc

SEQ ID NO: 3052429 - RNA, 19 nt, Artificial Sequence
  Description of Artificial Sequence: Synthetic oligonucleotide
cccuucuuaagcucaaguu

SEQ ID NO: 3052430 - RNA, 19 nt, Artificial Sequence
  Description of Artificial Sequence: Synthetic oligonucleotide
cggggagcaaggcuucuug

SEQ ID NO: 3052431 - RNA, 19 nt, Artificial Sequence
  Description of Artificial Sequence: Synthetic oligonucleotide
guccacccuugcuggagua

SEQ ID NO: 3052432 - RNA, 19 nt, Artificial Sequence
  Description of Artificial Sequence: Synthetic oligonucleotide
ggcaggugccaccaccacu

SEQ ID NO: 3052433 - RNA, 19 nt, Artificial Sequence
  Description of Artificial Sequence: Synthetic oligonucleotide
ggcaguggagucccucugu

SEQ ID NO: 3052434 - RNA, 19 nt, Artificial Sequence
  Description of Artificial Sequence: Synthetic oligonucleotide
caguauggcuguccacccu

SEQ ID NO: 3052435 - RNA, 19 nt, Artificial Sequence
  Description of Artificial Sequence: Synthetic oligonucleotide
cacccuugcuggaguaggu

SEQ ID NO: 3052436 - RNA, 19 nt, Artificial Sequence
  Description of Artificial Sequence: Synthetic oligonucleotide
gucccucugugcacucaca

SEQ ID NO: 3052437 - RNA, 19 nt, Artificial Sequence
  Description of Artificial Sequence: Synthetic oligonucleotide
cagggucggcaggugccac

SEQ ID NO: 3052438 - RNA, 19 nt, Artificial Sequence
  Description of Artificial Sequence: Synthetic oligonucleotide
aggcacacuugggucccaa

SEQ ID NO: 3052439 - RNA, 19 nt, Artificial Sequence
  Description of Artificial Sequence: Synthetic oligonucleotide
ccuugcuggaguaggugcu

SEQ ID NO: 3052440 - RNA, 19 nt, Artificial Sequence
  Description of Artificial Sequence: Synthetic oligonucleotide
guccccuucuuaagcucaa

SEQ ID NO: 3052441 - RNA, 19 nt, Artificial Sequence
  Description of Artificial Sequence: Synthetic oligonucleotide
ggucggggagcaaggcuuc

SEQ ID NO: 3052442 - RNA, 19 nt, Artificial Sequence
  Description of Artificial Sequence: Synthetic oligonucleotide
cgucucuuugguccccuuc

SEQ ID NO: 3052443 - RNA, 19 nt, Artificial Sequence
  Description of Artificial Sequence: Synthetic oligonucleotide
gggucggcaggugccacca

SEQ ID NO: 3052444 - RNA, 19 nt, Artificial Sequence
  Description of Artificial Sequence: Synthetic oligonucleotide
gggucccaaggcaguggag

SEQ ID NO: 3052445 - RNA, 19 nt, Artificial Sequence
  Description of Artificial Sequence: Synthetic oligonucleotide
cccugauuuguuaacucuu

SEQ ID NO: 3052446 - RNA, 19 nt, Artificial Sequence
  Description of Artificial Sequence: Synthetic oligonucleotide
gcaguccuuuucgcaccag

SEQ ID NO: 3052447 - RNA, 19 nt, Artificial Sequence
  Description of Artificial Sequence: Synthetic oligonucleotide
gcguugcuggucggggagc

SEQ ID NO: 3052448 - RNA, 19 nt, Artificial Sequence
  Description of Artificial Sequence: Synthetic oligonucleotide
ccaccacucugaucauuga

SEQ ID NO: 3052449 - RNA, 19 nt, Artificial Sequence
  Description of Artificial Sequence: Synthetic oligonucleotide
ccccuucuuaagcucaagu

SEQ ID NO: 3052450 - RNA, 19 nt, Artificial Sequence
  Description of Artificial Sequence: Synthetic oligonucleotide
guugcuggucggggagcaa

SEQ ID NO: 3052451 - RNA, 19 nt, Artificial Sequence
  Description of Artificial Sequence: Synthetic oligonucleotide
cuugcuggaguaggugcuu

SEQ ID NO: 3052452 - RNA, 19 nt, Artificial Sequence
  Description of Artificial Sequence: Synthetic oligonucleotide
cacacacucugcagauguu

SEQ ID NO: 3052453 - RNA, 19 nt, Artificial Sequence
  Description of Artificial Sequence: Synthetic oligonucleotide
acccggcuugcaguccuuu

SEQ ID NO: 3052454 - RNA, 19 nt, Artificial Sequence
  Description of Artificial Sequence: Synthetic oligonucleotide
gugccaccaccacucugau

SEQ ID NO: 3052455 - RNA, 19 nt, Artificial Sequence
  Description of Artificial Sequence: Synthetic oligonucleotide
ggucggcaggugccaccac

SEQ ID NO: 3052456 - RNA, 19 nt, Artificial Sequence
  Description of Artificial Sequence: Synthetic oligonucleotide
cccucugugcacucacacu

SEQ ID NO: 3052457 - RNA, 19 nt, Artificial Sequence
  Description of Artificial Sequence: Synthetic oligonucleotide
ccacauccgucucuuuggu

SEQ ID NO: 3052458 - RNA, 19 nt, Artificial Sequence
  Description of Artificial Sequence: Synthetic oligonucleotide
caggugccaccaccacucu

SEQ ID NO: 3052459 - RNA, 19 nt, Artificial Sequence
  Description of Artificial Sequence: Synthetic oligonucleotide
gucggggagcaaggcuucu

SEQ ID NO: 3052460 - RNA, 19 nt, Artificial Sequence
  Description of Artificial Sequence: Synthetic oligonucleotide
ccagggucggcaggugcca

SEQ ID NO: 3052461 - RNA, 19 nt, Artificial Sequence
  Description of Artificial Sequence: Synthetic oligonucleotide
caggcacacuuggguccca

SEQ ID NO: 3052462 - RNA, 19 nt, Artificial Sequence
  Description of Artificial Sequence: Synthetic oligonucleotide
cguugcuggucggggagca

SEQ ID NO: 3052463 - RNA, 19 nt, Artificial Sequence
  Description of Artificial Sequence: Synthetic oligonucleotide
cggcaggugccaccaccac

SEQ ID NO: 3052464 - RNA, 19 nt, Artificial Sequence
  Description of Artificial Sequence: Synthetic oligonucleotide
caccaccacucugaucauu

SEQ ID NO: 3052465 - RNA, 19 nt, Artificial Sequence
  Description of Artificial Sequence: Synthetic oligonucleotide
gacccggcuugcaguccuu

SEQ ID NO: 3052466 - RNA, 19 nt, Artificial Sequence
  Description of Artificial Sequence: Synthetic oligonucleotide
cccggcuugcaguccuuuu

SEQ ID NO: 3052467 - RNA, 19 nt, Artificial Sequence
  Description of Artificial Sequence: Synthetic oligonucleotide
ccaccaccacucugaucau

SEQ ID NO: 3052468 - RNA, 19 nt, Artificial Sequence
  Description of Artificial Sequence: Synthetic oligonucleotide
ccgucucuuugguccccuu

SEQ ID NO: 3052469 - RNA, 19 nt, Artificial Sequence
  Description of Artificial Sequence: Synthetic oligonucleotide
uuaaagauagccaucgugg

SEQ ID NO: 3052470 - RNA, 19 nt, Artificial Sequence
  Description of Artificial Sequence: Synthetic oligonucleotide
uuuaucauaccacacaaca

SEQ ID NO: 3052471 - RNA, 19 nt, Artificial Sequence
  Description of Artificial Sequence: Synthetic oligonucleotide
aaugacucagaucauacug

SEQ ID NO: 3052472 - RNA, 19 nt, Artificial Sequence
  Description of Artificial Sequence: Synthetic oligonucleotide
aagauagccaucguggucc

SEQ ID NO: 3052473 - RNA, 19 nt, Artificial Sequence
  Description of Artificial Sequence: Synthetic oligonucleotide
acagaugugucauugaagg

SEQ ID NO: 3052474 - RNA, 19 nt, Artificial Sequence
  Description of Artificial Sequence: Synthetic oligonucleotide
  modified_base (6)..(6): a, c, u, g, unknown or other
uuuuanaccggucugacaa

SEQ ID NO: 3052475 - RNA, 19 nt, Artificial Sequence
  Description of Artificial Sequence: Synthetic oligonucleotide
uuugccaugacaaaagcca

SEQ ID NO: 3052476 - RNA, 19 nt, Artificial Sequence
  Description of Artificial Sequence: Synthetic oligonucleotide
aauuuuaucauaccacaca

SEQ ID NO: 3052477 - RNA, 19 nt, Artificial Sequence
  Description of Artificial Sequence: Synthetic oligonucleotide
ugugcaauuaaagauagcc

SEQ ID NO: 3052478 - RNA, 19 nt, Artificial Sequence
  Description of Artificial Sequence: Synthetic oligonucleotide
gaguccaggauuuagacag

SEQ ID NO: 3052479 - RNA, 19 nt, Artificial Sequence
  Description of Artificial Sequence: Synthetic oligonucleotide
  modified_base (11)..(11): a, c, u, g, unknown or other
aaagguuuuanaccggucu

SEQ ID NO: 3052480 - RNA, 19 nt, Artificial Sequence
  Description of Artificial Sequence: Synthetic oligonucleotide
auuuagacagaauacccgg

SEQ ID NO: 3052481 - RNA, 19 nt, Artificial Sequence
  Description of Artificial Sequence: Synthetic oligonucleotide
aaaaugaagauuugccaug

SEQ ID NO: 3052482 - RNA, 19 nt, Artificial Sequence
  Description of Artificial Sequence: Synthetic oligonucleotide
caugacaaaagccaguccg

SEQ ID NO: 3052483 - RNA, 19 nt, Artificial Sequence
  Description of Artificial Sequence: Synthetic oligonucleotide
ugaagauuugccaugacaa

SEQ ID NO: 3052484 - RNA, 19 nt, Artificial Sequence
  Description of Artificial Sequence: Synthetic oligonucleotide
augaaaaugaagauuugcc

SEQ ID NO: 3052485 - RNA, 19 nt, Artificial Sequence
  Description of Artificial Sequence: Synthetic oligonucleotide
gcuuaaaugacucagauca

SEQ ID NO: 3052486 - RNA, 19 nt, Artificial Sequence
  Description of Artificial Sequence: Synthetic oligonucleotide
aaucuguccagauguggcc

SEQ ID NO: 3052487 - RNA, 19 nt, Artificial Sequence
  Description of Artificial Sequence: Synthetic oligonucleotide
uaucauaccacacaacagu

SEQ ID NO: 3052488 - RNA, 19 nt, Artificial Sequence
  Description of Artificial Sequence: Synthetic oligonucleotide
aagucuaucacagccaauc

SEQ ID NO: 3052489 - RNA, 19 nt, Artificial Sequence
  Description of Artificial Sequence: Synthetic oligonucleotide
ugaaaaugaagauuugcca

SEQ ID NO: 3052490 - RNA, 19 nt, Artificial Sequence
  Description of Artificial Sequence: Synthetic oligonucleotide
ucuaucacagccaaucaug

SEQ ID NO: 3052491 - RNA, 19 nt, Artificial Sequence
  Description of Artificial Sequence: Synthetic oligonucleotide
auuaaagauagccaucgug

SEQ ID NO: 3052492 - RNA, 19 nt, Artificial Sequence
  Description of Artificial Sequence: Synthetic oligonucleotide
aggauuuagacagaauacc

SEQ ID NO: 3052493 - RNA, 19 nt, Artificial Sequence
  Description of Artificial Sequence: Synthetic oligonucleotide
  modified_base (10)..(10): a, c, u, g, unknown or other
aagguuuuanaccggucug

SEQ ID NO: 3052494 - RNA, 19 nt, Artificial Sequence
  Description of Artificial Sequence: Synthetic oligonucleotide
ucauacugugcaauuaaag

SEQ ID NO: 3052495 - RNA, 19 nt, Artificial Sequence
  Description of Artificial Sequence: Synthetic oligonucleotide
aaagauagccaucgugguc

SEQ ID NO: 3052496 - RNA, 19 nt, Artificial Sequence
  Description of Artificial Sequence: Synthetic oligonucleotide
ugcaauuaaagauagccau

SEQ ID NO: 3052497 - RNA, 19 nt, Artificial Sequence
  Description of Artificial Sequence: Synthetic oligonucleotide
uuaucauaccacacaacag

SEQ ID NO: 3052498 - RNA, 19 nt, Artificial Sequence
  Description of Artificial Sequence: Synthetic oligonucleotide
caauuaaagauagccaucg

SEQ ID NO: 3052499 - RNA, 19 nt, Artificial Sequence
  Description of Artificial Sequence: Synthetic oligonucleotide
gauuuagacagaauacccg

SEQ ID NO: 3052500 - RNA, 19 nt, Artificial Sequence
  Description of Artificial Sequence: Synthetic oligonucleotide
acaaaagccaguccgucac

SEQ ID NO: 3052501 - RNA, 19 nt, Artificial Sequence
  Description of Artificial Sequence: Synthetic oligonucleotide
uaaaugacucagaucauac

SEQ ID NO: 3052502 - RNA, 19 nt, Artificial Sequence
  Description of Artificial Sequence: Synthetic oligonucleotide
ugugcuucucuccacgagg

SEQ ID NO: 3052503 - RNA, 19 nt, Artificial Sequence
  Description of Artificial Sequence: Synthetic oligonucleotide
aggggagagugauugagcc

SEQ ID NO: 3052504 - RNA, 19 nt, Artificial Sequence
  Description of Artificial Sequence: Synthetic oligonucleotide
agugauugagccuaaugug

SEQ ID NO: 3052505 - RNA, 19 nt, Artificial Sequence
  Description of Artificial Sequence: Synthetic oligonucleotide
gaugaaaaugaagauuugc

SEQ ID NO: 3052506 - RNA, 19 nt, Artificial Sequence
  Description of Artificial Sequence: Synthetic oligonucleotide
  modified_base (15)..(15): a, c, u, g, unknown or other
ggucaaagguuuuanaccg

SEQ ID NO: 3052507 - RNA, 19 nt, Artificial Sequence
  Description of Artificial Sequence: Synthetic oligonucleotide
aacagugacagauguguca

SEQ ID NO: 3052508 - RNA, 19 nt, Artificial Sequence
  Description of Artificial Sequence: Synthetic oligonucleotide
uaaugugcuucucuccacg

SEQ ID NO: 3052509 - RNA, 19 nt, Artificial Sequence
  Description of Artificial Sequence: Synthetic oligonucleotide
auuuuaucauaccacacaa

SEQ ID NO: 3052510 - RNA, 19 nt, Artificial Sequence
  Description of Artificial Sequence: Synthetic oligonucleotide
aaaagccaguccgucaccc

SEQ ID NO: 3052511 - RNA, 19 nt, Artificial Sequence
  Description of Artificial Sequence: Synthetic oligonucleotide
auacugugcaauuaaagau

SEQ ID NO: 3052512 - RNA, 19 nt, Artificial Sequence
  Description of Artificial Sequence: Synthetic oligonucleotide
aucacagccaaucauggca

SEQ ID NO: 3052513 - RNA, 19 nt, Artificial Sequence
  Description of Artificial Sequence: Synthetic oligonucleotide
cuaauuuuaucauaccaca

SEQ ID NO: 3052514 - RNA, 19 nt, Artificial Sequence
  Description of Artificial Sequence: Synthetic oligonucleotide
uaauuuuaucauaccacac

SEQ ID NO: 3052515 - RNA, 19 nt, Artificial Sequence
  Description of Artificial Sequence: Synthetic oligonucleotide
ucacccuucugccauagcc

SEQ ID NO: 3052516 - RNA, 19 nt, Artificial Sequence
  Description of Artificial Sequence: Synthetic oligonucleotide
gaggcgaugaaaaugaaga

SEQ ID NO: 3052517 - RNA, 19 nt, Artificial Sequence
  Description of Artificial Sequence: Synthetic oligonucleotide
cuaucacagccaaucaugg

SEQ ID NO: 3052518 - RNA, 19 nt, Artificial Sequence
  Description of Artificial Sequence: Synthetic oligonucleotide
aggaguccaggauuuagac

SEQ ID NO: 3052519 - RNA, 19 nt, Artificial Sequence
  Description of Artificial Sequence: Synthetic oligonucleotide
uuagacagaauacccggac

SEQ ID NO: 3052520 - RNA, 19 nt, Artificial Sequence
  Description of Artificial Sequence: Synthetic oligonucleotide
cauacugugcaauuaaaga

SEQ ID NO: 3052521 - RNA, 19 nt, Artificial Sequence
  Description of Artificial Sequence: Synthetic oligonucleotide
  modified_base (13)..(13): a, c, u, g, unknown or other
ucaaagguuuuanaccggu

SEQ ID NO: 3052522 - RNA, 19 nt, Artificial Sequence
  Description of Artificial Sequence: Synthetic oligonucleotide
acaacagugacagaugugu

SEQ ID NO: 3052523 - RNA, 19 nt, Artificial Sequence
  Description of Artificial Sequence: Synthetic oligonucleotide
auuugccaugacaaaagcc

SEQ ID NO: 3052524 - RNA, 19 nt, Artificial Sequence
  Description of Artificial Sequence: Synthetic oligonucleotide
uggccuaauuuuaucauac

SEQ ID NO: 3052525 - RNA, 19 nt, Artificial Sequence
  Description of Artificial Sequence: Synthetic oligonucleotide
aaaugacucagaucauacu

SEQ ID NO: 3052526 - RNA, 19 nt, Artificial Sequence
  Description of Artificial Sequence: Synthetic oligonucleotide
uacugugcaauuaaagaua

SEQ ID NO: 3052527 - RNA, 19 nt, Artificial Sequence
  Description of Artificial Sequence: Synthetic oligonucleotide
caggauuuagacagaauac

SEQ ID NO: 3052528 - RNA, 19 nt, Artificial Sequence
  Description of Artificial Sequence: Synthetic oligonucleotide
cauaccacacaacagugac

SEQ ID NO: 3052529 - RNA, 19 nt, Artificial Sequence
  Description of Artificial Sequence: Synthetic oligonucleotide
  modified_base (16)..(16): a, c, u, g, unknown or other
gggucaaagguuuuanacc

SEQ ID NO: 3052530 - RNA, 19 nt, Artificial Sequence
  Description of Artificial Sequence: Synthetic oligonucleotide
ucacagccaaucauggcag

SEQ ID NO: 3052531 - RNA, 19 nt, Artificial Sequence
  Description of Artificial Sequence: Synthetic oligonucleotide
aaaacuggcgucacaccac

SEQ ID NO: 3052532 - RNA, 19 nt, Artificial Sequence
  Description of Artificial Sequence: Synthetic oligonucleotide
augaagauuugccaugaca

SEQ ID NO: 3052533 - RNA, 19 nt, Artificial Sequence
  Description of Artificial Sequence: Synthetic oligonucleotide
ugauugagccuaaugugcu

SEQ ID NO: 3052534 - RNA, 19 nt, Artificial Sequence
  Description of Artificial Sequence: Synthetic oligonucleotide
ucugccauagccccaccag

SEQ ID NO: 3052535 - RNA, 19 nt, Artificial Sequence
  Description of Artificial Sequence: Synthetic oligonucleotide
aaaugaagauuugccauga

SEQ ID NO: 3052536 - RNA, 19 nt, Artificial Sequence
  Description of Artificial Sequence: Synthetic oligonucleotide
uuuagacagaauacccgga

SEQ ID NO: 3052537 - RNA, 19 nt, Artificial Sequence
  Description of Artificial Sequence: Synthetic oligonucleotide
aagauuugccaugacaaaa

SEQ ID NO: 3052538 - RNA, 19 nt, Artificial Sequence
  Description of Artificial Sequence: Synthetic oligonucleotide
uuuuaucauaccacacaac

SEQ ID NO: 3052539 - RNA, 19 nt, Artificial Sequence
  Description of Artificial Sequence: Synthetic oligonucleotide
aguccgucacccuucugcc

SEQ ID NO: 3052540 - RNA, 19 nt, Artificial Sequence
  Description of Artificial Sequence: Synthetic oligonucleotide
gauuugccaugacaaaagc

SEQ ID NO: 3052541 - RNA, 19 nt, Artificial Sequence
  Description of Artificial Sequence: Synthetic oligonucleotide
aaucauggcagccuugcuu

SEQ ID NO: 3052542 - RNA, 19 nt, Artificial Sequence
  Description of Artificial Sequence: Synthetic oligonucleotide
aauuaaagauagccaucgu

SEQ ID NO: 3052543 - RNA, 19 nt, Artificial Sequence
  Description of Artificial Sequence: Synthetic oligonucleotide
agauccaggguggagaauc

SEQ ID NO: 3052544 - RNA, 19 nt, Artificial Sequence
  Description of Artificial Sequence: Synthetic oligonucleotide
gaaaaugaagauuugccau

SEQ ID NO: 3052545 - RNA, 19 nt, Artificial Sequence
  Description of Artificial Sequence: Synthetic oligonucleotide
uaaagauagccaucguggu

SEQ ID NO: 3052546 - RNA, 19 nt, Artificial Sequence
  Description of Artificial Sequence: Synthetic oligonucleotide
accacacagauccagggug

SEQ ID NO: 3052547 - RNA, 19 nt, Artificial Sequence
  Description of Artificial Sequence: Synthetic oligonucleotide
ccuaauuuuaucauaccac

SEQ ID NO: 3052548 - RNA, 19 nt, Artificial Sequence
  Description of Artificial Sequence: Synthetic oligonucleotide
uugcuuaaaugacucagau

SEQ ID NO: 3052549 - RNA, 19 nt, Artificial Sequence
  Description of Artificial Sequence: Synthetic oligonucleotide
ugacagaugugucauugaa

SEQ ID NO: 3052550 - RNA, 19 nt, Artificial Sequence
  Description of Artificial Sequence: Synthetic oligonucleotide
acccuucugccauagcccc

SEQ ID NO: 3052551 - RNA, 19 nt, Artificial Sequence
  Description of Artificial Sequence: Synthetic oligonucleotide
gaaucuguccagauguggc

SEQ ID NO: 3052552 - RNA, 19 nt, Artificial Sequence
  Description of Artificial Sequence: Synthetic oligonucleotide
ggacaagucuaucacagcc

SEQ ID NO: 3052553 - RNA, 19 nt, Artificial Sequence
  Description of Artificial Sequence: Synthetic oligonucleotide
gagugauugagccuaaugu

SEQ ID NO: 3052554 - RNA, 19 nt, Artificial Sequence
  Description of Artificial Sequence: Synthetic oligonucleotide
uggagaaucuguccagaug

SEQ ID NO: 3052555 - RNA, 19 nt, Artificial Sequence
  Description of Artificial Sequence: Synthetic oligonucleotide
agagugauugagccuaaug

SEQ ID NO: 3052556 - RNA, 19 nt, Artificial Sequence
  Description of Artificial Sequence: Synthetic oligonucleotide
agaauacccggacaagucu

SEQ ID NO: 3052557 - RNA, 19 nt, Artificial Sequence
  Description of Artificial Sequence: Synthetic oligonucleotide
ugacucagaucauacugug

SEQ ID NO: 3052558 - RNA, 19 nt, Artificial Sequence
  Description of Artificial Sequence: Synthetic oligonucleotide
agccuaaugugcuucucuc

SEQ ID NO: 3052559 - RNA, 19 nt, Artificial Sequence
  Description of Artificial Sequence: Synthetic oligonucleotide
acaccacacagauccaggg

SEQ ID NO: 3052560 - RNA, 19 nt, Artificial Sequence
  Description of Artificial Sequence: Synthetic oligonucleotide
ucauaccacacaacaguga

SEQ ID NO: 3052561 - RNA, 19 nt, Artificial Sequence
  Description of Artificial Sequence: Synthetic oligonucleotide
agauuugccaugacaaaag

SEQ ID NO: 3052562 - RNA, 19 nt, Artificial Sequence
  Description of Artificial Sequence: Synthetic oligonucleotide
uagacagaauacccggaca

SEQ ID NO: 3052563 - RNA, 19 nt, Artificial Sequence
  Description of Artificial Sequence: Synthetic oligonucleotide
cgucacaccacacagaucc

SEQ ID NO: 3052564 - RNA, 19 nt, Artificial Sequence
  Description of Artificial Sequence: Synthetic oligonucleotide
acugugcaauuaaagauag

SEQ ID NO: 3052565 - RNA, 19 nt, Artificial Sequence
  Description of Artificial Sequence: Synthetic oligonucleotide
gugauugagccuaaugugc

SEQ ID NO: 3052566 - RNA, 19 nt, Artificial Sequence
  Description of Artificial Sequence: Synthetic oligonucleotide
agugacagaugugucauug

SEQ ID NO: 3052567 - RNA, 19 nt, Artificial Sequence
  Description of Artificial Sequence: Synthetic oligonucleotide
agaugugucauugaaggaa

SEQ ID NO: 3052568 - RNA, 19 nt, Artificial Sequence
  Description of Artificial Sequence: Synthetic oligonucleotide
agaaucuguccagaugugg

SEQ ID NO: 3052569 - RNA, 19 nt, Artificial Sequence
  Description of Artificial Sequence: Synthetic oligonucleotide
agacagaauacccggacaa

SEQ ID NO: 3052570 - RNA, 19 nt, Artificial Sequence
  Description of Artificial Sequence: Synthetic oligonucleotide
auugagccuaaugugcuuc

SEQ ID NO: 3052571 - RNA, 19 nt, Artificial Sequence
  Description of Artificial Sequence: Synthetic oligonucleotide
acacaacagugacagaugu

SEQ ID NO: 3052572 - RNA, 19 nt, Artificial Sequence
  Description of Artificial Sequence: Synthetic oligonucleotide
uuaaaugacucagaucaua

SEQ ID NO: 3052573 - RNA, 19 nt, Artificial Sequence
  Description of Artificial Sequence: Synthetic oligonucleotide
aaugugcuucucuccacga

SEQ ID NO: 3052574 - RNA, 19 nt, Artificial Sequence
  Description of Artificial Sequence: Synthetic oligonucleotide
auguggccuaauuuuauca

SEQ ID NO: 3052575 - RNA, 19 nt, Artificial Sequence
  Description of Artificial Sequence: Synthetic oligonucleotide
acccggacaagucuaucac

SEQ ID NO: 3052576 - RNA, 19 nt, Artificial Sequence
  Description of Artificial Sequence: Synthetic oligonucleotide
gccaucgugguccauaggg

SEQ ID NO: 3052577 - RNA, 19 nt, Artificial Sequence
  Description of Artificial Sequence: Synthetic oligonucleotide
gacagaugugucauugaag

SEQ ID NO: 3052578 - RNA, 19 nt, Artificial Sequence
  Description of Artificial Sequence: Synthetic oligonucleotide
aaacuggcgucacaccaca

SEQ ID NO: 3052579 - RNA, 19 nt, Artificial Sequence
  Description of Artificial Sequence: Synthetic oligonucleotide
ugguccauaggggucaaag

SEQ ID NO: 3052580 - RNA, 19 nt, Artificial Sequence
  Description of Artificial Sequence: Synthetic oligonucleotide
ugugucauugaaggaaaga

SEQ ID NO: 3052581 - RNA, 19 nt, Artificial Sequence
  Description of Artificial Sequence: Synthetic oligonucleotide
caguccgucacccuucugc

SEQ ID NO: 3052582 - RNA, 19 nt, Artificial Sequence
  Description of Artificial Sequence: Synthetic oligonucleotide
  modified_base (14)..(14): a, c, u, g, unknown or other
gucaaagguuuuanaccgg

SEQ ID NO: 3052583 - RNA, 19 nt, Artificial Sequence
  Description of Artificial Sequence: Synthetic oligonucleotide
auaggggagagugauugag

SEQ ID NO: 3052584 - RNA, 19 nt, Artificial Sequence
  Description of Artificial Sequence: Synthetic oligonucleotide
ggauuuagacagaauaccc

SEQ ID NO: 3052585 - RNA, 19 nt, Artificial Sequence
  Description of Artificial Sequence: Synthetic oligonucleotide
aggguggagaaucugucca

SEQ ID NO: 3052586 - RNA, 19 nt, Artificial Sequence
  Description of Artificial Sequence: Synthetic oligonucleotide
acaagucuaucacagccaa

SEQ ID NO: 3052587 - RNA, 19 nt, Artificial Sequence
  Description of Artificial Sequence: Synthetic oligonucleotide
uaggggagagugauugagc

SEQ ID NO: 3052588 - RNA, 19 nt, Artificial Sequence
  Description of Artificial Sequence: Synthetic oligonucleotide
uguggccuaauuuuaucau

SEQ ID NO: 3052589 - RNA, 19 nt, Artificial Sequence
  Description of Artificial Sequence: Synthetic oligonucleotide
  modified_base (17)..(17): a, c, u, g, unknown or other
ggggucaaagguuuuanac

SEQ ID NO: 3052590 - RNA, 19 nt, Artificial Sequence
  Description of Artificial Sequence: Synthetic oligonucleotide
gauguggccuaauuuuauc

SEQ ID NO: 3052591 - RNA, 19 nt, Artificial Sequence
  Description of Artificial Sequence: Synthetic oligonucleotide
ugcuuaaaugacucagauc

SEQ ID NO: 3052592 - RNA, 19 nt, Artificial Sequence
  Description of Artificial Sequence: Synthetic oligonucleotide
ugccauagccccaccagga

SEQ ID NO: 3052593 - RNA, 19 nt, Artificial Sequence
  Description of Artificial Sequence: Synthetic oligonucleotide
cacgaggcgaugaaaauga

SEQ ID NO: 3052594 - RNA, 19 nt, Artificial Sequence
  Description of Artificial Sequence: Synthetic oligonucleotide
cauagccccaccaggaguc

SEQ ID NO: 3052595 - RNA, 19 nt, Artificial Sequence
  Description of Artificial Sequence: Synthetic oligonucleotide
uacccggacaagucuauca

SEQ ID NO: 3052596 - RNA, 19 nt, Artificial Sequence
  Description of Artificial Sequence: Synthetic oligonucleotide
uccauaggggucaaagguu

SEQ ID NO: 3052597 - RNA, 19 nt, Artificial Sequence
  Description of Artificial Sequence: Synthetic oligonucleotide
  modified_base (4)..(4): a, c, u, g, unknown or other
uuanaccggucugacaaaa

SEQ ID NO: 3052598 - RNA, 19 nt, Artificial Sequence
  Description of Artificial Sequence: Synthetic oligonucleotide
cuggcgucacaccacacag

SEQ ID NO: 3052599 - RNA, 19 nt, Artificial Sequence
  Description of Artificial Sequence: Synthetic oligonucleotide
acagaauacccggacaagu

SEQ ID NO: 3052600 - RNA, 19 nt, Artificial Sequence
  Description of Artificial Sequence: Synthetic oligonucleotide
  modified_base (5)..(5): a, c, u, g, unknown or other
uuuanaccggucugacaaa

SEQ ID NO: 3052601 - RNA, 19 nt, Artificial Sequence
  Description of Artificial Sequence: Synthetic oligonucleotide
cacccuucugccauagccc

SEQ ID NO: 3052602 - RNA, 19 nt, Artificial Sequence
  Description of Artificial Sequence: Synthetic oligonucleotide
gaagauuugccaugacaaa

SEQ ID NO: 3052603 - RNA, 19 nt, Artificial Sequence
  Description of Artificial Sequence: Synthetic oligonucleotide
cagaauacccggacaaguc

SEQ ID NO: 3052604 - RNA, 19 nt, Artificial Sequence
  Description of Artificial Sequence: Synthetic oligonucleotide
gacaaaagccaguccguca

SEQ ID NO: 3052605 - RNA, 19 nt, Artificial Sequence
  Description of Artificial Sequence: Synthetic oligonucleotide
cacacaacagugacagaug

SEQ ID NO: 3052606 - RNA, 19 nt, Artificial Sequence
  Description of Artificial Sequence: Synthetic oligonucleotide
agucuaucacagccaauca

SEQ ID NO: 3052607 - RNA, 19 nt, Artificial Sequence
  Description of Artificial Sequence: Synthetic oligonucleotide
ucagaucauacugugcaau

SEQ ID NO: 3052608 - RNA, 19 nt, Artificial Sequence
  Description of Artificial Sequence: Synthetic oligonucleotide
aucauaccacacaacagug

SEQ ID NO: 3052609 - RNA, 19 nt, Artificial Sequence
  Description of Artificial Sequence: Synthetic oligonucleotide
cuugcuuaaaugacucaga

SEQ ID NO: 3052610 - RNA, 19 nt, Artificial Sequence
  Description of Artificial Sequence: Synthetic oligonucleotide
ggagaaucuguccagaugu

SEQ ID NO: 3052611 - RNA, 19 nt, Artificial Sequence
  Description of Artificial Sequence: Synthetic oligonucleotide
agccuugcuuaaaugacuc

SEQ ID NO: 3052612 - RNA, 19 nt, Artificial Sequence
  Description of Artificial Sequence: Synthetic oligonucleotide
  modified_base (7)..(7): a, c, u, g, unknown or other
guuuuanaccggucugaca

SEQ ID NO: 3052613 - RNA, 19 nt, Artificial Sequence
  Description of Artificial Sequence: Synthetic oligonucleotide
uagccaucgugguccauag

SEQ ID NO: 3052614 - RNA, 19 nt, Artificial Sequence
  Description of Artificial Sequence: Synthetic oligonucleotide
  modified_base (12)..(12): a, c, u, g, unknown or other
caaagguuuuanaccgguc

SEQ ID NO: 3052615 - RNA, 19 nt, Artificial Sequence
  Description of Artificial Sequence: Synthetic oligonucleotide
cuaaugugcuucucuccac

SEQ ID NO: 3052616 - RNA, 19 nt, Artificial Sequence
  Description of Artificial Sequence: Synthetic oligonucleotide
gacagaauacccggacaag

SEQ ID NO: 3052617 - RNA, 19 nt, Artificial Sequence
  Description of Artificial Sequence: Synthetic oligonucleotide
gguccauaggggucaaagg

SEQ ID NO: 3052618 - RNA, 19 nt, Artificial Sequence
  Description of Artificial Sequence: Synthetic oligonucleotide
acuggcgucacaccacaca

SEQ ID NO: 3052619 - RNA, 19 nt, Artificial Sequence
  Description of Artificial Sequence: Synthetic oligonucleotide
ugcuucucuccacgaggcg

SEQ ID NO: 3052620 - RNA, 19 nt, Artificial Sequence
  Description of Artificial Sequence: Synthetic oligonucleotide
ugccaugacaaaagccagu

SEQ ID NO: 3052621 - RNA, 19 nt, Artificial Sequence
  Description of Artificial Sequence: Synthetic oligonucleotide
gaugugucauugaaggaaa

SEQ ID NO: 3052622 - RNA, 19 nt, Artificial Sequence
  Description of Artificial Sequence: Synthetic oligonucleotide
aaagccaguccgucacccu

SEQ ID NO: 3052623 - RNA, 19 nt, Artificial Sequence
  Description of Artificial Sequence: Synthetic oligonucleotide
caggguggagaaucugucc

SEQ ID NO: 3052624 - RNA, 19 nt, Artificial Sequence
  Description of Artificial Sequence: Synthetic oligonucleotide
augacucagaucauacugu

SEQ ID NO: 3052625 - RNA, 19 nt, Artificial Sequence
  Description of Artificial Sequence: Synthetic oligonucleotide
augugcuucucuccacgag

SEQ ID NO: 3052626 - RNA, 19 nt, Artificial Sequence
  Description of Artificial Sequence: Synthetic oligonucleotide
cugccauagccccaccagg

SEQ ID NO: 3052627 - RNA, 19 nt, Artificial Sequence
  Description of Artificial Sequence: Synthetic oligonucleotide
gacaagucuaucacagcca

SEQ ID NO: 3052628 - RNA, 19 nt, Artificial Sequence
  Description of Artificial Sequence: Synthetic oligonucleotide
gugcaauuaaagauagcca

SEQ ID NO: 3052629 - RNA, 19 nt, Artificial Sequence
  Description of Artificial Sequence: Synthetic oligonucleotide
guccauaggggucaaaggu

SEQ ID NO: 3052630 - RNA, 19 nt, Artificial Sequence
  Description of Artificial Sequence: Synthetic oligonucleotide
uucugccauagccccacca

SEQ ID NO: 3052631 - RNA, 19 nt, Artificial Sequence
  Description of Artificial Sequence: Synthetic oligonucleotide
cacaacagugacagaugug

SEQ ID NO: 3052632 - RNA, 19 nt, Artificial Sequence
  Description of Artificial Sequence: Synthetic oligonucleotide
ccggacaagucuaucacag

SEQ ID NO: 3052633 - RNA, 19 nt, Artificial Sequence
  Description of Artificial Sequence: Synthetic oligonucleotide
  modified_base (9)..(9): a, c, u, g, unknown or other
agguuuuanaccggucuga

SEQ ID NO: 3052634 - RNA, 19 nt, Artificial Sequence
  Description of Artificial Sequence: Synthetic oligonucleotide
gacucagaucauacugugc

SEQ ID NO: 3052635 - RNA, 19 nt, Artificial Sequence
  Description of Artificial Sequence: Synthetic oligonucleotide
uugagccuaaugugcuucu

SEQ ID NO: 3052636 - RNA, 19 nt, Artificial Sequence
  Description of Artificial Sequence: Synthetic oligonucleotide
aagccaguccgucacccuu

SEQ ID NO: 3052637 - RNA, 19 nt, Artificial Sequence
  Description of Artificial Sequence: Synthetic oligonucleotide
aggcgaugaaaaugaagau

SEQ ID NO: 3052638 - RNA, 19 nt, Artificial Sequence
  Description of Artificial Sequence: Synthetic oligonucleotide
acagauccaggguggagaa

SEQ ID NO: 3052639 - RNA, 19 nt, Artificial Sequence
  Description of Artificial Sequence: Synthetic oligonucleotide
auggcagccuugcuuaaau

SEQ ID NO: 3052640 - RNA, 19 nt, Artificial Sequence
  Description of Artificial Sequence: Synthetic oligonucleotide
ggcagccuugcuuaaauga

SEQ ID NO: 3052641 - RNA, 19 nt, Artificial Sequence
  Description of Artificial Sequence: Synthetic oligonucleotide
ccuugcuuaaaugacucag

SEQ ID NO: 3052642 - RNA, 19 nt, Artificial Sequence
  Description of Artificial Sequence: Synthetic oligonucleotide
cugugcaauuaaagauagc

SEQ ID NO: 3052643 - RNA, 19 nt, Artificial Sequence
  Description of Artificial Sequence: Synthetic oligonucleotide
uccaggauuuagacagaau

SEQ ID NO: 3052644 - RNA, 19 nt, Artificial Sequence
  Description of Artificial Sequence: Synthetic oligonucleotide
uccacgaggcgaugaaaau

SEQ ID NO: 3052645 - RNA, 19 nt, Artificial Sequence
  Description of Artificial Sequence: Synthetic oligonucleotide
ucgugguccauagggguca

SEQ ID NO: 3052646 - RNA, 19 nt, Artificial Sequence
  Description of Artificial Sequence: Synthetic oligonucleotide
caacagugacagauguguc

SEQ ID NO: 3052647 - RNA, 19 nt, Artificial Sequence
  Description of Artificial Sequence: Synthetic oligonucleotide
caaaagccaguccgucacc

SEQ ID NO: 3052648 - RNA, 19 nt, Artificial Sequence
  Description of Artificial Sequence: Synthetic oligonucleotide
aauacccggacaagucuau

SEQ ID NO: 3052649 - RNA, 19 nt, Artificial Sequence
  Description of Artificial Sequence: Synthetic oligonucleotide
agaucauacugugcaauua

SEQ ID NO: 3052650 - RNA, 19 nt, Artificial Sequence
  Description of Artificial Sequence: Synthetic oligonucleotide
aucgugguccauagggguc

SEQ ID NO: 3052651 - RNA, 19 nt, Artificial Sequence
  Description of Artificial Sequence: Synthetic oligonucleotide
ccaggauuuagacagaaua

SEQ ID NO: 3052652 - RNA, 19 nt, Artificial Sequence
  Description of Artificial Sequence: Synthetic oligonucleotide
  modified_base (19)..(19): a, c, u, g, unknown or other
uaggggucaaagguuuuan

SEQ ID NO: 3052653 - RNA, 19 nt, Artificial Sequence
  Description of Artificial Sequence: Synthetic oligonucleotide
uggcagccuugcuuaaaug

SEQ ID NO: 3052654 - RNA, 19 nt, Artificial Sequence
  Description of Artificial Sequence: Synthetic oligonucleotide
aucuguccagauguggccu

SEQ ID NO: 3052655 - RNA, 19 nt, Artificial Sequence
  Description of Artificial Sequence: Synthetic oligonucleotide
gugucauugaaggaaagau

SEQ ID NO: 3052656 - RNA, 19 nt, Artificial Sequence
  Description of Artificial Sequence: Synthetic oligonucleotide
caggaguccaggauuuaga

SEQ ID NO: 3052657 - RNA, 19 nt, Artificial Sequence
  Description of Artificial Sequence: Synthetic oligonucleotide
  modified_base (8)..(8): a, c, u, g, unknown or other
gguuuuanaccggucugac

SEQ ID NO: 3052658 - RNA, 19 nt, Artificial Sequence
  Description of Artificial Sequence: Synthetic oligonucleotide
  modified_base (18)..(18): a, c, u, g, unknown or other
aggggucaaagguuuuana

SEQ ID NO: 3052659 - RNA, 19 nt, Artificial Sequence
  Description of Artificial Sequence: Synthetic oligonucleotide
gaauacccggacaagucua

SEQ ID NO: 3052660 - RNA, 19 nt, Artificial Sequence
  Description of Artificial Sequence: Synthetic oligonucleotide
cuccacgaggcgaugaaaa

SEQ ID NO: 3052661 - RNA, 19 nt, Artificial Sequence
  Description of Artificial Sequence: Synthetic oligonucleotide
ccaucgugguccauagggg

SEQ ID NO: 3052662 - RNA, 19 nt, Artificial Sequence
  Description of Artificial Sequence: Synthetic oligonucleotide
auagccccaccaggagucc

SEQ ID NO: 3052663 - RNA, 19 nt, Artificial Sequence
  Description of Artificial Sequence: Synthetic oligonucleotide
uggcgucacaccacacaga

SEQ ID NO: 3052664 - RNA, 19 nt, Artificial Sequence
  Description of Artificial Sequence: Synthetic oligonucleotide
ggccuaauuuuaucauacc

SEQ ID NO: 3052665 - RNA, 19 nt, Artificial Sequence
  Description of Artificial Sequence: Synthetic oligonucleotide
gcaauuaaagauagccauc

SEQ ID NO: 3052666 - RNA, 19 nt, Artificial Sequence
  Description of Artificial Sequence: Synthetic oligonucleotide
aucauacugugcaauuaaa

SEQ ID NO: 3052667 - RNA, 19 nt, Artificial Sequence
  Description of Artificial Sequence: Synthetic oligonucleotide
aacuggcgucacaccacac

SEQ ID NO: 3052668 - RNA, 19 nt, Artificial Sequence
  Description of Artificial Sequence: Synthetic oligonucleotide
ccacacagauccagggugg

SEQ ID NO: 3052669 - RNA, 19 nt, Artificial Sequence
  Description of Artificial Sequence: Synthetic oligonucleotide
auagccaucgugguccaua

SEQ ID NO: 3052670 - RNA, 19 nt, Artificial Sequence
  Description of Artificial Sequence: Synthetic oligonucleotide
guggccuaauuuuaucaua

SEQ ID NO: 3052671 - RNA, 19 nt, Artificial Sequence
  Description of Artificial Sequence: Synthetic oligonucleotide
gugacagaugugucauuga

SEQ ID NO: 3052672 - RNA, 19 nt, Artificial Sequence
  Description of Artificial Sequence: Synthetic oligonucleotide
gccuaaugugcuucucucc

SEQ ID NO: 3052673 - RNA, 19 nt, Artificial Sequence
  Description of Artificial Sequence: Synthetic oligonucleotide
gagccuaaugugcuucucu

SEQ ID NO: 3052674 - RNA, 19 nt, Artificial Sequence
  Description of Artificial Sequence: Synthetic oligonucleotide
cacagccaaucauggcagc

SEQ ID NO: 3052675 - RNA, 19 nt, Artificial Sequence
  Description of Artificial Sequence: Synthetic oligonucleotide
ucucuccacgaggcgauga

SEQ ID NO: 3052676 - RNA, 19 nt, Artificial Sequence
  Description of Artificial Sequence: Synthetic oligonucleotide
augugucauugaaggaaag

SEQ ID NO: 3052677 - RNA, 19 nt, Artificial Sequence
  Description of Artificial Sequence: Synthetic oligonucleotide
ucuguccagauguggccua

SEQ ID NO: 3052678 - RNA, 19 nt, Artificial Sequence
  Description of Artificial Sequence: Synthetic oligonucleotide
ccaaucauggcagccuugc

SEQ ID NO: 3052679 - RNA, 19 nt, Artificial Sequence
  Description of Artificial Sequence: Synthetic oligonucleotide
ggguggagaaucuguccag

SEQ ID NO: 3052680 - RNA, 19 nt, Artificial Sequence
  Description of Artificial Sequence: Synthetic oligonucleotide
agauguggccuaauuuuau

SEQ ID NO: 3052681 - RNA, 19 nt, Artificial Sequence
  Description of Artificial Sequence: Synthetic oligonucleotide
auacccggacaagucuauc

SEQ ID NO: 3052682 - RNA, 19 nt, Artificial Sequence
  Description of Artificial Sequence: Synthetic oligonucleotide
ccuaaugugcuucucucca

SEQ ID NO: 3052683 - RNA, 19 nt, Artificial Sequence
  Description of Artificial Sequence: Synthetic oligonucleotide
ggaguccaggauuuagaca

SEQ ID NO: 3052684 - RNA, 19 nt, Artificial Sequence
  Description of Artificial Sequence: Synthetic oligonucleotide
auaccacacaacagugaca

SEQ ID NO: 3052685 - RNA, 19 nt, Artificial Sequence
  Description of Artificial Sequence: Synthetic oligonucleotide
agccaaucauggcagccuu

SEQ ID NO: 3052686 - RNA, 19 nt, Artificial Sequence
  Description of Artificial Sequence: Synthetic oligonucleotide
agauagccaucguggucca

SEQ ID NO: 3052687 - RNA, 19 nt, Artificial Sequence
  Description of Artificial Sequence: Synthetic oligonucleotide
gcgaugaaaaugaagauuu

SEQ ID NO: 3052688 - RNA, 19 nt, Artificial Sequence
  Description of Artificial Sequence: Synthetic oligonucleotide
agccaucgugguccauagg

SEQ ID NO: 3052689 - RNA, 19 nt, Artificial Sequence
  Description of Artificial Sequence: Synthetic oligonucleotide
acacagauccaggguggag

SEQ ID NO: 3052690 - RNA, 19 nt, Artificial Sequence
  Description of Artificial Sequence: Synthetic oligonucleotide
gcagccuugcuuaaaugac

SEQ ID NO: 3052691 - RNA, 19 nt, Artificial Sequence
  Description of Artificial Sequence: Synthetic oligonucleotide
auaggggucaaagguuuua

SEQ ID NO: 3052692 - RNA, 19 nt, Artificial Sequence
  Description of Artificial Sequence: Synthetic oligonucleotide
cucagaucauacugugcaa

SEQ ID NO: 3052693 - RNA, 19 nt, Artificial Sequence
  Description of Artificial Sequence: Synthetic oligonucleotide
gucuaucacagccaaucau

SEQ ID NO: 3052694 - RNA, 19 nt, Artificial Sequence
  Description of Artificial Sequence: Synthetic oligonucleotide
gccaugacaaaagccaguc

SEQ ID NO: 3052695 - RNA, 19 nt, Artificial Sequence
  Description of Artificial Sequence: Synthetic oligonucleotide
ucuccacgaggcgaugaaa

SEQ ID NO: 3052696 - RNA, 19 nt, Artificial Sequence
  Description of Artificial Sequence: Synthetic oligonucleotide
gggagagugauugagccua

SEQ ID NO: 3052697 - RNA, 19 nt, Artificial Sequence
  Description of Artificial Sequence: Synthetic oligonucleotide
agccaguccgucacccuuc

SEQ ID NO: 3052698 - RNA, 19 nt, Artificial Sequence
  Description of Artificial Sequence: Synthetic oligonucleotide
ugagccuaaugugcuucuc

SEQ ID NO: 3052699 - RNA, 19 nt, Artificial Sequence
  Description of Artificial Sequence: Synthetic oligonucleotide
caucgugguccauaggggu

SEQ ID NO: 3052700 - RNA, 19 nt, Artificial Sequence
  Description of Artificial Sequence: Synthetic oligonucleotide
ucauggcagccuugcuuaa

SEQ ID NO: 3052701 - RNA, 19 nt, Artificial Sequence
  Description of Artificial Sequence: Synthetic oligonucleotide
cgaggcgaugaaaaugaag

SEQ ID NO: 3052702 - RNA, 19 nt, Artificial Sequence
  Description of Artificial Sequence: Synthetic oligonucleotide
cuuaaaugacucagaucau

SEQ ID NO: 3052703 - RNA, 19 nt, Artificial Sequence
  Description of Artificial Sequence: Synthetic oligonucleotide
gccauagccccaccaggag

SEQ ID NO: 3052704 - RNA, 19 nt, Artificial Sequence
  Description of Artificial Sequence: Synthetic oligonucleotide
ccaggguggagaaucuguc

SEQ ID NO: 3052705 - RNA, 19 nt, Artificial Sequence
  Description of Artificial Sequence: Synthetic oligonucleotide
gauugagccuaaugugcuu

SEQ ID NO: 3052706 - RNA, 19 nt, Artificial Sequence
  Description of Artificial Sequence: Synthetic oligonucleotide
cagccuugcuuaaaugacu

SEQ ID NO: 3052707 - RNA, 19 nt, Artificial Sequence
  Description of Artificial Sequence: Synthetic oligonucleotide
ccacgaggcgaugaaaaug

SEQ ID NO: 3052708 - RNA, 19 nt, Artificial Sequence
  Description of Artificial Sequence: Synthetic oligonucleotide
cgaugaaaaugaagauuug

SEQ ID NO: 3052709 - RNA, 19 nt, Artificial Sequence
  Description of Artificial Sequence: Synthetic oligonucleotide
guccaggauuuagacagaa

SEQ ID NO: 3052710 - RNA, 19 nt, Artificial Sequence
  Description of Artificial Sequence: Synthetic oligonucleotide
gcuucucuccacgaggcga

SEQ ID NO: 3052711 - RNA, 19 nt, Artificial Sequence
  Description of Artificial Sequence: Synthetic oligonucleotide
ggcgucacaccacacagau

SEQ ID NO: 3052712 - RNA, 19 nt, Artificial Sequence
  Description of Artificial Sequence: Synthetic oligonucleotide
gguggagaaucuguccaga

SEQ ID NO: 3052713 - RNA, 19 nt, Artificial Sequence
  Description of Artificial Sequence: Synthetic oligonucleotide
ccagauguggccuaauuuu

SEQ ID NO: 3052714 - RNA, 19 nt, Artificial Sequence
  Description of Artificial Sequence: Synthetic oligonucleotide
uucucuccacgaggcgaug

SEQ ID NO: 3052715 - RNA, 19 nt, Artificial Sequence
  Description of Artificial Sequence: Synthetic oligonucleotide
cuucugccauagccccacc

SEQ ID NO: 3052716 - RNA, 19 nt, Artificial Sequence
  Description of Artificial Sequence: Synthetic oligonucleotide
cagaucauacugugcaauu

SEQ ID NO: 3052717 - RNA, 19 nt, Artificial Sequence
  Description of Artificial Sequence: Synthetic oligonucleotide
gucacccuucugccauagc

SEQ ID NO: 3052718 - RNA, 19 nt, Artificial Sequence
  Description of Artificial Sequence: Synthetic oligonucleotide
aguccaggauuuagacaga

SEQ ID NO: 3052719 - RNA, 19 nt, Artificial Sequence
  Description of Artificial Sequence: Synthetic oligonucleotide
ggcgaugaaaaugaagauu

SEQ ID NO: 3052720 - RNA, 19 nt, Artificial Sequence
  Description of Artificial Sequence: Synthetic oligonucleotide
cuucucuccacgaggcgau

SEQ ID NO: 3052721 - RNA, 19 nt, Artificial Sequence
  Description of Artificial Sequence: Synthetic oligonucleotide
cucuccacgaggcgaugaa

SEQ ID NO: 3052722 - RNA, 19 nt, Artificial Sequence
  Description of Artificial Sequence: Synthetic oligonucleotide
gauccaggguggagaaucu

SEQ ID NO: 3052723 - RNA, 19 nt, Artificial Sequence
  Description of Artificial Sequence: Synthetic oligonucleotide
uguccagauguggccuaau

SEQ ID NO: 3052724 - RNA, 19 nt, Artificial Sequence
  Description of Artificial Sequence: Synthetic oligonucleotide
ccuucugccauagccccac

SEQ ID NO: 3052725 - RNA, 19 nt, Artificial Sequence
  Description of Artificial Sequence: Synthetic oligonucleotide
guccgucacccuucugcca

SEQ ID NO: 3052726 - RNA, 19 nt, Artificial Sequence
  Description of Artificial Sequence: Synthetic oligonucleotide
cggacaagucuaucacagc

SEQ ID NO: 3052727 - RNA, 19 nt, Artificial Sequence
  Description of Artificial Sequence: Synthetic oligonucleotide
gccuugcuuaaaugacuca

SEQ ID NO: 3052728 - RNA, 19 nt, Artificial Sequence
  Description of Artificial Sequence: Synthetic oligonucleotide
caccacacagauccagggu

SEQ ID NO: 3052729 - RNA, 19 nt, Artificial Sequence
  Description of Artificial Sequence: Synthetic oligonucleotide
cacacagauccagggugga

SEQ ID NO: 3052730 - RNA, 19 nt, Artificial Sequence
  Description of Artificial Sequence: Synthetic oligonucleotide
gucacaccacacagaucca

SEQ ID NO: 3052731 - RNA, 19 nt, Artificial Sequence
  Description of Artificial Sequence: Synthetic oligonucleotide
guccagauguggccuaauu

SEQ ID NO: 3052732 - RNA, 19 nt, Artificial Sequence
  Description of Artificial Sequence: Synthetic oligonucleotide
cccggacaagucuaucaca

SEQ ID NO: 3052733 - RNA, 19 nt, Artificial Sequence
  Description of Artificial Sequence: Synthetic oligonucleotide
cagccaaucauggcagccu

SEQ ID NO: 3052734 - RNA, 19 nt, Artificial Sequence
  Description of Artificial Sequence: Synthetic oligonucleotide
caccaggaguccaggauuu

SEQ ID NO: 3052735 - RNA, 19 nt, Artificial Sequence
  Description of Artificial Sequence: Synthetic oligonucleotide
caaucauggcagccuugcu

SEQ ID NO: 3052736 - RNA, 19 nt, Artificial Sequence
  Description of Artificial Sequence: Synthetic oligonucleotide
acgaggcgaugaaaaugaa

SEQ ID NO: 3052737 - RNA, 19 nt, Artificial Sequence
  Description of Artificial Sequence: Synthetic oligonucleotide
gccaaucauggcagccuug

SEQ ID NO: 3052738 - RNA, 19 nt, Artificial Sequence
  Description of Artificial Sequence: Synthetic oligonucleotide
ggggagagugauugagccu

SEQ ID NO: 3052739 - RNA, 19 nt, Artificial Sequence
  Description of Artificial Sequence: Synthetic oligonucleotide
caagucuaucacagccaau

SEQ ID NO: 3052740 - RNA, 19 nt, Artificial Sequence
  Description of Artificial Sequence: Synthetic oligonucleotide
cauaggggucaaagguuuu

SEQ ID NO: 3052741 - RNA, 19 nt, Artificial Sequence
  Description of Artificial Sequence: Synthetic oligonucleotide
ccauaggggucaaagguuu

SEQ ID NO: 3052742 - RNA, 19 nt, Artificial Sequence
  Description of Artificial Sequence: Synthetic oligonucleotide
accaggaguccaggauuua

SEQ ID NO: 3052743 - RNA, 19 nt, Artificial Sequence
  Description of Artificial Sequence: Synthetic oligonucleotide
gagagugauugagccuaau

SEQ ID NO: 3052744 - RNA, 19 nt, Artificial Sequence
  Description of Artificial Sequence: Synthetic oligonucleotide
cuguccagauguggccuaa

SEQ ID NO: 3052745 - RNA, 19 nt, Artificial Sequence
  Description of Artificial Sequence: Synthetic oligonucleotide
ggagagugauugagccuaa

SEQ ID NO: 3052746 - RNA, 19 nt, Artificial Sequence
  Description of Artificial Sequence: Synthetic oligonucleotide
ccaccaggaguccaggauu

SEQ ID NO: 3052747 - RNA, 19 nt, Artificial Sequence
  Description of Artificial Sequence: Synthetic oligonucleotide
cgucacccuucugccauag

SEQ ID NO: 3052748 - RNA, 19 nt, Artificial Sequence
  Description of Artificial Sequence: Synthetic oligonucleotide
gauagccaucgugguccau

SEQ ID NO: 3052749 - RNA, 19 nt, Artificial Sequence
  Description of Artificial Sequence: Synthetic oligonucleotide
cccuucugccauagcccca

SEQ ID NO: 3052750 - RNA, 19 nt, Artificial Sequence
  Description of Artificial Sequence: Synthetic oligonucleotide
gcgucacaccacacagauc

SEQ ID NO: 3052751 - RNA, 19 nt, Artificial Sequence
  Description of Artificial Sequence: Synthetic oligonucleotide
gccaguccgucacccuucu

SEQ ID NO: 3052752 - RNA, 19 nt, Artificial Sequence
  Description of Artificial Sequence: Synthetic oligonucleotide
gugguccauaggggucaaa

SEQ ID NO: 3052753 - RNA, 19 nt, Artificial Sequence
  Description of Artificial Sequence: Synthetic oligonucleotide
ccaguccgucacccuucug

SEQ ID NO: 3052754 - RNA, 19 nt, Artificial Sequence
  Description of Artificial Sequence: Synthetic oligonucleotide
cagauccaggguggagaau

SEQ ID NO: 3052755 - RNA, 19 nt, Artificial Sequence
  Description of Artificial Sequence: Synthetic oligonucleotide
ccgucacccuucugccaua

SEQ ID NO: 3052756 - RNA, 19 nt, Artificial Sequence
  Description of Artificial Sequence: Synthetic oligonucleotide
cgugguccauaggggucaa

SEQ ID NO: 3052757 - RNA, 19 nt, Artificial Sequence
  Description of Artificial Sequence: Synthetic oligonucleotide
auaaguaaaauucaaaagg

SEQ ID NO: 3052758 - RNA, 19 nt, Artificial Sequence
  Description of Artificial Sequence: Synthetic oligonucleotide
aaauucaaaaggcagagag

SEQ ID NO: 3052759 - RNA, 19 nt, Artificial Sequence
  Description of Artificial Sequence: Synthetic oligonucleotide
aauauaucguugcaugugc

SEQ ID NO: 3052760 - RNA, 19 nt, Artificial Sequence
  Description of Artificial Sequence: Synthetic oligonucleotide
uuuaacaacacuaucagaa

SEQ ID NO: 3052761 - RNA, 19 nt, Artificial Sequence
  Description of Artificial Sequence: Synthetic oligonucleotide
aaguugagucuauugaucc

SEQ ID NO: 3052762 - RNA, 19 nt, Artificial Sequence
  Description of Artificial Sequence: Synthetic oligonucleotide
uauaaguaaaauucaaaag

SEQ ID NO: 3052763 - RNA, 19 nt, Artificial Sequence
  Description of Artificial Sequence: Synthetic oligonucleotide
uaaguaaaauucaaaaggc

SEQ ID NO: 3052764 - RNA, 19 nt, Artificial Sequence
  Description of Artificial Sequence: Synthetic oligonucleotide
ugauccauaauacacacug

SEQ ID NO: 3052765 - RNA, 19 nt, Artificial Sequence
  Description of Artificial Sequence: Synthetic oligonucleotide
acugguaauuaauauaucg

SEQ ID NO: 3052766 - RNA, 19 nt, Artificial Sequence
  Description of Artificial Sequence: Synthetic oligonucleotide
uauacauucugcuaaacca

SEQ ID NO: 3052767 - RNA, 19 nt, Artificial Sequence
  Description of Artificial Sequence: Synthetic oligonucleotide
aacauuuggcaucagcugg

SEQ ID NO: 3052768 - RNA, 19 nt, Artificial Sequence
  Description of Artificial Sequence: Synthetic oligonucleotide
uuauaaguaaaauucaaaa

SEQ ID NO: 3052769 - RNA, 19 nt, Artificial Sequence
  Description of Artificial Sequence: Synthetic oligonucleotide
auuaaaauggcucaauacu

SEQ ID NO: 3052770 - RNA, 19 nt, Artificial Sequence
  Description of Artificial Sequence: Synthetic oligonucleotide
uagauuaguauaaauauaa

SEQ ID NO: 3052771 - RNA, 19 nt, Artificial Sequence
  Description of Artificial Sequence: Synthetic oligonucleotide
aacacuaucagaaaguugu

SEQ ID NO: 3052772 - RNA, 19 nt, Artificial Sequence
  Description of Artificial Sequence: Synthetic oligonucleotide
uuuucugucauuauaagua

SEQ ID NO: 3052773 - RNA, 19 nt, Artificial Sequence
  Description of Artificial Sequence: Synthetic oligonucleotide
uuuauuggaaagcaaguug

SEQ ID NO: 3052774 - RNA, 19 nt, Artificial Sequence
  Description of Artificial Sequence: Synthetic oligonucleotide
ugugauacuaacauuuggc

SEQ ID NO: 3052775 - RNA, 19 nt, Artificial Sequence
  Description of Artificial Sequence: Synthetic oligonucleotide
agaauuauaaaaucgacuu

SEQ ID NO: 3052776 - RNA, 19 nt, Artificial Sequence
  Description of Artificial Sequence: Synthetic oligonucleotide
uuauagauuaguauaaaua

SEQ ID NO: 3052777 - RNA, 19 nt, Artificial Sequence
  Description of Artificial Sequence: Synthetic oligonucleotide
guaauuaauauaucguugc

SEQ ID NO: 3052778 - RNA, 19 nt, Artificial Sequence
  Description of Artificial Sequence: Synthetic oligonucleotide
uucauuauagauuaguaua

SEQ ID NO: 3052779 - RNA, 19 nt, Artificial Sequence
  Description of Artificial Sequence: Synthetic oligonucleotide
uuauuggaaagcaaguuga

SEQ ID NO: 3052780 - RNA, 19 nt, Artificial Sequence
  Description of Artificial Sequence: Synthetic oligonucleotide
ugcuaaaccaguuuuaaac

SEQ ID NO: 3052781 - RNA, 19 nt, Artificial Sequence
  Description of Artificial Sequence: Synthetic oligonucleotide
gucauuauaaguaaaauuc

SEQ ID NO: 3052782 - RNA, 19 nt, Artificial Sequence
  Description of Artificial Sequence: Synthetic oligonucleotide
caauuuauuggaaagcaag

SEQ ID NO: 3052783 - RNA, 19 nt, Artificial Sequence
  Description of Artificial Sequence: Synthetic oligonucleotide
auugauccauaauacacac

SEQ ID NO: 3052784 - RNA, 19 nt, Artificial Sequence
  Description of Artificial Sequence: Synthetic oligonucleotide
auuaguauaaauauaauuu

SEQ ID NO: 3052785 - RNA, 19 nt, Artificial Sequence
  Description of Artificial Sequence: Synthetic oligonucleotide
acuaucagaaaguugucuc

SEQ ID NO: 3052786 - RNA, 19 nt, Artificial Sequence
  Description of Artificial Sequence: Synthetic oligonucleotide
cuauugauccauaauacac

SEQ ID NO: 3052787 - RNA, 19 nt, Artificial Sequence
  Description of Artificial Sequence: Synthetic oligonucleotide
ucauuauaaguaaaauuca

SEQ ID NO: 3052788 - RNA, 19 nt, Artificial Sequence
  Description of Artificial Sequence: Synthetic oligonucleotide
cuggagaauuauaaaaucg

SEQ ID NO: 3052789 - RNA, 19 nt, Artificial Sequence
  Description of Artificial Sequence: Synthetic oligonucleotide
gauacuaacauuuggcauc

SEQ ID NO: 3052790 - RNA, 19 nt, Artificial Sequence
  Description of Artificial Sequence: Synthetic oligonucleotide
aauuauaaaaucgacuuuu

SEQ ID NO: 3052791 - RNA, 19 nt, Artificial Sequence
  Description of Artificial Sequence: Synthetic oligonucleotide
auucaaaaggcagagagag

SEQ ID NO: 3052792 - RNA, 19 nt, Artificial Sequence
  Description of Artificial Sequence: Synthetic oligonucleotide
uaaaauucaaaaggcagag

SEQ ID NO: 3052793 - RNA, 19 nt, Artificial Sequence
  Description of Artificial Sequence: Synthetic oligonucleotide
uaacaacacuaucagaaag

SEQ ID NO: 3052794 - RNA, 19 nt, Artificial Sequence
  Description of Artificial Sequence: Synthetic oligonucleotide
aagucauuaaaauggcuca

SEQ ID NO: 3052795 - RNA, 19 nt, Artificial Sequence
  Description of Artificial Sequence: Synthetic oligonucleotide
uggagaauuauaaaaucga

SEQ ID NO: 3052796 - RNA, 19 nt, Artificial Sequence
  Description of Artificial Sequence: Synthetic oligonucleotide
uuaguauaaauauaauuua

SEQ ID NO: 3052797 - RNA, 19 nt, Artificial Sequence
  Description of Artificial Sequence: Synthetic oligonucleotide
uucugcaacacuagguugg

SEQ ID NO: 3052798 - RNA, 19 nt, Artificial Sequence
  Description of Artificial Sequence: Synthetic oligonucleotide
acuaacauuuggcaucagc

SEQ ID NO: 3052799 - RNA, 19 nt, Artificial Sequence
  Description of Artificial Sequence: Synthetic oligonucleotide
cuuuuaacaacacuaucag

SEQ ID NO: 3052800 - RNA, 19 nt, Artificial Sequence
  Description of Artificial Sequence: Synthetic oligonucleotide
uauugauccauaauacaca

SEQ ID NO: 3052801 - RNA, 19 nt, Artificial Sequence
  Description of Artificial Sequence: Synthetic oligonucleotide
aguaaaauucaaaaggcag

SEQ ID NO: 3052802 - RNA, 19 nt, Artificial Sequence
  Description of Artificial Sequence: Synthetic oligonucleotide
acuagguuggccuuuuaac

SEQ ID NO: 3052803 - RNA, 19 nt, Artificial Sequence
  Description of Artificial Sequence: Synthetic oligonucleotide
aaguugucuccagagaagc

SEQ ID NO: 3052804 - RNA, 19 nt, Artificial Sequence
  Description of Artificial Sequence: Synthetic oligonucleotide
ucauuauagauuaguauaa

SEQ ID NO: 3052805 - RNA, 19 nt, Artificial Sequence
  Description of Artificial Sequence: Synthetic oligonucleotide
uugugauacuaacauuugg

SEQ ID NO: 3052806 - RNA, 19 nt, Artificial Sequence
  Description of Artificial Sequence: Synthetic oligonucleotide
uuuggcaucagcuggagaa

SEQ ID NO: 3052807 - RNA, 19 nt, Artificial Sequence
  Description of Artificial Sequence: Synthetic oligonucleotide
uuaaaauggcucaauacuu

SEQ ID NO: 3052808 - RNA, 19 nt, Artificial Sequence
  Description of Artificial Sequence: Synthetic oligonucleotide
cauuaaaauggcucaauac

SEQ ID NO: 3052809 - RNA, 19 nt, Artificial Sequence
  Description of Artificial Sequence: Synthetic oligonucleotide
ucaaaaggcagagagagaa

SEQ ID NO: 3052810 - RNA, 19 nt, Artificial Sequence
  Description of Artificial Sequence: Synthetic oligonucleotide
uaguauaaauauaauuuau

SEQ ID NO: 3052811 - RNA, 19 nt, Artificial Sequence
  Description of Artificial Sequence: Synthetic oligonucleotide
aaaacacccuucauuauag

SEQ ID NO: 3052812 - RNA, 19 nt, Artificial Sequence
  Description of Artificial Sequence: Synthetic oligonucleotide
agucuauugauccauaaua

SEQ ID NO: 3052813 - RNA, 19 nt, Artificial Sequence
  Description of Artificial Sequence: Synthetic oligonucleotide
cugcacauacauuuggugg

SEQ ID NO: 3052814 - RNA, 19 nt, Artificial Sequence
  Description of Artificial Sequence: Synthetic oligonucleotide
ucugucauuauaaguaaaa

SEQ ID NO: 3052815 - RNA, 19 nt, Artificial Sequence
  Description of Artificial Sequence: Synthetic oligonucleotide
ucuauugauccauaauaca

SEQ ID NO: 3052816 - RNA, 19 nt, Artificial Sequence
  Description of Artificial Sequence: Synthetic oligonucleotide
uaauuaauauaucguugca

SEQ ID NO: 3052817 - RNA, 19 nt, Artificial Sequence
  Description of Artificial Sequence: Synthetic oligonucleotide
ugucauuauaaguaaaauu

SEQ ID NO: 3052818 - RNA, 19 nt, Artificial Sequence
  Description of Artificial Sequence: Synthetic oligonucleotide
ugguuugugauacuaacau

SEQ ID NO: 3052819 - RNA, 19 nt, Artificial Sequence
  Description of Artificial Sequence: Synthetic oligonucleotide
aacacugguaauuaauaua

SEQ ID NO: 3052820 - RNA, 19 nt, Artificial Sequence
  Description of Artificial Sequence: Synthetic oligonucleotide
uuaauauaucguugcaugu

SEQ ID NO: 3052821 - RNA, 19 nt, Artificial Sequence
  Description of Artificial Sequence: Synthetic oligonucleotide
aauuaauauaucguugcau

SEQ ID NO: 3052822 - RNA, 19 nt, Artificial Sequence
  Description of Artificial Sequence: Synthetic oligonucleotide
uuugugauacuaacauuug

SEQ ID NO: 3052823 - RNA, 19 nt, Artificial Sequence
  Description of Artificial Sequence: Synthetic oligonucleotide
aauuuauuggaaagcaagu

SEQ ID NO: 3052824 - RNA, 19 nt, Artificial Sequence
  Description of Artificial Sequence: Synthetic oligonucleotide
aaacacugguaauuaauau

SEQ ID NO: 3052825 - RNA, 19 nt, Artificial Sequence
  Description of Artificial Sequence: Synthetic oligonucleotide
auuauagauuaguauaaau

SEQ ID NO: 3052826 - RNA, 19 nt, Artificial Sequence
  Description of Artificial Sequence: Synthetic oligonucleotide
uaaaccaguuuuaaacacu

SEQ ID NO: 3052827 - RNA, 19 nt, Artificial Sequence
  Description of Artificial Sequence: Synthetic oligonucleotide
ugcaugugcaaacuucugc

SEQ ID NO: 3052828 - RNA, 19 nt, Artificial Sequence
  Description of Artificial Sequence: Synthetic oligonucleotide
cuaaaccaguuuuaaacac

SEQ ID NO: 3052829 - RNA, 19 nt, Artificial Sequence
  Description of Artificial Sequence: Synthetic oligonucleotide
uaauauaucguugcaugug

SEQ ID NO: 3052830 - RNA, 19 nt, Artificial Sequence
  Description of Artificial Sequence: Synthetic oligonucleotide
auccauaauacacacugca

SEQ ID NO: 3052831 - RNA, 19 nt, Artificial Sequence
  Description of Artificial Sequence: Synthetic oligonucleotide
uaacauuuggcaucagcug

SEQ ID NO: 3052832 - RNA, 19 nt, Artificial Sequence
  Description of Artificial Sequence: Synthetic oligonucleotide
agcaaguugagucuauuga

SEQ ID NO: 3052833 - RNA, 19 nt, Artificial Sequence
  Description of Artificial Sequence: Synthetic oligonucleotide
uauuggaaagcaaguugag

SEQ ID NO: 3052834 - RNA, 19 nt, Artificial Sequence
  Description of Artificial Sequence: Synthetic oligonucleotide
ugguaauuaauauaucguu

SEQ ID NO: 3052835 - RNA, 19 nt, Artificial Sequence
  Description of Artificial Sequence: Synthetic oligonucleotide
cuaucagaaaguugucucc

SEQ ID NO: 3052836 - RNA, 19 nt, Artificial Sequence
  Description of Artificial Sequence: Synthetic oligonucleotide
aaaccaguuuuaaacacug

SEQ ID NO: 3052837 - RNA, 19 nt, Artificial Sequence
  Description of Artificial Sequence: Synthetic oligonucleotide
accaguuuuaaacacuggu

SEQ ID NO: 3052838 - RNA, 19 nt, Artificial Sequence
  Description of Artificial Sequence: Synthetic oligonucleotide
uggccuuuuaacaacacua

SEQ ID NO: 3052839 - RNA, 19 nt, Artificial Sequence
  Description of Artificial Sequence: Synthetic oligonucleotide
aaguaaaauucaaaaggca

SEQ ID NO: 3052840 - RNA, 19 nt, Artificial Sequence
  Description of Artificial Sequence: Synthetic oligonucleotide
aagcaaguugagucuauug

SEQ ID NO: 3052841 - RNA, 19 nt, Artificial Sequence
  Description of Artificial Sequence: Synthetic oligonucleotide
ugcaacacuagguuggccu

SEQ ID NO: 3052842 - RNA, 19 nt, Artificial Sequence
  Description of Artificial Sequence: Synthetic oligonucleotide
aacaacacuaucagaaagu

SEQ ID NO: 3052843 - RNA, 19 nt, Artificial Sequence
  Description of Artificial Sequence: Synthetic oligonucleotide
uuuuaacaacacuaucaga

SEQ ID NO: 3052844 - RNA, 19 nt, Artificial Sequence
  Description of Artificial Sequence: Synthetic oligonucleotide
ugcacauacauuugguggu

SEQ ID NO: 3052845 - RNA, 19 nt, Artificial Sequence
  Description of Artificial Sequence: Synthetic oligonucleotide
aacacccuucauuauagau

SEQ ID NO: 3052846 - RNA, 19 nt, Artificial Sequence
  Description of Artificial Sequence: Synthetic oligonucleotide
gauuaguauaaauauaauu

SEQ ID NO: 3052847 - RNA, 19 nt, Artificial Sequence
  Description of Artificial Sequence: Synthetic oligonucleotide
ucauuaaaauggcucaaua

SEQ ID NO: 3052848 - RNA, 19 nt, Artificial Sequence
  Description of Artificial Sequence: Synthetic oligonucleotide
ugauacuaacauuuggcau

SEQ ID NO: 3052849 - RNA, 19 nt, Artificial Sequence
  Description of Artificial Sequence: Synthetic oligonucleotide
uuaacaacacuaucagaaa

SEQ ID NO: 3052850 - RNA, 19 nt, Artificial Sequence
  Description of Artificial Sequence: Synthetic oligonucleotide
aaaauggcucaauacuuuu

SEQ ID NO: 3052851 - RNA, 19 nt, Artificial Sequence
  Description of Artificial Sequence: Synthetic oligonucleotide
uccauaauacacacugcac

SEQ ID NO: 3052852 - RNA, 19 nt, Artificial Sequence
  Description of Artificial Sequence: Synthetic oligonucleotide
auacacacugcacauacau

SEQ ID NO: 3052853 - RNA, 19 nt, Artificial Sequence
  Description of Artificial Sequence: Synthetic oligonucleotide
uaaaauggcucaauacuuu

SEQ ID NO: 3052854 - RNA, 19 nt, Artificial Sequence
  Description of Artificial Sequence: Synthetic oligonucleotide
aaaguugucuccagagaag

SEQ ID NO: 3052855 - RNA, 19 nt, Artificial Sequence
  Description of Artificial Sequence: Synthetic oligonucleotide
uuucugucauuauaaguaa

SEQ ID NO: 3052856 - RNA, 19 nt, Artificial Sequence
  Description of Artificial Sequence: Synthetic oligonucleotide
uggaaagcaaguugagucu

SEQ ID NO: 3052857 - RNA, 19 nt, Artificial Sequence
  Description of Artificial Sequence: Synthetic oligonucleotide
uuuuaaacacugguaauua

SEQ ID NO: 3052858 - RNA, 19 nt, Artificial Sequence
  Description of Artificial Sequence: Synthetic oligonucleotide
acacugcacauacauuugg

SEQ ID NO: 3052859 - RNA, 19 nt, Artificial Sequence
  Description of Artificial Sequence: Synthetic oligonucleotide
guaaaauucaaaaggcaga

SEQ ID NO: 3052860 - RNA, 19 nt, Artificial Sequence
  Description of Artificial Sequence: Synthetic oligonucleotide
uuuaaacacugguaauuaa

SEQ ID NO: 3052861 - RNA, 19 nt, Artificial Sequence
  Description of Artificial Sequence: Synthetic oligonucleotide
ucagaaaguugucuccaga

SEQ ID NO: 3052862 - RNA, 19 nt, Artificial Sequence
  Description of Artificial Sequence: Synthetic oligonucleotide
gguaauuaauauaucguug

SEQ ID NO: 3052863 - RNA, 19 nt, Artificial Sequence
  Description of Artificial Sequence: Synthetic oligonucleotide
aauucaaaaggcagagaga

SEQ ID NO: 3052864 - RNA, 19 nt, Artificial Sequence
  Description of Artificial Sequence: Synthetic oligonucleotide
uacauuuggugguuuguga

SEQ ID NO: 3052865 - RNA, 19 nt, Artificial Sequence
  Description of Artificial Sequence: Synthetic oligonucleotide
agguuggccuuuuaacaac

SEQ ID NO: 3052866 - RNA, 19 nt, Artificial Sequence
  Description of Artificial Sequence: Synthetic oligonucleotide
gugauacuaacauuuggca

SEQ ID NO: 3052867 - RNA, 19 nt, Artificial Sequence
  Description of Artificial Sequence: Synthetic oligonucleotide
auacauucugcuaaaccag

SEQ ID NO: 3052868 - RNA, 19 nt, Artificial Sequence
  Description of Artificial Sequence: Synthetic oligonucleotide
aaaagucauuaaaauggcu

SEQ ID NO: 3052869 - RNA, 19 nt, Artificial Sequence
  Description of Artificial Sequence: Synthetic oligonucleotide
uaucguugcaugugcaaac

SEQ ID NO: 3052870 - RNA, 19 nt, Artificial Sequence
  Description of Artificial Sequence: Synthetic oligonucleotide
caaguugagucuauugauc

SEQ ID NO: 3052871 - RNA, 19 nt, Artificial Sequence
  Description of Artificial Sequence: Synthetic oligonucleotide
acacugguaauuaauauau

SEQ ID NO: 3052872 - RNA, 19 nt, Artificial Sequence
  Description of Artificial Sequence: Synthetic oligonucleotide
agaaaguugucuccagaga

SEQ ID NO: 3052873 - RNA, 19 nt, Artificial Sequence
  Description of Artificial Sequence: Synthetic oligonucleotide
cuaacauuuggcaucagcu

SEQ ID NO: 3052874 - RNA, 19 nt, Artificial Sequence
  Description of Artificial Sequence: Synthetic oligonucleotide
cuagguuggccuuuuaaca

SEQ ID NO: 3052875 - RNA, 19 nt, Artificial Sequence
  Description of Artificial Sequence: Synthetic oligonucleotide
gucuauugauccauaauac

SEQ ID NO: 3052876 - RNA, 19 nt, Artificial Sequence
  Description of Artificial Sequence: Synthetic oligonucleotide
caguuuuaaacacugguaa

SEQ ID NO: 3052877 - RNA, 19 nt, Artificial Sequence
  Description of Artificial Sequence: Synthetic oligonucleotide
aacuucugcaacacuaggu

SEQ ID NO: 3052878 - RNA, 19 nt, Artificial Sequence
  Description of Artificial Sequence: Synthetic oligonucleotide
uaucagaaaguugucucca

SEQ ID NO: 3052879 - RNA, 19 nt, Artificial Sequence
  Description of Artificial Sequence: Synthetic oligonucleotide
uagguuggccuuuuaacaa

SEQ ID NO: 3052880 - RNA, 19 nt, Artificial Sequence
  Description of Artificial Sequence: Synthetic oligonucleotide
uauaucguugcaugugcaa

SEQ ID NO: 3052881 - RNA, 19 nt, Artificial Sequence
  Description of Artificial Sequence: Synthetic oligonucleotide
ccuuuuaacaacacuauca

SEQ ID NO: 3052882 - RNA, 19 nt, Artificial Sequence
  Description of Artificial Sequence: Synthetic oligonucleotide
ucugcuaaaccaguuuuaa

SEQ ID NO: 3052883 - RNA, 19 nt, Artificial Sequence
  Description of Artificial Sequence: Synthetic oligonucleotide
uuggccuuuuaacaacacu

SEQ ID NO: 3052884 - RNA, 19 nt, Artificial Sequence
  Description of Artificial Sequence: Synthetic oligonucleotide
acauacauuuggugguuug

SEQ ID NO: 3052885 - RNA, 19 nt, Artificial Sequence
  Description of Artificial Sequence: Synthetic oligonucleotide
acauuuggugguuugugau

SEQ ID NO: 3052886 - RNA, 19 nt, Artificial Sequence
  Description of Artificial Sequence: Synthetic oligonucleotide
aucagaaaguugucuccag

SEQ ID NO: 3052887 - RNA, 19 nt, Artificial Sequence
  Description of Artificial Sequence: Synthetic oligonucleotide
uucaaaaggcagagagaga

SEQ ID NO: 3052888 - RNA, 19 nt, Artificial Sequence
  Description of Artificial Sequence: Synthetic oligonucleotide
cuucugcaacacuagguug

SEQ ID NO: 3052889 - RNA, 19 nt, Artificial Sequence
  Description of Artificial Sequence: Synthetic oligonucleotide
ugagucuauugauccauaa

SEQ ID NO: 3052890 - RNA, 19 nt, Artificial Sequence
  Description of Artificial Sequence: Synthetic oligonucleotide
uucugucauuauaaguaaa

SEQ ID NO: 3052891 - RNA, 19 nt, Artificial Sequence
  Description of Artificial Sequence: Synthetic oligonucleotide
gcuaaaccaguuuuaaaca

SEQ ID NO: 3052892 - RNA, 19 nt, Artificial Sequence
  Description of Artificial Sequence: Synthetic oligonucleotide
auacauuuggugguuugug

SEQ ID NO: 3052893 - RNA, 19 nt, Artificial Sequence
  Description of Artificial Sequence: Synthetic oligonucleotide
aaccaguuuuaaacacugg

SEQ ID NO: 3052894 - RNA, 19 nt, Artificial Sequence
  Description of Artificial Sequence: Synthetic oligonucleotide
caacacuaucagaaaguug

SEQ ID NO: 3052895 - RNA, 19 nt, Artificial Sequence
  Description of Artificial Sequence: Synthetic oligonucleotide
auuggaaagcaaguugagu

SEQ ID NO: 3052896 - RNA, 19 nt, Artificial Sequence
  Description of Artificial Sequence: Synthetic oligonucleotide
ggugguuugugauacuaac

SEQ ID NO: 3052897 - RNA, 19 nt, Artificial Sequence
  Description of Artificial Sequence: Synthetic oligonucleotide
gauccauaauacacacugc

SEQ ID NO: 3052898 - RNA, 19 nt, Artificial Sequence
  Description of Artificial Sequence: Synthetic oligonucleotide
auacuaacauuuggcauca

SEQ ID NO: 3052899 - RNA, 19 nt, Artificial Sequence
  Description of Artificial Sequence: Synthetic oligonucleotide
aaacacccuucauuauaga

SEQ ID NO: 3052900 - RNA, 19 nt, Artificial Sequence
  Description of Artificial Sequence: Synthetic oligonucleotide
aucagcuggagaauuauaa

SEQ ID NO: 3052901 - RNA, 19 nt, Artificial Sequence
  Description of Artificial Sequence: Synthetic oligonucleotide
uugauccauaauacacacu

SEQ ID NO: 3052902 - RNA, 19 nt, Artificial Sequence
  Description of Artificial Sequence: Synthetic oligonucleotide
uucugcuaaaccaguuuua

SEQ ID NO: 3052903 - RNA, 19 nt, Artificial Sequence
  Description of Artificial Sequence: Synthetic oligonucleotide
guuugugauacuaacauuu

SEQ ID NO: 3052904 - RNA, 19 nt, Artificial Sequence
  Description of Artificial Sequence: Synthetic oligonucleotide
cugguaauuaauauaucgu

SEQ ID NO: 3052905 - RNA, 19 nt, Artificial Sequence
  Description of Artificial Sequence: Synthetic oligonucleotide
uugcaugugcaaacuucug

SEQ ID NO: 3052906 - RNA, 19 nt, Artificial Sequence
  Description of Artificial Sequence: Synthetic oligonucleotide
agcuggagaauuauaaaau

SEQ ID NO: 3052907 - RNA, 19 nt, Artificial Sequence
  Description of Artificial Sequence: Synthetic oligonucleotide
cacccuucauuauagauua

SEQ ID NO: 3052908 - RNA, 19 nt, Artificial Sequence
  Description of Artificial Sequence: Synthetic oligonucleotide
cagcuggagaauuauaaaa

SEQ ID NO: 3052909 - RNA, 19 nt, Artificial Sequence
  Description of Artificial Sequence: Synthetic oligonucleotide
ugcaaacuucugcaacacu

SEQ ID NO: 3052910 - RNA, 19 nt, Artificial Sequence
  Description of Artificial Sequence: Synthetic oligonucleotide
gcuggagaauuauaaaauc

SEQ ID NO: 3052911 - RNA, 19 nt, Artificial Sequence
  Description of Artificial Sequence: Synthetic oligonucleotide
cacacugcacauacauuug

SEQ ID NO: 3052912 - RNA, 19 nt, Artificial Sequence
  Description of Artificial Sequence: Synthetic oligonucleotide
cuucauuauagauuaguau

SEQ ID NO: 3052913 - RNA, 19 nt, Artificial Sequence
  Description of Artificial Sequence: Synthetic oligonucleotide
acaacacuaucagaaaguu

SEQ ID NO: 3052914 - RNA, 19 nt, Artificial Sequence
  Description of Artificial Sequence: Synthetic oligonucleotide
gaauuauaaaaucgacuuu

SEQ ID NO: 3052915 - RNA, 19 nt, Artificial Sequence
  Description of Artificial Sequence: Synthetic oligonucleotide
cauaauacacacugcacau

SEQ ID NO: 3052916 - RNA, 19 nt, Artificial Sequence
  Description of Artificial Sequence: Synthetic oligonucleotide
auaucguugcaugugcaaa

SEQ ID NO: 3052917 - RNA, 19 nt, Artificial Sequence
  Description of Artificial Sequence: Synthetic oligonucleotide
ccauaauacacacugcaca

SEQ ID NO: 3052918 - RNA, 19 nt, Artificial Sequence
  Description of Artificial Sequence: Synthetic oligonucleotide
agauuaguauaaauauaau

SEQ ID NO: 3052919 - RNA, 19 nt, Artificial Sequence
  Description of Artificial Sequence: Synthetic oligonucleotide
gcaugugcaaacuucugca

SEQ ID NO: 3052920 - RNA, 19 nt, Artificial Sequence
  Description of Artificial Sequence: Synthetic oligonucleotide
acaauuuauuggaaagcaa

SEQ ID NO: 3052921 - RNA, 19 nt, Artificial Sequence
  Description of Artificial Sequence: Synthetic oligonucleotide
aaagcaaguugagucuauu

SEQ ID NO: 3052922 - RNA, 19 nt, Artificial Sequence
  Description of Artificial Sequence: Synthetic oligonucleotide
cacugguaauuaauauauc

SEQ ID NO: 3052923 - RNA, 19 nt, Artificial Sequence
  Description of Artificial Sequence: Synthetic oligonucleotide
uugagucuauugauccaua

SEQ ID NO: 3052924 - RNA, 19 nt, Artificial Sequence
  Description of Artificial Sequence: Synthetic oligonucleotide
acacccuucauuauagauu

SEQ ID NO: 3052925 - RNA, 19 nt, Artificial Sequence
  Description of Artificial Sequence: Synthetic oligonucleotide
guuuuaaacacugguaauu

SEQ ID NO: 3052926 - RNA, 19 nt, Artificial Sequence
  Description of Artificial Sequence: Synthetic oligonucleotide
acacuaucagaaaguuguc

SEQ ID NO: 3052927 - RNA, 19 nt, Artificial Sequence
  Description of Artificial Sequence: Synthetic oligonucleotide
auauaucguugcaugugca

SEQ ID NO: 3052928 - RNA, 19 nt, Artificial Sequence
  Description of Artificial Sequence: Synthetic oligonucleotide
uuuggugguuugugauacu

SEQ ID NO: 3052929 - RNA, 19 nt, Artificial Sequence
  Description of Artificial Sequence: Synthetic oligonucleotide
gugguuugugauacuaaca

SEQ ID NO: 3052930 - RNA, 19 nt, Artificial Sequence
  Description of Artificial Sequence: Synthetic oligonucleotide
cauuauagauuaguauaaa

SEQ ID NO: 3052931 - RNA, 19 nt, Artificial Sequence
  Description of Artificial Sequence: Synthetic oligonucleotide
aucguugcaugugcaaacu

SEQ ID NO: 3052932 - RNA, 19 nt, Artificial Sequence
  Description of Artificial Sequence: Synthetic oligonucleotide
acauuuggcaucagcugga

SEQ ID NO: 3052933 - RNA, 19 nt, Artificial Sequence
  Description of Artificial Sequence: Synthetic oligonucleotide
auaauacacacugcacaua

SEQ ID NO: 3052934 - RNA, 19 nt, Artificial Sequence
  Description of Artificial Sequence: Synthetic oligonucleotide
gagucuauugauccauaau

SEQ ID NO: 3052935 - RNA, 19 nt, Artificial Sequence
  Description of Artificial Sequence: Synthetic oligonucleotide
guugcaugugcaaacuucu

SEQ ID NO: 3052936 - RNA, 19 nt, Artificial Sequence
  Description of Artificial Sequence: Synthetic oligonucleotide
ucguugcaugugcaaacuu

SEQ ID NO: 3052937 - RNA, 19 nt, Artificial Sequence
  Description of Artificial Sequence: Synthetic oligonucleotide
aacacuagguuggccuuuu

SEQ ID NO: 3052938 - RNA, 19 nt, Artificial Sequence
  Description of Artificial Sequence: Synthetic oligonucleotide
cauuuggugguuugugaua

SEQ ID NO: 3052939 - RNA, 19 nt, Artificial Sequence
  Description of Artificial Sequence: Synthetic oligonucleotide
gccuuuuaacaacacuauc

SEQ ID NO: 3052940 - RNA, 19 nt, Artificial Sequence
  Description of Artificial Sequence: Synthetic oligonucleotide
caaaaggcagagagagaaa

SEQ ID NO: 3052941 - RNA, 19 nt, Artificial Sequence
  Description of Artificial Sequence: Synthetic oligonucleotide
ccaguuuuaaacacuggua

SEQ ID NO: 3052942 - RNA, 19 nt, Artificial Sequence
  Description of Artificial Sequence: Synthetic oligonucleotide
cguugcaugugcaaacuuc

SEQ ID NO: 3052943 - RNA, 19 nt, Artificial Sequence
  Description of Artificial Sequence: Synthetic oligonucleotide
aguugucuccagagaagca

SEQ ID NO: 3052944 - RNA, 19 nt, Artificial Sequence
  Description of Artificial Sequence: Synthetic oligonucleotide
ccuucauuauagauuagua

SEQ ID NO: 3052945 - RNA, 19 nt, Artificial Sequence
  Description of Artificial Sequence: Synthetic oligonucleotide
cugcuaaaccaguuuuaaa

SEQ ID NO: 3052946 - RNA, 19 nt, Artificial Sequence
  Description of Artificial Sequence: Synthetic oligonucleotide
cacuagguuggccuuuuaa

SEQ ID NO: 3052947 - RNA, 19 nt, Artificial Sequence
  Description of Artificial Sequence: Synthetic oligonucleotide
guuggccuuuuaacaacac

SEQ ID NO: 3052948 - RNA, 19 nt, Artificial Sequence
  Description of Artificial Sequence: Synthetic oligonucleotide
acauucugcuaaaccaguu

SEQ ID NO: 3052949 - RNA, 19 nt, Artificial Sequence
  Description of Artificial Sequence: Synthetic oligonucleotide
uggcaucagcuggagaauu

SEQ ID NO: 3052950 - RNA, 19 nt, Artificial Sequence
  Description of Artificial Sequence: Synthetic oligonucleotide
uacuaacauuuggcaucag

SEQ ID NO: 3052951 - RNA, 19 nt, Artificial Sequence
  Description of Artificial Sequence: Synthetic oligonucleotide
cacuaucagaaaguugucu

SEQ ID NO: 3052952 - RNA, 19 nt, Artificial Sequence
  Description of Artificial Sequence: Synthetic oligonucleotide
cacugcacauacauuuggu

SEQ ID NO: 3052953 - RNA, 19 nt, Artificial Sequence
  Description of Artificial Sequence: Synthetic oligonucleotide
cauucugcuaaaccaguuu

SEQ ID NO: 3052954 - RNA, 19 nt, Artificial Sequence
  Description of Artificial Sequence: Synthetic oligonucleotide
gucauuaaaauggcucaau

SEQ ID NO: 3052955 - RNA, 19 nt, Artificial Sequence
  Description of Artificial Sequence: Synthetic oligonucleotide
cauacauuuggugguuugu

SEQ ID NO: 3052956 - RNA, 19 nt, Artificial Sequence
  Description of Artificial Sequence: Synthetic oligonucleotide
caucagcuggagaauuaua

SEQ ID NO: 3052957 - RNA, 19 nt, Artificial Sequence
  Description of Artificial Sequence: Synthetic oligonucleotide
gguuggccuuuuaacaaca

SEQ ID NO: 3052958 - RNA, 19 nt, Artificial Sequence
  Description of Artificial Sequence: Synthetic oligonucleotide
cugcaacacuagguuggcc

SEQ ID NO: 3052959 - RNA, 19 nt, Artificial Sequence
  Description of Artificial Sequence: Synthetic oligonucleotide
ggaaagcaaguugagucua

SEQ ID NO: 3052960 - RNA, 19 nt, Artificial Sequence
  Description of Artificial Sequence: Synthetic oligonucleotide
gaaagcaaguugagucuau

SEQ ID NO: 3052961 - RNA, 19 nt, Artificial Sequence
  Description of Artificial Sequence: Synthetic oligonucleotide
gguuugugauacuaacauu

SEQ ID NO: 3052962 - RNA, 19 nt, Artificial Sequence
  Description of Artificial Sequence: Synthetic oligonucleotide
acacuagguuggccuuuua

SEQ ID NO: 3052963 - RNA, 19 nt, Artificial Sequence
  Description of Artificial Sequence: Synthetic oligonucleotide
ggccuuuuaacaacacuau

SEQ ID NO: 3052964 - RNA, 19 nt, Artificial Sequence
  Description of Artificial Sequence: Synthetic oligonucleotide
cccuucauuauagauuagu

SEQ ID NO: 3052965 - RNA, 19 nt, Artificial Sequence
  Description of Artificial Sequence: Synthetic oligonucleotide
ggcaucagcuggagaauua

SEQ ID NO: 3052966 - RNA, 19 nt, Artificial Sequence
  Description of Artificial Sequence: Synthetic oligonucleotide
gcaacacuagguuggccuu

SEQ ID NO: 3052967 - RNA, 19 nt, Artificial Sequence
  Description of Artificial Sequence: Synthetic oligonucleotide
gcaucagcuggagaauuau

SEQ ID NO: 3052968 - RNA, 19 nt, Artificial Sequence
  Description of Artificial Sequence: Synthetic oligonucleotide
caacacuagguuggccuuu

SEQ ID NO: 3052969 - RNA, 19 nt, Artificial Sequence
  Description of Artificial Sequence: Synthetic oligonucleotide
gcacauacauuuggugguu

SEQ ID NO: 3052970 - RNA, 19 nt, Artificial Sequence
  Description of Artificial Sequence: Synthetic oligonucleotide
aaauccaaugaguucaugg

SEQ ID NO: 3052971 - RNA, 19 nt, Artificial Sequence
  Description of Artificial Sequence: Synthetic oligonucleotide
agaaacagaagagaaaucc

SEQ ID NO: 3052972 - RNA, 19 nt, Artificial Sequence
  Description of Artificial Sequence: Synthetic oligonucleotide
uccaaugaguucauggagg

SEQ ID NO: 3052973 - RNA, 19 nt, Artificial Sequence
  Description of Artificial Sequence: Synthetic oligonucleotide
agaagagaaauccaaugag

SEQ ID NO: 3052974 - RNA, 19 nt, Artificial Sequence
  Description of Artificial Sequence: Synthetic oligonucleotide
aauccaaugaguucaugga

SEQ ID NO: 3052975 - RNA, 19 nt, Artificial Sequence
  Description of Artificial Sequence: Synthetic oligonucleotide
aaugaguucauggaggagu

SEQ ID NO: 3052976 - RNA, 19 nt, Artificial Sequence
  Description of Artificial Sequence: Synthetic oligonucleotide
cauaagaagcccacuaggg

SEQ ID NO: 3052977 - RNA, 19 nt, Artificial Sequence
  Description of Artificial Sequence: Synthetic oligonucleotide
uuggauuucuuguucagug

SEQ ID NO: 3052978 - RNA, 19 nt, Artificial Sequence
  Description of Artificial Sequence: Synthetic oligonucleotide
aggcgagugacauccaucc

SEQ ID NO: 3052979 - RNA, 19 nt, Artificial Sequence
  Description of Artificial Sequence: Synthetic oligonucleotide
agagaaauccaaugaguuc

SEQ ID NO: 3052980 - RNA, 19 nt, Artificial Sequence
  Description of Artificial Sequence: Synthetic oligonucleotide
uuguucagugccacgauag

SEQ ID NO: 3052981 - RNA, 19 nt, Artificial Sequence
  Description of Artificial Sequence: Synthetic oligonucleotide
aaggaagcauaagaagccc

SEQ ID NO: 3052982 - RNA, 19 nt, Artificial Sequence
  Description of Artificial Sequence: Synthetic oligonucleotide
caaggaagcauaagaagcc

SEQ ID NO: 3052983 - RNA, 19 nt, Artificial Sequence
  Description of Artificial Sequence: Synthetic oligonucleotide
agugccacgauagaaacag

SEQ ID NO: 3052984 - RNA, 19 nt, Artificial Sequence
  Description of Artificial Sequence: Synthetic oligonucleotide
gagaaauccaaugaguuca

SEQ ID NO: 3052985 - RNA, 19 nt, Artificial Sequence
  Description of Artificial Sequence: Synthetic oligonucleotide
cacgauagaaacagaagag

SEQ ID NO: 3052986 - RNA, 19 nt, Artificial Sequence
  Description of Artificial Sequence: Synthetic oligonucleotide
auggcaaggaagcauaaga

SEQ ID NO: 3052987 - RNA, 19 nt, Artificial Sequence
  Description of Artificial Sequence: Synthetic oligonucleotide
gaucucuucugcuucucgg

SEQ ID NO: 3052988 - RNA, 19 nt, Artificial Sequence
  Description of Artificial Sequence: Synthetic oligonucleotide
ugagugucuccucagguac

SEQ ID NO: 3052989 - RNA, 19 nt, Artificial Sequence
  Description of Artificial Sequence: Synthetic oligonucleotide
uucauggaggaguugcucc

SEQ ID NO: 3052990 - RNA, 19 nt, Artificial Sequence
  Description of Artificial Sequence: Synthetic oligonucleotide
gaguaggcgagugacaucc

SEQ ID NO: 3052991 - RNA, 19 nt, Artificial Sequence
  Description of Artificial Sequence: Synthetic oligonucleotide
agcauaagaagcccacuag

SEQ ID NO: 3052992 - RNA, 19 nt, Artificial Sequence
  Description of Artificial Sequence: Synthetic oligonucleotide
gugacauccauccugagaa

SEQ ID NO: 3052993 - RNA, 19 nt, Artificial Sequence
  Description of Artificial Sequence: Synthetic oligonucleotide
uccucagguaccauguggc

SEQ ID NO: 3052994 - RNA, 19 nt, Artificial Sequence
  Description of Artificial Sequence: Synthetic oligonucleotide
auccaaugaguucauggag

SEQ ID NO: 3052995 - RNA, 19 nt, Artificial Sequence
  Description of Artificial Sequence: Synthetic oligonucleotide
auaagaagcccacuagggu

SEQ ID NO: 3052996 - RNA, 19 nt, Artificial Sequence
  Description of Artificial Sequence: Synthetic oligonucleotide
uucagugccacgauagaaa

SEQ ID NO: 3052997 - RNA, 19 nt, Artificial Sequence
  Description of Artificial Sequence: Synthetic oligonucleotide
aagaagcccacuagggugg

SEQ ID NO: 3052998 - RNA, 19 nt, Artificial Sequence
  Description of Artificial Sequence: Synthetic oligonucleotide
ucagacuccugucaucucu

SEQ ID NO: 3052999 - RNA, 19 nt, Artificial Sequence
  Description of Artificial Sequence: Synthetic oligonucleotide
ucagguaccauguggcugu

SEQ ID NO: 3053000 - RNA, 19 nt, Artificial Sequence
  Description of Artificial Sequence: Synthetic oligonucleotide
ucuuggacgaucucuucug

SEQ ID NO: 3053001 - RNA, 19 nt, Artificial Sequence
  Description of Artificial Sequence: Synthetic oligonucleotide
uuuucuuggacgaucucuu

SEQ ID NO: 3053002 - RNA, 19 nt, Artificial Sequence
  Description of Artificial Sequence: Synthetic oligonucleotide
aagcauaagaagcccacua

SEQ ID NO: 3053003 - RNA, 19 nt, Artificial Sequence
  Description of Artificial Sequence: Synthetic oligonucleotide
auuucuuguucagugccac

SEQ ID NO: 3053004 - RNA, 19 nt, Artificial Sequence
  Description of Artificial Sequence: Synthetic oligonucleotide
ucuuggauuucuuguucag

SEQ ID NO: 3053005 - RNA, 19 nt, Artificial Sequence
  Description of Artificial Sequence: Synthetic oligonucleotide
gaucuucuuggauuucuug

SEQ ID NO: 3053006 - RNA, 19 nt, Artificial Sequence
  Description of Artificial Sequence: Synthetic oligonucleotide
uucuuggacgaucucuucu

SEQ ID NO: 3053007 - RNA, 19 nt, Artificial Sequence
  Description of Artificial Sequence: Synthetic oligonucleotide
uggauuucuuguucagugc

SEQ ID NO: 3053008 - RNA, 19 nt, Artificial Sequence
  Description of Artificial Sequence: Synthetic oligonucleotide
gaggaguugcuccucagac

SEQ ID NO: 3053009 - RNA, 19 nt, Artificial Sequence
  Description of Artificial Sequence: Synthetic oligonucleotide
ucugagugucuccucaggu

SEQ ID NO: 3053010 - RNA, 19 nt, Artificial Sequence
  Description of Artificial Sequence: Synthetic oligonucleotide
ucagugccacgauagaaac

SEQ ID NO: 3053011 - RNA, 19 nt, Artificial Sequence
  Description of Artificial Sequence: Synthetic oligonucleotide
ugccacgauagaaacagaa

SEQ ID NO: 3053012 - RNA, 19 nt, Artificial Sequence
  Description of Artificial Sequence: Synthetic oligonucleotide
uguugaucuucuuggauuu

SEQ ID NO: 3053013 - RNA, 19 nt, Artificial Sequence
  Description of Artificial Sequence: Synthetic oligonucleotide
gcauaagaagcccacuagg

SEQ ID NO: 3053014 - RNA, 19 nt, Artificial Sequence
  Description of Artificial Sequence: Synthetic oligonucleotide
ucuuuucuguugaucuucu

SEQ ID NO: 3053015 - RNA, 19 nt, Artificial Sequence
  Description of Artificial Sequence: Synthetic oligonucleotide
gcaaggaagcauaagaagc

SEQ ID NO: 3053016 - RNA, 19 nt, Artificial Sequence
  Description of Artificial Sequence: Synthetic oligonucleotide
uagauggcaaggaagcaua

SEQ ID NO: 3053017 - RNA, 19 nt, Artificial Sequence
  Description of Artificial Sequence: Synthetic oligonucleotide
uucuuguucagugccacga

SEQ ID NO: 3053018 - RNA, 19 nt, Artificial Sequence
  Description of Artificial Sequence: Synthetic oligonucleotide
ucucggguggccacgcagg

SEQ ID NO: 3053019 - RNA, 19 nt, Artificial Sequence
  Description of Artificial Sequence: Synthetic oligonucleotide
ucuguugaucuucuuggau

SEQ ID NO: 3053020 - RNA, 19 nt, Artificial Sequence
  Description of Artificial Sequence: Synthetic oligonucleotide
agugacauccauccugaga

SEQ ID NO: 3053021 - RNA, 19 nt, Artificial Sequence
  Description of Artificial Sequence: Synthetic oligonucleotide
ugcagcuggucucgggugg

SEQ ID NO: 3053022 - RNA, 19 nt, Artificial Sequence
  Description of Artificial Sequence: Synthetic oligonucleotide
ggauuucuuguucagugcc

SEQ ID NO: 3053023 - RNA, 19 nt, Artificial Sequence
  Description of Artificial Sequence: Synthetic oligonucleotide
gauagaaacagaagagaaa

SEQ ID NO: 3053024 - RNA, 19 nt, Artificial Sequence
  Description of Artificial Sequence: Synthetic oligonucleotide
ggcaaggaagcauaagaag

SEQ ID NO: 3053025 - RNA, 19 nt, Artificial Sequence
  Description of Artificial Sequence: Synthetic oligonucleotide
uguggcuguagauggcaag

SEQ ID NO: 3053026 - RNA, 19 nt, Artificial Sequence
  Description of Artificial Sequence: Synthetic oligonucleotide
uagaaacagaagagaaauc

SEQ ID NO: 3053027 - RNA, 19 nt, Artificial Sequence
  Description of Artificial Sequence: Synthetic oligonucleotide
acgauagaaacagaagaga

SEQ ID NO: 3053028 - RNA, 19 nt, Artificial Sequence
  Description of Artificial Sequence: Synthetic oligonucleotide
uaccauguggcuguagaug

SEQ ID NO: 3053029 - RNA, 19 nt, Artificial Sequence
  Description of Artificial Sequence: Synthetic oligonucleotide
uucuuuucuguugaucuuc

SEQ ID NO: 3053030 - RNA, 19 nt, Artificial Sequence
  Description of Artificial Sequence: Synthetic oligonucleotide
gacauccauccugagaagc

SEQ ID NO: 3053031 - RNA, 19 nt, Artificial Sequence
  Description of Artificial Sequence: Synthetic oligonucleotide
acuggcaggaggcggcacg

SEQ ID NO: 3053032 - RNA, 19 nt, Artificial Sequence
  Description of Artificial Sequence: Synthetic oligonucleotide
uguucagugccacgauaga

SEQ ID NO: 3053033 - RNA, 19 nt, Artificial Sequence
  Description of Artificial Sequence: Synthetic oligonucleotide
aucucugagugucuccuca

SEQ ID NO: 3053034 - RNA, 19 nt, Artificial Sequence
  Description of Artificial Sequence: Synthetic oligonucleotide
ucauggaggaguugcuccu

SEQ ID NO: 3053035 - RNA, 19 nt, Artificial Sequence
  Description of Artificial Sequence: Synthetic oligonucleotide
uucuguugaucuucuugga

SEQ ID NO: 3053036 - RNA, 19 nt, Artificial Sequence
  Description of Artificial Sequence: Synthetic oligonucleotide
guggcuguagauggcaagg

SEQ ID NO: 3053037 - RNA, 19 nt, Artificial Sequence
  Description of Artificial Sequence: Synthetic oligonucleotide
ggaguugcuccucagacuc

SEQ ID NO: 3053038 - RNA, 19 nt, Artificial Sequence
  Description of Artificial Sequence: Synthetic oligonucleotide
ucucugagugucuccucag

SEQ ID NO: 3053039 - RNA, 19 nt, Artificial Sequence
  Description of Artificial Sequence: Synthetic oligonucleotide
gauggcaaggaagcauaag

SEQ ID NO: 3053040 - RNA, 19 nt, Artificial Sequence
  Description of Artificial Sequence: Synthetic oligonucleotide
ggccgugccaccuucuucg

SEQ ID NO: 3053041 - RNA, 19 nt, Artificial Sequence
  Description of Artificial Sequence: Synthetic oligonucleotide
uguagauggcaaggaagca

SEQ ID NO: 3053042 - RNA, 19 nt, Artificial Sequence
  Description of Artificial Sequence: Synthetic oligonucleotide
uucucggcuucuuuucugu

SEQ ID NO: 3053043 - RNA, 19 nt, Artificial Sequence
  Description of Artificial Sequence: Synthetic oligonucleotide
accuucuucgucgaggccu

SEQ ID NO: 3053044 - RNA, 19 nt, Artificial Sequence
  Description of Artificial Sequence: Synthetic oligonucleotide
cuuggacgaucucuucugc

SEQ ID NO: 3053045 - RNA, 19 nt, Artificial Sequence
  Description of Artificial Sequence: Synthetic oligonucleotide
ugacauccauccugagaag

SEQ ID NO: 3053046 - RNA, 19 nt, Artificial Sequence
  Description of Artificial Sequence: Synthetic oligonucleotide
gacuccugucaucucugag

SEQ ID NO: 3053047 - RNA, 19 nt, Artificial Sequence
  Description of Artificial Sequence: Synthetic oligonucleotide
uuggacgaucucuucugcu

SEQ ID NO: 3053048 - RNA, 19 nt, Artificial Sequence
  Description of Artificial Sequence: Synthetic oligonucleotide
cucugagugucuccucagg

SEQ ID NO: 3053049 - RNA, 19 nt, Artificial Sequence
  Description of Artificial Sequence: Synthetic oligonucleotide
uggacgaucucuucugcuu

SEQ ID NO: 3053050 - RNA, 19 nt, Artificial Sequence
  Description of Artificial Sequence: Synthetic oligonucleotide
guggcaggcggcuugcagc

SEQ ID NO: 3053051 - RNA, 19 nt, Artificial Sequence
  Description of Artificial Sequence: Synthetic oligonucleotide
uaggcgagugacauccauc

SEQ ID NO: 3053052 - RNA, 19 nt, Artificial Sequence
  Description of Artificial Sequence: Synthetic oligonucleotide
aggaguugcuccucagacu

SEQ ID NO: 3053053 - RNA, 19 nt, Artificial Sequence
  Description of Artificial Sequence: Synthetic oligonucleotide
ucuuguucagugccacgau

SEQ ID NO: 3053054 - RNA, 19 nt, Artificial Sequence
  Description of Artificial Sequence: Synthetic oligonucleotide
aagcccacuaggguggcca

SEQ ID NO: 3053055 - RNA, 19 nt, Artificial Sequence
  Description of Artificial Sequence: Synthetic oligonucleotide
gcgagugacauccauccug

SEQ ID NO: 3053056 - RNA, 19 nt, Artificial Sequence
  Description of Artificial Sequence: Synthetic oligonucleotide
ccacgauagaaacagaaga

SEQ ID NO: 3053057 - RNA, 19 nt, Artificial Sequence
  Description of Artificial Sequence: Synthetic oligonucleotide
cuucucggcuucuuuucug

SEQ ID NO: 3053058 - RNA, 19 nt, Artificial Sequence
  Description of Artificial Sequence: Synthetic oligonucleotide
uuucuuggacgaucucuuc

SEQ ID NO: 3053059 - RNA, 19 nt, Artificial Sequence
  Description of Artificial Sequence: Synthetic oligonucleotide
aggaguaggcgagugacau

SEQ ID NO: 3053060 - RNA, 19 nt, Artificial Sequence
  Description of Artificial Sequence: Synthetic oligonucleotide
caggaggcggcacgggucg

SEQ ID NO: 3053061 - RNA, 19 nt, Artificial Sequence
  Description of Artificial Sequence: Synthetic oligonucleotide
ucuccucagguaccaugug

SEQ ID NO: 3053062 - RNA, 19 nt, Artificial Sequence
  Description of Artificial Sequence: Synthetic oligonucleotide
gucaucucugagugucucc

SEQ ID NO: 3053063 - RNA, 19 nt, Artificial Sequence
  Description of Artificial Sequence: Synthetic oligonucleotide
gaaauccaaugaguucaug

SEQ ID NO: 3053064 - RNA, 19 nt, Artificial Sequence
  Description of Artificial Sequence: Synthetic oligonucleotide
cucagguaccauguggcug

SEQ ID NO: 3053065 - RNA, 19 nt, Artificial Sequence
  Description of Artificial Sequence: Synthetic oligonucleotide
cacgggucgcagcaggcgg

SEQ ID NO: 3053066 - RNA, 19 nt, Artificial Sequence
  Description of Artificial Sequence: Synthetic oligonucleotide
uggaggaguugcuccucag

SEQ ID NO: 3053067 - RNA, 19 nt, Artificial Sequence
  Description of Artificial Sequence: Synthetic oligonucleotide
cgugccaccuucuucgucg

SEQ ID NO: 3053068 - RNA, 19 nt, Artificial Sequence
  Description of Artificial Sequence: Synthetic oligonucleotide
uggcaggcggcuugcagcu

SEQ ID NO: 3053069 - RNA, 19 nt, Artificial Sequence
  Description of Artificial Sequence: Synthetic oligonucleotide
aguugcuccucagacuccu

SEQ ID NO: 3053070 - RNA, 19 nt, Artificial Sequence
  Description of Artificial Sequence: Synthetic oligonucleotide
ugucaucucugagugucuc

SEQ ID NO: 3053071 - RNA, 19 nt, Artificial Sequence
  Description of Artificial Sequence: Synthetic oligonucleotide
guggccaggaguaggcgag

SEQ ID NO: 3053072 - RNA, 19 nt, Artificial Sequence
  Description of Artificial Sequence: Synthetic oligonucleotide
gucucggguggccacgcag

SEQ ID NO: 3053073 - RNA, 19 nt, Artificial Sequence
  Description of Artificial Sequence: Synthetic oligonucleotide
aggaagcauaagaagccca

SEQ ID NO: 3053074 - RNA, 19 nt, Artificial Sequence
  Description of Artificial Sequence: Synthetic oligonucleotide
agugucuccucagguacca

SEQ ID NO: 3053075 - RNA, 19 nt, Artificial Sequence
  Description of Artificial Sequence: Synthetic oligonucleotide
ggaagcauaagaagcccac

SEQ ID NO: 3053076 - RNA, 19 nt, Artificial Sequence
  Description of Artificial Sequence: Synthetic oligonucleotide
ggucgcagcaggcgggugg

SEQ ID NO: 3053077 - RNA, 19 nt, Artificial Sequence
  Description of Artificial Sequence: Synthetic oligonucleotide
caaugaguucauggaggag

SEQ ID NO: 3053078 - RNA, 19 nt, Artificial Sequence
  Description of Artificial Sequence: Synthetic oligonucleotide
agaagcccacuaggguggc

SEQ ID NO: 3053079 - RNA, 19 nt, Artificial Sequence
  Description of Artificial Sequence: Synthetic oligonucleotide
gccacgauagaaacagaag

SEQ ID NO: 3053080 - RNA, 19 nt, Artificial Sequence
  Description of Artificial Sequence: Synthetic oligonucleotide
gagugacauccauccugag

SEQ ID NO: 3053081 - RNA, 19 nt, Artificial Sequence
  Description of Artificial Sequence: Synthetic oligonucleotide
ccugucaucucugaguguc

SEQ ID NO: 3053082 - RNA, 19 nt, Artificial Sequence
  Description of Artificial Sequence: Synthetic oligonucleotide
gagugucuccucagguacc

SEQ ID NO: 3053083 - RNA, 19 nt, Artificial Sequence
  Description of Artificial Sequence: Synthetic oligonucleotide
guucagugccacgauagaa

SEQ ID NO: 3053084 - RNA, 19 nt, Artificial Sequence
  Description of Artificial Sequence: Synthetic oligonucleotide
uccucagacuccugucauc

SEQ ID NO: 3053085 - RNA, 19 nt, Artificial Sequence
  Description of Artificial Sequence: Synthetic oligonucleotide
guucauggaggaguugcuc

SEQ ID NO: 3053086 - RNA, 19 nt, Artificial Sequence
  Description of Artificial Sequence: Synthetic oligonucleotide
ccaccuucuucgucgaggc

SEQ ID NO: 3053087 - RNA, 19 nt, Artificial Sequence
  Description of Artificial Sequence: Synthetic oligonucleotide
gccaccuucuucgucgagg

SEQ ID NO: 3053088 - RNA, 19 nt, Artificial Sequence
  Description of Artificial Sequence: Synthetic oligonucleotide
gcaggcggcuugcagcugg

SEQ ID NO: 3053089 - RNA, 19 nt, Artificial Sequence
  Description of Artificial Sequence: Synthetic oligonucleotide
cgauagaaacagaagagaa

SEQ ID NO: 3053090 - RNA, 19 nt, Artificial Sequence
  Description of Artificial Sequence: Synthetic oligonucleotide
cugagugucuccucaggua

SEQ ID NO: 3053091 - RNA, 19 nt, Artificial Sequence
  Description of Artificial Sequence: Synthetic oligonucleotide
acgaucucuucugcuucuc

SEQ ID NO: 3053092 - RNA, 19 nt, Artificial Sequence
  Description of Artificial Sequence: Synthetic oligonucleotide
agaaauccaaugaguucau

SEQ ID NO: 3053093 - RNA, 19 nt, Artificial Sequence
  Description of Artificial Sequence: Synthetic oligonucleotide
ccaaugaguucauggagga

SEQ ID NO: 3053094 - RNA, 19 nt, Artificial Sequence
  Description of Artificial Sequence: Synthetic oligonucleotide
cuuguucagugccacgaua

SEQ ID NO: 3053095 - RNA, 19 nt, Artificial Sequence
  Description of Artificial Sequence: Synthetic oligonucleotide
cuggcaggaggcggcacgg

SEQ ID NO: 3053096 - RNA, 19 nt, Artificial Sequence
  Description of Artificial Sequence: Synthetic oligonucleotide
augaguucauggaggaguu

SEQ ID NO: 3053097 - RNA, 19 nt, Artificial Sequence
  Description of Artificial Sequence: Synthetic oligonucleotide
uccugucaucucugagugu

SEQ ID NO: 3053098 - RNA, 19 nt, Artificial Sequence
  Description of Artificial Sequence: Synthetic oligonucleotide
gaagcauaagaagcccacu

SEQ ID NO: 3053099 - RNA, 19 nt, Artificial Sequence
  Description of Artificial Sequence: Synthetic oligonucleotide
caucucugagugucuccuc

SEQ ID NO: 3053100 - RNA, 19 nt, Artificial Sequence
  Description of Artificial Sequence: Synthetic oligonucleotide
guagauggcaaggaagcau

SEQ ID NO: 3053101 - RNA, 19 nt, Artificial Sequence
  Description of Artificial Sequence: Synthetic oligonucleotide
ccaggaguaggcgagugac

SEQ ID NO: 3053102 - RNA, 19 nt, Artificial Sequence
  Description of Artificial Sequence: Synthetic oligonucleotide
gacgaucucuucugcuucu

SEQ ID NO: 3053103 - RNA, 19 nt, Artificial Sequence
  Description of Artificial Sequence: Synthetic oligonucleotide
gguggcaggcggcuugcag

SEQ ID NO: 3053104 - RNA, 19 nt, Artificial Sequence
  Description of Artificial Sequence: Synthetic oligonucleotide
agcccacuaggguggccag

SEQ ID NO: 3053105 - RNA, 19 nt, Artificial Sequence
  Description of Artificial Sequence: Synthetic oligonucleotide
aggcggcacgggucgcagc

SEQ ID NO: 3053106 - RNA, 19 nt, Artificial Sequence
  Description of Artificial Sequence: Synthetic oligonucleotide
cuaggguggccaggaguag

SEQ ID NO: 3053107 - RNA, 19 nt, Artificial Sequence
  Description of Artificial Sequence: Synthetic oligonucleotide
gcuugcagcuggucucggg

SEQ ID NO: 3053108 - RNA, 19 nt, Artificial Sequence
  Description of Artificial Sequence: Synthetic oligonucleotide
cucagacuccugucaucuc

SEQ ID NO: 3053109 - RNA, 19 nt, Artificial Sequence
  Description of Artificial Sequence: Synthetic oligonucleotide
gguggccaggaguaggcga

SEQ ID NO: 3053110 - RNA, 19 nt, Artificial Sequence
  Description of Artificial Sequence: Synthetic oligonucleotide
ggaggaguugcuccucaga

SEQ ID NO: 3053111 - RNA, 19 nt, Artificial Sequence
  Description of Artificial Sequence: Synthetic oligonucleotide
cuggucucggguggccacg

SEQ ID NO: 3053112 - RNA, 19 nt, Artificial Sequence
  Description of Artificial Sequence: Synthetic oligonucleotide
cagugccacgauagaaaca

SEQ ID NO: 3053113 - RNA, 19 nt, Artificial Sequence
  Description of Artificial Sequence: Synthetic oligonucleotide
cggguggccacgcagggcg

SEQ ID NO: 3053114 - RNA, 19 nt, Artificial Sequence
  Description of Artificial Sequence: Synthetic oligonucleotide
caggaguaggcgagugaca

SEQ ID NO: 3053115 - RNA, 19 nt, Artificial Sequence
  Description of Artificial Sequence: Synthetic oligonucleotide
cauggaggaguugcuccuc

SEQ ID NO: 3053116 - RNA, 19 nt, Artificial Sequence
  Description of Artificial Sequence: Synthetic oligonucleotide
gcuccucagacuccuguca

SEQ ID NO: 3053117 - RNA, 19 nt, Artificial Sequence
  Description of Artificial Sequence: Synthetic oligonucleotide
caccuucuucgucgaggcc

SEQ ID NO: 3053118 - RNA, 19 nt, Artificial Sequence
  Description of Artificial Sequence: Synthetic oligonucleotide
acgggucgcagcaggcggg

SEQ ID NO: 3053119 - RNA, 19 nt, Artificial Sequence
  Description of Artificial Sequence: Synthetic oligonucleotide
cuuggauuucuuguucagu

SEQ ID NO: 3053120 - RNA, 19 nt, Artificial Sequence
  Description of Artificial Sequence: Synthetic oligonucleotide
gucuccucagguaccaugu

SEQ ID NO: 3053121 - RNA, 19 nt, Artificial Sequence
  Description of Artificial Sequence: Synthetic oligonucleotide
caggcggguggcaggcggc

SEQ ID NO: 3053122 - RNA, 19 nt, Artificial Sequence
  Description of Artificial Sequence: Synthetic oligonucleotide
gucgcagcaggcggguggc

SEQ ID NO: 3053123 - RNA, 19 nt, Artificial Sequence
  Description of Artificial Sequence: Synthetic oligonucleotide
agauggcaaggaagcauaa

SEQ ID NO: 3053124 - RNA, 19 nt, Artificial Sequence
  Description of Artificial Sequence: Synthetic oligonucleotide
ccacgcagggcgugggugg

SEQ ID NO: 3053125 - RNA, 19 nt, Artificial Sequence
  Description of Artificial Sequence: Synthetic oligonucleotide
guaccauguggcuguagau

SEQ ID NO: 3053126 - RNA, 19 nt, Artificial Sequence
  Description of Artificial Sequence: Synthetic oligonucleotide
ggcuguagauggcaaggaa

SEQ ID NO: 3053127 - RNA, 19 nt, Artificial Sequence
  Description of Artificial Sequence: Synthetic oligonucleotide
uggucucggguggccacgc

SEQ ID NO: 3053128 - RNA, 19 nt, Artificial Sequence
  Description of Artificial Sequence: Synthetic oligonucleotide
uucuucgucgaggccuuuu

SEQ ID NO: 3053129 - RNA, 19 nt, Artificial Sequence
  Description of Artificial Sequence: Synthetic oligonucleotide
uggcaggaggcggcacggg

SEQ ID NO: 3053130 - RNA, 19 nt, Artificial Sequence
  Description of Artificial Sequence: Synthetic oligonucleotide
ggcuucuuuucuguugauc

SEQ ID NO: 3053131 - RNA, 19 nt, Artificial Sequence
  Description of Artificial Sequence: Synthetic oligonucleotide
gaggcggcacgggucgcag

SEQ ID NO: 3053132 - RNA, 19 nt, Artificial Sequence
  Description of Artificial Sequence: Synthetic oligonucleotide
uggccacgcagggcguggg

SEQ ID NO: 3053133 - RNA, 19 nt, Artificial Sequence
  Description of Artificial Sequence: Synthetic oligonucleotide
guggccacgcagggcgugg

SEQ ID NO: 3053134 - RNA, 19 nt, Artificial Sequence
  Description of Artificial Sequence: Synthetic oligonucleotide
ucggguggccacgcagggc

SEQ ID NO: 3053135 - RNA, 19 nt, Artificial Sequence
  Description of Artificial Sequence: Synthetic oligonucleotide
gcggcuugcagcuggucuc

SEQ ID NO: 3053136 - RNA, 19 nt, Artificial Sequence
  Description of Artificial Sequence: Synthetic oligonucleotide
ccauguggcuguagauggc

SEQ ID NO: 3053137 - RNA, 19 nt, Artificial Sequence
  Description of Artificial Sequence: Synthetic oligonucleotide
cagggcguggguggcgggg

SEQ ID NO: 3053138 - RNA, 19 nt, Artificial Sequence
  Description of Artificial Sequence: Synthetic oligonucleotide
gaagcccacuaggguggcc

SEQ ID NO: 3053139 - RNA, 19 nt, Artificial Sequence
  Description of Artificial Sequence: Synthetic oligonucleotide
cacuaggguggccaggagu

SEQ ID NO: 3053140 - RNA, 19 nt, Artificial Sequence
  Description of Artificial Sequence: Synthetic oligonucleotide
cgaucucuucugcuucucg

SEQ ID NO: 3053141 - RNA, 19 nt, Artificial Sequence
  Description of Artificial Sequence: Synthetic oligonucleotide
cgagugacauccauccuga

SEQ ID NO: 3053142 - RNA, 19 nt, Artificial Sequence
  Description of Artificial Sequence: Synthetic oligonucleotide
ggcggcacgggucgcagca

SEQ ID NO: 3053143 - RNA, 19 nt, Artificial Sequence
  Description of Artificial Sequence: Synthetic oligonucleotide
ggaguaggcgagugacauc

SEQ ID NO: 3053144 - RNA, 19 nt, Artificial Sequence
  Description of Artificial Sequence: Synthetic oligonucleotide
guaggcgagugacauccau

SEQ ID NO: 3053145 - RNA, 19 nt, Artificial Sequence
  Description of Artificial Sequence: Synthetic oligonucleotide
agguaccauguggcuguag

SEQ ID NO: 3053146 - RNA, 19 nt, Artificial Sequence
  Description of Artificial Sequence: Synthetic oligonucleotide
agcuggucucggguggcca

SEQ ID NO: 3053147 - RNA, 19 nt, Artificial Sequence
  Description of Artificial Sequence: Synthetic oligonucleotide
aggaggcggcacgggucgc

SEQ ID NO: 3053148 - RNA, 19 nt, Artificial Sequence
  Description of Artificial Sequence: Synthetic oligonucleotide
auguggcuguagauggcaa

SEQ ID NO: 3053149 - RNA, 19 nt, Artificial Sequence
  Description of Artificial Sequence: Synthetic oligonucleotide
guugcuccucagacuccug

SEQ ID NO: 3053150 - RNA, 19 nt, Artificial Sequence
  Description of Artificial Sequence: Synthetic oligonucleotide
gcacgggucgcagcaggcg

SEQ ID NO: 3053151 - RNA, 19 nt, Artificial Sequence
  Description of Artificial Sequence: Synthetic oligonucleotide
cacgcagggcguggguggc

SEQ ID NO: 3053152 - RNA, 19 nt, Artificial Sequence
  Description of Artificial Sequence: Synthetic oligonucleotide
aguaggcgagugacaucca

SEQ ID NO: 3053153 - RNA, 19 nt, Artificial Sequence
  Description of Artificial Sequence: Synthetic oligonucleotide
gcuggucucggguggccac

SEQ ID NO: 3053154 - RNA, 19 nt, Artificial Sequence
  Description of Artificial Sequence: Synthetic oligonucleotide
gugccaccuucuucgucga

SEQ ID NO: 3053155 - RNA, 19 nt, Artificial Sequence
  Description of Artificial Sequence: Synthetic oligonucleotide
uggccaggaguaggcgagu

SEQ ID NO: 3053156 - RNA, 19 nt, Artificial Sequence
  Description of Artificial Sequence: Synthetic oligonucleotide
ggguggccaggaguaggcg

SEQ ID NO: 3053157 - RNA, 19 nt, Artificial Sequence
  Description of Artificial Sequence: Synthetic oligonucleotide
ggcggcuugcagcuggucu

SEQ ID NO: 3053158 - RNA, 19 nt, Artificial Sequence
  Description of Artificial Sequence: Synthetic oligonucleotide
gcggguggcaggcggcuug

SEQ ID NO: 3053159 - RNA, 19 nt, Artificial Sequence
  Description of Artificial Sequence: Synthetic oligonucleotide
cugucaucucugagugucu

SEQ ID NO: 3053160 - RNA, 19 nt, Artificial Sequence
  Description of Artificial Sequence: Synthetic oligonucleotide
cagcuggucucggguggcc

SEQ ID NO: 3053161 - RNA, 19 nt, Artificial Sequence
  Description of Artificial Sequence: Synthetic oligonucleotide
gccaggaguaggcgaguga

SEQ ID NO: 3053162 - RNA, 19 nt, Artificial Sequence
  Description of Artificial Sequence: Synthetic oligonucleotide
acgcagggcguggguggcg

SEQ ID NO: 3053163 - RNA, 19 nt, Artificial Sequence
  Description of Artificial Sequence: Synthetic oligonucleotide
aggcggcuugcagcugguc

SEQ ID NO: 3053164 - RNA, 19 nt, Artificial Sequence
  Description of Artificial Sequence: Synthetic oligonucleotide
cuccucagacuccugucau

SEQ ID NO: 3053165 - RNA, 19 nt, Artificial Sequence
  Description of Artificial Sequence: Synthetic oligonucleotide
gccacgcagggcgugggug

SEQ ID NO: 3053166 - RNA, 19 nt, Artificial Sequence
  Description of Artificial Sequence: Synthetic oligonucleotide
ggccaggaguaggcgagug

SEQ ID NO: 3053167 - RNA, 19 nt, Artificial Sequence
  Description of Artificial Sequence: Synthetic oligonucleotide
gggccgugccaccuucuuc

SEQ ID NO: 3053168 - RNA, 19 nt, Artificial Sequence
  Description of Artificial Sequence: Synthetic oligonucleotide
gugccacgauagaaacaga

SEQ ID NO: 3053169 - RNA, 19 nt, Artificial Sequence
  Description of Artificial Sequence: Synthetic oligonucleotide
aggcggguggcaggcggcu

SEQ ID NO: 3053170 - RNA, 19 nt, Artificial Sequence
  Description of Artificial Sequence: Synthetic oligonucleotide
ccucagacuccugucaucu

SEQ ID NO: 3053171 - RNA, 19 nt, Artificial Sequence
  Description of Artificial Sequence: Synthetic oligonucleotide
ggcuugcagcuggucucgg

SEQ ID NO: 3053172 - RNA, 19 nt, Artificial Sequence
  Description of Artificial Sequence: Synthetic oligonucleotide
gcccacuaggguggccagg

SEQ ID NO: 3053173 - RNA, 19 nt, Artificial Sequence
  Description of Artificial Sequence: Synthetic oligonucleotide
cccacuaggguggccagga

SEQ ID NO: 3053174 - RNA, 19 nt, Artificial Sequence
  Description of Artificial Sequence: Synthetic oligonucleotide
gguggccacgcagggcgug

SEQ ID NO: 3053175 - RNA, 19 nt, Artificial Sequence
  Description of Artificial Sequence: Synthetic oligonucleotide
ucgcagcaggcggguggca

SEQ ID NO: 3053176 - RNA, 19 nt, Artificial Sequence
  Description of Artificial Sequence: Synthetic oligonucleotide
ccacuaggguggccaggag

SEQ ID NO: 3053177 - RNA, 19 nt, Artificial Sequence
  Description of Artificial Sequence: Synthetic oligonucleotide
cggcuugcagcuggucucg

SEQ ID NO: 3053178 - RNA, 19 nt, Artificial Sequence
  Description of Artificial Sequence: Synthetic oligonucleotide
ggcgagugacauccauccu

SEQ ID NO: 3053179 - RNA, 19 nt, Artificial Sequence
  Description of Artificial Sequence: Synthetic oligonucleotide
ccucagguaccauguggcu

SEQ ID NO: 3053180 - RNA, 19 nt, Artificial Sequence
  Description of Artificial Sequence: Synthetic oligonucleotide
ggaggcggcacgggucgca

SEQ ID NO: 3053181 - RNA, 19 nt, Artificial Sequence
  Description of Artificial Sequence: Synthetic oligonucleotide
cgcagggcguggguggcgg

SEQ ID NO: 3053182 - RNA, 19 nt, Artificial Sequence
  Description of Artificial Sequence: Synthetic oligonucleotide
ggucucggguggccacgca

SEQ ID NO: 3053183 - RNA, 19 nt, Artificial Sequence
  Description of Artificial Sequence: Synthetic oligonucleotide
ccgugccaccuucuucguc

SEQ ID NO: 3053184 - RNA, 19 nt, Artificial Sequence
  Description of Artificial Sequence: Synthetic oligonucleotide
gcggcacgggucgcagcag

SEQ ID NO: 3053185 - RNA, 19 nt, Artificial Sequence
  Description of Artificial Sequence: Synthetic oligonucleotide
caggcggcuugcagcuggu

SEQ ID NO: 3053186 - RNA, 19 nt, Artificial Sequence
  Description of Artificial Sequence: Synthetic oligonucleotide
ggcaggcggcuugcagcug

SEQ ID NO: 3053187 - RNA, 19 nt, Artificial Sequence
  Description of Artificial Sequence: Synthetic oligonucleotide
gggucgcagcaggcgggug

SEQ ID NO: 3053188 - RNA, 19 nt, Artificial Sequence
  Description of Artificial Sequence: Synthetic oligonucleotide
ccuucuucgucgaggccuu

SEQ ID NO: 3053189 - RNA, 19 nt, Artificial Sequence
  Description of Artificial Sequence: Synthetic oligonucleotide
cagguaccauguggcugua

SEQ ID NO: 3053190 - RNA, 19 nt, Artificial Sequence
  Description of Artificial Sequence: Synthetic oligonucleotide
gugucuccucagguaccau

SEQ ID NO: 3053191 - RNA, 19 nt, Artificial Sequence
  Description of Artificial Sequence: Synthetic oligonucleotide
gccgugccaccuucuucgu

SEQ ID NO: 3053192 - RNA, 19 nt, Artificial Sequence
  Description of Artificial Sequence: Synthetic oligonucleotide
ggggccgugccaccuucuu

SEQ ID NO: 3053193 - RNA, 19 nt, Artificial Sequence
  Description of Artificial Sequence: Synthetic oligonucleotide
ggccacgcagggcgugggu

SEQ ID NO: 3053194 - RNA, 19 nt, Artificial Sequence
  Description of Artificial Sequence: Synthetic oligonucleotide
ggguggcaggcggcuugca

SEQ ID NO: 3053195 - RNA, 19 nt, Artificial Sequence
  Description of Artificial Sequence: Synthetic oligonucleotide
cuucuucgucgaggccuuu

SEQ ID NO: 3053196 - RNA, 19 nt, Artificial Sequence
  Description of Artificial Sequence: Synthetic oligonucleotide
ggguggccacgcagggcgu

SEQ ID NO: 3053197 - RNA, 19 nt, Artificial Sequence
  Description of Artificial Sequence: Synthetic oligonucleotide
ggcggguggcaggcggcuu

SEQ ID NO: 3053198 - RNA, 19 nt, Artificial Sequence
  Description of Artificial Sequence: Synthetic oligonucleotide
cggcuucuuuucuguugau

SEQ ID NO: 3053199 - RNA, 19 nt, Artificial Sequence
  Description of Artificial Sequence: Synthetic oligonucleotide
aaaguagucacauucaauc

SEQ ID NO: 3053200 - RNA, 19 nt, Artificial Sequence
  Description of Artificial Sequence: Synthetic oligonucleotide
cuaaugaugggcuucaugg

SEQ ID NO: 3053201 - RNA, 19 nt, Artificial Sequence
  Description of Artificial Sequence: Synthetic oligonucleotide
auggguucaagccaaaucc

SEQ ID NO: 3053202 - RNA, 19 nt, Artificial Sequence
  Description of Artificial Sequence: Synthetic oligonucleotide
aagaacugcauucuuuggc

SEQ ID NO: 3053203 - RNA, 19 nt, Artificial Sequence
  Description of Artificial Sequence: Synthetic oligonucleotide
uucaaucagguucagaugc

SEQ ID NO: 3053204 - RNA, 19 nt, Artificial Sequence
  Description of Artificial Sequence: Synthetic oligonucleotide
uuuaaguacugccagacga

SEQ ID NO: 3053205 - RNA, 19 nt, Artificial Sequence
  Description of Artificial Sequence: Synthetic oligonucleotide
agcaguuucacucugaugu

SEQ ID NO: 3053206 - RNA, 19 nt, Artificial Sequence
  Description of Artificial Sequence: Synthetic oligonucleotide
acauucuuaaacuccagac

SEQ ID NO: 3053207 - RNA, 19 nt, Artificial Sequence
  Description of Artificial Sequence: Synthetic oligonucleotide
ucaagccaaauccaguagg

SEQ ID NO: 3053208 - RNA, 19 nt, Artificial Sequence
  Description of Artificial Sequence: Synthetic oligonucleotide
gucacauucaaucagguuc

SEQ ID NO: 3053209 - RNA, 19 nt, Artificial Sequence
  Description of Artificial Sequence: Synthetic oligonucleotide
uuaaacuccagaccaaagu

SEQ ID NO: 3053210 - RNA, 19 nt, Artificial Sequence
  Description of Artificial Sequence: Synthetic oligonucleotide
augucaaauacuuccacag

SEQ ID NO: 3053211 - RNA, 19 nt, Artificial Sequence
  Description of Artificial Sequence: Synthetic oligonucleotide
uccaacagaaguuuggcca

SEQ ID NO: 3053212 - RNA, 19 nt, Artificial Sequence
  Description of Artificial Sequence: Synthetic oligonucleotide
ucaaauacuuccacagugc

SEQ ID NO: 3053213 - RNA, 19 nt, Artificial Sequence
  Description of Artificial Sequence: Synthetic oligonucleotide
cuguccaucacacuuaggc

SEQ ID NO: 3053214 - RNA, 19 nt, Artificial Sequence
  Description of Artificial Sequence: Synthetic oligonucleotide
ugucuuuaaguacugccag

SEQ ID NO: 3053215 - RNA, 19 nt, Artificial Sequence
  Description of Artificial Sequence: Synthetic oligonucleotide
aauccaguaggacuggaca

SEQ ID NO: 3053216 - RNA, 19 nt, Artificial Sequence
  Description of Artificial Sequence: Synthetic oligonucleotide
cauucuuuggccuucguac

SEQ ID NO: 3053217 - RNA, 19 nt, Artificial Sequence
  Description of Artificial Sequence: Synthetic oligonucleotide
ucugucuuuaaguacugcc

SEQ ID NO: 3053218 - RNA, 19 nt, Artificial Sequence
  Description of Artificial Sequence: Synthetic oligonucleotide
acuugugucaguaagaccu

SEQ ID NO: 3053219 - RNA, 19 nt, Artificial Sequence
  Description of Artificial Sequence: Synthetic oligonucleotide
aguagucacauucaaucag

SEQ ID NO: 3053220 - RNA, 19 nt, Artificial Sequence
  Description of Artificial Sequence: Synthetic oligonucleotide
aaugaugggcuucaugggu

SEQ ID NO: 3053221 - RNA, 19 nt, Artificial Sequence
  Description of Artificial Sequence: Synthetic oligonucleotide
cauucuuaaacuccagacc

SEQ ID NO: 3053222 - RNA, 19 nt, Artificial Sequence
  Description of Artificial Sequence: Synthetic oligonucleotide
gucaaauacuuccacagug

SEQ ID NO: 3053223 - RNA, 19 nt, Artificial Sequence
  Description of Artificial Sequence: Synthetic oligonucleotide
agugccauccagcaguuuc

SEQ ID NO: 3053224 - RNA, 19 nt, Artificial Sequence
  Description of Artificial Sequence: Synthetic oligonucleotide
ucacauucaaucagguuca

SEQ ID NO: 3053225 - RNA, 19 nt, Artificial Sequence
  Description of Artificial Sequence: Synthetic oligonucleotide
aaguuuggccacccaagcg

SEQ ID NO: 3053226 - RNA, 19 nt, Artificial Sequence
  Description of Artificial Sequence: Synthetic oligonucleotide
gaccaaaguagucacauuc

SEQ ID NO: 3053227 - RNA, 19 nt, Artificial Sequence
  Description of Artificial Sequence: Synthetic oligonucleotide
aaguagucacauucaauca

SEQ ID NO: 3053228 - RNA, 19 nt, Artificial Sequence
  Description of Artificial Sequence: Synthetic oligonucleotide
uaaacuccagaccaaagua

SEQ ID NO: 3053229 - RNA, 19 nt, Artificial Sequence
  Description of Artificial Sequence: Synthetic oligonucleotide
uggacauucuuaaacucca

SEQ ID NO: 3053230 - RNA, 19 nt, Artificial Sequence
  Description of Artificial Sequence: Synthetic oligonucleotide
uaaugaugggcuucauggg

SEQ ID NO: 3053231 - RNA, 19 nt, Artificial Sequence
  Description of Artificial Sequence: Synthetic oligonucleotide
acuggacauucuuaaacuc

SEQ ID NO: 3053232 - RNA, 19 nt, Artificial Sequence
  Description of Artificial Sequence: Synthetic oligonucleotide
cuggacauucuuaaacucc

SEQ ID NO: 3053233 - RNA, 19 nt, Artificial Sequence
  Description of Artificial Sequence: Synthetic oligonucleotide
aggugcuucuccugcaucc

SEQ ID NO: 3053234 - RNA, 19 nt, Artificial Sequence
  Description of Artificial Sequence: Synthetic oligonucleotide
ucguacuugccuaaugaug

SEQ ID NO: 3053235 - RNA, 19 nt, Artificial Sequence
  Description of Artificial Sequence: Synthetic oligonucleotide
aguaagaccuguccaucac

SEQ ID NO: 3053236 - RNA, 19 nt, Artificial Sequence
  Description of Artificial Sequence: Synthetic oligonucleotide
gaagaacugcauucuuugg

SEQ ID NO: 3053237 - RNA, 19 nt, Artificial Sequence
  Description of Artificial Sequence: Synthetic oligonucleotide
ugucaguaagaccugucca

SEQ ID NO: 3053238 - RNA, 19 nt, Artificial Sequence
  Description of Artificial Sequence: Synthetic oligonucleotide
ugcauccugggugagaggg

SEQ ID NO: 3053239 - RNA, 19 nt, Artificial Sequence
  Description of Artificial Sequence: Synthetic oligonucleotide
aaacuccagaccaaaguag

SEQ ID NO: 3053240 - RNA, 19 nt, Artificial Sequence
  Description of Artificial Sequence: Synthetic oligonucleotide
uucaagccaaauccaguag

SEQ ID NO: 3053241 - RNA, 19 nt, Artificial Sequence
  Description of Artificial Sequence: Synthetic oligonucleotide
ucuuuaaguacugccagac

SEQ ID NO: 3053242 - RNA, 19 nt, Artificial Sequence
  Description of Artificial Sequence: Synthetic oligonucleotide
aacagaaguuuggccaccc

SEQ ID NO: 3053243 - RNA, 19 nt, Artificial Sequence
  Description of Artificial Sequence: Synthetic oligonucleotide
caaauacuuccacagugcc

SEQ ID NO: 3053244 - RNA, 19 nt, Artificial Sequence
  Description of Artificial Sequence: Synthetic oligonucleotide
uuucacucugaugugcagg

SEQ ID NO: 3053245 - RNA, 19 nt, Artificial Sequence
  Description of Artificial Sequence: Synthetic oligonucleotide
uaagaccuguccaucacac

SEQ ID NO: 3053246 - RNA, 19 nt, Artificial Sequence
  Description of Artificial Sequence: Synthetic oligonucleotide
aguuuggccacccaagcgu

SEQ ID NO: 3053247 - RNA, 19 nt, Artificial Sequence
  Description of Artificial Sequence: Synthetic oligonucleotide
ucacacuuaggcucaaugu

SEQ ID NO: 3053248 - RNA, 19 nt, Artificial Sequence
  Description of Artificial Sequence: Synthetic oligonucleotide
uacugccagacgaagaacu

SEQ ID NO: 3053249 - RNA, 19 nt, Artificial Sequence
  Description of Artificial Sequence: Synthetic oligonucleotide
acacuugugucaguaagac

SEQ ID NO: 3053250 - RNA, 19 nt, Artificial Sequence
  Description of Artificial Sequence: Synthetic oligonucleotide
gaugcuuccacacuugugu

SEQ ID NO: 3053251 - RNA, 19 nt, Artificial Sequence
  Description of Artificial Sequence: Synthetic oligonucleotide
guagucacauucaaucagg

SEQ ID NO: 3053252 - RNA, 19 nt, Artificial Sequence
  Description of Artificial Sequence: Synthetic oligonucleotide
aaauccaguaggacuggac

SEQ ID NO: 3053253 - RNA, 19 nt, Artificial Sequence
  Description of Artificial Sequence: Synthetic oligonucleotide
uaggcucaaugucaaauac

SEQ ID NO: 3053254 - RNA, 19 nt, Artificial Sequence
  Description of Artificial Sequence: Synthetic oligonucleotide
gaaguuuggccacccaagc

SEQ ID NO: 3053255 - RNA, 19 nt, Artificial Sequence
  Description of Artificial Sequence: Synthetic oligonucleotide
cagacgaagaacugcauuc

SEQ ID NO: 3053256 - RNA, 19 nt, Artificial Sequence
  Description of Artificial Sequence: Synthetic oligonucleotide
ugcucacuccaacagaagu

SEQ ID NO: 3053257 - RNA, 19 nt, Artificial Sequence
  Description of Artificial Sequence: Synthetic oligonucleotide
uuaaguacugccagacgaa

SEQ ID NO: 3053258 - RNA, 19 nt, Artificial Sequence
  Description of Artificial Sequence: Synthetic oligonucleotide
agccaaauccaguaggacu

SEQ ID NO: 3053259 - RNA, 19 nt, Artificial Sequence
  Description of Artificial Sequence: Synthetic oligonucleotide
auucaaucagguucagaug

SEQ ID NO: 3053260 - RNA, 19 nt, Artificial Sequence
  Description of Artificial Sequence: Synthetic oligonucleotide
aucacacuuaggcucaaug

SEQ ID NO: 3053261 - RNA, 19 nt, Artificial Sequence
  Description of Artificial Sequence: Synthetic oligonucleotide
ugcuucuccugcauccugg

SEQ ID NO: 3053262 - RNA, 19 nt, Artificial Sequence
  Description of Artificial Sequence: Synthetic oligonucleotide
aguacugccagacgaagaa

SEQ ID NO: 3053263 - RNA, 19 nt, Artificial Sequence
  Description of Artificial Sequence: Synthetic oligonucleotide
ugucaaauacuuccacagu

SEQ ID NO: 3053264 - RNA, 19 nt, Artificial Sequence
  Description of Artificial Sequence: Synthetic oligonucleotide
aagccaaauccaguaggac

SEQ ID NO: 3053265 - RNA, 19 nt, Artificial Sequence
  Description of Artificial Sequence: Synthetic oligonucleotide
uucagaugcuuccacacuu

SEQ ID NO: 3053266 - RNA, 19 nt, Artificial Sequence
  Description of Artificial Sequence: Synthetic oligonucleotide
cguacuugccuaaugaugg

SEQ ID NO: 3053267 - RNA, 19 nt, Artificial Sequence
  Description of Artificial Sequence: Synthetic oligonucleotide
ugccagacgaagaacugca

SEQ ID NO: 3053268 - RNA, 19 nt, Artificial Sequence
  Description of Artificial Sequence: Synthetic oligonucleotide
cacuccaacagaaguuugg

SEQ ID NO: 3053269 - RNA, 19 nt, Artificial Sequence
  Description of Artificial Sequence: Synthetic oligonucleotide
cuuuaaguacugccagacg

SEQ ID NO: 3053270 - RNA, 19 nt, Artificial Sequence
  Description of Artificial Sequence: Synthetic oligonucleotide
uccacagugccauccagca

SEQ ID NO: 3053271 - RNA, 19 nt, Artificial Sequence
  Description of Artificial Sequence: Synthetic oligonucleotide
cacacuuaggcucaauguc

SEQ ID NO: 3053272 - RNA, 19 nt, Artificial Sequence
  Description of Artificial Sequence: Synthetic oligonucleotide
uuggccuucguacuugccu

SEQ ID NO: 3053273 - RNA, 19 nt, Artificial Sequence
  Description of Artificial Sequence: Synthetic oligonucleotide
uucacucugaugugcaggu

SEQ ID NO: 3053274 - RNA, 19 nt, Artificial Sequence
  Description of Artificial Sequence: Synthetic oligonucleotide
uccaucacacuuaggcuca

SEQ ID NO: 3053275 - RNA, 19 nt, Artificial Sequence
  Description of Artificial Sequence: Synthetic oligonucleotide
uaggacuggacauucuuaa

SEQ ID NO: 3053276 - RNA, 19 nt, Artificial Sequence
  Description of Artificial Sequence: Synthetic oligonucleotide
uguccaucacacuuaggcu

SEQ ID NO: 3053277 - RNA, 19 nt, Artificial Sequence
  Description of Artificial Sequence: Synthetic oligonucleotide
cacucugaugugcaggugc

SEQ ID NO: 3053278 - RNA, 19 nt, Artificial Sequence
  Description of Artificial Sequence: Synthetic oligonucleotide
agagggucugcuccgguuc

SEQ ID NO: 3053279 - RNA, 19 nt, Artificial Sequence
  Description of Artificial Sequence: Synthetic oligonucleotide
uccagaccaaaguagucac

SEQ ID NO: 3053280 - RNA, 19 nt, Artificial Sequence
  Description of Artificial Sequence: Synthetic oligonucleotide
uuaggcucaaugucaaaua

SEQ ID NO: 3053281 - RNA, 19 nt, Artificial Sequence
  Description of Artificial Sequence: Synthetic oligonucleotide
ucagaugcuuccacacuug

SEQ ID NO: 3053282 - RNA, 19 nt, Artificial Sequence
  Description of Artificial Sequence: Synthetic oligonucleotide
gugucaguaagaccugucc

SEQ ID NO: 3053283 - RNA, 19 nt, Artificial Sequence
  Description of Artificial Sequence: Synthetic oligonucleotide
gacauucuuaaacuccaga

SEQ ID NO: 3053284 - RNA, 19 nt, Artificial Sequence
  Description of Artificial Sequence: Synthetic oligonucleotide
cauucaaucagguucagau

SEQ ID NO: 3053285 - RNA, 19 nt, Artificial Sequence
  Description of Artificial Sequence: Synthetic oligonucleotide
uuucugucuuuaaguacug

SEQ ID NO: 3053286 - RNA, 19 nt, Artificial Sequence
  Description of Artificial Sequence: Synthetic oligonucleotide
uggguucaagccaaaucca

SEQ ID NO: 3053287 - RNA, 19 nt, Artificial Sequence
  Description of Artificial Sequence: Synthetic oligonucleotide
uaaguacugccagacgaag

SEQ ID NO: 3053288 - RNA, 19 nt, Artificial Sequence
  Description of Artificial Sequence: Synthetic oligonucleotide
guccaucacacuuaggcuc

SEQ ID NO: 3053289 - RNA, 19 nt, Artificial Sequence
  Description of Artificial Sequence: Synthetic oligonucleotide
aacuccagaccaaaguagu

SEQ ID NO: 3053290 - RNA, 19 nt, Artificial Sequence
  Description of Artificial Sequence: Synthetic oligonucleotide
agaccuguccaucacacuu

SEQ ID NO: 3053291 - RNA, 19 nt, Artificial Sequence
  Description of Artificial Sequence: Synthetic oligonucleotide
agaaguuuggccacccaag

SEQ ID NO: 3053292 - RNA, 19 nt, Artificial Sequence
  Description of Artificial Sequence: Synthetic oligonucleotide
auucuuuggccuucguacu

SEQ ID NO: 3053293 - RNA, 19 nt, Artificial Sequence
  Description of Artificial Sequence: Synthetic oligonucleotide
cauggguucaagccaaauc

SEQ ID NO: 3053294 - RNA, 19 nt, Artificial Sequence
  Description of Artificial Sequence: Synthetic oligonucleotide
aaauacuuccacagugcca

SEQ ID NO: 3053295 - RNA, 19 nt, Artificial Sequence
  Description of Artificial Sequence: Synthetic oligonucleotide
caaugucaaauacuuccac

SEQ ID NO: 3053296 - RNA, 19 nt, Artificial Sequence
  Description of Artificial Sequence: Synthetic oligonucleotide
cugucuuuaaguacugcca

SEQ ID NO: 3053297 - RNA, 19 nt, Artificial Sequence
  Description of Artificial Sequence: Synthetic oligonucleotide
agggugcucacuccaacag

SEQ ID NO: 3053298 - RNA, 19 nt, Artificial Sequence
  Description of Artificial Sequence: Synthetic oligonucleotide
uagucacauucaaucaggu

SEQ ID NO: 3053299 - RNA, 19 nt, Artificial Sequence
  Description of Artificial Sequence: Synthetic oligonucleotide
ggcuucauggguucaagcc

SEQ ID NO: 3053300 - RNA, 19 nt, Artificial Sequence
  Description of Artificial Sequence: Synthetic oligonucleotide
cuccaacagaaguuuggcc

SEQ ID NO: 3053301 - RNA, 19 nt, Artificial Sequence
  Description of Artificial Sequence: Synthetic oligonucleotide
cuucguacuugccuaauga

SEQ ID NO: 3053302 - RNA, 19 nt, Artificial Sequence
  Description of Artificial Sequence: Synthetic oligonucleotide
ggacuggacauucuuaaac

SEQ ID NO: 3053303 - RNA, 19 nt, Artificial Sequence
  Description of Artificial Sequence: Synthetic oligonucleotide
uucguacuugccuaaugau

SEQ ID NO: 3053304 - RNA, 19 nt, Artificial Sequence
  Description of Artificial Sequence: Synthetic oligonucleotide
augcuuccacacuuguguc

SEQ ID NO: 3053305 - RNA, 19 nt, Artificial Sequence
  Description of Artificial Sequence: Synthetic oligonucleotide
guacuugccuaaugauggg

SEQ ID NO: 3053306 - RNA, 19 nt, Artificial Sequence
  Description of Artificial Sequence: Synthetic oligonucleotide
gacuggacauucuuaaacu

SEQ ID NO: 3053307 - RNA, 19 nt, Artificial Sequence
  Description of Artificial Sequence: Synthetic oligonucleotide
aguaggacuggacauucuu

SEQ ID NO: 3053308 - RNA, 19 nt, Artificial Sequence
  Description of Artificial Sequence: Synthetic oligonucleotide
ucacuccaacagaaguuug

SEQ ID NO: 3053309 - RNA, 19 nt, Artificial Sequence
  Description of Artificial Sequence: Synthetic oligonucleotide
ucugaugugcaggugcuuc

SEQ ID NO: 3053310 - RNA, 19 nt, Artificial Sequence
  Description of Artificial Sequence: Synthetic oligonucleotide
ugugucaguaagaccuguc

SEQ ID NO: 3053311 - RNA, 19 nt, Artificial Sequence
  Description of Artificial Sequence: Synthetic oligonucleotide
guucaagccaaauccagua

SEQ ID NO: 3053312 - RNA, 19 nt, Artificial Sequence
  Description of Artificial Sequence: Synthetic oligonucleotide
acacuuaggcucaauguca

SEQ ID NO: 3053313 - RNA, 19 nt, Artificial Sequence
  Description of Artificial Sequence: Synthetic oligonucleotide
uacuuccacagugccaucc

SEQ ID NO: 3053314 - RNA, 19 nt, Artificial Sequence
  Description of Artificial Sequence: Synthetic oligonucleotide
uacuugccuaaugaugggc

SEQ ID NO: 3053315 - RNA, 19 nt, Artificial Sequence
  Description of Artificial Sequence: Synthetic oligonucleotide
ugcuuccacacuuguguca

SEQ ID NO: 3053316 - RNA, 19 nt, Artificial Sequence
  Description of Artificial Sequence: Synthetic oligonucleotide
uccgguuccagggugcuca

SEQ ID NO: 3053317 - RNA, 19 nt, Artificial Sequence
  Description of Artificial Sequence: Synthetic oligonucleotide
ccauccagcaguuucacuc

SEQ ID NO: 3053318 - RNA, 19 nt, Artificial Sequence
  Description of Artificial Sequence: Synthetic oligonucleotide
aagaccuguccaucacacu

SEQ ID NO: 3053319 - RNA, 19 nt, Artificial Sequence
  Description of Artificial Sequence: Synthetic oligonucleotide
caagccaaauccaguagga

SEQ ID NO: 3053320 - RNA, 19 nt, Artificial Sequence
  Description of Artificial Sequence: Synthetic oligonucleotide
cacuugugucaguaagacc

SEQ ID NO: 3053321 - RNA, 19 nt, Artificial Sequence
  Description of Artificial Sequence: Synthetic oligonucleotide
auccaguaggacuggacau

SEQ ID NO: 3053322 - RNA, 19 nt, Artificial Sequence
  Description of Artificial Sequence: Synthetic oligonucleotide
gguucagaugcuuccacac

SEQ ID NO: 3053323 - RNA, 19 nt, Artificial Sequence
  Description of Artificial Sequence: Synthetic oligonucleotide
accuguccaucacacuuag

SEQ ID NO: 3053324 - RNA, 19 nt, Artificial Sequence
  Description of Artificial Sequence: Synthetic oligonucleotide
cuugugucaguaagaccug

SEQ ID NO: 3053325 - RNA, 19 nt, Artificial Sequence
  Description of Artificial Sequence: Synthetic oligonucleotide
ucuuuggccuucguacuug

SEQ ID NO: 3053326 - RNA, 19 nt, Artificial Sequence
  Description of Artificial Sequence: Synthetic oligonucleotide
guuucacucugaugugcag

SEQ ID NO: 3053327 - RNA, 19 nt, Artificial Sequence
  Description of Artificial Sequence: Synthetic oligonucleotide
gccaaauccaguaggacug

SEQ ID NO: 3053328 - RNA, 19 nt, Artificial Sequence
  Description of Artificial Sequence: Synthetic oligonucleotide
ucaguaagaccuguccauc

SEQ ID NO: 3053329 - RNA, 19 nt, Artificial Sequence
  Description of Artificial Sequence: Synthetic oligonucleotide
accaaaguagucacauuca

SEQ ID NO: 3053330 - RNA, 19 nt, Artificial Sequence
  Description of Artificial Sequence: Synthetic oligonucleotide
caguuucacucugaugugc

SEQ ID NO: 3053331 - RNA, 19 nt, Artificial Sequence
  Description of Artificial Sequence: Synthetic oligonucleotide
ggugagagggucugcuccg

SEQ ID NO: 3053332 - RNA, 19 nt, Artificial Sequence
  Description of Artificial Sequence: Synthetic oligonucleotide
aaguacugccagacgaaga

SEQ ID NO: 3053333 - RNA, 19 nt, Artificial Sequence
  Description of Artificial Sequence: Synthetic oligonucleotide
ucugcuccgguuccagggu

SEQ ID NO: 3053334 - RNA, 19 nt, Artificial Sequence
  Description of Artificial Sequence: Synthetic oligonucleotide
cuuuggccuucguacuugc

SEQ ID NO: 3053335 - RNA, 19 nt, Artificial Sequence
  Description of Artificial Sequence: Synthetic oligonucleotide
uuuggccuucguacuugcc

SEQ ID NO: 3053336 - RNA, 19 nt, Artificial Sequence
  Description of Artificial Sequence: Synthetic oligonucleotide
uccagcaguuucacucuga

SEQ ID NO: 3053337 - RNA, 19 nt, Artificial Sequence
  Description of Artificial Sequence: Synthetic oligonucleotide
agacgaagaacugcauucu

SEQ ID NO: 3053338 - RNA, 19 nt, Artificial Sequence
  Description of Artificial Sequence: Synthetic oligonucleotide
guaagaccuguccaucaca

SEQ ID NO: 3053339 - RNA, 19 nt, Artificial Sequence
  Description of Artificial Sequence: Synthetic oligonucleotide
acuugccuaaugaugggcu

SEQ ID NO: 3053340 - RNA, 19 nt, Artificial Sequence
  Description of Artificial Sequence: Synthetic oligonucleotide
cuucauggguucaagccaa

SEQ ID NO: 3053341 - RNA, 19 nt, Artificial Sequence
  Description of Artificial Sequence: Synthetic oligonucleotide
cacacuugugucaguaaga

SEQ ID NO: 3053342 - RNA, 19 nt, Artificial Sequence
  Description of Artificial Sequence: Synthetic oligonucleotide
uucugucuuuaaguacugc

SEQ ID NO: 3053343 - RNA, 19 nt, Artificial Sequence
  Description of Artificial Sequence: Synthetic oligonucleotide
uucuuuggccuucguacuu

SEQ ID NO: 3053344 - RNA, 19 nt, Artificial Sequence
  Description of Artificial Sequence: Synthetic oligonucleotide
ugccuaaugaugggcuuca

SEQ ID NO: 3053345 - RNA, 19 nt, Artificial Sequence
  Description of Artificial Sequence: Synthetic oligonucleotide
acuccagaccaaaguaguc

SEQ ID NO: 3053346 - RNA, 19 nt, Artificial Sequence
  Description of Artificial Sequence: Synthetic oligonucleotide
gucuuuaaguacugccaga

SEQ ID NO: 3053347 - RNA, 19 nt, Artificial Sequence
  Description of Artificial Sequence: Synthetic oligonucleotide
agucacauucaaucagguu

SEQ ID NO: 3053348 - RNA, 19 nt, Artificial Sequence
  Description of Artificial Sequence: Synthetic oligonucleotide
ugaugggcuucauggguuc

SEQ ID NO: 3053349 - RNA, 19 nt, Artificial Sequence
  Description of Artificial Sequence: Synthetic oligonucleotide
cugccagacgaagaacugc

SEQ ID NO: 3053350 - RNA, 19 nt, Artificial Sequence
  Description of Artificial Sequence: Synthetic oligonucleotide
uggccuucguacuugccua

SEQ ID NO: 3053351 - RNA, 19 nt, Artificial Sequence
  Description of Artificial Sequence: Synthetic oligonucleotide
gggugagagggucugcucc

SEQ ID NO: 3053352 - RNA, 19 nt, Artificial Sequence
  Description of Artificial Sequence: Synthetic oligonucleotide
cacagugccauccagcagu

SEQ ID NO: 3053353 - RNA, 19 nt, Artificial Sequence
  Description of Artificial Sequence: Synthetic oligonucleotide
gcuucauggguucaagcca

SEQ ID NO: 3053354 - RNA, 19 nt, Artificial Sequence
  Description of Artificial Sequence: Synthetic oligonucleotide
ugcuccgguuccagggugc

SEQ ID NO: 3053355 - RNA, 19 nt, Artificial Sequence
  Description of Artificial Sequence: Synthetic oligonucleotide
cuccagaccaaaguaguca

SEQ ID NO: 3053356 - RNA, 19 nt, Artificial Sequence
  Description of Artificial Sequence: Synthetic oligonucleotide
gagggucugcuccgguucc

SEQ ID NO: 3053357 - RNA, 19 nt, Artificial Sequence
  Description of Artificial Sequence: Synthetic oligonucleotide
caguaagaccuguccauca

SEQ ID NO: 3053358 - RNA, 19 nt, Artificial Sequence
  Description of Artificial Sequence: Synthetic oligonucleotide
guuccagggugcucacucc

SEQ ID NO: 3053359 - RNA, 19 nt, Artificial Sequence
  Description of Artificial Sequence: Synthetic oligonucleotide
uugccuaaugaugggcuuc

SEQ ID NO: 3053360 - RNA, 19 nt, Artificial Sequence
  Description of Artificial Sequence: Synthetic oligonucleotide
ugggcuucauggguucaag

SEQ ID NO: 3053361 - RNA, 19 nt, Artificial Sequence
  Description of Artificial Sequence: Synthetic oligonucleotide
uuccacacuugugucagua

SEQ ID NO: 3053362 - RNA, 19 nt, Artificial Sequence
  Description of Artificial Sequence: Synthetic oligonucleotide
gguuccagggugcucacuc

SEQ ID NO: 3053363 - RNA, 19 nt, Artificial Sequence
  Description of Artificial Sequence: Synthetic oligonucleotide
cagguucagaugcuuccac

SEQ ID NO: 3053364 - RNA, 19 nt, Artificial Sequence
  Description of Artificial Sequence: Synthetic oligonucleotide
uuuggccacccaagcgugu

SEQ ID NO: 3053365 - RNA, 19 nt, Artificial Sequence
  Description of Artificial Sequence: Synthetic oligonucleotide
ccaacagaaguuuggccac

SEQ ID NO: 3053366 - RNA, 19 nt, Artificial Sequence
  Description of Artificial Sequence: Synthetic oligonucleotide
guuuggccacccaagcgug

SEQ ID NO: 3053367 - RNA, 19 nt, Artificial Sequence
  Description of Artificial Sequence: Synthetic oligonucleotide
gucaguaagaccuguccau

SEQ ID NO: 3053368 - RNA, 19 nt, Artificial Sequence
  Description of Artificial Sequence: Synthetic oligonucleotide
aggacuggacauucuuaaa

SEQ ID NO: 3053369 - RNA, 19 nt, Artificial Sequence
  Description of Artificial Sequence: Synthetic oligonucleotide
gcuuccacacuugugucag

SEQ ID NO: 3053370 - RNA, 19 nt, Artificial Sequence
  Description of Artificial Sequence: Synthetic oligonucleotide
auccagcaguuucacucug

SEQ ID NO: 3053371 - RNA, 19 nt, Artificial Sequence
  Description of Artificial Sequence: Synthetic oligonucleotide
uugugucaguaagaccugu

SEQ ID NO: 3053372 - RNA, 19 nt, Artificial Sequence
  Description of Artificial Sequence: Synthetic oligonucleotide
auacuuccacagugccauc

SEQ ID NO: 3053373 - RNA, 19 nt, Artificial Sequence
  Description of Artificial Sequence: Synthetic oligonucleotide
cagaaguuuggccacccaa

SEQ ID NO: 3053374 - RNA, 19 nt, Artificial Sequence
  Description of Artificial Sequence: Synthetic oligonucleotide
acugccagacgaagaacug

SEQ ID NO: 3053375 - RNA, 19 nt, Artificial Sequence
  Description of Artificial Sequence: Synthetic oligonucleotide
agaugcuuccacacuugug

SEQ ID NO: 3053376 - RNA, 19 nt, Artificial Sequence
  Description of Artificial Sequence: Synthetic oligonucleotide
uccaguaggacuggacauu

SEQ ID NO: 3053377 - RNA, 19 nt, Artificial Sequence
  Description of Artificial Sequence: Synthetic oligonucleotide
ggguucaagccaaauccag

SEQ ID NO: 3053378 - RNA, 19 nt, Artificial Sequence
  Description of Artificial Sequence: Synthetic oligonucleotide
cagcaguuucacucugaug

SEQ ID NO: 3053379 - RNA, 19 nt, Artificial Sequence
  Description of Artificial Sequence: Synthetic oligonucleotide
uccugggugagagggucug

SEQ ID NO: 3053380 - RNA, 19 nt, Artificial Sequence
  Description of Artificial Sequence: Synthetic oligonucleotide
cauccugggugagaggguc

SEQ ID NO: 3053381 - RNA, 19 nt, Artificial Sequence
  Description of Artificial Sequence: Synthetic oligonucleotide
uccagggugcucacuccaa

SEQ ID NO: 3053382 - RNA, 19 nt, Artificial Sequence
  Description of Artificial Sequence: Synthetic oligonucleotide
cacuuaggcucaaugucaa

SEQ ID NO: 3053383 - RNA, 19 nt, Artificial Sequence
  Description of Artificial Sequence: Synthetic oligonucleotide
uggccacccaagcgugucc

SEQ ID NO: 3053384 - RNA, 19 nt, Artificial Sequence
  Description of Artificial Sequence: Synthetic oligonucleotide
acauucaaucagguucaga

SEQ ID NO: 3053385 - RNA, 19 nt, Artificial Sequence
  Description of Artificial Sequence: Synthetic oligonucleotide
uucauggguucaagccaaa

SEQ ID NO: 3053386 - RNA, 19 nt, Artificial Sequence
  Description of Artificial Sequence: Synthetic oligonucleotide
acucugaugugcaggugcu

SEQ ID NO: 3053387 - RNA, 19 nt, Artificial Sequence
  Description of Artificial Sequence: Synthetic oligonucleotide
cuuaggcucaaugucaaau

SEQ ID NO: 3053388 - RNA, 19 nt, Artificial Sequence
  Description of Artificial Sequence: Synthetic oligonucleotide
ugcauucuuuggccuucgu

SEQ ID NO: 3053389 - RNA, 19 nt, Artificial Sequence
  Description of Artificial Sequence: Synthetic oligonucleotide
ucauggguucaagccaaau

SEQ ID NO: 3053390 - RNA, 19 nt, Artificial Sequence
  Description of Artificial Sequence: Synthetic oligonucleotide
ccugcauccugggugagag

SEQ ID NO: 3053391 - RNA, 19 nt, Artificial Sequence
  Description of Artificial Sequence: Synthetic oligonucleotide
acuuaggcucaaugucaaa

SEQ ID NO: 3053392 - RNA, 19 nt, Artificial Sequence
  Description of Artificial Sequence: Synthetic oligonucleotide
ucacucugaugugcaggug

SEQ ID NO: 3053393 - RNA, 19 nt, Artificial Sequence
  Description of Artificial Sequence: Synthetic oligonucleotide
guucagaugcuuccacacu

SEQ ID NO: 3053394 - RNA, 19 nt, Artificial Sequence
  Description of Artificial Sequence: Synthetic oligonucleotide
ggugcucacuccaacagaa

SEQ ID NO: 3053395 - RNA, 19 nt, Artificial Sequence
  Description of Artificial Sequence: Synthetic oligonucleotide
augaugggcuucauggguu

SEQ ID NO: 3053396 - RNA, 19 nt, Artificial Sequence
  Description of Artificial Sequence: Synthetic oligonucleotide
cagggugcucacuccaaca

SEQ ID NO: 3053397 - RNA, 19 nt, Artificial Sequence
  Description of Artificial Sequence: Synthetic oligonucleotide
gugcuucuccugcauccug

SEQ ID NO: 3053398 - RNA, 19 nt, Artificial Sequence
  Description of Artificial Sequence: Synthetic oligonucleotide
guacugccagacgaagaac

SEQ ID NO: 3053399 - RNA, 19 nt, Artificial Sequence
  Description of Artificial Sequence: Synthetic oligonucleotide
gugagagggucugcuccgg

SEQ ID NO: 3053400 - RNA, 19 nt, Artificial Sequence
  Description of Artificial Sequence: Synthetic oligonucleotide
cugcauucuuuggccuucg

SEQ ID NO: 3053401 - RNA, 19 nt, Artificial Sequence
  Description of Artificial Sequence: Synthetic oligonucleotide
guaggacuggacauucuua

SEQ ID NO: 3053402 - RNA, 19 nt, Artificial Sequence
  Description of Artificial Sequence: Synthetic oligonucleotide
gggcuucauggguucaagc

SEQ ID NO: 3053403 - RNA, 19 nt, Artificial Sequence
  Description of Artificial Sequence: Synthetic oligonucleotide
ggacauucuuaaacuccag

SEQ ID NO: 3053404 - RNA, 19 nt, Artificial Sequence
  Description of Artificial Sequence: Synthetic oligonucleotide
cugcauccugggugagagg

SEQ ID NO: 3053405 - RNA, 19 nt, Artificial Sequence
  Description of Artificial Sequence: Synthetic oligonucleotide
cacauucaaucagguucag

SEQ ID NO: 3053406 - RNA, 19 nt, Artificial Sequence
  Description of Artificial Sequence: Synthetic oligonucleotide
gugccauccagcaguuuca

SEQ ID NO: 3053407 - RNA, 19 nt, Artificial Sequence
  Description of Artificial Sequence: Synthetic oligonucleotide
ggucugcuccgguuccagg

SEQ ID NO: 3053408 - RNA, 19 nt, Artificial Sequence
  Description of Artificial Sequence: Synthetic oligonucleotide
cagaccaaaguagucacau

SEQ ID NO: 3053409 - RNA, 19 nt, Artificial Sequence
  Description of Artificial Sequence: Synthetic oligonucleotide
cugcuccgguuccagggug

SEQ ID NO: 3053410 - RNA, 19 nt, Artificial Sequence
  Description of Artificial Sequence: Synthetic oligonucleotide
caggugcuucuccugcauc

SEQ ID NO: 3053411 - RNA, 19 nt, Artificial Sequence
  Description of Artificial Sequence: Synthetic oligonucleotide
uccugcauccugggugaga

SEQ ID NO: 3053412 - RNA, 19 nt, Artificial Sequence
  Description of Artificial Sequence: Synthetic oligonucleotide
gaccuguccaucacacuua

SEQ ID NO: 3053413 - RNA, 19 nt, Artificial Sequence
  Description of Artificial Sequence: Synthetic oligonucleotide
ccuucguacuugccuaaug

SEQ ID NO: 3053414 - RNA, 19 nt, Artificial Sequence
  Description of Artificial Sequence: Synthetic oligonucleotide
ccaaaguagucacauucaa

SEQ ID NO: 3053415 - RNA, 19 nt, Artificial Sequence
  Description of Artificial Sequence: Synthetic oligonucleotide
gacgaagaacugcauucuu

SEQ ID NO: 3053416 - RNA, 19 nt, Artificial Sequence
  Description of Artificial Sequence: Synthetic oligonucleotide
gaugggcuucauggguuca

SEQ ID NO: 3053417 - RNA, 19 nt, Artificial Sequence
  Description of Artificial Sequence: Synthetic oligonucleotide
ccaaauccaguaggacugg

SEQ ID NO: 3053418 - RNA, 19 nt, Artificial Sequence
  Description of Artificial Sequence: Synthetic oligonucleotide
cacccaagcgugucccuga

SEQ ID NO: 3053419 - RNA, 19 nt, Artificial Sequence
  Description of Artificial Sequence: Synthetic oligonucleotide
gcauucuuuggccuucgua

SEQ ID NO: 3053420 - RNA, 19 nt, Artificial Sequence
  Description of Artificial Sequence: Synthetic oligonucleotide
ccaagcgugucccugaagu

SEQ ID NO: 3053421 - RNA, 19 nt, Artificial Sequence
  Description of Artificial Sequence: Synthetic oligonucleotide
cucacuccaacagaaguuu

SEQ ID NO: 3053422 - RNA, 19 nt, Artificial Sequence
  Description of Artificial Sequence: Synthetic oligonucleotide
ccaguaggacuggacauuc

SEQ ID NO: 3053423 - RNA, 19 nt, Artificial Sequence
  Description of Artificial Sequence: Synthetic oligonucleotide
caaauccaguaggacugga

SEQ ID NO: 3053424 - RNA, 19 nt, Artificial Sequence
  Description of Artificial Sequence: Synthetic oligonucleotide
gggugcucacuccaacaga

SEQ ID NO: 3053425 - RNA, 19 nt, Artificial Sequence
  Description of Artificial Sequence: Synthetic oligonucleotide
augggcuucauggguucaa

SEQ ID NO: 3053426 - RNA, 19 nt, Artificial Sequence
  Description of Artificial Sequence: Synthetic oligonucleotide
gcucaaugucaaauacuuc

SEQ ID NO: 3053427 - RNA, 19 nt, Artificial Sequence
  Description of Artificial Sequence: Synthetic oligonucleotide
acccaagcgugucccugaa

SEQ ID NO: 3053428 - RNA, 19 nt, Artificial Sequence
  Description of Artificial Sequence: Synthetic oligonucleotide
gguucaagccaaauccagu

SEQ ID NO: 3053429 - RNA, 19 nt, Artificial Sequence
  Description of Artificial Sequence: Synthetic oligonucleotide
cuugccuaaugaugggcuu

SEQ ID NO: 3053430 - RNA, 19 nt, Artificial Sequence
  Description of Artificial Sequence: Synthetic oligonucleotide
ccuguccaucacacuuagg

SEQ ID NO: 3053431 - RNA, 19 nt, Artificial Sequence
  Description of Artificial Sequence: Synthetic oligonucleotide
gagagggucugcuccgguu

SEQ ID NO: 3053432 - RNA, 19 nt, Artificial Sequence
  Description of Artificial Sequence: Synthetic oligonucleotide
cagaugcuuccacacuugu

SEQ ID NO: 3053433 - RNA, 19 nt, Artificial Sequence
  Description of Artificial Sequence: Synthetic oligonucleotide
ccagggugcucacuccaac

SEQ ID NO: 3053434 - RNA, 19 nt, Artificial Sequence
  Description of Artificial Sequence: Synthetic oligonucleotide
ggccacccaagcguguccc

SEQ ID NO: 3053435 - RNA, 19 nt, Artificial Sequence
  Description of Artificial Sequence: Synthetic oligonucleotide
auccugggugagagggucu

SEQ ID NO: 3053436 - RNA, 19 nt, Artificial Sequence
  Description of Artificial Sequence: Synthetic oligonucleotide
ccacagugccauccagcag

SEQ ID NO: 3053437 - RNA, 19 nt, Artificial Sequence
  Description of Artificial Sequence: Synthetic oligonucleotide
ccagaccaaaguagucaca

SEQ ID NO: 3053438 - RNA, 19 nt, Artificial Sequence
  Description of Artificial Sequence: Synthetic oligonucleotide
agggucugcuccgguucca

SEQ ID NO: 3053439 - RNA, 19 nt, Artificial Sequence
  Description of Artificial Sequence: Synthetic oligonucleotide
cugggugagagggucugcu

SEQ ID NO: 3053440 - RNA, 19 nt, Artificial Sequence
  Description of Artificial Sequence: Synthetic oligonucleotide
caguaggacuggacauucu

SEQ ID NO: 3053441 - RNA, 19 nt, Artificial Sequence
  Description of Artificial Sequence: Synthetic oligonucleotide
cuccugcauccugggugag

SEQ ID NO: 3053442 - RNA, 19 nt, Artificial Sequence
  Description of Artificial Sequence: Synthetic oligonucleotide
cuucuccugcauccugggu

SEQ ID NO: 3053443 - RNA, 19 nt, Artificial Sequence
  Description of Artificial Sequence: Synthetic oligonucleotide
gcucacuccaacagaaguu

SEQ ID NO: 3053444 - RNA, 19 nt, Artificial Sequence
  Description of Artificial Sequence: Synthetic oligonucleotide
ggccuucguacuugccuaa

SEQ ID NO: 3053445 - RNA, 19 nt, Artificial Sequence
  Description of Artificial Sequence: Synthetic oligonucleotide
ccacccaagcgugucccug

SEQ ID NO: 3053446 - RNA, 19 nt, Artificial Sequence
  Description of Artificial Sequence: Synthetic oligonucleotide
cccaagcgugucccugaag

SEQ ID NO: 3053447 - RNA, 19 nt, Artificial Sequence
  Description of Artificial Sequence: Synthetic oligonucleotide
ggugcuucuccugcauccu

SEQ ID NO: 3053448 - RNA, 19 nt, Artificial Sequence
  Description of Artificial Sequence: Synthetic oligonucleotide
cuccgguuccagggugcuc

SEQ ID NO: 3053449 - RNA, 19 nt, Artificial Sequence
  Description of Artificial Sequence: Synthetic oligonucleotide
cuuccacacuugugucagu

SEQ ID NO: 3053450 - RNA, 19 nt, Artificial Sequence
  Description of Artificial Sequence: Synthetic oligonucleotide
ccagacgaagaacugcauu

SEQ ID NO: 3053451 - RNA, 19 nt, Artificial Sequence
  Description of Artificial Sequence: Synthetic oligonucleotide
ccugggugagagggucugc

SEQ ID NO: 3053452 - RNA, 19 nt, Artificial Sequence
  Description of Artificial Sequence: Synthetic oligonucleotide
ccagcaguuucacucugau

SEQ ID NO: 3053453 - RNA, 19 nt, Artificial Sequence
  Description of Artificial Sequence: Synthetic oligonucleotide
gccauccagcaguuucacu

SEQ ID NO: 3053454 - RNA, 19 nt, Artificial Sequence
  Description of Artificial Sequence: Synthetic oligonucleotide
ccgguuccagggugcucac

SEQ ID NO: 3053455 - RNA, 19 nt, Artificial Sequence
  Description of Artificial Sequence: Synthetic oligonucleotide
caucacacuuaggcucaau

SEQ ID NO: 3053456 - RNA, 19 nt, Artificial Sequence
  Description of Artificial Sequence: Synthetic oligonucleotide
cucugaugugcaggugcuu

SEQ ID NO: 3053457 - RNA, 19 nt, Artificial Sequence
  Description of Artificial Sequence: Synthetic oligonucleotide
gccagacgaagaacugcau

SEQ ID NO: 3053458 - RNA, 19 nt, Artificial Sequence
  Description of Artificial Sequence: Synthetic oligonucleotide
gccacccaagcgugucccu

SEQ ID NO: 3053459 - RNA, 19 nt, Artificial Sequence
  Description of Artificial Sequence: Synthetic oligonucleotide
gcuccgguuccagggugcu

SEQ ID NO: 3053460 - RNA, 19 nt, Artificial Sequence
  Description of Artificial Sequence: Synthetic oligonucleotide
gccuucguacuugccuaau

SEQ ID NO: 3053461 - RNA, 19 nt, Artificial Sequence
  Description of Artificial Sequence: Synthetic oligonucleotide
gccuaaugaugggcuucau

SEQ ID NO: 3053462 - RNA, 19 nt, Artificial Sequence
  Description of Artificial Sequence: Synthetic oligonucleotide
cgguuccagggugcucacu

SEQ ID NO: 3053463 - RNA, 19 nt, Artificial Sequence
  Description of Artificial Sequence: Synthetic oligonucleotide
aucacugaagaacuuaugc

SEQ ID NO: 3053464 - RNA, 19 nt, Artificial Sequence
  Description of Artificial Sequence: Synthetic oligonucleotide
uccaccaucugguugaccg

SEQ ID NO: 3053465 - RNA, 19 nt, Artificial Sequence
  Description of Artificial Sequence: Synthetic oligonucleotide
aacaguucggcccaggccu

SEQ ID NO: 3053466 - RNA, 19 nt, Artificial Sequence
  Description of Artificial Sequence: Synthetic oligonucleotide
agcuccaacaguucggccc

SEQ ID NO: 3053467 - RNA, 19 nt, Artificial Sequence
  Description of Artificial Sequence: Synthetic oligonucleotide
cucaaucugcccuugaagc

SEQ ID NO: 3053468 - RNA, 19 nt, Artificial Sequence
  Description of Artificial Sequence: Synthetic oligonucleotide
ugggucugggcucaggugg

SEQ ID NO: 3053469 - RNA, 19 nt, Artificial Sequence
  Description of Artificial Sequence: Synthetic oligonucleotide
aacuuaugcagcucccgag

SEQ ID NO: 3053470 - RNA, 19 nt, Artificial Sequence
  Description of Artificial Sequence: Synthetic oligonucleotide
acugaagaacuuaugcagc

SEQ ID NO: 3053471 - RNA, 19 nt, Artificial Sequence
  Description of Artificial Sequence: Synthetic oligonucleotide
ugcucgaaggcucgcaggg

SEQ ID NO: 3053472 - RNA, 19 nt, Artificial Sequence
  Description of Artificial Sequence: Synthetic oligonucleotide
uaugcagcucccgagaggc

SEQ ID NO: 3053473 - RNA, 19 nt, Artificial Sequence
  Description of Artificial Sequence: Synthetic oligonucleotide
aagaacuuaugcagcuccc

SEQ ID NO: 3053474 - RNA, 19 nt, Artificial Sequence
  Description of Artificial Sequence: Synthetic oligonucleotide
cuagcuccuccucaaagcg

SEQ ID NO: 3053475 - RNA, 19 nt, Artificial Sequence
  Description of Artificial Sequence: Synthetic oligonucleotide
ugcaggucgugcucgaagg

SEQ ID NO: 3053476 - RNA, 19 nt, Artificial Sequence
  Description of Artificial Sequence: Synthetic oligonucleotide
caugagcuccaacaguucg

SEQ ID NO: 3053477 - RNA, 19 nt, Artificial Sequence
  Description of Artificial Sequence: Synthetic oligonucleotide
uuaugcagcucccgagagg

SEQ ID NO: 3053478 - RNA, 19 nt, Artificial Sequence
  Description of Artificial Sequence: Synthetic oligonucleotide
cacgagaagcugcaggucg

SEQ ID NO: 3053479 - RNA, 19 nt, Artificial Sequence
  Description of Artificial Sequence: Synthetic oligonucleotide
uguguggccgcacucaauc

SEQ ID NO: 3053480 - RNA, 19 nt, Artificial Sequence
  Description of Artificial Sequence: Synthetic oligonucleotide
uguggccgcacucaaucag

SEQ ID NO: 3053481 - RNA, 19 nt, Artificial Sequence
  Description of Artificial Sequence: Synthetic oligonucleotide
ucaaucugcccuugaagcu

SEQ ID NO: 3053482 - RNA, 19 nt, Artificial Sequence
  Description of Artificial Sequence: Synthetic oligonucleotide
ucucgggcaucacugaaga

SEQ ID NO: 3053483 - RNA, 19 nt, Artificial Sequence
  Description of Artificial Sequence: Synthetic oligonucleotide
ucgggcaucacugaagaac

SEQ ID NO: 3053484 - RNA, 19 nt, Artificial Sequence
  Description of Artificial Sequence: Synthetic oligonucleotide
acucaaucagcucguccac

SEQ ID NO: 3053485 - RNA, 19 nt, Artificial Sequence
  Description of Artificial Sequence: Synthetic oligonucleotide
ucguccaccaucugguuga

SEQ ID NO: 3053486 - RNA, 19 nt, Artificial Sequence
  Description of Artificial Sequence: Synthetic oligonucleotide
auggagcuggcacuggguc

SEQ ID NO: 3053487 - RNA, 19 nt, Artificial Sequence
  Description of Artificial Sequence: Synthetic oligonucleotide
uccgcuucuccucaaucug

SEQ ID NO: 3053488 - RNA, 19 nt, Artificial Sequence
  Description of Artificial Sequence: Synthetic oligonucleotide
ugcccaugagcuccaacag

SEQ ID NO: 3053489 - RNA, 19 nt, Artificial Sequence
  Description of Artificial Sequence: Synthetic oligonucleotide
agaacuuaugcagcucccg

SEQ ID NO: 3053490 - RNA, 19 nt, Artificial Sequence
  Description of Artificial Sequence: Synthetic oligonucleotide
ugcccuugaagcucucggg

SEQ ID NO: 3053491 - RNA, 19 nt, Artificial Sequence
  Description of Artificial Sequence: Synthetic oligonucleotide
acuuaugcagcucccgaga

SEQ ID NO: 3053492 - RNA, 19 nt, Artificial Sequence
  Description of Artificial Sequence: Synthetic oligonucleotide
cacucaaucagcucgucca

SEQ ID NO: 3053493 - RNA, 19 nt, Artificial Sequence
  Description of Artificial Sequence: Synthetic oligonucleotide
gccgcacucaaucagcucg

SEQ ID NO: 3053494 - RNA, 19 nt, Artificial Sequence
  Description of Artificial Sequence: Synthetic oligonucleotide
cuuaugcagcucccgagag

SEQ ID NO: 3053495 - RNA, 19 nt, Artificial Sequence
  Description of Artificial Sequence: Synthetic oligonucleotide
ucugggcucagguggugcg

SEQ ID NO: 3053496 - RNA, 19 nt, Artificial Sequence
  Description of Artificial Sequence: Synthetic oligonucleotide
agguggugcggucaagcgg

SEQ ID NO: 3053497 - RNA, 19 nt, Artificial Sequence
  Description of Artificial Sequence: Synthetic oligonucleotide
agcagcugggcccgagugc

SEQ ID NO: 3053498 - RNA, 19 nt, Artificial Sequence
  Description of Artificial Sequence: Synthetic oligonucleotide
gaacuuaugcagcucccga

SEQ ID NO: 3053499 - RNA, 19 nt, Artificial Sequence
  Description of Artificial Sequence: Synthetic oligonucleotide
aagcggggcagccgccucc

SEQ ID NO: 3053500 - RNA, 19 nt, Artificial Sequence
  Description of Artificial Sequence: Synthetic oligonucleotide
ugagcuccaacaguucggc

SEQ ID NO: 3053501 - RNA, 19 nt, Artificial Sequence
  Description of Artificial Sequence: Synthetic oligonucleotide
ugggacacgagaagcugca

SEQ ID NO: 3053502 - RNA, 19 nt, Artificial Sequence
  Description of Artificial Sequence: Synthetic oligonucleotide
aagcucucgggcaucacug

SEQ ID NO: 3053503 - RNA, 19 nt, Artificial Sequence
  Description of Artificial Sequence: Synthetic oligonucleotide
cacucagccaugguggccg

SEQ ID NO: 3053504 - RNA, 19 nt, Artificial Sequence
  Description of Artificial Sequence: Synthetic oligonucleotide
gguggugcggucaagcggg

SEQ ID NO: 3053505 - RNA, 19 nt, Artificial Sequence
  Description of Artificial Sequence: Synthetic oligonucleotide
ucagccaugguggccgccg

SEQ ID NO: 3053506 - RNA, 19 nt, Artificial Sequence
  Description of Artificial Sequence: Synthetic oligonucleotide
cugggacacgagaagcugc

SEQ ID NO: 3053507 - RNA, 19 nt, Artificial Sequence
  Description of Artificial Sequence: Synthetic oligonucleotide
ggacacgagaagcugcagg

SEQ ID NO: 3053508 - RNA, 19 nt, Artificial Sequence
  Description of Artificial Sequence: Synthetic oligonucleotide
gugcccaugagcuccaaca

SEQ ID NO: 3053509 - RNA, 19 nt, Artificial Sequence
  Description of Artificial Sequence: Synthetic oligonucleotide
caucacugaagaacuuaug

SEQ ID NO: 3053510 - RNA, 19 nt, Artificial Sequence
  Description of Artificial Sequence: Synthetic oligonucleotide
cugcccuugaagcucucgg

SEQ ID NO: 3053511 - RNA, 19 nt, Artificial Sequence
  Description of Artificial Sequence: Synthetic oligonucleotide
caacaguucggcccaggcc

SEQ ID NO: 3053512 - RNA, 19 nt, Artificial Sequence
  Description of Artificial Sequence: Synthetic oligonucleotide
gacacgagaagcugcaggu

SEQ ID NO: 3053513 - RNA, 19 nt, Artificial Sequence
  Description of Artificial Sequence: Synthetic oligonucleotide
uccucaaucugcccuugaa

SEQ ID NO: 3053514 - RNA, 19 nt, Artificial Sequence
  Description of Artificial Sequence: Synthetic oligonucleotide
ugguugaccgccgccagcc

SEQ ID NO: 3053515 - RNA, 19 nt, Artificial Sequence
  Description of Artificial Sequence: Synthetic oligonucleotide
augagcuccaacaguucgg

SEQ ID NO: 3053516 - RNA, 19 nt, Artificial Sequence
  Description of Artificial Sequence: Synthetic oligonucleotide
guccucugcauggagcugg

SEQ ID NO: 3053517 - RNA, 19 nt, Artificial Sequence
  Description of Artificial Sequence: Synthetic oligonucleotide
cucucgggcaucacugaag

SEQ ID NO: 3053518 - RNA, 19 nt, Artificial Sequence
  Description of Artificial Sequence: Synthetic oligonucleotide
uugaccgccgccagccgcc

SEQ ID NO: 3053519 - RNA, 19 nt, Artificial Sequence
  Description of Artificial Sequence: Synthetic oligonucleotide
agugcccaugagcuccaac

SEQ ID NO: 3053520 - RNA, 19 nt, Artificial Sequence
  Description of Artificial Sequence: Synthetic oligonucleotide
ugaagaacuuaugcagcuc

SEQ ID NO: 3053521 - RNA, 19 nt, Artificial Sequence
  Description of Artificial Sequence: Synthetic oligonucleotide
gaggcagcgagcagcuggg

SEQ ID NO: 3053522 - RNA, 19 nt, Artificial Sequence
  Description of Artificial Sequence: Synthetic oligonucleotide
caaucugcccuugaagcuc

SEQ ID NO: 3053523 - RNA, 19 nt, Artificial Sequence
  Description of Artificial Sequence: Synthetic oligonucleotide
aaucugcccuugaagcucu

SEQ ID NO: 3053524 - RNA, 19 nt, Artificial Sequence
  Description of Artificial Sequence: Synthetic oligonucleotide
ccuagcuccuccucaaagc

SEQ ID NO: 3053525 - RNA, 19 nt, Artificial Sequence
  Description of Artificial Sequence: Synthetic oligonucleotide
ucugcccuugaagcucucg

SEQ ID NO: 3053526 - RNA, 19 nt, Artificial Sequence
  Description of Artificial Sequence: Synthetic oligonucleotide
agcccguccuuccacucag

SEQ ID NO: 3053527 - RNA, 19 nt, Artificial Sequence
  Description of Artificial Sequence: Synthetic oligonucleotide
uccuuccacucagccaugg

SEQ ID NO: 3053528 - RNA, 19 nt, Artificial Sequence
  Description of Artificial Sequence: Synthetic oligonucleotide
ucguucagcccguccuucc

SEQ ID NO: 3053529 - RNA, 19 nt, Artificial Sequence
  Description of Artificial Sequence: Synthetic oligonucleotide
cucguccaccaucugguug

SEQ ID NO: 3053530 - RNA, 19 nt, Artificial Sequence
  Description of Artificial Sequence: Synthetic oligonucleotide
agcucguccaccaucuggu

SEQ ID NO: 3053531 - RNA, 19 nt, Artificial Sequence
  Description of Artificial Sequence: Synthetic oligonucleotide
cugcaggucgugcucgaag

SEQ ID NO: 3053532 - RNA, 19 nt, Artificial Sequence
  Description of Artificial Sequence: Synthetic oligonucleotide
uucagcccguccuuccacu

SEQ ID NO: 3053533 - RNA, 19 nt, Artificial Sequence
  Description of Artificial Sequence: Synthetic oligonucleotide
cucaaucagcucguccacc

SEQ ID NO: 3053534 - RNA, 19 nt, Artificial Sequence
  Description of Artificial Sequence: Synthetic oligonucleotide
gcagcgagcagcugggccc

SEQ ID NO: 3053535 - RNA, 19 nt, Artificial Sequence
  Description of Artificial Sequence: Synthetic oligonucleotide
uggccgcacucaaucagcu

SEQ ID NO: 3053536 - RNA, 19 nt, Artificial Sequence
  Description of Artificial Sequence: Synthetic oligonucleotide
aggucgugcucgaaggcuc

SEQ ID NO: 3053537 - RNA, 19 nt, Artificial Sequence
  Description of Artificial Sequence: Synthetic oligonucleotide
guugaccgccgccagccgc

SEQ ID NO: 3053538 - RNA, 19 nt, Artificial Sequence
  Description of Artificial Sequence: Synthetic oligonucleotide
caccaucugguugaccgcc

SEQ ID NO: 3053539 - RNA, 19 nt, Artificial Sequence
  Description of Artificial Sequence: Synthetic oligonucleotide
acacgagaagcugcagguc

SEQ ID NO: 3053540 - RNA, 19 nt, Artificial Sequence
  Description of Artificial Sequence: Synthetic oligonucleotide
ucccgagaggcagcgagca

SEQ ID NO: 3053541 - RNA, 19 nt, Artificial Sequence
  Description of Artificial Sequence: Synthetic oligonucleotide
gaagcucucgggcaucacu

SEQ ID NO: 3053542 - RNA, 19 nt, Artificial Sequence
  Description of Artificial Sequence: Synthetic oligonucleotide
aucugguugaccgccgcca

SEQ ID NO: 3053543 - RNA, 19 nt, Artificial Sequence
  Description of Artificial Sequence: Synthetic oligonucleotide
ggucaagcggggcagccgc

SEQ ID NO: 3053544 - RNA, 19 nt, Artificial Sequence
  Description of Artificial Sequence: Synthetic oligonucleotide
acucagccaugguggccgc

SEQ ID NO: 3053545 - RNA, 19 nt, Artificial Sequence
  Description of Artificial Sequence: Synthetic oligonucleotide
uugaagcucucgggcauca

SEQ ID NO: 3053546 - RNA, 19 nt, Artificial Sequence
  Description of Artificial Sequence: Synthetic oligonucleotide
caucugguugaccgccgcc

SEQ ID NO: 3053547 - RNA, 19 nt, Artificial Sequence
  Description of Artificial Sequence: Synthetic oligonucleotide
uccaacaguucggcccagg

SEQ ID NO: 3053548 - RNA, 19 nt, Artificial Sequence
  Description of Artificial Sequence: Synthetic oligonucleotide
uccucugcauggagcuggc

SEQ ID NO: 3053549 - RNA, 19 nt, Artificial Sequence
  Description of Artificial Sequence: Synthetic oligonucleotide
ucggcccaggccucguuca

SEQ ID NO: 3053550 - RNA, 19 nt, Artificial Sequence
  Description of Artificial Sequence: Synthetic oligonucleotide
ugcauggagcuggcacugg

SEQ ID NO: 3053551 - RNA, 19 nt, Artificial Sequence
  Description of Artificial Sequence: Synthetic oligonucleotide
uucggcccaggccucguuc

SEQ ID NO: 3053552 - RNA, 19 nt, Artificial Sequence
  Description of Artificial Sequence: Synthetic oligonucleotide
ccaggccucguucagcccg

SEQ ID NO: 3053553 - RNA, 19 nt, Artificial Sequence
  Description of Artificial Sequence: Synthetic oligonucleotide
ucgaaggcucgcagggguc

SEQ ID NO: 3053554 - RNA, 19 nt, Artificial Sequence
  Description of Artificial Sequence: Synthetic oligonucleotide
gagcuccaacaguucggcc

SEQ ID NO: 3053555 - RNA, 19 nt, Artificial Sequence
  Description of Artificial Sequence: Synthetic oligonucleotide
cucccgagaggcagcgagc

SEQ ID NO: 3053556 - RNA, 19 nt, Artificial Sequence
  Description of Artificial Sequence: Synthetic oligonucleotide
agggguccucugcauggag

SEQ ID NO: 3053557 - RNA, 19 nt, Artificial Sequence
  Description of Artificial Sequence: Synthetic oligonucleotide
gcccuugaagcucucgggc

SEQ ID NO: 3053558 - RNA, 19 nt, Artificial Sequence
  Description of Artificial Sequence: Synthetic oligonucleotide
guggccgccgcuguguggc

SEQ ID NO: 3053559 - RNA, 19 nt, Artificial Sequence
  Description of Artificial Sequence: Synthetic oligonucleotide
guucagcccguccuuccac

SEQ ID NO: 3053560 - RNA, 19 nt, Artificial Sequence
  Description of Artificial Sequence: Synthetic oligonucleotide
guggccgcacucaaucagc

SEQ ID NO: 3053561 - RNA, 19 nt, Artificial Sequence
  Description of Artificial Sequence: Synthetic oligonucleotide
agcucucgggcaucacuga

SEQ ID NO: 3053562 - RNA, 19 nt, Artificial Sequence
  Description of Artificial Sequence: Synthetic oligonucleotide
ucuccucaaucugcccuug

SEQ ID NO: 3053563 - RNA, 19 nt, Artificial Sequence
  Description of Artificial Sequence: Synthetic oligonucleotide
gcacucaaucagcucgucc

SEQ ID NO: 3053564 - RNA, 19 nt, Artificial Sequence
  Description of Artificial Sequence: Synthetic oligonucleotide
ggugcggucaagcggggca

SEQ ID NO: 3053565 - RNA, 19 nt, Artificial Sequence
  Description of Artificial Sequence: Synthetic oligonucleotide
cugguugaccgccgccagc

SEQ ID NO: 3053566 - RNA, 19 nt, Artificial Sequence
  Description of Artificial Sequence: Synthetic oligonucleotide
ucagcccguccuuccacuc

SEQ ID NO: 3053567 - RNA, 19 nt, Artificial Sequence
  Description of Artificial Sequence: Synthetic oligonucleotide
ggcccgagugcccaugagc

SEQ ID NO: 3053568 - RNA, 19 nt, Artificial Sequence
  Description of Artificial Sequence: Synthetic oligonucleotide
cugcauggagcuggcacug

SEQ ID NO: 3053569 - RNA, 19 nt, Artificial Sequence
  Description of Artificial Sequence: Synthetic oligonucleotide
aaggcucgcagggguccuc

SEQ ID NO: 3053570 - RNA, 19 nt, Artificial Sequence
  Description of Artificial Sequence: Synthetic oligonucleotide
accaucugguugaccgccg

SEQ ID NO: 3053571 - RNA, 19 nt, Artificial Sequence
  Description of Artificial Sequence: Synthetic oligonucleotide
ucaagcggggcagccgccu

SEQ ID NO: 3053572 - RNA, 19 nt, Artificial Sequence
  Description of Artificial Sequence: Synthetic oligonucleotide
accugggacacgagaagcu

SEQ ID NO: 3053573 - RNA, 19 nt, Artificial Sequence
  Description of Artificial Sequence: Synthetic oligonucleotide
ugggcccgagugcccauga

SEQ ID NO: 3053574 - RNA, 19 nt, Artificial Sequence
  Description of Artificial Sequence: Synthetic oligonucleotide
ccaacaguucggcccaggc

SEQ ID NO: 3053575 - RNA, 19 nt, Artificial Sequence
  Description of Artificial Sequence: Synthetic oligonucleotide
ggcagcgagcagcugggcc

SEQ ID NO: 3053576 - RNA, 19 nt, Artificial Sequence
  Description of Artificial Sequence: Synthetic oligonucleotide
ccgagugcccaugagcucc

SEQ ID NO: 3053577 - RNA, 19 nt, Artificial Sequence
  Description of Artificial Sequence: Synthetic oligonucleotide
cucgcagggguccucugca

SEQ ID NO: 3053578 - RNA, 19 nt, Artificial Sequence
  Description of Artificial Sequence: Synthetic oligonucleotide
cuugaagcucucgggcauc

SEQ ID NO: 3053579 - RNA, 19 nt, Artificial Sequence
  Description of Artificial Sequence: Synthetic oligonucleotide
ugguggccgccgcugugug

SEQ ID NO: 3053580 - RNA, 19 nt, Artificial Sequence
  Description of Artificial Sequence: Synthetic oligonucleotide
gcagcugggcccgagugcc

SEQ ID NO: 3053581 - RNA, 19 nt, Artificial Sequence
  Description of Artificial Sequence: Synthetic oligonucleotide
gcuccaacaguucggccca

SEQ ID NO: 3053582 - RNA, 19 nt, Artificial Sequence
  Description of Artificial Sequence: Synthetic oligonucleotide
ccgagaggcagcgagcagc

SEQ ID NO: 3053583 - RNA, 19 nt, Artificial Sequence
  Description of Artificial Sequence: Synthetic oligonucleotide
ucgugcucgaaggcucgca

SEQ ID NO: 3053584 - RNA, 19 nt, Artificial Sequence
  Description of Artificial Sequence: Synthetic oligonucleotide
cuccgcuucuccucaaucu

SEQ ID NO: 3053585 - RNA, 19 nt, Artificial Sequence
  Description of Artificial Sequence: Synthetic oligonucleotide
acgagaagcugcaggucgu

SEQ ID NO: 3053586 - RNA, 19 nt, Artificial Sequence
  Description of Artificial Sequence: Synthetic oligonucleotide
acaguucggcccaggccuc

SEQ ID NO: 3053587 - RNA, 19 nt, Artificial Sequence
  Description of Artificial Sequence: Synthetic oligonucleotide
caugguggccgccgcugug

SEQ ID NO: 3053588 - RNA, 19 nt, Artificial Sequence
  Description of Artificial Sequence: Synthetic oligonucleotide
gcccaggccucguucagcc

SEQ ID NO: 3053589 - RNA, 19 nt, Artificial Sequence
  Description of Artificial Sequence: Synthetic oligonucleotide
cccuagcuccuccucaaag

SEQ ID NO: 3053590 - RNA, 19 nt, Artificial Sequence
  Description of Artificial Sequence: Synthetic oligonucleotide
gugcggucaagcggggcag

SEQ ID NO: 3053591 - RNA, 19 nt, Artificial Sequence
  Description of Artificial Sequence: Synthetic oligonucleotide
guguggccgcacucaauca

SEQ ID NO: 3053592 - RNA, 19 nt, Artificial Sequence
  Description of Artificial Sequence: Synthetic oligonucleotide
gucugggcucagguggugc

SEQ ID NO: 3053593 - RNA, 19 nt, Artificial Sequence
  Description of Artificial Sequence: Synthetic oligonucleotide
cagcgagcagcugggcccg

SEQ ID NO: 3053594 - RNA, 19 nt, Artificial Sequence
  Description of Artificial Sequence: Synthetic oligonucleotide
augguggccgccgcugugu

SEQ ID NO: 3053595 - RNA, 19 nt, Artificial Sequence
  Description of Artificial Sequence: Synthetic oligonucleotide
ggucgugcucgaaggcucg

SEQ ID NO: 3053596 - RNA, 19 nt, Artificial Sequence
  Description of Artificial Sequence: Synthetic oligonucleotide
gcaggucgugcucgaaggc

SEQ ID NO: 3053597 - RNA, 19 nt, Artificial Sequence
  Description of Artificial Sequence: Synthetic oligonucleotide
cucgaaggcucgcaggggu

SEQ ID NO: 3053598 - RNA, 19 nt, Artificial Sequence
  Description of Artificial Sequence: Synthetic oligonucleotide
cucguucagcccguccuuc

SEQ ID NO: 3053599 - RNA, 19 nt, Artificial Sequence
  Description of Artificial Sequence: Synthetic oligonucleotide
cagcucccgagaggcagcg

SEQ ID NO: 3053600 - RNA, 19 nt, Artificial Sequence
  Description of Artificial Sequence: Synthetic oligonucleotide
agcggggcagccgccuccg

SEQ ID NO: 3053601 - RNA, 19 nt, Artificial Sequence
  Description of Artificial Sequence: Synthetic oligonucleotide
ugaagcucucgggcaucac

SEQ ID NO: 3053602 - RNA, 19 nt, Artificial Sequence
  Description of Artificial Sequence: Synthetic oligonucleotide
agccgccucccgcccuagc

SEQ ID NO: 3053603 - RNA, 19 nt, Artificial Sequence
  Description of Artificial Sequence: Synthetic oligonucleotide
aggcagcgagcagcugggc

SEQ ID NO: 3053604 - RNA, 19 nt, Artificial Sequence
  Description of Artificial Sequence: Synthetic oligonucleotide
gguugaccgccgccagccg

SEQ ID NO: 3053605 - RNA, 19 nt, Artificial Sequence
  Description of Artificial Sequence: Synthetic oligonucleotide
ugcggucaagcggggcagc

SEQ ID NO: 3053606 - RNA, 19 nt, Artificial Sequence
  Description of Artificial Sequence: Synthetic oligonucleotide
gggguccucugcauggagc

SEQ ID NO: 3053607 - RNA, 19 nt, Artificial Sequence
  Description of Artificial Sequence: Synthetic oligonucleotide
agccaugguggccgccgcu

SEQ ID NO: 3053608 - RNA, 19 nt, Artificial Sequence
  Description of Artificial Sequence: Synthetic oligonucleotide
cccguccuuccacucagcc

SEQ ID NO: 3053609 - RNA, 19 nt, Artificial Sequence
  Description of Artificial Sequence: Synthetic oligonucleotide
gcucgcagggguccucugc

SEQ ID NO: 3053610 - RNA, 19 nt, Artificial Sequence
  Description of Artificial Sequence: Synthetic oligonucleotide
cauggagcuggcacugggu

SEQ ID NO: 3053611 - RNA, 19 nt, Artificial Sequence
  Description of Artificial Sequence: Synthetic oligonucleotide
uggugcggucaagcggggc

SEQ ID NO: 3053612 - RNA, 19 nt, Artificial Sequence
  Description of Artificial Sequence: Synthetic oligonucleotide
ucgcagggguccucugcau

SEQ ID NO: 3053613 - RNA, 19 nt, Artificial Sequence
  Description of Artificial Sequence: Synthetic oligonucleotide
cucccgcccuagcuccucc

SEQ ID NO: 3053614 - RNA, 19 nt, Artificial Sequence
  Description of Artificial Sequence: Synthetic oligonucleotide
cagccaugguggccgccgc

SEQ ID NO: 3053615 - RNA, 19 nt, Artificial Sequence
  Description of Artificial Sequence: Synthetic oligonucleotide
ggguccucugcauggagcu

SEQ ID NO: 3053616 - RNA, 19 nt, Artificial Sequence
  Description of Artificial Sequence: Synthetic oligonucleotide
ccugggacacgagaagcug

SEQ ID NO: 3053617 - RNA, 19 nt, Artificial Sequence
  Description of Artificial Sequence: Synthetic oligonucleotide
caguucggcccaggccucg

SEQ ID NO: 3053618 - RNA, 19 nt, Artificial Sequence
  Description of Artificial Sequence: Synthetic oligonucleotide
gguggccgccgcugugugg

SEQ ID NO: 3053619 - RNA, 19 nt, Artificial Sequence
  Description of Artificial Sequence: Synthetic oligonucleotide
ccaugagcuccaacaguuc

SEQ ID NO: 3053620 - RNA, 19 nt, Artificial Sequence
  Description of Artificial Sequence: Synthetic oligonucleotide
gagcuggcacugggucugg

SEQ ID NO: 3053621 - RNA, 19 nt, Artificial Sequence
  Description of Artificial Sequence: Synthetic oligonucleotide
gcucgaaggcucgcagggg

SEQ ID NO: 3053622 - RNA, 19 nt, Artificial Sequence
  Description of Artificial Sequence: Synthetic oligonucleotide
cucagguggugcggucaag

SEQ ID NO: 3053623 - RNA, 19 nt, Artificial Sequence
  Description of Artificial Sequence: Synthetic oligonucleotide
ccaucugguugaccgccgc

SEQ ID NO: 3053624 - RNA, 19 nt, Artificial Sequence
  Description of Artificial Sequence: Synthetic oligonucleotide
cacugggucugggcucagg

SEQ ID NO: 3053625 - RNA, 19 nt, Artificial Sequence
  Description of Artificial Sequence: Synthetic oligonucleotide
ucccgcccuagcuccuccu

SEQ ID NO: 3053626 - RNA, 19 nt, Artificial Sequence
  Description of Artificial Sequence: Synthetic oligonucleotide
cccuugaagcucucgggca

SEQ ID NO: 3053627 - RNA, 19 nt, Artificial Sequence
  Description of Artificial Sequence: Synthetic oligonucleotide
caagcggggcagccgccuc

SEQ ID NO: 3053628 - RNA, 19 nt, Artificial Sequence
  Description of Artificial Sequence: Synthetic oligonucleotide
cgugcucgaaggcucgcag

SEQ ID NO: 3053629 - RNA, 19 nt, Artificial Sequence
  Description of Artificial Sequence: Synthetic oligonucleotide
gucaagcggggcagccgcc

SEQ ID NO: 3053630 - RNA, 19 nt, Artificial Sequence
  Description of Artificial Sequence: Synthetic oligonucleotide
guggugcggucaagcgggg

SEQ ID NO: 3053631 - RNA, 19 nt, Artificial Sequence
  Description of Artificial Sequence: Synthetic oligonucleotide
gucgugcucgaaggcucgc

SEQ ID NO: 3053632 - RNA, 19 nt, Artificial Sequence
  Description of Artificial Sequence: Synthetic oligonucleotide
cagcccguccuuccacuca

SEQ ID NO: 3053633 - RNA, 19 nt, Artificial Sequence
  Description of Artificial Sequence: Synthetic oligonucleotide
cuccucaaucugcccuuga

SEQ ID NO: 3053634 - RNA, 19 nt, Artificial Sequence
  Description of Artificial Sequence: Synthetic oligonucleotide
cucagccaugguggccgcc

SEQ ID NO: 3053635 - RNA, 19 nt, Artificial Sequence
  Description of Artificial Sequence: Synthetic oligonucleotide
gcaucacugaagaacuuau

SEQ ID NO: 3053636 - RNA, 19 nt, Artificial Sequence
  Description of Artificial Sequence: Synthetic oligonucleotide
aggcucgcagggguccucu

SEQ ID NO: 3053637 - RNA, 19 nt, Artificial Sequence
  Description of Artificial Sequence: Synthetic oligonucleotide
gccucguucagcccguccu

SEQ ID NO: 3053638 - RNA, 19 nt, Artificial Sequence
  Description of Artificial Sequence: Synthetic oligonucleotide
cccaugagcuccaacaguu

SEQ ID NO: 3053639 - RNA, 19 nt, Artificial Sequence
  Description of Artificial Sequence: Synthetic oligonucleotide
aguucggcccaggccucgu

SEQ ID NO: 3053640 - RNA, 19 nt, Artificial Sequence
  Description of Artificial Sequence: Synthetic oligonucleotide
cagccgccuccgcuucucc

SEQ ID NO: 3053641 - RNA, 19 nt, Artificial Sequence
  Description of Artificial Sequence: Synthetic oligonucleotide
gggacacgagaagcugcag

SEQ ID NO: 3053642 - RNA, 19 nt, Artificial Sequence
  Description of Artificial Sequence: Synthetic oligonucleotide
ccuccgcuucuccucaauc

SEQ ID NO: 3053643 - RNA, 19 nt, Artificial Sequence
  Description of Artificial Sequence: Synthetic oligonucleotide
gccaugguggccgccgcug

SEQ ID NO: 3053644 - RNA, 19 nt, Artificial Sequence
  Description of Artificial Sequence: Synthetic oligonucleotide
ggcacugggucugggcuca

SEQ ID NO: 3053645 - RNA, 19 nt, Artificial Sequence
  Description of Artificial Sequence: Synthetic oligonucleotide
gcuguguggccgcacucaa

SEQ ID NO: 3053646 - RNA, 19 nt, Artificial Sequence
  Description of Artificial Sequence: Synthetic oligonucleotide
cucgggcaucacugaagaa

SEQ ID NO: 3053647 - RNA, 19 nt, Artificial Sequence
  Description of Artificial Sequence: Synthetic oligonucleotide
caggucgugcucgaaggcu

SEQ ID NO: 3053648 - RNA, 19 nt, Artificial Sequence
  Description of Artificial Sequence: Synthetic oligonucleotide
cguccuuccacucagccau

SEQ ID NO: 3053649 - RNA, 19 nt, Artificial Sequence
  Description of Artificial Sequence: Synthetic oligonucleotide
ggccucguucagcccgucc

SEQ ID NO: 3053650 - RNA, 19 nt, Artificial Sequence
  Description of Artificial Sequence: Synthetic oligonucleotide
gcucucgggcaucacugaa

SEQ ID NO: 3053651 - RNA, 19 nt, Artificial Sequence
  Description of Artificial Sequence: Synthetic oligonucleotide
guccuuccacucagccaug

SEQ ID NO: 3053652 - RNA, 19 nt, Artificial Sequence
  Description of Artificial Sequence: Synthetic oligonucleotide
gcccgagugcccaugagcu

SEQ ID NO: 3053653 - RNA, 19 nt, Artificial Sequence
  Description of Artificial Sequence: Synthetic oligonucleotide
cgaaggcucgcaggggucc

SEQ ID NO: 3053654 - RNA, 19 nt, Artificial Sequence
  Description of Artificial Sequence: Synthetic oligonucleotide
gguccucugcauggagcug

SEQ ID NO: 3053655 - RNA, 19 nt, Artificial Sequence
  Description of Artificial Sequence: Synthetic oligonucleotide
gcagcucccgagaggcagc

SEQ ID NO: 3053656 - RNA, 19 nt, Artificial Sequence
  Description of Artificial Sequence: Synthetic oligonucleotide
aucugcccuugaagcucuc

SEQ ID NO: 3053657 - RNA, 19 nt, Artificial Sequence
  Description of Artificial Sequence: Synthetic oligonucleotide
cugggcccgagugcccaug

SEQ ID NO: 3053658 - RNA, 19 nt, Artificial Sequence
  Description of Artificial Sequence: Synthetic oligonucleotide
cgggcaucacugaagaacu

SEQ ID NO: 3053659 - RNA, 19 nt, Artificial Sequence
  Description of Artificial Sequence: Synthetic oligonucleotide
ggccgcacucaaucagcuc

SEQ ID NO: 3053660 - RNA, 19 nt, Artificial Sequence
  Description of Artificial Sequence: Synthetic oligonucleotide
gaaggcucgcagggguccu

SEQ ID NO: 3053661 - RNA, 19 nt, Artificial Sequence
  Description of Artificial Sequence: Synthetic oligonucleotide
gcccaugagcuccaacagu

SEQ ID NO: 3053662 - RNA, 19 nt, Artificial Sequence
  Description of Artificial Sequence: Synthetic oligonucleotide
gggcccgagugcccaugag

SEQ ID NO: 3053663 - RNA, 19 nt, Artificial Sequence
  Description of Artificial Sequence: Synthetic oligonucleotide
gcucagguggugcggucaa

SEQ ID NO: 3053664 - RNA, 19 nt, Artificial Sequence
  Description of Artificial Sequence: Synthetic oligonucleotide
ugaccgccgccagccgccu

SEQ ID NO: 3053665 - RNA, 19 nt, Artificial Sequence
  Description of Artificial Sequence: Synthetic oligonucleotide
ggcccaggccucguucagc

SEQ ID NO: 3053666 - RNA, 19 nt, Artificial Sequence
  Description of Artificial Sequence: Synthetic oligonucleotide
gcggucaagcggggcagcc

SEQ ID NO: 3053667 - RNA, 19 nt, Artificial Sequence
  Description of Artificial Sequence: Synthetic oligonucleotide
cagggguccucugcaugga

SEQ ID NO: 3053668 - RNA, 19 nt, Artificial Sequence
  Description of Artificial Sequence: Synthetic oligonucleotide
aggccucguucagcccguc

SEQ ID NO: 3053669 - RNA, 19 nt, Artificial Sequence
  Description of Artificial Sequence: Synthetic oligonucleotide
gccgccgcuguguggccgc

SEQ ID NO: 3053670 - RNA, 19 nt, Artificial Sequence
  Description of Artificial Sequence: Synthetic oligonucleotide
caaucagcucguccaccau

SEQ ID NO: 3053671 - RNA, 19 nt, Artificial Sequence
  Description of Artificial Sequence: Synthetic oligonucleotide
augcagcucccgagaggca

SEQ ID NO: 3053672 - RNA, 19 nt, Artificial Sequence
  Description of Artificial Sequence: Synthetic oligonucleotide
cccgagugcccaugagcuc

SEQ ID NO: 3053673 - RNA, 19 nt, Artificial Sequence
  Description of Artificial Sequence: Synthetic oligonucleotide
cgcagggguccucugcaug

SEQ ID NO: 3053674 - RNA, 19 nt, Artificial Sequence
  Description of Artificial Sequence: Synthetic oligonucleotide
ggccgccgcuguguggccg

SEQ ID NO: 3053675 - RNA, 19 nt, Artificial Sequence
  Description of Artificial Sequence: Synthetic oligonucleotide
ggcucgcagggguccucug

SEQ ID NO: 3053676 - RNA, 19 nt, Artificial Sequence
  Description of Artificial Sequence: Synthetic oligonucleotide
cccaggccucguucagccc

SEQ ID NO: 3053677 - RNA, 19 nt, Artificial Sequence
  Description of Artificial Sequence: Synthetic oligonucleotide
cccgagaggcagcgagcag

SEQ ID NO: 3053678 - RNA, 19 nt, Artificial Sequence
  Description of Artificial Sequence: Synthetic oligonucleotide
agcucccgagaggcagcga

SEQ ID NO: 3053679 - RNA, 19 nt, Artificial Sequence
  Description of Artificial Sequence: Synthetic oligonucleotide
cuguguggccgcacucaau

SEQ ID NO: 3053680 - RNA, 19 nt, Artificial Sequence
  Description of Artificial Sequence: Synthetic oligonucleotide
ccuugaagcucucgggcau

SEQ ID NO: 3053681 - RNA, 19 nt, Artificial Sequence
  Description of Artificial Sequence: Synthetic oligonucleotide
caggccucguucagcccgu

SEQ ID NO: 3053682 - RNA, 19 nt, Artificial Sequence
  Description of Artificial Sequence: Synthetic oligonucleotide
cggucaagcggggcagccg

SEQ ID NO: 3053683 - RNA, 19 nt, Artificial Sequence
  Description of Artificial Sequence: Synthetic oligonucleotide
cgagaagcugcaggucgug

SEQ ID NO: 3053684 - RNA, 19 nt, Artificial Sequence
  Description of Artificial Sequence: Synthetic oligonucleotide
gggcucagguggugcgguc

SEQ ID NO: 3053685 - RNA, 19 nt, Artificial Sequence
  Description of Artificial Sequence: Synthetic oligonucleotide
cguucagcccguccuucca

SEQ ID NO: 3053686 - RNA, 19 nt, Artificial Sequence
  Description of Artificial Sequence: Synthetic oligonucleotide
gccgccucccgcccuagcu

SEQ ID NO: 3053687 - RNA, 19 nt, Artificial Sequence
  Description of Artificial Sequence: Synthetic oligonucleotide
gggcagccgccuccgcuuc

SEQ ID NO: 3053688 - RNA, 19 nt, Artificial Sequence
  Description of Artificial Sequence: Synthetic oligonucleotide
gaccgccgccagccgccuc

SEQ ID NO: 3053689 - RNA, 19 nt, Artificial Sequence
  Description of Artificial Sequence: Synthetic oligonucleotide
gcgagcagcugggcccgag

SEQ ID NO: 3053690 - RNA, 19 nt, Artificial Sequence
  Description of Artificial Sequence: Synthetic oligonucleotide
ccgcccuagcuccuccuca

SEQ ID NO: 3053691 - RNA, 19 nt, Artificial Sequence
  Description of Artificial Sequence: Synthetic oligonucleotide
cccgcccuagcuccuccuc

SEQ ID NO: 3053692 - RNA, 19 nt, Artificial Sequence
  Description of Artificial Sequence: Synthetic oligonucleotide
gccgcuguguggccgcacu

SEQ ID NO: 3053693 - RNA, 19 nt, Artificial Sequence
  Description of Artificial Sequence: Synthetic oligonucleotide
gagugcccaugagcuccaa

SEQ ID NO: 3053694 - RNA, 19 nt, Artificial Sequence
  Description of Artificial Sequence: Synthetic oligonucleotide
ccgcuguguggccgcacuc

SEQ ID NO: 3053695 - RNA, 19 nt, Artificial Sequence
  Description of Artificial Sequence: Synthetic oligonucleotide
cagccgccucccgcccuag

SEQ ID NO: 3053696 - RNA, 19 nt, Artificial Sequence
  Description of Artificial Sequence: Synthetic oligonucleotide
gcccuagcuccuccucaaa

SEQ ID NO: 3053697 - RNA, 19 nt, Artificial Sequence
  Description of Artificial Sequence: Synthetic oligonucleotide
agcgagcagcugggcccga

SEQ ID NO: 3053698 - RNA, 19 nt, Artificial Sequence
  Description of Artificial Sequence: Synthetic oligonucleotide
ccgcacucaaucagcucgu

SEQ ID NO: 3053699 - RNA, 19 nt, Artificial Sequence
  Description of Artificial Sequence: Synthetic oligonucleotide
cgcuguguggccgcacuca

SEQ ID NO: 3053700 - RNA, 19 nt, Artificial Sequence
  Description of Artificial Sequence: Synthetic oligonucleotide
ccgccuccgcuucuccuca

SEQ ID NO: 3053701 - RNA, 19 nt, Artificial Sequence
  Description of Artificial Sequence: Synthetic oligonucleotide
guucggcccaggccucguu

SEQ ID NO: 3053702 - RNA, 19 nt, Artificial Sequence
  Description of Artificial Sequence: Synthetic oligonucleotide
cgagugcccaugagcucca

SEQ ID NO: 3053703 - RNA, 19 nt, Artificial Sequence
  Description of Artificial Sequence: Synthetic oligonucleotide
gcccguccuuccacucagc

SEQ ID NO: 3053704 - RNA, 19 nt, Artificial Sequence
  Description of Artificial Sequence: Synthetic oligonucleotide
gcugcaggucgugcucgaa

SEQ ID NO: 3053705 - RNA, 19 nt, Artificial Sequence
  Description of Artificial Sequence: Synthetic oligonucleotide
cggcccaggccucguucag

SEQ ID NO: 3053706 - RNA, 19 nt, Artificial Sequence
  Description of Artificial Sequence: Synthetic oligonucleotide
cgcccuagcuccuccucaa

SEQ ID NO: 3053707 - RNA, 19 nt, Artificial Sequence
  Description of Artificial Sequence: Synthetic oligonucleotide
ccuuccacucagccauggu

SEQ ID NO: 3053708 - RNA, 19 nt, Artificial Sequence
  Description of Artificial Sequence: Synthetic oligonucleotide
cgcacucaaucagcucguc

SEQ ID NO: 3053709 - RNA, 19 nt, Artificial Sequence
  Description of Artificial Sequence: Synthetic oligonucleotide
gcucguccaccaucugguu

SEQ ID NO: 3053710 - RNA, 19 nt, Artificial Sequence
  Description of Artificial Sequence: Synthetic oligonucleotide
cguccaccaucugguugac

SEQ ID NO: 3053711 - RNA, 19 nt, Artificial Sequence
  Description of Artificial Sequence: Synthetic oligonucleotide
ccucccgcccuagcuccuc

SEQ ID NO: 3053712 - RNA, 19 nt, Artificial Sequence
  Description of Artificial Sequence: Synthetic oligonucleotide
gcggggcagccgccuccgc

SEQ ID NO: 3053713 - RNA, 19 nt, Artificial Sequence
  Description of Artificial Sequence: Synthetic oligonucleotide
gccuccgcuucuccucaau

SEQ ID NO: 3053714 - RNA, 19 nt, Artificial Sequence
  Description of Artificial Sequence: Synthetic oligonucleotide
ccaugguggccgccgcugu

SEQ ID NO: 3053715 - RNA, 19 nt, Artificial Sequence
  Description of Artificial Sequence: Synthetic oligonucleotide
ccucguucagcccguccuu

SEQ ID NO: 3053716 - RNA, 19 nt, Artificial Sequence
  Description of Artificial Sequence: Synthetic oligonucleotide
ccucugcauggagcuggca

SEQ ID NO: 3053717 - RNA, 19 nt, Artificial Sequence
  Description of Artificial Sequence: Synthetic oligonucleotide
ccagccgccucccgcccua

SEQ ID NO: 3053718 - RNA, 19 nt, Artificial Sequence
  Description of Artificial Sequence: Synthetic oligonucleotide
gcugggcccgagugcccau

SEQ ID NO: 3053719 - RNA, 19 nt, Artificial Sequence
  Description of Artificial Sequence: Synthetic oligonucleotide
cgagcagcugggcccgagu

SEQ ID NO: 3053720 - RNA, 19 nt, Artificial Sequence
  Description of Artificial Sequence: Synthetic oligonucleotide
cgccgccagccgccucccg

SEQ ID NO: 3053721 - RNA, 19 nt, Artificial Sequence
  Description of Artificial Sequence: Synthetic oligonucleotide
cggggcagccgccuccgcu

SEQ ID NO: 3053722 - RNA, 19 nt, Artificial Sequence
  Description of Artificial Sequence: Synthetic oligonucleotide
cgccgcuguguggccgcac

SEQ ID NO: 3053723 - RNA, 19 nt, Artificial Sequence
  Description of Artificial Sequence: Synthetic oligonucleotide
cgccuccgcuucuccucaa

SEQ ID NO: 3053724 - RNA, 19 nt, Artificial Sequence
  Description of Artificial Sequence: Synthetic oligonucleotide
ccgccgcuguguggccgca

SEQ ID NO: 3053725 - RNA, 19 nt, Artificial Sequence
  Description of Artificial Sequence: Synthetic oligonucleotide
aauuuaggcaaauagaaag

SEQ ID NO: 3053726 - RNA, 19 nt, Artificial Sequence
  Description of Artificial Sequence: Synthetic oligonucleotide
aacgaugaagaauuuaggc

SEQ ID NO: 3053727 - RNA, 19 nt, Artificial Sequence
  Description of Artificial Sequence: Synthetic oligonucleotide
gaagaauuuaggcaaauag

SEQ ID NO: 3053728 - RNA, 19 nt, Artificial Sequence
  Description of Artificial Sequence: Synthetic oligonucleotide
aaguuaagcauuuucuuuc

SEQ ID NO: 3053729 - RNA, 19 nt, Artificial Sequence
  Description of Artificial Sequence: Synthetic oligonucleotide
cuaacgaugaagaauuuag

SEQ ID NO: 3053730 - RNA, 19 nt, Artificial Sequence
  Description of Artificial Sequence: Synthetic oligonucleotide
agaaccacaaacacgaagc

SEQ ID NO: 3053731 - RNA, 19 nt, Artificial Sequence
  Description of Artificial Sequence: Synthetic oligonucleotide
ugugcaaacaggcaaaggu

SEQ ID NO: 3053732 - RNA, 19 nt, Artificial Sequence
  Description of Artificial Sequence: Synthetic oligonucleotide
caaaggugaacgaugaagg

SEQ ID NO: 3053733 - RNA, 19 nt, Artificial Sequence
  Description of Artificial Sequence: Synthetic oligonucleotide
uucaccaggaaggagagcg

SEQ ID NO: 3053734 - RNA, 19 nt, Artificial Sequence
  Description of Artificial Sequence: Synthetic oligonucleotide
gaaggugagaaccacaaac

SEQ ID NO: 3053735 - RNA, 19 nt, Artificial Sequence
  Description of Artificial Sequence: Synthetic oligonucleotide
uaacgaugaagaauuuagg

SEQ ID NO: 3053736 - RNA, 19 nt, Artificial Sequence
  Description of Artificial Sequence: Synthetic oligonucleotide
aaggagagcgggaagaacg

SEQ ID NO: 3053737 - RNA, 19 nt, Artificial Sequence
  Description of Artificial Sequence: Synthetic oligonucleotide
ugaacgaugaaggugagaa

SEQ ID NO: 3053738 - RNA, 19 nt, Artificial Sequence
  Description of Artificial Sequence: Synthetic oligonucleotide
uaagcauuuucuuucuccc

SEQ ID NO: 3053739 - RNA, 19 nt, Artificial Sequence
  Description of Artificial Sequence: Synthetic oligonucleotide
aagaauuuaggcaaauaga

SEQ ID NO: 3053740 - RNA, 19 nt, Artificial Sequence
  Description of Artificial Sequence: Synthetic oligonucleotide
acgaugaagaauuuaggca

SEQ ID NO: 3053741 - RNA, 19 nt, Artificial Sequence
  Description of Artificial Sequence: Synthetic oligonucleotide
uagaaaguuaagcauuuuc

SEQ ID NO: 3053742 - RNA, 19 nt, Artificial Sequence
  Description of Artificial Sequence: Synthetic oligonucleotide
ugcaaacaggcaaagguga

SEQ ID NO: 3053743 - RNA, 19 nt, Artificial Sequence
  Description of Artificial Sequence: Synthetic oligonucleotide
aaauagaaaguuaagcauu

SEQ ID NO: 3053744 - RNA, 19 nt, Artificial Sequence
  Description of Artificial Sequence: Synthetic oligonucleotide
agccacaacaguccuaacg

SEQ ID NO: 3053745 - RNA, 19 nt, Artificial Sequence
  Description of Artificial Sequence: Synthetic oligonucleotide
agaauuuaggcaaauagaa

SEQ ID NO: 3053746 - RNA, 19 nt, Artificial Sequence
  Description of Artificial Sequence: Synthetic oligonucleotide
aggugagaaccacaaacac

SEQ ID NO: 3053747 - RNA, 19 nt, Artificial Sequence
  Description of Artificial Sequence: Synthetic oligonucleotide
uuucuuucucccuggaccc

SEQ ID NO: 3053748 - RNA, 19 nt, Artificial Sequence
  Description of Artificial Sequence: Synthetic oligonucleotide
agggaaugugcaaacaggc

SEQ ID NO: 3053749 - RNA, 19 nt, Artificial Sequence
  Description of Artificial Sequence: Synthetic oligonucleotide
gcaaauagaaaguuaagca

SEQ ID NO: 3053750 - RNA, 19 nt, Artificial Sequence
  Description of Artificial Sequence: Synthetic oligonucleotide
gaaccacaaacacgaagcg

SEQ ID NO: 3053751 - RNA, 19 nt, Artificial Sequence
  Description of Artificial Sequence: Synthetic oligonucleotide
aaaggugaacgaugaaggu

SEQ ID NO: 3053752 - RNA, 19 nt, Artificial Sequence
  Description of Artificial Sequence: Synthetic oligonucleotide
aaggugaacgaugaaggug

SEQ ID NO: 3053753 - RNA, 19 nt, Artificial Sequence
  Description of Artificial Sequence: Synthetic oligonucleotide
ucauggagaacuugcgcag

SEQ ID NO: 3053754 - RNA, 19 nt, Artificial Sequence
  Description of Artificial Sequence: Synthetic oligonucleotide
agcauuuucuuucucccug

SEQ ID NO: 3053755 - RNA, 19 nt, Artificial Sequence
  Description of Artificial Sequence: Synthetic oligonucleotide
gugagaaccacaaacacga

SEQ ID NO: 3053756 - RNA, 19 nt, Artificial Sequence
  Description of Artificial Sequence: Synthetic oligonucleotide
ucucauggagaacuugcgc

SEQ ID NO: 3053757 - RNA, 19 nt, Artificial Sequence
  Description of Artificial Sequence: Synthetic oligonucleotide
aacaguccuaacgaugaag

SEQ ID NO: 3053758 - RNA, 19 nt, Artificial Sequence
  Description of Artificial Sequence: Synthetic oligonucleotide
aaccacaaacacgaagcgg

SEQ ID NO: 3053759 - RNA, 19 nt, Artificial Sequence
  Description of Artificial Sequence: Synthetic oligonucleotide
cagggaaugugcaaacagg

SEQ ID NO: 3053760 - RNA, 19 nt, Artificial Sequence
  Description of Artificial Sequence: Synthetic oligonucleotide
aaggugagaaccacaaaca

SEQ ID NO: 3053761 - RNA, 19 nt, Artificial Sequence
  Description of Artificial Sequence: Synthetic oligonucleotide
aaugugcaaacaggcaaag

SEQ ID NO: 3053762 - RNA, 19 nt, Artificial Sequence
  Description of Artificial Sequence: Synthetic oligonucleotide
acgaagcggaaccagagcu

SEQ ID NO: 3053763 - RNA, 19 nt, Artificial Sequence
  Description of Artificial Sequence: Synthetic oligonucleotide
ggcaaauagaaaguuaagc

SEQ ID NO: 3053764 - RNA, 19 nt, Artificial Sequence
  Description of Artificial Sequence: Synthetic oligonucleotide
accacaaacacgaagcgga

SEQ ID NO: 3053765 - RNA, 19 nt, Artificial Sequence
  Description of Artificial Sequence: Synthetic oligonucleotide
aguuaagcauuuucuuucu

SEQ ID NO: 3053766 - RNA, 19 nt, Artificial Sequence
  Description of Artificial Sequence: Synthetic oligonucleotide
cucucauggagaacuugcg

SEQ ID NO: 3053767 - RNA, 19 nt, Artificial Sequence
  Description of Artificial Sequence: Synthetic oligonucleotide
aagcauuuucuuucucccu

SEQ ID NO: 3053768 - RNA, 19 nt, Artificial Sequence
  Description of Artificial Sequence: Synthetic oligonucleotide
cucauggagaacuugcgca

SEQ ID NO: 3053769 - RNA, 19 nt, Artificial Sequence
  Description of Artificial Sequence: Synthetic oligonucleotide
acaacaguccuaacgauga

SEQ ID NO: 3053770 - RNA, 19 nt, Artificial Sequence
  Description of Artificial Sequence: Synthetic oligonucleotide
caggcaaaggugaacgaug

SEQ ID NO: 3053771 - RNA, 19 nt, Artificial Sequence
  Description of Artificial Sequence: Synthetic oligonucleotide
acuugcgcagggaaugugc

SEQ ID NO: 3053772 - RNA, 19 nt, Artificial Sequence
  Description of Artificial Sequence: Synthetic oligonucleotide
aggugaacgaugaagguga

SEQ ID NO: 3053773 - RNA, 19 nt, Artificial Sequence
  Description of Artificial Sequence: Synthetic oligonucleotide
gaagcggaaccagagcucc

SEQ ID NO: 3053774 - RNA, 19 nt, Artificial Sequence
  Description of Artificial Sequence: Synthetic oligonucleotide
aaacacgaagcggaaccag

SEQ ID NO: 3053775 - RNA, 19 nt, Artificial Sequence
  Description of Artificial Sequence: Synthetic oligonucleotide
ggugagaaccacaaacacg

SEQ ID NO: 3053776 - RNA, 19 nt, Artificial Sequence
  Description of Artificial Sequence: Synthetic oligonucleotide
caaauagaaaguuaagcau

SEQ ID NO: 3053777 - RNA, 19 nt, Artificial Sequence
  Description of Artificial Sequence: Synthetic oligonucleotide
aacaggcaaaggugaacga

SEQ ID NO: 3053778 - RNA, 19 nt, Artificial Sequence
  Description of Artificial Sequence: Synthetic oligonucleotide
gcaaaggugaacgaugaag

SEQ ID NO: 3053779 - RNA, 19 nt, Artificial Sequence
  Description of Artificial Sequence: Synthetic oligonucleotide
acaguccuaacgaugaaga

SEQ ID NO: 3053780 - RNA, 19 nt, Artificial Sequence
  Description of Artificial Sequence: Synthetic oligonucleotide
ucaccaggaaggagagcgg

SEQ ID NO: 3053781 - RNA, 19 nt, Artificial Sequence
  Description of Artificial Sequence: Synthetic oligonucleotide
aguccuaacgaugaagaau

SEQ ID NO: 3053782 - RNA, 19 nt, Artificial Sequence
  Description of Artificial Sequence: Synthetic oligonucleotide
gaauuuaggcaaauagaaa

SEQ ID NO: 3053783 - RNA, 19 nt, Artificial Sequence
  Description of Artificial Sequence: Synthetic oligonucleotide
ggaaugugcaaacaggcaa

SEQ ID NO: 3053784 - RNA, 19 nt, Artificial Sequence
  Description of Artificial Sequence: Synthetic oligonucleotide
gugcaaacaggcaaaggug

SEQ ID NO: 3053785 - RNA, 19 nt, Artificial Sequence
  Description of Artificial Sequence: Synthetic oligonucleotide
gacccguaucccaugauac

SEQ ID NO: 3053786 - RNA, 19 nt, Artificial Sequence
  Description of Artificial Sequence: Synthetic oligonucleotide
gcagggaaugugcaaacag

SEQ ID NO: 3053787 - RNA, 19 nt, Artificial Sequence
  Description of Artificial Sequence: Synthetic oligonucleotide
ugaagaauuuaggcaaaua

SEQ ID NO: 3053788 - RNA, 19 nt, Artificial Sequence
  Description of Artificial Sequence: Synthetic oligonucleotide
aacacgaagcggaaccaga

SEQ ID NO: 3053789 - RNA, 19 nt, Artificial Sequence
  Description of Artificial Sequence: Synthetic oligonucleotide
gaacgaugaaggugagaac

SEQ ID NO: 3053790 - RNA, 19 nt, Artificial Sequence
  Description of Artificial Sequence: Synthetic oligonucleotide
ugaaggugagaaccacaaa

SEQ ID NO: 3053791 - RNA, 19 nt, Artificial Sequence
  Description of Artificial Sequence: Synthetic oligonucleotide
gaugaaggugagaaccaca

SEQ ID NO: 3053792 - RNA, 19 nt, Artificial Sequence
  Description of Artificial Sequence: Synthetic oligonucleotide
gaaugugcaaacaggcaaa

SEQ ID NO: 3053793 - RNA, 19 nt, Artificial Sequence
  Description of Artificial Sequence: Synthetic oligonucleotide
gccacaacaguccuaacga

SEQ ID NO: 3053794 - RNA, 19 nt, Artificial Sequence
  Description of Artificial Sequence: Synthetic oligonucleotide
augaaggugagaaccacaa

SEQ ID NO: 3053795 - RNA, 19 nt, Artificial Sequence
  Description of Artificial Sequence: Synthetic oligonucleotide
aggaaggagagcgggaaga

SEQ ID NO: 3053796 - RNA, 19 nt, Artificial Sequence
  Description of Artificial Sequence: Synthetic oligonucleotide
augugcaaacaggcaaagg

SEQ ID NO: 3053797 - RNA, 19 nt, Artificial Sequence
  Description of Artificial Sequence: Synthetic oligonucleotide
cauggagaacuugcgcagg

SEQ ID NO: 3053798 - RNA, 19 nt, Artificial Sequence
  Description of Artificial Sequence: Synthetic oligonucleotide
aggcaaauagaaaguuaag

SEQ ID NO: 3053799 - RNA, 19 nt, Artificial Sequence
  Description of Artificial Sequence: Synthetic oligonucleotide
acacgaagcggaaccagag

SEQ ID NO: 3053800 - RNA, 19 nt, Artificial Sequence
  Description of Artificial Sequence: Synthetic oligonucleotide
ugcgcagggaaugugcaaa

SEQ ID NO: 3053801 - RNA, 19 nt, Artificial Sequence
  Description of Artificial Sequence: Synthetic oligonucleotide
gaugaagaauuuaggcaaa

SEQ ID NO: 3053802 - RNA, 19 nt, Artificial Sequence
  Description of Artificial Sequence: Synthetic oligonucleotide
cacgaagcggaaccagagc

SEQ ID NO: 3053803 - RNA, 19 nt, Artificial Sequence
  Description of Artificial Sequence: Synthetic oligonucleotide
aggagagcgggaagaacgg

SEQ ID NO: 3053804 - RNA, 19 nt, Artificial Sequence
  Description of Artificial Sequence: Synthetic oligonucleotide
uucuuucucccuggacccg

SEQ ID NO: 3053805 - RNA, 19 nt, Artificial Sequence
  Description of Artificial Sequence: Synthetic oligonucleotide
aacuugcgcagggaaugug

SEQ ID NO: 3053806 - RNA, 19 nt, Artificial Sequence
  Description of Artificial Sequence: Synthetic oligonucleotide
acaggcaaaggugaacgau

SEQ ID NO: 3053807 - RNA, 19 nt, Artificial Sequence
  Description of Artificial Sequence: Synthetic oligonucleotide
acccguaucccaugauaca

SEQ ID NO: 3053808 - RNA, 19 nt, Artificial Sequence
  Description of Artificial Sequence: Synthetic oligonucleotide
cgaugaagaauuuaggcaa

SEQ ID NO: 3053809 - RNA, 19 nt, Artificial Sequence
  Description of Artificial Sequence: Synthetic oligonucleotide
agcggaaccagagcuccag

SEQ ID NO: 3053810 - RNA, 19 nt, Artificial Sequence
  Description of Artificial Sequence: Synthetic oligonucleotide
cuugcgcagggaaugugca

SEQ ID NO: 3053811 - RNA, 19 nt, Artificial Sequence
  Description of Artificial Sequence: Synthetic oligonucleotide
aggcaaaggugaacgauga

SEQ ID NO: 3053812 - RNA, 19 nt, Artificial Sequence
  Description of Artificial Sequence: Synthetic oligonucleotide
ucuuucucccuggacccgu

SEQ ID NO: 3053813 - RNA, 19 nt, Artificial Sequence
  Description of Artificial Sequence: Synthetic oligonucleotide
guccuaacgaugaagaauu

SEQ ID NO: 3053814 - RNA, 19 nt, Artificial Sequence
  Description of Artificial Sequence: Synthetic oligonucleotide
acgaugaaggugagaacca

SEQ ID NO: 3053815 - RNA, 19 nt, Artificial Sequence
  Description of Artificial Sequence: Synthetic oligonucleotide
caggaaggagagcgggaag

SEQ ID NO: 3053816 - RNA, 19 nt, Artificial Sequence
  Description of Artificial Sequence: Synthetic oligonucleotide
cacaaacacgaagcggaac

SEQ ID NO: 3053817 - RNA, 19 nt, Artificial Sequence
  Description of Artificial Sequence: Synthetic oligonucleotide
ccguaucccaugauacacg

SEQ ID NO: 3053818 - RNA, 19 nt, Artificial Sequence
  Description of Artificial Sequence: Synthetic oligonucleotide
uggagaacuugcgcaggga

SEQ ID NO: 3053819 - RNA, 19 nt, Artificial Sequence
  Description of Artificial Sequence: Synthetic oligonucleotide
uccuaacgaugaagaauuu

SEQ ID NO: 3053820 - RNA, 19 nt, Artificial Sequence
  Description of Artificial Sequence: Synthetic oligonucleotide
ggagccagcuguucaccag

SEQ ID NO: 3053821 - RNA, 19 nt, Artificial Sequence
  Description of Artificial Sequence: Synthetic oligonucleotide
auagaaaguuaagcauuuu

SEQ ID NO: 3053822 - RNA, 19 nt, Artificial Sequence
  Description of Artificial Sequence: Synthetic oligonucleotide
gucucucauggagaacuug

SEQ ID NO: 3053823 - RNA, 19 nt, Artificial Sequence
  Description of Artificial Sequence: Synthetic oligonucleotide
ggagaacuugcgcagggaa

SEQ ID NO: 3053824 - RNA, 19 nt, Artificial Sequence
  Description of Artificial Sequence: Synthetic oligonucleotide
cauuuucuuucucccugga

SEQ ID NO: 3053825 - RNA, 19 nt, Artificial Sequence
  Description of Artificial Sequence: Synthetic oligonucleotide
uugcgcagggaaugugcaa

SEQ ID NO: 3053826 - RNA, 19 nt, Artificial Sequence
  Description of Artificial Sequence: Synthetic oligonucleotide
caaacacgaagcggaacca

SEQ ID NO: 3053827 - RNA, 19 nt, Artificial Sequence
  Description of Artificial Sequence: Synthetic oligonucleotide
cccguaucccaugauacac

SEQ ID NO: 3053828 - RNA, 19 nt, Artificial Sequence
  Description of Artificial Sequence: Synthetic oligonucleotide
uggacccguaucccaugau

SEQ ID NO: 3053829 - RNA, 19 nt, Artificial Sequence
  Description of Artificial Sequence: Synthetic oligonucleotide
caguccuaacgaugaagaa

SEQ ID NO: 3053830 - RNA, 19 nt, Artificial Sequence
  Description of Artificial Sequence: Synthetic oligonucleotide
gggaaugugcaaacaggca

SEQ ID NO: 3053831 - RNA, 19 nt, Artificial Sequence
  Description of Artificial Sequence: Synthetic oligonucleotide
gagaacuugcgcagggaau

SEQ ID NO: 3053832 - RNA, 19 nt, Artificial Sequence
  Description of Artificial Sequence: Synthetic oligonucleotide
accaggaaggagagcggga

SEQ ID NO: 3053833 - RNA, 19 nt, Artificial Sequence
  Description of Artificial Sequence: Synthetic oligonucleotide
cuggacccguaucccauga

SEQ ID NO: 3053834 - RNA, 19 nt, Artificial Sequence
  Description of Artificial Sequence: Synthetic oligonucleotide
ggacccguaucccaugaua

SEQ ID NO: 3053835 - RNA, 19 nt, Artificial Sequence
  Description of Artificial Sequence: Synthetic oligonucleotide
guucaccaggaaggagagc

SEQ ID NO: 3053836 - RNA, 19 nt, Artificial Sequence
  Description of Artificial Sequence: Synthetic oligonucleotide
ggugaacgaugaaggugag

SEQ ID NO: 3053837 - RNA, 19 nt, Artificial Sequence
  Description of Artificial Sequence: Synthetic oligonucleotide
gugaacgaugaaggugaga

SEQ ID NO: 3053838 - RNA, 19 nt, Artificial Sequence
  Description of Artificial Sequence: Synthetic oligonucleotide
aagcggaaccagagcucca

SEQ ID NO: 3053839 - RNA, 19 nt, Artificial Sequence
  Description of Artificial Sequence: Synthetic oligonucleotide
agccagcuguucaccagga

SEQ ID NO: 3053840 - RNA, 19 nt, Artificial Sequence
  Description of Artificial Sequence: Synthetic oligonucleotide
caacaguccuaacgaugaa

SEQ ID NO: 3053841 - RNA, 19 nt, Artificial Sequence
  Description of Artificial Sequence: Synthetic oligonucleotide
gggagccagcuguucacca

SEQ ID NO: 3053842 - RNA, 19 nt, Artificial Sequence
  Description of Artificial Sequence: Synthetic oligonucleotide
gcgcagggaaugugcaaac

SEQ ID NO: 3053843 - RNA, 19 nt, Artificial Sequence
  Description of Artificial Sequence: Synthetic oligonucleotide
ccagccacaacaguccuaa

SEQ ID NO: 3053844 - RNA, 19 nt, Artificial Sequence
  Description of Artificial Sequence: Synthetic oligonucleotide
agucucucauggagaacuu

SEQ ID NO: 3053845 - RNA, 19 nt, Artificial Sequence
  Description of Artificial Sequence: Synthetic oligonucleotide
gcaaacaggcaaaggugaa

SEQ ID NO: 3053846 - RNA, 19 nt, Artificial Sequence
  Description of Artificial Sequence: Synthetic oligonucleotide
gcggaaccagagcuccagc

SEQ ID NO: 3053847 - RNA, 19 nt, Artificial Sequence
  Description of Artificial Sequence: Synthetic oligonucleotide
cgaagcggaaccagagcuc

SEQ ID NO: 3053848 - RNA, 19 nt, Artificial Sequence
  Description of Artificial Sequence: Synthetic oligonucleotide
cagccacaacaguccuaac

SEQ ID NO: 3053849 - RNA, 19 nt, Artificial Sequence
  Description of Artificial Sequence: Synthetic oligonucleotide
ccugggagccagcuguuca

SEQ ID NO: 3053850 - RNA, 19 nt, Artificial Sequence
  Description of Artificial Sequence: Synthetic oligonucleotide
ggcaaaggugaacgaugaa

SEQ ID NO: 3053851 - RNA, 19 nt, Artificial Sequence
  Description of Artificial Sequence: Synthetic oligonucleotide
ccuaacgaugaagaauuua

SEQ ID NO: 3053852 - RNA, 19 nt, Artificial Sequence
  Description of Artificial Sequence: Synthetic oligonucleotide
ccuggacccguaucccaug

SEQ ID NO: 3053853 - RNA, 19 nt, Artificial Sequence
  Description of Artificial Sequence: Synthetic oligonucleotide
cgaugaaggugagaaccac

SEQ ID NO: 3053854 - RNA, 19 nt, Artificial Sequence
  Description of Artificial Sequence: Synthetic oligonucleotide
ccaggaaggagagcgggaa

SEQ ID NO: 3053855 - RNA, 19 nt, Artificial Sequence
  Description of Artificial Sequence: Synthetic oligonucleotide
ccacaaacacgaagcggaa

SEQ ID NO: 3053856 - RNA, 19 nt, Artificial Sequence
  Description of Artificial Sequence: Synthetic oligonucleotide
ccagucucucauggagaac

SEQ ID NO: 3053857 - RNA, 19 nt, Artificial Sequence
  Description of Artificial Sequence: Synthetic oligonucleotide
ccacaacaguccuaacgau

SEQ ID NO: 3053858 - RNA, 19 nt, Artificial Sequence
  Description of Artificial Sequence: Synthetic oligonucleotide
cgcagggaaugugcaaaca

SEQ ID NO: 3053859 - RNA, 19 nt, Artificial Sequence
  Description of Artificial Sequence: Synthetic oligonucleotide
cccugggagccagcuguuc

SEQ ID NO: 3053860 - RNA, 19 nt, Artificial Sequence
  Description of Artificial Sequence: Synthetic oligonucleotide
uauuauuuaaauaagcggg

SEQ ID NO: 3053861 - RNA, 19 nt, Artificial Sequence
  Description of Artificial Sequence: Synthetic oligonucleotide
aacuguacaagacacaggc

SEQ ID NO: 3053862 - RNA, 19 nt, Artificial Sequence
  Description of Artificial Sequence: Synthetic oligonucleotide
aaauaagcgggguagauac

SEQ ID NO: 3053863 - RNA, 19 nt, Artificial Sequence
  Description of Artificial Sequence: Synthetic oligonucleotide
uuauuauuuaaauaagcgg

SEQ ID NO: 3053864 - RNA, 19 nt, Artificial Sequence
  Description of Artificial Sequence: Synthetic oligonucleotide
cuuauuauuuaaauaagcg

SEQ ID NO: 3053865 - RNA, 19 nt, Artificial Sequence
  Description of Artificial Sequence: Synthetic oligonucleotide
aaugcauucaguccaacug

SEQ ID NO: 3053866 - RNA, 19 nt, Artificial Sequence
  Description of Artificial Sequence: Synthetic oligonucleotide
aauauaccuguccuggucg

SEQ ID NO: 3053867 - RNA, 19 nt, Artificial Sequence
  Description of Artificial Sequence: Synthetic oligonucleotide
ucuuauuauuuaaauaagc

SEQ ID NO: 3053868 - RNA, 19 nt, Artificial Sequence
  Description of Artificial Sequence: Synthetic oligonucleotide
aguaggguuuucuacagcc

SEQ ID NO: 3053869 - RNA, 19 nt, Artificial Sequence
  Description of Artificial Sequence: Synthetic oligonucleotide
ucuguacugaacaucacgg

SEQ ID NO: 3053870 - RNA, 19 nt, Artificial Sequence
  Description of Artificial Sequence: Synthetic oligonucleotide
ucuacagccuuacuuaugg

SEQ ID NO: 3053871 - RNA, 19 nt, Artificial Sequence
  Description of Artificial Sequence: Synthetic oligonucleotide
aacugcugaacagacaucc

SEQ ID NO: 3053872 - RNA, 19 nt, Artificial Sequence
  Description of Artificial Sequence: Synthetic oligonucleotide
ugaacagacauccugaauc

SEQ ID NO: 3053873 - RNA, 19 nt, Artificial Sequence
  Description of Artificial Sequence: Synthetic oligonucleotide
aaauauaccuguccugguc

SEQ ID NO: 3053874 - RNA, 19 nt, Artificial Sequence
  Description of Artificial Sequence: Synthetic oligonucleotide
uucuuauuauuuaaauaag

SEQ ID NO: 3053875 - RNA, 19 nt, Artificial Sequence
  Description of Artificial Sequence: Synthetic oligonucleotide
uauagcaucacugacuuac

SEQ ID NO: 3053876 - RNA, 19 nt, Artificial Sequence
  Description of Artificial Sequence: Synthetic oligonucleotide
uuacuuaugggaauccgcc

SEQ ID NO: 3053877 - RNA, 19 nt, Artificial Sequence
  Description of Artificial Sequence: Synthetic oligonucleotide
uuuucuuccagaaaugcau

SEQ ID NO: 3053878 - RNA, 19 nt, Artificial Sequence
  Description of Artificial Sequence: Synthetic oligonucleotide
auuuaaauaagcgggguag

SEQ ID NO: 3053879 - RNA, 19 nt, Artificial Sequence
  Description of Artificial Sequence: Synthetic oligonucleotide
acaaauauaccuguccugg

SEQ ID NO: 3053880 - RNA, 19 nt, Artificial Sequence
  Description of Artificial Sequence: Synthetic oligonucleotide
auuauuuaaauaagcgggg

SEQ ID NO: 3053881 - RNA, 19 nt, Artificial Sequence
  Description of Artificial Sequence: Synthetic oligonucleotide
uuuucuacagccuuacuua

SEQ ID NO: 3053882 - RNA, 19 nt, Artificial Sequence
  Description of Artificial Sequence: Synthetic oligonucleotide
guagauacaaauauaccug

SEQ ID NO: 3053883 - RNA, 19 nt, Artificial Sequence
  Description of Artificial Sequence: Synthetic oligonucleotide
auacaaauauaccuguccu

SEQ ID NO: 3053884 - RNA, 19 nt, Artificial Sequence
  Description of Artificial Sequence: Synthetic oligonucleotide
cuuacuuaugggaauccgc

SEQ ID NO: 3053885 - RNA, 19 nt, Artificial Sequence
  Description of Artificial Sequence: Synthetic oligonucleotide
cuguacaagacacaggcug

SEQ ID NO: 3053886 - RNA, 19 nt, Artificial Sequence
  Description of Artificial Sequence: Synthetic oligonucleotide
uguacaagacacaggcugc

SEQ ID NO: 3053887 - RNA, 19 nt, Artificial Sequence
  Description of Artificial Sequence: Synthetic oligonucleotide
uccagaaaugcauucaguc

SEQ ID NO: 3053888 - RNA, 19 nt, Artificial Sequence
  Description of Artificial Sequence: Synthetic oligonucleotide
ucuucuuauuauuuaaaua

SEQ ID NO: 3053889 - RNA, 19 nt, Artificial Sequence
  Description of Artificial Sequence: Synthetic oligonucleotide
ucacugacuuacgugaugg

SEQ ID NO: 3053890 - RNA, 19 nt, Artificial Sequence
  Description of Artificial Sequence: Synthetic oligonucleotide
aaaugcauucaguccaacu

SEQ ID NO: 3053891 - RNA, 19 nt, Artificial Sequence
  Description of Artificial Sequence: Synthetic oligonucleotide
acuuaugggaauccgccuc

SEQ ID NO: 3053892 - RNA, 19 nt, Artificial Sequence
  Description of Artificial Sequence: Synthetic oligonucleotide
aaucucaguagcaguaggg

SEQ ID NO: 3053893 - RNA, 19 nt, Artificial Sequence
  Description of Artificial Sequence: Synthetic oligonucleotide
uacauauagcaucacugac

SEQ ID NO: 3053894 - RNA, 19 nt, Artificial Sequence
  Description of Artificial Sequence: Synthetic oligonucleotide
uagauacaaauauaccugu

SEQ ID NO: 3053895 - RNA, 19 nt, Artificial Sequence
  Description of Artificial Sequence: Synthetic oligonucleotide
uacaaauauaccuguccug

SEQ ID NO: 3053896 - RNA, 19 nt, Artificial Sequence
  Description of Artificial Sequence: Synthetic oligonucleotide
ugggaacuguacaagacac

SEQ ID NO: 3053897 - RNA, 19 nt, Artificial Sequence
  Description of Artificial Sequence: Synthetic oligonucleotide
gaaucucaguagcaguagg

SEQ ID NO: 3053898 - RNA, 19 nt, Artificial Sequence
  Description of Artificial Sequence: Synthetic oligonucleotide
aacaucacgguuccacucu

SEQ ID NO: 3053899 - RNA, 19 nt, Artificial Sequence
  Description of Artificial Sequence: Synthetic oligonucleotide
uauuuaaauaagcggggua

SEQ ID NO: 3053900 - RNA, 19 nt, Artificial Sequence
  Description of Artificial Sequence: Synthetic oligonucleotide
cucuguacugaacaucacg

SEQ ID NO: 3053901 - RNA, 19 nt, Artificial Sequence
  Description of Artificial Sequence: Synthetic oligonucleotide
uacagccuuacuuauggga

SEQ ID NO: 3053902 - RNA, 19 nt, Artificial Sequence
  Description of Artificial Sequence: Synthetic oligonucleotide
acauccugaaucucaguag

SEQ ID NO: 3053903 - RNA, 19 nt, Artificial Sequence
  Description of Artificial Sequence: Synthetic oligonucleotide
ugcugaacagacauccuga

SEQ ID NO: 3053904 - RNA, 19 nt, Artificial Sequence
  Description of Artificial Sequence: Synthetic oligonucleotide
cauccugaaucucaguagc

SEQ ID NO: 3053905 - RNA, 19 nt, Artificial Sequence
  Description of Artificial Sequence: Synthetic oligonucleotide
gguagauacaaauauaccu

SEQ ID NO: 3053906 - RNA, 19 nt, Artificial Sequence
  Description of Artificial Sequence: Synthetic oligonucleotide
uacugaacaucacgguucc

SEQ ID NO: 3053907 - RNA, 19 nt, Artificial Sequence
  Description of Artificial Sequence: Synthetic oligonucleotide
agcaguaggguuuucuaca

SEQ ID NO: 3053908 - RNA, 19 nt, Artificial Sequence
  Description of Artificial Sequence: Synthetic oligonucleotide
cagaaaugcauucagucca

SEQ ID NO: 3053909 - RNA, 19 nt, Artificial Sequence
  Description of Artificial Sequence: Synthetic oligonucleotide
ucggcuauggucuucuuau

SEQ ID NO: 3053910 - RNA, 19 nt, Artificial Sequence
  Description of Artificial Sequence: Synthetic oligonucleotide
ucuggaguacauuuguuuu

SEQ ID NO: 3053911 - RNA, 19 nt, Artificial Sequence
  Description of Artificial Sequence: Synthetic oligonucleotide
uauggucuucuuauuauuu

SEQ ID NO: 3053912 - RNA, 19 nt, Artificial Sequence
  Description of Artificial Sequence: Synthetic oligonucleotide
cuuccagaaaugcauucag

SEQ ID NO: 3053913 - RNA, 19 nt, Artificial Sequence
  Description of Artificial Sequence: Synthetic oligonucleotide
agcaucacugacuuacgug

SEQ ID NO: 3053914 - RNA, 19 nt, Artificial Sequence
  Description of Artificial Sequence: Synthetic oligonucleotide
uuuaaauaagcgggguaga

SEQ ID NO: 3053915 - RNA, 19 nt, Artificial Sequence
  Description of Artificial Sequence: Synthetic oligonucleotide
uacgugaugggaacuguac

SEQ ID NO: 3053916 - RNA, 19 nt, Artificial Sequence
  Description of Artificial Sequence: Synthetic oligonucleotide
augggaacuguacaagaca

SEQ ID NO: 3053917 - RNA, 19 nt, Artificial Sequence
  Description of Artificial Sequence: Synthetic oligonucleotide
cuacauauagcaucacuga

SEQ ID NO: 3053918 - RNA, 19 nt, Artificial Sequence
  Description of Artificial Sequence: Synthetic oligonucleotide
ugaaucucaguagcaguag

SEQ ID NO: 3053919 - RNA, 19 nt, Artificial Sequence
  Description of Artificial Sequence: Synthetic oligonucleotide
ggaacuguacaagacacag

SEQ ID NO: 3053920 - RNA, 19 nt, Artificial Sequence
  Description of Artificial Sequence: Synthetic oligonucleotide
uguacccgaacucugccuc

SEQ ID NO: 3053921 - RNA, 19 nt, Artificial Sequence
  Description of Artificial Sequence: Synthetic oligonucleotide
auauaccuguccuggucgg

SEQ ID NO: 3053922 - RNA, 19 nt, Artificial Sequence
  Description of Artificial Sequence: Synthetic oligonucleotide
uccugaaucucaguagcag

SEQ ID NO: 3053923 - RNA, 19 nt, Artificial Sequence
  Description of Artificial Sequence: Synthetic oligonucleotide
cuuaugggaauccgccucc

SEQ ID NO: 3053924 - RNA, 19 nt, Artificial Sequence
  Description of Artificial Sequence: Synthetic oligonucleotide
uccugucugagcuguaccc

SEQ ID NO: 3053925 - RNA, 19 nt, Artificial Sequence
  Description of Artificial Sequence: Synthetic oligonucleotide
ugaacaucacgguuccacu

SEQ ID NO: 3053926 - RNA, 19 nt, Artificial Sequence
  Description of Artificial Sequence: Synthetic oligonucleotide
gcuacauauagcaucacug

SEQ ID NO: 3053927 - RNA, 19 nt, Artificial Sequence
  Description of Artificial Sequence: Synthetic oligonucleotide
aagcgggguagauacaaau

SEQ ID NO: 3053928 - RNA, 19 nt, Artificial Sequence
  Description of Artificial Sequence: Synthetic oligonucleotide
acauauagcaucacugacu

SEQ ID NO: 3053929 - RNA, 19 nt, Artificial Sequence
  Description of Artificial Sequence: Synthetic oligonucleotide
ucuuccagaaaugcauuca

SEQ ID NO: 3053930 - RNA, 19 nt, Artificial Sequence
  Description of Artificial Sequence: Synthetic oligonucleotide
ugcauucaguccaacugcu

SEQ ID NO: 3053931 - RNA, 19 nt, Artificial Sequence
  Description of Artificial Sequence: Synthetic oligonucleotide
ucaguccaacugcugaaca

SEQ ID NO: 3053932 - RNA, 19 nt, Artificial Sequence
  Description of Artificial Sequence: Synthetic oligonucleotide
ugacuuacgugaugggaac

SEQ ID NO: 3053933 - RNA, 19 nt, Artificial Sequence
  Description of Artificial Sequence: Synthetic oligonucleotide
gacauccugaaucucagua

SEQ ID NO: 3053934 - RNA, 19 nt, Artificial Sequence
  Description of Artificial Sequence: Synthetic oligonucleotide
ucacgguuccacucucugg

SEQ ID NO: 3053935 - RNA, 19 nt, Artificial Sequence
  Description of Artificial Sequence: Synthetic oligonucleotide
gaugggaacuguacaagac

SEQ ID NO: 3053936 - RNA, 19 nt, Artificial Sequence
  Description of Artificial Sequence: Synthetic oligonucleotide
auaccuguccuggucggcc

SEQ ID NO: 3053937 - RNA, 19 nt, Artificial Sequence
  Description of Artificial Sequence: Synthetic oligonucleotide
uucuacagccuuacuuaug

SEQ ID NO: 3053938 - RNA, 19 nt, Artificial Sequence
  Description of Artificial Sequence: Synthetic oligonucleotide
uuccagaaaugcauucagu

SEQ ID NO: 3053939 - RNA, 19 nt, Artificial Sequence
  Description of Artificial Sequence: Synthetic oligonucleotide
cugaacaucacgguuccac

SEQ ID NO: 3053940 - RNA, 19 nt, Artificial Sequence
  Description of Artificial Sequence: Synthetic oligonucleotide
uuaaauaagcgggguagau

SEQ ID NO: 3053941 - RNA, 19 nt, Artificial Sequence
  Description of Artificial Sequence: Synthetic oligonucleotide
cagacauccugaaucucag

SEQ ID NO: 3053942 - RNA, 19 nt, Artificial Sequence
  Description of Artificial Sequence: Synthetic oligonucleotide
agauacaaauauaccuguc

SEQ ID NO: 3053943 - RNA, 19 nt, Artificial Sequence
  Description of Artificial Sequence: Synthetic oligonucleotide
uagcaguaggguuuucuac

SEQ ID NO: 3053944 - RNA, 19 nt, Artificial Sequence
  Description of Artificial Sequence: Synthetic oligonucleotide
uccacgggaguccccacag

SEQ ID NO: 3053945 - RNA, 19 nt, Artificial Sequence
  Description of Artificial Sequence: Synthetic oligonucleotide
ccagaaaugcauucagucc

SEQ ID NO: 3053946 - RNA, 19 nt, Artificial Sequence
  Description of Artificial Sequence: Synthetic oligonucleotide
uuucuuccagaaaugcauu

SEQ ID NO: 3053947 - RNA, 19 nt, Artificial Sequence
  Description of Artificial Sequence: Synthetic oligonucleotide
uuucuacagccuuacuuau

SEQ ID NO: 3053948 - RNA, 19 nt, Artificial Sequence
  Description of Artificial Sequence: Synthetic oligonucleotide
uuccugucugagcuguacc

SEQ ID NO: 3053949 - RNA, 19 nt, Artificial Sequence
  Description of Artificial Sequence: Synthetic oligonucleotide
aagacacaggcugccaucu

SEQ ID NO: 3053950 - RNA, 19 nt, Artificial Sequence
  Description of Artificial Sequence: Synthetic oligonucleotide
cauucaguccaacugcuga

SEQ ID NO: 3053951 - RNA, 19 nt, Artificial Sequence
  Description of Artificial Sequence: Synthetic oligonucleotide
uaggguuuucuacagccuu

SEQ ID NO: 3053952 - RNA, 19 nt, Artificial Sequence
  Description of Artificial Sequence: Synthetic oligonucleotide
uucuuccagaaaugcauuc

SEQ ID NO: 3053953 - RNA, 19 nt, Artificial Sequence
  Description of Artificial Sequence: Synthetic oligonucleotide
gggguagauacaaauauac

SEQ ID NO: 3053954 - RNA, 19 nt, Artificial Sequence
  Description of Artificial Sequence: Synthetic oligonucleotide
cugcugaacagacauccug

SEQ ID NO: 3053955 - RNA, 19 nt, Artificial Sequence
  Description of Artificial Sequence: Synthetic oligonucleotide
gaacaucacgguuccacuc

SEQ ID NO: 3053956 - RNA, 19 nt, Artificial Sequence
  Description of Artificial Sequence: Synthetic oligonucleotide
uaaauaagcgggguagaua

SEQ ID NO: 3053957 - RNA, 19 nt, Artificial Sequence
  Description of Artificial Sequence: Synthetic oligonucleotide
guacugaacaucacgguuc

SEQ ID NO: 3053958 - RNA, 19 nt, Artificial Sequence
  Description of Artificial Sequence: Synthetic oligonucleotide
acagacauccugaaucuca

SEQ ID NO: 3053959 - RNA, 19 nt, Artificial Sequence
  Description of Artificial Sequence: Synthetic oligonucleotide
gaacucugccucuguacug

SEQ ID NO: 3053960 - RNA, 19 nt, Artificial Sequence
  Description of Artificial Sequence: Synthetic oligonucleotide
caguccaacugcugaacag

SEQ ID NO: 3053961 - RNA, 19 nt, Artificial Sequence
  Description of Artificial Sequence: Synthetic oligonucleotide
aucacugacuuacgugaug

SEQ ID NO: 3053962 - RNA, 19 nt, Artificial Sequence
  Description of Artificial Sequence: Synthetic oligonucleotide
gcaucacugacuuacguga

SEQ ID NO: 3053963 - RNA, 19 nt, Artificial Sequence
  Description of Artificial Sequence: Synthetic oligonucleotide
cacgggaguccccacagcc

SEQ ID NO: 3053964 - RNA, 19 nt, Artificial Sequence
  Description of Artificial Sequence: Synthetic oligonucleotide
uagcaucacugacuuacgu

SEQ ID NO: 3053965 - RNA, 19 nt, Artificial Sequence
  Description of Artificial Sequence: Synthetic oligonucleotide
gaacagacauccugaaucu

SEQ ID NO: 3053966 - RNA, 19 nt, Artificial Sequence
  Description of Artificial Sequence: Synthetic oligonucleotide
acaucacgguuccacucuc

SEQ ID NO: 3053967 - RNA, 19 nt, Artificial Sequence
  Description of Artificial Sequence: Synthetic oligonucleotide
auucaguccaacugcugaa

SEQ ID NO: 3053968 - RNA, 19 nt, Artificial Sequence
  Description of Artificial Sequence: Synthetic oligonucleotide
acgugaugggaacuguaca

SEQ ID NO: 3053969 - RNA, 19 nt, Artificial Sequence
  Description of Artificial Sequence: Synthetic oligonucleotide
agccuuacuuaugggaauc

SEQ ID NO: 3053970 - RNA, 19 nt, Artificial Sequence
  Description of Artificial Sequence: Synthetic oligonucleotide
acuuacgugaugggaacug

SEQ ID NO: 3053971 - RNA, 19 nt, Artificial Sequence
  Description of Artificial Sequence: Synthetic oligonucleotide
aucacgguuccacucucug

SEQ ID NO: 3053972 - RNA, 19 nt, Artificial Sequence
  Description of Artificial Sequence: Synthetic oligonucleotide
auggucuucuuauuauuua

SEQ ID NO: 3053973 - RNA, 19 nt, Artificial Sequence
  Description of Artificial Sequence: Synthetic oligonucleotide
uccaacugcugaacagaca

SEQ ID NO: 3053974 - RNA, 19 nt, Artificial Sequence
  Description of Artificial Sequence: Synthetic oligonucleotide
auaagcgggguagauacaa

SEQ ID NO: 3053975 - RNA, 19 nt, Artificial Sequence
  Description of Artificial Sequence: Synthetic oligonucleotide
guuuucuacagccuuacuu

SEQ ID NO: 3053976 - RNA, 19 nt, Artificial Sequence
  Description of Artificial Sequence: Synthetic oligonucleotide
aguagcaguaggguuuucu

SEQ ID NO: 3053977 - RNA, 19 nt, Artificial Sequence
  Description of Artificial Sequence: Synthetic oligonucleotide
agcuguacccgaacucugc

SEQ ID NO: 3053978 - RNA, 19 nt, Artificial Sequence
  Description of Artificial Sequence: Synthetic oligonucleotide
aguccaacugcugaacaga

SEQ ID NO: 3053979 - RNA, 19 nt, Artificial Sequence
  Description of Artificial Sequence: Synthetic oligonucleotide
uaugggaauccgccucccc

SEQ ID NO: 3053980 - RNA, 19 nt, Artificial Sequence
  Description of Artificial Sequence: Synthetic oligonucleotide
uuacgugaugggaacugua

SEQ ID NO: 3053981 - RNA, 19 nt, Artificial Sequence
  Description of Artificial Sequence: Synthetic oligonucleotide
acaagacacaggcugccau

SEQ ID NO: 3053982 - RNA, 19 nt, Artificial Sequence
  Description of Artificial Sequence: Synthetic oligonucleotide
cuacagccuuacuuauggg

SEQ ID NO: 3053983 - RNA, 19 nt, Artificial Sequence
  Description of Artificial Sequence: Synthetic oligonucleotide
gcugccaucuuccugucug

SEQ ID NO: 3053984 - RNA, 19 nt, Artificial Sequence
  Description of Artificial Sequence: Synthetic oligonucleotide
uaccuguccuggucggccg

SEQ ID NO: 3053985 - RNA, 19 nt, Artificial Sequence
  Description of Artificial Sequence: Synthetic oligonucleotide
auagcaucacugacuuacg

SEQ ID NO: 3053986 - RNA, 19 nt, Artificial Sequence
  Description of Artificial Sequence: Synthetic oligonucleotide
acagccuuacuuaugggaa

SEQ ID NO: 3053987 - RNA, 19 nt, Artificial Sequence
  Description of Artificial Sequence: Synthetic oligonucleotide
cacgguuccacucucugga

SEQ ID NO: 3053988 - RNA, 19 nt, Artificial Sequence
  Description of Artificial Sequence: Synthetic oligonucleotide
caagacacaggcugccauc

SEQ ID NO: 3053989 - RNA, 19 nt, Artificial Sequence
  Description of Artificial Sequence: Synthetic oligonucleotide
cugaaucucaguagcagua

SEQ ID NO: 3053990 - RNA, 19 nt, Artificial Sequence
  Description of Artificial Sequence: Synthetic oligonucleotide
uucaguccaacugcugaac

SEQ ID NO: 3053991 - RNA, 19 nt, Artificial Sequence
  Description of Artificial Sequence: Synthetic oligonucleotide
aagccaucuccacgggagu

SEQ ID NO: 3053992 - RNA, 19 nt, Artificial Sequence
  Description of Artificial Sequence: Synthetic oligonucleotide
gaauccgccuccccucggc

SEQ ID NO: 3053993 - RNA, 19 nt, Artificial Sequence
  Description of Artificial Sequence: Synthetic oligonucleotide
gcgcaagccaucuccacgg

SEQ ID NO: 3053994 - RNA, 19 nt, Artificial Sequence
  Description of Artificial Sequence: Synthetic oligonucleotide
gucuucuuauuauuuaaau

SEQ ID NO: 3053995 - RNA, 19 nt, Artificial Sequence
  Description of Artificial Sequence: Synthetic oligonucleotide
cauauagcaucacugacuu

SEQ ID NO: 3053996 - RNA, 19 nt, Artificial Sequence
  Description of Artificial Sequence: Synthetic oligonucleotide
ggcgcaagccaucuccacg

SEQ ID NO: 3053997 - RNA, 19 nt, Artificial Sequence
  Description of Artificial Sequence: Synthetic oligonucleotide
gcaguaggguuuucuacag

SEQ ID NO: 3053998 - RNA, 19 nt, Artificial Sequence
  Description of Artificial Sequence: Synthetic oligonucleotide
guacaagacacaggcugcc

SEQ ID NO: 3053999 - RNA, 19 nt, Artificial Sequence
  Description of Artificial Sequence: Synthetic oligonucleotide
cugagcuguacccgaacuc

SEQ ID NO: 3054000 - RNA, 19 nt, Artificial Sequence
  Description of Artificial Sequence: Synthetic oligonucleotide
aauccgccuccccucggcu

SEQ ID NO: 3054001 - RNA, 19 nt, Artificial Sequence
  Description of Artificial Sequence: Synthetic oligonucleotide
uaagcgggguagauacaaa

SEQ ID NO: 3054002 - RNA, 19 nt, Artificial Sequence
  Description of Artificial Sequence: Synthetic oligonucleotide
ggguagauacaaauauacc

SEQ ID NO: 3054003 - RNA, 19 nt, Artificial Sequence
  Description of Artificial Sequence: Synthetic oligonucleotide
ucucuggaguacauuuguu

SEQ ID NO: 3054004 - RNA, 19 nt, Artificial Sequence
  Description of Artificial Sequence: Synthetic oligonucleotide
ugggaauccgccuccccuc

SEQ ID NO: 3054005 - RNA, 19 nt, Artificial Sequence
  Description of Artificial Sequence: Synthetic oligonucleotide
aauaagcgggguagauaca

SEQ ID NO: 3054006 - RNA, 19 nt, Artificial Sequence
  Description of Artificial Sequence: Synthetic oligonucleotide
guagcaguaggguuuucua

SEQ ID NO: 3054007 - RNA, 19 nt, Artificial Sequence
  Description of Artificial Sequence: Synthetic oligonucleotide
ugucugagcuguacccgaa

SEQ ID NO: 3054008 - RNA, 19 nt, Artificial Sequence
  Description of Artificial Sequence: Synthetic oligonucleotide
acgggaguccccacagccc

SEQ ID NO: 3054009 - RNA, 19 nt, Artificial Sequence
  Description of Artificial Sequence: Synthetic oligonucleotide
uauaccuguccuggucggc

SEQ ID NO: 3054010 - RNA, 19 nt, Artificial Sequence
  Description of Artificial Sequence: Synthetic oligonucleotide
uacaagacacaggcugcca

SEQ ID NO: 3054011 - RNA, 19 nt, Artificial Sequence
  Description of Artificial Sequence: Synthetic oligonucleotide
uuaugggaauccgccuccc

SEQ ID NO: 3054012 - RNA, 19 nt, Artificial Sequence
  Description of Artificial Sequence: Synthetic oligonucleotide
caguaggguuuucuacagc

SEQ ID NO: 3054013 - RNA, 19 nt, Artificial Sequence
  Description of Artificial Sequence: Synthetic oligonucleotide
uccacucucuggaguacau

SEQ ID NO: 3054014 - RNA, 19 nt, Artificial Sequence
  Description of Artificial Sequence: Synthetic oligonucleotide
acucucuggaguacauuug

SEQ ID NO: 3054015 - RNA, 19 nt, Artificial Sequence
  Description of Artificial Sequence: Synthetic oligonucleotide
ggcggcgcaagccaucucc

SEQ ID NO: 3054016 - RNA, 19 nt, Artificial Sequence
  Description of Artificial Sequence: Synthetic oligonucleotide
guccccacagccccgccag

SEQ ID NO: 3054017 - RNA, 19 nt, Artificial Sequence
  Description of Artificial Sequence: Synthetic oligonucleotide
acgguuccacucucuggag

SEQ ID NO: 3054018 - RNA, 19 nt, Artificial Sequence
  Description of Artificial Sequence: Synthetic oligonucleotide
agacauccugaaucucagu

SEQ ID NO: 3054019 - RNA, 19 nt, Artificial Sequence
  Description of Artificial Sequence: Synthetic oligonucleotide
ugccaucuuccugucugag

SEQ ID NO: 3054020 - RNA, 19 nt, Artificial Sequence
  Description of Artificial Sequence: Synthetic oligonucleotide
ugccucuguacugaacauc

SEQ ID NO: 3054021 - RNA, 19 nt, Artificial Sequence
  Description of Artificial Sequence: Synthetic oligonucleotide
cucaguagcaguaggguuu

SEQ ID NO: 3054022 - RNA, 19 nt, Artificial Sequence
  Description of Artificial Sequence: Synthetic oligonucleotide
ucaguagcaguaggguuuu

SEQ ID NO: 3054023 - RNA, 19 nt, Artificial Sequence
  Description of Artificial Sequence: Synthetic oligonucleotide
uggucggccggggaccgcg

SEQ ID NO: 3054024 - RNA, 19 nt, Artificial Sequence
  Description of Artificial Sequence: Synthetic oligonucleotide
caacugcugaacagacauc

SEQ ID NO: 3054025 - RNA, 19 nt, Artificial Sequence
  Description of Artificial Sequence: Synthetic oligonucleotide
ccuuacuuaugggaauccg

SEQ ID NO: 3054026 - RNA, 19 nt, Artificial Sequence
  Description of Artificial Sequence: Synthetic oligonucleotide
ucggccggggaccgcgcgg

SEQ ID NO: 3054027 - RNA, 19 nt, Artificial Sequence
  Description of Artificial Sequence: Synthetic oligonucleotide
guccaacugcugaacagac

SEQ ID NO: 3054028 - RNA, 19 nt, Artificial Sequence
  Description of Artificial Sequence: Synthetic oligonucleotide
gagcuguacccgaacucug

SEQ ID NO: 3054029 - RNA, 19 nt, Artificial Sequence
  Description of Artificial Sequence: Synthetic oligonucleotide
acuguacaagacacaggcu

SEQ ID NO: 3054030 - RNA, 19 nt, Artificial Sequence
  Description of Artificial Sequence: Synthetic oligonucleotide
aucuccacgggagucccca

SEQ ID NO: 3054031 - RNA, 19 nt, Artificial Sequence
  Description of Artificial Sequence: Synthetic oligonucleotide
cugucugagcuguacccga

SEQ ID NO: 3054032 - RNA, 19 nt, Artificial Sequence
  Description of Artificial Sequence: Synthetic oligonucleotide
accuguccuggucggccgg

SEQ ID NO: 3054033 - RNA, 19 nt, Artificial Sequence
  Description of Artificial Sequence: Synthetic oligonucleotide
gcuguacccgaacucugcc

SEQ ID NO: 3054034 - RNA, 19 nt, Artificial Sequence
  Description of Artificial Sequence: Synthetic oligonucleotide
uguccuggucggccgggga

SEQ ID NO: 3054035 - RNA, 19 nt, Artificial Sequence
  Description of Artificial Sequence: Synthetic oligonucleotide
uccuggucggccggggacc

SEQ ID NO: 3054036 - RNA, 19 nt, Artificial Sequence
  Description of Artificial Sequence: Synthetic oligonucleotide
uccgccuccccucggcuau

SEQ ID NO: 3054037 - RNA, 19 nt, Artificial Sequence
  Description of Artificial Sequence: Synthetic oligonucleotide
gccucuguacugaacauca

SEQ ID NO: 3054038 - RNA, 19 nt, Artificial Sequence
  Description of Artificial Sequence: Synthetic oligonucleotide
gggaauccgccuccccucg

SEQ ID NO: 3054039 - RNA, 19 nt, Artificial Sequence
  Description of Artificial Sequence: Synthetic oligonucleotide
cucucuggaguacauuugu

SEQ ID NO: 3054040 - RNA, 19 nt, Artificial Sequence
  Description of Artificial Sequence: Synthetic oligonucleotide
gucugagcuguacccgaac

SEQ ID NO: 3054041 - RNA, 19 nt, Artificial Sequence
  Description of Artificial Sequence: Synthetic oligonucleotide
auccugaaucucaguagca

SEQ ID NO: 3054042 - RNA, 19 nt, Artificial Sequence
  Description of Artificial Sequence: Synthetic oligonucleotide
cuccccucggcuauggucu

SEQ ID NO: 3054043 - RNA, 19 nt, Artificial Sequence
  Description of Artificial Sequence: Synthetic oligonucleotide
gguuccacucucuggagua

SEQ ID NO: 3054044 - RNA, 19 nt, Artificial Sequence
  Description of Artificial Sequence: Synthetic oligonucleotide
uacccgaacucugccucug

SEQ ID NO: 3054045 - RNA, 19 nt, Artificial Sequence
  Description of Artificial Sequence: Synthetic oligonucleotide
aguccccacagccccgcca

SEQ ID NO: 3054046 - RNA, 19 nt, Artificial Sequence
  Description of Artificial Sequence: Synthetic oligonucleotide
cucugccucuguacugaac

SEQ ID NO: 3054047 - RNA, 19 nt, Artificial Sequence
  Description of Artificial Sequence: Synthetic oligonucleotide
cucuggaguacauuuguuu

SEQ ID NO: 3054048 - RNA, 19 nt, Artificial Sequence
  Description of Artificial Sequence: Synthetic oligonucleotide
caaauauaccuguccuggu

SEQ ID NO: 3054049 - RNA, 19 nt, Artificial Sequence
  Description of Artificial Sequence: Synthetic oligonucleotide
ggcuauggucuucuuauua

SEQ ID NO: 3054050 - RNA, 19 nt, Artificial Sequence
  Description of Artificial Sequence: Synthetic oligonucleotide
ccugucugagcuguacccg

SEQ ID NO: 3054051 - RNA, 19 nt, Artificial Sequence
  Description of Artificial Sequence: Synthetic oligonucleotide
cacucucuggaguacauuu

SEQ ID NO: 3054052 - RNA, 19 nt, Artificial Sequence
  Description of Artificial Sequence: Synthetic oligonucleotide
auauagcaucacugacuua

SEQ ID NO: 3054053 - RNA, 19 nt, Artificial Sequence
  Description of Artificial Sequence: Synthetic oligonucleotide
ccgaacucugccucuguac

SEQ ID NO: 3054054 - RNA, 19 nt, Artificial Sequence
  Description of Artificial Sequence: Synthetic oligonucleotide
cuguacugaacaucacggu

SEQ ID NO: 3054055 - RNA, 19 nt, Artificial Sequence
  Description of Artificial Sequence: Synthetic oligonucleotide
acugcugaacagacauccu

SEQ ID NO: 3054056 - RNA, 19 nt, Artificial Sequence
  Description of Artificial Sequence: Synthetic oligonucleotide
guccuggucggccggggac

SEQ ID NO: 3054057 - RNA, 19 nt, Artificial Sequence
  Description of Artificial Sequence: Synthetic oligonucleotide
agcgggguagauacaaaua

SEQ ID NO: 3054058 - RNA, 19 nt, Artificial Sequence
  Description of Artificial Sequence: Synthetic oligonucleotide
gcuauggucuucuuauuau

SEQ ID NO: 3054059 - RNA, 19 nt, Artificial Sequence
  Description of Artificial Sequence: Synthetic oligonucleotide
ggguuuucuacagccuuac

SEQ ID NO: 3054060 - RNA, 19 nt, Artificial Sequence
  Description of Artificial Sequence: Synthetic oligonucleotide
cuauggucuucuuauuauu

SEQ ID NO: 3054061 - RNA, 19 nt, Artificial Sequence
  Description of Artificial Sequence: Synthetic oligonucleotide
ccaacugcugaacagacau

SEQ ID NO: 3054062 - RNA, 19 nt, Artificial Sequence
  Description of Artificial Sequence: Synthetic oligonucleotide
gcgggguagauacaaauau

SEQ ID NO: 3054063 - RNA, 19 nt, Artificial Sequence
  Description of Artificial Sequence: Synthetic oligonucleotide
ucuuccugucugagcugua

SEQ ID NO: 3054064 - RNA, 19 nt, Artificial Sequence
  Description of Artificial Sequence: Synthetic oligonucleotide
gcugaacagacauccugaa

SEQ ID NO: 3054065 - RNA, 19 nt, Artificial Sequence
  Description of Artificial Sequence: Synthetic oligonucleotide
aggguuuucuacagccuua

SEQ ID NO: 3054066 - RNA, 19 nt, Artificial Sequence
  Description of Artificial Sequence: Synthetic oligonucleotide
caucuccacgggagucccc

SEQ ID NO: 3054067 - RNA, 19 nt, Artificial Sequence
  Description of Artificial Sequence: Synthetic oligonucleotide
gccuuacuuaugggaaucc

SEQ ID NO: 3054068 - RNA, 19 nt, Artificial Sequence
  Description of Artificial Sequence: Synthetic oligonucleotide
cucggcuauggucuucuua

SEQ ID NO: 3054069 - RNA, 19 nt, Artificial Sequence
  Description of Artificial Sequence: Synthetic oligonucleotide
ggaauccgccuccccucgg

SEQ ID NO: 3054070 - RNA, 19 nt, Artificial Sequence
  Description of Artificial Sequence: Synthetic oligonucleotide
cgugaugggaacuguacaa

SEQ ID NO: 3054071 - RNA, 19 nt, Artificial Sequence
  Description of Artificial Sequence: Synthetic oligonucleotide
cugccaucuuccugucuga

SEQ ID NO: 3054072 - RNA, 19 nt, Artificial Sequence
  Description of Artificial Sequence: Synthetic oligonucleotide
acccgaacucugccucugu

SEQ ID NO: 3054073 - RNA, 19 nt, Artificial Sequence
  Description of Artificial Sequence: Synthetic oligonucleotide
guaggguuuucuacagccu

SEQ ID NO: 3054074 - RNA, 19 nt, Artificial Sequence
  Description of Artificial Sequence: Synthetic oligonucleotide
gucggccggggaccgcgcg

SEQ ID NO: 3054075 - RNA, 19 nt, Artificial Sequence
  Description of Artificial Sequence: Synthetic oligonucleotide
gacuuacgugaugggaacu

SEQ ID NO: 3054076 - RNA, 19 nt, Artificial Sequence
  Description of Artificial Sequence: Synthetic oligonucleotide
cuuacgugaugggaacugu

SEQ ID NO: 3054077 - RNA, 19 nt, Artificial Sequence
  Description of Artificial Sequence: Synthetic oligonucleotide
ccuccccucggcuaugguc

SEQ ID NO: 3054078 - RNA, 19 nt, Artificial Sequence
  Description of Artificial Sequence: Synthetic oligonucleotide
agacacaggcugccaucuu

SEQ ID NO: 3054079 - RNA, 19 nt, Artificial Sequence
  Description of Artificial Sequence: Synthetic oligonucleotide
gcauucaguccaacugcug

SEQ ID NO: 3054080 - RNA, 19 nt, Artificial Sequence
  Description of Artificial Sequence: Synthetic oligonucleotide
gggaacuguacaagacaca

SEQ ID NO: 3054081 - RNA, 19 nt, Artificial Sequence
  Description of Artificial Sequence: Synthetic oligonucleotide
acugaacaucacgguucca

SEQ ID NO: 3054082 - RNA, 19 nt, Artificial Sequence
  Description of Artificial Sequence: Synthetic oligonucleotide
cuguccuggucggccgggg

SEQ ID NO: 3054083 - RNA, 19 nt, Artificial Sequence
  Description of Artificial Sequence: Synthetic oligonucleotide
cgggaguccccacagcccc

SEQ ID NO: 3054084 - RNA, 19 nt, Artificial Sequence
  Description of Artificial Sequence: Synthetic oligonucleotide
cugaacagacauccugaau

SEQ ID NO: 3054085 - RNA, 19 nt, Artificial Sequence
  Description of Artificial Sequence: Synthetic oligonucleotide
cuguacccgaacucugccu

SEQ ID NO: 3054086 - RNA, 19 nt, Artificial Sequence
  Description of Artificial Sequence: Synthetic oligonucleotide
gaguccccacagccccgcc

SEQ ID NO: 3054087 - RNA, 19 nt, Artificial Sequence
  Description of Artificial Sequence: Synthetic oligonucleotide
cuccacgggaguccccaca

SEQ ID NO: 3054088 - RNA, 19 nt, Artificial Sequence
  Description of Artificial Sequence: Synthetic oligonucleotide
caucacugacuuacgugau

SEQ ID NO: 3054089 - RNA, 19 nt, Artificial Sequence
  Description of Artificial Sequence: Synthetic oligonucleotide
ccugaaucucaguagcagu

SEQ ID NO: 3054090 - RNA, 19 nt, Artificial Sequence
  Description of Artificial Sequence: Synthetic oligonucleotide
gcaagccaucuccacggga

SEQ ID NO: 3054091 - RNA, 19 nt, Artificial Sequence
  Description of Artificial Sequence: Synthetic oligonucleotide
ccucuguacugaacaucac

SEQ ID NO: 3054092 - RNA, 19 nt, Artificial Sequence
  Description of Artificial Sequence: Synthetic oligonucleotide
gaccgcgcggcggcgcaag

SEQ ID NO: 3054093 - RNA, 19 nt, Artificial Sequence
  Description of Artificial Sequence: Synthetic oligonucleotide
auccgccuccccucggcua

SEQ ID NO: 3054094 - RNA, 19 nt, Artificial Sequence
  Description of Artificial Sequence: Synthetic oligonucleotide
guacccgaacucugccucu

SEQ ID NO: 3054095 - RNA, 19 nt, Artificial Sequence
  Description of Artificial Sequence: Synthetic oligonucleotide
cagccuuacuuaugggaau

SEQ ID NO: 3054096 - RNA, 19 nt, Artificial Sequence
  Description of Artificial Sequence: Synthetic oligonucleotide
ccaucuccacgggaguccc

SEQ ID NO: 3054097 - RNA, 19 nt, Artificial Sequence
  Description of Artificial Sequence: Synthetic oligonucleotide
caucacgguuccacucucu

SEQ ID NO: 3054098 - RNA, 19 nt, Artificial Sequence
  Description of Artificial Sequence: Synthetic oligonucleotide
gggaguccccacagccccg

SEQ ID NO: 3054099 - RNA, 19 nt, Artificial Sequence
  Description of Artificial Sequence: Synthetic oligonucleotide
gguuuucuacagccuuacu

SEQ ID NO: 3054100 - RNA, 19 nt, Artificial Sequence
  Description of Artificial Sequence: Synthetic oligonucleotide
uccccucggcuauggucuu

SEQ ID NO: 3054101 - RNA, 19 nt, Artificial Sequence
  Description of Artificial Sequence: Synthetic oligonucleotide
cgaacucugccucuguacu

SEQ ID NO: 3054102 - RNA, 19 nt, Artificial Sequence
  Description of Artificial Sequence: Synthetic oligonucleotide
cgggguagauacaaauaua

SEQ ID NO: 3054103 - RNA, 19 nt, Artificial Sequence
  Description of Artificial Sequence: Synthetic oligonucleotide
cgcaagccaucuccacggg

SEQ ID NO: 3054104 - RNA, 19 nt, Artificial Sequence
  Description of Artificial Sequence: Synthetic oligonucleotide
ccacgggaguccccacagc

SEQ ID NO: 3054105 - RNA, 19 nt, Artificial Sequence
  Description of Artificial Sequence: Synthetic oligonucleotide
ccggggaccgcgcggcggc

SEQ ID NO: 3054106 - RNA, 19 nt, Artificial Sequence
  Description of Artificial Sequence: Synthetic oligonucleotide
caguagcaguaggguuuuc

SEQ ID NO: 3054107 - RNA, 19 nt, Artificial Sequence
  Description of Artificial Sequence: Synthetic oligonucleotide
gccggggaccgcgcggcgg

SEQ ID NO: 3054108 - RNA, 19 nt, Artificial Sequence
  Description of Artificial Sequence: Synthetic oligonucleotide
cuggucggccggggaccgc

SEQ ID NO: 3054109 - RNA, 19 nt, Artificial Sequence
  Description of Artificial Sequence: Synthetic oligonucleotide
gcggcgcaagccaucucca

SEQ ID NO: 3054110 - RNA, 19 nt, Artificial Sequence
  Description of Artificial Sequence: Synthetic oligonucleotide
ggccggggaccgcgcggcg

SEQ ID NO: 3054111 - RNA, 19 nt, Artificial Sequence
  Description of Artificial Sequence: Synthetic oligonucleotide
gggaccgcgcggcggcgca

SEQ ID NO: 3054112 - RNA, 19 nt, Artificial Sequence
  Description of Artificial Sequence: Synthetic oligonucleotide
cggcgcaagccaucuccac

SEQ ID NO: 3054113 - RNA, 19 nt, Artificial Sequence
  Description of Artificial Sequence: Synthetic oligonucleotide
cccgaacucugccucugua

SEQ ID NO: 3054114 - RNA, 19 nt, Artificial Sequence
  Description of Artificial Sequence: Synthetic oligonucleotide
ggggaccgcgcggcggcgc

SEQ ID NO: 3054115 - RNA, 19 nt, Artificial Sequence
  Description of Artificial Sequence: Synthetic oligonucleotide
ggucggccggggaccgcgc

SEQ ID NO: 3054116 - RNA, 19 nt, Artificial Sequence
  Description of Artificial Sequence: Synthetic oligonucleotide
ggcugccaucuuccugucu

SEQ ID NO: 3054117 - RNA, 19 nt, Artificial Sequence
  Description of Artificial Sequence: Synthetic oligonucleotide
ccgcgcggcggcgcaagcc

SEQ ID NO: 3054118 - RNA, 19 nt, Artificial Sequence
  Description of Artificial Sequence: Synthetic oligonucleotide
cgcgcggcggcgcaagcca

SEQ ID NO: 3054119 - RNA, 19 nt, Artificial Sequence
  Description of Artificial Sequence: Synthetic oligonucleotide
gcggcggcgcaagccaucu

SEQ ID NO: 3054120 - RNA, 19 nt, Artificial Sequence
  Description of Artificial Sequence: Synthetic oligonucleotide
cgccuccccucggcuaugg

SEQ ID NO: 3054121 - RNA, 19 nt, Artificial Sequence
  Description of Artificial Sequence: Synthetic oligonucleotide
cgguuccacucucuggagu

SEQ ID NO: 3054122 - RNA, 19 nt, Artificial Sequence
  Description of Artificial Sequence: Synthetic oligonucleotide
cgcggcggcgcaagccauc

SEQ ID NO: 3054123 - RNA, 19 nt, Artificial Sequence
  Description of Artificial Sequence: Synthetic oligonucleotide
cccucggcuauggucuucu

SEQ ID NO: 3054124 - RNA, 19 nt, Artificial Sequence
  Description of Artificial Sequence: Synthetic oligonucleotide
ccccucggcuauggucuuc

SEQ ID NO: 3054125 - RNA, 19 nt, Artificial Sequence
  Description of Artificial Sequence: Synthetic oligonucleotide
gccuccccucggcuauggu

SEQ ID NO: 3054126 - RNA, 19 nt, Artificial Sequence
  Description of Artificial Sequence: Synthetic oligonucleotide
ccacucucuggaguacauu

SEQ ID NO: 3054127 - RNA, 19 nt, Artificial Sequence
  Description of Artificial Sequence: Synthetic oligonucleotide
ccgccuccccucggcuaug

SEQ ID NO: 3054128 - RNA, 19 nt, Artificial Sequence
  Description of Artificial Sequence: Synthetic oligonucleotide
ggaccgcgcggcggcgcaa

SEQ ID NO: 3054129 - RNA, 19 nt, Artificial Sequence
  Description of Artificial Sequence: Synthetic oligonucleotide
cggggaccgcgcggcggcg

SEQ ID NO: 3054130 - RNA, 19 nt, Artificial Sequence
  Description of Artificial Sequence: Synthetic oligonucleotide
cggcuauggucuucuuauu

SEQ ID NO: 3054131 - RNA, 19 nt, Artificial Sequence
  Description of Artificial Sequence: Synthetic oligonucleotide
cggcggcgcaagccaucuc

SEQ ID NO: 3054132 - RNA, 19 nt, Artificial Sequence
  Description of Artificial Sequence: Synthetic oligonucleotide
ccucggcuauggucuucuu

SEQ ID NO: 3054133 - RNA, 19 nt, Artificial Sequence
  Description of Artificial Sequence: Synthetic oligonucleotide
gcgcggcggcgcaagccau

SEQ ID NO: 3054134 - RNA, 19 nt, Artificial Sequence
  Description of Artificial Sequence: Synthetic oligonucleotide
uaaagcacagcccucagca

SEQ ID NO: 3054135 - RNA, 19 nt, Artificial Sequence
  Description of Artificial Sequence: Synthetic oligonucleotide
agagagucauagcacagcc

SEQ ID NO: 3054136 - RNA, 19 nt, Artificial Sequence
  Description of Artificial Sequence: Synthetic oligonucleotide
agugccaggaacuaaagca

SEQ ID NO: 3054137 - RNA, 19 nt, Artificial Sequence
  Description of Artificial Sequence: Synthetic oligonucleotide
ugaugauuguggcaggagg

SEQ ID NO: 3054138 - RNA, 19 nt, Artificial Sequence
  Description of Artificial Sequence: Synthetic oligonucleotide
cauagcacagcccucagcg

SEQ ID NO: 3054139 - RNA, 19 nt, Artificial Sequence
  Description of Artificial Sequence: Synthetic oligonucleotide
agucaugagcuucaagccc

SEQ ID NO: 3054140 - RNA, 19 nt, Artificial Sequence
  Description of Artificial Sequence: Synthetic oligonucleotide
auugggauccuccaggaag

SEQ ID NO: 3054141 - RNA, 19 nt, Artificial Sequence
  Description of Artificial Sequence: Synthetic oligonucleotide
aagaggaugugcucccagc

SEQ ID NO: 3054142 - RNA, 19 nt, Artificial Sequence
  Description of Artificial Sequence: Synthetic oligonucleotide
aagugccaggaacuaaagc

SEQ ID NO: 3054143 - RNA, 19 nt, Artificial Sequence
  Description of Artificial Sequence: Synthetic oligonucleotide
uccauugggauccuccagg

SEQ ID NO: 3054144 - RNA, 19 nt, Artificial Sequence
  Description of Artificial Sequence: Synthetic oligonucleotide
ugugucaagaaguuguccu

SEQ ID NO: 3054145 - RNA, 19 nt, Artificial Sequence
  Description of Artificial Sequence: Synthetic oligonucleotide
agagucauagcacagcccu

SEQ ID NO: 3054146 - RNA, 19 nt, Artificial Sequence
  Description of Artificial Sequence: Synthetic oligonucleotide
guuaaggccuugcugagcc

SEQ ID NO: 3054147 - RNA, 19 nt, Artificial Sequence
  Description of Artificial Sequence: Synthetic oligonucleotide
ucaagccccacacuggacc

SEQ ID NO: 3054148 - RNA, 19 nt, Artificial Sequence
  Description of Artificial Sequence: Synthetic oligonucleotide
ugaccagacaguccauugg

SEQ ID NO: 3054149 - RNA, 19 nt, Artificial Sequence
  Description of Artificial Sequence: Synthetic oligonucleotide
aagaaguuguccugaccag

SEQ ID NO: 3054150 - RNA, 19 nt, Artificial Sequence
  Description of Artificial Sequence: Synthetic oligonucleotide
gaccagacaguccauuggg

SEQ ID NO: 3054151 - RNA, 19 nt, Artificial Sequence
  Description of Artificial Sequence: Synthetic oligonucleotide
aggaugugcucccagcugg

SEQ ID NO: 3054152 - RNA, 19 nt, Artificial Sequence
  Description of Artificial Sequence: Synthetic oligonucleotide
uagcacagcccucagcggg

SEQ ID NO: 3054153 - RNA, 19 nt, Artificial Sequence
  Description of Artificial Sequence: Synthetic oligonucleotide
caagaaguuguccugacca

SEQ ID NO: 3054154 - RNA, 19 nt, Artificial Sequence
  Description of Artificial Sequence: Synthetic oligonucleotide
uugccguccagucaugagc

SEQ ID NO: 3054155 - RNA, 19 nt, Artificial Sequence
  Description of Artificial Sequence: Synthetic oligonucleotide
uguggcaggaggugaagag

SEQ ID NO: 3054156 - RNA, 19 nt, Artificial Sequence
  Description of Artificial Sequence: Synthetic oligonucleotide
cuugcuauccaggauggcc

SEQ ID NO: 3054157 - RNA, 19 nt, Artificial Sequence
  Description of Artificial Sequence: Synthetic oligonucleotide
uccaggaagugccaggaac

SEQ ID NO: 3054158 - RNA, 19 nt, Artificial Sequence
  Description of Artificial Sequence: Synthetic oligonucleotide
ucaagaaguuguccugacc

SEQ ID NO: 3054159 - RNA, 19 nt, Artificial Sequence
  Description of Artificial Sequence: Synthetic oligonucleotide
uugcuauccaggauggccu

SEQ ID NO: 3054160 - RNA, 19 nt, Artificial Sequence
  Description of Artificial Sequence: Synthetic oligonucleotide
cagucaugagcuucaagcc

SEQ ID NO: 3054161 - RNA, 19 nt, Artificial Sequence
  Description of Artificial Sequence: Synthetic oligonucleotide
cugcaggugaugauugugg

SEQ ID NO: 3054162 - RNA, 19 nt, Artificial Sequence
  Description of Artificial Sequence: Synthetic oligonucleotide
caggugaugauuguggcag

SEQ ID NO: 3054163 - RNA, 19 nt, Artificial Sequence
  Description of Artificial Sequence: Synthetic oligonucleotide
ugugauguccggccgguca

SEQ ID NO: 3054164 - RNA, 19 nt, Artificial Sequence
  Description of Artificial Sequence: Synthetic oligonucleotide
aacuaaagcacagcccuca

SEQ ID NO: 3054165 - RNA, 19 nt, Artificial Sequence
  Description of Artificial Sequence: Synthetic oligonucleotide
uccaggauggccuuccagu

SEQ ID NO: 3054166 - RNA, 19 nt, Artificial Sequence
  Description of Artificial Sequence: Synthetic oligonucleotide
aggagagagucauagcaca

SEQ ID NO: 3054167 - RNA, 19 nt, Artificial Sequence
  Description of Artificial Sequence: Synthetic oligonucleotide
uggcaggaggugaagagga

SEQ ID NO: 3054168 - RNA, 19 nt, Artificial Sequence
  Description of Artificial Sequence: Synthetic oligonucleotide
cagguuaaggccuugcuga

SEQ ID NO: 3054169 - RNA, 19 nt, Artificial Sequence
  Description of Artificial Sequence: Synthetic oligonucleotide
aggaaaaggggaguguguc

SEQ ID NO: 3054170 - RNA, 19 nt, Artificial Sequence
  Description of Artificial Sequence: Synthetic oligonucleotide
uugggauccuccaggaagu

SEQ ID NO: 3054171 - RNA, 19 nt, Artificial Sequence
  Description of Artificial Sequence: Synthetic oligonucleotide
gaccaggagagagucauag

SEQ ID NO: 3054172 - RNA, 19 nt, Artificial Sequence
  Description of Artificial Sequence: Synthetic oligonucleotide
acuggaccaggagagaguc

SEQ ID NO: 3054173 - RNA, 19 nt, Artificial Sequence
  Description of Artificial Sequence: Synthetic oligonucleotide
accaggagagagucauagc

SEQ ID NO: 3054174 - RNA, 19 nt, Artificial Sequence
  Description of Artificial Sequence: Synthetic oligonucleotide
aggggagugugucaagaag

SEQ ID NO: 3054175 - RNA, 19 nt, Artificial Sequence
  Description of Artificial Sequence: Synthetic oligonucleotide
ugugcucccagcuggggug

SEQ ID NO: 3054176 - RNA, 19 nt, Artificial Sequence
  Description of Artificial Sequence: Synthetic oligonucleotide
aaaggggagugugucaaga

SEQ ID NO: 3054177 - RNA, 19 nt, Artificial Sequence
  Description of Artificial Sequence: Synthetic oligonucleotide
gucaugagcuucaagcccc

SEQ ID NO: 3054178 - RNA, 19 nt, Artificial Sequence
  Description of Artificial Sequence: Synthetic oligonucleotide
acgaguggagucuccggcg

SEQ ID NO: 3054179 - RNA, 19 nt, Artificial Sequence
  Description of Artificial Sequence: Synthetic oligonucleotide
gaagaggaugugcucccag

SEQ ID NO: 3054180 - RNA, 19 nt, Artificial Sequence
  Description of Artificial Sequence: Synthetic oligonucleotide
ugucaagaaguuguccuga

SEQ ID NO: 3054181 - RNA, 19 nt, Artificial Sequence
  Description of Artificial Sequence: Synthetic oligonucleotide
ucagccccugugauguccg

SEQ ID NO: 3054182 - RNA, 19 nt, Artificial Sequence
  Description of Artificial Sequence: Synthetic oligonucleotide
ugccguccagucaugagcu

SEQ ID NO: 3054183 - RNA, 19 nt, Artificial Sequence
  Description of Artificial Sequence: Synthetic oligonucleotide
ucaucugcccacgagugga

SEQ ID NO: 3054184 - RNA, 19 nt, Artificial Sequence
  Description of Artificial Sequence: Synthetic oligonucleotide
ucagcaggcuguuugccgu

SEQ ID NO: 3054185 - RNA, 19 nt, Artificial Sequence
  Description of Artificial Sequence: Synthetic oligonucleotide
cucagcaggcuguuugccg

SEQ ID NO: 3054186 - RNA, 19 nt, Artificial Sequence
  Description of Artificial Sequence: Synthetic oligonucleotide
caguccauugggauccucc

SEQ ID NO: 3054187 - RNA, 19 nt, Artificial Sequence
  Description of Artificial Sequence: Synthetic oligonucleotide
uuugccguccagucaugag

SEQ ID NO: 3054188 - RNA, 19 nt, Artificial Sequence
  Description of Artificial Sequence: Synthetic oligonucleotide
ugccaggaacuaaagcaca

SEQ ID NO: 3054189 - RNA, 19 nt, Artificial Sequence
  Description of Artificial Sequence: Synthetic oligonucleotide
agaggaugugcucccagcu

SEQ ID NO: 3054190 - RNA, 19 nt, Artificial Sequence
  Description of Artificial Sequence: Synthetic oligonucleotide
caggagagagucauagcac

SEQ ID NO: 3054191 - RNA, 19 nt, Artificial Sequence
  Description of Artificial Sequence: Synthetic oligonucleotide
cuuccagucaucugcccac

SEQ ID NO: 3054192 - RNA, 19 nt, Artificial Sequence
  Description of Artificial Sequence: Synthetic oligonucleotide
gaaguuguccugaccagac

SEQ ID NO: 3054193 - RNA, 19 nt, Artificial Sequence
  Description of Artificial Sequence: Synthetic oligonucleotide
uaaggccuugcugagccag

SEQ ID NO: 3054194 - RNA, 19 nt, Artificial Sequence
  Description of Artificial Sequence: Synthetic oligonucleotide
ggaacuaaagcacagcccu

SEQ ID NO: 3054195 - RNA, 19 nt, Artificial Sequence
  Description of Artificial Sequence: Synthetic oligonucleotide
auagcacagcccucagcgg

SEQ ID NO: 3054196 - RNA, 19 nt, Artificial Sequence
  Description of Artificial Sequence: Synthetic oligonucleotide
uguccugaccagacagucc

SEQ ID NO: 3054197 - RNA, 19 nt, Artificial Sequence
  Description of Artificial Sequence: Synthetic oligonucleotide
ucauagcacagcccucagc

SEQ ID NO: 3054198 - RNA, 19 nt, Artificial Sequence
  Description of Artificial Sequence: Synthetic oligonucleotide
gagagagucauagcacagc

SEQ ID NO: 3054199 - RNA, 19 nt, Artificial Sequence
  Description of Artificial Sequence: Synthetic oligonucleotide
cuaaagcacagcccucagc

SEQ ID NO: 3054200 - RNA, 19 nt, Artificial Sequence
  Description of Artificial Sequence: Synthetic oligonucleotide
aggugaagaggaugugcuc

SEQ ID NO: 3054201 - RNA, 19 nt, Artificial Sequence
  Description of Artificial Sequence: Synthetic oligonucleotide
acuaaagcacagcccucag

SEQ ID NO: 3054202 - RNA, 19 nt, Artificial Sequence
  Description of Artificial Sequence: Synthetic oligonucleotide
guccugaccagacagucca

SEQ ID NO: 3054203 - RNA, 19 nt, Artificial Sequence
  Description of Artificial Sequence: Synthetic oligonucleotide
aaguuguccugaccagaca

SEQ ID NO: 3054204 - RNA, 19 nt, Artificial Sequence
  Description of Artificial Sequence: Synthetic oligonucleotide
cacgaguggagucuccggc

SEQ ID NO: 3054205 - RNA, 19 nt, Artificial Sequence
  Description of Artificial Sequence: Synthetic oligonucleotide
uccagucaugagcuucaag

SEQ ID NO: 3054206 - RNA, 19 nt, Artificial Sequence
  Description of Artificial Sequence: Synthetic oligonucleotide
gagugugucaagaaguugu

SEQ ID NO: 3054207 - RNA, 19 nt, Artificial Sequence
  Description of Artificial Sequence: Synthetic oligonucleotide
cugaccagacaguccauug

SEQ ID NO: 3054208 - RNA, 19 nt, Artificial Sequence
  Description of Artificial Sequence: Synthetic oligonucleotide
aguccauugggauccucca

SEQ ID NO: 3054209 - RNA, 19 nt, Artificial Sequence
  Description of Artificial Sequence: Synthetic oligonucleotide
agugugucaagaaguuguc

SEQ ID NO: 3054210 - RNA, 19 nt, Artificial Sequence
  Description of Artificial Sequence: Synthetic oligonucleotide
uggaccaggagagagucau

SEQ ID NO: 3054211 - RNA, 19 nt, Artificial Sequence
  Description of Artificial Sequence: Synthetic oligonucleotide
aaggggagugugucaagaa

SEQ ID NO: 3054212 - RNA, 19 nt, Artificial Sequence
  Description of Artificial Sequence: Synthetic oligonucleotide
gaggaugugcucccagcug

SEQ ID NO: 3054213 - RNA, 19 nt, Artificial Sequence
  Description of Artificial Sequence: Synthetic oligonucleotide
agucauagcacagcccuca

SEQ ID NO: 3054214 - RNA, 19 nt, Artificial Sequence
  Description of Artificial Sequence: Synthetic oligonucleotide
agguuaaggccuugcugag

SEQ ID NO: 3054215 - RNA, 19 nt, Artificial Sequence
  Description of Artificial Sequence: Synthetic oligonucleotide
gaagugccaggaacuaaag

SEQ ID NO: 3054216 - RNA, 19 nt, Artificial Sequence
  Description of Artificial Sequence: Synthetic oligonucleotide
uguccggccggucaucuau

SEQ ID NO: 3054217 - RNA, 19 nt, Artificial Sequence
  Description of Artificial Sequence: Synthetic oligonucleotide
acacuggaccaggagagag

SEQ ID NO: 3054218 - RNA, 19 nt, Artificial Sequence
  Description of Artificial Sequence: Synthetic oligonucleotide
ggauccuccaggaagugcc

SEQ ID NO: 3054219 - RNA, 19 nt, Artificial Sequence
  Description of Artificial Sequence: Synthetic oligonucleotide
gucaucugcccacgagugg

SEQ ID NO: 3054220 - RNA, 19 nt, Artificial Sequence
  Description of Artificial Sequence: Synthetic oligonucleotide
cuugcugagccaggaaaag

SEQ ID NO: 3054221 - RNA, 19 nt, Artificial Sequence
  Description of Artificial Sequence: Synthetic oligonucleotide
agaaguuguccugaccaga

SEQ ID NO: 3054222 - RNA, 19 nt, Artificial Sequence
  Description of Artificial Sequence: Synthetic oligonucleotide
aggugaugauuguggcagg

SEQ ID NO: 3054223 - RNA, 19 nt, Artificial Sequence
  Description of Artificial Sequence: Synthetic oligonucleotide
cuauccaggauggccuucc

SEQ ID NO: 3054224 - RNA, 19 nt, Artificial Sequence
  Description of Artificial Sequence: Synthetic oligonucleotide
aggauggccuuccagucau

SEQ ID NO: 3054225 - RNA, 19 nt, Artificial Sequence
  Description of Artificial Sequence: Synthetic oligonucleotide
agucaucugcccacgagug

SEQ ID NO: 3054226 - RNA, 19 nt, Artificial Sequence
  Description of Artificial Sequence: Synthetic oligonucleotide
gaugauuguggcaggaggu

SEQ ID NO: 3054227 - RNA, 19 nt, Artificial Sequence
  Description of Artificial Sequence: Synthetic oligonucleotide
uuguccugaccagacaguc

SEQ ID NO: 3054228 - RNA, 19 nt, Artificial Sequence
  Description of Artificial Sequence: Synthetic oligonucleotide
gagagucauagcacagccc

SEQ ID NO: 3054229 - RNA, 19 nt, Artificial Sequence
  Description of Artificial Sequence: Synthetic oligonucleotide
gugccaggaacuaaagcac

SEQ ID NO: 3054230 - RNA, 19 nt, Artificial Sequence
  Description of Artificial Sequence: Synthetic oligonucleotide
gucaagaaguuguccugac

SEQ ID NO: 3054231 - RNA, 19 nt, Artificial Sequence
  Description of Artificial Sequence: Synthetic oligonucleotide
aguggagucuccggcgagg

SEQ ID NO: 3054232 - RNA, 19 nt, Artificial Sequence
  Description of Artificial Sequence: Synthetic oligonucleotide
auccaggauggccuuccag

SEQ ID NO: 3054233 - RNA, 19 nt, Artificial Sequence
  Description of Artificial Sequence: Synthetic oligonucleotide
ucaugagcuucaagcccca

SEQ ID NO: 3054234 - RNA, 19 nt, Artificial Sequence
  Description of Artificial Sequence: Synthetic oligonucleotide
ucugcccacgaguggaguc

SEQ ID NO: 3054235 - RNA, 19 nt, Artificial Sequence
  Description of Artificial Sequence: Synthetic oligonucleotide
ccaggagagagucauagca

SEQ ID NO: 3054236 - RNA, 19 nt, Artificial Sequence
  Description of Artificial Sequence: Synthetic oligonucleotide
guccauugggauccuccag

SEQ ID NO: 3054237 - RNA, 19 nt, Artificial Sequence
  Description of Artificial Sequence: Synthetic oligonucleotide
uucaagccccacacuggac

SEQ ID NO: 3054238 - RNA, 19 nt, Artificial Sequence
  Description of Artificial Sequence: Synthetic oligonucleotide
uuccagucaucugcccacg

SEQ ID NO: 3054239 - RNA, 19 nt, Artificial Sequence
  Description of Artificial Sequence: Synthetic oligonucleotide
uggagucuccggcgagggg

SEQ ID NO: 3054240 - RNA, 19 nt, Artificial Sequence
  Description of Artificial Sequence: Synthetic oligonucleotide
gugaugauuguggcaggag

SEQ ID NO: 3054241 - RNA, 19 nt, Artificial Sequence
  Description of Artificial Sequence: Synthetic oligonucleotide
cuucaagccccacacugga

SEQ ID NO: 3054242 - RNA, 19 nt, Artificial Sequence
  Description of Artificial Sequence: Synthetic oligonucleotide
ggaggugaagaggaugugc

SEQ ID NO: 3054243 - RNA, 19 nt, Artificial Sequence
  Description of Artificial Sequence: Synthetic oligonucleotide
gugugucaagaaguugucc

SEQ ID NO: 3054244 - RNA, 19 nt, Artificial Sequence
  Description of Artificial Sequence: Synthetic oligonucleotide
acagcccucagcggggccg

SEQ ID NO: 3054245 - RNA, 19 nt, Artificial Sequence
  Description of Artificial Sequence: Synthetic oligonucleotide
cuggggugugggcucagcc

SEQ ID NO: 3054246 - RNA, 19 nt, Artificial Sequence
  Description of Artificial Sequence: Synthetic oligonucleotide
gaggugaagaggaugugcu

SEQ ID NO: 3054247 - RNA, 19 nt, Artificial Sequence
  Description of Artificial Sequence: Synthetic oligonucleotide
agcaggcuguuugccgucc

SEQ ID NO: 3054248 - RNA, 19 nt, Artificial Sequence
  Description of Artificial Sequence: Synthetic oligonucleotide
uguuugccguccagucaug

SEQ ID NO: 3054249 - RNA, 19 nt, Artificial Sequence
  Description of Artificial Sequence: Synthetic oligonucleotide
uuguggcaggaggugaaga

SEQ ID NO: 3054250 - RNA, 19 nt, Artificial Sequence
  Description of Artificial Sequence: Synthetic oligonucleotide
aaggccuugcugagccagg

SEQ ID NO: 3054251 - RNA, 19 nt, Artificial Sequence
  Description of Artificial Sequence: Synthetic oligonucleotide
auggccuuccagucaucug

SEQ ID NO: 3054252 - RNA, 19 nt, Artificial Sequence
  Description of Artificial Sequence: Synthetic oligonucleotide
uucagcugcaggugaugau

SEQ ID NO: 3054253 - RNA, 19 nt, Artificial Sequence
  Description of Artificial Sequence: Synthetic oligonucleotide
gaguggagucuccggcgag

SEQ ID NO: 3054254 - RNA, 19 nt, Artificial Sequence
  Description of Artificial Sequence: Synthetic oligonucleotide
agcggggccgcuugcuauc

SEQ ID NO: 3054255 - RNA, 19 nt, Artificial Sequence
  Description of Artificial Sequence: Synthetic oligonucleotide
ggggugugggcucagcccc

SEQ ID NO: 3054256 - RNA, 19 nt, Artificial Sequence
  Description of Artificial Sequence: Synthetic oligonucleotide
uuaaggccuugcugagcca

SEQ ID NO: 3054257 - RNA, 19 nt, Artificial Sequence
  Description of Artificial Sequence: Synthetic oligonucleotide
gucauagcacagcccucag

SEQ ID NO: 3054258 - RNA, 19 nt, Artificial Sequence
  Description of Artificial Sequence: Synthetic oligonucleotide
ugaagaggaugugcuccca

SEQ ID NO: 3054259 - RNA, 19 nt, Artificial Sequence
  Description of Artificial Sequence: Synthetic oligonucleotide
uccagucaucugcccacga

SEQ ID NO: 3054260 - RNA, 19 nt, Artificial Sequence
  Description of Artificial Sequence: Synthetic oligonucleotide
uauccaggauggccuucca

SEQ ID NO: 3054261 - RNA, 19 nt, Artificial Sequence
  Description of Artificial Sequence: Synthetic oligonucleotide
agccccugugauguccggc

SEQ ID NO: 3054262 - RNA, 19 nt, Artificial Sequence
  Description of Artificial Sequence: Synthetic oligonucleotide
agccaggaaaaggggagug

SEQ ID NO: 3054263 - RNA, 19 nt, Artificial Sequence
  Description of Artificial Sequence: Synthetic oligonucleotide
gcuucaagccccacacugg

SEQ ID NO: 3054264 - RNA, 19 nt, Artificial Sequence
  Description of Artificial Sequence: Synthetic oligonucleotide
caggaggugaagaggaugu

SEQ ID NO: 3054265 - RNA, 19 nt, Artificial Sequence
  Description of Artificial Sequence: Synthetic oligonucleotide
cucagccccugugaugucc

SEQ ID NO: 3054266 - RNA, 19 nt, Artificial Sequence
  Description of Artificial Sequence: Synthetic oligonucleotide
ggagagagucauagcacag

SEQ ID NO: 3054267 - RNA, 19 nt, Artificial Sequence
  Description of Artificial Sequence: Synthetic oligonucleotide
guggagucuccggcgaggg

SEQ ID NO: 3054268 - RNA, 19 nt, Artificial Sequence
  Description of Artificial Sequence: Synthetic oligonucleotide
ggaaaaggggaguguguca

SEQ ID NO: 3054269 - RNA, 19 nt, Artificial Sequence
  Description of Artificial Sequence: Synthetic oligonucleotide
caucugcccacgaguggag

SEQ ID NO: 3054270 - RNA, 19 nt, Artificial Sequence
  Description of Artificial Sequence: Synthetic oligonucleotide
agcacagcccucagcgggg

SEQ ID NO: 3054271 - RNA, 19 nt, Artificial Sequence
  Description of Artificial Sequence: Synthetic oligonucleotide
ccgcuugcuauccaggaug

SEQ ID NO: 3054272 - RNA, 19 nt, Artificial Sequence
  Description of Artificial Sequence: Synthetic oligonucleotide
ggaagugccaggaacuaaa

SEQ ID NO: 3054273 - RNA, 19 nt, Artificial Sequence
  Description of Artificial Sequence: Synthetic oligonucleotide
agcugcaggugaugauugu

SEQ ID NO: 3054274 - RNA, 19 nt, Artificial Sequence
  Description of Artificial Sequence: Synthetic oligonucleotide
uccggccggucaucuauga

SEQ ID NO: 3054275 - RNA, 19 nt, Artificial Sequence
  Description of Artificial Sequence: Synthetic oligonucleotide
cuucagcugcaggugauga

SEQ ID NO: 3054276 - RNA, 19 nt, Artificial Sequence
  Description of Artificial Sequence: Synthetic oligonucleotide
caagccccacacuggacca

SEQ ID NO: 3054277 - RNA, 19 nt, Artificial Sequence
  Description of Artificial Sequence: Synthetic oligonucleotide
ggagugugucaagaaguug

SEQ ID NO: 3054278 - RNA, 19 nt, Artificial Sequence
  Description of Artificial Sequence: Synthetic oligonucleotide
ggcuguuugccguccaguc

SEQ ID NO: 3054279 - RNA, 19 nt, Artificial Sequence
  Description of Artificial Sequence: Synthetic oligonucleotide
acagcccucagcaggcugu

SEQ ID NO: 3054280 - RNA, 19 nt, Artificial Sequence
  Description of Artificial Sequence: Synthetic oligonucleotide
ccaggaaaaggggagugug

SEQ ID NO: 3054281 - RNA, 19 nt, Artificial Sequence
  Description of Artificial Sequence: Synthetic oligonucleotide
ugcuauccaggauggccuu

SEQ ID NO: 3054282 - RNA, 19 nt, Artificial Sequence
  Description of Artificial Sequence: Synthetic oligonucleotide
gcccucagcaggcuguuug

SEQ ID NO: 3054283 - RNA, 19 nt, Artificial Sequence
  Description of Artificial Sequence: Synthetic oligonucleotide
caggcuguuugccguccag

SEQ ID NO: 3054284 - RNA, 19 nt, Artificial Sequence
  Description of Artificial Sequence: Synthetic oligonucleotide
gccaggaacuaaagcacag

SEQ ID NO: 3054285 - RNA, 19 nt, Artificial Sequence
  Description of Artificial Sequence: Synthetic oligonucleotide
ucagcggggccgcuugcua

SEQ ID NO: 3054286 - RNA, 19 nt, Artificial Sequence
  Description of Artificial Sequence: Synthetic oligonucleotide
cuguuugccguccagucau

SEQ ID NO: 3054287 - RNA, 19 nt, Artificial Sequence
  Description of Artificial Sequence: Synthetic oligonucleotide
gcaggaggugaagaggaug

SEQ ID NO: 3054288 - RNA, 19 nt, Artificial Sequence
  Description of Artificial Sequence: Synthetic oligonucleotide
gauggccuuccagucaucu

SEQ ID NO: 3054289 - RNA, 19 nt, Artificial Sequence
  Description of Artificial Sequence: Synthetic oligonucleotide
aggaggugaagaggaugug

SEQ ID NO: 3054290 - RNA, 19 nt, Artificial Sequence
  Description of Artificial Sequence: Synthetic oligonucleotide
accagacaguccauuggga

SEQ ID NO: 3054291 - RNA, 19 nt, Artificial Sequence
  Description of Artificial Sequence: Synthetic oligonucleotide
gugggcucagccccuguga

SEQ ID NO: 3054292 - RNA, 19 nt, Artificial Sequence
  Description of Artificial Sequence: Synthetic oligonucleotide
gcugcaggugaugauugug

SEQ ID NO: 3054293 - RNA, 19 nt, Artificial Sequence
  Description of Artificial Sequence: Synthetic oligonucleotide
gccccugugauguccggcc

SEQ ID NO: 3054294 - RNA, 19 nt, Artificial Sequence
  Description of Artificial Sequence: Synthetic oligonucleotide
caggauggccuuccaguca

SEQ ID NO: 3054295 - RNA, 19 nt, Artificial Sequence
  Description of Artificial Sequence: Synthetic oligonucleotide
cagucaucugcccacgagu

SEQ ID NO: 3054296 - RNA, 19 nt, Artificial Sequence
  Description of Artificial Sequence: Synthetic oligonucleotide
aggaagugccaggaacuaa

SEQ ID NO: 3054297 - RNA, 19 nt, Artificial Sequence
  Description of Artificial Sequence: Synthetic oligonucleotide
ccaggaacuaaagcacagc

SEQ ID NO: 3054298 - RNA, 19 nt, Artificial Sequence
  Description of Artificial Sequence: Synthetic oligonucleotide
ccagucaucugcccacgag

SEQ ID NO: 3054299 - RNA, 19 nt, Artificial Sequence
  Description of Artificial Sequence: Synthetic oligonucleotide
gcaggugaugauuguggca

SEQ ID NO: 3054300 - RNA, 19 nt, Artificial Sequence
  Description of Artificial Sequence: Synthetic oligonucleotide
gguuaaggccuugcugagc

SEQ ID NO: 3054301 - RNA, 19 nt, Artificial Sequence
  Description of Artificial Sequence: Synthetic oligonucleotide
gagucauagcacagcccuc

SEQ ID NO: 3054302 - RNA, 19 nt, Artificial Sequence
  Description of Artificial Sequence: Synthetic oligonucleotide
gcuguuugccguccaguca

SEQ ID NO: 3054303 - RNA, 19 nt, Artificial Sequence
  Description of Artificial Sequence: Synthetic oligonucleotide
ccaggauggccuuccaguc

SEQ ID NO: 3054304 - RNA, 19 nt, Artificial Sequence
  Description of Artificial Sequence: Synthetic oligonucleotide
aggcuguuugccguccagu

SEQ ID NO: 3054305 - RNA, 19 nt, Artificial Sequence
  Description of Artificial Sequence: Synthetic oligonucleotide
acaguccauugggauccuc

SEQ ID NO: 3054306 - RNA, 19 nt, Artificial Sequence
  Description of Artificial Sequence: Synthetic oligonucleotide
ggggccgcuugcuauccag

SEQ ID NO: 3054307 - RNA, 19 nt, Artificial Sequence
  Description of Artificial Sequence: Synthetic oligonucleotide
gauccuccaggaagugcca

SEQ ID NO: 3054308 - RNA, 19 nt, Artificial Sequence
  Description of Artificial Sequence: Synthetic oligonucleotide
uccugaccagacaguccau

SEQ ID NO: 3054309 - RNA, 19 nt, Artificial Sequence
  Description of Artificial Sequence: Synthetic oligonucleotide
gccuugcugagccaggaaa

SEQ ID NO: 3054310 - RNA, 19 nt, Artificial Sequence
  Description of Artificial Sequence: Synthetic oligonucleotide
guuugccguccagucauga

SEQ ID NO: 3054311 - RNA, 19 nt, Artificial Sequence
  Description of Artificial Sequence: Synthetic oligonucleotide
ggugaugauuguggcagga

SEQ ID NO: 3054312 - RNA, 19 nt, Artificial Sequence
  Description of Artificial Sequence: Synthetic oligonucleotide
ucccagcuggggugugggc

SEQ ID NO: 3054313 - RNA, 19 nt, Artificial Sequence
  Description of Artificial Sequence: Synthetic oligonucleotide
caggaaaaggggagugugu

SEQ ID NO: 3054314 - RNA, 19 nt, Artificial Sequence
  Description of Artificial Sequence: Synthetic oligonucleotide
ggggagugugucaagaagu

SEQ ID NO: 3054315 - RNA, 19 nt, Artificial Sequence
  Description of Artificial Sequence: Synthetic oligonucleotide
cccacacuggaccaggaga

SEQ ID NO: 3054316 - RNA, 19 nt, Artificial Sequence
  Description of Artificial Sequence: Synthetic oligonucleotide
ccacgaguggagucuccgg

SEQ ID NO: 3054317 - RNA, 19 nt, Artificial Sequence
  Description of Artificial Sequence: Synthetic oligonucleotide
ugauguccggccggucauc

SEQ ID NO: 3054318 - RNA, 19 nt, Artificial Sequence
  Description of Artificial Sequence: Synthetic oligonucleotide
aggccuugcugagccagga

SEQ ID NO: 3054319 - RNA, 19 nt, Artificial Sequence
  Description of Artificial Sequence: Synthetic oligonucleotide
gggauccuccaggaagugc

SEQ ID NO: 3054320 - RNA, 19 nt, Artificial Sequence
  Description of Artificial Sequence: Synthetic oligonucleotide
ccuugcugagccaggaaaa

SEQ ID NO: 3054321 - RNA, 19 nt, Artificial Sequence
  Description of Artificial Sequence: Synthetic oligonucleotide
cauugggauccuccaggaa

SEQ ID NO: 3054322 - RNA, 19 nt, Artificial Sequence
  Description of Artificial Sequence: Synthetic oligonucleotide
cagcaggcuguuugccguc

SEQ ID NO: 3054323 - RNA, 19 nt, Artificial Sequence
  Description of Artificial Sequence: Synthetic oligonucleotide
aucugcccacgaguggagu

SEQ ID NO: 3054324 - RNA, 19 nt, Artificial Sequence
  Description of Artificial Sequence: Synthetic oligonucleotide
ccuuccagucaucugccca

SEQ ID NO: 3054325 - RNA, 19 nt, Artificial Sequence
  Description of Artificial Sequence: Synthetic oligonucleotide
ggcucagccccugugaugu

SEQ ID NO: 3054326 - RNA, 19 nt, Artificial Sequence
  Description of Artificial Sequence: Synthetic oligonucleotide
gauguccggccggucaucu

SEQ ID NO: 3054327 - RNA, 19 nt, Artificial Sequence
  Description of Artificial Sequence: Synthetic oligonucleotide
cagccccugugauguccgg

SEQ ID NO: 3054328 - RNA, 19 nt, Artificial Sequence
  Description of Artificial Sequence: Synthetic oligonucleotide
ggccgcuugcuauccagga

SEQ ID NO: 3054329 - RNA, 19 nt, Artificial Sequence
  Description of Artificial Sequence: Synthetic oligonucleotide
cccugugauguccggccgg

SEQ ID NO: 3054330 - RNA, 19 nt, Artificial Sequence
  Description of Artificial Sequence: Synthetic oligonucleotide
cccacgaguggagucuccg

SEQ ID NO: 3054331 - RNA, 19 nt, Artificial Sequence
  Description of Artificial Sequence: Synthetic oligonucleotide
caugagcuucaagccccac

SEQ ID NO: 3054332 - RNA, 19 nt, Artificial Sequence
  Description of Artificial Sequence: Synthetic oligonucleotide
cuggaccaggagagaguca

SEQ ID NO: 3054333 - RNA, 19 nt, Artificial Sequence
  Description of Artificial Sequence: Synthetic oligonucleotide
ccaggaagugccaggaacu

SEQ ID NO: 3054334 - RNA, 19 nt, Artificial Sequence
  Description of Artificial Sequence: Synthetic oligonucleotide
ugcccacgaguggagucuc

SEQ ID NO: 3054335 - RNA, 19 nt, Artificial Sequence
  Description of Artificial Sequence: Synthetic oligonucleotide
ccauugggauccuccagga

SEQ ID NO: 3054336 - RNA, 19 nt, Artificial Sequence
  Description of Artificial Sequence: Synthetic oligonucleotide
gagcuucaagccccacacu

SEQ ID NO: 3054337 - RNA, 19 nt, Artificial Sequence
  Description of Artificial Sequence: Synthetic oligonucleotide
gagccaggaaaaggggagu

SEQ ID NO: 3054338 - RNA, 19 nt, Artificial Sequence
  Description of Artificial Sequence: Synthetic oligonucleotide
cacuggaccaggagagagu

SEQ ID NO: 3054339 - RNA, 19 nt, Artificial Sequence
  Description of Artificial Sequence: Synthetic oligonucleotide
cacagcccucagcggggcc

SEQ ID NO: 3054340 - RNA, 19 nt, Artificial Sequence
  Description of Artificial Sequence: Synthetic oligonucleotide
gcuucagcugcaggugaug

SEQ ID NO: 3054341 - RNA, 19 nt, Artificial Sequence
  Description of Artificial Sequence: Synthetic oligonucleotide
gggccgcuugcuauccagg

SEQ ID NO: 3054342 - RNA, 19 nt, Artificial Sequence
  Description of Artificial Sequence: Synthetic oligonucleotide
gugauguccggccggucau

SEQ ID NO: 3054343 - RNA, 19 nt, Artificial Sequence
  Description of Artificial Sequence: Synthetic oligonucleotide
ccagcuggggugugggcuc

SEQ ID NO: 3054344 - RNA, 19 nt, Artificial Sequence
  Description of Artificial Sequence: Synthetic oligonucleotide
caggaagugccaggaacua

SEQ ID NO: 3054345 - RNA, 19 nt, Artificial Sequence
  Description of Artificial Sequence: Synthetic oligonucleotide
cacacuggaccaggagaga

SEQ ID NO: 3054346 - RNA, 19 nt, Artificial Sequence
  Description of Artificial Sequence: Synthetic oligonucleotide
gccuuccagucaucugccc

SEQ ID NO: 3054347 - RNA, 19 nt, Artificial Sequence
  Description of Artificial Sequence: Synthetic oligonucleotide
guccggccggucaucuaug

SEQ ID NO: 3054348 - RNA, 19 nt, Artificial Sequence
  Description of Artificial Sequence: Synthetic oligonucleotide
ccucagcaggcuguuugcc

SEQ ID NO: 3054349 - RNA, 19 nt, Artificial Sequence
  Description of Artificial Sequence: Synthetic oligonucleotide
ccccugugauguccggccg

SEQ ID NO: 3054350 - RNA, 19 nt, Artificial Sequence
  Description of Artificial Sequence: Synthetic oligonucleotide
ccguccagucaugagcuuc

SEQ ID NO: 3054351 - RNA, 19 nt, Artificial Sequence
  Description of Artificial Sequence: Synthetic oligonucleotide
ccccacacuggaccaggag

SEQ ID NO: 3054352 - RNA, 19 nt, Artificial Sequence
  Description of Artificial Sequence: Synthetic oligonucleotide
ccagacaguccauugggau

SEQ ID NO: 3054353 - RNA, 19 nt, Artificial Sequence
  Description of Artificial Sequence: Synthetic oligonucleotide
cagcccucagcggggccgc

SEQ ID NO: 3054354 - RNA, 19 nt, Artificial Sequence
  Description of Artificial Sequence: Synthetic oligonucleotide
cguccagucaugagcuuca

SEQ ID NO: 3054355 - RNA, 19 nt, Artificial Sequence
  Description of Artificial Sequence: Synthetic oligonucleotide
auguccggccggucaucua

SEQ ID NO: 3054356 - RNA, 19 nt, Artificial Sequence
  Description of Artificial Sequence: Synthetic oligonucleotide
gcuugcuauccaggauggc

SEQ ID NO: 3054357 - RNA, 19 nt, Artificial Sequence
  Description of Artificial Sequence: Synthetic oligonucleotide
gcucccagcuggggugugg

SEQ ID NO: 3054358 - RNA, 19 nt, Artificial Sequence
  Description of Artificial Sequence: Synthetic oligonucleotide
cugugauguccggccgguc

SEQ ID NO: 3054359 - RNA, 19 nt, Artificial Sequence
  Description of Artificial Sequence: Synthetic oligonucleotide
cugcccacgaguggagucu

SEQ ID NO: 3054360 - RNA, 19 nt, Artificial Sequence
  Description of Artificial Sequence: Synthetic oligonucleotide
ccggccggucaucuaugag

SEQ ID NO: 3054361 - RNA, 19 nt, Artificial Sequence
  Description of Artificial Sequence: Synthetic oligonucleotide
ggugugggcucagccccug

SEQ ID NO: 3054362 - RNA, 19 nt, Artificial Sequence
  Description of Artificial Sequence: Synthetic oligonucleotide
gcuauccaggauggccuuc

SEQ ID NO: 3054363 - RNA, 19 nt, Artificial Sequence
  Description of Artificial Sequence: Synthetic oligonucleotide
cccucagcggggccgcuug

SEQ ID NO: 3054364 - RNA, 19 nt, Artificial Sequence
  Description of Artificial Sequence: Synthetic oligonucleotide
gggagugugucaagaaguu

SEQ ID NO: 3054365 - RNA, 19 nt, Artificial Sequence
  Description of Artificial Sequence: Synthetic oligonucleotide
gcaggcuguuugccgucca

SEQ ID NO: 3054366 - RNA, 19 nt, Artificial Sequence
  Description of Artificial Sequence: Synthetic oligonucleotide
ggccuugcugagccaggaa

SEQ ID NO: 3054367 - RNA, 19 nt, Artificial Sequence
  Description of Artificial Sequence: Synthetic oligonucleotide
gacaguccauugggauccu

SEQ ID NO: 3054368 - RNA, 19 nt, Artificial Sequence
  Description of Artificial Sequence: Synthetic oligonucleotide
gccaggaaaaggggagugu

SEQ ID NO: 3054369 - RNA, 19 nt, Artificial Sequence
  Description of Artificial Sequence: Synthetic oligonucleotide
gcggggccgcuugcuaucc

SEQ ID NO: 3054370 - RNA, 19 nt, Artificial Sequence
  Description of Artificial Sequence: Synthetic oligonucleotide
cagcggggccgcuugcuau

SEQ ID NO: 3054371 - RNA, 19 nt, Artificial Sequence
  Description of Artificial Sequence: Synthetic oligonucleotide
ccucagcggggccgcuugc

SEQ ID NO: 3054372 - RNA, 19 nt, Artificial Sequence
  Description of Artificial Sequence: Synthetic oligonucleotide
gccgcuugcuauccaggau

SEQ ID NO: 3054373 - RNA, 19 nt, Artificial Sequence
  Description of Artificial Sequence: Synthetic oligonucleotide
cagcuggggugugggcuca

SEQ ID NO: 3054374 - RNA, 19 nt, Artificial Sequence
  Description of Artificial Sequence: Synthetic oligonucleotide
cucagcggggccgcuugcu

SEQ ID NO: 3054375 - RNA, 19 nt, Artificial Sequence
  Description of Artificial Sequence: Synthetic oligonucleotide
gugcucccagcuggggugu

SEQ ID NO: 3054376 - RNA, 19 nt, Artificial Sequence
  Description of Artificial Sequence: Synthetic oligonucleotide
gcccacgaguggagucucc

SEQ ID NO: 3054377 - RNA, 19 nt, Artificial Sequence
  Description of Artificial Sequence: Synthetic oligonucleotide
agcccucagcaggcuguuu

SEQ ID NO: 3054378 - RNA, 19 nt, Artificial Sequence
  Description of Artificial Sequence: Synthetic oligonucleotide
gugugggcucagccccugu

SEQ ID NO: 3054379 - RNA, 19 nt, Artificial Sequence
  Description of Artificial Sequence: Synthetic oligonucleotide
ggauggccuuccagucauc

SEQ ID NO: 3054380 - RNA, 19 nt, Artificial Sequence
  Description of Artificial Sequence: Synthetic oligonucleotide
gcucagccccugugauguc

SEQ ID NO: 3054381 - RNA, 19 nt, Artificial Sequence
  Description of Artificial Sequence: Synthetic oligonucleotide
ggcuucagcugcaggugau

SEQ ID NO: 3054382 - RNA, 19 nt, Artificial Sequence
  Description of Artificial Sequence: Synthetic oligonucleotide
ggaccaggagagagucaua

SEQ ID NO: 3054383 - RNA, 19 nt, Artificial Sequence
  Description of Artificial Sequence: Synthetic oligonucleotide
ggcaggaggugaagaggau

SEQ ID NO: 3054384 - RNA, 19 nt, Artificial Sequence
  Description of Artificial Sequence: Synthetic oligonucleotide
agcccucagcggggccgcu

SEQ ID NO: 3054385 - RNA, 19 nt, Artificial Sequence
  Description of Artificial Sequence: Synthetic oligonucleotide
ccugugauguccggccggu

SEQ ID NO: 3054386 - RNA, 19 nt, Artificial Sequence
  Description of Artificial Sequence: Synthetic oligonucleotide
ccugaccagacaguccauu

SEQ ID NO: 3054387 - RNA, 19 nt, Artificial Sequence
  Description of Artificial Sequence: Synthetic oligonucleotide
cagcccucagcaggcuguu

SEQ ID NO: 3054388 - RNA, 19 nt, Artificial Sequence
  Description of Artificial Sequence: Synthetic oligonucleotide
gcacagcccucagcaggcu

SEQ ID NO: 3054389 - RNA, 19 nt, Artificial Sequence
  Description of Artificial Sequence: Synthetic oligonucleotide
gccguccagucaugagcuu

SEQ ID NO: 3054390 - RNA, 19 nt, Artificial Sequence
  Description of Artificial Sequence: Synthetic oligonucleotide
cggggccgcuugcuaucca

SEQ ID NO: 3054391 - RNA, 19 nt, Artificial Sequence
  Description of Artificial Sequence: Synthetic oligonucleotide
gcccucagcggggccgcuu

SEQ ID NO: 3054392 - RNA, 19 nt, Artificial Sequence
  Description of Artificial Sequence: Synthetic oligonucleotide
gaugguaggccuuagagcc

SEQ ID NO: 3054393 - RNA, 19 nt, Artificial Sequence
  Description of Artificial Sequence: Synthetic oligonucleotide
aguguuucgccucuuagcc

SEQ ID NO: 3054394 - RNA, 19 nt, Artificial Sequence
  Description of Artificial Sequence: Synthetic oligonucleotide
aauaccucaagaugaacug

SEQ ID NO: 3054395 - RNA, 19 nt, Artificial Sequence
  Description of Artificial Sequence: Synthetic oligonucleotide
auuguacugacugaaauac

SEQ ID NO: 3054396 - RNA, 19 nt, Artificial Sequence
  Description of Artificial Sequence: Synthetic oligonucleotide
aagaugguaggccuuagag

SEQ ID NO: 3054397 - RNA, 19 nt, Artificial Sequence
  Description of Artificial Sequence: Synthetic oligonucleotide
aacgugugcgucuuauugc

SEQ ID NO: 3054398 - RNA, 19 nt, Artificial Sequence
  Description of Artificial Sequence: Synthetic oligonucleotide
uucucuugcgcuuagcagg

SEQ ID NO: 3054399 - RNA, 19 nt, Artificial Sequence
  Description of Artificial Sequence: Synthetic oligonucleotide
acugaaauaccucaagaug

SEQ ID NO: 3054400 - RNA, 19 nt, Artificial Sequence
  Description of Artificial Sequence: Synthetic oligonucleotide
agaugguaggccuuagagc

SEQ ID NO: 3054401 - RNA, 19 nt, Artificial Sequence
  Description of Artificial Sequence: Synthetic oligonucleotide
aaggaugacguuccuuucg

SEQ ID NO: 3054402 - RNA, 19 nt, Artificial Sequence
  Description of Artificial Sequence: Synthetic oligonucleotide
aaauaccucaagaugaacu

SEQ ID NO: 3054403 - RNA, 19 nt, Artificial Sequence
  Description of Artificial Sequence: Synthetic oligonucleotide
aguuauacuuucucuugcg

SEQ ID NO: 3054404 - RNA, 19 nt, Artificial Sequence
  Description of Artificial Sequence: Synthetic oligonucleotide
augucugaaucuucgauag

SEQ ID NO: 3054405 - RNA, 19 nt, Artificial Sequence
  Description of Artificial Sequence: Synthetic oligonucleotide
cugaaauaccucaagauga

SEQ ID NO: 3054406 - RNA, 19 nt, Artificial Sequence
  Description of Artificial Sequence: Synthetic oligonucleotide
uuauuguacugacugaaau

SEQ ID NO: 3054407 - RNA, 19 nt, Artificial Sequence
  Description of Artificial Sequence: Synthetic oligonucleotide
augaacuggaugcugcaac

SEQ ID NO: 3054408 - RNA, 19 nt, Artificial Sequence
  Description of Artificial Sequence: Synthetic oligonucleotide
uuauacuuucucuugcgcu

SEQ ID NO: 3054409 - RNA, 19 nt, Artificial Sequence
  Description of Artificial Sequence: Synthetic oligonucleotide
uucaccggaauccaugucu

SEQ ID NO: 3054410 - RNA, 19 nt, Artificial Sequence
  Description of Artificial Sequence: Synthetic oligonucleotide
aaaggaugacguuccuuuc

SEQ ID NO: 3054411 - RNA, 19 nt, Artificial Sequence
  Description of Artificial Sequence: Synthetic oligonucleotide
ugacugaaauaccucaaga

SEQ ID NO: 3054412 - RNA, 19 nt, Artificial Sequence
  Description of Artificial Sequence: Synthetic oligonucleotide
uuuuauuguacugacugaa

SEQ ID NO: 3054413 - RNA, 19 nt, Artificial Sequence
  Description of Artificial Sequence: Synthetic oligonucleotide
auugcgacgcuuuccaaag

SEQ ID NO: 3054414 - RNA, 19 nt, Artificial Sequence
  Description of Artificial Sequence: Synthetic oligonucleotide
acuucugaagaugguaggc

SEQ ID NO: 3054415 - RNA, 19 nt, Artificial Sequence
  Description of Artificial Sequence: Synthetic oligonucleotide
uuccaaaggaugacguucc

SEQ ID NO: 3054416 - RNA, 19 nt, Artificial Sequence
  Description of Artificial Sequence: Synthetic oligonucleotide
uuucucuugcgcuuagcag

SEQ ID NO: 3054417 - RNA, 19 nt, Artificial Sequence
  Description of Artificial Sequence: Synthetic oligonucleotide
uacugacugaaauaccuca

SEQ ID NO: 3054418 - RNA, 19 nt, Artificial Sequence
  Description of Artificial Sequence: Synthetic oligonucleotide
ucucuugcgcuuagcaggg

SEQ ID NO: 3054419 - RNA, 19 nt, Artificial Sequence
  Description of Artificial Sequence: Synthetic oligonucleotide
uuuuaggugccgcauccgc

SEQ ID NO: 3054420 - RNA, 19 nt, Artificial Sequence
  Description of Artificial Sequence: Synthetic oligonucleotide
gacuucugaagaugguagg

SEQ ID NO: 3054421 - RNA, 19 nt, Artificial Sequence
  Description of Artificial Sequence: Synthetic oligonucleotide
agguguugucccuucaccg

SEQ ID NO: 3054422 - RNA, 19 nt, Artificial Sequence
  Description of Artificial Sequence: Synthetic oligonucleotide
ucugaaucuucgauagaca

SEQ ID NO: 3054423 - RNA, 19 nt, Artificial Sequence
  Description of Artificial Sequence: Synthetic oligonucleotide
uauuguacugacugaaaua

SEQ ID NO: 3054424 - RNA, 19 nt, Artificial Sequence
  Description of Artificial Sequence: Synthetic oligonucleotide
uggguuuagguguuguccc

SEQ ID NO: 3054425 - RNA, 19 nt, Artificial Sequence
  Description of Artificial Sequence: Synthetic oligonucleotide
uuagccuuggcacuccagu

SEQ ID NO: 3054426 - RNA, 19 nt, Artificial Sequence
  Description of Artificial Sequence: Synthetic oligonucleotide
uucgucaucuugcuucugc

SEQ ID NO: 3054427 - RNA, 19 nt, Artificial Sequence
  Description of Artificial Sequence: Synthetic oligonucleotide
gaugacguuccuuucguca

SEQ ID NO: 3054428 - RNA, 19 nt, Artificial Sequence
  Description of Artificial Sequence: Synthetic oligonucleotide
uuggguuuagguguugucc

SEQ ID NO: 3054429 - RNA, 19 nt, Artificial Sequence
  Description of Artificial Sequence: Synthetic oligonucleotide
uuuauuguacugacugaaa

SEQ ID NO: 3054430 - RNA, 19 nt, Artificial Sequence
  Description of Artificial Sequence: Synthetic oligonucleotide
acgugugcgucuuauugcg

SEQ ID NO: 3054431 - RNA, 19 nt, Artificial Sequence
  Description of Artificial Sequence: Synthetic oligonucleotide
uaccucaagaugaacugga

SEQ ID NO: 3054432 - RNA, 19 nt, Artificial Sequence
  Description of Artificial Sequence: Synthetic oligonucleotide
uuuaggugccgcauccgcc

SEQ ID NO: 3054433 - RNA, 19 nt, Artificial Sequence
  Description of Artificial Sequence: Synthetic oligonucleotide
uaguguuucgccucuuagc

SEQ ID NO: 3054434 - RNA, 19 nt, Artificial Sequence
  Description of Artificial Sequence: Synthetic oligonucleotide
guuauacuuucucuugcgc

SEQ ID NO: 3054435 - RNA, 19 nt, Artificial Sequence
  Description of Artificial Sequence: Synthetic oligonucleotide
acagguggacuucugaaga

SEQ ID NO: 3054436 - RNA, 19 nt, Artificial Sequence
  Description of Artificial Sequence: Synthetic oligonucleotide
ugucccuucaccggaaucc

SEQ ID NO: 3054437 - RNA, 19 nt, Artificial Sequence
  Description of Artificial Sequence: Synthetic oligonucleotide
cuuagagccacagcggcgg

SEQ ID NO: 3054438 - RNA, 19 nt, Artificial Sequence
  Description of Artificial Sequence: Synthetic oligonucleotide
uauacuuucucuugcgcuu

SEQ ID NO: 3054439 - RNA, 19 nt, Artificial Sequence
  Description of Artificial Sequence: Synthetic oligonucleotide
uucugaagaugguaggccu

SEQ ID NO: 3054440 - RNA, 19 nt, Artificial Sequence
  Description of Artificial Sequence: Synthetic oligonucleotide
uagguguugucccuucacc

SEQ ID NO: 3054441 - RNA, 19 nt, Artificial Sequence
  Description of Artificial Sequence: Synthetic oligonucleotide
guuccuuucgucaucuugc

SEQ ID NO: 3054442 - RNA, 19 nt, Artificial Sequence
  Description of Artificial Sequence: Synthetic oligonucleotide
uccaguuauacuuucucuu

SEQ ID NO: 3054443 - RNA, 19 nt, Artificial Sequence
  Description of Artificial Sequence: Synthetic oligonucleotide
uuaggugccgcauccgccc

SEQ ID NO: 3054444 - RNA, 19 nt, Artificial Sequence
  Description of Artificial Sequence: Synthetic oligonucleotide
aggguagccacauuugcca

SEQ ID NO: 3054445 - RNA, 19 nt, Artificial Sequence
  Description of Artificial Sequence: Synthetic oligonucleotide
ugaaucuucgauagacaau

SEQ ID NO: 3054446 - RNA, 19 nt, Artificial Sequence
  Description of Artificial Sequence: Synthetic oligonucleotide
gucaucuugcuucugccgc

SEQ ID NO: 3054447 - RNA, 19 nt, Artificial Sequence
  Description of Artificial Sequence: Synthetic oligonucleotide
ugugcgucuuauugcgacg

SEQ ID NO: 3054448 - RNA, 19 nt, Artificial Sequence
  Description of Artificial Sequence: Synthetic oligonucleotide
aacagcugcccucuugggu

SEQ ID NO: 3054449 - RNA, 19 nt, Artificial Sequence
  Description of Artificial Sequence: Synthetic oligonucleotide
caguuauacuuucucuugc

SEQ ID NO: 3054450 - RNA, 19 nt, Artificial Sequence
  Description of Artificial Sequence: Synthetic oligonucleotide
gucugaaucuucgauagac

SEQ ID NO: 3054451 - RNA, 19 nt, Artificial Sequence
  Description of Artificial Sequence: Synthetic oligonucleotide
caacgugugcgucuuauug

SEQ ID NO: 3054452 - RNA, 19 nt, Artificial Sequence
  Description of Artificial Sequence: Synthetic oligonucleotide
ugcgacgcuuuccaaagga

SEQ ID NO: 3054453 - RNA, 19 nt, Artificial Sequence
  Description of Artificial Sequence: Synthetic oligonucleotide
uauugcgacgcuuuccaaa

SEQ ID NO: 3054454 - RNA, 19 nt, Artificial Sequence
  Description of Artificial Sequence: Synthetic oligonucleotide
ucuuauugcgacgcuuucc

SEQ ID NO: 3054455 - RNA, 19 nt, Artificial Sequence
  Description of Artificial Sequence: Synthetic oligonucleotide
gaugcugcaacagcugccc

SEQ ID NO: 3054456 - RNA, 19 nt, Artificial Sequence
  Description of Artificial Sequence: Synthetic oligonucleotide
cugacugaaauaccucaag

SEQ ID NO: 3054457 - RNA, 19 nt, Artificial Sequence
  Description of Artificial Sequence: Synthetic oligonucleotide
cuuauugcgacgcuuucca

SEQ ID NO: 3054458 - RNA, 19 nt, Artificial Sequence
  Description of Artificial Sequence: Synthetic oligonucleotide
uuagguguugucccuucac

SEQ ID NO: 3054459 - RNA, 19 nt, Artificial Sequence
  Description of Artificial Sequence: Synthetic oligonucleotide
guaguguuucgccucuuag

SEQ ID NO: 3054460 - RNA, 19 nt, Artificial Sequence
  Description of Artificial Sequence: Synthetic oligonucleotide
auaccucaagaugaacugg

SEQ ID NO: 3054461 - RNA, 19 nt, Artificial Sequence
  Description of Artificial Sequence: Synthetic oligonucleotide
cuucugaagaugguaggcc

SEQ ID NO: 3054462 - RNA, 19 nt, Artificial Sequence
  Description of Artificial Sequence: Synthetic oligonucleotide
ccacauuugccacaggugg

SEQ ID NO: 3054463 - RNA, 19 nt, Artificial Sequence
  Description of Artificial Sequence: Synthetic oligonucleotide
ucaccggaauccaugucug

SEQ ID NO: 3054464 - RNA, 19 nt, Artificial Sequence
  Description of Artificial Sequence: Synthetic oligonucleotide
agccacauuugccacaggu

SEQ ID NO: 3054465 - RNA, 19 nt, Artificial Sequence
  Description of Artificial Sequence: Synthetic oligonucleotide
uguuucgccucuuagccuu

SEQ ID NO: 3054466 - RNA, 19 nt, Artificial Sequence
  Description of Artificial Sequence: Synthetic oligonucleotide
cacagguggacuucugaag

SEQ ID NO: 3054467 - RNA, 19 nt, Artificial Sequence
  Description of Artificial Sequence: Synthetic oligonucleotide
cuugcgcuuagcaggguag

SEQ ID NO: 3054468 - RNA, 19 nt, Artificial Sequence
  Description of Artificial Sequence: Synthetic oligonucleotide
auccaugucugaaucuucg

SEQ ID NO: 3054469 - RNA, 19 nt, Artificial Sequence
  Description of Artificial Sequence: Synthetic oligonucleotide
uuuagguguugucccuuca

SEQ ID NO: 3054470 - RNA, 19 nt, Artificial Sequence
  Description of Artificial Sequence: Synthetic oligonucleotide
caggguagccacauuugcc

SEQ ID NO: 3054471 - RNA, 19 nt, Artificial Sequence
  Description of Artificial Sequence: Synthetic oligonucleotide
gacgcuuuccaaaggauga

SEQ ID NO: 3054472 - RNA, 19 nt, Artificial Sequence
  Description of Artificial Sequence: Synthetic oligonucleotide
ucaucuugcuucugccgcc

SEQ ID NO: 3054473 - RNA, 19 nt, Artificial Sequence
  Description of Artificial Sequence: Synthetic oligonucleotide
ucgucaucuugcuucugcc

SEQ ID NO: 3054474 - RNA, 19 nt, Artificial Sequence
  Description of Artificial Sequence: Synthetic oligonucleotide
cuuggcacuccaguuauac

SEQ ID NO: 3054475 - RNA, 19 nt, Artificial Sequence
  Description of Artificial Sequence: Synthetic oligonucleotide
ucaagaugaacuggaugcu

SEQ ID NO: 3054476 - RNA, 19 nt, Artificial Sequence
  Description of Artificial Sequence: Synthetic oligonucleotide
gaaucuucgauagacaauu

SEQ ID NO: 3054477 - RNA, 19 nt, Artificial Sequence
  Description of Artificial Sequence: Synthetic oligonucleotide
gacugaaauaccucaagau

SEQ ID NO: 3054478 - RNA, 19 nt, Artificial Sequence
  Description of Artificial Sequence: Synthetic oligonucleotide
gguguugucccuucaccgg

SEQ ID NO: 3054479 - RNA, 19 nt, Artificial Sequence
  Description of Artificial Sequence: Synthetic oligonucleotide
ccuuucgucaucuugcuuc

SEQ ID NO: 3054480 - RNA, 19 nt, Artificial Sequence
  Description of Artificial Sequence: Synthetic oligonucleotide
ugcaacagcugcccucuug

SEQ ID NO: 3054481 - RNA, 19 nt, Artificial Sequence
  Description of Artificial Sequence: Synthetic oligonucleotide
ucuugcuucugccgccgag

SEQ ID NO: 3054482 - RNA, 19 nt, Artificial Sequence
  Description of Artificial Sequence: Synthetic oligonucleotide
gcaacagcugcccucuugg

SEQ ID NO: 3054483 - RNA, 19 nt, Artificial Sequence
  Description of Artificial Sequence: Synthetic oligonucleotide
gguggacuucugaagaugg

SEQ ID NO: 3054484 - RNA, 19 nt, Artificial Sequence
  Description of Artificial Sequence: Synthetic oligonucleotide
acuggaugcugcaacagcu

SEQ ID NO: 3054485 - RNA, 19 nt, Artificial Sequence
  Description of Artificial Sequence: Synthetic oligonucleotide
aggaugacguuccuuucgu

SEQ ID NO: 3054486 - RNA, 19 nt, Artificial Sequence
  Description of Artificial Sequence: Synthetic oligonucleotide
acagcggcggcacaacgug

SEQ ID NO: 3054487 - RNA, 19 nt, Artificial Sequence
  Description of Artificial Sequence: Synthetic oligonucleotide
cuuucucuugcgcuuagca

SEQ ID NO: 3054488 - RNA, 19 nt, Artificial Sequence
  Description of Artificial Sequence: Synthetic oligonucleotide
agaugaacuggaugcugca

SEQ ID NO: 3054489 - RNA, 19 nt, Artificial Sequence
  Description of Artificial Sequence: Synthetic oligonucleotide
aucuucgauagacaauuuu

SEQ ID NO: 3054490 - RNA, 19 nt, Artificial Sequence
  Description of Artificial Sequence: Synthetic oligonucleotide
guagccacauuugccacag

SEQ ID NO: 3054491 - RNA, 19 nt, Artificial Sequence
  Description of Artificial Sequence: Synthetic oligonucleotide
acagcugcccucuuggguu

SEQ ID NO: 3054492 - RNA, 19 nt, Artificial Sequence
  Description of Artificial Sequence: Synthetic oligonucleotide
ucgccucuuagccuuggca

SEQ ID NO: 3054493 - RNA, 19 nt, Artificial Sequence
  Description of Artificial Sequence: Synthetic oligonucleotide
agucccgguaguguuucgc

SEQ ID NO: 3054494 - RNA, 19 nt, Artificial Sequence
  Description of Artificial Sequence: Synthetic oligonucleotide
cuugcuucugccgccgagg

SEQ ID NO: 3054495 - RNA, 19 nt, Artificial Sequence
  Description of Artificial Sequence: Synthetic oligonucleotide
augacguuccuuucgucau

SEQ ID NO: 3054496 - RNA, 19 nt, Artificial Sequence
  Description of Artificial Sequence: Synthetic oligonucleotide
gaaauaccucaagaugaac

SEQ ID NO: 3054497 - RNA, 19 nt, Artificial Sequence
  Description of Artificial Sequence: Synthetic oligonucleotide
caugucugaaucuucgaua

SEQ ID NO: 3054498 - RNA, 19 nt, Artificial Sequence
  Description of Artificial Sequence: Synthetic oligonucleotide
uccaugucugaaucuucga

SEQ ID NO: 3054499 - RNA, 19 nt, Artificial Sequence
  Description of Artificial Sequence: Synthetic oligonucleotide
uaggccuuagagccacagc

SEQ ID NO: 3054500 - RNA, 19 nt, Artificial Sequence
  Description of Artificial Sequence: Synthetic oligonucleotide
uugcuucugccgccgaggc

SEQ ID NO: 3054501 - RNA, 19 nt, Artificial Sequence
  Description of Artificial Sequence: Synthetic oligonucleotide
ucugaagaugguaggccuu

SEQ ID NO: 3054502 - RNA, 19 nt, Artificial Sequence
  Description of Artificial Sequence: Synthetic oligonucleotide
uacuuucucuugcgcuuag

SEQ ID NO: 3054503 - RNA, 19 nt, Artificial Sequence
  Description of Artificial Sequence: Synthetic oligonucleotide
uuccuuucgucaucuugcu

SEQ ID NO: 3054504 - RNA, 19 nt, Artificial Sequence
  Description of Artificial Sequence: Synthetic oligonucleotide
gugugcgucuuauugcgac

SEQ ID NO: 3054505 - RNA, 19 nt, Artificial Sequence
  Description of Artificial Sequence: Synthetic oligonucleotide
ugucugaaucuucgauaga

SEQ ID NO: 3054506 - RNA, 19 nt, Artificial Sequence
  Description of Artificial Sequence: Synthetic oligonucleotide
caagaugaacuggaugcug

SEQ ID NO: 3054507 - RNA, 19 nt, Artificial Sequence
  Description of Artificial Sequence: Synthetic oligonucleotide
ccaguuauacuuucucuug

SEQ ID NO: 3054508 - RNA, 19 nt, Artificial Sequence
  Description of Artificial Sequence: Synthetic oligonucleotide
ucuugcgcuuagcagggua

SEQ ID NO: 3054509 - RNA, 19 nt, Artificial Sequence
  Description of Artificial Sequence: Synthetic oligonucleotide
gaagaugguaggccuuaga

SEQ ID NO: 3054510 - RNA, 19 nt, Artificial Sequence
  Description of Artificial Sequence: Synthetic oligonucleotide
cuuggguuuagguguuguc

SEQ ID NO: 3054511 - RNA, 19 nt, Artificial Sequence
  Description of Artificial Sequence: Synthetic oligonucleotide
acuuucucuugcgcuuagc

SEQ ID NO: 3054512 - RNA, 19 nt, Artificial Sequence
  Description of Artificial Sequence: Synthetic oligonucleotide
ugaagaugguaggccuuag

SEQ ID NO: 3054513 - RNA, 19 nt, Artificial Sequence
  Description of Artificial Sequence: Synthetic oligonucleotide
ugcccucuuggguuuaggu

SEQ ID NO: 3054514 - RNA, 19 nt, Artificial Sequence
  Description of Artificial Sequence: Synthetic oligonucleotide
ugccgcauccgcccagucc

SEQ ID NO: 3054515 - RNA, 19 nt, Artificial Sequence
  Description of Artificial Sequence: Synthetic oligonucleotide
cuuagccuuggcacuccag

SEQ ID NO: 3054516 - RNA, 19 nt, Artificial Sequence
  Description of Artificial Sequence: Synthetic oligonucleotide
ucuuggguuuagguguugu

SEQ ID NO: 3054517 - RNA, 19 nt, Artificial Sequence
  Description of Artificial Sequence: Synthetic oligonucleotide
auuugccacagguggacuu

SEQ ID NO: 3054518 - RNA, 19 nt, Artificial Sequence
  Description of Artificial Sequence: Synthetic oligonucleotide
acgcuuuccaaaggaugac

SEQ ID NO: 3054519 - RNA, 19 nt, Artificial Sequence
  Description of Artificial Sequence: Synthetic oligonucleotide
caaaggaugacguuccuuu

SEQ ID NO: 3054520 - RNA, 19 nt, Artificial Sequence
  Description of Artificial Sequence: Synthetic oligonucleotide
ucugccgccgaggccaaag

SEQ ID NO: 3054521 - RNA, 19 nt, Artificial Sequence
  Description of Artificial Sequence: Synthetic oligonucleotide
uuugccacagguggacuuc

SEQ ID NO: 3054522 - RNA, 19 nt, Artificial Sequence
  Description of Artificial Sequence: Synthetic oligonucleotide
ugcugcaacagcugcccuc

SEQ ID NO: 3054523 - RNA, 19 nt, Artificial Sequence
  Description of Artificial Sequence: Synthetic oligonucleotide
ucuuagccuuggcacucca

SEQ ID NO: 3054524 - RNA, 19 nt, Artificial Sequence
  Description of Artificial Sequence: Synthetic oligonucleotide
uccaaaggaugacguuccu

SEQ ID NO: 3054525 - RNA, 19 nt, Artificial Sequence
  Description of Artificial Sequence: Synthetic oligonucleotide
guuuagguguugucccuuc

SEQ ID NO: 3054526 - RNA, 19 nt, Artificial Sequence
  Description of Artificial Sequence: Synthetic oligonucleotide
gucccgguaguguuucgcc

SEQ ID NO: 3054527 - RNA, 19 nt, Artificial Sequence
  Description of Artificial Sequence: Synthetic oligonucleotide
uguugucccuucaccggaa

SEQ ID NO: 3054528 - RNA, 19 nt, Artificial Sequence
  Description of Artificial Sequence: Synthetic oligonucleotide
gccgcauccgcccaguccc

SEQ ID NO: 3054529 - RNA, 19 nt, Artificial Sequence
  Description of Artificial Sequence: Synthetic oligonucleotide
agguggacuucugaagaug

SEQ ID NO: 3054530 - RNA, 19 nt, Artificial Sequence
  Description of Artificial Sequence: Synthetic oligonucleotide
ugacguuccuuucgucauc

SEQ ID NO: 3054531 - RNA, 19 nt, Artificial Sequence
  Description of Artificial Sequence: Synthetic oligonucleotide
caacagcugcccucuuggg

SEQ ID NO: 3054532 - RNA, 19 nt, Artificial Sequence
  Description of Artificial Sequence: Synthetic oligonucleotide
ugguaggccuuagagccac

SEQ ID NO: 3054533 - RNA, 19 nt, Artificial Sequence
  Description of Artificial Sequence: Synthetic oligonucleotide
uuauugcgacgcuuuccaa

SEQ ID NO: 3054534 - RNA, 19 nt, Artificial Sequence
  Description of Artificial Sequence: Synthetic oligonucleotide
ugcgcuuagcaggguagcc

SEQ ID NO: 3054535 - RNA, 19 nt, Artificial Sequence
  Description of Artificial Sequence: Synthetic oligonucleotide
uugucccuucaccggaauc

SEQ ID NO: 3054536 - RNA, 19 nt, Artificial Sequence
  Description of Artificial Sequence: Synthetic oligonucleotide
ucccgguaguguuucgccu

SEQ ID NO: 3054537 - RNA, 19 nt, Artificial Sequence
  Description of Artificial Sequence: Synthetic oligonucleotide
gugcgucuuauugcgacgc

SEQ ID NO: 3054538 - RNA, 19 nt, Artificial Sequence
  Description of Artificial Sequence: Synthetic oligonucleotide
guaggccuuagagccacag

SEQ ID NO: 3054539 - RNA, 19 nt, Artificial Sequence
  Description of Artificial Sequence: Synthetic oligonucleotide
cacauuugccacaggugga

SEQ ID NO: 3054540 - RNA, 19 nt, Artificial Sequence
  Description of Artificial Sequence: Synthetic oligonucleotide
caucuugcuucugccgccg

SEQ ID NO: 3054541 - RNA, 19 nt, Artificial Sequence
  Description of Artificial Sequence: Synthetic oligonucleotide
guguugucccuucaccgga

SEQ ID NO: 3054542 - RNA, 19 nt, Artificial Sequence
  Description of Artificial Sequence: Synthetic oligonucleotide
uuucgccucuuagccuugg

SEQ ID NO: 3054543 - RNA, 19 nt, Artificial Sequence
  Description of Artificial Sequence: Synthetic oligonucleotide
uucgccucuuagccuuggc

SEQ ID NO: 3054544 - RNA, 19 nt, Artificial Sequence
  Description of Artificial Sequence: Synthetic oligonucleotide
acugacugaaauaccucaa

SEQ ID NO: 3054545 - RNA, 19 nt, Artificial Sequence
  Description of Artificial Sequence: Synthetic oligonucleotide
agcaggguagccacauuug

SEQ ID NO: 3054546 - RNA, 19 nt, Artificial Sequence
  Description of Artificial Sequence: Synthetic oligonucleotide
ugcgucuuauugcgacgcu

SEQ ID NO: 3054547 - RNA, 19 nt, Artificial Sequence
  Description of Artificial Sequence: Synthetic oligonucleotide
ugcuucugccgccgaggcc

SEQ ID NO: 3054548 - RNA, 19 nt, Artificial Sequence
  Description of Artificial Sequence: Synthetic oligonucleotide
uugcgcuuagcaggguagc

SEQ ID NO: 3054549 - RNA, 19 nt, Artificial Sequence
  Description of Artificial Sequence: Synthetic oligonucleotide
agccuuggcacuccaguua

SEQ ID NO: 3054550 - RNA, 19 nt, Artificial Sequence
  Description of Artificial Sequence: Synthetic oligonucleotide
ccucaagaugaacuggaug

SEQ ID NO: 3054551 - RNA, 19 nt, Artificial Sequence
  Description of Artificial Sequence: Synthetic oligonucleotide
gaauccaugucugaaucuu

SEQ ID NO: 3054552 - RNA, 19 nt, Artificial Sequence
  Description of Artificial Sequence: Synthetic oligonucleotide
uagccuuggcacuccaguu

SEQ ID NO: 3054553 - RNA, 19 nt, Artificial Sequence
  Description of Artificial Sequence: Synthetic oligonucleotide
gaugaacuggaugcugcaa

SEQ ID NO: 3054554 - RNA, 19 nt, Artificial Sequence
  Description of Artificial Sequence: Synthetic oligonucleotide
gucuuauugcgacgcuuuc

SEQ ID NO: 3054555 - RNA, 19 nt, Artificial Sequence
  Description of Artificial Sequence: Synthetic oligonucleotide
accggaauccaugucugaa

SEQ ID NO: 3054556 - RNA, 19 nt, Artificial Sequence
  Description of Artificial Sequence: Synthetic oligonucleotide
aaucuucgauagacaauuu

SEQ ID NO: 3054557 - RNA, 19 nt, Artificial Sequence
  Description of Artificial Sequence: Synthetic oligonucleotide
gcccucuuggguuuaggug

SEQ ID NO: 3054558 - RNA, 19 nt, Artificial Sequence
  Description of Artificial Sequence: Synthetic oligonucleotide
auccgcccagucccgguag

SEQ ID NO: 3054559 - RNA, 19 nt, Artificial Sequence
  Description of Artificial Sequence: Synthetic oligonucleotide
cuccaguuauacuuucucu

SEQ ID NO: 3054560 - RNA, 19 nt, Artificial Sequence
  Description of Artificial Sequence: Synthetic oligonucleotide
ggccuuagagccacagcgg

SEQ ID NO: 3054561 - RNA, 19 nt, Artificial Sequence
  Description of Artificial Sequence: Synthetic oligonucleotide
gcuucugccgccgaggcca

SEQ ID NO: 3054562 - RNA, 19 nt, Artificial Sequence
  Description of Artificial Sequence: Synthetic oligonucleotide
acaacgugugcgucuuauu

SEQ ID NO: 3054563 - RNA, 19 nt, Artificial Sequence
  Description of Artificial Sequence: Synthetic oligonucleotide
cuucaccggaauccauguc

SEQ ID NO: 3054564 - RNA, 19 nt, Artificial Sequence
  Description of Artificial Sequence: Synthetic oligonucleotide
uuagcaggguagccacauu

SEQ ID NO: 3054565 - RNA, 19 nt, Artificial Sequence
  Description of Artificial Sequence: Synthetic oligonucleotide
ugccacagguggacuucug

SEQ ID NO: 3054566 - RNA, 19 nt, Artificial Sequence
  Description of Artificial Sequence: Synthetic oligonucleotide
uagccacauuugccacagg

SEQ ID NO: 3054567 - RNA, 19 nt, Artificial Sequence
  Description of Artificial Sequence: Synthetic oligonucleotide
uccuuucgucaucuugcuu

SEQ ID NO: 3054568 - RNA, 19 nt, Artificial Sequence
  Description of Artificial Sequence: Synthetic oligonucleotide
uaggugccgcauccgccca

SEQ ID NO: 3054569 - RNA, 19 nt, Artificial Sequence
  Description of Artificial Sequence: Synthetic oligonucleotide
auacuuucucuugcgcuua

SEQ ID NO: 3054570 - RNA, 19 nt, Artificial Sequence
  Description of Artificial Sequence: Synthetic oligonucleotide
gccacauuugccacaggug

SEQ ID NO: 3054571 - RNA, 19 nt, Artificial Sequence
  Description of Artificial Sequence: Synthetic oligonucleotide
gguagccacauuugccaca

SEQ ID NO: 3054572 - RNA, 19 nt, Artificial Sequence
  Description of Artificial Sequence: Synthetic oligonucleotide
ggaugcugcaacagcugcc

SEQ ID NO: 3054573 - RNA, 19 nt, Artificial Sequence
  Description of Artificial Sequence: Synthetic oligonucleotide
cucuuagccuuggcacucc

SEQ ID NO: 3054574 - RNA, 19 nt, Artificial Sequence
  Description of Artificial Sequence: Synthetic oligonucleotide
uugccacagguggacuucu

SEQ ID NO: 3054575 - RNA, 19 nt, Artificial Sequence
  Description of Artificial Sequence: Synthetic oligonucleotide
cgucaucuugcuucugccg

SEQ ID NO: 3054576 - RNA, 19 nt, Artificial Sequence
  Description of Artificial Sequence: Synthetic oligonucleotide
cccuucaccggaauccaug

SEQ ID NO: 3054577 - RNA, 19 nt, Artificial Sequence
  Description of Artificial Sequence: Synthetic oligonucleotide
agcggcggcacaacgugug

SEQ ID NO: 3054578 - RNA, 19 nt, Artificial Sequence
  Description of Artificial Sequence: Synthetic oligonucleotide
uuucgucaucuugcuucug

SEQ ID NO: 3054579 - RNA, 19 nt, Artificial Sequence
  Description of Artificial Sequence: Synthetic oligonucleotide
gacguuccuuucgucaucu

SEQ ID NO: 3054580 - RNA, 19 nt, Artificial Sequence
  Description of Artificial Sequence: Synthetic oligonucleotide
ucccuucaccggaauccau

SEQ ID NO: 3054581 - RNA, 19 nt, Artificial Sequence
  Description of Artificial Sequence: Synthetic oligonucleotide
cgacgcuuuccaaaggaug

SEQ ID NO: 3054582 - RNA, 19 nt, Artificial Sequence
  Description of Artificial Sequence: Synthetic oligonucleotide
cgccucuuagccuuggcac

SEQ ID NO: 3054583 - RNA, 19 nt, Artificial Sequence
  Description of Artificial Sequence: Synthetic oligonucleotide
ggguagccacauuugccac

SEQ ID NO: 3054584 - RNA, 19 nt, Artificial Sequence
  Description of Artificial Sequence: Synthetic oligonucleotide
ggaauccaugucugaaucu

SEQ ID NO: 3054585 - RNA, 19 nt, Artificial Sequence
  Description of Artificial Sequence: Synthetic oligonucleotide
cggaauccaugucugaauc

SEQ ID NO: 3054586 - RNA, 19 nt, Artificial Sequence
  Description of Artificial Sequence: Synthetic oligonucleotide
augcugcaacagcugcccu

SEQ ID NO: 3054587 - RNA, 19 nt, Artificial Sequence
  Description of Artificial Sequence: Synthetic oligonucleotide
cccucuuggguuuaggugu

SEQ ID NO: 3054588 - RNA, 19 nt, Artificial Sequence
  Description of Artificial Sequence: Synthetic oligonucleotide
uccgcccagucccgguagu

SEQ ID NO: 3054589 - RNA, 19 nt, Artificial Sequence
  Description of Artificial Sequence: Synthetic oligonucleotide
accucaagaugaacuggau

SEQ ID NO: 3054590 - RNA, 19 nt, Artificial Sequence
  Description of Artificial Sequence: Synthetic oligonucleotide
aggugccgcauccgcccag

SEQ ID NO: 3054591 - RNA, 19 nt, Artificial Sequence
  Description of Artificial Sequence: Synthetic oligonucleotide
cagucccgguaguguuucg

SEQ ID NO: 3054592 - RNA, 19 nt, Artificial Sequence
  Description of Artificial Sequence: Synthetic oligonucleotide
cugaagaugguaggccuua

SEQ ID NO: 3054593 - RNA, 19 nt, Artificial Sequence
  Description of Artificial Sequence: Synthetic oligonucleotide
augguaggccuuagagcca

SEQ ID NO: 3054594 - RNA, 19 nt, Artificial Sequence
  Description of Artificial Sequence: Synthetic oligonucleotide
aucuugcuucugccgccga

SEQ ID NO: 3054595 - RNA, 19 nt, Artificial Sequence
  Description of Artificial Sequence: Synthetic oligonucleotide
guguuucgccucuuagccu

SEQ ID NO: 3054596 - RNA, 19 nt, Artificial Sequence
  Description of Artificial Sequence: Synthetic oligonucleotide
gucccuucaccggaaucca

SEQ ID NO: 3054597 - RNA, 19 nt, Artificial Sequence
  Description of Artificial Sequence: Synthetic oligonucleotide
ggaugacguuccuuucguc

SEQ ID NO: 3054598 - RNA, 19 nt, Artificial Sequence
  Description of Artificial Sequence: Synthetic oligonucleotide
cgcuuuccaaaggaugacg

SEQ ID NO: 3054599 - RNA, 19 nt, Artificial Sequence
  Description of Artificial Sequence: Synthetic oligonucleotide
cugcccucuuggguuuagg

SEQ ID NO: 3054600 - RNA, 19 nt, Artificial Sequence
  Description of Artificial Sequence: Synthetic oligonucleotide
gguaguguuucgccucuua

SEQ ID NO: 3054601 - RNA, 19 nt, Artificial Sequence
  Description of Artificial Sequence: Synthetic oligonucleotide
gccacagguggacuucuga

SEQ ID NO: 3054602 - RNA, 19 nt, Artificial Sequence
  Description of Artificial Sequence: Synthetic oligonucleotide
cccgguaguguuucgccuc

SEQ ID NO: 3054603 - RNA, 19 nt, Artificial Sequence
  Description of Artificial Sequence: Synthetic oligonucleotide
gcuuuccaaaggaugacgu

SEQ ID NO: 3054604 - RNA, 19 nt, Artificial Sequence
  Description of Artificial Sequence: Synthetic oligonucleotide
gcacuccaguuauacuuuc

SEQ ID NO: 3054605 - RNA, 19 nt, Artificial Sequence
  Description of Artificial Sequence: Synthetic oligonucleotide
guuucgccucuuagccuug

SEQ ID NO: 3054606 - RNA, 19 nt, Artificial Sequence
  Description of Artificial Sequence: Synthetic oligonucleotide
cacuccaguuauacuuucu

SEQ ID NO: 3054607 - RNA, 19 nt, Artificial Sequence
  Description of Artificial Sequence: Synthetic oligonucleotide
caccggaauccaugucuga

SEQ ID NO: 3054608 - RNA, 19 nt, Artificial Sequence
  Description of Artificial Sequence: Synthetic oligonucleotide
cucuuggguuuagguguug

SEQ ID NO: 3054609 - RNA, 19 nt, Artificial Sequence
  Description of Artificial Sequence: Synthetic oligonucleotide
agccacagcggcggcacaa

SEQ ID NO: 3054610 - RNA, 19 nt, Artificial Sequence
  Description of Artificial Sequence: Synthetic oligonucleotide
cacagcggcggcacaacgu

SEQ ID NO: 3054611 - RNA, 19 nt, Artificial Sequence
  Description of Artificial Sequence: Synthetic oligonucleotide
ccacagguggacuucugaa

SEQ ID NO: 3054612 - RNA, 19 nt, Artificial Sequence
  Description of Artificial Sequence: Synthetic oligonucleotide
ccacagcggcggcacaacg

SEQ ID NO: 3054613 - RNA, 19 nt, Artificial Sequence
  Description of Artificial Sequence: Synthetic oligonucleotide
cagguggacuucugaagau

SEQ ID NO: 3054614 - RNA, 19 nt, Artificial Sequence
  Description of Artificial Sequence: Synthetic oligonucleotide
gcgcuuagcaggguagcca

SEQ ID NO: 3054615 - RNA, 19 nt, Artificial Sequence
  Description of Artificial Sequence: Synthetic oligonucleotide
gccucuuagccuuggcacu

SEQ ID NO: 3054616 - RNA, 19 nt, Artificial Sequence
  Description of Artificial Sequence: Synthetic oligonucleotide
gcugcaacagcugcccucu

SEQ ID NO: 3054617 - RNA, 19 nt, Artificial Sequence
  Description of Artificial Sequence: Synthetic oligonucleotide
ggguuuagguguugucccu

SEQ ID NO: 3054618 - RNA, 19 nt, Artificial Sequence
  Description of Artificial Sequence: Synthetic oligonucleotide
cacaacgugugcgucuuau

SEQ ID NO: 3054619 - RNA, 19 nt, Artificial Sequence
  Description of Artificial Sequence: Synthetic oligonucleotide
guggacuucugaagauggu

SEQ ID NO: 3054620 - RNA, 19 nt, Artificial Sequence
  Description of Artificial Sequence: Synthetic oligonucleotide
guugucccuucaccggaau

SEQ ID NO: 3054621 - RNA, 19 nt, Artificial Sequence
  Description of Artificial Sequence: Synthetic oligonucleotide
acguuccuuucgucaucuu

SEQ ID NO: 3054622 - RNA, 19 nt, Artificial Sequence
  Description of Artificial Sequence: Synthetic oligonucleotide
ggcggcacaacgugugcgu

SEQ ID NO: 3054623 - RNA, 19 nt, Artificial Sequence
  Description of Artificial Sequence: Synthetic oligonucleotide
ccuucaccggaauccaugu

SEQ ID NO: 3054624 - RNA, 19 nt, Artificial Sequence
  Description of Artificial Sequence: Synthetic oligonucleotide
ccaugucugaaucuucgau

SEQ ID NO: 3054625 - RNA, 19 nt, Artificial Sequence
  Description of Artificial Sequence: Synthetic oligonucleotide
gcggcggcacaacgugugc

SEQ ID NO: 3054626 - RNA, 19 nt, Artificial Sequence
  Description of Artificial Sequence: Synthetic oligonucleotide
cauccgcccagucccggua

SEQ ID NO: 3054627 - RNA, 19 nt, Artificial Sequence
  Description of Artificial Sequence: Synthetic oligonucleotide
gccuuggcacuccaguuau

SEQ ID NO: 3054628 - RNA, 19 nt, Artificial Sequence
  Description of Artificial Sequence: Synthetic oligonucleotide
cauuugccacagguggacu

SEQ ID NO: 3054629 - RNA, 19 nt, Artificial Sequence
  Description of Artificial Sequence: Synthetic oligonucleotide
ggcacuccaguuauacuuu

SEQ ID NO: 3054630 - RNA, 19 nt, Artificial Sequence
  Description of Artificial Sequence: Synthetic oligonucleotide
gcugcccucuuggguuuag

SEQ ID NO: 3054631 - RNA, 19 nt, Artificial Sequence
  Description of Artificial Sequence: Synthetic oligonucleotide
cuucugccgccgaggccaa

SEQ ID NO: 3054632 - RNA, 19 nt, Artificial Sequence
  Description of Artificial Sequence: Synthetic oligonucleotide
ccgcauccgcccagucccg

SEQ ID NO: 3054633 - RNA, 19 nt, Artificial Sequence
  Description of Artificial Sequence: Synthetic oligonucleotide
gugccgcauccgcccaguc

SEQ ID NO: 3054634 - RNA, 19 nt, Artificial Sequence
  Description of Artificial Sequence: Synthetic oligonucleotide
gguuuagguguugucccuu

SEQ ID NO: 3054635 - RNA, 19 nt, Artificial Sequence
  Description of Artificial Sequence: Synthetic oligonucleotide
cggcggcacaacgugugcg

SEQ ID NO: 3054636 - RNA, 19 nt, Artificial Sequence
  Description of Artificial Sequence: Synthetic oligonucleotide
gccacagcggcggcacaac

SEQ ID NO: 3054637 - RNA, 19 nt, Artificial Sequence
  Description of Artificial Sequence: Synthetic oligonucleotide
ccggaauccaugucugaau

SEQ ID NO: 3054638 - RNA, 19 nt, Artificial Sequence
  Description of Artificial Sequence: Synthetic oligonucleotide
gcggcacaacgugugcguc

SEQ ID NO: 3054639 - RNA, 19 nt, Artificial Sequence
  Description of Artificial Sequence: Synthetic oligonucleotide
cgucuuauugcgacgcuuu

SEQ ID NO: 3054640 - RNA, 19 nt, Artificial Sequence
  Description of Artificial Sequence: Synthetic oligonucleotide
ggcacaacgugugcgucuu

SEQ ID NO: 3054641 - RNA, 19 nt, Artificial Sequence
  Description of Artificial Sequence: Synthetic oligonucleotide
cagcggcggcacaacgugu

SEQ ID NO: 3054642 - RNA, 19 nt, Artificial Sequence
  Description of Artificial Sequence: Synthetic oligonucleotide
uucugccgccgaggccaaa

SEQ ID NO: 3054643 - RNA, 19 nt, Artificial Sequence
  Description of Artificial Sequence: Synthetic oligonucleotide
cgugugcgucuuauugcga

SEQ ID NO: 3054644 - RNA, 19 nt, Artificial Sequence
  Description of Artificial Sequence: Synthetic oligonucleotide
agcugcccucuuggguuua

SEQ ID NO: 3054645 - RNA, 19 nt, Artificial Sequence
  Description of Artificial Sequence: Synthetic oligonucleotide
gcgacgcuuuccaaaggau

SEQ ID NO: 3054646 - RNA, 19 nt, Artificial Sequence
  Description of Artificial Sequence: Synthetic oligonucleotide
gguaggccuuagagccaca

SEQ ID NO: 3054647 - RNA, 19 nt, Artificial Sequence
  Description of Artificial Sequence: Synthetic oligonucleotide
gcccagucccgguaguguu

SEQ ID NO: 3054648 - RNA, 19 nt, Artificial Sequence
  Description of Artificial Sequence: Synthetic oligonucleotide
gcgucuuauugcgacgcuu

SEQ ID NO: 3054649 - RNA, 19 nt, Artificial Sequence
  Description of Artificial Sequence: Synthetic oligonucleotide
cagcugcccucuuggguuu

SEQ ID NO: 3054650 - RNA, 19 nt, Artificial Sequence
  Description of Artificial Sequence: Synthetic oligonucleotide
gcauccgcccagucccggu

SEQ ID NO: 3054651 - RNA, 19 nt, Artificial Sequence
  Description of Artificial Sequence: Synthetic oligonucleotide
ccgguaguguuucgccucu

SEQ ID NO: 3054652 - RNA, 19 nt, Artificial Sequence
  Description of Artificial Sequence: Synthetic oligonucleotide
ccgcccagucccgguagug

SEQ ID NO: 3054653 - RNA, 19 nt, Artificial Sequence
  Description of Artificial Sequence: Synthetic oligonucleotide
cgcauccgcccagucccgg

SEQ ID NO: 3054654 - RNA, 19 nt, Artificial Sequence
  Description of Artificial Sequence: Synthetic oligonucleotide
ccaaaggaugacguuccuu

SEQ ID NO: 3054655 - RNA, 19 nt, Artificial Sequence
  Description of Artificial Sequence: Synthetic oligonucleotide
ggugccgcauccgcccagu

SEQ ID NO: 3054656 - RNA, 19 nt, Artificial Sequence
  Description of Artificial Sequence: Synthetic oligonucleotide
ccucuuggguuuagguguu

SEQ ID NO: 3054657 - RNA, 19 nt, Artificial Sequence
  Description of Artificial Sequence: Synthetic oligonucleotide
ccuuggcacuccaguuaua

SEQ ID NO: 3054658 - RNA, 19 nt, Artificial Sequence
  Description of Artificial Sequence: Synthetic oligonucleotide
cucuugcgcuuagcagggu

SEQ ID NO: 3054659 - RNA, 19 nt, Artificial Sequence
  Description of Artificial Sequence: Synthetic oligonucleotide
cggcacaacgugugcgucu

SEQ ID NO: 3054660 - RNA, 19 nt, Artificial Sequence
  Description of Artificial Sequence: Synthetic oligonucleotide
cgcccagucccgguagugu

SEQ ID NO: 3054661 - RNA, 19 nt, Artificial Sequence
  Description of Artificial Sequence: Synthetic oligonucleotide
cgguaguguuucgccucuu

SEQ ID NO: 3054662 - RNA, 19 nt, Artificial Sequence
  Description of Artificial Sequence: Synthetic oligonucleotide
ucuuuaaggaaauagaugg

SEQ ID NO: 3054663 - RNA, 19 nt, Artificial Sequence
  Description of Artificial Sequence: Synthetic oligonucleotide
auuaguuauacacauaccc

SEQ ID NO: 3054664 - RNA, 19 nt, Artificial Sequence
  Description of Artificial Sequence: Synthetic oligonucleotide
aguuacauuaguuauacac

SEQ ID NO: 3054665 - RNA, 19 nt, Artificial Sequence
  Description of Artificial Sequence: Synthetic oligonucleotide
aacaaauucagcucagggc

SEQ ID NO: 3054666 - RNA, 19 nt, Artificial Sequence
  Description of Artificial Sequence: Synthetic oligonucleotide
uucacauccauuaagagga

SEQ ID NO: 3054667 - RNA, 19 nt, Artificial Sequence
  Description of Artificial Sequence: Synthetic oligonucleotide
auacaaaugauuuacccac

SEQ ID NO: 3054668 - RNA, 19 nt, Artificial Sequence
  Description of Artificial Sequence: Synthetic oligonucleotide
acauuaguuauacacauac

SEQ ID NO: 3054669 - RNA, 19 nt, Artificial Sequence
  Description of Artificial Sequence: Synthetic oligonucleotide
agaaauacaaaugauuuac

SEQ ID NO: 3054670 - RNA, 19 nt, Artificial Sequence
  Description of Artificial Sequence: Synthetic oligonucleotide
aaagcaaacugcugggccc

SEQ ID NO: 3054671 - RNA, 19 nt, Artificial Sequence
  Description of Artificial Sequence: Synthetic oligonucleotide
aaaugauuuacccacggca

SEQ ID NO: 3054672 - RNA, 19 nt, Artificial Sequence
  Description of Artificial Sequence: Synthetic oligonucleotide
cuguuagucauacagaacg

SEQ ID NO: 3054673 - RNA, 19 nt, Artificial Sequence
  Description of Artificial Sequence: Synthetic oligonucleotide
aagagagaugaguaagugc

SEQ ID NO: 3054674 - RNA, 19 nt, Artificial Sequence
  Description of Artificial Sequence: Synthetic oligonucleotide
aaggcuaaaagagagauga

SEQ ID NO: 3054675 - RNA, 19 nt, Artificial Sequence
  Description of Artificial Sequence: Synthetic oligonucleotide
uaaaaggacaguuacauua

SEQ ID NO: 3054676 - RNA, 19 nt, Artificial Sequence
  Description of Artificial Sequence: Synthetic oligonucleotide
aagaggaaaggcuaaaaga

SEQ ID NO: 3054677 - RNA, 19 nt, Artificial Sequence
  Description of Artificial Sequence: Synthetic oligonucleotide
agacaaagcaaacugcugg

SEQ ID NO: 3054678 - RNA, 19 nt, Artificial Sequence
  Description of Artificial Sequence: Synthetic oligonucleotide
auaccuguuagucauacag

SEQ ID NO: 3054679 - RNA, 19 nt, Artificial Sequence
  Description of Artificial Sequence: Synthetic oligonucleotide
acaaauucagcucagggca

SEQ ID NO: 3054680 - RNA, 19 nt, Artificial Sequence
  Description of Artificial Sequence: Synthetic oligonucleotide
uuugcaagcugccugaaca

SEQ ID NO: 3054681 - RNA, 19 nt, Artificial Sequence
  Description of Artificial Sequence: Synthetic oligonucleotide
aaugauuuacccacggcac

SEQ ID NO: 3054682 - RNA, 19 nt, Artificial Sequence
  Description of Artificial Sequence: Synthetic oligonucleotide
uuaguuauacacauaccca

SEQ ID NO: 3054683 - RNA, 19 nt, Artificial Sequence
  Description of Artificial Sequence: Synthetic oligonucleotide
uaagaggaaaggcuaaaag

SEQ ID NO: 3054684 - RNA, 19 nt, Artificial Sequence
  Description of Artificial Sequence: Synthetic oligonucleotide
uaguuauacacauacccag

SEQ ID NO: 3054685 - RNA, 19 nt, Artificial Sequence
  Description of Artificial Sequence: Synthetic oligonucleotide
uagaugguuagacaaagca

SEQ ID NO: 3054686 - RNA, 19 nt, Artificial Sequence
  Description of Artificial Sequence: Synthetic oligonucleotide
aauagaugguuagacaaag

SEQ ID NO: 3054687 - RNA, 19 nt, Artificial Sequence
  Description of Artificial Sequence: Synthetic oligonucleotide
uaaaagagagaugaguaag

SEQ ID NO: 3054688 - RNA, 19 nt, Artificial Sequence
  Description of Artificial Sequence: Synthetic oligonucleotide
ucauacagaacgcuuaaga

SEQ ID NO: 3054689 - RNA, 19 nt, Artificial Sequence
  Description of Artificial Sequence: Synthetic oligonucleotide
gaacaaauucagcucaggg

SEQ ID NO: 3054690 - RNA, 19 nt, Artificial Sequence
  Description of Artificial Sequence: Synthetic oligonucleotide
auacccagugacuuaauac

SEQ ID NO: 3054691 - RNA, 19 nt, Artificial Sequence
  Description of Artificial Sequence: Synthetic oligonucleotide
gaaauagaugguuagacaa

SEQ ID NO: 3054692 - RNA, 19 nt, Artificial Sequence
  Description of Artificial Sequence: Synthetic oligonucleotide
uuuaaaaggacaguuacau

SEQ ID NO: 3054693 - RNA, 19 nt, Artificial Sequence
  Description of Artificial Sequence: Synthetic oligonucleotide
uuucuuuaaggaaauagau

SEQ ID NO: 3054694 - RNA, 19 nt, Artificial Sequence
  Description of Artificial Sequence: Synthetic oligonucleotide
guucacauccauuaagagg

SEQ ID NO: 3054695 - RNA, 19 nt, Artificial Sequence
  Description of Artificial Sequence: Synthetic oligonucleotide
uccauuaagaggaaaggcu

SEQ ID NO: 3054696 - RNA, 19 nt, Artificial Sequence
  Description of Artificial Sequence: Synthetic oligonucleotide
uacagaacgcuuaagaaau

SEQ ID NO: 3054697 - RNA, 19 nt, Artificial Sequence
  Description of Artificial Sequence: Synthetic oligonucleotide
uauacacauacccagugac

SEQ ID NO: 3054698 - RNA, 19 nt, Artificial Sequence
  Description of Artificial Sequence: Synthetic oligonucleotide
cuucauguugugaugaccc

SEQ ID NO: 3054699 - RNA, 19 nt, Artificial Sequence
  Description of Artificial Sequence: Synthetic oligonucleotide
acaguuacauuaguuauac

SEQ ID NO: 3054700 - RNA, 19 nt, Artificial Sequence
  Description of Artificial Sequence: Synthetic oligonucleotide
cauggcaugucacauauag

SEQ ID NO: 3054701 - RNA, 19 nt, Artificial Sequence
  Description of Artificial Sequence: Synthetic oligonucleotide
agaggaaaggcuaaaagag

SEQ ID NO: 3054702 - RNA, 19 nt, Artificial Sequence
  Description of Artificial Sequence: Synthetic oligonucleotide
aggaaauagaugguuagac

SEQ ID NO: 3054703 - RNA, 19 nt, Artificial Sequence
  Description of Artificial Sequence: Synthetic oligonucleotide
uacccagugacuuaauacc

SEQ ID NO: 3054704 - RNA, 19 nt, Artificial Sequence
  Description of Artificial Sequence: Synthetic oligonucleotide
uuacauuaguuauacacau

SEQ ID NO: 3054705 - RNA, 19 nt, Artificial Sequence
  Description of Artificial Sequence: Synthetic oligonucleotide
uuacccacggcacaguuca

SEQ ID NO: 3054706 - RNA, 19 nt, Artificial Sequence
  Description of Artificial Sequence: Synthetic oligonucleotide
gacaaagcaaacugcuggg

SEQ ID NO: 3054707 - RNA, 19 nt, Artificial Sequence
  Description of Artificial Sequence: Synthetic oligonucleotide
aguaagugcuugcuguucg

SEQ ID NO: 3054708 - RNA, 19 nt, Artificial Sequence
  Description of Artificial Sequence: Synthetic oligonucleotide
acaaaugauuuacccacgg

SEQ ID NO: 3054709 - RNA, 19 nt, Artificial Sequence
  Description of Artificial Sequence: Synthetic oligonucleotide
auccauuaagaggaaaggc

SEQ ID NO: 3054710 - RNA, 19 nt, Artificial Sequence
  Description of Artificial Sequence: Synthetic oligonucleotide
aagugcuugcuguucgugg

SEQ ID NO: 3054711 - RNA, 19 nt, Artificial Sequence
  Description of Artificial Sequence: Synthetic oligonucleotide
uacaaaugauuuacccacg

SEQ ID NO: 3054712 - RNA, 19 nt, Artificial Sequence
  Description of Artificial Sequence: Synthetic oligonucleotide
cauauaguucuucauguug

SEQ ID NO: 3054713 - RNA, 19 nt, Artificial Sequence
  Description of Artificial Sequence: Synthetic oligonucleotide
acgcuuaagaaauacaaau

SEQ ID NO: 3054714 - RNA, 19 nt, Artificial Sequence
  Description of Artificial Sequence: Synthetic oligonucleotide
ugccugaacaaauucagcu

SEQ ID NO: 3054715 - RNA, 19 nt, Artificial Sequence
  Description of Artificial Sequence: Synthetic oligonucleotide
aagaaauacaaaugauuua

SEQ ID NO: 3054716 - RNA, 19 nt, Artificial Sequence
  Description of Artificial Sequence: Synthetic oligonucleotide
aaaaggacaguuacauuag

SEQ ID NO: 3054717 - RNA, 19 nt, Artificial Sequence
  Description of Artificial Sequence: Synthetic oligonucleotide
uuaaggaaauagaugguua

SEQ ID NO: 3054718 - RNA, 19 nt, Artificial Sequence
  Description of Artificial Sequence: Synthetic oligonucleotide
gugacuuaauaccuguuag

SEQ ID NO: 3054719 - RNA, 19 nt, Artificial Sequence
  Description of Artificial Sequence: Synthetic oligonucleotide
uggcaugucacauauaguu

SEQ ID NO: 3054720 - RNA, 19 nt, Artificial Sequence
  Description of Artificial Sequence: Synthetic oligonucleotide
acaguucacauccauuaag

SEQ ID NO: 3054721 - RNA, 19 nt, Artificial Sequence
  Description of Artificial Sequence: Synthetic oligonucleotide
gguuagacaaagcaaacug

SEQ ID NO: 3054722 - RNA, 19 nt, Artificial Sequence
  Description of Artificial Sequence: Synthetic oligonucleotide
augaguaagugcuugcugu

SEQ ID NO: 3054723 - RNA, 19 nt, Artificial Sequence
  Description of Artificial Sequence: Synthetic oligonucleotide
cacggcacaguucacaucc

SEQ ID NO: 3054724 - RNA, 19 nt, Artificial Sequence
  Description of Artificial Sequence: Synthetic oligonucleotide
cugugaacagcucuguugc

SEQ ID NO: 3054725 - RNA, 19 nt, Artificial Sequence
  Description of Artificial Sequence: Synthetic oligonucleotide
uguuagucauacagaacgc

SEQ ID NO: 3054726 - RNA, 19 nt, Artificial Sequence
  Description of Artificial Sequence: Synthetic oligonucleotide
auacagaacgcuuaagaaa

SEQ ID NO: 3054727 - RNA, 19 nt, Artificial Sequence
  Description of Artificial Sequence: Synthetic oligonucleotide
gaugguuagacaaagcaaa

SEQ ID NO: 3054728 - RNA, 19 nt, Artificial Sequence
  Description of Artificial Sequence: Synthetic oligonucleotide
ugucacauauaguucuuca

SEQ ID NO: 3054729 - RNA, 19 nt, Artificial Sequence
  Description of Artificial Sequence: Synthetic oligonucleotide
acuuaauaccuguuaguca

SEQ ID NO: 3054730 - RNA, 19 nt, Artificial Sequence
  Description of Artificial Sequence: Synthetic oligonucleotide
aguucacauccauuaagag

SEQ ID NO: 3054731 - RNA, 19 nt, Artificial Sequence
  Description of Artificial Sequence: Synthetic oligonucleotide
gcuuaagaaauacaaauga

SEQ ID NO: 3054732 - RNA, 19 nt, Artificial Sequence
  Description of Artificial Sequence: Synthetic oligonucleotide
uucagcucagggcacaaga

SEQ ID NO: 3054733 - RNA, 19 nt, Artificial Sequence
  Description of Artificial Sequence: Synthetic oligonucleotide
aaaagagagaugaguaagu

SEQ ID NO: 3054734 - RNA, 19 nt, Artificial Sequence
  Description of Artificial Sequence: Synthetic oligonucleotide
aggaaaggcuaaaagagag

SEQ ID NO: 3054735 - RNA, 19 nt, Artificial Sequence
  Description of Artificial Sequence: Synthetic oligonucleotide
uuuaaggaaauagaugguu

SEQ ID NO: 3054736 - RNA, 19 nt, Artificial Sequence
  Description of Artificial Sequence: Synthetic oligonucleotide
ugaacagcucuguugcugc

SEQ ID NO: 3054737 - RNA, 19 nt, Artificial Sequence
  Description of Artificial Sequence: Synthetic oligonucleotide
cauuaguuauacacauacc

SEQ ID NO: 3054738 - RNA, 19 nt, Artificial Sequence
  Description of Artificial Sequence: Synthetic oligonucleotide
gacuuaauaccuguuaguc

SEQ ID NO: 3054739 - RNA, 19 nt, Artificial Sequence
  Description of Artificial Sequence: Synthetic oligonucleotide
caaagcaaacugcugggcc

SEQ ID NO: 3054740 - RNA, 19 nt, Artificial Sequence
  Description of Artificial Sequence: Synthetic oligonucleotide
guuacauuaguuauacaca

SEQ ID NO: 3054741 - RNA, 19 nt, Artificial Sequence
  Description of Artificial Sequence: Synthetic oligonucleotide
uaguucuucauguugugau

SEQ ID NO: 3054742 - RNA, 19 nt, Artificial Sequence
  Description of Artificial Sequence: Synthetic oligonucleotide
guugcugcagccuguaccc

SEQ ID NO: 3054743 - RNA, 19 nt, Artificial Sequence
  Description of Artificial Sequence: Synthetic oligonucleotide
acccacaaggcuuugcaag

SEQ ID NO: 3054744 - RNA, 19 nt, Artificial Sequence
  Description of Artificial Sequence: Synthetic oligonucleotide
guuagacaaagcaaacugc

SEQ ID NO: 3054745 - RNA, 19 nt, Artificial Sequence
  Description of Artificial Sequence: Synthetic oligonucleotide
ugacuuaauaccuguuagu

SEQ ID NO: 3054746 - RNA, 19 nt, Artificial Sequence
  Description of Artificial Sequence: Synthetic oligonucleotide
acauccauuaagaggaaag

SEQ ID NO: 3054747 - RNA, 19 nt, Artificial Sequence
  Description of Artificial Sequence: Synthetic oligonucleotide
acagcucuguugcugcagc

SEQ ID NO: 3054748 - RNA, 19 nt, Artificial Sequence
  Description of Artificial Sequence: Synthetic oligonucleotide
cauccauuaagaggaaagg

SEQ ID NO: 3054749 - RNA, 19 nt, Artificial Sequence
  Description of Artificial Sequence: Synthetic oligonucleotide
uuagucauacagaacgcuu

SEQ ID NO: 3054750 - RNA, 19 nt, Artificial Sequence
  Description of Artificial Sequence: Synthetic oligonucleotide
aggacaguuacauuaguua

SEQ ID NO: 3054751 - RNA, 19 nt, Artificial Sequence
  Description of Artificial Sequence: Synthetic oligonucleotide
ugaacaaauucagcucagg

SEQ ID NO: 3054752 - RNA, 19 nt, Artificial Sequence
  Description of Artificial Sequence: Synthetic oligonucleotide
aacugcugggcccugcaug

SEQ ID NO: 3054753 - RNA, 19 nt, Artificial Sequence
  Description of Artificial Sequence: Synthetic oligonucleotide
aaaggacaguuacauuagu

SEQ ID NO: 3054754 - RNA, 19 nt, Artificial Sequence
  Description of Artificial Sequence: Synthetic oligonucleotide
ugauuuacccacggcacag

SEQ ID NO: 3054755 - RNA, 19 nt, Artificial Sequence
  Description of Artificial Sequence: Synthetic oligonucleotide
accuguuagucauacagaa

SEQ ID NO: 3054756 - RNA, 19 nt, Artificial Sequence
  Description of Artificial Sequence: Synthetic oligonucleotide
gaacgcuuaagaaauacaa

SEQ ID NO: 3054757 - RNA, 19 nt, Artificial Sequence
  Description of Artificial Sequence: Synthetic oligonucleotide
acaaagcaaacugcugggc

SEQ ID NO: 3054758 - RNA, 19 nt, Artificial Sequence
  Description of Artificial Sequence: Synthetic oligonucleotide
cuuaauaccuguuagucau

SEQ ID NO: 3054759 - RNA, 19 nt, Artificial Sequence
  Description of Artificial Sequence: Synthetic oligonucleotide
agugacuuaauaccuguua

SEQ ID NO: 3054760 - RNA, 19 nt, Artificial Sequence
  Description of Artificial Sequence: Synthetic oligonucleotide
guucguggaagccugcuug

SEQ ID NO: 3054761 - RNA, 19 nt, Artificial Sequence
  Description of Artificial Sequence: Synthetic oligonucleotide
uagucauacagaacgcuua

SEQ ID NO: 3054762 - RNA, 19 nt, Artificial Sequence
  Description of Artificial Sequence: Synthetic oligonucleotide
auagaugguuagacaaagc

SEQ ID NO: 3054763 - RNA, 19 nt, Artificial Sequence
  Description of Artificial Sequence: Synthetic oligonucleotide
caaaugauuuacccacggc

SEQ ID NO: 3054764 - RNA, 19 nt, Artificial Sequence
  Description of Artificial Sequence: Synthetic oligonucleotide
aguucuucauguugugaug

SEQ ID NO: 3054765 - RNA, 19 nt, Artificial Sequence
  Description of Artificial Sequence: Synthetic oligonucleotide
uucguggaagccugcuugg

SEQ ID NO: 3054766 - RNA, 19 nt, Artificial Sequence
  Description of Artificial Sequence: Synthetic oligonucleotide
aauaccuguuagucauaca

SEQ ID NO: 3054767 - RNA, 19 nt, Artificial Sequence
  Description of Artificial Sequence: Synthetic oligonucleotide
acaaggcuuugcaagcugc

SEQ ID NO: 3054768 - RNA, 19 nt, Artificial Sequence
  Description of Artificial Sequence: Synthetic oligonucleotide
ucuucauguugugaugacc

SEQ ID NO: 3054769 - RNA, 19 nt, Artificial Sequence
  Description of Artificial Sequence: Synthetic oligonucleotide
gagaugaguaagugcuugc

SEQ ID NO: 3054770 - RNA, 19 nt, Artificial Sequence
  Description of Artificial Sequence: Synthetic oligonucleotide
cauacagaacgcuuaagaa

SEQ ID NO: 3054771 - RNA, 19 nt, Artificial Sequence
  Description of Artificial Sequence: Synthetic oligonucleotide
uaauaccuguuagucauac

SEQ ID NO: 3054772 - RNA, 19 nt, Artificial Sequence
  Description of Artificial Sequence: Synthetic oligonucleotide
ugcuguucguggaagccug

SEQ ID NO: 3054773 - RNA, 19 nt, Artificial Sequence
  Description of Artificial Sequence: Synthetic oligonucleotide
cuaaaagagagaugaguaa

SEQ ID NO: 3054774 - RNA, 19 nt, Artificial Sequence
  Description of Artificial Sequence: Synthetic oligonucleotide
augguuagacaaagcaaac

SEQ ID NO: 3054775 - RNA, 19 nt, Artificial Sequence
  Description of Artificial Sequence: Synthetic oligonucleotide
aaaggcuaaaagagagaug

SEQ ID NO: 3054776 - RNA, 19 nt, Artificial Sequence
  Description of Artificial Sequence: Synthetic oligonucleotide
aagacauggcaugucacau

SEQ ID NO: 3054777 - RNA, 19 nt, Artificial Sequence
  Description of Artificial Sequence: Synthetic oligonucleotide
cucagggcacaagacaugg

SEQ ID NO: 3054778 - RNA, 19 nt, Artificial Sequence
  Description of Artificial Sequence: Synthetic oligonucleotide
uacacauacccagugacuu

SEQ ID NO: 3054779 - RNA, 19 nt, Artificial Sequence
  Description of Artificial Sequence: Synthetic oligonucleotide
aacgcuuaagaaauacaaa

SEQ ID NO: 3054780 - RNA, 19 nt, Artificial Sequence
  Description of Artificial Sequence: Synthetic oligonucleotide
uuaagaggaaaggcuaaaa

SEQ ID NO: 3054781 - RNA, 19 nt, Artificial Sequence
  Description of Artificial Sequence: Synthetic oligonucleotide
ucagcucagggcacaagac

SEQ ID NO: 3054782 - RNA, 19 nt, Artificial Sequence
  Description of Artificial Sequence: Synthetic oligonucleotide
ugguuagacaaagcaaacu

SEQ ID NO: 3054783 - RNA, 19 nt, Artificial Sequence
  Description of Artificial Sequence: Synthetic oligonucleotide
augauuuacccacggcaca

SEQ ID NO: 3054784 - RNA, 19 nt, Artificial Sequence
  Description of Artificial Sequence: Synthetic oligonucleotide
cugaacaaauucagcucag

SEQ ID NO: 3054785 - RNA, 19 nt, Artificial Sequence
  Description of Artificial Sequence: Synthetic oligonucleotide
uuaaaaggacaguuacauu

SEQ ID NO: 3054786 - RNA, 19 nt, Artificial Sequence
  Description of Artificial Sequence: Synthetic oligonucleotide
caguucacauccauuaaga

SEQ ID NO: 3054787 - RNA, 19 nt, Artificial Sequence
  Description of Artificial Sequence: Synthetic oligonucleotide
gaaaggcuaaaagagagau

SEQ ID NO: 3054788 - RNA, 19 nt, Artificial Sequence
  Description of Artificial Sequence: Synthetic oligonucleotide
acaagacauggcaugucac

SEQ ID NO: 3054789 - RNA, 19 nt, Artificial Sequence
  Description of Artificial Sequence: Synthetic oligonucleotide
auggccugugaacagcucu

SEQ ID NO: 3054790 - RNA, 19 nt, Artificial Sequence
  Description of Artificial Sequence: Synthetic oligonucleotide
uacauuaguuauacacaua

SEQ ID NO: 3054791 - RNA, 19 nt, Artificial Sequence
  Description of Artificial Sequence: Synthetic oligonucleotide
ggaaauagaugguuagaca

SEQ ID NO: 3054792 - RNA, 19 nt, Artificial Sequence
  Description of Artificial Sequence: Synthetic oligonucleotide
cacauauaguucuucaugu

SEQ ID NO: 3054793 - RNA, 19 nt, Artificial Sequence
  Description of Artificial Sequence: Synthetic oligonucleotide
uuuacccacggcacaguuc

SEQ ID NO: 3054794 - RNA, 19 nt, Artificial Sequence
  Description of Artificial Sequence: Synthetic oligonucleotide
cuuaagaaauacaaaugau

SEQ ID NO: 3054795 - RNA, 19 nt, Artificial Sequence
  Description of Artificial Sequence: Synthetic oligonucleotide
agucauacagaacgcuuaa

SEQ ID NO: 3054796 - RNA, 19 nt, Artificial Sequence
  Description of Artificial Sequence: Synthetic oligonucleotide
aaauucagcucagggcaca

SEQ ID NO: 3054797 - RNA, 19 nt, Artificial Sequence
  Description of Artificial Sequence: Synthetic oligonucleotide
cagccuguacccacaaggc

SEQ ID NO: 3054798 - RNA, 19 nt, Artificial Sequence
  Description of Artificial Sequence: Synthetic oligonucleotide
uggccugugaacagcucug

SEQ ID NO: 3054799 - RNA, 19 nt, Artificial Sequence
  Description of Artificial Sequence: Synthetic oligonucleotide
cagaacgcuuaagaaauac

SEQ ID NO: 3054800 - RNA, 19 nt, Artificial Sequence
  Description of Artificial Sequence: Synthetic oligonucleotide
gaggaaaggcuaaaagaga

SEQ ID NO: 3054801 - RNA, 19 nt, Artificial Sequence
  Description of Artificial Sequence: Synthetic oligonucleotide
aacagcucuguugcugcag

SEQ ID NO: 3054802 - RNA, 19 nt, Artificial Sequence
  Description of Artificial Sequence: Synthetic oligonucleotide
cuugcuguucguggaagcc

SEQ ID NO: 3054803 - RNA, 19 nt, Artificial Sequence
  Description of Artificial Sequence: Synthetic oligonucleotide
caaauucagcucagggcac

SEQ ID NO: 3054804 - RNA, 19 nt, Artificial Sequence
  Description of Artificial Sequence: Synthetic oligonucleotide
aaggacaguuacauuaguu

SEQ ID NO: 3054805 - RNA, 19 nt, Artificial Sequence
  Description of Artificial Sequence: Synthetic oligonucleotide
agaugguuagacaaagcaa

SEQ ID NO: 3054806 - RNA, 19 nt, Artificial Sequence
  Description of Artificial Sequence: Synthetic oligonucleotide
aguuauacacauacccagu

SEQ ID NO: 3054807 - RNA, 19 nt, Artificial Sequence
  Description of Artificial Sequence: Synthetic oligonucleotide
acauauaguucuucauguu

SEQ ID NO: 3054808 - RNA, 19 nt, Artificial Sequence
  Description of Artificial Sequence: Synthetic oligonucleotide
cugccugaacaaauucagc

SEQ ID NO: 3054809 - RNA, 19 nt, Artificial Sequence
  Description of Artificial Sequence: Synthetic oligonucleotide
uucuucauguugugaugac

SEQ ID NO: 3054810 - RNA, 19 nt, Artificial Sequence
  Description of Artificial Sequence: Synthetic oligonucleotide
augucacauauaguucuuc

SEQ ID NO: 3054811 - RNA, 19 nt, Artificial Sequence
  Description of Artificial Sequence: Synthetic oligonucleotide
guucuucauguugugauga

SEQ ID NO: 3054812 - RNA, 19 nt, Artificial Sequence
  Description of Artificial Sequence: Synthetic oligonucleotide
cauuaagaggaaaggcuaa

SEQ ID NO: 3054813 - RNA, 19 nt, Artificial Sequence
  Description of Artificial Sequence: Synthetic oligonucleotide
auuaagaggaaaggcuaaa

SEQ ID NO: 3054814 - RNA, 19 nt, Artificial Sequence
  Description of Artificial Sequence: Synthetic oligonucleotide
gacauggcaugucacauau

SEQ ID NO: 3054815 - RNA, 19 nt, Artificial Sequence
  Description of Artificial Sequence: Synthetic oligonucleotide
uaagugcuugcuguucgug

SEQ ID NO: 3054816 - RNA, 19 nt, Artificial Sequence
  Description of Artificial Sequence: Synthetic oligonucleotide
cacaagacauggcauguca

SEQ ID NO: 3054817 - RNA, 19 nt, Artificial Sequence
  Description of Artificial Sequence: Synthetic oligonucleotide
ugaguaagugcuugcuguu

SEQ ID NO: 3054818 - RNA, 19 nt, Artificial Sequence
  Description of Artificial Sequence: Synthetic oligonucleotide
uuaauaccuguuagucaua

SEQ ID NO: 3054819 - RNA, 19 nt, Artificial Sequence
  Description of Artificial Sequence: Synthetic oligonucleotide
agaacgcuuaagaaauaca

SEQ ID NO: 3054820 - RNA, 19 nt, Artificial Sequence
  Description of Artificial Sequence: Synthetic oligonucleotide
guacccacaaggcuuugca

SEQ ID NO: 3054821 - RNA, 19 nt, Artificial Sequence
  Description of Artificial Sequence: Synthetic oligonucleotide
uugcaagcugccugaacaa

SEQ ID NO: 3054822 - RNA, 19 nt, Artificial Sequence
  Description of Artificial Sequence: Synthetic oligonucleotide
ccugugaacagcucuguug

SEQ ID NO: 3054823 - RNA, 19 nt, Artificial Sequence
  Description of Artificial Sequence: Synthetic oligonucleotide
gugaacagcucuguugcug

SEQ ID NO: 3054824 - RNA, 19 nt, Artificial Sequence
  Description of Artificial Sequence: Synthetic oligonucleotide
aagcaaacugcugggcccu

SEQ ID NO: 3054825 - RNA, 19 nt, Artificial Sequence
  Description of Artificial Sequence: Synthetic oligonucleotide
gcuaaaagagagaugagua

SEQ ID NO: 3054826 - RNA, 19 nt, Artificial Sequence
  Description of Artificial Sequence: Synthetic oligonucleotide
gcugccugaacaaauucag

SEQ ID NO: 3054827 - RNA, 19 nt, Artificial Sequence
  Description of Artificial Sequence: Synthetic oligonucleotide
ugcauggccugugaacagc

SEQ ID NO: 3054828 - RNA, 19 nt, Artificial Sequence
  Description of Artificial Sequence: Synthetic oligonucleotide
ucagggcacaagacauggc

SEQ ID NO: 3054829 - RNA, 19 nt, Artificial Sequence
  Description of Artificial Sequence: Synthetic oligonucleotide
agccuguacccacaaggcu

SEQ ID NO: 3054830 - RNA, 19 nt, Artificial Sequence
  Description of Artificial Sequence: Synthetic oligonucleotide
ugcuugcuguucguggaag

SEQ ID NO: 3054831 - RNA, 19 nt, Artificial Sequence
  Description of Artificial Sequence: Synthetic oligonucleotide
ugcugggcccugcauggcc

SEQ ID NO: 3054832 - RNA, 19 nt, Artificial Sequence
  Description of Artificial Sequence: Synthetic oligonucleotide
uguacccacaaggcuuugc

SEQ ID NO: 3054833 - RNA, 19 nt, Artificial Sequence
  Description of Artificial Sequence: Synthetic oligonucleotide
gacaguuacauuaguuaua

SEQ ID NO: 3054834 - RNA, 19 nt, Artificial Sequence
  Description of Artificial Sequence: Synthetic oligonucleotide
ugugaacagcucuguugcu

SEQ ID NO: 3054835 - RNA, 19 nt, Artificial Sequence
  Description of Artificial Sequence: Synthetic oligonucleotide
auuuacccacggcacaguu

SEQ ID NO: 3054836 - RNA, 19 nt, Artificial Sequence
  Description of Artificial Sequence: Synthetic oligonucleotide
auacacauacccagugacu

SEQ ID NO: 3054837 - RNA, 19 nt, Artificial Sequence
  Description of Artificial Sequence: Synthetic oligonucleotide
uugcuguucguggaagccu

SEQ ID NO: 3054838 - RNA, 19 nt, Artificial Sequence
  Description of Artificial Sequence: Synthetic oligonucleotide
uguucguggaagccugcuu

SEQ ID NO: 3054839 - RNA, 19 nt, Artificial Sequence
  Description of Artificial Sequence: Synthetic oligonucleotide
guggaagccugcuugggaa

SEQ ID NO: 3054840 - RNA, 19 nt, Artificial Sequence
  Description of Artificial Sequence: Synthetic oligonucleotide
cuuuaaggaaauagauggu

SEQ ID NO: 3054841 - RNA, 19 nt, Artificial Sequence
  Description of Artificial Sequence: Synthetic oligonucleotide
cacaaggcuuugcaagcug

SEQ ID NO: 3054842 - RNA, 19 nt, Artificial Sequence
  Description of Artificial Sequence: Synthetic oligonucleotide
gucauacagaacgcuuaag

SEQ ID NO: 3054843 - RNA, 19 nt, Artificial Sequence
  Description of Artificial Sequence: Synthetic oligonucleotide
ugcugcagccuguacccac

SEQ ID NO: 3054844 - RNA, 19 nt, Artificial Sequence
  Description of Artificial Sequence: Synthetic oligonucleotide
agcucagggcacaagacau

SEQ ID NO: 3054845 - RNA, 19 nt, Artificial Sequence
  Description of Artificial Sequence: Synthetic oligonucleotide
ucguggaagccugcuuggg

SEQ ID NO: 3054846 - RNA, 19 nt, Artificial Sequence
  Description of Artificial Sequence: Synthetic oligonucleotide
gcaugucacauauaguucu

SEQ ID NO: 3054847 - RNA, 19 nt, Artificial Sequence
  Description of Artificial Sequence: Synthetic oligonucleotide
uacccacaaggcuuugcaa

SEQ ID NO: 3054848 - RNA, 19 nt, Artificial Sequence
  Description of Artificial Sequence: Synthetic oligonucleotide
gaguaagugcuugcuguuc

SEQ ID NO: 3054849 - RNA, 19 nt, Artificial Sequence
  Description of Artificial Sequence: Synthetic oligonucleotide
acccagugacuuaauaccu

SEQ ID NO: 3054850 - RNA, 19 nt, Artificial Sequence
  Description of Artificial Sequence: Synthetic oligonucleotide
gcacaguucacauccauua

SEQ ID NO: 3054851 - RNA, 19 nt, Artificial Sequence
  Description of Artificial Sequence: Synthetic oligonucleotide
gggcacaagacauggcaug

SEQ ID NO: 3054852 - RNA, 19 nt, Artificial Sequence
  Description of Artificial Sequence: Synthetic oligonucleotide
aauucagcucagggcacaa

SEQ ID NO: 3054853 - RNA, 19 nt, Artificial Sequence
  Description of Artificial Sequence: Synthetic oligonucleotide
gccugaacaaauucagcuc

SEQ ID NO: 3054854 - RNA, 19 nt, Artificial Sequence
  Description of Artificial Sequence: Synthetic oligonucleotide
ucacauccauuaagaggaa

SEQ ID NO: 3054855 - RNA, 19 nt, Artificial Sequence
  Description of Artificial Sequence: Synthetic oligonucleotide
agacauggcaugucacaua

SEQ ID NO: 3054856 - RNA, 19 nt, Artificial Sequence
  Description of Artificial Sequence: Synthetic oligonucleotide
cugcauggccugugaacag

SEQ ID NO: 3054857 - RNA, 19 nt, Artificial Sequence
  Description of Artificial Sequence: Synthetic oligonucleotide
guuagucauacagaacgcu

SEQ ID NO: 3054858 - RNA, 19 nt, Artificial Sequence
  Description of Artificial Sequence: Synthetic oligonucleotide
ugcaagcugccugaacaaa

SEQ ID NO: 3054859 - RNA, 19 nt, Artificial Sequence
  Description of Artificial Sequence: Synthetic oligonucleotide
ggacaguuacauuaguuau

SEQ ID NO: 3054860 - RNA, 19 nt, Artificial Sequence
  Description of Artificial Sequence: Synthetic oligonucleotide
acacauacccagugacuua

SEQ ID NO: 3054861 - RNA, 19 nt, Artificial Sequence
  Description of Artificial Sequence: Synthetic oligonucleotide
uggaagccugcuugggaau

SEQ ID NO: 3054862 - RNA, 19 nt, Artificial Sequence
  Description of Artificial Sequence: Synthetic oligonucleotide
gucacauauaguucuucau

SEQ ID NO: 3054863 - RNA, 19 nt, Artificial Sequence
  Description of Artificial Sequence: Synthetic oligonucleotide
ccauuaagaggaaaggcua

SEQ ID NO: 3054864 - RNA, 19 nt, Artificial Sequence
  Description of Artificial Sequence: Synthetic oligonucleotide
ccuguuagucauacagaac

SEQ ID NO: 3054865 - RNA, 19 nt, Artificial Sequence
  Description of Artificial Sequence: Synthetic oligonucleotide
cagcucagggcacaagaca

SEQ ID NO: 3054866 - RNA, 19 nt, Artificial Sequence
  Description of Artificial Sequence: Synthetic oligonucleotide
cagcucuguugcugcagcc

SEQ ID NO: 3054867 - RNA, 19 nt, Artificial Sequence
  Description of Artificial Sequence: Synthetic oligonucleotide
aggcuaaaagagagaugag

SEQ ID NO: 3054868 - RNA, 19 nt, Artificial Sequence
  Description of Artificial Sequence: Synthetic oligonucleotide
gaacagcucuguugcugca

SEQ ID NO: 3054869 - RNA, 19 nt, Artificial Sequence
  Description of Artificial Sequence: Synthetic oligonucleotide
ggcuaaaagagagaugagu

SEQ ID NO: 3054870 - RNA, 19 nt, Artificial Sequence
  Description of Artificial Sequence: Synthetic oligonucleotide
cauacccagugacuuaaua

SEQ ID NO: 3054871 - RNA, 19 nt, Artificial Sequence
  Description of Artificial Sequence: Synthetic oligonucleotide
ggcaugucacauauaguuc

SEQ ID NO: 3054872 - RNA, 19 nt, Artificial Sequence
  Description of Artificial Sequence: Synthetic oligonucleotide
auucagcucagggcacaag

SEQ ID NO: 3054873 - RNA, 19 nt, Artificial Sequence
  Description of Artificial Sequence: Synthetic oligonucleotide
cacauacccagugacuuaa

SEQ ID NO: 3054874 - RNA, 19 nt, Artificial Sequence
  Description of Artificial Sequence: Synthetic oligonucleotide
gcuugcuguucguggaagc

SEQ ID NO: 3054875 - RNA, 19 nt, Artificial Sequence
  Description of Artificial Sequence: Synthetic oligonucleotide
ucuguugcugcagccugua

SEQ ID NO: 3054876 - RNA, 19 nt, Artificial Sequence
  Description of Artificial Sequence: Synthetic oligonucleotide
auggcaugucacauauagu

SEQ ID NO: 3054877 - RNA, 19 nt, Artificial Sequence
  Description of Artificial Sequence: Synthetic oligonucleotide
ggcuuugcaagcugccuga

SEQ ID NO: 3054878 - RNA, 19 nt, Artificial Sequence
  Description of Artificial Sequence: Synthetic oligonucleotide
cccagugacuuaauaccug

SEQ ID NO: 3054879 - RNA, 19 nt, Artificial Sequence
  Description of Artificial Sequence: Synthetic oligonucleotide
ggaaaggcuaaaagagaga

SEQ ID NO: 3054880 - RNA, 19 nt, Artificial Sequence
  Description of Artificial Sequence: Synthetic oligonucleotide
caaacugcugggcccugca

SEQ ID NO: 3054881 - RNA, 19 nt, Artificial Sequence
  Description of Artificial Sequence: Synthetic oligonucleotide
agggcacaagacauggcau

SEQ ID NO: 3054882 - RNA, 19 nt, Artificial Sequence
  Description of Artificial Sequence: Synthetic oligonucleotide
cauggccugugaacagcuc

SEQ ID NO: 3054883 - RNA, 19 nt, Artificial Sequence
  Description of Artificial Sequence: Synthetic oligonucleotide
acccacggcacaguucaca

SEQ ID NO: 3054884 - RNA, 19 nt, Artificial Sequence
  Description of Artificial Sequence: Synthetic oligonucleotide
caguuacauuaguuauaca

SEQ ID NO: 3054885 - RNA, 19 nt, Artificial Sequence
  Description of Artificial Sequence: Synthetic oligonucleotide
guaagugcuugcuguucgu

SEQ ID NO: 3054886 - RNA, 19 nt, Artificial Sequence
  Description of Artificial Sequence: Synthetic oligonucleotide
ccugcauggccugugaaca

SEQ ID NO: 3054887 - RNA, 19 nt, Artificial Sequence
  Description of Artificial Sequence: Synthetic oligonucleotide
cccugcauggccugugaac

SEQ ID NO: 3054888 - RNA, 19 nt, Artificial Sequence
  Description of Artificial Sequence: Synthetic oligonucleotide
caagcugccugaacaaauu

SEQ ID NO: 3054889 - RNA, 19 nt, Artificial Sequence
  Description of Artificial Sequence: Synthetic oligonucleotide
gaagccugcuugggaaucu

SEQ ID NO: 3054890 - RNA, 19 nt, Artificial Sequence
  Description of Artificial Sequence: Synthetic oligonucleotide
uugcugcagccuguaccca

SEQ ID NO: 3054891 - RNA, 19 nt, Artificial Sequence
  Description of Artificial Sequence: Synthetic oligonucleotide
gauuuacccacggcacagu

SEQ ID NO: 3054892 - RNA, 19 nt, Artificial Sequence
  Description of Artificial Sequence: Synthetic oligonucleotide
cacauccauuaagaggaaa

SEQ ID NO: 3054893 - RNA, 19 nt, Artificial Sequence
  Description of Artificial Sequence: Synthetic oligonucleotide
acagaacgcuuaagaaaua

SEQ ID NO: 3054894 - RNA, 19 nt, Artificial Sequence
  Description of Artificial Sequence: Synthetic oligonucleotide
gugcuugcuguucguggaa

SEQ ID NO: 3054895 - RNA, 19 nt, Artificial Sequence
  Description of Artificial Sequence: Synthetic oligonucleotide
uacccacggcacaguucac

SEQ ID NO: 3054896 - RNA, 19 nt, Artificial Sequence
  Description of Artificial Sequence: Synthetic oligonucleotide
caugucacauauaguucuu

SEQ ID NO: 3054897 - RNA, 19 nt, Artificial Sequence
  Description of Artificial Sequence: Synthetic oligonucleotide
ggaagccugcuugggaauc

SEQ ID NO: 3054898 - RNA, 19 nt, Artificial Sequence
  Description of Artificial Sequence: Synthetic oligonucleotide
ccagugacuuaauaccugu

SEQ ID NO: 3054899 - RNA, 19 nt, Artificial Sequence
  Description of Artificial Sequence: Synthetic oligonucleotide
gcucagggcacaagacaug

SEQ ID NO: 3054900 - RNA, 19 nt, Artificial Sequence
  Description of Artificial Sequence: Synthetic oligonucleotide
agcaaacugcugggcccug

SEQ ID NO: 3054901 - RNA, 19 nt, Artificial Sequence
  Description of Artificial Sequence: Synthetic oligonucleotide
ggcacaagacauggcaugu

SEQ ID NO: 3054902 - RNA, 19 nt, Artificial Sequence
  Description of Artificial Sequence: Synthetic oligonucleotide
acauacccagugacuuaau

SEQ ID NO: 3054903 - RNA, 19 nt, Artificial Sequence
  Description of Artificial Sequence: Synthetic oligonucleotide
gcaaacugcugggcccugc

SEQ ID NO: 3054904 - RNA, 19 nt, Artificial Sequence
  Description of Artificial Sequence: Synthetic oligonucleotide
gcacaagacauggcauguc

SEQ ID NO: 3054905 - RNA, 19 nt, Artificial Sequence
  Description of Artificial Sequence: Synthetic oligonucleotide
cugcugggcccugcauggc

SEQ ID NO: 3054906 - RNA, 19 nt, Artificial Sequence
  Description of Artificial Sequence: Synthetic oligonucleotide
cuguacccacaaggcuuug

SEQ ID NO: 3054907 - RNA, 19 nt, Artificial Sequence
  Description of Artificial Sequence: Synthetic oligonucleotide
acggcacaguucacaucca

SEQ ID NO: 3054908 - RNA, 19 nt, Artificial Sequence
  Description of Artificial Sequence: Synthetic oligonucleotide
cagugacuuaauaccuguu

SEQ ID NO: 3054909 - RNA, 19 nt, Artificial Sequence
  Description of Artificial Sequence: Synthetic oligonucleotide
gcaagcugccugaacaaau

SEQ ID NO: 3054910 - RNA, 19 nt, Artificial Sequence
  Description of Artificial Sequence: Synthetic oligonucleotide
gcuguucguggaagccugc

SEQ ID NO: 3054911 - RNA, 19 nt, Artificial Sequence
  Description of Artificial Sequence: Synthetic oligonucleotide
gcugcagccuguacccaca

SEQ ID NO: 3054912 - RNA, 19 nt, Artificial Sequence
  Description of Artificial Sequence: Synthetic oligonucleotide
gccuguacccacaaggcuu

SEQ ID NO: 3054913 - RNA, 19 nt, Artificial Sequence
  Description of Artificial Sequence: Synthetic oligonucleotide
acauggcaugucacauaua

SEQ ID NO: 3054914 - RNA, 19 nt, Artificial Sequence
  Description of Artificial Sequence: Synthetic oligonucleotide
cugcagccuguacccacaa

SEQ ID NO: 3054915 - RNA, 19 nt, Artificial Sequence
  Description of Artificial Sequence: Synthetic oligonucleotide
ccacggcacaguucacauc

SEQ ID NO: 3054916 - RNA, 19 nt, Artificial Sequence
  Description of Artificial Sequence: Synthetic oligonucleotide
cguggaagccugcuuggga

SEQ ID NO: 3054917 - RNA, 19 nt, Artificial Sequence
  Description of Artificial Sequence: Synthetic oligonucleotide
cuguucguggaagccugcu

SEQ ID NO: 3054918 - RNA, 19 nt, Artificial Sequence
  Description of Artificial Sequence: Synthetic oligonucleotide
ggcccugcauggccuguga

SEQ ID NO: 3054919 - RNA, 19 nt, Artificial Sequence
  Description of Artificial Sequence: Synthetic oligonucleotide
ggcacaguucacauccauu

SEQ ID NO: 3054920 - RNA, 19 nt, Artificial Sequence
  Description of Artificial Sequence: Synthetic oligonucleotide
ccuguacccacaaggcuuu

SEQ ID NO: 3054921 - RNA, 19 nt, Artificial Sequence
  Description of Artificial Sequence: Synthetic oligonucleotide
gggcccugcauggccugug

SEQ ID NO: 3054922 - RNA, 19 nt, Artificial Sequence
  Description of Artificial Sequence: Synthetic oligonucleotide
cccacggcacaguucacau

SEQ ID NO: 3054923 - RNA, 19 nt, Artificial Sequence
  Description of Artificial Sequence: Synthetic oligonucleotide
gccugcuugggaaucuuuu

SEQ ID NO: 3054924 - RNA, 19 nt, Artificial Sequence
  Description of Artificial Sequence: Synthetic oligonucleotide
gcccugcauggccugugaa

SEQ ID NO: 3054925 - RNA, 19 nt, Artificial Sequence
  Description of Artificial Sequence: Synthetic oligonucleotide
ggccugugaacagcucugu

SEQ ID NO: 3054926 - RNA, 19 nt, Artificial Sequence
  Description of Artificial Sequence: Synthetic oligonucleotide
gcugggcccugcauggccu

SEQ ID NO: 3054927 - RNA, 19 nt, Artificial Sequence
  Description of Artificial Sequence: Synthetic oligonucleotide
ccacaaggcuuugcaagcu

SEQ ID NO: 3054928 - RNA, 19 nt, Artificial Sequence
  Description of Artificial Sequence: Synthetic oligonucleotide
gccugugaacagcucuguu

SEQ ID NO: 3054929 - RNA, 19 nt, Artificial Sequence
  Description of Artificial Sequence: Synthetic oligonucleotide
cggcacaguucacauccau

SEQ ID NO: 3054930 - RNA, 19 nt, Artificial Sequence
  Description of Artificial Sequence: Synthetic oligonucleotide
cugagaauggcaaauaucc

SEQ ID NO: 3054931 - RNA, 19 nt, Artificial Sequence
  Description of Artificial Sequence: Synthetic oligonucleotide
ugaauaacagcauuuggug

SEQ ID NO: 3054932 - RNA, 19 nt, Artificial Sequence
  Description of Artificial Sequence: Synthetic oligonucleotide
gagaauggcaaauaucccc

SEQ ID NO: 3054933 - RNA, 19 nt, Artificial Sequence
  Description of Artificial Sequence: Synthetic oligonucleotide
aauaacagcauuuggugua

SEQ ID NO: 3054934 - RNA, 19 nt, Artificial Sequence
  Description of Artificial Sequence: Synthetic oligonucleotide
aacagcauuugguguaggg

SEQ ID NO: 3054935 - RNA, 19 nt, Artificial Sequence
  Description of Artificial Sequence: Synthetic oligonucleotide
aacggggcauugcaaagac

SEQ ID NO: 3054936 - RNA, 19 nt, Artificial Sequence
  Description of Artificial Sequence: Synthetic oligonucleotide
auggcaaauauccccaaag

SEQ ID NO: 3054937 - RNA, 19 nt, Artificial Sequence
  Description of Artificial Sequence: Synthetic oligonucleotide
caugaauaacagcauuugg

SEQ ID NO: 3054938 - RNA, 19 nt, Artificial Sequence
  Description of Artificial Sequence: Synthetic oligonucleotide
ggcaaauauccccaaagcg

SEQ ID NO: 3054939 - RNA, 19 nt, Artificial Sequence
  Description of Artificial Sequence: Synthetic oligonucleotide
ugagaauggcaaauauccc

SEQ ID NO: 3054940 - RNA, 19 nt, Artificial Sequence
  Description of Artificial Sequence: Synthetic oligonucleotide
acagcauuugguguagggc

SEQ ID NO: 3054941 - RNA, 19 nt, Artificial Sequence
  Description of Artificial Sequence: Synthetic oligonucleotide
uggcaaauauccccaaagc

SEQ ID NO: 3054942 - RNA, 19 nt, Artificial Sequence
  Description of Artificial Sequence: Synthetic oligonucleotide
augaauaacagcauuuggu

SEQ ID NO: 3054943 - RNA, 19 nt, Artificial Sequence
  Description of Artificial Sequence: Synthetic oligonucleotide
gcaaauauccccaaagcgc

SEQ ID NO: 3054944 - RNA, 19 nt, Artificial Sequence
  Description of Artificial Sequence: Synthetic oligonucleotide
ucuggaugccgccaccugc

SEQ ID NO: 3054945 - RNA, 19 nt, Artificial Sequence
  Description of Artificial Sequence: Synthetic oligonucleotide
ugcugagaauggcaaauau

SEQ ID NO: 3054946 - RNA, 19 nt, Artificial Sequence
  Description of Artificial Sequence: Synthetic oligonucleotide
gaauaacagcauuuggugu

SEQ ID NO: 3054947 - RNA, 19 nt, Artificial Sequence
  Description of Artificial Sequence: Synthetic oligonucleotide
cagcauuugguguagggca

SEQ ID NO: 3054948 - RNA, 19 nt, Artificial Sequence
  Description of Artificial Sequence: Synthetic oligonucleotide
auaacagcauuugguguag

SEQ ID NO: 3054949 - RNA, 19 nt, Artificial Sequence
  Description of Artificial Sequence: Synthetic oligonucleotide
caaauauccccaaagcgcu

SEQ ID NO: 3054950 - RNA, 19 nt, Artificial Sequence
  Description of Artificial Sequence: Synthetic oligonucleotide
aucucuggaugccgccacc

SEQ ID NO: 3054951 - RNA, 19 nt, Artificial Sequence
  Description of Artificial Sequence: Synthetic oligonucleotide
cggggcauugcaaagaccc

SEQ ID NO: 3054952 - RNA, 19 nt, Artificial Sequence
  Description of Artificial Sequence: Synthetic oligonucleotide
auuugguguagggcaugcg

SEQ ID NO: 3054953 - RNA, 19 nt, Artificial Sequence
  Description of Artificial Sequence: Synthetic oligonucleotide
uaacagcauuugguguagg

SEQ ID NO: 3054954 - RNA, 19 nt, Artificial Sequence
  Description of Artificial Sequence: Synthetic oligonucleotide
caucucuggaugccgccac

SEQ ID NO: 3054955 - RNA, 19 nt, Artificial Sequence
  Description of Artificial Sequence: Synthetic oligonucleotide
gcaacggggcauugcaaag

SEQ ID NO: 3054956 - RNA, 19 nt, Artificial Sequence
  Description of Artificial Sequence: Synthetic oligonucleotide
ucucuggaugccgccaccu

SEQ ID NO: 3054957 - RNA, 19 nt, Artificial Sequence
  Description of Artificial Sequence: Synthetic oligonucleotide
gcugagaauggcaaauauc

SEQ ID NO: 3054958 - RNA, 19 nt, Artificial Sequence
  Description of Artificial Sequence: Synthetic oligonucleotide
acggggcauugcaaagacc

SEQ ID NO: 3054959 - RNA, 19 nt, Artificial Sequence
  Description of Artificial Sequence: Synthetic oligonucleotide
agcauuugguguagggcau

SEQ ID NO: 3054960 - RNA, 19 nt, Artificial Sequence
  Description of Artificial Sequence: Synthetic oligonucleotide
ggcaacggggcauugcaaa

SEQ ID NO: 3054961 - RNA, 19 nt, Artificial Sequence
  Description of Artificial Sequence: Synthetic oligonucleotide
cucuggaugccgccaccug

SEQ ID NO: 3054962 - RNA, 19 nt, Artificial Sequence
  Description of Artificial Sequence: Synthetic oligonucleotide
ggggcaacggggcauugca

SEQ ID NO: 3054963 - RNA, 19 nt, Artificial Sequence
  Description of Artificial Sequence: Synthetic oligonucleotide
caacggggcauugcaaaga

SEQ ID NO: 3054964 - RNA, 19 nt, Artificial Sequence
  Description of Artificial Sequence: Synthetic oligonucleotide
gcauuugguguagggcaug

SEQ ID NO: 3054965 - RNA, 19 nt, Artificial Sequence
  Description of Artificial Sequence: Synthetic oligonucleotide
cugcugagaauggcaaaua

SEQ ID NO: 3054966 - RNA, 19 nt, Artificial Sequence
  Description of Artificial Sequence: Synthetic oligonucleotide
ccugcugagaauggcaaau

SEQ ID NO: 3054967 - RNA, 19 nt, Artificial Sequence
  Description of Artificial Sequence: Synthetic oligonucleotide
gggcaacggggcauugcaa

SEQ ID NO: 3054968 - RNA, 19 nt, Artificial Sequence
  Description of Artificial Sequence: Synthetic oligonucleotide
aaauacagcacacagaaac

SEQ ID NO: 3054969 - RNA, 19 nt, Artificial Sequence
  Description of Artificial Sequence: Synthetic oligonucleotide
aauaucaauauuuucauag

SEQ ID NO: 3054970 - RNA, 19 nt, Artificial Sequence
  Description of Artificial Sequence: Synthetic oligonucleotide
acaauuaaaaguuugauag

SEQ ID NO: 3054971 - RNA, 19 nt, Artificial Sequence
  Description of Artificial Sequence: Synthetic oligonucleotide
aagaucuucacuuucacac

SEQ ID NO: 3054972 - RNA, 19 nt, Artificial Sequence
  Description of Artificial Sequence: Synthetic oligonucleotide
uuuuaaauauauuuguugg

SEQ ID NO: 3054973 - RNA, 19 nt, Artificial Sequence
  Description of Artificial Sequence: Synthetic oligonucleotide
uauacuaucaauaauuaaa

SEQ ID NO: 3054974 - RNA, 19 nt, Artificial Sequence
  Description of Artificial Sequence: Synthetic oligonucleotide
uauaacucuuuacagauag

SEQ ID NO: 3054975 - RNA, 19 nt, Artificial Sequence
  Description of Artificial Sequence: Synthetic oligonucleotide
uaauagaaaagccagaaaa

SEQ ID NO: 3054976 - RNA, 19 nt, Artificial Sequence
  Description of Artificial Sequence: Synthetic oligonucleotide
auauuuguuggguaaauac

SEQ ID NO: 3054977 - RNA, 19 nt, Artificial Sequence
  Description of Artificial Sequence: Synthetic oligonucleotide
aacuuuauaacucuuuaca

SEQ ID NO: 3054978 - RNA, 19 nt, Artificial Sequence
  Description of Artificial Sequence: Synthetic oligonucleotide
uucacuuucacacaaccag

SEQ ID NO: 3054979 - RNA, 19 nt, Artificial Sequence
  Description of Artificial Sequence: Synthetic oligonucleotide
uuuaaauauauuuguuggg

SEQ ID NO: 3054980 - RNA, 19 nt, Artificial Sequence
  Description of Artificial Sequence: Synthetic oligonucleotide
aaacuuuauaacucuuuac

SEQ ID NO: 3054981 - RNA, 19 nt, Artificial Sequence
  Description of Artificial Sequence: Synthetic oligonucleotide
gaaaguauucucuuuauac

SEQ ID NO: 3054982 - RNA, 19 nt, Artificial Sequence
  Description of Artificial Sequence: Synthetic oligonucleotide
uaauguacaauuaaaaguu

SEQ ID NO: 3054983 - RNA, 19 nt, Artificial Sequence
  Description of Artificial Sequence: Synthetic oligonucleotide
uuuacaacguuuuaaauau

SEQ ID NO: 3054984 - RNA, 19 nt, Artificial Sequence
  Description of Artificial Sequence: Synthetic oligonucleotide
uucucuaacuuuuaaaggc

SEQ ID NO: 3054985 - RNA, 19 nt, Artificial Sequence
  Description of Artificial Sequence: Synthetic oligonucleotide
aguucucuaacuuuuaaag

SEQ ID NO: 3054986 - RNA, 19 nt, Artificial Sequence
  Description of Artificial Sequence: Synthetic oligonucleotide
guaaaaggaauguuaauag

SEQ ID NO: 3054987 - RNA, 19 nt, Artificial Sequence
  Description of Artificial Sequence: Synthetic oligonucleotide
acuaucaauaauuaaauua

SEQ ID NO: 3054988 - RNA, 19 nt, Artificial Sequence
  Description of Artificial Sequence: Synthetic oligonucleotide
aaaguauucucuuuauacu

SEQ ID NO: 3054989 - RNA, 19 nt, Artificial Sequence
  Description of Artificial Sequence: Synthetic oligonucleotide
aaaaguaauguacaauuaa

SEQ ID NO: 3054990 - RNA, 19 nt, Artificial Sequence
  Description of Artificial Sequence: Synthetic oligonucleotide
aaaagaucuucacuuucac

SEQ ID NO: 3054991 - RNA, 19 nt, Artificial Sequence
  Description of Artificial Sequence: Synthetic oligonucleotide
guuuuaaauauauuuguug

SEQ ID NO: 3054992 - RNA, 19 nt, Artificial Sequence
  Description of Artificial Sequence: Synthetic oligonucleotide
uuuauaacucuuuacagau

SEQ ID NO: 3054993 - RNA, 19 nt, Artificial Sequence
  Description of Artificial Sequence: Synthetic oligonucleotide
aauauuuucauaggaaagu

SEQ ID NO: 3054994 - RNA, 19 nt, Artificial Sequence
  Description of Artificial Sequence: Synthetic oligonucleotide
uuaaaaguuugauaguucu

SEQ ID NO: 3054995 - RNA, 19 nt, Artificial Sequence
  Description of Artificial Sequence: Synthetic oligonucleotide
uuuaggaguaaaaggaaug

SEQ ID NO: 3054996 - RNA, 19 nt, Artificial Sequence
  Description of Artificial Sequence: Synthetic oligonucleotide
aauguuaauagaaaagcca

SEQ ID NO: 3054997 - RNA, 19 nt, Artificial Sequence
  Description of Artificial Sequence: Synthetic oligonucleotide
aguuugauaguucucuaac

SEQ ID NO: 3054998 - RNA, 19 nt, Artificial Sequence
  Description of Artificial Sequence: Synthetic oligonucleotide
gauaguacuguuaauauca

SEQ ID NO: 3054999 - RNA, 19 nt, Artificial Sequence
  Description of Artificial Sequence: Synthetic oligonucleotide
aaaaguuugauaguucucu

SEQ ID NO: 3055000 - RNA, 19 nt, Artificial Sequence
  Description of Artificial Sequence: Synthetic oligonucleotide
uuuuacaacguuuuaaaua

SEQ ID NO: 3055001 - RNA, 19 nt, Artificial Sequence
  Description of Artificial Sequence: Synthetic oligonucleotide
aacguuuuaaauauauuug

SEQ ID NO: 3055002 - RNA, 19 nt, Artificial Sequence
  Description of Artificial Sequence: Synthetic oligonucleotide
uuuaaagucuuuaauuuua

SEQ ID NO: 3055003 - RNA, 19 nt, Artificial Sequence
  Description of Artificial Sequence: Synthetic oligonucleotide
auaucaauauuuucauagg

SEQ ID NO: 3055004 - RNA, 19 nt, Artificial Sequence
  Description of Artificial Sequence: Synthetic oligonucleotide
uaucaauauuuucauagga

SEQ ID NO: 3055005 - RNA, 19 nt, Artificial Sequence
  Description of Artificial Sequence: Synthetic oligonucleotide
uauuuguuggguaaauaca

SEQ ID NO: 3055006 - RNA, 19 nt, Artificial Sequence
  Description of Artificial Sequence: Synthetic oligonucleotide
uuaaauauauuuguugggu

SEQ ID NO: 3055007 - RNA, 19 nt, Artificial Sequence
  Description of Artificial Sequence: Synthetic oligonucleotide
ucuuuaauuuuauucaaaa

SEQ ID NO: 3055008 - RNA, 19 nt, Artificial Sequence
  Description of Artificial Sequence: Synthetic oligonucleotide
uuaauaucaauauuuucau

SEQ ID NO: 3055009 - RNA, 19 nt, Artificial Sequence
  Description of Artificial Sequence: Synthetic oligonucleotide
uuugaaacuuuauaacucu

SEQ ID NO: 3055010 - RNA, 19 nt, Artificial Sequence
  Description of Artificial Sequence: Synthetic oligonucleotide
guaaauacagcacacagaa

SEQ ID NO: 3055011 - RNA, 19 nt, Artificial Sequence
  Description of Artificial Sequence: Synthetic oligonucleotide
ucaauaauuaaauuauguu

SEQ ID NO: 3055012 - RNA, 19 nt, Artificial Sequence
  Description of Artificial Sequence: Synthetic oligonucleotide
acuuuuaaaggccaugcug

SEQ ID NO: 3055013 - RNA, 19 nt, Artificial Sequence
  Description of Artificial Sequence: Synthetic oligonucleotide
aaggaauguuaauagaaaa

SEQ ID NO: 3055014 - RNA, 19 nt, Artificial Sequence
  Description of Artificial Sequence: Synthetic oligonucleotide
uuuauacuaucaauaauua

SEQ ID NO: 3055015 - RNA, 19 nt, Artificial Sequence
  Description of Artificial Sequence: Synthetic oligonucleotide
ucucuuuauacuaucaaua

SEQ ID NO: 3055016 - RNA, 19 nt, Artificial Sequence
  Description of Artificial Sequence: Synthetic oligonucleotide
ucucuaacuuuuaaaggcc

SEQ ID NO: 3055017 - RNA, 19 nt, Artificial Sequence
  Description of Artificial Sequence: Synthetic oligonucleotide
uaucaauaauuaaauuaug

SEQ ID NO: 3055018 - RNA, 19 nt, Artificial Sequence
  Description of Artificial Sequence: Synthetic oligonucleotide
uuacagauaguacuguuaa

SEQ ID NO: 3055019 - RNA, 19 nt, Artificial Sequence
  Description of Artificial Sequence: Synthetic oligonucleotide
cuuugaaacuuuauaacuc

SEQ ID NO: 3055020 - RNA, 19 nt, Artificial Sequence
  Description of Artificial Sequence: Synthetic oligonucleotide
gaauguuaauagaaaagcc

SEQ ID NO: 3055021 - RNA, 19 nt, Artificial Sequence
  Description of Artificial Sequence: Synthetic oligonucleotide
guucucuaacuuuuaaagg

SEQ ID NO: 3055022 - RNA, 19 nt, Artificial Sequence
  Description of Artificial Sequence: Synthetic oligonucleotide
ucauaggaaaguauucucu

SEQ ID NO: 3055023 - RNA, 19 nt, Artificial Sequence
  Description of Artificial Sequence: Synthetic oligonucleotide
guaauguacaauuaaaagu

SEQ ID NO: 3055024 - RNA, 19 nt, Artificial Sequence
  Description of Artificial Sequence: Synthetic oligonucleotide
agauaguacuguuaauauc

SEQ ID NO: 3055025 - RNA, 19 nt, Artificial Sequence
  Description of Artificial Sequence: Synthetic oligonucleotide
aaguauucucuuuauacua

SEQ ID NO: 3055026 - RNA, 19 nt, Artificial Sequence
  Description of Artificial Sequence: Synthetic oligonucleotide
acguuuuaaauauauuugu

SEQ ID NO: 3055027 - RNA, 19 nt, Artificial Sequence
  Description of Artificial Sequence: Synthetic oligonucleotide
uuuucauaggaaaguauuc

SEQ ID NO: 3055028 - RNA, 19 nt, Artificial Sequence
  Description of Artificial Sequence: Synthetic oligonucleotide
uuugauaguucucuaacuu

SEQ ID NO: 3055029 - RNA, 19 nt, Artificial Sequence
  Description of Artificial Sequence: Synthetic oligonucleotide
uacaacguuuuaaauauau

SEQ ID NO: 3055030 - RNA, 19 nt, Artificial Sequence
  Description of Artificial Sequence: Synthetic oligonucleotide
uacaauuaaaaguuugaua

SEQ ID NO: 3055031 - RNA, 19 nt, Artificial Sequence
  Description of Artificial Sequence: Synthetic oligonucleotide
auguuaauagaaaagccag

SEQ ID NO: 3055032 - RNA, 19 nt, Artificial Sequence
  Description of Artificial Sequence: Synthetic oligonucleotide
cuguuuaggaguaaaagga

SEQ ID NO: 3055033 - RNA, 19 nt, Artificial Sequence
  Description of Artificial Sequence: Synthetic oligonucleotide
uuguuggguaaauacagca

SEQ ID NO: 3055034 - RNA, 19 nt, Artificial Sequence
  Description of Artificial Sequence: Synthetic oligonucleotide
gcuguuuaggaguaaaagg

SEQ ID NO: 3055035 - RNA, 19 nt, Artificial Sequence
  Description of Artificial Sequence: Synthetic oligonucleotide
uucacacaaccagugaucg

SEQ ID NO: 3055036 - RNA, 19 nt, Artificial Sequence
  Description of Artificial Sequence: Synthetic oligonucleotide
uguuaauagaaaagccaga

SEQ ID NO: 3055037 - RNA, 19 nt, Artificial Sequence
  Description of Artificial Sequence: Synthetic oligonucleotide
acuguuaauaucaauauuu

SEQ ID NO: 3055038 - RNA, 19 nt, Artificial Sequence
  Description of Artificial Sequence: Synthetic oligonucleotide
aaggccaugcuguuuagga

SEQ ID NO: 3055039 - RNA, 19 nt, Artificial Sequence
  Description of Artificial Sequence: Synthetic oligonucleotide
uaacuuuuaaaggccaugc

SEQ ID NO: 3055040 - RNA, 19 nt, Artificial Sequence
  Description of Artificial Sequence: Synthetic oligonucleotide
uauucucuuuauacuauca

SEQ ID NO: 3055041 - RNA, 19 nt, Artificial Sequence
  Description of Artificial Sequence: Synthetic oligonucleotide
uuaaaggccaugcuguuua

SEQ ID NO: 3055042 - RNA, 19 nt, Artificial Sequence
  Description of Artificial Sequence: Synthetic oligonucleotide
ggaauguuaauagaaaagc

SEQ ID NO: 3055043 - RNA, 19 nt, Artificial Sequence
  Description of Artificial Sequence: Synthetic oligonucleotide
aaaguaauguacaauuaaa

SEQ ID NO: 3055044 - RNA, 19 nt, Artificial Sequence
  Description of Artificial Sequence: Synthetic oligonucleotide
uguuaauaucaauauuuuc

SEQ ID NO: 3055045 - RNA, 19 nt, Artificial Sequence
  Description of Artificial Sequence: Synthetic oligonucleotide
aguaaaaggaauguuaaua

SEQ ID NO: 3055046 - RNA, 19 nt, Artificial Sequence
  Description of Artificial Sequence: Synthetic oligonucleotide
aaagaucuucacuuucaca

SEQ ID NO: 3055047 - RNA, 19 nt, Artificial Sequence
  Description of Artificial Sequence: Synthetic oligonucleotide
uuuguuggguaaauacagc

SEQ ID NO: 3055048 - RNA, 19 nt, Artificial Sequence
  Description of Artificial Sequence: Synthetic oligonucleotide
uuucauaggaaaguauucu

SEQ ID NO: 3055049 - RNA, 19 nt, Artificial Sequence
  Description of Artificial Sequence: Synthetic oligonucleotide
uuuacagauaguacuguua

SEQ ID NO: 3055050 - RNA, 19 nt, Artificial Sequence
  Description of Artificial Sequence: Synthetic oligonucleotide
aucaauaauuaaauuaugu

SEQ ID NO: 3055051 - RNA, 19 nt, Artificial Sequence
  Description of Artificial Sequence: Synthetic oligonucleotide
cuuuauaacucuuuacaga

SEQ ID NO: 3055052 - RNA, 19 nt, Artificial Sequence
  Description of Artificial Sequence: Synthetic oligonucleotide
ucuuuauacuaucaauaau

SEQ ID NO: 3055053 - RNA, 19 nt, Artificial Sequence
  Description of Artificial Sequence: Synthetic oligonucleotide
uguuuaggaguaaaaggaa

SEQ ID NO: 3055054 - RNA, 19 nt, Artificial Sequence
  Description of Artificial Sequence: Synthetic oligonucleotide
uuaauagaaaagccagaaa

SEQ ID NO: 3055055 - RNA, 19 nt, Artificial Sequence
  Description of Artificial Sequence: Synthetic oligonucleotide
auuaaaaguuugauaguuc

SEQ ID NO: 3055056 - RNA, 19 nt, Artificial Sequence
  Description of Artificial Sequence: Synthetic oligonucleotide
ugcuguuuaggaguaaaag

SEQ ID NO: 3055057 - RNA, 19 nt, Artificial Sequence
  Description of Artificial Sequence: Synthetic oligonucleotide
aaguaauguacaauuaaaa

SEQ ID NO: 3055058 - RNA, 19 nt, Artificial Sequence
  Description of Artificial Sequence: Synthetic oligonucleotide
ugauaguucucuaacuuuu

SEQ ID NO: 3055059 - RNA, 19 nt, Artificial Sequence
  Description of Artificial Sequence: Synthetic oligonucleotide
uuauacuaucaauaauuaa

SEQ ID NO: 3055060 - RNA, 19 nt, Artificial Sequence
  Description of Artificial Sequence: Synthetic oligonucleotide
uaaauauauuuguugggua

SEQ ID NO: 3055061 - RNA, 19 nt, Artificial Sequence
  Description of Artificial Sequence: Synthetic oligonucleotide
cucuuuacagauaguacug

SEQ ID NO: 3055062 - RNA, 19 nt, Artificial Sequence
  Description of Artificial Sequence: Synthetic oligonucleotide
aguacuguuaauaucaaua

SEQ ID NO: 3055063 - RNA, 19 nt, Artificial Sequence
  Description of Artificial Sequence: Synthetic oligonucleotide
uauuuucauaggaaaguau

SEQ ID NO: 3055064 - RNA, 19 nt, Artificial Sequence
  Description of Artificial Sequence: Synthetic oligonucleotide
uguuggguaaauacagcac

SEQ ID NO: 3055065 - RNA, 19 nt, Artificial Sequence
  Description of Artificial Sequence: Synthetic oligonucleotide
aacuuuuaaaggccaugcu

SEQ ID NO: 3055066 - RNA, 19 nt, Artificial Sequence
  Description of Artificial Sequence: Synthetic oligonucleotide
aggaauguuaauagaaaag

SEQ ID NO: 3055067 - RNA, 19 nt, Artificial Sequence
  Description of Artificial Sequence: Synthetic oligonucleotide
uuaaagucuuuaauuuuau

SEQ ID NO: 3055068 - RNA, 19 nt, Artificial Sequence
  Description of Artificial Sequence: Synthetic oligonucleotide
uucucuuuauacuaucaau

SEQ ID NO: 3055069 - RNA, 19 nt, Artificial Sequence
  Description of Artificial Sequence: Synthetic oligonucleotide
uuaggaguaaaaggaaugu

SEQ ID NO: 3055070 - RNA, 19 nt, Artificial Sequence
  Description of Artificial Sequence: Synthetic oligonucleotide
cuaucaauaauuaaauuau

SEQ ID NO: 3055071 - RNA, 19 nt, Artificial Sequence
  Description of Artificial Sequence: Synthetic oligonucleotide
uucauaggaaaguauucuc

SEQ ID NO: 3055072 - RNA, 19 nt, Artificial Sequence
  Description of Artificial Sequence: Synthetic oligonucleotide
ugaaacuuuauaacucuuu

SEQ ID NO: 3055073 - RNA, 19 nt, Artificial Sequence
  Description of Artificial Sequence: Synthetic oligonucleotide
guuggguaaauacagcaca

SEQ ID NO: 3055074 - RNA, 19 nt, Artificial Sequence
  Description of Artificial Sequence: Synthetic oligonucleotide
uaggaaaguauucucuuua

SEQ ID NO: 3055075 - RNA, 19 nt, Artificial Sequence
  Description of Artificial Sequence: Synthetic oligonucleotide
aauauauuuguuggguaaa

SEQ ID NO: 3055076 - RNA, 19 nt, Artificial Sequence
  Description of Artificial Sequence: Synthetic oligonucleotide
gaaacuuuauaacucuuua

SEQ ID NO: 3055077 - RNA, 19 nt, Artificial Sequence
  Description of Artificial Sequence: Synthetic oligonucleotide
aaaggaauguuaauagaaa

SEQ ID NO: 3055078 - RNA, 19 nt, Artificial Sequence
  Description of Artificial Sequence: Synthetic oligonucleotide
uuucacacaaccagugauc

SEQ ID NO: 3055079 - RNA, 19 nt, Artificial Sequence
  Description of Artificial Sequence: Synthetic oligonucleotide
aaguuugauaguucucuaa

SEQ ID NO: 3055080 - RNA, 19 nt, Artificial Sequence
  Description of Artificial Sequence: Synthetic oligonucleotide
uaaaaguuugauaguucuc

SEQ ID NO: 3055081 - RNA, 19 nt, Artificial Sequence
  Description of Artificial Sequence: Synthetic oligonucleotide
uuggguaaauacagcacac

SEQ ID NO: 3055082 - RNA, 19 nt, Artificial Sequence
  Description of Artificial Sequence: Synthetic oligonucleotide
agcacacagaaacugacaa

SEQ ID NO: 3055083 - RNA, 19 nt, Artificial Sequence
  Description of Artificial Sequence: Synthetic oligonucleotide
ucacuuucacacaaccagu

SEQ ID NO: 3055084 - RNA, 19 nt, Artificial Sequence
  Description of Artificial Sequence: Synthetic oligonucleotide
guuaauagaaaagccagaa

SEQ ID NO: 3055085 - RNA, 19 nt, Artificial Sequence
  Description of Artificial Sequence: Synthetic oligonucleotide
auacuaucaauaauuaaau

SEQ ID NO: 3055086 - RNA, 19 nt, Artificial Sequence
  Description of Artificial Sequence: Synthetic oligonucleotide
acagauaguacuguuaaua

SEQ ID NO: 3055087 - RNA, 19 nt, Artificial Sequence
  Description of Artificial Sequence: Synthetic oligonucleotide
ggguaaauacagcacacag

SEQ ID NO: 3055088 - RNA, 19 nt, Artificial Sequence
  Description of Artificial Sequence: Synthetic oligonucleotide
aaaguuugauaguucucua

SEQ ID NO: 3055089 - RNA, 19 nt, Artificial Sequence
  Description of Artificial Sequence: Synthetic oligonucleotide
cuuuuaaaggccaugcugu

SEQ ID NO: 3055090 - RNA, 19 nt, Artificial Sequence
  Description of Artificial Sequence: Synthetic oligonucleotide
auuuucauaggaaaguauu

SEQ ID NO: 3055091 - RNA, 19 nt, Artificial Sequence
  Description of Artificial Sequence: Synthetic oligonucleotide
uaguucucuaacuuuuaaa

SEQ ID NO: 3055092 - RNA, 19 nt, Artificial Sequence
  Description of Artificial Sequence: Synthetic oligonucleotide
uugauaguucucuaacuuu

SEQ ID NO: 3055093 - RNA, 19 nt, Artificial Sequence
  Description of Artificial Sequence: Synthetic oligonucleotide
ucuaacuuuuaaaggccau

SEQ ID NO: 3055094 - RNA, 19 nt, Artificial Sequence
  Description of Artificial Sequence: Synthetic oligonucleotide
cucuuuauacuaucaauaa

SEQ ID NO: 3055095 - RNA, 19 nt, Artificial Sequence
  Description of Artificial Sequence: Synthetic oligonucleotide
uacuguuaauaucaauauu

SEQ ID NO: 3055096 - RNA, 19 nt, Artificial Sequence
  Description of Artificial Sequence: Synthetic oligonucleotide
uccccuuugaaacuuuaua

SEQ ID NO: 3055097 - RNA, 19 nt, Artificial Sequence
  Description of Artificial Sequence: Synthetic oligonucleotide
uaauaucaauauuuucaua

SEQ ID NO: 3055098 - RNA, 19 nt, Artificial Sequence
  Description of Artificial Sequence: Synthetic oligonucleotide
cacuuucacacaaccagug

SEQ ID NO: 3055099 - RNA, 19 nt, Artificial Sequence
  Description of Artificial Sequence: Synthetic oligonucleotide
auacagcacacagaaacug

SEQ ID NO: 3055100 - RNA, 19 nt, Artificial Sequence
  Description of Artificial Sequence: Synthetic oligonucleotide
uacuaucaauaauuaaauu

SEQ ID NO: 3055101 - RNA, 19 nt, Artificial Sequence
  Description of Artificial Sequence: Synthetic oligonucleotide
cuaacuuuuaaaggccaug

SEQ ID NO: 3055102 - RNA, 19 nt, Artificial Sequence
  Description of Artificial Sequence: Synthetic oligonucleotide
aaaggccaugcuguuuagg

SEQ ID NO: 3055103 - RNA, 19 nt, Artificial Sequence
  Description of Artificial Sequence: Synthetic oligonucleotide
agaucuucacuuucacaca

SEQ ID NO: 3055104 - RNA, 19 nt, Artificial Sequence
  Description of Artificial Sequence: Synthetic oligonucleotide
gaucuucacuuucacacaa

SEQ ID NO: 3055105 - RNA, 19 nt, Artificial Sequence
  Description of Artificial Sequence: Synthetic oligonucleotide
aaaauccccuuugaaacuu

SEQ ID NO: 3055106 - RNA, 19 nt, Artificial Sequence
  Description of Artificial Sequence: Synthetic oligonucleotide
auaguucucuaacuuuuaa

SEQ ID NO: 3055107 - RNA, 19 nt, Artificial Sequence
  Description of Artificial Sequence: Synthetic oligonucleotide
uuauaacucuuuacagaua

SEQ ID NO: 3055108 - RNA, 19 nt, Artificial Sequence
  Description of Artificial Sequence: Synthetic oligonucleotide
caacguuuuaaauauauuu

SEQ ID NO: 3055109 - RNA, 19 nt, Artificial Sequence
  Description of Artificial Sequence: Synthetic oligonucleotide
uugaaacuuuauaacucuu

SEQ ID NO: 3055110 - RNA, 19 nt, Artificial Sequence
  Description of Artificial Sequence: Synthetic oligonucleotide
auauuuucauaggaaagua

SEQ ID NO: 3055111 - RNA, 19 nt, Artificial Sequence
  Description of Artificial Sequence: Synthetic oligonucleotide
uauauuuguuggguaaaua

SEQ ID NO: 3055112 - RNA, 19 nt, Artificial Sequence
  Description of Artificial Sequence: Synthetic oligonucleotide
acuuucacacaaccaguga

SEQ ID NO: 3055113 - RNA, 19 nt, Artificial Sequence
  Description of Artificial Sequence: Synthetic oligonucleotide
auaggaaaguauucucuuu

SEQ ID NO: 3055114 - RNA, 19 nt, Artificial Sequence
  Description of Artificial Sequence: Synthetic oligonucleotide
guauucucuuuauacuauc

SEQ ID NO: 3055115 - RNA, 19 nt, Artificial Sequence
  Description of Artificial Sequence: Synthetic oligonucleotide
uaaauacagcacacagaaa

SEQ ID NO: 3055116 - RNA, 19 nt, Artificial Sequence
  Description of Artificial Sequence: Synthetic oligonucleotide
aggaaaguauucucuuuau

SEQ ID NO: 3055117 - RNA, 19 nt, Artificial Sequence
  Description of Artificial Sequence: Synthetic oligonucleotide
uuuuaaaggccaugcuguu

SEQ ID NO: 3055118 - RNA, 19 nt, Artificial Sequence
  Description of Artificial Sequence: Synthetic oligonucleotide
guacuguuaauaucaauau

SEQ ID NO: 3055119 - RNA, 19 nt, Artificial Sequence
  Description of Artificial Sequence: Synthetic oligonucleotide
cucuaacuuuuaaaggcca

SEQ ID NO: 3055120 - RNA, 19 nt, Artificial Sequence
  Description of Artificial Sequence: Synthetic oligonucleotide
uggguaaauacagcacaca

SEQ ID NO: 3055121 - RNA, 19 nt, Artificial Sequence
  Description of Artificial Sequence: Synthetic oligonucleotide
aguauucucuuuauacuau

SEQ ID NO: 3055122 - RNA, 19 nt, Artificial Sequence
  Description of Artificial Sequence: Synthetic oligonucleotide
uaaaggccaugcuguuuag

SEQ ID NO: 3055123 - RNA, 19 nt, Artificial Sequence
  Description of Artificial Sequence: Synthetic oligonucleotide
cccuuugaaacuuuauaac

SEQ ID NO: 3055124 - RNA, 19 nt, Artificial Sequence
  Description of Artificial Sequence: Synthetic oligonucleotide
uaguacuguuaauaucaau

SEQ ID NO: 3055125 - RNA, 19 nt, Artificial Sequence
  Description of Artificial Sequence: Synthetic oligonucleotide
guuugauaguucucuaacu

SEQ ID NO: 3055126 - RNA, 19 nt, Artificial Sequence
  Description of Artificial Sequence: Synthetic oligonucleotide
cuucacuuucacacaacca

SEQ ID NO: 3055127 - RNA, 19 nt, Artificial Sequence
  Description of Artificial Sequence: Synthetic oligonucleotide
uacagauaguacuguuaau

SEQ ID NO: 3055128 - RNA, 19 nt, Artificial Sequence
  Description of Artificial Sequence: Synthetic oligonucleotide
uuacaacguuuuaaauaua

SEQ ID NO: 3055129 - RNA, 19 nt, Artificial Sequence
  Description of Artificial Sequence: Synthetic oligonucleotide
cacacaaccagugaucgaa

SEQ ID NO: 3055130 - RNA, 19 nt, Artificial Sequence
  Description of Artificial Sequence: Synthetic oligonucleotide
uuuaaaggccaugcuguuu

SEQ ID NO: 3055131 - RNA, 19 nt, Artificial Sequence
  Description of Artificial Sequence: Synthetic oligonucleotide
gguaaauacagcacacaga

SEQ ID NO: 3055132 - RNA, 19 nt, Artificial Sequence
  Description of Artificial Sequence: Synthetic oligonucleotide
uaggaguaaaaggaauguu

SEQ ID NO: 3055133 - RNA, 19 nt, Artificial Sequence
  Description of Artificial Sequence: Synthetic oligonucleotide
caauuaaaaguuugauagu

SEQ ID NO: 3055134 - RNA, 19 nt, Artificial Sequence
  Description of Artificial Sequence: Synthetic oligonucleotide
ucacacaaccagugaucga

SEQ ID NO: 3055135 - RNA, 19 nt, Artificial Sequence
  Description of Artificial Sequence: Synthetic oligonucleotide
gucuuuaauuuuauucaaa

SEQ ID NO: 3055136 - RNA, 19 nt, Artificial Sequence
  Description of Artificial Sequence: Synthetic oligonucleotide
cuuucacacaaccagugau

SEQ ID NO: 3055137 - RNA, 19 nt, Artificial Sequence
  Description of Artificial Sequence: Synthetic oligonucleotide
cagauaguacuguuaauau

SEQ ID NO: 3055138 - RNA, 19 nt, Artificial Sequence
  Description of Artificial Sequence: Synthetic oligonucleotide
gaguaaaaggaauguuaau

SEQ ID NO: 3055139 - RNA, 19 nt, Artificial Sequence
  Description of Artificial Sequence: Synthetic oligonucleotide
gauaguucucuaacuuuua

SEQ ID NO: 3055140 - RNA, 19 nt, Artificial Sequence
  Description of Artificial Sequence: Synthetic oligonucleotide
ccuuugaaacuuuauaacu

SEQ ID NO: 3055141 - RNA, 19 nt, Artificial Sequence
  Description of Artificial Sequence: Synthetic oligonucleotide
cuguuaauaucaauauuuu

SEQ ID NO: 3055142 - RNA, 19 nt, Artificial Sequence
  Description of Artificial Sequence: Synthetic oligonucleotide
acaacguuuuaaauauauu

SEQ ID NO: 3055143 - RNA, 19 nt, Artificial Sequence
  Description of Artificial Sequence: Synthetic oligonucleotide
cauaggaaaguauucucuu

SEQ ID NO: 3055144 - RNA, 19 nt, Artificial Sequence
  Description of Artificial Sequence: Synthetic oligonucleotide
guuuaggaguaaaaggaau

SEQ ID NO: 3055145 - RNA, 19 nt, Artificial Sequence
  Description of Artificial Sequence: Synthetic oligonucleotide
auaguacuguuaauaucaa

SEQ ID NO: 3055146 - RNA, 19 nt, Artificial Sequence
  Description of Artificial Sequence: Synthetic oligonucleotide
ccccuuugaaacuuuauaa

SEQ ID NO: 3055147 - RNA, 19 nt, Artificial Sequence
  Description of Artificial Sequence: Synthetic oligonucleotide
ggaaaguauucucuuuaua

SEQ ID NO: 3055148 - RNA, 19 nt, Artificial Sequence
  Description of Artificial Sequence: Synthetic oligonucleotide
cagcacacagaaacugaca

SEQ ID NO: 3055149 - RNA, 19 nt, Artificial Sequence
  Description of Artificial Sequence: Synthetic oligonucleotide
caugcuguuuaggaguaaa

SEQ ID NO: 3055150 - RNA, 19 nt, Artificial Sequence
  Description of Artificial Sequence: Synthetic oligonucleotide
aauccccuuugaaacuuua

SEQ ID NO: 3055151 - RNA, 19 nt, Artificial Sequence
  Description of Artificial Sequence: Synthetic oligonucleotide
cacaaccagugaucgaaaa

SEQ ID NO: 3055152 - RNA, 19 nt, Artificial Sequence
  Description of Artificial Sequence: Synthetic oligonucleotide
aaauccccuuugaaacuuu

SEQ ID NO: 3055153 - RNA, 19 nt, Artificial Sequence
  Description of Artificial Sequence: Synthetic oligonucleotide
ggccaugcuguuuaggagu

SEQ ID NO: 3055154 - RNA, 19 nt, Artificial Sequence
  Description of Artificial Sequence: Synthetic oligonucleotide
augcuguuuaggaguaaaa

SEQ ID NO: 3055155 - RNA, 19 nt, Artificial Sequence
  Description of Artificial Sequence: Synthetic oligonucleotide
gcacacagaaacugacaaa

SEQ ID NO: 3055156 - RNA, 19 nt, Artificial Sequence
  Description of Artificial Sequence: Synthetic oligonucleotide
auccccuuugaaacuuuau

SEQ ID NO: 3055157 - RNA, 19 nt, Artificial Sequence
  Description of Artificial Sequence: Synthetic oligonucleotide
acacaaccagugaucgaaa

SEQ ID NO: 3055158 - RNA, 19 nt, Artificial Sequence
  Description of Artificial Sequence: Synthetic oligonucleotide
cguuuuaaauauauuuguu

SEQ ID NO: 3055159 - RNA, 19 nt, Artificial Sequence
  Description of Artificial Sequence: Synthetic oligonucleotide
gccaugcuguuuaggagua

SEQ ID NO: 3055160 - RNA, 19 nt, Artificial Sequence
  Description of Artificial Sequence: Synthetic oligonucleotide
ccaugcuguuuaggaguaa

SEQ ID NO: 3055161 - RNA, 19 nt, Artificial Sequence
  Description of Artificial Sequence: Synthetic oligonucleotide
aaaguugucauggagauag

SEQ ID NO: 3055162 - RNA, 19 nt, Artificial Sequence
  Description of Artificial Sequence: Synthetic oligonucleotide
aaaagacccagccagaucu

SEQ ID NO: 3055163 - RNA, 19 nt, Artificial Sequence
  Description of Artificial Sequence: Synthetic oligonucleotide
ucugguaucaaugaugucc

SEQ ID NO: 3055164 - RNA, 19 nt, Artificial Sequence
  Description of Artificial Sequence: Synthetic oligonucleotide
auuuccacgagacuggagg

SEQ ID NO: 3055165 - RNA, 19 nt, Artificial Sequence
  Description of Artificial Sequence: Synthetic oligonucleotide
agagagauggcacaggguc

SEQ ID NO: 3055166 - RNA, 19 nt, Artificial Sequence
  Description of Artificial Sequence: Synthetic oligonucleotide
ucagugaaaguugucaugg

SEQ ID NO: 3055167 - RNA, 19 nt, Artificial Sequence
  Description of Artificial Sequence: Synthetic oligonucleotide
uaucaaugauguccgagcg

SEQ ID NO: 3055168 - RNA, 19 nt, Artificial Sequence
  Description of Artificial Sequence: Synthetic oligonucleotide
cuuuucuuggagaaacucc

SEQ ID NO: 3055169 - RNA, 19 nt, Artificial Sequence
  Description of Artificial Sequence: Synthetic oligonucleotide
uuucucguacuuuucuugg

SEQ ID NO: 3055170 - RNA, 19 nt, Artificial Sequence
  Description of Artificial Sequence: Synthetic oligonucleotide
ucagguucagugaaaguug

SEQ ID NO: 3055171 - RNA, 19 nt, Artificial Sequence
  Description of Artificial Sequence: Synthetic oligonucleotide
agugaaaguugucauggag

SEQ ID NO: 3055172 - RNA, 19 nt, Artificial Sequence
  Description of Artificial Sequence: Synthetic oligonucleotide
cugguaucaaugauguccg

SEQ ID NO: 3055173 - RNA, 19 nt, Artificial Sequence
  Description of Artificial Sequence: Synthetic oligonucleotide
gaagcagcaucagagagag

SEQ ID NO: 3055174 - RNA, 19 nt, Artificial Sequence
  Description of Artificial Sequence: Synthetic oligonucleotide
aaucugguaucaaugaugu

SEQ ID NO: 3055175 - RNA, 19 nt, Artificial Sequence
  Description of Artificial Sequence: Synthetic oligonucleotide
uuuucucguacuuuucuug

SEQ ID NO: 3055176 - RNA, 19 nt, Artificial Sequence
  Description of Artificial Sequence: Synthetic oligonucleotide
uugucauggagauagacuu

SEQ ID NO: 3055177 - RNA, 19 nt, Artificial Sequence
  Description of Artificial Sequence: Synthetic oligonucleotide
uguaagagggcccuuugac

SEQ ID NO: 3055178 - RNA, 19 nt, Artificial Sequence
  Description of Artificial Sequence: Synthetic oligonucleotide
guaucaaugauguccgagc

SEQ ID NO: 3055179 - RNA, 19 nt, Artificial Sequence
  Description of Artificial Sequence: Synthetic oligonucleotide
ugaaaguugucauggagau

SEQ ID NO: 3055180 - RNA, 19 nt, Artificial Sequence
  Description of Artificial Sequence: Synthetic oligonucleotide
ucucguacuuuucuuggag

SEQ ID NO: 3055181 - RNA, 19 nt, Artificial Sequence
  Description of Artificial Sequence: Synthetic oligonucleotide
gaaucugguaucaaugaug

SEQ ID NO: 3055182 - RNA, 19 nt, Artificial Sequence
  Description of Artificial Sequence: Synthetic oligonucleotide
uggaaucugguaucaauga

SEQ ID NO: 3055183 - RNA, 19 nt, Artificial Sequence
  Description of Artificial Sequence: Synthetic oligonucleotide
caggacuucagguucagug

SEQ ID NO: 3055184 - RNA, 19 nt, Artificial Sequence
  Description of Artificial Sequence: Synthetic oligonucleotide
aggaagcagcaucagagag

SEQ ID NO: 3055185 - RNA, 19 nt, Artificial Sequence
  Description of Artificial Sequence: Synthetic oligonucleotide
ucgaagaggaagcagcauc

SEQ ID NO: 3055186 - RNA, 19 nt, Artificial Sequence
  Description of Artificial Sequence: Synthetic oligonucleotide
uucagugaaaguugucaug

SEQ ID NO: 3055187 - RNA, 19 nt, Artificial Sequence
  Description of Artificial Sequence: Synthetic oligonucleotide
cuggaaucugguaucaaug

SEQ ID NO: 3055188 - RNA, 19 nt, Artificial Sequence
  Description of Artificial Sequence: Synthetic oligonucleotide
uucagguucagugaaaguu

SEQ ID NO: 3055189 - RNA, 19 nt, Artificial Sequence
  Description of Artificial Sequence: Synthetic oligonucleotide
acuuuucuuggagaaacuc

SEQ ID NO: 3055190 - RNA, 19 nt, Artificial Sequence
  Description of Artificial Sequence: Synthetic oligonucleotide
ugcggcacaccucauuucc

SEQ ID NO: 3055191 - RNA, 19 nt, Artificial Sequence
  Description of Artificial Sequence: Synthetic oligonucleotide
uggagaaacuccuucacuu

SEQ ID NO: 3055192 - RNA, 19 nt, Artificial Sequence
  Description of Artificial Sequence: Synthetic oligonucleotide
acuggcucgaagaggaagc

SEQ ID NO: 3055193 - RNA, 19 nt, Artificial Sequence
  Description of Artificial Sequence: Synthetic oligonucleotide
aguugucauggagauagac

SEQ ID NO: 3055194 - RNA, 19 nt, Artificial Sequence
  Description of Artificial Sequence: Synthetic oligonucleotide
cagcaucagagagagaugg

SEQ ID NO: 3055195 - RNA, 19 nt, Artificial Sequence
  Description of Artificial Sequence: Synthetic oligonucleotide
uuuccuuccgggacggagc

SEQ ID NO: 3055196 - RNA, 19 nt, Artificial Sequence
  Description of Artificial Sequence: Synthetic oligonucleotide
guacuuuucuuggagaaac

SEQ ID NO: 3055197 - RNA, 19 nt, Artificial Sequence
  Description of Artificial Sequence: Synthetic oligonucleotide
uaagagggcccuuugacuu

SEQ ID NO: 3055198 - RNA, 19 nt, Artificial Sequence
  Description of Artificial Sequence: Synthetic oligonucleotide
gaucuugcggcacaccuca

SEQ ID NO: 3055199 - RNA, 19 nt, Artificial Sequence
  Description of Artificial Sequence: Synthetic oligonucleotide
uggaggaacaggacuucag

SEQ ID NO: 3055200 - RNA, 19 nt, Artificial Sequence
  Description of Artificial Sequence: Synthetic oligonucleotide
ugucauggagauagacuug

SEQ ID NO: 3055201 - RNA, 19 nt, Artificial Sequence
  Description of Artificial Sequence: Synthetic oligonucleotide
ucagagagagauggcacag

SEQ ID NO: 3055202 - RNA, 19 nt, Artificial Sequence
  Description of Artificial Sequence: Synthetic oligonucleotide
caucagagagagauggcac

SEQ ID NO: 3055203 - RNA, 19 nt, Artificial Sequence
  Description of Artificial Sequence: Synthetic oligonucleotide
ugguuggcagacuggcucg

SEQ ID NO: 3055204 - RNA, 19 nt, Artificial Sequence
  Description of Artificial Sequence: Synthetic oligonucleotide
agacuggaggaacaggacu

SEQ ID NO: 3055205 - RNA, 19 nt, Artificial Sequence
  Description of Artificial Sequence: Synthetic oligonucleotide
acuucagguucagugaaag

SEQ ID NO: 3055206 - RNA, 19 nt, Artificial Sequence
  Description of Artificial Sequence: Synthetic oligonucleotide
aggacuucagguucaguga

SEQ ID NO: 3055207 - RNA, 19 nt, Artificial Sequence
  Description of Artificial Sequence: Synthetic oligonucleotide
ucguacuuuucuuggagaa

SEQ ID NO: 3055208 - RNA, 19 nt, Artificial Sequence
  Description of Artificial Sequence: Synthetic oligonucleotide
aucagagagagauggcaca

SEQ ID NO: 3055209 - RNA, 19 nt, Artificial Sequence
  Description of Artificial Sequence: Synthetic oligonucleotide
gacccagccagaucuugcg

SEQ ID NO: 3055210 - RNA, 19 nt, Artificial Sequence
  Description of Artificial Sequence: Synthetic oligonucleotide
gagaaacuccuucacuuuc

SEQ ID NO: 3055211 - RNA, 19 nt, Artificial Sequence
  Description of Artificial Sequence: Synthetic oligonucleotide
cuuggagaaacuccuucac

SEQ ID NO: 3055212 - RNA, 19 nt, Artificial Sequence
  Description of Artificial Sequence: Synthetic oligonucleotide
ucccagaaguguccgcacg

SEQ ID NO: 3055213 - RNA, 19 nt, Artificial Sequence
  Description of Artificial Sequence: Synthetic oligonucleotide
gaaacuccuucacuuucug

SEQ ID NO: 3055214 - RNA, 19 nt, Artificial Sequence
  Description of Artificial Sequence: Synthetic oligonucleotide
ggaggaacaggacuucagg

SEQ ID NO: 3055215 - RNA, 19 nt, Artificial Sequence
  Description of Artificial Sequence: Synthetic oligonucleotide
uuugacuugcuccggggua

SEQ ID NO: 3055216 - RNA, 19 nt, Artificial Sequence
  Description of Artificial Sequence: Synthetic oligonucleotide
uuuccacgagacuggagga

SEQ ID NO: 3055217 - RNA, 19 nt, Artificial Sequence
  Description of Artificial Sequence: Synthetic oligonucleotide
caccucauuuccacgagac

SEQ ID NO: 3055218 - RNA, 19 nt, Artificial Sequence
  Description of Artificial Sequence: Synthetic oligonucleotide
uucacuuucugaggguccc

SEQ ID NO: 3055219 - RNA, 19 nt, Artificial Sequence
  Description of Artificial Sequence: Synthetic oligonucleotide
acuuucugagggucccugg

SEQ ID NO: 3055220 - RNA, 19 nt, Artificial Sequence
  Description of Artificial Sequence: Synthetic oligonucleotide
cuucacuuucugagggucc

SEQ ID NO: 3055221 - RNA, 19 nt, Artificial Sequence
  Description of Artificial Sequence: Synthetic oligonucleotide
gugaaaguugucauggaga

SEQ ID NO: 3055222 - RNA, 19 nt, Artificial Sequence
  Description of Artificial Sequence: Synthetic oligonucleotide
uuggcagacuggcucgaag

SEQ ID NO: 3055223 - RNA, 19 nt, Artificial Sequence
  Description of Artificial Sequence: Synthetic oligonucleotide
agagauggcacagggucuc

SEQ ID NO: 3055224 - RNA, 19 nt, Artificial Sequence
  Description of Artificial Sequence: Synthetic oligonucleotide
uggcagacuggcucgaaga

SEQ ID NO: 3055225 - RNA, 19 nt, Artificial Sequence
  Description of Artificial Sequence: Synthetic oligonucleotide
cuugcuccgggguacguac

SEQ ID NO: 3055226 - RNA, 19 nt, Artificial Sequence
  Description of Artificial Sequence: Synthetic oligonucleotide
aagagggcccuuugacuug

SEQ ID NO: 3055227 - RNA, 19 nt, Artificial Sequence
  Description of Artificial Sequence: Synthetic oligonucleotide
cagacuggcucgaagagga

SEQ ID NO: 3055228 - RNA, 19 nt, Artificial Sequence
  Description of Artificial Sequence: Synthetic oligonucleotide
aaugauguccgagcgucaa

SEQ ID NO: 3055229 - RNA, 19 nt, Artificial Sequence
  Description of Artificial Sequence: Synthetic oligonucleotide
aggaacaggacuucagguu

SEQ ID NO: 3055230 - RNA, 19 nt, Artificial Sequence
  Description of Artificial Sequence: Synthetic oligonucleotide
cacggguuuuccuuccggg

SEQ ID NO: 3055231 - RNA, 19 nt, Artificial Sequence
  Description of Artificial Sequence: Synthetic oligonucleotide
cugguuggcagacuggcuc

SEQ ID NO: 3055232 - RNA, 19 nt, Artificial Sequence
  Description of Artificial Sequence: Synthetic oligonucleotide
ggaacaggacuucagguuc

SEQ ID NO: 3055233 - RNA, 19 nt, Artificial Sequence
  Description of Artificial Sequence: Synthetic oligonucleotide
gacugguuggcagacuggc

SEQ ID NO: 3055234 - RNA, 19 nt, Artificial Sequence
  Description of Artificial Sequence: Synthetic oligonucleotide
ugauguccgagcgucaaaa

SEQ ID NO: 3055235 - RNA, 19 nt, Artificial Sequence
  Description of Artificial Sequence: Synthetic oligonucleotide
uucucguacuuuucuugga

SEQ ID NO: 3055236 - RNA, 19 nt, Artificial Sequence
  Description of Artificial Sequence: Synthetic oligonucleotide
uuucugagggucccuggaa

SEQ ID NO: 3055237 - RNA, 19 nt, Artificial Sequence
  Description of Artificial Sequence: Synthetic oligonucleotide
uuccuuccgggacggagcc

SEQ ID NO: 3055238 - RNA, 19 nt, Artificial Sequence
  Description of Artificial Sequence: Synthetic oligonucleotide
gacggagcccuggacaggg

SEQ ID NO: 3055239 - RNA, 19 nt, Artificial Sequence
  Description of Artificial Sequence: Synthetic oligonucleotide
gguaucaaugauguccgag

SEQ ID NO: 3055240 - RNA, 19 nt, Artificial Sequence
  Description of Artificial Sequence: Synthetic oligonucleotide
uucugagggucccuggaau

SEQ ID NO: 3055241 - RNA, 19 nt, Artificial Sequence
  Description of Artificial Sequence: Synthetic oligonucleotide
ggcccuuugacuugcuccg

SEQ ID NO: 3055242 - RNA, 19 nt, Artificial Sequence
  Description of Artificial Sequence: Synthetic oligonucleotide
gacuggcucgaagaggaag

SEQ ID NO: 3055243 - RNA, 19 nt, Artificial Sequence
  Description of Artificial Sequence: Synthetic oligonucleotide
uccgggguacguaccaucu

SEQ ID NO: 3055244 - RNA, 19 nt, Artificial Sequence
  Description of Artificial Sequence: Synthetic oligonucleotide
gguucagugaaaguuguca

SEQ ID NO: 3055245 - RNA, 19 nt, Artificial Sequence
  Description of Artificial Sequence: Synthetic oligonucleotide
gaagaggaagcagcaucag

SEQ ID NO: 3055246 - RNA, 19 nt, Artificial Sequence
  Description of Artificial Sequence: Synthetic oligonucleotide
agagggcccuuugacuugc

SEQ ID NO: 3055247 - RNA, 19 nt, Artificial Sequence
  Description of Artificial Sequence: Synthetic oligonucleotide
accgccucugcuguaagag

SEQ ID NO: 3055248 - RNA, 19 nt, Artificial Sequence
  Description of Artificial Sequence: Synthetic oligonucleotide
uugacuugcuccgggguac

SEQ ID NO: 3055249 - RNA, 19 nt, Artificial Sequence
  Description of Artificial Sequence: Synthetic oligonucleotide
agcaucagagagagauggc

SEQ ID NO: 3055250 - RNA, 19 nt, Artificial Sequence
  Description of Artificial Sequence: Synthetic oligonucleotide
gucauggagauagacuuga

SEQ ID NO: 3055251 - RNA, 19 nt, Artificial Sequence
  Description of Artificial Sequence: Synthetic oligonucleotide
ccucauuuccacgagacug

SEQ ID NO: 3055252 - RNA, 19 nt, Artificial Sequence
  Description of Artificial Sequence: Synthetic oligonucleotide
gaggaacaggacuucaggu

SEQ ID NO: 3055253 - RNA, 19 nt, Artificial Sequence
  Description of Artificial Sequence: Synthetic oligonucleotide
aagacccagccagaucuug

SEQ ID NO: 3055254 - RNA, 19 nt, Artificial Sequence
  Description of Artificial Sequence: Synthetic oligonucleotide
ucauggagauagacuugac

SEQ ID NO: 3055255 - RNA, 19 nt, Artificial Sequence
  Description of Artificial Sequence: Synthetic oligonucleotide
aacaggacuucagguucag

SEQ ID NO: 3055256 - RNA, 19 nt, Artificial Sequence
  Description of Artificial Sequence: Synthetic oligonucleotide
agauggcacagggucuccc

SEQ ID NO: 3055257 - RNA, 19 nt, Artificial Sequence
  Description of Artificial Sequence: Synthetic oligonucleotide
acuggaggaacaggacuuc

SEQ ID NO: 3055258 - RNA, 19 nt, Artificial Sequence
  Description of Artificial Sequence: Synthetic oligonucleotide
uccacgagacuggaggaac

SEQ ID NO: 3055259 - RNA, 19 nt, Artificial Sequence
  Description of Artificial Sequence: Synthetic oligonucleotide
aucugguaucaaugauguc

SEQ ID NO: 3055260 - RNA, 19 nt, Artificial Sequence
  Description of Artificial Sequence: Synthetic oligonucleotide
agaaacuccuucacuuucu

SEQ ID NO: 3055261 - RNA, 19 nt, Artificial Sequence
  Description of Artificial Sequence: Synthetic oligonucleotide
uuucuuggagaaacuccuu

SEQ ID NO: 3055262 - RNA, 19 nt, Artificial Sequence
  Description of Artificial Sequence: Synthetic oligonucleotide
ggguuuuccuuccgggacg

SEQ ID NO: 3055263 - RNA, 19 nt, Artificial Sequence
  Description of Artificial Sequence: Synthetic oligonucleotide
auggcacagggucucccag

SEQ ID NO: 3055264 - RNA, 19 nt, Artificial Sequence
  Description of Artificial Sequence: Synthetic oligonucleotide
acccagccagaucuugcgg

SEQ ID NO: 3055265 - RNA, 19 nt, Artificial Sequence
  Description of Artificial Sequence: Synthetic oligonucleotide
gauggcacagggucuccca

SEQ ID NO: 3055266 - RNA, 19 nt, Artificial Sequence
  Description of Artificial Sequence: Synthetic oligonucleotide
acggguuuuccuuccggga

SEQ ID NO: 3055267 - RNA, 19 nt, Artificial Sequence
  Description of Artificial Sequence: Synthetic oligonucleotide
ugcuccgggguacguacca

SEQ ID NO: 3055268 - RNA, 19 nt, Artificial Sequence
  Description of Artificial Sequence: Synthetic oligonucleotide
ggcucgaagaggaagcagc

SEQ ID NO: 3055269 - RNA, 19 nt, Artificial Sequence
  Description of Artificial Sequence: Synthetic oligonucleotide
uccuucacuuucugagggu

SEQ ID NO: 3055270 - RNA, 19 nt, Artificial Sequence
  Description of Artificial Sequence: Synthetic oligonucleotide
cucguacuuuucuuggaga

SEQ ID NO: 3055271 - RNA, 19 nt, Artificial Sequence
  Description of Artificial Sequence: Synthetic oligonucleotide
cauuuccacgagacuggag

SEQ ID NO: 3055272 - RNA, 19 nt, Artificial Sequence
  Description of Artificial Sequence: Synthetic oligonucleotide
ucauuuccacgagacugga

SEQ ID NO: 3055273 - RNA, 19 nt, Artificial Sequence
  Description of Artificial Sequence: Synthetic oligonucleotide
cacaccucauuuccacgag

SEQ ID NO: 3055274 - RNA, 19 nt, Artificial Sequence
  Description of Artificial Sequence: Synthetic oligonucleotide
acaccucauuuccacgaga

SEQ ID NO: 3055275 - RNA, 19 nt, Artificial Sequence
  Description of Artificial Sequence: Synthetic oligonucleotide
acgagacuggaggaacagg

SEQ ID NO: 3055276 - RNA, 19 nt, Artificial Sequence
  Description of Artificial Sequence: Synthetic oligonucleotide
gagacuggaggaacaggac

SEQ ID NO: 3055277 - RNA, 19 nt, Artificial Sequence
  Description of Artificial Sequence: Synthetic oligonucleotide
cacagggucucccagaagu

SEQ ID NO: 3055278 - RNA, 19 nt, Artificial Sequence
  Description of Artificial Sequence: Synthetic oligonucleotide
guaagagggcccuuugacu

SEQ ID NO: 3055279 - RNA, 19 nt, Artificial Sequence
  Description of Artificial Sequence: Synthetic oligonucleotide
accucauuuccacgagacu

SEQ ID NO: 3055280 - RNA, 19 nt, Artificial Sequence
  Description of Artificial Sequence: Synthetic oligonucleotide
ucuugcggcacaccucauu

SEQ ID NO: 3055281 - RNA, 19 nt, Artificial Sequence
  Description of Artificial Sequence: Synthetic oligonucleotide
cuuucugagggucccugga

SEQ ID NO: 3055282 - RNA, 19 nt, Artificial Sequence
  Description of Artificial Sequence: Synthetic oligonucleotide
ggcacaccucauuuccacg

SEQ ID NO: 3055283 - RNA, 19 nt, Artificial Sequence
  Description of Artificial Sequence: Synthetic oligonucleotide
guucagugaaaguugucau

SEQ ID NO: 3055284 - RNA, 19 nt, Artificial Sequence
  Description of Artificial Sequence: Synthetic oligonucleotide
gucccuggaaucugguauc

SEQ ID NO: 3055285 - RNA, 19 nt, Artificial Sequence
  Description of Artificial Sequence: Synthetic oligonucleotide
gggacggagcccuggacag

SEQ ID NO: 3055286 - RNA, 19 nt, Artificial Sequence
  Description of Artificial Sequence: Synthetic oligonucleotide
uggcucgaagaggaagcag

SEQ ID NO: 3055287 - RNA, 19 nt, Artificial Sequence
  Description of Artificial Sequence: Synthetic oligonucleotide
gacagggguggaggcaccg

SEQ ID NO: 3055288 - RNA, 19 nt, Artificial Sequence
  Description of Artificial Sequence: Synthetic oligonucleotide
uccgcacggguuuuccuuc

SEQ ID NO: 3055289 - RNA, 19 nt, Artificial Sequence
  Description of Artificial Sequence: Synthetic oligonucleotide
ugacuugcuccgggguacg

SEQ ID NO: 3055290 - RNA, 19 nt, Artificial Sequence
  Description of Artificial Sequence: Synthetic oligonucleotide
ggaggcaccgccucugcug

SEQ ID NO: 3055291 - RNA, 19 nt, Artificial Sequence
  Description of Artificial Sequence: Synthetic oligonucleotide
gaacaggacuucagguuca

SEQ ID NO: 3055292 - RNA, 19 nt, Artificial Sequence
  Description of Artificial Sequence: Synthetic oligonucleotide
agggcccuuugacuugcuc

SEQ ID NO: 3055293 - RNA, 19 nt, Artificial Sequence
  Description of Artificial Sequence: Synthetic oligonucleotide
cacgagacuggaggaacag

SEQ ID NO: 3055294 - RNA, 19 nt, Artificial Sequence
  Description of Artificial Sequence: Synthetic oligonucleotide
acagggguggaggcaccgc

SEQ ID NO: 3055295 - RNA, 19 nt, Artificial Sequence
  Description of Artificial Sequence: Synthetic oligonucleotide
ugguaucaaugauguccga

SEQ ID NO: 3055296 - RNA, 19 nt, Artificial Sequence
  Description of Artificial Sequence: Synthetic oligonucleotide
gcgacugguuggcagacug

SEQ ID NO: 3055297 - RNA, 19 nt, Artificial Sequence
  Description of Artificial Sequence: Synthetic oligonucleotide
agaaguguccgcacggguu

SEQ ID NO: 3055298 - RNA, 19 nt, Artificial Sequence
  Description of Artificial Sequence: Synthetic oligonucleotide
ccuuugacuugcuccgggg

SEQ ID NO: 3055299 - RNA, 19 nt, Artificial Sequence
  Description of Artificial Sequence: Synthetic oligonucleotide
agccagaucuugcggcaca

SEQ ID NO: 3055300 - RNA, 19 nt, Artificial Sequence
  Description of Artificial Sequence: Synthetic oligonucleotide
gguuuuccuuccgggacgg

SEQ ID NO: 3055301 - RNA, 19 nt, Artificial Sequence
  Description of Artificial Sequence: Synthetic oligonucleotide
gcaucagagagagauggca

SEQ ID NO: 3055302 - RNA, 19 nt, Artificial Sequence
  Description of Artificial Sequence: Synthetic oligonucleotide
ucccuggaaucugguauca

SEQ ID NO: 3055303 - RNA, 19 nt, Artificial Sequence
  Description of Artificial Sequence: Synthetic oligonucleotide
uugcuccgggguacguacc

SEQ ID NO: 3055304 - RNA, 19 nt, Artificial Sequence
  Description of Artificial Sequence: Synthetic oligonucleotide
gcagacuggcucgaagagg

SEQ ID NO: 3055305 - RNA, 19 nt, Artificial Sequence
  Description of Artificial Sequence: Synthetic oligonucleotide
uguccgcacggguuuuccu

SEQ ID NO: 3055306 - RNA, 19 nt, Artificial Sequence
  Description of Artificial Sequence: Synthetic oligonucleotide
agguucagugaaaguuguc

SEQ ID NO: 3055307 - RNA, 19 nt, Artificial Sequence
  Description of Artificial Sequence: Synthetic oligonucleotide
cgccucugcuguaagaggg

SEQ ID NO: 3055308 - RNA, 19 nt, Artificial Sequence
  Description of Artificial Sequence: Synthetic oligonucleotide
cccagccagaucuugcggc

SEQ ID NO: 3055309 - RNA, 19 nt, Artificial Sequence
  Description of Artificial Sequence: Synthetic oligonucleotide
uccgggacggagcccugga

SEQ ID NO: 3055310 - RNA, 19 nt, Artificial Sequence
  Description of Artificial Sequence: Synthetic oligonucleotide
uuccacgagacuggaggaa

SEQ ID NO: 3055311 - RNA, 19 nt, Artificial Sequence
  Description of Artificial Sequence: Synthetic oligonucleotide
cccagaaguguccgcacgg

SEQ ID NO: 3055312 - RNA, 19 nt, Artificial Sequence
  Description of Artificial Sequence: Synthetic oligonucleotide
gaaguguccgcacggguuu

SEQ ID NO: 3055313 - RNA, 19 nt, Artificial Sequence
  Description of Artificial Sequence: Synthetic oligonucleotide
cuguaagagggcccuuuga

SEQ ID NO: 3055314 - RNA, 19 nt, Artificial Sequence
  Description of Artificial Sequence: Synthetic oligonucleotide
uugcggcacaccucauuuc

SEQ ID NO: 3055315 - RNA, 19 nt, Artificial Sequence
  Description of Artificial Sequence: Synthetic oligonucleotide
gcacaccucauuuccacga

SEQ ID NO: 3055316 - RNA, 19 nt, Artificial Sequence
  Description of Artificial Sequence: Synthetic oligonucleotide
cacuuucugagggucccug

SEQ ID NO: 3055317 - RNA, 19 nt, Artificial Sequence
  Description of Artificial Sequence: Synthetic oligonucleotide
augauguccgagcgucaaa

SEQ ID NO: 3055318 - RNA, 19 nt, Artificial Sequence
  Description of Artificial Sequence: Synthetic oligonucleotide
uggaggcaccgccucugcu

SEQ ID NO: 3055319 - RNA, 19 nt, Artificial Sequence
  Description of Artificial Sequence: Synthetic oligonucleotide
ggacuucagguucagugaa

SEQ ID NO: 3055320 - RNA, 19 nt, Artificial Sequence
  Description of Artificial Sequence: Synthetic oligonucleotide
gcuguaagagggcccuuug

SEQ ID NO: 3055321 - RNA, 19 nt, Artificial Sequence
  Description of Artificial Sequence: Synthetic oligonucleotide
ggaagcagcaucagagaga

SEQ ID NO: 3055322 - RNA, 19 nt, Artificial Sequence
  Description of Artificial Sequence: Synthetic oligonucleotide
ugcuguaagagggcccuuu

SEQ ID NO: 3055323 - RNA, 19 nt, Artificial Sequence
  Description of Artificial Sequence: Synthetic oligonucleotide
cuccgggguacguaccauc

SEQ ID NO: 3055324 - RNA, 19 nt, Artificial Sequence
  Description of Artificial Sequence: Synthetic oligonucleotide
cagugaaaguugucaugga

SEQ ID NO: 3055325 - RNA, 19 nt, Artificial Sequence
  Description of Artificial Sequence: Synthetic oligonucleotide
uuccgggacggagcccugg

SEQ ID NO: 3055326 - RNA, 19 nt, Artificial Sequence
  Description of Artificial Sequence: Synthetic oligonucleotide
aguguccgcacggguuuuc

SEQ ID NO: 3055327 - RNA, 19 nt, Artificial Sequence
  Description of Artificial Sequence: Synthetic oligonucleotide
aaguugucauggagauaga

SEQ ID NO: 3055328 - RNA, 19 nt, Artificial Sequence
  Description of Artificial Sequence: Synthetic oligonucleotide
ggucucccagaaguguccg

SEQ ID NO: 3055329 - RNA, 19 nt, Artificial Sequence
  Description of Artificial Sequence: Synthetic oligonucleotide
gacuggaggaacaggacuu

SEQ ID NO: 3055330 - RNA, 19 nt, Artificial Sequence
  Description of Artificial Sequence: Synthetic oligonucleotide
gcacggguuuuccuuccgg

SEQ ID NO: 3055331 - RNA, 19 nt, Artificial Sequence
  Description of Artificial Sequence: Synthetic oligonucleotide
gaaaguugucauggagaua

SEQ ID NO: 3055332 - RNA, 19 nt, Artificial Sequence
  Description of Artificial Sequence: Synthetic oligonucleotide
gucucccagaaguguccgc

SEQ ID NO: 3055333 - RNA, 19 nt, Artificial Sequence
  Description of Artificial Sequence: Synthetic oligonucleotide
ggucccuggaaucugguau

SEQ ID NO: 3055334 - RNA, 19 nt, Artificial Sequence
  Description of Artificial Sequence: Synthetic oligonucleotide
cagguucagugaaaguugu

SEQ ID NO: 3055335 - RNA, 19 nt, Artificial Sequence
  Description of Artificial Sequence: Synthetic oligonucleotide
aaagacccagccagaucuu

SEQ ID NO: 3055336 - RNA, 19 nt, Artificial Sequence
  Description of Artificial Sequence: Synthetic oligonucleotide
ucacuuucugagggucccu

SEQ ID NO: 3055337 - RNA, 19 nt, Artificial Sequence
  Description of Artificial Sequence: Synthetic oligonucleotide
gagauggcacagggucucc

SEQ ID NO: 3055338 - RNA, 19 nt, Artificial Sequence
  Description of Artificial Sequence: Synthetic oligonucleotide
cgaagaggaagcagcauca

SEQ ID NO: 3055339 - RNA, 19 nt, Artificial Sequence
  Description of Artificial Sequence: Synthetic oligonucleotide
cuuugacuugcuccggggu

SEQ ID NO: 3055340 - RNA, 19 nt, Artificial Sequence
  Description of Artificial Sequence: Synthetic oligonucleotide
cccuuugacuugcuccggg

SEQ ID NO: 3055341 - RNA, 19 nt, Artificial Sequence
  Description of Artificial Sequence: Synthetic oligonucleotide
acugguuggcagacuggcu

SEQ ID NO: 3055342 - RNA, 19 nt, Artificial Sequence
  Description of Artificial Sequence: Synthetic oligonucleotide
gacuucagguucagugaaa

SEQ ID NO: 3055343 - RNA, 19 nt, Artificial Sequence
  Description of Artificial Sequence: Synthetic oligonucleotide
gaggcaccgccucugcugu

SEQ ID NO: 3055344 - RNA, 19 nt, Artificial Sequence
  Description of Artificial Sequence: Synthetic oligonucleotide
ggaaucugguaucaaugau

SEQ ID NO: 3055345 - RNA, 19 nt, Artificial Sequence
  Description of Artificial Sequence: Synthetic oligonucleotide
ccuggacagggguggaggc

SEQ ID NO: 3055346 - RNA, 19 nt, Artificial Sequence
  Description of Artificial Sequence: Synthetic oligonucleotide
cuugcggcacaccucauuu

SEQ ID NO: 3055347 - RNA, 19 nt, Artificial Sequence
  Description of Artificial Sequence: Synthetic oligonucleotide
guggaggcaccgccucugc

SEQ ID NO: 3055348 - RNA, 19 nt, Artificial Sequence
  Description of Artificial Sequence: Synthetic oligonucleotide
ccuucacuuucugaggguc

SEQ ID NO: 3055349 - RNA, 19 nt, Artificial Sequence
  Description of Artificial Sequence: Synthetic oligonucleotide
guguccgcacggguuuucc

SEQ ID NO: 3055350 - RNA, 19 nt, Artificial Sequence
  Description of Artificial Sequence: Synthetic oligonucleotide
cuucagguucagugaaagu

SEQ ID NO: 3055351 - RNA, 19 nt, Artificial Sequence
  Description of Artificial Sequence: Synthetic oligonucleotide
gggucucccagaagugucc

SEQ ID NO: 3055352 - RNA, 19 nt, Artificial Sequence
  Description of Artificial Sequence: Synthetic oligonucleotide
gguacguaccaucucuuuu

SEQ ID NO: 3055353 - RNA, 19 nt, Artificial Sequence
  Description of Artificial Sequence: Synthetic oligonucleotide
cuggaggaacaggacuuca

SEQ ID NO: 3055354 - RNA, 19 nt, Artificial Sequence
  Description of Artificial Sequence: Synthetic oligonucleotide
gcagcaucagagagagaug

SEQ ID NO: 3055355 - RNA, 19 nt, Artificial Sequence
  Description of Artificial Sequence: Synthetic oligonucleotide
gguggaggcaccgccucug

SEQ ID NO: 3055356 - RNA, 19 nt, Artificial Sequence
  Description of Artificial Sequence: Synthetic oligonucleotide
ggcacagggucucccagaa

SEQ ID NO: 3055357 - RNA, 19 nt, Artificial Sequence
  Description of Artificial Sequence: Synthetic oligonucleotide
ccgccucugcuguaagagg

SEQ ID NO: 3055358 - RNA, 19 nt, Artificial Sequence
  Description of Artificial Sequence: Synthetic oligonucleotide
acaggacuucagguucagu

SEQ ID NO: 3055359 - RNA, 19 nt, Artificial Sequence
  Description of Artificial Sequence: Synthetic oligonucleotide
aaguguccgcacggguuuu

SEQ ID NO: 3055360 - RNA, 19 nt, Artificial Sequence
  Description of Artificial Sequence: Synthetic oligonucleotide
cggguuuuccuuccgggac

SEQ ID NO: 3055361 - RNA, 19 nt, Artificial Sequence
  Description of Artificial Sequence: Synthetic oligonucleotide
gcucgaagaggaagcagca

SEQ ID NO: 3055362 - RNA, 19 nt, Artificial Sequence
  Description of Artificial Sequence: Synthetic oligonucleotide
cuggcucgaagaggaagca

SEQ ID NO: 3055363 - RNA, 19 nt, Artificial Sequence
  Description of Artificial Sequence: Synthetic oligonucleotide
acuugcuccgggguacgua

SEQ ID NO: 3055364 - RNA, 19 nt, Artificial Sequence
  Description of Artificial Sequence: Synthetic oligonucleotide
ggagaaacuccuucacuuu

SEQ ID NO: 3055365 - RNA, 19 nt, Artificial Sequence
  Description of Artificial Sequence: Synthetic oligonucleotide
cagccagaucuugcggcac

SEQ ID NO: 3055366 - RNA, 19 nt, Artificial Sequence
  Description of Artificial Sequence: Synthetic oligonucleotide
cuggacagggguggaggca

SEQ ID NO: 3055367 - RNA, 19 nt, Artificial Sequence
  Description of Artificial Sequence: Synthetic oligonucleotide
uccuuccgggacggagccc

SEQ ID NO: 3055368 - RNA, 19 nt, Artificial Sequence
  Description of Artificial Sequence: Synthetic oligonucleotide
cagaaguguccgcacgggu

SEQ ID NO: 3055369 - RNA, 19 nt, Artificial Sequence
  Description of Artificial Sequence: Synthetic oligonucleotide
cuuccgggacggagcccug

SEQ ID NO: 3055370 - RNA, 19 nt, Artificial Sequence
  Description of Artificial Sequence: Synthetic oligonucleotide
ccagccagaucuugcggca

SEQ ID NO: 3055371 - RNA, 19 nt, Artificial Sequence
  Description of Artificial Sequence: Synthetic oligonucleotide
ccuggaaucugguaucaau

SEQ ID NO: 3055372 - RNA, 19 nt, Artificial Sequence
  Description of Artificial Sequence: Synthetic oligonucleotide
cggcacaccucauuuccac

SEQ ID NO: 3055373 - RNA, 19 nt, Artificial Sequence
  Description of Artificial Sequence: Synthetic oligonucleotide
gcacagggucucccagaag

SEQ ID NO: 3055374 - RNA, 19 nt, Artificial Sequence
  Description of Artificial Sequence: Synthetic oligonucleotide
ggacggagcccuggacagg

SEQ ID NO: 3055375 - RNA, 19 nt, Artificial Sequence
  Description of Artificial Sequence: Synthetic oligonucleotide
agggucccuggaaucuggu

SEQ ID NO: 3055376 - RNA, 19 nt, Artificial Sequence
  Description of Artificial Sequence: Synthetic oligonucleotide
guccgcacggguuuuccuu

SEQ ID NO: 3055377 - RNA, 19 nt, Artificial Sequence
  Description of Artificial Sequence: Synthetic oligonucleotide
acggagcccuggacagggg

SEQ ID NO: 3055378 - RNA, 19 nt, Artificial Sequence
  Description of Artificial Sequence: Synthetic oligonucleotide
gcccuuugacuugcuccgg

SEQ ID NO: 3055379 - RNA, 19 nt, Artificial Sequence
  Description of Artificial Sequence: Synthetic oligonucleotide
aagcagcaucagagagaga

SEQ ID NO: 3055380 - RNA, 19 nt, Artificial Sequence
  Description of Artificial Sequence: Synthetic oligonucleotide
ccacgagacuggaggaaca

SEQ ID NO: 3055381 - RNA, 19 nt, Artificial Sequence
  Description of Artificial Sequence: Synthetic oligonucleotide
ccagaucuugcggcacacc

SEQ ID NO: 3055382 - RNA, 19 nt, Artificial Sequence
  Description of Artificial Sequence: Synthetic oligonucleotide
cagggucucccagaagugu

SEQ ID NO: 3055383 - RNA, 19 nt, Artificial Sequence
  Description of Artificial Sequence: Synthetic oligonucleotide
ccgcacggguuuuccuucc

SEQ ID NO: 3055384 - RNA, 19 nt, Artificial Sequence
  Description of Artificial Sequence: Synthetic oligonucleotide
gccagaucuugcggcacac

SEQ ID NO: 3055385 - RNA, 19 nt, Artificial Sequence
  Description of Artificial Sequence: Synthetic oligonucleotide
guuggcagacuggcucgaa

SEQ ID NO: 3055386 - RNA, 19 nt, Artificial Sequence
  Description of Artificial Sequence: Synthetic oligonucleotide
agacuggcucgaagaggaa

SEQ ID NO: 3055387 - RNA, 19 nt, Artificial Sequence
  Description of Artificial Sequence: Synthetic oligonucleotide
gguuggcagacuggcucga

SEQ ID NO: 3055388 - RNA, 19 nt, Artificial Sequence
  Description of Artificial Sequence: Synthetic oligonucleotide
guuuuccuuccgggacgga

SEQ ID NO: 3055389 - RNA, 19 nt, Artificial Sequence
  Description of Artificial Sequence: Synthetic oligonucleotide
agcccuggacaggggugga

SEQ ID NO: 3055390 - RNA, 19 nt, Artificial Sequence
  Description of Artificial Sequence: Synthetic oligonucleotide
cucgaagaggaagcagcau

SEQ ID NO: 3055391 - RNA, 19 nt, Artificial Sequence
  Description of Artificial Sequence: Synthetic oligonucleotide
cgcacggguuuuccuuccg

SEQ ID NO: 3055392 - RNA, 19 nt, Artificial Sequence
  Description of Artificial Sequence: Synthetic oligonucleotide
gggucccuggaaucuggua

SEQ ID NO: 3055393 - RNA, 19 nt, Artificial Sequence
  Description of Artificial Sequence: Synthetic oligonucleotide
ggcaccgccucugcuguaa

SEQ ID NO: 3055394 - RNA, 19 nt, Artificial Sequence
  Description of Artificial Sequence: Synthetic oligonucleotide
ggguacguaccaucucuuu

SEQ ID NO: 3055395 - RNA, 19 nt, Artificial Sequence
  Description of Artificial Sequence: Synthetic oligonucleotide
cgggacggagcccuggaca

SEQ ID NO: 3055396 - RNA, 19 nt, Artificial Sequence
  Description of Artificial Sequence: Synthetic oligonucleotide
ccgggguacguaccaucuc

SEQ ID NO: 3055397 - RNA, 19 nt, Artificial Sequence
  Description of Artificial Sequence: Synthetic oligonucleotide
cguacuuuucuuggagaaa

SEQ ID NO: 3055398 - RNA, 19 nt, Artificial Sequence
  Description of Artificial Sequence: Synthetic oligonucleotide
gacuugcuccgggguacgu

SEQ ID NO: 3055399 - RNA, 19 nt, Artificial Sequence
  Description of Artificial Sequence: Synthetic oligonucleotide
gcggcacaccucauuucca

SEQ ID NO: 3055400 - RNA, 19 nt, Artificial Sequence
  Description of Artificial Sequence: Synthetic oligonucleotide
aucuugcggcacaccucau

SEQ ID NO: 3055401 - RNA, 19 nt, Artificial Sequence
  Description of Artificial Sequence: Synthetic oligonucleotide
gcccuggacagggguggag

SEQ ID NO: 3055402 - RNA, 19 nt, Artificial Sequence
  Description of Artificial Sequence: Synthetic oligonucleotide
cgggguacguaccaucucu

SEQ ID NO: 3055403 - RNA, 19 nt, Artificial Sequence
  Description of Artificial Sequence: Synthetic oligonucleotide
ccgggacggagcccuggac

SEQ ID NO: 3055404 - RNA, 19 nt, Artificial Sequence
  Description of Artificial Sequence: Synthetic oligonucleotide
aggcaccgccucugcugua

SEQ ID NO: 3055405 - RNA, 19 nt, Artificial Sequence
  Description of Artificial Sequence: Synthetic oligonucleotide
ccuuccgggacggagcccu

SEQ ID NO: 3055406 - RNA, 19 nt, Artificial Sequence
  Description of Artificial Sequence: Synthetic oligonucleotide
ggguggaggcaccgccucu

SEQ ID NO: 3055407 - RNA, 19 nt, Artificial Sequence
  Description of Artificial Sequence: Synthetic oligonucleotide
gggguacguaccaucucuu

SEQ ID NO: 3055408 - RNA, 19 nt, Artificial Sequence
  Description of Artificial Sequence: Synthetic oligonucleotide
gagggcccuuugacuugcu

SEQ ID NO: 3055409 - RNA, 19 nt, Artificial Sequence
  Description of Artificial Sequence: Synthetic oligonucleotide
cccuggaaucugguaucaa

SEQ ID NO: 3055410 - RNA, 19 nt, Artificial Sequence
  Description of Artificial Sequence: Synthetic oligonucleotide
cggagcccuggacaggggu

SEQ ID NO: 3055411 - RNA, 19 nt, Artificial Sequence
  Description of Artificial Sequence: Synthetic oligonucleotide
gcuccgggguacguaccau

SEQ ID NO: 3055412 - RNA, 19 nt, Artificial Sequence
  Description of Artificial Sequence: Synthetic oligonucleotide
aaaguguugcuuuaacugc

SEQ ID NO: 3055413 - RNA, 19 nt, Artificial Sequence
  Description of Artificial Sequence: Synthetic oligonucleotide
auuaaaauguggcucauac

SEQ ID NO: 3055414 - RNA, 19 nt, Artificial Sequence
  Description of Artificial Sequence: Synthetic oligonucleotide
aauuaagugcuuugugucc

SEQ ID NO: 3055415 - RNA, 19 nt, Artificial Sequence
  Description of Artificial Sequence: Synthetic oligonucleotide
aguuguaucuccuauuccc

SEQ ID NO: 3055416 - RNA, 19 nt, Artificial Sequence
  Description of Artificial Sequence: Synthetic oligonucleotide
uguugcaaaauuaaaaugu

SEQ ID NO: 3055417 - RNA, 19 nt, Artificial Sequence
  Description of Artificial Sequence: Synthetic oligonucleotide
ugcaaaauuaaaauguggc

SEQ ID NO: 3055418 - RNA, 19 nt, Artificial Sequence
  Description of Artificial Sequence: Synthetic oligonucleotide
aaaauuaaaauguggcuca

SEQ ID NO: 3055419 - RNA, 19 nt, Artificial Sequence
  Description of Artificial Sequence: Synthetic oligonucleotide
aagaucuccaaucuuauca

SEQ ID NO: 3055420 - RNA, 19 nt, Artificial Sequence
  Description of Artificial Sequence: Synthetic oligonucleotide
uaaaauguggcucauacau

SEQ ID NO: 3055421 - RNA, 19 nt, Artificial Sequence
  Description of Artificial Sequence: Synthetic oligonucleotide
uucaaugugacccuuucgc

SEQ ID NO: 3055422 - RNA, 19 nt, Artificial Sequence
  Description of Artificial Sequence: Synthetic oligonucleotide
uuaauuaagugcuuugugu

SEQ ID NO: 3055423 - RNA, 19 nt, Artificial Sequence
  Description of Artificial Sequence: Synthetic oligonucleotide
uugcaaaauuaaaaugugg

SEQ ID NO: 3055424 - RNA, 19 nt, Artificial Sequence
  Description of Artificial Sequence: Synthetic oligonucleotide
uuaacugcuuaauuaagug

SEQ ID NO: 3055425 - RNA, 19 nt, Artificial Sequence
  Description of Artificial Sequence: Synthetic oligonucleotide
cuucugagcagcaacauag

SEQ ID NO: 3055426 - RNA, 19 nt, Artificial Sequence
  Description of Artificial Sequence: Synthetic oligonucleotide
aacauagcuucucugaaga

SEQ ID NO: 3055427 - RNA, 19 nt, Artificial Sequence
  Description of Artificial Sequence: Synthetic oligonucleotide
aacuuaucagagcauagca

SEQ ID NO: 3055428 - RNA, 19 nt, Artificial Sequence
  Description of Artificial Sequence: Synthetic oligonucleotide
aaauguggcucauacauau

SEQ ID NO: 3055429 - RNA, 19 nt, Artificial Sequence
  Description of Artificial Sequence: Synthetic oligonucleotide
aaugugacccuuucgcauc

SEQ ID NO: 3055430 - RNA, 19 nt, Artificial Sequence
  Description of Artificial Sequence: Synthetic oligonucleotide
caaaguguugcuuuaacug

SEQ ID NO: 3055431 - RNA, 19 nt, Artificial Sequence
  Description of Artificial Sequence: Synthetic oligonucleotide
aaguuguaucuccuauucc

SEQ ID NO: 3055432 - RNA, 19 nt, Artificial Sequence
  Description of Artificial Sequence: Synthetic oligonucleotide
ucuuaucagagacuguugc

SEQ ID NO: 3055433 - RNA, 19 nt, Artificial Sequence
  Description of Artificial Sequence: Synthetic oligonucleotide
gaugcaguuuguaagagug

SEQ ID NO: 3055434 - RNA, 19 nt, Artificial Sequence
  Description of Artificial Sequence: Synthetic oligonucleotide
auguggcucauacauaugg

SEQ ID NO: 3055435 - RNA, 19 nt, Artificial Sequence
  Description of Artificial Sequence: Synthetic oligonucleotide
uuuguaagagugcucuugc

SEQ ID NO: 3055436 - RNA, 19 nt, Artificial Sequence
  Description of Artificial Sequence: Synthetic oligonucleotide
ugagcagcaacauagcuuc

SEQ ID NO: 3055437 - RNA, 19 nt, Artificial Sequence
  Description of Artificial Sequence: Synthetic oligonucleotide
caaaauuaaaauguggcuc

SEQ ID NO: 3055438 - RNA, 19 nt, Artificial Sequence
  Description of Artificial Sequence: Synthetic oligonucleotide
cuaacgacgaugcaguuug

SEQ ID NO: 3055439 - RNA, 19 nt, Artificial Sequence
  Description of Artificial Sequence: Synthetic oligonucleotide
uaauuaagugcuuuguguc

SEQ ID NO: 3055440 - RNA, 19 nt, Artificial Sequence
  Description of Artificial Sequence: Synthetic oligonucleotide
aacugcuuaauuaagugcu

SEQ ID NO: 3055441 - RNA, 19 nt, Artificial Sequence
  Description of Artificial Sequence: Synthetic oligonucleotide
uuguugguggaccagggcc

SEQ ID NO: 3055442 - RNA, 19 nt, Artificial Sequence
  Description of Artificial Sequence: Synthetic oligonucleotide
uaacugcuuaauuaagugc

SEQ ID NO: 3055443 - RNA, 19 nt, Artificial Sequence
  Description of Artificial Sequence: Synthetic oligonucleotide
uguaagagugcucuugccu

SEQ ID NO: 3055444 - RNA, 19 nt, Artificial Sequence
  Description of Artificial Sequence: Synthetic oligonucleotide
uuaucagagcauagcaaag

SEQ ID NO: 3055445 - RNA, 19 nt, Artificial Sequence
  Description of Artificial Sequence: Synthetic oligonucleotide
acagcuagguuguuguagg

SEQ ID NO: 3055446 - RNA, 19 nt, Artificial Sequence
  Description of Artificial Sequence: Synthetic oligonucleotide
cuuaauuaagugcuuugug

SEQ ID NO: 3055447 - RNA, 19 nt, Artificial Sequence
  Description of Artificial Sequence: Synthetic oligonucleotide
uguggcucauacauauggg

SEQ ID NO: 3055448 - RNA, 19 nt, Artificial Sequence
  Description of Artificial Sequence: Synthetic oligonucleotide
aaucuuaucagagacuguu

SEQ ID NO: 3055449 - RNA, 19 nt, Artificial Sequence
  Description of Artificial Sequence: Synthetic oligonucleotide
ugcuuuaacugcuuaauua

SEQ ID NO: 3055450 - RNA, 19 nt, Artificial Sequence
  Description of Artificial Sequence: Synthetic oligonucleotide
uuucgcaucuccagcacag

SEQ ID NO: 3055451 - RNA, 19 nt, Artificial Sequence
  Description of Artificial Sequence: Synthetic oligonucleotide
ugccuguucaaugugaccc

SEQ ID NO: 3055452 - RNA, 19 nt, Artificial Sequence
  Description of Artificial Sequence: Synthetic oligonucleotide
agaucuccaaucuuaucag

SEQ ID NO: 3055453 - RNA, 19 nt, Artificial Sequence
  Description of Artificial Sequence: Synthetic oligonucleotide
auucccacagcaaugucgc

SEQ ID NO: 3055454 - RNA, 19 nt, Artificial Sequence
  Description of Artificial Sequence: Synthetic oligonucleotide
cuguugcaaaauuaaaaug

SEQ ID NO: 3055455 - RNA, 19 nt, Artificial Sequence
  Description of Artificial Sequence: Synthetic oligonucleotide
uggcucauacauauggggc

SEQ ID NO: 3055456 - RNA, 19 nt, Artificial Sequence
  Description of Artificial Sequence: Synthetic oligonucleotide
agcaaaguguugcuuuaac

SEQ ID NO: 3055457 - RNA, 19 nt, Artificial Sequence
  Description of Artificial Sequence: Synthetic oligonucleotide
uuaaaauguggcucauaca

SEQ ID NO: 3055458 - RNA, 19 nt, Artificial Sequence
  Description of Artificial Sequence: Synthetic oligonucleotide
guaagagugcucuugccug

SEQ ID NO: 3055459 - RNA, 19 nt, Artificial Sequence
  Description of Artificial Sequence: Synthetic oligonucleotide
ucucugaagaucuccaauc

SEQ ID NO: 3055460 - RNA, 19 nt, Artificial Sequence
  Description of Artificial Sequence: Synthetic oligonucleotide
gagcauagcaaaguguugc

SEQ ID NO: 3055461 - RNA, 19 nt, Artificial Sequence
  Description of Artificial Sequence: Synthetic oligonucleotide
guggcucauacauaugggg

SEQ ID NO: 3055462 - RNA, 19 nt, Artificial Sequence
  Description of Artificial Sequence: Synthetic oligonucleotide
agcaacauagcuucucuga

SEQ ID NO: 3055463 - RNA, 19 nt, Artificial Sequence
  Description of Artificial Sequence: Synthetic oligonucleotide
ugcuuaauuaagugcuuug

SEQ ID NO: 3055464 - RNA, 19 nt, Artificial Sequence
  Description of Artificial Sequence: Synthetic oligonucleotide
auacauauggggcgcuaac

SEQ ID NO: 3055465 - RNA, 19 nt, Artificial Sequence
  Description of Artificial Sequence: Synthetic oligonucleotide
cuuaucagagcauagcaaa

SEQ ID NO: 3055466 - RNA, 19 nt, Artificial Sequence
  Description of Artificial Sequence: Synthetic oligonucleotide
aucagagcauagcaaagug

SEQ ID NO: 3055467 - RNA, 19 nt, Artificial Sequence
  Description of Artificial Sequence: Synthetic oligonucleotide
ucagagcauagcaaagugu

SEQ ID NO: 3055468 - RNA, 19 nt, Artificial Sequence
  Description of Artificial Sequence: Synthetic oligonucleotide
guugcaaaauuaaaaugug

SEQ ID NO: 3055469 - RNA, 19 nt, Artificial Sequence
  Description of Artificial Sequence: Synthetic oligonucleotide
cuccaaucuuaucagagac

SEQ ID NO: 3055470 - RNA, 19 nt, Artificial Sequence
  Description of Artificial Sequence: Synthetic oligonucleotide
uacauauggggcgcuaacg

SEQ ID NO: 3055471 - RNA, 19 nt, Artificial Sequence
  Description of Artificial Sequence: Synthetic oligonucleotide
ucugcguggugguuguugg

SEQ ID NO: 3055472 - RNA, 19 nt, Artificial Sequence
  Description of Artificial Sequence: Synthetic oligonucleotide
gaacuuaucagagcauagc

SEQ ID NO: 3055473 - RNA, 19 nt, Artificial Sequence
  Description of Artificial Sequence: Synthetic oligonucleotide
caaguuguaucuccuauuc

SEQ ID NO: 3055474 - RNA, 19 nt, Artificial Sequence
  Description of Artificial Sequence: Synthetic oligonucleotide
auagcuucucugaagaucu

SEQ ID NO: 3055475 - RNA, 19 nt, Artificial Sequence
  Description of Artificial Sequence: Synthetic oligonucleotide
uuaucagagacuguugcaa

SEQ ID NO: 3055476 - RNA, 19 nt, Artificial Sequence
  Description of Artificial Sequence: Synthetic oligonucleotide
ucaaugugacccuuucgca

SEQ ID NO: 3055477 - RNA, 19 nt, Artificial Sequence
  Description of Artificial Sequence: Synthetic oligonucleotide
uccuauucccacagcaaug

SEQ ID NO: 3055478 - RNA, 19 nt, Artificial Sequence
  Description of Artificial Sequence: Synthetic oligonucleotide
ucugagcagcaacauagcu

SEQ ID NO: 3055479 - RNA, 19 nt, Artificial Sequence
  Description of Artificial Sequence: Synthetic oligonucleotide
ucuccaaucuuaucagaga

SEQ ID NO: 3055480 - RNA, 19 nt, Artificial Sequence
  Description of Artificial Sequence: Synthetic oligonucleotide
uguugguggaccagggcca

SEQ ID NO: 3055481 - RNA, 19 nt, Artificial Sequence
  Description of Artificial Sequence: Synthetic oligonucleotide
ugcaguuuguaagagugcu

SEQ ID NO: 3055482 - RNA, 19 nt, Artificial Sequence
  Description of Artificial Sequence: Synthetic oligonucleotide
ucuugccuguucaauguga

SEQ ID NO: 3055483 - RNA, 19 nt, Artificial Sequence
  Description of Artificial Sequence: Synthetic oligonucleotide
acauauggggcgcuaacga

SEQ ID NO: 3055484 - RNA, 19 nt, Artificial Sequence
  Description of Artificial Sequence: Synthetic oligonucleotide
aucuccuauucccacagca

SEQ ID NO: 3055485 - RNA, 19 nt, Artificial Sequence
  Description of Artificial Sequence: Synthetic oligonucleotide
guaucuccuauucccacag

SEQ ID NO: 3055486 - RNA, 19 nt, Artificial Sequence
  Description of Artificial Sequence: Synthetic oligonucleotide
ugaagaucuccaaucuuau

SEQ ID NO: 3055487 - RNA, 19 nt, Artificial Sequence
  Description of Artificial Sequence: Synthetic oligonucleotide
uguucaaugugacccuuuc

SEQ ID NO: 3055488 - RNA, 19 nt, Artificial Sequence
  Description of Artificial Sequence: Synthetic oligonucleotide
agcuagguuguuguaggcc

SEQ ID NO: 3055489 - RNA, 19 nt, Artificial Sequence
  Description of Artificial Sequence: Synthetic oligonucleotide
agcacagcuagguuguugu

SEQ ID NO: 3055490 - RNA, 19 nt, Artificial Sequence
  Description of Artificial Sequence: Synthetic oligonucleotide
uguaucuccuauucccaca

SEQ ID NO: 3055491 - RNA, 19 nt, Artificial Sequence
  Description of Artificial Sequence: Synthetic oligonucleotide
aagaacuuaucagagcaua

SEQ ID NO: 3055492 - RNA, 19 nt, Artificial Sequence
  Description of Artificial Sequence: Synthetic oligonucleotide
ggcucauacauauggggcg

SEQ ID NO: 3055493 - RNA, 19 nt, Artificial Sequence
  Description of Artificial Sequence: Synthetic oligonucleotide
agcuucucugaagaucucc

SEQ ID NO: 3055494 - RNA, 19 nt, Artificial Sequence
  Description of Artificial Sequence: Synthetic oligonucleotide
gacgaugcaguuuguaaga

SEQ ID NO: 3055495 - RNA, 19 nt, Artificial Sequence
  Description of Artificial Sequence: Synthetic oligonucleotide
acccuuucgcaucuccagc

SEQ ID NO: 3055496 - RNA, 19 nt, Artificial Sequence
  Description of Artificial Sequence: Synthetic oligonucleotide
aagugcuuuguguccacgu

SEQ ID NO: 3055497 - RNA, 19 nt, Artificial Sequence
  Description of Artificial Sequence: Synthetic oligonucleotide
uguugcuuuaacugcuuaa

SEQ ID NO: 3055498 - RNA, 19 nt, Artificial Sequence
  Description of Artificial Sequence: Synthetic oligonucleotide
auauggggcgcuaacgacg

SEQ ID NO: 3055499 - RNA, 19 nt, Artificial Sequence
  Description of Artificial Sequence: Synthetic oligonucleotide
uaucagagcauagcaaagu

SEQ ID NO: 3055500 - RNA, 19 nt, Artificial Sequence
  Description of Artificial Sequence: Synthetic oligonucleotide
ugggccaaguuguaucucc

SEQ ID NO: 3055501 - RNA, 19 nt, Artificial Sequence
  Description of Artificial Sequence: Synthetic oligonucleotide
caacauagcuucucugaag

SEQ ID NO: 3055502 - RNA, 19 nt, Artificial Sequence
  Description of Artificial Sequence: Synthetic oligonucleotide
guucaaugugacccuuucg

SEQ ID NO: 3055503 - RNA, 19 nt, Artificial Sequence
  Description of Artificial Sequence: Synthetic oligonucleotide
gacuguugcaaaauuaaaa

SEQ ID NO: 3055504 - RNA, 19 nt, Artificial Sequence
  Description of Artificial Sequence: Synthetic oligonucleotide
guuuguaagagugcucuug

SEQ ID NO: 3055505 - RNA, 19 nt, Artificial Sequence
  Description of Artificial Sequence: Synthetic oligonucleotide
uauggggcgcuaacgacga

SEQ ID NO: 3055506 - RNA, 19 nt, Artificial Sequence
  Description of Artificial Sequence: Synthetic oligonucleotide
gacccuuucgcaucuccag

SEQ ID NO: 3055507 - RNA, 19 nt, Artificial Sequence
  Description of Artificial Sequence: Synthetic oligonucleotide
aucuccaaucuuaucagag

SEQ ID NO: 3055508 - RNA, 19 nt, Artificial Sequence
  Description of Artificial Sequence: Synthetic oligonucleotide
ugcuuuguguccacgugcu

SEQ ID NO: 3055509 - RNA, 19 nt, Artificial Sequence
  Description of Artificial Sequence: Synthetic oligonucleotide
ugggaaugccgccucagac

SEQ ID NO: 3055510 - RNA, 19 nt, Artificial Sequence
  Description of Artificial Sequence: Synthetic oligonucleotide
auuaagugcuuugugucca

SEQ ID NO: 3055511 - RNA, 19 nt, Artificial Sequence
  Description of Artificial Sequence: Synthetic oligonucleotide
agugcuuuguguccacgug

SEQ ID NO: 3055512 - RNA, 19 nt, Artificial Sequence
  Description of Artificial Sequence: Synthetic oligonucleotide
aaugccgccucagacuucu

SEQ ID NO: 3055513 - RNA, 19 nt, Artificial Sequence
  Description of Artificial Sequence: Synthetic oligonucleotide
aaguguugcuuuaacugcu

SEQ ID NO: 3055514 - RNA, 19 nt, Artificial Sequence
  Description of Artificial Sequence: Synthetic oligonucleotide
uucugagcagcaacauagc

SEQ ID NO: 3055515 - RNA, 19 nt, Artificial Sequence
  Description of Artificial Sequence: Synthetic oligonucleotide
cuugccuguucaaugugac

SEQ ID NO: 3055516 - RNA, 19 nt, Artificial Sequence
  Description of Artificial Sequence: Synthetic oligonucleotide
cuccagcacagcuagguug

SEQ ID NO: 3055517 - RNA, 19 nt, Artificial Sequence
  Description of Artificial Sequence: Synthetic oligonucleotide
cagacuucugagcagcaac

SEQ ID NO: 3055518 - RNA, 19 nt, Artificial Sequence
  Description of Artificial Sequence: Synthetic oligonucleotide
guuguaggccucugcgugg

SEQ ID NO: 3055519 - RNA, 19 nt, Artificial Sequence
  Description of Artificial Sequence: Synthetic oligonucleotide
cauagcuucucugaagauc

SEQ ID NO: 3055520 - RNA, 19 nt, Artificial Sequence
  Description of Artificial Sequence: Synthetic oligonucleotide
uuguaagagugcucuugcc

SEQ ID NO: 3055521 - RNA, 19 nt, Artificial Sequence
  Description of Artificial Sequence: Synthetic oligonucleotide
ucuccuauucccacagcaa

SEQ ID NO: 3055522 - RNA, 19 nt, Artificial Sequence
  Description of Artificial Sequence: Synthetic oligonucleotide
agaacuuaucagagcauag

SEQ ID NO: 3055523 - RNA, 19 nt, Artificial Sequence
  Description of Artificial Sequence: Synthetic oligonucleotide
uaucagagacuguugcaaa

SEQ ID NO: 3055524 - RNA, 19 nt, Artificial Sequence
  Description of Artificial Sequence: Synthetic oligonucleotide
cauauggggcgcuaacgac

SEQ ID NO: 3055525 - RNA, 19 nt, Artificial Sequence
  Description of Artificial Sequence: Synthetic oligonucleotide
uuguaucuccuauucccac

SEQ ID NO: 3055526 - RNA, 19 nt, Artificial Sequence
  Description of Artificial Sequence: Synthetic oligonucleotide
cugaagaucuccaaucuua

SEQ ID NO: 3055527 - RNA, 19 nt, Artificial Sequence
  Description of Artificial Sequence: Synthetic oligonucleotide
gugcuuuguguccacgugc

SEQ ID NO: 3055528 - RNA, 19 nt, Artificial Sequence
  Description of Artificial Sequence: Synthetic oligonucleotide
cuuaucagagacuguugca

SEQ ID NO: 3055529 - RNA, 19 nt, Artificial Sequence
  Description of Artificial Sequence: Synthetic oligonucleotide
ucccacagcaaugucgccc

SEQ ID NO: 3055530 - RNA, 19 nt, Artificial Sequence
  Description of Artificial Sequence: Synthetic oligonucleotide
agcauagcaaaguguugcu

SEQ ID NO: 3055531 - RNA, 19 nt, Artificial Sequence
  Description of Artificial Sequence: Synthetic oligonucleotide
uugcuuuaacugcuuaauu

SEQ ID NO: 3055532 - RNA, 19 nt, Artificial Sequence
  Description of Artificial Sequence: Synthetic oligonucleotide
ugaagcacguggugggcca

SEQ ID NO: 3055533 - RNA, 19 nt, Artificial Sequence
  Description of Artificial Sequence: Synthetic oligonucleotide
uaagagugcucuugccugu

SEQ ID NO: 3055534 - RNA, 19 nt, Artificial Sequence
  Description of Artificial Sequence: Synthetic oligonucleotide
gcuuuaacugcuuaauuaa

SEQ ID NO: 3055535 - RNA, 19 nt, Artificial Sequence
  Description of Artificial Sequence: Synthetic oligonucleotide
acgacgaugcaguuuguaa

SEQ ID NO: 3055536 - RNA, 19 nt, Artificial Sequence
  Description of Artificial Sequence: Synthetic oligonucleotide
ccaaucuuaucagagacug

SEQ ID NO: 3055537 - RNA, 19 nt, Artificial Sequence
  Description of Artificial Sequence: Synthetic oligonucleotide
ugacccuuucgcaucucca

SEQ ID NO: 3055538 - RNA, 19 nt, Artificial Sequence
  Description of Artificial Sequence: Synthetic oligonucleotide
gaagaucuccaaucuuauc

SEQ ID NO: 3055539 - RNA, 19 nt, Artificial Sequence
  Description of Artificial Sequence: Synthetic oligonucleotide
cacagcuagguuguuguag

SEQ ID NO: 3055540 - RNA, 19 nt, Artificial Sequence
  Description of Artificial Sequence: Synthetic oligonucleotide
cacguggugggccaaguug

SEQ ID NO: 3055541 - RNA, 19 nt, Artificial Sequence
  Description of Artificial Sequence: Synthetic oligonucleotide
ucgcaucuccagcacagcu

SEQ ID NO: 3055542 - RNA, 19 nt, Artificial Sequence
  Description of Artificial Sequence: Synthetic oligonucleotide
agcagcaacauagcuucuc

SEQ ID NO: 3055543 - RNA, 19 nt, Artificial Sequence
  Description of Artificial Sequence: Synthetic oligonucleotide
augcaguuuguaagagugc

SEQ ID NO: 3055544 - RNA, 19 nt, Artificial Sequence
  Description of Artificial Sequence: Synthetic oligonucleotide
agccugaagcacguggugg

SEQ ID NO: 3055545 - RNA, 19 nt, Artificial Sequence
  Description of Artificial Sequence: Synthetic oligonucleotide
uaagugcuuuguguccacg

SEQ ID NO: 3055546 - RNA, 19 nt, Artificial Sequence
  Description of Artificial Sequence: Synthetic oligonucleotide
auagcaaaguguugcuuua

SEQ ID NO: 3055547 - RNA, 19 nt, Artificial Sequence
  Description of Artificial Sequence: Synthetic oligonucleotide
aucagagacuguugcaaaa

SEQ ID NO: 3055548 - RNA, 19 nt, Artificial Sequence
  Description of Artificial Sequence: Synthetic oligonucleotide
ucagagacuguugcaaaau

SEQ ID NO: 3055549 - RNA, 19 nt, Artificial Sequence
  Description of Artificial Sequence: Synthetic oligonucleotide
aauuaaaauguggcucaua

SEQ ID NO: 3055550 - RNA, 19 nt, Artificial Sequence
  Description of Artificial Sequence: Synthetic oligonucleotide
gaucuccaaucuuaucaga

SEQ ID NO: 3055551 - RNA, 19 nt, Artificial Sequence
  Description of Artificial Sequence: Synthetic oligonucleotide
gcaucuccagcacagcuag

SEQ ID NO: 3055552 - RNA, 19 nt, Artificial Sequence
  Description of Artificial Sequence: Synthetic oligonucleotide
aaaauguggcucauacaua

SEQ ID NO: 3055553 - RNA, 19 nt, Artificial Sequence
  Description of Artificial Sequence: Synthetic oligonucleotide
uggugggccaaguuguauc

SEQ ID NO: 3055554 - RNA, 19 nt, Artificial Sequence
  Description of Artificial Sequence: Synthetic oligonucleotide
ugcguggugguuguuggug

SEQ ID NO: 3055555 - RNA, 19 nt, Artificial Sequence
  Description of Artificial Sequence: Synthetic oligonucleotide
uugccuguucaaugugacc

SEQ ID NO: 3055556 - RNA, 19 nt, Artificial Sequence
  Description of Artificial Sequence: Synthetic oligonucleotide
uggaccagggccagccuga

SEQ ID NO: 3055557 - RNA, 19 nt, Artificial Sequence
  Description of Artificial Sequence: Synthetic oligonucleotide
uuaagugcuuuguguccac

SEQ ID NO: 3055558 - RNA, 19 nt, Artificial Sequence
  Description of Artificial Sequence: Synthetic oligonucleotide
guuguugguggaccagggc

SEQ ID NO: 3055559 - RNA, 19 nt, Artificial Sequence
  Description of Artificial Sequence: Synthetic oligonucleotide
uguccacgugcucugggaa

SEQ ID NO: 3055560 - RNA, 19 nt, Artificial Sequence
  Description of Artificial Sequence: Synthetic oligonucleotide
gcaaaauuaaaauguggcu

SEQ ID NO: 3055561 - RNA, 19 nt, Artificial Sequence
  Description of Artificial Sequence: Synthetic oligonucleotide
aauguggcucauacauaug

SEQ ID NO: 3055562 - RNA, 19 nt, Artificial Sequence
  Description of Artificial Sequence: Synthetic oligonucleotide
acuuaucagagcauagcaa

SEQ ID NO: 3055563 - RNA, 19 nt, Artificial Sequence
  Description of Artificial Sequence: Synthetic oligonucleotide
uccacgugcucugggaaug

SEQ ID NO: 3055564 - RNA, 19 nt, Artificial Sequence
  Description of Artificial Sequence: Synthetic oligonucleotide
uaucuccuauucccacagc

SEQ ID NO: 3055565 - RNA, 19 nt, Artificial Sequence
  Description of Artificial Sequence: Synthetic oligonucleotide
ggcgcuaacgacgaugcag

SEQ ID NO: 3055566 - RNA, 19 nt, Artificial Sequence
  Description of Artificial Sequence: Synthetic oligonucleotide
guaggccucugcguggugg

SEQ ID NO: 3055567 - RNA, 19 nt, Artificial Sequence
  Description of Artificial Sequence: Synthetic oligonucleotide
uggugguuguugguggacc

SEQ ID NO: 3055568 - RNA, 19 nt, Artificial Sequence
  Description of Artificial Sequence: Synthetic oligonucleotide
guuguaucuccuauuccca

SEQ ID NO: 3055569 - RNA, 19 nt, Artificial Sequence
  Description of Artificial Sequence: Synthetic oligonucleotide
ucugggaaugccgccucag

SEQ ID NO: 3055570 - RNA, 19 nt, Artificial Sequence
  Description of Artificial Sequence: Synthetic oligonucleotide
ugguggaccagggccagcc

SEQ ID NO: 3055571 - RNA, 19 nt, Artificial Sequence
  Description of Artificial Sequence: Synthetic oligonucleotide
agagacuguugcaaaauua

SEQ ID NO: 3055572 - RNA, 19 nt, Artificial Sequence
  Description of Artificial Sequence: Synthetic oligonucleotide
acgaugcaguuuguaagag

SEQ ID NO: 3055573 - RNA, 19 nt, Artificial Sequence
  Description of Artificial Sequence: Synthetic oligonucleotide
aucuuaucagagacuguug

SEQ ID NO: 3055574 - RNA, 19 nt, Artificial Sequence
  Description of Artificial Sequence: Synthetic oligonucleotide
acuucugagcagcaacaua

SEQ ID NO: 3055575 - RNA, 19 nt, Artificial Sequence
  Description of Artificial Sequence: Synthetic oligonucleotide
ugccgccucagacuucuga

SEQ ID NO: 3055576 - RNA, 19 nt, Artificial Sequence
  Description of Artificial Sequence: Synthetic oligonucleotide
agacuucugagcagcaaca

SEQ ID NO: 3055577 - RNA, 19 nt, Artificial Sequence
  Description of Artificial Sequence: Synthetic oligonucleotide
uggggcgcuaacgacgaug

SEQ ID NO: 3055578 - RNA, 19 nt, Artificial Sequence
  Description of Artificial Sequence: Synthetic oligonucleotide
agggccagccugaagcacg

SEQ ID NO: 3055579 - RNA, 19 nt, Artificial Sequence
  Description of Artificial Sequence: Synthetic oligonucleotide
agagcauagcaaaguguug

SEQ ID NO: 3055580 - RNA, 19 nt, Artificial Sequence
  Description of Artificial Sequence: Synthetic oligonucleotide
gccagccugaagcacgugg

SEQ ID NO: 3055581 - RNA, 19 nt, Artificial Sequence
  Description of Artificial Sequence: Synthetic oligonucleotide
cagcaacauagcuucucug

SEQ ID NO: 3055582 - RNA, 19 nt, Artificial Sequence
  Description of Artificial Sequence: Synthetic oligonucleotide
cuagguuguuguaggccuc

SEQ ID NO: 3055583 - RNA, 19 nt, Artificial Sequence
  Description of Artificial Sequence: Synthetic oligonucleotide
cauagcaaaguguugcuuu

SEQ ID NO: 3055584 - RNA, 19 nt, Artificial Sequence
  Description of Artificial Sequence: Synthetic oligonucleotide
cagagcauagcaaaguguu

SEQ ID NO: 3055585 - RNA, 19 nt, Artificial Sequence
  Description of Artificial Sequence: Synthetic oligonucleotide
acauagcuucucugaagau

SEQ ID NO: 3055586 - RNA, 19 nt, Artificial Sequence
  Description of Artificial Sequence: Synthetic oligonucleotide
augugacccuuucgcaucu

SEQ ID NO: 3055587 - RNA, 19 nt, Artificial Sequence
  Description of Artificial Sequence: Synthetic oligonucleotide
cagcuagguuguuguaggc

SEQ ID NO: 3055588 - RNA, 19 nt, Artificial Sequence
  Description of Artificial Sequence: Synthetic oligonucleotide
agugcucuugccuguucaa

SEQ ID NO: 3055589 - RNA, 19 nt, Artificial Sequence
  Description of Artificial Sequence: Synthetic oligonucleotide
ugcucugggaaugccgccu

SEQ ID NO: 3055590 - RNA, 19 nt, Artificial Sequence
  Description of Artificial Sequence: Synthetic oligonucleotide
cucuugccuguucaaugug

SEQ ID NO: 3055591 - RNA, 19 nt, Artificial Sequence
  Description of Artificial Sequence: Synthetic oligonucleotide
aacgacgaugcaguuugua

SEQ ID NO: 3055592 - RNA, 19 nt, Artificial Sequence
  Description of Artificial Sequence: Synthetic oligonucleotide
uagguuguuguaggccucu

SEQ ID NO: 3055593 - RNA, 19 nt, Artificial Sequence
  Description of Artificial Sequence: Synthetic oligonucleotide
ucagacuucugagcagcaa

SEQ ID NO: 3055594 - RNA, 19 nt, Artificial Sequence
  Description of Artificial Sequence: Synthetic oligonucleotide
guggaccagggccagccug

SEQ ID NO: 3055595 - RNA, 19 nt, Artificial Sequence
  Description of Artificial Sequence: Synthetic oligonucleotide
agacuguugcaaaauuaaa

SEQ ID NO: 3055596 - RNA, 19 nt, Artificial Sequence
  Description of Artificial Sequence: Synthetic oligonucleotide
ucuccagcacagcuagguu

SEQ ID NO: 3055597 - RNA, 19 nt, Artificial Sequence
  Description of Artificial Sequence: Synthetic oligonucleotide
gguuguugguggaccaggg

SEQ ID NO: 3055598 - RNA, 19 nt, Artificial Sequence
  Description of Artificial Sequence: Synthetic oligonucleotide
acguggugggccaaguugu

SEQ ID NO: 3055599 - RNA, 19 nt, Artificial Sequence
  Description of Artificial Sequence: Synthetic oligonucleotide
aguuuguaagagugcucuu

SEQ ID NO: 3055600 - RNA, 19 nt, Artificial Sequence
  Description of Artificial Sequence: Synthetic oligonucleotide
acgugcucugggaaugccg

SEQ ID NO: 3055601 - RNA, 19 nt, Artificial Sequence
  Description of Artificial Sequence: Synthetic oligonucleotide
caguuuguaagagugcucu

SEQ ID NO: 3055602 - RNA, 19 nt, Artificial Sequence
  Description of Artificial Sequence: Synthetic oligonucleotide
guugcuuuaacugcuuaau

SEQ ID NO: 3055603 - RNA, 19 nt, Artificial Sequence
  Description of Artificial Sequence: Synthetic oligonucleotide
uaggccucugcgugguggu

SEQ ID NO: 3055604 - RNA, 19 nt, Artificial Sequence
  Description of Artificial Sequence: Synthetic oligonucleotide
cuuucgcaucuccagcaca

SEQ ID NO: 3055605 - RNA, 19 nt, Artificial Sequence
  Description of Artificial Sequence: Synthetic oligonucleotide
gcguggugguuguuggugg

SEQ ID NO: 3055606 - RNA, 19 nt, Artificial Sequence
  Description of Artificial Sequence: Synthetic oligonucleotide
uagcaaaguguugcuuuaa

SEQ ID NO: 3055607 - RNA, 19 nt, Artificial Sequence
  Description of Artificial Sequence: Synthetic oligonucleotide
cccacagcaaugucgcccc

SEQ ID NO: 3055608 - RNA, 19 nt, Artificial Sequence
  Description of Artificial Sequence: Synthetic oligonucleotide
gccgccucagacuucugag

SEQ ID NO: 3055609 - RNA, 19 nt, Artificial Sequence
  Description of Artificial Sequence: Synthetic oligonucleotide
uuguaggccucugcguggu

SEQ ID NO: 3055610 - RNA, 19 nt, Artificial Sequence
  Description of Artificial Sequence: Synthetic oligonucleotide
cuauucccacagcaauguc

SEQ ID NO: 3055611 - RNA, 19 nt, Artificial Sequence
  Description of Artificial Sequence: Synthetic oligonucleotide
uucgcaucuccagcacagc

SEQ ID NO: 3055612 - RNA, 19 nt, Artificial Sequence
  Description of Artificial Sequence: Synthetic oligonucleotide
gcuagguuguuguaggccu

SEQ ID NO: 3055613 - RNA, 19 nt, Artificial Sequence
  Description of Artificial Sequence: Synthetic oligonucleotide
cucugcguggugguuguug

SEQ ID NO: 3055614 - RNA, 19 nt, Artificial Sequence
  Description of Artificial Sequence: Synthetic oligonucleotide
gcaacauagcuucucugaa

SEQ ID NO: 3055615 - RNA, 19 nt, Artificial Sequence
  Description of Artificial Sequence: Synthetic oligonucleotide
cuucucugaagaucuccaa

SEQ ID NO: 3055616 - RNA, 19 nt, Artificial Sequence
  Description of Artificial Sequence: Synthetic oligonucleotide
gcaaaguguugcuuuaacu

SEQ ID NO: 3055617 - RNA, 19 nt, Artificial Sequence
  Description of Artificial Sequence: Synthetic oligonucleotide
gcucauacauauggggcgc

SEQ ID NO: 3055618 - RNA, 19 nt, Artificial Sequence
  Description of Artificial Sequence: Synthetic oligonucleotide
caaugugacccuuucgcau

SEQ ID NO: 3055619 - RNA, 19 nt, Artificial Sequence
  Description of Artificial Sequence: Synthetic oligonucleotide
caucuccagcacagcuagg

SEQ ID NO: 3055620 - RNA, 19 nt, Artificial Sequence
  Description of Artificial Sequence: Synthetic oligonucleotide
cugagcagcaacauagcuu

SEQ ID NO: 3055621 - RNA, 19 nt, Artificial Sequence
  Description of Artificial Sequence: Synthetic oligonucleotide
guugguggaccagggccag

SEQ ID NO: 3055622 - RNA, 19 nt, Artificial Sequence
  Description of Artificial Sequence: Synthetic oligonucleotide
uaacgacgaugcaguuugu

SEQ ID NO: 3055623 - RNA, 19 nt, Artificial Sequence
  Description of Artificial Sequence: Synthetic oligonucleotide
ucauacauauggggcgcua

SEQ ID NO: 3055624 - RNA, 19 nt, Artificial Sequence
  Description of Artificial Sequence: Synthetic oligonucleotide
guguccacgugcucuggga

SEQ ID NO: 3055625 - RNA, 19 nt, Artificial Sequence
  Description of Artificial Sequence: Synthetic oligonucleotide
aagcacguggugggccaag

SEQ ID NO: 3055626 - RNA, 19 nt, Artificial Sequence
  Description of Artificial Sequence: Synthetic oligonucleotide
ccucagacuucugagcagc

SEQ ID NO: 3055627 - RNA, 19 nt, Artificial Sequence
  Description of Artificial Sequence: Synthetic oligonucleotide
gugguuguugguggaccag

SEQ ID NO: 3055628 - RNA, 19 nt, Artificial Sequence
  Description of Artificial Sequence: Synthetic oligonucleotide
cagccugaagcacguggug

SEQ ID NO: 3055629 - RNA, 19 nt, Artificial Sequence
  Description of Artificial Sequence: Synthetic oligonucleotide
cgugcucugggaaugccgc

SEQ ID NO: 3055630 - RNA, 19 nt, Artificial Sequence
  Description of Artificial Sequence: Synthetic oligonucleotide
ggugguuguugguggacca

SEQ ID NO: 3055631 - RNA, 19 nt, Artificial Sequence
  Description of Artificial Sequence: Synthetic oligonucleotide
ggggcgcuaacgacgaugc

SEQ ID NO: 3055632 - RNA, 19 nt, Artificial Sequence
  Description of Artificial Sequence: Synthetic oligonucleotide
uguaggccucugcguggug

SEQ ID NO: 3055633 - RNA, 19 nt, Artificial Sequence
  Description of Artificial Sequence: Synthetic oligonucleotide
acugcuuaauuaagugcuu

SEQ ID NO: 3055634 - RNA, 19 nt, Artificial Sequence
  Description of Artificial Sequence: Synthetic oligonucleotide
cauacauauggggcgcuaa

SEQ ID NO: 3055635 - RNA, 19 nt, Artificial Sequence
  Description of Artificial Sequence: Synthetic oligonucleotide
gugcucugggaaugccgcc

SEQ ID NO: 3055636 - RNA, 19 nt, Artificial Sequence
  Description of Artificial Sequence: Synthetic oligonucleotide
aagagugcucuugccuguu

SEQ ID NO: 3055637 - RNA, 19 nt, Artificial Sequence
  Description of Artificial Sequence: Synthetic oligonucleotide
gcuuaauuaagugcuuugu

SEQ ID NO: 3055638 - RNA, 19 nt, Artificial Sequence
  Description of Artificial Sequence: Synthetic oligonucleotide
cuccuauucccacagcaau

SEQ ID NO: 3055639 - RNA, 19 nt, Artificial Sequence
  Description of Artificial Sequence: Synthetic oligonucleotide
gaccagggccagccugaag

SEQ ID NO: 3055640 - RNA, 19 nt, Artificial Sequence
  Description of Artificial Sequence: Synthetic oligonucleotide
cucagacuucugagcagca

SEQ ID NO: 3055641 - RNA, 19 nt, Artificial Sequence
  Description of Artificial Sequence: Synthetic oligonucleotide
gcuucucugaagaucucca

SEQ ID NO: 3055642 - RNA, 19 nt, Artificial Sequence
  Description of Artificial Sequence: Synthetic oligonucleotide
gccucagacuucugagcag

SEQ ID NO: 3055643 - RNA, 19 nt, Artificial Sequence
  Description of Artificial Sequence: Synthetic oligonucleotide
caagaacuuaucagagcau

SEQ ID NO: 3055644 - RNA, 19 nt, Artificial Sequence
  Description of Artificial Sequence: Synthetic oligonucleotide
aguguugcuuuaacugcuu

SEQ ID NO: 3055645 - RNA, 19 nt, Artificial Sequence
  Description of Artificial Sequence: Synthetic oligonucleotide
guguugcuuuaacugcuua

SEQ ID NO: 3055646 - RNA, 19 nt, Artificial Sequence
  Description of Artificial Sequence: Synthetic oligonucleotide
cacgugcucugggaaugcc

SEQ ID NO: 3055647 - RNA, 19 nt, Artificial Sequence
  Description of Artificial Sequence: Synthetic oligonucleotide
gggaaugccgccucagacu

SEQ ID NO: 3055648 - RNA, 19 nt, Artificial Sequence
  Description of Artificial Sequence: Synthetic oligonucleotide
cugggaaugccgccucaga

SEQ ID NO: 3055649 - RNA, 19 nt, Artificial Sequence
  Description of Artificial Sequence: Synthetic oligonucleotide
ggugggccaaguuguaucu

SEQ ID NO: 3055650 - RNA, 19 nt, Artificial Sequence
  Description of Artificial Sequence: Synthetic oligonucleotide
gcagcaacauagcuucucu

SEQ ID NO: 3055651 - RNA, 19 nt, Artificial Sequence
  Description of Artificial Sequence: Synthetic oligonucleotide
gcucuugccuguucaaugu

SEQ ID NO: 3055652 - RNA, 19 nt, Artificial Sequence
  Description of Artificial Sequence: Synthetic oligonucleotide
guggugguuguugguggac

SEQ ID NO: 3055653 - RNA, 19 nt, Artificial Sequence
  Description of Artificial Sequence: Synthetic oligonucleotide
caaucuuaucagagacugu

SEQ ID NO: 3055654 - RNA, 19 nt, Artificial Sequence
  Description of Artificial Sequence: Synthetic oligonucleotide
ggaaugccgccucagacuu

SEQ ID NO: 3055655 - RNA, 19 nt, Artificial Sequence
  Description of Artificial Sequence: Synthetic oligonucleotide
ccgccucagacuucugagc

SEQ ID NO: 3055656 - RNA, 19 nt, Artificial Sequence
  Description of Artificial Sequence: Synthetic oligonucleotide
gacuucugagcagcaacau

SEQ ID NO: 3055657 - RNA, 19 nt, Artificial Sequence
  Description of Artificial Sequence: Synthetic oligonucleotide
ccuuucgcaucuccagcac

SEQ ID NO: 3055658 - RNA, 19 nt, Artificial Sequence
  Description of Artificial Sequence: Synthetic oligonucleotide
agcacguggugggccaagu

SEQ ID NO: 3055659 - RNA, 19 nt, Artificial Sequence
  Description of Artificial Sequence: Synthetic oligonucleotide
cccuuucgcaucuccagca

SEQ ID NO: 3055660 - RNA, 19 nt, Artificial Sequence
  Description of Artificial Sequence: Synthetic oligonucleotide
gcaguuuguaagagugcuc

SEQ ID NO: 3055661 - RNA, 19 nt, Artificial Sequence
  Description of Artificial Sequence: Synthetic oligonucleotide
gccaaguuguaucuccuau

SEQ ID NO: 3055662 - RNA, 19 nt, Artificial Sequence
  Description of Artificial Sequence: Synthetic oligonucleotide
uugguggaccagggccagc

SEQ ID NO: 3055663 - RNA, 19 nt, Artificial Sequence
  Description of Artificial Sequence: Synthetic oligonucleotide
cagggccagccugaagcac

SEQ ID NO: 3055664 - RNA, 19 nt, Artificial Sequence
  Description of Artificial Sequence: Synthetic oligonucleotide
cagagacuguugcaaaauu

SEQ ID NO: 3055665 - RNA, 19 nt, Artificial Sequence
  Description of Artificial Sequence: Synthetic oligonucleotide
ugugacccuuucgcaucuc

SEQ ID NO: 3055666 - RNA, 19 nt, Artificial Sequence
  Description of Artificial Sequence: Synthetic oligonucleotide
ggccucugcguggugguug

SEQ ID NO: 3055667 - RNA, 19 nt, Artificial Sequence
  Description of Artificial Sequence: Synthetic oligonucleotide
gaaugccgccucagacuuc

SEQ ID NO: 3055668 - RNA, 19 nt, Artificial Sequence
  Description of Artificial Sequence: Synthetic oligonucleotide
cucugggaaugccgccuca

SEQ ID NO: 3055669 - RNA, 19 nt, Artificial Sequence
  Description of Artificial Sequence: Synthetic oligonucleotide
gugggccaaguuguaucuc

SEQ ID NO: 3055670 - RNA, 19 nt, Artificial Sequence
  Description of Artificial Sequence: Synthetic oligonucleotide
cugcuuaauuaagugcuuu

SEQ ID NO: 3055671 - RNA, 19 nt, Artificial Sequence
  Description of Artificial Sequence: Synthetic oligonucleotide
ccuauucccacagcaaugu

SEQ ID NO: 3055672 - RNA, 19 nt, Artificial Sequence
  Description of Artificial Sequence: Synthetic oligonucleotide
gaagcacguggugggccaa

SEQ ID NO: 3055673 - RNA, 19 nt, Artificial Sequence
  Description of Artificial Sequence: Synthetic oligonucleotide
cgccucagacuucugagca

SEQ ID NO: 3055674 - RNA, 19 nt, Artificial Sequence
  Description of Artificial Sequence: Synthetic oligonucleotide
guccacgugcucugggaau

SEQ ID NO: 3055675 - RNA, 19 nt, Artificial Sequence
  Description of Artificial Sequence: Synthetic oligonucleotide
gcucugggaaugccgccuc

SEQ ID NO: 3055676 - RNA, 19 nt, Artificial Sequence
  Description of Artificial Sequence: Synthetic oligonucleotide
gcgcuaacgacgaugcagu

SEQ ID NO: 3055677 - RNA, 19 nt, Artificial Sequence
  Description of Artificial Sequence: Synthetic oligonucleotide
gcuuuguguccacgugcuc

SEQ ID NO: 3055678 - RNA, 19 nt, Artificial Sequence
  Description of Artificial Sequence: Synthetic oligonucleotide
ggccaaguuguaucuccua

SEQ ID NO: 3055679 - RNA, 19 nt, Artificial Sequence
  Description of Artificial Sequence: Synthetic oligonucleotide
cuguucaaugugacccuuu

SEQ ID NO: 3055680 - RNA, 19 nt, Artificial Sequence
  Description of Artificial Sequence: Synthetic oligonucleotide
gccuguucaaugugacccu

SEQ ID NO: 3055681 - RNA, 19 nt, Artificial Sequence
  Description of Artificial Sequence: Synthetic oligonucleotide
ccagggccagccugaagca

SEQ ID NO: 3055682 - RNA, 19 nt, Artificial Sequence
  Description of Artificial Sequence: Synthetic oligonucleotide
ccagccugaagcacguggu

SEQ ID NO: 3055683 - RNA, 19 nt, Artificial Sequence
  Description of Artificial Sequence: Synthetic oligonucleotide
cucauacauauggggcgcu

SEQ ID NO: 3055684 - RNA, 19 nt, Artificial Sequence
  Description of Artificial Sequence: Synthetic oligonucleotide
ccaaguuguaucuccuauu

SEQ ID NO: 3055685 - RNA, 19 nt, Artificial Sequence
  Description of Artificial Sequence: Synthetic oligonucleotide
gugcucuugccuguucaau

SEQ ID NO: 3055686 - RNA, 19 nt, Artificial Sequence
  Description of Artificial Sequence: Synthetic oligonucleotide
ccacgugcucugggaaugc

SEQ ID NO: 3055687 - RNA, 19 nt, Artificial Sequence
  Description of Artificial Sequence: Synthetic oligonucleotide
auggggcgcuaacgacgau

SEQ ID NO: 3055688 - RNA, 19 nt, Artificial Sequence
  Description of Artificial Sequence: Synthetic oligonucleotide
gcuaacgacgaugcaguuu

SEQ ID NO: 3055689 - RNA, 19 nt, Artificial Sequence
  Description of Artificial Sequence: Synthetic oligonucleotide
guggugggccaaguuguau

SEQ ID NO: 3055690 - RNA, 19 nt, Artificial Sequence
  Description of Artificial Sequence: Synthetic oligonucleotide
gagcagcaacauagcuucu

SEQ ID NO: 3055691 - RNA, 19 nt, Artificial Sequence
  Description of Artificial Sequence: Synthetic oligonucleotide
gcacagcuagguuguugua

SEQ ID NO: 3055692 - RNA, 19 nt, Artificial Sequence
  Description of Artificial Sequence: Synthetic oligonucleotide
cugcguggugguuguuggu

SEQ ID NO: 3055693 - RNA, 19 nt, Artificial Sequence
  Description of Artificial Sequence: Synthetic oligonucleotide
gcauagcaaaguguugcuu

SEQ ID NO: 3055694 - RNA, 19 nt, Artificial Sequence
  Description of Artificial Sequence: Synthetic oligonucleotide
cguggugguuguuggugga

SEQ ID NO: 3055695 - RNA, 19 nt, Artificial Sequence
  Description of Artificial Sequence: Synthetic oligonucleotide
gggccaaguuguaucuccu

SEQ ID NO: 3055696 - RNA, 19 nt, Artificial Sequence
  Description of Artificial Sequence: Synthetic oligonucleotide
cgaugcaguuuguaagagu

SEQ ID NO: 3055697 - RNA, 19 nt, Artificial Sequence
  Description of Artificial Sequence: Synthetic oligonucleotide
gccucugcguggugguugu

SEQ ID NO: 3055698 - RNA, 19 nt, Artificial Sequence
  Description of Artificial Sequence: Synthetic oligonucleotide
gggcgcuaacgacgaugca

SEQ ID NO: 3055699 - RNA, 19 nt, Artificial Sequence
  Description of Artificial Sequence: Synthetic oligonucleotide
aggccucugcguggugguu

SEQ ID NO: 3055700 - RNA, 19 nt, Artificial Sequence
  Description of Artificial Sequence: Synthetic oligonucleotide
ggaccagggccagccugaa

SEQ ID NO: 3055701 - RNA, 19 nt, Artificial Sequence
  Description of Artificial Sequence: Synthetic oligonucleotide
ggccagccugaagcacgug

SEQ ID NO: 3055702 - RNA, 19 nt, Artificial Sequence
  Description of Artificial Sequence: Synthetic oligonucleotide
gggccagccugaagcacgu

SEQ ID NO: 3055703 - RNA, 19 nt, Artificial Sequence
  Description of Artificial Sequence: Synthetic oligonucleotide
gcacguggugggccaaguu

SEQ ID NO: 3055704 - RNA, 19 nt, Artificial Sequence
  Description of Artificial Sequence: Synthetic oligonucleotide
cguggugggccaaguugua

SEQ ID NO: 3055705 - RNA, 19 nt, Artificial Sequence
  Description of Artificial Sequence: Synthetic oligonucleotide
ccuguucaaugugacccuu

SEQ ID NO: 3055706 - RNA, 19 nt, Artificial Sequence
  Description of Artificial Sequence: Synthetic oligonucleotide
cgcuaacgacgaugcaguu

SEQ ID NO: 3055707 - RNA, 19 nt, Artificial Sequence
  Description of Artificial Sequence: Synthetic oligonucleotide
ccucugcguggugguuguu

SEQ ID NO: 3055708 - RNA, 19 nt, Artificial Sequence
  Description of Artificial Sequence: Synthetic oligonucleotide
auggcacucauacaggggc

SEQ ID NO: 3055709 - RNA, 19 nt, Artificial Sequence
  Description of Artificial Sequence: Synthetic oligonucleotide
guuuccagcacauacacac

SEQ ID NO: 3055710 - RNA, 19 nt, Artificial Sequence
  Description of Artificial Sequence: Synthetic oligonucleotide
ugagguuuccagcacauac

SEQ ID NO: 3055711 - RNA, 19 nt, Artificial Sequence
  Description of Artificial Sequence: Synthetic oligonucleotide
agcacauacacacgugccc

SEQ ID NO: 3055712 - RNA, 19 nt, Artificial Sequence
  Description of Artificial Sequence: Synthetic oligonucleotide
agugcgacugcccucauag

SEQ ID NO: 3055713 - RNA, 19 nt, Artificial Sequence
  Description of Artificial Sequence: Synthetic oligonucleotide
cuuccuucccacuaucugg

SEQ ID NO: 3055714 - RNA, 19 nt, Artificial Sequence
  Description of Artificial Sequence: Synthetic oligonucleotide
agguuuccagcacauacac

SEQ ID NO: 3055715 - RNA, 19 nt, Artificial Sequence
  Description of Artificial Sequence: Synthetic oligonucleotide
agaacugccgucccacagc

SEQ ID NO: 3055716 - RNA, 19 nt, Artificial Sequence
  Description of Artificial Sequence: Synthetic oligonucleotide
guugcagcagcacugcagg

SEQ ID NO: 3055717 - RNA, 19 nt, Artificial Sequence
  Description of Artificial Sequence: Synthetic oligonucleotide
ugauggagcagcaucggcu

SEQ ID NO: 3055718 - RNA, 19 nt, Artificial Sequence
  Description of Artificial Sequence: Synthetic oligonucleotide
ucagguugcagcagcacug

SEQ ID NO: 3055719 - RNA, 19 nt, Artificial Sequence
  Description of Artificial Sequence: Synthetic oligonucleotide
ucauacaggggcgacuugg

SEQ ID NO: 3055720 - RNA, 19 nt, Artificial Sequence
  Description of Artificial Sequence: Synthetic oligonucleotide
cucuggauggcacucauac

SEQ ID NO: 3055721 - RNA, 19 nt, Artificial Sequence
  Description of Artificial Sequence: Synthetic oligonucleotide
aaacaggccuacccguccg

SEQ ID NO: 3055722 - RNA, 19 nt, Artificial Sequence
  Description of Artificial Sequence: Synthetic oligonucleotide
ugcacagccaccagccgcg

SEQ ID NO: 3055723 - RNA, 19 nt, Artificial Sequence
  Description of Artificial Sequence: Synthetic oligonucleotide
ucuuccuucccacuaucug

SEQ ID NO: 3055724 - RNA, 19 nt, Artificial Sequence
  Description of Artificial Sequence: Synthetic oligonucleotide
uuuccagcacauacacacg

SEQ ID NO: 3055725 - RNA, 19 nt, Artificial Sequence
  Description of Artificial Sequence: Synthetic oligonucleotide
acaauccuguccuugguca

SEQ ID NO: 3055726 - RNA, 19 nt, Artificial Sequence
  Description of Artificial Sequence: Synthetic oligonucleotide
cuucccacuaucugggagc

SEQ ID NO: 3055727 - RNA, 19 nt, Artificial Sequence
  Description of Artificial Sequence: Synthetic oligonucleotide
uggauggcacucauacagg

SEQ ID NO: 3055728 - RNA, 19 nt, Artificial Sequence
  Description of Artificial Sequence: Synthetic oligonucleotide
ucaucagugcgacugcccu

SEQ ID NO: 3055729 - RNA, 19 nt, Artificial Sequence
  Description of Artificial Sequence: Synthetic oligonucleotide
uagcucaucagugcgacug

SEQ ID NO: 3055730 - RNA, 19 nt, Artificial Sequence
  Description of Artificial Sequence: Synthetic oligonucleotide
caggaaacaggccuacccg

SEQ ID NO: 3055731 - RNA, 19 nt, Artificial Sequence
  Description of Artificial Sequence: Synthetic oligonucleotide
uucagguugcagcagcacu

SEQ ID NO: 3055732 - RNA, 19 nt, Artificial Sequence
  Description of Artificial Sequence: Synthetic oligonucleotide
uacaggggcgacuugguac

SEQ ID NO: 3055733 - RNA, 19 nt, Artificial Sequence
  Description of Artificial Sequence: Synthetic oligonucleotide
uuccagcacauacacacgu

SEQ ID NO: 3055734 - RNA, 19 nt, Artificial Sequence
  Description of Artificial Sequence: Synthetic oligonucleotide
gcgacuugguacuacaggg

SEQ ID NO: 3055735 - RNA, 19 nt, Artificial Sequence
  Description of Artificial Sequence: Synthetic oligonucleotide
uguaccugcacagccacca

SEQ ID NO: 3055736 - RNA, 19 nt, Artificial Sequence
  Description of Artificial Sequence: Synthetic oligonucleotide
acacacgugccccugcagg

SEQ ID NO: 3055737 - RNA, 19 nt, Artificial Sequence
  Description of Artificial Sequence: Synthetic oligonucleotide
acuaucugggagcccuggc

SEQ ID NO: 3055738 - RNA, 19 nt, Artificial Sequence
  Description of Artificial Sequence: Synthetic oligonucleotide
cuggguagcacagaacugc

SEQ ID NO: 3055739 - RNA, 19 nt, Artificial Sequence
  Description of Artificial Sequence: Synthetic oligonucleotide
cacugauagcucaucagug

SEQ ID NO: 3055740 - RNA, 19 nt, Artificial Sequence
  Description of Artificial Sequence: Synthetic oligonucleotide
uaucugggagcccuggccu

SEQ ID NO: 3055741 - RNA, 19 nt, Artificial Sequence
  Description of Artificial Sequence: Synthetic oligonucleotide
uugguccugucccagugcc

SEQ ID NO: 3055742 - RNA, 19 nt, Artificial Sequence
  Description of Artificial Sequence: Synthetic oligonucleotide
gaaacaggccuacccgucc

SEQ ID NO: 3055743 - RNA, 19 nt, Artificial Sequence
  Description of Artificial Sequence: Synthetic oligonucleotide
ugauagcucaucagugcga

SEQ ID NO: 3055744 - RNA, 19 nt, Artificial Sequence
  Description of Artificial Sequence: Synthetic oligonucleotide
agcacagaacugccguccc

SEQ ID NO: 3055745 - RNA, 19 nt, Artificial Sequence
  Description of Artificial Sequence: Synthetic oligonucleotide
uccuuggucaccuugucuu

SEQ ID NO: 3055746 - RNA, 19 nt, Artificial Sequence
  Description of Artificial Sequence: Synthetic oligonucleotide
cuaucugggagcccuggcc

SEQ ID NO: 3055747 - RNA, 19 nt, Artificial Sequence
  Description of Artificial Sequence: Synthetic oligonucleotide
acagccaccagccgcgguc

SEQ ID NO: 3055748 - RNA, 19 nt, Artificial Sequence
  Description of Artificial Sequence: Synthetic oligonucleotide
gauggagcagcaucggcuc

SEQ ID NO: 3055749 - RNA, 19 nt, Artificial Sequence
  Description of Artificial Sequence: Synthetic oligonucleotide
agcucaucagugcgacugc

SEQ ID NO: 3055750 - RNA, 19 nt, Artificial Sequence
  Description of Artificial Sequence: Synthetic oligonucleotide
gaacugccgucccacagcc

SEQ ID NO: 3055751 - RNA, 19 nt, Artificial Sequence
  Description of Artificial Sequence: Synthetic oligonucleotide
gauagcucaucagugcgac

SEQ ID NO: 3055752 - RNA, 19 nt, Artificial Sequence
  Description of Artificial Sequence: Synthetic oligonucleotide
accuugucuuccuucccac

SEQ ID NO: 3055753 - RNA, 19 nt, Artificial Sequence
  Description of Artificial Sequence: Synthetic oligonucleotide
gauggcacucauacagggg

SEQ ID NO: 3055754 - RNA, 19 nt, Artificial Sequence
  Description of Artificial Sequence: Synthetic oligonucleotide
uggcacucauacaggggcg

SEQ ID NO: 3055755 - RNA, 19 nt, Artificial Sequence
  Description of Artificial Sequence: Synthetic oligonucleotide
uuugguccugucccagugc

SEQ ID NO: 3055756 - RNA, 19 nt, Artificial Sequence
  Description of Artificial Sequence: Synthetic oligonucleotide
cagcccuucagguugcagc

SEQ ID NO: 3055757 - RNA, 19 nt, Artificial Sequence
  Description of Artificial Sequence: Synthetic oligonucleotide
ggauggcacucauacaggg

SEQ ID NO: 3055758 - RNA, 19 nt, Artificial Sequence
  Description of Artificial Sequence: Synthetic oligonucleotide
aggaaacaggccuacccgu

SEQ ID NO: 3055759 - RNA, 19 nt, Artificial Sequence
  Description of Artificial Sequence: Synthetic oligonucleotide
ucugagguuuccagcacau

SEQ ID NO: 3055760 - RNA, 19 nt, Artificial Sequence
  Description of Artificial Sequence: Synthetic oligonucleotide
agcccagcccuucagguug

SEQ ID NO: 3055761 - RNA, 19 nt, Artificial Sequence
  Description of Artificial Sequence: Synthetic oligonucleotide
agugcccugcaggugaugg

SEQ ID NO: 3055762 - RNA, 19 nt, Artificial Sequence
  Description of Artificial Sequence: Synthetic oligonucleotide
cagcacauacacacgugcc

SEQ ID NO: 3055763 - RNA, 19 nt, Artificial Sequence
  Description of Artificial Sequence: Synthetic oligonucleotide
cagcacugcaggaaacagg

SEQ ID NO: 3055764 - RNA, 19 nt, Artificial Sequence
  Description of Artificial Sequence: Synthetic oligonucleotide
uccagcacauacacacgug

SEQ ID NO: 3055765 - RNA, 19 nt, Artificial Sequence
  Description of Artificial Sequence: Synthetic oligonucleotide
guccguuguaccugcacag

SEQ ID NO: 3055766 - RNA, 19 nt, Artificial Sequence
  Description of Artificial Sequence: Synthetic oligonucleotide
guuguaccugcacagccac

SEQ ID NO: 3055767 - RNA, 19 nt, Artificial Sequence
  Description of Artificial Sequence: Synthetic oligonucleotide
acaggggcgacuugguacu

SEQ ID NO: 3055768 - RNA, 19 nt, Artificial Sequence
  Description of Artificial Sequence: Synthetic oligonucleotide
ggcgacuugguacuacagg

SEQ ID NO: 3055769 - RNA, 19 nt, Artificial Sequence
  Description of Artificial Sequence: Synthetic oligonucleotide
uaccugcacagccaccagc

SEQ ID NO: 3055770 - RNA, 19 nt, Artificial Sequence
  Description of Artificial Sequence: Synthetic oligonucleotide
gcagcaucggcucuggaug

SEQ ID NO: 3055771 - RNA, 19 nt, Artificial Sequence
  Description of Artificial Sequence: Synthetic oligonucleotide
cuuugguccugucccagug

SEQ ID NO: 3055772 - RNA, 19 nt, Artificial Sequence
  Description of Artificial Sequence: Synthetic oligonucleotide
ucuggauggcacucauaca

SEQ ID NO: 3055773 - RNA, 19 nt, Artificial Sequence
  Description of Artificial Sequence: Synthetic oligonucleotide
gcaggaaacaggccuaccc

SEQ ID NO: 3055774 - RNA, 19 nt, Artificial Sequence
  Description of Artificial Sequence: Synthetic oligonucleotide
agcccuucagguugcagca

SEQ ID NO: 3055775 - RNA, 19 nt, Artificial Sequence
  Description of Artificial Sequence: Synthetic oligonucleotide
agcagcaucggcucuggau

SEQ ID NO: 3055776 - RNA, 19 nt, Artificial Sequence
  Description of Artificial Sequence: Synthetic oligonucleotide
ucaccuugucuuccuuccc

SEQ ID NO: 3055777 - RNA, 19 nt, Artificial Sequence
  Description of Artificial Sequence: Synthetic oligonucleotide
cacacgugccccugcaggc

SEQ ID NO: 3055778 - RNA, 19 nt, Artificial Sequence
  Description of Artificial Sequence: Synthetic oligonucleotide
cugcacagccaccagccgc

SEQ ID NO: 3055779 - RNA, 19 nt, Artificial Sequence
  Description of Artificial Sequence: Synthetic oligonucleotide
uacacacgugccccugcag

SEQ ID NO: 3055780 - RNA, 19 nt, Artificial Sequence
  Description of Artificial Sequence: Synthetic oligonucleotide
gagguuuccagcacauaca

SEQ ID NO: 3055781 - RNA, 19 nt, Artificial Sequence
  Description of Artificial Sequence: Synthetic oligonucleotide
ggcacugauagcucaucag

SEQ ID NO: 3055782 - RNA, 19 nt, Artificial Sequence
  Description of Artificial Sequence: Synthetic oligonucleotide
acccguccguuguaccugc

SEQ ID NO: 3055783 - RNA, 19 nt, Artificial Sequence
  Description of Artificial Sequence: Synthetic oligonucleotide
cagcaucggcucuggaugg

SEQ ID NO: 3055784 - RNA, 19 nt, Artificial Sequence
  Description of Artificial Sequence: Synthetic oligonucleotide
cagaacugccgucccacag

SEQ ID NO: 3055785 - RNA, 19 nt, Artificial Sequence
  Description of Artificial Sequence: Synthetic oligonucleotide
acugccgucccacagccuu

SEQ ID NO: 3055786 - RNA, 19 nt, Artificial Sequence
  Description of Artificial Sequence: Synthetic oligonucleotide
aucagugcgacugcccuca

SEQ ID NO: 3055787 - RNA, 19 nt, Artificial Sequence
  Description of Artificial Sequence: Synthetic oligonucleotide
aggcacugauagcucauca

SEQ ID NO: 3055788 - RNA, 19 nt, Artificial Sequence
  Description of Artificial Sequence: Synthetic oligonucleotide
cauacacacgugccccugc

SEQ ID NO: 3055789 - RNA, 19 nt, Artificial Sequence
  Description of Artificial Sequence: Synthetic oligonucleotide
uucccacuaucugggagcc

SEQ ID NO: 3055790 - RNA, 19 nt, Artificial Sequence
  Description of Artificial Sequence: Synthetic oligonucleotide
accagccgcggucugaggu

SEQ ID NO: 3055791 - RNA, 19 nt, Artificial Sequence
  Description of Artificial Sequence: Synthetic oligonucleotide
gugauggagcagcaucggc

SEQ ID NO: 3055792 - RNA, 19 nt, Artificial Sequence
  Description of Artificial Sequence: Synthetic oligonucleotide
auacacacgugccccugca

SEQ ID NO: 3055793 - RNA, 19 nt, Artificial Sequence
  Description of Artificial Sequence: Synthetic oligonucleotide
caauccuguccuuggucac

SEQ ID NO: 3055794 - RNA, 19 nt, Artificial Sequence
  Description of Artificial Sequence: Synthetic oligonucleotide
ccagcacauacacacgugc

SEQ ID NO: 3055795 - RNA, 19 nt, Artificial Sequence
  Description of Artificial Sequence: Synthetic oligonucleotide
uuggucaccuugucuuccu

SEQ ID NO: 3055796 - RNA, 19 nt, Artificial Sequence
  Description of Artificial Sequence: Synthetic oligonucleotide
aacaggccuacccguccgu

SEQ ID NO: 3055797 - RNA, 19 nt, Artificial Sequence
  Description of Artificial Sequence: Synthetic oligonucleotide
uccguuguaccugcacagc

SEQ ID NO: 3055798 - RNA, 19 nt, Artificial Sequence
  Description of Artificial Sequence: Synthetic oligonucleotide
uuguaccugcacagccacc

SEQ ID NO: 3055799 - RNA, 19 nt, Artificial Sequence
  Description of Artificial Sequence: Synthetic oligonucleotide
aggccuacccguccguugu

SEQ ID NO: 3055800 - RNA, 19 nt, Artificial Sequence
  Description of Artificial Sequence: Synthetic oligonucleotide
uccuuugguccugucccag

SEQ ID NO: 3055801 - RNA, 19 nt, Artificial Sequence
  Description of Artificial Sequence: Synthetic oligonucleotide
guagcacagaacugccguc

SEQ ID NO: 3055802 - RNA, 19 nt, Artificial Sequence
  Description of Artificial Sequence: Synthetic oligonucleotide
auaggccuggguagcacag

SEQ ID NO: 3055803 - RNA, 19 nt, Artificial Sequence
  Description of Artificial Sequence: Synthetic oligonucleotide
acucauacaggggcgacuu

SEQ ID NO: 3055804 - RNA, 19 nt, Artificial Sequence
  Description of Artificial Sequence: Synthetic oligonucleotide
gucugagguuuccagcaca

SEQ ID NO: 3055805 - RNA, 19 nt, Artificial Sequence
  Description of Artificial Sequence: Synthetic oligonucleotide
cacugcaggaaacaggccu

SEQ ID NO: 3055806 - RNA, 19 nt, Artificial Sequence
  Description of Artificial Sequence: Synthetic oligonucleotide
gguugcagcagcacugcag

SEQ ID NO: 3055807 - RNA, 19 nt, Artificial Sequence
  Description of Artificial Sequence: Synthetic oligonucleotide
uggagcagcaucggcucug

SEQ ID NO: 3055808 - RNA, 19 nt, Artificial Sequence
  Description of Artificial Sequence: Synthetic oligonucleotide
agcagcacugcaggaaaca

SEQ ID NO: 3055809 - RNA, 19 nt, Artificial Sequence
  Description of Artificial Sequence: Synthetic oligonucleotide
uacccguccguuguaccug

SEQ ID NO: 3055810 - RNA, 19 nt, Artificial Sequence
  Description of Artificial Sequence: Synthetic oligonucleotide
gcacauacacacgugcccc

SEQ ID NO: 3055811 - RNA, 19 nt, Artificial Sequence
  Description of Artificial Sequence: Synthetic oligonucleotide
cccucauaggccuggguag

SEQ ID NO: 3055812 - RNA, 19 nt, Artificial Sequence
  Description of Artificial Sequence: Synthetic oligonucleotide
cauaggccuggguagcaca

SEQ ID NO: 3055813 - RNA, 19 nt, Artificial Sequence
  Description of Artificial Sequence: Synthetic oligonucleotide
aucggcucuggauggcacu

SEQ ID NO: 3055814 - RNA, 19 nt, Artificial Sequence
  Description of Artificial Sequence: Synthetic oligonucleotide
gguagcacagaacugccgu

SEQ ID NO: 3055815 - RNA, 19 nt, Artificial Sequence
  Description of Artificial Sequence: Synthetic oligonucleotide
ugguccugucccagugccc

SEQ ID NO: 3055816 - RNA, 19 nt, Artificial Sequence
  Description of Artificial Sequence: Synthetic oligonucleotide
gucccacagccuugcaaag

SEQ ID NO: 3055817 - RNA, 19 nt, Artificial Sequence
  Description of Artificial Sequence: Synthetic oligonucleotide
ugccccugcaggcacugau

SEQ ID NO: 3055818 - RNA, 19 nt, Artificial Sequence
  Description of Artificial Sequence: Synthetic oligonucleotide
ucauaggccuggguagcac

SEQ ID NO: 3055819 - RNA, 19 nt, Artificial Sequence
  Description of Artificial Sequence: Synthetic oligonucleotide
cacuaucugggagcccugg

SEQ ID NO: 3055820 - RNA, 19 nt, Artificial Sequence
  Description of Artificial Sequence: Synthetic oligonucleotide
aggccuggguagcacagaa

SEQ ID NO: 3055821 - RNA, 19 nt, Artificial Sequence
  Description of Artificial Sequence: Synthetic oligonucleotide
caucggcucuggauggcac

SEQ ID NO: 3055822 - RNA, 19 nt, Artificial Sequence
  Description of Artificial Sequence: Synthetic oligonucleotide
auagcucaucagugcgacu

SEQ ID NO: 3055823 - RNA, 19 nt, Artificial Sequence
  Description of Artificial Sequence: Synthetic oligonucleotide
agggagcccagcccuucag

SEQ ID NO: 3055824 - RNA, 19 nt, Artificial Sequence
  Description of Artificial Sequence: Synthetic oligonucleotide
ugcaggaaacaggccuacc

SEQ ID NO: 3055825 - RNA, 19 nt, Artificial Sequence
  Description of Artificial Sequence: Synthetic oligonucleotide
uugcagcagcacugcagga

SEQ ID NO: 3055826 - RNA, 19 nt, Artificial Sequence
  Description of Artificial Sequence: Synthetic oligonucleotide
gggaacaauccuguccuug

SEQ ID NO: 3055827 - RNA, 19 nt, Artificial Sequence
  Description of Artificial Sequence: Synthetic oligonucleotide
caucagugcgacugcccuc

SEQ ID NO: 3055828 - RNA, 19 nt, Artificial Sequence
  Description of Artificial Sequence: Synthetic oligonucleotide
gaacaauccuguccuuggu

SEQ ID NO: 3055829 - RNA, 19 nt, Artificial Sequence
  Description of Artificial Sequence: Synthetic oligonucleotide
cuucagguugcagcagcac

SEQ ID NO: 3055830 - RNA, 19 nt, Artificial Sequence
  Description of Artificial Sequence: Synthetic oligonucleotide
uccugucccagugcccugc

SEQ ID NO: 3055831 - RNA, 19 nt, Artificial Sequence
  Description of Artificial Sequence: Synthetic oligonucleotide
caccuugucuuccuuccca

SEQ ID NO: 3055832 - RNA, 19 nt, Artificial Sequence
  Description of Artificial Sequence: Synthetic oligonucleotide
guaccugcacagccaccag

SEQ ID NO: 3055833 - RNA, 19 nt, Artificial Sequence
  Description of Artificial Sequence: Synthetic oligonucleotide
ccguuguaccugcacagcc

SEQ ID NO: 3055834 - RNA, 19 nt, Artificial Sequence
  Description of Artificial Sequence: Synthetic oligonucleotide
aggggcgacuugguacuac

SEQ ID NO: 3055835 - RNA, 19 nt, Artificial Sequence
  Description of Artificial Sequence: Synthetic oligonucleotide
auacaggggcgacuuggua

SEQ ID NO: 3055836 - RNA, 19 nt, Artificial Sequence
  Description of Artificial Sequence: Synthetic oligonucleotide
caggccuacccguccguug

SEQ ID NO: 3055837 - RNA, 19 nt, Artificial Sequence
  Description of Artificial Sequence: Synthetic oligonucleotide
auccuguccuuggucaccu

SEQ ID NO: 3055838 - RNA, 19 nt, Artificial Sequence
  Description of Artificial Sequence: Synthetic oligonucleotide
auggagcagcaucggcucu

SEQ ID NO: 3055839 - RNA, 19 nt, Artificial Sequence
  Description of Artificial Sequence: Synthetic oligonucleotide
gccuggguagcacagaacu

SEQ ID NO: 3055840 - RNA, 19 nt, Artificial Sequence
  Description of Artificial Sequence: Synthetic oligonucleotide
gcacugauagcucaucagu

SEQ ID NO: 3055841 - RNA, 19 nt, Artificial Sequence
  Description of Artificial Sequence: Synthetic oligonucleotide
acugcaggaaacaggccua

SEQ ID NO: 3055842 - RNA, 19 nt, Artificial Sequence
  Description of Artificial Sequence: Synthetic oligonucleotide
cagcagcacugcaggaaac

SEQ ID NO: 3055843 - RNA, 19 nt, Artificial Sequence
  Description of Artificial Sequence: Synthetic oligonucleotide
ccuucccacuaucugggag

SEQ ID NO: 3055844 - RNA, 19 nt, Artificial Sequence
  Description of Artificial Sequence: Synthetic oligonucleotide
gggagcccagcccuucagg

SEQ ID NO: 3055845 - RNA, 19 nt, Artificial Sequence
  Description of Artificial Sequence: Synthetic oligonucleotide
gcagcacugcaggaaacag

SEQ ID NO: 3055846 - RNA, 19 nt, Artificial Sequence
  Description of Artificial Sequence: Synthetic oligonucleotide
gcggucugagguuuccagc

SEQ ID NO: 3055847 - RNA, 19 nt, Artificial Sequence
  Description of Artificial Sequence: Synthetic oligonucleotide
ucggcucuggauggcacuc

SEQ ID NO: 3055848 - RNA, 19 nt, Artificial Sequence
  Description of Artificial Sequence: Synthetic oligonucleotide
cucauacaggggcgacuug

SEQ ID NO: 3055849 - RNA, 19 nt, Artificial Sequence
  Description of Artificial Sequence: Synthetic oligonucleotide
ugccgucccacagccuugc

SEQ ID NO: 3055850 - RNA, 19 nt, Artificial Sequence
  Description of Artificial Sequence: Synthetic oligonucleotide
ggguagcacagaacugccg

SEQ ID NO: 3055851 - RNA, 19 nt, Artificial Sequence
  Description of Artificial Sequence: Synthetic oligonucleotide
cugcaggaaacaggccuac

SEQ ID NO: 3055852 - RNA, 19 nt, Artificial Sequence
  Description of Artificial Sequence: Synthetic oligonucleotide
cccuucagguugcagcagc

SEQ ID NO: 3055853 - RNA, 19 nt, Artificial Sequence
  Description of Artificial Sequence: Synthetic oligonucleotide
cacgugccccugcaggcac

SEQ ID NO: 3055854 - RNA, 19 nt, Artificial Sequence
  Description of Artificial Sequence: Synthetic oligonucleotide
ccuggguagcacagaacug

SEQ ID NO: 3055855 - RNA, 19 nt, Artificial Sequence
  Description of Artificial Sequence: Synthetic oligonucleotide
ggucugagguuuccagcac

SEQ ID NO: 3055856 - RNA, 19 nt, Artificial Sequence
  Description of Artificial Sequence: Synthetic oligonucleotide
ccccugcaggcacugauag

SEQ ID NO: 3055857 - RNA, 19 nt, Artificial Sequence
  Description of Artificial Sequence: Synthetic oligonucleotide
guccuuugguccuguccca

SEQ ID NO: 3055858 - RNA, 19 nt, Artificial Sequence
  Description of Artificial Sequence: Synthetic oligonucleotide
uaggccuggguagcacaga

SEQ ID NO: 3055859 - RNA, 19 nt, Artificial Sequence
  Description of Artificial Sequence: Synthetic oligonucleotide
uggucaccuugucuuccuu

SEQ ID NO: 3055860 - RNA, 19 nt, Artificial Sequence
  Description of Artificial Sequence: Synthetic oligonucleotide
gcagcagcacugcaggaaa

SEQ ID NO: 3055861 - RNA, 19 nt, Artificial Sequence
  Description of Artificial Sequence: Synthetic oligonucleotide
ggaaacaggccuacccguc

SEQ ID NO: 3055862 - RNA, 19 nt, Artificial Sequence
  Description of Artificial Sequence: Synthetic oligonucleotide
agcccuggccugcccagga

SEQ ID NO: 3055863 - RNA, 19 nt, Artificial Sequence
  Description of Artificial Sequence: Synthetic oligonucleotide
gagggagcccagcccuuca

SEQ ID NO: 3055864 - RNA, 19 nt, Artificial Sequence
  Description of Artificial Sequence: Synthetic oligonucleotide
cuacccguccguuguaccu

SEQ ID NO: 3055865 - RNA, 19 nt, Artificial Sequence
  Description of Artificial Sequence: Synthetic oligonucleotide
ggagcagcaucggcucugg

SEQ ID NO: 3055866 - RNA, 19 nt, Artificial Sequence
  Description of Artificial Sequence: Synthetic oligonucleotide
cauacaggggcgacuuggu

SEQ ID NO: 3055867 - RNA, 19 nt, Artificial Sequence
  Description of Artificial Sequence: Synthetic oligonucleotide
cugccgucccacagccuug

SEQ ID NO: 3055868 - RNA, 19 nt, Artificial Sequence
  Description of Artificial Sequence: Synthetic oligonucleotide
ggagcccuggccugcccag

SEQ ID NO: 3055869 - RNA, 19 nt, Artificial Sequence
  Description of Artificial Sequence: Synthetic oligonucleotide
ccuacccguccguuguacc

SEQ ID NO: 3055870 - RNA, 19 nt, Artificial Sequence
  Description of Artificial Sequence: Synthetic oligonucleotide
acacgugccccugcaggca

SEQ ID NO: 3055871 - RNA, 19 nt, Artificial Sequence
  Description of Artificial Sequence: Synthetic oligonucleotide
caggcacugauagcucauc

SEQ ID NO: 3055872 - RNA, 19 nt, Artificial Sequence
  Description of Artificial Sequence: Synthetic oligonucleotide
ugggagcccuggccugccc

SEQ ID NO: 3055873 - RNA, 19 nt, Artificial Sequence
  Description of Artificial Sequence: Synthetic oligonucleotide
gcccucauaggccugggua

SEQ ID NO: 3055874 - RNA, 19 nt, Artificial Sequence
  Description of Artificial Sequence: Synthetic oligonucleotide
ggggcgacuugguacuaca

SEQ ID NO: 3055875 - RNA, 19 nt, Artificial Sequence
  Description of Artificial Sequence: Synthetic oligonucleotide
caggagggagcccagcccu

SEQ ID NO: 3055876 - RNA, 19 nt, Artificial Sequence
  Description of Artificial Sequence: Synthetic oligonucleotide
ccucauaggccuggguagc

SEQ ID NO: 3055877 - RNA, 19 nt, Artificial Sequence
  Description of Artificial Sequence: Synthetic oligonucleotide
cccuggccugcccaggagg

SEQ ID NO: 3055878 - RNA, 19 nt, Artificial Sequence
  Description of Artificial Sequence: Synthetic oligonucleotide
cucauaggccuggguagca

SEQ ID NO: 3055879 - RNA, 19 nt, Artificial Sequence
  Description of Artificial Sequence: Synthetic oligonucleotide
cccagugcccugcagguga

SEQ ID NO: 3055880 - RNA, 19 nt, Artificial Sequence
  Description of Artificial Sequence: Synthetic oligonucleotide
ucccacuaucugggagccc

SEQ ID NO: 3055881 - RNA, 19 nt, Artificial Sequence
  Description of Artificial Sequence: Synthetic oligonucleotide
guccugucccagugcccug

SEQ ID NO: 3055882 - RNA, 19 nt, Artificial Sequence
  Description of Artificial Sequence: Synthetic oligonucleotide
ggagcccagcccuucaggu

SEQ ID NO: 3055883 - RNA, 19 nt, Artificial Sequence
  Description of Artificial Sequence: Synthetic oligonucleotide
caccagccgcggucugagg

SEQ ID NO: 3055884 - RNA, 19 nt, Artificial Sequence
  Description of Artificial Sequence: Synthetic oligonucleotide
gguuuccagcacauacaca

SEQ ID NO: 3055885 - RNA, 19 nt, Artificial Sequence
  Description of Artificial Sequence: Synthetic oligonucleotide
gggcgacuugguacuacag

SEQ ID NO: 3055886 - RNA, 19 nt, Artificial Sequence
  Description of Artificial Sequence: Synthetic oligonucleotide
cggucugagguuuccagca

SEQ ID NO: 3055887 - RNA, 19 nt, Artificial Sequence
  Description of Artificial Sequence: Synthetic oligonucleotide
aacugccgucccacagccu

SEQ ID NO: 3055888 - RNA, 19 nt, Artificial Sequence
  Description of Artificial Sequence: Synthetic oligonucleotide
cgcggucugagguuuccag

SEQ ID NO: 3055889 - RNA, 19 nt, Artificial Sequence
  Description of Artificial Sequence: Synthetic oligonucleotide
cugcccucauaggccuggg

SEQ ID NO: 3055890 - RNA, 19 nt, Artificial Sequence
  Description of Artificial Sequence: Synthetic oligonucleotide
ucagugcgacugcccucau

SEQ ID NO: 3055891 - RNA, 19 nt, Artificial Sequence
  Description of Artificial Sequence: Synthetic oligonucleotide
cgucccacagccuugcaaa

SEQ ID NO: 3055892 - RNA, 19 nt, Artificial Sequence
  Description of Artificial Sequence: Synthetic oligonucleotide
cguuguaccugcacagcca

SEQ ID NO: 3055893 - RNA, 19 nt, Artificial Sequence
  Description of Artificial Sequence: Synthetic oligonucleotide
ggcacucauacaggggcga

SEQ ID NO: 3055894 - RNA, 19 nt, Artificial Sequence
  Description of Artificial Sequence: Synthetic oligonucleotide
cugggagcccuggccugcc

SEQ ID NO: 3055895 - RNA, 19 nt, Artificial Sequence
  Description of Artificial Sequence: Synthetic oligonucleotide
gguccugucccagugcccu

SEQ ID NO: 3055896 - RNA, 19 nt, Artificial Sequence
  Description of Artificial Sequence: Synthetic oligonucleotide
gcacagaacugccguccca

SEQ ID NO: 3055897 - RNA, 19 nt, Artificial Sequence
  Description of Artificial Sequence: Synthetic oligonucleotide
acaggccuacccguccguu

SEQ ID NO: 3055898 - RNA, 19 nt, Artificial Sequence
  Description of Artificial Sequence: Synthetic oligonucleotide
gagcagcaucggcucugga

SEQ ID NO: 3055899 - RNA, 19 nt, Artificial Sequence
  Description of Artificial Sequence: Synthetic oligonucleotide
agccaccagccgcggucug

SEQ ID NO: 3055900 - RNA, 19 nt, Artificial Sequence
  Description of Artificial Sequence: Synthetic oligonucleotide
cguccguuguaccugcaca

SEQ ID NO: 3055901 - RNA, 19 nt, Artificial Sequence
  Description of Artificial Sequence: Synthetic oligonucleotide
gagcccagcccuucagguu

SEQ ID NO: 3055902 - RNA, 19 nt, Artificial Sequence
  Description of Artificial Sequence: Synthetic oligonucleotide
ccguccguuguaccugcac

SEQ ID NO: 3055903 - RNA, 19 nt, Artificial Sequence
  Description of Artificial Sequence: Synthetic oligonucleotide
gggagcccuggccugccca

SEQ ID NO: 3055904 - RNA, 19 nt, Artificial Sequence
  Description of Artificial Sequence: Synthetic oligonucleotide
gcacucauacaggggcgac

SEQ ID NO: 3055905 - RNA, 19 nt, Artificial Sequence
  Description of Artificial Sequence: Synthetic oligonucleotide
ccaccagccgcggucugag

SEQ ID NO: 3055906 - RNA, 19 nt, Artificial Sequence
  Description of Artificial Sequence: Synthetic oligonucleotide
cacucauacaggggcgacu

SEQ ID NO: 3055907 - RNA, 19 nt, Artificial Sequence
  Description of Artificial Sequence: Synthetic oligonucleotide
ccacuaucugggagcccug

SEQ ID NO: 3055908 - RNA, 19 nt, Artificial Sequence
  Description of Artificial Sequence: Synthetic oligonucleotide
uccuguccuuggucaccuu

SEQ ID NO: 3055909 - RNA, 19 nt, Artificial Sequence
  Description of Artificial Sequence: Synthetic oligonucleotide
agccgcggucugagguuuc

SEQ ID NO: 3055910 - RNA, 19 nt, Artificial Sequence
  Description of Artificial Sequence: Synthetic oligonucleotide
cccacuaucugggagcccu

SEQ ID NO: 3055911 - RNA, 19 nt, Artificial Sequence
  Description of Artificial Sequence: Synthetic oligonucleotide
gcaucggcucuggauggca

SEQ ID NO: 3055912 - RNA, 19 nt, Artificial Sequence
  Description of Artificial Sequence: Synthetic oligonucleotide
cugagguuuccagcacaua

SEQ ID NO: 3055913 - RNA, 19 nt, Artificial Sequence
  Description of Artificial Sequence: Synthetic oligonucleotide
ggccuggguagcacagaac

SEQ ID NO: 3055914 - RNA, 19 nt, Artificial Sequence
  Description of Artificial Sequence: Synthetic oligonucleotide
ggagggagcccagcccuuc

SEQ ID NO: 3055915 - RNA, 19 nt, Artificial Sequence
  Description of Artificial Sequence: Synthetic oligonucleotide
gccuacccguccguuguac

SEQ ID NO: 3055916 - RNA, 19 nt, Artificial Sequence
  Description of Artificial Sequence: Synthetic oligonucleotide
gcccuggccugcccaggag

SEQ ID NO: 3055917 - RNA, 19 nt, Artificial Sequence
  Description of Artificial Sequence: Synthetic oligonucleotide
gcccuucagguugcagcag

SEQ ID NO: 3055918 - RNA, 19 nt, Artificial Sequence
  Description of Artificial Sequence: Synthetic oligonucleotide
cagugcccugcaggugaug

SEQ ID NO: 3055919 - RNA, 19 nt, Artificial Sequence
  Description of Artificial Sequence: Synthetic oligonucleotide
gccugcccaggagggagcc

SEQ ID NO: 3055920 - RNA, 19 nt, Artificial Sequence
  Description of Artificial Sequence: Synthetic oligonucleotide
gccgcggucugagguuucc

SEQ ID NO: 3055921 - RNA, 19 nt, Artificial Sequence
  Description of Artificial Sequence: Synthetic oligonucleotide
ccagcccuucagguugcag

SEQ ID NO: 3055922 - RNA, 19 nt, Artificial Sequence
  Description of Artificial Sequence: Synthetic oligonucleotide
ggccugcccaggagggagc

SEQ ID NO: 3055923 - RNA, 19 nt, Artificial Sequence
  Description of Artificial Sequence: Synthetic oligonucleotide
gcacagccaccagccgcgg

SEQ ID NO: 3055924 - RNA, 19 nt, Artificial Sequence
  Description of Artificial Sequence: Synthetic oligonucleotide
aggagggagcccagcccuu

SEQ ID NO: 3055925 - RNA, 19 nt, Artificial Sequence
  Description of Artificial Sequence: Synthetic oligonucleotide
cagugcgacugcccucaua

SEQ ID NO: 3055926 - RNA, 19 nt, Artificial Sequence
  Description of Artificial Sequence: Synthetic oligonucleotide
acgugccccugcaggcacu

SEQ ID NO: 3055927 - RNA, 19 nt, Artificial Sequence
  Description of Artificial Sequence: Synthetic oligonucleotide
ggcucuggauggcacucau

SEQ ID NO: 3055928 - RNA, 19 nt, Artificial Sequence
  Description of Artificial Sequence: Synthetic oligonucleotide
ccgucccacagccuugcaa

SEQ ID NO: 3055929 - RNA, 19 nt, Artificial Sequence
  Description of Artificial Sequence: Synthetic oligonucleotide
gcccagcccuucagguugc

SEQ ID NO: 3055930 - RNA, 19 nt, Artificial Sequence
  Description of Artificial Sequence: Synthetic oligonucleotide
gccaccagccgcggucuga

SEQ ID NO: 3055931 - RNA, 19 nt, Artificial Sequence
  Description of Artificial Sequence: Synthetic oligonucleotide
cagccaccagccgcggucu

SEQ ID NO: 3055932 - RNA, 19 nt, Artificial Sequence
  Description of Artificial Sequence: Synthetic oligonucleotide
ccuuugguccugucccagu

SEQ ID NO: 3055933 - RNA, 19 nt, Artificial Sequence
  Description of Artificial Sequence: Synthetic oligonucleotide
ccugcccaggagggagccc

SEQ ID NO: 3055934 - RNA, 19 nt, Artificial Sequence
  Description of Artificial Sequence: Synthetic oligonucleotide
gcaggcacugauagcucau

SEQ ID NO: 3055935 - RNA, 19 nt, Artificial Sequence
  Description of Artificial Sequence: Synthetic oligonucleotide
cacagccaccagccgcggu

SEQ ID NO: 3055936 - RNA, 19 nt, Artificial Sequence
  Description of Artificial Sequence: Synthetic oligonucleotide
gcucuggauggcacucaua

SEQ ID NO: 3055937 - RNA, 19 nt, Artificial Sequence
  Description of Artificial Sequence: Synthetic oligonucleotide
gccccugcaggcacugaua

SEQ ID NO: 3055938 - RNA, 19 nt, Artificial Sequence
  Description of Artificial Sequence: Synthetic oligonucleotide
ggccuacccguccguugua

SEQ ID NO: 3055939 - RNA, 19 nt, Artificial Sequence
  Description of Artificial Sequence: Synthetic oligonucleotide
gugccccugcaggcacuga

SEQ ID NO: 3055940 - RNA, 19 nt, Artificial Sequence
  Description of Artificial Sequence: Synthetic oligonucleotide
cgugccccugcaggcacug

SEQ ID NO: 3055941 - RNA, 19 nt, Artificial Sequence
  Description of Artificial Sequence: Synthetic oligonucleotide
gccgucccacagccuugca

SEQ ID NO: 3055942 - RNA, 19 nt, Artificial Sequence
  Description of Artificial Sequence: Synthetic oligonucleotide
caggggcgacuugguacua

SEQ ID NO: 3055943 - RNA, 19 nt, Artificial Sequence
  Description of Artificial Sequence: Synthetic oligonucleotide
cagccgcggucugagguuu

SEQ ID NO: 3055944 - RNA, 19 nt, Artificial Sequence
  Description of Artificial Sequence: Synthetic oligonucleotide
ccagccgcggucugagguu

SEQ ID NO: 3055945 - RNA, 19 nt, Artificial Sequence
  Description of Artificial Sequence: Synthetic oligonucleotide
cccguccguuguaccugca

SEQ ID NO: 3055946 - RNA, 19 nt, Artificial Sequence
  Description of Artificial Sequence: Synthetic oligonucleotide
ccgcggucugagguuucca

SEQ ID NO: 3055947 - RNA, 19 nt, Artificial Sequence
  Description of Artificial Sequence: Synthetic oligonucleotide
cggcucuggauggcacuca

SEQ ID NO: 3055948 - RNA, 19 nt, Artificial Sequence
  Description of Artificial Sequence: Synthetic oligonucleotide
cccagcccuucagguugca

SEQ ID NO: 3055949 - RNA, 19 nt, Artificial Sequence
  Description of Artificial Sequence: Synthetic oligonucleotide
gaaacuggaucucagaggg

SEQ ID NO: 3055950 - RNA, 19 nt, Artificial Sequence
  Description of Artificial Sequence: Synthetic oligonucleotide
uuuuacuuggugaaacugg

SEQ ID NO: 3055951 - RNA, 19 nt, Artificial Sequence
  Description of Artificial Sequence: Synthetic oligonucleotide
aaauuuuacuuggugaaac

SEQ ID NO: 3055952 - RNA, 19 nt, Artificial Sequence
  Description of Artificial Sequence: Synthetic oligonucleotide
aauagucaggcuccuuucc

SEQ ID NO: 3055953 - RNA, 19 nt, Artificial Sequence
  Description of Artificial Sequence: Synthetic oligonucleotide
auugagaggaucugucucc

SEQ ID NO: 3055954 - RNA, 19 nt, Artificial Sequence
  Description of Artificial Sequence: Synthetic oligonucleotide
agaggguuuccccagaugg

SEQ ID NO: 3055955 - RNA, 19 nt, Artificial Sequence
  Description of Artificial Sequence: Synthetic oligonucleotide
acugacugcaacaagcucc

SEQ ID NO: 3055956 - RNA, 19 nt, Artificial Sequence
  Description of Artificial Sequence: Synthetic oligonucleotide
ucuggaaacauauccuggg

SEQ ID NO: 3055957 - RNA, 19 nt, Artificial Sequence
  Description of Artificial Sequence: Synthetic oligonucleotide
ugaaacuggaucucagagg

SEQ ID NO: 3055958 - RNA, 19 nt, Artificial Sequence
  Description of Artificial Sequence: Synthetic oligonucleotide
aucuggggaauccagcucc

SEQ ID NO: 3055959 - RNA, 19 nt, Artificial Sequence
  Description of Artificial Sequence: Synthetic oligonucleotide
auggaugguaucuggaaac

SEQ ID NO: 3055960 - RNA, 19 nt, Artificial Sequence
  Description of Artificial Sequence: Synthetic oligonucleotide
gguaucuggaaacauaucc

SEQ ID NO: 3055961 - RNA, 19 nt, Artificial Sequence
  Description of Artificial Sequence: Synthetic oligonucleotide
uuuacuuggugaaacugga

SEQ ID NO: 3055962 - RNA, 19 nt, Artificial Sequence
  Description of Artificial Sequence: Synthetic oligonucleotide
aauuuuacuuggugaaacu

SEQ ID NO: 3055963 - RNA, 19 nt, Artificial Sequence
  Description of Artificial Sequence: Synthetic oligonucleotide
uggacugacugcaacaagc

SEQ ID NO: 3055964 - RNA, 19 nt, Artificial Sequence
  Description of Artificial Sequence: Synthetic oligonucleotide
caagcucccacucaguucc

SEQ ID NO: 3055965 - RNA, 19 nt, Artificial Sequence
  Description of Artificial Sequence: Synthetic oligonucleotide
aaacauauccugggucucc

SEQ ID NO: 3055966 - RNA, 19 nt, Artificial Sequence
  Description of Artificial Sequence: Synthetic oligonucleotide
aauggaugguaucuggaaa

SEQ ID NO: 3055967 - RNA, 19 nt, Artificial Sequence
  Description of Artificial Sequence: Synthetic oligonucleotide
cucagccggaccaugaugg

SEQ ID NO: 3055968 - RNA, 19 nt, Artificial Sequence
  Description of Artificial Sequence: Synthetic oligonucleotide
agaggaucugucuccuucc

SEQ ID NO: 3055969 - RNA, 19 nt, Artificial Sequence
  Description of Artificial Sequence: Synthetic oligonucleotide
ucuaaggcuggccgaauag

SEQ ID NO: 3055970 - RNA, 19 nt, Artificial Sequence
  Description of Artificial Sequence: Synthetic oligonucleotide
acuuggugaaacuggaucu

SEQ ID NO: 3055971 - RNA, 19 nt, Artificial Sequence
  Description of Artificial Sequence: Synthetic oligonucleotide
uucacagucuucaggggag

SEQ ID NO: 3055972 - RNA, 19 nt, Artificial Sequence
  Description of Artificial Sequence: Synthetic oligonucleotide
uacuuggugaaacuggauc

SEQ ID NO: 3055973 - RNA, 19 nt, Artificial Sequence
  Description of Artificial Sequence: Synthetic oligonucleotide
gugaaacuggaucucagag

SEQ ID NO: 3055974 - RNA, 19 nt, Artificial Sequence
  Description of Artificial Sequence: Synthetic oligonucleotide
agcuccuggaguucuaagg

SEQ ID NO: 3055975 - RNA, 19 nt, Artificial Sequence
  Description of Artificial Sequence: Synthetic oligonucleotide
agucaggcuccuuuccucc

SEQ ID NO: 3055976 - RNA, 19 nt, Artificial Sequence
  Description of Artificial Sequence: Synthetic oligonucleotide
uucccauggcaucaucugg

SEQ ID NO: 3055977 - RNA, 19 nt, Artificial Sequence
  Description of Artificial Sequence: Synthetic oligonucleotide
uucauugagaggaucuguc

SEQ ID NO: 3055978 - RNA, 19 nt, Artificial Sequence
  Description of Artificial Sequence: Synthetic oligonucleotide
uuccucuuuucccagcagc

SEQ ID NO: 3055979 - RNA, 19 nt, Artificial Sequence
  Description of Artificial Sequence: Synthetic oligonucleotide
uggaaacauauccuggguc

SEQ ID NO: 3055980 - RNA, 19 nt, Artificial Sequence
  Description of Artificial Sequence: Synthetic oligonucleotide
auuuuacuuggugaaacug

SEQ ID NO: 3055981 - RNA, 19 nt, Artificial Sequence
  Description of Artificial Sequence: Synthetic oligonucleotide
acugcaacaagcucccacu

SEQ ID NO: 3055982 - RNA, 19 nt, Artificial Sequence
  Description of Artificial Sequence: Synthetic oligonucleotide
uccuggaguucuaaggcug

SEQ ID NO: 3055983 - RNA, 19 nt, Artificial Sequence
  Description of Artificial Sequence: Synthetic oligonucleotide
ucaucuggggaauccagcu

SEQ ID NO: 3055984 - RNA, 19 nt, Artificial Sequence
  Description of Artificial Sequence: Synthetic oligonucleotide
cagucuucaggggagaggg

SEQ ID NO: 3055985 - RNA, 19 nt, Artificial Sequence
  Description of Artificial Sequence: Synthetic oligonucleotide
acaagcucccacucaguuc

SEQ ID NO: 3055986 - RNA, 19 nt, Artificial Sequence
  Description of Artificial Sequence: Synthetic oligonucleotide
ucauugagaggaucugucu

SEQ ID NO: 3055987 - RNA, 19 nt, Artificial Sequence
  Description of Artificial Sequence: Synthetic oligonucleotide
ggaguucuaaggcuggccg

SEQ ID NO: 3055988 - RNA, 19 nt, Artificial Sequence
  Description of Artificial Sequence: Synthetic oligonucleotide
ucuccuuccggcgaggggc

SEQ ID NO: 3055989 - RNA, 19 nt, Artificial Sequence
  Description of Artificial Sequence: Synthetic oligonucleotide
uggccgaauagucaggcuc

SEQ ID NO: 3055990 - RNA, 19 nt, Artificial Sequence
  Description of Artificial Sequence: Synthetic oligonucleotide
aacaagcucccacucaguu

SEQ ID NO: 3055991 - RNA, 19 nt, Artificial Sequence
  Description of Artificial Sequence: Synthetic oligonucleotide
aguucacagucuucagggg

SEQ ID NO: 3055992 - RNA, 19 nt, Artificial Sequence
  Description of Artificial Sequence: Synthetic oligonucleotide
gaucugucuccuuccggcg

SEQ ID NO: 3055993 - RNA, 19 nt, Artificial Sequence
  Description of Artificial Sequence: Synthetic oligonucleotide
ggcgccaaauuuuacuugg

SEQ ID NO: 3055994 - RNA, 19 nt, Artificial Sequence
  Description of Artificial Sequence: Synthetic oligonucleotide
uccauuccuccucccacgg

SEQ ID NO: 3055995 - RNA, 19 nt, Artificial Sequence
  Description of Artificial Sequence: Synthetic oligonucleotide
ucccacgguucauugagag

SEQ ID NO: 3055996 - RNA, 19 nt, Artificial Sequence
  Description of Artificial Sequence: Synthetic oligonucleotide
uaaggcuggccgaauaguc

SEQ ID NO: 3055997 - RNA, 19 nt, Artificial Sequence
  Description of Artificial Sequence: Synthetic oligonucleotide
uggugaaacuggaucucag

SEQ ID NO: 3055998 - RNA, 19 nt, Artificial Sequence
  Description of Artificial Sequence: Synthetic oligonucleotide
cauugagaggaucugucuc

SEQ ID NO: 3055999 - RNA, 19 nt, Artificial Sequence
  Description of Artificial Sequence: Synthetic oligonucleotide
ucugucuccuuccggcgag

SEQ ID NO: 3056000 - RNA, 19 nt, Artificial Sequence
  Description of Artificial Sequence: Synthetic oligonucleotide
ugcaacaagcucccacuca

SEQ ID NO: 3056001 - RNA, 19 nt, Artificial Sequence
  Description of Artificial Sequence: Synthetic oligonucleotide
aucaucuggggaauccagc

SEQ ID NO: 3056002 - RNA, 19 nt, Artificial Sequence
  Description of Artificial Sequence: Synthetic oligonucleotide
gagaggaucugucuccuuc

SEQ ID NO: 3056003 - RNA, 19 nt, Artificial Sequence
  Description of Artificial Sequence: Synthetic oligonucleotide
gaauagucaggcuccuuuc

SEQ ID NO: 3056004 - RNA, 19 nt, Artificial Sequence
  Description of Artificial Sequence: Synthetic oligonucleotide
gaauggaugguaucuggaa

SEQ ID NO: 3056005 - RNA, 19 nt, Artificial Sequence
  Description of Artificial Sequence: Synthetic oligonucleotide
aucuggaaacauauccugg

SEQ ID NO: 3056006 - RNA, 19 nt, Artificial Sequence
  Description of Artificial Sequence: Synthetic oligonucleotide
cacucaguuccucuuuucc

SEQ ID NO: 3056007 - RNA, 19 nt, Artificial Sequence
  Description of Artificial Sequence: Synthetic oligonucleotide
agccggaccaugauggccc

SEQ ID NO: 3056008 - RNA, 19 nt, Artificial Sequence
  Description of Artificial Sequence: Synthetic oligonucleotide
auagucaggcuccuuuccu

SEQ ID NO: 3056009 - RNA, 19 nt, Artificial Sequence
  Description of Artificial Sequence: Synthetic oligonucleotide
gaggaucugucuccuuccg

SEQ ID NO: 3056010 - RNA, 19 nt, Artificial Sequence
  Description of Artificial Sequence: Synthetic oligonucleotide
cauggcaucaucuggggaa

SEQ ID NO: 3056011 - RNA, 19 nt, Artificial Sequence
  Description of Artificial Sequence: Synthetic oligonucleotide
aggcuggccgaauagucag

SEQ ID NO: 3056012 - RNA, 19 nt, Artificial Sequence
  Description of Artificial Sequence: Synthetic oligonucleotide
aggguuuccccagaugggg

SEQ ID NO: 3056013 - RNA, 19 nt, Artificial Sequence
  Description of Artificial Sequence: Synthetic oligonucleotide
ucucagccggaccaugaug

SEQ ID NO: 3056014 - RNA, 19 nt, Artificial Sequence
  Description of Artificial Sequence: Synthetic oligonucleotide
aguuccucuuuucccagca

SEQ ID NO: 3056015 - RNA, 19 nt, Artificial Sequence
  Description of Artificial Sequence: Synthetic oligonucleotide
ggaucugucuccuuccggc

SEQ ID NO: 3056016 - RNA, 19 nt, Artificial Sequence
  Description of Artificial Sequence: Synthetic oligonucleotide
gcaacaagcucccacucag

SEQ ID NO: 3056017 - RNA, 19 nt, Artificial Sequence
  Description of Artificial Sequence: Synthetic oligonucleotide
accaugauggccccgggaa

SEQ ID NO: 3056018 - RNA, 19 nt, Artificial Sequence
  Description of Artificial Sequence: Synthetic oligonucleotide
uccuggacugacugcaaca

SEQ ID NO: 3056019 - RNA, 19 nt, Artificial Sequence
  Description of Artificial Sequence: Synthetic oligonucleotide
gcuccuuuccuccagggcc

SEQ ID NO: 3056020 - RNA, 19 nt, Artificial Sequence
  Description of Artificial Sequence: Synthetic oligonucleotide
gggaauggaugguaucugg

SEQ ID NO: 3056021 - RNA, 19 nt, Artificial Sequence
  Description of Artificial Sequence: Synthetic oligonucleotide
guucacagucuucagggga

SEQ ID NO: 3056022 - RNA, 19 nt, Artificial Sequence
  Description of Artificial Sequence: Synthetic oligonucleotide
uuggugguucccauggcau

SEQ ID NO: 3056023 - RNA, 19 nt, Artificial Sequence
  Description of Artificial Sequence: Synthetic oligonucleotide
uccagggccuccuggacug

SEQ ID NO: 3056024 - RNA, 19 nt, Artificial Sequence
  Description of Artificial Sequence: Synthetic oligonucleotide
aggaucugucuccuuccgg

SEQ ID NO: 3056025 - RNA, 19 nt, Artificial Sequence
  Description of Artificial Sequence: Synthetic oligonucleotide
uccaguucacagucuucag

SEQ ID NO: 3056026 - RNA, 19 nt, Artificial Sequence
  Description of Artificial Sequence: Synthetic oligonucleotide
augguaucuggaaacauau

SEQ ID NO: 3056027 - RNA, 19 nt, Artificial Sequence
  Description of Artificial Sequence: Synthetic oligonucleotide
guccauuccuccucccacg

SEQ ID NO: 3056028 - RNA, 19 nt, Artificial Sequence
  Description of Artificial Sequence: Synthetic oligonucleotide
aggggcgccaaauuuuacu

SEQ ID NO: 3056029 - RNA, 19 nt, Artificial Sequence
  Description of Artificial Sequence: Synthetic oligonucleotide
aacauauccugggucucca

SEQ ID NO: 3056030 - RNA, 19 nt, Artificial Sequence
  Description of Artificial Sequence: Synthetic oligonucleotide
auauccugggucuccaguu

SEQ ID NO: 3056031 - RNA, 19 nt, Artificial Sequence
  Description of Artificial Sequence: Synthetic oligonucleotide
gaggguuuccccagauggg

SEQ ID NO: 3056032 - RNA, 19 nt, Artificial Sequence
  Description of Artificial Sequence: Synthetic oligonucleotide
cucuuuucccagcagcguc

SEQ ID NO: 3056033 - RNA, 19 nt, Artificial Sequence
  Description of Artificial Sequence: Synthetic oligonucleotide
gaugguaucuggaaacaua

SEQ ID NO: 3056034 - RNA, 19 nt, Artificial Sequence
  Description of Artificial Sequence: Synthetic oligonucleotide
acagucuucaggggagagg

SEQ ID NO: 3056035 - RNA, 19 nt, Artificial Sequence
  Description of Artificial Sequence: Synthetic oligonucleotide
uuggugaaacuggaucuca

SEQ ID NO: 3056036 - RNA, 19 nt, Artificial Sequence
  Description of Artificial Sequence: Synthetic oligonucleotide
uggaugguaucuggaaaca

SEQ ID NO: 3056037 - RNA, 19 nt, Artificial Sequence
  Description of Artificial Sequence: Synthetic oligonucleotide
uuacuuggugaaacuggau

SEQ ID NO: 3056038 - RNA, 19 nt, Artificial Sequence
  Description of Artificial Sequence: Synthetic oligonucleotide
ugggucuccaguucacagu

SEQ ID NO: 3056039 - RNA, 19 nt, Artificial Sequence
  Description of Artificial Sequence: Synthetic oligonucleotide
uauccugggucuccaguuc

SEQ ID NO: 3056040 - RNA, 19 nt, Artificial Sequence
  Description of Artificial Sequence: Synthetic oligonucleotide
gcuccuggaguucuaaggc

SEQ ID NO: 3056041 - RNA, 19 nt, Artificial Sequence
  Description of Artificial Sequence: Synthetic oligonucleotide
uggaguucuaaggcuggcc

SEQ ID NO: 3056042 - RNA, 19 nt, Artificial Sequence
  Description of Artificial Sequence: Synthetic oligonucleotide
aaggcuggccgaauaguca

SEQ ID NO: 3056043 - RNA, 19 nt, Artificial Sequence
  Description of Artificial Sequence: Synthetic oligonucleotide
aaacuggaucucagagggg

SEQ ID NO: 3056044 - RNA, 19 nt, Artificial Sequence
  Description of Artificial Sequence: Synthetic oligonucleotide
uucuaaggcuggccgaaua

SEQ ID NO: 3056045 - RNA, 19 nt, Artificial Sequence
  Description of Artificial Sequence: Synthetic oligonucleotide
uucccagcagcguccauuc

SEQ ID NO: 3056046 - RNA, 19 nt, Artificial Sequence
  Description of Artificial Sequence: Synthetic oligonucleotide
ugguaucuggaaacauauc

SEQ ID NO: 3056047 - RNA, 19 nt, Artificial Sequence
  Description of Artificial Sequence: Synthetic oligonucleotide
gaaacauauccugggucuc

SEQ ID NO: 3056048 - RNA, 19 nt, Artificial Sequence
  Description of Artificial Sequence: Synthetic oligonucleotide
caugauggccccgggaaug

SEQ ID NO: 3056049 - RNA, 19 nt, Artificial Sequence
  Description of Artificial Sequence: Synthetic oligonucleotide
uagucaggcuccuuuccuc

SEQ ID NO: 3056050 - RNA, 19 nt, Artificial Sequence
  Description of Artificial Sequence: Synthetic oligonucleotide
aggggagaggguuucccca

SEQ ID NO: 3056051 - RNA, 19 nt, Artificial Sequence
  Description of Artificial Sequence: Synthetic oligonucleotide
uggccccgggaauggaugg

SEQ ID NO: 3056052 - RNA, 19 nt, Artificial Sequence
  Description of Artificial Sequence: Synthetic oligonucleotide
gagaggguuuccccagaug

SEQ ID NO: 3056053 - RNA, 19 nt, Artificial Sequence
  Description of Artificial Sequence: Synthetic oligonucleotide
ucaggggagaggguuuccc

SEQ ID NO: 3056054 - RNA, 19 nt, Artificial Sequence
  Description of Artificial Sequence: Synthetic oligonucleotide
gacugacugcaacaagcuc

SEQ ID NO: 3056055 - RNA, 19 nt, Artificial Sequence
  Description of Artificial Sequence: Synthetic oligonucleotide
gaguucuaaggcuggccga

SEQ ID NO: 3056056 - RNA, 19 nt, Artificial Sequence
  Description of Artificial Sequence: Synthetic oligonucleotide
cuuggugaaacuggaucuc

SEQ ID NO: 3056057 - RNA, 19 nt, Artificial Sequence
  Description of Artificial Sequence: Synthetic oligonucleotide
uugagaggaucugucuccu

SEQ ID NO: 3056058 - RNA, 19 nt, Artificial Sequence
  Description of Artificial Sequence: Synthetic oligonucleotide
ucuccaguucacagucuuc

SEQ ID NO: 3056059 - RNA, 19 nt, Artificial Sequence
  Description of Artificial Sequence: Synthetic oligonucleotide
aggcuccuuuccuccaggg

SEQ ID NO: 3056060 - RNA, 19 nt, Artificial Sequence
  Description of Artificial Sequence: Synthetic oligonucleotide
caggggagaggguuucccc

SEQ ID NO: 3056061 - RNA, 19 nt, Artificial Sequence
  Description of Artificial Sequence: Synthetic oligonucleotide
guaucuggaaacauauccu

SEQ ID NO: 3056062 - RNA, 19 nt, Artificial Sequence
  Description of Artificial Sequence: Synthetic oligonucleotide
acauauccugggucuccag

SEQ ID NO: 3056063 - RNA, 19 nt, Artificial Sequence
  Description of Artificial Sequence: Synthetic oligonucleotide
gaauccagcuccuggaguu

SEQ ID NO: 3056064 - RNA, 19 nt, Artificial Sequence
  Description of Artificial Sequence: Synthetic oligonucleotide
agcguccauuccuccuccc

SEQ ID NO: 3056065 - RNA, 19 nt, Artificial Sequence
  Description of Artificial Sequence: Synthetic oligonucleotide
ucuggggaauccagcuccu

SEQ ID NO: 3056066 - RNA, 19 nt, Artificial Sequence
  Description of Artificial Sequence: Synthetic oligonucleotide
augauggccccgggaaugg

SEQ ID NO: 3056067 - RNA, 19 nt, Artificial Sequence
  Description of Artificial Sequence: Synthetic oligonucleotide
aucugucuccuuccggcga

SEQ ID NO: 3056068 - RNA, 19 nt, Artificial Sequence
  Description of Artificial Sequence: Synthetic oligonucleotide
aguucuaaggcuggccgaa

SEQ ID NO: 3056069 - RNA, 19 nt, Artificial Sequence
  Description of Artificial Sequence: Synthetic oligonucleotide
acgguucauugagaggauc

SEQ ID NO: 3056070 - RNA, 19 nt, Artificial Sequence
  Description of Artificial Sequence: Synthetic oligonucleotide
agcagcguccauuccuccu

SEQ ID NO: 3056071 - RNA, 19 nt, Artificial Sequence
  Description of Artificial Sequence: Synthetic oligonucleotide
uuucccagcagcguccauu

SEQ ID NO: 3056072 - RNA, 19 nt, Artificial Sequence
  Description of Artificial Sequence: Synthetic oligonucleotide
ucagccggaccaugauggc

SEQ ID NO: 3056073 - RNA, 19 nt, Artificial Sequence
  Description of Artificial Sequence: Synthetic oligonucleotide
cuccaguucacagucuuca

SEQ ID NO: 3056074 - RNA, 19 nt, Artificial Sequence
  Description of Artificial Sequence: Synthetic oligonucleotide
ugucuccuuccggcgaggg

SEQ ID NO: 3056075 - RNA, 19 nt, Artificial Sequence
  Description of Artificial Sequence: Synthetic oligonucleotide
guuccucuuuucccagcag

SEQ ID NO: 3056076 - RNA, 19 nt, Artificial Sequence
  Description of Artificial Sequence: Synthetic oligonucleotide
ggugaaacuggaucucaga

SEQ ID NO: 3056077 - RNA, 19 nt, Artificial Sequence
  Description of Artificial Sequence: Synthetic oligonucleotide
uggugguucccauggcauc

SEQ ID NO: 3056078 - RNA, 19 nt, Artificial Sequence
  Description of Artificial Sequence: Synthetic oligonucleotide
caaauuuuacuuggugaaa

SEQ ID NO: 3056079 - RNA, 19 nt, Artificial Sequence
  Description of Artificial Sequence: Synthetic oligonucleotide
auuccuccucccacgguuc

SEQ ID NO: 3056080 - RNA, 19 nt, Artificial Sequence
  Description of Artificial Sequence: Synthetic oligonucleotide
gguucauugagaggaucug

SEQ ID NO: 3056081 - RNA, 19 nt, Artificial Sequence
  Description of Artificial Sequence: Synthetic oligonucleotide
caucuggggaauccagcuc

SEQ ID NO: 3056082 - RNA, 19 nt, Artificial Sequence
  Description of Artificial Sequence: Synthetic oligonucleotide
ggggucgcuggccuugucg

SEQ ID NO: 3056083 - RNA, 19 nt, Artificial Sequence
  Description of Artificial Sequence: Synthetic oligonucleotide
ccucccacgguucauugag

SEQ ID NO: 3056084 - RNA, 19 nt, Artificial Sequence
  Description of Artificial Sequence: Synthetic oligonucleotide
uccugggucuccaguucac

SEQ ID NO: 3056085 - RNA, 19 nt, Artificial Sequence
  Description of Artificial Sequence: Synthetic oligonucleotide
gguccucucagccggacca

SEQ ID NO: 3056086 - RNA, 19 nt, Artificial Sequence
  Description of Artificial Sequence: Synthetic oligonucleotide
uuccuccucccacgguuca

SEQ ID NO: 3056087 - RNA, 19 nt, Artificial Sequence
  Description of Artificial Sequence: Synthetic oligonucleotide
ccuggaguucuaaggcugg

SEQ ID NO: 3056088 - RNA, 19 nt, Artificial Sequence
  Description of Artificial Sequence: Synthetic oligonucleotide
gucuccuuccggcgagggg

SEQ ID NO: 3056089 - RNA, 19 nt, Artificial Sequence
  Description of Artificial Sequence: Synthetic oligonucleotide
cuccuuccggcgaggggcg

SEQ ID NO: 3056090 - RNA, 19 nt, Artificial Sequence
  Description of Artificial Sequence: Synthetic oligonucleotide
uccucccacgguucauuga

SEQ ID NO: 3056091 - RNA, 19 nt, Artificial Sequence
  Description of Artificial Sequence: Synthetic oligonucleotide
cuccuggacugacugcaac

SEQ ID NO: 3056092 - RNA, 19 nt, Artificial Sequence
  Description of Artificial Sequence: Synthetic oligonucleotide
ccacgguucauugagagga

SEQ ID NO: 3056093 - RNA, 19 nt, Artificial Sequence
  Description of Artificial Sequence: Synthetic oligonucleotide
caggcuccuuuccuccagg

SEQ ID NO: 3056094 - RNA, 19 nt, Artificial Sequence
  Description of Artificial Sequence: Synthetic oligonucleotide
cugcaacaagcucccacuc

SEQ ID NO: 3056095 - RNA, 19 nt, Artificial Sequence
  Description of Artificial Sequence: Synthetic oligonucleotide
ucacagucuucaggggaga

SEQ ID NO: 3056096 - RNA, 19 nt, Artificial Sequence
  Description of Artificial Sequence: Synthetic oligonucleotide
gaccaugauggccccggga

SEQ ID NO: 3056097 - RNA, 19 nt, Artificial Sequence
  Description of Artificial Sequence: Synthetic oligonucleotide
ucccacucaguuccucuuu

SEQ ID NO: 3056098 - RNA, 19 nt, Artificial Sequence
  Description of Artificial Sequence: Synthetic oligonucleotide
ggccgaauagucaggcucc

SEQ ID NO: 3056099 - RNA, 19 nt, Artificial Sequence
  Description of Artificial Sequence: Synthetic oligonucleotide
cagcuccuggaguucuaag

SEQ ID NO: 3056100 - RNA, 19 nt, Artificial Sequence
  Description of Artificial Sequence: Synthetic oligonucleotide
ggggagaggguuuccccag

SEQ ID NO: 3056101 - RNA, 19 nt, Artificial Sequence
  Description of Artificial Sequence: Synthetic oligonucleotide
cuggaguucuaaggcuggc

SEQ ID NO: 3056102 - RNA, 19 nt, Artificial Sequence
  Description of Artificial Sequence: Synthetic oligonucleotide
ggggaauccagcuccugga

SEQ ID NO: 3056103 - RNA, 19 nt, Artificial Sequence
  Description of Artificial Sequence: Synthetic oligonucleotide
cacagucuucaggggagag

SEQ ID NO: 3056104 - RNA, 19 nt, Artificial Sequence
  Description of Artificial Sequence: Synthetic oligonucleotide
cagcguccauuccuccucc

SEQ ID NO: 3056105 - RNA, 19 nt, Artificial Sequence
  Description of Artificial Sequence: Synthetic oligonucleotide
cagccggaccaugauggcc

SEQ ID NO: 3056106 - RNA, 19 nt, Artificial Sequence
  Description of Artificial Sequence: Synthetic oligonucleotide
ggaauggaugguaucugga

SEQ ID NO: 3056107 - RNA, 19 nt, Artificial Sequence
  Description of Artificial Sequence: Synthetic oligonucleotide
gggcgccaaauuuuacuug

SEQ ID NO: 3056108 - RNA, 19 nt, Artificial Sequence
  Description of Artificial Sequence: Synthetic oligonucleotide
cccauggcaucaucugggg

SEQ ID NO: 3056109 - RNA, 19 nt, Artificial Sequence
  Description of Artificial Sequence: Synthetic oligonucleotide
ucccagcagcguccauucc

SEQ ID NO: 3056110 - RNA, 19 nt, Artificial Sequence
  Description of Artificial Sequence: Synthetic oligonucleotide
auggccccgggaauggaug

SEQ ID NO: 3056111 - RNA, 19 nt, Artificial Sequence
  Description of Artificial Sequence: Synthetic oligonucleotide
uccucucagccggaccaug

SEQ ID NO: 3056112 - RNA, 19 nt, Artificial Sequence
  Description of Artificial Sequence: Synthetic oligonucleotide
ggugguucccauggcauca

SEQ ID NO: 3056113 - RNA, 19 nt, Artificial Sequence
  Description of Artificial Sequence: Synthetic oligonucleotide
ugguucccauggcaucauc

SEQ ID NO: 3056114 - RNA, 19 nt, Artificial Sequence
  Description of Artificial Sequence: Synthetic oligonucleotide
ggcuccuuuccuccagggc

SEQ ID NO: 3056115 - RNA, 19 nt, Artificial Sequence
  Description of Artificial Sequence: Synthetic oligonucleotide
gcuggccgaauagucaggc

SEQ ID NO: 3056116 - RNA, 19 nt, Artificial Sequence
  Description of Artificial Sequence: Synthetic oligonucleotide
gggccuccuggacugacug

SEQ ID NO: 3056117 - RNA, 19 nt, Artificial Sequence
  Description of Artificial Sequence: Synthetic oligonucleotide
cccacgguucauugagagg

SEQ ID NO: 3056118 - RNA, 19 nt, Artificial Sequence
  Description of Artificial Sequence: Synthetic oligonucleotide
ugagaggaucugucuccuu

SEQ ID NO: 3056119 - RNA, 19 nt, Artificial Sequence
  Description of Artificial Sequence: Synthetic oligonucleotide
agcucccacucaguuccuc

SEQ ID NO: 3056120 - RNA, 19 nt, Artificial Sequence
  Description of Artificial Sequence: Synthetic oligonucleotide
gcagcguccauuccuccuc

SEQ ID NO: 3056121 - RNA, 19 nt, Artificial Sequence
  Description of Artificial Sequence: Synthetic oligonucleotide
gucaggcuccuuuccucca

SEQ ID NO: 3056122 - RNA, 19 nt, Artificial Sequence
  Description of Artificial Sequence: Synthetic oligonucleotide
cuccuggaguucuaaggcu

SEQ ID NO: 3056123 - RNA, 19 nt, Artificial Sequence
  Description of Artificial Sequence: Synthetic oligonucleotide
uuuucccagcagcguccau

SEQ ID NO: 3056124 - RNA, 19 nt, Artificial Sequence
  Description of Artificial Sequence: Synthetic oligonucleotide
cgccaaauuuuacuuggug

SEQ ID NO: 3056125 - RNA, 19 nt, Artificial Sequence
  Description of Artificial Sequence: Synthetic oligonucleotide
cauuccuccucccacgguu

SEQ ID NO: 3056126 - RNA, 19 nt, Artificial Sequence
  Description of Artificial Sequence: Synthetic oligonucleotide
ugauggccccgggaaugga

SEQ ID NO: 3056127 - RNA, 19 nt, Artificial Sequence
  Description of Artificial Sequence: Synthetic oligonucleotide
ggaccaugauggccccggg

SEQ ID NO: 3056128 - RNA, 19 nt, Artificial Sequence
  Description of Artificial Sequence: Synthetic oligonucleotide
gaggggcgccaaauuuuac

SEQ ID NO: 3056129 - RNA, 19 nt, Artificial Sequence
  Description of Artificial Sequence: Synthetic oligonucleotide
cuccuuuccuccagggccu

SEQ ID NO: 3056130 - RNA, 19 nt, Artificial Sequence
  Description of Artificial Sequence: Synthetic oligonucleotide
cuaaggcuggccgaauagu

SEQ ID NO: 3056131 - RNA, 19 nt, Artificial Sequence
  Description of Artificial Sequence: Synthetic oligonucleotide
ggaauccagcuccuggagu

SEQ ID NO: 3056132 - RNA, 19 nt, Artificial Sequence
  Description of Artificial Sequence: Synthetic oligonucleotide
cugucuccuuccggcgagg

SEQ ID NO: 3056133 - RNA, 19 nt, Artificial Sequence
  Description of Artificial Sequence: Synthetic oligonucleotide
cucccacgguucauugaga

SEQ ID NO: 3056134 - RNA, 19 nt, Artificial Sequence
  Description of Artificial Sequence: Synthetic oligonucleotide
gccuccuggacugacugca

SEQ ID NO: 3056135 - RNA, 19 nt, Artificial Sequence
  Description of Artificial Sequence: Synthetic oligonucleotide
cguccauuccuccucccac

SEQ ID NO: 3056136 - RNA, 19 nt, Artificial Sequence
  Description of Artificial Sequence: Synthetic oligonucleotide
ggguccucucagccggacc

SEQ ID NO: 3056137 - RNA, 19 nt, Artificial Sequence
  Description of Artificial Sequence: Synthetic oligonucleotide
cuggggaauccagcuccug

SEQ ID NO: 3056138 - RNA, 19 nt, Artificial Sequence
  Description of Artificial Sequence: Synthetic oligonucleotide
gguucccauggcaucaucu

SEQ ID NO: 3056139 - RNA, 19 nt, Artificial Sequence
  Description of Artificial Sequence: Synthetic oligonucleotide
ggacugacugcaacaagcu

SEQ ID NO: 3056140 - RNA, 19 nt, Artificial Sequence
  Description of Artificial Sequence: Synthetic oligonucleotide
agucuucaggggagagggu

SEQ ID NO: 3056141 - RNA, 19 nt, Artificial Sequence
  Description of Artificial Sequence: Synthetic oligonucleotide
uggcaucaucuggggaauc

SEQ ID NO: 3056142 - RNA, 19 nt, Artificial Sequence
  Description of Artificial Sequence: Synthetic oligonucleotide
ccacucaguuccucuuuuc

SEQ ID NO: 3056143 - RNA, 19 nt, Artificial Sequence
  Description of Artificial Sequence: Synthetic oligonucleotide
ggccuccuggacugacugc

SEQ ID NO: 3056144 - RNA, 19 nt, Artificial Sequence
  Description of Artificial Sequence: Synthetic oligonucleotide
uccggcgaggggcgccaaa

SEQ ID NO: 3056145 - RNA, 19 nt, Artificial Sequence
  Description of Artificial Sequence: Synthetic oligonucleotide
ggggcgccaaauuuuacuu

SEQ ID NO: 3056146 - RNA, 19 nt, Artificial Sequence
  Description of Artificial Sequence: Synthetic oligonucleotide
caacaagcucccacucagu

SEQ ID NO: 3056147 - RNA, 19 nt, Artificial Sequence
  Description of Artificial Sequence: Synthetic oligonucleotide
gauggccccgggaauggau

SEQ ID NO: 3056148 - RNA, 19 nt, Artificial Sequence
  Description of Artificial Sequence: Synthetic oligonucleotide
aagcucccacucaguuccu

SEQ ID NO: 3056149 - RNA, 19 nt, Artificial Sequence
  Description of Artificial Sequence: Synthetic oligonucleotide
uccuccucccacgguucau

SEQ ID NO: 3056150 - RNA, 19 nt, Artificial Sequence
  Description of Artificial Sequence: Synthetic oligonucleotide
gcguccauuccuccuccca

SEQ ID NO: 3056151 - RNA, 19 nt, Artificial Sequence
  Description of Artificial Sequence: Synthetic oligonucleotide
cccgggaauggaugguauc

SEQ ID NO: 3056152 - RNA, 19 nt, Artificial Sequence
  Description of Artificial Sequence: Synthetic oligonucleotide
uccuuuccuccagggccuc

SEQ ID NO: 3056153 - RNA, 19 nt, Artificial Sequence
  Description of Artificial Sequence: Synthetic oligonucleotide
cggaccaugauggccccgg

SEQ ID NO: 3056154 - RNA, 19 nt, Artificial Sequence
  Description of Artificial Sequence: Synthetic oligonucleotide
agggccuccuggacugacu

SEQ ID NO: 3056155 - RNA, 19 nt, Artificial Sequence
  Description of Artificial Sequence: Synthetic oligonucleotide
cagggccuccuggacugac

SEQ ID NO: 3056156 - RNA, 19 nt, Artificial Sequence
  Description of Artificial Sequence: Synthetic oligonucleotide
gggagaggguuuccccaga

SEQ ID NO: 3056157 - RNA, 19 nt, Artificial Sequence
  Description of Artificial Sequence: Synthetic oligonucleotide
uccuuccggcgaggggcgc

SEQ ID NO: 3056158 - RNA, 19 nt, Artificial Sequence
  Description of Artificial Sequence: Synthetic oligonucleotide
ccucucagccggaccauga

SEQ ID NO: 3056159 - RNA, 19 nt, Artificial Sequence
  Description of Artificial Sequence: Synthetic oligonucleotide
cuggccgaauagucaggcu

SEQ ID NO: 3056160 - RNA, 19 nt, Artificial Sequence
  Description of Artificial Sequence: Synthetic oligonucleotide
gcucccacucaguuccucu

SEQ ID NO: 3056161 - RNA, 19 nt, Artificial Sequence
  Description of Artificial Sequence: Synthetic oligonucleotide
gccggaccaugauggcccc

SEQ ID NO: 3056162 - RNA, 19 nt, Artificial Sequence
  Description of Artificial Sequence: Synthetic oligonucleotide
cgggaauggaugguaucug

SEQ ID NO: 3056163 - RNA, 19 nt, Artificial Sequence
  Description of Artificial Sequence: Synthetic oligonucleotide
ggcgaggggcgccaaauuu

SEQ ID NO: 3056164 - RNA, 19 nt, Artificial Sequence
  Description of Artificial Sequence: Synthetic oligonucleotide
cgguucauugagaggaucu

SEQ ID NO: 3056165 - RNA, 19 nt, Artificial Sequence
  Description of Artificial Sequence: Synthetic oligonucleotide
ccauggcaucaucugggga

SEQ ID NO: 3056166 - RNA, 19 nt, Artificial Sequence
  Description of Artificial Sequence: Synthetic oligonucleotide
cacgguucauugagaggau

SEQ ID NO: 3056167 - RNA, 19 nt, Artificial Sequence
  Description of Artificial Sequence: Synthetic oligonucleotide
cuuccggcgaggggcgcca

SEQ ID NO: 3056168 - RNA, 19 nt, Artificial Sequence
  Description of Artificial Sequence: Synthetic oligonucleotide
cucucagccggaccaugau

SEQ ID NO: 3056169 - RNA, 19 nt, Artificial Sequence
  Description of Artificial Sequence: Synthetic oligonucleotide
ggagaggguuuccccagau

SEQ ID NO: 3056170 - RNA, 19 nt, Artificial Sequence
  Description of Artificial Sequence: Synthetic oligonucleotide
cucccacucaguuccucuu

SEQ ID NO: 3056171 - RNA, 19 nt, Artificial Sequence
  Description of Artificial Sequence: Synthetic oligonucleotide
cccagcagcguccauuccu

SEQ ID NO: 3056172 - RNA, 19 nt, Artificial Sequence
  Description of Artificial Sequence: Synthetic oligonucleotide
cgaauagucaggcuccuuu

SEQ ID NO: 3056173 - RNA, 19 nt, Artificial Sequence
  Description of Artificial Sequence: Synthetic oligonucleotide
ccgggaauggaugguaucu

SEQ ID NO: 3056174 - RNA, 19 nt, Artificial Sequence
  Description of Artificial Sequence: Synthetic oligonucleotide
guucuaaggcuggccgaau

SEQ ID NO: 3056175 - RNA, 19 nt, Artificial Sequence
  Description of Artificial Sequence: Synthetic oligonucleotide
ccuuccggcgaggggcgcc

SEQ ID NO: 3056176 - RNA, 19 nt, Artificial Sequence
  Description of Artificial Sequence: Synthetic oligonucleotide
cgaggggcgccaaauuuua

SEQ ID NO: 3056177 - RNA, 19 nt, Artificial Sequence
  Description of Artificial Sequence: Synthetic oligonucleotide
gggguccucucagccggac

SEQ ID NO: 3056178 - RNA, 19 nt, Artificial Sequence
  Description of Artificial Sequence: Synthetic oligonucleotide
gugguucccauggcaucau

SEQ ID NO: 3056179 - RNA, 19 nt, Artificial Sequence
  Description of Artificial Sequence: Synthetic oligonucleotide
uuccggcgaggggcgccaa

SEQ ID NO: 3056180 - RNA, 19 nt, Artificial Sequence
  Description of Artificial Sequence: Synthetic oligonucleotide
gcgaggggcgccaaauuuu

SEQ ID NO: 3056181 - RNA, 19 nt, Artificial Sequence
  Description of Artificial Sequence: Synthetic oligonucleotide
ccuccuggacugacugcaa

SEQ ID NO: 3056182 - RNA, 19 nt, Artificial Sequence
  Description of Artificial Sequence: Synthetic oligonucleotide
gcgccaaauuuuacuuggu

SEQ ID NO: 3056183 - RNA, 19 nt, Artificial Sequence
  Description of Artificial Sequence: Synthetic oligonucleotide
ccggaccaugauggccccg

SEQ ID NO: 3056184 - RNA, 19 nt, Artificial Sequence
  Description of Artificial Sequence: Synthetic oligonucleotide
gccccgggaauggauggua

SEQ ID NO: 3056185 - RNA, 19 nt, Artificial Sequence
  Description of Artificial Sequence: Synthetic oligonucleotide
gccgaauagucaggcuccu

SEQ ID NO: 3056186 - RNA, 19 nt, Artificial Sequence
  Description of Artificial Sequence: Synthetic oligonucleotide
guccucucagccggaccau

SEQ ID NO: 3056187 - RNA, 19 nt, Artificial Sequence
  Description of Artificial Sequence: Synthetic oligonucleotide
ccaugauggccccgggaau

SEQ ID NO: 3056188 - RNA, 19 nt, Artificial Sequence
  Description of Artificial Sequence: Synthetic oligonucleotide
cccacucaguuccucuuuu

SEQ ID NO: 3056189 - RNA, 19 nt, Artificial Sequence
  Description of Artificial Sequence: Synthetic oligonucleotide
ccauuccuccucccacggu

SEQ ID NO: 3056190 - RNA, 19 nt, Artificial Sequence
  Description of Artificial Sequence: Synthetic oligonucleotide
ccccgggaauggaugguau

SEQ ID NO: 3056191 - RNA, 19 nt, Artificial Sequence
  Description of Artificial Sequence: Synthetic oligonucleotide
ggccccgggaauggauggu

SEQ ID NO: 3056192 - RNA, 19 nt, Artificial Sequence
  Description of Artificial Sequence: Synthetic oligonucleotide
ccggcgaggggcgccaaau

SEQ ID NO: 3056193 - RNA, 19 nt, Artificial Sequence
  Description of Artificial Sequence: Synthetic oligonucleotide
ccagggccuccuggacuga

SEQ ID NO: 3056194 - RNA, 19 nt, Artificial Sequence
  Description of Artificial Sequence: Synthetic oligonucleotide
ccgaauagucaggcuccuu

SEQ ID NO: 3056195 - RNA, 19 nt, Artificial Sequence
  Description of Artificial Sequence: Synthetic oligonucleotide
cggcgaggggcgccaaauu

SEQ ID NO: 3056196 - RNA, 19 nt, Artificial Sequence
  Description of Artificial Sequence: Synthetic oligonucleotide
uuuagauagcacuuggucc

SEQ ID NO: 3056197 - RNA, 19 nt, Artificial Sequence
  Description of Artificial Sequence: Synthetic oligonucleotide
uuaugugcagagaugagca

SEQ ID NO: 3056198 - RNA, 19 nt, Artificial Sequence
  Description of Artificial Sequence: Synthetic oligonucleotide
uuagauagcacuugguccu

SEQ ID NO: 3056199 - RNA, 19 nt, Artificial Sequence
  Description of Artificial Sequence: Synthetic oligonucleotide
ugguuuuggggccacaggg

SEQ ID NO: 3056200 - RNA, 19 nt, Artificial Sequence
  Description of Artificial Sequence: Synthetic oligonucleotide
ggaacucauguuuagauag

SEQ ID NO: 3056201 - RNA, 19 nt, Artificial Sequence
  Description of Artificial Sequence: Synthetic oligonucleotide
aggcuguuucaccugaugc

SEQ ID NO: 3056202 - RNA, 19 nt, Artificial Sequence
  Description of Artificial Sequence: Synthetic oligonucleotide
auguuuagauagcacuugg

SEQ ID NO: 3056203 - RNA, 19 nt, Artificial Sequence
  Description of Artificial Sequence: Synthetic oligonucleotide
uuucaccugaugcuguugc

SEQ ID NO: 3056204 - RNA, 19 nt, Artificial Sequence
  Description of Artificial Sequence: Synthetic oligonucleotide
gaaccuugggguugcaggg

SEQ ID NO: 3056205 - RNA, 19 nt, Artificial Sequence
  Description of Artificial Sequence: Synthetic oligonucleotide
guuuagauagcacuugguc

SEQ ID NO: 3056206 - RNA, 19 nt, Artificial Sequence
  Description of Artificial Sequence: Synthetic oligonucleotide
uagcacuugguccuuaugu

SEQ ID NO: 3056207 - RNA, 19 nt, Artificial Sequence
  Description of Artificial Sequence: Synthetic oligonucleotide
cuuaugugcagagaugagc

SEQ ID NO: 3056208 - RNA, 19 nt, Artificial Sequence
  Description of Artificial Sequence: Synthetic oligonucleotide
uccuuaugugcagagauga

SEQ ID NO: 3056209 - RNA, 19 nt, Artificial Sequence
  Description of Artificial Sequence: Synthetic oligonucleotide
ucauguuuagauagcacuu

SEQ ID NO: 3056210 - RNA, 19 nt, Artificial Sequence
  Description of Artificial Sequence: Synthetic oligonucleotide
gagaugagcagacucucug

SEQ ID NO: 3056211 - RNA, 19 nt, Artificial Sequence
  Description of Artificial Sequence: Synthetic oligonucleotide
ugugcagagaugagcagac

SEQ ID NO: 3056212 - RNA, 19 nt, Artificial Sequence
  Description of Artificial Sequence: Synthetic oligonucleotide
ugcagagaugagcagacuc

SEQ ID NO: 3056213 - RNA, 19 nt, Artificial Sequence
  Description of Artificial Sequence: Synthetic oligonucleotide
uguuuagauagcacuuggu

SEQ ID NO: 3056214 - RNA, 19 nt, Artificial Sequence
  Description of Artificial Sequence: Synthetic oligonucleotide
ggauccuugguuuuggggc

SEQ ID NO: 3056215 - RNA, 19 nt, Artificial Sequence
  Description of Artificial Sequence: Synthetic oligonucleotide
uugguuuuggggccacagg

SEQ ID NO: 3056216 - RNA, 19 nt, Artificial Sequence
  Description of Artificial Sequence: Synthetic oligonucleotide
aacucauguuuagauagca

SEQ ID NO: 3056217 - RNA, 19 nt, Artificial Sequence
  Description of Artificial Sequence: Synthetic oligonucleotide
gauccuugguuuuggggcc

SEQ ID NO: 3056218 - RNA, 19 nt, Artificial Sequence
  Description of Artificial Sequence: Synthetic oligonucleotide
ggaaccuugggguugcagg

SEQ ID NO: 3056219 - RNA, 19 nt, Artificial Sequence
  Description of Artificial Sequence: Synthetic oligonucleotide
gaugcuguugcagcugagg

SEQ ID NO: 3056220 - RNA, 19 nt, Artificial Sequence
  Description of Artificial Sequence: Synthetic oligonucleotide
agugcagggcugcuucugc

SEQ ID NO: 3056221 - RNA, 19 nt, Artificial Sequence
  Description of Artificial Sequence: Synthetic oligonucleotide
ucuggcgaccuuaggcugg

SEQ ID NO: 3056222 - RNA, 19 nt, Artificial Sequence
  Description of Artificial Sequence: Synthetic oligonucleotide
ugggaacucauguuuagau

SEQ ID NO: 3056223 - RNA, 19 nt, Artificial Sequence
  Description of Artificial Sequence: Synthetic oligonucleotide
agcacuugguccuuaugug

SEQ ID NO: 3056224 - RNA, 19 nt, Artificial Sequence
  Description of Artificial Sequence: Synthetic oligonucleotide
aaggcuguuucaccugaug

SEQ ID NO: 3056225 - RNA, 19 nt, Artificial Sequence
  Description of Artificial Sequence: Synthetic oligonucleotide
ugcuggugggaacucaugu

SEQ ID NO: 3056226 - RNA, 19 nt, Artificial Sequence
  Description of Artificial Sequence: Synthetic oligonucleotide
cauguuuagauagcacuug

SEQ ID NO: 3056227 - RNA, 19 nt, Artificial Sequence
  Description of Artificial Sequence: Synthetic oligonucleotide
cucauguuuagauagcacu

SEQ ID NO: 3056228 - RNA, 19 nt, Artificial Sequence
  Description of Artificial Sequence: Synthetic oligonucleotide
uugguccuuaugugcagag

SEQ ID NO: 3056229 - RNA, 19 nt, Artificial Sequence
  Description of Artificial Sequence: Synthetic oligonucleotide
ucaccugaugcuguugcag

SEQ ID NO: 3056230 - RNA, 19 nt, Artificial Sequence
  Description of Artificial Sequence: Synthetic oligonucleotide
acucauguuuagauagcac

SEQ ID NO: 3056231 - RNA, 19 nt, Artificial Sequence
  Description of Artificial Sequence: Synthetic oligonucleotide
cuugggguugcagggaucc

SEQ ID NO: 3056232 - RNA, 19 nt, Artificial Sequence
  Description of Artificial Sequence: Synthetic oligonucleotide
agaugagcagacucucugu

SEQ ID NO: 3056233 - RNA, 19 nt, Artificial Sequence
  Description of Artificial Sequence: Synthetic oligonucleotide
uggcaaggcuguuucaccu

SEQ ID NO: 3056234 - RNA, 19 nt, Artificial Sequence
  Description of Artificial Sequence: Synthetic oligonucleotide
caccugaugcuguugcagc

SEQ ID NO: 3056235 - RNA, 19 nt, Artificial Sequence
  Description of Artificial Sequence: Synthetic oligonucleotide
gaacucauguuuagauagc

SEQ ID NO: 3056236 - RNA, 19 nt, Artificial Sequence
  Description of Artificial Sequence: Synthetic oligonucleotide
cuccaggcaccuuaggcug

SEQ ID NO: 3056237 - RNA, 19 nt, Artificial Sequence
  Description of Artificial Sequence: Synthetic oligonucleotide
acuugguccuuaugugcag

SEQ ID NO: 3056238 - RNA, 19 nt, Artificial Sequence
  Description of Artificial Sequence: Synthetic oligonucleotide
cuggcaaggcuguuucacc

SEQ ID NO: 3056239 - RNA, 19 nt, Artificial Sequence
  Description of Artificial Sequence: Synthetic oligonucleotide
uggcaccuuaggcuggcag

SEQ ID NO: 3056240 - RNA, 19 nt, Artificial Sequence
  Description of Artificial Sequence: Synthetic oligonucleotide
cuggcagggcucaggaacc

SEQ ID NO: 3056241 - RNA, 19 nt, Artificial Sequence
  Description of Artificial Sequence: Synthetic oligonucleotide
uccaggcaccuuaggcugg

SEQ ID NO: 3056242 - RNA, 19 nt, Artificial Sequence
  Description of Artificial Sequence: Synthetic oligonucleotide
cuugguuuuggggccacag

SEQ ID NO: 3056243 - RNA, 19 nt, Artificial Sequence
  Description of Artificial Sequence: Synthetic oligonucleotide
gguggcagggcucaggcac

SEQ ID NO: 3056244 - RNA, 19 nt, Artificial Sequence
  Description of Artificial Sequence: Synthetic oligonucleotide
uuuuggggccacaggguuc

SEQ ID NO: 3056245 - RNA, 19 nt, Artificial Sequence
  Description of Artificial Sequence: Synthetic oligonucleotide
ggcaccuuaggcuggcagg

SEQ ID NO: 3056246 - RNA, 19 nt, Artificial Sequence
  Description of Artificial Sequence: Synthetic oligonucleotide
ucugcuggugggaacucau

SEQ ID NO: 3056247 - RNA, 19 nt, Artificial Sequence
  Description of Artificial Sequence: Synthetic oligonucleotide
auagcacuugguccuuaug

SEQ ID NO: 3056248 - RNA, 19 nt, Artificial Sequence
  Description of Artificial Sequence: Synthetic oligonucleotide
ggcucuggcgaccuuaggc

SEQ ID NO: 3056249 - RNA, 19 nt, Artificial Sequence
  Description of Artificial Sequence: Synthetic oligonucleotide
gggauccuugguuuugggg

SEQ ID NO: 3056250 - RNA, 19 nt, Artificial Sequence
  Description of Artificial Sequence: Synthetic oligonucleotide
cacuugguccuuaugugca

SEQ ID NO: 3056251 - RNA, 19 nt, Artificial Sequence
  Description of Artificial Sequence: Synthetic oligonucleotide
uggugggaacucauguuua

SEQ ID NO: 3056252 - RNA, 19 nt, Artificial Sequence
  Description of Artificial Sequence: Synthetic oligonucleotide
gcuggcagggcucaggaac

SEQ ID NO: 3056253 - RNA, 19 nt, Artificial Sequence
  Description of Artificial Sequence: Synthetic oligonucleotide
agggauccuugguuuuggg

SEQ ID NO: 3056254 - RNA, 19 nt, Artificial Sequence
  Description of Artificial Sequence: Synthetic oligonucleotide
ggugggaacucauguuuag

SEQ ID NO: 3056255 - RNA, 19 nt, Artificial Sequence
  Description of Artificial Sequence: Synthetic oligonucleotide
accuuaggcuggcagggcu

SEQ ID NO: 3056256 - RNA, 19 nt, Artificial Sequence
  Description of Artificial Sequence: Synthetic oligonucleotide
uggcuggcaaggcuguuuc

SEQ ID NO: 3056257 - RNA, 19 nt, Artificial Sequence
  Description of Artificial Sequence: Synthetic oligonucleotide
accugaugcuguugcagcu

SEQ ID NO: 3056258 - RNA, 19 nt, Artificial Sequence
  Description of Artificial Sequence: Synthetic oligonucleotide
cagggcucaggaaccuugg

SEQ ID NO: 3056259 - RNA, 19 nt, Artificial Sequence
  Description of Artificial Sequence: Synthetic oligonucleotide
aggcaccuuaggcuggcag

SEQ ID NO: 3056260 - RNA, 19 nt, Artificial Sequence
  Description of Artificial Sequence: Synthetic oligonucleotide
gcacuugguccuuaugugc

SEQ ID NO: 3056261 - RNA, 19 nt, Artificial Sequence
  Description of Artificial Sequence: Synthetic oligonucleotide
uugcagggauccuugguuu

SEQ ID NO: 3056262 - RNA, 19 nt, Artificial Sequence
  Description of Artificial Sequence: Synthetic oligonucleotide
cuggcagggcuccaggcac

SEQ ID NO: 3056263 - RNA, 19 nt, Artificial Sequence
  Description of Artificial Sequence: Synthetic oligonucleotide
cucaggcaccuuaggcugg

SEQ ID NO: 3056264 - RNA, 19 nt, Artificial Sequence
  Description of Artificial Sequence: Synthetic oligonucleotide
gcucaggcaccuuaggcug

SEQ ID NO: 3056265 - RNA, 19 nt, Artificial Sequence
  Description of Artificial Sequence: Synthetic oligonucleotide
cuuaggcugggcagggcuc

SEQ ID NO: 3056266 - RNA, 19 nt, Artificial Sequence
  Description of Artificial Sequence: Synthetic oligonucleotide
uguuucaccugaugcuguu

SEQ ID NO: 3056267 - RNA, 19 nt, Artificial Sequence
  Description of Artificial Sequence: Synthetic oligonucleotide
cuuaggcuggcagggcucc

SEQ ID NO: 3056268 - RNA, 19 nt, Artificial Sequence
  Description of Artificial Sequence: Synthetic oligonucleotide
gaccuuaggcugggcaggg

SEQ ID NO: 3056269 - RNA, 19 nt, Artificial Sequence
  Description of Artificial Sequence: Synthetic oligonucleotide
ggggccacaggguuccugg

SEQ ID NO: 3056270 - RNA, 19 nt, Artificial Sequence
  Description of Artificial Sequence: Synthetic oligonucleotide
cucuggcgaccuuaggcug

SEQ ID NO: 3056271 - RNA, 19 nt, Artificial Sequence
  Description of Artificial Sequence: Synthetic oligonucleotide
gcucuggcaccuuaggcug

SEQ ID NO: 3056272 - RNA, 19 nt, Artificial Sequence
  Description of Artificial Sequence: Synthetic oligonucleotide
gcuguuucaccugaugcug

SEQ ID NO: 3056273 - RNA, 19 nt, Artificial Sequence
  Description of Artificial Sequence: Synthetic oligonucleotide
uuaggcugggcagggcucu

SEQ ID NO: 3056274 - RNA, 19 nt, Artificial Sequence
  Description of Artificial Sequence: Synthetic oligonucleotide
gugguggcuggcaaggcug

SEQ ID NO: 3056275 - RNA, 19 nt, Artificial Sequence
  Description of Artificial Sequence: Synthetic oligonucleotide
cagggauccuugguuuugg

SEQ ID NO: 3056276 - RNA, 19 nt, Artificial Sequence
  Description of Artificial Sequence: Synthetic oligonucleotide
gcgaccuuaggcugggcag

SEQ ID NO: 3056277 - RNA, 19 nt, Artificial Sequence
  Description of Artificial Sequence: Synthetic oligonucleotide
cagggcucaggcaccuuag

SEQ ID NO: 3056278 - RNA, 19 nt, Artificial Sequence
  Description of Artificial Sequence: Synthetic oligonucleotide
cucuggcaccuuaggcugg

SEQ ID NO: 3056279 - RNA, 19 nt, Artificial Sequence
  Description of Artificial Sequence: Synthetic oligonucleotide
aaccuugggguugcaggga

SEQ ID NO: 3056280 - RNA, 19 nt, Artificial Sequence
  Description of Artificial Sequence: Synthetic oligonucleotide
uuccuggggugguggcugg

SEQ ID NO: 3056281 - RNA, 19 nt, Artificial Sequence
  Description of Artificial Sequence: Synthetic oligonucleotide
ucuggcaccuuaggcuggc

SEQ ID NO: 3056282 - RNA, 19 nt, Artificial Sequence
  Description of Artificial Sequence: Synthetic oligonucleotide
gaugagcagacucucuguu

SEQ ID NO: 3056283 - RNA, 19 nt, Artificial Sequence
  Description of Artificial Sequence: Synthetic oligonucleotide
guuccuggggugguggcug

SEQ ID NO: 3056284 - RNA, 19 nt, Artificial Sequence
  Description of Artificial Sequence: Synthetic oligonucleotide
gcaccuuaggcuggcaggg

SEQ ID NO: 3056285 - RNA, 19 nt, Artificial Sequence
  Description of Artificial Sequence: Synthetic oligonucleotide
cuggcagggcucaggcacc

SEQ ID NO: 3056286 - RNA, 19 nt, Artificial Sequence
  Description of Artificial Sequence: Synthetic oligonucleotide
ugguggcuggcaaggcugu

SEQ ID NO: 3056287 - RNA, 19 nt, Artificial Sequence
  Description of Artificial Sequence: Synthetic oligonucleotide
ugguccuuaugugcagaga

SEQ ID NO: 3056288 - RNA, 19 nt, Artificial Sequence
  Description of Artificial Sequence: Synthetic oligonucleotide
ucaggcaccuuaggcuggc

SEQ ID NO: 3056289 - RNA, 19 nt, Artificial Sequence
  Description of Artificial Sequence: Synthetic oligonucleotide
guuucaccugaugcuguug

SEQ ID NO: 3056290 - RNA, 19 nt, Artificial Sequence
  Description of Artificial Sequence: Synthetic oligonucleotide
ugcuucugcuggugggaac

SEQ ID NO: 3056291 - RNA, 19 nt, Artificial Sequence
  Description of Artificial Sequence: Synthetic oligonucleotide
cagggcucuggcaccuuag

SEQ ID NO: 3056292 - RNA, 19 nt, Artificial Sequence
  Description of Artificial Sequence: Synthetic oligonucleotide
uucugcuggugggaacuca

SEQ ID NO: 3056293 - RNA, 19 nt, Artificial Sequence
  Description of Artificial Sequence: Synthetic oligonucleotide
uggcagggcuccaggcacc

SEQ ID NO: 3056294 - RNA, 19 nt, Artificial Sequence
  Description of Artificial Sequence: Synthetic oligonucleotide
accuugggguugcagggau

SEQ ID NO: 3056295 - RNA, 19 nt, Artificial Sequence
  Description of Artificial Sequence: Synthetic oligonucleotide
gcuggcagggcucuggcga

SEQ ID NO: 3056296 - RNA, 19 nt, Artificial Sequence
  Description of Artificial Sequence: Synthetic oligonucleotide
ugcagggauccuugguuuu

SEQ ID NO: 3056297 - RNA, 19 nt, Artificial Sequence
  Description of Artificial Sequence: Synthetic oligonucleotide
ggcucaggaaccuuggggu

SEQ ID NO: 3056298 - RNA, 19 nt, Artificial Sequence
  Description of Artificial Sequence: Synthetic oligonucleotide
ccuuaugugcagagaugag

SEQ ID NO: 3056299 - RNA, 19 nt, Artificial Sequence
  Description of Artificial Sequence: Synthetic oligonucleotide
cugcuggugggaacucaug

SEQ ID NO: 3056300 - RNA, 19 nt, Artificial Sequence
  Description of Artificial Sequence: Synthetic oligonucleotide
aggaaccuugggguugcag

SEQ ID NO: 3056301 - RNA, 19 nt, Artificial Sequence
  Description of Artificial Sequence: Synthetic oligonucleotide
ggcucuggcaccuuaggcu

SEQ ID NO: 3056302 - RNA, 19 nt, Artificial Sequence
  Description of Artificial Sequence: Synthetic oligonucleotide
gauagcacuugguccuuau

SEQ ID NO: 3056303 - RNA, 19 nt, Artificial Sequence
  Description of Artificial Sequence: Synthetic oligonucleotide
ggcaaggcuguuucaccug

SEQ ID NO: 3056304 - RNA, 19 nt, Artificial Sequence
  Description of Artificial Sequence: Synthetic oligonucleotide
cuggcagggcucuggcgac

SEQ ID NO: 3056305 - RNA, 19 nt, Artificial Sequence
  Description of Artificial Sequence: Synthetic oligonucleotide
accuuaggcugggcagggc

SEQ ID NO: 3056306 - RNA, 19 nt, Artificial Sequence
  Description of Artificial Sequence: Synthetic oligonucleotide
gggaacucauguuuagaua

SEQ ID NO: 3056307 - RNA, 19 nt, Artificial Sequence
  Description of Artificial Sequence: Synthetic oligonucleotide
gggcucuggcaccuuaggc

SEQ ID NO: 3056308 - RNA, 19 nt, Artificial Sequence
  Description of Artificial Sequence: Synthetic oligonucleotide
ugggguugcagggauccuu

SEQ ID NO: 3056309 - RNA, 19 nt, Artificial Sequence
  Description of Artificial Sequence: Synthetic oligonucleotide
ggcuguuucaccugaugcu

SEQ ID NO: 3056310 - RNA, 19 nt, Artificial Sequence
  Description of Artificial Sequence: Synthetic oligonucleotide
gugggaacucauguuuaga

SEQ ID NO: 3056311 - RNA, 19 nt, Artificial Sequence
  Description of Artificial Sequence: Synthetic oligonucleotide
gcuggcaaggcuguuucac

SEQ ID NO: 3056312 - RNA, 19 nt, Artificial Sequence
  Description of Artificial Sequence: Synthetic oligonucleotide
cuggcgaccuuaggcuggg

SEQ ID NO: 3056313 - RNA, 19 nt, Artificial Sequence
  Description of Artificial Sequence: Synthetic oligonucleotide
gcaaggcuguuucaccuga

SEQ ID NO: 3056314 - RNA, 19 nt, Artificial Sequence
  Description of Artificial Sequence: Synthetic oligonucleotide
cuugguccuuaugugcaga

SEQ ID NO: 3056315 - RNA, 19 nt, Artificial Sequence
  Description of Artificial Sequence: Synthetic oligonucleotide
ggguugcagggauccuugg

SEQ ID NO: 3056316 - RNA, 19 nt, Artificial Sequence
  Description of Artificial Sequence: Synthetic oligonucleotide
cuggugggaacucauguuu

SEQ ID NO: 3056317 - RNA, 19 nt, Artificial Sequence
  Description of Artificial Sequence: Synthetic oligonucleotide
cuuaggcuggcagggcuca

SEQ ID NO: 3056318 - RNA, 19 nt, Artificial Sequence
  Description of Artificial Sequence: Synthetic oligonucleotide
gcuccaggcaccuuaggcu

SEQ ID NO: 3056319 - RNA, 19 nt, Artificial Sequence
  Description of Artificial Sequence: Synthetic oligonucleotide
agggcucuggcgaccuuag

SEQ ID NO: 3056320 - RNA, 19 nt, Artificial Sequence
  Description of Artificial Sequence: Synthetic oligonucleotide
ggcgaccuuaggcugggca

SEQ ID NO: 3056321 - RNA, 19 nt, Artificial Sequence
  Description of Artificial Sequence: Synthetic oligonucleotide
agggcuccaggcaccuuag

SEQ ID NO: 3056322 - RNA, 19 nt, Artificial Sequence
  Description of Artificial Sequence: Synthetic oligonucleotide
gggguugcagggauccuug

SEQ ID NO: 3056323 - RNA, 19 nt, Artificial Sequence
  Description of Artificial Sequence: Synthetic oligonucleotide
uagauagcacuugguccuu

SEQ ID NO: 3056324 - RNA, 19 nt, Artificial Sequence
  Description of Artificial Sequence: Synthetic oligonucleotide
gcagggcucaggaaccuug

SEQ ID NO: 3056325 - RNA, 19 nt, Artificial Sequence
  Description of Artificial Sequence: Synthetic oligonucleotide
guggcagggcucaggcacc

SEQ ID NO: 3056326 - RNA, 19 nt, Artificial Sequence
  Description of Artificial Sequence: Synthetic oligonucleotide
cagugcagggcugcuucug

SEQ ID NO: 3056327 - RNA, 19 nt, Artificial Sequence
  Description of Artificial Sequence: Synthetic oligonucleotide
cuguuucaccugaugcugu

SEQ ID NO: 3056328 - RNA, 19 nt, Artificial Sequence
  Description of Artificial Sequence: Synthetic oligonucleotide
caccuuaggcuggcagggc

SEQ ID NO: 3056329 - RNA, 19 nt, Artificial Sequence
  Description of Artificial Sequence: Synthetic oligonucleotide
auccuugguuuuggggcca

SEQ ID NO: 3056330 - RNA, 19 nt, Artificial Sequence
  Description of Artificial Sequence: Synthetic oligonucleotide
acaggguuccugggguggu

SEQ ID NO: 3056331 - RNA, 19 nt, Artificial Sequence
  Description of Artificial Sequence: Synthetic oligonucleotide
uggggccacaggguuccug

SEQ ID NO: 3056332 - RNA, 19 nt, Artificial Sequence
  Description of Artificial Sequence: Synthetic oligonucleotide
gcuggcagggcuccaggca

SEQ ID NO: 3056333 - RNA, 19 nt, Artificial Sequence
  Description of Artificial Sequence: Synthetic oligonucleotide
gcagggauccuugguuuug

SEQ ID NO: 3056334 - RNA, 19 nt, Artificial Sequence
  Description of Artificial Sequence: Synthetic oligonucleotide
uuaggcuggcagggcucca

SEQ ID NO: 3056335 - RNA, 19 nt, Artificial Sequence
  Description of Artificial Sequence: Synthetic oligonucleotide
uccuugguuuuggggccac

SEQ ID NO: 3056336 - RNA, 19 nt, Artificial Sequence
  Description of Artificial Sequence: Synthetic oligonucleotide
uggcagggcucaggaaccu

SEQ ID NO: 3056337 - RNA, 19 nt, Artificial Sequence
  Description of Artificial Sequence: Synthetic oligonucleotide
cuucugcuggugggaacuc

SEQ ID NO: 3056338 - RNA, 19 nt, Artificial Sequence
  Description of Artificial Sequence: Synthetic oligonucleotide
ccuuaggcuggcagggcuc

SEQ ID NO: 3056339 - RNA, 19 nt, Artificial Sequence
  Description of Artificial Sequence: Synthetic oligonucleotide
uugggguugcagggauccu

SEQ ID NO: 3056340 - RNA, 19 nt, Artificial Sequence
  Description of Artificial Sequence: Synthetic oligonucleotide
uggcagggcucaggcaccu

SEQ ID NO: 3056341 - RNA, 19 nt, Artificial Sequence
  Description of Artificial Sequence: Synthetic oligonucleotide
uggcagggcucuggcgacc

SEQ ID NO: 3056342 - RNA, 19 nt, Artificial Sequence
  Description of Artificial Sequence: Synthetic oligonucleotide
agauagcacuugguccuua

SEQ ID NO: 3056343 - RNA, 19 nt, Artificial Sequence
  Description of Artificial Sequence: Synthetic oligonucleotide
ggcugggcagggcucuggc

SEQ ID NO: 3056344 - RNA, 19 nt, Artificial Sequence
  Description of Artificial Sequence: Synthetic oligonucleotide
gguugcagggauccuuggu

SEQ ID NO: 3056345 - RNA, 19 nt, Artificial Sequence
  Description of Artificial Sequence: Synthetic oligonucleotide
cgaccuuaggcugggcagg

SEQ ID NO: 3056346 - RNA, 19 nt, Artificial Sequence
  Description of Artificial Sequence: Synthetic oligonucleotide
ggugguggcuggcaaggcu

SEQ ID NO: 3056347 - RNA, 19 nt, Artificial Sequence
  Description of Artificial Sequence: Synthetic oligonucleotide
ggguuccuggggugguggc

SEQ ID NO: 3056348 - RNA, 19 nt, Artificial Sequence
  Description of Artificial Sequence: Synthetic oligonucleotide
uccuggggugguggcuggc

SEQ ID NO: 3056349 - RNA, 19 nt, Artificial Sequence
  Description of Artificial Sequence: Synthetic oligonucleotide
gccacaggguuccuggggu

SEQ ID NO: 3056350 - RNA, 19 nt, Artificial Sequence
  Description of Artificial Sequence: Synthetic oligonucleotide
gggcucuggcgaccuuagg

SEQ ID NO: 3056351 - RNA, 19 nt, Artificial Sequence
  Description of Artificial Sequence: Synthetic oligonucleotide
gggugcagugcagggcugc

SEQ ID NO: 3056352 - RNA, 19 nt, Artificial Sequence
  Description of Artificial Sequence: Synthetic oligonucleotide
caggguuccugggguggug

SEQ ID NO: 3056353 - RNA, 19 nt, Artificial Sequence
  Description of Artificial Sequence: Synthetic oligonucleotide
cuuaggcuggcagggcucu

SEQ ID NO: 3056354 - RNA, 19 nt, Artificial Sequence
  Description of Artificial Sequence: Synthetic oligonucleotide
cuggggugguggcuggcaa

SEQ ID NO: 3056355 - RNA, 19 nt, Artificial Sequence
  Description of Artificial Sequence: Synthetic oligonucleotide
gcagggcucaggcaccuua

SEQ ID NO: 3056356 - RNA, 19 nt, Artificial Sequence
  Description of Artificial Sequence: Synthetic oligonucleotide
gcuggugggaacucauguu

SEQ ID NO: 3056357 - RNA, 19 nt, Artificial Sequence
  Description of Artificial Sequence: Synthetic oligonucleotide
cugcuucugcuggugggaa

SEQ ID NO: 3056358 - RNA, 19 nt, Artificial Sequence
  Description of Artificial Sequence: Synthetic oligonucleotide
ggcuggcaaggcuguuuca

SEQ ID NO: 3056359 - RNA, 19 nt, Artificial Sequence
  Description of Artificial Sequence: Synthetic oligonucleotide
ccaggcaccuuaggcuggc

SEQ ID NO: 3056360 - RNA, 19 nt, Artificial Sequence
  Description of Artificial Sequence: Synthetic oligonucleotide
cagggcucuggcgaccuua

SEQ ID NO: 3056361 - RNA, 19 nt, Artificial Sequence
  Description of Artificial Sequence: Synthetic oligonucleotide
caaggcuguuucaccugau

SEQ ID NO: 3056362 - RNA, 19 nt, Artificial Sequence
  Description of Artificial Sequence: Synthetic oligonucleotide
ggcuggcagggcucaggca

SEQ ID NO: 3056363 - RNA, 19 nt, Artificial Sequence
  Description of Artificial Sequence: Synthetic oligonucleotide
gggugguggcuggcaaggc

SEQ ID NO: 3056364 - RNA, 19 nt, Artificial Sequence
  Description of Artificial Sequence: Synthetic oligonucleotide
uggcgaccuuaggcugggc

SEQ ID NO: 3056365 - RNA, 19 nt, Artificial Sequence
  Description of Artificial Sequence: Synthetic oligonucleotide
gugcagagaugagcagacu

SEQ ID NO: 3056366 - RNA, 19 nt, Artificial Sequence
  Description of Artificial Sequence: Synthetic oligonucleotide
cagggcugcuucugcuggu

SEQ ID NO: 3056367 - RNA, 19 nt, Artificial Sequence
  Description of Artificial Sequence: Synthetic oligonucleotide
gcagggcucuggcaccuua

SEQ ID NO: 3056368 - RNA, 19 nt, Artificial Sequence
  Description of Artificial Sequence: Synthetic oligonucleotide
uuggggccacaggguuccu

SEQ ID NO: 3056369 - RNA, 19 nt, Artificial Sequence
  Description of Artificial Sequence: Synthetic oligonucleotide
ggggugcagugcagggcug

SEQ ID NO: 3056370 - RNA, 19 nt, Artificial Sequence
  Description of Artificial Sequence: Synthetic oligonucleotide
gguuccuggggugguggcu

SEQ ID NO: 3056371 - RNA, 19 nt, Artificial Sequence
  Description of Artificial Sequence: Synthetic oligonucleotide
gcagugcagggcugcuucu

SEQ ID NO: 3056372 - RNA, 19 nt, Artificial Sequence
  Description of Artificial Sequence: Synthetic oligonucleotide
caggcaccuuaggcuggca

SEQ ID NO: 3056373 - RNA, 19 nt, Artificial Sequence
  Description of Artificial Sequence: Synthetic oligonucleotide
ggcagggcucuggcgaccu

SEQ ID NO: 3056374 - RNA, 19 nt, Artificial Sequence
  Description of Artificial Sequence: Synthetic oligonucleotide
ggcagggcuccaggcaccu

SEQ ID NO: 3056375 - RNA, 19 nt, Artificial Sequence
  Description of Artificial Sequence: Synthetic oligonucleotide
ccuugguuuuggggccaca

SEQ ID NO: 3056376 - RNA, 19 nt, Artificial Sequence
  Description of Artificial Sequence: Synthetic oligonucleotide
ggcagggcucaggaaccuu

SEQ ID NO: 3056377 - RNA, 19 nt, Artificial Sequence
  Description of Artificial Sequence: Synthetic oligonucleotide
gcagggcucuggcgaccuu

SEQ ID NO: 3056378 - RNA, 19 nt, Artificial Sequence
  Description of Artificial Sequence: Synthetic oligonucleotide
ggcagggcucaggcaccuu

SEQ ID NO: 3056379 - RNA, 19 nt, Artificial Sequence
  Description of Artificial Sequence: Synthetic oligonucleotide
ggcagggcucuggcaccuu

SEQ ID NO: 3056380 - RNA, 19 nt, Artificial Sequence
  Description of Artificial Sequence: Synthetic oligonucleotide
  modified_base (13)..(13): a, c, u, g, unknown or other
aaauaaauaaaanaaacac

SEQ ID NO: 3056381 - RNA, 19 nt, Artificial Sequence
  Description of Artificial Sequence: Synthetic oligonucleotide
  modified_base (9)..(9): a, c, u, g, unknown or other
aaauaaaanaaacacacug

SEQ ID NO: 3056382 - RNA, 19 nt, Artificial Sequence
  Description of Artificial Sequence: Synthetic oligonucleotide
uaaaauaaaauaaauaaaa

SEQ ID NO: 3056383 - RNA, 19 nt, Artificial Sequence
  Description of Artificial Sequence: Synthetic oligonucleotide
  modified_base (11)..(11): a, c, u, g, unknown or other
auaaauaaaanaaacacac

SEQ ID NO: 3056384 - RNA, 19 nt, Artificial Sequence
  Description of Artificial Sequence: Synthetic oligonucleotide
auagaaaugacccauucgg

SEQ ID NO: 3056385 - RNA, 19 nt, Artificial Sequence
  Description of Artificial Sequence: Synthetic oligonucleotide
  modified_base (7)..(7): a, c, u, g, unknown or other
auaaaanaaacacacugug

SEQ ID NO: 3056386 - RNA, 19 nt, Artificial Sequence
  Description of Artificial Sequence: Synthetic oligonucleotide
  modified_base (5)..(5): a, c, u, g, unknown or other
aaaanaaacacacuguguu

SEQ ID NO: 3056387 - RNA, 19 nt, Artificial Sequence
  Description of Artificial Sequence: Synthetic oligonucleotide
  modified_base (3)..(3): a, c, u, g, unknown or other
aanaaacacacuguguucg

SEQ ID NO: 3056388 - RNA, 19 nt, Artificial Sequence
  Description of Artificial Sequence: Synthetic oligonucleotide
  modified_base (4)..(4): a, c, u, g, unknown or other
aaanaaacacacuguguuc

SEQ ID NO: 3056389 - RNA, 19 nt, Artificial Sequence
  Description of Artificial Sequence: Synthetic oligonucleotide
aauagaaaugacccauucg

SEQ ID NO: 3056390 - RNA, 19 nt, Artificial Sequence
  Description of Artificial Sequence: Synthetic oligonucleotide
  modified_base (12)..(12): a, c, u, g, unknown or other
aauaaauaaaanaaacaca

SEQ ID NO: 3056391 - RNA, 19 nt, Artificial Sequence
  Description of Artificial Sequence: Synthetic oligonucleotide
aagacucuaggccauuacc

SEQ ID NO: 3056392 - RNA, 19 nt, Artificial Sequence
  Description of Artificial Sequence: Synthetic oligonucleotide
  modified_base (10)..(10): a, c, u, g, unknown or other
uaaauaaaanaaacacacu

SEQ ID NO: 3056393 - RNA, 19 nt, Artificial Sequence
  Description of Artificial Sequence: Synthetic oligonucleotide
  modified_base (8)..(8): a, c, u, g, unknown or other
aauaaaanaaacacacugu

SEQ ID NO: 3056394 - RNA, 19 nt, Artificial Sequence
  Description of Artificial Sequence: Synthetic oligonucleotide
aacaagguaugcaagacuc

SEQ ID NO: 3056395 - RNA, 19 nt, Artificial Sequence
  Description of Artificial Sequence: Synthetic oligonucleotide
gaugacacuucucacauug

SEQ ID NO: 3056396 - RNA, 19 nt, Artificial Sequence
  Description of Artificial Sequence: Synthetic oligonucleotide
  modified_base (19)..(19): a, c, u, g, unknown or other
aaaauaaaauaaauaaaan

SEQ ID NO: 3056397 - RNA, 19 nt, Artificial Sequence
  Description of Artificial Sequence: Synthetic oligonucleotide
  modified_base (6)..(6): a, c, u, g, unknown or other
uaaaanaaacacacugugu

SEQ ID NO: 3056398 - RNA, 19 nt, Artificial Sequence
  Description of Artificial Sequence: Synthetic oligonucleotide
gucagaauagaaaugaccc

SEQ ID NO: 3056399 - RNA, 19 nt, Artificial Sequence
  Description of Artificial Sequence: Synthetic oligonucleotide
uaugcaagacucuaggcca

SEQ ID NO: 3056400 - RNA, 19 nt, Artificial Sequence
  Description of Artificial Sequence: Synthetic oligonucleotide
cucacauuguccuagggug

SEQ ID NO: 3056401 - RNA, 19 nt, Artificial Sequence
  Description of Artificial Sequence: Synthetic oligonucleotide
guaugcaagacucuaggcc

SEQ ID NO: 3056402 - RNA, 19 nt, Artificial Sequence
  Description of Artificial Sequence: Synthetic oligonucleotide
gauugugcaggacuccugg

SEQ ID NO: 3056403 - RNA, 19 nt, Artificial Sequence
  Description of Artificial Sequence: Synthetic oligonucleotide
aacacacuguguucgaugu

SEQ ID NO: 3056404 - RNA, 19 nt, Artificial Sequence
  Description of Artificial Sequence: Synthetic oligonucleotide
aucucuggaggacagggac

SEQ ID NO: 3056405 - RNA, 19 nt, Artificial Sequence
  Description of Artificial Sequence: Synthetic oligonucleotide
aaacacacuguguucgaug

SEQ ID NO: 3056406 - RNA, 19 nt, Artificial Sequence
  Description of Artificial Sequence: Synthetic oligonucleotide
acacuugguacacuggcgg

SEQ ID NO: 3056407 - RNA, 19 nt, Artificial Sequence
  Description of Artificial Sequence: Synthetic oligonucleotide
agagcaaucagccacuuuu

SEQ ID NO: 3056408 - RNA, 19 nt, Artificial Sequence
  Description of Artificial Sequence: Synthetic oligonucleotide
agaaaugacccauucggca

SEQ ID NO: 3056409 - RNA, 19 nt, Artificial Sequence
  Description of Artificial Sequence: Synthetic oligonucleotide
agguaugcaagacucuagg

SEQ ID NO: 3056410 - RNA, 19 nt, Artificial Sequence
  Description of Artificial Sequence: Synthetic oligonucleotide
gaaaugacccauucggcac

SEQ ID NO: 3056411 - RNA, 19 nt, Artificial Sequence
  Description of Artificial Sequence: Synthetic oligonucleotide
uguggaguugcaucucugg

SEQ ID NO: 3056412 - RNA, 19 nt, Artificial Sequence
  Description of Artificial Sequence: Synthetic oligonucleotide
uagaaaugacccauucggc

SEQ ID NO: 3056413 - RNA, 19 nt, Artificial Sequence
  Description of Artificial Sequence: Synthetic oligonucleotide
acucuaggccauuaccagc

SEQ ID NO: 3056414 - RNA, 19 nt, Artificial Sequence
  Description of Artificial Sequence: Synthetic oligonucleotide
ugugaaugucccuggauga

SEQ ID NO: 3056415 - RNA, 19 nt, Artificial Sequence
  Description of Artificial Sequence: Synthetic oligonucleotide
ucagaauagaaaugaccca

SEQ ID NO: 3056416 - RNA, 19 nt, Artificial Sequence
  Description of Artificial Sequence: Synthetic oligonucleotide
uggaguugcaucucuggag

SEQ ID NO: 3056417 - RNA, 19 nt, Artificial Sequence
  Description of Artificial Sequence: Synthetic oligonucleotide
ucucacauuguccuagggu

SEQ ID NO: 3056418 - RNA, 19 nt, Artificial Sequence
  Description of Artificial Sequence: Synthetic oligonucleotide
  modified_base (2)..(2): a, c, u, g, unknown or other
anaaacacacuguguucga

SEQ ID NO: 3056419 - RNA, 19 nt, Artificial Sequence
  Description of Artificial Sequence: Synthetic oligonucleotide
cucuaggccauuaccagcc

SEQ ID NO: 3056420 - RNA, 19 nt, Artificial Sequence
  Description of Artificial Sequence: Synthetic oligonucleotide
uucggcacuggcauuuccg

SEQ ID NO: 3056421 - RNA, 19 nt, Artificial Sequence
  Description of Artificial Sequence: Synthetic oligonucleotide
uggaacaagguaugcaaga

SEQ ID NO: 3056422 - RNA, 19 nt, Artificial Sequence
  Description of Artificial Sequence: Synthetic oligonucleotide
gaauagaaaugacccauuc

SEQ ID NO: 3056423 - RNA, 19 nt, Artificial Sequence
  Description of Artificial Sequence: Synthetic oligonucleotide
uccuggacaaacucacccg

SEQ ID NO: 3056424 - RNA, 19 nt, Artificial Sequence
  Description of Artificial Sequence: Synthetic oligonucleotide
acacuucucacauuguccu

SEQ ID NO: 3056425 - RNA, 19 nt, Artificial Sequence
  Description of Artificial Sequence: Synthetic oligonucleotide
gacucuaggccauuaccag

SEQ ID NO: 3056426 - RNA, 19 nt, Artificial Sequence
  Description of Artificial Sequence: Synthetic oligonucleotide
uggcagagcaaucagccac

SEQ ID NO: 3056427 - RNA, 19 nt, Artificial Sequence
  Description of Artificial Sequence: Synthetic oligonucleotide
uuaccagccucugugaaug

SEQ ID NO: 3056428 - RNA, 19 nt, Artificial Sequence
  Description of Artificial Sequence: Synthetic oligonucleotide
aaaugacccauucggcacu

SEQ ID NO: 3056429 - RNA, 19 nt, Artificial Sequence
  Description of Artificial Sequence: Synthetic oligonucleotide
ugugcaggacuccuggaca

SEQ ID NO: 3056430 - RNA, 19 nt, Artificial Sequence
  Description of Artificial Sequence: Synthetic oligonucleotide
uggaugacacuucucacau

SEQ ID NO: 3056431 - RNA, 19 nt, Artificial Sequence
  Description of Artificial Sequence: Synthetic oligonucleotide
uucgauguggaguugcauc

SEQ ID NO: 3056432 - RNA, 19 nt, Artificial Sequence
  Description of Artificial Sequence: Synthetic oligonucleotide
ggaguugcaucucuggagg

SEQ ID NO: 3056433 - RNA, 19 nt, Artificial Sequence
  Description of Artificial Sequence: Synthetic oligonucleotide
ucgauguggaguugcaucu

SEQ ID NO: 3056434 - RNA, 19 nt, Artificial Sequence
  Description of Artificial Sequence: Synthetic oligonucleotide
aggacuccuggacaaacuc

SEQ ID NO: 3056435 - RNA, 19 nt, Artificial Sequence
  Description of Artificial Sequence: Synthetic oligonucleotide
cacacuguguucgaugugg

SEQ ID NO: 3056436 - RNA, 19 nt, Artificial Sequence
  Description of Artificial Sequence: Synthetic oligonucleotide
cugugaaugucccuggaug

SEQ ID NO: 3056437 - RNA, 19 nt, Artificial Sequence
  Description of Artificial Sequence: Synthetic oligonucleotide
gaacucacuggauccgggg

SEQ ID NO: 3056438 - RNA, 19 nt, Artificial Sequence
  Description of Artificial Sequence: Synthetic oligonucleotide
uuuuccuggucuuuuccac

SEQ ID NO: 3056439 - RNA, 19 nt, Artificial Sequence
  Description of Artificial Sequence: Synthetic oligonucleotide
ugacacuucucacauuguc

SEQ ID NO: 3056440 - RNA, 19 nt, Artificial Sequence
  Description of Artificial Sequence: Synthetic oligonucleotide
gaggacagggacucccugg

SEQ ID NO: 3056441 - RNA, 19 nt, Artificial Sequence
  Description of Artificial Sequence: Synthetic oligonucleotide
auuuccggucacugguggc

SEQ ID NO: 3056442 - RNA, 19 nt, Artificial Sequence
  Description of Artificial Sequence: Synthetic oligonucleotide
uaggccauuaccagccucu

SEQ ID NO: 3056443 - RNA, 19 nt, Artificial Sequence
  Description of Artificial Sequence: Synthetic oligonucleotide
uucucacauuguccuaggg

SEQ ID NO: 3056444 - RNA, 19 nt, Artificial Sequence
  Description of Artificial Sequence: Synthetic oligonucleotide
aacucacuggauccggggu

SEQ ID NO: 3056445 - RNA, 19 nt, Artificial Sequence
  Description of Artificial Sequence: Synthetic oligonucleotide
uuccuggucuuuuccacag

SEQ ID NO: 3056446 - RNA, 19 nt, Artificial Sequence
  Description of Artificial Sequence: Synthetic oligonucleotide
aaacucacccgcacuacag

SEQ ID NO: 3056447 - RNA, 19 nt, Artificial Sequence
  Description of Artificial Sequence: Synthetic oligonucleotide
acucacuggauccgggguc

SEQ ID NO: 3056448 - RNA, 19 nt, Artificial Sequence
  Description of Artificial Sequence: Synthetic oligonucleotide
aggacagggacucccuggg

SEQ ID NO: 3056449 - RNA, 19 nt, Artificial Sequence
  Description of Artificial Sequence: Synthetic oligonucleotide
acuucucacauuguccuag

SEQ ID NO: 3056450 - RNA, 19 nt, Artificial Sequence
  Description of Artificial Sequence: Synthetic oligonucleotide
acucccuggggacacuugg

SEQ ID NO: 3056451 - RNA, 19 nt, Artificial Sequence
  Description of Artificial Sequence: Synthetic oligonucleotide
ucggcacuggcauuuccgg

SEQ ID NO: 3056452 - RNA, 19 nt, Artificial Sequence
  Description of Artificial Sequence: Synthetic oligonucleotide
acuguguucgauguggagu

SEQ ID NO: 3056453 - RNA, 19 nt, Artificial Sequence
  Description of Artificial Sequence: Synthetic oligonucleotide
acagggacucccuggggac

SEQ ID NO: 3056454 - RNA, 19 nt, Artificial Sequence
  Description of Artificial Sequence: Synthetic oligonucleotide
aagguaugcaagacucuag

SEQ ID NO: 3056455 - RNA, 19 nt, Artificial Sequence
  Description of Artificial Sequence: Synthetic oligonucleotide
uugugcaggacuccuggac

SEQ ID NO: 3056456 - RNA, 19 nt, Artificial Sequence
  Description of Artificial Sequence: Synthetic oligonucleotide
cuggaacaagguaugcaag

SEQ ID NO: 3056457 - RNA, 19 nt, Artificial Sequence
  Description of Artificial Sequence: Synthetic oligonucleotide
ucuuuuccacagcuggaac

SEQ ID NO: 3056458 - RNA, 19 nt, Artificial Sequence
  Description of Artificial Sequence: Synthetic oligonucleotide
uuuuccacagcuggaacaa

SEQ ID NO: 3056459 - RNA, 19 nt, Artificial Sequence
  Description of Artificial Sequence: Synthetic oligonucleotide
uggacaaacucacccgcac

SEQ ID NO: 3056460 - RNA, 19 nt, Artificial Sequence
  Description of Artificial Sequence: Synthetic oligonucleotide
ucacauuguccuagggugu

SEQ ID NO: 3056461 - RNA, 19 nt, Artificial Sequence
  Description of Artificial Sequence: Synthetic oligonucleotide
ucacccgcacuacaguucu

SEQ ID NO: 3056462 - RNA, 19 nt, Artificial Sequence
  Description of Artificial Sequence: Synthetic oligonucleotide
uccggggucagaauagaaa

SEQ ID NO: 3056463 - RNA, 19 nt, Artificial Sequence
  Description of Artificial Sequence: Synthetic oligonucleotide
uuuccuggucuuuuccaca

SEQ ID NO: 3056464 - RNA, 19 nt, Artificial Sequence
  Description of Artificial Sequence: Synthetic oligonucleotide
aguugcaucucuggaggac

SEQ ID NO: 3056465 - RNA, 19 nt, Artificial Sequence
  Description of Artificial Sequence: Synthetic oligonucleotide
ggucagaauagaaaugacc

SEQ ID NO: 3056466 - RNA, 19 nt, Artificial Sequence
  Description of Artificial Sequence: Synthetic oligonucleotide
cauuuccggucacuggugg

SEQ ID NO: 3056467 - RNA, 19 nt, Artificial Sequence
  Description of Artificial Sequence: Synthetic oligonucleotide
auucggcacuggcauuucc

SEQ ID NO: 3056468 - RNA, 19 nt, Artificial Sequence
  Description of Artificial Sequence: Synthetic oligonucleotide
ggcagaacucacuggaucc

SEQ ID NO: 3056469 - RNA, 19 nt, Artificial Sequence
  Description of Artificial Sequence: Synthetic oligonucleotide
ugacccauucggcacuggc

SEQ ID NO: 3056470 - RNA, 19 nt, Artificial Sequence
  Description of Artificial Sequence: Synthetic oligonucleotide
aacucacccgcacuacagu

SEQ ID NO: 3056471 - RNA, 19 nt, Artificial Sequence
  Description of Artificial Sequence: Synthetic oligonucleotide
uacacuggcggcagaacuc

SEQ ID NO: 3056472 - RNA, 19 nt, Artificial Sequence
  Description of Artificial Sequence: Synthetic oligonucleotide
cuuuuccacagcuggaaca

SEQ ID NO: 3056473 - RNA, 19 nt, Artificial Sequence
  Description of Artificial Sequence: Synthetic oligonucleotide
ucugugaaugucccuggau

SEQ ID NO: 3056474 - RNA, 19 nt, Artificial Sequence
  Description of Artificial Sequence: Synthetic oligonucleotide
uggcauuuccggucacugg

SEQ ID NO: 3056475 - RNA, 19 nt, Artificial Sequence
  Description of Artificial Sequence: Synthetic oligonucleotide
uugcaucucuggaggacag

SEQ ID NO: 3056476 - RNA, 19 nt, Artificial Sequence
  Description of Artificial Sequence: Synthetic oligonucleotide
uguucgauguggaguugca

SEQ ID NO: 3056477 - RNA, 19 nt, Artificial Sequence
  Description of Artificial Sequence: Synthetic oligonucleotide
gccauuaccagccucugug

SEQ ID NO: 3056478 - RNA, 19 nt, Artificial Sequence
  Description of Artificial Sequence: Synthetic oligonucleotide
auuguccuagggugugggg

SEQ ID NO: 3056479 - RNA, 19 nt, Artificial Sequence
  Description of Artificial Sequence: Synthetic oligonucleotide
acaaacucacccgcacuac

SEQ ID NO: 3056480 - RNA, 19 nt, Artificial Sequence
  Description of Artificial Sequence: Synthetic oligonucleotide
gacuccuggacaaacucac

SEQ ID NO: 3056481 - RNA, 19 nt, Artificial Sequence
  Description of Artificial Sequence: Synthetic oligonucleotide
uggauccggggucagaaua

SEQ ID NO: 3056482 - RNA, 19 nt, Artificial Sequence
  Description of Artificial Sequence: Synthetic oligonucleotide
cuucucacauuguccuagg

SEQ ID NO: 3056483 - RNA, 19 nt, Artificial Sequence
  Description of Artificial Sequence: Synthetic oligonucleotide
cuggaugacacuucucaca

SEQ ID NO: 3056484 - RNA, 19 nt, Artificial Sequence
  Description of Artificial Sequence: Synthetic oligonucleotide
gguaugcaagacucuaggc

SEQ ID NO: 3056485 - RNA, 19 nt, Artificial Sequence
  Description of Artificial Sequence: Synthetic oligonucleotide
auuaccagccucugugaau

SEQ ID NO: 3056486 - RNA, 19 nt, Artificial Sequence
  Description of Artificial Sequence: Synthetic oligonucleotide
gacaaacucacccgcacua

SEQ ID NO: 3056487 - RNA, 19 nt, Artificial Sequence
  Description of Artificial Sequence: Synthetic oligonucleotide
gguggcagagcaaucagcc

SEQ ID NO: 3056488 - RNA, 19 nt, Artificial Sequence
  Description of Artificial Sequence: Synthetic oligonucleotide
gaaugucccuggaugacac

SEQ ID NO: 3056489 - RNA, 19 nt, Artificial Sequence
  Description of Artificial Sequence: Synthetic oligonucleotide
uuuccggucacugguggca

SEQ ID NO: 3056490 - RNA, 19 nt, Artificial Sequence
  Description of Artificial Sequence: Synthetic oligonucleotide
ggacacuugguacacuggc

SEQ ID NO: 3056491 - RNA, 19 nt, Artificial Sequence
  Description of Artificial Sequence: Synthetic oligonucleotide
gacagggacucccugggga

SEQ ID NO: 3056492 - RNA, 19 nt, Artificial Sequence
  Description of Artificial Sequence: Synthetic oligonucleotide
acugguggcagagcaauca

SEQ ID NO: 3056493 - RNA, 19 nt, Artificial Sequence
  Description of Artificial Sequence: Synthetic oligonucleotide
acccauucggcacuggcau

SEQ ID NO: 3056494 - RNA, 19 nt, Artificial Sequence
  Description of Artificial Sequence: Synthetic oligonucleotide
acuacaguucuugcagcag

SEQ ID NO: 3056495 - RNA, 19 nt, Artificial Sequence
  Description of Artificial Sequence: Synthetic oligonucleotide
cauuguccuaggguguggg

SEQ ID NO: 3056496 - RNA, 19 nt, Artificial Sequence
  Description of Artificial Sequence: Synthetic oligonucleotide
cuggcggcagaacucacug

SEQ ID NO: 3056497 - RNA, 19 nt, Artificial Sequence
  Description of Artificial Sequence: Synthetic oligonucleotide
gaacaagguaugcaagacu

SEQ ID NO: 3056498 - RNA, 19 nt, Artificial Sequence
  Description of Artificial Sequence: Synthetic oligonucleotide
aaugucccuggaugacacu

SEQ ID NO: 3056499 - RNA, 19 nt, Artificial Sequence
  Description of Artificial Sequence: Synthetic oligonucleotide
cacuugguacacuggcggc

SEQ ID NO: 3056500 - RNA, 19 nt, Artificial Sequence
  Description of Artificial Sequence: Synthetic oligonucleotide
aaugacccauucggcacug

SEQ ID NO: 3056501 - RNA, 19 nt, Artificial Sequence
  Description of Artificial Sequence: Synthetic oligonucleotide
caagacucuaggccauuac

SEQ ID NO: 3056502 - RNA, 19 nt, Artificial Sequence
  Description of Artificial Sequence: Synthetic oligonucleotide
ucacugguggcagagcaau

SEQ ID NO: 3056503 - RNA, 19 nt, Artificial Sequence
  Description of Artificial Sequence: Synthetic oligonucleotide
cuugguacacuggcggcag

SEQ ID NO: 3056504 - RNA, 19 nt, Artificial Sequence
  Description of Artificial Sequence: Synthetic oligonucleotide
agaacucacuggauccggg

SEQ ID NO: 3056505 - RNA, 19 nt, Artificial Sequence
  Description of Artificial Sequence: Synthetic oligonucleotide
cagccucugugaauguccc

SEQ ID NO: 3056506 - RNA, 19 nt, Artificial Sequence
  Description of Artificial Sequence: Synthetic oligonucleotide
ggggucagaauagaaauga

SEQ ID NO: 3056507 - RNA, 19 nt, Artificial Sequence
  Description of Artificial Sequence: Synthetic oligonucleotide
gcuggaacaagguaugcaa

SEQ ID NO: 3056508 - RNA, 19 nt, Artificial Sequence
  Description of Artificial Sequence: Synthetic oligonucleotide
gcaucucuggaggacaggg

SEQ ID NO: 3056509 - RNA, 19 nt, Artificial Sequence
  Description of Artificial Sequence: Synthetic oligonucleotide
cagaacucacuggauccgg

SEQ ID NO: 3056510 - RNA, 19 nt, Artificial Sequence
  Description of Artificial Sequence: Synthetic oligonucleotide
ugucccuggaugacacuuc

SEQ ID NO: 3056511 - RNA, 19 nt, Artificial Sequence
  Description of Artificial Sequence: Synthetic oligonucleotide
cugguggcagagcaaucag

SEQ ID NO: 3056512 - RNA, 19 nt, Artificial Sequence
  Description of Artificial Sequence: Synthetic oligonucleotide
cuggucuuuuccacagcug

SEQ ID NO: 3056513 - RNA, 19 nt, Artificial Sequence
  Description of Artificial Sequence: Synthetic oligonucleotide
acuccuggacaaacucacc

SEQ ID NO: 3056514 - RNA, 19 nt, Artificial Sequence
  Description of Artificial Sequence: Synthetic oligonucleotide
uggcggcagaacucacugg

SEQ ID NO: 3056515 - RNA, 19 nt, Artificial Sequence
  Description of Artificial Sequence: Synthetic oligonucleotide
ggggacacuugguacacug

SEQ ID NO: 3056516 - RNA, 19 nt, Artificial Sequence
  Description of Artificial Sequence: Synthetic oligonucleotide
auugugcaggacuccugga

SEQ ID NO: 3056517 - RNA, 19 nt, Artificial Sequence
  Description of Artificial Sequence: Synthetic oligonucleotide
acuugguacacuggcggca

SEQ ID NO: 3056518 - RNA, 19 nt, Artificial Sequence
  Description of Artificial Sequence: Synthetic oligonucleotide
agcuggaacaagguaugca

SEQ ID NO: 3056519 - RNA, 19 nt, Artificial Sequence
  Description of Artificial Sequence: Synthetic oligonucleotide
guggaguugcaucucugga

SEQ ID NO: 3056520 - RNA, 19 nt, Artificial Sequence
  Description of Artificial Sequence: Synthetic oligonucleotide
cacuguguucgauguggag

SEQ ID NO: 3056521 - RNA, 19 nt, Artificial Sequence
  Description of Artificial Sequence: Synthetic oligonucleotide
cuggaggacagggacuccc

SEQ ID NO: 3056522 - RNA, 19 nt, Artificial Sequence
  Description of Artificial Sequence: Synthetic oligonucleotide
cucacccgcacuacaguuc

SEQ ID NO: 3056523 - RNA, 19 nt, Artificial Sequence
  Description of Artificial Sequence: Synthetic oligonucleotide
gauguggaguugcaucucu

SEQ ID NO: 3056524 - RNA, 19 nt, Artificial Sequence
  Description of Artificial Sequence: Synthetic oligonucleotide
cacuacaguucuugcagca

SEQ ID NO: 3056525 - RNA, 19 nt, Artificial Sequence
  Description of Artificial Sequence: Synthetic oligonucleotide
guugcaucucuggaggaca

SEQ ID NO: 3056526 - RNA, 19 nt, Artificial Sequence
  Description of Artificial Sequence: Synthetic oligonucleotide
uggaggacagggacucccu

SEQ ID NO: 3056527 - RNA, 19 nt, Artificial Sequence
  Description of Artificial Sequence: Synthetic oligonucleotide
ucuaggccauuaccagccu

SEQ ID NO: 3056528 - RNA, 19 nt, Artificial Sequence
  Description of Artificial Sequence: Synthetic oligonucleotide
ccagccucugugaaugucc

SEQ ID NO: 3056529 - RNA, 19 nt, Artificial Sequence
  Description of Artificial Sequence: Synthetic oligonucleotide
guguucgauguggaguugc

SEQ ID NO: 3056530 - RNA, 19 nt, Artificial Sequence
  Description of Artificial Sequence: Synthetic oligonucleotide
ugcaucucuggaggacagg

SEQ ID NO: 3056531 - RNA, 19 nt, Artificial Sequence
  Description of Artificial Sequence: Synthetic oligonucleotide
cucuggaggacagggacuc

SEQ ID NO: 3056532 - RNA, 19 nt, Artificial Sequence
  Description of Artificial Sequence: Synthetic oligonucleotide
cuggcauuuccggucacug

SEQ ID NO: 3056533 - RNA, 19 nt, Artificial Sequence
  Description of Artificial Sequence: Synthetic oligonucleotide
uuuccacagcuggaacaag

SEQ ID NO: 3056534 - RNA, 19 nt, Artificial Sequence
  Description of Artificial Sequence: Synthetic oligonucleotide
acucacccgcacuacaguu

SEQ ID NO: 3056535 - RNA, 19 nt, Artificial Sequence
  Description of Artificial Sequence: Synthetic oligonucleotide
acauuguccuagggugugg

SEQ ID NO: 3056536 - RNA, 19 nt, Artificial Sequence
  Description of Artificial Sequence: Synthetic oligonucleotide
acuggauccggggucagaa

SEQ ID NO: 3056537 - RNA, 19 nt, Artificial Sequence
  Description of Artificial Sequence: Synthetic oligonucleotide
ucccuggggacacuuggua

SEQ ID NO: 3056538 - RNA, 19 nt, Artificial Sequence
  Description of Artificial Sequence: Synthetic oligonucleotide
ccuggacaaacucacccgc

SEQ ID NO: 3056539 - RNA, 19 nt, Artificial Sequence
  Description of Artificial Sequence: Synthetic oligonucleotide
cacauuguccuagggugug

SEQ ID NO: 3056540 - RNA, 19 nt, Artificial Sequence
  Description of Artificial Sequence: Synthetic oligonucleotide
acacacuguguucgaugug

SEQ ID NO: 3056541 - RNA, 19 nt, Artificial Sequence
  Description of Artificial Sequence: Synthetic oligonucleotide
agaauagaaaugacccauu

SEQ ID NO: 3056542 - RNA, 19 nt, Artificial Sequence
  Description of Artificial Sequence: Synthetic oligonucleotide
caaacucacccgcacuaca

SEQ ID NO: 3056543 - RNA, 19 nt, Artificial Sequence
  Description of Artificial Sequence: Synthetic oligonucleotide
agggacucccuggggacac

SEQ ID NO: 3056544 - RNA, 19 nt, Artificial Sequence
  Description of Artificial Sequence: Synthetic oligonucleotide
ggcacuggcauuuccgguc

SEQ ID NO: 3056545 - RNA, 19 nt, Artificial Sequence
  Description of Artificial Sequence: Synthetic oligonucleotide
ggcggcagaacucacugga

SEQ ID NO: 3056546 - RNA, 19 nt, Artificial Sequence
  Description of Artificial Sequence: Synthetic oligonucleotide
ggucacugguggcagagca

SEQ ID NO: 3056547 - RNA, 19 nt, Artificial Sequence
  Description of Artificial Sequence: Synthetic oligonucleotide
acccgcacuacaguucuug

SEQ ID NO: 3056548 - RNA, 19 nt, Artificial Sequence
  Description of Artificial Sequence: Synthetic oligonucleotide
accagccucugugaauguc

SEQ ID NO: 3056549 - RNA, 19 nt, Artificial Sequence
  Description of Artificial Sequence: Synthetic oligonucleotide
gaguugcaucucuggagga

SEQ ID NO: 3056550 - RNA, 19 nt, Artificial Sequence
  Description of Artificial Sequence: Synthetic oligonucleotide
acaagguaugcaagacucu

SEQ ID NO: 3056551 - RNA, 19 nt, Artificial Sequence
  Description of Artificial Sequence: Synthetic oligonucleotide
cuaggccauuaccagccuc

SEQ ID NO: 3056552 - RNA, 19 nt, Artificial Sequence
  Description of Artificial Sequence: Synthetic oligonucleotide
acacuggcggcagaacuca

SEQ ID NO: 3056553 - RNA, 19 nt, Artificial Sequence
  Description of Artificial Sequence: Synthetic oligonucleotide
gacccauucggcacuggca

SEQ ID NO: 3056554 - RNA, 19 nt, Artificial Sequence
  Description of Artificial Sequence: Synthetic oligonucleotide
uuccggucacugguggcag

SEQ ID NO: 3056555 - RNA, 19 nt, Artificial Sequence
  Description of Artificial Sequence: Synthetic oligonucleotide
guacacuggcggcagaacu

SEQ ID NO: 3056556 - RNA, 19 nt, Artificial Sequence
  Description of Artificial Sequence: Synthetic oligonucleotide
uguguucgauguggaguug

SEQ ID NO: 3056557 - RNA, 19 nt, Artificial Sequence
  Description of Artificial Sequence: Synthetic oligonucleotide
gcagaacucacuggauccg

SEQ ID NO: 3056558 - RNA, 19 nt, Artificial Sequence
  Description of Artificial Sequence: Synthetic oligonucleotide
caagguaugcaagacucua

SEQ ID NO: 3056559 - RNA, 19 nt, Artificial Sequence
  Description of Artificial Sequence: Synthetic oligonucleotide
ugguacacuggcggcagaa

SEQ ID NO: 3056560 - RNA, 19 nt, Artificial Sequence
  Description of Artificial Sequence: Synthetic oligonucleotide
ggauccggggucagaauag

SEQ ID NO: 3056561 - RNA, 19 nt, Artificial Sequence
  Description of Artificial Sequence: Synthetic oligonucleotide
cuggacaaacucacccgca

SEQ ID NO: 3056562 - RNA, 19 nt, Artificial Sequence
  Description of Artificial Sequence: Synthetic oligonucleotide
gccucugugaaugucccug

SEQ ID NO: 3056563 - RNA, 19 nt, Artificial Sequence
  Description of Artificial Sequence: Synthetic oligonucleotide
cauuaccagccucugugaa

SEQ ID NO: 3056564 - RNA, 19 nt, Artificial Sequence
  Description of Artificial Sequence: Synthetic oligonucleotide
ggcauuuccggucacuggu

SEQ ID NO: 3056565 - RNA, 19 nt, Artificial Sequence
  Description of Artificial Sequence: Synthetic oligonucleotide
ccucugugaaugucccugg

SEQ ID NO: 3056566 - RNA, 19 nt, Artificial Sequence
  Description of Artificial Sequence: Synthetic oligonucleotide
uugguacacuggcggcaga

SEQ ID NO: 3056567 - RNA, 19 nt, Artificial Sequence
  Description of Artificial Sequence: Synthetic oligonucleotide
ccuggaugacacuucucac

SEQ ID NO: 3056568 - RNA, 19 nt, Artificial Sequence
  Description of Artificial Sequence: Synthetic oligonucleotide
guggcagagcaaucagcca

SEQ ID NO: 3056569 - RNA, 19 nt, Artificial Sequence
  Description of Artificial Sequence: Synthetic oligonucleotide
caucucuggaggacaggga

SEQ ID NO: 3056570 - RNA, 19 nt, Artificial Sequence
  Description of Artificial Sequence: Synthetic oligonucleotide
cuggggacacuugguacac

SEQ ID NO: 3056571 - RNA, 19 nt, Artificial Sequence
  Description of Artificial Sequence: Synthetic oligonucleotide
gauccggggucagaauaga

SEQ ID NO: 3056572 - RNA, 19 nt, Artificial Sequence
  Description of Artificial Sequence: Synthetic oligonucleotide
acuggcauuuccggucacu

SEQ ID NO: 3056573 - RNA, 19 nt, Artificial Sequence
  Description of Artificial Sequence: Synthetic oligonucleotide
cccuggaugacacuucuca

SEQ ID NO: 3056574 - RNA, 19 nt, Artificial Sequence
  Description of Artificial Sequence: Synthetic oligonucleotide
gugcaggacuccuggacaa

SEQ ID NO: 3056575 - RNA, 19 nt, Artificial Sequence
  Description of Artificial Sequence: Synthetic oligonucleotide
auguggaguugcaucucug

SEQ ID NO: 3056576 - RNA, 19 nt, Artificial Sequence
  Description of Artificial Sequence: Synthetic oligonucleotide
cuguguucgauguggaguu

SEQ ID NO: 3056577 - RNA, 19 nt, Artificial Sequence
  Description of Artificial Sequence: Synthetic oligonucleotide
gggacacuugguacacugg

SEQ ID NO: 3056578 - RNA, 19 nt, Artificial Sequence
  Description of Artificial Sequence: Synthetic oligonucleotide
ucccuggaugacacuucuc

SEQ ID NO: 3056579 - RNA, 19 nt, Artificial Sequence
  Description of Artificial Sequence: Synthetic oligonucleotide
cucacuggauccgggguca

SEQ ID NO: 3056580 - RNA, 19 nt, Artificial Sequence
  Description of Artificial Sequence: Synthetic oligonucleotide
acuggcggcagaacucacu

SEQ ID NO: 3056581 - RNA, 19 nt, Artificial Sequence
  Description of Artificial Sequence: Synthetic oligonucleotide
augacacuucucacauugu

SEQ ID NO: 3056582 - RNA, 19 nt, Artificial Sequence
  Description of Artificial Sequence: Synthetic oligonucleotide
acacuguguucgaugugga

SEQ ID NO: 3056583 - RNA, 19 nt, Artificial Sequence
  Description of Artificial Sequence: Synthetic oligonucleotide
ggaggacagggacucccug

SEQ ID NO: 3056584 - RNA, 19 nt, Artificial Sequence
  Description of Artificial Sequence: Synthetic oligonucleotide
uaccagccucugugaaugu

SEQ ID NO: 3056585 - RNA, 19 nt, Artificial Sequence
  Description of Artificial Sequence: Synthetic oligonucleotide
agccucugugaaugucccu

SEQ ID NO: 3056586 - RNA, 19 nt, Artificial Sequence
  Description of Artificial Sequence: Synthetic oligonucleotide
cucugugaaugucccugga

SEQ ID NO: 3056587 - RNA, 19 nt, Artificial Sequence
  Description of Artificial Sequence: Synthetic oligonucleotide
cacugguggcagagcaauc

SEQ ID NO: 3056588 - RNA, 19 nt, Artificial Sequence
  Description of Artificial Sequence: Synthetic oligonucleotide
gggucagaauagaaaugac

SEQ ID NO: 3056589 - RNA, 19 nt, Artificial Sequence
  Description of Artificial Sequence: Synthetic oligonucleotide
uccggucacugguggcaga

SEQ ID NO: 3056590 - RNA, 19 nt, Artificial Sequence
  Description of Artificial Sequence: Synthetic oligonucleotide
ggauugugcaggacuccug

SEQ ID NO: 3056591 - RNA, 19 nt, Artificial Sequence
  Description of Artificial Sequence: Synthetic oligonucleotide
ucacuggauccggggucag

SEQ ID NO: 3056592 - RNA, 19 nt, Artificial Sequence
  Description of Artificial Sequence: Synthetic oligonucleotide
gacucccuggggacacuug

SEQ ID NO: 3056593 - RNA, 19 nt, Artificial Sequence
  Description of Artificial Sequence: Synthetic oligonucleotide
ggacuccuggacaaacuca

SEQ ID NO: 3056594 - RNA, 19 nt, Artificial Sequence
  Description of Artificial Sequence: Synthetic oligonucleotide
ugcaggacuccuggacaaa

SEQ ID NO: 3056595 - RNA, 19 nt, Artificial Sequence
  Description of Artificial Sequence: Synthetic oligonucleotide
cccuggggacacuugguac

SEQ ID NO: 3056596 - RNA, 19 nt, Artificial Sequence
  Description of Artificial Sequence: Synthetic oligonucleotide
augacccauucggcacugg

SEQ ID NO: 3056597 - RNA, 19 nt, Artificial Sequence
  Description of Artificial Sequence: Synthetic oligonucleotide
gucccuggaugacacuucu

SEQ ID NO: 3056598 - RNA, 19 nt, Artificial Sequence
  Description of Artificial Sequence: Synthetic oligonucleotide
augcaagacucuaggccau

SEQ ID NO: 3056599 - RNA, 19 nt, Artificial Sequence
  Description of Artificial Sequence: Synthetic oligonucleotide
cccgcacuacaguucuugc

SEQ ID NO: 3056600 - RNA, 19 nt, Artificial Sequence
  Description of Artificial Sequence: Synthetic oligonucleotide
gcaggacuccuggacaaac

SEQ ID NO: 3056601 - RNA, 19 nt, Artificial Sequence
  Description of Artificial Sequence: Synthetic oligonucleotide
gcacuggcauuuccgguca

SEQ ID NO: 3056602 - RNA, 19 nt, Artificial Sequence
  Description of Artificial Sequence: Synthetic oligonucleotide
ugcaagacucuaggccauu

SEQ ID NO: 3056603 - RNA, 19 nt, Artificial Sequence
  Description of Artificial Sequence: Synthetic oligonucleotide
gguacacuggcggcagaac

SEQ ID NO: 3056604 - RNA, 19 nt, Artificial Sequence
  Description of Artificial Sequence: Synthetic oligonucleotide
ggggauugugcaggacucc

SEQ ID NO: 3056605 - RNA, 19 nt, Artificial Sequence
  Description of Artificial Sequence: Synthetic oligonucleotide
cacuggcggcagaacucac

SEQ ID NO: 3056606 - RNA, 19 nt, Artificial Sequence
  Description of Artificial Sequence: Synthetic oligonucleotide
cggggucagaauagaaaug

SEQ ID NO: 3056607 - RNA, 19 nt, Artificial Sequence
  Description of Artificial Sequence: Synthetic oligonucleotide
cauucggcacuggcauuuc

SEQ ID NO: 3056608 - RNA, 19 nt, Artificial Sequence
  Description of Artificial Sequence: Synthetic oligonucleotide
uggggacacuugguacacu

SEQ ID NO: 3056609 - RNA, 19 nt, Artificial Sequence
  Description of Artificial Sequence: Synthetic oligonucleotide
ccauuaccagccucuguga

SEQ ID NO: 3056610 - RNA, 19 nt, Artificial Sequence
  Description of Artificial Sequence: Synthetic oligonucleotide
ggacaaacucacccgcacu

SEQ ID NO: 3056611 - RNA, 19 nt, Artificial Sequence
  Description of Artificial Sequence: Synthetic oligonucleotide
caggacuccuggacaaacu

SEQ ID NO: 3056612 - RNA, 19 nt, Artificial Sequence
  Description of Artificial Sequence: Synthetic oligonucleotide
cacuucucacauuguccua

SEQ ID NO: 3056613 - RNA, 19 nt, Artificial Sequence
  Description of Artificial Sequence: Synthetic oligonucleotide
auccggggucagaauagaa

SEQ ID NO: 3056614 - RNA, 19 nt, Artificial Sequence
  Description of Artificial Sequence: Synthetic oligonucleotide
gucacugguggcagagcaa

SEQ ID NO: 3056615 - RNA, 19 nt, Artificial Sequence
  Description of Artificial Sequence: Synthetic oligonucleotide
ccggggucagaauagaaau

SEQ ID NO: 3056616 - RNA, 19 nt, Artificial Sequence
  Description of Artificial Sequence: Synthetic oligonucleotide
cacuggcauuuccggucac

SEQ ID NO: 3056617 - RNA, 19 nt, Artificial Sequence
  Description of Artificial Sequence: Synthetic oligonucleotide
cggcagaacucacuggauc

SEQ ID NO: 3056618 - RNA, 19 nt, Artificial Sequence
  Description of Artificial Sequence: Synthetic oligonucleotide
ccuggucuuuuccacagcu

SEQ ID NO: 3056619 - RNA, 19 nt, Artificial Sequence
  Description of Artificial Sequence: Synthetic oligonucleotide
ccgcacuacaguucuugca

SEQ ID NO: 3056620 - RNA, 19 nt, Artificial Sequence
  Description of Artificial Sequence: Synthetic oligonucleotide
ccggucacugguggcagag

SEQ ID NO: 3056621 - RNA, 19 nt, Artificial Sequence
  Description of Artificial Sequence: Synthetic oligonucleotide
guucgauguggaguugcau

SEQ ID NO: 3056622 - RNA, 19 nt, Artificial Sequence
  Description of Artificial Sequence: Synthetic oligonucleotide
gggauugugcaggacuccu

SEQ ID NO: 3056623 - RNA, 19 nt, Artificial Sequence
  Description of Artificial Sequence: Synthetic oligonucleotide
cucccuggggacacuuggu

SEQ ID NO: 3056624 - RNA, 19 nt, Artificial Sequence
  Description of Artificial Sequence: Synthetic oligonucleotide
ggcagagcaaucagccacu

SEQ ID NO: 3056625 - RNA, 19 nt, Artificial Sequence
  Description of Artificial Sequence: Synthetic oligonucleotide
cagggacucccuggggaca

SEQ ID NO: 3056626 - RNA, 19 nt, Artificial Sequence
  Description of Artificial Sequence: Synthetic oligonucleotide
gcaagacucuaggccauua

SEQ ID NO: 3056627 - RNA, 19 nt, Artificial Sequence
  Description of Artificial Sequence: Synthetic oligonucleotide
ccacagcuggaacaaggua

SEQ ID NO: 3056628 - RNA, 19 nt, Artificial Sequence
  Description of Artificial Sequence: Synthetic oligonucleotide
cuggauccggggucagaau

SEQ ID NO: 3056629 - RNA, 19 nt, Artificial Sequence
  Description of Artificial Sequence: Synthetic oligonucleotide
ggccauuaccagccucugu

SEQ ID NO: 3056630 - RNA, 19 nt, Artificial Sequence
  Description of Artificial Sequence: Synthetic oligonucleotide
cagagcaaucagccacuuu

SEQ ID NO: 3056631 - RNA, 19 nt, Artificial Sequence
  Description of Artificial Sequence: Synthetic oligonucleotide
ggaugacacuucucacauu

SEQ ID NO: 3056632 - RNA, 19 nt, Artificial Sequence
  Description of Artificial Sequence: Synthetic oligonucleotide
ccauucggcacuggcauuu

SEQ ID NO: 3056633 - RNA, 19 nt, Artificial Sequence
  Description of Artificial Sequence: Synthetic oligonucleotide
gcggcagaacucacuggau

SEQ ID NO: 3056634 - RNA, 19 nt, Artificial Sequence
  Description of Artificial Sequence: Synthetic oligonucleotide
gcagagcaaucagccacuu

SEQ ID NO: 3056635 - RNA, 19 nt, Artificial Sequence
  Description of Artificial Sequence: Synthetic oligonucleotide
ggacucccuggggacacuu

SEQ ID NO: 3056636 - RNA, 19 nt, Artificial Sequence
  Description of Artificial Sequence: Synthetic oligonucleotide
cggcacuggcauuuccggu

SEQ ID NO: 3056637 - RNA, 19 nt, Artificial Sequence
  Description of Artificial Sequence: Synthetic oligonucleotide
cacccgcacuacaguucuu

SEQ ID NO: 3056638 - RNA, 19 nt, Artificial Sequence
  Description of Artificial Sequence: Synthetic oligonucleotide
cccauucggcacuggcauu

SEQ ID NO: 3056639 - RNA, 19 nt, Artificial Sequence
  Description of Artificial Sequence: Synthetic oligonucleotide
  modified_base (1)..(1): a, c, u, g, unknown or other
naaacacacuguguucgau

SEQ ID NO: 3056640 - RNA, 19 nt, Artificial Sequence
  Description of Artificial Sequence: Synthetic oligonucleotide
agcgucaucaaucaaaucc

SEQ ID NO: 3056641 - RNA, 19 nt, Artificial Sequence
  Description of Artificial Sequence: Synthetic oligonucleotide
ucaaucaaauccaagaucc

SEQ ID NO: 3056642 - RNA, 19 nt, Artificial Sequence
  Description of Artificial Sequence: Synthetic oligonucleotide
aagaucugaauucggagac

SEQ ID NO: 3056643 - RNA, 19 nt, Artificial Sequence
  Description of Artificial Sequence: Synthetic oligonucleotide
ugauuuauuaugcaaagau

SEQ ID NO: 3056644 - RNA, 19 nt, Artificial Sequence
  Description of Artificial Sequence: Synthetic oligonucleotide
ucaucaaucaaauccaaga

SEQ ID NO: 3056645 - RNA, 19 nt, Artificial Sequence
  Description of Artificial Sequence: Synthetic oligonucleotide
uuugaaaacuccauccaag

SEQ ID NO: 3056646 - RNA, 19 nt, Artificial Sequence
  Description of Artificial Sequence: Synthetic oligonucleotide
auuuauuaugcaaagaucu

SEQ ID NO: 3056647 - RNA, 19 nt, Artificial Sequence
  Description of Artificial Sequence: Synthetic oligonucleotide
aaagaucugaauucggaga

SEQ ID NO: 3056648 - RNA, 19 nt, Artificial Sequence
  Description of Artificial Sequence: Synthetic oligonucleotide
agacagagaagaaacaugc

SEQ ID NO: 3056649 - RNA, 19 nt, Artificial Sequence
  Description of Artificial Sequence: Synthetic oligonucleotide
aauucggagacagagaaga

SEQ ID NO: 3056650 - RNA, 19 nt, Artificial Sequence
  Description of Artificial Sequence: Synthetic oligonucleotide
ugggauugcaacauccucg

SEQ ID NO: 3056651 - RNA, 19 nt, Artificial Sequence
  Description of Artificial Sequence: Synthetic oligonucleotide
agaagaaacaugcuuuauc

SEQ ID NO: 3056652 - RNA, 19 nt, Artificial Sequence
  Description of Artificial Sequence: Synthetic oligonucleotide
uaugcaaagaucugaauuc

SEQ ID NO: 3056653 - RNA, 19 nt, Artificial Sequence
  Description of Artificial Sequence: Synthetic oligonucleotide
ucugaauucggagacagag

SEQ ID NO: 3056654 - RNA, 19 nt, Artificial Sequence
  Description of Artificial Sequence: Synthetic oligonucleotide
uguugauuuauuaugcaaa

SEQ ID NO: 3056655 - RNA, 19 nt, Artificial Sequence
  Description of Artificial Sequence: Synthetic oligonucleotide
uugaaaacuccauccaagg

SEQ ID NO: 3056656 - RNA, 19 nt, Artificial Sequence
  Description of Artificial Sequence: Synthetic oligonucleotide
aucaaucaaauccaagauc

SEQ ID NO: 3056657 - RNA, 19 nt, Artificial Sequence
  Description of Artificial Sequence: Synthetic oligonucleotide
ucaguuuccagcagguggg

SEQ ID NO: 3056658 - RNA, 19 nt, Artificial Sequence
  Description of Artificial Sequence: Synthetic oligonucleotide
ugaaaacuccauccaaggg

SEQ ID NO: 3056659 - RNA, 19 nt, Artificial Sequence
  Description of Artificial Sequence: Synthetic oligonucleotide
ugaauucggagacagagaa

SEQ ID NO: 3056660 - RNA, 19 nt, Artificial Sequence
  Description of Artificial Sequence: Synthetic oligonucleotide
guaguguugauuuauuaug

SEQ ID NO: 3056661 - RNA, 19 nt, Artificial Sequence
  Description of Artificial Sequence: Synthetic oligonucleotide
uuuauuaugcaaagaucug

SEQ ID NO: 3056662 - RNA, 19 nt, Artificial Sequence
  Description of Artificial Sequence: Synthetic oligonucleotide
ucuuucacagacucugugg

SEQ ID NO: 3056663 - RNA, 19 nt, Artificial Sequence
  Description of Artificial Sequence: Synthetic oligonucleotide
gaaaacuccauccaaggga

SEQ ID NO: 3056664 - RNA, 19 nt, Artificial Sequence
  Description of Artificial Sequence: Synthetic oligonucleotide
uaguguugauuuauuaugc

SEQ ID NO: 3056665 - RNA, 19 nt, Artificial Sequence
  Description of Artificial Sequence: Synthetic oligonucleotide
guugauuuauuaugcaaag

SEQ ID NO: 3056666 - RNA, 19 nt, Artificial Sequence
  Description of Artificial Sequence: Synthetic oligonucleotide
aacauccucguaugguagc

SEQ ID NO: 3056667 - RNA, 19 nt, Artificial Sequence
  Description of Artificial Sequence: Synthetic oligonucleotide
uguucuuucacagacucug

SEQ ID NO: 3056668 - RNA, 19 nt, Artificial Sequence
  Description of Artificial Sequence: Synthetic oligonucleotide
uggaagcucgcucaguggg

SEQ ID NO: 3056669 - RNA, 19 nt, Artificial Sequence
  Description of Artificial Sequence: Synthetic oligonucleotide
uauuaugcaaagaucugaa

SEQ ID NO: 3056670 - RNA, 19 nt, Artificial Sequence
  Description of Artificial Sequence: Synthetic oligonucleotide
aagggaaaggaaccuagug

SEQ ID NO: 3056671 - RNA, 19 nt, Artificial Sequence
  Description of Artificial Sequence: Synthetic oligonucleotide
gaaacaugcuuuaucuacg

SEQ ID NO: 3056672 - RNA, 19 nt, Artificial Sequence
  Description of Artificial Sequence: Synthetic oligonucleotide
uuauuaugcaaagaucuga

SEQ ID NO: 3056673 - RNA, 19 nt, Artificial Sequence
  Description of Artificial Sequence: Synthetic oligonucleotide
uguaguguugauuuauuau

SEQ ID NO: 3056674 - RNA, 19 nt, Artificial Sequence
  Description of Artificial Sequence: Synthetic oligonucleotide
gaagaaacaugcuuuaucu

SEQ ID NO: 3056675 - RNA, 19 nt, Artificial Sequence
  Description of Artificial Sequence: Synthetic oligonucleotide
agugucaguuuccagcagg

SEQ ID NO: 3056676 - RNA, 19 nt, Artificial Sequence
  Description of Artificial Sequence: Synthetic oligonucleotide
uuuugaaaacuccauccaa

SEQ ID NO: 3056677 - RNA, 19 nt, Artificial Sequence
  Description of Artificial Sequence: Synthetic oligonucleotide
ucaaauccaagauccuucc

SEQ ID NO: 3056678 - RNA, 19 nt, Artificial Sequence
  Description of Artificial Sequence: Synthetic oligonucleotide
auugcaacauccucguaug

SEQ ID NO: 3056679 - RNA, 19 nt, Artificial Sequence
  Description of Artificial Sequence: Synthetic oligonucleotide
ugcaaagaucugaauucgg

SEQ ID NO: 3056680 - RNA, 19 nt, Artificial Sequence
  Description of Artificial Sequence: Synthetic oligonucleotide
acaugcuuuaucuacguau

SEQ ID NO: 3056681 - RNA, 19 nt, Artificial Sequence
  Description of Artificial Sequence: Synthetic oligonucleotide
ucuggaagcucgcucagug

SEQ ID NO: 3056682 - RNA, 19 nt, Artificial Sequence
  Description of Artificial Sequence: Synthetic oligonucleotide
aaacaugcuuuaucuacgu

SEQ ID NO: 3056683 - RNA, 19 nt, Artificial Sequence
  Description of Artificial Sequence: Synthetic oligonucleotide
cauccaagggaaaggaacc

SEQ ID NO: 3056684 - RNA, 19 nt, Artificial Sequence
  Description of Artificial Sequence: Synthetic oligonucleotide
gauuuauuaugcaaagauc

SEQ ID NO: 3056685 - RNA, 19 nt, Artificial Sequence
  Description of Artificial Sequence: Synthetic oligonucleotide
ugggacguucucauggagg

SEQ ID NO: 3056686 - RNA, 19 nt, Artificial Sequence
  Description of Artificial Sequence: Synthetic oligonucleotide
aucaaauccaagauccuuc

SEQ ID NO: 3056687 - RNA, 19 nt, Artificial Sequence
  Description of Artificial Sequence: Synthetic oligonucleotide
agggaaaggaaccuagugu

SEQ ID NO: 3056688 - RNA, 19 nt, Artificial Sequence
  Description of Artificial Sequence: Synthetic oligonucleotide
aggucuguccacuucaucu

SEQ ID NO: 3056689 - RNA, 19 nt, Artificial Sequence
  Description of Artificial Sequence: Synthetic oligonucleotide
guuuccagcaggugggacg

SEQ ID NO: 3056690 - RNA, 19 nt, Artificial Sequence
  Description of Artificial Sequence: Synthetic oligonucleotide
uucacagacucuguggugc

SEQ ID NO: 3056691 - RNA, 19 nt, Artificial Sequence
  Description of Artificial Sequence: Synthetic oligonucleotide
gaucugaauucggagacag

SEQ ID NO: 3056692 - RNA, 19 nt, Artificial Sequence
  Description of Artificial Sequence: Synthetic oligonucleotide
acagagaagaaacaugcuu

SEQ ID NO: 3056693 - RNA, 19 nt, Artificial Sequence
  Description of Artificial Sequence: Synthetic oligonucleotide
gaaaggaaccuagugucag

SEQ ID NO: 3056694 - RNA, 19 nt, Artificial Sequence
  Description of Artificial Sequence: Synthetic oligonucleotide
aucuccuguucuuucacag

SEQ ID NO: 3056695 - RNA, 19 nt, Artificial Sequence
  Description of Artificial Sequence: Synthetic oligonucleotide
uucucauggaggcacugca

SEQ ID NO: 3056696 - RNA, 19 nt, Artificial Sequence
  Description of Artificial Sequence: Synthetic oligonucleotide
cuugucuucccgccaagcg

SEQ ID NO: 3056697 - RNA, 19 nt, Artificial Sequence
  Description of Artificial Sequence: Synthetic oligonucleotide
aguguugauuuauuaugca

SEQ ID NO: 3056698 - RNA, 19 nt, Artificial Sequence
  Description of Artificial Sequence: Synthetic oligonucleotide
auggaggcacugcaaggcc

SEQ ID NO: 3056699 - RNA, 19 nt, Artificial Sequence
  Description of Artificial Sequence: Synthetic oligonucleotide
augcaaagaucugaauucg

SEQ ID NO: 3056700 - RNA, 19 nt, Artificial Sequence
  Description of Artificial Sequence: Synthetic oligonucleotide
ccuagugucaguuuccagc

SEQ ID NO: 3056701 - RNA, 19 nt, Artificial Sequence
  Description of Artificial Sequence: Synthetic oligonucleotide
aaaggaaccuagugucagu

SEQ ID NO: 3056702 - RNA, 19 nt, Artificial Sequence
  Description of Artificial Sequence: Synthetic oligonucleotide
uugauuuauuaugcaaaga

SEQ ID NO: 3056703 - RNA, 19 nt, Artificial Sequence
  Description of Artificial Sequence: Synthetic oligonucleotide
aagaaacaugcuuuaucua

SEQ ID NO: 3056704 - RNA, 19 nt, Artificial Sequence
  Description of Artificial Sequence: Synthetic oligonucleotide
uugucuucccgccaagcgu

SEQ ID NO: 3056705 - RNA, 19 nt, Artificial Sequence
  Description of Artificial Sequence: Synthetic oligonucleotide
uguggugccgccguugucc

SEQ ID NO: 3056706 - RNA, 19 nt, Artificial Sequence
  Description of Artificial Sequence: Synthetic oligonucleotide
uaugguagcuugucuuccc

SEQ ID NO: 3056707 - RNA, 19 nt, Artificial Sequence
  Description of Artificial Sequence: Synthetic oligonucleotide
cagugggauugcaacaucc

SEQ ID NO: 3056708 - RNA, 19 nt, Artificial Sequence
  Description of Artificial Sequence: Synthetic oligonucleotide
gauugcaacauccucguau

SEQ ID NO: 3056709 - RNA, 19 nt, Artificial Sequence
  Description of Artificial Sequence: Synthetic oligonucleotide
ugcaaggccaggucugucc

SEQ ID NO: 3056710 - RNA, 19 nt, Artificial Sequence
  Description of Artificial Sequence: Synthetic oligonucleotide
uucaucuccuguucuuuca

SEQ ID NO: 3056711 - RNA, 19 nt, Artificial Sequence
  Description of Artificial Sequence: Synthetic oligonucleotide
uuuguaguguugauuuauu

SEQ ID NO: 3056712 - RNA, 19 nt, Artificial Sequence
  Description of Artificial Sequence: Synthetic oligonucleotide
ugucuucccgccaagcguc

SEQ ID NO: 3056713 - RNA, 19 nt, Artificial Sequence
  Description of Artificial Sequence: Synthetic oligonucleotide
gggaaaggaaccuaguguc

SEQ ID NO: 3056714 - RNA, 19 nt, Artificial Sequence
  Description of Artificial Sequence: Synthetic oligonucleotide
aagcgucaucaaucaaauc

SEQ ID NO: 3056715 - RNA, 19 nt, Artificial Sequence
  Description of Artificial Sequence: Synthetic oligonucleotide
agauccuuccaucccguug

SEQ ID NO: 3056716 - RNA, 19 nt, Artificial Sequence
  Description of Artificial Sequence: Synthetic oligonucleotide
augguagcuugucuucccg

SEQ ID NO: 3056717 - RNA, 19 nt, Artificial Sequence
  Description of Artificial Sequence: Synthetic oligonucleotide
aucccguuguaccucacug

SEQ ID NO: 3056718 - RNA, 19 nt, Artificial Sequence
  Description of Artificial Sequence: Synthetic oligonucleotide
cuagugucaguuuccagca

SEQ ID NO: 3056719 - RNA, 19 nt, Artificial Sequence
  Description of Artificial Sequence: Synthetic oligonucleotide
agagaagaaacaugcuuua

SEQ ID NO: 3056720 - RNA, 19 nt, Artificial Sequence
  Description of Artificial Sequence: Synthetic oligonucleotide
uuucacagacucuguggug

SEQ ID NO: 3056721 - RNA, 19 nt, Artificial Sequence
  Description of Artificial Sequence: Synthetic oligonucleotide
uuguaguguugauuuauua

SEQ ID NO: 3056722 - RNA, 19 nt, Artificial Sequence
  Description of Artificial Sequence: Synthetic oligonucleotide
caacauccucguaugguag

SEQ ID NO: 3056723 - RNA, 19 nt, Artificial Sequence
  Description of Artificial Sequence: Synthetic oligonucleotide
acagacucuguggugccgc

SEQ ID NO: 3056724 - RNA, 19 nt, Artificial Sequence
  Description of Artificial Sequence: Synthetic oligonucleotide
cucaggcucuggaagcucg

SEQ ID NO: 3056725 - RNA, 19 nt, Artificial Sequence
  Description of Artificial Sequence: Synthetic oligonucleotide
auuaugcaaagaucugaau

SEQ ID NO: 3056726 - RNA, 19 nt, Artificial Sequence
  Description of Artificial Sequence: Synthetic oligonucleotide
ucaucuccuguucuuucac

SEQ ID NO: 3056727 - RNA, 19 nt, Artificial Sequence
  Description of Artificial Sequence: Synthetic oligonucleotide
auccucguaugguagcuug

SEQ ID NO: 3056728 - RNA, 19 nt, Artificial Sequence
  Description of Artificial Sequence: Synthetic oligonucleotide
ucguaugguagcuugucuu

SEQ ID NO: 3056729 - RNA, 19 nt, Artificial Sequence
  Description of Artificial Sequence: Synthetic oligonucleotide
guguugauuuauuaugcaa

SEQ ID NO: 3056730 - RNA, 19 nt, Artificial Sequence
  Description of Artificial Sequence: Synthetic oligonucleotide
uucggagacagagaagaaa

SEQ ID NO: 3056731 - RNA, 19 nt, Artificial Sequence
  Description of Artificial Sequence: Synthetic oligonucleotide
gauccuuccaucccguugu

SEQ ID NO: 3056732 - RNA, 19 nt, Artificial Sequence
  Description of Artificial Sequence: Synthetic oligonucleotide
gaaccuagugucaguuucc

SEQ ID NO: 3056733 - RNA, 19 nt, Artificial Sequence
  Description of Artificial Sequence: Synthetic oligonucleotide
gucaucaaucaaauccaag

SEQ ID NO: 3056734 - RNA, 19 nt, Artificial Sequence
  Description of Artificial Sequence: Synthetic oligonucleotide
ggaaccuagugucaguuuc

SEQ ID NO: 3056735 - RNA, 19 nt, Artificial Sequence
  Description of Artificial Sequence: Synthetic oligonucleotide
ccauccaagggaaaggaac

SEQ ID NO: 3056736 - RNA, 19 nt, Artificial Sequence
  Description of Artificial Sequence: Synthetic oligonucleotide
ugcuuuaucuacguauuuu

SEQ ID NO: 3056737 - RNA, 19 nt, Artificial Sequence
  Description of Artificial Sequence: Synthetic oligonucleotide
gggacguucucauggaggc

SEQ ID NO: 3056738 - RNA, 19 nt, Artificial Sequence
  Description of Artificial Sequence: Synthetic oligonucleotide
ucuccuguucuuucacaga

SEQ ID NO: 3056739 - RNA, 19 nt, Artificial Sequence
  Description of Artificial Sequence: Synthetic oligonucleotide
gaauucggagacagagaag

SEQ ID NO: 3056740 - RNA, 19 nt, Artificial Sequence
  Description of Artificial Sequence: Synthetic oligonucleotide
uuuccagcaggugggacgu

SEQ ID NO: 3056741 - RNA, 19 nt, Artificial Sequence
  Description of Artificial Sequence: Synthetic oligonucleotide
ccuuccaucccguuguacc

SEQ ID NO: 3056742 - RNA, 19 nt, Artificial Sequence
  Description of Artificial Sequence: Synthetic oligonucleotide
aaggaaccuagugucaguu

SEQ ID NO: 3056743 - RNA, 19 nt, Artificial Sequence
  Description of Artificial Sequence: Synthetic oligonucleotide
aacaugcuuuaucuacgua

SEQ ID NO: 3056744 - RNA, 19 nt, Artificial Sequence
  Description of Artificial Sequence: Synthetic oligonucleotide
cugcucaggcucuggaagc

SEQ ID NO: 3056745 - RNA, 19 nt, Artificial Sequence
  Description of Artificial Sequence: Synthetic oligonucleotide
cuggaagcucgcucagugg

SEQ ID NO: 3056746 - RNA, 19 nt, Artificial Sequence
  Description of Artificial Sequence: Synthetic oligonucleotide
ucuguggugccgccguugu

SEQ ID NO: 3056747 - RNA, 19 nt, Artificial Sequence
  Description of Artificial Sequence: Synthetic oligonucleotide
aaccuagugucaguuucca

SEQ ID NO: 3056748 - RNA, 19 nt, Artificial Sequence
  Description of Artificial Sequence: Synthetic oligonucleotide
ugguagcuugucuucccgc

SEQ ID NO: 3056749 - RNA, 19 nt, Artificial Sequence
  Description of Artificial Sequence: Synthetic oligonucleotide
gguagcuugucuucccgcc

SEQ ID NO: 3056750 - RNA, 19 nt, Artificial Sequence
  Description of Artificial Sequence: Synthetic oligonucleotide
uagugucaguuuccagcag

SEQ ID NO: 3056751 - RNA, 19 nt, Artificial Sequence
  Description of Artificial Sequence: Synthetic oligonucleotide
guaugguagcuugucuucc

SEQ ID NO: 3056752 - RNA, 19 nt, Artificial Sequence
  Description of Artificial Sequence: Synthetic oligonucleotide
ucacagacucuguggugcc

SEQ ID NO: 3056753 - RNA, 19 nt, Artificial Sequence
  Description of Artificial Sequence: Synthetic oligonucleotide
aggcucuggaagcucgcuc

SEQ ID NO: 3056754 - RNA, 19 nt, Artificial Sequence
  Description of Artificial Sequence: Synthetic oligonucleotide
ccaagggaaaggaaccuag

SEQ ID NO: 3056755 - RNA, 19 nt, Artificial Sequence
  Description of Artificial Sequence: Synthetic oligonucleotide
uccauccaagggaaaggaa

SEQ ID NO: 3056756 - RNA, 19 nt, Artificial Sequence
  Description of Artificial Sequence: Synthetic oligonucleotide
ucagugggauugcaacauc

SEQ ID NO: 3056757 - RNA, 19 nt, Artificial Sequence
  Description of Artificial Sequence: Synthetic oligonucleotide
uagcuugucuucccgccaa

SEQ ID NO: 3056758 - RNA, 19 nt, Artificial Sequence
  Description of Artificial Sequence: Synthetic oligonucleotide
cacugcaaggccaggucug

SEQ ID NO: 3056759 - RNA, 19 nt, Artificial Sequence
  Description of Artificial Sequence: Synthetic oligonucleotide
aaggccaggucuguccacu

SEQ ID NO: 3056760 - RNA, 19 nt, Artificial Sequence
  Description of Artificial Sequence: Synthetic oligonucleotide
cugaauucggagacagaga

SEQ ID NO: 3056761 - RNA, 19 nt, Artificial Sequence
  Description of Artificial Sequence: Synthetic oligonucleotide
uccaucccguuguaccuca

SEQ ID NO: 3056762 - RNA, 19 nt, Artificial Sequence
  Description of Artificial Sequence: Synthetic oligonucleotide
ucaggcucuggaagcucgc

SEQ ID NO: 3056763 - RNA, 19 nt, Artificial Sequence
  Description of Artificial Sequence: Synthetic oligonucleotide
cagagaagaaacaugcuuu

SEQ ID NO: 3056764 - RNA, 19 nt, Artificial Sequence
  Description of Artificial Sequence: Synthetic oligonucleotide
gugggauugcaacauccuc

SEQ ID NO: 3056765 - RNA, 19 nt, Artificial Sequence
  Description of Artificial Sequence: Synthetic oligonucleotide
uucccgccaagcgucauca

SEQ ID NO: 3056766 - RNA, 19 nt, Artificial Sequence
  Description of Artificial Sequence: Synthetic oligonucleotide
cuuucacagacucuguggu

SEQ ID NO: 3056767 - RNA, 19 nt, Artificial Sequence
  Description of Artificial Sequence: Synthetic oligonucleotide
agcucgcucagugggauug

SEQ ID NO: 3056768 - RNA, 19 nt, Artificial Sequence
  Description of Artificial Sequence: Synthetic oligonucleotide
accuagugucaguuuccag

SEQ ID NO: 3056769 - RNA, 19 nt, Artificial Sequence
  Description of Artificial Sequence: Synthetic oligonucleotide
uccucguaugguagcuugu

SEQ ID NO: 3056770 - RNA, 19 nt, Artificial Sequence
  Description of Artificial Sequence: Synthetic oligonucleotide
caucaaucaaauccaagau

SEQ ID NO: 3056771 - RNA, 19 nt, Artificial Sequence
  Description of Artificial Sequence: Synthetic oligonucleotide
agugggauugcaacauccu

SEQ ID NO: 3056772 - RNA, 19 nt, Artificial Sequence
  Description of Artificial Sequence: Synthetic oligonucleotide
ugucaguuuccagcaggug

SEQ ID NO: 3056773 - RNA, 19 nt, Artificial Sequence
  Description of Artificial Sequence: Synthetic oligonucleotide
acauccucguaugguagcu

SEQ ID NO: 3056774 - RNA, 19 nt, Artificial Sequence
  Description of Artificial Sequence: Synthetic oligonucleotide
augcuuuaucuacguauuu

SEQ ID NO: 3056775 - RNA, 19 nt, Artificial Sequence
  Description of Artificial Sequence: Synthetic oligonucleotide
gugggacguucucauggag

SEQ ID NO: 3056776 - RNA, 19 nt, Artificial Sequence
  Description of Artificial Sequence: Synthetic oligonucleotide
gccguuguccugcucaggc

SEQ ID NO: 3056777 - RNA, 19 nt, Artificial Sequence
  Description of Artificial Sequence: Synthetic oligonucleotide
gcaaagaucugaauucgga

SEQ ID NO: 3056778 - RNA, 19 nt, Artificial Sequence
  Description of Artificial Sequence: Synthetic oligonucleotide
agaucugaauucggagaca

SEQ ID NO: 3056779 - RNA, 19 nt, Artificial Sequence
  Description of Artificial Sequence: Synthetic oligonucleotide
caagcgucaucaaucaaau

SEQ ID NO: 3056780 - RNA, 19 nt, Artificial Sequence
  Description of Artificial Sequence: Synthetic oligonucleotide
guagcuugucuucccgcca

SEQ ID NO: 3056781 - RNA, 19 nt, Artificial Sequence
  Description of Artificial Sequence: Synthetic oligonucleotide
aagauccuuccaucccguu

SEQ ID NO: 3056782 - RNA, 19 nt, Artificial Sequence
  Description of Artificial Sequence: Synthetic oligonucleotide
ccaagcgucaucaaucaaa

SEQ ID NO: 3056783 - RNA, 19 nt, Artificial Sequence
  Description of Artificial Sequence: Synthetic oligonucleotide
ggucuguccacuucaucuc

SEQ ID NO: 3056784 - RNA, 19 nt, Artificial Sequence
  Description of Artificial Sequence: Synthetic oligonucleotide
caugcuuuaucuacguauu

SEQ ID NO: 3056785 - RNA, 19 nt, Artificial Sequence
  Description of Artificial Sequence: Synthetic oligonucleotide
agcuugucuucccgccaag

SEQ ID NO: 3056786 - RNA, 19 nt, Artificial Sequence
  Description of Artificial Sequence: Synthetic oligonucleotide
ugcucaggcucuggaagcu

SEQ ID NO: 3056787 - RNA, 19 nt, Artificial Sequence
  Description of Artificial Sequence: Synthetic oligonucleotide
agcaggugggacguucuca

SEQ ID NO: 3056788 - RNA, 19 nt, Artificial Sequence
  Description of Artificial Sequence: Synthetic oligonucleotide
ucgcucagugggauugcaa

SEQ ID NO: 3056789 - RNA, 19 nt, Artificial Sequence
  Description of Artificial Sequence: Synthetic oligonucleotide
gcgucaucaaucaaaucca

SEQ ID NO: 3056790 - RNA, 19 nt, Artificial Sequence
  Description of Artificial Sequence: Synthetic oligonucleotide
caucuccuguucuuucaca

SEQ ID NO: 3056791 - RNA, 19 nt, Artificial Sequence
  Description of Artificial Sequence: Synthetic oligonucleotide
caaauccaagauccuucca

SEQ ID NO: 3056792 - RNA, 19 nt, Artificial Sequence
  Description of Artificial Sequence: Synthetic oligonucleotide
agacucuguggugccgccg

SEQ ID NO: 3056793 - RNA, 19 nt, Artificial Sequence
  Description of Artificial Sequence: Synthetic oligonucleotide
uccagcaggugggacguuc

SEQ ID NO: 3056794 - RNA, 19 nt, Artificial Sequence
  Description of Artificial Sequence: Synthetic oligonucleotide
aggaaccuagugucaguuu

SEQ ID NO: 3056795 - RNA, 19 nt, Artificial Sequence
  Description of Artificial Sequence: Synthetic oligonucleotide
cagacucuguggugccgcc

SEQ ID NO: 3056796 - RNA, 19 nt, Artificial Sequence
  Description of Artificial Sequence: Synthetic oligonucleotide
ccgccaagcgucaucaauc

SEQ ID NO: 3056797 - RNA, 19 nt, Artificial Sequence
  Description of Artificial Sequence: Synthetic oligonucleotide
gacagagaagaaacaugcu

SEQ ID NO: 3056798 - RNA, 19 nt, Artificial Sequence
  Description of Artificial Sequence: Synthetic oligonucleotide
cuuccaucccguuguaccu

SEQ ID NO: 3056799 - RNA, 19 nt, Artificial Sequence
  Description of Artificial Sequence: Synthetic oligonucleotide
acugcaaggccaggucugu

SEQ ID NO: 3056800 - RNA, 19 nt, Artificial Sequence
  Description of Artificial Sequence: Synthetic oligonucleotide
uuccaucccguuguaccuc

SEQ ID NO: 3056801 - RNA, 19 nt, Artificial Sequence
  Description of Artificial Sequence: Synthetic oligonucleotide
cacagacucuguggugccg

SEQ ID NO: 3056802 - RNA, 19 nt, Artificial Sequence
  Description of Artificial Sequence: Synthetic oligonucleotide
gacucuguggugccgccgu

SEQ ID NO: 3056803 - RNA, 19 nt, Artificial Sequence
  Description of Artificial Sequence: Synthetic oligonucleotide
ggugccgccguuguccugc

SEQ ID NO: 3056804 - RNA, 19 nt, Artificial Sequence
  Description of Artificial Sequence: Synthetic oligonucleotide
ggaaaggaaccuaguguca

SEQ ID NO: 3056805 - RNA, 19 nt, Artificial Sequence
  Description of Artificial Sequence: Synthetic oligonucleotide
caaucaaauccaagauccu

SEQ ID NO: 3056806 - RNA, 19 nt, Artificial Sequence
  Description of Artificial Sequence: Synthetic oligonucleotide
cguaugguagcuugucuuc

SEQ ID NO: 3056807 - RNA, 19 nt, Artificial Sequence
  Description of Artificial Sequence: Synthetic oligonucleotide
caaggccaggucuguccac

SEQ ID NO: 3056808 - RNA, 19 nt, Artificial Sequence
  Description of Artificial Sequence: Synthetic oligonucleotide
cgcucagugggauugcaac

SEQ ID NO: 3056809 - RNA, 19 nt, Artificial Sequence
  Description of Artificial Sequence: Synthetic oligonucleotide
ggagacagagaagaaacau

SEQ ID NO: 3056810 - RNA, 19 nt, Artificial Sequence
  Description of Artificial Sequence: Synthetic oligonucleotide
gccaggucuguccacuuca

SEQ ID NO: 3056811 - RNA, 19 nt, Artificial Sequence
  Description of Artificial Sequence: Synthetic oligonucleotide
caggucuguccacuucauc

SEQ ID NO: 3056812 - RNA, 19 nt, Artificial Sequence
  Description of Artificial Sequence: Synthetic oligonucleotide
cuucccgccaagcgucauc

SEQ ID NO: 3056813 - RNA, 19 nt, Artificial Sequence
  Description of Artificial Sequence: Synthetic oligonucleotide
uccuuccaucccguuguac

SEQ ID NO: 3056814 - RNA, 19 nt, Artificial Sequence
  Description of Artificial Sequence: Synthetic oligonucleotide
ggugggacguucucaugga

SEQ ID NO: 3056815 - RNA, 19 nt, Artificial Sequence
  Description of Artificial Sequence: Synthetic oligonucleotide
ggcacugcaaggccagguc

SEQ ID NO: 3056816 - RNA, 19 nt, Artificial Sequence
  Description of Artificial Sequence: Synthetic oligonucleotide
gggauugcaacauccucgu

SEQ ID NO: 3056817 - RNA, 19 nt, Artificial Sequence
  Description of Artificial Sequence: Synthetic oligonucleotide
gagaagaaacaugcuuuau

SEQ ID NO: 3056818 - RNA, 19 nt, Artificial Sequence
  Description of Artificial Sequence: Synthetic oligonucleotide
aagcucgcucagugggauu

SEQ ID NO: 3056819 - RNA, 19 nt, Artificial Sequence
  Description of Artificial Sequence: Synthetic oligonucleotide
aggcacugcaaggccaggu

SEQ ID NO: 3056820 - RNA, 19 nt, Artificial Sequence
  Description of Artificial Sequence: Synthetic oligonucleotide
cguuguaccucacugucca

SEQ ID NO: 3056821 - RNA, 19 nt, Artificial Sequence
  Description of Artificial Sequence: Synthetic oligonucleotide
aaacuccauccaagggaaa

SEQ ID NO: 3056822 - RNA, 19 nt, Artificial Sequence
  Description of Artificial Sequence: Synthetic oligonucleotide
cucuguggugccgccguug

SEQ ID NO: 3056823 - RNA, 19 nt, Artificial Sequence
  Description of Artificial Sequence: Synthetic oligonucleotide
uuguccugcucaggcucug

SEQ ID NO: 3056824 - RNA, 19 nt, Artificial Sequence
  Description of Artificial Sequence: Synthetic oligonucleotide
auucggagacagagaagaa

SEQ ID NO: 3056825 - RNA, 19 nt, Artificial Sequence
  Description of Artificial Sequence: Synthetic oligonucleotide
aucugaauucggagacaga

SEQ ID NO: 3056826 - RNA, 19 nt, Artificial Sequence
  Description of Artificial Sequence: Synthetic oligonucleotide
gccgccguuguccugcuca

SEQ ID NO: 3056827 - RNA, 19 nt, Artificial Sequence
  Description of Artificial Sequence: Synthetic oligonucleotide
gcaaggccaggucugucca

SEQ ID NO: 3056828 - RNA, 19 nt, Artificial Sequence
  Description of Artificial Sequence: Synthetic oligonucleotide
cucguaugguagcuugucu

SEQ ID NO: 3056829 - RNA, 19 nt, Artificial Sequence
  Description of Artificial Sequence: Synthetic oligonucleotide
caagauccuuccaucccgu

SEQ ID NO: 3056830 - RNA, 19 nt, Artificial Sequence
  Description of Artificial Sequence: Synthetic oligonucleotide
guccugcucaggcucugga

SEQ ID NO: 3056831 - RNA, 19 nt, Artificial Sequence
  Description of Artificial Sequence: Synthetic oligonucleotide
guccacuucaucuccuguu

SEQ ID NO: 3056832 - RNA, 19 nt, Artificial Sequence
  Description of Artificial Sequence: Synthetic oligonucleotide
gaagcucgcucagugggau

SEQ ID NO: 3056833 - RNA, 19 nt, Artificial Sequence
  Description of Artificial Sequence: Synthetic oligonucleotide
cguuguccugcucaggcuc

SEQ ID NO: 3056834 - RNA, 19 nt, Artificial Sequence
  Description of Artificial Sequence: Synthetic oligonucleotide
gcuugucuucccgccaagc

SEQ ID NO: 3056835 - RNA, 19 nt, Artificial Sequence
  Description of Artificial Sequence: Synthetic oligonucleotide
gugucaguuuccagcaggu

SEQ ID NO: 3056836 - RNA, 19 nt, Artificial Sequence
  Description of Artificial Sequence: Synthetic oligonucleotide
cuguucuuucacagacucu

SEQ ID NO: 3056837 - RNA, 19 nt, Artificial Sequence
  Description of Artificial Sequence: Synthetic oligonucleotide
cagcaggugggacguucuc

SEQ ID NO: 3056838 - RNA, 19 nt, Artificial Sequence
  Description of Artificial Sequence: Synthetic oligonucleotide
guucuuucacagacucugu

SEQ ID NO: 3056839 - RNA, 19 nt, Artificial Sequence
  Description of Artificial Sequence: Synthetic oligonucleotide
ccucguaugguagcuuguc

SEQ ID NO: 3056840 - RNA, 19 nt, Artificial Sequence
  Description of Artificial Sequence: Synthetic oligonucleotide
auccuuccaucccguugua

SEQ ID NO: 3056841 - RNA, 19 nt, Artificial Sequence
  Description of Artificial Sequence: Synthetic oligonucleotide
ggaagcucgcucaguggga

SEQ ID NO: 3056842 - RNA, 19 nt, Artificial Sequence
  Description of Artificial Sequence: Synthetic oligonucleotide
cacuucaucuccuguucuu

SEQ ID NO: 3056843 - RNA, 19 nt, Artificial Sequence
  Description of Artificial Sequence: Synthetic oligonucleotide
uggugccgccguuguccug

SEQ ID NO: 3056844 - RNA, 19 nt, Artificial Sequence
  Description of Artificial Sequence: Synthetic oligonucleotide
ucuucccgccaagcgucau

SEQ ID NO: 3056845 - RNA, 19 nt, Artificial Sequence
  Description of Artificial Sequence: Synthetic oligonucleotide
gcacugcaaggccaggucu

SEQ ID NO: 3056846 - RNA, 19 nt, Artificial Sequence
  Description of Artificial Sequence: Synthetic oligonucleotide
aggccaggucuguccacuu

SEQ ID NO: 3056847 - RNA, 19 nt, Artificial Sequence
  Description of Artificial Sequence: Synthetic oligonucleotide
guuguccugcucaggcucu

SEQ ID NO: 3056848 - RNA, 19 nt, Artificial Sequence
  Description of Artificial Sequence: Synthetic oligonucleotide
acucuguggugccgccguu

SEQ ID NO: 3056849 - RNA, 19 nt, Artificial Sequence
  Description of Artificial Sequence: Synthetic oligonucleotide
cuguggugccgccguuguc

SEQ ID NO: 3056850 - RNA, 19 nt, Artificial Sequence
  Description of Artificial Sequence: Synthetic oligonucleotide
cugcaaggccaggucuguc

SEQ ID NO: 3056851 - RNA, 19 nt, Artificial Sequence
  Description of Artificial Sequence: Synthetic oligonucleotide
cucgcucagugggauugca

SEQ ID NO: 3056852 - RNA, 19 nt, Artificial Sequence
  Description of Artificial Sequence: Synthetic oligonucleotide
caucccguuguaccucacu

SEQ ID NO: 3056853 - RNA, 19 nt, Artificial Sequence
  Description of Artificial Sequence: Synthetic oligonucleotide
ggccaggucuguccacuuc

SEQ ID NO: 3056854 - RNA, 19 nt, Artificial Sequence
  Description of Artificial Sequence: Synthetic oligonucleotide
ucccgccaagcgucaucaa

SEQ ID NO: 3056855 - RNA, 19 nt, Artificial Sequence
  Description of Artificial Sequence: Synthetic oligonucleotide
caguuuccagcagguggga

SEQ ID NO: 3056856 - RNA, 19 nt, Artificial Sequence
  Description of Artificial Sequence: Synthetic oligonucleotide
cggagacagagaagaaaca

SEQ ID NO: 3056857 - RNA, 19 nt, Artificial Sequence
  Description of Artificial Sequence: Synthetic oligonucleotide
guggugccgccguuguccu

SEQ ID NO: 3056858 - RNA, 19 nt, Artificial Sequence
  Description of Artificial Sequence: Synthetic oligonucleotide
guuguaccucacuguccau

SEQ ID NO: 3056859 - RNA, 19 nt, Artificial Sequence
  Description of Artificial Sequence: Synthetic oligonucleotide
cgccaagcgucaucaauca

SEQ ID NO: 3056860 - RNA, 19 nt, Artificial Sequence
  Description of Artificial Sequence: Synthetic oligonucleotide
gucuucccgccaagcguca

SEQ ID NO: 3056861 - RNA, 19 nt, Artificial Sequence
  Description of Artificial Sequence: Synthetic oligonucleotide
ccgccguuguccugcucag

SEQ ID NO: 3056862 - RNA, 19 nt, Artificial Sequence
  Description of Artificial Sequence: Synthetic oligonucleotide
cgucaucaaucaaauccaa

SEQ ID NO: 3056863 - RNA, 19 nt, Artificial Sequence
  Description of Artificial Sequence: Synthetic oligonucleotide
ggacguucucauggaggca

SEQ ID NO: 3056864 - RNA, 19 nt, Artificial Sequence
  Description of Artificial Sequence: Synthetic oligonucleotide
gccaagcgucaucaaucaa

SEQ ID NO: 3056865 - RNA, 19 nt, Artificial Sequence
  Description of Artificial Sequence: Synthetic oligonucleotide
ggauugcaacauccucgua

SEQ ID NO: 3056866 - RNA, 19 nt, Artificial Sequence
  Description of Artificial Sequence: Synthetic oligonucleotide
gcucgcucagugggauugc

SEQ ID NO: 3056867 - RNA, 19 nt, Artificial Sequence
  Description of Artificial Sequence: Synthetic oligonucleotide
ugccgccguuguccugcuc

SEQ ID NO: 3056868 - RNA, 19 nt, Artificial Sequence
  Description of Artificial Sequence: Synthetic oligonucleotide
gcucaggcucuggaagcuc

SEQ ID NO: 3056869 - RNA, 19 nt, Artificial Sequence
  Description of Artificial Sequence: Synthetic oligonucleotide
cucuggaagcucgcucagu

SEQ ID NO: 3056870 - RNA, 19 nt, Artificial Sequence
  Description of Artificial Sequence: Synthetic oligonucleotide
ccaucccguuguaccucac

SEQ ID NO: 3056871 - RNA, 19 nt, Artificial Sequence
  Description of Artificial Sequence: Synthetic oligonucleotide
ccacuucaucuccuguucu

SEQ ID NO: 3056872 - RNA, 19 nt, Artificial Sequence
  Description of Artificial Sequence: Synthetic oligonucleotide
uuccagcaggugggacguu

SEQ ID NO: 3056873 - RNA, 19 nt, Artificial Sequence
  Description of Artificial Sequence: Synthetic oligonucleotide
cauccucguaugguagcuu

SEQ ID NO: 3056874 - RNA, 19 nt, Artificial Sequence
  Description of Artificial Sequence: Synthetic oligonucleotide
ccagcaggugggacguucu

SEQ ID NO: 3056875 - RNA, 19 nt, Artificial Sequence
  Description of Artificial Sequence: Synthetic oligonucleotide
cccgccaagcgucaucaau

SEQ ID NO: 3056876 - RNA, 19 nt, Artificial Sequence
  Description of Artificial Sequence: Synthetic oligonucleotide
ccguuguccugcucaggcu

SEQ ID NO: 3056877 - RNA, 19 nt, Artificial Sequence
  Description of Artificial Sequence: Synthetic oligonucleotide
cgccguuguccugcucagg

SEQ ID NO: 3056878 - RNA, 19 nt, Artificial Sequence
  Description of Artificial Sequence: Synthetic oligonucleotide
ccaggucuguccacuucau

SEQ ID NO: 3056879 - RNA, 19 nt, Artificial Sequence
  Description of Artificial Sequence: Synthetic oligonucleotide
agagccaacaguuuuaugu

SEQ ID NO: 3056880 - RNA, 19 nt, Artificial Sequence
  Description of Artificial Sequence: Synthetic oligonucleotide
aguuuuaugucuccugaac

SEQ ID NO: 3056881 - RNA, 19 nt, Artificial Sequence
  Description of Artificial Sequence: Synthetic oligonucleotide
auaacacagcagcauaggc

SEQ ID NO: 3056882 - RNA, 19 nt, Artificial Sequence
  Description of Artificial Sequence: Synthetic oligonucleotide
ugcgcuuguacaaggagcg

SEQ ID NO: 3056883 - RNA, 19 nt, Artificial Sequence
  Description of Artificial Sequence: Synthetic oligonucleotide
uuagcuuguugccauaaca

SEQ ID NO: 3056884 - RNA, 19 nt, Artificial Sequence
  Description of Artificial Sequence: Synthetic oligonucleotide
ugaacuuugucugcuaucc

SEQ ID NO: 3056885 - RNA, 19 nt, Artificial Sequence
  Description of Artificial Sequence: Synthetic oligonucleotide
uuuaugucuccugaacucg

SEQ ID NO: 3056886 - RNA, 19 nt, Artificial Sequence
  Description of Artificial Sequence: Synthetic oligonucleotide
aacaguuuuaugucuccug

SEQ ID NO: 3056887 - RNA, 19 nt, Artificial Sequence
  Description of Artificial Sequence: Synthetic oligonucleotide
uuuaguagcuucuugucau

SEQ ID NO: 3056888 - RNA, 19 nt, Artificial Sequence
  Description of Artificial Sequence: Synthetic oligonucleotide
uccuguugaacuuugucug

SEQ ID NO: 3056889 - RNA, 19 nt, Artificial Sequence
  Description of Artificial Sequence: Synthetic oligonucleotide
aagaugcgcuuguacaagg

SEQ ID NO: 3056890 - RNA, 19 nt, Artificial Sequence
  Description of Artificial Sequence: Synthetic oligonucleotide
uuuuaugucuccugaacuc

SEQ ID NO: 3056891 - RNA, 19 nt, Artificial Sequence
  Description of Artificial Sequence: Synthetic oligonucleotide
uugcaagaaacgcugggcc

SEQ ID NO: 3056892 - RNA, 19 nt, Artificial Sequence
  Description of Artificial Sequence: Synthetic oligonucleotide
cuugcaauuguccaaucug

SEQ ID NO: 3056893 - RNA, 19 nt, Artificial Sequence
  Description of Artificial Sequence: Synthetic oligonucleotide
uuuucuuccgggagagagg

SEQ ID NO: 3056894 - RNA, 19 nt, Artificial Sequence
  Description of Artificial Sequence: Synthetic oligonucleotide
ucagcucuugcaauugucc

SEQ ID NO: 3056895 - RNA, 19 nt, Artificial Sequence
  Description of Artificial Sequence: Synthetic oligonucleotide
ugcaagaugcgcuuguaca

SEQ ID NO: 3056896 - RNA, 19 nt, Artificial Sequence
  Description of Artificial Sequence: Synthetic oligonucleotide
uuccuguugaacuuugucu

SEQ ID NO: 3056897 - RNA, 19 nt, Artificial Sequence
  Description of Artificial Sequence: Synthetic oligonucleotide
aaucugcucaucacgaaag

SEQ ID NO: 3056898 - RNA, 19 nt, Artificial Sequence
  Description of Artificial Sequence: Synthetic oligonucleotide
uguacaaggagcggacucg

SEQ ID NO: 3056899 - RNA, 19 nt, Artificial Sequence
  Description of Artificial Sequence: Synthetic oligonucleotide
ucccauucuugcaagaaac

SEQ ID NO: 3056900 - RNA, 19 nt, Artificial Sequence
  Description of Artificial Sequence: Synthetic oligonucleotide
uagcuuguugccauaacac

SEQ ID NO: 3056901 - RNA, 19 nt, Artificial Sequence
  Description of Artificial Sequence: Synthetic oligonucleotide
cucaucacgaaagucauug

SEQ ID NO: 3056902 - RNA, 19 nt, Artificial Sequence
  Description of Artificial Sequence: Synthetic oligonucleotide
ucacguacuggucacccag

SEQ ID NO: 3056903 - RNA, 19 nt, Artificial Sequence
  Description of Artificial Sequence: Synthetic oligonucleotide
uccaaucugcucaucacga

SEQ ID NO: 3056904 - RNA, 19 nt, Artificial Sequence
  Description of Artificial Sequence: Synthetic oligonucleotide
auaggccucccauucuugc

SEQ ID NO: 3056905 - RNA, 19 nt, Artificial Sequence
  Description of Artificial Sequence: Synthetic oligonucleotide
ugccgauuggguuuaguag

SEQ ID NO: 3056906 - RNA, 19 nt, Artificial Sequence
  Description of Artificial Sequence: Synthetic oligonucleotide
ucugcuauccuuagcuugu

SEQ ID NO: 3056907 - RNA, 19 nt, Artificial Sequence
  Description of Artificial Sequence: Synthetic oligonucleotide
ucacgaaagucauugaguu

SEQ ID NO: 3056908 - RNA, 19 nt, Artificial Sequence
  Description of Artificial Sequence: Synthetic oligonucleotide
acaguuuuaugucuccuga

SEQ ID NO: 3056909 - RNA, 19 nt, Artificial Sequence
  Description of Artificial Sequence: Synthetic oligonucleotide
caucacgaaagucauugag

SEQ ID NO: 3056910 - RNA, 19 nt, Artificial Sequence
  Description of Artificial Sequence: Synthetic oligonucleotide
aacuuugucugcuauccuu

SEQ ID NO: 3056911 - RNA, 19 nt, Artificial Sequence
  Description of Artificial Sequence: Synthetic oligonucleotide
aaacaagcuuuuccuguug

SEQ ID NO: 3056912 - RNA, 19 nt, Artificial Sequence
  Description of Artificial Sequence: Synthetic oligonucleotide
uuguccaaucugcucauca

SEQ ID NO: 3056913 - RNA, 19 nt, Artificial Sequence
  Description of Artificial Sequence: Synthetic oligonucleotide
ucuuccgggagagaggugc

SEQ ID NO: 3056914 - RNA, 19 nt, Artificial Sequence
  Description of Artificial Sequence: Synthetic oligonucleotide
gaugcgcuuguacaaggag

SEQ ID NO: 3056915 - RNA, 19 nt, Artificial Sequence
  Description of Artificial Sequence: Synthetic oligonucleotide
caauuguccaaucugcuca

SEQ ID NO: 3056916 - RNA, 19 nt, Artificial Sequence
  Description of Artificial Sequence: Synthetic oligonucleotide
uugucaucagcucuugcaa

SEQ ID NO: 3056917 - RNA, 19 nt, Artificial Sequence
  Description of Artificial Sequence: Synthetic oligonucleotide
uuuccuguugaacuuuguc

SEQ ID NO: 3056918 - RNA, 19 nt, Artificial Sequence
  Description of Artificial Sequence: Synthetic oligonucleotide
guccaaucugcucaucacg

SEQ ID NO: 3056919 - RNA, 19 nt, Artificial Sequence
  Description of Artificial Sequence: Synthetic oligonucleotide
agggcuuugagguccgggg

SEQ ID NO: 3056920 - RNA, 19 nt, Artificial Sequence
  Description of Artificial Sequence: Synthetic oligonucleotide
uucuugcaagaaacgcugg

SEQ ID NO: 3056921 - RNA, 19 nt, Artificial Sequence
  Description of Artificial Sequence: Synthetic oligonucleotide
ucguccuucacguacuggu

SEQ ID NO: 3056922 - RNA, 19 nt, Artificial Sequence
  Description of Artificial Sequence: Synthetic oligonucleotide
gauuggguuuaguagcuuc

SEQ ID NO: 3056923 - RNA, 19 nt, Artificial Sequence
  Description of Artificial Sequence: Synthetic oligonucleotide
gaacucguccuucacguac

SEQ ID NO: 3056924 - RNA, 19 nt, Artificial Sequence
  Description of Artificial Sequence: Synthetic oligonucleotide
guagcuucuugucaucagc

SEQ ID NO: 3056925 - RNA, 19 nt, Artificial Sequence
  Description of Artificial Sequence: Synthetic oligonucleotide
aaacgcugggccucgccag

SEQ ID NO: 3056926 - RNA, 19 nt, Artificial Sequence
  Description of Artificial Sequence: Synthetic oligonucleotide
cauaacacagcagcauagg

SEQ ID NO: 3056927 - RNA, 19 nt, Artificial Sequence
  Description of Artificial Sequence: Synthetic oligonucleotide
acgaaagucauugaguuuu

SEQ ID NO: 3056928 - RNA, 19 nt, Artificial Sequence
  Description of Artificial Sequence: Synthetic oligonucleotide
uagcuucuugucaucagcu

SEQ ID NO: 3056929 - RNA, 19 nt, Artificial Sequence
  Description of Artificial Sequence: Synthetic oligonucleotide
uuugucugcuauccuuagc

SEQ ID NO: 3056930 - RNA, 19 nt, Artificial Sequence
  Description of Artificial Sequence: Synthetic oligonucleotide
cuugcaagaaacgcugggc

SEQ ID NO: 3056931 - RNA, 19 nt, Artificial Sequence
  Description of Artificial Sequence: Synthetic oligonucleotide
guuuaguagcuucuuguca

SEQ ID NO: 3056932 - RNA, 19 nt, Artificial Sequence
  Description of Artificial Sequence: Synthetic oligonucleotide
aauuguccaaucugcucau

SEQ ID NO: 3056933 - RNA, 19 nt, Artificial Sequence
  Description of Artificial Sequence: Synthetic oligonucleotide
uuguacaaggagcggacuc

SEQ ID NO: 3056934 - RNA, 19 nt, Artificial Sequence
  Description of Artificial Sequence: Synthetic oligonucleotide
gagaggugccaaaacaagc

SEQ ID NO: 3056935 - RNA, 19 nt, Artificial Sequence
  Description of Artificial Sequence: Synthetic oligonucleotide
uggguuuaguagcuucuug

SEQ ID NO: 3056936 - RNA, 19 nt, Artificial Sequence
  Description of Artificial Sequence: Synthetic oligonucleotide
cugcucaucacgaaaguca

SEQ ID NO: 3056937 - RNA, 19 nt, Artificial Sequence
  Description of Artificial Sequence: Synthetic oligonucleotide
aguagcuucuugucaucag

SEQ ID NO: 3056938 - RNA, 19 nt, Artificial Sequence
  Description of Artificial Sequence: Synthetic oligonucleotide
gagccaacaguuuuauguc

SEQ ID NO: 3056939 - RNA, 19 nt, Artificial Sequence
  Description of Artificial Sequence: Synthetic oligonucleotide
gucugcuauccuuagcuug

SEQ ID NO: 3056940 - RNA, 19 nt, Artificial Sequence
  Description of Artificial Sequence: Synthetic oligonucleotide
agcuuguugccauaacaca

SEQ ID NO: 3056941 - RNA, 19 nt, Artificial Sequence
  Description of Artificial Sequence: Synthetic oligonucleotide
uguugccauaacacagcag

SEQ ID NO: 3056942 - RNA, 19 nt, Artificial Sequence
  Description of Artificial Sequence: Synthetic oligonucleotide
agaaacgcugggccucgcc

SEQ ID NO: 3056943 - RNA, 19 nt, Artificial Sequence
  Description of Artificial Sequence: Synthetic oligonucleotide
uuaugucuccugaacucgu

SEQ ID NO: 3056944 - RNA, 19 nt, Artificial Sequence
  Description of Artificial Sequence: Synthetic oligonucleotide
agcuucuugucaucagcuc

SEQ ID NO: 3056945 - RNA, 19 nt, Artificial Sequence
  Description of Artificial Sequence: Synthetic oligonucleotide
gcuauccuuagcuuguugc

SEQ ID NO: 3056946 - RNA, 19 nt, Artificial Sequence
  Description of Artificial Sequence: Synthetic oligonucleotide
uguccaaucugcucaucac

SEQ ID NO: 3056947 - RNA, 19 nt, Artificial Sequence
  Description of Artificial Sequence: Synthetic oligonucleotide
ugcaagaaacgcugggccu

SEQ ID NO: 3056948 - RNA, 19 nt, Artificial Sequence
  Description of Artificial Sequence: Synthetic oligonucleotide
uauccuuagcuuguugcca

SEQ ID NO: 3056949 - RNA, 19 nt, Artificial Sequence
  Description of Artificial Sequence: Synthetic oligonucleotide
uugccauaacacagcagca

SEQ ID NO: 3056950 - RNA, 19 nt, Artificial Sequence
  Description of Artificial Sequence: Synthetic oligonucleotide
agaggugccaaaacaagcu

SEQ ID NO: 3056951 - RNA, 19 nt, Artificial Sequence
  Description of Artificial Sequence: Synthetic oligonucleotide
aucacgaaagucauugagu

SEQ ID NO: 3056952 - RNA, 19 nt, Artificial Sequence
  Description of Artificial Sequence: Synthetic oligonucleotide
acucgcgaaacgugccgcc

SEQ ID NO: 3056953 - RNA, 19 nt, Artificial Sequence
  Description of Artificial Sequence: Synthetic oligonucleotide
aaacgugccgccccggcau

SEQ ID NO: 3056954 - RNA, 19 nt, Artificial Sequence
  Description of Artificial Sequence: Synthetic oligonucleotide
gccgauuggguuuaguagc

SEQ ID NO: 3056955 - RNA, 19 nt, Artificial Sequence
  Description of Artificial Sequence: Synthetic oligonucleotide
agagaggugccaaaacaag

SEQ ID NO: 3056956 - RNA, 19 nt, Artificial Sequence
  Description of Artificial Sequence: Synthetic oligonucleotide
guuuuaugucuccugaacu

SEQ ID NO: 3056957 - RNA, 19 nt, Artificial Sequence
  Description of Artificial Sequence: Synthetic oligonucleotide
caagcuuuuccuguugaac

SEQ ID NO: 3056958 - RNA, 19 nt, Artificial Sequence
  Description of Artificial Sequence: Synthetic oligonucleotide
cuuuuccuguugaacuuug

SEQ ID NO: 3056959 - RNA, 19 nt, Artificial Sequence
  Description of Artificial Sequence: Synthetic oligonucleotide
uacaaggagcggacucgcg

SEQ ID NO: 3056960 - RNA, 19 nt, Artificial Sequence
  Description of Artificial Sequence: Synthetic oligonucleotide
acguacuggucacccaggg

SEQ ID NO: 3056961 - RNA, 19 nt, Artificial Sequence
  Description of Artificial Sequence: Synthetic oligonucleotide
gucacccagggcuuugagg

SEQ ID NO: 3056962 - RNA, 19 nt, Artificial Sequence
  Description of Artificial Sequence: Synthetic oligonucleotide
uugaacuuugucugcuauc

SEQ ID NO: 3056963 - RNA, 19 nt, Artificial Sequence
  Description of Artificial Sequence: Synthetic oligonucleotide
cuuugucugcuauccuuag

SEQ ID NO: 3056964 - RNA, 19 nt, Artificial Sequence
  Description of Artificial Sequence: Synthetic oligonucleotide
guacuggucacccagggcu

SEQ ID NO: 3056965 - RNA, 19 nt, Artificial Sequence
  Description of Artificial Sequence: Synthetic oligonucleotide
ucaucagcucuugcaauug

SEQ ID NO: 3056966 - RNA, 19 nt, Artificial Sequence
  Description of Artificial Sequence: Synthetic oligonucleotide
ucuugucaucagcucuugc

SEQ ID NO: 3056967 - RNA, 19 nt, Artificial Sequence
  Description of Artificial Sequence: Synthetic oligonucleotide
gcuuguugccauaacacag

SEQ ID NO: 3056968 - RNA, 19 nt, Artificial Sequence
  Description of Artificial Sequence: Synthetic oligonucleotide
uuuuccuguugaacuuugu

SEQ ID NO: 3056969 - RNA, 19 nt, Artificial Sequence
  Description of Artificial Sequence: Synthetic oligonucleotide
agccaacaguuuuaugucu

SEQ ID NO: 3056970 - RNA, 19 nt, Artificial Sequence
  Description of Artificial Sequence: Synthetic oligonucleotide
ucaucacgaaagucauuga

SEQ ID NO: 3056971 - RNA, 19 nt, Artificial Sequence
  Description of Artificial Sequence: Synthetic oligonucleotide
caaaacaagcuuuuccugu

SEQ ID NO: 3056972 - RNA, 19 nt, Artificial Sequence
  Description of Artificial Sequence: Synthetic oligonucleotide
gaaacgcugggccucgcca

SEQ ID NO: 3056973 - RNA, 19 nt, Artificial Sequence
  Description of Artificial Sequence: Synthetic oligonucleotide
cuucacguacuggucaccc

SEQ ID NO: 3056974 - RNA, 19 nt, Artificial Sequence
  Description of Artificial Sequence: Synthetic oligonucleotide
agcagcauaggccucccau

SEQ ID NO: 3056975 - RNA, 19 nt, Artificial Sequence
  Description of Artificial Sequence: Synthetic oligonucleotide
ugcuauccuuagcuuguug

SEQ ID NO: 3056976 - RNA, 19 nt, Artificial Sequence
  Description of Artificial Sequence: Synthetic oligonucleotide
cauucuugcaagaaacgcu

SEQ ID NO: 3056977 - RNA, 19 nt, Artificial Sequence
  Description of Artificial Sequence: Synthetic oligonucleotide
caagaugcgcuuguacaag

SEQ ID NO: 3056978 - RNA, 19 nt, Artificial Sequence
  Description of Artificial Sequence: Synthetic oligonucleotide
ggagagaggugccaaaaca

SEQ ID NO: 3056979 - RNA, 19 nt, Artificial Sequence
  Description of Artificial Sequence: Synthetic oligonucleotide
gagagaggugccaaaacaa

SEQ ID NO: 3056980 - RNA, 19 nt, Artificial Sequence
  Description of Artificial Sequence: Synthetic oligonucleotide
uaugucuccugaacucguc

SEQ ID NO: 3056981 - RNA, 19 nt, Artificial Sequence
  Description of Artificial Sequence: Synthetic oligonucleotide
uaguagcuucuugucauca

SEQ ID NO: 3056982 - RNA, 19 nt, Artificial Sequence
  Description of Artificial Sequence: Synthetic oligonucleotide
ucugcucaucacgaaaguc

SEQ ID NO: 3056983 - RNA, 19 nt, Artificial Sequence
  Description of Artificial Sequence: Synthetic oligonucleotide
aucagcucuugcaauuguc

SEQ ID NO: 3056984 - RNA, 19 nt, Artificial Sequence
  Description of Artificial Sequence: Synthetic oligonucleotide
auuggguuuaguagcuucu

SEQ ID NO: 3056985 - RNA, 19 nt, Artificial Sequence
  Description of Artificial Sequence: Synthetic oligonucleotide
gguuuaguagcuucuuguc

SEQ ID NO: 3056986 - RNA, 19 nt, Artificial Sequence
  Description of Artificial Sequence: Synthetic oligonucleotide
uccuucacguacuggucac

SEQ ID NO: 3056987 - RNA, 19 nt, Artificial Sequence
  Description of Artificial Sequence: Synthetic oligonucleotide
agcucuugcaauuguccaa

SEQ ID NO: 3056988 - RNA, 19 nt, Artificial Sequence
  Description of Artificial Sequence: Synthetic oligonucleotide
auccuuagcuuguugccau

SEQ ID NO: 3056989 - RNA, 19 nt, Artificial Sequence
  Description of Artificial Sequence: Synthetic oligonucleotide
cuuagcuuguugccauaac

SEQ ID NO: 3056990 - RNA, 19 nt, Artificial Sequence
  Description of Artificial Sequence: Synthetic oligonucleotide
ccauaacacagcagcauag

SEQ ID NO: 3056991 - RNA, 19 nt, Artificial Sequence
  Description of Artificial Sequence: Synthetic oligonucleotide
agcuuuuccuguugaacuu

SEQ ID NO: 3056992 - RNA, 19 nt, Artificial Sequence
  Description of Artificial Sequence: Synthetic oligonucleotide
ucgcgaaacgugccgcccc

SEQ ID NO: 3056993 - RNA, 19 nt, Artificial Sequence
  Description of Artificial Sequence: Synthetic oligonucleotide
ugccauaacacagcagcau

SEQ ID NO: 3056994 - RNA, 19 nt, Artificial Sequence
  Description of Artificial Sequence: Synthetic oligonucleotide
cacguacuggucacccagg

SEQ ID NO: 3056995 - RNA, 19 nt, Artificial Sequence
  Description of Artificial Sequence: Synthetic oligonucleotide
uguugaacuuugucugcua

SEQ ID NO: 3056996 - RNA, 19 nt, Artificial Sequence
  Description of Artificial Sequence: Synthetic oligonucleotide
aacucguccuucacguacu

SEQ ID NO: 3056997 - RNA, 19 nt, Artificial Sequence
  Description of Artificial Sequence: Synthetic oligonucleotide
cagcauaggccucccauuc

SEQ ID NO: 3056998 - RNA, 19 nt, Artificial Sequence
  Description of Artificial Sequence: Synthetic oligonucleotide
acaagcuuuuccuguugaa

SEQ ID NO: 3056999 - RNA, 19 nt, Artificial Sequence
  Description of Artificial Sequence: Synthetic oligonucleotide
uucacguacuggucaccca

SEQ ID NO: 3057000 - RNA, 19 nt, Artificial Sequence
  Description of Artificial Sequence: Synthetic oligonucleotide
uaggccucccauucuugca

SEQ ID NO: 3057001 - RNA, 19 nt, Artificial Sequence
  Description of Artificial Sequence: Synthetic oligonucleotide
cauaggccucccauucuug

SEQ ID NO: 3057002 - RNA, 19 nt, Artificial Sequence
  Description of Artificial Sequence: Synthetic oligonucleotide
ccauucuugcaagaaacgc

SEQ ID NO: 3057003 - RNA, 19 nt, Artificial Sequence
  Description of Artificial Sequence: Synthetic oligonucleotide
cugcaagaugcgcuuguac

SEQ ID NO: 3057004 - RNA, 19 nt, Artificial Sequence
  Description of Artificial Sequence: Synthetic oligonucleotide
caagaaacgcugggccucg

SEQ ID NO: 3057005 - RNA, 19 nt, Artificial Sequence
  Description of Artificial Sequence: Synthetic oligonucleotide
cccauucuugcaagaaacg

SEQ ID NO: 3057006 - RNA, 19 nt, Artificial Sequence
  Description of Artificial Sequence: Synthetic oligonucleotide
ccugaacucguccuucacg

SEQ ID NO: 3057007 - RNA, 19 nt, Artificial Sequence
  Description of Artificial Sequence: Synthetic oligonucleotide
cugaacucguccuucacgu

SEQ ID NO: 3057008 - RNA, 19 nt, Artificial Sequence
  Description of Artificial Sequence: Synthetic oligonucleotide
aggagcggacucgcgaaac

SEQ ID NO: 3057009 - RNA, 19 nt, Artificial Sequence
  Description of Artificial Sequence: Synthetic oligonucleotide
aacgugccgccccggcauc

SEQ ID NO: 3057010 - RNA, 19 nt, Artificial Sequence
  Description of Artificial Sequence: Synthetic oligonucleotide
aagaaacgcugggccucgc

SEQ ID NO: 3057011 - RNA, 19 nt, Artificial Sequence
  Description of Artificial Sequence: Synthetic oligonucleotide
agcugcaagaugcgcuugu

SEQ ID NO: 3057012 - RNA, 19 nt, Artificial Sequence
  Description of Artificial Sequence: Synthetic oligonucleotide
agcauaggccucccauucu

SEQ ID NO: 3057013 - RNA, 19 nt, Artificial Sequence
  Description of Artificial Sequence: Synthetic oligonucleotide
uucuugucaucagcucuug

SEQ ID NO: 3057014 - RNA, 19 nt, Artificial Sequence
  Description of Artificial Sequence: Synthetic oligonucleotide
aacgcugggccucgccaga

SEQ ID NO: 3057015 - RNA, 19 nt, Artificial Sequence
  Description of Artificial Sequence: Synthetic oligonucleotide
ccaacaguuuuaugucucc

SEQ ID NO: 3057016 - RNA, 19 nt, Artificial Sequence
  Description of Artificial Sequence: Synthetic oligonucleotide
gaaacgugccgccccggca

SEQ ID NO: 3057017 - RNA, 19 nt, Artificial Sequence
  Description of Artificial Sequence: Synthetic oligonucleotide
ugucugcuauccuuagcuu

SEQ ID NO: 3057018 - RNA, 19 nt, Artificial Sequence
  Description of Artificial Sequence: Synthetic oligonucleotide
gacucgcgaaacgugccgc

SEQ ID NO: 3057019 - RNA, 19 nt, Artificial Sequence
  Description of Artificial Sequence: Synthetic oligonucleotide
gcaauuguccaaucugcuc

SEQ ID NO: 3057020 - RNA, 19 nt, Artificial Sequence
  Description of Artificial Sequence: Synthetic oligonucleotide
aaggagcggacucgcgaaa

SEQ ID NO: 3057021 - RNA, 19 nt, Artificial Sequence
  Description of Artificial Sequence: Synthetic oligonucleotide
ucuccugaacucguccuuc

SEQ ID NO: 3057022 - RNA, 19 nt, Artificial Sequence
  Description of Artificial Sequence: Synthetic oligonucleotide
cagagcccggugcagcugc

SEQ ID NO: 3057023 - RNA, 19 nt, Artificial Sequence
  Description of Artificial Sequence: Synthetic oligonucleotide
guacaaggagcggacucgc

SEQ ID NO: 3057024 - RNA, 19 nt, Artificial Sequence
  Description of Artificial Sequence: Synthetic oligonucleotide
cagcucuugcaauugucca

SEQ ID NO: 3057025 - RNA, 19 nt, Artificial Sequence
  Description of Artificial Sequence: Synthetic oligonucleotide
ggacucgcgaaacgugccg

SEQ ID NO: 3057026 - RNA, 19 nt, Artificial Sequence
  Description of Artificial Sequence: Synthetic oligonucleotide
ccuguugaacuuugucugc

SEQ ID NO: 3057027 - RNA, 19 nt, Artificial Sequence
  Description of Artificial Sequence: Synthetic oligonucleotide
acuuugucugcuauccuua

SEQ ID NO: 3057028 - RNA, 19 nt, Artificial Sequence
  Description of Artificial Sequence: Synthetic oligonucleotide
ggagcggacucgcgaaacg

SEQ ID NO: 3057029 - RNA, 19 nt, Artificial Sequence
  Description of Artificial Sequence: Synthetic oligonucleotide
agcccggugcagcugcaag

SEQ ID NO: 3057030 - RNA, 19 nt, Artificial Sequence
  Description of Artificial Sequence: Synthetic oligonucleotide
aggccucccauucuugcaa

SEQ ID NO: 3057031 - RNA, 19 nt, Artificial Sequence
  Description of Artificial Sequence: Synthetic oligonucleotide
auuguccaaucugcucauc

SEQ ID NO: 3057032 - RNA, 19 nt, Artificial Sequence
  Description of Artificial Sequence: Synthetic oligonucleotide
gcaagaugcgcuuguacaa

SEQ ID NO: 3057033 - RNA, 19 nt, Artificial Sequence
  Description of Artificial Sequence: Synthetic oligonucleotide
ggguuuaguagcuucuugu

SEQ ID NO: 3057034 - RNA, 19 nt, Artificial Sequence
  Description of Artificial Sequence: Synthetic oligonucleotide
guugaacuuugucugcuau

SEQ ID NO: 3057035 - RNA, 19 nt, Artificial Sequence
  Description of Artificial Sequence: Synthetic oligonucleotide
acucguccuucacguacug

SEQ ID NO: 3057036 - RNA, 19 nt, Artificial Sequence
  Description of Artificial Sequence: Synthetic oligonucleotide
ugaacucguccuucacgua

SEQ ID NO: 3057037 - RNA, 19 nt, Artificial Sequence
  Description of Artificial Sequence: Synthetic oligonucleotide
uacuggucacccagggcuu

SEQ ID NO: 3057038 - RNA, 19 nt, Artificial Sequence
  Description of Artificial Sequence: Synthetic oligonucleotide
cugccgauuggguuuagua

SEQ ID NO: 3057039 - RNA, 19 nt, Artificial Sequence
  Description of Artificial Sequence: Synthetic oligonucleotide
caguuuuaugucuccugaa

SEQ ID NO: 3057040 - RNA, 19 nt, Artificial Sequence
  Description of Artificial Sequence: Synthetic oligonucleotide
caaggagcggacucgcgaa

SEQ ID NO: 3057041 - RNA, 19 nt, Artificial Sequence
  Description of Artificial Sequence: Synthetic oligonucleotide
uuggguuuaguagcuucuu

SEQ ID NO: 3057042 - RNA, 19 nt, Artificial Sequence
  Description of Artificial Sequence: Synthetic oligonucleotide
ggugcagcugcaagaugcg

SEQ ID NO: 3057043 - RNA, 19 nt, Artificial Sequence
  Description of Artificial Sequence: Synthetic oligonucleotide
cucgccagagccaacaguu

SEQ ID NO: 3057044 - RNA, 19 nt, Artificial Sequence
  Description of Artificial Sequence: Synthetic oligonucleotide
cucguccuucacguacugg

SEQ ID NO: 3057045 - RNA, 19 nt, Artificial Sequence
  Description of Artificial Sequence: Synthetic oligonucleotide
cucccauucuugcaagaaa

SEQ ID NO: 3057046 - RNA, 19 nt, Artificial Sequence
  Description of Artificial Sequence: Synthetic oligonucleotide
cucuugcaauuguccaauc

SEQ ID NO: 3057047 - RNA, 19 nt, Artificial Sequence
  Description of Artificial Sequence: Synthetic oligonucleotide
agaugcgcuuguacaagga

SEQ ID NO: 3057048 - RNA, 19 nt, Artificial Sequence
  Description of Artificial Sequence: Synthetic oligonucleotide
uucuuccgggagagaggug

SEQ ID NO: 3057049 - RNA, 19 nt, Artificial Sequence
  Description of Artificial Sequence: Synthetic oligonucleotide
gcuucuugucaucagcucu

SEQ ID NO: 3057050 - RNA, 19 nt, Artificial Sequence
  Description of Artificial Sequence: Synthetic oligonucleotide
aggugccaaaacaagcuuu

SEQ ID NO: 3057051 - RNA, 19 nt, Artificial Sequence
  Description of Artificial Sequence: Synthetic oligonucleotide
cagagccaacaguuuuaug

SEQ ID NO: 3057052 - RNA, 19 nt, Artificial Sequence
  Description of Artificial Sequence: Synthetic oligonucleotide
gggagagaggugccaaaac

SEQ ID NO: 3057053 - RNA, 19 nt, Artificial Sequence
  Description of Artificial Sequence: Synthetic oligonucleotide
ugggccucgccagagccaa

SEQ ID NO: 3057054 - RNA, 19 nt, Artificial Sequence
  Description of Artificial Sequence: Synthetic oligonucleotide
cucgcgaaacgugccgccc

SEQ ID NO: 3057055 - RNA, 19 nt, Artificial Sequence
  Description of Artificial Sequence: Synthetic oligonucleotide
gaacuuugucugcuauccu

SEQ ID NO: 3057056 - RNA, 19 nt, Artificial Sequence
  Description of Artificial Sequence: Synthetic oligonucleotide
gcuuguacaaggagcggac

SEQ ID NO: 3057057 - RNA, 19 nt, Artificial Sequence
  Description of Artificial Sequence: Synthetic oligonucleotide
agcggacucgcgaaacgug

SEQ ID NO: 3057058 - RNA, 19 nt, Artificial Sequence
  Description of Artificial Sequence: Synthetic oligonucleotide
gucaucagcucuugcaauu

SEQ ID NO: 3057059 - RNA, 19 nt, Artificial Sequence
  Description of Artificial Sequence: Synthetic oligonucleotide
ugccgccccggcaucgcgc

SEQ ID NO: 3057060 - RNA, 19 nt, Artificial Sequence
  Description of Artificial Sequence: Synthetic oligonucleotide
ucgccagagccaacaguuu

SEQ ID NO: 3057061 - RNA, 19 nt, Artificial Sequence
  Description of Artificial Sequence: Synthetic oligonucleotide
gccauaacacagcagcaua

SEQ ID NO: 3057062 - RNA, 19 nt, Artificial Sequence
  Description of Artificial Sequence: Synthetic oligonucleotide
uccuuagcuuguugccaua

SEQ ID NO: 3057063 - RNA, 19 nt, Artificial Sequence
  Description of Artificial Sequence: Synthetic oligonucleotide
gcaagaaacgcugggccuc

SEQ ID NO: 3057064 - RNA, 19 nt, Artificial Sequence
  Description of Artificial Sequence: Synthetic oligonucleotide
cuucuugucaucagcucuu

SEQ ID NO: 3057065 - RNA, 19 nt, Artificial Sequence
  Description of Artificial Sequence: Synthetic oligonucleotide
uuccgggagagaggugcca

SEQ ID NO: 3057066 - RNA, 19 nt, Artificial Sequence
  Description of Artificial Sequence: Synthetic oligonucleotide
ggccucccauucuugcaag

SEQ ID NO: 3057067 - RNA, 19 nt, Artificial Sequence
  Description of Artificial Sequence: Synthetic oligonucleotide
gugcagcugcaagaugcgc

SEQ ID NO: 3057068 - RNA, 19 nt, Artificial Sequence
  Description of Artificial Sequence: Synthetic oligonucleotide
gcggacucgcgaaacgugc

SEQ ID NO: 3057069 - RNA, 19 nt, Artificial Sequence
  Description of Artificial Sequence: Synthetic oligonucleotide
ggucacccagggcuuugag

SEQ ID NO: 3057070 - RNA, 19 nt, Artificial Sequence
  Description of Artificial Sequence: Synthetic oligonucleotide
gugccaaaacaagcuuuuc

SEQ ID NO: 3057071 - RNA, 19 nt, Artificial Sequence
  Description of Artificial Sequence: Synthetic oligonucleotide
cuguugaacuuugucugcu

SEQ ID NO: 3057072 - RNA, 19 nt, Artificial Sequence
  Description of Artificial Sequence: Synthetic oligonucleotide
gagcggacucgcgaaacgu

SEQ ID NO: 3057073 - RNA, 19 nt, Artificial Sequence
  Description of Artificial Sequence: Synthetic oligonucleotide
gugccgccccggcaucgcg

SEQ ID NO: 3057074 - RNA, 19 nt, Artificial Sequence
  Description of Artificial Sequence: Synthetic oligonucleotide
caucagcucuugcaauugu

SEQ ID NO: 3057075 - RNA, 19 nt, Artificial Sequence
  Description of Artificial Sequence: Synthetic oligonucleotide
cguacuggucacccagggc

SEQ ID NO: 3057076 - RNA, 19 nt, Artificial Sequence
  Description of Artificial Sequence: Synthetic oligonucleotide
acgugccgccccggcaucg

SEQ ID NO: 3057077 - RNA, 19 nt, Artificial Sequence
  Description of Artificial Sequence: Synthetic oligonucleotide
acgcugggccucgccagag

SEQ ID NO: 3057078 - RNA, 19 nt, Artificial Sequence
  Description of Artificial Sequence: Synthetic oligonucleotide
cuuguacaaggagcggacu

SEQ ID NO: 3057079 - RNA, 19 nt, Artificial Sequence
  Description of Artificial Sequence: Synthetic oligonucleotide
cagcugcaagaugcgcuug

SEQ ID NO: 3057080 - RNA, 19 nt, Artificial Sequence
  Description of Artificial Sequence: Synthetic oligonucleotide
cacgaaagucauugaguuu

SEQ ID NO: 3057081 - RNA, 19 nt, Artificial Sequence
  Description of Artificial Sequence: Synthetic oligonucleotide
cggacucgcgaaacgugcc

SEQ ID NO: 3057082 - RNA, 19 nt, Artificial Sequence
  Description of Artificial Sequence: Synthetic oligonucleotide
ggugccaaaacaagcuuuu

SEQ ID NO: 3057083 - RNA, 19 nt, Artificial Sequence
  Description of Artificial Sequence: Synthetic oligonucleotide
gcgcuuguacaaggagcgg

SEQ ID NO: 3057084 - RNA, 19 nt, Artificial Sequence
  Description of Artificial Sequence: Synthetic oligonucleotide
acuggucacccagggcuuu

SEQ ID NO: 3057085 - RNA, 19 nt, Artificial Sequence
  Description of Artificial Sequence: Synthetic oligonucleotide
gccucgccagagccaacag

SEQ ID NO: 3057086 - RNA, 19 nt, Artificial Sequence
  Description of Artificial Sequence: Synthetic oligonucleotide
gcccggugcagcugcaaga

SEQ ID NO: 3057087 - RNA, 19 nt, Artificial Sequence
  Description of Artificial Sequence: Synthetic oligonucleotide
ccuucacguacuggucacc

SEQ ID NO: 3057088 - RNA, 19 nt, Artificial Sequence
  Description of Artificial Sequence: Synthetic oligonucleotide
ccaaucugcucaucacgaa

SEQ ID NO: 3057089 - RNA, 19 nt, Artificial Sequence
  Description of Artificial Sequence: Synthetic oligonucleotide
cgaaacgugccgccccggc

SEQ ID NO: 3057090 - RNA, 19 nt, Artificial Sequence
  Description of Artificial Sequence: Synthetic oligonucleotide
gggcagagcccggugcagc

SEQ ID NO: 3057091 - RNA, 19 nt, Artificial Sequence
  Description of Artificial Sequence: Synthetic oligonucleotide
gcucuugcaauuguccaau

SEQ ID NO: 3057092 - RNA, 19 nt, Artificial Sequence
  Description of Artificial Sequence: Synthetic oligonucleotide
cgcgaaacgugccgccccg

SEQ ID NO: 3057093 - RNA, 19 nt, Artificial Sequence
  Description of Artificial Sequence: Synthetic oligonucleotide
ggccucgccagagccaaca

SEQ ID NO: 3057094 - RNA, 19 nt, Artificial Sequence
  Description of Artificial Sequence: Synthetic oligonucleotide
gccgccccggcaucgcgcc

SEQ ID NO: 3057095 - RNA, 19 nt, Artificial Sequence
  Description of Artificial Sequence: Synthetic oligonucleotide
gcagcugcaagaugcgcuu

SEQ ID NO: 3057096 - RNA, 19 nt, Artificial Sequence
  Description of Artificial Sequence: Synthetic oligonucleotide
gcauaggccucccauucuu

SEQ ID NO: 3057097 - RNA, 19 nt, Artificial Sequence
  Description of Artificial Sequence: Synthetic oligonucleotide
ccgauuggguuuaguagcu

SEQ ID NO: 3057098 - RNA, 19 nt, Artificial Sequence
  Description of Artificial Sequence: Synthetic oligonucleotide
gccucccauucuugcaaga

SEQ ID NO: 3057099 - RNA, 19 nt, Artificial Sequence
  Description of Artificial Sequence: Synthetic oligonucleotide
ggggcagagcccggugcag

SEQ ID NO: 3057100 - RNA, 19 nt, Artificial Sequence
  Description of Artificial Sequence: Synthetic oligonucleotide
gcagcauaggccucccauu

SEQ ID NO: 3057101 - RNA, 19 nt, Artificial Sequence
  Description of Artificial Sequence: Synthetic oligonucleotide
cgcuuguacaaggagcgga

SEQ ID NO: 3057102 - RNA, 19 nt, Artificial Sequence
  Description of Artificial Sequence: Synthetic oligonucleotide
gcgaaacgugccgccccgg

SEQ ID NO: 3057103 - RNA, 19 nt, Artificial Sequence
  Description of Artificial Sequence: Synthetic oligonucleotide
ccuuagcuuguugccauaa

SEQ ID NO: 3057104 - RNA, 19 nt, Artificial Sequence
  Description of Artificial Sequence: Synthetic oligonucleotide
ccucccauucuugcaagaa

SEQ ID NO: 3057105 - RNA, 19 nt, Artificial Sequence
  Description of Artificial Sequence: Synthetic oligonucleotide
agagcccggugcagcugca

SEQ ID NO: 3057106 - RNA, 19 nt, Artificial Sequence
  Description of Artificial Sequence: Synthetic oligonucleotide
gcuuuuccuguugaacuuu

SEQ ID NO: 3057107 - RNA, 19 nt, Artificial Sequence
  Description of Artificial Sequence: Synthetic oligonucleotide
cagcagcauaggccuccca

SEQ ID NO: 3057108 - RNA, 19 nt, Artificial Sequence
  Description of Artificial Sequence: Synthetic oligonucleotide
ccggugcagcugcaagaug

SEQ ID NO: 3057109 - RNA, 19 nt, Artificial Sequence
  Description of Artificial Sequence: Synthetic oligonucleotide
gagcccggugcagcugcaa

SEQ ID NO: 3057110 - RNA, 19 nt, Artificial Sequence
  Description of Artificial Sequence: Synthetic oligonucleotide
gccccggcaucgcgccgcg

SEQ ID NO: 3057111 - RNA, 19 nt, Artificial Sequence
  Description of Artificial Sequence: Synthetic oligonucleotide
ccucgccagagccaacagu

SEQ ID NO: 3057112 - RNA, 19 nt, Artificial Sequence
  Description of Artificial Sequence: Synthetic oligonucleotide
cgcugggccucgccagagc

SEQ ID NO: 3057113 - RNA, 19 nt, Artificial Sequence
  Description of Artificial Sequence: Synthetic oligonucleotide
cgggagagaggugccaaaa

SEQ ID NO: 3057114 - RNA, 19 nt, Artificial Sequence
  Description of Artificial Sequence: Synthetic oligonucleotide
cugcuauccuuagcuuguu

SEQ ID NO: 3057115 - RNA, 19 nt, Artificial Sequence
  Description of Artificial Sequence: Synthetic oligonucleotide
cccggugcagcugcaagau

SEQ ID NO: 3057116 - RNA, 19 nt, Artificial Sequence
  Description of Artificial Sequence: Synthetic oligonucleotide
cgugccgccccggcaucgc

SEQ ID NO: 3057117 - RNA, 19 nt, Artificial Sequence
  Description of Artificial Sequence: Synthetic oligonucleotide
cgccagagccaacaguuuu

SEQ ID NO: 3057118 - RNA, 19 nt, Artificial Sequence
  Description of Artificial Sequence: Synthetic oligonucleotide
gggccucgccagagccaac

SEQ ID NO: 3057119 - RNA, 19 nt, Artificial Sequence
  Description of Artificial Sequence: Synthetic oligonucleotide
cgauuggguuuaguagcuu

SEQ ID NO: 3057120 - RNA, 19 nt, Artificial Sequence
  Description of Artificial Sequence: Synthetic oligonucleotide
aaugaaauugcuuugucca

SEQ ID NO: 3057121 - RNA, 19 nt, Artificial Sequence
  Description of Artificial Sequence: Synthetic oligonucleotide
ucaaugaugaccauguugu

SEQ ID NO: 3057122 - RNA, 19 nt, Artificial Sequence
  Description of Artificial Sequence: Synthetic oligonucleotide
augaugaccauguuguugc

SEQ ID NO: 3057123 - RNA, 19 nt, Artificial Sequence
  Description of Artificial Sequence: Synthetic oligonucleotide
aacagagcaucaaacuugc

SEQ ID NO: 3057124 - RNA, 19 nt, Artificial Sequence
  Description of Artificial Sequence: Synthetic oligonucleotide
ucccugaggaagcugaggg

SEQ ID NO: 3057125 - RNA, 19 nt, Artificial Sequence
  Description of Artificial Sequence: Synthetic oligonucleotide
aaaagcagaggucaaugau

SEQ ID NO: 3057126 - RNA, 19 nt, Artificial Sequence
  Description of Artificial Sequence: Synthetic oligonucleotide
aauugcuuuguccaagcau

SEQ ID NO: 3057127 - RNA, 19 nt, Artificial Sequence
  Description of Artificial Sequence: Synthetic oligonucleotide
agggcuagcaaugaaauug

SEQ ID NO: 3057128 - RNA, 19 nt, Artificial Sequence
  Description of Artificial Sequence: Synthetic oligonucleotide
aaagcagaggucaaugaug

SEQ ID NO: 3057129 - RNA, 19 nt, Artificial Sequence
  Description of Artificial Sequence: Synthetic oligonucleotide
cuugcuuucccugaggaag

SEQ ID NO: 3057130 - RNA, 19 nt, Artificial Sequence
  Description of Artificial Sequence: Synthetic oligonucleotide
ugaacagagcaucaaacuu

SEQ ID NO: 3057131 - RNA, 19 nt, Artificial Sequence
  Description of Artificial Sequence: Synthetic oligonucleotide
agagcaucaaacuugcuuu

SEQ ID NO: 3057132 - RNA, 19 nt, Artificial Sequence
  Description of Artificial Sequence: Synthetic oligonucleotide
gaacagagcaucaaacuug

SEQ ID NO: 3057133 - RNA, 19 nt, Artificial Sequence
  Description of Artificial Sequence: Synthetic oligonucleotide
gucaaugaugaccauguug

SEQ ID NO: 3057134 - RNA, 19 nt, Artificial Sequence
  Description of Artificial Sequence: Synthetic oligonucleotide
gaaauugcuuuguccaagc

SEQ ID NO: 3057135 - RNA, 19 nt, Artificial Sequence
  Description of Artificial Sequence: Synthetic oligonucleotide
auugcuuuguccaagcaug

SEQ ID NO: 3057136 - RNA, 19 nt, Artificial Sequence
  Description of Artificial Sequence: Synthetic oligonucleotide
aaacuugcuuucccugagg

SEQ ID NO: 3057137 - RNA, 19 nt, Artificial Sequence
  Description of Artificial Sequence: Synthetic oligonucleotide
ugaaauugcuuuguccaag

SEQ ID NO: 3057138 - RNA, 19 nt, Artificial Sequence
  Description of Artificial Sequence: Synthetic oligonucleotide
uccaagagggcuagcaaug

SEQ ID NO: 3057139 - RNA, 19 nt, Artificial Sequence
  Description of Artificial Sequence: Synthetic oligonucleotide
aacuugcuuucccugagga

SEQ ID NO: 3057140 - RNA, 19 nt, Artificial Sequence
  Description of Artificial Sequence: Synthetic oligonucleotide
ucaaacuugcuuucccuga

SEQ ID NO: 3057141 - RNA, 19 nt, Artificial Sequence
  Description of Artificial Sequence: Synthetic oligonucleotide
aucaaacuugcuuucccug

SEQ ID NO: 3057142 - RNA, 19 nt, Artificial Sequence
  Description of Artificial Sequence: Synthetic oligonucleotide
aagcagaggucaaugauga

SEQ ID NO: 3057143 - RNA, 19 nt, Artificial Sequence
  Description of Artificial Sequence: Synthetic oligonucleotide
aaauugcuuuguccaagca

SEQ ID NO: 3057144 - RNA, 19 nt, Artificial Sequence
  Description of Artificial Sequence: Synthetic oligonucleotide
auguuguugcuguacucuc

SEQ ID NO: 3057145 - RNA, 19 nt, Artificial Sequence
  Description of Artificial Sequence: Synthetic oligonucleotide
uagcaaugaaauugcuuug

SEQ ID NO: 3057146 - RNA, 19 nt, Artificial Sequence
  Description of Artificial Sequence: Synthetic oligonucleotide
agcaucaaacuugcuuucc

SEQ ID NO: 3057147 - RNA, 19 nt, Artificial Sequence
  Description of Artificial Sequence: Synthetic oligonucleotide
cagaggucaaugaugacca

SEQ ID NO: 3057148 - RNA, 19 nt, Artificial Sequence
  Description of Artificial Sequence: Synthetic oligonucleotide
cuagcaaugaaauugcuuu

SEQ ID NO: 3057149 - RNA, 19 nt, Artificial Sequence
  Description of Artificial Sequence: Synthetic oligonucleotide
agcugaggguggcagaguc

SEQ ID NO: 3057150 - RNA, 19 nt, Artificial Sequence
  Description of Artificial Sequence: Synthetic oligonucleotide
uguuguugcuguacucucu

SEQ ID NO: 3057151 - RNA, 19 nt, Artificial Sequence
  Description of Artificial Sequence: Synthetic oligonucleotide
gaagcugaggguggcagag

SEQ ID NO: 3057152 - RNA, 19 nt, Artificial Sequence
  Description of Artificial Sequence: Synthetic oligonucleotide
caaacuugcuuucccugag

SEQ ID NO: 3057153 - RNA, 19 nt, Artificial Sequence
  Description of Artificial Sequence: Synthetic oligonucleotide
aggucaaugaugaccaugu

SEQ ID NO: 3057154 - RNA, 19 nt, Artificial Sequence
  Description of Artificial Sequence: Synthetic oligonucleotide
ucaggaggcucugacagcu

SEQ ID NO: 3057155 - RNA, 19 nt, Artificial Sequence
  Description of Artificial Sequence: Synthetic oligonucleotide
agcaaugaaauugcuuugu

SEQ ID NO: 3057156 - RNA, 19 nt, Artificial Sequence
  Description of Artificial Sequence: Synthetic oligonucleotide
uucuccaagagggcuagca

SEQ ID NO: 3057157 - RNA, 19 nt, Artificial Sequence
  Description of Artificial Sequence: Synthetic oligonucleotide
gaggucaaugaugaccaug

SEQ ID NO: 3057158 - RNA, 19 nt, Artificial Sequence
  Description of Artificial Sequence: Synthetic oligonucleotide
aagagggcuagcaaugaaa

SEQ ID NO: 3057159 - RNA, 19 nt, Artificial Sequence
  Description of Artificial Sequence: Synthetic oligonucleotide
augaaauugcuuuguccaa

SEQ ID NO: 3057160 - RNA, 19 nt, Artificial Sequence
  Description of Artificial Sequence: Synthetic oligonucleotide
uuucccugaggaagcugag

SEQ ID NO: 3057161 - RNA, 19 nt, Artificial Sequence
  Description of Artificial Sequence: Synthetic oligonucleotide
gcagaggucaaugaugacc

SEQ ID NO: 3057162 - RNA, 19 nt, Artificial Sequence
  Description of Artificial Sequence: Synthetic oligonucleotide
uugcuuuguccaagcaugu

SEQ ID NO: 3057163 - RNA, 19 nt, Artificial Sequence
  Description of Artificial Sequence: Synthetic oligonucleotide
uaguucuccaagagggcua

SEQ ID NO: 3057164 - RNA, 19 nt, Artificial Sequence
  Description of Artificial Sequence: Synthetic oligonucleotide
uucaggaggcucugacagc

SEQ ID NO: 3057165 - RNA, 19 nt, Artificial Sequence
  Description of Artificial Sequence: Synthetic oligonucleotide
aguucuccaagagggcuag

SEQ ID NO: 3057166 - RNA, 19 nt, Artificial Sequence
  Description of Artificial Sequence: Synthetic oligonucleotide
agcagaggucaaugaugac

SEQ ID NO: 3057167 - RNA, 19 nt, Artificial Sequence
  Description of Artificial Sequence: Synthetic oligonucleotide
uucccugaggaagcugagg

SEQ ID NO: 3057168 - RNA, 19 nt, Artificial Sequence
  Description of Artificial Sequence: Synthetic oligonucleotide
gagcaucaaacuugcuuuc

SEQ ID NO: 3057169 - RNA, 19 nt, Artificial Sequence
  Description of Artificial Sequence: Synthetic oligonucleotide
gaucacaccgcagggcaug

SEQ ID NO: 3057170 - RNA, 19 nt, Artificial Sequence
  Description of Artificial Sequence: Synthetic oligonucleotide
agagggcuagcaaugaaau

SEQ ID NO: 3057171 - RNA, 19 nt, Artificial Sequence
  Description of Artificial Sequence: Synthetic oligonucleotide
gcaucaaacuugcuuuccc

SEQ ID NO: 3057172 - RNA, 19 nt, Artificial Sequence
  Description of Artificial Sequence: Synthetic oligonucleotide
aggaggcucugacagcuga

SEQ ID NO: 3057173 - RNA, 19 nt, Artificial Sequence
  Description of Artificial Sequence: Synthetic oligonucleotide
caccgcagggcauggcugg

SEQ ID NO: 3057174 - RNA, 19 nt, Artificial Sequence
  Description of Artificial Sequence: Synthetic oligonucleotide
agaguccuucaggaggcuc

SEQ ID NO: 3057175 - RNA, 19 nt, Artificial Sequence
  Description of Artificial Sequence: Synthetic oligonucleotide
ugcuuuguccaagcaugug

SEQ ID NO: 3057176 - RNA, 19 nt, Artificial Sequence
  Description of Artificial Sequence: Synthetic oligonucleotide
acuugcuuucccugaggaa

SEQ ID NO: 3057177 - RNA, 19 nt, Artificial Sequence
  Description of Artificial Sequence: Synthetic oligonucleotide
ugaugaccauguuguugcu

SEQ ID NO: 3057178 - RNA, 19 nt, Artificial Sequence
  Description of Artificial Sequence: Synthetic oligonucleotide
gaggguggcagaguccuuc

SEQ ID NO: 3057179 - RNA, 19 nt, Artificial Sequence
  Description of Artificial Sequence: Synthetic oligonucleotide
aggcucugacagcugaaaa

SEQ ID NO: 3057180 - RNA, 19 nt, Artificial Sequence
  Description of Artificial Sequence: Synthetic oligonucleotide
caucaaacuugcuuucccu

SEQ ID NO: 3057181 - RNA, 19 nt, Artificial Sequence
  Description of Artificial Sequence: Synthetic oligonucleotide
aucacaccgcagggcaugg

SEQ ID NO: 3057182 - RNA, 19 nt, Artificial Sequence
  Description of Artificial Sequence: Synthetic oligonucleotide
cagagcaucaaacuugcuu

SEQ ID NO: 3057183 - RNA, 19 nt, Artificial Sequence
  Description of Artificial Sequence: Synthetic oligonucleotide
cagggcauggcugggucug

SEQ ID NO: 3057184 - RNA, 19 nt, Artificial Sequence
  Description of Artificial Sequence: Synthetic oligonucleotide
ugaccauguuguugcugua

SEQ ID NO: 3057185 - RNA, 19 nt, Artificial Sequence
  Description of Artificial Sequence: Synthetic oligonucleotide
gaguccuucaggaggcucu

SEQ ID NO: 3057186 - RNA, 19 nt, Artificial Sequence
  Description of Artificial Sequence: Synthetic oligonucleotide
cuccaagagggcuagcaau

SEQ ID NO: 3057187 - RNA, 19 nt, Artificial Sequence
  Description of Artificial Sequence: Synthetic oligonucleotide
gaggcucugacagcugaaa

SEQ ID NO: 3057188 - RNA, 19 nt, Artificial Sequence
  Description of Artificial Sequence: Synthetic oligonucleotide
agaggucaaugaugaccau

SEQ ID NO: 3057189 - RNA, 19 nt, Artificial Sequence
  Description of Artificial Sequence: Synthetic oligonucleotide
acaccgcagggcauggcug

SEQ ID NO: 3057190 - RNA, 19 nt, Artificial Sequence
  Description of Artificial Sequence: Synthetic oligonucleotide
caagagggcuagcaaugaa

SEQ ID NO: 3057191 - RNA, 19 nt, Artificial Sequence
  Description of Artificial Sequence: Synthetic oligonucleotide
ccauguuguugcuguacuc

SEQ ID NO: 3057192 - RNA, 19 nt, Artificial Sequence
  Description of Artificial Sequence: Synthetic oligonucleotide
cugaggguggcagaguccu

SEQ ID NO: 3057193 - RNA, 19 nt, Artificial Sequence
  Description of Artificial Sequence: Synthetic oligonucleotide
gagggcuagcaaugaaauu

SEQ ID NO: 3057194 - RNA, 19 nt, Artificial Sequence
  Description of Artificial Sequence: Synthetic oligonucleotide
ucacaccgcagggcauggc

SEQ ID NO: 3057195 - RNA, 19 nt, Artificial Sequence
  Description of Artificial Sequence: Synthetic oligonucleotide
cacaccgcagggcauggcu

SEQ ID NO: 3057196 - RNA, 19 nt, Artificial Sequence
  Description of Artificial Sequence: Synthetic oligonucleotide
ugaggguggcagaguccuu

SEQ ID NO: 3057197 - RNA, 19 nt, Artificial Sequence
  Description of Artificial Sequence: Synthetic oligonucleotide
ggguggcagaguccuucag

SEQ ID NO: 3057198 - RNA, 19 nt, Artificial Sequence
  Description of Artificial Sequence: Synthetic oligonucleotide
gcauggcugggucugugaa

SEQ ID NO: 3057199 - RNA, 19 nt, Artificial Sequence
  Description of Artificial Sequence: Synthetic oligonucleotide
acagagcaucaaacuugcu

SEQ ID NO: 3057200 - RNA, 19 nt, Artificial Sequence
  Description of Artificial Sequence: Synthetic oligonucleotide
gcugaggguggcagagucc

SEQ ID NO: 3057201 - RNA, 19 nt, Artificial Sequence
  Description of Artificial Sequence: Synthetic oligonucleotide
ggcauggcugggucuguga

SEQ ID NO: 3057202 - RNA, 19 nt, Artificial Sequence
  Description of Artificial Sequence: Synthetic oligonucleotide
gcuagcaaugaaauugcuu

SEQ ID NO: 3057203 - RNA, 19 nt, Artificial Sequence
  Description of Artificial Sequence: Synthetic oligonucleotide
guucuccaagagggcuagc

SEQ ID NO: 3057204 - RNA, 19 nt, Artificial Sequence
  Description of Artificial Sequence: Synthetic oligonucleotide
caaugaugaccauguuguu

SEQ ID NO: 3057205 - RNA, 19 nt, Artificial Sequence
  Description of Artificial Sequence: Synthetic oligonucleotide
ccaagagggcuagcaauga

SEQ ID NO: 3057206 - RNA, 19 nt, Artificial Sequence
  Description of Artificial Sequence: Synthetic oligonucleotide
agggcauggcugggucugu

SEQ ID NO: 3057207 - RNA, 19 nt, Artificial Sequence
  Description of Artificial Sequence: Synthetic oligonucleotide
gggcauggcugggucugug

SEQ ID NO: 3057208 - RNA, 19 nt, Artificial Sequence
  Description of Artificial Sequence: Synthetic oligonucleotide
cgcagggcauggcuggguc

SEQ ID NO: 3057209 - RNA, 19 nt, Artificial Sequence
  Description of Artificial Sequence: Synthetic oligonucleotide
gcagggcauggcugggucu

SEQ ID NO: 3057210 - RNA, 19 nt, Artificial Sequence
  Description of Artificial Sequence: Synthetic oligonucleotide
cagaguccuucaggaggcu

SEQ ID NO: 3057211 - RNA, 19 nt, Artificial Sequence
  Description of Artificial Sequence: Synthetic oligonucleotide
ccgcagggcauggcugggu

SEQ ID NO: 3057212 - RNA, 19 nt, Artificial Sequence
  Description of Artificial Sequence: Synthetic oligonucleotide
aauuaaggcauuuuggagg

SEQ ID NO: 3057213 - RNA, 19 nt, Artificial Sequence
  Description of Artificial Sequence: Synthetic oligonucleotide
uuuauuauaacaaaguauc

SEQ ID NO: 3057214 - RNA, 19 nt, Artificial Sequence
  Description of Artificial Sequence: Synthetic oligonucleotide
acugcaaacaagcacaucc

SEQ ID NO: 3057215 - RNA, 19 nt, Artificial Sequence
  Description of Artificial Sequence: Synthetic oligonucleotide
aaagcucuuaacuaggcac

SEQ ID NO: 3057216 - RNA, 19 nt, Artificial Sequence
  Description of Artificial Sequence: Synthetic oligonucleotide
aaugaaagacugcacaugg

SEQ ID NO: 3057217 - RNA, 19 nt, Artificial Sequence
  Description of Artificial Sequence: Synthetic oligonucleotide
aaaacaaucuguccuggcc

SEQ ID NO: 3057218 - RNA, 19 nt, Artificial Sequence
  Description of Artificial Sequence: Synthetic oligonucleotide
aaugaaugaaugaacaaac

SEQ ID NO: 3057219 - RNA, 19 nt, Artificial Sequence
  Description of Artificial Sequence: Synthetic oligonucleotide
ugaaugaacaaacaaauaa

SEQ ID NO: 3057220 - RNA, 19 nt, Artificial Sequence
  Description of Artificial Sequence: Synthetic oligonucleotide
aaaauuaaggcauuuugga

SEQ ID NO: 3057221 - RNA, 19 nt, Artificial Sequence
  Description of Artificial Sequence: Synthetic oligonucleotide
uaaaauguaaaugaaagac

SEQ ID NO: 3057222 - RNA, 19 nt, Artificial Sequence
  Description of Artificial Sequence: Synthetic oligonucleotide
aacaaauaaaauguaaaug

SEQ ID NO: 3057223 - RNA, 19 nt, Artificial Sequence
  Description of Artificial Sequence: Synthetic oligonucleotide
aaauuaaggcauuuuggag

SEQ ID NO: 3057224 - RNA, 19 nt, Artificial Sequence
  Description of Artificial Sequence: Synthetic oligonucleotide
uuugaaagcucuuaacuag

SEQ ID NO: 3057225 - RNA, 19 nt, Artificial Sequence
  Description of Artificial Sequence: Synthetic oligonucleotide
aaauguaaaugaaagacug

SEQ ID NO: 3057226 - RNA, 19 nt, Artificial Sequence
  Description of Artificial Sequence: Synthetic oligonucleotide
uuaacuaggcacaagggca

SEQ ID NO: 3057227 - RNA, 19 nt, Artificial Sequence
  Description of Artificial Sequence: Synthetic oligonucleotide
uacccaaugagacacaggc

SEQ ID NO: 3057228 - RNA, 19 nt, Artificial Sequence
  Description of Artificial Sequence: Synthetic oligonucleotide
aaaucugaggucaacaaag

SEQ ID NO: 3057229 - RNA, 19 nt, Artificial Sequence
  Description of Artificial Sequence: Synthetic oligonucleotide
ugaaagacugcacauggag

SEQ ID NO: 3057230 - RNA, 19 nt, Artificial Sequence
  Description of Artificial Sequence: Synthetic oligonucleotide
acaaaauuaaggcauuuug

SEQ ID NO: 3057231 - RNA, 19 nt, Artificial Sequence
  Description of Artificial Sequence: Synthetic oligonucleotide
aaagacugcacauggagga

SEQ ID NO: 3057232 - RNA, 19 nt, Artificial Sequence
  Description of Artificial Sequence: Synthetic oligonucleotide
auuaaggcauuuuggaggg

SEQ ID NO: 3057233 - RNA, 19 nt, Artificial Sequence
  Description of Artificial Sequence: Synthetic oligonucleotide
aaugaaugaacaaacaaau

SEQ ID NO: 3057234 - RNA, 19 nt, Artificial Sequence
  Description of Artificial Sequence: Synthetic oligonucleotide
aaugucauuguacuuuuga

SEQ ID NO: 3057235 - RNA, 19 nt, Artificial Sequence
  Description of Artificial Sequence: Synthetic oligonucleotide
auuauaacaaaguaucaaa

SEQ ID NO: 3057236 - RNA, 19 nt, Artificial Sequence
  Description of Artificial Sequence: Synthetic oligonucleotide
aauguaaaugaaagacugc

SEQ ID NO: 3057237 - RNA, 19 nt, Artificial Sequence
  Description of Artificial Sequence: Synthetic oligonucleotide
aaagcauuuauuauaacaa

SEQ ID NO: 3057238 - RNA, 19 nt, Artificial Sequence
  Description of Artificial Sequence: Synthetic oligonucleotide
uuauaacaaaguaucaaaa

SEQ ID NO: 3057239 - RNA, 19 nt, Artificial Sequence
  Description of Artificial Sequence: Synthetic oligonucleotide
ugaugcacuaugcacaccc

SEQ ID NO: 3057240 - RNA, 19 nt, Artificial Sequence
  Description of Artificial Sequence: Synthetic oligonucleotide
ucuuaacuaggcacaaggg

SEQ ID NO: 3057241 - RNA, 19 nt, Artificial Sequence
  Description of Artificial Sequence: Synthetic oligonucleotide
aaaauguaaaugaaagacu

SEQ ID NO: 3057242 - RNA, 19 nt, Artificial Sequence
  Description of Artificial Sequence: Synthetic oligonucleotide
uccucauccccacauaggg

SEQ ID NO: 3057243 - RNA, 19 nt, Artificial Sequence
  Description of Artificial Sequence: Synthetic oligonucleotide
uuauuauaacaaaguauca

SEQ ID NO: 3057244 - RNA, 19 nt, Artificial Sequence
  Description of Artificial Sequence: Synthetic oligonucleotide
auaaaauguaaaugaaaga

SEQ ID NO: 3057245 - RNA, 19 nt, Artificial Sequence
  Description of Artificial Sequence: Synthetic oligonucleotide
cuuaacuaggcacaagggc

SEQ ID NO: 3057246 - RNA, 19 nt, Artificial Sequence
  Description of Artificial Sequence: Synthetic oligonucleotide
uugaaagcucuuaacuagg

SEQ ID NO: 3057247 - RNA, 19 nt, Artificial Sequence
  Description of Artificial Sequence: Synthetic oligonucleotide
cucuuaacuaggcacaagg

SEQ ID NO: 3057248 - RNA, 19 nt, Artificial Sequence
  Description of Artificial Sequence: Synthetic oligonucleotide
acuuuugaaagcucuuaac

SEQ ID NO: 3057249 - RNA, 19 nt, Artificial Sequence
  Description of Artificial Sequence: Synthetic oligonucleotide
aaugaacaaacaaauaaaa

SEQ ID NO: 3057250 - RNA, 19 nt, Artificial Sequence
  Description of Artificial Sequence: Synthetic oligonucleotide
caggccacaaaauuaaggc

SEQ ID NO: 3057251 - RNA, 19 nt, Artificial Sequence
  Description of Artificial Sequence: Synthetic oligonucleotide
auggaggaagcuucuaccc

SEQ ID NO: 3057252 - RNA, 19 nt, Artificial Sequence
  Description of Artificial Sequence: Synthetic oligonucleotide
ugagacacaggccacaaaa

SEQ ID NO: 3057253 - RNA, 19 nt, Artificial Sequence
  Description of Artificial Sequence: Synthetic oligonucleotide
uuggagggaaaucugaggu

SEQ ID NO: 3057254 - RNA, 19 nt, Artificial Sequence
  Description of Artificial Sequence: Synthetic oligonucleotide
acacccacccagcagaagc

SEQ ID NO: 3057255 - RNA, 19 nt, Artificial Sequence
  Description of Artificial Sequence: Synthetic oligonucleotide
ggcacaagcacacagaccc

SEQ ID NO: 3057256 - RNA, 19 nt, Artificial Sequence
  Description of Artificial Sequence: Synthetic oligonucleotide
uuuggagggaaaucugagg

SEQ ID NO: 3057257 - RNA, 19 nt, Artificial Sequence
  Description of Artificial Sequence: Synthetic oligonucleotide
ucugaggucaacaaagcau

SEQ ID NO: 3057258 - RNA, 19 nt, Artificial Sequence
  Description of Artificial Sequence: Synthetic oligonucleotide
aaauaaaauguaaaugaaa

SEQ ID NO: 3057259 - RNA, 19 nt, Artificial Sequence
  Description of Artificial Sequence: Synthetic oligonucleotide
uauuauaacaaaguaucaa

SEQ ID NO: 3057260 - RNA, 19 nt, Artificial Sequence
  Description of Artificial Sequence: Synthetic oligonucleotide
uuuuggagggaaaucugag

SEQ ID NO: 3057261 - RNA, 19 nt, Artificial Sequence
  Description of Artificial Sequence: Synthetic oligonucleotide
uuuugaaagcucuuaacua

SEQ ID NO: 3057262 - RNA, 19 nt, Artificial Sequence
  Description of Artificial Sequence: Synthetic oligonucleotide
caaagcauuuauuauaaca

SEQ ID NO: 3057263 - RNA, 19 nt, Artificial Sequence
  Description of Artificial Sequence: Synthetic oligonucleotide
aaucugaggucaacaaagc

SEQ ID NO: 3057264 - RNA, 19 nt, Artificial Sequence
  Description of Artificial Sequence: Synthetic oligonucleotide
  modified_base (2)..(2): a, c, u, g, unknown or other
anagaggcuauggugagca

SEQ ID NO: 3057265 - RNA, 19 nt, Artificial Sequence
  Description of Artificial Sequence: Synthetic oligonucleotide
uguaaaugaaagacugcac

SEQ ID NO: 3057266 - RNA, 19 nt, Artificial Sequence
  Description of Artificial Sequence: Synthetic oligonucleotide
acaagcacauccucauccc

SEQ ID NO: 3057267 - RNA, 19 nt, Artificial Sequence
  Description of Artificial Sequence: Synthetic oligonucleotide
aaaugaaagacugcacaug

SEQ ID NO: 3057268 - RNA, 19 nt, Artificial Sequence
  Description of Artificial Sequence: Synthetic oligonucleotide
uaaaugaaagacugcacau

SEQ ID NO: 3057269 - RNA, 19 nt, Artificial Sequence
  Description of Artificial Sequence: Synthetic oligonucleotide
uuguacuuuugaaagcucu

SEQ ID NO: 3057270 - RNA, 19 nt, Artificial Sequence
  Description of Artificial Sequence: Synthetic oligonucleotide
gaaugaaugaacaaacaaa

SEQ ID NO: 3057271 - RNA, 19 nt, Artificial Sequence
  Description of Artificial Sequence: Synthetic oligonucleotide
acauggaggaagcuucuac

SEQ ID NO: 3057272 - RNA, 19 nt, Artificial Sequence
  Description of Artificial Sequence: Synthetic oligonucleotide
ugcaugaugcacuaugcac

SEQ ID NO: 3057273 - RNA, 19 nt, Artificial Sequence
  Description of Artificial Sequence: Synthetic oligonucleotide
aacaaagcauuuauuauaa

SEQ ID NO: 3057274 - RNA, 19 nt, Artificial Sequence
  Description of Artificial Sequence: Synthetic oligonucleotide
gaaagacugcacauggagg

SEQ ID NO: 3057275 - RNA, 19 nt, Artificial Sequence
  Description of Artificial Sequence: Synthetic oligonucleotide
ucauuguacuuuugaaagc

SEQ ID NO: 3057276 - RNA, 19 nt, Artificial Sequence
  Description of Artificial Sequence: Synthetic oligonucleotide
cuggccacugcaaacaagc

SEQ ID NO: 3057277 - RNA, 19 nt, Artificial Sequence
  Description of Artificial Sequence: Synthetic oligonucleotide
auguaaaugaaagacugca

SEQ ID NO: 3057278 - RNA, 19 nt, Artificial Sequence
  Description of Artificial Sequence: Synthetic oligonucleotide
ugaaagcucuuaacuaggc

SEQ ID NO: 3057279 - RNA, 19 nt, Artificial Sequence
  Description of Artificial Sequence: Synthetic oligonucleotide
ugcacauggaggaagcuuc

SEQ ID NO: 3057280 - RNA, 19 nt, Artificial Sequence
  Description of Artificial Sequence: Synthetic oligonucleotide
aaacaagcacauccucauc

SEQ ID NO: 3057281 - RNA, 19 nt, Artificial Sequence
  Description of Artificial Sequence: Synthetic oligonucleotide
cauggaggaagcuucuacc

SEQ ID NO: 3057282 - RNA, 19 nt, Artificial Sequence
  Description of Artificial Sequence: Synthetic oligonucleotide
gucaacaaagcauuuauua

SEQ ID NO: 3057283 - RNA, 19 nt, Artificial Sequence
  Description of Artificial Sequence: Synthetic oligonucleotide
ugcacuaugcacacccacc

SEQ ID NO: 3057284 - RNA, 19 nt, Artificial Sequence
  Description of Artificial Sequence: Synthetic oligonucleotide
ugcacacccacccagcaga

SEQ ID NO: 3057285 - RNA, 19 nt, Artificial Sequence
  Description of Artificial Sequence: Synthetic oligonucleotide
agugcaugaugcacuaugc

SEQ ID NO: 3057286 - RNA, 19 nt, Artificial Sequence
  Description of Artificial Sequence: Synthetic oligonucleotide
uacuuuugaaagcucuuaa

SEQ ID NO: 3057287 - RNA, 19 nt, Artificial Sequence
  Description of Artificial Sequence: Synthetic oligonucleotide
ugucucaggcacaagcaca

SEQ ID NO: 3057288 - RNA, 19 nt, Artificial Sequence
  Description of Artificial Sequence: Synthetic oligonucleotide
augucucaggcacaagcac

SEQ ID NO: 3057289 - RNA, 19 nt, Artificial Sequence
  Description of Artificial Sequence: Synthetic oligonucleotide
  modified_base (13)..(13): a, c, u, g, unknown or other
ccacauagggganagaggc

SEQ ID NO: 3057290 - RNA, 19 nt, Artificial Sequence
  Description of Artificial Sequence: Synthetic oligonucleotide
acaaagcauuuauuauaac

SEQ ID NO: 3057291 - RNA, 19 nt, Artificial Sequence
  Description of Artificial Sequence: Synthetic oligonucleotide
gugagcaugucucaggcac

SEQ ID NO: 3057292 - RNA, 19 nt, Artificial Sequence
  Description of Artificial Sequence: Synthetic oligonucleotide
cuucuacccaaugagacac

SEQ ID NO: 3057293 - RNA, 19 nt, Artificial Sequence
  Description of Artificial Sequence: Synthetic oligonucleotide
agcacacagacccagugca

SEQ ID NO: 3057294 - RNA, 19 nt, Artificial Sequence
  Description of Artificial Sequence: Synthetic oligonucleotide
uggugagcaugucucaggc

SEQ ID NO: 3057295 - RNA, 19 nt, Artificial Sequence
  Description of Artificial Sequence: Synthetic oligonucleotide
aggucaacaaagcauuuau

SEQ ID NO: 3057296 - RNA, 19 nt, Artificial Sequence
  Description of Artificial Sequence: Synthetic oligonucleotide
aagcaguggaagcugugca

SEQ ID NO: 3057297 - RNA, 19 nt, Artificial Sequence
  Description of Artificial Sequence: Synthetic oligonucleotide
acaaacaaauaaaauguaa

SEQ ID NO: 3057298 - RNA, 19 nt, Artificial Sequence
  Description of Artificial Sequence: Synthetic oligonucleotide
ucaggcacaagcacacaga

SEQ ID NO: 3057299 - RNA, 19 nt, Artificial Sequence
  Description of Artificial Sequence: Synthetic oligonucleotide
augcacuaugcacacccac

SEQ ID NO: 3057300 - RNA, 19 nt, Artificial Sequence
  Description of Artificial Sequence: Synthetic oligonucleotide
acaggccacaaaauuaagg

SEQ ID NO: 3057301 - RNA, 19 nt, Artificial Sequence
  Description of Artificial Sequence: Synthetic oligonucleotide
gaaaucugaggucaacaaa

SEQ ID NO: 3057302 - RNA, 19 nt, Artificial Sequence
  Description of Artificial Sequence: Synthetic oligonucleotide
caugaugcacuaugcacac

SEQ ID NO: 3057303 - RNA, 19 nt, Artificial Sequence
  Description of Artificial Sequence: Synthetic oligonucleotide
cuuuugaaagcucuuaacu

SEQ ID NO: 3057304 - RNA, 19 nt, Artificial Sequence
  Description of Artificial Sequence: Synthetic oligonucleotide
auggugagcaugucucagg

SEQ ID NO: 3057305 - RNA, 19 nt, Artificial Sequence
  Description of Artificial Sequence: Synthetic oligonucleotide
cauuuuggagggaaaucug

SEQ ID NO: 3057306 - RNA, 19 nt, Artificial Sequence
  Description of Artificial Sequence: Synthetic oligonucleotide
  modified_base (8)..(8): a, c, u, g, unknown or other
uagggganagaggcuaugg

SEQ ID NO: 3057307 - RNA, 19 nt, Artificial Sequence
  Description of Artificial Sequence: Synthetic oligonucleotide
ucuacccaaugagacacag

SEQ ID NO: 3057308 - RNA, 19 nt, Artificial Sequence
  Description of Artificial Sequence: Synthetic oligonucleotide
cagacccagugcaugaugc

SEQ ID NO: 3057309 - RNA, 19 nt, Artificial Sequence
  Description of Artificial Sequence: Synthetic oligonucleotide
uaacuaggcacaagggcaa

SEQ ID NO: 3057310 - RNA, 19 nt, Artificial Sequence
  Description of Artificial Sequence: Synthetic oligonucleotide
caacaaagcauuuauuaua

SEQ ID NO: 3057311 - RNA, 19 nt, Artificial Sequence
  Description of Artificial Sequence: Synthetic oligonucleotide
uguacuuuugaaagcucuu

SEQ ID NO: 3057312 - RNA, 19 nt, Artificial Sequence
  Description of Artificial Sequence: Synthetic oligonucleotide
gaaagcucuuaacuaggca

SEQ ID NO: 3057313 - RNA, 19 nt, Artificial Sequence
  Description of Artificial Sequence: Synthetic oligonucleotide
uggaggaagcuucuaccca

SEQ ID NO: 3057314 - RNA, 19 nt, Artificial Sequence
  Description of Artificial Sequence: Synthetic oligonucleotide
uauggugagcaugucucag

SEQ ID NO: 3057315 - RNA, 19 nt, Artificial Sequence
  Description of Artificial Sequence: Synthetic oligonucleotide
augucauuguacuuuugaa

SEQ ID NO: 3057316 - RNA, 19 nt, Artificial Sequence
  Description of Artificial Sequence: Synthetic oligonucleotide
ugcaaacaagcacauccuc

SEQ ID NO: 3057317 - RNA, 19 nt, Artificial Sequence
  Description of Artificial Sequence: Synthetic oligonucleotide
cauccucauccccacauag

SEQ ID NO: 3057318 - RNA, 19 nt, Artificial Sequence
  Description of Artificial Sequence: Synthetic oligonucleotide
uaugcacacccacccagca

SEQ ID NO: 3057319 - RNA, 19 nt, Artificial Sequence
  Description of Artificial Sequence: Synthetic oligonucleotide
cucaggcacaagcacacag

SEQ ID NO: 3057320 - RNA, 19 nt, Artificial Sequence
  Description of Artificial Sequence: Synthetic oligonucleotide
agcaguggaagcugugcag

SEQ ID NO: 3057321 - RNA, 19 nt, Artificial Sequence
  Description of Artificial Sequence: Synthetic oligonucleotide
augaacaaacaaauaaaau

SEQ ID NO: 3057322 - RNA, 19 nt, Artificial Sequence
  Description of Artificial Sequence: Synthetic oligonucleotide
cagugcaugaugcacuaug

SEQ ID NO: 3057323 - RNA, 19 nt, Artificial Sequence
  Description of Artificial Sequence: Synthetic oligonucleotide
gaagcaguggaagcugugc

SEQ ID NO: 3057324 - RNA, 19 nt, Artificial Sequence
  Description of Artificial Sequence: Synthetic oligonucleotide
aggccacaaaauuaaggca

SEQ ID NO: 3057325 - RNA, 19 nt, Artificial Sequence
  Description of Artificial Sequence: Synthetic oligonucleotide
aucugaggucaacaaagca

SEQ ID NO: 3057326 - RNA, 19 nt, Artificial Sequence
  Description of Artificial Sequence: Synthetic oligonucleotide
aagcucuuaacuaggcaca

SEQ ID NO: 3057327 - RNA, 19 nt, Artificial Sequence
  Description of Artificial Sequence: Synthetic oligonucleotide
  modified_base (6)..(6): a, c, u, g, unknown or other
gggganagaggcuauggug

SEQ ID NO: 3057328 - RNA, 19 nt, Artificial Sequence
  Description of Artificial Sequence: Synthetic oligonucleotide
cucauccccacauagggga

SEQ ID NO: 3057329 - RNA, 19 nt, Artificial Sequence
  Description of Artificial Sequence: Synthetic oligonucleotide
  modified_base (7)..(7): a, c, u, g, unknown or other
agggganagaggcuauggu

SEQ ID NO: 3057330 - RNA, 19 nt, Artificial Sequence
  Description of Artificial Sequence: Synthetic oligonucleotide
uaaggcauuuuggagggaa

SEQ ID NO: 3057331 - RNA, 19 nt, Artificial Sequence
  Description of Artificial Sequence: Synthetic oligonucleotide
agacacaggccacaaaauu

SEQ ID NO: 3057332 - RNA, 19 nt, Artificial Sequence
  Description of Artificial Sequence: Synthetic oligonucleotide
auuuuggagggaaaucuga

SEQ ID NO: 3057333 - RNA, 19 nt, Artificial Sequence
  Description of Artificial Sequence: Synthetic oligonucleotide
guggaagcugugcagacuc

SEQ ID NO: 3057334 - RNA, 19 nt, Artificial Sequence
  Description of Artificial Sequence: Synthetic oligonucleotide
auuguacuuuugaaagcuc

SEQ ID NO: 3057335 - RNA, 19 nt, Artificial Sequence
  Description of Artificial Sequence: Synthetic oligonucleotide
gcaugucucaggcacaagc

SEQ ID NO: 3057336 - RNA, 19 nt, Artificial Sequence
  Description of Artificial Sequence: Synthetic oligonucleotide
cuaugcacacccacccagc

SEQ ID NO: 3057337 - RNA, 19 nt, Artificial Sequence
  Description of Artificial Sequence: Synthetic oligonucleotide
caggcacaagcacacagac

SEQ ID NO: 3057338 - RNA, 19 nt, Artificial Sequence
  Description of Artificial Sequence: Synthetic oligonucleotide
caagcacacagacccagug

SEQ ID NO: 3057339 - RNA, 19 nt, Artificial Sequence
  Description of Artificial Sequence: Synthetic oligonucleotide
  modified_base (4)..(4): a, c, u, g, unknown or other
gganagaggcuauggugag

SEQ ID NO: 3057340 - RNA, 19 nt, Artificial Sequence
  Description of Artificial Sequence: Synthetic oligonucleotide
agcagaagcaguggaagcu

SEQ ID NO: 3057341 - RNA, 19 nt, Artificial Sequence
  Description of Artificial Sequence: Synthetic oligonucleotide
caugucucaggcacaagca

SEQ ID NO: 3057342 - RNA, 19 nt, Artificial Sequence
  Description of Artificial Sequence: Synthetic oligonucleotide
ugagcaugucucaggcaca

SEQ ID NO: 3057343 - RNA, 19 nt, Artificial Sequence
  Description of Artificial Sequence: Synthetic oligonucleotide
aaugagacacaggccacaa

SEQ ID NO: 3057344 - RNA, 19 nt, Artificial Sequence
  Description of Artificial Sequence: Synthetic oligonucleotide
cuacccaaugagacacagg

SEQ ID NO: 3057345 - RNA, 19 nt, Artificial Sequence
  Description of Artificial Sequence: Synthetic oligonucleotide
gacacaggccacaaaauua

SEQ ID NO: 3057346 - RNA, 19 nt, Artificial Sequence
  Description of Artificial Sequence: Synthetic oligonucleotide
cagcagaagcaguggaagc

SEQ ID NO: 3057347 - RNA, 19 nt, Artificial Sequence
  Description of Artificial Sequence: Synthetic oligonucleotide
agaggcuauggugagcaug

SEQ ID NO: 3057348 - RNA, 19 nt, Artificial Sequence
  Description of Artificial Sequence: Synthetic oligonucleotide
caagcacauccucaucccc

SEQ ID NO: 3057349 - RNA, 19 nt, Artificial Sequence
  Description of Artificial Sequence: Synthetic oligonucleotide
uguccuggccacugcaaac

SEQ ID NO: 3057350 - RNA, 19 nt, Artificial Sequence
  Description of Artificial Sequence: Synthetic oligonucleotide
  modified_base (14)..(14): a, c, u, g, unknown or other
cccacauagggganagagg

SEQ ID NO: 3057351 - RNA, 19 nt, Artificial Sequence
  Description of Artificial Sequence: Synthetic oligonucleotide
aagcuucuacccaaugaga

SEQ ID NO: 3057352 - RNA, 19 nt, Artificial Sequence
  Description of Artificial Sequence: Synthetic oligonucleotide
acagacccagugcaugaug

SEQ ID NO: 3057353 - RNA, 19 nt, Artificial Sequence
  Description of Artificial Sequence: Synthetic oligonucleotide
acacagacccagugcauga

SEQ ID NO: 3057354 - RNA, 19 nt, Artificial Sequence
  Description of Artificial Sequence: Synthetic oligonucleotide
uggagggaaaucugagguc

SEQ ID NO: 3057355 - RNA, 19 nt, Artificial Sequence
  Description of Artificial Sequence: Synthetic oligonucleotide
  modified_base (3)..(3): a, c, u, g, unknown or other
ganagaggcuauggugagc

SEQ ID NO: 3057356 - RNA, 19 nt, Artificial Sequence
  Description of Artificial Sequence: Synthetic oligonucleotide
  modified_base (11)..(11): a, c, u, g, unknown or other
acauagggganagaggcua

SEQ ID NO: 3057357 - RNA, 19 nt, Artificial Sequence
  Description of Artificial Sequence: Synthetic oligonucleotide
  modified_base (5)..(5): a, c, u, g, unknown or other
ggganagaggcuaugguga

SEQ ID NO: 3057358 - RNA, 19 nt, Artificial Sequence
  Description of Artificial Sequence: Synthetic oligonucleotide
aaaugucauuguacuuuug

SEQ ID NO: 3057359 - RNA, 19 nt, Artificial Sequence
  Description of Artificial Sequence: Synthetic oligonucleotide
ggaagcuucuacccaauga

SEQ ID NO: 3057360 - RNA, 19 nt, Artificial Sequence
  Description of Artificial Sequence: Synthetic oligonucleotide
agacugcacauggaggaag

SEQ ID NO: 3057361 - RNA, 19 nt, Artificial Sequence
  Description of Artificial Sequence: Synthetic oligonucleotide
gacugcacauggaggaagc

SEQ ID NO: 3057362 - RNA, 19 nt, Artificial Sequence
  Description of Artificial Sequence: Synthetic oligonucleotide
gcacuaugcacacccaccc

SEQ ID NO: 3057363 - RNA, 19 nt, Artificial Sequence
  Description of Artificial Sequence: Synthetic oligonucleotide
cacaagcacacagacccag

SEQ ID NO: 3057364 - RNA, 19 nt, Artificial Sequence
  Description of Artificial Sequence: Synthetic oligonucleotide
cauuguacuuuugaaagcu

SEQ ID NO: 3057365 - RNA, 19 nt, Artificial Sequence
  Description of Artificial Sequence: Synthetic oligonucleotide
acacaggccacaaaauuaa

SEQ ID NO: 3057366 - RNA, 19 nt, Artificial Sequence
  Description of Artificial Sequence: Synthetic oligonucleotide
ggaaaucugaggucaacaa

SEQ ID NO: 3057367 - RNA, 19 nt, Artificial Sequence
  Description of Artificial Sequence: Synthetic oligonucleotide
cccaaugagacacaggcca

SEQ ID NO: 3057368 - RNA, 19 nt, Artificial Sequence
  Description of Artificial Sequence: Synthetic oligonucleotide
ucuguccuggccacugcaa

SEQ ID NO: 3057369 - RNA, 19 nt, Artificial Sequence
  Description of Artificial Sequence: Synthetic oligonucleotide
aggcacaagcacacagacc

SEQ ID NO: 3057370 - RNA, 19 nt, Artificial Sequence
  Description of Artificial Sequence: Synthetic oligonucleotide
ugaggucaacaaagcauuu

SEQ ID NO: 3057371 - RNA, 19 nt, Artificial Sequence
  Description of Artificial Sequence: Synthetic oligonucleotide
cacaggccacaaaauuaag

SEQ ID NO: 3057372 - RNA, 19 nt, Artificial Sequence
  Description of Artificial Sequence: Synthetic oligonucleotide
gcuauggugagcaugucuc

SEQ ID NO: 3057373 - RNA, 19 nt, Artificial Sequence
  Description of Artificial Sequence: Synthetic oligonucleotide
augcacacccacccagcag

SEQ ID NO: 3057374 - RNA, 19 nt, Artificial Sequence
  Description of Artificial Sequence: Synthetic oligonucleotide
aggaagcuucuacccaaug

SEQ ID NO: 3057375 - RNA, 19 nt, Artificial Sequence
  Description of Artificial Sequence: Synthetic oligonucleotide
uucuacccaaugagacaca

SEQ ID NO: 3057376 - RNA, 19 nt, Artificial Sequence
  Description of Artificial Sequence: Synthetic oligonucleotide
ggagggaaaucugagguca

SEQ ID NO: 3057377 - RNA, 19 nt, Artificial Sequence
  Description of Artificial Sequence: Synthetic oligonucleotide
auccucauccccacauagg

SEQ ID NO: 3057378 - RNA, 19 nt, Artificial Sequence
  Description of Artificial Sequence: Synthetic oligonucleotide
uggccacugcaaacaagca

SEQ ID NO: 3057379 - RNA, 19 nt, Artificial Sequence
  Description of Artificial Sequence: Synthetic oligonucleotide
cacacagacccagugcaug

SEQ ID NO: 3057380 - RNA, 19 nt, Artificial Sequence
  Description of Artificial Sequence: Synthetic oligonucleotide
gacccagugcaugaugcac

SEQ ID NO: 3057381 - RNA, 19 nt, Artificial Sequence
  Description of Artificial Sequence: Synthetic oligonucleotide
augaaugaacaaacaaaua

SEQ ID NO: 3057382 - RNA, 19 nt, Artificial Sequence
  Description of Artificial Sequence: Synthetic oligonucleotide
augaugcacuaugcacacc

SEQ ID NO: 3057383 - RNA, 19 nt, Artificial Sequence
  Description of Artificial Sequence: Synthetic oligonucleotide
gcaugaugcacuaugcaca

SEQ ID NO: 3057384 - RNA, 19 nt, Artificial Sequence
  Description of Artificial Sequence: Synthetic oligonucleotide
gucucaggcacaagcacac

SEQ ID NO: 3057385 - RNA, 19 nt, Artificial Sequence
  Description of Artificial Sequence: Synthetic oligonucleotide
gcauuuauuauaacaaagu

SEQ ID NO: 3057386 - RNA, 19 nt, Artificial Sequence
  Description of Artificial Sequence: Synthetic oligonucleotide
caaacaagcacauccucau

SEQ ID NO: 3057387 - RNA, 19 nt, Artificial Sequence
  Description of Artificial Sequence: Synthetic oligonucleotide
aucuguccuggccacugca

SEQ ID NO: 3057388 - RNA, 19 nt, Artificial Sequence
  Description of Artificial Sequence: Synthetic oligonucleotide
  modified_base (19)..(19): a, c, u, g, unknown or other
ucauccccacauaggggan

SEQ ID NO: 3057389 - RNA, 19 nt, Artificial Sequence
  Description of Artificial Sequence: Synthetic oligonucleotide
gugcaugaugcacuaugca

SEQ ID NO: 3057390 - RNA, 19 nt, Artificial Sequence
  Description of Artificial Sequence: Synthetic oligonucleotide
aagacugcacauggaggaa

SEQ ID NO: 3057391 - RNA, 19 nt, Artificial Sequence
  Description of Artificial Sequence: Synthetic oligonucleotide
gaggcuauggugagcaugu

SEQ ID NO: 3057392 - RNA, 19 nt, Artificial Sequence
  Description of Artificial Sequence: Synthetic oligonucleotide
agacccagugcaugaugca

SEQ ID NO: 3057393 - RNA, 19 nt, Artificial Sequence
  Description of Artificial Sequence: Synthetic oligonucleotide
cuauggugagcaugucuca

SEQ ID NO: 3057394 - RNA, 19 nt, Artificial Sequence
  Description of Artificial Sequence: Synthetic oligonucleotide
cugaggucaacaaagcauu

SEQ ID NO: 3057395 - RNA, 19 nt, Artificial Sequence
  Description of Artificial Sequence: Synthetic oligonucleotide
uggaagcugugcagacucu

SEQ ID NO: 3057396 - RNA, 19 nt, Artificial Sequence
  Description of Artificial Sequence: Synthetic oligonucleotide
  modified_base (17)..(17): a, c, u, g, unknown or other
auccccacauagggganag

SEQ ID NO: 3057397 - RNA, 19 nt, Artificial Sequence
  Description of Artificial Sequence: Synthetic oligonucleotide
  modified_base (9)..(9): a, c, u, g, unknown or other
auagggganagaggcuaug

SEQ ID NO: 3057398 - RNA, 19 nt, Artificial Sequence
  Description of Artificial Sequence: Synthetic oligonucleotide
ggccacugcaaacaagcac

SEQ ID NO: 3057399 - RNA, 19 nt, Artificial Sequence
  Description of Artificial Sequence: Synthetic oligonucleotide
gcaaacaagcacauccuca

SEQ ID NO: 3057400 - RNA, 19 nt, Artificial Sequence
  Description of Artificial Sequence: Synthetic oligonucleotide
guacuuuugaaagcucuua

SEQ ID NO: 3057401 - RNA, 19 nt, Artificial Sequence
  Description of Artificial Sequence: Synthetic oligonucleotide
aguggaagcugugcagacu

SEQ ID NO: 3057402 - RNA, 19 nt, Artificial Sequence
  Description of Artificial Sequence: Synthetic oligonucleotide
aggcauuuuggagggaaau

SEQ ID NO: 3057403 - RNA, 19 nt, Artificial Sequence
  Description of Artificial Sequence: Synthetic oligonucleotide
ggaggaagcuucuacccaa

SEQ ID NO: 3057404 - RNA, 19 nt, Artificial Sequence
  Description of Artificial Sequence: Synthetic oligonucleotide
augaaagacugcacaugga

SEQ ID NO: 3057405 - RNA, 19 nt, Artificial Sequence
  Description of Artificial Sequence: Synthetic oligonucleotide
aaggcauuuuggagggaaa

SEQ ID NO: 3057406 - RNA, 19 nt, Artificial Sequence
  Description of Artificial Sequence: Synthetic oligonucleotide
uccuggccacugcaaacaa

SEQ ID NO: 3057407 - RNA, 19 nt, Artificial Sequence
  Description of Artificial Sequence: Synthetic oligonucleotide
gaggucaacaaagcauuua

SEQ ID NO: 3057408 - RNA, 19 nt, Artificial Sequence
  Description of Artificial Sequence: Synthetic oligonucleotide
ccagcagaagcaguggaag

SEQ ID NO: 3057409 - RNA, 19 nt, Artificial Sequence
  Description of Artificial Sequence: Synthetic oligonucleotide
agaagcaguggaagcugug

SEQ ID NO: 3057410 - RNA, 19 nt, Artificial Sequence
  Description of Artificial Sequence: Synthetic oligonucleotide
ccucauccccacauagggg

SEQ ID NO: 3057411 - RNA, 19 nt, Artificial Sequence
  Description of Artificial Sequence: Synthetic oligonucleotide
gcauuuuggagggaaaucu

SEQ ID NO: 3057412 - RNA, 19 nt, Artificial Sequence
  Description of Artificial Sequence: Synthetic oligonucleotide
cacccagcagaagcagugg

SEQ ID NO: 3057413 - RNA, 19 nt, Artificial Sequence
  Description of Artificial Sequence: Synthetic oligonucleotide
gggaaaucugaggucaaca

SEQ ID NO: 3057414 - RNA, 19 nt, Artificial Sequence
  Description of Artificial Sequence: Synthetic oligonucleotide
acccagugcaugaugcacu

SEQ ID NO: 3057415 - RNA, 19 nt, Artificial Sequence
  Description of Artificial Sequence: Synthetic oligonucleotide
gaugcacuaugcacaccca

SEQ ID NO: 3057416 - RNA, 19 nt, Artificial Sequence
  Description of Artificial Sequence: Synthetic oligonucleotide
uuaaggcauuuuggaggga

SEQ ID NO: 3057417 - RNA, 19 nt, Artificial Sequence
  Description of Artificial Sequence: Synthetic oligonucleotide
cugcaaacaagcacauccu

SEQ ID NO: 3057418 - RNA, 19 nt, Artificial Sequence
  Description of Artificial Sequence: Synthetic oligonucleotide
aacuaggcacaagggcaaa

SEQ ID NO: 3057419 - RNA, 19 nt, Artificial Sequence
  Description of Artificial Sequence: Synthetic oligonucleotide
ggaagcugugcagacucug

SEQ ID NO: 3057420 - RNA, 19 nt, Artificial Sequence
  Description of Artificial Sequence: Synthetic oligonucleotide
agcucuuaacuaggcacaa

SEQ ID NO: 3057421 - RNA, 19 nt, Artificial Sequence
  Description of Artificial Sequence: Synthetic oligonucleotide
ccacccagcagaagcagug

SEQ ID NO: 3057422 - RNA, 19 nt, Artificial Sequence
  Description of Artificial Sequence: Synthetic oligonucleotide
ccaaugagacacaggccac

SEQ ID NO: 3057423 - RNA, 19 nt, Artificial Sequence
  Description of Artificial Sequence: Synthetic oligonucleotide
ggcauuuuggagggaaauc

SEQ ID NO: 3057424 - RNA, 19 nt, Artificial Sequence
  Description of Artificial Sequence: Synthetic oligonucleotide
augagacacaggccacaaa

SEQ ID NO: 3057425 - RNA, 19 nt, Artificial Sequence
  Description of Artificial Sequence: Synthetic oligonucleotide
guccuggccacugcaaaca

SEQ ID NO: 3057426 - RNA, 19 nt, Artificial Sequence
  Description of Artificial Sequence: Synthetic oligonucleotide
caaugagacacaggccaca

SEQ ID NO: 3057427 - RNA, 19 nt, Artificial Sequence
  Description of Artificial Sequence: Synthetic oligonucleotide
acugcacauggaggaagcu

SEQ ID NO: 3057428 - RNA, 19 nt, Artificial Sequence
  Description of Artificial Sequence: Synthetic oligonucleotide
gagcaugucucaggcacaa

SEQ ID NO: 3057429 - RNA, 19 nt, Artificial Sequence
  Description of Artificial Sequence: Synthetic oligonucleotide
ggccacaaaauuaaggcau

SEQ ID NO: 3057430 - RNA, 19 nt, Artificial Sequence
  Description of Artificial Sequence: Synthetic oligonucleotide
ucucaggcacaagcacaca

SEQ ID NO: 3057431 - RNA, 19 nt, Artificial Sequence
  Description of Artificial Sequence: Synthetic oligonucleotide
acuaggcacaagggcaaaa

SEQ ID NO: 3057432 - RNA, 19 nt, Artificial Sequence
  Description of Artificial Sequence: Synthetic oligonucleotide
acaagcacacagacccagu

SEQ ID NO: 3057433 - RNA, 19 nt, Artificial Sequence
  Description of Artificial Sequence: Synthetic oligonucleotide
acccacccagcagaagcag

SEQ ID NO: 3057434 - RNA, 19 nt, Artificial Sequence
  Description of Artificial Sequence: Synthetic oligonucleotide
cacccacccagcagaagca

SEQ ID NO: 3057435 - RNA, 19 nt, Artificial Sequence
  Description of Artificial Sequence: Synthetic oligonucleotide
cacuaugcacacccaccca

SEQ ID NO: 3057436 - RNA, 19 nt, Artificial Sequence
  Description of Artificial Sequence: Synthetic oligonucleotide
  modified_base (10)..(10): a, c, u, g, unknown or other
cauagggganagaggcuau

SEQ ID NO: 3057437 - RNA, 19 nt, Artificial Sequence
  Description of Artificial Sequence: Synthetic oligonucleotide
  modified_base (12)..(12): a, c, u, g, unknown or other
cacauagggganagaggcu

SEQ ID NO: 3057438 - RNA, 19 nt, Artificial Sequence
  Description of Artificial Sequence: Synthetic oligonucleotide
gagacacaggccacaaaau

SEQ ID NO: 3057439 - RNA, 19 nt, Artificial Sequence
  Description of Artificial Sequence: Synthetic oligonucleotide
agcaugucucaggcacaag

SEQ ID NO: 3057440 - RNA, 19 nt, Artificial Sequence
  Description of Artificial Sequence: Synthetic oligonucleotide
  modified_base (16)..(16): a, c, u, g, unknown or other
uccccacauagggganaga

SEQ ID NO: 3057441 - RNA, 19 nt, Artificial Sequence
  Description of Artificial Sequence: Synthetic oligonucleotide
cuguccuggccacugcaaa

SEQ ID NO: 3057442 - RNA, 19 nt, Artificial Sequence
  Description of Artificial Sequence: Synthetic oligonucleotide
ggugagcaugucucaggca

SEQ ID NO: 3057443 - RNA, 19 nt, Artificial Sequence
  Description of Artificial Sequence: Synthetic oligonucleotide
aggcuauggugagcauguc

SEQ ID NO: 3057444 - RNA, 19 nt, Artificial Sequence
  Description of Artificial Sequence: Synthetic oligonucleotide
gcucuuaacuaggcacaag

SEQ ID NO: 3057445 - RNA, 19 nt, Artificial Sequence
  Description of Artificial Sequence: Synthetic oligonucleotide
ccuggccacugcaaacaag

SEQ ID NO: 3057446 - RNA, 19 nt, Artificial Sequence
  Description of Artificial Sequence: Synthetic oligonucleotide
cacauccucauccccacau

SEQ ID NO: 3057447 - RNA, 19 nt, Artificial Sequence
  Description of Artificial Sequence: Synthetic oligonucleotide
ggcuauggugagcaugucu

SEQ ID NO: 3057448 - RNA, 19 nt, Artificial Sequence
  Description of Artificial Sequence: Synthetic oligonucleotide
cacaaaauuaaggcauuuu

SEQ ID NO: 3057449 - RNA, 19 nt, Artificial Sequence
  Description of Artificial Sequence: Synthetic oligonucleotide
gagggaaaucugaggucaa

SEQ ID NO: 3057450 - RNA, 19 nt, Artificial Sequence
  Description of Artificial Sequence: Synthetic oligonucleotide
cagaagcaguggaagcugu

SEQ ID NO: 3057451 - RNA, 19 nt, Artificial Sequence
  Description of Artificial Sequence: Synthetic oligonucleotide
cacacccacccagcagaag

SEQ ID NO: 3057452 - RNA, 19 nt, Artificial Sequence
  Description of Artificial Sequence: Synthetic oligonucleotide
  modified_base (18)..(18): a, c, u, g, unknown or other
cauccccacauaggggana

SEQ ID NO: 3057453 - RNA, 19 nt, Artificial Sequence
  Description of Artificial Sequence: Synthetic oligonucleotide
gaggaagcuucuacccaau

SEQ ID NO: 3057454 - RNA, 19 nt, Artificial Sequence
  Description of Artificial Sequence: Synthetic oligonucleotide
cccagcagaagcaguggaa

SEQ ID NO: 3057455 - RNA, 19 nt, Artificial Sequence
  Description of Artificial Sequence: Synthetic oligonucleotide
ggucaacaaagcauuuauu

SEQ ID NO: 3057456 - RNA, 19 nt, Artificial Sequence
  Description of Artificial Sequence: Synthetic oligonucleotide
cacauggaggaagcuucua

SEQ ID NO: 3057457 - RNA, 19 nt, Artificial Sequence
  Description of Artificial Sequence: Synthetic oligonucleotide
cugcacauggaggaagcuu

SEQ ID NO: 3057458 - RNA, 19 nt, Artificial Sequence
  Description of Artificial Sequence: Synthetic oligonucleotide
cccagugcaugaugcacua

SEQ ID NO: 3057459 - RNA, 19 nt, Artificial Sequence
  Description of Artificial Sequence: Synthetic oligonucleotide
gcacaagcacacagaccca

SEQ ID NO: 3057460 - RNA, 19 nt, Artificial Sequence
  Description of Artificial Sequence: Synthetic oligonucleotide
gcacauccucauccccaca

SEQ ID NO: 3057461 - RNA, 19 nt, Artificial Sequence
  Description of Artificial Sequence: Synthetic oligonucleotide
gccacaaaauuaaggcauu

SEQ ID NO: 3057462 - RNA, 19 nt, Artificial Sequence
  Description of Artificial Sequence: Synthetic oligonucleotide
cacagacccagugcaugau

SEQ ID NO: 3057463 - RNA, 19 nt, Artificial Sequence
  Description of Artificial Sequence: Synthetic oligonucleotide
ccacugcaaacaagcacau

SEQ ID NO: 3057464 - RNA, 19 nt, Artificial Sequence
  Description of Artificial Sequence: Synthetic oligonucleotide
gcacacccacccagcagaa

SEQ ID NO: 3057465 - RNA, 19 nt, Artificial Sequence
  Description of Artificial Sequence: Synthetic oligonucleotide
ccacaaaauuaaggcauuu

SEQ ID NO: 3057466 - RNA, 19 nt, Artificial Sequence
  Description of Artificial Sequence: Synthetic oligonucleotide
cccacccagcagaagcagu

SEQ ID NO: 3057467 - RNA, 19 nt, Artificial Sequence
  Description of Artificial Sequence: Synthetic oligonucleotide
gcacacagacccagugcau

SEQ ID NO: 3057468 - RNA, 19 nt, Artificial Sequence
  Description of Artificial Sequence: Synthetic oligonucleotide
ccagugcaugaugcacuau

SEQ ID NO: 3057469 - RNA, 19 nt, Artificial Sequence
  Description of Artificial Sequence: Synthetic oligonucleotide
  modified_base (1)..(1): a, c, u, g, unknown or other
nagaggcuauggugagcau

SEQ ID NO: 3057470 - RNA, 19 nt, Artificial Sequence
  Description of Artificial Sequence: Synthetic oligonucleotide
uguaagaaaauaaaauggg

SEQ ID NO: 3057471 - RNA, 19 nt, Artificial Sequence
  Description of Artificial Sequence: Synthetic oligonucleotide
uauuuugugucucacaggg

SEQ ID NO: 3057472 - RNA, 19 nt, Artificial Sequence
  Description of Artificial Sequence: Synthetic oligonucleotide
ucuacaagcagaaugaaca

SEQ ID NO: 3057473 - RNA, 19 nt, Artificial Sequence
  Description of Artificial Sequence: Synthetic oligonucleotide
uauauuuugugucucacag

SEQ ID NO: 3057474 - RNA, 19 nt, Artificial Sequence
  Description of Artificial Sequence: Synthetic oligonucleotide
aaugaugaacagcaaacgg

SEQ ID NO: 3057475 - RNA, 19 nt, Artificial Sequence
  Description of Artificial Sequence: Synthetic oligonucleotide
uuugagcucaccaugaaag

SEQ ID NO: 3057476 - RNA, 19 nt, Artificial Sequence
  Description of Artificial Sequence: Synthetic oligonucleotide
cauguaagaaaauaaaaug

SEQ ID NO: 3057477 - RNA, 19 nt, Artificial Sequence
  Description of Artificial Sequence: Synthetic oligonucleotide
auaagauucuuuuaggaug

SEQ ID NO: 3057478 - RNA, 19 nt, Artificial Sequence
  Description of Artificial Sequence: Synthetic oligonucleotide
uuaaugaugaacagcaaac

SEQ ID NO: 3057479 - RNA, 19 nt, Artificial Sequence
  Description of Artificial Sequence: Synthetic oligonucleotide
acagauacuaacuucaugu

SEQ ID NO: 3057480 - RNA, 19 nt, Artificial Sequence
  Description of Artificial Sequence: Synthetic oligonucleotide
ugguuaaugaugaacagca

SEQ ID NO: 3057481 - RNA, 19 nt, Artificial Sequence
  Description of Artificial Sequence: Synthetic oligonucleotide
aauaaaauggguuucccuu

SEQ ID NO: 3057482 - RNA, 19 nt, Artificial Sequence
  Description of Artificial Sequence: Synthetic oligonucleotide
aagaaaauaaaauggguuu

SEQ ID NO: 3057483 - RNA, 19 nt, Artificial Sequence
  Description of Artificial Sequence: Synthetic oligonucleotide
aacagcuaaugauuugagc

SEQ ID NO: 3057484 - RNA, 19 nt, Artificial Sequence
  Description of Artificial Sequence: Synthetic oligonucleotide
ucauguaagaaaauaaaau

SEQ ID NO: 3057485 - RNA, 19 nt, Artificial Sequence
  Description of Artificial Sequence: Synthetic oligonucleotide
aaaauaaaauggguuuccc

SEQ ID NO: 3057486 - RNA, 19 nt, Artificial Sequence
  Description of Artificial Sequence: Synthetic oligonucleotide
acagcuaaugauuugagcu

SEQ ID NO: 3057487 - RNA, 19 nt, Artificial Sequence
  Description of Artificial Sequence: Synthetic oligonucleotide
aauaagauucuuuuaggau

SEQ ID NO: 3057488 - RNA, 19 nt, Artificial Sequence
  Description of Artificial Sequence: Synthetic oligonucleotide
ucaucacagaauaagauuc

SEQ ID NO: 3057489 - RNA, 19 nt, Artificial Sequence
  Description of Artificial Sequence: Synthetic oligonucleotide
gauacuaacuucauguaag

SEQ ID NO: 3057490 - RNA, 19 nt, Artificial Sequence
  Description of Artificial Sequence: Synthetic oligonucleotide
agaauaagauucuuuuagg

SEQ ID NO: 3057491 - RNA, 19 nt, Artificial Sequence
  Description of Artificial Sequence: Synthetic oligonucleotide
uaagaaaauaaaauggguu

SEQ ID NO: 3057492 - RNA, 19 nt, Artificial Sequence
  Description of Artificial Sequence: Synthetic oligonucleotide
cagaauaagauucuuuuag

SEQ ID NO: 3057493 - RNA, 19 nt, Artificial Sequence
  Description of Artificial Sequence: Synthetic oligonucleotide
uuggacuugaccuuguggc

SEQ ID NO: 3057494 - RNA, 19 nt, Artificial Sequence
  Description of Artificial Sequence: Synthetic oligonucleotide
uucauguaagaaaauaaaa

SEQ ID NO: 3057495 - RNA, 19 nt, Artificial Sequence
  Description of Artificial Sequence: Synthetic oligonucleotide
aaauaaaauggguuucccu

SEQ ID NO: 3057496 - RNA, 19 nt, Artificial Sequence
  Description of Artificial Sequence: Synthetic oligonucleotide
uaagauucuuuuaggauga

SEQ ID NO: 3057497 - RNA, 19 nt, Artificial Sequence
  Description of Artificial Sequence: Synthetic oligonucleotide
aaugauuugagcucaccau

SEQ ID NO: 3057498 - RNA, 19 nt, Artificial Sequence
  Description of Artificial Sequence: Synthetic oligonucleotide
ugaugaacagcaaacggga

SEQ ID NO: 3057499 - RNA, 19 nt, Artificial Sequence
  Description of Artificial Sequence: Synthetic oligonucleotide
aaaggcagggagcuaacag

SEQ ID NO: 3057500 - RNA, 19 nt, Artificial Sequence
  Description of Artificial Sequence: Synthetic oligonucleotide
ucugcauggauucuacaag

SEQ ID NO: 3057501 - RNA, 19 nt, Artificial Sequence
  Description of Artificial Sequence: Synthetic oligonucleotide
augccacugaccuacagac

SEQ ID NO: 3057502 - RNA, 19 nt, Artificial Sequence
  Description of Artificial Sequence: Synthetic oligonucleotide
uaaugauuugagcucacca

SEQ ID NO: 3057503 - RNA, 19 nt, Artificial Sequence
  Description of Artificial Sequence: Synthetic oligonucleotide
auaaaauggguuucccuuc

SEQ ID NO: 3057504 - RNA, 19 nt, Artificial Sequence
  Description of Artificial Sequence: Synthetic oligonucleotide
uaaugaugaacagcaaacg

SEQ ID NO: 3057505 - RNA, 19 nt, Artificial Sequence
  Description of Artificial Sequence: Synthetic oligonucleotide
acuaacuucauguaagaaa

SEQ ID NO: 3057506 - RNA, 19 nt, Artificial Sequence
  Description of Artificial Sequence: Synthetic oligonucleotide
agaaaauaaaauggguuuc

SEQ ID NO: 3057507 - RNA, 19 nt, Artificial Sequence
  Description of Artificial Sequence: Synthetic oligonucleotide
guacguaugagccaggaac

SEQ ID NO: 3057508 - RNA, 19 nt, Artificial Sequence
  Description of Artificial Sequence: Synthetic oligonucleotide
aaauggguuucccuuccac

SEQ ID NO: 3057509 - RNA, 19 nt, Artificial Sequence
  Description of Artificial Sequence: Synthetic oligonucleotide
gaauaagauucuuuuagga

SEQ ID NO: 3057510 - RNA, 19 nt, Artificial Sequence
  Description of Artificial Sequence: Synthetic oligonucleotide
uggagaugguuaaugauga

SEQ ID NO: 3057511 - RNA, 19 nt, Artificial Sequence
  Description of Artificial Sequence: Synthetic oligonucleotide
gaaaauaaaauggguuucc

SEQ ID NO: 3057512 - RNA, 19 nt, Artificial Sequence
  Description of Artificial Sequence: Synthetic oligonucleotide
uaauaugccacugaccuac

SEQ ID NO: 3057513 - RNA, 19 nt, Artificial Sequence
  Description of Artificial Sequence: Synthetic oligonucleotide
cuaacuucauguaagaaaa

SEQ ID NO: 3057514 - RNA, 19 nt, Artificial Sequence
  Description of Artificial Sequence: Synthetic oligonucleotide
uucccuuccacuuuuguga

SEQ ID NO: 3057515 - RNA, 19 nt, Artificial Sequence
  Description of Artificial Sequence: Synthetic oligonucleotide
cuaacagauacuaacuuca

SEQ ID NO: 3057516 - RNA, 19 nt, Artificial Sequence
  Description of Artificial Sequence: Synthetic oligonucleotide
augguuaaugaugaacagc

SEQ ID NO: 3057517 - RNA, 19 nt, Artificial Sequence
  Description of Artificial Sequence: Synthetic oligonucleotide
aacagauacuaacuucaug

SEQ ID NO: 3057518 - RNA, 19 nt, Artificial Sequence
  Description of Artificial Sequence: Synthetic oligonucleotide
gaugguuaaugaugaacag

SEQ ID NO: 3057519 - RNA, 19 nt, Artificial Sequence
  Description of Artificial Sequence: Synthetic oligonucleotide
agcacagugguauauuuug

SEQ ID NO: 3057520 - RNA, 19 nt, Artificial Sequence
  Description of Artificial Sequence: Synthetic oligonucleotide
augaugaacagcaaacggg

SEQ ID NO: 3057521 - RNA, 19 nt, Artificial Sequence
  Description of Artificial Sequence: Synthetic oligonucleotide
gauucuacaagcagaauga

SEQ ID NO: 3057522 - RNA, 19 nt, Artificial Sequence
  Description of Artificial Sequence: Synthetic oligonucleotide
auuggacuugaccuugugg

SEQ ID NO: 3057523 - RNA, 19 nt, Artificial Sequence
  Description of Artificial Sequence: Synthetic oligonucleotide
ugaccuacagacaucucug

SEQ ID NO: 3057524 - RNA, 19 nt, Artificial Sequence
  Description of Artificial Sequence: Synthetic oligonucleotide
ugaacagcuaaugauuuga

SEQ ID NO: 3057525 - RNA, 19 nt, Artificial Sequence
  Description of Artificial Sequence: Synthetic oligonucleotide
augauuugagcucaccaug

SEQ ID NO: 3057526 - RNA, 19 nt, Artificial Sequence
  Description of Artificial Sequence: Synthetic oligonucleotide
gacuguguacguaugagcc

SEQ ID NO: 3057527 - RNA, 19 nt, Artificial Sequence
  Description of Artificial Sequence: Synthetic oligonucleotide
auauuuugugucucacagg

SEQ ID NO: 3057528 - RNA, 19 nt, Artificial Sequence
  Description of Artificial Sequence: Synthetic oligonucleotide
ggauucuacaagcagaaug

SEQ ID NO: 3057529 - RNA, 19 nt, Artificial Sequence
  Description of Artificial Sequence: Synthetic oligonucleotide
ugauuugagcucaccauga

SEQ ID NO: 3057530 - RNA, 19 nt, Artificial Sequence
  Description of Artificial Sequence: Synthetic oligonucleotide
aauggguuucccuuccacu

SEQ ID NO: 3057531 - RNA, 19 nt, Artificial Sequence
  Description of Artificial Sequence: Synthetic oligonucleotide
agugguauauuuugugucu

SEQ ID NO: 3057532 - RNA, 19 nt, Artificial Sequence
  Description of Artificial Sequence: Synthetic oligonucleotide
ugaacagcaaacgggacug

SEQ ID NO: 3057533 - RNA, 19 nt, Artificial Sequence
  Description of Artificial Sequence: Synthetic oligonucleotide
aaggcagggagcuaacaga

SEQ ID NO: 3057534 - RNA, 19 nt, Artificial Sequence
  Description of Artificial Sequence: Synthetic oligonucleotide
ucucaucacagaauaagau

SEQ ID NO: 3057535 - RNA, 19 nt, Artificial Sequence
  Description of Artificial Sequence: Synthetic oligonucleotide
agggaggcugcuaauaugc

SEQ ID NO: 3057536 - RNA, 19 nt, Artificial Sequence
  Description of Artificial Sequence: Synthetic oligonucleotide
agaugguuaaugaugaaca

SEQ ID NO: 3057537 - RNA, 19 nt, Artificial Sequence
  Description of Artificial Sequence: Synthetic oligonucleotide
aagcagaaugaacagcuaa

SEQ ID NO: 3057538 - RNA, 19 nt, Artificial Sequence
  Description of Artificial Sequence: Synthetic oligonucleotide
uugagcucaccaugaaagg

SEQ ID NO: 3057539 - RNA, 19 nt, Artificial Sequence
  Description of Artificial Sequence: Synthetic oligonucleotide
uacguaugagccaggaacu

SEQ ID NO: 3057540 - RNA, 19 nt, Artificial Sequence
  Description of Artificial Sequence: Synthetic oligonucleotide
ggagcuaacagauacuaac

SEQ ID NO: 3057541 - RNA, 19 nt, Artificial Sequence
  Description of Artificial Sequence: Synthetic oligonucleotide
uaugccacugaccuacaga

SEQ ID NO: 3057542 - RNA, 19 nt, Artificial Sequence
  Description of Artificial Sequence: Synthetic oligonucleotide
aggcgauuggacuugaccu

SEQ ID NO: 3057543 - RNA, 19 nt, Artificial Sequence
  Description of Artificial Sequence: Synthetic oligonucleotide
guuaaugaugaacagcaaa

SEQ ID NO: 3057544 - RNA, 19 nt, Artificial Sequence
  Description of Artificial Sequence: Synthetic oligonucleotide
uucuacaagcagaaugaac

SEQ ID NO: 3057545 - RNA, 19 nt, Artificial Sequence
  Description of Artificial Sequence: Synthetic oligonucleotide
cucaccaugaaaggcaggg

SEQ ID NO: 3057546 - RNA, 19 nt, Artificial Sequence
  Description of Artificial Sequence: Synthetic oligonucleotide
cugcauggauucuacaagc

SEQ ID NO: 3057547 - RNA, 19 nt, Artificial Sequence
  Description of Artificial Sequence: Synthetic oligonucleotide
acaagcagaaugaacagcu

SEQ ID NO: 3057548 - RNA, 19 nt, Artificial Sequence
  Description of Artificial Sequence: Synthetic oligonucleotide
acagugguauauuuugugu

SEQ ID NO: 3057549 - RNA, 19 nt, Artificial Sequence
  Description of Artificial Sequence: Synthetic oligonucleotide
ugcuaauaugccacugacc

SEQ ID NO: 3057550 - RNA, 19 nt, Artificial Sequence
  Description of Artificial Sequence: Synthetic oligonucleotide
agauacuaacuucauguaa

SEQ ID NO: 3057551 - RNA, 19 nt, Artificial Sequence
  Description of Artificial Sequence: Synthetic oligonucleotide
aacuucauguaagaaaaua

SEQ ID NO: 3057552 - RNA, 19 nt, Artificial Sequence
  Description of Artificial Sequence: Synthetic oligonucleotide
uugaccuuguggcagcaca

SEQ ID NO: 3057553 - RNA, 19 nt, Artificial Sequence
  Description of Artificial Sequence: Synthetic oligonucleotide
gacaucucugcauggauuc

SEQ ID NO: 3057554 - RNA, 19 nt, Artificial Sequence
  Description of Artificial Sequence: Synthetic oligonucleotide
augaacagcaaacgggacu

SEQ ID NO: 3057555 - RNA, 19 nt, Artificial Sequence
  Description of Artificial Sequence: Synthetic oligonucleotide
cuacaagcagaaugaacag

SEQ ID NO: 3057556 - RNA, 19 nt, Artificial Sequence
  Description of Artificial Sequence: Synthetic oligonucleotide
gagaugguuaaugaugaac

SEQ ID NO: 3057557 - RNA, 19 nt, Artificial Sequence
  Description of Artificial Sequence: Synthetic oligonucleotide
cuucauguaagaaaauaaa

SEQ ID NO: 3057558 - RNA, 19 nt, Artificial Sequence
  Description of Artificial Sequence: Synthetic oligonucleotide
cauggauucuacaagcaga

SEQ ID NO: 3057559 - RNA, 19 nt, Artificial Sequence
  Description of Artificial Sequence: Synthetic oligonucleotide
auggagaugguuaaugaug

SEQ ID NO: 3057560 - RNA, 19 nt, Artificial Sequence
  Description of Artificial Sequence: Synthetic oligonucleotide
gaggcgauuggacuugacc

SEQ ID NO: 3057561 - RNA, 19 nt, Artificial Sequence
  Description of Artificial Sequence: Synthetic oligonucleotide
aaugaacagcuaaugauuu

SEQ ID NO: 3057562 - RNA, 19 nt, Artificial Sequence
  Description of Artificial Sequence: Synthetic oligonucleotide
caccaugaaaggcagggag

SEQ ID NO: 3057563 - RNA, 19 nt, Artificial Sequence
  Description of Artificial Sequence: Synthetic oligonucleotide
auacuaacuucauguaaga

SEQ ID NO: 3057564 - RNA, 19 nt, Artificial Sequence
  Description of Artificial Sequence: Synthetic oligonucleotide
aacgggacuguguacguau

SEQ ID NO: 3057565 - RNA, 19 nt, Artificial Sequence
  Description of Artificial Sequence: Synthetic oligonucleotide
ugagcucaccaugaaaggc

SEQ ID NO: 3057566 - RNA, 19 nt, Artificial Sequence
  Description of Artificial Sequence: Synthetic oligonucleotide
agauucuuuuaggaugaac

SEQ ID NO: 3057567 - RNA, 19 nt, Artificial Sequence
  Description of Artificial Sequence: Synthetic oligonucleotide
ugcauggauucuacaagca

SEQ ID NO: 3057568 - RNA, 19 nt, Artificial Sequence
  Description of Artificial Sequence: Synthetic oligonucleotide
cuacagacaucucugcaug

SEQ ID NO: 3057569 - RNA, 19 nt, Artificial Sequence
  Description of Artificial Sequence: Synthetic oligonucleotide
accaugaaaggcagggagc

SEQ ID NO: 3057570 - RNA, 19 nt, Artificial Sequence
  Description of Artificial Sequence: Synthetic oligonucleotide
cacagugguauauuuugug

SEQ ID NO: 3057571 - RNA, 19 nt, Artificial Sequence
  Description of Artificial Sequence: Synthetic oligonucleotide
acuucauguaagaaaauaa

SEQ ID NO: 3057572 - RNA, 19 nt, Artificial Sequence
  Description of Artificial Sequence: Synthetic oligonucleotide
ugaccuuguggcagcacag

SEQ ID NO: 3057573 - RNA, 19 nt, Artificial Sequence
  Description of Artificial Sequence: Synthetic oligonucleotide
uguggcagcacagugguau

SEQ ID NO: 3057574 - RNA, 19 nt, Artificial Sequence
  Description of Artificial Sequence: Synthetic oligonucleotide
uacaagcagaaugaacagc

SEQ ID NO: 3057575 - RNA, 19 nt, Artificial Sequence
  Description of Artificial Sequence: Synthetic oligonucleotide
gcuaauaugccacugaccu

SEQ ID NO: 3057576 - RNA, 19 nt, Artificial Sequence
  Description of Artificial Sequence: Synthetic oligonucleotide
ucacagaauaagauucuuu

SEQ ID NO: 3057577 - RNA, 19 nt, Artificial Sequence
  Description of Artificial Sequence: Synthetic oligonucleotide
cagugguauauuuuguguc

SEQ ID NO: 3057578 - RNA, 19 nt, Artificial Sequence
  Description of Artificial Sequence: Synthetic oligonucleotide
gaggcugcuaauaugccac

SEQ ID NO: 3057579 - RNA, 19 nt, Artificial Sequence
  Description of Artificial Sequence: Synthetic oligonucleotide
acagaauaagauucuuuua

SEQ ID NO: 3057580 - RNA, 19 nt, Artificial Sequence
  Description of Artificial Sequence: Synthetic oligonucleotide
ugguauauuuugugucuca

SEQ ID NO: 3057581 - RNA, 19 nt, Artificial Sequence
  Description of Artificial Sequence: Synthetic oligonucleotide
ucccucucaucacagaaua

SEQ ID NO: 3057582 - RNA, 19 nt, Artificial Sequence
  Description of Artificial Sequence: Synthetic oligonucleotide
agcaaacgggacuguguac

SEQ ID NO: 3057583 - RNA, 19 nt, Artificial Sequence
  Description of Artificial Sequence: Synthetic oligonucleotide
augaacagcuaaugauuug

SEQ ID NO: 3057584 - RNA, 19 nt, Artificial Sequence
  Description of Artificial Sequence: Synthetic oligonucleotide
aaaauggguuucccuucca

SEQ ID NO: 3057585 - RNA, 19 nt, Artificial Sequence
  Description of Artificial Sequence: Synthetic oligonucleotide
cagcuaaugauuugagcuc

SEQ ID NO: 3057586 - RNA, 19 nt, Artificial Sequence
  Description of Artificial Sequence: Synthetic oligonucleotide
gaacagcuaaugauuugag

SEQ ID NO: 3057587 - RNA, 19 nt, Artificial Sequence
  Description of Artificial Sequence: Synthetic oligonucleotide
cuguguacguaugagccag

SEQ ID NO: 3057588 - RNA, 19 nt, Artificial Sequence
  Description of Artificial Sequence: Synthetic oligonucleotide
cugcuaauaugccacugac

SEQ ID NO: 3057589 - RNA, 19 nt, Artificial Sequence
  Description of Artificial Sequence: Synthetic oligonucleotide
ugagggaggcugcuaauau

SEQ ID NO: 3057590 - RNA, 19 nt, Artificial Sequence
  Description of Artificial Sequence: Synthetic oligonucleotide
guauauuuugugucucaca

SEQ ID NO: 3057591 - RNA, 19 nt, Artificial Sequence
  Description of Artificial Sequence: Synthetic oligonucleotide
guaugagccaggaacuggc

SEQ ID NO: 3057592 - RNA, 19 nt, Artificial Sequence
  Description of Artificial Sequence: Synthetic oligonucleotide
auuugagcucaccaugaaa

SEQ ID NO: 3057593 - RNA, 19 nt, Artificial Sequence
  Description of Artificial Sequence: Synthetic oligonucleotide
agcuaacagauacuaacuu

SEQ ID NO: 3057594 - RNA, 19 nt, Artificial Sequence
  Description of Artificial Sequence: Synthetic oligonucleotide
uaacagauacuaacuucau

SEQ ID NO: 3057595 - RNA, 19 nt, Artificial Sequence
  Description of Artificial Sequence: Synthetic oligonucleotide
gcaaacgggacuguguacg

SEQ ID NO: 3057596 - RNA, 19 nt, Artificial Sequence
  Description of Artificial Sequence: Synthetic oligonucleotide
cucucaucacagaauaaga

SEQ ID NO: 3057597 - RNA, 19 nt, Artificial Sequence
  Description of Artificial Sequence: Synthetic oligonucleotide
agcuaaugauuugagcuca

SEQ ID NO: 3057598 - RNA, 19 nt, Artificial Sequence
  Description of Artificial Sequence: Synthetic oligonucleotide
aacagcaaacgggacugug

SEQ ID NO: 3057599 - RNA, 19 nt, Artificial Sequence
  Description of Artificial Sequence: Synthetic oligonucleotide
uggacuugaccuuguggca

SEQ ID NO: 3057600 - RNA, 19 nt, Artificial Sequence
  Description of Artificial Sequence: Synthetic oligonucleotide
uguguacguaugagccagg

SEQ ID NO: 3057601 - RNA, 19 nt, Artificial Sequence
  Description of Artificial Sequence: Synthetic oligonucleotide
gcuaacagauacuaacuuc

SEQ ID NO: 3057602 - RNA, 19 nt, Artificial Sequence
  Description of Artificial Sequence: Synthetic oligonucleotide
guaagaaaauaaaaugggu

SEQ ID NO: 3057603 - RNA, 19 nt, Artificial Sequence
  Description of Artificial Sequence: Synthetic oligonucleotide
acuguguacguaugagcca

SEQ ID NO: 3057604 - RNA, 19 nt, Artificial Sequence
  Description of Artificial Sequence: Synthetic oligonucleotide
gcagggagcuaacagauac

SEQ ID NO: 3057605 - RNA, 19 nt, Artificial Sequence
  Description of Artificial Sequence: Synthetic oligonucleotide
cuaaugauuugagcucacc

SEQ ID NO: 3057606 - RNA, 19 nt, Artificial Sequence
  Description of Artificial Sequence: Synthetic oligonucleotide
gaccuacagacaucucugc

SEQ ID NO: 3057607 - RNA, 19 nt, Artificial Sequence
  Description of Artificial Sequence: Synthetic oligonucleotide
uguacguaugagccaggaa

SEQ ID NO: 3057608 - RNA, 19 nt, Artificial Sequence
  Description of Artificial Sequence: Synthetic oligonucleotide
aacuggcugagggaggcug

SEQ ID NO: 3057609 - RNA, 19 nt, Artificial Sequence
  Description of Artificial Sequence: Synthetic oligonucleotide
caggaacuggcugagggag

SEQ ID NO: 3057610 - RNA, 19 nt, Artificial Sequence
  Description of Artificial Sequence: Synthetic oligonucleotide
auggguuucccuuccacuu

SEQ ID NO: 3057611 - RNA, 19 nt, Artificial Sequence
  Description of Artificial Sequence: Synthetic oligonucleotide
gacuugaccuuguggcagc

SEQ ID NO: 3057612 - RNA, 19 nt, Artificial Sequence
  Description of Artificial Sequence: Synthetic oligonucleotide
gauuggacuugaccuugug

SEQ ID NO: 3057613 - RNA, 19 nt, Artificial Sequence
  Description of Artificial Sequence: Synthetic oligonucleotide
accuacagacaucucugca

SEQ ID NO: 3057614 - RNA, 19 nt, Artificial Sequence
  Description of Artificial Sequence: Synthetic oligonucleotide
gaaugaacagcuaaugauu

SEQ ID NO: 3057615 - RNA, 19 nt, Artificial Sequence
  Description of Artificial Sequence: Synthetic oligonucleotide
accuuguggcagcacagug

SEQ ID NO: 3057616 - RNA, 19 nt, Artificial Sequence
  Description of Artificial Sequence: Synthetic oligonucleotide
uaacuucauguaagaaaau

SEQ ID NO: 3057617 - RNA, 19 nt, Artificial Sequence
  Description of Artificial Sequence: Synthetic oligonucleotide
augaaaggcagggagcuaa

SEQ ID NO: 3057618 - RNA, 19 nt, Artificial Sequence
  Description of Artificial Sequence: Synthetic oligonucleotide
uaugagccaggaacuggcu

SEQ ID NO: 3057619 - RNA, 19 nt, Artificial Sequence
  Description of Artificial Sequence: Synthetic oligonucleotide
gagcucaccaugaaaggca

SEQ ID NO: 3057620 - RNA, 19 nt, Artificial Sequence
  Description of Artificial Sequence: Synthetic oligonucleotide
aucucugcauggauucuac

SEQ ID NO: 3057621 - RNA, 19 nt, Artificial Sequence
  Description of Artificial Sequence: Synthetic oligonucleotide
gcauggauucuacaagcag

SEQ ID NO: 3057622 - RNA, 19 nt, Artificial Sequence
  Description of Artificial Sequence: Synthetic oligonucleotide
auaugccacugaccuacag

SEQ ID NO: 3057623 - RNA, 19 nt, Artificial Sequence
  Description of Artificial Sequence: Synthetic oligonucleotide
uacuaacuucauguaagaa

SEQ ID NO: 3057624 - RNA, 19 nt, Artificial Sequence
  Description of Artificial Sequence: Synthetic oligonucleotide
cucugcauggauucuacaa

SEQ ID NO: 3057625 - RNA, 19 nt, Artificial Sequence
  Description of Artificial Sequence: Synthetic oligonucleotide
ggacuguguacguaugagc

SEQ ID NO: 3057626 - RNA, 19 nt, Artificial Sequence
  Description of Artificial Sequence: Synthetic oligonucleotide
gauggagaugguuaaugau

SEQ ID NO: 3057627 - RNA, 19 nt, Artificial Sequence
  Description of Artificial Sequence: Synthetic oligonucleotide
cacagaauaagauucuuuu

SEQ ID NO: 3057628 - RNA, 19 nt, Artificial Sequence
  Description of Artificial Sequence: Synthetic oligonucleotide
uucccucucaucacagaau

SEQ ID NO: 3057629 - RNA, 19 nt, Artificial Sequence
  Description of Artificial Sequence: Synthetic oligonucleotide
auggauucuacaagcagaa

SEQ ID NO: 3057630 - RNA, 19 nt, Artificial Sequence
  Description of Artificial Sequence: Synthetic oligonucleotide
auuuugugucucacagggg

SEQ ID NO: 3057631 - RNA, 19 nt, Artificial Sequence
  Description of Artificial Sequence: Synthetic oligonucleotide
gaugaacagcaaacgggac

SEQ ID NO: 3057632 - RNA, 19 nt, Artificial Sequence
  Description of Artificial Sequence: Synthetic oligonucleotide
ccuuguggcagcacagugg

SEQ ID NO: 3057633 - RNA, 19 nt, Artificial Sequence
  Description of Artificial Sequence: Synthetic oligonucleotide
ucccuuccacuuuugugac

SEQ ID NO: 3057634 - RNA, 19 nt, Artificial Sequence
  Description of Artificial Sequence: Synthetic oligonucleotide
agcagaaugaacagcuaau

SEQ ID NO: 3057635 - RNA, 19 nt, Artificial Sequence
  Description of Artificial Sequence: Synthetic oligonucleotide
gauuugagcucaccaugaa

SEQ ID NO: 3057636 - RNA, 19 nt, Artificial Sequence
  Description of Artificial Sequence: Synthetic oligonucleotide
ccuuccacuuuugugaccc

SEQ ID NO: 3057637 - RNA, 19 nt, Artificial Sequence
  Description of Artificial Sequence: Synthetic oligonucleotide
ucucugcauggauucuaca

SEQ ID NO: 3057638 - RNA, 19 nt, Artificial Sequence
  Description of Artificial Sequence: Synthetic oligonucleotide
acagacaucucugcaugga

SEQ ID NO: 3057639 - RNA, 19 nt, Artificial Sequence
  Description of Artificial Sequence: Synthetic oligonucleotide
gguauauuuugugucucac

SEQ ID NO: 3057640 - RNA, 19 nt, Artificial Sequence
  Description of Artificial Sequence: Synthetic oligonucleotide
cugaccuacagacaucucu

SEQ ID NO: 3057641 - RNA, 19 nt, Artificial Sequence
  Description of Artificial Sequence: Synthetic oligonucleotide
acuggcugagggaggcugc

SEQ ID NO: 3057642 - RNA, 19 nt, Artificial Sequence
  Description of Artificial Sequence: Synthetic oligonucleotide
agggagcuaacagauacua

SEQ ID NO: 3057643 - RNA, 19 nt, Artificial Sequence
  Description of Artificial Sequence: Synthetic oligonucleotide
ugccacugaccuacagaca

SEQ ID NO: 3057644 - RNA, 19 nt, Artificial Sequence
  Description of Artificial Sequence: Synthetic oligonucleotide
cuucccucucaucacagaa

SEQ ID NO: 3057645 - RNA, 19 nt, Artificial Sequence
  Description of Artificial Sequence: Synthetic oligonucleotide
gagcuaacagauacuaacu

SEQ ID NO: 3057646 - RNA, 19 nt, Artificial Sequence
  Description of Artificial Sequence: Synthetic oligonucleotide
agcucaccaugaaaggcag

SEQ ID NO: 3057647 - RNA, 19 nt, Artificial Sequence
  Description of Artificial Sequence: Synthetic oligonucleotide
cucaucacagaauaagauu

SEQ ID NO: 3057648 - RNA, 19 nt, Artificial Sequence
  Description of Artificial Sequence: Synthetic oligonucleotide
acagcaaacgggacugugu

SEQ ID NO: 3057649 - RNA, 19 nt, Artificial Sequence
  Description of Artificial Sequence: Synthetic oligonucleotide
ucaccaugaaaggcaggga

SEQ ID NO: 3057650 - RNA, 19 nt, Artificial Sequence
  Description of Artificial Sequence: Synthetic oligonucleotide
ggacuugaccuuguggcag

SEQ ID NO: 3057651 - RNA, 19 nt, Artificial Sequence
  Description of Artificial Sequence: Synthetic oligonucleotide
cuuguggcagcacaguggu

SEQ ID NO: 3057652 - RNA, 19 nt, Artificial Sequence
  Description of Artificial Sequence: Synthetic oligonucleotide
uggguuucccuuccacuuu

SEQ ID NO: 3057653 - RNA, 19 nt, Artificial Sequence
  Description of Artificial Sequence: Synthetic oligonucleotide
cagauacuaacuucaugua

SEQ ID NO: 3057654 - RNA, 19 nt, Artificial Sequence
  Description of Artificial Sequence: Synthetic oligonucleotide
aucacagaauaagauucuu

SEQ ID NO: 3057655 - RNA, 19 nt, Artificial Sequence
  Description of Artificial Sequence: Synthetic oligonucleotide
auucuacaagcagaaugaa

SEQ ID NO: 3057656 - RNA, 19 nt, Artificial Sequence
  Description of Artificial Sequence: Synthetic oligonucleotide
gggacuguguacguaugag

SEQ ID NO: 3057657 - RNA, 19 nt, Artificial Sequence
  Description of Artificial Sequence: Synthetic oligonucleotide
gugguauauuuugugucuc

SEQ ID NO: 3057658 - RNA, 19 nt, Artificial Sequence
  Description of Artificial Sequence: Synthetic oligonucleotide
gcugcuaauaugccacuga

SEQ ID NO: 3057659 - RNA, 19 nt, Artificial Sequence
  Description of Artificial Sequence: Synthetic oligonucleotide
ggaggcugcuaauaugcca

SEQ ID NO: 3057660 - RNA, 19 nt, Artificial Sequence
  Description of Artificial Sequence: Synthetic oligonucleotide
acguaugagccaggaacug

SEQ ID NO: 3057661 - RNA, 19 nt, Artificial Sequence
  Description of Artificial Sequence: Synthetic oligonucleotide
gaaaggcagggagcuaaca

SEQ ID NO: 3057662 - RNA, 19 nt, Artificial Sequence
  Description of Artificial Sequence: Synthetic oligonucleotide
aauaugccacugaccuaca

SEQ ID NO: 3057663 - RNA, 19 nt, Artificial Sequence
  Description of Artificial Sequence: Synthetic oligonucleotide
ggaacuggcugagggaggc

SEQ ID NO: 3057664 - RNA, 19 nt, Artificial Sequence
  Description of Artificial Sequence: Synthetic oligonucleotide
aggaacuggcugagggagg

SEQ ID NO: 3057665 - RNA, 19 nt, Artificial Sequence
  Description of Artificial Sequence: Synthetic oligonucleotide
gagccaggaacuggcugag

SEQ ID NO: 3057666 - RNA, 19 nt, Artificial Sequence
  Description of Artificial Sequence: Synthetic oligonucleotide
aggcagggagcuaacagau

SEQ ID NO: 3057667 - RNA, 19 nt, Artificial Sequence
  Description of Artificial Sequence: Synthetic oligonucleotide
gcgauggagaugguuaaug

SEQ ID NO: 3057668 - RNA, 19 nt, Artificial Sequence
  Description of Artificial Sequence: Synthetic oligonucleotide
cuuccacuuuugugacccc

SEQ ID NO: 3057669 - RNA, 19 nt, Artificial Sequence
  Description of Artificial Sequence: Synthetic oligonucleotide
aagauucuuuuaggaugaa

SEQ ID NO: 3057670 - RNA, 19 nt, Artificial Sequence
  Description of Artificial Sequence: Synthetic oligonucleotide
agacaucucugcauggauu

SEQ ID NO: 3057671 - RNA, 19 nt, Artificial Sequence
  Description of Artificial Sequence: Synthetic oligonucleotide
aggcugcuaauaugccacu

SEQ ID NO: 3057672 - RNA, 19 nt, Artificial Sequence
  Description of Artificial Sequence: Synthetic oligonucleotide
aaacgggacuguguacgua

SEQ ID NO: 3057673 - RNA, 19 nt, Artificial Sequence
  Description of Artificial Sequence: Synthetic oligonucleotide
cagcaaacgggacugugua

SEQ ID NO: 3057674 - RNA, 19 nt, Artificial Sequence
  Description of Artificial Sequence: Synthetic oligonucleotide
accuucccucucaucacag

SEQ ID NO: 3057675 - RNA, 19 nt, Artificial Sequence
  Description of Artificial Sequence: Synthetic oligonucleotide
acaucucugcauggauucu

SEQ ID NO: 3057676 - RNA, 19 nt, Artificial Sequence
  Description of Artificial Sequence: Synthetic oligonucleotide
uggauucuacaagcagaau

SEQ ID NO: 3057677 - RNA, 19 nt, Artificial Sequence
  Description of Artificial Sequence: Synthetic oligonucleotide
acuccccaccuucccucuc

SEQ ID NO: 3057678 - RNA, 19 nt, Artificial Sequence
  Description of Artificial Sequence: Synthetic oligonucleotide
acugaccuacagacaucuc

SEQ ID NO: 3057679 - RNA, 19 nt, Artificial Sequence
  Description of Artificial Sequence: Synthetic oligonucleotide
gccacugaccuacagacau

SEQ ID NO: 3057680 - RNA, 19 nt, Artificial Sequence
  Description of Artificial Sequence: Synthetic oligonucleotide
guguacguaugagccagga

SEQ ID NO: 3057681 - RNA, 19 nt, Artificial Sequence
  Description of Artificial Sequence: Synthetic oligonucleotide
caagcagaaugaacagcua

SEQ ID NO: 3057682 - RNA, 19 nt, Artificial Sequence
  Description of Artificial Sequence: Synthetic oligonucleotide
gcgauuggacuugaccuug

SEQ ID NO: 3057683 - RNA, 19 nt, Artificial Sequence
  Description of Artificial Sequence: Synthetic oligonucleotide
cguaugagccaggaacugg

SEQ ID NO: 3057684 - RNA, 19 nt, Artificial Sequence
  Description of Artificial Sequence: Synthetic oligonucleotide
guuucccuuccacuuuugu

SEQ ID NO: 3057685 - RNA, 19 nt, Artificial Sequence
  Description of Artificial Sequence: Synthetic oligonucleotide
cacugaccuacagacaucu

SEQ ID NO: 3057686 - RNA, 19 nt, Artificial Sequence
  Description of Artificial Sequence: Synthetic oligonucleotide
caccuucccucucaucaca

SEQ ID NO: 3057687 - RNA, 19 nt, Artificial Sequence
  Description of Artificial Sequence: Synthetic oligonucleotide
cuugaccuuguggcagcac

SEQ ID NO: 3057688 - RNA, 19 nt, Artificial Sequence
  Description of Artificial Sequence: Synthetic oligonucleotide
acuugaccuuguggcagca

SEQ ID NO: 3057689 - RNA, 19 nt, Artificial Sequence
  Description of Artificial Sequence: Synthetic oligonucleotide
ggcugcuaauaugccacug

SEQ ID NO: 3057690 - RNA, 19 nt, Artificial Sequence
  Description of Artificial Sequence: Synthetic oligonucleotide
ggcugagggaggcugcuaa

SEQ ID NO: 3057691 - RNA, 19 nt, Artificial Sequence
  Description of Artificial Sequence: Synthetic oligonucleotide
ggggcgauggagaugguua

SEQ ID NO: 3057692 - RNA, 19 nt, Artificial Sequence
  Description of Artificial Sequence: Synthetic oligonucleotide
caucucugcauggauucua

SEQ ID NO: 3057693 - RNA, 19 nt, Artificial Sequence
  Description of Artificial Sequence: Synthetic oligonucleotide
cgauggagaugguuaauga

SEQ ID NO: 3057694 - RNA, 19 nt, Artificial Sequence
  Description of Artificial Sequence: Synthetic oligonucleotide
acgggacuguguacguaug

SEQ ID NO: 3057695 - RNA, 19 nt, Artificial Sequence
  Description of Artificial Sequence: Synthetic oligonucleotide
gguuaaugaugaacagcaa

SEQ ID NO: 3057696 - RNA, 19 nt, Artificial Sequence
  Description of Artificial Sequence: Synthetic oligonucleotide
ggagaugguuaaugaugaa

SEQ ID NO: 3057697 - RNA, 19 nt, Artificial Sequence
  Description of Artificial Sequence: Synthetic oligonucleotide
caaacgggacuguguacgu

SEQ ID NO: 3057698 - RNA, 19 nt, Artificial Sequence
  Description of Artificial Sequence: Synthetic oligonucleotide
ccaccuucccucucaucac

SEQ ID NO: 3057699 - RNA, 19 nt, Artificial Sequence
  Description of Artificial Sequence: Synthetic oligonucleotide
gcuaaugauuugagcucac

SEQ ID NO: 3057700 - RNA, 19 nt, Artificial Sequence
  Description of Artificial Sequence: Synthetic oligonucleotide
gggaggcugcuaauaugcc

SEQ ID NO: 3057701 - RNA, 19 nt, Artificial Sequence
  Description of Artificial Sequence: Synthetic oligonucleotide
cugagggaggcugcuaaua

SEQ ID NO: 3057702 - RNA, 19 nt, Artificial Sequence
  Description of Artificial Sequence: Synthetic oligonucleotide
ccuacagacaucucugcau

SEQ ID NO: 3057703 - RNA, 19 nt, Artificial Sequence
  Description of Artificial Sequence: Synthetic oligonucleotide
cagacaucucugcauggau

SEQ ID NO: 3057704 - RNA, 19 nt, Artificial Sequence
  Description of Artificial Sequence: Synthetic oligonucleotide
gggcgauggagaugguuaa

SEQ ID NO: 3057705 - RNA, 19 nt, Artificial Sequence
  Description of Artificial Sequence: Synthetic oligonucleotide
cagggagcuaacagauacu

SEQ ID NO: 3057706 - RNA, 19 nt, Artificial Sequence
  Description of Artificial Sequence: Synthetic oligonucleotide
gaccuuguggcagcacagu

SEQ ID NO: 3057707 - RNA, 19 nt, Artificial Sequence
  Description of Artificial Sequence: Synthetic oligonucleotide
gcucaccaugaaaggcagg

SEQ ID NO: 3057708 - RNA, 19 nt, Artificial Sequence
  Description of Artificial Sequence: Synthetic oligonucleotide
ccacuccccaccuucccuc

SEQ ID NO: 3057709 - RNA, 19 nt, Artificial Sequence
  Description of Artificial Sequence: Synthetic oligonucleotide
ccaggaacuggcugaggga

SEQ ID NO: 3057710 - RNA, 19 nt, Artificial Sequence
  Description of Artificial Sequence: Synthetic oligonucleotide
gguuucccuuccacuuuug

SEQ ID NO: 3057711 - RNA, 19 nt, Artificial Sequence
  Description of Artificial Sequence: Synthetic oligonucleotide
cccuuccacuuuugugacc

SEQ ID NO: 3057712 - RNA, 19 nt, Artificial Sequence
  Description of Artificial Sequence: Synthetic oligonucleotide
ccacugaccuacagacauc

SEQ ID NO: 3057713 - RNA, 19 nt, Artificial Sequence
  Description of Artificial Sequence: Synthetic oligonucleotide
ggcgauuggacuugaccuu

SEQ ID NO: 3057714 - RNA, 19 nt, Artificial Sequence
  Description of Artificial Sequence: Synthetic oligonucleotide
ccaugaaaggcagggagcu

SEQ ID NO: 3057715 - RNA, 19 nt, Artificial Sequence
  Description of Artificial Sequence: Synthetic oligonucleotide
gcagcacagugguauauuu

SEQ ID NO: 3057716 - RNA, 19 nt, Artificial Sequence
  Description of Artificial Sequence: Synthetic oligonucleotide
gggagcuaacagauacuaa

SEQ ID NO: 3057717 - RNA, 19 nt, Artificial Sequence
  Description of Artificial Sequence: Synthetic oligonucleotide
gaacagcaaacgggacugu

SEQ ID NO: 3057718 - RNA, 19 nt, Artificial Sequence
  Description of Artificial Sequence: Synthetic oligonucleotide
uggcugagggaggcugcua

SEQ ID NO: 3057719 - RNA, 19 nt, Artificial Sequence
  Description of Artificial Sequence: Synthetic oligonucleotide
ccuucccucucaucacaga

SEQ ID NO: 3057720 - RNA, 19 nt, Artificial Sequence
  Description of Artificial Sequence: Synthetic oligonucleotide
ccccacuccccaccuuccc

SEQ ID NO: 3057721 - RNA, 19 nt, Artificial Sequence
  Description of Artificial Sequence: Synthetic oligonucleotide
gaacuggcugagggaggcu

SEQ ID NO: 3057722 - RNA, 19 nt, Artificial Sequence
  Description of Artificial Sequence: Synthetic oligonucleotide
ggguuucccuuccacuuuu

SEQ ID NO: 3057723 - RNA, 19 nt, Artificial Sequence
  Description of Artificial Sequence: Synthetic oligonucleotide
cgggacuguguacguauga

SEQ ID NO: 3057724 - RNA, 19 nt, Artificial Sequence
  Description of Artificial Sequence: Synthetic oligonucleotide
cuggcugagggaggcugcu

SEQ ID NO: 3057725 - RNA, 19 nt, Artificial Sequence
  Description of Artificial Sequence: Synthetic oligonucleotide
gcugagggaggcugcuaau

SEQ ID NO: 3057726 - RNA, 19 nt, Artificial Sequence
  Description of Artificial Sequence: Synthetic oligonucleotide
ggcagggagcuaacagaua

SEQ ID NO: 3057727 - RNA, 19 nt, Artificial Sequence
  Description of Artificial Sequence: Synthetic oligonucleotide
ggcagcacagugguauauu

SEQ ID NO: 3057728 - RNA, 19 nt, Artificial Sequence
  Description of Artificial Sequence: Synthetic oligonucleotide
ggcgauggagaugguuaau

SEQ ID NO: 3057729 - RNA, 19 nt, Artificial Sequence
  Description of Artificial Sequence: Synthetic oligonucleotide
cccacuccccaccuucccu

SEQ ID NO: 3057730 - RNA, 19 nt, Artificial Sequence
  Description of Artificial Sequence: Synthetic oligonucleotide
cgauuggacuugaccuugu

SEQ ID NO: 3057731 - RNA, 19 nt, Artificial Sequence
  Description of Artificial Sequence: Synthetic oligonucleotide
gaugauggacaauagaagg

SEQ ID NO: 3057732 - RNA, 19 nt, Artificial Sequence
  Description of Artificial Sequence: Synthetic oligonucleotide
  modified_base (14)..(14): a, c, u, g, unknown or other
aucuuuuguguucngaaag

SEQ ID NO: 3057733 - RNA, 19 nt, Artificial Sequence
  Description of Artificial Sequence: Synthetic oligonucleotide
aaugaugggcaacggaagg

SEQ ID NO: 3057734 - RNA, 19 nt, Artificial Sequence
  Description of Artificial Sequence: Synthetic oligonucleotide
acaauagaaggccagacca

SEQ ID NO: 3057735 - RNA, 19 nt, Artificial Sequence
  Description of Artificial Sequence: Synthetic oligonucleotide
uguguuuuagaaagcaaug

SEQ ID NO: 3057736 - RNA, 19 nt, Artificial Sequence
  Description of Artificial Sequence: Synthetic oligonucleotide
ugaugauggacaauagaag

SEQ ID NO: 3057737 - RNA, 19 nt, Artificial Sequence
  Description of Artificial Sequence: Synthetic oligonucleotide
acauguaggguguuucucc

SEQ ID NO: 3057738 - RNA, 19 nt, Artificial Sequence
  Description of Artificial Sequence: Synthetic oligonucleotide
aaaguacugauggagcacg

SEQ ID NO: 3057739 - RNA, 19 nt, Artificial Sequence
  Description of Artificial Sequence: Synthetic oligonucleotide
  modified_base (5)..(5): a, c, u, g, unknown or other
guucngaaagugaugaugg

SEQ ID NO: 3057740 - RNA, 19 nt, Artificial Sequence
  Description of Artificial Sequence: Synthetic oligonucleotide
uguuuuagaaagcaaugau

SEQ ID NO: 3057741 - RNA, 19 nt, Artificial Sequence
  Description of Artificial Sequence: Synthetic oligonucleotide
  modified_base (8)..(8): a, c, u, g, unknown or other
uguguucngaaagugauga

SEQ ID NO: 3057742 - RNA, 19 nt, Artificial Sequence
  Description of Artificial Sequence: Synthetic oligonucleotide
  modified_base (11)..(11): a, c, u, g, unknown or other
uuuuguguucngaaaguga

SEQ ID NO: 3057743 - RNA, 19 nt, Artificial Sequence
  Description of Artificial Sequence: Synthetic oligonucleotide
uuguguuuuagaaagcaau

SEQ ID NO: 3057744 - RNA, 19 nt, Artificial Sequence
  Description of Artificial Sequence: Synthetic oligonucleotide
aaagugaugauggacaaua

SEQ ID NO: 3057745 - RNA, 19 nt, Artificial Sequence
  Description of Artificial Sequence: Synthetic oligonucleotide
accuguaugaaucuuuugu

SEQ ID NO: 3057746 - RNA, 19 nt, Artificial Sequence
  Description of Artificial Sequence: Synthetic oligonucleotide
auucuuuacacuuguggug

SEQ ID NO: 3057747 - RNA, 19 nt, Artificial Sequence
  Description of Artificial Sequence: Synthetic oligonucleotide
  modified_base (6)..(6): a, c, u, g, unknown or other
uguucngaaagugaugaug

SEQ ID NO: 3057748 - RNA, 19 nt, Artificial Sequence
  Description of Artificial Sequence: Synthetic oligonucleotide
  modified_base (16)..(16): a, c, u, g, unknown or other
gaaucuuuuguguucngaa

SEQ ID NO: 3057749 - RNA, 19 nt, Artificial Sequence
  Description of Artificial Sequence: Synthetic oligonucleotide
agaaggccagaccacauuc

SEQ ID NO: 3057750 - RNA, 19 nt, Artificial Sequence
  Description of Artificial Sequence: Synthetic oligonucleotide
ugauggacaauagaaggcc

SEQ ID NO: 3057751 - RNA, 19 nt, Artificial Sequence
  Description of Artificial Sequence: Synthetic oligonucleotide
  modified_base (13)..(13): a, c, u, g, unknown or other
ucuuuuguguucngaaagu

SEQ ID NO: 3057752 - RNA, 19 nt, Artificial Sequence
  Description of Artificial Sequence: Synthetic oligonucleotide
guuuuagaaagcaaugaug

SEQ ID NO: 3057753 - RNA, 19 nt, Artificial Sequence
  Description of Artificial Sequence: Synthetic oligonucleotide
augauggacaauagaaggc

SEQ ID NO: 3057754 - RNA, 19 nt, Artificial Sequence
  Description of Artificial Sequence: Synthetic oligonucleotide
gcacagaaaguacugaugg

SEQ ID NO: 3057755 - RNA, 19 nt, Artificial Sequence
  Description of Artificial Sequence: Synthetic oligonucleotide
gacaauagaaggccagacc

SEQ ID NO: 3057756 - RNA, 19 nt, Artificial Sequence
  Description of Artificial Sequence: Synthetic oligonucleotide
acuugugguguuucucucc

SEQ ID NO: 3057757 - RNA, 19 nt, Artificial Sequence
  Description of Artificial Sequence: Synthetic oligonucleotide
agaaaguacugauggagca

SEQ ID NO: 3057758 - RNA, 19 nt, Artificial Sequence
  Description of Artificial Sequence: Synthetic oligonucleotide
  modified_base (15)..(15): a, c, u, g, unknown or other
aaucuuuuguguucngaaa

SEQ ID NO: 3057759 - RNA, 19 nt, Artificial Sequence
  Description of Artificial Sequence: Synthetic oligonucleotide
augauggacaauggaaggc

SEQ ID NO: 3057760 - RNA, 19 nt, Artificial Sequence
  Description of Artificial Sequence: Synthetic oligonucleotide
  modified_base (19)..(19): a, c, u, g, unknown or other
uaugaaucuuuuguguucn

SEQ ID NO: 3057761 - RNA, 19 nt, Artificial Sequence
  Description of Artificial Sequence: Synthetic oligonucleotide
auaccucacauuuguagag

SEQ ID NO: 3057762 - RNA, 19 nt, Artificial Sequence
  Description of Artificial Sequence: Synthetic oligonucleotide
ugcacagaaaguacugaug

SEQ ID NO: 3057763 - RNA, 19 nt, Artificial Sequence
  Description of Artificial Sequence: Synthetic oligonucleotide
acaauggaaggccuuacca

SEQ ID NO: 3057764 - RNA, 19 nt, Artificial Sequence
  Description of Artificial Sequence: Synthetic oligonucleotide
cagaaaguacugauggagc

SEQ ID NO: 3057765 - RNA, 19 nt, Artificial Sequence
  Description of Artificial Sequence: Synthetic oligonucleotide
uaccacauaccucacauuu

SEQ ID NO: 3057766 - RNA, 19 nt, Artificial Sequence
  Description of Artificial Sequence: Synthetic oligonucleotide
aauagaaggccagaccaca

SEQ ID NO: 3057767 - RNA, 19 nt, Artificial Sequence
  Description of Artificial Sequence: Synthetic oligonucleotide
aauucuccugugcacagaa

SEQ ID NO: 3057768 - RNA, 19 nt, Artificial Sequence
  Description of Artificial Sequence: Synthetic oligonucleotide
cagaccacauucuuuacac

SEQ ID NO: 3057769 - RNA, 19 nt, Artificial Sequence
  Description of Artificial Sequence: Synthetic oligonucleotide
uguaugaaucuuuuguguu

SEQ ID NO: 3057770 - RNA, 19 nt, Artificial Sequence
  Description of Artificial Sequence: Synthetic oligonucleotide
  modified_base (2)..(2): a, c, u, g, unknown or other
cngaaagugaugauggaca

SEQ ID NO: 3057771 - RNA, 19 nt, Artificial Sequence
  Description of Artificial Sequence: Synthetic oligonucleotide
ugauggacaauggaaggcc

SEQ ID NO: 3057772 - RNA, 19 nt, Artificial Sequence
  Description of Artificial Sequence: Synthetic oligonucleotide
  modified_base (3)..(3): a, c, u, g, unknown or other
ucngaaagugaugauggac

SEQ ID NO: 3057773 - RNA, 19 nt, Artificial Sequence
  Description of Artificial Sequence: Synthetic oligonucleotide
auucucuuguguuuuagaa

SEQ ID NO: 3057774 - RNA, 19 nt, Artificial Sequence
  Description of Artificial Sequence: Synthetic oligonucleotide
ugugguguuucucuccugu

SEQ ID NO: 3057775 - RNA, 19 nt, Artificial Sequence
  Description of Artificial Sequence: Synthetic oligonucleotide
agugaugauggacaauaga

SEQ ID NO: 3057776 - RNA, 19 nt, Artificial Sequence
  Description of Artificial Sequence: Synthetic oligonucleotide
guaugaauucuccugugca

SEQ ID NO: 3057777 - RNA, 19 nt, Artificial Sequence
  Description of Artificial Sequence: Synthetic oligonucleotide
  modified_base (9)..(9): a, c, u, g, unknown or other
uuguguucngaaagugaug

SEQ ID NO: 3057778 - RNA, 19 nt, Artificial Sequence
  Description of Artificial Sequence: Synthetic oligonucleotide
ugauggagcacggaaggcc

SEQ ID NO: 3057779 - RNA, 19 nt, Artificial Sequence
  Description of Artificial Sequence: Synthetic oligonucleotide
uucucuuguguuuuagaaa

SEQ ID NO: 3057780 - RNA, 19 nt, Artificial Sequence
  Description of Artificial Sequence: Synthetic oligonucleotide
augaugggcaacggaaggc

SEQ ID NO: 3057781 - RNA, 19 nt, Artificial Sequence
  Description of Artificial Sequence: Synthetic oligonucleotide
guaugaaucuuuuguguuc

SEQ ID NO: 3057782 - RNA, 19 nt, Artificial Sequence
  Description of Artificial Sequence: Synthetic oligonucleotide
agcaaugauggacaaugga

SEQ ID NO: 3057783 - RNA, 19 nt, Artificial Sequence
  Description of Artificial Sequence: Synthetic oligonucleotide
gugaugauggacaauagaa

SEQ ID NO: 3057784 - RNA, 19 nt, Artificial Sequence
  Description of Artificial Sequence: Synthetic oligonucleotide
caacggaaggcuuugccac

SEQ ID NO: 3057785 - RNA, 19 nt, Artificial Sequence
  Description of Artificial Sequence: Synthetic oligonucleotide
gacaauggaaggccuuacc

SEQ ID NO: 3057786 - RNA, 19 nt, Artificial Sequence
  Description of Artificial Sequence: Synthetic oligonucleotide
acacuugugguguuucucu

SEQ ID NO: 3057787 - RNA, 19 nt, Artificial Sequence
  Description of Artificial Sequence: Synthetic oligonucleotide
  modified_base (4)..(4): a, c, u, g, unknown or other
uucngaaagugaugaugga

SEQ ID NO: 3057788 - RNA, 19 nt, Artificial Sequence
  Description of Artificial Sequence: Synthetic oligonucleotide
  modified_base (12)..(12): a, c, u, g, unknown or other
cuuuuguguucngaaagug

SEQ ID NO: 3057789 - RNA, 19 nt, Artificial Sequence
  Description of Artificial Sequence: Synthetic oligonucleotide
  modified_base (17)..(17): a, c, u, g, unknown or other
ugaaucuuuuguguucnga

SEQ ID NO: 3057790 - RNA, 19 nt, Artificial Sequence
  Description of Artificial Sequence: Synthetic oligonucleotide
gaauucucuuguguuuuag

SEQ ID NO: 3057791 - RNA, 19 nt, Artificial Sequence
  Description of Artificial Sequence: Synthetic oligonucleotide
uccugugcacagaaaguac

SEQ ID NO: 3057792 - RNA, 19 nt, Artificial Sequence
  Description of Artificial Sequence: Synthetic oligonucleotide
caauagaaggccagaccac

SEQ ID NO: 3057793 - RNA, 19 nt, Artificial Sequence
  Description of Artificial Sequence: Synthetic oligonucleotide
ugccacagacuucacacau

SEQ ID NO: 3057794 - RNA, 19 nt, Artificial Sequence
  Description of Artificial Sequence: Synthetic oligonucleotide
gaaaguacugauggagcac

SEQ ID NO: 3057795 - RNA, 19 nt, Artificial Sequence
  Description of Artificial Sequence: Synthetic oligonucleotide
uuuacacuugugguguuuc

SEQ ID NO: 3057796 - RNA, 19 nt, Artificial Sequence
  Description of Artificial Sequence: Synthetic oligonucleotide
cauucuuuacacuuguggu

SEQ ID NO: 3057797 - RNA, 19 nt, Artificial Sequence
  Description of Artificial Sequence: Synthetic oligonucleotide
aagugaugauggacaauag

SEQ ID NO: 3057798 - RNA, 19 nt, Artificial Sequence
  Description of Artificial Sequence: Synthetic oligonucleotide
guguuuuagaaagcaauga

SEQ ID NO: 3057799 - RNA, 19 nt, Artificial Sequence
  Description of Artificial Sequence: Synthetic oligonucleotide
aggguguuucuccuguaug

SEQ ID NO: 3057800 - RNA, 19 nt, Artificial Sequence
  Description of Artificial Sequence: Synthetic oligonucleotide
ccuguaugaaucuuuugug

SEQ ID NO: 3057801 - RNA, 19 nt, Artificial Sequence
  Description of Artificial Sequence: Synthetic oligonucleotide
cucuuguguuuuagaaagc

SEQ ID NO: 3057802 - RNA, 19 nt, Artificial Sequence
  Description of Artificial Sequence: Synthetic oligonucleotide
ugaugggcaacggaaggcu

SEQ ID NO: 3057803 - RNA, 19 nt, Artificial Sequence
  Description of Artificial Sequence: Synthetic oligonucleotide
aaggccagaccacauucuu

SEQ ID NO: 3057804 - RNA, 19 nt, Artificial Sequence
  Description of Artificial Sequence: Synthetic oligonucleotide
agaaagcaaugauggacaa

SEQ ID NO: 3057805 - RNA, 19 nt, Artificial Sequence
  Description of Artificial Sequence: Synthetic oligonucleotide
aaguacugauggagcacgg

SEQ ID NO: 3057806 - RNA, 19 nt, Artificial Sequence
  Description of Artificial Sequence: Synthetic oligonucleotide
uggacaauagaaggccaga

SEQ ID NO: 3057807 - RNA, 19 nt, Artificial Sequence
  Description of Artificial Sequence: Synthetic oligonucleotide
acacauguaggguguuucu

SEQ ID NO: 3057808 - RNA, 19 nt, Artificial Sequence
  Description of Artificial Sequence: Synthetic oligonucleotide
agcacggaaggccuugcca

SEQ ID NO: 3057809 - RNA, 19 nt, Artificial Sequence
  Description of Artificial Sequence: Synthetic oligonucleotide
auggacaauagaaggccag

SEQ ID NO: 3057810 - RNA, 19 nt, Artificial Sequence
  Description of Artificial Sequence: Synthetic oligonucleotide
uuacacuugugguguuucu

SEQ ID NO: 3057811 - RNA, 19 nt, Artificial Sequence
  Description of Artificial Sequence: Synthetic oligonucleotide
  modified_base (18)..(18): a, c, u, g, unknown or other
augaaucuuuuguguucng

SEQ ID NO: 3057812 - RNA, 19 nt, Artificial Sequence
  Description of Artificial Sequence: Synthetic oligonucleotide
guacugauggagcacggaa

SEQ ID NO: 3057813 - RNA, 19 nt, Artificial Sequence
  Description of Artificial Sequence: Synthetic oligonucleotide
uaggguguuucuccuguau

SEQ ID NO: 3057814 - RNA, 19 nt, Artificial Sequence
  Description of Artificial Sequence: Synthetic oligonucleotide
gauggacaauagaaggcca

SEQ ID NO: 3057815 - RNA, 19 nt, Artificial Sequence
  Description of Artificial Sequence: Synthetic oligonucleotide
cuguaugaaucuuuugugu

SEQ ID NO: 3057816 - RNA, 19 nt, Artificial Sequence
  Description of Artificial Sequence: Synthetic oligonucleotide
uagaaggccagaccacauu

SEQ ID NO: 3057817 - RNA, 19 nt, Artificial Sequence
  Description of Artificial Sequence: Synthetic oligonucleotide
gcaaugauggacaauggaa

SEQ ID NO: 3057818 - RNA, 19 nt, Artificial Sequence
  Description of Artificial Sequence: Synthetic oligonucleotide
cacacauguaggguguuuc

SEQ ID NO: 3057819 - RNA, 19 nt, Artificial Sequence
  Description of Artificial Sequence: Synthetic oligonucleotide
agaccacauucuuuacacu

SEQ ID NO: 3057820 - RNA, 19 nt, Artificial Sequence
  Description of Artificial Sequence: Synthetic oligonucleotide
uaccucacauuuguagagu

SEQ ID NO: 3057821 - RNA, 19 nt, Artificial Sequence
  Description of Artificial Sequence: Synthetic oligonucleotide
ggguguuucuccuguauga

SEQ ID NO: 3057822 - RNA, 19 nt, Artificial Sequence
  Description of Artificial Sequence: Synthetic oligonucleotide
uggacaauggaaggccuua

SEQ ID NO: 3057823 - RNA, 19 nt, Artificial Sequence
  Description of Artificial Sequence: Synthetic oligonucleotide
ugggcaacggaaggcuuug

SEQ ID NO: 3057824 - RNA, 19 nt, Artificial Sequence
  Description of Artificial Sequence: Synthetic oligonucleotide
uuaccacauaccucacauu

SEQ ID NO: 3057825 - RNA, 19 nt, Artificial Sequence
  Description of Artificial Sequence: Synthetic oligonucleotide
ggcaacggaaggcuuugcc

SEQ ID NO: 3057826 - RNA, 19 nt, Artificial Sequence
  Description of Artificial Sequence: Synthetic oligonucleotide
cacuugugguguuucucuc

SEQ ID NO: 3057827 - RNA, 19 nt, Artificial Sequence
  Description of Artificial Sequence: Synthetic oligonucleotide
caccuguaugaaucuuuug

SEQ ID NO: 3057828 - RNA, 19 nt, Artificial Sequence
  Description of Artificial Sequence: Synthetic oligonucleotide
aguacugauggagcacgga

SEQ ID NO: 3057829 - RNA, 19 nt, Artificial Sequence
  Description of Artificial Sequence: Synthetic oligonucleotide
cacauguaggguguuucuc

SEQ ID NO: 3057830 - RNA, 19 nt, Artificial Sequence
  Description of Artificial Sequence: Synthetic oligonucleotide
gcaacggaaggcuuugcca

SEQ ID NO: 3057831 - RNA, 19 nt, Artificial Sequence
  Description of Artificial Sequence: Synthetic oligonucleotide
uugugguguuucucuccug

SEQ ID NO: 3057832 - RNA, 19 nt, Artificial Sequence
  Description of Artificial Sequence: Synthetic oligonucleotide
cugauggagcacggaaggc

SEQ ID NO: 3057833 - RNA, 19 nt, Artificial Sequence
  Description of Artificial Sequence: Synthetic oligonucleotide
ggcuuugccacagacuuca

SEQ ID NO: 3057834 - RNA, 19 nt, Artificial Sequence
  Description of Artificial Sequence: Synthetic oligonucleotide
uggagcacggaaggccuug

SEQ ID NO: 3057835 - RNA, 19 nt, Artificial Sequence
  Description of Artificial Sequence: Synthetic oligonucleotide
ggacaauagaaggccagac

SEQ ID NO: 3057836 - RNA, 19 nt, Artificial Sequence
  Description of Artificial Sequence: Synthetic oligonucleotide
gagcacggaaggccuugcc

SEQ ID NO: 3057837 - RNA, 19 nt, Artificial Sequence
  Description of Artificial Sequence: Synthetic oligonucleotide
cuucacacauguagggugu

SEQ ID NO: 3057838 - RNA, 19 nt, Artificial Sequence
  Description of Artificial Sequence: Synthetic oligonucleotide
gaauucuccugugcacaga

SEQ ID NO: 3057839 - RNA, 19 nt, Artificial Sequence
  Description of Artificial Sequence: Synthetic oligonucleotide
ggccagaccacauucuuua

SEQ ID NO: 3057840 - RNA, 19 nt, Artificial Sequence
  Description of Artificial Sequence: Synthetic oligonucleotide
cuugugguguuucucuccu

SEQ ID NO: 3057841 - RNA, 19 nt, Artificial Sequence
  Description of Artificial Sequence: Synthetic oligonucleotide
auagaaggccagaccacau

SEQ ID NO: 3057842 - RNA, 19 nt, Artificial Sequence
  Description of Artificial Sequence: Synthetic oligonucleotide
gauggacaauggaaggccu

SEQ ID NO: 3057843 - RNA, 19 nt, Artificial Sequence
  Description of Artificial Sequence: Synthetic oligonucleotide
cauguaggguguuucuccu

SEQ ID NO: 3057844 - RNA, 19 nt, Artificial Sequence
  Description of Artificial Sequence: Synthetic oligonucleotide
cuccugugcacagaaagua

SEQ ID NO: 3057845 - RNA, 19 nt, Artificial Sequence
  Description of Artificial Sequence: Synthetic oligonucleotide
gugcacagaaaguacugau

SEQ ID NO: 3057846 - RNA, 19 nt, Artificial Sequence
  Description of Artificial Sequence: Synthetic oligonucleotide
auggaaggccuuaccacau

SEQ ID NO: 3057847 - RNA, 19 nt, Artificial Sequence
  Description of Artificial Sequence: Synthetic oligonucleotide
aggcuuugccacagacuuc

SEQ ID NO: 3057848 - RNA, 19 nt, Artificial Sequence
  Description of Artificial Sequence: Synthetic oligonucleotide
ucacacauguaggguguuu

SEQ ID NO: 3057849 - RNA, 19 nt, Artificial Sequence
  Description of Artificial Sequence: Synthetic oligonucleotide
gaaggccagaccacauucu

SEQ ID NO: 3057850 - RNA, 19 nt, Artificial Sequence
  Description of Artificial Sequence: Synthetic oligonucleotide
gaaagugaugauggacaau

SEQ ID NO: 3057851 - RNA, 19 nt, Artificial Sequence
  Description of Artificial Sequence: Synthetic oligonucleotide
gguguuucuccuguaugaa

SEQ ID NO: 3057852 - RNA, 19 nt, Artificial Sequence
  Description of Artificial Sequence: Synthetic oligonucleotide
uucacacauguaggguguu

SEQ ID NO: 3057853 - RNA, 19 nt, Artificial Sequence
  Description of Artificial Sequence: Synthetic oligonucleotide
  modified_base (7)..(7): a, c, u, g, unknown or other
guguucngaaagugaugau

SEQ ID NO: 3057854 - RNA, 19 nt, Artificial Sequence
  Description of Artificial Sequence: Synthetic oligonucleotide
augggcaacggaaggcuuu

SEQ ID NO: 3057855 - RNA, 19 nt, Artificial Sequence
  Description of Artificial Sequence: Synthetic oligonucleotide
auggacaauggaaggccuu

SEQ ID NO: 3057856 - RNA, 19 nt, Artificial Sequence
  Description of Artificial Sequence: Synthetic oligonucleotide
ggacaauggaaggccuuac

SEQ ID NO: 3057857 - RNA, 19 nt, Artificial Sequence
  Description of Artificial Sequence: Synthetic oligonucleotide
ccacagacuucacacaugu

SEQ ID NO: 3057858 - RNA, 19 nt, Artificial Sequence
  Description of Artificial Sequence: Synthetic oligonucleotide
ccugugcacagaaaguacu

SEQ ID NO: 3057859 - RNA, 19 nt, Artificial Sequence
  Description of Artificial Sequence: Synthetic oligonucleotide
gccagaccacauucuuuac

SEQ ID NO: 3057860 - RNA, 19 nt, Artificial Sequence
  Description of Artificial Sequence: Synthetic oligonucleotide
gccacagacuucacacaug

SEQ ID NO: 3057861 - RNA, 19 nt, Artificial Sequence
  Description of Artificial Sequence: Synthetic oligonucleotide
aggccagaccacauucuuu

SEQ ID NO: 3057862 - RNA, 19 nt, Artificial Sequence
  Description of Artificial Sequence: Synthetic oligonucleotide
auucuccugugcacagaaa

SEQ ID NO: 3057863 - RNA, 19 nt, Artificial Sequence
  Description of Artificial Sequence: Synthetic oligonucleotide
cacagacuucacacaugua

SEQ ID NO: 3057864 - RNA, 19 nt, Artificial Sequence
  Description of Artificial Sequence: Synthetic oligonucleotide
ggagcacggaaggccuugc

SEQ ID NO: 3057865 - RNA, 19 nt, Artificial Sequence
  Description of Artificial Sequence: Synthetic oligonucleotide
gggcaacggaaggcuuugc

SEQ ID NO: 3057866 - RNA, 19 nt, Artificial Sequence
  Description of Artificial Sequence: Synthetic oligonucleotide
  modified_base (1)..(1): a, c, u, g, unknown or other
ngaaagugaugauggacaa

SEQ ID NO: 3057867 - RNA, 19 nt, Artificial Sequence
  Description of Artificial Sequence: Synthetic oligonucleotide
aaacauugaacucacaagc

SEQ ID NO: 3057868 - RNA, 19 nt, Artificial Sequence
  Description of Artificial Sequence: Synthetic oligonucleotide
aacaauggcagccacagac

SEQ ID NO: 3057869 - RNA, 19 nt, Artificial Sequence
  Description of Artificial Sequence: Synthetic oligonucleotide
aauaauggcagauguagag

SEQ ID NO: 3057870 - RNA, 19 nt, Artificial Sequence
  Description of Artificial Sequence: Synthetic oligonucleotide
aagaguagcucacacagac

SEQ ID NO: 3057871 - RNA, 19 nt, Artificial Sequence
  Description of Artificial Sequence: Synthetic oligonucleotide
ugaagaguagcucacacag

SEQ ID NO: 3057872 - RNA, 19 nt, Artificial Sequence
  Description of Artificial Sequence: Synthetic oligonucleotide
aauucaucagcacaagaag

SEQ ID NO: 3057873 - RNA, 19 nt, Artificial Sequence
  Description of Artificial Sequence: Synthetic oligonucleotide
uaaauaauggcagauguag

SEQ ID NO: 3057874 - RNA, 19 nt, Artificial Sequence
  Description of Artificial Sequence: Synthetic oligonucleotide
agauccagccaucauagcc

SEQ ID NO: 3057875 - RNA, 19 nt, Artificial Sequence
  Description of Artificial Sequence: Synthetic oligonucleotide
uaaacauugaacucacaag

SEQ ID NO: 3057876 - RNA, 19 nt, Artificial Sequence
  Description of Artificial Sequence: Synthetic oligonucleotide
uucaucagcacaagaaggg

SEQ ID NO: 3057877 - RNA, 19 nt, Artificial Sequence
  Description of Artificial Sequence: Synthetic oligonucleotide
agauguagagcauuccacc

SEQ ID NO: 3057878 - RNA, 19 nt, Artificial Sequence
  Description of Artificial Sequence: Synthetic oligonucleotide
uaucgguaaacauugaacu

SEQ ID NO: 3057879 - RNA, 19 nt, Artificial Sequence
  Description of Artificial Sequence: Synthetic oligonucleotide
aucugcaccacccaggacg

SEQ ID NO: 3057880 - RNA, 19 nt, Artificial Sequence
  Description of Artificial Sequence: Synthetic oligonucleotide
auagccacgaucccagucc

SEQ ID NO: 3057881 - RNA, 19 nt, Artificial Sequence
  Description of Artificial Sequence: Synthetic oligonucleotide
uguucauggcuaaauaaug

SEQ ID NO: 3057882 - RNA, 19 nt, Artificial Sequence
  Description of Artificial Sequence: Synthetic oligonucleotide
ugauuugaagaguagcuca

SEQ ID NO: 3057883 - RNA, 19 nt, Artificial Sequence
  Description of Artificial Sequence: Synthetic oligonucleotide
gaaggcaacagauccagcc

SEQ ID NO: 3057884 - RNA, 19 nt, Artificial Sequence
  Description of Artificial Sequence: Synthetic oligonucleotide
cauugaacucacaagcucc

SEQ ID NO: 3057885 - RNA, 19 nt, Artificial Sequence
  Description of Artificial Sequence: Synthetic oligonucleotide
cauggcuaaauaauggcag

SEQ ID NO: 3057886 - RNA, 19 nt, Artificial Sequence
  Description of Artificial Sequence: Synthetic oligonucleotide
aacagggcccagcagguac

SEQ ID NO: 3057887 - RNA, 19 nt, Artificial Sequence
  Description of Artificial Sequence: Synthetic oligonucleotide
cagaaccacacucagaagc

SEQ ID NO: 3057888 - RNA, 19 nt, Artificial Sequence
  Description of Artificial Sequence: Synthetic oligonucleotide
uaauggcagauguagagca

SEQ ID NO: 3057889 - RNA, 19 nt, Artificial Sequence
  Description of Artificial Sequence: Synthetic oligonucleotide
uucauggcuaaauaauggc

SEQ ID NO: 3057890 - RNA, 19 nt, Artificial Sequence
  Description of Artificial Sequence: Synthetic oligonucleotide
acauugaacucacaagcuc

SEQ ID NO: 3057891 - RNA, 19 nt, Artificial Sequence
  Description of Artificial Sequence: Synthetic oligonucleotide
aaauucaucagcacaagaa

SEQ ID NO: 3057892 - RNA, 19 nt, Artificial Sequence
  Description of Artificial Sequence: Synthetic oligonucleotide
auaguaucgguaaacauug

SEQ ID NO: 3057893 - RNA, 19 nt, Artificial Sequence
  Description of Artificial Sequence: Synthetic oligonucleotide
aaggguccucaacagggcc

SEQ ID NO: 3057894 - RNA, 19 nt, Artificial Sequence
  Description of Artificial Sequence: Synthetic oligonucleotide
acaagaaggguccucaaca

SEQ ID NO: 3057895 - RNA, 19 nt, Artificial Sequence
  Description of Artificial Sequence: Synthetic oligonucleotide
ucauggcuaaauaauggca

SEQ ID NO: 3057896 - RNA, 19 nt, Artificial Sequence
  Description of Artificial Sequence: Synthetic oligonucleotide
ucugagauaguaucgguaa

SEQ ID NO: 3057897 - RNA, 19 nt, Artificial Sequence
  Description of Artificial Sequence: Synthetic oligonucleotide
auaauggcagauguagagc

SEQ ID NO: 3057898 - RNA, 19 nt, Artificial Sequence
  Description of Artificial Sequence: Synthetic oligonucleotide
uguagagcauuccacccag

SEQ ID NO: 3057899 - RNA, 19 nt, Artificial Sequence
  Description of Artificial Sequence: Synthetic oligonucleotide
uuugaagaguagcucacac

SEQ ID NO: 3057900 - RNA, 19 nt, Artificial Sequence
  Description of Artificial Sequence: Synthetic oligonucleotide
aagaaggguccucaacagg

SEQ ID NO: 3057901 - RNA, 19 nt, Artificial Sequence
  Description of Artificial Sequence: Synthetic oligonucleotide
gauguagagcauuccaccc

SEQ ID NO: 3057902 - RNA, 19 nt, Artificial Sequence
  Description of Artificial Sequence: Synthetic oligonucleotide
acucacaagcuccaagaac

SEQ ID NO: 3057903 - RNA, 19 nt, Artificial Sequence
  Description of Artificial Sequence: Synthetic oligonucleotide
ucaucucugagauaguauc

SEQ ID NO: 3057904 - RNA, 19 nt, Artificial Sequence
  Description of Artificial Sequence: Synthetic oligonucleotide
cucacaagcuccaagaaca

SEQ ID NO: 3057905 - RNA, 19 nt, Artificial Sequence
  Description of Artificial Sequence: Synthetic oligonucleotide
ugaacucacaagcuccaag

SEQ ID NO: 3057906 - RNA, 19 nt, Artificial Sequence
  Description of Artificial Sequence: Synthetic oligonucleotide
cucaacagggcccagcagg

SEQ ID NO: 3057907 - RNA, 19 nt, Artificial Sequence
  Description of Artificial Sequence: Synthetic oligonucleotide
aucgguaaacauugaacuc

SEQ ID NO: 3057908 - RNA, 19 nt, Artificial Sequence
  Description of Artificial Sequence: Synthetic oligonucleotide
acagacaucaucucugaga

SEQ ID NO: 3057909 - RNA, 19 nt, Artificial Sequence
  Description of Artificial Sequence: Synthetic oligonucleotide
caagcuccaagaacaaugg

SEQ ID NO: 3057910 - RNA, 19 nt, Artificial Sequence
  Description of Artificial Sequence: Synthetic oligonucleotide
aucagcacaagaagggucc

SEQ ID NO: 3057911 - RNA, 19 nt, Artificial Sequence
  Description of Artificial Sequence: Synthetic oligonucleotide
aacagauccagccaucaua

SEQ ID NO: 3057912 - RNA, 19 nt, Artificial Sequence
  Description of Artificial Sequence: Synthetic oligonucleotide
acgaucccaguccagaagg

SEQ ID NO: 3057913 - RNA, 19 nt, Artificial Sequence
  Description of Artificial Sequence: Synthetic oligonucleotide
ucgguaaacauugaacuca

SEQ ID NO: 3057914 - RNA, 19 nt, Artificial Sequence
  Description of Artificial Sequence: Synthetic oligonucleotide
guaaacauugaacucacaa

SEQ ID NO: 3057915 - RNA, 19 nt, Artificial Sequence
  Description of Artificial Sequence: Synthetic oligonucleotide
agcacaaucugcaccaccc

SEQ ID NO: 3057916 - RNA, 19 nt, Artificial Sequence
  Description of Artificial Sequence: Synthetic oligonucleotide
auucaucagcacaagaagg

SEQ ID NO: 3057917 - RNA, 19 nt, Artificial Sequence
  Description of Artificial Sequence: Synthetic oligonucleotide
gacaugcagaaauucauca

SEQ ID NO: 3057918 - RNA, 19 nt, Artificial Sequence
  Description of Artificial Sequence: Synthetic oligonucleotide
aagcuccaagaacaauggc

SEQ ID NO: 3057919 - RNA, 19 nt, Artificial Sequence
  Description of Artificial Sequence: Synthetic oligonucleotide
guucauggcuaaauaaugg

SEQ ID NO: 3057920 - RNA, 19 nt, Artificial Sequence
  Description of Artificial Sequence: Synthetic oligonucleotide
uccaagaacaauggcagcc

SEQ ID NO: 3057921 - RNA, 19 nt, Artificial Sequence
  Description of Artificial Sequence: Synthetic oligonucleotide
agaaggguccucaacaggg

SEQ ID NO: 3057922 - RNA, 19 nt, Artificial Sequence
  Description of Artificial Sequence: Synthetic oligonucleotide
uuucuugugaaggaaggca

SEQ ID NO: 3057923 - RNA, 19 nt, Artificial Sequence
  Description of Artificial Sequence: Synthetic oligonucleotide
ugggccagugauuugaaga

SEQ ID NO: 3057924 - RNA, 19 nt, Artificial Sequence
  Description of Artificial Sequence: Synthetic oligonucleotide
agaaccacacucagaagcc

SEQ ID NO: 3057925 - RNA, 19 nt, Artificial Sequence
  Description of Artificial Sequence: Synthetic oligonucleotide
caucucugagauaguaucg

SEQ ID NO: 3057926 - RNA, 19 nt, Artificial Sequence
  Description of Artificial Sequence: Synthetic oligonucleotide
agagcauuccacccagaac

SEQ ID NO: 3057927 - RNA, 19 nt, Artificial Sequence
  Description of Artificial Sequence: Synthetic oligonucleotide
aaggcaacagauccagcca

SEQ ID NO: 3057928 - RNA, 19 nt, Artificial Sequence
  Description of Artificial Sequence: Synthetic oligonucleotide
gaacucacaagcuccaaga

SEQ ID NO: 3057929 - RNA, 19 nt, Artificial Sequence
  Description of Artificial Sequence: Synthetic oligonucleotide
acaagcuccaagaacaaug

SEQ ID NO: 3057930 - RNA, 19 nt, Artificial Sequence
  Description of Artificial Sequence: Synthetic oligonucleotide
uucuugugaaggaaggcaa

SEQ ID NO: 3057931 - RNA, 19 nt, Artificial Sequence
  Description of Artificial Sequence: Synthetic oligonucleotide
aaccacacucagaagcccc

SEQ ID NO: 3057932 - RNA, 19 nt, Artificial Sequence
  Description of Artificial Sequence: Synthetic oligonucleotide
ugagauaguaucgguaaac

SEQ ID NO: 3057933 - RNA, 19 nt, Artificial Sequence
  Description of Artificial Sequence: Synthetic oligonucleotide
ucugcaccacccaggacgg

SEQ ID NO: 3057934 - RNA, 19 nt, Artificial Sequence
  Description of Artificial Sequence: Synthetic oligonucleotide
aggacggcccaccagcagc

SEQ ID NO: 3057935 - RNA, 19 nt, Artificial Sequence
  Description of Artificial Sequence: Synthetic oligonucleotide
agugauuugaagaguagcu

SEQ ID NO: 3057936 - RNA, 19 nt, Artificial Sequence
  Description of Artificial Sequence: Synthetic oligonucleotide
aacauugaacucacaagcu

SEQ ID NO: 3057937 - RNA, 19 nt, Artificial Sequence
  Description of Artificial Sequence: Synthetic oligonucleotide
uugaagaguagcucacaca

SEQ ID NO: 3057938 - RNA, 19 nt, Artificial Sequence
  Description of Artificial Sequence: Synthetic oligonucleotide
aucucugagauaguaucgg

SEQ ID NO: 3057939 - RNA, 19 nt, Artificial Sequence
  Description of Artificial Sequence: Synthetic oligonucleotide
acagauccagccaucauag

SEQ ID NO: 3057940 - RNA, 19 nt, Artificial Sequence
  Description of Artificial Sequence: Synthetic oligonucleotide
gaaauucaucagcacaaga

SEQ ID NO: 3057941 - RNA, 19 nt, Artificial Sequence
  Description of Artificial Sequence: Synthetic oligonucleotide
aaauaauggcagauguaga

SEQ ID NO: 3057942 - RNA, 19 nt, Artificial Sequence
  Description of Artificial Sequence: Synthetic oligonucleotide
guaucgguaaacauugaac

SEQ ID NO: 3057943 - RNA, 19 nt, Artificial Sequence
  Description of Artificial Sequence: Synthetic oligonucleotide
aguaucgguaaacauugaa

SEQ ID NO: 3057944 - RNA, 19 nt, Artificial Sequence
  Description of Artificial Sequence: Synthetic oligonucleotide
uccacccagaaccacacuc

SEQ ID NO: 3057945 - RNA, 19 nt, Artificial Sequence
  Description of Artificial Sequence: Synthetic oligonucleotide
cagauguagagcauuccac

SEQ ID NO: 3057946 - RNA, 19 nt, Artificial Sequence
  Description of Artificial Sequence: Synthetic oligonucleotide
caagaaggguccucaacag

SEQ ID NO: 3057947 - RNA, 19 nt, Artificial Sequence
  Description of Artificial Sequence: Synthetic oligonucleotide
agcucacacagacaucauc

SEQ ID NO: 3057948 - RNA, 19 nt, Artificial Sequence
  Description of Artificial Sequence: Synthetic oligonucleotide
cagaaauucaucagcacaa

SEQ ID NO: 3057949 - RNA, 19 nt, Artificial Sequence
  Description of Artificial Sequence: Synthetic oligonucleotide
guagcucacacagacauca

SEQ ID NO: 3057950 - RNA, 19 nt, Artificial Sequence
  Description of Artificial Sequence: Synthetic oligonucleotide
agauaguaucgguaaacau

SEQ ID NO: 3057951 - RNA, 19 nt, Artificial Sequence
  Description of Artificial Sequence: Synthetic oligonucleotide
gauuugaagaguagcucac

SEQ ID NO: 3057952 - RNA, 19 nt, Artificial Sequence
  Description of Artificial Sequence: Synthetic oligonucleotide
uugugaaggaaggcaacag

SEQ ID NO: 3057953 - RNA, 19 nt, Artificial Sequence
  Description of Artificial Sequence: Synthetic oligonucleotide
aacucacaagcuccaagaa

SEQ ID NO: 3057954 - RNA, 19 nt, Artificial Sequence
  Description of Artificial Sequence: Synthetic oligonucleotide
accagcagccugcugcuac

SEQ ID NO: 3057955 - RNA, 19 nt, Artificial Sequence
  Description of Artificial Sequence: Synthetic oligonucleotide
agccaucauagccacgauc

SEQ ID NO: 3057956 - RNA, 19 nt, Artificial Sequence
  Description of Artificial Sequence: Synthetic oligonucleotide
aaucugcaccacccaggac

SEQ ID NO: 3057957 - RNA, 19 nt, Artificial Sequence
  Description of Artificial Sequence: Synthetic oligonucleotide
uagagcauuccacccagaa

SEQ ID NO: 3057958 - RNA, 19 nt, Artificial Sequence
  Description of Artificial Sequence: Synthetic oligonucleotide
uccucaacagggcccagca

SEQ ID NO: 3057959 - RNA, 19 nt, Artificial Sequence
  Description of Artificial Sequence: Synthetic oligonucleotide
acacucagaagccccagca

SEQ ID NO: 3057960 - RNA, 19 nt, Artificial Sequence
  Description of Artificial Sequence: Synthetic oligonucleotide
ucaacagggcccagcaggu

SEQ ID NO: 3057961 - RNA, 19 nt, Artificial Sequence
  Description of Artificial Sequence: Synthetic oligonucleotide
auggcuaaauaauggcaga

SEQ ID NO: 3057962 - RNA, 19 nt, Artificial Sequence
  Description of Artificial Sequence: Synthetic oligonucleotide
gauaguaucgguaaacauu

SEQ ID NO: 3057963 - RNA, 19 nt, Artificial Sequence
  Description of Artificial Sequence: Synthetic oligonucleotide
ugcagaaauucaucagcac

SEQ ID NO: 3057964 - RNA, 19 nt, Artificial Sequence
  Description of Artificial Sequence: Synthetic oligonucleotide
aggaaggcaacagauccag

SEQ ID NO: 3057965 - RNA, 19 nt, Artificial Sequence
  Description of Artificial Sequence: Synthetic oligonucleotide
acaaucugcaccacccagg

SEQ ID NO: 3057966 - RNA, 19 nt, Artificial Sequence
  Description of Artificial Sequence: Synthetic oligonucleotide
auccagccaucauagccac

SEQ ID NO: 3057967 - RNA, 19 nt, Artificial Sequence
  Description of Artificial Sequence: Synthetic oligonucleotide
agacaugcagaaauucauc

SEQ ID NO: 3057968 - RNA, 19 nt, Artificial Sequence
  Description of Artificial Sequence: Synthetic oligonucleotide
gcaccugagguguucaugg

SEQ ID NO: 3057969 - RNA, 19 nt, Artificial Sequence
  Description of Artificial Sequence: Synthetic oligonucleotide
gauccagccaucauagcca

SEQ ID NO: 3057970 - RNA, 19 nt, Artificial Sequence
  Description of Artificial Sequence: Synthetic oligonucleotide
gagauaguaucgguaaaca

SEQ ID NO: 3057971 - RNA, 19 nt, Artificial Sequence
  Description of Artificial Sequence: Synthetic oligonucleotide
gccaucauagccacgaucc

SEQ ID NO: 3057972 - RNA, 19 nt, Artificial Sequence
  Description of Artificial Sequence: Synthetic oligonucleotide
aucauagccacgaucccag

SEQ ID NO: 3057973 - RNA, 19 nt, Artificial Sequence
  Description of Artificial Sequence: Synthetic oligonucleotide
gaucccaguccagaagggg

SEQ ID NO: 3057974 - RNA, 19 nt, Artificial Sequence
  Description of Artificial Sequence: Synthetic oligonucleotide
caucagcacaagaaggguc

SEQ ID NO: 3057975 - RNA, 19 nt, Artificial Sequence
  Description of Artificial Sequence: Synthetic oligonucleotide
gcagaaauucaucagcaca

SEQ ID NO: 3057976 - RNA, 19 nt, Artificial Sequence
  Description of Artificial Sequence: Synthetic oligonucleotide
ucucugagauaguaucggu

SEQ ID NO: 3057977 - RNA, 19 nt, Artificial Sequence
  Description of Artificial Sequence: Synthetic oligonucleotide
gaguagcucacacagacau

SEQ ID NO: 3057978 - RNA, 19 nt, Artificial Sequence
  Description of Artificial Sequence: Synthetic oligonucleotide
cacaaucugcaccacccag

SEQ ID NO: 3057979 - RNA, 19 nt, Artificial Sequence
  Description of Artificial Sequence: Synthetic oligonucleotide
gaagccccagcacaaucug

SEQ ID NO: 3057980 - RNA, 19 nt, Artificial Sequence
  Description of Artificial Sequence: Synthetic oligonucleotide
accccguuucuugugaagg

SEQ ID NO: 3057981 - RNA, 19 nt, Artificial Sequence
  Description of Artificial Sequence: Synthetic oligonucleotide
ucaucagcacaagaagggu

SEQ ID NO: 3057982 - RNA, 19 nt, Artificial Sequence
  Description of Artificial Sequence: Synthetic oligonucleotide
gcuaaauaauggcagaugu

SEQ ID NO: 3057983 - RNA, 19 nt, Artificial Sequence
  Description of Artificial Sequence: Synthetic oligonucleotide
augcagaaauucaucagca

SEQ ID NO: 3057984 - RNA, 19 nt, Artificial Sequence
  Description of Artificial Sequence: Synthetic oligonucleotide
gggccagugauuugaagag

SEQ ID NO: 3057985 - RNA, 19 nt, Artificial Sequence
  Description of Artificial Sequence: Synthetic oligonucleotide
gguaccaccccguuucuug

SEQ ID NO: 3057986 - RNA, 19 nt, Artificial Sequence
  Description of Artificial Sequence: Synthetic oligonucleotide
gugauuugaagaguagcuc

SEQ ID NO: 3057987 - RNA, 19 nt, Artificial Sequence
  Description of Artificial Sequence: Synthetic oligonucleotide
cacaagaaggguccucaac

SEQ ID NO: 3057988 - RNA, 19 nt, Artificial Sequence
  Description of Artificial Sequence: Synthetic oligonucleotide
cuaaauaauggcagaugua

SEQ ID NO: 3057989 - RNA, 19 nt, Artificial Sequence
  Description of Artificial Sequence: Synthetic oligonucleotide
agcacaagaaggguccuca

SEQ ID NO: 3057990 - RNA, 19 nt, Artificial Sequence
  Description of Artificial Sequence: Synthetic oligonucleotide
accugagguguucauggcu

SEQ ID NO: 3057991 - RNA, 19 nt, Artificial Sequence
  Description of Artificial Sequence: Synthetic oligonucleotide
aggguccucaacagggccc

SEQ ID NO: 3057992 - RNA, 19 nt, Artificial Sequence
  Description of Artificial Sequence: Synthetic oligonucleotide
ucacaagcuccaagaacaa

SEQ ID NO: 3057993 - RNA, 19 nt, Artificial Sequence
  Description of Artificial Sequence: Synthetic oligonucleotide
aaggaaggcaacagaucca

SEQ ID NO: 3057994 - RNA, 19 nt, Artificial Sequence
  Description of Artificial Sequence: Synthetic oligonucleotide
gguguucauggcuaaauaa

SEQ ID NO: 3057995 - RNA, 19 nt, Artificial Sequence
  Description of Artificial Sequence: Synthetic oligonucleotide
uggugggccagugauuuga

SEQ ID NO: 3057996 - RNA, 19 nt, Artificial Sequence
  Description of Artificial Sequence: Synthetic oligonucleotide
ugcaccacccaggacggcc

SEQ ID NO: 3057997 - RNA, 19 nt, Artificial Sequence
  Description of Artificial Sequence: Synthetic oligonucleotide
auugaacucacaagcucca

SEQ ID NO: 3057998 - RNA, 19 nt, Artificial Sequence
  Description of Artificial Sequence: Synthetic oligonucleotide
cauuccacccagaaccaca

SEQ ID NO: 3057999 - RNA, 19 nt, Artificial Sequence
  Description of Artificial Sequence: Synthetic oligonucleotide
cuccaagaacaauggcagc

SEQ ID NO: 3058000 - RNA, 19 nt, Artificial Sequence
  Description of Artificial Sequence: Synthetic oligonucleotide
cucacacagacaucaucuc

SEQ ID NO: 3058001 - RNA, 19 nt, Artificial Sequence
  Description of Artificial Sequence: Synthetic oligonucleotide
auuugaagaguagcucaca

SEQ ID NO: 3058002 - RNA, 19 nt, Artificial Sequence
  Description of Artificial Sequence: Synthetic oligonucleotide
uggcuaaauaauggcagau

SEQ ID NO: 3058003 - RNA, 19 nt, Artificial Sequence
  Description of Artificial Sequence: Synthetic oligonucleotide
gcagguaccaccccguuuc

SEQ ID NO: 3058004 - RNA, 19 nt, Artificial Sequence
  Description of Artificial Sequence: Synthetic oligonucleotide
cacgaucccaguccagaag

SEQ ID NO: 3058005 - RNA, 19 nt, Artificial Sequence
  Description of Artificial Sequence: Synthetic oligonucleotide
aggcaacagauccagccau

SEQ ID NO: 3058006 - RNA, 19 nt, Artificial Sequence
  Description of Artificial Sequence: Synthetic oligonucleotide
gaaggguccucaacagggc

SEQ ID NO: 3058007 - RNA, 19 nt, Artificial Sequence
  Description of Artificial Sequence: Synthetic oligonucleotide
cauagccacgaucccaguc

SEQ ID NO: 3058008 - RNA, 19 nt, Artificial Sequence
  Description of Artificial Sequence: Synthetic oligonucleotide
uaguaucgguaaacauuga

SEQ ID NO: 3058009 - RNA, 19 nt, Artificial Sequence
  Description of Artificial Sequence: Synthetic oligonucleotide
cguuucuugugaaggaagg

SEQ ID NO: 3058010 - RNA, 19 nt, Artificial Sequence
  Description of Artificial Sequence: Synthetic oligonucleotide
uagccacgaucccagucca

SEQ ID NO: 3058011 - RNA, 19 nt, Artificial Sequence
  Description of Artificial Sequence: Synthetic oligonucleotide
gcagauguagagcauucca

SEQ ID NO: 3058012 - RNA, 19 nt, Artificial Sequence
  Description of Artificial Sequence: Synthetic oligonucleotide
cccaccagcagccugcugc

SEQ ID NO: 3058013 - RNA, 19 nt, Artificial Sequence
  Description of Artificial Sequence: Synthetic oligonucleotide
agguguucauggcuaaaua

SEQ ID NO: 3058014 - RNA, 19 nt, Artificial Sequence
  Description of Artificial Sequence: Synthetic oligonucleotide
cagacaucaucucugagau

SEQ ID NO: 3058015 - RNA, 19 nt, Artificial Sequence
  Description of Artificial Sequence: Synthetic oligonucleotide
caaucugcaccacccagga

SEQ ID NO: 3058016 - RNA, 19 nt, Artificial Sequence
  Description of Artificial Sequence: Synthetic oligonucleotide
cacccagaaccacacucag

SEQ ID NO: 3058017 - RNA, 19 nt, Artificial Sequence
  Description of Artificial Sequence: Synthetic oligonucleotide
aguagcucacacagacauc

SEQ ID NO: 3058018 - RNA, 19 nt, Artificial Sequence
  Description of Artificial Sequence: Synthetic oligonucleotide
ggcuaaauaauggcagaug

SEQ ID NO: 3058019 - RNA, 19 nt, Artificial Sequence
  Description of Artificial Sequence: Synthetic oligonucleotide
cagcacaaucugcaccacc

SEQ ID NO: 3058020 - RNA, 19 nt, Artificial Sequence
  Description of Artificial Sequence: Synthetic oligonucleotide
acaauggcagccacagaca

SEQ ID NO: 3058021 - RNA, 19 nt, Artificial Sequence
  Description of Artificial Sequence: Synthetic oligonucleotide
aauggcagauguagagcau

SEQ ID NO: 3058022 - RNA, 19 nt, Artificial Sequence
  Description of Artificial Sequence: Synthetic oligonucleotide
cacacucagaagccccagc

SEQ ID NO: 3058023 - RNA, 19 nt, Artificial Sequence
  Description of Artificial Sequence: Synthetic oligonucleotide
cucugagauaguaucggua

SEQ ID NO: 3058024 - RNA, 19 nt, Artificial Sequence
  Description of Artificial Sequence: Synthetic oligonucleotide
cacagacaucaucucugag

SEQ ID NO: 3058025 - RNA, 19 nt, Artificial Sequence
  Description of Artificial Sequence: Synthetic oligonucleotide
uccagccaucauagccacg

SEQ ID NO: 3058026 - RNA, 19 nt, Artificial Sequence
  Description of Artificial Sequence: Synthetic oligonucleotide
aucaucucugagauaguau

SEQ ID NO: 3058027 - RNA, 19 nt, Artificial Sequence
  Description of Artificial Sequence: Synthetic oligonucleotide
accaccccguuucuuguga

SEQ ID NO: 3058028 - RNA, 19 nt, Artificial Sequence
  Description of Artificial Sequence: Synthetic oligonucleotide
caucauagccacgauccca

SEQ ID NO: 3058029 - RNA, 19 nt, Artificial Sequence
  Description of Artificial Sequence: Synthetic oligonucleotide
cccagaaccacacucagaa

SEQ ID NO: 3058030 - RNA, 19 nt, Artificial Sequence
  Description of Artificial Sequence: Synthetic oligonucleotide
cucagaagccccagcacaa

SEQ ID NO: 3058031 - RNA, 19 nt, Artificial Sequence
  Description of Artificial Sequence: Synthetic oligonucleotide
cagacaugcagaaauucau

SEQ ID NO: 3058032 - RNA, 19 nt, Artificial Sequence
  Description of Artificial Sequence: Synthetic oligonucleotide
caccugagguguucauggc

SEQ ID NO: 3058033 - RNA, 19 nt, Artificial Sequence
  Description of Artificial Sequence: Synthetic oligonucleotide
ccagugauuugaagaguag

SEQ ID NO: 3058034 - RNA, 19 nt, Artificial Sequence
  Description of Artificial Sequence: Synthetic oligonucleotide
uaccaccccguuucuugug

SEQ ID NO: 3058035 - RNA, 19 nt, Artificial Sequence
  Description of Artificial Sequence: Synthetic oligonucleotide
cagauccagccaucauagc

SEQ ID NO: 3058036 - RNA, 19 nt, Artificial Sequence
  Description of Artificial Sequence: Synthetic oligonucleotide
guguucauggcuaaauaau

SEQ ID NO: 3058037 - RNA, 19 nt, Artificial Sequence
  Description of Artificial Sequence: Synthetic oligonucleotide
gugggccagugauuugaag

SEQ ID NO: 3058038 - RNA, 19 nt, Artificial Sequence
  Description of Artificial Sequence: Synthetic oligonucleotide
caccccguuucuugugaag

SEQ ID NO: 3058039 - RNA, 19 nt, Artificial Sequence
  Description of Artificial Sequence: Synthetic oligonucleotide
ucagcacaagaaggguccu

SEQ ID NO: 3058040 - RNA, 19 nt, Artificial Sequence
  Description of Artificial Sequence: Synthetic oligonucleotide
gggcccagcagguaccacc

SEQ ID NO: 3058041 - RNA, 19 nt, Artificial Sequence
  Description of Artificial Sequence: Synthetic oligonucleotide
uugaacucacaagcuccaa

SEQ ID NO: 3058042 - RNA, 19 nt, Artificial Sequence
  Description of Artificial Sequence: Synthetic oligonucleotide
ucauagccacgaucccagu

SEQ ID NO: 3058043 - RNA, 19 nt, Artificial Sequence
  Description of Artificial Sequence: Synthetic oligonucleotide
uuggugggccagugauuug

SEQ ID NO: 3058044 - RNA, 19 nt, Artificial Sequence
  Description of Artificial Sequence: Synthetic oligonucleotide
agaguagcucacacagaca

SEQ ID NO: 3058045 - RNA, 19 nt, Artificial Sequence
  Description of Artificial Sequence: Synthetic oligonucleotide
cugagauaguaucgguaaa

SEQ ID NO: 3058046 - RNA, 19 nt, Artificial Sequence
  Description of Artificial Sequence: Synthetic oligonucleotide
cccaggacggcccaccagc

SEQ ID NO: 3058047 - RNA, 19 nt, Artificial Sequence
  Description of Artificial Sequence: Synthetic oligonucleotide
caucaucucugagauagua

SEQ ID NO: 3058048 - RNA, 19 nt, Artificial Sequence
  Description of Artificial Sequence: Synthetic oligonucleotide
ugagguguucauggcuaaa

SEQ ID NO: 3058049 - RNA, 19 nt, Artificial Sequence
  Description of Artificial Sequence: Synthetic oligonucleotide
gcucacacagacaucaucu

SEQ ID NO: 3058050 - RNA, 19 nt, Artificial Sequence
  Description of Artificial Sequence: Synthetic oligonucleotide
uuccacccagaaccacacu

SEQ ID NO: 3058051 - RNA, 19 nt, Artificial Sequence
  Description of Artificial Sequence: Synthetic oligonucleotide
cccagcacaaucugcacca

SEQ ID NO: 3058052 - RNA, 19 nt, Artificial Sequence
  Description of Artificial Sequence: Synthetic oligonucleotide
agcagguaccaccccguuu

SEQ ID NO: 3058053 - RNA, 19 nt, Artificial Sequence
  Description of Artificial Sequence: Synthetic oligonucleotide
cccagcagguaccaccccg

SEQ ID NO: 3058054 - RNA, 19 nt, Artificial Sequence
  Description of Artificial Sequence: Synthetic oligonucleotide
ucagaagccccagcacaau

SEQ ID NO: 3058055 - RNA, 19 nt, Artificial Sequence
  Description of Artificial Sequence: Synthetic oligonucleotide
uagcucacacagacaucau

SEQ ID NO: 3058056 - RNA, 19 nt, Artificial Sequence
  Description of Artificial Sequence: Synthetic oligonucleotide
acccaggacggcccaccag

SEQ ID NO: 3058057 - RNA, 19 nt, Artificial Sequence
  Description of Artificial Sequence: Synthetic oligonucleotide
gagguguucauggcuaaau

SEQ ID NO: 3058058 - RNA, 19 nt, Artificial Sequence
  Description of Artificial Sequence: Synthetic oligonucleotide
cgguaaacauugaacucac

SEQ ID NO: 3058059 - RNA, 19 nt, Artificial Sequence
  Description of Artificial Sequence: Synthetic oligonucleotide
acggcccaccagcagccug

SEQ ID NO: 3058060 - RNA, 19 nt, Artificial Sequence
  Description of Artificial Sequence: Synthetic oligonucleotide
ccccagcacaaucugcacc

SEQ ID NO: 3058061 - RNA, 19 nt, Artificial Sequence
  Description of Artificial Sequence: Synthetic oligonucleotide
ccaucauagccacgauccc

SEQ ID NO: 3058062 - RNA, 19 nt, Artificial Sequence
  Description of Artificial Sequence: Synthetic oligonucleotide
caggacggcccaccagcag

SEQ ID NO: 3058063 - RNA, 19 nt, Artificial Sequence
  Description of Artificial Sequence: Synthetic oligonucleotide
cagccacagacaugcagaa

SEQ ID NO: 3058064 - RNA, 19 nt, Artificial Sequence
  Description of Artificial Sequence: Synthetic oligonucleotide
guccucaacagggcccagc

SEQ ID NO: 3058065 - RNA, 19 nt, Artificial Sequence
  Description of Artificial Sequence: Synthetic oligonucleotide
gcaacagauccagccauca

SEQ ID NO: 3058066 - RNA, 19 nt, Artificial Sequence
  Description of Artificial Sequence: Synthetic oligonucleotide
ccagaaccacacucagaag

SEQ ID NO: 3058067 - RNA, 19 nt, Artificial Sequence
  Description of Artificial Sequence: Synthetic oligonucleotide
ggcaccugagguguucaug

SEQ ID NO: 3058068 - RNA, 19 nt, Artificial Sequence
  Description of Artificial Sequence: Synthetic oligonucleotide
cugagguguucauggcuaa

SEQ ID NO: 3058069 - RNA, 19 nt, Artificial Sequence
  Description of Artificial Sequence: Synthetic oligonucleotide
cuuggugggccagugauuu

SEQ ID NO: 3058070 - RNA, 19 nt, Artificial Sequence
  Description of Artificial Sequence: Synthetic oligonucleotide
gccagugauuugaagagua

SEQ ID NO: 3058071 - RNA, 19 nt, Artificial Sequence
  Description of Artificial Sequence: Synthetic oligonucleotide
ggcccagcagguaccaccc

SEQ ID NO: 3058072 - RNA, 19 nt, Artificial Sequence
  Description of Artificial Sequence: Synthetic oligonucleotide
ccugagguguucauggcua

SEQ ID NO: 3058073 - RNA, 19 nt, Artificial Sequence
  Description of Artificial Sequence: Synthetic oligonucleotide
guaccaccccguuucuugu

SEQ ID NO: 3058074 - RNA, 19 nt, Artificial Sequence
  Description of Artificial Sequence: Synthetic oligonucleotide
ccacccagaaccacacuca

SEQ ID NO: 3058075 - RNA, 19 nt, Artificial Sequence
  Description of Artificial Sequence: Synthetic oligonucleotide
accacccaggacggcccac

SEQ ID NO: 3058076 - RNA, 19 nt, Artificial Sequence
  Description of Artificial Sequence: Synthetic oligonucleotide
cgaucccaguccagaaggg

SEQ ID NO: 3058077 - RNA, 19 nt, Artificial Sequence
  Description of Artificial Sequence: Synthetic oligonucleotide
ggacggcccaccagcagcc

SEQ ID NO: 3058078 - RNA, 19 nt, Artificial Sequence
  Description of Artificial Sequence: Synthetic oligonucleotide
cagcacaagaaggguccuc

SEQ ID NO: 3058079 - RNA, 19 nt, Artificial Sequence
  Description of Artificial Sequence: Synthetic oligonucleotide
ggaaggcaacagauccagc

SEQ ID NO: 3058080 - RNA, 19 nt, Artificial Sequence
  Description of Artificial Sequence: Synthetic oligonucleotide
uggcagccacagacaugca

SEQ ID NO: 3058081 - RNA, 19 nt, Artificial Sequence
  Description of Artificial Sequence: Synthetic oligonucleotide
gguaaacauugaacucaca

SEQ ID NO: 3058082 - RNA, 19 nt, Artificial Sequence
  Description of Artificial Sequence: Synthetic oligonucleotide
ggcuuggugggccagugau

SEQ ID NO: 3058083 - RNA, 19 nt, Artificial Sequence
  Description of Artificial Sequence: Synthetic oligonucleotide
gccacgaucccaguccaga

SEQ ID NO: 3058084 - RNA, 19 nt, Artificial Sequence
  Description of Artificial Sequence: Synthetic oligonucleotide
agccacagacaugcagaaa

SEQ ID NO: 3058085 - RNA, 19 nt, Artificial Sequence
  Description of Artificial Sequence: Synthetic oligonucleotide
guagagcauuccacccaga

SEQ ID NO: 3058086 - RNA, 19 nt, Artificial Sequence
  Description of Artificial Sequence: Synthetic oligonucleotide
agccacgaucccaguccag

SEQ ID NO: 3058087 - RNA, 19 nt, Artificial Sequence
  Description of Artificial Sequence: Synthetic oligonucleotide
ccucaacagggcccagcag

SEQ ID NO: 3058088 - RNA, 19 nt, Artificial Sequence
  Description of Artificial Sequence: Synthetic oligonucleotide
ggguccucaacagggccca

SEQ ID NO: 3058089 - RNA, 19 nt, Artificial Sequence
  Description of Artificial Sequence: Synthetic oligonucleotide
gcauuccacccagaaccac

SEQ ID NO: 3058090 - RNA, 19 nt, Artificial Sequence
  Description of Artificial Sequence: Synthetic oligonucleotide
gcacaagaaggguccucaa

SEQ ID NO: 3058091 - RNA, 19 nt, Artificial Sequence
  Description of Artificial Sequence: Synthetic oligonucleotide
gccccagcacaaucugcac

SEQ ID NO: 3058092 - RNA, 19 nt, Artificial Sequence
  Description of Artificial Sequence: Synthetic oligonucleotide
ccccguuucuugugaagga

SEQ ID NO: 3058093 - RNA, 19 nt, Artificial Sequence
  Description of Artificial Sequence: Synthetic oligonucleotide
caacagauccagccaucau

SEQ ID NO: 3058094 - RNA, 19 nt, Artificial Sequence
  Description of Artificial Sequence: Synthetic oligonucleotide
cggcccaccagcagccugc

SEQ ID NO: 3058095 - RNA, 19 nt, Artificial Sequence
  Description of Artificial Sequence: Synthetic oligonucleotide
agguaccaccccguuucuu

SEQ ID NO: 3058096 - RNA, 19 nt, Artificial Sequence
  Description of Artificial Sequence: Synthetic oligonucleotide
ccacacucagaagccccag

SEQ ID NO: 3058097 - RNA, 19 nt, Artificial Sequence
  Description of Artificial Sequence: Synthetic oligonucleotide
cacccaggacggcccacca

SEQ ID NO: 3058098 - RNA, 19 nt, Artificial Sequence
  Description of Artificial Sequence: Synthetic oligonucleotide
ccacccaggacggcccacc

SEQ ID NO: 3058099 - RNA, 19 nt, Artificial Sequence
  Description of Artificial Sequence: Synthetic oligonucleotide
cacaagcuccaagaacaau

SEQ ID NO: 3058100 - RNA, 19 nt, Artificial Sequence
  Description of Artificial Sequence: Synthetic oligonucleotide
ccacgaucccaguccagaa

SEQ ID NO: 3058101 - RNA, 19 nt, Artificial Sequence
  Description of Artificial Sequence: Synthetic oligonucleotide
cugcaccacccaggacggc

SEQ ID NO: 3058102 - RNA, 19 nt, Artificial Sequence
  Description of Artificial Sequence: Synthetic oligonucleotide
ggggcaccugagguguuca

SEQ ID NO: 3058103 - RNA, 19 nt, Artificial Sequence
  Description of Artificial Sequence: Synthetic oligonucleotide
cccguuucuugugaaggaa

SEQ ID NO: 3058104 - RNA, 19 nt, Artificial Sequence
  Description of Artificial Sequence: Synthetic oligonucleotide
caccacccaggacggccca

SEQ ID NO: 3058105 - RNA, 19 nt, Artificial Sequence
  Description of Artificial Sequence: Synthetic oligonucleotide
ccaggacggcccaccagca

SEQ ID NO: 3058106 - RNA, 19 nt, Artificial Sequence
  Description of Artificial Sequence: Synthetic oligonucleotide
ggccagugauuugaagagu

SEQ ID NO: 3058107 - RNA, 19 nt, Artificial Sequence
  Description of Artificial Sequence: Synthetic oligonucleotide
gcccagcagguaccacccc

SEQ ID NO: 3058108 - RNA, 19 nt, Artificial Sequence
  Description of Artificial Sequence: Synthetic oligonucleotide
ccagcacaaucugcaccac

SEQ ID NO: 3058109 - RNA, 19 nt, Artificial Sequence
  Description of Artificial Sequence: Synthetic oligonucleotide
cagguaccaccccguuucu

SEQ ID NO: 3058110 - RNA, 19 nt, Artificial Sequence
  Description of Artificial Sequence: Synthetic oligonucleotide
gguccucaacagggcccag

SEQ ID NO: 3058111 - RNA, 19 nt, Artificial Sequence
  Description of Artificial Sequence: Synthetic oligonucleotide
caacagggcccagcaggua

SEQ ID NO: 3058112 - RNA, 19 nt, Artificial Sequence
  Description of Artificial Sequence: Synthetic oligonucleotide
ccacagacaugcagaaauu

SEQ ID NO: 3058113 - RNA, 19 nt, Artificial Sequence
  Description of Artificial Sequence: Synthetic oligonucleotide
ccaccccguuucuugugaa

SEQ ID NO: 3058114 - RNA, 19 nt, Artificial Sequence
  Description of Artificial Sequence: Synthetic oligonucleotide
cagccaucauagccacgau

SEQ ID NO: 3058115 - RNA, 19 nt, Artificial Sequence
  Description of Artificial Sequence: Synthetic oligonucleotide
gacggcccaccagcagccu

SEQ ID NO: 3058116 - RNA, 19 nt, Artificial Sequence
  Description of Artificial Sequence: Synthetic oligonucleotide
cagcagguaccaccccguu

SEQ ID NO: 3058117 - RNA, 19 nt, Artificial Sequence
  Description of Artificial Sequence: Synthetic oligonucleotide
gcuuggugggccagugauu

SEQ ID NO: 3058118 - RNA, 19 nt, Artificial Sequence
  Description of Artificial Sequence: Synthetic oligonucleotide
gggcaccugagguguucau

SEQ ID NO: 3058119 - RNA, 19 nt, Artificial Sequence
  Description of Artificial Sequence: Synthetic oligonucleotide
caccagcagccugcugcua

SEQ ID NO: 3058120 - RNA, 19 nt, Artificial Sequence
  Description of Artificial Sequence: Synthetic oligonucleotide
aauaaaaggaaauccauag

SEQ ID NO: 3058121 - RNA, 19 nt, Artificial Sequence
  Description of Artificial Sequence: Synthetic oligonucleotide
aauguaaggcacgauauuc

SEQ ID NO: 3058122 - RNA, 19 nt, Artificial Sequence
  Description of Artificial Sequence: Synthetic oligonucleotide
gauauucucaauaaaagga

SEQ ID NO: 3058123 - RNA, 19 nt, Artificial Sequence
  Description of Artificial Sequence: Synthetic oligonucleotide
ucucaauaaaaggaaaucc

SEQ ID NO: 3058124 - RNA, 19 nt, Artificial Sequence
  Description of Artificial Sequence: Synthetic oligonucleotide
ucaauaaaaggaaauccau

SEQ ID NO: 3058125 - RNA, 19 nt, Artificial Sequence
  Description of Artificial Sequence: Synthetic oligonucleotide
aauccauagugcuuccauc

SEQ ID NO: 3058126 - RNA, 19 nt, Artificial Sequence
  Description of Artificial Sequence: Synthetic oligonucleotide
aggaaauccauagugcuuc

SEQ ID NO: 3058127 - RNA, 19 nt, Artificial Sequence
  Description of Artificial Sequence: Synthetic oligonucleotide
aaaauguaaggcacgauau

SEQ ID NO: 3058128 - RNA, 19 nt, Artificial Sequence
  Description of Artificial Sequence: Synthetic oligonucleotide
uauucucaauaaaaggaaa

SEQ ID NO: 3058129 - RNA, 19 nt, Artificial Sequence
  Description of Artificial Sequence: Synthetic oligonucleotide
cucaauaaaaggaaaucca

SEQ ID NO: 3058130 - RNA, 19 nt, Artificial Sequence
  Description of Artificial Sequence: Synthetic oligonucleotide
aaauccauagugcuuccau

SEQ ID NO: 3058131 - RNA, 19 nt, Artificial Sequence
  Description of Artificial Sequence: Synthetic oligonucleotide
auaaaaggaaauccauagu

SEQ ID NO: 3058132 - RNA, 19 nt, Artificial Sequence
  Description of Artificial Sequence: Synthetic oligonucleotide
acgauauucucaauaaaag

SEQ ID NO: 3058133 - RNA, 19 nt, Artificial Sequence
  Description of Artificial Sequence: Synthetic oligonucleotide
uaaggcacgauauucucaa

SEQ ID NO: 3058134 - RNA, 19 nt, Artificial Sequence
  Description of Artificial Sequence: Synthetic oligonucleotide
uucucaauaaaaggaaauc

SEQ ID NO: 3058135 - RNA, 19 nt, Artificial Sequence
  Description of Artificial Sequence: Synthetic oligonucleotide
auccauagugcuuccaucu

SEQ ID NO: 3058136 - RNA, 19 nt, Artificial Sequence
  Description of Artificial Sequence: Synthetic oligonucleotide
aaauguaaggcacgauauu

SEQ ID NO: 3058137 - RNA, 19 nt, Artificial Sequence
  Description of Artificial Sequence: Synthetic oligonucleotide
cacgauauucucaauaaaa

SEQ ID NO: 3058138 - RNA, 19 nt, Artificial Sequence
  Description of Artificial Sequence: Synthetic oligonucleotide
auauucucaauaaaaggaa

SEQ ID NO: 3058139 - RNA, 19 nt, Artificial Sequence
  Description of Artificial Sequence: Synthetic oligonucleotide
cgauauucucaauaaaagg

SEQ ID NO: 3058140 - RNA, 19 nt, Artificial Sequence
  Description of Artificial Sequence: Synthetic oligonucleotide
auucucaauaaaaggaaau

SEQ ID NO: 3058141 - RNA, 19 nt, Artificial Sequence
  Description of Artificial Sequence: Synthetic oligonucleotide
caauaaaaggaaauccaua

SEQ ID NO: 3058142 - RNA, 19 nt, Artificial Sequence
  Description of Artificial Sequence: Synthetic oligonucleotide
auguaaggcacgauauucu

SEQ ID NO: 3058143 - RNA, 19 nt, Artificial Sequence
  Description of Artificial Sequence: Synthetic oligonucleotide
aggcacgauauucucaaua

SEQ ID NO: 3058144 - RNA, 19 nt, Artificial Sequence
  Description of Artificial Sequence: Synthetic oligonucleotide
aaggaaauccauagugcuu

SEQ ID NO: 3058145 - RNA, 19 nt, Artificial Sequence
  Description of Artificial Sequence: Synthetic oligonucleotide
ggcacgauauucucaauaa

SEQ ID NO: 3058146 - RNA, 19 nt, Artificial Sequence
  Description of Artificial Sequence: Synthetic oligonucleotide
guaaggcacgauauucuca

SEQ ID NO: 3058147 - RNA, 19 nt, Artificial Sequence
  Description of Artificial Sequence: Synthetic oligonucleotide
aaggcacgauauucucaau

SEQ ID NO: 3058148 - RNA, 19 nt, Artificial Sequence
  Description of Artificial Sequence: Synthetic oligonucleotide
ggaaauccauagugcuucc

SEQ ID NO: 3058149 - RNA, 19 nt, Artificial Sequence
  Description of Artificial Sequence: Synthetic oligonucleotide
gaaauccauagugcuucca

SEQ ID NO: 3058150 - RNA, 19 nt, Artificial Sequence
  Description of Artificial Sequence: Synthetic oligonucleotide
gcacgauauucucaauaaa

SEQ ID NO: 3058151 - RNA, 19 nt, Artificial Sequence
  Description of Artificial Sequence: Synthetic oligonucleotide
ucaagaauaacuauaauau

SEQ ID NO: 3058152 - RNA, 19 nt, Artificial Sequence
  Description of Artificial Sequence: Synthetic oligonucleotide
aauagcuuuaaccuguuca

SEQ ID NO: 3058153 - RNA, 19 nt, Artificial Sequence
  Description of Artificial Sequence: Synthetic oligonucleotide
aagaauaacuauaauauug

SEQ ID NO: 3058154 - RNA, 19 nt, Artificial Sequence
  Description of Artificial Sequence: Synthetic oligonucleotide
gaugugaauagcuuuaacc

SEQ ID NO: 3058155 - RNA, 19 nt, Artificial Sequence
  Description of Artificial Sequence: Synthetic oligonucleotide
uguucaaaagaauagaguc

SEQ ID NO: 3058156 - RNA, 19 nt, Artificial Sequence
  Description of Artificial Sequence: Synthetic oligonucleotide
ugaacugagaacaugucag

SEQ ID NO: 3058157 - RNA, 19 nt, Artificial Sequence
  Description of Artificial Sequence: Synthetic oligonucleotide
uucaaaagaauagaguccg

SEQ ID NO: 3058158 - RNA, 19 nt, Artificial Sequence
  Description of Artificial Sequence: Synthetic oligonucleotide
agaauaacuauaauauugc

SEQ ID NO: 3058159 - RNA, 19 nt, Artificial Sequence
  Description of Artificial Sequence: Synthetic oligonucleotide
cauuggauugagaagaacc

SEQ ID NO: 3058160 - RNA, 19 nt, Artificial Sequence
  Description of Artificial Sequence: Synthetic oligonucleotide
uuuugaaguacucucucag

SEQ ID NO: 3058161 - RNA, 19 nt, Artificial Sequence
  Description of Artificial Sequence: Synthetic oligonucleotide
uuuguuucaagaauaacua

SEQ ID NO: 3058162 - RNA, 19 nt, Artificial Sequence
  Description of Artificial Sequence: Synthetic oligonucleotide
auugcugcaaaguucauug

SEQ ID NO: 3058163 - RNA, 19 nt, Artificial Sequence
  Description of Artificial Sequence: Synthetic oligonucleotide
agaagaacccuccuugagc

SEQ ID NO: 3058164 - RNA, 19 nt, Artificial Sequence
  Description of Artificial Sequence: Synthetic oligonucleotide
aaguucauuggauugagaa

SEQ ID NO: 3058165 - RNA, 19 nt, Artificial Sequence
  Description of Artificial Sequence: Synthetic oligonucleotide
ucaggaaaggcucagucgc

SEQ ID NO: 3058166 - RNA, 19 nt, Artificial Sequence
  Description of Artificial Sequence: Synthetic oligonucleotide
aauauugcugcaaaguuca

SEQ ID NO: 3058167 - RNA, 19 nt, Artificial Sequence
  Description of Artificial Sequence: Synthetic oligonucleotide
gaaguacucucucagcucg

SEQ ID NO: 3058168 - RNA, 19 nt, Artificial Sequence
  Description of Artificial Sequence: Synthetic oligonucleotide
augugaauagcuuuaaccu

SEQ ID NO: 3058169 - RNA, 19 nt, Artificial Sequence
  Description of Artificial Sequence: Synthetic oligonucleotide
accauuuugaacugagaac

SEQ ID NO: 3058170 - RNA, 19 nt, Artificial Sequence
  Description of Artificial Sequence: Synthetic oligonucleotide
uauaauauugcugcaaagu

SEQ ID NO: 3058171 - RNA, 19 nt, Artificial Sequence
  Description of Artificial Sequence: Synthetic oligonucleotide
aacaugucagaauggaugu

SEQ ID NO: 3058172 - RNA, 19 nt, Artificial Sequence
  Description of Artificial Sequence: Synthetic oligonucleotide
aaccauuuugaacugagaa

SEQ ID NO: 3058173 - RNA, 19 nt, Artificial Sequence
  Description of Artificial Sequence: Synthetic oligonucleotide
aagaauagaguccgcuuuc

SEQ ID NO: 3058174 - RNA, 19 nt, Artificial Sequence
  Description of Artificial Sequence: Synthetic oligonucleotide
auuggauugagaagaaccc

SEQ ID NO: 3058175 - RNA, 19 nt, Artificial Sequence
  Description of Artificial Sequence: Synthetic oligonucleotide
uugagaagaacccuccuug

SEQ ID NO: 3058176 - RNA, 19 nt, Artificial Sequence
  Description of Artificial Sequence: Synthetic oligonucleotide
auagaguccgcuuucuuuc

SEQ ID NO: 3058177 - RNA, 19 nt, Artificial Sequence
  Description of Artificial Sequence: Synthetic oligonucleotide
uggaagauugaguaaagcu

SEQ ID NO: 3058178 - RNA, 19 nt, Artificial Sequence
  Description of Artificial Sequence: Synthetic oligonucleotide
ugcucguucauuuucagcu

SEQ ID NO: 3058179 - RNA, 19 nt, Artificial Sequence
  Description of Artificial Sequence: Synthetic oligonucleotide
uguuucaagaauaacuaua

SEQ ID NO: 3058180 - RNA, 19 nt, Artificial Sequence
  Description of Artificial Sequence: Synthetic oligonucleotide
uuuaaccuguucaaaagaa

SEQ ID NO: 3058181 - RNA, 19 nt, Artificial Sequence
  Description of Artificial Sequence: Synthetic oligonucleotide
ucagaauggaugugaauag

SEQ ID NO: 3058182 - RNA, 19 nt, Artificial Sequence
  Description of Artificial Sequence: Synthetic oligonucleotide
caccaugucauccagaaug

SEQ ID NO: 3058183 - RNA, 19 nt, Artificial Sequence
  Description of Artificial Sequence: Synthetic oligonucleotide
gaacaugucagaauggaug

SEQ ID NO: 3058184 - RNA, 19 nt, Artificial Sequence
  Description of Artificial Sequence: Synthetic oligonucleotide
aaagaauagaguccgcuuu

SEQ ID NO: 3058185 - RNA, 19 nt, Artificial Sequence
  Description of Artificial Sequence: Synthetic oligonucleotide
ugugaauagcuuuaaccug

SEQ ID NO: 3058186 - RNA, 19 nt, Artificial Sequence
  Description of Artificial Sequence: Synthetic oligonucleotide
uuuaguguuggugucagca

SEQ ID NO: 3058187 - RNA, 19 nt, Artificial Sequence
  Description of Artificial Sequence: Synthetic oligonucleotide
uaauauugcugcaaaguuc

SEQ ID NO: 3058188 - RNA, 19 nt, Artificial Sequence
  Description of Artificial Sequence: Synthetic oligonucleotide
uugaacugagaacauguca

SEQ ID NO: 3058189 - RNA, 19 nt, Artificial Sequence
  Description of Artificial Sequence: Synthetic oligonucleotide
cugagaacaugucagaaug

SEQ ID NO: 3058190 - RNA, 19 nt, Artificial Sequence
  Description of Artificial Sequence: Synthetic oligonucleotide
aauggaugugaauagcuuu

SEQ ID NO: 3058191 - RNA, 19 nt, Artificial Sequence
  Description of Artificial Sequence: Synthetic oligonucleotide
ugcaaaguucauuggauug

SEQ ID NO: 3058192 - RNA, 19 nt, Artificial Sequence
  Description of Artificial Sequence: Synthetic oligonucleotide
uugaguaaagcucuucuau

SEQ ID NO: 3058193 - RNA, 19 nt, Artificial Sequence
  Description of Artificial Sequence: Synthetic oligonucleotide
ugagaacaugucagaaugg

SEQ ID NO: 3058194 - RNA, 19 nt, Artificial Sequence
  Description of Artificial Sequence: Synthetic oligonucleotide
aguucauuggauugagaag

SEQ ID NO: 3058195 - RNA, 19 nt, Artificial Sequence
  Description of Artificial Sequence: Synthetic oligonucleotide
ucacauggaagauugagua

SEQ ID NO: 3058196 - RNA, 19 nt, Artificial Sequence
  Description of Artificial Sequence: Synthetic oligonucleotide
ucagcaaaccauuuugaac

SEQ ID NO: 3058197 - RNA, 19 nt, Artificial Sequence
  Description of Artificial Sequence: Synthetic oligonucleotide
uaaccuguucaaaagaaua

SEQ ID NO: 3058198 - RNA, 19 nt, Artificial Sequence
  Description of Artificial Sequence: Synthetic oligonucleotide
aauagaguccgcuuucuuu

SEQ ID NO: 3058199 - RNA, 19 nt, Artificial Sequence
  Description of Artificial Sequence: Synthetic oligonucleotide
auaauauugcugcaaaguu

SEQ ID NO: 3058200 - RNA, 19 nt, Artificial Sequence
  Description of Artificial Sequence: Synthetic oligonucleotide
aaaagaauagaguccgcuu

SEQ ID NO: 3058201 - RNA, 19 nt, Artificial Sequence
  Description of Artificial Sequence: Synthetic oligonucleotide
aaggcucagucgcaaaauc

SEQ ID NO: 3058202 - RNA, 19 nt, Artificial Sequence
  Description of Artificial Sequence: Synthetic oligonucleotide
agcugcgucacucuuguuc

SEQ ID NO: 3058203 - RNA, 19 nt, Artificial Sequence
  Description of Artificial Sequence: Synthetic oligonucleotide
uucacauggaagauugagu

SEQ ID NO: 3058204 - RNA, 19 nt, Artificial Sequence
  Description of Artificial Sequence: Synthetic oligonucleotide
cuuuguuucaagaauaacu

SEQ ID NO: 3058205 - RNA, 19 nt, Artificial Sequence
  Description of Artificial Sequence: Synthetic oligonucleotide
aaccuguucaaaagaauag

SEQ ID NO: 3058206 - RNA, 19 nt, Artificial Sequence
  Description of Artificial Sequence: Synthetic oligonucleotide
acuauaauauugcugcaaa

SEQ ID NO: 3058207 - RNA, 19 nt, Artificial Sequence
  Description of Artificial Sequence: Synthetic oligonucleotide
ucuugggucaggaaaggcu

SEQ ID NO: 3058208 - RNA, 19 nt, Artificial Sequence
  Description of Artificial Sequence: Synthetic oligonucleotide
aguaaagcucuucuauuug

SEQ ID NO: 3058209 - RNA, 19 nt, Artificial Sequence
  Description of Artificial Sequence: Synthetic oligonucleotide
cuauaauauugcugcaaag

SEQ ID NO: 3058210 - RNA, 19 nt, Artificial Sequence
  Description of Artificial Sequence: Synthetic oligonucleotide
uuagccuuuaguguuggug

SEQ ID NO: 3058211 - RNA, 19 nt, Artificial Sequence
  Description of Artificial Sequence: Synthetic oligonucleotide
guucaaaagaauagagucc

SEQ ID NO: 3058212 - RNA, 19 nt, Artificial Sequence
  Description of Artificial Sequence: Synthetic oligonucleotide
ucagucgcaaaaucgggug

SEQ ID NO: 3058213 - RNA, 19 nt, Artificial Sequence
  Description of Artificial Sequence: Synthetic oligonucleotide
aaaaucgggugcucguuca

SEQ ID NO: 3058214 - RNA, 19 nt, Artificial Sequence
  Description of Artificial Sequence: Synthetic oligonucleotide
cuuucuuuccccaaccuca

SEQ ID NO: 3058215 - RNA, 19 nt, Artificial Sequence
  Description of Artificial Sequence: Synthetic oligonucleotide
auagcuuuaaccuguucaa

SEQ ID NO: 3058216 - RNA, 19 nt, Artificial Sequence
  Description of Artificial Sequence: Synthetic oligonucleotide
uagccuuuaguguuggugu

SEQ ID NO: 3058217 - RNA, 19 nt, Artificial Sequence
  Description of Artificial Sequence: Synthetic oligonucleotide
ugcugcaaaguucauugga

SEQ ID NO: 3058218 - RNA, 19 nt, Artificial Sequence
  Description of Artificial Sequence: Synthetic oligonucleotide
gucaggaaaggcucagucg

SEQ ID NO: 3058219 - RNA, 19 nt, Artificial Sequence
  Description of Artificial Sequence: Synthetic oligonucleotide
uggauugagaagaacccuc

SEQ ID NO: 3058220 - RNA, 19 nt, Artificial Sequence
  Description of Artificial Sequence: Synthetic oligonucleotide
uuaaccuguucaaaagaau

SEQ ID NO: 3058221 - RNA, 19 nt, Artificial Sequence
  Description of Artificial Sequence: Synthetic oligonucleotide
uuccuuuguuucaagaaua

SEQ ID NO: 3058222 - RNA, 19 nt, Artificial Sequence
  Description of Artificial Sequence: Synthetic oligonucleotide
auggaagauugaguaaagc

SEQ ID NO: 3058223 - RNA, 19 nt, Artificial Sequence
  Description of Artificial Sequence: Synthetic oligonucleotide
ugucagcaaaccauuuuga

SEQ ID NO: 3058224 - RNA, 19 nt, Artificial Sequence
  Description of Artificial Sequence: Synthetic oligonucleotide
auuuucagcugcgucacuc

SEQ ID NO: 3058225 - RNA, 19 nt, Artificial Sequence
  Description of Artificial Sequence: Synthetic oligonucleotide
aacuauaauauugcugcaa

SEQ ID NO: 3058226 - RNA, 19 nt, Artificial Sequence
  Description of Artificial Sequence: Synthetic oligonucleotide
ucucuuagccuuuaguguu

SEQ ID NO: 3058227 - RNA, 19 nt, Artificial Sequence
  Description of Artificial Sequence: Synthetic oligonucleotide
ggucucuuagccuuuagug

SEQ ID NO: 3058228 - RNA, 19 nt, Artificial Sequence
  Description of Artificial Sequence: Synthetic oligonucleotide
uuugaacugagaacauguc

SEQ ID NO: 3058229 - RNA, 19 nt, Artificial Sequence
  Description of Artificial Sequence: Synthetic oligonucleotide
cuucacauggaagauugag

SEQ ID NO: 3058230 - RNA, 19 nt, Artificial Sequence
  Description of Artificial Sequence: Synthetic oligonucleotide
cuugggucaggaaaggcuc

SEQ ID NO: 3058231 - RNA, 19 nt, Artificial Sequence
  Description of Artificial Sequence: Synthetic oligonucleotide
agcuuuaaccuguucaaaa

SEQ ID NO: 3058232 - RNA, 19 nt, Artificial Sequence
  Description of Artificial Sequence: Synthetic oligonucleotide
gagaagaacccuccuugag

SEQ ID NO: 3058233 - RNA, 19 nt, Artificial Sequence
  Description of Artificial Sequence: Synthetic oligonucleotide
ucguucauuuucagcugcg

SEQ ID NO: 3058234 - RNA, 19 nt, Artificial Sequence
  Description of Artificial Sequence: Synthetic oligonucleotide
cagcaaaccauuuugaacu

SEQ ID NO: 3058235 - RNA, 19 nt, Artificial Sequence
  Description of Artificial Sequence: Synthetic oligonucleotide
cuugagcuucacauggaag

SEQ ID NO: 3058236 - RNA, 19 nt, Artificial Sequence
  Description of Artificial Sequence: Synthetic oligonucleotide
gacuucuugggucaggaaa

SEQ ID NO: 3058237 - RNA, 19 nt, Artificial Sequence
  Description of Artificial Sequence: Synthetic oligonucleotide
uguuggugucagcaaacca

SEQ ID NO: 3058238 - RNA, 19 nt, Artificial Sequence
  Description of Artificial Sequence: Synthetic oligonucleotide
gaagauugaguaaagcucu

SEQ ID NO: 3058239 - RNA, 19 nt, Artificial Sequence
  Description of Artificial Sequence: Synthetic oligonucleotide
guuucaagaauaacuauaa

SEQ ID NO: 3058240 - RNA, 19 nt, Artificial Sequence
  Description of Artificial Sequence: Synthetic oligonucleotide
ucaaaagaauagaguccgc

SEQ ID NO: 3058241 - RNA, 19 nt, Artificial Sequence
  Description of Artificial Sequence: Synthetic oligonucleotide
uuucaagaauaacuauaau

SEQ ID NO: 3058242 - RNA, 19 nt, Artificial Sequence
  Description of Artificial Sequence: Synthetic oligonucleotide
acuucuugggucaggaaag

SEQ ID NO: 3058243 - RNA, 19 nt, Artificial Sequence
  Description of Artificial Sequence: Synthetic oligonucleotide
gcuuuaaccuguucaaaag

SEQ ID NO: 3058244 - RNA, 19 nt, Artificial Sequence
  Description of Artificial Sequence: Synthetic oligonucleotide
ucagcugcgucacucuugu

SEQ ID NO: 3058245 - RNA, 19 nt, Artificial Sequence
  Description of Artificial Sequence: Synthetic oligonucleotide
gauugaguaaagcucuucu

SEQ ID NO: 3058246 - RNA, 19 nt, Artificial Sequence
  Description of Artificial Sequence: Synthetic oligonucleotide
uccuuuguuucaagaauaa

SEQ ID NO: 3058247 - RNA, 19 nt, Artificial Sequence
  Description of Artificial Sequence: Synthetic oligonucleotide
ugaguaaagcucuucuauu

SEQ ID NO: 3058248 - RNA, 19 nt, Artificial Sequence
  Description of Artificial Sequence: Synthetic oligonucleotide
cauggaagauugaguaaag

SEQ ID NO: 3058249 - RNA, 19 nt, Artificial Sequence
  Description of Artificial Sequence: Synthetic oligonucleotide
ugagaagaacccuccuuga

SEQ ID NO: 3058250 - RNA, 19 nt, Artificial Sequence
  Description of Artificial Sequence: Synthetic oligonucleotide
uaacuauaauauugcugca

SEQ ID NO: 3058251 - RNA, 19 nt, Artificial Sequence
  Description of Artificial Sequence: Synthetic oligonucleotide
acauggaagauugaguaaa

SEQ ID NO: 3058252 - RNA, 19 nt, Artificial Sequence
  Description of Artificial Sequence: Synthetic oligonucleotide
uuguuucaagaauaacuau

SEQ ID NO: 3058253 - RNA, 19 nt, Artificial Sequence
  Description of Artificial Sequence: Synthetic oligonucleotide
cuuuaaccuguucaaaaga

SEQ ID NO: 3058254 - RNA, 19 nt, Artificial Sequence
  Description of Artificial Sequence: Synthetic oligonucleotide
ggaagauugaguaaagcuc

SEQ ID NO: 3058255 - RNA, 19 nt, Artificial Sequence
  Description of Artificial Sequence: Synthetic oligonucleotide
gaagaacccuccuugagcu

SEQ ID NO: 3058256 - RNA, 19 nt, Artificial Sequence
  Description of Artificial Sequence: Synthetic oligonucleotide
ccuguucaaaagaauagag

SEQ ID NO: 3058257 - RNA, 19 nt, Artificial Sequence
  Description of Artificial Sequence: Synthetic oligonucleotide
agcuucacauggaagauug

SEQ ID NO: 3058258 - RNA, 19 nt, Artificial Sequence
  Description of Artificial Sequence: Synthetic oligonucleotide
acugagaacaugucagaau

SEQ ID NO: 3058259 - RNA, 19 nt, Artificial Sequence
  Description of Artificial Sequence: Synthetic oligonucleotide
aaccucaccaugucaucca

SEQ ID NO: 3058260 - RNA, 19 nt, Artificial Sequence
  Description of Artificial Sequence: Synthetic oligonucleotide
agaauggaugugaauagcu

SEQ ID NO: 3058261 - RNA, 19 nt, Artificial Sequence
  Description of Artificial Sequence: Synthetic oligonucleotide
agaguccgcuuucuuuccc

SEQ ID NO: 3058262 - RNA, 19 nt, Artificial Sequence
  Description of Artificial Sequence: Synthetic oligonucleotide
agaacccuccuugagcuuc

SEQ ID NO: 3058263 - RNA, 19 nt, Artificial Sequence
  Description of Artificial Sequence: Synthetic oligonucleotide
gucagaauggaugugaaua

SEQ ID NO: 3058264 - RNA, 19 nt, Artificial Sequence
  Description of Artificial Sequence: Synthetic oligonucleotide
uuguuccuuuguuucaaga

SEQ ID NO: 3058265 - RNA, 19 nt, Artificial Sequence
  Description of Artificial Sequence: Synthetic oligonucleotide
uaaagcucuucuauuuguu

SEQ ID NO: 3058266 - RNA, 19 nt, Artificial Sequence
  Description of Artificial Sequence: Synthetic oligonucleotide
ucauuuucagcugcgucac

SEQ ID NO: 3058267 - RNA, 19 nt, Artificial Sequence
  Description of Artificial Sequence: Synthetic oligonucleotide
gaauaacuauaauauugcu

SEQ ID NO: 3058268 - RNA, 19 nt, Artificial Sequence
  Description of Artificial Sequence: Synthetic oligonucleotide
auugagaagaacccuccuu

SEQ ID NO: 3058269 - RNA, 19 nt, Artificial Sequence
  Description of Artificial Sequence: Synthetic oligonucleotide
cucguucauuuucagcugc

SEQ ID NO: 3058270 - RNA, 19 nt, Artificial Sequence
  Description of Artificial Sequence: Synthetic oligonucleotide
auugaguaaagcucuucua

SEQ ID NO: 3058271 - RNA, 19 nt, Artificial Sequence
  Description of Artificial Sequence: Synthetic oligonucleotide
aguguuggugucagcaaac

SEQ ID NO: 3058272 - RNA, 19 nt, Artificial Sequence
  Description of Artificial Sequence: Synthetic oligonucleotide
uuucuuuccccaaccucac

SEQ ID NO: 3058273 - RNA, 19 nt, Artificial Sequence
  Description of Artificial Sequence: Synthetic oligonucleotide
gagaacaugucagaaugga

SEQ ID NO: 3058274 - RNA, 19 nt, Artificial Sequence
  Description of Artificial Sequence: Synthetic oligonucleotide
uacucucucagcucggguc

SEQ ID NO: 3058275 - RNA, 19 nt, Artificial Sequence
  Description of Artificial Sequence: Synthetic oligonucleotide
uugcugcaaaguucauugg

SEQ ID NO: 3058276 - RNA, 19 nt, Artificial Sequence
  Description of Artificial Sequence: Synthetic oligonucleotide
uucagcugcgucacucuug

SEQ ID NO: 3058277 - RNA, 19 nt, Artificial Sequence
  Description of Artificial Sequence: Synthetic oligonucleotide
caaaguucauuggauugag

SEQ ID NO: 3058278 - RNA, 19 nt, Artificial Sequence
  Description of Artificial Sequence: Synthetic oligonucleotide
ucuuagccuuuaguguugg

SEQ ID NO: 3058279 - RNA, 19 nt, Artificial Sequence
  Description of Artificial Sequence: Synthetic oligonucleotide
uuggauugagaagaacccu

SEQ ID NO: 3058280 - RNA, 19 nt, Artificial Sequence
  Description of Artificial Sequence: Synthetic oligonucleotide
agauugaguaaagcucuuc

SEQ ID NO: 3058281 - RNA, 19 nt, Artificial Sequence
  Description of Artificial Sequence: Synthetic oligonucleotide
uuccccaaccucaccaugu

SEQ ID NO: 3058282 - RNA, 19 nt, Artificial Sequence
  Description of Artificial Sequence: Synthetic oligonucleotide
uuuucagcugcgucacucu

SEQ ID NO: 3058283 - RNA, 19 nt, Artificial Sequence
  Description of Artificial Sequence: Synthetic oligonucleotide
uucauuggauugagaagaa

SEQ ID NO: 3058284 - RNA, 19 nt, Artificial Sequence
  Description of Artificial Sequence: Synthetic oligonucleotide
agcaaaccauuuugaacug

SEQ ID NO: 3058285 - RNA, 19 nt, Artificial Sequence
  Description of Artificial Sequence: Synthetic oligonucleotide
accaugucauccagaaugg

SEQ ID NO: 3058286 - RNA, 19 nt, Artificial Sequence
  Description of Artificial Sequence: Synthetic oligonucleotide
cucagcucgggucucuuag

SEQ ID NO: 3058287 - RNA, 19 nt, Artificial Sequence
  Description of Artificial Sequence: Synthetic oligonucleotide
agccuuuaguguugguguc

SEQ ID NO: 3058288 - RNA, 19 nt, Artificial Sequence
  Description of Artificial Sequence: Synthetic oligonucleotide
uuggugucagcaaaccauu

SEQ ID NO: 3058289 - RNA, 19 nt, Artificial Sequence
  Description of Artificial Sequence: Synthetic oligonucleotide
aaaggcucagucgcaaaau

SEQ ID NO: 3058290 - RNA, 19 nt, Artificial Sequence
  Description of Artificial Sequence: Synthetic oligonucleotide
uuuccccaaccucaccaug

SEQ ID NO: 3058291 - RNA, 19 nt, Artificial Sequence
  Description of Artificial Sequence: Synthetic oligonucleotide
accuguucaaaagaauaga

SEQ ID NO: 3058292 - RNA, 19 nt, Artificial Sequence
  Description of Artificial Sequence: Synthetic oligonucleotide
gaaaggcucagucgcaaaa

SEQ ID NO: 3058293 - RNA, 19 nt, Artificial Sequence
  Description of Artificial Sequence: Synthetic oligonucleotide
aggcucagucgcaaaaucg

SEQ ID NO: 3058294 - RNA, 19 nt, Artificial Sequence
  Description of Artificial Sequence: Synthetic oligonucleotide
uccgcuuucuuuccccaac

SEQ ID NO: 3058295 - RNA, 19 nt, Artificial Sequence
  Description of Artificial Sequence: Synthetic oligonucleotide
ucgcaaaaucgggugcucg

SEQ ID NO: 3058296 - RNA, 19 nt, Artificial Sequence
  Description of Artificial Sequence: Synthetic oligonucleotide
cagaauggaugugaauagc

SEQ ID NO: 3058297 - RNA, 19 nt, Artificial Sequence
  Description of Artificial Sequence: Synthetic oligonucleotide
caugucagaauggauguga

SEQ ID NO: 3058298 - RNA, 19 nt, Artificial Sequence
  Description of Artificial Sequence: Synthetic oligonucleotide
caaccucaccaugucaucc

SEQ ID NO: 3058299 - RNA, 19 nt, Artificial Sequence
  Description of Artificial Sequence: Synthetic oligonucleotide
aaaccauuuugaacugaga

SEQ ID NO: 3058300 - RNA, 19 nt, Artificial Sequence
  Description of Artificial Sequence: Synthetic oligonucleotide
cucaccaugucauccagaa

SEQ ID NO: 3058301 - RNA, 19 nt, Artificial Sequence
  Description of Artificial Sequence: Synthetic oligonucleotide
ggcucagucgcaaaaucgg

SEQ ID NO: 3058302 - RNA, 19 nt, Artificial Sequence
  Description of Artificial Sequence: Synthetic oligonucleotide
gaguccgcuuucuuucccc

SEQ ID NO: 3058303 - RNA, 19 nt, Artificial Sequence
  Description of Artificial Sequence: Synthetic oligonucleotide
gcugcgucacucuuguucc

SEQ ID NO: 3058304 - RNA, 19 nt, Artificial Sequence
  Description of Artificial Sequence: Synthetic oligonucleotide
aguacucucucagcucggg

SEQ ID NO: 3058305 - RNA, 19 nt, Artificial Sequence
  Description of Artificial Sequence: Synthetic oligonucleotide
cucuuagccuuuaguguug

SEQ ID NO: 3058306 - RNA, 19 nt, Artificial Sequence
  Description of Artificial Sequence: Synthetic oligonucleotide
caaaaucgggugcucguuc

SEQ ID NO: 3058307 - RNA, 19 nt, Artificial Sequence
  Description of Artificial Sequence: Synthetic oligonucleotide
guaaagcucuucuauuugu

SEQ ID NO: 3058308 - RNA, 19 nt, Artificial Sequence
  Description of Artificial Sequence: Synthetic oligonucleotide
ucauccagaauggcuuucu

SEQ ID NO: 3058309 - RNA, 19 nt, Artificial Sequence
  Description of Artificial Sequence: Synthetic oligonucleotide
cuguucaaaagaauagagu

SEQ ID NO: 3058310 - RNA, 19 nt, Artificial Sequence
  Description of Artificial Sequence: Synthetic oligonucleotide
ugucagaauggaugugaau

SEQ ID NO: 3058311 - RNA, 19 nt, Artificial Sequence
  Description of Artificial Sequence: Synthetic oligonucleotide
ucauuggauugagaagaac

SEQ ID NO: 3058312 - RNA, 19 nt, Artificial Sequence
  Description of Artificial Sequence: Synthetic oligonucleotide
augucauccagaauggcuu

SEQ ID NO: 3058313 - RNA, 19 nt, Artificial Sequence
  Description of Artificial Sequence: Synthetic oligonucleotide
ugaauagcuuuaaccuguu

SEQ ID NO: 3058314 - RNA, 19 nt, Artificial Sequence
  Description of Artificial Sequence: Synthetic oligonucleotide
aaaguucauuggauugaga

SEQ ID NO: 3058315 - RNA, 19 nt, Artificial Sequence
  Description of Artificial Sequence: Synthetic oligonucleotide
gaguaaagcucuucuauuu

SEQ ID NO: 3058316 - RNA, 19 nt, Artificial Sequence
  Description of Artificial Sequence: Synthetic oligonucleotide
cagucgcaaaaucgggugc

SEQ ID NO: 3058317 - RNA, 19 nt, Artificial Sequence
  Description of Artificial Sequence: Synthetic oligonucleotide
ucagcucgggucucuuagc

SEQ ID NO: 3058318 - RNA, 19 nt, Artificial Sequence
  Description of Artificial Sequence: Synthetic oligonucleotide
cuucuugggucaggaaagg

SEQ ID NO: 3058319 - RNA, 19 nt, Artificial Sequence
  Description of Artificial Sequence: Synthetic oligonucleotide
uauugcugcaaaguucauu

SEQ ID NO: 3058320 - RNA, 19 nt, Artificial Sequence
  Description of Artificial Sequence: Synthetic oligonucleotide
ugagcuucacauggaagau

SEQ ID NO: 3058321 - RNA, 19 nt, Artificial Sequence
  Description of Artificial Sequence: Synthetic oligonucleotide
gucagcaaaccauuuugaa

SEQ ID NO: 3058322 - RNA, 19 nt, Artificial Sequence
  Description of Artificial Sequence: Synthetic oligonucleotide
gucucuuagccuuuagugu

SEQ ID NO: 3058323 - RNA, 19 nt, Artificial Sequence
  Description of Artificial Sequence: Synthetic oligonucleotide
uucuuuccccaaccucacc

SEQ ID NO: 3058324 - RNA, 19 nt, Artificial Sequence
  Description of Artificial Sequence: Synthetic oligonucleotide
aaaucgggugcucguucau

SEQ ID NO: 3058325 - RNA, 19 nt, Artificial Sequence
  Description of Artificial Sequence: Synthetic oligonucleotide
uucuugggucaggaaaggc

SEQ ID NO: 3058326 - RNA, 19 nt, Artificial Sequence
  Description of Artificial Sequence: Synthetic oligonucleotide
aaguacucucucagcucgg

SEQ ID NO: 3058327 - RNA, 19 nt, Artificial Sequence
  Description of Artificial Sequence: Synthetic oligonucleotide
gaauagcuuuaaccuguuc

SEQ ID NO: 3058328 - RNA, 19 nt, Artificial Sequence
  Description of Artificial Sequence: Synthetic oligonucleotide
cagcucgggucucuuagcc

SEQ ID NO: 3058329 - RNA, 19 nt, Artificial Sequence
  Description of Artificial Sequence: Synthetic oligonucleotide
gugaauagcuuuaaccugu

SEQ ID NO: 3058330 - RNA, 19 nt, Artificial Sequence
  Description of Artificial Sequence: Synthetic oligonucleotide
accucaccaugucauccag

SEQ ID NO: 3058331 - RNA, 19 nt, Artificial Sequence
  Description of Artificial Sequence: Synthetic oligonucleotide
guuccuuuguuucaagaau

SEQ ID NO: 3058332 - RNA, 19 nt, Artificial Sequence
  Description of Artificial Sequence: Synthetic oligonucleotide
agucgcaaaaucgggugcu

SEQ ID NO: 3058333 - RNA, 19 nt, Artificial Sequence
  Description of Artificial Sequence: Synthetic oligonucleotide
ggauugagaagaacccucc

SEQ ID NO: 3058334 - RNA, 19 nt, Artificial Sequence
  Description of Artificial Sequence: Synthetic oligonucleotide
gugcucguucauuuucagc

SEQ ID NO: 3058335 - RNA, 19 nt, Artificial Sequence
  Description of Artificial Sequence: Synthetic oligonucleotide
cuuuaguguuggugucagc

SEQ ID NO: 3058336 - RNA, 19 nt, Artificial Sequence
  Description of Artificial Sequence: Synthetic oligonucleotide
uggaugugaauagcuuuaa

SEQ ID NO: 3058337 - RNA, 19 nt, Artificial Sequence
  Description of Artificial Sequence: Synthetic oligonucleotide
ggucaggaaaggcucaguc

SEQ ID NO: 3058338 - RNA, 19 nt, Artificial Sequence
  Description of Artificial Sequence: Synthetic oligonucleotide
aucgggugcucguucauuu

SEQ ID NO: 3058339 - RNA, 19 nt, Artificial Sequence
  Description of Artificial Sequence: Synthetic oligonucleotide
ugucauccagaauggcuuu

SEQ ID NO: 3058340 - RNA, 19 nt, Artificial Sequence
  Description of Artificial Sequence: Synthetic oligonucleotide
guuggugucagcaaaccau

SEQ ID NO: 3058341 - RNA, 19 nt, Artificial Sequence
  Description of Artificial Sequence: Synthetic oligonucleotide
uagcuuuaaccuguucaaa

SEQ ID NO: 3058342 - RNA, 19 nt, Artificial Sequence
  Description of Artificial Sequence: Synthetic oligonucleotide
agaacaugucagaauggau

SEQ ID NO: 3058343 - RNA, 19 nt, Artificial Sequence
  Description of Artificial Sequence: Synthetic oligonucleotide
auggaugugaauagcuuua

SEQ ID NO: 3058344 - RNA, 19 nt, Artificial Sequence
  Description of Artificial Sequence: Synthetic oligonucleotide
guguuggugucagcaaacc

SEQ ID NO: 3058345 - RNA, 19 nt, Artificial Sequence
  Description of Artificial Sequence: Synthetic oligonucleotide
gauugagaagaacccuccu

SEQ ID NO: 3058346 - RNA, 19 nt, Artificial Sequence
  Description of Artificial Sequence: Synthetic oligonucleotide
caaaagaauagaguccgcu

SEQ ID NO: 3058347 - RNA, 19 nt, Artificial Sequence
  Description of Artificial Sequence: Synthetic oligonucleotide
caagaauaacuauaauauu

SEQ ID NO: 3058348 - RNA, 19 nt, Artificial Sequence
  Description of Artificial Sequence: Synthetic oligonucleotide
ggaugugaauagcuuuaac

SEQ ID NO: 3058349 - RNA, 19 nt, Artificial Sequence
  Description of Artificial Sequence: Synthetic oligonucleotide
uccccaaccucaccauguc

SEQ ID NO: 3058350 - RNA, 19 nt, Artificial Sequence
  Description of Artificial Sequence: Synthetic oligonucleotide
cacauggaagauugaguaa

SEQ ID NO: 3058351 - RNA, 19 nt, Artificial Sequence
  Description of Artificial Sequence: Synthetic oligonucleotide
acaugucagaauggaugug

SEQ ID NO: 3058352 - RNA, 19 nt, Artificial Sequence
  Description of Artificial Sequence: Synthetic oligonucleotide
ggugcucguucauuuucag

SEQ ID NO: 3058353 - RNA, 19 nt, Artificial Sequence
  Description of Artificial Sequence: Synthetic oligonucleotide
aagauugaguaaagcucuu

SEQ ID NO: 3058354 - RNA, 19 nt, Artificial Sequence
  Description of Artificial Sequence: Synthetic oligonucleotide
uggugucagcaaaccauuu

SEQ ID NO: 3058355 - RNA, 19 nt, Artificial Sequence
  Description of Artificial Sequence: Synthetic oligonucleotide
agcucgggucucuuagccu

SEQ ID NO: 3058356 - RNA, 19 nt, Artificial Sequence
  Description of Artificial Sequence: Synthetic oligonucleotide
gcaaaguucauuggauuga

SEQ ID NO: 3058357 - RNA, 19 nt, Artificial Sequence
  Description of Artificial Sequence: Synthetic oligonucleotide
gcucagucgcaaaaucggg

SEQ ID NO: 3058358 - RNA, 19 nt, Artificial Sequence
  Description of Artificial Sequence: Synthetic oligonucleotide
gcuuucuuuccccaaccuc

SEQ ID NO: 3058359 - RNA, 19 nt, Artificial Sequence
  Description of Artificial Sequence: Synthetic oligonucleotide
aagaacccuccuugagcuu

SEQ ID NO: 3058360 - RNA, 19 nt, Artificial Sequence
  Description of Artificial Sequence: Synthetic oligonucleotide
aaucgggugcucguucauu

SEQ ID NO: 3058361 - RNA, 19 nt, Artificial Sequence
  Description of Artificial Sequence: Synthetic oligonucleotide
gcucguucauuuucagcug

SEQ ID NO: 3058362 - RNA, 19 nt, Artificial Sequence
  Description of Artificial Sequence: Synthetic oligonucleotide
gaauggaugugaauagcuu

SEQ ID NO: 3058363 - RNA, 19 nt, Artificial Sequence
  Description of Artificial Sequence: Synthetic oligonucleotide
cucagucgcaaaaucgggu

SEQ ID NO: 3058364 - RNA, 19 nt, Artificial Sequence
  Description of Artificial Sequence: Synthetic oligonucleotide
aggaaaggcucagucgcaa

SEQ ID NO: 3058365 - RNA, 19 nt, Artificial Sequence
  Description of Artificial Sequence: Synthetic oligonucleotide
augucagaauggaugugaa

SEQ ID NO: 3058366 - RNA, 19 nt, Artificial Sequence
  Description of Artificial Sequence: Synthetic oligonucleotide
agacuucuugggucaggaa

SEQ ID NO: 3058367 - RNA, 19 nt, Artificial Sequence
  Description of Artificial Sequence: Synthetic oligonucleotide
aacccuccuugagcuucac

SEQ ID NO: 3058368 - RNA, 19 nt, Artificial Sequence
  Description of Artificial Sequence: Synthetic oligonucleotide
ccuuuaguguuggugucag

SEQ ID NO: 3058369 - RNA, 19 nt, Artificial Sequence
  Description of Artificial Sequence: Synthetic oligonucleotide
caggaaaggcucagucgca

SEQ ID NO: 3058370 - RNA, 19 nt, Artificial Sequence
  Description of Artificial Sequence: Synthetic oligonucleotide
cauuuugaacugagaacau

SEQ ID NO: 3058371 - RNA, 19 nt, Artificial Sequence
  Description of Artificial Sequence: Synthetic oligonucleotide
ucucagcucgggucucuua

SEQ ID NO: 3058372 - RNA, 19 nt, Artificial Sequence
  Description of Artificial Sequence: Synthetic oligonucleotide
gucacucuuguuccuuugu

SEQ ID NO: 3058373 - RNA, 19 nt, Artificial Sequence
  Description of Artificial Sequence: Synthetic oligonucleotide
gaauagaguccgcuuucuu

SEQ ID NO: 3058374 - RNA, 19 nt, Artificial Sequence
  Description of Artificial Sequence: Synthetic oligonucleotide
ugcgucacucuuguuccuu

SEQ ID NO: 3058375 - RNA, 19 nt, Artificial Sequence
  Description of Artificial Sequence: Synthetic oligonucleotide
ucgggugcucguucauuuu

SEQ ID NO: 3058376 - RNA, 19 nt, Artificial Sequence
  Description of Artificial Sequence: Synthetic oligonucleotide
ucucucagcucgggucucu

SEQ ID NO: 3058377 - RNA, 19 nt, Artificial Sequence
  Description of Artificial Sequence: Synthetic oligonucleotide
cugcaaaguucauuggauu

SEQ ID NO: 3058378 - RNA, 19 nt, Artificial Sequence
  Description of Artificial Sequence: Synthetic oligonucleotide
gucauccagaauggcuuuc

SEQ ID NO: 3058379 - RNA, 19 nt, Artificial Sequence
  Description of Artificial Sequence: Synthetic oligonucleotide
gaacccuccuugagcuuca

SEQ ID NO: 3058380 - RNA, 19 nt, Artificial Sequence
  Description of Artificial Sequence: Synthetic oligonucleotide
acccuccuugagcuucaca

SEQ ID NO: 3058381 - RNA, 19 nt, Artificial Sequence
  Description of Artificial Sequence: Synthetic oligonucleotide
gucgcaaaaucgggugcuc

SEQ ID NO: 3058382 - RNA, 19 nt, Artificial Sequence
  Description of Artificial Sequence: Synthetic oligonucleotide
ccaaccucaccaugucauc

SEQ ID NO: 3058383 - RNA, 19 nt, Artificial Sequence
  Description of Artificial Sequence: Synthetic oligonucleotide
ggugucagcaaaccauuuu

SEQ ID NO: 3058384 - RNA, 19 nt, Artificial Sequence
  Description of Artificial Sequence: Synthetic oligonucleotide
ggaaaggcucagucgcaaa

SEQ ID NO: 3058385 - RNA, 19 nt, Artificial Sequence
  Description of Artificial Sequence: Synthetic oligonucleotide
gcaaaccauuuugaacuga

SEQ ID NO: 3058386 - RNA, 19 nt, Artificial Sequence
  Description of Artificial Sequence: Synthetic oligonucleotide
auauugcugcaaaguucau

SEQ ID NO: 3058387 - RNA, 19 nt, Artificial Sequence
  Description of Artificial Sequence: Synthetic oligonucleotide
gcugcaaaguucauuggau

SEQ ID NO: 3058388 - RNA, 19 nt, Artificial Sequence
  Description of Artificial Sequence: Synthetic oligonucleotide
guacucucucagcucgggu

SEQ ID NO: 3058389 - RNA, 19 nt, Artificial Sequence
  Description of Artificial Sequence: Synthetic oligonucleotide
gggugcucguucauuuuca

SEQ ID NO: 3058390 - RNA, 19 nt, Artificial Sequence
  Description of Artificial Sequence: Synthetic oligonucleotide
gggucucuuagccuuuagu

SEQ ID NO: 3058391 - RNA, 19 nt, Artificial Sequence
  Description of Artificial Sequence: Synthetic oligonucleotide
ccuugagcuucacauggaa

SEQ ID NO: 3058392 - RNA, 19 nt, Artificial Sequence
  Description of Artificial Sequence: Synthetic oligonucleotide
gccuuuaguguugguguca

SEQ ID NO: 3058393 - RNA, 19 nt, Artificial Sequence
  Description of Artificial Sequence: Synthetic oligonucleotide
guccgcuuucuuuccccaa

SEQ ID NO: 3058394 - RNA, 19 nt, Artificial Sequence
  Description of Artificial Sequence: Synthetic oligonucleotide
ucgggucucuuagccuuua

SEQ ID NO: 3058395 - RNA, 19 nt, Artificial Sequence
  Description of Artificial Sequence: Synthetic oligonucleotide
gagcuucacauggaagauu

SEQ ID NO: 3058396 - RNA, 19 nt, Artificial Sequence
  Description of Artificial Sequence: Synthetic oligonucleotide
ccagaauggcuuucuucaa

SEQ ID NO: 3058397 - RNA, 19 nt, Artificial Sequence
  Description of Artificial Sequence: Synthetic oligonucleotide
cgucacucuuguuccuuug

SEQ ID NO: 3058398 - RNA, 19 nt, Artificial Sequence
  Description of Artificial Sequence: Synthetic oligonucleotide
cuuagccuuuaguguuggu

SEQ ID NO: 3058399 - RNA, 19 nt, Artificial Sequence
  Description of Artificial Sequence: Synthetic oligonucleotide
cgggugcucguucauuuuc

SEQ ID NO: 3058400 - RNA, 19 nt, Artificial Sequence
  Description of Artificial Sequence: Synthetic oligonucleotide
cauuuucagcugcgucacu

SEQ ID NO: 3058401 - RNA, 19 nt, Artificial Sequence
  Description of Artificial Sequence: Synthetic oligonucleotide
ccucaccaugucauccaga

SEQ ID NO: 3058402 - RNA, 19 nt, Artificial Sequence
  Description of Artificial Sequence: Synthetic oligonucleotide
gcuucacauggaagauuga

SEQ ID NO: 3058403 - RNA, 19 nt, Artificial Sequence
  Description of Artificial Sequence: Synthetic oligonucleotide
cauccagaauggcuuucuu

SEQ ID NO: 3058404 - RNA, 19 nt, Artificial Sequence
  Description of Artificial Sequence: Synthetic oligonucleotide
ccccaaccucaccauguca

SEQ ID NO: 3058405 - RNA, 19 nt, Artificial Sequence
  Description of Artificial Sequence: Synthetic oligonucleotide
cugcgucacucuuguuccu

SEQ ID NO: 3058406 - RNA, 19 nt, Artificial Sequence
  Description of Artificial Sequence: Synthetic oligonucleotide
gcaaaaucgggugcucguu

SEQ ID NO: 3058407 - RNA, 19 nt, Artificial Sequence
  Description of Artificial Sequence: Synthetic oligonucleotide
cgcaaaaucgggugcucgu

SEQ ID NO: 3058408 - RNA, 19 nt, Artificial Sequence
  Description of Artificial Sequence: Synthetic oligonucleotide
cgggucucuuagccuuuag

SEQ ID NO: 3058409 - RNA, 19 nt, Artificial Sequence
  Description of Artificial Sequence: Synthetic oligonucleotide
cucgggucucuuagccuuu

SEQ ID NO: 3058410 - RNA, 19 nt, Artificial Sequence
  Description of Artificial Sequence: Synthetic oligonucleotide
gcgucacucuuguuccuuu

SEQ ID NO: 3058411 - RNA, 19 nt, Artificial Sequence
  Description of Artificial Sequence: Synthetic oligonucleotide
gggucaggaaaggcucagu

SEQ ID NO: 3058412 - RNA, 19 nt, Artificial Sequence
  Description of Artificial Sequence: Synthetic oligonucleotide
cguucauuuucagcugcgu

SEQ ID NO: 3058413 - RNA, 19 nt, Artificial Sequence
  Description of Artificial Sequence: Synthetic oligonucleotide
cucucagcucgggucucuu

SEQ ID NO: 3058414 - RNA, 19 nt, Artificial Sequence
  Description of Artificial Sequence: Synthetic oligonucleotide
cagcugcgucacucuuguu

SEQ ID NO: 3058415 - RNA, 19 nt, Artificial Sequence
  Description of Artificial Sequence: Synthetic oligonucleotide
aaaacuguaaaguauccgg

SEQ ID NO: 3058416 - RNA, 19 nt, Artificial Sequence
  Description of Artificial Sequence: Synthetic oligonucleotide
aaaacagucacucucagga

SEQ ID NO: 3058417 - RNA, 19 nt, Artificial Sequence
  Description of Artificial Sequence: Synthetic oligonucleotide
ucuaaagacacagagaagg

SEQ ID NO: 3058418 - RNA, 19 nt, Artificial Sequence
  Description of Artificial Sequence: Synthetic oligonucleotide
auuauagugacuuucagug

SEQ ID NO: 3058419 - RNA, 19 nt, Artificial Sequence
  Description of Artificial Sequence: Synthetic oligonucleotide
aagaggaucuuguagauag

SEQ ID NO: 3058420 - RNA, 19 nt, Artificial Sequence
  Description of Artificial Sequence: Synthetic oligonucleotide
uauuucuaaagacacagag

SEQ ID NO: 3058421 - RNA, 19 nt, Artificial Sequence
  Description of Artificial Sequence: Synthetic oligonucleotide
uuucuaaagacacagagaa

SEQ ID NO: 3058422 - RNA, 19 nt, Artificial Sequence
  Description of Artificial Sequence: Synthetic oligonucleotide
aaaguauccggcuuacagc

SEQ ID NO: 3058423 - RNA, 19 nt, Artificial Sequence
  Description of Artificial Sequence: Synthetic oligonucleotide
uuuauuucuaaagacacag

SEQ ID NO: 3058424 - RNA, 19 nt, Artificial Sequence
  Description of Artificial Sequence: Synthetic oligonucleotide
aaagacauguauccuaaag

SEQ ID NO: 3058425 - RNA, 19 nt, Artificial Sequence
  Description of Artificial Sequence: Synthetic oligonucleotide
uaaaguauccggcuuacag

SEQ ID NO: 3058426 - RNA, 19 nt, Artificial Sequence
  Description of Artificial Sequence: Synthetic oligonucleotide
aaagaugucacugucagga

SEQ ID NO: 3058427 - RNA, 19 nt, Artificial Sequence
  Description of Artificial Sequence: Synthetic oligonucleotide
uuugcuaucucaguguugg

SEQ ID NO: 3058428 - RNA, 19 nt, Artificial Sequence
  Description of Artificial Sequence: Synthetic oligonucleotide
ucuucuuuauuucuaaaga

SEQ ID NO: 3058429 - RNA, 19 nt, Artificial Sequence
  Description of Artificial Sequence: Synthetic oligonucleotide
agacauguauccuaaagag

SEQ ID NO: 3058430 - RNA, 19 nt, Artificial Sequence
  Description of Artificial Sequence: Synthetic oligonucleotide
aagacauguauccuaaaga

SEQ ID NO: 3058431 - RNA, 19 nt, Artificial Sequence
  Description of Artificial Sequence: Synthetic oligonucleotide
uaaaauaaccuuuaccauc

SEQ ID NO: 3058432 - RNA, 19 nt, Artificial Sequence
  Description of Artificial Sequence: Synthetic oligonucleotide
acugucaggagucugcggc

SEQ ID NO: 3058433 - RNA, 19 nt, Artificial Sequence
  Description of Artificial Sequence: Synthetic oligonucleotide
cuucuuguauuucacagcg

SEQ ID NO: 3058434 - RNA, 19 nt, Artificial Sequence
  Description of Artificial Sequence: Synthetic oligonucleotide
uuguauuucacagcgaaag

SEQ ID NO: 3058435 - RNA, 19 nt, Artificial Sequence
  Description of Artificial Sequence: Synthetic oligonucleotide
aaacuguaaaguauccggc

SEQ ID NO: 3058436 - RNA, 19 nt, Artificial Sequence
  Description of Artificial Sequence: Synthetic oligonucleotide
aauaaccuuuaccaucauc

SEQ ID NO: 3058437 - RNA, 19 nt, Artificial Sequence
  Description of Artificial Sequence: Synthetic oligonucleotide
aaaauaaccuuuaccauca

SEQ ID NO: 3058438 - RNA, 19 nt, Artificial Sequence
  Description of Artificial Sequence: Synthetic oligonucleotide
aaguauccggcuuacagcu

SEQ ID NO: 3058439 - RNA, 19 nt, Artificial Sequence
  Description of Artificial Sequence: Synthetic oligonucleotide
aaccuuuaccaucaucuuc

SEQ ID NO: 3058440 - RNA, 19 nt, Artificial Sequence
  Description of Artificial Sequence: Synthetic oligonucleotide
ggaucuaaaagucucacag

SEQ ID NO: 3058441 - RNA, 19 nt, Artificial Sequence
  Description of Artificial Sequence: Synthetic oligonucleotide
guaaagaugucacugucag

SEQ ID NO: 3058442 - RNA, 19 nt, Artificial Sequence
  Description of Artificial Sequence: Synthetic oligonucleotide
uauuucacagcgaaagaca

SEQ ID NO: 3058443 - RNA, 19 nt, Artificial Sequence
  Description of Artificial Sequence: Synthetic oligonucleotide
aucuucuuuauuucuaaag

SEQ ID NO: 3058444 - RNA, 19 nt, Artificial Sequence
  Description of Artificial Sequence: Synthetic oligonucleotide
uauagugacuuucagugaa

SEQ ID NO: 3058445 - RNA, 19 nt, Artificial Sequence
  Description of Artificial Sequence: Synthetic oligonucleotide
auaaccuuuaccaucaucu

SEQ ID NO: 3058446 - RNA, 19 nt, Artificial Sequence
  Description of Artificial Sequence: Synthetic oligonucleotide
augcaaaacagucacucuc

SEQ ID NO: 3058447 - RNA, 19 nt, Artificial Sequence
  Description of Artificial Sequence: Synthetic oligonucleotide
ucuuguauuucacagcgaa

SEQ ID NO: 3058448 - RNA, 19 nt, Artificial Sequence
  Description of Artificial Sequence: Synthetic oligonucleotide
aaagucucacaguuccuuc

SEQ ID NO: 3058449 - RNA, 19 nt, Artificial Sequence
  Description of Artificial Sequence: Synthetic oligonucleotide
gaagguaaagaugucacug

SEQ ID NO: 3058450 - RNA, 19 nt, Artificial Sequence
  Description of Artificial Sequence: Synthetic oligonucleotide
agugacuuucagugaaugc

SEQ ID NO: 3058451 - RNA, 19 nt, Artificial Sequence
  Description of Artificial Sequence: Synthetic oligonucleotide
acauguauccuaaagagcu

SEQ ID NO: 3058452 - RNA, 19 nt, Artificial Sequence
  Description of Artificial Sequence: Synthetic oligonucleotide
ugagaguagggucugcuug

SEQ ID NO: 3058453 - RNA, 19 nt, Artificial Sequence
  Description of Artificial Sequence: Synthetic oligonucleotide
agcucugcauuauagugac

SEQ ID NO: 3058454 - RNA, 19 nt, Artificial Sequence
  Description of Artificial Sequence: Synthetic oligonucleotide
aacuguaaaguauccggcu

SEQ ID NO: 3058455 - RNA, 19 nt, Artificial Sequence
  Description of Artificial Sequence: Synthetic oligonucleotide
gugaaugcaaaacagucac

SEQ ID NO: 3058456 - RNA, 19 nt, Artificial Sequence
  Description of Artificial Sequence: Synthetic oligonucleotide
agagcucugcauuauagug

SEQ ID NO: 3058457 - RNA, 19 nt, Artificial Sequence
  Description of Artificial Sequence: Synthetic oligonucleotide
ugcauuauagugacuuuca

SEQ ID NO: 3058458 - RNA, 19 nt, Artificial Sequence
  Description of Artificial Sequence: Synthetic oligonucleotide
ucugcuuggcaguacggcg

SEQ ID NO: 3058459 - RNA, 19 nt, Artificial Sequence
  Description of Artificial Sequence: Synthetic oligonucleotide
aagguaaagaugucacugu

SEQ ID NO: 3058460 - RNA, 19 nt, Artificial Sequence
  Description of Artificial Sequence: Synthetic oligonucleotide
uggucuggggaucuaaaag

SEQ ID NO: 3058461 - RNA, 19 nt, Artificial Sequence
  Description of Artificial Sequence: Synthetic oligonucleotide
aacagucacucucaggagu

SEQ ID NO: 3058462 - RNA, 19 nt, Artificial Sequence
  Description of Artificial Sequence: Synthetic oligonucleotide
aaugcaaaacagucacucu

SEQ ID NO: 3058463 - RNA, 19 nt, Artificial Sequence
  Description of Artificial Sequence: Synthetic oligonucleotide
aguagggucugcuuggcag

SEQ ID NO: 3058464 - RNA, 19 nt, Artificial Sequence
  Description of Artificial Sequence: Synthetic oligonucleotide
aaagagcucugcauuauag

SEQ ID NO: 3058465 - RNA, 19 nt, Artificial Sequence
  Description of Artificial Sequence: Synthetic oligonucleotide
ugcaaaacagucacucuca

SEQ ID NO: 3058466 - RNA, 19 nt, Artificial Sequence
  Description of Artificial Sequence: Synthetic oligonucleotide
guaguuugcuaucucagug

SEQ ID NO: 3058467 - RNA, 19 nt, Artificial Sequence
  Description of Artificial Sequence: Synthetic oligonucleotide
ucagugaaugcaaaacagu

SEQ ID NO: 3058468 - RNA, 19 nt, Artificial Sequence
  Description of Artificial Sequence: Synthetic oligonucleotide
uauccuaaagagcucugca

SEQ ID NO: 3058469 - RNA, 19 nt, Artificial Sequence
  Description of Artificial Sequence: Synthetic oligonucleotide
aucuaaaagucucacaguu

SEQ ID NO: 3058470 - RNA, 19 nt, Artificial Sequence
  Description of Artificial Sequence: Synthetic oligonucleotide
gaucuuguagauaggguag

SEQ ID NO: 3058471 - RNA, 19 nt, Artificial Sequence
  Description of Artificial Sequence: Synthetic oligonucleotide
aguggcugagaguaggguc

SEQ ID NO: 3058472 - RNA, 19 nt, Artificial Sequence
  Description of Artificial Sequence: Synthetic oligonucleotide
gaaugcaaaacagucacuc

SEQ ID NO: 3058473 - RNA, 19 nt, Artificial Sequence
  Description of Artificial Sequence: Synthetic oligonucleotide
aguggcaaaacuguaaagu

SEQ ID NO: 3058474 - RNA, 19 nt, Artificial Sequence
  Description of Artificial Sequence: Synthetic oligonucleotide
gagaguagggucugcuugg

SEQ ID NO: 3058475 - RNA, 19 nt, Artificial Sequence
  Description of Artificial Sequence: Synthetic oligonucleotide
gaggaucuuguagauaggg

SEQ ID NO: 3058476 - RNA, 19 nt, Artificial Sequence
  Description of Artificial Sequence: Synthetic oligonucleotide
aaacagucacucucaggag

SEQ ID NO: 3058477 - RNA, 19 nt, Artificial Sequence
  Description of Artificial Sequence: Synthetic oligonucleotide
cagugaaugcaaaacaguc

SEQ ID NO: 3058478 - RNA, 19 nt, Artificial Sequence
  Description of Artificial Sequence: Synthetic oligonucleotide
agguaaagaugucacuguc

SEQ ID NO: 3058479 - RNA, 19 nt, Artificial Sequence
  Description of Artificial Sequence: Synthetic oligonucleotide
uacagcuucuuguauuuca

SEQ ID NO: 3058480 - RNA, 19 nt, Artificial Sequence
  Description of Artificial Sequence: Synthetic oligonucleotide
aagagcucugcauuauagu

SEQ ID NO: 3058481 - RNA, 19 nt, Artificial Sequence
  Description of Artificial Sequence: Synthetic oligonucleotide
uuauuucuaaagacacaga

SEQ ID NO: 3058482 - RNA, 19 nt, Artificial Sequence
  Description of Artificial Sequence: Synthetic oligonucleotide
uucuaaagacacagagaag

SEQ ID NO: 3058483 - RNA, 19 nt, Artificial Sequence
  Description of Artificial Sequence: Synthetic oligonucleotide
ucuaaaagucucacaguuc

SEQ ID NO: 3058484 - RNA, 19 nt, Artificial Sequence
  Description of Artificial Sequence: Synthetic oligonucleotide
cucaggagucccaucaugc

SEQ ID NO: 3058485 - RNA, 19 nt, Artificial Sequence
  Description of Artificial Sequence: Synthetic oligonucleotide
caaaacuguaaaguauccg

SEQ ID NO: 3058486 - RNA, 19 nt, Artificial Sequence
  Description of Artificial Sequence: Synthetic oligonucleotide
ucugcggcgaggcaguggc

SEQ ID NO: 3058487 - RNA, 19 nt, Artificial Sequence
  Description of Artificial Sequence: Synthetic oligonucleotide
ucugacacagaagaggauc

SEQ ID NO: 3058488 - RNA, 19 nt, Artificial Sequence
  Description of Artificial Sequence: Synthetic oligonucleotide
uaaagaugucacugucagg

SEQ ID NO: 3058489 - RNA, 19 nt, Artificial Sequence
  Description of Artificial Sequence: Synthetic oligonucleotide
gaaggcaguggcaaaacug

SEQ ID NO: 3058490 - RNA, 19 nt, Artificial Sequence
  Description of Artificial Sequence: Synthetic oligonucleotide
acagcgaaagacauguauc

SEQ ID NO: 3058491 - RNA, 19 nt, Artificial Sequence
  Description of Artificial Sequence: Synthetic oligonucleotide
uuggcaguacggcggaagg

SEQ ID NO: 3058492 - RNA, 19 nt, Artificial Sequence
  Description of Artificial Sequence: Synthetic oligonucleotide
cacagagaagguaaagaug

SEQ ID NO: 3058493 - RNA, 19 nt, Artificial Sequence
  Description of Artificial Sequence: Synthetic oligonucleotide
aagucucacaguuccuuca

SEQ ID NO: 3058494 - RNA, 19 nt, Artificial Sequence
  Description of Artificial Sequence: Synthetic oligonucleotide
gagaagguaaagaugucac

SEQ ID NO: 3058495 - RNA, 19 nt, Artificial Sequence
  Description of Artificial Sequence: Synthetic oligonucleotide
uuauagugacuuucaguga

SEQ ID NO: 3058496 - RNA, 19 nt, Artificial Sequence
  Description of Artificial Sequence: Synthetic oligonucleotide
ugacuuucagugaaugcaa

SEQ ID NO: 3058497 - RNA, 19 nt, Artificial Sequence
  Description of Artificial Sequence: Synthetic oligonucleotide
aagaugucacugucaggag

SEQ ID NO: 3058498 - RNA, 19 nt, Artificial Sequence
  Description of Artificial Sequence: Synthetic oligonucleotide
uggcaaaacuguaaaguau

SEQ ID NO: 3058499 - RNA, 19 nt, Artificial Sequence
  Description of Artificial Sequence: Synthetic oligonucleotide
guauuucacagcgaaagac

SEQ ID NO: 3058500 - RNA, 19 nt, Artificial Sequence
  Description of Artificial Sequence: Synthetic oligonucleotide
agauaggguaguuugcuau

SEQ ID NO: 3058501 - RNA, 19 nt, Artificial Sequence
  Description of Artificial Sequence: Synthetic oligonucleotide
gacauguauccuaaagagc

SEQ ID NO: 3058502 - RNA, 19 nt, Artificial Sequence
  Description of Artificial Sequence: Synthetic oligonucleotide
uaguuugcuaucucagugu

SEQ ID NO: 3058503 - RNA, 19 nt, Artificial Sequence
  Description of Artificial Sequence: Synthetic oligonucleotide
uccuaaagagcucugcauu

SEQ ID NO: 3058504 - RNA, 19 nt, Artificial Sequence
  Description of Artificial Sequence: Synthetic oligonucleotide
aaggcaguggcaaaacugu

SEQ ID NO: 3058505 - RNA, 19 nt, Artificial Sequence
  Description of Artificial Sequence: Synthetic oligonucleotide
caaaacagucacucucagg

SEQ ID NO: 3058506 - RNA, 19 nt, Artificial Sequence
  Description of Artificial Sequence: Synthetic oligonucleotide
acucucaggagucccauca

SEQ ID NO: 3058507 - RNA, 19 nt, Artificial Sequence
  Description of Artificial Sequence: Synthetic oligonucleotide
ucuggggaucuaaaagucu

SEQ ID NO: 3058508 - RNA, 19 nt, Artificial Sequence
  Description of Artificial Sequence: Synthetic oligonucleotide
accuuuaccaucaucuucu

SEQ ID NO: 3058509 - RNA, 19 nt, Artificial Sequence
  Description of Artificial Sequence: Synthetic oligonucleotide
agagaagguaaagauguca

SEQ ID NO: 3058510 - RNA, 19 nt, Artificial Sequence
  Description of Artificial Sequence: Synthetic oligonucleotide
gugacuuucagugaaugca

SEQ ID NO: 3058511 - RNA, 19 nt, Artificial Sequence
  Description of Artificial Sequence: Synthetic oligonucleotide
agaagguaaagaugucacu

SEQ ID NO: 3058512 - RNA, 19 nt, Artificial Sequence
  Description of Artificial Sequence: Synthetic oligonucleotide
aaaagucucacaguuccuu

SEQ ID NO: 3058513 - RNA, 19 nt, Artificial Sequence
  Description of Artificial Sequence: Synthetic oligonucleotide
auuucuaaagacacagaga

SEQ ID NO: 3058514 - RNA, 19 nt, Artificial Sequence
  Description of Artificial Sequence: Synthetic oligonucleotide
uuucacagcgaaagacaug

SEQ ID NO: 3058515 - RNA, 19 nt, Artificial Sequence
  Description of Artificial Sequence: Synthetic oligonucleotide
uguauccuaaagagcucug

SEQ ID NO: 3058516 - RNA, 19 nt, Artificial Sequence
  Description of Artificial Sequence: Synthetic oligonucleotide
gacacagagaagguaaaga

SEQ ID NO: 3058517 - RNA, 19 nt, Artificial Sequence
  Description of Artificial Sequence: Synthetic oligonucleotide
gaugucacugucaggaguc

SEQ ID NO: 3058518 - RNA, 19 nt, Artificial Sequence
  Description of Artificial Sequence: Synthetic oligonucleotide
cuggggaucuaaaagucuc

SEQ ID NO: 3058519 - RNA, 19 nt, Artificial Sequence
  Description of Artificial Sequence: Synthetic oligonucleotide
gauaggguaguuugcuauc

SEQ ID NO: 3058520 - RNA, 19 nt, Artificial Sequence
  Description of Artificial Sequence: Synthetic oligonucleotide
agaugucacugucaggagu

SEQ ID NO: 3058521 - RNA, 19 nt, Artificial Sequence
  Description of Artificial Sequence: Synthetic oligonucleotide
ucaggagucccaucaugcc

SEQ ID NO: 3058522 - RNA, 19 nt, Artificial Sequence
  Description of Artificial Sequence: Synthetic oligonucleotide
ugaaugcaaaacagucacu

SEQ ID NO: 3058523 - RNA, 19 nt, Artificial Sequence
  Description of Artificial Sequence: Synthetic oligonucleotide
agugaaugcaaaacaguca

SEQ ID NO: 3058524 - RNA, 19 nt, Artificial Sequence
  Description of Artificial Sequence: Synthetic oligonucleotide
uacggcggaaggcaguggc

SEQ ID NO: 3058525 - RNA, 19 nt, Artificial Sequence
  Description of Artificial Sequence: Synthetic oligonucleotide
cugcuuggcaguacggcgg

SEQ ID NO: 3058526 - RNA, 19 nt, Artificial Sequence
  Description of Artificial Sequence: Synthetic oligonucleotide
aggguaguuugcuaucuca

SEQ ID NO: 3058527 - RNA, 19 nt, Artificial Sequence
  Description of Artificial Sequence: Synthetic oligonucleotide
agucucacaguuccuucag

SEQ ID NO: 3058528 - RNA, 19 nt, Artificial Sequence
  Description of Artificial Sequence: Synthetic oligonucleotide
uaaaagucucacaguuccu

SEQ ID NO: 3058529 - RNA, 19 nt, Artificial Sequence
  Description of Artificial Sequence: Synthetic oligonucleotide
ucaguguuggucuggggau

SEQ ID NO: 3058530 - RNA, 19 nt, Artificial Sequence
  Description of Artificial Sequence: Synthetic oligonucleotide
acagcuucuuguauuucac

SEQ ID NO: 3058531 - RNA, 19 nt, Artificial Sequence
  Description of Artificial Sequence: Synthetic oligonucleotide
gacacagaagaggaucuug

SEQ ID NO: 3058532 - RNA, 19 nt, Artificial Sequence
  Description of Artificial Sequence: Synthetic oligonucleotide
uguaaaguauccggcuuac

SEQ ID NO: 3058533 - RNA, 19 nt, Artificial Sequence
  Description of Artificial Sequence: Synthetic oligonucleotide
agaagaggaucuuguagau

SEQ ID NO: 3058534 - RNA, 19 nt, Artificial Sequence
  Description of Artificial Sequence: Synthetic oligonucleotide
uggggaucuaaaagucuca

SEQ ID NO: 3058535 - RNA, 19 nt, Artificial Sequence
  Description of Artificial Sequence: Synthetic oligonucleotide
agucacucucaggaguccc

SEQ ID NO: 3058536 - RNA, 19 nt, Artificial Sequence
  Description of Artificial Sequence: Synthetic oligonucleotide
uaaagacacagagaaggua

SEQ ID NO: 3058537 - RNA, 19 nt, Artificial Sequence
  Description of Artificial Sequence: Synthetic oligonucleotide
acuguaaaguauccggcuu

SEQ ID NO: 3058538 - RNA, 19 nt, Artificial Sequence
  Description of Artificial Sequence: Synthetic oligonucleotide
acuuucagugaaugcaaaa

SEQ ID NO: 3058539 - RNA, 19 nt, Artificial Sequence
  Description of Artificial Sequence: Synthetic oligonucleotide
ucacugucaggagucugcg

SEQ ID NO: 3058540 - RNA, 19 nt, Artificial Sequence
  Description of Artificial Sequence: Synthetic oligonucleotide
caggagucccaucaugccc

SEQ ID NO: 3058541 - RNA, 19 nt, Artificial Sequence
  Description of Artificial Sequence: Synthetic oligonucleotide
auguauccuaaagagcucu

SEQ ID NO: 3058542 - RNA, 19 nt, Artificial Sequence
  Description of Artificial Sequence: Synthetic oligonucleotide
uuaccaucaucuucuuuau

SEQ ID NO: 3058543 - RNA, 19 nt, Artificial Sequence
  Description of Artificial Sequence: Synthetic oligonucleotide
uagugacuuucagugaaug

SEQ ID NO: 3058544 - RNA, 19 nt, Artificial Sequence
  Description of Artificial Sequence: Synthetic oligonucleotide
agucccaucaugcccucug

SEQ ID NO: 3058545 - RNA, 19 nt, Artificial Sequence
  Description of Artificial Sequence: Synthetic oligonucleotide
gaggcaguggcugagagua

SEQ ID NO: 3058546 - RNA, 19 nt, Artificial Sequence
  Description of Artificial Sequence: Synthetic oligonucleotide
uaaagagcucugcauuaua

SEQ ID NO: 3058547 - RNA, 19 nt, Artificial Sequence
  Description of Artificial Sequence: Synthetic oligonucleotide
cucaguguuggucugggga

SEQ ID NO: 3058548 - RNA, 19 nt, Artificial Sequence
  Description of Artificial Sequence: Synthetic oligonucleotide
aguuugcuaucucaguguu

SEQ ID NO: 3058549 - RNA, 19 nt, Artificial Sequence
  Description of Artificial Sequence: Synthetic oligonucleotide
uucuuguauuucacagcga

SEQ ID NO: 3058550 - RNA, 19 nt, Artificial Sequence
  Description of Artificial Sequence: Synthetic oligonucleotide
ugcuaucucaguguugguc

SEQ ID NO: 3058551 - RNA, 19 nt, Artificial Sequence
  Description of Artificial Sequence: Synthetic oligonucleotide
ggaucuuguagauagggua

SEQ ID NO: 3058552 - RNA, 19 nt, Artificial Sequence
  Description of Artificial Sequence: Synthetic oligonucleotide
guggcaaaacuguaaagua

SEQ ID NO: 3058553 - RNA, 19 nt, Artificial Sequence
  Description of Artificial Sequence: Synthetic oligonucleotide
aucaugcccucugacacag

SEQ ID NO: 3058554 - RNA, 19 nt, Artificial Sequence
  Description of Artificial Sequence: Synthetic oligonucleotide
uccggcuuacagcuucuug

SEQ ID NO: 3058555 - RNA, 19 nt, Artificial Sequence
  Description of Artificial Sequence: Synthetic oligonucleotide
cugcauuauagugacuuuc

SEQ ID NO: 3058556 - RNA, 19 nt, Artificial Sequence
  Description of Artificial Sequence: Synthetic oligonucleotide
cauuauagugacuuucagu

SEQ ID NO: 3058557 - RNA, 19 nt, Artificial Sequence
  Description of Artificial Sequence: Synthetic oligonucleotide
auuucacagcgaaagacau

SEQ ID NO: 3058558 - RNA, 19 nt, Artificial Sequence
  Description of Artificial Sequence: Synthetic oligonucleotide
gaucuaaaagucucacagu

SEQ ID NO: 3058559 - RNA, 19 nt, Artificial Sequence
  Description of Artificial Sequence: Synthetic oligonucleotide
cauguauccuaaagagcuc

SEQ ID NO: 3058560 - RNA, 19 nt, Artificial Sequence
  Description of Artificial Sequence: Synthetic oligonucleotide
guauccuaaagagcucugc

SEQ ID NO: 3058561 - RNA, 19 nt, Artificial Sequence
  Description of Artificial Sequence: Synthetic oligonucleotide
agacacagagaagguaaag

SEQ ID NO: 3058562 - RNA, 19 nt, Artificial Sequence
  Description of Artificial Sequence: Synthetic oligonucleotide
uuggucuggggaucuaaaa

SEQ ID NO: 3058563 - RNA, 19 nt, Artificial Sequence
  Description of Artificial Sequence: Synthetic oligonucleotide
guauccggcuuacagcuuc

SEQ ID NO: 3058564 - RNA, 19 nt, Artificial Sequence
  Description of Artificial Sequence: Synthetic oligonucleotide
ggcaaaacuguaaaguauc

SEQ ID NO: 3058565 - RNA, 19 nt, Artificial Sequence
  Description of Artificial Sequence: Synthetic oligonucleotide
agaguagggucugcuuggc

SEQ ID NO: 3058566 - RNA, 19 nt, Artificial Sequence
  Description of Artificial Sequence: Synthetic oligonucleotide
cuaaaauaaccuuuaccau

SEQ ID NO: 3058567 - RNA, 19 nt, Artificial Sequence
  Description of Artificial Sequence: Synthetic oligonucleotide
auaggguaguuugcuaucu

SEQ ID NO: 3058568 - RNA, 19 nt, Artificial Sequence
  Description of Artificial Sequence: Synthetic oligonucleotide
uaaccuuuaccaucaucuu

SEQ ID NO: 3058569 - RNA, 19 nt, Artificial Sequence
  Description of Artificial Sequence: Synthetic oligonucleotide
gagcucugcauuauaguga

SEQ ID NO: 3058570 - RNA, 19 nt, Artificial Sequence
  Description of Artificial Sequence: Synthetic oligonucleotide
ucucaguguuggucugggg

SEQ ID NO: 3058571 - RNA, 19 nt, Artificial Sequence
  Description of Artificial Sequence: Synthetic oligonucleotide
gcauuauagugacuuucag

SEQ ID NO: 3058572 - RNA, 19 nt, Artificial Sequence
  Description of Artificial Sequence: Synthetic oligonucleotide
ucugcauuauagugacuuu

SEQ ID NO: 3058573 - RNA, 19 nt, Artificial Sequence
  Description of Artificial Sequence: Synthetic oligonucleotide
uagauaggguaguuugcua

SEQ ID NO: 3058574 - RNA, 19 nt, Artificial Sequence
  Description of Artificial Sequence: Synthetic oligonucleotide
ucaggagucugcggcgagg

SEQ ID NO: 3058575 - RNA, 19 nt, Artificial Sequence
  Description of Artificial Sequence: Synthetic oligonucleotide
cuaucucaguguuggucug

SEQ ID NO: 3058576 - RNA, 19 nt, Artificial Sequence
  Description of Artificial Sequence: Synthetic oligonucleotide
ccaucaugcccucugacac

SEQ ID NO: 3058577 - RNA, 19 nt, Artificial Sequence
  Description of Artificial Sequence: Synthetic oligonucleotide
cuuggcaguacggcggaag

SEQ ID NO: 3058578 - RNA, 19 nt, Artificial Sequence
  Description of Artificial Sequence: Synthetic oligonucleotide
uaggguaguuugcuaucuc

SEQ ID NO: 3058579 - RNA, 19 nt, Artificial Sequence
  Description of Artificial Sequence: Synthetic oligonucleotide
aguacggcggaaggcagug

SEQ ID NO: 3058580 - RNA, 19 nt, Artificial Sequence
  Description of Artificial Sequence: Synthetic oligonucleotide
ugcuuggcaguacggcgga

SEQ ID NO: 3058581 - RNA, 19 nt, Artificial Sequence
  Description of Artificial Sequence: Synthetic oligonucleotide
aagacacagagaagguaaa

SEQ ID NO: 3058582 - RNA, 19 nt, Artificial Sequence
  Description of Artificial Sequence: Synthetic oligonucleotide
gcaaaacuguaaaguaucc

SEQ ID NO: 3058583 - RNA, 19 nt, Artificial Sequence
  Description of Artificial Sequence: Synthetic oligonucleotide
agcgaaagacauguauccu

SEQ ID NO: 3058584 - RNA, 19 nt, Artificial Sequence
  Description of Artificial Sequence: Synthetic oligonucleotide
ucccaucaugcccucugac

SEQ ID NO: 3058585 - RNA, 19 nt, Artificial Sequence
  Description of Artificial Sequence: Synthetic oligonucleotide
aucuuguagauaggguagu

SEQ ID NO: 3058586 - RNA, 19 nt, Artificial Sequence
  Description of Artificial Sequence: Synthetic oligonucleotide
cccucugacacagaagagg

SEQ ID NO: 3058587 - RNA, 19 nt, Artificial Sequence
  Description of Artificial Sequence: Synthetic oligonucleotide
gcaaaacagucacucucag

SEQ ID NO: 3058588 - RNA, 19 nt, Artificial Sequence
  Description of Artificial Sequence: Synthetic oligonucleotide
gaaagacauguauccuaaa

SEQ ID NO: 3058589 - RNA, 19 nt, Artificial Sequence
  Description of Artificial Sequence: Synthetic oligonucleotide
agaggaucuuguagauagg

SEQ ID NO: 3058590 - RNA, 19 nt, Artificial Sequence
  Description of Artificial Sequence: Synthetic oligonucleotide
cuaaagacacagagaaggu

SEQ ID NO: 3058591 - RNA, 19 nt, Artificial Sequence
  Description of Artificial Sequence: Synthetic oligonucleotide
gggucugcuuggcaguacg

SEQ ID NO: 3058592 - RNA, 19 nt, Artificial Sequence
  Description of Artificial Sequence: Synthetic oligonucleotide
ugucacugucaggagucug

SEQ ID NO: 3058593 - RNA, 19 nt, Artificial Sequence
  Description of Artificial Sequence: Synthetic oligonucleotide
ggguaguuugcuaucucag

SEQ ID NO: 3058594 - RNA, 19 nt, Artificial Sequence
  Description of Artificial Sequence: Synthetic oligonucleotide
aggaucuuguagauagggu

SEQ ID NO: 3058595 - RNA, 19 nt, Artificial Sequence
  Description of Artificial Sequence: Synthetic oligonucleotide
gucugcuuggcaguacggc

SEQ ID NO: 3058596 - RNA, 19 nt, Artificial Sequence
  Description of Artificial Sequence: Synthetic oligonucleotide
uauccggcuuacagcuucu

SEQ ID NO: 3058597 - RNA, 19 nt, Artificial Sequence
  Description of Artificial Sequence: Synthetic oligonucleotide
gucuggggaucuaaaaguc

SEQ ID NO: 3058598 - RNA, 19 nt, Artificial Sequence
  Description of Artificial Sequence: Synthetic oligonucleotide
cagagaagguaaagauguc

SEQ ID NO: 3058599 - RNA, 19 nt, Artificial Sequence
  Description of Artificial Sequence: Synthetic oligonucleotide
gguaaagaugucacuguca

SEQ ID NO: 3058600 - RNA, 19 nt, Artificial Sequence
  Description of Artificial Sequence: Synthetic oligonucleotide
ugcggcgaggcaguggcug

SEQ ID NO: 3058601 - RNA, 19 nt, Artificial Sequence
  Description of Artificial Sequence: Synthetic oligonucleotide
guagauaggguaguuugcu

SEQ ID NO: 3058602 - RNA, 19 nt, Artificial Sequence
  Description of Artificial Sequence: Synthetic oligonucleotide
cacugucaggagucugcgg

SEQ ID NO: 3058603 - RNA, 19 nt, Artificial Sequence
  Description of Artificial Sequence: Synthetic oligonucleotide
ggagucugcggcgaggcag

SEQ ID NO: 3058604 - RNA, 19 nt, Artificial Sequence
  Description of Artificial Sequence: Synthetic oligonucleotide
ggucuggggaucuaaaagu

SEQ ID NO: 3058605 - RNA, 19 nt, Artificial Sequence
  Description of Artificial Sequence: Synthetic oligonucleotide
uguuggucuggggaucuaa

SEQ ID NO: 3058606 - RNA, 19 nt, Artificial Sequence
  Description of Artificial Sequence: Synthetic oligonucleotide
ggcaguggcugagaguagg

SEQ ID NO: 3058607 - RNA, 19 nt, Artificial Sequence
  Description of Artificial Sequence: Synthetic oligonucleotide
ucuuguagauaggguaguu

SEQ ID NO: 3058608 - RNA, 19 nt, Artificial Sequence
  Description of Artificial Sequence: Synthetic oligonucleotide
ugucaggagucugcggcga

SEQ ID NO: 3058609 - RNA, 19 nt, Artificial Sequence
  Description of Artificial Sequence: Synthetic oligonucleotide
guuugcuaucucaguguug

SEQ ID NO: 3058610 - RNA, 19 nt, Artificial Sequence
  Description of Artificial Sequence: Synthetic oligonucleotide
cuguaaaguauccggcuua

SEQ ID NO: 3058611 - RNA, 19 nt, Artificial Sequence
  Description of Artificial Sequence: Synthetic oligonucleotide
caugcccucugacacagaa

SEQ ID NO: 3058612 - RNA, 19 nt, Artificial Sequence
  Description of Artificial Sequence: Synthetic oligonucleotide
cugacacagaagaggaucu

SEQ ID NO: 3058613 - RNA, 19 nt, Artificial Sequence
  Description of Artificial Sequence: Synthetic oligonucleotide
uggcaguacggcggaaggc

SEQ ID NO: 3058614 - RNA, 19 nt, Artificial Sequence
  Description of Artificial Sequence: Synthetic oligonucleotide
cuuacagcuucuuguauuu

SEQ ID NO: 3058615 - RNA, 19 nt, Artificial Sequence
  Description of Artificial Sequence: Synthetic oligonucleotide
gcaguggcaaaacuguaaa

SEQ ID NO: 3058616 - RNA, 19 nt, Artificial Sequence
  Description of Artificial Sequence: Synthetic oligonucleotide
uuacagcuucuuguauuuc

SEQ ID NO: 3058617 - RNA, 19 nt, Artificial Sequence
  Description of Artificial Sequence: Synthetic oligonucleotide
ccucugacacagaagagga

SEQ ID NO: 3058618 - RNA, 19 nt, Artificial Sequence
  Description of Artificial Sequence: Synthetic oligonucleotide
gggaucuaaaagucucaca

SEQ ID NO: 3058619 - RNA, 19 nt, Artificial Sequence
  Description of Artificial Sequence: Synthetic oligonucleotide
gacuuucagugaaugcaaa

SEQ ID NO: 3058620 - RNA, 19 nt, Artificial Sequence
  Description of Artificial Sequence: Synthetic oligonucleotide
cucugcauuauagugacuu

SEQ ID NO: 3058621 - RNA, 19 nt, Artificial Sequence
  Description of Artificial Sequence: Synthetic oligonucleotide
gcgaaagacauguauccua

SEQ ID NO: 3058622 - RNA, 19 nt, Artificial Sequence
  Description of Artificial Sequence: Synthetic oligonucleotide
cacagcgaaagacauguau

SEQ ID NO: 3058623 - RNA, 19 nt, Artificial Sequence
  Description of Artificial Sequence: Synthetic oligonucleotide
gaagaggaucuuguagaua

SEQ ID NO: 3058624 - RNA, 19 nt, Artificial Sequence
  Description of Artificial Sequence: Synthetic oligonucleotide
caucaugcccucugacaca

SEQ ID NO: 3058625 - RNA, 19 nt, Artificial Sequence
  Description of Artificial Sequence: Synthetic oligonucleotide
auagugacuuucagugaau

SEQ ID NO: 3058626 - RNA, 19 nt, Artificial Sequence
  Description of Artificial Sequence: Synthetic oligonucleotide
gaguagggucugcuuggca

SEQ ID NO: 3058627 - RNA, 19 nt, Artificial Sequence
  Description of Artificial Sequence: Synthetic oligonucleotide
gucaggagucugcggcgag

SEQ ID NO: 3058628 - RNA, 19 nt, Artificial Sequence
  Description of Artificial Sequence: Synthetic oligonucleotide
ucacucucaggagucccau

SEQ ID NO: 3058629 - RNA, 19 nt, Artificial Sequence
  Description of Artificial Sequence: Synthetic oligonucleotide
gguaguuugcuaucucagu

SEQ ID NO: 3058630 - RNA, 19 nt, Artificial Sequence
  Description of Artificial Sequence: Synthetic oligonucleotide
uugcuaucucaguguuggu

SEQ ID NO: 3058631 - RNA, 19 nt, Artificial Sequence
  Description of Artificial Sequence: Synthetic oligonucleotide
ggcaguacggcggaaggca

SEQ ID NO: 3058632 - RNA, 19 nt, Artificial Sequence
  Description of Artificial Sequence: Synthetic oligonucleotide
ggggaucuaaaagucucac

SEQ ID NO: 3058633 - RNA, 19 nt, Artificial Sequence
  Description of Artificial Sequence: Synthetic oligonucleotide
uggcugagaguagggucug

SEQ ID NO: 3058634 - RNA, 19 nt, Artificial Sequence
  Description of Artificial Sequence: Synthetic oligonucleotide
gucucacaguuccuucaga

SEQ ID NO: 3058635 - RNA, 19 nt, Artificial Sequence
  Description of Artificial Sequence: Synthetic oligonucleotide
agggucugcuuggcaguac

SEQ ID NO: 3058636 - RNA, 19 nt, Artificial Sequence
  Description of Artificial Sequence: Synthetic oligonucleotide
ugacacagaagaggaucuu

SEQ ID NO: 3058637 - RNA, 19 nt, Artificial Sequence
  Description of Artificial Sequence: Synthetic oligonucleotide
ucacagcgaaagacaugua

SEQ ID NO: 3058638 - RNA, 19 nt, Artificial Sequence
  Description of Artificial Sequence: Synthetic oligonucleotide
cagucacucucaggagucc

SEQ ID NO: 3058639 - RNA, 19 nt, Artificial Sequence
  Description of Artificial Sequence: Synthetic oligonucleotide
guagggucugcuuggcagu

SEQ ID NO: 3058640 - RNA, 19 nt, Artificial Sequence
  Description of Artificial Sequence: Synthetic oligonucleotide
augcccucugacacagaag

SEQ ID NO: 3058641 - RNA, 19 nt, Artificial Sequence
  Description of Artificial Sequence: Synthetic oligonucleotide
guaaaguauccggcuuaca

SEQ ID NO: 3058642 - RNA, 19 nt, Artificial Sequence
  Description of Artificial Sequence: Synthetic oligonucleotide
gcaguggcugagaguaggg

SEQ ID NO: 3058643 - RNA, 19 nt, Artificial Sequence
  Description of Artificial Sequence: Synthetic oligonucleotide
ggucugcuuggcaguacgg

SEQ ID NO: 3058644 - RNA, 19 nt, Artificial Sequence
  Description of Artificial Sequence: Synthetic oligonucleotide
ccuaaagagcucugcauua

SEQ ID NO: 3058645 - RNA, 19 nt, Artificial Sequence
  Description of Artificial Sequence: Synthetic oligonucleotide
guuggucuggggaucuaaa

SEQ ID NO: 3058646 - RNA, 19 nt, Artificial Sequence
  Description of Artificial Sequence: Synthetic oligonucleotide
augucacugucaggagucu

SEQ ID NO: 3058647 - RNA, 19 nt, Artificial Sequence
  Description of Artificial Sequence: Synthetic oligonucleotide
gucacucucaggaguccca

SEQ ID NO: 3058648 - RNA, 19 nt, Artificial Sequence
  Description of Artificial Sequence: Synthetic oligonucleotide
cacucucaggagucccauc

SEQ ID NO: 3058649 - RNA, 19 nt, Artificial Sequence
  Description of Artificial Sequence: Synthetic oligonucleotide
gcgaggcaguggcugagag

SEQ ID NO: 3058650 - RNA, 19 nt, Artificial Sequence
  Description of Artificial Sequence: Synthetic oligonucleotide
cgaaagacauguauccuaa

SEQ ID NO: 3058651 - RNA, 19 nt, Artificial Sequence
  Description of Artificial Sequence: Synthetic oligonucleotide
ggcaguggcaaaacuguaa

SEQ ID NO: 3058652 - RNA, 19 nt, Artificial Sequence
  Description of Artificial Sequence: Synthetic oligonucleotide
uagggucugcuuggcagua

SEQ ID NO: 3058653 - RNA, 19 nt, Artificial Sequence
  Description of Artificial Sequence: Synthetic oligonucleotide
gucugcggcgaggcagugg

SEQ ID NO: 3058654 - RNA, 19 nt, Artificial Sequence
  Description of Artificial Sequence: Synthetic oligonucleotide
aggagucugcggcgaggca

SEQ ID NO: 3058655 - RNA, 19 nt, Artificial Sequence
  Description of Artificial Sequence: Synthetic oligonucleotide
gcuuacagcuucuuguauu

SEQ ID NO: 3058656 - RNA, 19 nt, Artificial Sequence
  Description of Artificial Sequence: Synthetic oligonucleotide
guacggcggaaggcagugg

SEQ ID NO: 3058657 - RNA, 19 nt, Artificial Sequence
  Description of Artificial Sequence: Synthetic oligonucleotide
cccaucaugcccucugaca

SEQ ID NO: 3058658 - RNA, 19 nt, Artificial Sequence
  Description of Artificial Sequence: Synthetic oligonucleotide
cuuguagauaggguaguuu

SEQ ID NO: 3058659 - RNA, 19 nt, Artificial Sequence
  Description of Artificial Sequence: Synthetic oligonucleotide
cuaaagagcucugcauuau

SEQ ID NO: 3058660 - RNA, 19 nt, Artificial Sequence
  Description of Artificial Sequence: Synthetic oligonucleotide
gcaguacggcggaaggcag

SEQ ID NO: 3058661 - RNA, 19 nt, Artificial Sequence
  Description of Artificial Sequence: Synthetic oligonucleotide
ccggcuuacagcuucuugu

SEQ ID NO: 3058662 - RNA, 19 nt, Artificial Sequence
  Description of Artificial Sequence: Synthetic oligonucleotide
ggaaggcaguggcaaaacu

SEQ ID NO: 3058663 - RNA, 19 nt, Artificial Sequence
  Description of Artificial Sequence: Synthetic oligonucleotide
acggcggaaggcaguggca

SEQ ID NO: 3058664 - RNA, 19 nt, Artificial Sequence
  Description of Artificial Sequence: Synthetic oligonucleotide
gagucugcggcgaggcagu

SEQ ID NO: 3058665 - RNA, 19 nt, Artificial Sequence
  Description of Artificial Sequence: Synthetic oligonucleotide
aggcaguggcugagaguag

SEQ ID NO: 3058666 - RNA, 19 nt, Artificial Sequence
  Description of Artificial Sequence: Synthetic oligonucleotide
aggcaguggcaaaacugua

SEQ ID NO: 3058667 - RNA, 19 nt, Artificial Sequence
  Description of Artificial Sequence: Synthetic oligonucleotide
aguauccggcuuacagcuu

SEQ ID NO: 3058668 - RNA, 19 nt, Artificial Sequence
  Description of Artificial Sequence: Synthetic oligonucleotide
cugagaguagggucugcuu

SEQ ID NO: 3058669 - RNA, 19 nt, Artificial Sequence
  Description of Artificial Sequence: Synthetic oligonucleotide
gcccucugacacagaagag

SEQ ID NO: 3058670 - RNA, 19 nt, Artificial Sequence
  Description of Artificial Sequence: Synthetic oligonucleotide
cucugacacagaagaggau

SEQ ID NO: 3058671 - RNA, 19 nt, Artificial Sequence
  Description of Artificial Sequence: Synthetic oligonucleotide
agucugcggcgaggcagug

SEQ ID NO: 3058672 - RNA, 19 nt, Artificial Sequence
  Description of Artificial Sequence: Synthetic oligonucleotide
caguacggcggaaggcagu

SEQ ID NO: 3058673 - RNA, 19 nt, Artificial Sequence
  Description of Artificial Sequence: Synthetic oligonucleotide
gcggaaggcaguggcaaaa

SEQ ID NO: 3058674 - RNA, 19 nt, Artificial Sequence
  Description of Artificial Sequence: Synthetic oligonucleotide
ggcuuacagcuucuuguau

SEQ ID NO: 3058675 - RNA, 19 nt, Artificial Sequence
  Description of Artificial Sequence: Synthetic oligonucleotide
gcugagaguagggucugcu

SEQ ID NO: 3058676 - RNA, 19 nt, Artificial Sequence
  Description of Artificial Sequence: Synthetic oligonucleotide
ggcggaaggcaguggcaaa

SEQ ID NO: 3058677 - RNA, 19 nt, Artificial Sequence
  Description of Artificial Sequence: Synthetic oligonucleotide
caguggcugagaguagggu

SEQ ID NO: 3058678 - RNA, 19 nt, Artificial Sequence
  Description of Artificial Sequence: Synthetic oligonucleotide
ggcugagaguagggucugc

SEQ ID NO: 3058679 - RNA, 19 nt, Artificial Sequence
  Description of Artificial Sequence: Synthetic oligonucleotide
auccggcuuacagcuucuu

SEQ ID NO: 3058680 - RNA, 19 nt, Artificial Sequence
  Description of Artificial Sequence: Synthetic oligonucleotide
gcggcgaggcaguggcuga

SEQ ID NO: 3058681 - RNA, 19 nt, Artificial Sequence
  Description of Artificial Sequence: Synthetic oligonucleotide
cggcuuacagcuucuugua

SEQ ID NO: 3058682 - RNA, 19 nt, Artificial Sequence
  Description of Artificial Sequence: Synthetic oligonucleotide
ggcgaggcaguggcugaga

SEQ ID NO: 3058683 - RNA, 19 nt, Artificial Sequence
  Description of Artificial Sequence: Synthetic oligonucleotide
guguuggucuggggaucua

SEQ ID NO: 3058684 - RNA, 19 nt, Artificial Sequence
  Description of Artificial Sequence: Synthetic oligonucleotide
ccuuuaccaucaucuucuu

SEQ ID NO: 3058685 - RNA, 19 nt, Artificial Sequence
  Description of Artificial Sequence: Synthetic oligonucleotide
cugcggcgaggcaguggcu

SEQ ID NO: 3058686 - RNA, 19 nt, Artificial Sequence
  Description of Artificial Sequence: Synthetic oligonucleotide
cgaggcaguggcugagagu

SEQ ID NO: 3058687 - RNA, 19 nt, Artificial Sequence
  Description of Artificial Sequence: Synthetic oligonucleotide
cggcgaggcaguggcugag

SEQ ID NO: 3058688 - RNA, 19 nt, Artificial Sequence
  Description of Artificial Sequence: Synthetic oligonucleotide
gcuuggcaguacggcggaa

SEQ ID NO: 3058689 - RNA, 19 nt, Artificial Sequence
  Description of Artificial Sequence: Synthetic oligonucleotide
gcucugcauuauagugacu

SEQ ID NO: 3058690 - RNA, 19 nt, Artificial Sequence
  Description of Artificial Sequence: Synthetic oligonucleotide
uugugaaugaggcucaagc

SEQ ID NO: 3058691 - RNA, 19 nt, Artificial Sequence
  Description of Artificial Sequence: Synthetic oligonucleotide
uggaaauuuguccucuggg

SEQ ID NO: 3058692 - RNA, 19 nt, Artificial Sequence
  Description of Artificial Sequence: Synthetic oligonucleotide
uugucgcugacccagagcc

SEQ ID NO: 3058693 - RNA, 19 nt, Artificial Sequence
  Description of Artificial Sequence: Synthetic oligonucleotide
auucucucgaggcaguggc

SEQ ID NO: 3058694 - RNA, 19 nt, Artificial Sequence
  Description of Artificial Sequence: Synthetic oligonucleotide
aaauuuguccucugggugu

SEQ ID NO: 3058695 - RNA, 19 nt, Artificial Sequence
  Description of Artificial Sequence: Synthetic oligonucleotide
uuggacgccaacccgaagg

SEQ ID NO: 3058696 - RNA, 19 nt, Artificial Sequence
  Description of Artificial Sequence: Synthetic oligonucleotide
aagguagcccaacaggauc

SEQ ID NO: 3058697 - RNA, 19 nt, Artificial Sequence
  Description of Artificial Sequence: Synthetic oligonucleotide
auuacugcagcucuuccag

SEQ ID NO: 3058698 - RNA, 19 nt, Artificial Sequence
  Description of Artificial Sequence: Synthetic oligonucleotide
gugaaugaggcucaagccg

SEQ ID NO: 3058699 - RNA, 19 nt, Artificial Sequence
  Description of Artificial Sequence: Synthetic oligonucleotide
gaaauuuguccucugggug

SEQ ID NO: 3058700 - RNA, 19 nt, Artificial Sequence
  Description of Artificial Sequence: Synthetic oligonucleotide
ugaaugaggcucaagccgc

SEQ ID NO: 3058701 - RNA, 19 nt, Artificial Sequence
  Description of Artificial Sequence: Synthetic oligonucleotide
uguaucaggcuccagggga

SEQ ID NO: 3058702 - RNA, 19 nt, Artificial Sequence
  Description of Artificial Sequence: Synthetic oligonucleotide
ugggauuuccagaugagga

SEQ ID NO: 3058703 - RNA, 19 nt, Artificial Sequence
  Description of Artificial Sequence: Synthetic oligonucleotide
ugugaaugaggcucaagcc

SEQ ID NO: 3058704 - RNA, 19 nt, Artificial Sequence
  Description of Artificial Sequence: Synthetic oligonucleotide
gaugaggagguguaucagg

SEQ ID NO: 3058705 - RNA, 19 nt, Artificial Sequence
  Description of Artificial Sequence: Synthetic oligonucleotide
agguguaucaggcuccagg

SEQ ID NO: 3058706 - RNA, 19 nt, Artificial Sequence
  Description of Artificial Sequence: Synthetic oligonucleotide
gaggcaguggcccauuuag

SEQ ID NO: 3058707 - RNA, 19 nt, Artificial Sequence
  Description of Artificial Sequence: Synthetic oligonucleotide
ugcuacuagccacuggugc

SEQ ID NO: 3058708 - RNA, 19 nt, Artificial Sequence
  Description of Artificial Sequence: Synthetic oligonucleotide
auggaaauuuguccucugg

SEQ ID NO: 3058709 - RNA, 19 nt, Artificial Sequence
  Description of Artificial Sequence: Synthetic oligonucleotide
uuugggauuuccagaugag

SEQ ID NO: 3058710 - RNA, 19 nt, Artificial Sequence
  Description of Artificial Sequence: Synthetic oligonucleotide
augaggagguguaucaggc

SEQ ID NO: 3058711 - RNA, 19 nt, Artificial Sequence
  Description of Artificial Sequence: Synthetic oligonucleotide
ucuccugucaccccuugug

SEQ ID NO: 3058712 - RNA, 19 nt, Artificial Sequence
  Description of Artificial Sequence: Synthetic oligonucleotide
aaggaagggaggggcagcc

SEQ ID NO: 3058713 - RNA, 19 nt, Artificial Sequence
  Description of Artificial Sequence: Synthetic oligonucleotide
gguguaucaggcuccaggg

SEQ ID NO: 3058714 - RNA, 19 nt, Artificial Sequence
  Description of Artificial Sequence: Synthetic oligonucleotide
uugggauuuccagaugagg

SEQ ID NO: 3058715 - RNA, 19 nt, Artificial Sequence
  Description of Artificial Sequence: Synthetic oligonucleotide
aacccgaaggaagggaggg

SEQ ID NO: 3058716 - RNA, 19 nt, Artificial Sequence
  Description of Artificial Sequence: Synthetic oligonucleotide
guuugggauuuccagauga

SEQ ID NO: 3058717 - RNA, 19 nt, Artificial Sequence
  Description of Artificial Sequence: Synthetic oligonucleotide
uuuagcccagugcuacuag

SEQ ID NO: 3058718 - RNA, 19 nt, Artificial Sequence
  Description of Artificial Sequence: Synthetic oligonucleotide
ugcuccauggaaauuuguc

SEQ ID NO: 3058719 - RNA, 19 nt, Artificial Sequence
  Description of Artificial Sequence: Synthetic oligonucleotide
caccccuugugaaugaggc

SEQ ID NO: 3058720 - RNA, 19 nt, Artificial Sequence
  Description of Artificial Sequence: Synthetic oligonucleotide
caaagguagcccaacagga

SEQ ID NO: 3058721 - RNA, 19 nt, Artificial Sequence
  Description of Artificial Sequence: Synthetic oligonucleotide
acuggugccccaaagguag

SEQ ID NO: 3058722 - RNA, 19 nt, Artificial Sequence
  Description of Artificial Sequence: Synthetic oligonucleotide
gggacaauggcccuuggcc

SEQ ID NO: 3058723 - RNA, 19 nt, Artificial Sequence
  Description of Artificial Sequence: Synthetic oligonucleotide
uuuugucgcugacccagag

SEQ ID NO: 3058724 - RNA, 19 nt, Artificial Sequence
  Description of Artificial Sequence: Synthetic oligonucleotide
ucaccccuugugaaugagg

SEQ ID NO: 3058725 - RNA, 19 nt, Artificial Sequence
  Description of Artificial Sequence: Synthetic oligonucleotide
uuugucgcugacccagagc

SEQ ID NO: 3058726 - RNA, 19 nt, Artificial Sequence
  Description of Artificial Sequence: Synthetic oligonucleotide
uagcccagugcuacuagcc

SEQ ID NO: 3058727 - RNA, 19 nt, Artificial Sequence
  Description of Artificial Sequence: Synthetic oligonucleotide
gacgccaacccgaaggaag

SEQ ID NO: 3058728 - RNA, 19 nt, Artificial Sequence
  Description of Artificial Sequence: Synthetic oligonucleotide
ugaggcucaagccgcgacc

SEQ ID NO: 3058729 - RNA, 19 nt, Artificial Sequence
  Description of Artificial Sequence: Synthetic oligonucleotide
gcuccauggaaauuugucc

SEQ ID NO: 3058730 - RNA, 19 nt, Artificial Sequence
  Description of Artificial Sequence: Synthetic oligonucleotide
uuuccagaugaggaggugu

SEQ ID NO: 3058731 - RNA, 19 nt, Artificial Sequence
  Description of Artificial Sequence: Synthetic oligonucleotide
uuagcccagugcuacuagc

SEQ ID NO: 3058732 - RNA, 19 nt, Artificial Sequence
  Description of Artificial Sequence: Synthetic oligonucleotide
ccaaagguagcccaacagg

SEQ ID NO: 3058733 - RNA, 19 nt, Artificial Sequence
  Description of Artificial Sequence: Synthetic oligonucleotide
augaggcucaagccgcgac

SEQ ID NO: 3058734 - RNA, 19 nt, Artificial Sequence
  Description of Artificial Sequence: Synthetic oligonucleotide
uguuugggauuuccagaug

SEQ ID NO: 3058735 - RNA, 19 nt, Artificial Sequence
  Description of Artificial Sequence: Synthetic oligonucleotide
gggauuuccagaugaggag

SEQ ID NO: 3058736 - RNA, 19 nt, Artificial Sequence
  Description of Artificial Sequence: Synthetic oligonucleotide
gacaauggcccuuggccac

SEQ ID NO: 3058737 - RNA, 19 nt, Artificial Sequence
  Description of Artificial Sequence: Synthetic oligonucleotide
ucucucgaggcaguggccc

SEQ ID NO: 3058738 - RNA, 19 nt, Artificial Sequence
  Description of Artificial Sequence: Synthetic oligonucleotide
uccauggaaauuuguccuc

SEQ ID NO: 3058739 - RNA, 19 nt, Artificial Sequence
  Description of Artificial Sequence: Synthetic oligonucleotide
ggcaguggcccauuuagcc

SEQ ID NO: 3058740 - RNA, 19 nt, Artificial Sequence
  Description of Artificial Sequence: Synthetic oligonucleotide
uggacgccaacccgaagga

SEQ ID NO: 3058741 - RNA, 19 nt, Artificial Sequence
  Description of Artificial Sequence: Synthetic oligonucleotide
auggcccuuggccaccugg

SEQ ID NO: 3058742 - RNA, 19 nt, Artificial Sequence
  Description of Artificial Sequence: Synthetic oligonucleotide
cuucucucuccugucaccc

SEQ ID NO: 3058743 - RNA, 19 nt, Artificial Sequence
  Description of Artificial Sequence: Synthetic oligonucleotide
guguaucaggcuccagggg

SEQ ID NO: 3058744 - RNA, 19 nt, Artificial Sequence
  Description of Artificial Sequence: Synthetic oligonucleotide
uccucuggguguuugggau

SEQ ID NO: 3058745 - RNA, 19 nt, Artificial Sequence
  Description of Artificial Sequence: Synthetic oligonucleotide
cagaugaggagguguauca

SEQ ID NO: 3058746 - RNA, 19 nt, Artificial Sequence
  Description of Artificial Sequence: Synthetic oligonucleotide
uuccagaugaggaggugua

SEQ ID NO: 3058747 - RNA, 19 nt, Artificial Sequence
  Description of Artificial Sequence: Synthetic oligonucleotide
uuguccucuggguguuugg

SEQ ID NO: 3058748 - RNA, 19 nt, Artificial Sequence
  Description of Artificial Sequence: Synthetic oligonucleotide
ggguguuugggauuuccag

SEQ ID NO: 3058749 - RNA, 19 nt, Artificial Sequence
  Description of Artificial Sequence: Synthetic oligonucleotide
gcuacuagccacuggugcc

SEQ ID NO: 3058750 - RNA, 19 nt, Artificial Sequence
  Description of Artificial Sequence: Synthetic oligonucleotide
cauuacugcagcucuucca

SEQ ID NO: 3058751 - RNA, 19 nt, Artificial Sequence
  Description of Artificial Sequence: Synthetic oligonucleotide
ugaggagguguaucaggcu

SEQ ID NO: 3058752 - RNA, 19 nt, Artificial Sequence
  Description of Artificial Sequence: Synthetic oligonucleotide
ugucccauuacugcagcuc

SEQ ID NO: 3058753 - RNA, 19 nt, Artificial Sequence
  Description of Artificial Sequence: Synthetic oligonucleotide
gguguuugggauuuccaga

SEQ ID NO: 3058754 - RNA, 19 nt, Artificial Sequence
  Description of Artificial Sequence: Synthetic oligonucleotide
gaaugaggcucaagccgcg

SEQ ID NO: 3058755 - RNA, 19 nt, Artificial Sequence
  Description of Artificial Sequence: Synthetic oligonucleotide
uuuguccucuggguguuug

SEQ ID NO: 3058756 - RNA, 19 nt, Artificial Sequence
  Description of Artificial Sequence: Synthetic oligonucleotide
agaugaggagguguaucag

SEQ ID NO: 3058757 - RNA, 19 nt, Artificial Sequence
  Description of Artificial Sequence: Synthetic oligonucleotide
cauggaaauuuguccucug

SEQ ID NO: 3058758 - RNA, 19 nt, Artificial Sequence
  Description of Artificial Sequence: Synthetic oligonucleotide
cuacuagccacuggugccc

SEQ ID NO: 3058759 - RNA, 19 nt, Artificial Sequence
  Description of Artificial Sequence: Synthetic oligonucleotide
uggcccauuuagcccagug

SEQ ID NO: 3058760 - RNA, 19 nt, Artificial Sequence
  Description of Artificial Sequence: Synthetic oligonucleotide
uucucucgaggcaguggcc

SEQ ID NO: 3058761 - RNA, 19 nt, Artificial Sequence
  Description of Artificial Sequence: Synthetic oligonucleotide
acaauggcccuuggccacc

SEQ ID NO: 3058762 - RNA, 19 nt, Artificial Sequence
  Description of Artificial Sequence: Synthetic oligonucleotide
cauucucucgaggcagugg

SEQ ID NO: 3058763 - RNA, 19 nt, Artificial Sequence
  Description of Artificial Sequence: Synthetic oligonucleotide
gccaccuggcccuuggacg

SEQ ID NO: 3058764 - RNA, 19 nt, Artificial Sequence
  Description of Artificial Sequence: Synthetic oligonucleotide
cuuccaggggcccauucuc

SEQ ID NO: 3058765 - RNA, 19 nt, Artificial Sequence
  Description of Artificial Sequence: Synthetic oligonucleotide
aauuuguccucuggguguu

SEQ ID NO: 3058766 - RNA, 19 nt, Artificial Sequence
  Description of Artificial Sequence: Synthetic oligonucleotide
aagccgcgaccuccccucc

SEQ ID NO: 3058767 - RNA, 19 nt, Artificial Sequence
  Description of Artificial Sequence: Synthetic oligonucleotide
uccugucaccccuugugaa

SEQ ID NO: 3058768 - RNA, 19 nt, Artificial Sequence
  Description of Artificial Sequence: Synthetic oligonucleotide
cuccauggaaauuuguccu

SEQ ID NO: 3058769 - RNA, 19 nt, Artificial Sequence
  Description of Artificial Sequence: Synthetic oligonucleotide
ucaagccgcgaccuccccu

SEQ ID NO: 3058770 - RNA, 19 nt, Artificial Sequence
  Description of Artificial Sequence: Synthetic oligonucleotide
uggcccuuggccaccuggc

SEQ ID NO: 3058771 - RNA, 19 nt, Artificial Sequence
  Description of Artificial Sequence: Synthetic oligonucleotide
acgccaacccgaaggaagg

SEQ ID NO: 3058772 - RNA, 19 nt, Artificial Sequence
  Description of Artificial Sequence: Synthetic oligonucleotide
cuccccuccagccuguguc

SEQ ID NO: 3058773 - RNA, 19 nt, Artificial Sequence
  Description of Artificial Sequence: Synthetic oligonucleotide
uucucucuccugucacccc

SEQ ID NO: 3058774 - RNA, 19 nt, Artificial Sequence
  Description of Artificial Sequence: Synthetic oligonucleotide
ggaaauuuguccucugggu

SEQ ID NO: 3058775 - RNA, 19 nt, Artificial Sequence
  Description of Artificial Sequence: Synthetic oligonucleotide
gccacuggugccccaaagg

SEQ ID NO: 3058776 - RNA, 19 nt, Artificial Sequence
  Description of Artificial Sequence: Synthetic oligonucleotide
cauggcugcuccauggaaa

SEQ ID NO: 3058777 - RNA, 19 nt, Artificial Sequence
  Description of Artificial Sequence: Synthetic oligonucleotide
caagccgcgaccuccccuc

SEQ ID NO: 3058778 - RNA, 19 nt, Artificial Sequence
  Description of Artificial Sequence: Synthetic oligonucleotide
uggcccuuggacgccaacc

SEQ ID NO: 3058779 - RNA, 19 nt, Artificial Sequence
  Description of Artificial Sequence: Synthetic oligonucleotide
caguggcccauuuagccca

SEQ ID NO: 3058780 - RNA, 19 nt, Artificial Sequence
  Description of Artificial Sequence: Synthetic oligonucleotide
cugucaccccuugugaaug

SEQ ID NO: 3058781 - RNA, 19 nt, Artificial Sequence
  Description of Artificial Sequence: Synthetic oligonucleotide
agguagcccaacaggaucu

SEQ ID NO: 3058782 - RNA, 19 nt, Artificial Sequence
  Description of Artificial Sequence: Synthetic oligonucleotide
aggcaguggcccauuuagc

SEQ ID NO: 3058783 - RNA, 19 nt, Artificial Sequence
  Description of Artificial Sequence: Synthetic oligonucleotide
gccugugucccauuacugc

SEQ ID NO: 3058784 - RNA, 19 nt, Artificial Sequence
  Description of Artificial Sequence: Synthetic oligonucleotide
ugucaccccuugugaauga

SEQ ID NO: 3058785 - RNA, 19 nt, Artificial Sequence
  Description of Artificial Sequence: Synthetic oligonucleotide
cuugugaaugaggcucaag

SEQ ID NO: 3058786 - RNA, 19 nt, Artificial Sequence
  Description of Artificial Sequence: Synthetic oligonucleotide
ggacaauggcccuuggcca

SEQ ID NO: 3058787 - RNA, 19 nt, Artificial Sequence
  Description of Artificial Sequence: Synthetic oligonucleotide
aaugaggcucaagccgcga

SEQ ID NO: 3058788 - RNA, 19 nt, Artificial Sequence
  Description of Artificial Sequence: Synthetic oligonucleotide
gcaguggcccauuuagccc

SEQ ID NO: 3058789 - RNA, 19 nt, Artificial Sequence
  Description of Artificial Sequence: Synthetic oligonucleotide
guguuugggauuuccagau

SEQ ID NO: 3058790 - RNA, 19 nt, Artificial Sequence
  Description of Artificial Sequence: Synthetic oligonucleotide
ccaacccgaaggaagggag

SEQ ID NO: 3058791 - RNA, 19 nt, Artificial Sequence
  Description of Artificial Sequence: Synthetic oligonucleotide
gggcccauucucucgaggc

SEQ ID NO: 3058792 - RNA, 19 nt, Artificial Sequence
  Description of Artificial Sequence: Synthetic oligonucleotide
uccccuccagccugugucc

SEQ ID NO: 3058793 - RNA, 19 nt, Artificial Sequence
  Description of Artificial Sequence: Synthetic oligonucleotide
ugucgcugacccagagcca

SEQ ID NO: 3058794 - RNA, 19 nt, Artificial Sequence
  Description of Artificial Sequence: Synthetic oligonucleotide
ggcccauuuagcccagugc

SEQ ID NO: 3058795 - RNA, 19 nt, Artificial Sequence
  Description of Artificial Sequence: Synthetic oligonucleotide
uccagccugugucccauua

SEQ ID NO: 3058796 - RNA, 19 nt, Artificial Sequence
  Description of Artificial Sequence: Synthetic oligonucleotide
ggcuccaggggacaauggc

SEQ ID NO: 3058797 - RNA, 19 nt, Artificial Sequence
  Description of Artificial Sequence: Synthetic oligonucleotide
agccuucucucuccuguca

SEQ ID NO: 3058798 - RNA, 19 nt, Artificial Sequence
  Description of Artificial Sequence: Synthetic oligonucleotide
auuuagcccagugcuacua

SEQ ID NO: 3058799 - RNA, 19 nt, Artificial Sequence
  Description of Artificial Sequence: Synthetic oligonucleotide
gauuuccagaugaggaggu

SEQ ID NO: 3058800 - RNA, 19 nt, Artificial Sequence
  Description of Artificial Sequence: Synthetic oligonucleotide
cccaaagguagcccaacag

SEQ ID NO: 3058801 - RNA, 19 nt, Artificial Sequence
  Description of Artificial Sequence: Synthetic oligonucleotide
uccaggggcccauucucuc

SEQ ID NO: 3058802 - RNA, 19 nt, Artificial Sequence
  Description of Artificial Sequence: Synthetic oligonucleotide
cagugcuacuagccacugg

SEQ ID NO: 3058803 - RNA, 19 nt, Artificial Sequence
  Description of Artificial Sequence: Synthetic oligonucleotide
uggugccccaaagguagcc

SEQ ID NO: 3058804 - RNA, 19 nt, Artificial Sequence
  Description of Artificial Sequence: Synthetic oligonucleotide
aagggaggggcagccuucu

SEQ ID NO: 3058805 - RNA, 19 nt, Artificial Sequence
  Description of Artificial Sequence: Synthetic oligonucleotide
ugccccaaagguagcccaa

SEQ ID NO: 3058806 - RNA, 19 nt, Artificial Sequence
  Description of Artificial Sequence: Synthetic oligonucleotide
ggcccuuggacgccaaccc

SEQ ID NO: 3058807 - RNA, 19 nt, Artificial Sequence
  Description of Artificial Sequence: Synthetic oligonucleotide
gucccauuacugcagcucu

SEQ ID NO: 3058808 - RNA, 19 nt, Artificial Sequence
  Description of Artificial Sequence: Synthetic oligonucleotide
uccaggggacaauggcccu

SEQ ID NO: 3058809 - RNA, 19 nt, Artificial Sequence
  Description of Artificial Sequence: Synthetic oligonucleotide
gagccauggcugcuccaug

SEQ ID NO: 3058810 - RNA, 19 nt, Artificial Sequence
  Description of Artificial Sequence: Synthetic oligonucleotide
agccugugucccauuacug

SEQ ID NO: 3058811 - RNA, 19 nt, Artificial Sequence
  Description of Artificial Sequence: Synthetic oligonucleotide
cuuggacgccaacccgaag

SEQ ID NO: 3058812 - RNA, 19 nt, Artificial Sequence
  Description of Artificial Sequence: Synthetic oligonucleotide
gaagggaggggcagccuuc

SEQ ID NO: 3058813 - RNA, 19 nt, Artificial Sequence
  Description of Artificial Sequence: Synthetic oligonucleotide
gcuccaggggacaauggcc

SEQ ID NO: 3058814 - RNA, 19 nt, Artificial Sequence
  Description of Artificial Sequence: Synthetic oligonucleotide
gcccauuuagcccagugcu

SEQ ID NO: 3058815 - RNA, 19 nt, Artificial Sequence
  Description of Artificial Sequence: Synthetic oligonucleotide
caggcuccaggggacaaug

SEQ ID NO: 3058816 - RNA, 19 nt, Artificial Sequence
  Description of Artificial Sequence: Synthetic oligonucleotide
ccaccuggcccuuggacgc

SEQ ID NO: 3058817 - RNA, 19 nt, Artificial Sequence
  Description of Artificial Sequence: Synthetic oligonucleotide
uacuagccacuggugcccc

SEQ ID NO: 3058818 - RNA, 19 nt, Artificial Sequence
  Description of Artificial Sequence: Synthetic oligonucleotide
gugccccaaagguagccca

SEQ ID NO: 3058819 - RNA, 19 nt, Artificial Sequence
  Description of Artificial Sequence: Synthetic oligonucleotide
uccagaugaggagguguau

SEQ ID NO: 3058820 - RNA, 19 nt, Artificial Sequence
  Description of Artificial Sequence: Synthetic oligonucleotide
cuccugucaccccuuguga

SEQ ID NO: 3058821 - RNA, 19 nt, Artificial Sequence
  Description of Artificial Sequence: Synthetic oligonucleotide
ucccauuacugcagcucuu

SEQ ID NO: 3058822 - RNA, 19 nt, Artificial Sequence
  Description of Artificial Sequence: Synthetic oligonucleotide
guccucuggguguuuggga

SEQ ID NO: 3058823 - RNA, 19 nt, Artificial Sequence
  Description of Artificial Sequence: Synthetic oligonucleotide
ggaggggcagccuucucuc

SEQ ID NO: 3058824 - RNA, 19 nt, Artificial Sequence
  Description of Artificial Sequence: Synthetic oligonucleotide
aggggacaauggcccuugg

SEQ ID NO: 3058825 - RNA, 19 nt, Artificial Sequence
  Description of Artificial Sequence: Synthetic oligonucleotide
gucaccccuugugaaugag

SEQ ID NO: 3058826 - RNA, 19 nt, Artificial Sequence
  Description of Artificial Sequence: Synthetic oligonucleotide
ggcucaagccgcgaccucc

SEQ ID NO: 3058827 - RNA, 19 nt, Artificial Sequence
  Description of Artificial Sequence: Synthetic oligonucleotide
cuggugccccaaagguagc

SEQ ID NO: 3058828 - RNA, 19 nt, Artificial Sequence
  Description of Artificial Sequence: Synthetic oligonucleotide
ccuucucucuccugucacc

SEQ ID NO: 3058829 - RNA, 19 nt, Artificial Sequence
  Description of Artificial Sequence: Synthetic oligonucleotide
ccauuacugcagcucuucc

SEQ ID NO: 3058830 - RNA, 19 nt, Artificial Sequence
  Description of Artificial Sequence: Synthetic oligonucleotide
aggcucaagccgcgaccuc

SEQ ID NO: 3058831 - RNA, 19 nt, Artificial Sequence
  Description of Artificial Sequence: Synthetic oligonucleotide
ggggacaauggcccuuggc

SEQ ID NO: 3058832 - RNA, 19 nt, Artificial Sequence
  Description of Artificial Sequence: Synthetic oligonucleotide
gugcuacuagccacuggug

SEQ ID NO: 3058833 - RNA, 19 nt, Artificial Sequence
  Description of Artificial Sequence: Synthetic oligonucleotide
cccgaaggaagggaggggc

SEQ ID NO: 3058834 - RNA, 19 nt, Artificial Sequence
  Description of Artificial Sequence: Synthetic oligonucleotide
gcccuuggacgccaacccg

SEQ ID NO: 3058835 - RNA, 19 nt, Artificial Sequence
  Description of Artificial Sequence: Synthetic oligonucleotide
caggggacaauggcccuug

SEQ ID NO: 3058836 - RNA, 19 nt, Artificial Sequence
  Description of Artificial Sequence: Synthetic oligonucleotide
ccaggggcccauucucucg

SEQ ID NO: 3058837 - RNA, 19 nt, Artificial Sequence
  Description of Artificial Sequence: Synthetic oligonucleotide
cagccuucucucuccuguc

SEQ ID NO: 3058838 - RNA, 19 nt, Artificial Sequence
  Description of Artificial Sequence: Synthetic oligonucleotide
aggggcccauucucucgag

SEQ ID NO: 3058839 - RNA, 19 nt, Artificial Sequence
  Description of Artificial Sequence: Synthetic oligonucleotide
cucaagccgcgaccucccc

SEQ ID NO: 3058840 - RNA, 19 nt, Artificial Sequence
  Description of Artificial Sequence: Synthetic oligonucleotide
ggggcccauucucucgagg

SEQ ID NO: 3058841 - RNA, 19 nt, Artificial Sequence
  Description of Artificial Sequence: Synthetic oligonucleotide
cacuggugccccaaaggua

SEQ ID NO: 3058842 - RNA, 19 nt, Artificial Sequence
  Description of Artificial Sequence: Synthetic oligonucleotide
gcccuuggccaccuggccc

SEQ ID NO: 3058843 - RNA, 19 nt, Artificial Sequence
  Description of Artificial Sequence: Synthetic oligonucleotide
ggugccccaaagguagccc

SEQ ID NO: 3058844 - RNA, 19 nt, Artificial Sequence
  Description of Artificial Sequence: Synthetic oligonucleotide
gaggcucaagccgcgaccu

SEQ ID NO: 3058845 - RNA, 19 nt, Artificial Sequence
  Description of Artificial Sequence: Synthetic oligonucleotide
aggcuccaggggacaaugg

SEQ ID NO: 3058846 - RNA, 19 nt, Artificial Sequence
  Description of Artificial Sequence: Synthetic oligonucleotide
gagguguaucaggcuccag

SEQ ID NO: 3058847 - RNA, 19 nt, Artificial Sequence
  Description of Artificial Sequence: Synthetic oligonucleotide
ccagaugaggagguguauc

SEQ ID NO: 3058848 - RNA, 19 nt, Artificial Sequence
  Description of Artificial Sequence: Synthetic oligonucleotide
gccuucucucuccugucac

SEQ ID NO: 3058849 - RNA, 19 nt, Artificial Sequence
  Description of Artificial Sequence: Synthetic oligonucleotide
acuagccacuggugcccca

SEQ ID NO: 3058850 - RNA, 19 nt, Artificial Sequence
  Description of Artificial Sequence: Synthetic oligonucleotide
ucaggcuccaggggacaau

SEQ ID NO: 3058851 - RNA, 19 nt, Artificial Sequence
  Description of Artificial Sequence: Synthetic oligonucleotide
cagccugugucccauuacu

SEQ ID NO: 3058852 - RNA, 19 nt, Artificial Sequence
  Description of Artificial Sequence: Synthetic oligonucleotide
gcugcuccauggaaauuug

SEQ ID NO: 3058853 - RNA, 19 nt, Artificial Sequence
  Description of Artificial Sequence: Synthetic oligonucleotide
uagccacuggugccccaaa

SEQ ID NO: 3058854 - RNA, 19 nt, Artificial Sequence
  Description of Artificial Sequence: Synthetic oligonucleotide
ucucgaggcaguggcccau

SEQ ID NO: 3058855 - RNA, 19 nt, Artificial Sequence
  Description of Artificial Sequence: Synthetic oligonucleotide
ucgaggcaguggcccauuu

SEQ ID NO: 3058856 - RNA, 19 nt, Artificial Sequence
  Description of Artificial Sequence: Synthetic oligonucleotide
cucucgaggcaguggccca

SEQ ID NO: 3058857 - RNA, 19 nt, Artificial Sequence
  Description of Artificial Sequence: Synthetic oligonucleotide
caggggcccauucucucga

SEQ ID NO: 3058858 - RNA, 19 nt, Artificial Sequence
  Description of Artificial Sequence: Synthetic oligonucleotide
uggccaccuggcccuugga

SEQ ID NO: 3058859 - RNA, 19 nt, Artificial Sequence
  Description of Artificial Sequence: Synthetic oligonucleotide
ggcccauucucucgaggca

SEQ ID NO: 3058860 - RNA, 19 nt, Artificial Sequence
  Description of Artificial Sequence: Synthetic oligonucleotide
ggccaccuggcccuuggac

SEQ ID NO: 3058861 - RNA, 19 nt, Artificial Sequence
  Description of Artificial Sequence: Synthetic oligonucleotide
aguggcccauuuagcccag

SEQ ID NO: 3058862 - RNA, 19 nt, Artificial Sequence
  Description of Artificial Sequence: Synthetic oligonucleotide
cauuuagcccagugcuacu

SEQ ID NO: 3058863 - RNA, 19 nt, Artificial Sequence
  Description of Artificial Sequence: Synthetic oligonucleotide
cccauuacugcagcucuuc

SEQ ID NO: 3058864 - RNA, 19 nt, Artificial Sequence
  Description of Artificial Sequence: Synthetic oligonucleotide
ggcccuuggccaccuggcc

SEQ ID NO: 3058865 - RNA, 19 nt, Artificial Sequence
  Description of Artificial Sequence: Synthetic oligonucleotide
gccgcgaccuccccuccag

SEQ ID NO: 3058866 - RNA, 19 nt, Artificial Sequence
  Description of Artificial Sequence: Synthetic oligonucleotide
gucgcugacccagagccau

SEQ ID NO: 3058867 - RNA, 19 nt, Artificial Sequence
  Description of Artificial Sequence: Synthetic oligonucleotide
ccagccugugucccauuac

SEQ ID NO: 3058868 - RNA, 19 nt, Artificial Sequence
  Description of Artificial Sequence: Synthetic oligonucleotide
gggaggggcagccuucucu

SEQ ID NO: 3058869 - RNA, 19 nt, Artificial Sequence
  Description of Artificial Sequence: Synthetic oligonucleotide
cccuuggacgccaacccga

SEQ ID NO: 3058870 - RNA, 19 nt, Artificial Sequence
  Description of Artificial Sequence: Synthetic oligonucleotide
cuagccacuggugccccaa

SEQ ID NO: 3058871 - RNA, 19 nt, Artificial Sequence
  Description of Artificial Sequence: Synthetic oligonucleotide
gcucaagccgcgaccuccc

SEQ ID NO: 3058872 - RNA, 19 nt, Artificial Sequence
  Description of Artificial Sequence: Synthetic oligonucleotide
agccgcgaccuccccucca

SEQ ID NO: 3058873 - RNA, 19 nt, Artificial Sequence
  Description of Artificial Sequence: Synthetic oligonucleotide
gcugacccagagccauggc

SEQ ID NO: 3058874 - RNA, 19 nt, Artificial Sequence
  Description of Artificial Sequence: Synthetic oligonucleotide
ggagguguaucaggcucca

SEQ ID NO: 3058875 - RNA, 19 nt, Artificial Sequence
  Description of Artificial Sequence: Synthetic oligonucleotide
cuggcccuuggacgccaac

SEQ ID NO: 3058876 - RNA, 19 nt, Artificial Sequence
  Description of Artificial Sequence: Synthetic oligonucleotide
cccuugugaaugaggcuca

SEQ ID NO: 3058877 - RNA, 19 nt, Artificial Sequence
  Description of Artificial Sequence: Synthetic oligonucleotide
cgcgaccuccccuccagcc

SEQ ID NO: 3058878 - RNA, 19 nt, Artificial Sequence
  Description of Artificial Sequence: Synthetic oligonucleotide
gugucccauuacugcagcu

SEQ ID NO: 3058879 - RNA, 19 nt, Artificial Sequence
  Description of Artificial Sequence: Synthetic oligonucleotide
cugcuccauggaaauuugu

SEQ ID NO: 3058880 - RNA, 19 nt, Artificial Sequence
  Description of Artificial Sequence: Synthetic oligonucleotide
ggcugcuccauggaaauuu

SEQ ID NO: 3058881 - RNA, 19 nt, Artificial Sequence
  Description of Artificial Sequence: Synthetic oligonucleotide
gccauggcugcuccaugga

SEQ ID NO: 3058882 - RNA, 19 nt, Artificial Sequence
  Description of Artificial Sequence: Synthetic oligonucleotide
gccaacccgaaggaaggga

SEQ ID NO: 3058883 - RNA, 19 nt, Artificial Sequence
  Description of Artificial Sequence: Synthetic oligonucleotide
gaggggcagccuucucucu

SEQ ID NO: 3058884 - RNA, 19 nt, Artificial Sequence
  Description of Artificial Sequence: Synthetic oligonucleotide
gguagcccaacaggaucuc

SEQ ID NO: 3058885 - RNA, 19 nt, Artificial Sequence
  Description of Artificial Sequence: Synthetic oligonucleotide
caccuggcccuuggacgcc

SEQ ID NO: 3058886 - RNA, 19 nt, Artificial Sequence
  Description of Artificial Sequence: Synthetic oligonucleotide
ccacuggugccccaaaggu

SEQ ID NO: 3058887 - RNA, 19 nt, Artificial Sequence
  Description of Artificial Sequence: Synthetic oligonucleotide
uggcugcuccauggaaauu

SEQ ID NO: 3058888 - RNA, 19 nt, Artificial Sequence
  Description of Artificial Sequence: Synthetic oligonucleotide
cgcugacccagagccaugg

SEQ ID NO: 3058889 - RNA, 19 nt, Artificial Sequence
  Description of Artificial Sequence: Synthetic oligonucleotide
auuuguccucuggguguuu

SEQ ID NO: 3058890 - RNA, 19 nt, Artificial Sequence
  Description of Artificial Sequence: Synthetic oligonucleotide
cuuggccaccuggcccuug

SEQ ID NO: 3058891 - RNA, 19 nt, Artificial Sequence
  Description of Artificial Sequence: Synthetic oligonucleotide
accuggcccuuggacgcca

SEQ ID NO: 3058892 - RNA, 19 nt, Artificial Sequence
  Description of Artificial Sequence: Synthetic oligonucleotide
ccgaaggaagggaggggca

SEQ ID NO: 3058893 - RNA, 19 nt, Artificial Sequence
  Description of Artificial Sequence: Synthetic oligonucleotide
cccauuuagcccagugcua

SEQ ID NO: 3058894 - RNA, 19 nt, Artificial Sequence
  Description of Artificial Sequence: Synthetic oligonucleotide
ccagugcuacuagccacug

SEQ ID NO: 3058895 - RNA, 19 nt, Artificial Sequence
  Description of Artificial Sequence: Synthetic oligonucleotide
cucuggguguuugggauuu

SEQ ID NO: 3058896 - RNA, 19 nt, Artificial Sequence
  Description of Artificial Sequence: Synthetic oligonucleotide
cgaccuccccuccagccug

SEQ ID NO: 3058897 - RNA, 19 nt, Artificial Sequence
  Description of Artificial Sequence: Synthetic oligonucleotide
gccccaaagguagcccaac

SEQ ID NO: 3058898 - RNA, 19 nt, Artificial Sequence
  Description of Artificial Sequence: Synthetic oligonucleotide
ccccaaagguagcccaaca

SEQ ID NO: 3058899 - RNA, 19 nt, Artificial Sequence
  Description of Artificial Sequence: Synthetic oligonucleotide
ccuuggacgccaacccgaa

SEQ ID NO: 3058900 - RNA, 19 nt, Artificial Sequence
  Description of Artificial Sequence: Synthetic oligonucleotide
ccauggaaauuuguccucu

SEQ ID NO: 3058901 - RNA, 19 nt, Artificial Sequence
  Description of Artificial Sequence: Synthetic oligonucleotide
ccauggcugcuccauggaa

SEQ ID NO: 3058902 - RNA, 19 nt, Artificial Sequence
  Description of Artificial Sequence: Synthetic oligonucleotide
cccagugcuacuagccacu

SEQ ID NO: 3058903 - RNA, 19 nt, Artificial Sequence
  Description of Artificial Sequence: Synthetic oligonucleotide
cucuccugucaccccuugu

SEQ ID NO: 3058904 - RNA, 19 nt, Artificial Sequence
  Description of Artificial Sequence: Synthetic oligonucleotide
cagcucuuccaggggccca

SEQ ID NO: 3058905 - RNA, 19 nt, Artificial Sequence
  Description of Artificial Sequence: Synthetic oligonucleotide
ccugucaccccuugugaau

SEQ ID NO: 3058906 - RNA, 19 nt, Artificial Sequence
  Description of Artificial Sequence: Synthetic oligonucleotide
accuccccuccagccugug

SEQ ID NO: 3058907 - RNA, 19 nt, Artificial Sequence
  Description of Artificial Sequence: Synthetic oligonucleotide
gcgaccuccccuccagccu

SEQ ID NO: 3058908 - RNA, 19 nt, Artificial Sequence
  Description of Artificial Sequence: Synthetic oligonucleotide
cgccaacccgaaggaaggg

SEQ ID NO: 3058909 - RNA, 19 nt, Artificial Sequence
  Description of Artificial Sequence: Synthetic oligonucleotide
ggacgccaacccgaaggaa

SEQ ID NO: 3058910 - RNA, 19 nt, Artificial Sequence
  Description of Artificial Sequence: Synthetic oligonucleotide
ccccuccagccuguguccc

SEQ ID NO: 3058911 - RNA, 19 nt, Artificial Sequence
  Description of Artificial Sequence: Synthetic oligonucleotide
cucucuccugucaccccuu

SEQ ID NO: 3058912 - RNA, 19 nt, Artificial Sequence
  Description of Artificial Sequence: Synthetic oligonucleotide
ccgcgaccuccccuccagc

SEQ ID NO: 3058913 - RNA, 19 nt, Artificial Sequence
  Description of Artificial Sequence: Synthetic oligonucleotide
caauggcccuuggccaccu

SEQ ID NO: 3058914 - RNA, 19 nt, Artificial Sequence
  Description of Artificial Sequence: Synthetic oligonucleotide
gaccuccccuccagccugu

SEQ ID NO: 3058915 - RNA, 19 nt, Artificial Sequence
  Description of Artificial Sequence: Synthetic oligonucleotide
ccuugugaaugaggcucaa

SEQ ID NO: 3058916 - RNA, 19 nt, Artificial Sequence
  Description of Artificial Sequence: Synthetic oligonucleotide
cgaggcaguggcccauuua

SEQ ID NO: 3058917 - RNA, 19 nt, Artificial Sequence
  Description of Artificial Sequence: Synthetic oligonucleotide
guggcccauuuagcccagu

SEQ ID NO: 3058918 - RNA, 19 nt, Artificial Sequence
  Description of Artificial Sequence: Synthetic oligonucleotide
cucgaggcaguggcccauu

SEQ ID NO: 3058919 - RNA, 19 nt, Artificial Sequence
  Description of Artificial Sequence: Synthetic oligonucleotide
cuccagccugugucccauu

SEQ ID NO: 3058920 - RNA, 19 nt, Artificial Sequence
  Description of Artificial Sequence: Synthetic oligonucleotide
ccuggcccuuggacgccaa

SEQ ID NO: 3058921 - RNA, 19 nt, Artificial Sequence
  Description of Artificial Sequence: Synthetic oligonucleotide
ccuccagccugugucccau

SEQ ID NO: 3058922 - RNA, 19 nt, Artificial Sequence
  Description of Artificial Sequence: Synthetic oligonucleotide
ccuccccuccagccugugu

SEQ ID NO: 3058923 - RNA, 19 nt, Artificial Sequence
  Description of Artificial Sequence: Synthetic oligonucleotide
ccaggggacaauggcccuu

SEQ ID NO: 3058924 - RNA, 19 nt, Artificial Sequence
  Description of Artificial Sequence: Synthetic oligonucleotide
gcucuuccaggggcccauu

SEQ ID NO: 3058925 - RNA, 19 nt, Artificial Sequence
  Description of Artificial Sequence: Synthetic oligonucleotide
ccuuggccaccuggcccuu

SEQ ID NO: 3058926 - RNA, 19 nt, Artificial Sequence
  Description of Artificial Sequence: Synthetic oligonucleotide
gauggugacgcgcuuggcg

SEQ ID NO: 3058927 - RNA, 19 nt, Artificial Sequence
  Description of Artificial Sequence: Synthetic oligonucleotide
uugguguccucgaacagcc

SEQ ID NO: 3058928 - RNA, 19 nt, Artificial Sequence
  Description of Artificial Sequence: Synthetic oligonucleotide
uccucgaacagccccacca

SEQ ID NO: 3058929 - RNA, 19 nt, Artificial Sequence
  Description of Artificial Sequence: Synthetic oligonucleotide
agcuggauguccuugggca

SEQ ID NO: 3058930 - RNA, 19 nt, Artificial Sequence
  Description of Artificial Sequence: Synthetic oligonucleotide
ucgaacagccccaccaggu

SEQ ID NO: 3058931 - RNA, 19 nt, Artificial Sequence
  Description of Artificial Sequence: Synthetic oligonucleotide
agcggugcggcuucuugac

SEQ ID NO: 3058932 - RNA, 19 nt, Artificial Sequence
  Description of Artificial Sequence: Synthetic oligonucleotide
acgcgcuuggcguggaugg

SEQ ID NO: 3058933 - RNA, 19 nt, Artificial Sequence
  Description of Artificial Sequence: Synthetic oligonucleotide
auggugacgcgcuuggcgu

SEQ ID NO: 3058934 - RNA, 19 nt, Artificial Sequence
  Description of Artificial Sequence: Synthetic oligonucleotide
cucgaacagccccaccagg

SEQ ID NO: 3058935 - RNA, 19 nt, Artificial Sequence
  Description of Artificial Sequence: Synthetic oligonucleotide
uagcggugcggcuucuuga

SEQ ID NO: 3058936 - RNA, 19 nt, Artificial Sequence
  Description of Artificial Sequence: Synthetic oligonucleotide
uuaggcccgcuccccgcgg

SEQ ID NO: 3058937 - RNA, 19 nt, Artificial Sequence
  Description of Artificial Sequence: Synthetic oligonucleotide
cagcuggauguccuugggc

SEQ ID NO: 3058938 - RNA, 19 nt, Artificial Sequence
  Description of Artificial Sequence: Synthetic oligonucleotide
uggugacgcgcuuggcgug

SEQ ID NO: 3058939 - RNA, 19 nt, Artificial Sequence
  Description of Artificial Sequence: Synthetic oligonucleotide
gacgcgcuuggcguggaug

SEQ ID NO: 3058940 - RNA, 19 nt, Artificial Sequence
  Description of Artificial Sequence: Synthetic oligonucleotide
uccccgcggaugcggcggg

SEQ ID NO: 3058941 - RNA, 19 nt, Artificial Sequence
  Description of Artificial Sequence: Synthetic oligonucleotide
cuccccgcggaugcggcgg

SEQ ID NO: 3058942 - RNA, 19 nt, Artificial Sequence
  Description of Artificial Sequence: Synthetic oligonucleotide
gggcaugauggugacgcgc

SEQ ID NO: 3058943 - RNA, 19 nt, Artificial Sequence
  Description of Artificial Sequence: Synthetic oligonucleotide
ggugacgcgcuuggcgugg

SEQ ID NO: 3058944 - RNA, 19 nt, Artificial Sequence
  Description of Artificial Sequence: Synthetic oligonucleotide
ccggccgacgcucuugcgg

SEQ ID NO: 3058945 - RNA, 19 nt, Artificial Sequence
  Description of Artificial Sequence: Synthetic oligonucleotide
ccucgaacagccccaccag

SEQ ID NO: 3058946 - RNA, 19 nt, Artificial Sequence
  Description of Artificial Sequence: Synthetic oligonucleotide
uaggcccgcuccccgcgga

SEQ ID NO: 3058947 - RNA, 19 nt, Artificial Sequence
  Description of Artificial Sequence: Synthetic oligonucleotide
cggugcggcuucuugacgc

SEQ ID NO: 3058948 - RNA, 19 nt, Artificial Sequence
  Description of Artificial Sequence: Synthetic oligonucleotide
gcguggauggcgcacaggu

SEQ ID NO: 3058949 - RNA, 19 nt, Artificial Sequence
  Description of Artificial Sequence: Synthetic oligonucleotide
gcgcuuggcguggauggcg

SEQ ID NO: 3058950 - RNA, 19 nt, Artificial Sequence
  Description of Artificial Sequence: Synthetic oligonucleotide
cucuugcgggcagcuuuag

SEQ ID NO: 3058951 - RNA, 19 nt, Artificial Sequence
  Description of Artificial Sequence: Synthetic oligonucleotide
uggccggccgacgcucuug

SEQ ID NO: 3058952 - RNA, 19 nt, Artificial Sequence
  Description of Artificial Sequence: Synthetic oligonucleotide
gcggugcggcuucuugacg

SEQ ID NO: 3058953 - RNA, 19 nt, Artificial Sequence
  Description of Artificial Sequence: Synthetic oligonucleotide
cggccgacgcucuugcggg

SEQ ID NO: 3058954 - RNA, 19 nt, Artificial Sequence
  Description of Artificial Sequence: Synthetic oligonucleotide
ugacgcgcuuggcguggau

SEQ ID NO: 3058955 - RNA, 19 nt, Artificial Sequence
  Description of Artificial Sequence: Synthetic oligonucleotide
ggccagcuggauguccuug

SEQ ID NO: 3058956 - RNA, 19 nt, Artificial Sequence
  Description of Artificial Sequence: Synthetic oligonucleotide
ggaugcggcgggccagcug

SEQ ID NO: 3058957 - RNA, 19 nt, Artificial Sequence
  Description of Artificial Sequence: Synthetic oligonucleotide
ggccggccgacgcucuugc

SEQ ID NO: 3058958 - RNA, 19 nt, Artificial Sequence
  Description of Artificial Sequence: Synthetic oligonucleotide
cgcuuggcguggauggcgc

SEQ ID NO: 3058959 - RNA, 19 nt, Artificial Sequence
  Description of Artificial Sequence: Synthetic oligonucleotide
gacgcucuugcgggcagcu

SEQ ID NO: 3058960 - RNA, 19 nt, Artificial Sequence
  Description of Artificial Sequence: Synthetic oligonucleotide
gcggcuucuugacgccgcc

SEQ ID NO: 3058961 - RNA, 19 nt, Artificial Sequence
  Description of Artificial Sequence: Synthetic oligonucleotide
gcccgcuccccgcggaugc

SEQ ID NO: 3058962 - RNA, 19 nt, Artificial Sequence
  Description of Artificial Sequence: Synthetic oligonucleotide
gcuccccgcggaugcggcg

SEQ ID NO: 3058963 - RNA, 19 nt, Artificial Sequence
  Description of Artificial Sequence: Synthetic oligonucleotide
gcggcgggccagcuggaug

SEQ ID NO: 3058964 - RNA, 19 nt, Artificial Sequence
  Description of Artificial Sequence: Synthetic oligonucleotide
gcccguggccggccgacgc

SEQ ID NO: 3058965 - RNA, 19 nt, Artificial Sequence
  Description of Artificial Sequence: Synthetic oligonucleotide
ugcggcgggccagcuggau

SEQ ID NO: 3058966 - RNA, 19 nt, Artificial Sequence
  Description of Artificial Sequence: Synthetic oligonucleotide
ggccgacgcucuugcgggc

SEQ ID NO: 3058967 - RNA, 19 nt, Artificial Sequence
  Description of Artificial Sequence: Synthetic oligonucleotide
aggcccgcuccccgcggau

SEQ ID NO: 3058968 - RNA, 19 nt, Artificial Sequence
  Description of Artificial Sequence: Synthetic oligonucleotide
gccggccgacgcucuugcg

SEQ ID NO: 3058969 - RNA, 19 nt, Artificial Sequence
  Description of Artificial Sequence: Synthetic oligonucleotide
ccgacgcucuugcgggcag

SEQ ID NO: 3058970 - RNA, 19 nt, Artificial Sequence
  Description of Artificial Sequence: Synthetic oligonucleotide
gcuuggcguggauggcgca

SEQ ID NO: 3058971 - RNA, 19 nt, Artificial Sequence
  Description of Artificial Sequence: Synthetic oligonucleotide
gcggaugcggcgggccagc

SEQ ID NO: 3058972 - RNA, 19 nt, Artificial Sequence
  Description of Artificial Sequence: Synthetic oligonucleotide
gugacgcgcuuggcgugga

SEQ ID NO: 3058973 - RNA, 19 nt, Artificial Sequence
  Description of Artificial Sequence: Synthetic oligonucleotide
gccgacgcucuugcgggca

SEQ ID NO: 3058974 - RNA, 19 nt, Artificial Sequence
  Description of Artificial Sequence: Synthetic oligonucleotide
cccgcggaugcggcgggcc

SEQ ID NO: 3058975 - RNA, 19 nt, Artificial Sequence
  Description of Artificial Sequence: Synthetic oligonucleotide
ccgcuccccgcggaugcgg

SEQ ID NO: 3058976 - RNA, 19 nt, Artificial Sequence
  Description of Artificial Sequence: Synthetic oligonucleotide
ggcccgcuccccgcggaug

SEQ ID NO: 3058977 - RNA, 19 nt, Artificial Sequence
  Description of Artificial Sequence: Synthetic oligonucleotide
cgcuccccgcggaugcggc

SEQ ID NO: 3058978 - RNA, 19 nt, Artificial Sequence
  Description of Artificial Sequence: Synthetic oligonucleotide
augcggcgggccagcugga

SEQ ID NO: 3058979 - RNA, 19 nt, Artificial Sequence
  Description of Artificial Sequence: Synthetic oligonucleotide
cgcgcuuggcguggauggc

SEQ ID NO: 3058980 - RNA, 19 nt, Artificial Sequence
  Description of Artificial Sequence: Synthetic oligonucleotide
cccgcuccccgcggaugcg

SEQ ID NO: 3058981 - RNA, 19 nt, Artificial Sequence
  Description of Artificial Sequence: Synthetic oligonucleotide
ccguggccggccgacgcuc

SEQ ID NO: 3058982 - RNA, 19 nt, Artificial Sequence
  Description of Artificial Sequence: Synthetic oligonucleotide
cgacgcucuugcgggcagc

SEQ ID NO: 3058983 - RNA, 19 nt, Artificial Sequence
  Description of Artificial Sequence: Synthetic oligonucleotide
ccgcccguggccggccgac

SEQ ID NO: 3058984 - RNA, 19 nt, Artificial Sequence
  Description of Artificial Sequence: Synthetic oligonucleotide
guggccggccgacgcucuu

SEQ ID NO: 3058985 - RNA, 19 nt, Artificial Sequence
  Description of Artificial Sequence: Synthetic oligonucleotide
gggccagcuggauguccuu

SEQ ID NO: 3058986 - RNA, 19 nt, Artificial Sequence
  Description of Artificial Sequence: Synthetic oligonucleotide
gccgcccguggccggccga

SEQ ID NO: 3058987 - RNA, 19 nt, Artificial Sequence
  Description of Artificial Sequence: Synthetic oligonucleotide
cguggauggcgcacagguu

SEQ ID NO: 3058988 - RNA, 19 nt, Artificial Sequence
  Description of Artificial Sequence: Synthetic oligonucleotide
ccccgcggaugcggcgggc

SEQ ID NO: 3058989 - RNA, 19 nt, Artificial Sequence
  Description of Artificial Sequence: Synthetic oligonucleotide
cgcccguggccggccgacg

SEQ ID NO: 3058990 - RNA, 19 nt, Artificial Sequence
  Description of Artificial Sequence: Synthetic oligonucleotide
cccguggccggccgacgcu

SEQ ID NO: 3058991 - RNA, 19 nt, Artificial Sequence
  Description of Artificial Sequence: Synthetic oligonucleotide
cguggccggccgacgcucu

SEQ ID NO: 3058992 - RNA, 19 nt, Artificial Sequence
  Description of Artificial Sequence: Synthetic oligonucleotide
cggaugcggcgggccagcu

SEQ ID NO: 3058993 - RNA, 19 nt, Artificial Sequence
  Description of Artificial Sequence: Synthetic oligonucleotide
agaaguuagacccagagac

SEQ ID NO: 3058994 - RNA, 19 nt, Artificial Sequence
  Description of Artificial Sequence: Synthetic oligonucleotide
aauacuauagcacaaacau

SEQ ID NO: 3058995 - RNA, 19 nt, Artificial Sequence
  Description of Artificial Sequence: Synthetic oligonucleotide
uuuaaaacauuaaauaugu

SEQ ID NO: 3058996 - RNA, 19 nt, Artificial Sequence
  Description of Artificial Sequence: Synthetic oligonucleotide
uaaaacauuaaauauguca

SEQ ID NO: 3058997 - RNA, 19 nt, Artificial Sequence
  Description of Artificial Sequence: Synthetic oligonucleotide
aaaaguacucauuugcagg

SEQ ID NO: 3058998 - RNA, 19 nt, Artificial Sequence
  Description of Artificial Sequence: Synthetic oligonucleotide
acuucaaaagaacuuaacc

SEQ ID NO: 3058999 - RNA, 19 nt, Artificial Sequence
  Description of Artificial Sequence: Synthetic oligonucleotide
auggccagaaguuagaccc

SEQ ID NO: 3059000 - RNA, 19 nt, Artificial Sequence
  Description of Artificial Sequence: Synthetic oligonucleotide
uuuuagucaaauacuauag

SEQ ID NO: 3059001 - RNA, 19 nt, Artificial Sequence
  Description of Artificial Sequence: Synthetic oligonucleotide
cuucaaaagaacuuaaccc

SEQ ID NO: 3059002 - RNA, 19 nt, Artificial Sequence
  Description of Artificial Sequence: Synthetic oligonucleotide
ugaaauauaacuuuagaua

SEQ ID NO: 3059003 - RNA, 19 nt, Artificial Sequence
  Description of Artificial Sequence: Synthetic oligonucleotide
aaaacauuacaccugaaau

SEQ ID NO: 3059004 - RNA, 19 nt, Artificial Sequence
  Description of Artificial Sequence: Synthetic oligonucleotide
agaacuuaacccuucaaac

SEQ ID NO: 3059005 - RNA, 19 nt, Artificial Sequence
  Description of Artificial Sequence: Synthetic oligonucleotide
ugauguaacacuucaaaag

SEQ ID NO: 3059006 - RNA, 19 nt, Artificial Sequence
  Description of Artificial Sequence: Synthetic oligonucleotide
aaaauacacauauuuucuc

SEQ ID NO: 3059007 - RNA, 19 nt, Artificial Sequence
  Description of Artificial Sequence: Synthetic oligonucleotide
uuuacaauauuuugcacag

SEQ ID NO: 3059008 - RNA, 19 nt, Artificial Sequence
  Description of Artificial Sequence: Synthetic oligonucleotide
uacuauagcacaaacauaa

SEQ ID NO: 3059009 - RNA, 19 nt, Artificial Sequence
  Description of Artificial Sequence: Synthetic oligonucleotide
acaaacauaauuuacaaua

SEQ ID NO: 3059010 - RNA, 19 nt, Artificial Sequence
  Description of Artificial Sequence: Synthetic oligonucleotide
aaacauuaaauaugucaac

SEQ ID NO: 3059011 - RNA, 19 nt, Artificial Sequence
  Description of Artificial Sequence: Synthetic oligonucleotide
aauacacauauuuucucuc

SEQ ID NO: 3059012 - RNA, 19 nt, Artificial Sequence
  Description of Artificial Sequence: Synthetic oligonucleotide
acaucuguacauuuaaaac

SEQ ID NO: 3059013 - RNA, 19 nt, Artificial Sequence
  Description of Artificial Sequence: Synthetic oligonucleotide
aacuuuagauauuauauaa

SEQ ID NO: 3059014 - RNA, 19 nt, Artificial Sequence
  Description of Artificial Sequence: Synthetic oligonucleotide
uuaacuuugagguucucag

SEQ ID NO: 3059015 - RNA, 19 nt, Artificial Sequence
  Description of Artificial Sequence: Synthetic oligonucleotide
uuagucaaauacuauagca

SEQ ID NO: 3059016 - RNA, 19 nt, Artificial Sequence
  Description of Artificial Sequence: Synthetic oligonucleotide
uuaaauaugucaacaguga

SEQ ID NO: 3059017 - RNA, 19 nt, Artificial Sequence
  Description of Artificial Sequence: Synthetic oligonucleotide
uucaaaagaacuuaacccu

SEQ ID NO: 3059018 - RNA, 19 nt, Artificial Sequence
  Description of Artificial Sequence: Synthetic oligonucleotide
uauagcacaaacauaauuu

SEQ ID NO: 3059019 - RNA, 19 nt, Artificial Sequence
  Description of Artificial Sequence: Synthetic oligonucleotide
caaacuaucauuugucugc

SEQ ID NO: 3059020 - RNA, 19 nt, Artificial Sequence
  Description of Artificial Sequence: Synthetic oligonucleotide
aaauacacauauuuucucu

SEQ ID NO: 3059021 - RNA, 19 nt, Artificial Sequence
  Description of Artificial Sequence: Synthetic oligonucleotide
aaaacauuaaauaugucaa

SEQ ID NO: 3059022 - RNA, 19 nt, Artificial Sequence
  Description of Artificial Sequence: Synthetic oligonucleotide
aacuuugagguucucagug

SEQ ID NO: 3059023 - RNA, 19 nt, Artificial Sequence
  Description of Artificial Sequence: Synthetic oligonucleotide
acauuuaaaacauuaaaua

SEQ ID NO: 3059024 - RNA, 19 nt, Artificial Sequence
  Description of Artificial Sequence: Synthetic oligonucleotide
uuugucugcgaugaaaugg

SEQ ID NO: 3059025 - RNA, 19 nt, Artificial Sequence
  Description of Artificial Sequence: Synthetic oligonucleotide
uaaauaugucaacagugag

SEQ ID NO: 3059026 - RNA, 19 nt, Artificial Sequence
  Description of Artificial Sequence: Synthetic oligonucleotide
auacacauauuuucucucc

SEQ ID NO: 3059027 - RNA, 19 nt, Artificial Sequence
  Description of Artificial Sequence: Synthetic oligonucleotide
aauacaucuguacauuuaa

SEQ ID NO: 3059028 - RNA, 19 nt, Artificial Sequence
  Description of Artificial Sequence: Synthetic oligonucleotide
aacauuaaauaugucaaca

SEQ ID NO: 3059029 - RNA, 19 nt, Artificial Sequence
  Description of Artificial Sequence: Synthetic oligonucleotide
uuuugcacagaaaacauua

SEQ ID NO: 3059030 - RNA, 19 nt, Artificial Sequence
  Description of Artificial Sequence: Synthetic oligonucleotide
aguuaaauacaucuguaca

SEQ ID NO: 3059031 - RNA, 19 nt, Artificial Sequence
  Description of Artificial Sequence: Synthetic oligonucleotide
aaaguacucauuugcaggu

SEQ ID NO: 3059032 - RNA, 19 nt, Artificial Sequence
  Description of Artificial Sequence: Synthetic oligonucleotide
uacaauauuuugcacagaa

SEQ ID NO: 3059033 - RNA, 19 nt, Artificial Sequence
  Description of Artificial Sequence: Synthetic oligonucleotide
uuuagucaaauacuauagc

SEQ ID NO: 3059034 - RNA, 19 nt, Artificial Sequence
  Description of Artificial Sequence: Synthetic oligonucleotide
gauguaacacuucaaaaga

SEQ ID NO: 3059035 - RNA, 19 nt, Artificial Sequence
  Description of Artificial Sequence: Synthetic oligonucleotide
agacccagagacuaugacc

SEQ ID NO: 3059036 - RNA, 19 nt, Artificial Sequence
  Description of Artificial Sequence: Synthetic oligonucleotide
acauuaaauaugucaacag

SEQ ID NO: 3059037 - RNA, 19 nt, Artificial Sequence
  Description of Artificial Sequence: Synthetic oligonucleotide
uauaacuuuagauauuaua

SEQ ID NO: 3059038 - RNA, 19 nt, Artificial Sequence
  Description of Artificial Sequence: Synthetic oligonucleotide
uaugucaacagugagacau

SEQ ID NO: 3059039 - RNA, 19 nt, Artificial Sequence
  Description of Artificial Sequence: Synthetic oligonucleotide
aacauuacaccugaaauau

SEQ ID NO: 3059040 - RNA, 19 nt, Artificial Sequence
  Description of Artificial Sequence: Synthetic oligonucleotide
aagaacuuaacccuucaaa

SEQ ID NO: 3059041 - RNA, 19 nt, Artificial Sequence
  Description of Artificial Sequence: Synthetic oligonucleotide
aaacauuacaccugaaaua

SEQ ID NO: 3059042 - RNA, 19 nt, Artificial Sequence
  Description of Artificial Sequence: Synthetic oligonucleotide
uguaacacuucaaaagaac

SEQ ID NO: 3059043 - RNA, 19 nt, Artificial Sequence
  Description of Artificial Sequence: Synthetic oligonucleotide
uagucaaauacuauagcac

SEQ ID NO: 3059044 - RNA, 19 nt, Artificial Sequence
  Description of Artificial Sequence: Synthetic oligonucleotide
aauauaacuuuagauauua

SEQ ID NO: 3059045 - RNA, 19 nt, Artificial Sequence
  Description of Artificial Sequence: Synthetic oligonucleotide
agucaaauacuauagcaca

SEQ ID NO: 3059046 - RNA, 19 nt, Artificial Sequence
  Description of Artificial Sequence: Synthetic oligonucleotide
uuacaccugaaauauaacu

SEQ ID NO: 3059047 - RNA, 19 nt, Artificial Sequence
  Description of Artificial Sequence: Synthetic oligonucleotide
auauuuugcacagaaaaca

SEQ ID NO: 3059048 - RNA, 19 nt, Artificial Sequence
  Description of Artificial Sequence: Synthetic oligonucleotide
ugaaauggcacccucuuaa

SEQ ID NO: 3059049 - RNA, 19 nt, Artificial Sequence
  Description of Artificial Sequence: Synthetic oligonucleotide
uauuuucucuccuuacuag

SEQ ID NO: 3059050 - RNA, 19 nt, Artificial Sequence
  Description of Artificial Sequence: Synthetic oligonucleotide
aacuuaacccuucaaacua

SEQ ID NO: 3059051 - RNA, 19 nt, Artificial Sequence
  Description of Artificial Sequence: Synthetic oligonucleotide
ucugcgaugaaauggcacc

SEQ ID NO: 3059052 - RNA, 19 nt, Artificial Sequence
  Description of Artificial Sequence: Synthetic oligonucleotide
uucucaguggcacauggcc

SEQ ID NO: 3059053 - RNA, 19 nt, Artificial Sequence
  Description of Artificial Sequence: Synthetic oligonucleotide
acccucuuaacuuugaggu

SEQ ID NO: 3059054 - RNA, 19 nt, Artificial Sequence
  Description of Artificial Sequence: Synthetic oligonucleotide
ucaaacuaucauuugucug

SEQ ID NO: 3059055 - RNA, 19 nt, Artificial Sequence
  Description of Artificial Sequence: Synthetic oligonucleotide
acauauuuucucuccuuac

SEQ ID NO: 3059056 - RNA, 19 nt, Artificial Sequence
  Description of Artificial Sequence: Synthetic oligonucleotide
agcaguuaaauacaucugu

SEQ ID NO: 3059057 - RNA, 19 nt, Artificial Sequence
  Description of Artificial Sequence: Synthetic oligonucleotide
uacaucuguacauuuaaaa

SEQ ID NO: 3059058 - RNA, 19 nt, Artificial Sequence
  Description of Artificial Sequence: Synthetic oligonucleotide
caucuguacauuuaaaaca

SEQ ID NO: 3059059 - RNA, 19 nt, Artificial Sequence
  Description of Artificial Sequence: Synthetic oligonucleotide
aaaagaacuuaacccuuca

SEQ ID NO: 3059060 - RNA, 19 nt, Artificial Sequence
  Description of Artificial Sequence: Synthetic oligonucleotide
aaauacuauagcacaaaca

SEQ ID NO: 3059061 - RNA, 19 nt, Artificial Sequence
  Description of Artificial Sequence: Synthetic oligonucleotide
aauggcacccucuuaacuu

SEQ ID NO: 3059062 - RNA, 19 nt, Artificial Sequence
  Description of Artificial Sequence: Synthetic oligonucleotide
aaacuaucauuugucugcg

SEQ ID NO: 3059063 - RNA, 19 nt, Artificial Sequence
  Description of Artificial Sequence: Synthetic oligonucleotide
uugucugcgaugaaauggc

SEQ ID NO: 3059064 - RNA, 19 nt, Artificial Sequence
  Description of Artificial Sequence: Synthetic oligonucleotide
gacccagagacuaugaccc

SEQ ID NO: 3059065 - RNA, 19 nt, Artificial Sequence
  Description of Artificial Sequence: Synthetic oligonucleotide
uacaccugaaauauaacuu

SEQ ID NO: 3059066 - RNA, 19 nt, Artificial Sequence
  Description of Artificial Sequence: Synthetic oligonucleotide
ucauuugcagguuccagca

SEQ ID NO: 3059067 - RNA, 19 nt, Artificial Sequence
  Description of Artificial Sequence: Synthetic oligonucleotide
uccagcaugauguaacacu

SEQ ID NO: 3059068 - RNA, 19 nt, Artificial Sequence
  Description of Artificial Sequence: Synthetic oligonucleotide
aguacucauuugcagguuc

SEQ ID NO: 3059069 - RNA, 19 nt, Artificial Sequence
  Description of Artificial Sequence: Synthetic oligonucleotide
cuucaaacuaucauuuguc

SEQ ID NO: 3059070 - RNA, 19 nt, Artificial Sequence
  Description of Artificial Sequence: Synthetic oligonucleotide
agagacuaugaccccuucc

SEQ ID NO: 3059071 - RNA, 19 nt, Artificial Sequence
  Description of Artificial Sequence: Synthetic oligonucleotide
uucaaacuaucauuugucu

SEQ ID NO: 3059072 - RNA, 19 nt, Artificial Sequence
  Description of Artificial Sequence: Synthetic oligonucleotide
uugcacagaaaacauuaca

SEQ ID NO: 3059073 - RNA, 19 nt, Artificial Sequence
  Description of Artificial Sequence: Synthetic oligonucleotide
gaaaacauuacaccugaaa

SEQ ID NO: 3059074 - RNA, 19 nt, Artificial Sequence
  Description of Artificial Sequence: Synthetic oligonucleotide
aacccuucaaacuaucauu

SEQ ID NO: 3059075 - RNA, 19 nt, Artificial Sequence
  Description of Artificial Sequence: Synthetic oligonucleotide
uaacuuuagauauuauaua

SEQ ID NO: 3059076 - RNA, 19 nt, Artificial Sequence
  Description of Artificial Sequence: Synthetic oligonucleotide
aacacuucaaaagaacuua

SEQ ID NO: 3059077 - RNA, 19 nt, Artificial Sequence
  Description of Artificial Sequence: Synthetic oligonucleotide
agcaugauguaacacuuca

SEQ ID NO: 3059078 - RNA, 19 nt, Artificial Sequence
  Description of Artificial Sequence: Synthetic oligonucleotide
gagacuaugaccccuucca

SEQ ID NO: 3059079 - RNA, 19 nt, Artificial Sequence
  Description of Artificial Sequence: Synthetic oligonucleotide
cucauuugcagguuccagc

SEQ ID NO: 3059080 - RNA, 19 nt, Artificial Sequence
  Description of Artificial Sequence: Synthetic oligonucleotide
aaauggcacccucuuaacu

SEQ ID NO: 3059081 - RNA, 19 nt, Artificial Sequence
  Description of Artificial Sequence: Synthetic oligonucleotide
caguuaaauacaucuguac

SEQ ID NO: 3059082 - RNA, 19 nt, Artificial Sequence
  Description of Artificial Sequence: Synthetic oligonucleotide
auuugcagguuccagcaug

SEQ ID NO: 3059083 - RNA, 19 nt, Artificial Sequence
  Description of Artificial Sequence: Synthetic oligonucleotide
caaauacuauagcacaaac

SEQ ID NO: 3059084 - RNA, 19 nt, Artificial Sequence
  Description of Artificial Sequence: Synthetic oligonucleotide
uagcacaaacauaauuuac

SEQ ID NO: 3059085 - RNA, 19 nt, Artificial Sequence
  Description of Artificial Sequence: Synthetic oligonucleotide
uuaacccuucaaacuauca

SEQ ID NO: 3059086 - RNA, 19 nt, Artificial Sequence
  Description of Artificial Sequence: Synthetic oligonucleotide
uaacacuucaaaagaacuu

SEQ ID NO: 3059087 - RNA, 19 nt, Artificial Sequence
  Description of Artificial Sequence: Synthetic oligonucleotide
cauuacaccugaaauauaa

SEQ ID NO: 3059088 - RNA, 19 nt, Artificial Sequence
  Description of Artificial Sequence: Synthetic oligonucleotide
ucaaaagaacuuaacccuu

SEQ ID NO: 3059089 - RNA, 19 nt, Artificial Sequence
  Description of Artificial Sequence: Synthetic oligonucleotide
acuaucauuugucugcgau

SEQ ID NO: 3059090 - RNA, 19 nt, Artificial Sequence
  Description of Artificial Sequence: Synthetic oligonucleotide
uuuucucuccuuacuagaa

SEQ ID NO: 3059091 - RNA, 19 nt, Artificial Sequence
  Description of Artificial Sequence: Synthetic oligonucleotide
uaacccuucaaacuaucau

SEQ ID NO: 3059092 - RNA, 19 nt, Artificial Sequence
  Description of Artificial Sequence: Synthetic oligonucleotide
auuuucucuccuuacuaga

SEQ ID NO: 3059093 - RNA, 19 nt, Artificial Sequence
  Description of Artificial Sequence: Synthetic oligonucleotide
uuugcacagaaaacauuac

SEQ ID NO: 3059094 - RNA, 19 nt, Artificial Sequence
  Description of Artificial Sequence: Synthetic oligonucleotide
augauguaacacuucaaaa

SEQ ID NO: 3059095 - RNA, 19 nt, Artificial Sequence
  Description of Artificial Sequence: Synthetic oligonucleotide
auagcacaaacauaauuua

SEQ ID NO: 3059096 - RNA, 19 nt, Artificial Sequence
  Description of Artificial Sequence: Synthetic oligonucleotide
cuuugagguucucaguggc

SEQ ID NO: 3059097 - RNA, 19 nt, Artificial Sequence
  Description of Artificial Sequence: Synthetic oligonucleotide
uuaaaacauuaaauauguc

SEQ ID NO: 3059098 - RNA, 19 nt, Artificial Sequence
  Description of Artificial Sequence: Synthetic oligonucleotide
agcacaaacauaauuuaca

SEQ ID NO: 3059099 - RNA, 19 nt, Artificial Sequence
  Description of Artificial Sequence: Synthetic oligonucleotide
aaagaacuuaacccuucaa

SEQ ID NO: 3059100 - RNA, 19 nt, Artificial Sequence
  Description of Artificial Sequence: Synthetic oligonucleotide
auauuuucucuccuuacua

SEQ ID NO: 3059101 - RNA, 19 nt, Artificial Sequence
  Description of Artificial Sequence: Synthetic oligonucleotide
uuugcagguuccagcauga

SEQ ID NO: 3059102 - RNA, 19 nt, Artificial Sequence
  Description of Artificial Sequence: Synthetic oligonucleotide
guuaaauacaucuguacau

SEQ ID NO: 3059103 - RNA, 19 nt, Artificial Sequence
  Description of Artificial Sequence: Synthetic oligonucleotide
acaccugaaauauaacuuu

SEQ ID NO: 3059104 - RNA, 19 nt, Artificial Sequence
  Description of Artificial Sequence: Synthetic oligonucleotide
ucaaauacuauagcacaaa

SEQ ID NO: 3059105 - RNA, 19 nt, Artificial Sequence
  Description of Artificial Sequence: Synthetic oligonucleotide
uaaauacaucuguacauuu

SEQ ID NO: 3059106 - RNA, 19 nt, Artificial Sequence
  Description of Artificial Sequence: Synthetic oligonucleotide
acagaaaacauuacaccug

SEQ ID NO: 3059107 - RNA, 19 nt, Artificial Sequence
  Description of Artificial Sequence: Synthetic oligonucleotide
cuaucauuugucugcgaug

SEQ ID NO: 3059108 - RNA, 19 nt, Artificial Sequence
  Description of Artificial Sequence: Synthetic oligonucleotide
cacccucuuaacuuugagg

SEQ ID NO: 3059109 - RNA, 19 nt, Artificial Sequence
  Description of Artificial Sequence: Synthetic oligonucleotide
caugauguaacacuucaaa

SEQ ID NO: 3059110 - RNA, 19 nt, Artificial Sequence
  Description of Artificial Sequence: Synthetic oligonucleotide
auuacaccugaaauauaac

SEQ ID NO: 3059111 - RNA, 19 nt, Artificial Sequence
  Description of Artificial Sequence: Synthetic oligonucleotide
aaguuagacccagagacua

SEQ ID NO: 3059112 - RNA, 19 nt, Artificial Sequence
  Description of Artificial Sequence: Synthetic oligonucleotide
caaaagaacuuaacccuuc

SEQ ID NO: 3059113 - RNA, 19 nt, Artificial Sequence
  Description of Artificial Sequence: Synthetic oligonucleotide
gaacuuaacccuucaaacu

SEQ ID NO: 3059114 - RNA, 19 nt, Artificial Sequence
  Description of Artificial Sequence: Synthetic oligonucleotide
uuagacccagagacuauga

SEQ ID NO: 3059115 - RNA, 19 nt, Artificial Sequence
  Description of Artificial Sequence: Synthetic oligonucleotide
cugaaauauaacuuuagau

SEQ ID NO: 3059116 - RNA, 19 nt, Artificial Sequence
  Description of Artificial Sequence: Synthetic oligonucleotide
aucuguacauuuaaaacau

SEQ ID NO: 3059117 - RNA, 19 nt, Artificial Sequence
  Description of Artificial Sequence: Synthetic oligonucleotide
auuugucugcgaugaaaug

SEQ ID NO: 3059118 - RNA, 19 nt, Artificial Sequence
  Description of Artificial Sequence: Synthetic oligonucleotide
uuucucuccuuacuagaaa

SEQ ID NO: 3059119 - RNA, 19 nt, Artificial Sequence
  Description of Artificial Sequence: Synthetic oligonucleotide
cuguacauuuaaaacauua

SEQ ID NO: 3059120 - RNA, 19 nt, Artificial Sequence
  Description of Artificial Sequence: Synthetic oligonucleotide
ucauuugucugcgaugaaa

SEQ ID NO: 3059121 - RNA, 19 nt, Artificial Sequence
  Description of Artificial Sequence: Synthetic oligonucleotide
cacuucaaaagaacuuaac

SEQ ID NO: 3059122 - RNA, 19 nt, Artificial Sequence
  Description of Artificial Sequence: Synthetic oligonucleotide
aaauauaacuuuagauauu

SEQ ID NO: 3059123 - RNA, 19 nt, Artificial Sequence
  Description of Artificial Sequence: Synthetic oligonucleotide
cacagaaaacauuacaccu

SEQ ID NO: 3059124 - RNA, 19 nt, Artificial Sequence
  Description of Artificial Sequence: Synthetic oligonucleotide
cauggccagaaguuagacc

SEQ ID NO: 3059125 - RNA, 19 nt, Artificial Sequence
  Description of Artificial Sequence: Synthetic oligonucleotide
cagaaaacauuacaccuga

SEQ ID NO: 3059126 - RNA, 19 nt, Artificial Sequence
  Description of Artificial Sequence: Synthetic oligonucleotide
aaauacaucuguacauuua

SEQ ID NO: 3059127 - RNA, 19 nt, Artificial Sequence
  Description of Artificial Sequence: Synthetic oligonucleotide
gaaauggcacccucuuaac

SEQ ID NO: 3059128 - RNA, 19 nt, Artificial Sequence
  Description of Artificial Sequence: Synthetic oligonucleotide
uaacuuugagguucucagu

SEQ ID NO: 3059129 - RNA, 19 nt, Artificial Sequence
  Description of Artificial Sequence: Synthetic oligonucleotide
gguucucaguggcacaugg

SEQ ID NO: 3059130 - RNA, 19 nt, Artificial Sequence
  Description of Artificial Sequence: Synthetic oligonucleotide
gcagcaguuaaauacaucu

SEQ ID NO: 3059131 - RNA, 19 nt, Artificial Sequence
  Description of Artificial Sequence: Synthetic oligonucleotide
uagacccagagacuaugac

SEQ ID NO: 3059132 - RNA, 19 nt, Artificial Sequence
  Description of Artificial Sequence: Synthetic oligonucleotide
cagcaguuaaauacaucug

SEQ ID NO: 3059133 - RNA, 19 nt, Artificial Sequence
  Description of Artificial Sequence: Synthetic oligonucleotide
acauggccagaaguuagac

SEQ ID NO: 3059134 - RNA, 19 nt, Artificial Sequence
  Description of Artificial Sequence: Synthetic oligonucleotide
accugaaauauaacuuuag

SEQ ID NO: 3059135 - RNA, 19 nt, Artificial Sequence
  Description of Artificial Sequence: Synthetic oligonucleotide
cuuaacccuucaaacuauc

SEQ ID NO: 3059136 - RNA, 19 nt, Artificial Sequence
  Description of Artificial Sequence: Synthetic oligonucleotide
guuagacccagagacuaug

SEQ ID NO: 3059137 - RNA, 19 nt, Artificial Sequence
  Description of Artificial Sequence: Synthetic oligonucleotide
ugcagcaguuaaauacauc

SEQ ID NO: 3059138 - RNA, 19 nt, Artificial Sequence
  Description of Artificial Sequence: Synthetic oligonucleotide
guaacacuucaaaagaacu

SEQ ID NO: 3059139 - RNA, 19 nt, Artificial Sequence
  Description of Artificial Sequence: Synthetic oligonucleotide
uggcacauggccagaaguu

SEQ ID NO: 3059140 - RNA, 19 nt, Artificial Sequence
  Description of Artificial Sequence: Synthetic oligonucleotide
acccagagacuaugacccc

SEQ ID NO: 3059141 - RNA, 19 nt, Artificial Sequence
  Description of Artificial Sequence: Synthetic oligonucleotide
aacuaucauuugucugcga

SEQ ID NO: 3059142 - RNA, 19 nt, Artificial Sequence
  Description of Artificial Sequence: Synthetic oligonucleotide
cuuaacuuugagguucuca

SEQ ID NO: 3059143 - RNA, 19 nt, Artificial Sequence
  Description of Artificial Sequence: Synthetic oligonucleotide
ccagaaguuagacccagag

SEQ ID NO: 3059144 - RNA, 19 nt, Artificial Sequence
  Description of Artificial Sequence: Synthetic oligonucleotide
acucauuugcagguuccag

SEQ ID NO: 3059145 - RNA, 19 nt, Artificial Sequence
  Description of Artificial Sequence: Synthetic oligonucleotide
ugucugcgaugaaauggca

SEQ ID NO: 3059146 - RNA, 19 nt, Artificial Sequence
  Description of Artificial Sequence: Synthetic oligonucleotide
acacauauuuucucuccuu

SEQ ID NO: 3059147 - RNA, 19 nt, Artificial Sequence
  Description of Artificial Sequence: Synthetic oligonucleotide
guacucauuugcagguucc

SEQ ID NO: 3059148 - RNA, 19 nt, Artificial Sequence
  Description of Artificial Sequence: Synthetic oligonucleotide
gcacaaacauaauuuacaa

SEQ ID NO: 3059149 - RNA, 19 nt, Artificial Sequence
  Description of Artificial Sequence: Synthetic oligonucleotide
uuacaauauuuugcacaga

SEQ ID NO: 3059150 - RNA, 19 nt, Artificial Sequence
  Description of Artificial Sequence: Synthetic oligonucleotide
gguuccagcaugauguaac

SEQ ID NO: 3059151 - RNA, 19 nt, Artificial Sequence
  Description of Artificial Sequence: Synthetic oligonucleotide
cauauuuucucuccuuacu

SEQ ID NO: 3059152 - RNA, 19 nt, Artificial Sequence
  Description of Artificial Sequence: Synthetic oligonucleotide
gaugaaauggcacccucuu

SEQ ID NO: 3059153 - RNA, 19 nt, Artificial Sequence
  Description of Artificial Sequence: Synthetic oligonucleotide
auguaacacuucaaaagaa

SEQ ID NO: 3059154 - RNA, 19 nt, Artificial Sequence
  Description of Artificial Sequence: Synthetic oligonucleotide
guuccagcaugauguaaca

SEQ ID NO: 3059155 - RNA, 19 nt, Artificial Sequence
  Description of Artificial Sequence: Synthetic oligonucleotide
uacucauuugcagguucca

SEQ ID NO: 3059156 - RNA, 19 nt, Artificial Sequence
  Description of Artificial Sequence: Synthetic oligonucleotide
cugcgaugaaauggcaccc

SEQ ID NO: 3059157 - RNA, 19 nt, Artificial Sequence
  Description of Artificial Sequence: Synthetic oligonucleotide
gucaaauacuauagcacaa

SEQ ID NO: 3059158 - RNA, 19 nt, Artificial Sequence
  Description of Artificial Sequence: Synthetic oligonucleotide
cagaaguuagacccagaga

SEQ ID NO: 3059159 - RNA, 19 nt, Artificial Sequence
  Description of Artificial Sequence: Synthetic oligonucleotide
cauuugucugcgaugaaau

SEQ ID NO: 3059160 - RNA, 19 nt, Artificial Sequence
  Description of Artificial Sequence: Synthetic oligonucleotide
cacauauuuucucuccuua

SEQ ID NO: 3059161 - RNA, 19 nt, Artificial Sequence
  Description of Artificial Sequence: Synthetic oligonucleotide
agacuaugaccccuuccau

SEQ ID NO: 3059162 - RNA, 19 nt, Artificial Sequence
  Description of Artificial Sequence: Synthetic oligonucleotide
acaauauuuugcacagaaa

SEQ ID NO: 3059163 - RNA, 19 nt, Artificial Sequence
  Description of Artificial Sequence: Synthetic oligonucleotide
ugucaacagugagacauuu

SEQ ID NO: 3059164 - RNA, 19 nt, Artificial Sequence
  Description of Artificial Sequence: Synthetic oligonucleotide
uggccagaaguuagaccca

SEQ ID NO: 3059165 - RNA, 19 nt, Artificial Sequence
  Description of Artificial Sequence: Synthetic oligonucleotide
ccucuuaacuuugagguuc

SEQ ID NO: 3059166 - RNA, 19 nt, Artificial Sequence
  Description of Artificial Sequence: Synthetic oligonucleotide
auaugucaacagugagaca

SEQ ID NO: 3059167 - RNA, 19 nt, Artificial Sequence
  Description of Artificial Sequence: Synthetic oligonucleotide
acccuucaaacuaucauuu

SEQ ID NO: 3059168 - RNA, 19 nt, Artificial Sequence
  Description of Artificial Sequence: Synthetic oligonucleotide
auuuugcacagaaaacauu

SEQ ID NO: 3059169 - RNA, 19 nt, Artificial Sequence
  Description of Artificial Sequence: Synthetic oligonucleotide
cuauagcacaaacauaauu

SEQ ID NO: 3059170 - RNA, 19 nt, Artificial Sequence
  Description of Artificial Sequence: Synthetic oligonucleotide
auggcacccucuuaacuuu

SEQ ID NO: 3059171 - RNA, 19 nt, Artificial Sequence
  Description of Artificial Sequence: Synthetic oligonucleotide
ugcgaugaaauggcacccu

SEQ ID NO: 3059172 - RNA, 19 nt, Artificial Sequence
  Description of Artificial Sequence: Synthetic oligonucleotide
uuccagcaugauguaacac

SEQ ID NO: 3059173 - RNA, 19 nt, Artificial Sequence
  Description of Artificial Sequence: Synthetic oligonucleotide
auacuauagcacaaacaua

SEQ ID NO: 3059174 - RNA, 19 nt, Artificial Sequence
  Description of Artificial Sequence: Synthetic oligonucleotide
augaaauggcacccucuua

SEQ ID NO: 3059175 - RNA, 19 nt, Artificial Sequence
  Description of Artificial Sequence: Synthetic oligonucleotide
acuuaacccuucaaacuau

SEQ ID NO: 3059176 - RNA, 19 nt, Artificial Sequence
  Description of Artificial Sequence: Synthetic oligonucleotide
acacuucaaaagaacuuaa

SEQ ID NO: 3059177 - RNA, 19 nt, Artificial Sequence
  Description of Artificial Sequence: Synthetic oligonucleotide
cagcaugauguaacacuuc

SEQ ID NO: 3059178 - RNA, 19 nt, Artificial Sequence
  Description of Artificial Sequence: Synthetic oligonucleotide
gaaguuagacccagagacu

SEQ ID NO: 3059179 - RNA, 19 nt, Artificial Sequence
  Description of Artificial Sequence: Synthetic oligonucleotide
auacaucuguacauuuaaa

SEQ ID NO: 3059180 - RNA, 19 nt, Artificial Sequence
  Description of Artificial Sequence: Synthetic oligonucleotide
aaguacucauuugcagguu

SEQ ID NO: 3059181 - RNA, 19 nt, Artificial Sequence
  Description of Artificial Sequence: Synthetic oligonucleotide
cacauggccagaaguuaga

SEQ ID NO: 3059182 - RNA, 19 nt, Artificial Sequence
  Description of Artificial Sequence: Synthetic oligonucleotide
acuauagcacaaacauaau

SEQ ID NO: 3059183 - RNA, 19 nt, Artificial Sequence
  Description of Artificial Sequence: Synthetic oligonucleotide
guucucaguggcacauggc

SEQ ID NO: 3059184 - RNA, 19 nt, Artificial Sequence
  Description of Artificial Sequence: Synthetic oligonucleotide
gcacauggccagaaguuag

SEQ ID NO: 3059185 - RNA, 19 nt, Artificial Sequence
  Description of Artificial Sequence: Synthetic oligonucleotide
cacaaacauaauuuacaau

SEQ ID NO: 3059186 - RNA, 19 nt, Artificial Sequence
  Description of Artificial Sequence: Synthetic oligonucleotide
guggcacauggccagaagu

SEQ ID NO: 3059187 - RNA, 19 nt, Artificial Sequence
  Description of Artificial Sequence: Synthetic oligonucleotide
gcacccucuuaacuuugag

SEQ ID NO: 3059188 - RNA, 19 nt, Artificial Sequence
  Description of Artificial Sequence: Synthetic oligonucleotide
ccuucaaacuaucauuugu

SEQ ID NO: 3059189 - RNA, 19 nt, Artificial Sequence
  Description of Artificial Sequence: Synthetic oligonucleotide
gcaguuaaauacaucugua

SEQ ID NO: 3059190 - RNA, 19 nt, Artificial Sequence
  Description of Artificial Sequence: Synthetic oligonucleotide
aguuagacccagagacuau

SEQ ID NO: 3059191 - RNA, 19 nt, Artificial Sequence
  Description of Artificial Sequence: Synthetic oligonucleotide
agaaaacauuacaccugaa

SEQ ID NO: 3059192 - RNA, 19 nt, Artificial Sequence
  Description of Artificial Sequence: Synthetic oligonucleotide
cagagacuaugaccccuuc

SEQ ID NO: 3059193 - RNA, 19 nt, Artificial Sequence
  Description of Artificial Sequence: Synthetic oligonucleotide
cucuuaacuuugagguucu

SEQ ID NO: 3059194 - RNA, 19 nt, Artificial Sequence
  Description of Artificial Sequence: Synthetic oligonucleotide
cccuucaaacuaucauuug

SEQ ID NO: 3059195 - RNA, 19 nt, Artificial Sequence
  Description of Artificial Sequence: Synthetic oligonucleotide
ucuuaacuuugagguucuc

SEQ ID NO: 3059196 - RNA, 19 nt, Artificial Sequence
  Description of Artificial Sequence: Synthetic oligonucleotide
ggccagaaguuagacccag

SEQ ID NO: 3059197 - RNA, 19 nt, Artificial Sequence
  Description of Artificial Sequence: Synthetic oligonucleotide
gcgaugaaauggcacccuc

SEQ ID NO: 3059198 - RNA, 19 nt, Artificial Sequence
  Description of Artificial Sequence: Synthetic oligonucleotide
agguuccagcaugauguaa

SEQ ID NO: 3059199 - RNA, 19 nt, Artificial Sequence
  Description of Artificial Sequence: Synthetic oligonucleotide
acauuacaccugaaauaua

SEQ ID NO: 3059200 - RNA, 19 nt, Artificial Sequence
  Description of Artificial Sequence: Synthetic oligonucleotide
agguucucaguggcacaug

SEQ ID NO: 3059201 - RNA, 19 nt, Artificial Sequence
  Description of Artificial Sequence: Synthetic oligonucleotide
augucaacagugagacauu

SEQ ID NO: 3059202 - RNA, 19 nt, Artificial Sequence
  Description of Artificial Sequence: Synthetic oligonucleotide
ggcacauggccagaaguua

SEQ ID NO: 3059203 - RNA, 19 nt, Artificial Sequence
  Description of Artificial Sequence: Synthetic oligonucleotide
uugcagguuccagcaugau

SEQ ID NO: 3059204 - RNA, 19 nt, Artificial Sequence
  Description of Artificial Sequence: Synthetic oligonucleotide
gcaugauguaacacuucaa

SEQ ID NO: 3059205 - RNA, 19 nt, Artificial Sequence
  Description of Artificial Sequence: Synthetic oligonucleotide
ccagcaugauguaacacuu

SEQ ID NO: 3059206 - RNA, 19 nt, Artificial Sequence
  Description of Artificial Sequence: Synthetic oligonucleotide
gugcagcaguuaaauacau

SEQ ID NO: 3059207 - RNA, 19 nt, Artificial Sequence
  Description of Artificial Sequence: Synthetic oligonucleotide
cauuugcagguuccagcau

SEQ ID NO: 3059208 - RNA, 19 nt, Artificial Sequence
  Description of Artificial Sequence: Synthetic oligonucleotide
gucaacagugagacauuuu

SEQ ID NO: 3059209 - RNA, 19 nt, Artificial Sequence
  Description of Artificial Sequence: Synthetic oligonucleotide
cgaugaaauggcacccucu

SEQ ID NO: 3059210 - RNA, 19 nt, Artificial Sequence
  Description of Artificial Sequence: Synthetic oligonucleotide
gccagaaguuagacccaga

SEQ ID NO: 3059211 - RNA, 19 nt, Artificial Sequence
  Description of Artificial Sequence: Synthetic oligonucleotide
ccagagacuaugaccccuu

SEQ ID NO: 3059212 - RNA, 19 nt, Artificial Sequence
  Description of Artificial Sequence: Synthetic oligonucleotide
cccagagacuaugaccccu

SEQ ID NO: 3059213 - RNA, 19 nt, Artificial Sequence
  Description of Artificial Sequence: Synthetic oligonucleotide
cccucuuaacuuugagguu

SEQ ID NO: 3059214 - RNA, 19 nt, Artificial Sequence
  Description of Artificial Sequence: Synthetic oligonucleotide
uucuugaugaacuugagug

SEQ ID NO: 3059215 - RNA, 19 nt, Artificial Sequence
  Description of Artificial Sequence: Synthetic oligonucleotide
cuuguugaggcccacagcc

SEQ ID NO: 3059216 - RNA, 19 nt, Artificial Sequence
  Description of Artificial Sequence: Synthetic oligonucleotide
uucuucgucaccuuguggc

SEQ ID NO: 3059217 - RNA, 19 nt, Artificial Sequence
  Description of Artificial Sequence: Synthetic oligonucleotide
uccuuggacaccuugagca

SEQ ID NO: 3059218 - RNA, 19 nt, Artificial Sequence
  Description of Artificial Sequence: Synthetic oligonucleotide
gaucaugucccguaccacg

SEQ ID NO: 3059219 - RNA, 19 nt, Artificial Sequence
  Description of Artificial Sequence: Synthetic oligonucleotide
uuguugauauucuucguca

SEQ ID NO: 3059220 - RNA, 19 nt, Artificial Sequence
  Description of Artificial Sequence: Synthetic oligonucleotide
ucuugaugaacuugagugc

SEQ ID NO: 3059221 - RNA, 19 nt, Artificial Sequence
  Description of Artificial Sequence: Synthetic oligonucleotide
aacuuggugugcuugguga

SEQ ID NO: 3059222 - RNA, 19 nt, Artificial Sequence
  Description of Artificial Sequence: Synthetic oligonucleotide
caugggauagugcagggcc

SEQ ID NO: 3059223 - RNA, 19 nt, Artificial Sequence
  Description of Artificial Sequence: Synthetic oligonucleotide
acagccaugggauagugca

SEQ ID NO: 3059224 - RNA, 19 nt, Artificial Sequence
  Description of Artificial Sequence: Synthetic oligonucleotide
cuugaugaacuugagugcg

SEQ ID NO: 3059225 - RNA, 19 nt, Artificial Sequence
  Description of Artificial Sequence: Synthetic oligonucleotide
uggcacgccgcucauaggg

SEQ ID NO: 3059226 - RNA, 19 nt, Artificial Sequence
  Description of Artificial Sequence: Synthetic oligonucleotide
gaugugagugcccaccugc

SEQ ID NO: 3059227 - RNA, 19 nt, Artificial Sequence
  Description of Artificial Sequence: Synthetic oligonucleotide
gauauucuucgucaccuug

SEQ ID NO: 3059228 - RNA, 19 nt, Artificial Sequence
  Description of Artificial Sequence: Synthetic oligonucleotide
ucauagggcgcgaagcugc

SEQ ID NO: 3059229 - RNA, 19 nt, Artificial Sequence
  Description of Artificial Sequence: Synthetic oligonucleotide
uugauauucuucgucaccu

SEQ ID NO: 3059230 - RNA, 19 nt, Artificial Sequence
  Description of Artificial Sequence: Synthetic oligonucleotide
cuugagugcgcacuugucc

SEQ ID NO: 3059231 - RNA, 19 nt, Artificial Sequence
  Description of Artificial Sequence: Synthetic oligonucleotide
ggcuuguugauauucuucg

SEQ ID NO: 3059232 - RNA, 19 nt, Artificial Sequence
  Description of Artificial Sequence: Synthetic oligonucleotide
uguugcuaggcuccucgcg

SEQ ID NO: 3059233 - RNA, 19 nt, Artificial Sequence
  Description of Artificial Sequence: Synthetic oligonucleotide
cuuggcuuggaugugagug

SEQ ID NO: 3059234 - RNA, 19 nt, Artificial Sequence
  Description of Artificial Sequence: Synthetic oligonucleotide
cuuguugauauucuucguc

SEQ ID NO: 3059235 - RNA, 19 nt, Artificial Sequence
  Description of Artificial Sequence: Synthetic oligonucleotide
uuccucuuggcuuggaugu

SEQ ID NO: 3059236 - RNA, 19 nt, Artificial Sequence
  Description of Artificial Sequence: Synthetic oligonucleotide
uauucuucgucaccuugug

SEQ ID NO: 3059237 - RNA, 19 nt, Artificial Sequence
  Description of Artificial Sequence: Synthetic oligonucleotide
uugagcagcuccauggcac

SEQ ID NO: 3059238 - RNA, 19 nt, Artificial Sequence
  Description of Artificial Sequence: Synthetic oligonucleotide
uagugcagggccauggcug

SEQ ID NO: 3059239 - RNA, 19 nt, Artificial Sequence
  Description of Artificial Sequence: Synthetic oligonucleotide
aacuugagugcgcacuugu

SEQ ID NO: 3059240 - RNA, 19 nt, Artificial Sequence
  Description of Artificial Sequence: Synthetic oligonucleotide
guugauauucuucgucacc

SEQ ID NO: 3059241 - RNA, 19 nt, Artificial Sequence
  Description of Artificial Sequence: Synthetic oligonucleotide
agugcagggccauggcugc

SEQ ID NO: 3059242 - RNA, 19 nt, Artificial Sequence
  Description of Artificial Sequence: Synthetic oligonucleotide
uguugauauucuucgucac

SEQ ID NO: 3059243 - RNA, 19 nt, Artificial Sequence
  Description of Artificial Sequence: Synthetic oligonucleotide
uugagugcgcacuuguccu

SEQ ID NO: 3059244 - RNA, 19 nt, Artificial Sequence
  Description of Artificial Sequence: Synthetic oligonucleotide
ucccguaccacgaaccaac

SEQ ID NO: 3059245 - RNA, 19 nt, Artificial Sequence
  Description of Artificial Sequence: Synthetic oligonucleotide
accaacuuggugugcuugg

SEQ ID NO: 3059246 - RNA, 19 nt, Artificial Sequence
  Description of Artificial Sequence: Synthetic oligonucleotide
guugcuaggcuccucgcgc

SEQ ID NO: 3059247 - RNA, 19 nt, Artificial Sequence
  Description of Artificial Sequence: Synthetic oligonucleotide
uuggcuuggaugugagugc

SEQ ID NO: 3059248 - RNA, 19 nt, Artificial Sequence
  Description of Artificial Sequence: Synthetic oligonucleotide
cauggcacgccgcucauag

SEQ ID NO: 3059249 - RNA, 19 nt, Artificial Sequence
  Description of Artificial Sequence: Synthetic oligonucleotide
ugagcagcuccauggcacg

SEQ ID NO: 3059250 - RNA, 19 nt, Artificial Sequence
  Description of Artificial Sequence: Synthetic oligonucleotide
uuggugaggcgcccgagcc

SEQ ID NO: 3059251 - RNA, 19 nt, Artificial Sequence
  Description of Artificial Sequence: Synthetic oligonucleotide
uugaugaacuugagugcgc

SEQ ID NO: 3059252 - RNA, 19 nt, Artificial Sequence
  Description of Artificial Sequence: Synthetic oligonucleotide
accacgaaccaacuuggug

SEQ ID NO: 3059253 - RNA, 19 nt, Artificial Sequence
  Description of Artificial Sequence: Synthetic oligonucleotide
cuuccucuuggcuuggaug

SEQ ID NO: 3059254 - RNA, 19 nt, Artificial Sequence
  Description of Artificial Sequence: Synthetic oligonucleotide
auucuucgucaccuugugg

SEQ ID NO: 3059255 - RNA, 19 nt, Artificial Sequence
  Description of Artificial Sequence: Synthetic oligonucleotide
ucuucgucaccuuguggcc

SEQ ID NO: 3059256 - RNA, 19 nt, Artificial Sequence
  Description of Artificial Sequence: Synthetic oligonucleotide
guaccacgaaccaacuugg

SEQ ID NO: 3059257 - RNA, 19 nt, Artificial Sequence
  Description of Artificial Sequence: Synthetic oligonucleotide
gauagugcagggccauggc

SEQ ID NO: 3059258 - RNA, 19 nt, Artificial Sequence
  Description of Artificial Sequence: Synthetic oligonucleotide
cugcacaccucccagauca

SEQ ID NO: 3059259 - RNA, 19 nt, Artificial Sequence
  Description of Artificial Sequence: Synthetic oligonucleotide
ugaugaacuugagugcgca

SEQ ID NO: 3059260 - RNA, 19 nt, Artificial Sequence
  Description of Artificial Sequence: Synthetic oligonucleotide
uguugaggcccacagccau

SEQ ID NO: 3059261 - RNA, 19 nt, Artificial Sequence
  Description of Artificial Sequence: Synthetic oligonucleotide
uuggacaccuugagcagcu

SEQ ID NO: 3059262 - RNA, 19 nt, Artificial Sequence
  Description of Artificial Sequence: Synthetic oligonucleotide
agccaugggauagugcagg

SEQ ID NO: 3059263 - RNA, 19 nt, Artificial Sequence
  Description of Artificial Sequence: Synthetic oligonucleotide
augaacuugagugcgcacu

SEQ ID NO: 3059264 - RNA, 19 nt, Artificial Sequence
  Description of Artificial Sequence: Synthetic oligonucleotide
accucccagaucauguccc

SEQ ID NO: 3059265 - RNA, 19 nt, Artificial Sequence
  Description of Artificial Sequence: Synthetic oligonucleotide
ugaacuugagugcgcacuu

SEQ ID NO: 3059266 - RNA, 19 nt, Artificial Sequence
  Description of Artificial Sequence: Synthetic oligonucleotide
augucccguaccacgaacc

SEQ ID NO: 3059267 - RNA, 19 nt, Artificial Sequence
  Description of Artificial Sequence: Synthetic oligonucleotide
uccucuccgaugguggccg

SEQ ID NO: 3059268 - RNA, 19 nt, Artificial Sequence
  Description of Artificial Sequence: Synthetic oligonucleotide
uagggcgcgaagcugcaca

SEQ ID NO: 3059269 - RNA, 19 nt, Artificial Sequence
  Description of Artificial Sequence: Synthetic oligonucleotide
caccuuguggcccuuguug

SEQ ID NO: 3059270 - RNA, 19 nt, Artificial Sequence
  Description of Artificial Sequence: Synthetic oligonucleotide
aguccuucuuggccgccgc

SEQ ID NO: 3059271 - RNA, 19 nt, Artificial Sequence
  Description of Artificial Sequence: Synthetic oligonucleotide
aaccaacuuggugugcuug

SEQ ID NO: 3059272 - RNA, 19 nt, Artificial Sequence
  Description of Artificial Sequence: Synthetic oligonucleotide
uuguggcccuuguugaggc

SEQ ID NO: 3059273 - RNA, 19 nt, Artificial Sequence
  Description of Artificial Sequence: Synthetic oligonucleotide
ugucccguaccacgaacca

SEQ ID NO: 3059274 - RNA, 19 nt, Artificial Sequence
  Description of Artificial Sequence: Synthetic oligonucleotide
auagugcagggccauggcu

SEQ ID NO: 3059275 - RNA, 19 nt, Artificial Sequence
  Description of Artificial Sequence: Synthetic oligonucleotide
cuuguggcccuuguugagg

SEQ ID NO: 3059276 - RNA, 19 nt, Artificial Sequence
  Description of Artificial Sequence: Synthetic oligonucleotide
uuggccgccgccuucugca

SEQ ID NO: 3059277 - RNA, 19 nt, Artificial Sequence
  Description of Artificial Sequence: Synthetic oligonucleotide
cagccuguugcuaggcucc

SEQ ID NO: 3059278 - RNA, 19 nt, Artificial Sequence
  Description of Artificial Sequence: Synthetic oligonucleotide
agaucaugucccguaccac

SEQ ID NO: 3059279 - RNA, 19 nt, Artificial Sequence
  Description of Artificial Sequence: Synthetic oligonucleotide
acaccucccagaucauguc

SEQ ID NO: 3059280 - RNA, 19 nt, Artificial Sequence
  Description of Artificial Sequence: Synthetic oligonucleotide
accuuguggcccuuguuga

SEQ ID NO: 3059281 - RNA, 19 nt, Artificial Sequence
  Description of Artificial Sequence: Synthetic oligonucleotide
cacgaaccaacuuggugug

SEQ ID NO: 3059282 - RNA, 19 nt, Artificial Sequence
  Description of Artificial Sequence: Synthetic oligonucleotide
auauucuucgucaccuugu

SEQ ID NO: 3059283 - RNA, 19 nt, Artificial Sequence
  Description of Artificial Sequence: Synthetic oligonucleotide
ugcgcacuuguccuuggac

SEQ ID NO: 3059284 - RNA, 19 nt, Artificial Sequence
  Description of Artificial Sequence: Synthetic oligonucleotide
gaugaacuugagugcgcac

SEQ ID NO: 3059285 - RNA, 19 nt, Artificial Sequence
  Description of Artificial Sequence: Synthetic oligonucleotide
ggcugcuccucuccgaugg

SEQ ID NO: 3059286 - RNA, 19 nt, Artificial Sequence
  Description of Artificial Sequence: Synthetic oligonucleotide
cuuggacaccuugagcagc

SEQ ID NO: 3059287 - RNA, 19 nt, Artificial Sequence
  Description of Artificial Sequence: Synthetic oligonucleotide
cguaccacgaaccaacuug

SEQ ID NO: 3059288 - RNA, 19 nt, Artificial Sequence
  Description of Artificial Sequence: Synthetic oligonucleotide
cuuggugaggcgcccgagc

SEQ ID NO: 3059289 - RNA, 19 nt, Artificial Sequence
  Description of Artificial Sequence: Synthetic oligonucleotide
agcagcuccauggcacgcc

SEQ ID NO: 3059290 - RNA, 19 nt, Artificial Sequence
  Description of Artificial Sequence: Synthetic oligonucleotide
gugagugcccaccugcuuc

SEQ ID NO: 3059291 - RNA, 19 nt, Artificial Sequence
  Description of Artificial Sequence: Synthetic oligonucleotide
agggcgcgaagcugcacac

SEQ ID NO: 3059292 - RNA, 19 nt, Artificial Sequence
  Description of Artificial Sequence: Synthetic oligonucleotide
uccucgcgcuuccucuugg

SEQ ID NO: 3059293 - RNA, 19 nt, Artificial Sequence
  Description of Artificial Sequence: Synthetic oligonucleotide
accugcuucuugaugaacu

SEQ ID NO: 3059294 - RNA, 19 nt, Artificial Sequence
  Description of Artificial Sequence: Synthetic oligonucleotide
cagaucaugucccguacca

SEQ ID NO: 3059295 - RNA, 19 nt, Artificial Sequence
  Description of Artificial Sequence: Synthetic oligonucleotide
uggcuuggaugugagugcc

SEQ ID NO: 3059296 - RNA, 19 nt, Artificial Sequence
  Description of Artificial Sequence: Synthetic oligonucleotide
ggauagugcagggccaugg

SEQ ID NO: 3059297 - RNA, 19 nt, Artificial Sequence
  Description of Artificial Sequence: Synthetic oligonucleotide
caccucccagaucaugucc

SEQ ID NO: 3059298 - RNA, 19 nt, Artificial Sequence
  Description of Artificial Sequence: Synthetic oligonucleotide
ugguggccgcgacaggaag

SEQ ID NO: 3059299 - RNA, 19 nt, Artificial Sequence
  Description of Artificial Sequence: Synthetic oligonucleotide
uucgucaccuuguggcccu

SEQ ID NO: 3059300 - RNA, 19 nt, Artificial Sequence
  Description of Artificial Sequence: Synthetic oligonucleotide
ugcauggccgccagccugu

SEQ ID NO: 3059301 - RNA, 19 nt, Artificial Sequence
  Description of Artificial Sequence: Synthetic oligonucleotide
cucuuggcuuggaugugag

SEQ ID NO: 3059302 - RNA, 19 nt, Artificial Sequence
  Description of Artificial Sequence: Synthetic oligonucleotide
ccuguugcuaggcuccucg

SEQ ID NO: 3059303 - RNA, 19 nt, Artificial Sequence
  Description of Artificial Sequence: Synthetic oligonucleotide
agugcgcacuuguccuugg

SEQ ID NO: 3059304 - RNA, 19 nt, Artificial Sequence
  Description of Artificial Sequence: Synthetic oligonucleotide
gaggcccacagccauggga

SEQ ID NO: 3059305 - RNA, 19 nt, Artificial Sequence
  Description of Artificial Sequence: Synthetic oligonucleotide
caugucccguaccacgaac

SEQ ID NO: 3059306 - RNA, 19 nt, Artificial Sequence
  Description of Artificial Sequence: Synthetic oligonucleotide
guccuuggacaccuugagc

SEQ ID NO: 3059307 - RNA, 19 nt, Artificial Sequence
  Description of Artificial Sequence: Synthetic oligonucleotide
uggugugcuuggugaggcg

SEQ ID NO: 3059308 - RNA, 19 nt, Artificial Sequence
  Description of Artificial Sequence: Synthetic oligonucleotide
cuucgucaccuuguggccc

SEQ ID NO: 3059309 - RNA, 19 nt, Artificial Sequence
  Description of Artificial Sequence: Synthetic oligonucleotide
ugauauucuucgucaccuu

SEQ ID NO: 3059310 - RNA, 19 nt, Artificial Sequence
  Description of Artificial Sequence: Synthetic oligonucleotide
ucccagaucaugucccgua

SEQ ID NO: 3059311 - RNA, 19 nt, Artificial Sequence
  Description of Artificial Sequence: Synthetic oligonucleotide
agcuccauggcacgccgcu

SEQ ID NO: 3059312 - RNA, 19 nt, Artificial Sequence
  Description of Artificial Sequence: Synthetic oligonucleotide
acuugagugcgcacuuguc

SEQ ID NO: 3059313 - RNA, 19 nt, Artificial Sequence
  Description of Artificial Sequence: Synthetic oligonucleotide
agccucggcuuguugauau

SEQ ID NO: 3059314 - RNA, 19 nt, Artificial Sequence
  Description of Artificial Sequence: Synthetic oligonucleotide
cacagccaugggauagugc

SEQ ID NO: 3059315 - RNA, 19 nt, Artificial Sequence
  Description of Artificial Sequence: Synthetic oligonucleotide
uugcuaggcuccucgcgcu

SEQ ID NO: 3059316 - RNA, 19 nt, Artificial Sequence
  Description of Artificial Sequence: Synthetic oligonucleotide
ucggcuuguugauauucuu

SEQ ID NO: 3059317 - RNA, 19 nt, Artificial Sequence
  Description of Artificial Sequence: Synthetic oligonucleotide
uccgaugguggccgcgaca

SEQ ID NO: 3059318 - RNA, 19 nt, Artificial Sequence
  Description of Artificial Sequence: Synthetic oligonucleotide
ucaugucccguaccacgaa

SEQ ID NO: 3059319 - RNA, 19 nt, Artificial Sequence
  Description of Artificial Sequence: Synthetic oligonucleotide
aucaugucccguaccacga

SEQ ID NO: 3059320 - RNA, 19 nt, Artificial Sequence
  Description of Artificial Sequence: Synthetic oligonucleotide
gaacuugagugcgcacuug

SEQ ID NO: 3059321 - RNA, 19 nt, Artificial Sequence
  Description of Artificial Sequence: Synthetic oligonucleotide
acgaaccaacuuggugugc

SEQ ID NO: 3059322 - RNA, 19 nt, Artificial Sequence
  Description of Artificial Sequence: Synthetic oligonucleotide
ugcuuggugaggcgcccga

SEQ ID NO: 3059323 - RNA, 19 nt, Artificial Sequence
  Description of Artificial Sequence: Synthetic oligonucleotide
ugugcuuggugaggcgccc

SEQ ID NO: 3059324 - RNA, 19 nt, Artificial Sequence
  Description of Artificial Sequence: Synthetic oligonucleotide
cuuggaugugagugcccac

SEQ ID NO: 3059325 - RNA, 19 nt, Artificial Sequence
  Description of Artificial Sequence: Synthetic oligonucleotide
uaccacgaaccaacuuggu

SEQ ID NO: 3059326 - RNA, 19 nt, Artificial Sequence
  Description of Artificial Sequence: Synthetic oligonucleotide
ucuuggcuuggaugugagu

SEQ ID NO: 3059327 - RNA, 19 nt, Artificial Sequence
  Description of Artificial Sequence: Synthetic oligonucleotide
cagccaugggauagugcag

SEQ ID NO: 3059328 - RNA, 19 nt, Artificial Sequence
  Description of Artificial Sequence: Synthetic oligonucleotide
cucauagggcgcgaagcug

SEQ ID NO: 3059329 - RNA, 19 nt, Artificial Sequence
  Description of Artificial Sequence: Synthetic oligonucleotide
ggacaccuugagcagcucc

SEQ ID NO: 3059330 - RNA, 19 nt, Artificial Sequence
  Description of Artificial Sequence: Synthetic oligonucleotide
cuguugcuaggcuccucgc

SEQ ID NO: 3059331 - RNA, 19 nt, Artificial Sequence
  Description of Artificial Sequence: Synthetic oligonucleotide
agugcccaccugcuucuug

SEQ ID NO: 3059332 - RNA, 19 nt, Artificial Sequence
  Description of Artificial Sequence: Synthetic oligonucleotide
ucgcgcuuccucuuggcuu

SEQ ID NO: 3059333 - RNA, 19 nt, Artificial Sequence
  Description of Artificial Sequence: Synthetic oligonucleotide
auggcugcuccucuccgau

SEQ ID NO: 3059334 - RNA, 19 nt, Artificial Sequence
  Description of Artificial Sequence: Synthetic oligonucleotide
cuaggcuccucgcgcuucc

SEQ ID NO: 3059335 - RNA, 19 nt, Artificial Sequence
  Description of Artificial Sequence: Synthetic oligonucleotide
ugaggcccacagccauggg

SEQ ID NO: 3059336 - RNA, 19 nt, Artificial Sequence
  Description of Artificial Sequence: Synthetic oligonucleotide
gccgccuucugcauggccg

SEQ ID NO: 3059337 - RNA, 19 nt, Artificial Sequence
  Description of Artificial Sequence: Synthetic oligonucleotide
auggcacgccgcucauagg

SEQ ID NO: 3059338 - RNA, 19 nt, Artificial Sequence
  Description of Artificial Sequence: Synthetic oligonucleotide
uggugaggcgcccgagccu

SEQ ID NO: 3059339 - RNA, 19 nt, Artificial Sequence
  Description of Artificial Sequence: Synthetic oligonucleotide
uguggcccuuguugaggcc

SEQ ID NO: 3059340 - RNA, 19 nt, Artificial Sequence
  Description of Artificial Sequence: Synthetic oligonucleotide
cuucuugaugaacuugagu

SEQ ID NO: 3059341 - RNA, 19 nt, Artificial Sequence
  Description of Artificial Sequence: Synthetic oligonucleotide
ucuccgaugguggccgcga

SEQ ID NO: 3059342 - RNA, 19 nt, Artificial Sequence
  Description of Artificial Sequence: Synthetic oligonucleotide
gugcccaccugcuucuuga

SEQ ID NO: 3059343 - RNA, 19 nt, Artificial Sequence
  Description of Artificial Sequence: Synthetic oligonucleotide
gagugcgcacuuguccuug

SEQ ID NO: 3059344 - RNA, 19 nt, Artificial Sequence
  Description of Artificial Sequence: Synthetic oligonucleotide
ggugugcuuggugaggcgc

SEQ ID NO: 3059345 - RNA, 19 nt, Artificial Sequence
  Description of Artificial Sequence: Synthetic oligonucleotide
cacgccgcucauagggcgc

SEQ ID NO: 3059346 - RNA, 19 nt, Artificial Sequence
  Description of Artificial Sequence: Synthetic oligonucleotide
uucuuggccgccgccuucu

SEQ ID NO: 3059347 - RNA, 19 nt, Artificial Sequence
  Description of Artificial Sequence: Synthetic oligonucleotide
cacaccucccagaucaugu

SEQ ID NO: 3059348 - RNA, 19 nt, Artificial Sequence
  Description of Artificial Sequence: Synthetic oligonucleotide
aggcuccucgcgcuuccuc

SEQ ID NO: 3059349 - RNA, 19 nt, Artificial Sequence
  Description of Artificial Sequence: Synthetic oligonucleotide
cuuggccgccgccuucugc

SEQ ID NO: 3059350 - RNA, 19 nt, Artificial Sequence
  Description of Artificial Sequence: Synthetic oligonucleotide
ccacgaaccaacuuggugu

SEQ ID NO: 3059351 - RNA, 19 nt, Artificial Sequence
  Description of Artificial Sequence: Synthetic oligonucleotide
aggcccacagccaugggau

SEQ ID NO: 3059352 - RNA, 19 nt, Artificial Sequence
  Description of Artificial Sequence: Synthetic oligonucleotide
gcagcuccauggcacgccg

SEQ ID NO: 3059353 - RNA, 19 nt, Artificial Sequence
  Description of Artificial Sequence: Synthetic oligonucleotide
gcacgccgcucauagggcg

SEQ ID NO: 3059354 - RNA, 19 nt, Artificial Sequence
  Description of Artificial Sequence: Synthetic oligonucleotide
ugggauagugcagggccau

SEQ ID NO: 3059355 - RNA, 19 nt, Artificial Sequence
  Description of Artificial Sequence: Synthetic oligonucleotide
ugagugcgcacuuguccuu

SEQ ID NO: 3059356 - RNA, 19 nt, Artificial Sequence
  Description of Artificial Sequence: Synthetic oligonucleotide
gccaugggauagugcaggg

SEQ ID NO: 3059357 - RNA, 19 nt, Artificial Sequence
  Description of Artificial Sequence: Synthetic oligonucleotide
uccucuuggcuuggaugug

SEQ ID NO: 3059358 - RNA, 19 nt, Artificial Sequence
  Description of Artificial Sequence: Synthetic oligonucleotide
gccgccagccuguugcuag

SEQ ID NO: 3059359 - RNA, 19 nt, Artificial Sequence
  Description of Artificial Sequence: Synthetic oligonucleotide
gcgcacuuguccuuggaca

SEQ ID NO: 3059360 - RNA, 19 nt, Artificial Sequence
  Description of Artificial Sequence: Synthetic oligonucleotide
gugugcuuggugaggcgcc

SEQ ID NO: 3059361 - RNA, 19 nt, Artificial Sequence
  Description of Artificial Sequence: Synthetic oligonucleotide
gccgccgccuucugcaugg

SEQ ID NO: 3059362 - RNA, 19 nt, Artificial Sequence
  Description of Artificial Sequence: Synthetic oligonucleotide
auagggcgcgaagcugcac

SEQ ID NO: 3059363 - RNA, 19 nt, Artificial Sequence
  Description of Artificial Sequence: Synthetic oligonucleotide
cccuuguugaggcccacag

SEQ ID NO: 3059364 - RNA, 19 nt, Artificial Sequence
  Description of Artificial Sequence: Synthetic oligonucleotide
augggauagugcagggcca

SEQ ID NO: 3059365 - RNA, 19 nt, Artificial Sequence
  Description of Artificial Sequence: Synthetic oligonucleotide
caguccuucuuggccgccg

SEQ ID NO: 3059366 - RNA, 19 nt, Artificial Sequence
  Description of Artificial Sequence: Synthetic oligonucleotide
guugaggcccacagccaug

SEQ ID NO: 3059367 - RNA, 19 nt, Artificial Sequence
  Description of Artificial Sequence: Synthetic oligonucleotide
ugaggcgcccgagccucgg

SEQ ID NO: 3059368 - RNA, 19 nt, Artificial Sequence
  Description of Artificial Sequence: Synthetic oligonucleotide
ccagaucaugucccguacc

SEQ ID NO: 3059369 - RNA, 19 nt, Artificial Sequence
  Description of Artificial Sequence: Synthetic oligonucleotide
cuccucuccgaugguggcc

SEQ ID NO: 3059370 - RNA, 19 nt, Artificial Sequence
  Description of Artificial Sequence: Synthetic oligonucleotide
ccagccuguugcuaggcuc

SEQ ID NO: 3059371 - RNA, 19 nt, Artificial Sequence
  Description of Artificial Sequence: Synthetic oligonucleotide
uggcugcuccucuccgaug

SEQ ID NO: 3059372 - RNA, 19 nt, Artificial Sequence
  Description of Artificial Sequence: Synthetic oligonucleotide
augugagugcccaccugcu

SEQ ID NO: 3059373 - RNA, 19 nt, Artificial Sequence
  Description of Artificial Sequence: Synthetic oligonucleotide
ccuuguugaggcccacagc

SEQ ID NO: 3059374 - RNA, 19 nt, Artificial Sequence
  Description of Artificial Sequence: Synthetic oligonucleotide
cauggcugcuccucuccga

SEQ ID NO: 3059375 - RNA, 19 nt, Artificial Sequence
  Description of Artificial Sequence: Synthetic oligonucleotide
cgcacuuguccuuggacac

SEQ ID NO: 3059376 - RNA, 19 nt, Artificial Sequence
  Description of Artificial Sequence: Synthetic oligonucleotide
cuucuuggccgccgccuuc

SEQ ID NO: 3059377 - RNA, 19 nt, Artificial Sequence
  Description of Artificial Sequence: Synthetic oligonucleotide
ucuuggccgccgccuucug

SEQ ID NO: 3059378 - RNA, 19 nt, Artificial Sequence
  Description of Artificial Sequence: Synthetic oligonucleotide
acgccgcucauagggcgcg

SEQ ID NO: 3059379 - RNA, 19 nt, Artificial Sequence
  Description of Artificial Sequence: Synthetic oligonucleotide
gcuuggaugugagugccca

SEQ ID NO: 3059380 - RNA, 19 nt, Artificial Sequence
  Description of Artificial Sequence: Synthetic oligonucleotide
gagcagcuccauggcacgc

SEQ ID NO: 3059381 - RNA, 19 nt, Artificial Sequence
  Description of Artificial Sequence: Synthetic oligonucleotide
ccgaugguggccgcgacag

SEQ ID NO: 3059382 - RNA, 19 nt, Artificial Sequence
  Description of Artificial Sequence: Synthetic oligonucleotide
cauagggcgcgaagcugca

SEQ ID NO: 3059383 - RNA, 19 nt, Artificial Sequence
  Description of Artificial Sequence: Synthetic oligonucleotide
cgcgaagcugcacaccucc

SEQ ID NO: 3059384 - RNA, 19 nt, Artificial Sequence
  Description of Artificial Sequence: Synthetic oligonucleotide
ccuuguggcccuuguugag

SEQ ID NO: 3059385 - RNA, 19 nt, Artificial Sequence
  Description of Artificial Sequence: Synthetic oligonucleotide
cucggcuuguugauauucu

SEQ ID NO: 3059386 - RNA, 19 nt, Artificial Sequence
  Description of Artificial Sequence: Synthetic oligonucleotide
ugcacaccucccagaucau

SEQ ID NO: 3059387 - RNA, 19 nt, Artificial Sequence
  Description of Artificial Sequence: Synthetic oligonucleotide
ccucccagaucaugucccg

SEQ ID NO: 3059388 - RNA, 19 nt, Artificial Sequence
  Description of Artificial Sequence: Synthetic oligonucleotide
cucuccgaugguggccgcg

SEQ ID NO: 3059389 - RNA, 19 nt, Artificial Sequence
  Description of Artificial Sequence: Synthetic oligonucleotide
cugcuccucuccgauggug

SEQ ID NO: 3059390 - RNA, 19 nt, Artificial Sequence
  Description of Artificial Sequence: Synthetic oligonucleotide
aggcgcccgagccucggcu

SEQ ID NO: 3059391 - RNA, 19 nt, Artificial Sequence
  Description of Artificial Sequence: Synthetic oligonucleotide
guccuucuuggccgccgcc

SEQ ID NO: 3059392 - RNA, 19 nt, Artificial Sequence
  Description of Artificial Sequence: Synthetic oligonucleotide
gugcuuggugaggcgcccg

SEQ ID NO: 3059393 - RNA, 19 nt, Artificial Sequence
  Description of Artificial Sequence: Synthetic oligonucleotide
cuccucgcgcuuccucuug

SEQ ID NO: 3059394 - RNA, 19 nt, Artificial Sequence
  Description of Artificial Sequence: Synthetic oligonucleotide
ugcuaggcuccucgcgcuu

SEQ ID NO: 3059395 - RNA, 19 nt, Artificial Sequence
  Description of Artificial Sequence: Synthetic oligonucleotide
gcccacagccaugggauag

SEQ ID NO: 3059396 - RNA, 19 nt, Artificial Sequence
  Description of Artificial Sequence: Synthetic oligonucleotide
caccugcuucuugaugaac

SEQ ID NO: 3059397 - RNA, 19 nt, Artificial Sequence
  Description of Artificial Sequence: Synthetic oligonucleotide
cagcuccauggcacgccgc

SEQ ID NO: 3059398 - RNA, 19 nt, Artificial Sequence
  Description of Artificial Sequence: Synthetic oligonucleotide
cccagaucaugucccguac

SEQ ID NO: 3059399 - RNA, 19 nt, Artificial Sequence
  Description of Artificial Sequence: Synthetic oligonucleotide
ugcccaccugcuucuugau

SEQ ID NO: 3059400 - RNA, 19 nt, Artificial Sequence
  Description of Artificial Sequence: Synthetic oligonucleotide
gcuccucuccgaugguggc

SEQ ID NO: 3059401 - RNA, 19 nt, Artificial Sequence
  Description of Artificial Sequence: Synthetic oligonucleotide
ggugaggcgcccgagccuc

SEQ ID NO: 3059402 - RNA, 19 nt, Artificial Sequence
  Description of Artificial Sequence: Synthetic oligonucleotide
ccauggcugcuccucuccg

SEQ ID NO: 3059403 - RNA, 19 nt, Artificial Sequence
  Description of Artificial Sequence: Synthetic oligonucleotide
cggcuuguugauauucuuc

SEQ ID NO: 3059404 - RNA, 19 nt, Artificial Sequence
  Description of Artificial Sequence: Synthetic oligonucleotide
ggcgcgaagcugcacaccu

SEQ ID NO: 3059405 - RNA, 19 nt, Artificial Sequence
  Description of Artificial Sequence: Synthetic oligonucleotide
gaggcgcccgagccucggc

SEQ ID NO: 3059406 - RNA, 19 nt, Artificial Sequence
  Description of Artificial Sequence: Synthetic oligonucleotide
cgcucauagggcgcgaagc

SEQ ID NO: 3059407 - RNA, 19 nt, Artificial Sequence
  Description of Artificial Sequence: Synthetic oligonucleotide
gcucauagggcgcgaagcu

SEQ ID NO: 3059408 - RNA, 19 nt, Artificial Sequence
  Description of Artificial Sequence: Synthetic oligonucleotide
cgcgcuuccucuuggcuug

SEQ ID NO: 3059409 - RNA, 19 nt, Artificial Sequence
  Description of Artificial Sequence: Synthetic oligonucleotide
ccucggcuuguugauauuc

SEQ ID NO: 3059410 - RNA, 19 nt, Artificial Sequence
  Description of Artificial Sequence: Synthetic oligonucleotide
cuccgaugguggccgcgac

SEQ ID NO: 3059411 - RNA, 19 nt, Artificial Sequence
  Description of Artificial Sequence: Synthetic oligonucleotide
ccaugggauagugcagggc

SEQ ID NO: 3059412 - RNA, 19 nt, Artificial Sequence
  Description of Artificial Sequence: Synthetic oligonucleotide
gcuuguugauauucuucgu

SEQ ID NO: 3059413 - RNA, 19 nt, Artificial Sequence
  Description of Artificial Sequence: Synthetic oligonucleotide
ccgccuucugcauggccgc

SEQ ID NO: 3059414 - RNA, 19 nt, Artificial Sequence
  Description of Artificial Sequence: Synthetic oligonucleotide
gcacuuguccuuggacacc

SEQ ID NO: 3059415 - RNA, 19 nt, Artificial Sequence
  Description of Artificial Sequence: Synthetic oligonucleotide
gaaccaacuuggugugcuu

SEQ ID NO: 3059416 - RNA, 19 nt, Artificial Sequence
  Description of Artificial Sequence: Synthetic oligonucleotide
cauggccgccagccuguug

SEQ ID NO: 3059417 - RNA, 19 nt, Artificial Sequence
  Description of Artificial Sequence: Synthetic oligonucleotide
ccgagccucggcuuguuga

SEQ ID NO: 3059418 - RNA, 19 nt, Artificial Sequence
  Description of Artificial Sequence: Synthetic oligonucleotide
gugcgcacuuguccuugga

SEQ ID NO: 3059419 - RNA, 19 nt, Artificial Sequence
  Description of Artificial Sequence: Synthetic oligonucleotide
gcccaccugcuucuugaug

SEQ ID NO: 3059420 - RNA, 19 nt, Artificial Sequence
  Description of Artificial Sequence: Synthetic oligonucleotide
ggcacgccgcucauagggc

SEQ ID NO: 3059421 - RNA, 19 nt, Artificial Sequence
  Description of Artificial Sequence: Synthetic oligonucleotide
augguggccgcgacaggaa

SEQ ID NO: 3059422 - RNA, 19 nt, Artificial Sequence
  Description of Artificial Sequence: Synthetic oligonucleotide
gucccguaccacgaaccaa

SEQ ID NO: 3059423 - RNA, 19 nt, Artificial Sequence
  Description of Artificial Sequence: Synthetic oligonucleotide
gcacaccucccagaucaug

SEQ ID NO: 3059424 - RNA, 19 nt, Artificial Sequence
  Description of Artificial Sequence: Synthetic oligonucleotide
agccuguugcuaggcuccu

SEQ ID NO: 3059425 - RNA, 19 nt, Artificial Sequence
  Description of Artificial Sequence: Synthetic oligonucleotide
uaggcuccucgcgcuuccu

SEQ ID NO: 3059426 - RNA, 19 nt, Artificial Sequence
  Description of Artificial Sequence: Synthetic oligonucleotide
gcuuggugaggcgcccgag

SEQ ID NO: 3059427 - RNA, 19 nt, Artificial Sequence
  Description of Artificial Sequence: Synthetic oligonucleotide
ggcuuggaugugagugccc

SEQ ID NO: 3059428 - RNA, 19 nt, Artificial Sequence
  Description of Artificial Sequence: Synthetic oligonucleotide
ccucgcgcuuccucuuggc

SEQ ID NO: 3059429 - RNA, 19 nt, Artificial Sequence
  Description of Artificial Sequence: Synthetic oligonucleotide
gugaggcgcccgagccucg

SEQ ID NO: 3059430 - RNA, 19 nt, Artificial Sequence
  Description of Artificial Sequence: Synthetic oligonucleotide
cucgcgcuuccucuuggcu

SEQ ID NO: 3059431 - RNA, 19 nt, Artificial Sequence
  Description of Artificial Sequence: Synthetic oligonucleotide
gggauagugcagggccaug

SEQ ID NO: 3059432 - RNA, 19 nt, Artificial Sequence
  Description of Artificial Sequence: Synthetic oligonucleotide
ccgccagccuguugcuagg

SEQ ID NO: 3059433 - RNA, 19 nt, Artificial Sequence
  Description of Artificial Sequence: Synthetic oligonucleotide
uggccgccgccuucugcau

SEQ ID NO: 3059434 - RNA, 19 nt, Artificial Sequence
  Description of Artificial Sequence: Synthetic oligonucleotide
ccgcucauagggcgcgaag

SEQ ID NO: 3059435 - RNA, 19 nt, Artificial Sequence
  Description of Artificial Sequence: Synthetic oligonucleotide
cgaagcugcacaccuccca

SEQ ID NO: 3059436 - RNA, 19 nt, Artificial Sequence
  Description of Artificial Sequence: Synthetic oligonucleotide
gcgaagcugcacaccuccc

SEQ ID NO: 3059437 - RNA, 19 nt, Artificial Sequence
  Description of Artificial Sequence: Synthetic oligonucleotide
gagccucggcuuguugaua

SEQ ID NO: 3059438 - RNA, 19 nt, Artificial Sequence
  Description of Artificial Sequence: Synthetic oligonucleotide
ccacagccaugggauagug

SEQ ID NO: 3059439 - RNA, 19 nt, Artificial Sequence
  Description of Artificial Sequence: Synthetic oligonucleotide
gcuaggcuccucgcgcuuc

SEQ ID NO: 3059440 - RNA, 19 nt, Artificial Sequence
  Description of Artificial Sequence: Synthetic oligonucleotide
ccucuuggcuuggauguga

SEQ ID NO: 3059441 - RNA, 19 nt, Artificial Sequence
  Description of Artificial Sequence: Synthetic oligonucleotide
ggccgccgccuucugcaug

SEQ ID NO: 3059442 - RNA, 19 nt, Artificial Sequence
  Description of Artificial Sequence: Synthetic oligonucleotide
gcgcccgagccucggcuug

SEQ ID NO: 3059443 - RNA, 19 nt, Artificial Sequence
  Description of Artificial Sequence: Synthetic oligonucleotide
gggcgcgaagcugcacacc

SEQ ID NO: 3059444 - RNA, 19 nt, Artificial Sequence
  Description of Artificial Sequence: Synthetic oligonucleotide
ccaccugcuucuugaugaa

SEQ ID NO: 3059445 - RNA, 19 nt, Artificial Sequence
  Description of Artificial Sequence: Synthetic oligonucleotide
cucccagaucaugucccgu

SEQ ID NO: 3059446 - RNA, 19 nt, Artificial Sequence
  Description of Artificial Sequence: Synthetic oligonucleotide
cgaaccaacuuggugugcu

SEQ ID NO: 3059447 - RNA, 19 nt, Artificial Sequence
  Description of Artificial Sequence: Synthetic oligonucleotide
gcuccauggcacgccgcuc

SEQ ID NO: 3059448 - RNA, 19 nt, Artificial Sequence
  Description of Artificial Sequence: Synthetic oligonucleotide
ccucuccgaugguggccgc

SEQ ID NO: 3059449 - RNA, 19 nt, Artificial Sequence
  Description of Artificial Sequence: Synthetic oligonucleotide
gcgcuuccucuuggcuugg

SEQ ID NO: 3059450 - RNA, 19 nt, Artificial Sequence
  Description of Artificial Sequence: Synthetic oligonucleotide
gccagccuguugcuaggcu

SEQ ID NO: 3059451 - RNA, 19 nt, Artificial Sequence
  Description of Artificial Sequence: Synthetic oligonucleotide
ucgucaccuuguggcccuu

SEQ ID NO: 3059452 - RNA, 19 nt, Artificial Sequence
  Description of Artificial Sequence: Synthetic oligonucleotide
cccgagccucggcuuguug

SEQ ID NO: 3059453 - RNA, 19 nt, Artificial Sequence
  Description of Artificial Sequence: Synthetic oligonucleotide
ggcccacagccaugggaua

SEQ ID NO: 3059454 - RNA, 19 nt, Artificial Sequence
  Description of Artificial Sequence: Synthetic oligonucleotide
gcccuuguugaggcccaca

SEQ ID NO: 3059455 - RNA, 19 nt, Artificial Sequence
  Description of Artificial Sequence: Synthetic oligonucleotide
gcgcgaagcugcacaccuc

SEQ ID NO: 3059456 - RNA, 19 nt, Artificial Sequence
  Description of Artificial Sequence: Synthetic oligonucleotide
cgccgccuucugcauggcc

SEQ ID NO: 3059457 - RNA, 19 nt, Artificial Sequence
  Description of Artificial Sequence: Synthetic oligonucleotide
gccuguugcuaggcuccuc

SEQ ID NO: 3059458 - RNA, 19 nt, Artificial Sequence
  Description of Artificial Sequence: Synthetic oligonucleotide
gcugcuccucuccgauggu

SEQ ID NO: 3059459 - RNA, 19 nt, Artificial Sequence
  Description of Artificial Sequence: Synthetic oligonucleotide
cccguaccacgaaccaacu

SEQ ID NO: 3059460 - RNA, 19 nt, Artificial Sequence
  Description of Artificial Sequence: Synthetic oligonucleotide
cagggccauggcugcuccu

SEQ ID NO: 3059461 - RNA, 19 nt, Artificial Sequence
  Description of Artificial Sequence: Synthetic oligonucleotide
cgccagccuguugcuaggc

SEQ ID NO: 3059462 - RNA, 19 nt, Artificial Sequence
  Description of Artificial Sequence: Synthetic oligonucleotide
gccgcucauagggcgcgaa

SEQ ID NO: 3059463 - RNA, 19 nt, Artificial Sequence
  Description of Artificial Sequence: Synthetic oligonucleotide
cgagccucggcuuguugau

SEQ ID NO: 3059464 - RNA, 19 nt, Artificial Sequence
  Description of Artificial Sequence: Synthetic oligonucleotide
ggcgcccgagccucggcuu

SEQ ID NO: 3059465 - RNA, 19 nt, Artificial Sequence
  Description of Artificial Sequence: Synthetic oligonucleotide
gagugcccaccugcuucuu

SEQ ID NO: 3059466 - RNA, 19 nt, Artificial Sequence
  Description of Artificial Sequence: Synthetic oligonucleotide
cgucaccuuguggcccuug

SEQ ID NO: 3059467 - RNA, 19 nt, Artificial Sequence
  Description of Artificial Sequence: Synthetic oligonucleotide
cccacagccaugggauagu

SEQ ID NO: 3059468 - RNA, 19 nt, Artificial Sequence
  Description of Artificial Sequence: Synthetic oligonucleotide
ccuucuuggccgccgccuu

SEQ ID NO: 3059469 - RNA, 19 nt, Artificial Sequence
  Description of Artificial Sequence: Synthetic oligonucleotide
ccguaccacgaaccaacuu

SEQ ID NO: 3059470 - RNA, 19 nt, Artificial Sequence
  Description of Artificial Sequence: Synthetic oligonucleotide
gccucggcuuguugauauu

SEQ ID NO: 3059471 - RNA, 19 nt, Artificial Sequence
  Description of Artificial Sequence: Synthetic oligonucleotide
ccgccgccuucugcauggc

SEQ ID NO: 3059472 - RNA, 19 nt, Artificial Sequence
  Description of Artificial Sequence: Synthetic oligonucleotide
ccauggcacgccgcucaua

SEQ ID NO: 3059473 - RNA, 19 nt, Artificial Sequence
  Description of Artificial Sequence: Synthetic oligonucleotide
gcauggccgccagccuguu

SEQ ID NO: 3059474 - RNA, 19 nt, Artificial Sequence
  Description of Artificial Sequence: Synthetic oligonucleotide
gcccgagccucggcuuguu

SEQ ID NO: 3059475 - RNA, 19 nt, Artificial Sequence
  Description of Artificial Sequence: Synthetic oligonucleotide
cgccgcucauagggcgcga

SEQ ID NO: 3059476 - RNA, 19 nt, Artificial Sequence
  Description of Artificial Sequence: Synthetic oligonucleotide
cgcccgagccucggcuugu

SEQ ID NO: 3059477 - RNA, 19 nt, Artificial Sequence
  Description of Artificial Sequence: Synthetic oligonucleotide
aaagcuuuccuucacaaac

SEQ ID NO: 3059478 - RNA, 19 nt, Artificial Sequence
  Description of Artificial Sequence: Synthetic oligonucleotide
gaauaguucaucuuuggcc

SEQ ID NO: 3059479 - RNA, 19 nt, Artificial Sequence
  Description of Artificial Sequence: Synthetic oligonucleotide
accaauuuccaucuucugc

SEQ ID NO: 3059480 - RNA, 19 nt, Artificial Sequence
  Description of Artificial Sequence: Synthetic oligonucleotide
ucuuucguuccucagcccg

SEQ ID NO: 3059481 - RNA, 19 nt, Artificial Sequence
  Description of Artificial Sequence: Synthetic oligonucleotide
ugagccuuagggcuggugg

SEQ ID NO: 3059482 - RNA, 19 nt, Artificial Sequence
  Description of Artificial Sequence: Synthetic oligonucleotide
uucgcuuuggcuucucugg

SEQ ID NO: 3059483 - RNA, 19 nt, Artificial Sequence
  Description of Artificial Sequence: Synthetic oligonucleotide
uugaucauggccaaggcuu

SEQ ID NO: 3059484 - RNA, 19 nt, Artificial Sequence
  Description of Artificial Sequence: Synthetic oligonucleotide
uguuucuuuccaugggugg

SEQ ID NO: 3059485 - RNA, 19 nt, Artificial Sequence
  Description of Artificial Sequence: Synthetic oligonucleotide
ucacaaaccaauuuccauc

SEQ ID NO: 3059486 - RNA, 19 nt, Artificial Sequence
  Description of Artificial Sequence: Synthetic oligonucleotide
aaggcuuccaggcugucug

SEQ ID NO: 3059487 - RNA, 19 nt, Artificial Sequence
  Description of Artificial Sequence: Synthetic oligonucleotide
uguccuuggggaaaaccgg

SEQ ID NO: 3059488 - RNA, 19 nt, Artificial Sequence
  Description of Artificial Sequence: Synthetic oligonucleotide
uccuucacaaaccaauuuc

SEQ ID NO: 3059489 - RNA, 19 nt, Artificial Sequence
  Description of Artificial Sequence: Synthetic oligonucleotide
aagcuuuccuucacaaacc

SEQ ID NO: 3059490 - RNA, 19 nt, Artificial Sequence
  Description of Artificial Sequence: Synthetic oligonucleotide
cuguccuuggggaaaaccg

SEQ ID NO: 3059491 - RNA, 19 nt, Artificial Sequence
  Description of Artificial Sequence: Synthetic oligonucleotide
cuucuuucguuccucagcc

SEQ ID NO: 3059492 - RNA, 19 nt, Artificial Sequence
  Description of Artificial Sequence: Synthetic oligonucleotide
uguguuucuuuccaugggu

SEQ ID NO: 3059493 - RNA, 19 nt, Artificial Sequence
  Description of Artificial Sequence: Synthetic oligonucleotide
ucugcuguguuucuuucca

SEQ ID NO: 3059494 - RNA, 19 nt, Artificial Sequence
  Description of Artificial Sequence: Synthetic oligonucleotide
ucuuccugagccuuagggc

SEQ ID NO: 3059495 - RNA, 19 nt, Artificial Sequence
  Description of Artificial Sequence: Synthetic oligonucleotide
aucuucuuguguucccugc

SEQ ID NO: 3059496 - RNA, 19 nt, Artificial Sequence
  Description of Artificial Sequence: Synthetic oligonucleotide
cuucucagcugcauaaccc

SEQ ID NO: 3059497 - RNA, 19 nt, Artificial Sequence
  Description of Artificial Sequence: Synthetic oligonucleotide
aaaccaauuuccaucuucu

SEQ ID NO: 3059498 - RNA, 19 nt, Artificial Sequence
  Description of Artificial Sequence: Synthetic oligonucleotide
ugggaauaguucaucuuug

SEQ ID NO: 3059499 - RNA, 19 nt, Artificial Sequence
  Description of Artificial Sequence: Synthetic oligonucleotide
ucugugaucuucuuguguu

SEQ ID NO: 3059500 - RNA, 19 nt, Artificial Sequence
  Description of Artificial Sequence: Synthetic oligonucleotide
uucucagcugcauaacccc

SEQ ID NO: 3059501 - RNA, 19 nt, Artificial Sequence
  Description of Artificial Sequence: Synthetic oligonucleotide
cucuuccugagccuuaggg

SEQ ID NO: 3059502 - RNA, 19 nt, Artificial Sequence
  Description of Artificial Sequence: Synthetic oligonucleotide
aauuuccaucuucugcugu

SEQ ID NO: 3059503 - RNA, 19 nt, Artificial Sequence
  Description of Artificial Sequence: Synthetic oligonucleotide
uucacaaaccaauuuccau

SEQ ID NO: 3059504 - RNA, 19 nt, Artificial Sequence
  Description of Artificial Sequence: Synthetic oligonucleotide
ucaaagcuuuccuucacaa

SEQ ID NO: 3059505 - RNA, 19 nt, Artificial Sequence
  Description of Artificial Sequence: Synthetic oligonucleotide
auuuccaucuucugcugug

SEQ ID NO: 3059506 - RNA, 19 nt, Artificial Sequence
  Description of Artificial Sequence: Synthetic oligonucleotide
ugugaucuucuuguguucc

SEQ ID NO: 3059507 - RNA, 19 nt, Artificial Sequence
  Description of Artificial Sequence: Synthetic oligonucleotide
caaaccaauuuccaucuuc

SEQ ID NO: 3059508 - RNA, 19 nt, Artificial Sequence
  Description of Artificial Sequence: Synthetic oligonucleotide
ucuuuggccucaaagcuuu

SEQ ID NO: 3059509 - RNA, 19 nt, Artificial Sequence
  Description of Artificial Sequence: Synthetic oligonucleotide
ucugcacacgcccuguccu

SEQ ID NO: 3059510 - RNA, 19 nt, Artificial Sequence
  Description of Artificial Sequence: Synthetic oligonucleotide
ucuucuucgcuuuggcuuc

SEQ ID NO: 3059511 - RNA, 19 nt, Artificial Sequence
  Description of Artificial Sequence: Synthetic oligonucleotide
gagccuuagggcugguggg

SEQ ID NO: 3059512 - RNA, 19 nt, Artificial Sequence
  Description of Artificial Sequence: Synthetic oligonucleotide
ucgcuuuggcuucucuggg

SEQ ID NO: 3059513 - RNA, 19 nt, Artificial Sequence
  Description of Artificial Sequence: Synthetic oligonucleotide
gcuguguuucuuuccaugg

SEQ ID NO: 3059514 - RNA, 19 nt, Artificial Sequence
  Description of Artificial Sequence: Synthetic oligonucleotide
cuucucugggaauaguuca

SEQ ID NO: 3059515 - RNA, 19 nt, Artificial Sequence
  Description of Artificial Sequence: Synthetic oligonucleotide
ucuucuuguguucccugcu

SEQ ID NO: 3059516 - RNA, 19 nt, Artificial Sequence
  Description of Artificial Sequence: Synthetic oligonucleotide
uuuccuucacaaaccaauu

SEQ ID NO: 3059517 - RNA, 19 nt, Artificial Sequence
  Description of Artificial Sequence: Synthetic oligonucleotide
ccuucacaaaccaauuucc

SEQ ID NO: 3059518 - RNA, 19 nt, Artificial Sequence
  Description of Artificial Sequence: Synthetic oligonucleotide
cuguguuucuuuccauggg

SEQ ID NO: 3059519 - RNA, 19 nt, Artificial Sequence
  Description of Artificial Sequence: Synthetic oligonucleotide
ggaauaguucaucuuuggc

SEQ ID NO: 3059520 - RNA, 19 nt, Artificial Sequence
  Description of Artificial Sequence: Synthetic oligonucleotide
auaguucaucuuuggccuc

SEQ ID NO: 3059521 - RNA, 19 nt, Artificial Sequence
  Description of Artificial Sequence: Synthetic oligonucleotide
ucagcccgccgcuugauca

SEQ ID NO: 3059522 - RNA, 19 nt, Artificial Sequence
  Description of Artificial Sequence: Synthetic oligonucleotide
gggaauaguucaucuuugg

SEQ ID NO: 3059523 - RNA, 19 nt, Artificial Sequence
  Description of Artificial Sequence: Synthetic oligonucleotide
uuguguucccugcucuccc

SEQ ID NO: 3059524 - RNA, 19 nt, Artificial Sequence
  Description of Artificial Sequence: Synthetic oligonucleotide
agcuuuccuucacaaacca

SEQ ID NO: 3059525 - RNA, 19 nt, Artificial Sequence
  Description of Artificial Sequence: Synthetic oligonucleotide
uucugcuguguuucuuucc

SEQ ID NO: 3059526 - RNA, 19 nt, Artificial Sequence
  Description of Artificial Sequence: Synthetic oligonucleotide
guuucuuuccauggguggc

SEQ ID NO: 3059527 - RNA, 19 nt, Artificial Sequence
  Description of Artificial Sequence: Synthetic oligonucleotide
uucucuggccuucuuucgu

SEQ ID NO: 3059528 - RNA, 19 nt, Artificial Sequence
  Description of Artificial Sequence: Synthetic oligonucleotide
uuccuucacaaaccaauuu

SEQ ID NO: 3059529 - RNA, 19 nt, Artificial Sequence
  Description of Artificial Sequence: Synthetic oligonucleotide
ugaucauggccaaggcuuc

SEQ ID NO: 3059530 - RNA, 19 nt, Artificial Sequence
  Description of Artificial Sequence: Synthetic oligonucleotide
cuucgcuuuggcuucucug

SEQ ID NO: 3059531 - RNA, 19 nt, Artificial Sequence
  Description of Artificial Sequence: Synthetic oligonucleotide
cuuucguuccucagcccgc

SEQ ID NO: 3059532 - RNA, 19 nt, Artificial Sequence
  Description of Artificial Sequence: Synthetic oligonucleotide
uccaggcugucugugaucu

SEQ ID NO: 3059533 - RNA, 19 nt, Artificial Sequence
  Description of Artificial Sequence: Synthetic oligonucleotide
guacucuccucacugucug

SEQ ID NO: 3059534 - RNA, 19 nt, Artificial Sequence
  Description of Artificial Sequence: Synthetic oligonucleotide
uuuggcuucucugggaaua

SEQ ID NO: 3059535 - RNA, 19 nt, Artificial Sequence
  Description of Artificial Sequence: Synthetic oligonucleotide
cuuuccuucacaaaccaau

SEQ ID NO: 3059536 - RNA, 19 nt, Artificial Sequence
  Description of Artificial Sequence: Synthetic oligonucleotide
uucucugggaauaguucau

SEQ ID NO: 3059537 - RNA, 19 nt, Artificial Sequence
  Description of Artificial Sequence: Synthetic oligonucleotide
ucuggccuucuuucguucc

SEQ ID NO: 3059538 - RNA, 19 nt, Artificial Sequence
  Description of Artificial Sequence: Synthetic oligonucleotide
ucugggaauaguucaucuu

SEQ ID NO: 3059539 - RNA, 19 nt, Artificial Sequence
  Description of Artificial Sequence: Synthetic oligonucleotide
ugucugugaucuucuugug

SEQ ID NO: 3059540 - RNA, 19 nt, Artificial Sequence
  Description of Artificial Sequence: Synthetic oligonucleotide
ucacugucuggcaggggug

SEQ ID NO: 3059541 - RNA, 19 nt, Artificial Sequence
  Description of Artificial Sequence: Synthetic oligonucleotide
uuucuuuccauggguggcu

SEQ ID NO: 3059542 - RNA, 19 nt, Artificial Sequence
  Description of Artificial Sequence: Synthetic oligonucleotide
cuuguguucccugcucucc

SEQ ID NO: 3059543 - RNA, 19 nt, Artificial Sequence
  Description of Artificial Sequence: Synthetic oligonucleotide
ucuccccucuuucucuggc

SEQ ID NO: 3059544 - RNA, 19 nt, Artificial Sequence
  Description of Artificial Sequence: Synthetic oligonucleotide
caauuuccaucuucugcug

SEQ ID NO: 3059545 - RNA, 19 nt, Artificial Sequence
  Description of Artificial Sequence: Synthetic oligonucleotide
uucccugcucucccacugg

SEQ ID NO: 3059546 - RNA, 19 nt, Artificial Sequence
  Description of Artificial Sequence: Synthetic oligonucleotide
ugaucuucuuguguucccu

SEQ ID NO: 3059547 - RNA, 19 nt, Artificial Sequence
  Description of Artificial Sequence: Synthetic oligonucleotide
uuccugagccuuagggcug

SEQ ID NO: 3059548 - RNA, 19 nt, Artificial Sequence
  Description of Artificial Sequence: Synthetic oligonucleotide
cacgccucugcacacgccc

SEQ ID NO: 3059549 - RNA, 19 nt, Artificial Sequence
  Description of Artificial Sequence: Synthetic oligonucleotide
ucuggcaggggugucuccc

SEQ ID NO: 3059550 - RNA, 19 nt, Artificial Sequence
  Description of Artificial Sequence: Synthetic oligonucleotide
cugucugugaucuucuugu

SEQ ID NO: 3059551 - RNA, 19 nt, Artificial Sequence
  Description of Artificial Sequence: Synthetic oligonucleotide
ucguuccucagcccgccgc

SEQ ID NO: 3059552 - RNA, 19 nt, Artificial Sequence
  Description of Artificial Sequence: Synthetic oligonucleotide
uccccucuuucucuggccu

SEQ ID NO: 3059553 - RNA, 19 nt, Artificial Sequence
  Description of Artificial Sequence: Synthetic oligonucleotide
uacucuccucacugucugg

SEQ ID NO: 3059554 - RNA, 19 nt, Artificial Sequence
  Description of Artificial Sequence: Synthetic oligonucleotide
cuuccugagccuuagggcu

SEQ ID NO: 3059555 - RNA, 19 nt, Artificial Sequence
  Description of Artificial Sequence: Synthetic oligonucleotide
cacaaaccaauuuccaucu

SEQ ID NO: 3059556 - RNA, 19 nt, Artificial Sequence
  Description of Artificial Sequence: Synthetic oligonucleotide
gugaucuucuuguguuccc

SEQ ID NO: 3059557 - RNA, 19 nt, Artificial Sequence
  Description of Artificial Sequence: Synthetic oligonucleotide
uccucacugucuggcaggg

SEQ ID NO: 3059558 - RNA, 19 nt, Artificial Sequence
  Description of Artificial Sequence: Synthetic oligonucleotide
ugucuccccucuuucucug

SEQ ID NO: 3059559 - RNA, 19 nt, Artificial Sequence
  Description of Artificial Sequence: Synthetic oligonucleotide
ucuuguguucccugcucuc

SEQ ID NO: 3059560 - RNA, 19 nt, Artificial Sequence
  Description of Artificial Sequence: Synthetic oligonucleotide
uucuuucguuccucagccc

SEQ ID NO: 3059561 - RNA, 19 nt, Artificial Sequence
  Description of Artificial Sequence: Synthetic oligonucleotide
caucuuuggccucaaagcu

SEQ ID NO: 3059562 - RNA, 19 nt, Artificial Sequence
  Description of Artificial Sequence: Synthetic oligonucleotide
uccaucuucugcuguguuu

SEQ ID NO: 3059563 - RNA, 19 nt, Artificial Sequence
  Description of Artificial Sequence: Synthetic oligonucleotide
guucccugcucucccacug

SEQ ID NO: 3059564 - RNA, 19 nt, Artificial Sequence
  Description of Artificial Sequence: Synthetic oligonucleotide
ccuucuuucguuccucagc

SEQ ID NO: 3059565 - RNA, 19 nt, Artificial Sequence
  Description of Artificial Sequence: Synthetic oligonucleotide
uguguucccugcucuccca

SEQ ID NO: 3059566 - RNA, 19 nt, Artificial Sequence
  Description of Artificial Sequence: Synthetic oligonucleotide
uuucguuccucagcccgcc

SEQ ID NO: 3059567 - RNA, 19 nt, Artificial Sequence
  Description of Artificial Sequence: Synthetic oligonucleotide
cucugcacacgcccugucc

SEQ ID NO: 3059568 - RNA, 19 nt, Artificial Sequence
  Description of Artificial Sequence: Synthetic oligonucleotide
cugugaucuucuuguguuc

SEQ ID NO: 3059569 - RNA, 19 nt, Artificial Sequence
  Description of Artificial Sequence: Synthetic oligonucleotide
uucguuccucagcccgccg

SEQ ID NO: 3059570 - RNA, 19 nt, Artificial Sequence
  Description of Artificial Sequence: Synthetic oligonucleotide
uuccucagcccgccgcuug

SEQ ID NO: 3059571 - RNA, 19 nt, Artificial Sequence
  Description of Artificial Sequence: Synthetic oligonucleotide
acacgcccuguccuugggg

SEQ ID NO: 3059572 - RNA, 19 nt, Artificial Sequence
  Description of Artificial Sequence: Synthetic oligonucleotide
agccuuagggcuggugggg

SEQ ID NO: 3059573 - RNA, 19 nt, Artificial Sequence
  Description of Artificial Sequence: Synthetic oligonucleotide
caggcugucugugaucuuc

SEQ ID NO: 3059574 - RNA, 19 nt, Artificial Sequence
  Description of Artificial Sequence: Synthetic oligonucleotide
gcugucugugaucuucuug

SEQ ID NO: 3059575 - RNA, 19 nt, Artificial Sequence
  Description of Artificial Sequence: Synthetic oligonucleotide
guccuuggggaaaaccggc

SEQ ID NO: 3059576 - RNA, 19 nt, Artificial Sequence
  Description of Artificial Sequence: Synthetic oligonucleotide
gaucauggccaaggcuucc

SEQ ID NO: 3059577 - RNA, 19 nt, Artificial Sequence
  Description of Artificial Sequence: Synthetic oligonucleotide
ccuucucagcugcauaacc

SEQ ID NO: 3059578 - RNA, 19 nt, Artificial Sequence
  Description of Artificial Sequence: Synthetic oligonucleotide
ucucccacuggcgacgcuc

SEQ ID NO: 3059579 - RNA, 19 nt, Artificial Sequence
  Description of Artificial Sequence: Synthetic oligonucleotide
ucucuggccuucuuucguu

SEQ ID NO: 3059580 - RNA, 19 nt, Artificial Sequence
  Description of Artificial Sequence: Synthetic oligonucleotide
ggccucaaagcuuuccuuc

SEQ ID NO: 3059581 - RNA, 19 nt, Artificial Sequence
  Description of Artificial Sequence: Synthetic oligonucleotide
ggguggcucuuccugagcc

SEQ ID NO: 3059582 - RNA, 19 nt, Artificial Sequence
  Description of Artificial Sequence: Synthetic oligonucleotide
caaagcuuuccuucacaaa

SEQ ID NO: 3059583 - RNA, 19 nt, Artificial Sequence
  Description of Artificial Sequence: Synthetic oligonucleotide
cucccacuggcgacgcucc

SEQ ID NO: 3059584 - RNA, 19 nt, Artificial Sequence
  Description of Artificial Sequence: Synthetic oligonucleotide
cauggguggcucuuccuga

SEQ ID NO: 3059585 - RNA, 19 nt, Artificial Sequence
  Description of Artificial Sequence: Synthetic oligonucleotide
cuggcgacgcuccuccuuc

SEQ ID NO: 3059586 - RNA, 19 nt, Artificial Sequence
  Description of Artificial Sequence: Synthetic oligonucleotide
gcuugaucauggccaaggc

SEQ ID NO: 3059587 - RNA, 19 nt, Artificial Sequence
  Description of Artificial Sequence: Synthetic oligonucleotide
cugggaauaguucaucuuu

SEQ ID NO: 3059588 - RNA, 19 nt, Artificial Sequence
  Description of Artificial Sequence: Synthetic oligonucleotide
uccuucucagcugcauaac

SEQ ID NO: 3059589 - RNA, 19 nt, Artificial Sequence
  Description of Artificial Sequence: Synthetic oligonucleotide
cucacugucuggcaggggu

SEQ ID NO: 3059590 - RNA, 19 nt, Artificial Sequence
  Description of Artificial Sequence: Synthetic oligonucleotide
cuugaucauggccaaggcu

SEQ ID NO: 3059591 - RNA, 19 nt, Artificial Sequence
  Description of Artificial Sequence: Synthetic oligonucleotide
uccucagcccgccgcuuga

SEQ ID NO: 3059592 - RNA, 19 nt, Artificial Sequence
  Description of Artificial Sequence: Synthetic oligonucleotide
ugcacacgcccuguccuug

SEQ ID NO: 3059593 - RNA, 19 nt, Artificial Sequence
  Description of Artificial Sequence: Synthetic oligonucleotide
ggccaaggcuuccaggcug

SEQ ID NO: 3059594 - RNA, 19 nt, Artificial Sequence
  Description of Artificial Sequence: Synthetic oligonucleotide
cuggcaggggugucucccc

SEQ ID NO: 3059595 - RNA, 19 nt, Artificial Sequence
  Description of Artificial Sequence: Synthetic oligonucleotide
gucuccccucuuucucugg

SEQ ID NO: 3059596 - RNA, 19 nt, Artificial Sequence
  Description of Artificial Sequence: Synthetic oligonucleotide
cucuggccuucuuucguuc

SEQ ID NO: 3059597 - RNA, 19 nt, Artificial Sequence
  Description of Artificial Sequence: Synthetic oligonucleotide
uuccaggcugucugugauc

SEQ ID NO: 3059598 - RNA, 19 nt, Artificial Sequence
  Description of Artificial Sequence: Synthetic oligonucleotide
aucuuuggccucaaagcuu

SEQ ID NO: 3059599 - RNA, 19 nt, Artificial Sequence
  Description of Artificial Sequence: Synthetic oligonucleotide
aucauggccaaggcuucca

SEQ ID NO: 3059600 - RNA, 19 nt, Artificial Sequence
  Description of Artificial Sequence: Synthetic oligonucleotide
acaaaccaauuuccaucuu

SEQ ID NO: 3059601 - RNA, 19 nt, Artificial Sequence
  Description of Artificial Sequence: Synthetic oligonucleotide
cugcucucccacuggcgac

SEQ ID NO: 3059602 - RNA, 19 nt, Artificial Sequence
  Description of Artificial Sequence: Synthetic oligonucleotide
ugucuggcaggggugucuc

SEQ ID NO: 3059603 - RNA, 19 nt, Artificial Sequence
  Description of Artificial Sequence: Synthetic oligonucleotide
uggcaggggugucuccccu

SEQ ID NO: 3059604 - RNA, 19 nt, Artificial Sequence
  Description of Artificial Sequence: Synthetic oligonucleotide
gcuucucugggaauaguuc

SEQ ID NO: 3059605 - RNA, 19 nt, Artificial Sequence
  Description of Artificial Sequence: Synthetic oligonucleotide
cacacgcccuguccuuggg

SEQ ID NO: 3059606 - RNA, 19 nt, Artificial Sequence
  Description of Artificial Sequence: Synthetic oligonucleotide
acugucuggcagggguguc

SEQ ID NO: 3059607 - RNA, 19 nt, Artificial Sequence
  Description of Artificial Sequence: Synthetic oligonucleotide
acuggcgacgcuccuccuu

SEQ ID NO: 3059608 - RNA, 19 nt, Artificial Sequence
  Description of Artificial Sequence: Synthetic oligonucleotide
ccauggguggcucuuccug

SEQ ID NO: 3059609 - RNA, 19 nt, Artificial Sequence
  Description of Artificial Sequence: Synthetic oligonucleotide
cgcuugaucauggccaagg

SEQ ID NO: 3059610 - RNA, 19 nt, Artificial Sequence
  Description of Artificial Sequence: Synthetic oligonucleotide
gcuuuggcuucucugggaa

SEQ ID NO: 3059611 - RNA, 19 nt, Artificial Sequence
  Description of Artificial Sequence: Synthetic oligonucleotide
uccuccuucucagcugcau

SEQ ID NO: 3059612 - RNA, 19 nt, Artificial Sequence
  Description of Artificial Sequence: Synthetic oligonucleotide
ccacuggcgacgcuccucc

SEQ ID NO: 3059613 - RNA, 19 nt, Artificial Sequence
  Description of Artificial Sequence: Synthetic oligonucleotide
uggccuucuuucguuccuc

SEQ ID NO: 3059614 - RNA, 19 nt, Artificial Sequence
  Description of Artificial Sequence: Synthetic oligonucleotide
ccuguccuuggggaaaacc

SEQ ID NO: 3059615 - RNA, 19 nt, Artificial Sequence
  Description of Artificial Sequence: Synthetic oligonucleotide
cucuccucacugucuggca

SEQ ID NO: 3059616 - RNA, 19 nt, Artificial Sequence
  Description of Artificial Sequence: Synthetic oligonucleotide
cucgggcccacgccucugc

SEQ ID NO: 3059617 - RNA, 19 nt, Artificial Sequence
  Description of Artificial Sequence: Synthetic oligonucleotide
uggcuucucugggaauagu

SEQ ID NO: 3059618 - RNA, 19 nt, Artificial Sequence
  Description of Artificial Sequence: Synthetic oligonucleotide
cuuuggccucaaagcuuuc

SEQ ID NO: 3059619 - RNA, 19 nt, Artificial Sequence
  Description of Artificial Sequence: Synthetic oligonucleotide
ccucaaagcuuuccuucac

SEQ ID NO: 3059620 - RNA, 19 nt, Artificial Sequence
  Description of Artificial Sequence: Synthetic oligonucleotide
uggcucuuccugagccuua

SEQ ID NO: 3059621 - RNA, 19 nt, Artificial Sequence
  Description of Artificial Sequence: Synthetic oligonucleotide
aggcugucugugaucuucu

SEQ ID NO: 3059622 - RNA, 19 nt, Artificial Sequence
  Description of Artificial Sequence: Synthetic oligonucleotide
gcacacgcccuguccuugg

SEQ ID NO: 3059623 - RNA, 19 nt, Artificial Sequence
  Description of Artificial Sequence: Synthetic oligonucleotide
aucuucugcuguguuucuu

SEQ ID NO: 3059624 - RNA, 19 nt, Artificial Sequence
  Description of Artificial Sequence: Synthetic oligonucleotide
gucuggcaggggugucucc

SEQ ID NO: 3059625 - RNA, 19 nt, Artificial Sequence
  Description of Artificial Sequence: Synthetic oligonucleotide
gcuuccaggcugucuguga

SEQ ID NO: 3059626 - RNA, 19 nt, Artificial Sequence
  Description of Artificial Sequence: Synthetic oligonucleotide
gggcccacgccucugcaca

SEQ ID NO: 3059627 - RNA, 19 nt, Artificial Sequence
  Description of Artificial Sequence: Synthetic oligonucleotide
ucccacuggcgacgcuccu

SEQ ID NO: 3059628 - RNA, 19 nt, Artificial Sequence
  Description of Artificial Sequence: Synthetic oligonucleotide
cucagcccgccgcuugauc

SEQ ID NO: 3059629 - RNA, 19 nt, Artificial Sequence
  Description of Artificial Sequence: Synthetic oligonucleotide
uggcgacgcuccuccuucu

SEQ ID NO: 3059630 - RNA, 19 nt, Artificial Sequence
  Description of Artificial Sequence: Synthetic oligonucleotide
gcucuuccugagccuuagg

SEQ ID NO: 3059631 - RNA, 19 nt, Artificial Sequence
  Description of Artificial Sequence: Synthetic oligonucleotide
cuuccaggcugucugugau

SEQ ID NO: 3059632 - RNA, 19 nt, Artificial Sequence
  Description of Artificial Sequence: Synthetic oligonucleotide
ccugcucucccacuggcga

SEQ ID NO: 3059633 - RNA, 19 nt, Artificial Sequence
  Description of Artificial Sequence: Synthetic oligonucleotide
cugagccuuagggcuggug

SEQ ID NO: 3059634 - RNA, 19 nt, Artificial Sequence
  Description of Artificial Sequence: Synthetic oligonucleotide
acgcccuguccuuggggaa

SEQ ID NO: 3059635 - RNA, 19 nt, Artificial Sequence
  Description of Artificial Sequence: Synthetic oligonucleotide
cgccgcuugaucauggcca

SEQ ID NO: 3059636 - RNA, 19 nt, Artificial Sequence
  Description of Artificial Sequence: Synthetic oligonucleotide
gguacucuccucacugucu

SEQ ID NO: 3059637 - RNA, 19 nt, Artificial Sequence
  Description of Artificial Sequence: Synthetic oligonucleotide
cgacgcuccuccuucucag

SEQ ID NO: 3059638 - RNA, 19 nt, Artificial Sequence
  Description of Artificial Sequence: Synthetic oligonucleotide
ccgccgcuugaucauggcc

SEQ ID NO: 3059639 - RNA, 19 nt, Artificial Sequence
  Description of Artificial Sequence: Synthetic oligonucleotide
ggcuuccaggcugucugug

SEQ ID NO: 3059640 - RNA, 19 nt, Artificial Sequence
  Description of Artificial Sequence: Synthetic oligonucleotide
gcgacgcuccuccuucuca

SEQ ID NO: 3059641 - RNA, 19 nt, Artificial Sequence
  Description of Artificial Sequence: Synthetic oligonucleotide
cccacgccucugcacacgc

SEQ ID NO: 3059642 - RNA, 19 nt, Artificial Sequence
  Description of Artificial Sequence: Synthetic oligonucleotide
agcccgccgcuugaucaug

SEQ ID NO: 3059643 - RNA, 19 nt, Artificial Sequence
  Description of Artificial Sequence: Synthetic oligonucleotide
gccgcuugaucauggccaa

SEQ ID NO: 3059644 - RNA, 19 nt, Artificial Sequence
  Description of Artificial Sequence: Synthetic oligonucleotide
acgccucugcacacgcccu

SEQ ID NO: 3059645 - RNA, 19 nt, Artificial Sequence
  Description of Artificial Sequence: Synthetic oligonucleotide
gcuuuccuucacaaaccaa

SEQ ID NO: 3059646 - RNA, 19 nt, Artificial Sequence
  Description of Artificial Sequence: Synthetic oligonucleotide
cuuuccauggguggcucuu

SEQ ID NO: 3059647 - RNA, 19 nt, Artificial Sequence
  Description of Artificial Sequence: Synthetic oligonucleotide
gguggcucuuccugagccu

SEQ ID NO: 3059648 - RNA, 19 nt, Artificial Sequence
  Description of Artificial Sequence: Synthetic oligonucleotide
gcccgccgcuugaucaugg

SEQ ID NO: 3059649 - RNA, 19 nt, Artificial Sequence
  Description of Artificial Sequence: Synthetic oligonucleotide
cuccuccuucucagcugca

SEQ ID NO: 3059650 - RNA, 19 nt, Artificial Sequence
  Description of Artificial Sequence: Synthetic oligonucleotide
gggguacucuccucacugu

SEQ ID NO: 3059651 - RNA, 19 nt, Artificial Sequence
  Description of Artificial Sequence: Synthetic oligonucleotide
gggugucuccccucuuucu

SEQ ID NO: 3059652 - RNA, 19 nt, Artificial Sequence
  Description of Artificial Sequence: Synthetic oligonucleotide
cugcuguguuucuuuccau

SEQ ID NO: 3059653 - RNA, 19 nt, Artificial Sequence
  Description of Artificial Sequence: Synthetic oligonucleotide
ggcuucucugggaauaguu

SEQ ID NO: 3059654 - RNA, 19 nt, Artificial Sequence
  Description of Artificial Sequence: Synthetic oligonucleotide
cacugucuggcaggggugu

SEQ ID NO: 3059655 - RNA, 19 nt, Artificial Sequence
  Description of Artificial Sequence: Synthetic oligonucleotide
cccgccgcuugaucauggc

SEQ ID NO: 3059656 - RNA, 19 nt, Artificial Sequence
  Description of Artificial Sequence: Synthetic oligonucleotide
gcccacgccucugcacacg

SEQ ID NO: 3059657 - RNA, 19 nt, Artificial Sequence
  Description of Artificial Sequence: Synthetic oligonucleotide
ggcccacgccucugcacac

SEQ ID NO: 3059658 - RNA, 19 nt, Artificial Sequence
  Description of Artificial Sequence: Synthetic oligonucleotide
guggcucuuccugagccuu

SEQ ID NO: 3059659 - RNA, 19 nt, Artificial Sequence
  Description of Artificial Sequence: Synthetic oligonucleotide
ccacgccucugcacacgcc

SEQ ID NO: 3059660 - RNA, 19 nt, Artificial Sequence
  Description of Artificial Sequence: Synthetic oligonucleotide
cugucuggcaggggugucu

SEQ ID NO: 3059661 - RNA, 19 nt, Artificial Sequence
  Description of Artificial Sequence: Synthetic oligonucleotide
gcaggggugucuccccucu

SEQ ID NO: 3059662 - RNA, 19 nt, Artificial Sequence
  Description of Artificial Sequence: Synthetic oligonucleotide
gcucucccacuggcgacgc

SEQ ID NO: 3059663 - RNA, 19 nt, Artificial Sequence
  Description of Artificial Sequence: Synthetic oligonucleotide
ccuccuucucagcugcaua

SEQ ID NO: 3059664 - RNA, 19 nt, Artificial Sequence
  Description of Artificial Sequence: Synthetic oligonucleotide
cgcuuuggcuucucuggga

SEQ ID NO: 3059665 - RNA, 19 nt, Artificial Sequence
  Description of Artificial Sequence: Synthetic oligonucleotide
ccucugcacacgcccuguc

SEQ ID NO: 3059666 - RNA, 19 nt, Artificial Sequence
  Description of Artificial Sequence: Synthetic oligonucleotide
cuucuucgcuuuggcuucu

SEQ ID NO: 3059667 - RNA, 19 nt, Artificial Sequence
  Description of Artificial Sequence: Synthetic oligonucleotide
cugcacacgcccuguccuu

SEQ ID NO: 3059668 - RNA, 19 nt, Artificial Sequence
  Description of Artificial Sequence: Synthetic oligonucleotide
cagcccgccgcuugaucau

SEQ ID NO: 3059669 - RNA, 19 nt, Artificial Sequence
  Description of Artificial Sequence: Synthetic oligonucleotide
cgccucugcacacgcccug

SEQ ID NO: 3059670 - RNA, 19 nt, Artificial Sequence
  Description of Artificial Sequence: Synthetic oligonucleotide
ccgcuugaucauggccaag

SEQ ID NO: 3059671 - RNA, 19 nt, Artificial Sequence
  Description of Artificial Sequence: Synthetic oligonucleotide
cgggcccacgccucugcac

SEQ ID NO: 3059672 - RNA, 19 nt, Artificial Sequence
  Description of Artificial Sequence: Synthetic oligonucleotide
gcccuguccuuggggaaaa

SEQ ID NO: 3059673 - RNA, 19 nt, Artificial Sequence
  Description of Artificial Sequence: Synthetic oligonucleotide
ggcugucugugaucuucuu

SEQ ID NO: 3059674 - RNA, 19 nt, Artificial Sequence
  Description of Artificial Sequence: Synthetic oligonucleotide
guuccucagcccgccgcuu

SEQ ID NO: 3059675 - RNA, 19 nt, Artificial Sequence
  Description of Artificial Sequence: Synthetic oligonucleotide
cacuggcgacgcuccuccu

SEQ ID NO: 3059676 - RNA, 19 nt, Artificial Sequence
  Description of Artificial Sequence: Synthetic oligonucleotide
gccucugcacacgcccugu

SEQ ID NO: 3059677 - RNA, 19 nt, Artificial Sequence
  Description of Artificial Sequence: Synthetic oligonucleotide
cguuccucagcccgccgcu

SEQ ID NO: 3059678 - RNA, 19 nt, Artificial Sequence
  Description of Artificial Sequence: Synthetic oligonucleotide
ccucgggcccacgccucug

SEQ ID NO: 3059679 - RNA, 19 nt, Artificial Sequence
  Description of Artificial Sequence: Synthetic oligonucleotide
cucucccacuggcgacgcu

SEQ ID NO: 3059680 - RNA, 19 nt, Artificial Sequence
  Description of Artificial Sequence: Synthetic oligonucleotide
caggggugucuccccucuu

SEQ ID NO: 3059681 - RNA, 19 nt, Artificial Sequence
  Description of Artificial Sequence: Synthetic oligonucleotide
ccccucuuucucuggccuu

SEQ ID NO: 3059682 - RNA, 19 nt, Artificial Sequence
  Description of Artificial Sequence: Synthetic oligonucleotide
cccucgggcccacgccucu

SEQ ID NO: 3059683 - RNA, 19 nt, Artificial Sequence
  Description of Artificial Sequence: Synthetic oligonucleotide
ccaggcugucugugaucuu

SEQ ID NO: 3059684 - RNA, 19 nt, Artificial Sequence
  Description of Artificial Sequence: Synthetic oligonucleotide
ccucagcccgccgcuugau

SEQ ID NO: 3059685 - RNA, 19 nt, Artificial Sequence
  Description of Artificial Sequence: Synthetic oligonucleotide
ccugagccuuagggcuggu

SEQ ID NO: 3059686 - RNA, 19 nt, Artificial Sequence
  Description of Artificial Sequence: Synthetic oligonucleotide
aagaagaacagcuaaacgc

SEQ ID NO: 3059687 - RNA, 19 nt, Artificial Sequence
  Description of Artificial Sequence: Synthetic oligonucleotide
aaucuuuacauuuguaggg

SEQ ID NO: 3059688 - RNA, 19 nt, Artificial Sequence
  Description of Artificial Sequence: Synthetic oligonucleotide
aacaguuaaaagcuuugcc

SEQ ID NO: 3059689 - RNA, 19 nt, Artificial Sequence
  Description of Artificial Sequence: Synthetic oligonucleotide
acaaucaucacauuuguag

SEQ ID NO: 3059690 - RNA, 19 nt, Artificial Sequence
  Description of Artificial Sequence: Synthetic oligonucleotide
uauauagguaagaagaaca

SEQ ID NO: 3059691 - RNA, 19 nt, Artificial Sequence
  Description of Artificial Sequence: Synthetic oligonucleotide
uggaagaacaguuaaaagc

SEQ ID NO: 3059692 - RNA, 19 nt, Artificial Sequence
  Description of Artificial Sequence: Synthetic oligonucleotide
ugagagaacauuaaaaguc

SEQ ID NO: 3059693 - RNA, 19 nt, Artificial Sequence
  Description of Artificial Sequence: Synthetic oligonucleotide
aacauuaaaagucuuucca

SEQ ID NO: 3059694 - RNA, 19 nt, Artificial Sequence
  Description of Artificial Sequence: Synthetic oligonucleotide
guugagagaacauuaaaag

SEQ ID NO: 3059695 - RNA, 19 nt, Artificial Sequence
  Description of Artificial Sequence: Synthetic oligonucleotide
aacauuaaaggccaugcca

SEQ ID NO: 3059696 - RNA, 19 nt, Artificial Sequence
  Description of Artificial Sequence: Synthetic oligonucleotide
guuuagaaaguguugagag

SEQ ID NO: 3059697 - RNA, 19 nt, Artificial Sequence
  Description of Artificial Sequence: Synthetic oligonucleotide
aaugcagcgaacauuaaag

SEQ ID NO: 3059698 - RNA, 19 nt, Artificial Sequence
  Description of Artificial Sequence: Synthetic oligonucleotide
uguuuagaaagaaugcagc

SEQ ID NO: 3059699 - RNA, 19 nt, Artificial Sequence
  Description of Artificial Sequence: Synthetic oligonucleotide
uaagaagaacagcuaaacg

SEQ ID NO: 3059700 - RNA, 19 nt, Artificial Sequence
  Description of Artificial Sequence: Synthetic oligonucleotide
acauuaaaagucuuuccac

SEQ ID NO: 3059701 - RNA, 19 nt, Artificial Sequence
  Description of Artificial Sequence: Synthetic oligonucleotide
aaucaucacauuuguagag

SEQ ID NO: 3059702 - RNA, 19 nt, Artificial Sequence
  Description of Artificial Sequence: Synthetic oligonucleotide
caaucuuuacauuuguagg

SEQ ID NO: 3059703 - RNA, 19 nt, Artificial Sequence
  Description of Artificial Sequence: Synthetic oligonucleotide
agaagaacagcuaaacgcc

SEQ ID NO: 3059704 - RNA, 19 nt, Artificial Sequence
  Description of Artificial Sequence: Synthetic oligonucleotide
guuuagaaagaaugcagcg

SEQ ID NO: 3059705 - RNA, 19 nt, Artificial Sequence
  Description of Artificial Sequence: Synthetic oligonucleotide
uuagaaagaaugcagcgaa

SEQ ID NO: 3059706 - RNA, 19 nt, Artificial Sequence
  Description of Artificial Sequence: Synthetic oligonucleotide
uguugagagaacauuaaaa

SEQ ID NO: 3059707 - RNA, 19 nt, Artificial Sequence
  Description of Artificial Sequence: Synthetic oligonucleotide
agaacauuaaaagucuuuc

SEQ ID NO: 3059708 - RNA, 19 nt, Artificial Sequence
  Description of Artificial Sequence: Synthetic oligonucleotide
uucgccgaugcuuauauag

SEQ ID NO: 3059709 - RNA, 19 nt, Artificial Sequence
  Description of Artificial Sequence: Synthetic oligonucleotide
cugguguuuagaaagaaug

SEQ ID NO: 3059710 - RNA, 19 nt, Artificial Sequence
  Description of Artificial Sequence: Synthetic oligonucleotide
uuagaaaguguugagagaa

SEQ ID NO: 3059711 - RNA, 19 nt, Artificial Sequence
  Description of Artificial Sequence: Synthetic oligonucleotide
gaacauuaaaagucuuucc

SEQ ID NO: 3059712 - RNA, 19 nt, Artificial Sequence
  Description of Artificial Sequence: Synthetic oligonucleotide
uugagagaacauuaaaagu

SEQ ID NO: 3059713 - RNA, 19 nt, Artificial Sequence
  Description of Artificial Sequence: Synthetic oligonucleotide
acuauggauucgccgaugc

SEQ ID NO: 3059714 - RNA, 19 nt, Artificial Sequence
  Description of Artificial Sequence: Synthetic oligonucleotide
auagguaagaagaacagcu

SEQ ID NO: 3059715 - RNA, 19 nt, Artificial Sequence
  Description of Artificial Sequence: Synthetic oligonucleotide
ugcuuauauagguaagaag

SEQ ID NO: 3059716 - RNA, 19 nt, Artificial Sequence
  Description of Artificial Sequence: Synthetic oligonucleotide
ugguguuuagaaagaaugc

SEQ ID NO: 3059717 - RNA, 19 nt, Artificial Sequence
  Description of Artificial Sequence: Synthetic oligonucleotide
acauuaaaggccaugccac

SEQ ID NO: 3059718 - RNA, 19 nt, Artificial Sequence
  Description of Artificial Sequence: Synthetic oligonucleotide
aacagcuaaacgccugguc

SEQ ID NO: 3059719 - RNA, 19 nt, Artificial Sequence
  Description of Artificial Sequence: Synthetic oligonucleotide
uuuagaaagaaugcagcga

SEQ ID NO: 3059720 - RNA, 19 nt, Artificial Sequence
  Description of Artificial Sequence: Synthetic oligonucleotide
ugcagcgaacauuaaaggc

SEQ ID NO: 3059721 - RNA, 19 nt, Artificial Sequence
  Description of Artificial Sequence: Synthetic oligonucleotide
uuuagaaaguguugagaga

SEQ ID NO: 3059722 - RNA, 19 nt, Artificial Sequence
  Description of Artificial Sequence: Synthetic oligonucleotide
acagcuaaacgccugguca

SEQ ID NO: 3059723 - RNA, 19 nt, Artificial Sequence
  Description of Artificial Sequence: Synthetic oligonucleotide
gcuuauauagguaagaaga

SEQ ID NO: 3059724 - RNA, 19 nt, Artificial Sequence
  Description of Artificial Sequence: Synthetic oligonucleotide
uuauauagguaagaagaac

SEQ ID NO: 3059725 - RNA, 19 nt, Artificial Sequence
  Description of Artificial Sequence: Synthetic oligonucleotide
auuaaaagucuuuccacau

SEQ ID NO: 3059726 - RNA, 19 nt, Artificial Sequence
  Description of Artificial Sequence: Synthetic oligonucleotide
aauccucugguguuuagaa

SEQ ID NO: 3059727 - RNA, 19 nt, Artificial Sequence
  Description of Artificial Sequence: Synthetic oligonucleotide
agaacagcuaaacgccugg

SEQ ID NO: 3059728 - RNA, 19 nt, Artificial Sequence
  Description of Artificial Sequence: Synthetic oligonucleotide
uguuuagaaaguguugaga

SEQ ID NO: 3059729 - RNA, 19 nt, Artificial Sequence
  Description of Artificial Sequence: Synthetic oligonucleotide
uauagguaagaagaacagc

SEQ ID NO: 3059730 - RNA, 19 nt, Artificial Sequence
  Description of Artificial Sequence: Synthetic oligonucleotide
ucacaaucaucacauuugu

SEQ ID NO: 3059731 - RNA, 19 nt, Artificial Sequence
  Description of Artificial Sequence: Synthetic oligonucleotide
ucugguguuuagaaagugu

SEQ ID NO: 3059732 - RNA, 19 nt, Artificial Sequence
  Description of Artificial Sequence: Synthetic oligonucleotide
uauuugcugguguugguga

SEQ ID NO: 3059733 - RNA, 19 nt, Artificial Sequence
  Description of Artificial Sequence: Synthetic oligonucleotide
aagaaugcagcgaacauua

SEQ ID NO: 3059734 - RNA, 19 nt, Artificial Sequence
  Description of Artificial Sequence: Synthetic oligonucleotide
augcagcgaacauuaaagg

SEQ ID NO: 3059735 - RNA, 19 nt, Artificial Sequence
  Description of Artificial Sequence: Synthetic oligonucleotide
auauagguaagaagaacag

SEQ ID NO: 3059736 - RNA, 19 nt, Artificial Sequence
  Description of Artificial Sequence: Synthetic oligonucleotide
guguuuagaaagaaugcag

SEQ ID NO: 3059737 - RNA, 19 nt, Artificial Sequence
  Description of Artificial Sequence: Synthetic oligonucleotide
cauuaaaagucuuuccaca

SEQ ID NO: 3059738 - RNA, 19 nt, Artificial Sequence
  Description of Artificial Sequence: Synthetic oligonucleotide
gaacauuaaaggccaugcc

SEQ ID NO: 3059739 - RNA, 19 nt, Artificial Sequence
  Description of Artificial Sequence: Synthetic oligonucleotide
gucacaaucaucacauuug

SEQ ID NO: 3059740 - RNA, 19 nt, Artificial Sequence
  Description of Artificial Sequence: Synthetic oligonucleotide
ugguguuuagaaaguguug

SEQ ID NO: 3059741 - RNA, 19 nt, Artificial Sequence
  Description of Artificial Sequence: Synthetic oligonucleotide
ucgccgaugcuuauauagg

SEQ ID NO: 3059742 - RNA, 19 nt, Artificial Sequence
  Description of Artificial Sequence: Synthetic oligonucleotide
guaagaagaacagcuaaac

SEQ ID NO: 3059743 - RNA, 19 nt, Artificial Sequence
  Description of Artificial Sequence: Synthetic oligonucleotide
cuggaagaacaguuaaaag

SEQ ID NO: 3059744 - RNA, 19 nt, Artificial Sequence
  Description of Artificial Sequence: Synthetic oligonucleotide
agaaagaaugcagcgaaca

SEQ ID NO: 3059745 - RNA, 19 nt, Artificial Sequence
  Description of Artificial Sequence: Synthetic oligonucleotide
aaagaaugcagcgaacauu

SEQ ID NO: 3059746 - RNA, 19 nt, Artificial Sequence
  Description of Artificial Sequence: Synthetic oligonucleotide
aaaguguugagagaacauu

SEQ ID NO: 3059747 - RNA, 19 nt, Artificial Sequence
  Description of Artificial Sequence: Synthetic oligonucleotide
uaaacgccuggucacaauc

SEQ ID NO: 3059748 - RNA, 19 nt, Artificial Sequence
  Description of Artificial Sequence: Synthetic oligonucleotide
uagaguuucucuccucugu

SEQ ID NO: 3059749 - RNA, 19 nt, Artificial Sequence
  Description of Artificial Sequence: Synthetic oligonucleotide
ucuguguauuugcuggugu

SEQ ID NO: 3059750 - RNA, 19 nt, Artificial Sequence
  Description of Artificial Sequence: Synthetic oligonucleotide
uaaaggccaugccacauuc

SEQ ID NO: 3059751 - RNA, 19 nt, Artificial Sequence
  Description of Artificial Sequence: Synthetic oligonucleotide
agguaagaagaacagcuaa

SEQ ID NO: 3059752 - RNA, 19 nt, Artificial Sequence
  Description of Artificial Sequence: Synthetic oligonucleotide
agaaaguguugagagaaca

SEQ ID NO: 3059753 - RNA, 19 nt, Artificial Sequence
  Description of Artificial Sequence: Synthetic oligonucleotide
cuuauauagguaagaagaa

SEQ ID NO: 3059754 - RNA, 19 nt, Artificial Sequence
  Description of Artificial Sequence: Synthetic oligonucleotide
gaugcuuauauagguaaga

SEQ ID NO: 3059755 - RNA, 19 nt, Artificial Sequence
  Description of Artificial Sequence: Synthetic oligonucleotide
ucugguguuuagaaagaau

SEQ ID NO: 3059756 - RNA, 19 nt, Artificial Sequence
  Description of Artificial Sequence: Synthetic oligonucleotide
guguauuugcugguguugg

SEQ ID NO: 3059757 - RNA, 19 nt, Artificial Sequence
  Description of Artificial Sequence: Synthetic oligonucleotide
caaucaucacauuuguaga

SEQ ID NO: 3059758 - RNA, 19 nt, Artificial Sequence
  Description of Artificial Sequence: Synthetic oligonucleotide
guuggugaaggcuggaaga

SEQ ID NO: 3059759 - RNA, 19 nt, Artificial Sequence
  Description of Artificial Sequence: Synthetic oligonucleotide
uauggauucgccgaugcuu

SEQ ID NO: 3059760 - RNA, 19 nt, Artificial Sequence
  Description of Artificial Sequence: Synthetic oligonucleotide
aagaacaguuaaaagcuuu

SEQ ID NO: 3059761 - RNA, 19 nt, Artificial Sequence
  Description of Artificial Sequence: Synthetic oligonucleotide
aaguguugagagaacauua

SEQ ID NO: 3059762 - RNA, 19 nt, Artificial Sequence
  Description of Artificial Sequence: Synthetic oligonucleotide
gcagcgaacauuaaaggcc

SEQ ID NO: 3059763 - RNA, 19 nt, Artificial Sequence
  Description of Artificial Sequence: Synthetic oligonucleotide
agaacaguuaaaagcuuug

SEQ ID NO: 3059764 - RNA, 19 nt, Artificial Sequence
  Description of Artificial Sequence: Synthetic oligonucleotide
uagguaagaagaacagcua

SEQ ID NO: 3059765 - RNA, 19 nt, Artificial Sequence
  Description of Artificial Sequence: Synthetic oligonucleotide
gaaugcagcgaacauuaaa

SEQ ID NO: 3059766 - RNA, 19 nt, Artificial Sequence
  Description of Artificial Sequence: Synthetic oligonucleotide
uagaaagaaugcagcgaac

SEQ ID NO: 3059767 - RNA, 19 nt, Artificial Sequence
  Description of Artificial Sequence: Synthetic oligonucleotide
aagaacagcuaaacgccug

SEQ ID NO: 3059768 - RNA, 19 nt, Artificial Sequence
  Description of Artificial Sequence: Synthetic oligonucleotide
ucuccucuguguauuugcu

SEQ ID NO: 3059769 - RNA, 19 nt, Artificial Sequence
  Description of Artificial Sequence: Synthetic oligonucleotide
ggaagaacaguuaaaagcu

SEQ ID NO: 3059770 - RNA, 19 nt, Artificial Sequence
  Description of Artificial Sequence: Synthetic oligonucleotide
uguauuugcugguguuggu

SEQ ID NO: 3059771 - RNA, 19 nt, Artificial Sequence
  Description of Artificial Sequence: Synthetic oligonucleotide
aacgccuggucacaaucau

SEQ ID NO: 3059772 - RNA, 19 nt, Artificial Sequence
  Description of Artificial Sequence: Synthetic oligonucleotide
guauuugcugguguuggug

SEQ ID NO: 3059773 - RNA, 19 nt, Artificial Sequence
  Description of Artificial Sequence: Synthetic oligonucleotide
gguguuuagaaagaaugca

SEQ ID NO: 3059774 - RNA, 19 nt, Artificial Sequence
  Description of Artificial Sequence: Synthetic oligonucleotide
uuugcugguguuggugaag

SEQ ID NO: 3059775 - RNA, 19 nt, Artificial Sequence
  Description of Artificial Sequence: Synthetic oligonucleotide
guagaguuucucuccucug

SEQ ID NO: 3059776 - RNA, 19 nt, Artificial Sequence
  Description of Artificial Sequence: Synthetic oligonucleotide
cagcuaaacgccuggucac

SEQ ID NO: 3059777 - RNA, 19 nt, Artificial Sequence
  Description of Artificial Sequence: Synthetic oligonucleotide
cagcgaacauuaaaggcca

SEQ ID NO: 3059778 - RNA, 19 nt, Artificial Sequence
  Description of Artificial Sequence: Synthetic oligonucleotide
aaacgccuggucacaauca

SEQ ID NO: 3059779 - RNA, 19 nt, Artificial Sequence
  Description of Artificial Sequence: Synthetic oligonucleotide
augcuuauauagguaagaa

SEQ ID NO: 3059780 - RNA, 19 nt, Artificial Sequence
  Description of Artificial Sequence: Synthetic oligonucleotide
uuggugaaggcuggaagaa

SEQ ID NO: 3059781 - RNA, 19 nt, Artificial Sequence
  Description of Artificial Sequence: Synthetic oligonucleotide
aggcuggaagaacaguuaa

SEQ ID NO: 3059782 - RNA, 19 nt, Artificial Sequence
  Description of Artificial Sequence: Synthetic oligonucleotide
gaaagaaugcagcgaacau

SEQ ID NO: 3059783 - RNA, 19 nt, Artificial Sequence
  Description of Artificial Sequence: Synthetic oligonucleotide
ugaaggcuggaagaacagu

SEQ ID NO: 3059784 - RNA, 19 nt, Artificial Sequence
  Description of Artificial Sequence: Synthetic oligonucleotide
aguguugagagaacauuaa

SEQ ID NO: 3059785 - RNA, 19 nt, Artificial Sequence
  Description of Artificial Sequence: Synthetic oligonucleotide
cauuaaaggccaugccaca

SEQ ID NO: 3059786 - RNA, 19 nt, Artificial Sequence
  Description of Artificial Sequence: Synthetic oligonucleotide
guguugagagaacauuaaa

SEQ ID NO: 3059787 - RNA, 19 nt, Artificial Sequence
  Description of Artificial Sequence: Synthetic oligonucleotide
cuccucuguguauuugcug

SEQ ID NO: 3059788 - RNA, 19 nt, Artificial Sequence
  Description of Artificial Sequence: Synthetic oligonucleotide
cgaacauuaaaggccaugc

SEQ ID NO: 3059789 - RNA, 19 nt, Artificial Sequence
  Description of Artificial Sequence: Synthetic oligonucleotide
gauucgccgaugcuuauau

SEQ ID NO: 3059790 - RNA, 19 nt, Artificial Sequence
  Description of Artificial Sequence: Synthetic oligonucleotide
ggccaugccacauucuuca

SEQ ID NO: 3059791 - RNA, 19 nt, Artificial Sequence
  Description of Artificial Sequence: Synthetic oligonucleotide
gaauccucugguguuuaga

SEQ ID NO: 3059792 - RNA, 19 nt, Artificial Sequence
  Description of Artificial Sequence: Synthetic oligonucleotide
caguauggguccucuggug

SEQ ID NO: 3059793 - RNA, 19 nt, Artificial Sequence
  Description of Artificial Sequence: Synthetic oligonucleotide
auuugcugguguuggugaa

SEQ ID NO: 3059794 - RNA, 19 nt, Artificial Sequence
  Description of Artificial Sequence: Synthetic oligonucleotide
aaggcuggaagaacaguua

SEQ ID NO: 3059795 - RNA, 19 nt, Artificial Sequence
  Description of Artificial Sequence: Synthetic oligonucleotide
ggugaaggcuggaagaaca

SEQ ID NO: 3059796 - RNA, 19 nt, Artificial Sequence
  Description of Artificial Sequence: Synthetic oligonucleotide
gcuggaagaacaguuaaaa

SEQ ID NO: 3059797 - RNA, 19 nt, Artificial Sequence
  Description of Artificial Sequence: Synthetic oligonucleotide
auccucugguguuuagaaa

SEQ ID NO: 3059798 - RNA, 19 nt, Artificial Sequence
  Description of Artificial Sequence: Synthetic oligonucleotide
gaaggcuggaagaacaguu

SEQ ID NO: 3059799 - RNA, 19 nt, Artificial Sequence
  Description of Artificial Sequence: Synthetic oligonucleotide
gccacaaucuuuacauuug

SEQ ID NO: 3059800 - RNA, 19 nt, Artificial Sequence
  Description of Artificial Sequence: Synthetic oligonucleotide
aaaggccaugccacauucu

SEQ ID NO: 3059801 - RNA, 19 nt, Artificial Sequence
  Description of Artificial Sequence: Synthetic oligonucleotide
gguaagaagaacagcuaaa

SEQ ID NO: 3059802 - RNA, 19 nt, Artificial Sequence
  Description of Artificial Sequence: Synthetic oligonucleotide
cugguguuuagaaaguguu

SEQ ID NO: 3059803 - RNA, 19 nt, Artificial Sequence
  Description of Artificial Sequence: Synthetic oligonucleotide
gaaaguguugagagaacau

SEQ ID NO: 3059804 - RNA, 19 nt, Artificial Sequence
  Description of Artificial Sequence: Synthetic oligonucleotide
aggccaugccacauucuuc

SEQ ID NO: 3059805 - RNA, 19 nt, Artificial Sequence
  Description of Artificial Sequence: Synthetic oligonucleotide
gaagaacagcuaaacgccu

SEQ ID NO: 3059806 - RNA, 19 nt, Artificial Sequence
  Description of Artificial Sequence: Synthetic oligonucleotide
gagaacauuaaaagucuuu

SEQ ID NO: 3059807 - RNA, 19 nt, Artificial Sequence
  Description of Artificial Sequence: Synthetic oligonucleotide
gaguuucucuccucugugu

SEQ ID NO: 3059808 - RNA, 19 nt, Artificial Sequence
  Description of Artificial Sequence: Synthetic oligonucleotide
agagaacauuaaaagucuu

SEQ ID NO: 3059809 - RNA, 19 nt, Artificial Sequence
  Description of Artificial Sequence: Synthetic oligonucleotide
gguccucugguguuuagaa

SEQ ID NO: 3059810 - RNA, 19 nt, Artificial Sequence
  Description of Artificial Sequence: Synthetic oligonucleotide
agcuaaacgccuggucaca

SEQ ID NO: 3059811 - RNA, 19 nt, Artificial Sequence
  Description of Artificial Sequence: Synthetic oligonucleotide
uggguccucugguguuuag

SEQ ID NO: 3059812 - RNA, 19 nt, Artificial Sequence
  Description of Artificial Sequence: Synthetic oligonucleotide
ccgaugcuuauauagguaa

SEQ ID NO: 3059813 - RNA, 19 nt, Artificial Sequence
  Description of Artificial Sequence: Synthetic oligonucleotide
uauggguccucugguguuu

SEQ ID NO: 3059814 - RNA, 19 nt, Artificial Sequence
  Description of Artificial Sequence: Synthetic oligonucleotide
acgccuggucacaaucauc

SEQ ID NO: 3059815 - RNA, 19 nt, Artificial Sequence
  Description of Artificial Sequence: Synthetic oligonucleotide
cgaugcuuauauagguaag

SEQ ID NO: 3059816 - RNA, 19 nt, Artificial Sequence
  Description of Artificial Sequence: Synthetic oligonucleotide
cacaaucaucacauuugua

SEQ ID NO: 3059817 - RNA, 19 nt, Artificial Sequence
  Description of Artificial Sequence: Synthetic oligonucleotide
gaagaacaguuaaaagcuu

SEQ ID NO: 3059818 - RNA, 19 nt, Artificial Sequence
  Description of Artificial Sequence: Synthetic oligonucleotide
gcgaacauuaaaggccaug

SEQ ID NO: 3059819 - RNA, 19 nt, Artificial Sequence
  Description of Artificial Sequence: Synthetic oligonucleotide
cacuauggauucgccgaug

SEQ ID NO: 3059820 - RNA, 19 nt, Artificial Sequence
  Description of Artificial Sequence: Synthetic oligonucleotide
guccucugguguuuagaaa

SEQ ID NO: 3059821 - RNA, 19 nt, Artificial Sequence
  Description of Artificial Sequence: Synthetic oligonucleotide
uggauucgccgaugcuuau

SEQ ID NO: 3059822 - RNA, 19 nt, Artificial Sequence
  Description of Artificial Sequence: Synthetic oligonucleotide
cgccuggucacaaucauca

SEQ ID NO: 3059823 - RNA, 19 nt, Artificial Sequence
  Description of Artificial Sequence: Synthetic oligonucleotide
cucugguguuuagaaagaa

SEQ ID NO: 3059824 - RNA, 19 nt, Artificial Sequence
  Description of Artificial Sequence: Synthetic oligonucleotide
auucgccgaugcuuauaua

SEQ ID NO: 3059825 - RNA, 19 nt, Artificial Sequence
  Description of Artificial Sequence: Synthetic oligonucleotide
gaacagcuaaacgccuggu

SEQ ID NO: 3059826 - RNA, 19 nt, Artificial Sequence
  Description of Artificial Sequence: Synthetic oligonucleotide
agaaugcagcgaacauuaa

SEQ ID NO: 3059827 - RNA, 19 nt, Artificial Sequence
  Description of Artificial Sequence: Synthetic oligonucleotide
guguuggugaaggcuggaa

SEQ ID NO: 3059828 - RNA, 19 nt, Artificial Sequence
  Description of Artificial Sequence: Synthetic oligonucleotide
cuauggauucgccgaugcu

SEQ ID NO: 3059829 - RNA, 19 nt, Artificial Sequence
  Description of Artificial Sequence: Synthetic oligonucleotide
gcugguguuggugaaggcu

SEQ ID NO: 3059830 - RNA, 19 nt, Artificial Sequence
  Description of Artificial Sequence: Synthetic oligonucleotide
ggcuggaagaacaguuaaa

SEQ ID NO: 3059831 - RNA, 19 nt, Artificial Sequence
  Description of Artificial Sequence: Synthetic oligonucleotide
cuaaacgccuggucacaau

SEQ ID NO: 3059832 - RNA, 19 nt, Artificial Sequence
  Description of Artificial Sequence: Synthetic oligonucleotide
gccuggucacaaucaucac

SEQ ID NO: 3059833 - RNA, 19 nt, Artificial Sequence
  Description of Artificial Sequence: Synthetic oligonucleotide
agcgaacauuaaaggccau

SEQ ID NO: 3059834 - RNA, 19 nt, Artificial Sequence
  Description of Artificial Sequence: Synthetic oligonucleotide
gccaugccacauucuucac

SEQ ID NO: 3059835 - RNA, 19 nt, Artificial Sequence
  Description of Artificial Sequence: Synthetic oligonucleotide
gcuaaacgccuggucacaa

SEQ ID NO: 3059836 - RNA, 19 nt, Artificial Sequence
  Description of Artificial Sequence: Synthetic oligonucleotide
ggguccucugguguuuaga

SEQ ID NO: 3059837 - RNA, 19 nt, Artificial Sequence
  Description of Artificial Sequence: Synthetic oligonucleotide
gccgaugcuuauauaggua

SEQ ID NO: 3059838 - RNA, 19 nt, Artificial Sequence
  Description of Artificial Sequence: Synthetic oligonucleotide
auggguccucugguguuua

SEQ ID NO: 3059839 - RNA, 19 nt, Artificial Sequence
  Description of Artificial Sequence: Synthetic oligonucleotide
gguguuggugaaggcugga

SEQ ID NO: 3059840 - RNA, 19 nt, Artificial Sequence
  Description of Artificial Sequence: Synthetic oligonucleotide
ccaguauggguccucuggu

SEQ ID NO: 3059841 - RNA, 19 nt, Artificial Sequence
  Description of Artificial Sequence: Synthetic oligonucleotide
ggauucgccgaugcuuaua

SEQ ID NO: 3059842 - RNA, 19 nt, Artificial Sequence
  Description of Artificial Sequence: Synthetic oligonucleotide
cgccgaugcuuauauaggu

SEQ ID NO: 3059843 - RNA, 19 nt, Artificial Sequence
  Description of Artificial Sequence: Synthetic oligonucleotide
ccacuauggauucgccgau

SEQ ID NO: 3059844 - RNA, 19 nt, Artificial Sequence
  Description of Artificial Sequence: Synthetic oligonucleotide
uaaauuaugaccaaaagga

SEQ ID NO: 3059845 - RNA, 19 nt, Artificial Sequence
  Description of Artificial Sequence: Synthetic oligonucleotide
uuuauuuuaaauuaugacc

SEQ ID NO: 3059846 - RNA, 19 nt, Artificial Sequence
  Description of Artificial Sequence: Synthetic oligonucleotide
uuaaauuaugaccaaaagg

SEQ ID NO: 3059847 - RNA, 19 nt, Artificial Sequence
  Description of Artificial Sequence: Synthetic oligonucleotide
uuauuuuaaauuaugacca

SEQ ID NO: 3059848 - RNA, 19 nt, Artificial Sequence
  Description of Artificial Sequence: Synthetic oligonucleotide
uuuccauaaaaucaaaggg

SEQ ID NO: 3059849 - RNA, 19 nt, Artificial Sequence
  Description of Artificial Sequence: Synthetic oligonucleotide
uuuuccauaaaaucaaagg

SEQ ID NO: 3059850 - RNA, 19 nt, Artificial Sequence
  Description of Artificial Sequence: Synthetic oligonucleotide
aaaaucugcauccagggug

SEQ ID NO: 3059851 - RNA, 19 nt, Artificial Sequence
  Description of Artificial Sequence: Synthetic oligonucleotide
ucuacaagcaaucugucag

SEQ ID NO: 3059852 - RNA, 19 nt, Artificial Sequence
  Description of Artificial Sequence: Synthetic oligonucleotide
uuuguuuucccuucuaacg

SEQ ID NO: 3059853 - RNA, 19 nt, Artificial Sequence
  Description of Artificial Sequence: Synthetic oligonucleotide
aaacucaauauacuguuuc

SEQ ID NO: 3059854 - RNA, 19 nt, Artificial Sequence
  Description of Artificial Sequence: Synthetic oligonucleotide
uucaucaaaacacaguuca

SEQ ID NO: 3059855 - RNA, 19 nt, Artificial Sequence
  Description of Artificial Sequence: Synthetic oligonucleotide
uuuaaauuaugaccaaaag

SEQ ID NO: 3059856 - RNA, 19 nt, Artificial Sequence
  Description of Artificial Sequence: Synthetic oligonucleotide
uacuguuucaucaaaacac

SEQ ID NO: 3059857 - RNA, 19 nt, Artificial Sequence
  Description of Artificial Sequence: Synthetic oligonucleotide
agcgcugauacucagaaac

SEQ ID NO: 3059858 - RNA, 19 nt, Artificial Sequence
  Description of Artificial Sequence: Synthetic oligonucleotide
aucaaagggauuuucugcc

SEQ ID NO: 3059859 - RNA, 19 nt, Artificial Sequence
  Description of Artificial Sequence: Synthetic oligonucleotide
ucaauauacuguuucauca

SEQ ID NO: 3059860 - RNA, 19 nt, Artificial Sequence
  Description of Artificial Sequence: Synthetic oligonucleotide
uuuucuuucauuaaacuuu

SEQ ID NO: 3059861 - RNA, 19 nt, Artificial Sequence
  Description of Artificial Sequence: Synthetic oligonucleotide
caaucugucagcuacaaac

SEQ ID NO: 3059862 - RNA, 19 nt, Artificial Sequence
  Description of Artificial Sequence: Synthetic oligonucleotide
aaaucaaagggauuuucug

SEQ ID NO: 3059863 - RNA, 19 nt, Artificial Sequence
  Description of Artificial Sequence: Synthetic oligonucleotide
uuccauaaaaucaaaggga

SEQ ID NO: 3059864 - RNA, 19 nt, Artificial Sequence
  Description of Artificial Sequence: Synthetic oligonucleotide
cuuuauuuuaaauuaugac

SEQ ID NO: 3059865 - RNA, 19 nt, Artificial Sequence
  Description of Artificial Sequence: Synthetic oligonucleotide
aaagaaauuuguuuucccu

SEQ ID NO: 3059866 - RNA, 19 nt, Artificial Sequence
  Description of Artificial Sequence: Synthetic oligonucleotide
gaauccaaguucuacaagc

SEQ ID NO: 3059867 - RNA, 19 nt, Artificial Sequence
  Description of Artificial Sequence: Synthetic oligonucleotide
uuuuaaauuaugaccaaaa

SEQ ID NO: 3059868 - RNA, 19 nt, Artificial Sequence
  Description of Artificial Sequence: Synthetic oligonucleotide
auuaucugugguuuccgcc

SEQ ID NO: 3059869 - RNA, 19 nt, Artificial Sequence
  Description of Artificial Sequence: Synthetic oligonucleotide
agaaauuuguuuucccuuc

SEQ ID NO: 3059870 - RNA, 19 nt, Artificial Sequence
  Description of Artificial Sequence: Synthetic oligonucleotide
aacgaaauguuuuccauaa

SEQ ID NO: 3059871 - RNA, 19 nt, Artificial Sequence
  Description of Artificial Sequence: Synthetic oligonucleotide
guucauuccaaugaggccg

SEQ ID NO: 3059872 - RNA, 19 nt, Artificial Sequence
  Description of Artificial Sequence: Synthetic oligonucleotide
ucagcuacaaacucaauau

SEQ ID NO: 3059873 - RNA, 19 nt, Artificial Sequence
  Description of Artificial Sequence: Synthetic oligonucleotide
agaaacucgcuucucaaag

SEQ ID NO: 3059874 - RNA, 19 nt, Artificial Sequence
  Description of Artificial Sequence: Synthetic oligonucleotide
uccauaaaaucaaagggau

SEQ ID NO: 3059875 - RNA, 19 nt, Artificial Sequence
  Description of Artificial Sequence: Synthetic oligonucleotide
uacaaacucaauauacugu

SEQ ID NO: 3059876 - RNA, 19 nt, Artificial Sequence
  Description of Artificial Sequence: Synthetic oligonucleotide
uauacuguuucaucaaaac

SEQ ID NO: 3059877 - RNA, 19 nt, Artificial Sequence
  Description of Artificial Sequence: Synthetic oligonucleotide
aaaccuuugagaauccaag

SEQ ID NO: 3059878 - RNA, 19 nt, Artificial Sequence
  Description of Artificial Sequence: Synthetic oligonucleotide
aaggcuucuguuaagaacu

SEQ ID NO: 3059879 - RNA, 19 nt, Artificial Sequence
  Description of Artificial Sequence: Synthetic oligonucleotide
ucauuaaacuuuauuuuaa

SEQ ID NO: 3059880 - RNA, 19 nt, Artificial Sequence
  Description of Artificial Sequence: Synthetic oligonucleotide
auacucagaaacucgcuuc

SEQ ID NO: 3059881 - RNA, 19 nt, Artificial Sequence
  Description of Artificial Sequence: Synthetic oligonucleotide
aaguucuacaagcaaucug

SEQ ID NO: 3059882 - RNA, 19 nt, Artificial Sequence
  Description of Artificial Sequence: Synthetic oligonucleotide
uguuucaucaaaacacagu

SEQ ID NO: 3059883 - RNA, 19 nt, Artificial Sequence
  Description of Artificial Sequence: Synthetic oligonucleotide
ucuaacgaaauguuuucca

SEQ ID NO: 3059884 - RNA, 19 nt, Artificial Sequence
  Description of Artificial Sequence: Synthetic oligonucleotide
caagcaaucugucagcuac

SEQ ID NO: 3059885 - RNA, 19 nt, Artificial Sequence
  Description of Artificial Sequence: Synthetic oligonucleotide
ugagaauccaaguucuaca

SEQ ID NO: 3059886 - RNA, 19 nt, Artificial Sequence
  Description of Artificial Sequence: Synthetic oligonucleotide
uuguuuucccuucuaacga

SEQ ID NO: 3059887 - RNA, 19 nt, Artificial Sequence
  Description of Artificial Sequence: Synthetic oligonucleotide
ucaaaacacaguucauucc

SEQ ID NO: 3059888 - RNA, 19 nt, Artificial Sequence
  Description of Artificial Sequence: Synthetic oligonucleotide
uucucaaagaaauuuguuu

SEQ ID NO: 3059889 - RNA, 19 nt, Artificial Sequence
  Description of Artificial Sequence: Synthetic oligonucleotide
uucuguuaagaacuccugc

SEQ ID NO: 3059890 - RNA, 19 nt, Artificial Sequence
  Description of Artificial Sequence: Synthetic oligonucleotide
aacucaauauacuguuuca

SEQ ID NO: 3059891 - RNA, 19 nt, Artificial Sequence
  Description of Artificial Sequence: Synthetic oligonucleotide
aaagcgcugauacucagaa

SEQ ID NO: 3059892 - RNA, 19 nt, Artificial Sequence
  Description of Artificial Sequence: Synthetic oligonucleotide
ucaaagaaauuuguuuucc

SEQ ID NO: 3059893 - RNA, 19 nt, Artificial Sequence
  Description of Artificial Sequence: Synthetic oligonucleotide
aauuaugaccaaaaggaaa

SEQ ID NO: 3059894 - RNA, 19 nt, Artificial Sequence
  Description of Artificial Sequence: Synthetic oligonucleotide
aauuuguuuucccuucuaa

SEQ ID NO: 3059895 - RNA, 19 nt, Artificial Sequence
  Description of Artificial Sequence: Synthetic oligonucleotide
ucugucagcuacaaacuca

SEQ ID NO: 3059896 - RNA, 19 nt, Artificial Sequence
  Description of Artificial Sequence: Synthetic oligonucleotide
ugugguuuccgccaugacu

SEQ ID NO: 3059897 - RNA, 19 nt, Artificial Sequence
  Description of Artificial Sequence: Synthetic oligonucleotide
uccaaugaggccgacaggc

SEQ ID NO: 3059898 - RNA, 19 nt, Artificial Sequence
  Description of Artificial Sequence: Synthetic oligonucleotide
gacugcaaagcgcugauac

SEQ ID NO: 3059899 - RNA, 19 nt, Artificial Sequence
  Description of Artificial Sequence: Synthetic oligonucleotide
uuaucugugguuuccgcca

SEQ ID NO: 3059900 - RNA, 19 nt, Artificial Sequence
  Description of Artificial Sequence: Synthetic oligonucleotide
aguucuacaagcaaucugu

SEQ ID NO: 3059901 - RNA, 19 nt, Artificial Sequence
  Description of Artificial Sequence: Synthetic oligonucleotide
ucuuucauuaaacuuuauu

SEQ ID NO: 3059902 - RNA, 19 nt, Artificial Sequence
  Description of Artificial Sequence: Synthetic oligonucleotide
acacaguucauuccaauga

SEQ ID NO: 3059903 - RNA, 19 nt, Artificial Sequence
  Description of Artificial Sequence: Synthetic oligonucleotide
auacuguuucaucaaaaca

SEQ ID NO: 3059904 - RNA, 19 nt, Artificial Sequence
  Description of Artificial Sequence: Synthetic oligonucleotide
acaaacucaauauacuguu

SEQ ID NO: 3059905 - RNA, 19 nt, Artificial Sequence
  Description of Artificial Sequence: Synthetic oligonucleotide
cugauacucagaaacucgc

SEQ ID NO: 3059906 - RNA, 19 nt, Artificial Sequence
  Description of Artificial Sequence: Synthetic oligonucleotide
uccaaguucuacaagcaau

SEQ ID NO: 3059907 - RNA, 19 nt, Artificial Sequence
  Description of Artificial Sequence: Synthetic oligonucleotide
aaccuuugagaauccaagu

SEQ ID NO: 3059908 - RNA, 19 nt, Artificial Sequence
  Description of Artificial Sequence: Synthetic oligonucleotide
uuucuuucauuaaacuuua

SEQ ID NO: 3059909 - RNA, 19 nt, Artificial Sequence
  Description of Artificial Sequence: Synthetic oligonucleotide
gugaagacauuaucugugg

SEQ ID NO: 3059910 - RNA, 19 nt, Artificial Sequence
  Description of Artificial Sequence: Synthetic oligonucleotide
aaacucgcuucucaaagaa

SEQ ID NO: 3059911 - RNA, 19 nt, Artificial Sequence
  Description of Artificial Sequence: Synthetic oligonucleotide
agggugaagacauuaucug

SEQ ID NO: 3059912 - RNA, 19 nt, Artificial Sequence
  Description of Artificial Sequence: Synthetic oligonucleotide
uucccuucuaacgaaaugu

SEQ ID NO: 3059913 - RNA, 19 nt, Artificial Sequence
  Description of Artificial Sequence: Synthetic oligonucleotide
aagacauuaucugugguuu

SEQ ID NO: 3059914 - RNA, 19 nt, Artificial Sequence
  Description of Artificial Sequence: Synthetic oligonucleotide
cucaauauacuguuucauc

SEQ ID NO: 3059915 - RNA, 19 nt, Artificial Sequence
  Description of Artificial Sequence: Synthetic oligonucleotide
acuuuauuuuaaauuauga

SEQ ID NO: 3059916 - RNA, 19 nt, Artificial Sequence
  Description of Artificial Sequence: Synthetic oligonucleotide
cuuucauuaaacuuuauuu

SEQ ID NO: 3059917 - RNA, 19 nt, Artificial Sequence
  Description of Artificial Sequence: Synthetic oligonucleotide
uuucccuucuaacgaaaug

SEQ ID NO: 3059918 - RNA, 19 nt, Artificial Sequence
  Description of Artificial Sequence: Synthetic oligonucleotide
caaggcuucuguuaagaac

SEQ ID NO: 3059919 - RNA, 19 nt, Artificial Sequence
  Description of Artificial Sequence: Synthetic oligonucleotide
uuucaucaaaacacaguuc

SEQ ID NO: 3059920 - RNA, 19 nt, Artificial Sequence
  Description of Artificial Sequence: Synthetic oligonucleotide
aaagggauuuucugccuga

SEQ ID NO: 3059921 - RNA, 19 nt, Artificial Sequence
  Description of Artificial Sequence: Synthetic oligonucleotide
aaauuaugaccaaaaggaa

SEQ ID NO: 3059922 - RNA, 19 nt, Artificial Sequence
  Description of Artificial Sequence: Synthetic oligonucleotide
gugguuuccgccaugacug

SEQ ID NO: 3059923 - RNA, 19 nt, Artificial Sequence
  Description of Artificial Sequence: Synthetic oligonucleotide
guuuuccauaaaaucaaag

SEQ ID NO: 3059924 - RNA, 19 nt, Artificial Sequence
  Description of Artificial Sequence: Synthetic oligonucleotide
aucugucagcuacaaacuc

SEQ ID NO: 3059925 - RNA, 19 nt, Artificial Sequence
  Description of Artificial Sequence: Synthetic oligonucleotide
cuucuaacgaaauguuuuc

SEQ ID NO: 3059926 - RNA, 19 nt, Artificial Sequence
  Description of Artificial Sequence: Synthetic oligonucleotide
uccgccaugacugcaaagc

SEQ ID NO: 3059927 - RNA, 19 nt, Artificial Sequence
  Description of Artificial Sequence: Synthetic oligonucleotide
agaauccaaguucuacaag

SEQ ID NO: 3059928 - RNA, 19 nt, Artificial Sequence
  Description of Artificial Sequence: Synthetic oligonucleotide
aaucugucagcuacaaacu

SEQ ID NO: 3059929 - RNA, 19 nt, Artificial Sequence
  Description of Artificial Sequence: Synthetic oligonucleotide
uucuacaagcaaucuguca

SEQ ID NO: 3059930 - RNA, 19 nt, Artificial Sequence
  Description of Artificial Sequence: Synthetic oligonucleotide
uaaaaucaaagggauuuuc

SEQ ID NO: 3059931 - RNA, 19 nt, Artificial Sequence
  Description of Artificial Sequence: Synthetic oligonucleotide
aaacuuuauuuuaaauuau

SEQ ID NO: 3059932 - RNA, 19 nt, Artificial Sequence
  Description of Artificial Sequence: Synthetic oligonucleotide
uacucagaaacucgcuucu

SEQ ID NO: 3059933 - RNA, 19 nt, Artificial Sequence
  Description of Artificial Sequence: Synthetic oligonucleotide
cacaguucauuccaaugag

SEQ ID NO: 3059934 - RNA, 19 nt, Artificial Sequence
  Description of Artificial Sequence: Synthetic oligonucleotide
gacauuaucugugguuucc

SEQ ID NO: 3059935 - RNA, 19 nt, Artificial Sequence
  Description of Artificial Sequence: Synthetic oligonucleotide
cuacaagcaaucugucagc

SEQ ID NO: 3059936 - RNA, 19 nt, Artificial Sequence
  Description of Artificial Sequence: Synthetic oligonucleotide
aaacacaguucauuccaau

SEQ ID NO: 3059937 - RNA, 19 nt, Artificial Sequence
  Description of Artificial Sequence: Synthetic oligonucleotide
aauccaaguucuacaagca

SEQ ID NO: 3059938 - RNA, 19 nt, Artificial Sequence
  Description of Artificial Sequence: Synthetic oligonucleotide
uugagaauccaaguucuac

SEQ ID NO: 3059939 - RNA, 19 nt, Artificial Sequence
  Description of Artificial Sequence: Synthetic oligonucleotide
aaaaccuuugagaauccaa

SEQ ID NO: 3059940 - RNA, 19 nt, Artificial Sequence
  Description of Artificial Sequence: Synthetic oligonucleotide
ugaagacauuaucuguggu

SEQ ID NO: 3059941 - RNA, 19 nt, Artificial Sequence
  Description of Artificial Sequence: Synthetic oligonucleotide
ugauacucagaaacucgcu

SEQ ID NO: 3059942 - RNA, 19 nt, Artificial Sequence
  Description of Artificial Sequence: Synthetic oligonucleotide
cuguuucaucaaaacacag

SEQ ID NO: 3059943 - RNA, 19 nt, Artificial Sequence
  Description of Artificial Sequence: Synthetic oligonucleotide
uucuaacgaaauguuuucc

SEQ ID NO: 3059944 - RNA, 19 nt, Artificial Sequence
  Description of Artificial Sequence: Synthetic oligonucleotide
aaaucugcauccaggguga

SEQ ID NO: 3059945 - RNA, 19 nt, Artificial Sequence
  Description of Artificial Sequence: Synthetic oligonucleotide
guuucaucaaaacacaguu

SEQ ID NO: 3059946 - RNA, 19 nt, Artificial Sequence
  Description of Artificial Sequence: Synthetic oligonucleotide
ucagaaacucgcuucucaa

SEQ ID NO: 3059947 - RNA, 19 nt, Artificial Sequence
  Description of Artificial Sequence: Synthetic oligonucleotide
gagaauccaaguucuacaa

SEQ ID NO: 3059948 - RNA, 19 nt, Artificial Sequence
  Description of Artificial Sequence: Synthetic oligonucleotide
uaacgaaauguuuuccaua

SEQ ID NO: 3059949 - RNA, 19 nt, Artificial Sequence
  Description of Artificial Sequence: Synthetic oligonucleotide
aaugaggccgacaggcaag

SEQ ID NO: 3059950 - RNA, 19 nt, Artificial Sequence
  Description of Artificial Sequence: Synthetic oligonucleotide
agacauuaucugugguuuc

SEQ ID NO: 3059951 - RNA, 19 nt, Artificial Sequence
  Description of Artificial Sequence: Synthetic oligonucleotide
ugcaaagcgcugauacuca

SEQ ID NO: 3059952 - RNA, 19 nt, Artificial Sequence
  Description of Artificial Sequence: Synthetic oligonucleotide
aaauuuguuuucccuucua

SEQ ID NO: 3059953 - RNA, 19 nt, Artificial Sequence
  Description of Artificial Sequence: Synthetic oligonucleotide
cuucuguuaagaacuccug

SEQ ID NO: 3059954 - RNA, 19 nt, Artificial Sequence
  Description of Artificial Sequence: Synthetic oligonucleotide
uguuuucccuucuaacgaa

SEQ ID NO: 3059955 - RNA, 19 nt, Artificial Sequence
  Description of Artificial Sequence: Synthetic oligonucleotide
cauuaucugugguuuccgc

SEQ ID NO: 3059956 - RNA, 19 nt, Artificial Sequence
  Description of Artificial Sequence: Synthetic oligonucleotide
uucauuccaaugaggccga

SEQ ID NO: 3059957 - RNA, 19 nt, Artificial Sequence
  Description of Artificial Sequence: Synthetic oligonucleotide
auuuuaaauuaugaccaaa

SEQ ID NO: 3059958 - RNA, 19 nt, Artificial Sequence
  Description of Artificial Sequence: Synthetic oligonucleotide
gaaacucgcuucucaaaga

SEQ ID NO: 3059959 - RNA, 19 nt, Artificial Sequence
  Description of Artificial Sequence: Synthetic oligonucleotide
ucaaagggauuuucugccu

SEQ ID NO: 3059960 - RNA, 19 nt, Artificial Sequence
  Description of Artificial Sequence: Synthetic oligonucleotide
acuguuucaucaaaacaca

SEQ ID NO: 3059961 - RNA, 19 nt, Artificial Sequence
  Description of Artificial Sequence: Synthetic oligonucleotide
accuuugagaauccaaguu

SEQ ID NO: 3059962 - RNA, 19 nt, Artificial Sequence
  Description of Artificial Sequence: Synthetic oligonucleotide
uuuucccuucuaacgaaau

SEQ ID NO: 3059963 - RNA, 19 nt, Artificial Sequence
  Description of Artificial Sequence: Synthetic oligonucleotide
acauuaucugugguuuccg

SEQ ID NO: 3059964 - RNA, 19 nt, Artificial Sequence
  Description of Artificial Sequence: Synthetic oligonucleotide
gucagcuacaaacucaaua

SEQ ID NO: 3059965 - RNA, 19 nt, Artificial Sequence
  Description of Artificial Sequence: Synthetic oligonucleotide
cauaaaaucaaagggauuu

SEQ ID NO: 3059966 - RNA, 19 nt, Artificial Sequence
  Description of Artificial Sequence: Synthetic oligonucleotide
cuuugagaauccaaguucu

SEQ ID NO: 3059967 - RNA, 19 nt, Artificial Sequence
  Description of Artificial Sequence: Synthetic oligonucleotide
gaaauguuuuccauaaaau

SEQ ID NO: 3059968 - RNA, 19 nt, Artificial Sequence
  Description of Artificial Sequence: Synthetic oligonucleotide
caaagggauuuucugccug

SEQ ID NO: 3059969 - RNA, 19 nt, Artificial Sequence
  Description of Artificial Sequence: Synthetic oligonucleotide
gcugauacucagaaacucg

SEQ ID NO: 3059970 - RNA, 19 nt, Artificial Sequence
  Description of Artificial Sequence: Synthetic oligonucleotide
gggauuuucugccugaaaa

SEQ ID NO: 3059971 - RNA, 19 nt, Artificial Sequence
  Description of Artificial Sequence: Synthetic oligonucleotide
cugcaaagcgcugauacuc

SEQ ID NO: 3059972 - RNA, 19 nt, Artificial Sequence
  Description of Artificial Sequence: Synthetic oligonucleotide
ccuuugagaauccaaguuc

SEQ ID NO: 3059973 - RNA, 19 nt, Artificial Sequence
  Description of Artificial Sequence: Synthetic oligonucleotide
acugcaaagcgcugauacu

SEQ ID NO: 3059974 - RNA, 19 nt, Artificial Sequence
  Description of Artificial Sequence: Synthetic oligonucleotide
uuugagaauccaaguucua

SEQ ID NO: 3059975 - RNA, 19 nt, Artificial Sequence
  Description of Artificial Sequence: Synthetic oligonucleotide
caauauacuguuucaucaa

SEQ ID NO: 3059976 - RNA, 19 nt, Artificial Sequence
  Description of Artificial Sequence: Synthetic oligonucleotide
aaaacacaguucauuccaa

SEQ ID NO: 3059977 - RNA, 19 nt, Artificial Sequence
  Description of Artificial Sequence: Synthetic oligonucleotide
gaagacauuaucugugguu

SEQ ID NO: 3059978 - RNA, 19 nt, Artificial Sequence
  Description of Artificial Sequence: Synthetic oligonucleotide
acaggcaaggcuucuguua

SEQ ID NO: 3059979 - RNA, 19 nt, Artificial Sequence
  Description of Artificial Sequence: Synthetic oligonucleotide
acucaauauacuguuucau

SEQ ID NO: 3059980 - RNA, 19 nt, Artificial Sequence
  Description of Artificial Sequence: Synthetic oligonucleotide
uccagggugaagacauuau

SEQ ID NO: 3059981 - RNA, 19 nt, Artificial Sequence
  Description of Artificial Sequence: Synthetic oligonucleotide
gaaauuuguuuucccuucu

SEQ ID NO: 3059982 - RNA, 19 nt, Artificial Sequence
  Description of Artificial Sequence: Synthetic oligonucleotide
ucccuucuaacgaaauguu

SEQ ID NO: 3059983 - RNA, 19 nt, Artificial Sequence
  Description of Artificial Sequence: Synthetic oligonucleotide
gauacucagaaacucgcuu

SEQ ID NO: 3059984 - RNA, 19 nt, Artificial Sequence
  Description of Artificial Sequence: Synthetic oligonucleotide
ccaaguucuacaagcaauc

SEQ ID NO: 3059985 - RNA, 19 nt, Artificial Sequence
  Description of Artificial Sequence: Synthetic oligonucleotide
auaaaaucaaagggauuuu

SEQ ID NO: 3059986 - RNA, 19 nt, Artificial Sequence
  Description of Artificial Sequence: Synthetic oligonucleotide
auccaaguucuacaagcaa

SEQ ID NO: 3059987 - RNA, 19 nt, Artificial Sequence
  Description of Artificial Sequence: Synthetic oligonucleotide
cagggugaagacauuaucu

SEQ ID NO: 3059988 - RNA, 19 nt, Artificial Sequence
  Description of Artificial Sequence: Synthetic oligonucleotide
augacugcaaagcgcugau

SEQ ID NO: 3059989 - RNA, 19 nt, Artificial Sequence
  Description of Artificial Sequence: Synthetic oligonucleotide
augaggccgacaggcaagg

SEQ ID NO: 3059990 - RNA, 19 nt, Artificial Sequence
  Description of Artificial Sequence: Synthetic oligonucleotide
cuaacgaaauguuuuccau

SEQ ID NO: 3059991 - RNA, 19 nt, Artificial Sequence
  Description of Artificial Sequence: Synthetic oligonucleotide
uuuccgccaugacugcaaa

SEQ ID NO: 3059992 - RNA, 19 nt, Artificial Sequence
  Description of Artificial Sequence: Synthetic oligonucleotide
uucuuucauuaaacuuuau

SEQ ID NO: 3059993 - RNA, 19 nt, Artificial Sequence
  Description of Artificial Sequence: Synthetic oligonucleotide
acucagaaacucgcuucuc

SEQ ID NO: 3059994 - RNA, 19 nt, Artificial Sequence
  Description of Artificial Sequence: Synthetic oligonucleotide
uuccgccaugacugcaaag

SEQ ID NO: 3059995 - RNA, 19 nt, Artificial Sequence
  Description of Artificial Sequence: Synthetic oligonucleotide
caugacugcaaagcgcuga

SEQ ID NO: 3059996 - RNA, 19 nt, Artificial Sequence
  Description of Artificial Sequence: Synthetic oligonucleotide
aagcaaucugucagcuaca

SEQ ID NO: 3059997 - RNA, 19 nt, Artificial Sequence
  Description of Artificial Sequence: Synthetic oligonucleotide
aagcgcugauacucagaaa

SEQ ID NO: 3059998 - RNA, 19 nt, Artificial Sequence
  Description of Artificial Sequence: Synthetic oligonucleotide
ugguuuccgccaugacugc

SEQ ID NO: 3059999 - RNA, 19 nt, Artificial Sequence
  Description of Artificial Sequence: Synthetic oligonucleotide
acgaaauguuuuccauaaa

SEQ ID NO: 3060000 - RNA, 19 nt, Artificial Sequence
  Description of Artificial Sequence: Synthetic oligonucleotide
aagggauuuucugccugaa

SEQ ID NO: 3060001 - RNA, 19 nt, Artificial Sequence
  Description of Artificial Sequence: Synthetic oligonucleotide
caggcaaggcuucuguuaa

SEQ ID NO: 3060002 - RNA, 19 nt, Artificial Sequence
  Description of Artificial Sequence: Synthetic oligonucleotide
aggcaaggcuucuguuaag

SEQ ID NO: 3060003 - RNA, 19 nt, Artificial Sequence
  Description of Artificial Sequence: Synthetic oligonucleotide
acaagcaaucugucagcua

SEQ ID NO: 3060004 - RNA, 19 nt, Artificial Sequence
  Description of Artificial Sequence: Synthetic oligonucleotide
agggauuuucugccugaaa

SEQ ID NO: 3060005 - RNA, 19 nt, Artificial Sequence
  Description of Artificial Sequence: Synthetic oligonucleotide
caaagcgcugauacucaga

SEQ ID NO: 3060006 - RNA, 19 nt, Artificial Sequence
  Description of Artificial Sequence: Synthetic oligonucleotide
caaugaggccgacaggcaa

SEQ ID NO: 3060007 - RNA, 19 nt, Artificial Sequence
  Description of Artificial Sequence: Synthetic oligonucleotide
gaggccgacaggcaaggcu

SEQ ID NO: 3060008 - RNA, 19 nt, Artificial Sequence
  Description of Artificial Sequence: Synthetic oligonucleotide
guucuacaagcaaucuguc

SEQ ID NO: 3060009 - RNA, 19 nt, Artificial Sequence
  Description of Artificial Sequence: Synthetic oligonucleotide
gcaaagcgcugauacucag

SEQ ID NO: 3060010 - RNA, 19 nt, Artificial Sequence
  Description of Artificial Sequence: Synthetic oligonucleotide
agcaaucugucagcuacaa

SEQ ID NO: 3060011 - RNA, 19 nt, Artificial Sequence
  Description of Artificial Sequence: Synthetic oligonucleotide
cagaaacucgcuucucaaa

SEQ ID NO: 3060012 - RNA, 19 nt, Artificial Sequence
  Description of Artificial Sequence: Synthetic oligonucleotide
ugucagcuacaaacucaau

SEQ ID NO: 3060013 - RNA, 19 nt, Artificial Sequence
  Description of Artificial Sequence: Synthetic oligonucleotide
aggcuucuguuaagaacuc

SEQ ID NO: 3060014 - RNA, 19 nt, Artificial Sequence
  Description of Artificial Sequence: Synthetic oligonucleotide
aucugcauccagggugaag

SEQ ID NO: 3060015 - RNA, 19 nt, Artificial Sequence
  Description of Artificial Sequence: Synthetic oligonucleotide
gcuacaaacucaauauacu

SEQ ID NO: 3060016 - RNA, 19 nt, Artificial Sequence
  Description of Artificial Sequence: Synthetic oligonucleotide
auccagggugaagacauua

SEQ ID NO: 3060017 - RNA, 19 nt, Artificial Sequence
  Description of Artificial Sequence: Synthetic oligonucleotide
ccagggugaagacauuauc

SEQ ID NO: 3060018 - RNA, 19 nt, Artificial Sequence
  Description of Artificial Sequence: Synthetic oligonucleotide
guuuucccuucuaacgaaa

SEQ ID NO: 3060019 - RNA, 19 nt, Artificial Sequence
  Description of Artificial Sequence: Synthetic oligonucleotide
ccgccaugacugcaaagcg

SEQ ID NO: 3060020 - RNA, 19 nt, Artificial Sequence
  Description of Artificial Sequence: Synthetic oligonucleotide
ccuucuaacgaaauguuuu

SEQ ID NO: 3060021 - RNA, 19 nt, Artificial Sequence
  Description of Artificial Sequence: Synthetic oligonucleotide
aggccgacaggcaaggcuu

SEQ ID NO: 3060022 - RNA, 19 nt, Artificial Sequence
  Description of Artificial Sequence: Synthetic oligonucleotide
ggcaaggcuucuguuaaga

SEQ ID NO: 3060023 - RNA, 19 nt, Artificial Sequence
  Description of Artificial Sequence: Synthetic oligonucleotide
guuuccgccaugacugcaa

SEQ ID NO: 3060024 - RNA, 19 nt, Artificial Sequence
  Description of Artificial Sequence: Synthetic oligonucleotide
gcuucuguuaagaacuccu

SEQ ID NO: 3060025 - RNA, 19 nt, Artificial Sequence
  Description of Artificial Sequence: Synthetic oligonucleotide
ggcuucuguuaagaacucc

SEQ ID NO: 3060026 - RNA, 19 nt, Artificial Sequence
  Description of Artificial Sequence: Synthetic oligonucleotide
cauuccaaugaggccgaca

SEQ ID NO: 3060027 - RNA, 19 nt, Artificial Sequence
  Description of Artificial Sequence: Synthetic oligonucleotide
cugugguuuccgccaugac

SEQ ID NO: 3060028 - RNA, 19 nt, Artificial Sequence
  Description of Artificial Sequence: Synthetic oligonucleotide
cgccaugacugcaaagcgc

SEQ ID NO: 3060029 - RNA, 19 nt, Artificial Sequence
  Description of Artificial Sequence: Synthetic oligonucleotide
caaacucaauauacuguuu

SEQ ID NO: 3060030 - RNA, 19 nt, Artificial Sequence
  Description of Artificial Sequence: Synthetic oligonucleotide
caaguucuacaagcaaucu

SEQ ID NO: 3060031 - RNA, 19 nt, Artificial Sequence
  Description of Artificial Sequence: Synthetic oligonucleotide
ugacugcaaagcgcugaua

SEQ ID NO: 3060032 - RNA, 19 nt, Artificial Sequence
  Description of Artificial Sequence: Synthetic oligonucleotide
aaucugcauccagggugaa

SEQ ID NO: 3060033 - RNA, 19 nt, Artificial Sequence
  Description of Artificial Sequence: Synthetic oligonucleotide
ugaggccgacaggcaaggc

SEQ ID NO: 3060034 - RNA, 19 nt, Artificial Sequence
  Description of Artificial Sequence: Synthetic oligonucleotide
gcaaggcuucuguuaagaa

SEQ ID NO: 3060035 - RNA, 19 nt, Artificial Sequence
  Description of Artificial Sequence: Synthetic oligonucleotide
gccaugacugcaaagcgcu

SEQ ID NO: 3060036 - RNA, 19 nt, Artificial Sequence
  Description of Artificial Sequence: Synthetic oligonucleotide
gacaggcaaggcuucuguu

SEQ ID NO: 3060037 - RNA, 19 nt, Artificial Sequence
  Description of Artificial Sequence: Synthetic oligonucleotide
ucauuccaaugaggccgac

SEQ ID NO: 3060038 - RNA, 19 nt, Artificial Sequence
  Description of Artificial Sequence: Synthetic oligonucleotide
cgcugauacucagaaacuc

SEQ ID NO: 3060039 - RNA, 19 nt, Artificial Sequence
  Description of Artificial Sequence: Synthetic oligonucleotide
gcaaucugucagcuacaaa

SEQ ID NO: 3060040 - RNA, 19 nt, Artificial Sequence
  Description of Artificial Sequence: Synthetic oligonucleotide
ccaaugaggccgacaggca

SEQ ID NO: 3060041 - RNA, 19 nt, Artificial Sequence
  Description of Artificial Sequence: Synthetic oligonucleotide
ccaugacugcaaagcgcug

SEQ ID NO: 3060042 - RNA, 19 nt, Artificial Sequence
  Description of Artificial Sequence: Synthetic oligonucleotide
gguuuccgccaugacugca

SEQ ID NO: 3060043 - RNA, 19 nt, Artificial Sequence
  Description of Artificial Sequence: Synthetic oligonucleotide
ccauaaaaucaaagggauu

SEQ ID NO: 3060044 - RNA, 19 nt, Artificial Sequence
  Description of Artificial Sequence: Synthetic oligonucleotide
ccgacaggcaaggcuucug

SEQ ID NO: 3060045 - RNA, 19 nt, Artificial Sequence
  Description of Artificial Sequence: Synthetic oligonucleotide
gcgcugauacucagaaacu

SEQ ID NO: 3060046 - RNA, 19 nt, Artificial Sequence
  Description of Artificial Sequence: Synthetic oligonucleotide
cccuucuaacgaaauguuu

SEQ ID NO: 3060047 - RNA, 19 nt, Artificial Sequence
  Description of Artificial Sequence: Synthetic oligonucleotide
ggccgacaggcaaggcuuc

SEQ ID NO: 3060048 - RNA, 19 nt, Artificial Sequence
  Description of Artificial Sequence: Synthetic oligonucleotide
cauccagggugaagacauu

SEQ ID NO: 3060049 - RNA, 19 nt, Artificial Sequence
  Description of Artificial Sequence: Synthetic oligonucleotide
gccgacaggcaaggcuucu

SEQ ID NO: 3060050 - RNA, 19 nt, Artificial Sequence
  Description of Artificial Sequence: Synthetic oligonucleotide
aacguuucuaucuggaucc

SEQ ID NO: 3060051 - RNA, 19 nt, Artificial Sequence
  Description of Artificial Sequence: Synthetic oligonucleotide
aaauacugggaaaagaaac

SEQ ID NO: 3060052 - RNA, 19 nt, Artificial Sequence
  Description of Artificial Sequence: Synthetic oligonucleotide
ugggaaaagaaacugcugg

SEQ ID NO: 3060053 - RNA, 19 nt, Artificial Sequence
  Description of Artificial Sequence: Synthetic oligonucleotide
aaaagaaacugcuggcugg

SEQ ID NO: 3060054 - RNA, 19 nt, Artificial Sequence
  Description of Artificial Sequence: Synthetic oligonucleotide
aaacguuucuaucuggauc

SEQ ID NO: 3060055 - RNA, 19 nt, Artificial Sequence
  Description of Artificial Sequence: Synthetic oligonucleotide
auuauaggcauagucagcc

SEQ ID NO: 3060056 - RNA, 19 nt, Artificial Sequence
  Description of Artificial Sequence: Synthetic oligonucleotide
uuuuaccucacuauaauac

SEQ ID NO: 3060057 - RNA, 19 nt, Artificial Sequence
  Description of Artificial Sequence: Synthetic oligonucleotide
aauaaacguuucuaucugg

SEQ ID NO: 3060058 - RNA, 19 nt, Artificial Sequence
  Description of Artificial Sequence: Synthetic oligonucleotide
agaaauaaacguuucuauc

SEQ ID NO: 3060059 - RNA, 19 nt, Artificial Sequence
  Description of Artificial Sequence: Synthetic oligonucleotide
uccauuauaggcauaguca

SEQ ID NO: 3060060 - RNA, 19 nt, Artificial Sequence
  Description of Artificial Sequence: Synthetic oligonucleotide
aaauaaacguuucuaucug

SEQ ID NO: 3060061 - RNA, 19 nt, Artificial Sequence
  Description of Artificial Sequence: Synthetic oligonucleotide
cauagcuaagacuacacag

SEQ ID NO: 3060062 - RNA, 19 nt, Artificial Sequence
  Description of Artificial Sequence: Synthetic oligonucleotide
gaucccaggaaccuuaucc

SEQ ID NO: 3060063 - RNA, 19 nt, Artificial Sequence
  Description of Artificial Sequence: Synthetic oligonucleotide
uggacagucaggcuagucg

SEQ ID NO: 3060064 - RNA, 19 nt, Artificial Sequence
  Description of Artificial Sequence: Synthetic oligonucleotide
uucucagugacacagcugu

SEQ ID NO: 3060065 - RNA, 19 nt, Artificial Sequence
  Description of Artificial Sequence: Synthetic oligonucleotide
uauaauaccucugcgaacu

SEQ ID NO: 3060066 - RNA, 19 nt, Artificial Sequence
  Description of Artificial Sequence: Synthetic oligonucleotide
acuacacagaaauaaacgu

SEQ ID NO: 3060067 - RNA, 19 nt, Artificial Sequence
  Description of Artificial Sequence: Synthetic oligonucleotide
gaaccugcagaacagcugg

SEQ ID NO: 3060068 - RNA, 19 nt, Artificial Sequence
  Description of Artificial Sequence: Synthetic oligonucleotide
uuuaccucacuauaauacc

SEQ ID NO: 3060069 - RNA, 19 nt, Artificial Sequence
  Description of Artificial Sequence: Synthetic oligonucleotide
uuauccuaaucuuuuaccu

SEQ ID NO: 3060070 - RNA, 19 nt, Artificial Sequence
  Description of Artificial Sequence: Synthetic oligonucleotide
uaagacuacacagaaauaa

SEQ ID NO: 3060071 - RNA, 19 nt, Artificial Sequence
  Description of Artificial Sequence: Synthetic oligonucleotide
cuuauccuaaucuuuuacc

SEQ ID NO: 3060072 - RNA, 19 nt, Artificial Sequence
  Description of Artificial Sequence: Synthetic oligonucleotide
acuggccuccauuauaggc

SEQ ID NO: 3060073 - RNA, 19 nt, Artificial Sequence
  Description of Artificial Sequence: Synthetic oligonucleotide
cuuguugugcauuaucagc

SEQ ID NO: 3060074 - RNA, 19 nt, Artificial Sequence
  Description of Artificial Sequence: Synthetic oligonucleotide
gaaauaaacguuucuaucu

SEQ ID NO: 3060075 - RNA, 19 nt, Artificial Sequence
  Description of Artificial Sequence: Synthetic oligonucleotide
uuguugugcauuaucagcu

SEQ ID NO: 3060076 - RNA, 19 nt, Artificial Sequence
  Description of Artificial Sequence: Synthetic oligonucleotide
aaagaaacugcuggcuggc

SEQ ID NO: 3060077 - RNA, 19 nt, Artificial Sequence
  Description of Artificial Sequence: Synthetic oligonucleotide
uuacuggccuccauuauag

SEQ ID NO: 3060078 - RNA, 19 nt, Artificial Sequence
  Description of Artificial Sequence: Synthetic oligonucleotide
acuauaauaccucugcgaa

SEQ ID NO: 3060079 - RNA, 19 nt, Artificial Sequence
  Description of Artificial Sequence: Synthetic oligonucleotide
gaaaagaaacugcuggcug

SEQ ID NO: 3060080 - RNA, 19 nt, Artificial Sequence
  Description of Artificial Sequence: Synthetic oligonucleotide
ucacuauaauaccucugcg

SEQ ID NO: 3060081 - RNA, 19 nt, Artificial Sequence
  Description of Artificial Sequence: Synthetic oligonucleotide
aauaccucugcgaacuagg

SEQ ID NO: 3060082 - RNA, 19 nt, Artificial Sequence
  Description of Artificial Sequence: Synthetic oligonucleotide
uacacagaaauaaacguuu

SEQ ID NO: 3060083 - RNA, 19 nt, Artificial Sequence
  Description of Artificial Sequence: Synthetic oligonucleotide
aaucuuuuaccucacuaua

SEQ ID NO: 3060084 - RNA, 19 nt, Artificial Sequence
  Description of Artificial Sequence: Synthetic oligonucleotide
auaaccagugcauagcuaa

SEQ ID NO: 3060085 - RNA, 19 nt, Artificial Sequence
  Description of Artificial Sequence: Synthetic oligonucleotide
uaaucuuuuaccucacuau

SEQ ID NO: 3060086 - RNA, 19 nt, Artificial Sequence
  Description of Artificial Sequence: Synthetic oligonucleotide
uuaccucacuauaauaccu

SEQ ID NO: 3060087 - RNA, 19 nt, Artificial Sequence
  Description of Artificial Sequence: Synthetic oligonucleotide
auccuaaucuuuuaccuca

SEQ ID NO: 3060088 - RNA, 19 nt, Artificial Sequence
  Description of Artificial Sequence: Synthetic oligonucleotide
auagucagccuuguugugc

SEQ ID NO: 3060089 - RNA, 19 nt, Artificial Sequence
  Description of Artificial Sequence: Synthetic oligonucleotide
ucuuuuaccucacuauaau

SEQ ID NO: 3060090 - RNA, 19 nt, Artificial Sequence
  Description of Artificial Sequence: Synthetic oligonucleotide
accagugcauagcuaagac

SEQ ID NO: 3060091 - RNA, 19 nt, Artificial Sequence
  Description of Artificial Sequence: Synthetic oligonucleotide
aggaaccuuauccuaaucu

SEQ ID NO: 3060092 - RNA, 19 nt, Artificial Sequence
  Description of Artificial Sequence: Synthetic oligonucleotide
ucuucucagugacacagcu

SEQ ID NO: 3060093 - RNA, 19 nt, Artificial Sequence
  Description of Artificial Sequence: Synthetic oligonucleotide
ucagugacacagcugugcc

SEQ ID NO: 3060094 - RNA, 19 nt, Artificial Sequence
  Description of Artificial Sequence: Synthetic oligonucleotide
uuucagaugcccacggcac

SEQ ID NO: 3060095 - RNA, 19 nt, Artificial Sequence
  Description of Artificial Sequence: Synthetic oligonucleotide
ugugccuggacagucaggc

SEQ ID NO: 3060096 - RNA, 19 nt, Artificial Sequence
  Description of Artificial Sequence: Synthetic oligonucleotide
uuucuaucuggaucccagg

SEQ ID NO: 3060097 - RNA, 19 nt, Artificial Sequence
  Description of Artificial Sequence: Synthetic oligonucleotide
cuaucuggaucccaggaac

SEQ ID NO: 3060098 - RNA, 19 nt, Artificial Sequence
  Description of Artificial Sequence: Synthetic oligonucleotide
ugcaucuucucagugacac

SEQ ID NO: 3060099 - RNA, 19 nt, Artificial Sequence
  Description of Artificial Sequence: Synthetic oligonucleotide
caucuucucagugacacag

SEQ ID NO: 3060100 - RNA, 19 nt, Artificial Sequence
  Description of Artificial Sequence: Synthetic oligonucleotide
ugcauagcuaagacuacac

SEQ ID NO: 3060101 - RNA, 19 nt, Artificial Sequence
  Description of Artificial Sequence: Synthetic oligonucleotide
uagcuaagacuacacagaa

SEQ ID NO: 3060102 - RNA, 19 nt, Artificial Sequence
  Description of Artificial Sequence: Synthetic oligonucleotide
cauuauaggcauagucagc

SEQ ID NO: 3060103 - RNA, 19 nt, Artificial Sequence
  Description of Artificial Sequence: Synthetic oligonucleotide
uauccuaaucuuuuaccuc

SEQ ID NO: 3060104 - RNA, 19 nt, Artificial Sequence
  Description of Artificial Sequence: Synthetic oligonucleotide
ucuaucuggaucccaggaa

SEQ ID NO: 3060105 - RNA, 19 nt, Artificial Sequence
  Description of Artificial Sequence: Synthetic oligonucleotide
uaucuggaucccaggaacc

SEQ ID NO: 3060106 - RNA, 19 nt, Artificial Sequence
  Description of Artificial Sequence: Synthetic oligonucleotide
uaccucugcgaacuagggg

SEQ ID NO: 3060107 - RNA, 19 nt, Artificial Sequence
  Description of Artificial Sequence: Synthetic oligonucleotide
uggagcacgcaguuacugg

SEQ ID NO: 3060108 - RNA, 19 nt, Artificial Sequence
  Description of Artificial Sequence: Synthetic oligonucleotide
uaagcgaggggcuuucaga

SEQ ID NO: 3060109 - RNA, 19 nt, Artificial Sequence
  Description of Artificial Sequence: Synthetic oligonucleotide
cuccauuauaggcauaguc

SEQ ID NO: 3060110 - RNA, 19 nt, Artificial Sequence
  Description of Artificial Sequence: Synthetic oligonucleotide
ugcagaacagcugguagcc

SEQ ID NO: 3060111 - RNA, 19 nt, Artificial Sequence
  Description of Artificial Sequence: Synthetic oligonucleotide
cuagucgggauaaccagug

SEQ ID NO: 3060112 - RNA, 19 nt, Artificial Sequence
  Description of Artificial Sequence: Synthetic oligonucleotide
ggcauagucagccuuguug

SEQ ID NO: 3060113 - RNA, 19 nt, Artificial Sequence
  Description of Artificial Sequence: Synthetic oligonucleotide
guuucuaucuggaucccag

SEQ ID NO: 3060114 - RNA, 19 nt, Artificial Sequence
  Description of Artificial Sequence: Synthetic oligonucleotide
ccauuauaggcauagucag

SEQ ID NO: 3060115 - RNA, 19 nt, Artificial Sequence
  Description of Artificial Sequence: Synthetic oligonucleotide
agugacacagcugugccug

SEQ ID NO: 3060116 - RNA, 19 nt, Artificial Sequence
  Description of Artificial Sequence: Synthetic oligonucleotide
cagugcauagcuaagacua

SEQ ID NO: 3060117 - RNA, 19 nt, Artificial Sequence
  Description of Artificial Sequence: Synthetic oligonucleotide
aagcgaggggcuuucagau

SEQ ID NO: 3060118 - RNA, 19 nt, Artificial Sequence
  Description of Artificial Sequence: Synthetic oligonucleotide
agucgggauaaccagugca

SEQ ID NO: 3060119 - RNA, 19 nt, Artificial Sequence
  Description of Artificial Sequence: Synthetic oligonucleotide
uauaggcauagucagccuu

SEQ ID NO: 3060120 - RNA, 19 nt, Artificial Sequence
  Description of Artificial Sequence: Synthetic oligonucleotide
cuauaauaccucugcgaac

SEQ ID NO: 3060121 - RNA, 19 nt, Artificial Sequence
  Description of Artificial Sequence: Synthetic oligonucleotide
ggacagucaggcuagucgg

SEQ ID NO: 3060122 - RNA, 19 nt, Artificial Sequence
  Description of Artificial Sequence: Synthetic oligonucleotide
uaaccagugcauagcuaag

SEQ ID NO: 3060123 - RNA, 19 nt, Artificial Sequence
  Description of Artificial Sequence: Synthetic oligonucleotide
acugggaaaagaaacugcu

SEQ ID NO: 3060124 - RNA, 19 nt, Artificial Sequence
  Description of Artificial Sequence: Synthetic oligonucleotide
aagacuacacagaaauaaa

SEQ ID NO: 3060125 - RNA, 19 nt, Artificial Sequence
  Description of Artificial Sequence: Synthetic oligonucleotide
cugcagaacagcugguagc

SEQ ID NO: 3060126 - RNA, 19 nt, Artificial Sequence
  Description of Artificial Sequence: Synthetic oligonucleotide
cacuauaauaccucugcga

SEQ ID NO: 3060127 - RNA, 19 nt, Artificial Sequence
  Description of Artificial Sequence: Synthetic oligonucleotide
uaauaccucugcgaacuag

SEQ ID NO: 3060128 - RNA, 19 nt, Artificial Sequence
  Description of Artificial Sequence: Synthetic oligonucleotide
uaccucacuauaauaccuc

SEQ ID NO: 3060129 - RNA, 19 nt, Artificial Sequence
  Description of Artificial Sequence: Synthetic oligonucleotide
agccuuguugugcauuauc

SEQ ID NO: 3060130 - RNA, 19 nt, Artificial Sequence
  Description of Artificial Sequence: Synthetic oligonucleotide
accuccuuggagcacgcag

SEQ ID NO: 3060131 - RNA, 19 nt, Artificial Sequence
  Description of Artificial Sequence: Synthetic oligonucleotide
agcugguagccucaggcug

SEQ ID NO: 3060132 - RNA, 19 nt, Artificial Sequence
  Description of Artificial Sequence: Synthetic oligonucleotide
uucagaugcccacggcacc

SEQ ID NO: 3060133 - RNA, 19 nt, Artificial Sequence
  Description of Artificial Sequence: Synthetic oligonucleotide
gcuaagacuacacagaaau

SEQ ID NO: 3060134 - RNA, 19 nt, Artificial Sequence
  Description of Artificial Sequence: Synthetic oligonucleotide
auaaacguuucuaucugga

SEQ ID NO: 3060135 - RNA, 19 nt, Artificial Sequence
  Description of Artificial Sequence: Synthetic oligonucleotide
guugugcauuaucagcuug

SEQ ID NO: 3060136 - RNA, 19 nt, Artificial Sequence
  Description of Artificial Sequence: Synthetic oligonucleotide
cucagugacacagcugugc

SEQ ID NO: 3060137 - RNA, 19 nt, Artificial Sequence
  Description of Artificial Sequence: Synthetic oligonucleotide
aucccaggaaccuuauccu

SEQ ID NO: 3060138 - RNA, 19 nt, Artificial Sequence
  Description of Artificial Sequence: Synthetic oligonucleotide
cuuucagaugcccacggca

SEQ ID NO: 3060139 - RNA, 19 nt, Artificial Sequence
  Description of Artificial Sequence: Synthetic oligonucleotide
gggaaaagaaacugcuggc

SEQ ID NO: 3060140 - RNA, 19 nt, Artificial Sequence
  Description of Artificial Sequence: Synthetic oligonucleotide
cugggaaaagaaacugcug

SEQ ID NO: 3060141 - RNA, 19 nt, Artificial Sequence
  Description of Artificial Sequence: Synthetic oligonucleotide
ugccuggacagucaggcua

SEQ ID NO: 3060142 - RNA, 19 nt, Artificial Sequence
  Description of Artificial Sequence: Synthetic oligonucleotide
acacagaaauaaacguuuc

SEQ ID NO: 3060143 - RNA, 19 nt, Artificial Sequence
  Description of Artificial Sequence: Synthetic oligonucleotide
cuaaucuuuuaccucacua

SEQ ID NO: 3060144 - RNA, 19 nt, Artificial Sequence
  Description of Artificial Sequence: Synthetic oligonucleotide
accucacuauaauaccucu

SEQ ID NO: 3060145 - RNA, 19 nt, Artificial Sequence
  Description of Artificial Sequence: Synthetic oligonucleotide
aaccuuauccuaaucuuuu

SEQ ID NO: 3060146 - RNA, 19 nt, Artificial Sequence
  Description of Artificial Sequence: Synthetic oligonucleotide
aaccagugcauagcuaaga

SEQ ID NO: 3060147 - RNA, 19 nt, Artificial Sequence
  Description of Artificial Sequence: Synthetic oligonucleotide
cuggccuccauuauaggca

SEQ ID NO: 3060148 - RNA, 19 nt, Artificial Sequence
  Description of Artificial Sequence: Synthetic oligonucleotide
uuauaggcauagucagccu

SEQ ID NO: 3060149 - RNA, 19 nt, Artificial Sequence
  Description of Artificial Sequence: Synthetic oligonucleotide
agugcauagcuaagacuac

SEQ ID NO: 3060150 - RNA, 19 nt, Artificial Sequence
  Description of Artificial Sequence: Synthetic oligonucleotide
cagaacagcugguagccuc

SEQ ID NO: 3060151 - RNA, 19 nt, Artificial Sequence
  Description of Artificial Sequence: Synthetic oligonucleotide
guaagcgaggggcuuucag

SEQ ID NO: 3060152 - RNA, 19 nt, Artificial Sequence
  Description of Artificial Sequence: Synthetic oligonucleotide
ucagaugcccacggcaccc

SEQ ID NO: 3060153 - RNA, 19 nt, Artificial Sequence
  Description of Artificial Sequence: Synthetic oligonucleotide
uccuaaucuuuuaccucac

SEQ ID NO: 3060154 - RNA, 19 nt, Artificial Sequence
  Description of Artificial Sequence: Synthetic oligonucleotide
ucagccuuguugugcauua

SEQ ID NO: 3060155 - RNA, 19 nt, Artificial Sequence
  Description of Artificial Sequence: Synthetic oligonucleotide
auaggcauagucagccuug

SEQ ID NO: 3060156 - RNA, 19 nt, Artificial Sequence
  Description of Artificial Sequence: Synthetic oligonucleotide
uuggagcacgcaguuacug

SEQ ID NO: 3060157 - RNA, 19 nt, Artificial Sequence
  Description of Artificial Sequence: Synthetic oligonucleotide
ggagcacgcaguuacuggc

SEQ ID NO: 3060158 - RNA, 19 nt, Artificial Sequence
  Description of Artificial Sequence: Synthetic oligonucleotide
cuucucagugacacagcug

SEQ ID NO: 3060159 - RNA, 19 nt, Artificial Sequence
  Description of Artificial Sequence: Synthetic oligonucleotide
gcagccugcaucuucucag

SEQ ID NO: 3060160 - RNA, 19 nt, Artificial Sequence
  Description of Artificial Sequence: Synthetic oligonucleotide
aucuuuuaccucacuauaa

SEQ ID NO: 3060161 - RNA, 19 nt, Artificial Sequence
  Description of Artificial Sequence: Synthetic oligonucleotide
auaccucugcgaacuaggg

SEQ ID NO: 3060162 - RNA, 19 nt, Artificial Sequence
  Description of Artificial Sequence: Synthetic oligonucleotide
cuuuuaccucacuauaaua

SEQ ID NO: 3060163 - RNA, 19 nt, Artificial Sequence
  Description of Artificial Sequence: Synthetic oligonucleotide
gacagucaggcuagucggg

SEQ ID NO: 3060164 - RNA, 19 nt, Artificial Sequence
  Description of Artificial Sequence: Synthetic oligonucleotide
uagucgggauaaccagugc

SEQ ID NO: 3060165 - RNA, 19 nt, Artificial Sequence
  Description of Artificial Sequence: Synthetic oligonucleotide
ggcuagucgggauaaccag

SEQ ID NO: 3060166 - RNA, 19 nt, Artificial Sequence
  Description of Artificial Sequence: Synthetic oligonucleotide
aucuucucagugacacagc

SEQ ID NO: 3060167 - RNA, 19 nt, Artificial Sequence
  Description of Artificial Sequence: Synthetic oligonucleotide
caggcuagucgggauaacc

SEQ ID NO: 3060168 - RNA, 19 nt, Artificial Sequence
  Description of Artificial Sequence: Synthetic oligonucleotide
cagaaauaaacguuucuau

SEQ ID NO: 3060169 - RNA, 19 nt, Artificial Sequence
  Description of Artificial Sequence: Synthetic oligonucleotide
gcgaggggcuuucagaugc

SEQ ID NO: 3060170 - RNA, 19 nt, Artificial Sequence
  Description of Artificial Sequence: Synthetic oligonucleotide
gguagccucaggcuggcgc

SEQ ID NO: 3060171 - RNA, 19 nt, Artificial Sequence
  Description of Artificial Sequence: Synthetic oligonucleotide
ccuuggagcacgcaguuac

SEQ ID NO: 3060172 - RNA, 19 nt, Artificial Sequence
  Description of Artificial Sequence: Synthetic oligonucleotide
cauagucagccuuguugug

SEQ ID NO: 3060173 - RNA, 19 nt, Artificial Sequence
  Description of Artificial Sequence: Synthetic oligonucleotide
guuacuggccuccauuaua

SEQ ID NO: 3060174 - RNA, 19 nt, Artificial Sequence
  Description of Artificial Sequence: Synthetic oligonucleotide
acggcacccaggaaccugc

SEQ ID NO: 3060175 - RNA, 19 nt, Artificial Sequence
  Description of Artificial Sequence: Synthetic oligonucleotide
uguugugcauuaucagcuu

SEQ ID NO: 3060176 - RNA, 19 nt, Artificial Sequence
  Description of Artificial Sequence: Synthetic oligonucleotide
aaacugcuggcuggcaccu

SEQ ID NO: 3060177 - RNA, 19 nt, Artificial Sequence
  Description of Artificial Sequence: Synthetic oligonucleotide
augcccacggcacccagga

SEQ ID NO: 3060178 - RNA, 19 nt, Artificial Sequence
  Description of Artificial Sequence: Synthetic oligonucleotide
ccuuguugugcauuaucag

SEQ ID NO: 3060179 - RNA, 19 nt, Artificial Sequence
  Description of Artificial Sequence: Synthetic oligonucleotide
aguuacuggccuccauuau

SEQ ID NO: 3060180 - RNA, 19 nt, Artificial Sequence
  Description of Artificial Sequence: Synthetic oligonucleotide
ccuuauccuaaucuuuuac

SEQ ID NO: 3060181 - RNA, 19 nt, Artificial Sequence
  Description of Artificial Sequence: Synthetic oligonucleotide
ggcuuucagaugcccacgg

SEQ ID NO: 3060182 - RNA, 19 nt, Artificial Sequence
  Description of Artificial Sequence: Synthetic oligonucleotide
cacgcaguuacuggccucc

SEQ ID NO: 3060183 - RNA, 19 nt, Artificial Sequence
  Description of Artificial Sequence: Synthetic oligonucleotide
agcacgcaguuacuggccu

SEQ ID NO: 3060184 - RNA, 19 nt, Artificial Sequence
  Description of Artificial Sequence: Synthetic oligonucleotide
gacacagcugugccuggac

SEQ ID NO: 3060185 - RNA, 19 nt, Artificial Sequence
  Description of Artificial Sequence: Synthetic oligonucleotide
acguuucuaucuggauccc

SEQ ID NO: 3060186 - RNA, 19 nt, Artificial Sequence
  Description of Artificial Sequence: Synthetic oligonucleotide
cuacacagaaauaaacguu

SEQ ID NO: 3060187 - RNA, 19 nt, Artificial Sequence
  Description of Artificial Sequence: Synthetic oligonucleotide
gggauaaccagugcauagc

SEQ ID NO: 3060188 - RNA, 19 nt, Artificial Sequence
  Description of Artificial Sequence: Synthetic oligonucleotide
guagccucaggcuggcgca

SEQ ID NO: 3060189 - RNA, 19 nt, Artificial Sequence
  Description of Artificial Sequence: Synthetic oligonucleotide
uggccuccauuauaggcau

SEQ ID NO: 3060190 - RNA, 19 nt, Artificial Sequence
  Description of Artificial Sequence: Synthetic oligonucleotide
ucccaggaaccuuauccua

SEQ ID NO: 3060191 - RNA, 19 nt, Artificial Sequence
  Description of Artificial Sequence: Synthetic oligonucleotide
aucuggaucccaggaaccu

SEQ ID NO: 3060192 - RNA, 19 nt, Artificial Sequence
  Description of Artificial Sequence: Synthetic oligonucleotide
gccuccauuauaggcauag

SEQ ID NO: 3060193 - RNA, 19 nt, Artificial Sequence
  Description of Artificial Sequence: Synthetic oligonucleotide
aggaaccugcagaacagcu

SEQ ID NO: 3060194 - RNA, 19 nt, Artificial Sequence
  Description of Artificial Sequence: Synthetic oligonucleotide
aggcuagucgggauaacca

SEQ ID NO: 3060195 - RNA, 19 nt, Artificial Sequence
  Description of Artificial Sequence: Synthetic oligonucleotide
gagcacgcaguuacuggcc

SEQ ID NO: 3060196 - RNA, 19 nt, Artificial Sequence
  Description of Artificial Sequence: Synthetic oligonucleotide
cuaagacuacacagaaaua

SEQ ID NO: 3060197 - RNA, 19 nt, Artificial Sequence
  Description of Artificial Sequence: Synthetic oligonucleotide
agucaggcuagucgggaua

SEQ ID NO: 3060198 - RNA, 19 nt, Artificial Sequence
  Description of Artificial Sequence: Synthetic oligonucleotide
ccugcagaacagcugguag

SEQ ID NO: 3060199 - RNA, 19 nt, Artificial Sequence
  Description of Artificial Sequence: Synthetic oligonucleotide
ccaggaaccugcagaacag

SEQ ID NO: 3060200 - RNA, 19 nt, Artificial Sequence
  Description of Artificial Sequence: Synthetic oligonucleotide
agaacagcugguagccuca

SEQ ID NO: 3060201 - RNA, 19 nt, Artificial Sequence
  Description of Artificial Sequence: Synthetic oligonucleotide
gcauagucagccuuguugu

SEQ ID NO: 3060202 - RNA, 19 nt, Artificial Sequence
  Description of Artificial Sequence: Synthetic oligonucleotide
agccugcaucuucucagug

SEQ ID NO: 3060203 - RNA, 19 nt, Artificial Sequence
  Description of Artificial Sequence: Synthetic oligonucleotide
acagucaggcuagucggga

SEQ ID NO: 3060204 - RNA, 19 nt, Artificial Sequence
  Description of Artificial Sequence: Synthetic oligonucleotide
agcgaggggcuuucagaug

SEQ ID NO: 3060205 - RNA, 19 nt, Artificial Sequence
  Description of Artificial Sequence: Synthetic oligonucleotide
ggaaccugcagaacagcug

SEQ ID NO: 3060206 - RNA, 19 nt, Artificial Sequence
  Description of Artificial Sequence: Synthetic oligonucleotide
gcugguagccucaggcugg

SEQ ID NO: 3060207 - RNA, 19 nt, Artificial Sequence
  Description of Artificial Sequence: Synthetic oligonucleotide
uaggcauagucagccuugu

SEQ ID NO: 3060208 - RNA, 19 nt, Artificial Sequence
  Description of Artificial Sequence: Synthetic oligonucleotide
cugugccuggacagucagg

SEQ ID NO: 3060209 - RNA, 19 nt, Artificial Sequence
  Description of Artificial Sequence: Synthetic oligonucleotide
cacagaaauaaacguuucu

SEQ ID NO: 3060210 - RNA, 19 nt, Artificial Sequence
  Description of Artificial Sequence: Synthetic oligonucleotide
gugacacagcugugccugg

SEQ ID NO: 3060211 - RNA, 19 nt, Artificial Sequence
  Description of Artificial Sequence: Synthetic oligonucleotide
gauaaccagugcauagcua

SEQ ID NO: 3060212 - RNA, 19 nt, Artificial Sequence
  Description of Artificial Sequence: Synthetic oligonucleotide
gugcauagcuaagacuaca

SEQ ID NO: 3060213 - RNA, 19 nt, Artificial Sequence
  Description of Artificial Sequence: Synthetic oligonucleotide
gcauagcuaagacuacaca

SEQ ID NO: 3060214 - RNA, 19 nt, Artificial Sequence
  Description of Artificial Sequence: Synthetic oligonucleotide
ucgggauaaccagugcaua

SEQ ID NO: 3060215 - RNA, 19 nt, Artificial Sequence
  Description of Artificial Sequence: Synthetic oligonucleotide
caggaaccugcagaacagc

SEQ ID NO: 3060216 - RNA, 19 nt, Artificial Sequence
  Description of Artificial Sequence: Synthetic oligonucleotide
caguuacuggccuccauua

SEQ ID NO: 3060217 - RNA, 19 nt, Artificial Sequence
  Description of Artificial Sequence: Synthetic oligonucleotide
auaauaccucugcgaacua

SEQ ID NO: 3060218 - RNA, 19 nt, Artificial Sequence
  Description of Artificial Sequence: Synthetic oligonucleotide
gcacccaggaaccugcaga

SEQ ID NO: 3060219 - RNA, 19 nt, Artificial Sequence
  Description of Artificial Sequence: Synthetic oligonucleotide
gaggggcuuucagaugccc

SEQ ID NO: 3060220 - RNA, 19 nt, Artificial Sequence
  Description of Artificial Sequence: Synthetic oligonucleotide
ggauaaccagugcauagcu

SEQ ID NO: 3060221 - RNA, 19 nt, Artificial Sequence
  Description of Artificial Sequence: Synthetic oligonucleotide
gaaccuuauccuaaucuuu

SEQ ID NO: 3060222 - RNA, 19 nt, Artificial Sequence
  Description of Artificial Sequence: Synthetic oligonucleotide
gaacagcugguagccucag

SEQ ID NO: 3060223 - RNA, 19 nt, Artificial Sequence
  Description of Artificial Sequence: Synthetic oligonucleotide
gccuuguugugcauuauca

SEQ ID NO: 3060224 - RNA, 19 nt, Artificial Sequence
  Description of Artificial Sequence: Synthetic oligonucleotide
uggaucccaggaaccuuau

SEQ ID NO: 3060225 - RNA, 19 nt, Artificial Sequence
  Description of Artificial Sequence: Synthetic oligonucleotide
ggaaaagaaacugcuggcu

SEQ ID NO: 3060226 - RNA, 19 nt, Artificial Sequence
  Description of Artificial Sequence: Synthetic oligonucleotide
ggaaccuuauccuaaucuu

SEQ ID NO: 3060227 - RNA, 19 nt, Artificial Sequence
  Description of Artificial Sequence: Synthetic oligonucleotide
ugacacagcugugccugga

SEQ ID NO: 3060228 - RNA, 19 nt, Artificial Sequence
  Description of Artificial Sequence: Synthetic oligonucleotide
ucuggaucccaggaaccuu

SEQ ID NO: 3060229 - RNA, 19 nt, Artificial Sequence
  Description of Artificial Sequence: Synthetic oligonucleotide
cuggaucccaggaaccuua

SEQ ID NO: 3060230 - RNA, 19 nt, Artificial Sequence
  Description of Artificial Sequence: Synthetic oligonucleotide
cacccaggaaccugcagaa

SEQ ID NO: 3060231 - RNA, 19 nt, Artificial Sequence
  Description of Artificial Sequence: Synthetic oligonucleotide
gcccacggcacccaggaac

SEQ ID NO: 3060232 - RNA, 19 nt, Artificial Sequence
  Description of Artificial Sequence: Synthetic oligonucleotide
cccacggcacccaggaacc

SEQ ID NO: 3060233 - RNA, 19 nt, Artificial Sequence
  Description of Artificial Sequence: Synthetic oligonucleotide
cgggauaaccagugcauag

SEQ ID NO: 3060234 - RNA, 19 nt, Artificial Sequence
  Description of Artificial Sequence: Synthetic oligonucleotide
acccaggaaccugcagaac

SEQ ID NO: 3060235 - RNA, 19 nt, Artificial Sequence
  Description of Artificial Sequence: Synthetic oligonucleotide
cccaggaaccugcagaaca

SEQ ID NO: 3060236 - RNA, 19 nt, Artificial Sequence
  Description of Artificial Sequence: Synthetic oligonucleotide
uggcuggcaccuccuugga

SEQ ID NO: 3060237 - RNA, 19 nt, Artificial Sequence
  Description of Artificial Sequence: Synthetic oligonucleotide
gaguaagcgaggggcuuuc

SEQ ID NO: 3060238 - RNA, 19 nt, Artificial Sequence
  Description of Artificial Sequence: Synthetic oligonucleotide
aacugcuggcuggcaccuc

SEQ ID NO: 3060239 - RNA, 19 nt, Artificial Sequence
  Description of Artificial Sequence: Synthetic oligonucleotide
gcuuucagaugcccacggc

SEQ ID NO: 3060240 - RNA, 19 nt, Artificial Sequence
  Description of Artificial Sequence: Synthetic oligonucleotide
aaccugcagaacagcuggu

SEQ ID NO: 3060241 - RNA, 19 nt, Artificial Sequence
  Description of Artificial Sequence: Synthetic oligonucleotide
gucaggcuagucgggauaa

SEQ ID NO: 3060242 - RNA, 19 nt, Artificial Sequence
  Description of Artificial Sequence: Synthetic oligonucleotide
uagccucaggcuggcgcag

SEQ ID NO: 3060243 - RNA, 19 nt, Artificial Sequence
  Description of Artificial Sequence: Synthetic oligonucleotide
cacggcacccaggaaccug

SEQ ID NO: 3060244 - RNA, 19 nt, Artificial Sequence
  Description of Artificial Sequence: Synthetic oligonucleotide
ucaggcuagucgggauaac

SEQ ID NO: 3060245 - RNA, 19 nt, Artificial Sequence
  Description of Artificial Sequence: Synthetic oligonucleotide
accugcagaacagcuggua

SEQ ID NO: 3060246 - RNA, 19 nt, Artificial Sequence
  Description of Artificial Sequence: Synthetic oligonucleotide
aguaagcgaggggcuuuca

SEQ ID NO: 3060247 - RNA, 19 nt, Artificial Sequence
  Description of Artificial Sequence: Synthetic oligonucleotide
cuggacagucaggcuaguc

SEQ ID NO: 3060248 - RNA, 19 nt, Artificial Sequence
  Description of Artificial Sequence: Synthetic oligonucleotide
ggcacccaggaaccugcag

SEQ ID NO: 3060249 - RNA, 19 nt, Artificial Sequence
  Description of Artificial Sequence: Synthetic oligonucleotide
cagcugugccuggacaguc

SEQ ID NO: 3060250 - RNA, 19 nt, Artificial Sequence
  Description of Artificial Sequence: Synthetic oligonucleotide
gucgggauaaccagugcau

SEQ ID NO: 3060251 - RNA, 19 nt, Artificial Sequence
  Description of Artificial Sequence: Synthetic oligonucleotide
uccuuggagcacgcaguua

SEQ ID NO: 3060252 - RNA, 19 nt, Artificial Sequence
  Description of Artificial Sequence: Synthetic oligonucleotide
ugcuggcuggcaccuccuu

SEQ ID NO: 3060253 - RNA, 19 nt, Artificial Sequence
  Description of Artificial Sequence: Synthetic oligonucleotide
cccaggaaccuuauccuaa

SEQ ID NO: 3060254 - RNA, 19 nt, Artificial Sequence
  Description of Artificial Sequence: Synthetic oligonucleotide
aggcauagucagccuuguu

SEQ ID NO: 3060255 - RNA, 19 nt, Artificial Sequence
  Description of Artificial Sequence: Synthetic oligonucleotide
cuuggagcacgcaguuacu

SEQ ID NO: 3060256 - RNA, 19 nt, Artificial Sequence
  Description of Artificial Sequence: Synthetic oligonucleotide
cagcugguagccucaggcu

SEQ ID NO: 3060257 - RNA, 19 nt, Artificial Sequence
  Description of Artificial Sequence: Synthetic oligonucleotide
ggaucccaggaaccuuauc

SEQ ID NO: 3060258 - RNA, 19 nt, Artificial Sequence
  Description of Artificial Sequence: Synthetic oligonucleotide
gcaguuacuggccuccauu

SEQ ID NO: 3060259 - RNA, 19 nt, Artificial Sequence
  Description of Artificial Sequence: Synthetic oligonucleotide
ggcuggcgcagccugcauc

SEQ ID NO: 3060260 - RNA, 19 nt, Artificial Sequence
  Description of Artificial Sequence: Synthetic oligonucleotide
ccagugcauagcuaagacu

SEQ ID NO: 3060261 - RNA, 19 nt, Artificial Sequence
  Description of Artificial Sequence: Synthetic oligonucleotide
gcuagucgggauaaccagu

SEQ ID NO: 3060262 - RNA, 19 nt, Artificial Sequence
  Description of Artificial Sequence: Synthetic oligonucleotide
cagccugcaucuucucagu

SEQ ID NO: 3060263 - RNA, 19 nt, Artificial Sequence
  Description of Artificial Sequence: Synthetic oligonucleotide
gcacgcaguuacuggccuc

SEQ ID NO: 3060264 - RNA, 19 nt, Artificial Sequence
  Description of Artificial Sequence: Synthetic oligonucleotide
caggcuggcgcagccugca

SEQ ID NO: 3060265 - RNA, 19 nt, Artificial Sequence
  Description of Artificial Sequence: Synthetic oligonucleotide
ccuccuuggagcacgcagu

SEQ ID NO: 3060266 - RNA, 19 nt, Artificial Sequence
  Description of Artificial Sequence: Synthetic oligonucleotide
cagucaggcuagucgggau

SEQ ID NO: 3060267 - RNA, 19 nt, Artificial Sequence
  Description of Artificial Sequence: Synthetic oligonucleotide
cuccuuggagcacgcaguu

SEQ ID NO: 3060268 - RNA, 19 nt, Artificial Sequence
  Description of Artificial Sequence: Synthetic oligonucleotide
aggcuggcgcagccugcau

SEQ ID NO: 3060269 - RNA, 19 nt, Artificial Sequence
  Description of Artificial Sequence: Synthetic oligonucleotide
cagaugcccacggcaccca

SEQ ID NO: 3060270 - RNA, 19 nt, Artificial Sequence
  Description of Artificial Sequence: Synthetic oligonucleotide
cgaggggcuuucagaugcc

SEQ ID NO: 3060271 - RNA, 19 nt, Artificial Sequence
  Description of Artificial Sequence: Synthetic oligonucleotide
ccuaaucuuuuaccucacu

SEQ ID NO: 3060272 - RNA, 19 nt, Artificial Sequence
  Description of Artificial Sequence: Synthetic oligonucleotide
ggaguaagcgaggggcuuu

SEQ ID NO: 3060273 - RNA, 19 nt, Artificial Sequence
  Description of Artificial Sequence: Synthetic oligonucleotide
cguuucuaucuggauccca

SEQ ID NO: 3060274 - RNA, 19 nt, Artificial Sequence
  Description of Artificial Sequence: Synthetic oligonucleotide
caccuccuuggagcacgca

SEQ ID NO: 3060275 - RNA, 19 nt, Artificial Sequence
  Description of Artificial Sequence: Synthetic oligonucleotide
gcagaacagcugguagccu

SEQ ID NO: 3060276 - RNA, 19 nt, Artificial Sequence
  Description of Artificial Sequence: Synthetic oligonucleotide
cagccuuguugugcauuau

SEQ ID NO: 3060277 - RNA, 19 nt, Artificial Sequence
  Description of Artificial Sequence: Synthetic oligonucleotide
ccuccauuauaggcauagu

SEQ ID NO: 3060278 - RNA, 19 nt, Artificial Sequence
  Description of Artificial Sequence: Synthetic oligonucleotide
ggccuccauuauaggcaua

SEQ ID NO: 3060279 - RNA, 19 nt, Artificial Sequence
  Description of Artificial Sequence: Synthetic oligonucleotide
cggcacccaggaaccugca

SEQ ID NO: 3060280 - RNA, 19 nt, Artificial Sequence
  Description of Artificial Sequence: Synthetic oligonucleotide
ccucaggcuggcgcagccu

SEQ ID NO: 3060281 - RNA, 19 nt, Artificial Sequence
  Description of Artificial Sequence: Synthetic oligonucleotide
cgcaguuacuggccuccau

SEQ ID NO: 3060282 - RNA, 19 nt, Artificial Sequence
  Description of Artificial Sequence: Synthetic oligonucleotide
ccacggcacccaggaaccu

SEQ ID NO: 3060283 - RNA, 19 nt, Artificial Sequence
  Description of Artificial Sequence: Synthetic oligonucleotide
aauguuaaguuuuacuugc

SEQ ID NO: 3060284 - RNA, 19 nt, Artificial Sequence
  Description of Artificial Sequence: Synthetic oligonucleotide
aauacaaaauaauacaugu

SEQ ID NO: 3060285 - RNA, 19 nt, Artificial Sequence
  Description of Artificial Sequence: Synthetic oligonucleotide
uuuaaguuaaaccuuuagg

SEQ ID NO: 3060286 - RNA, 19 nt, Artificial Sequence
  Description of Artificial Sequence: Synthetic oligonucleotide
aaacacuauagccugagac

SEQ ID NO: 3060287 - RNA, 19 nt, Artificial Sequence
  Description of Artificial Sequence: Synthetic oligonucleotide
aacacuauagccugagacc

SEQ ID NO: 3060288 - RNA, 19 nt, Artificial Sequence
  Description of Artificial Sequence: Synthetic oligonucleotide
acaguauuuaaguuaaacc

SEQ ID NO: 3060289 - RNA, 19 nt, Artificial Sequence
  Description of Artificial Sequence: Synthetic oligonucleotide
uuaaguuaaaccuuuaggu

SEQ ID NO: 3060290 - RNA, 19 nt, Artificial Sequence
  Description of Artificial Sequence: Synthetic oligonucleotide
aacacaggagaacaugucc

SEQ ID NO: 3060291 - RNA, 19 nt, Artificial Sequence
  Description of Artificial Sequence: Synthetic oligonucleotide
caugcaauaauguacaaag

SEQ ID NO: 3060292 - RNA, 19 nt, Artificial Sequence
  Description of Artificial Sequence: Synthetic oligonucleotide
uacaaaauaauacauguuc

SEQ ID NO: 3060293 - RNA, 19 nt, Artificial Sequence
  Description of Artificial Sequence: Synthetic oligonucleotide
cuuauuauugauuugcuac

SEQ ID NO: 3060294 - RNA, 19 nt, Artificial Sequence
  Description of Artificial Sequence: Synthetic oligonucleotide
uucaacacaacuaagaguu

SEQ ID NO: 3060295 - RNA, 19 nt, Artificial Sequence
  Description of Artificial Sequence: Synthetic oligonucleotide
agaggcaaacacuauagcc

SEQ ID NO: 3060296 - RNA, 19 nt, Artificial Sequence
  Description of Artificial Sequence: Synthetic oligonucleotide
aaguuaaaccuuuagguga

SEQ ID NO: 3060297 - RNA, 19 nt, Artificial Sequence
  Description of Artificial Sequence: Synthetic oligonucleotide
auugauuugcuacaacuac

SEQ ID NO: 3060298 - RNA, 19 nt, Artificial Sequence
  Description of Artificial Sequence: Synthetic oligonucleotide
uauguuucaugcaauaaug

SEQ ID NO: 3060299 - RNA, 19 nt, Artificial Sequence
  Description of Artificial Sequence: Synthetic oligonucleotide
acauguucauccuugaagg

SEQ ID NO: 3060300 - RNA, 19 nt, Artificial Sequence
  Description of Artificial Sequence: Synthetic oligonucleotide
aaaauaauacauguucauc

SEQ ID NO: 3060301 - RNA, 19 nt, Artificial Sequence
  Description of Artificial Sequence: Synthetic oligonucleotide
ugcaauaauguacaaagcu

SEQ ID NO: 3060302 - RNA, 19 nt, Artificial Sequence
  Description of Artificial Sequence: Synthetic oligonucleotide
uuugcuacaacuacacaag

SEQ ID NO: 3060303 - RNA, 19 nt, Artificial Sequence
  Description of Artificial Sequence: Synthetic oligonucleotide
caauaauguacaaagcugc

SEQ ID NO: 3060304 - RNA, 19 nt, Artificial Sequence
  Description of Artificial Sequence: Synthetic oligonucleotide
acacuuauuauugauuugc

SEQ ID NO: 3060305 - RNA, 19 nt, Artificial Sequence
  Description of Artificial Sequence: Synthetic oligonucleotide
uacauguucauccuugaag

SEQ ID NO: 3060306 - RNA, 19 nt, Artificial Sequence
  Description of Artificial Sequence: Synthetic oligonucleotide
ugaaggacacuuauuauug

SEQ ID NO: 3060307 - RNA, 19 nt, Artificial Sequence
  Description of Artificial Sequence: Synthetic oligonucleotide
uaaguuaaaccuuuaggug

SEQ ID NO: 3060308 - RNA, 19 nt, Artificial Sequence
  Description of Artificial Sequence: Synthetic oligonucleotide
uauuaggcaguaucaaugg

SEQ ID NO: 3060309 - RNA, 19 nt, Artificial Sequence
  Description of Artificial Sequence: Synthetic oligonucleotide
uuaaguuuuacuugcaaaa

SEQ ID NO: 3060310 - RNA, 19 nt, Artificial Sequence
  Description of Artificial Sequence: Synthetic oligonucleotide
acaacuaagaguuauggau

SEQ ID NO: 3060311 - RNA, 19 nt, Artificial Sequence
  Description of Artificial Sequence: Synthetic oligonucleotide
uuauugauuugcuacaacu

SEQ ID NO: 3060312 - RNA, 19 nt, Artificial Sequence
  Description of Artificial Sequence: Synthetic oligonucleotide
ucuacaguauuuaaguuaa

SEQ ID NO: 3060313 - RNA, 19 nt, Artificial Sequence
  Description of Artificial Sequence: Synthetic oligonucleotide
uuaaaugcugguuuuguca

SEQ ID NO: 3060314 - RNA, 19 nt, Artificial Sequence
  Description of Artificial Sequence: Synthetic oligonucleotide
uauggaucuucccagagca

SEQ ID NO: 3060315 - RNA, 19 nt, Artificial Sequence
  Description of Artificial Sequence: Synthetic oligonucleotide
gagaacauguccuacauuc

SEQ ID NO: 3060316 - RNA, 19 nt, Artificial Sequence
  Description of Artificial Sequence: Synthetic oligonucleotide
aguuuuacuugcaaaauac

SEQ ID NO: 3060317 - RNA, 19 nt, Artificial Sequence
  Description of Artificial Sequence: Synthetic oligonucleotide
aagaguuauggaucuuccc

SEQ ID NO: 3060318 - RNA, 19 nt, Artificial Sequence
  Description of Artificial Sequence: Synthetic oligonucleotide
ugcaaaauacaaaauaaua

SEQ ID NO: 3060319 - RNA, 19 nt, Artificial Sequence
  Description of Artificial Sequence: Synthetic oligonucleotide
aaauacaaaauaauacaug

SEQ ID NO: 3060320 - RNA, 19 nt, Artificial Sequence
  Description of Artificial Sequence: Synthetic oligonucleotide
ugagaucuguguaacacag

SEQ ID NO: 3060321 - RNA, 19 nt, Artificial Sequence
  Description of Artificial Sequence: Synthetic oligonucleotide
uaauacauguucauccuug

SEQ ID NO: 3060322 - RNA, 19 nt, Artificial Sequence
  Description of Artificial Sequence: Synthetic oligonucleotide
uucucuacaguauuuaagu

SEQ ID NO: 3060323 - RNA, 19 nt, Artificial Sequence
  Description of Artificial Sequence: Synthetic oligonucleotide
aagaggcaaacacuauagc

SEQ ID NO: 3060324 - RNA, 19 nt, Artificial Sequence
  Description of Artificial Sequence: Synthetic oligonucleotide
uuugguauguuucaugcaa

SEQ ID NO: 3060325 - RNA, 19 nt, Artificial Sequence
  Description of Artificial Sequence: Synthetic oligonucleotide
aaagcugcaauuaccaaag

SEQ ID NO: 3060326 - RNA, 19 nt, Artificial Sequence
  Description of Artificial Sequence: Synthetic oligonucleotide
auuugcuacaacuacacaa

SEQ ID NO: 3060327 - RNA, 19 nt, Artificial Sequence
  Description of Artificial Sequence: Synthetic oligonucleotide
uuugucauucuucaugaga

SEQ ID NO: 3060328 - RNA, 19 nt, Artificial Sequence
  Description of Artificial Sequence: Synthetic oligonucleotide
uuauuauugauuugcuaca

SEQ ID NO: 3060329 - RNA, 19 nt, Artificial Sequence
  Description of Artificial Sequence: Synthetic oligonucleotide
uuaggcaguaucaauggca

SEQ ID NO: 3060330 - RNA, 19 nt, Artificial Sequence
  Description of Artificial Sequence: Synthetic oligonucleotide
auuuaaguuaaaccuuuag

SEQ ID NO: 3060331 - RNA, 19 nt, Artificial Sequence
  Description of Artificial Sequence: Synthetic oligonucleotide
uacaaagcugcaauuacca

SEQ ID NO: 3060332 - RNA, 19 nt, Artificial Sequence
  Description of Artificial Sequence: Synthetic oligonucleotide
aucaauggcaccugaagag

SEQ ID NO: 3060333 - RNA, 19 nt, Artificial Sequence
  Description of Artificial Sequence: Synthetic oligonucleotide
aacuaagaguuauggaucu

SEQ ID NO: 3060334 - RNA, 19 nt, Artificial Sequence
  Description of Artificial Sequence: Synthetic oligonucleotide
aucuguguaacacaggaga

SEQ ID NO: 3060335 - RNA, 19 nt, Artificial Sequence
  Description of Artificial Sequence: Synthetic oligonucleotide
uugucauucuucaugagau

SEQ ID NO: 3060336 - RNA, 19 nt, Artificial Sequence
  Description of Artificial Sequence: Synthetic oligonucleotide
uaucaauggcaccugaaga

SEQ ID NO: 3060337 - RNA, 19 nt, Artificial Sequence
  Description of Artificial Sequence: Synthetic oligonucleotide
cauucaacacaacuaagag

SEQ ID NO: 3060338 - RNA, 19 nt, Artificial Sequence
  Description of Artificial Sequence: Synthetic oligonucleotide
uguccuacauucaacacaa

SEQ ID NO: 3060339 - RNA, 19 nt, Artificial Sequence
  Description of Artificial Sequence: Synthetic oligonucleotide
uguacaaagcugcaauuac

SEQ ID NO: 3060340 - RNA, 19 nt, Artificial Sequence
  Description of Artificial Sequence: Synthetic oligonucleotide
ugauuugcuacaacuacac

SEQ ID NO: 3060341 - RNA, 19 nt, Artificial Sequence
  Description of Artificial Sequence: Synthetic oligonucleotide
agaguuauggaucuuccca

SEQ ID NO: 3060342 - RNA, 19 nt, Artificial Sequence
  Description of Artificial Sequence: Synthetic oligonucleotide
uguucauccuugaaggaca

SEQ ID NO: 3060343 - RNA, 19 nt, Artificial Sequence
  Description of Artificial Sequence: Synthetic oligonucleotide
auuauugauuugcuacaac

SEQ ID NO: 3060344 - RNA, 19 nt, Artificial Sequence
  Description of Artificial Sequence: Synthetic oligonucleotide
agaucuguguaacacagga

SEQ ID NO: 3060345 - RNA, 19 nt, Artificial Sequence
  Description of Artificial Sequence: Synthetic oligonucleotide
aaaccuuuaggugagguau

SEQ ID NO: 3060346 - RNA, 19 nt, Artificial Sequence
  Description of Artificial Sequence: Synthetic oligonucleotide
gaagaggcaaacacuauag

SEQ ID NO: 3060347 - RNA, 19 nt, Artificial Sequence
  Description of Artificial Sequence: Synthetic oligonucleotide
uuuaggugagguauuauuu

SEQ ID NO: 3060348 - RNA, 19 nt, Artificial Sequence
  Description of Artificial Sequence: Synthetic oligonucleotide
uccuacauucaacacaacu

SEQ ID NO: 3060349 - RNA, 19 nt, Artificial Sequence
  Description of Artificial Sequence: Synthetic oligonucleotide
auuaggcaguaucaauggc

SEQ ID NO: 3060350 - RNA, 19 nt, Artificial Sequence
  Description of Artificial Sequence: Synthetic oligonucleotide
cuugcaaaauacaaaauaa

SEQ ID NO: 3060351 - RNA, 19 nt, Artificial Sequence
  Description of Artificial Sequence: Synthetic oligonucleotide
uaagaguuauggaucuucc

SEQ ID NO: 3060352 - RNA, 19 nt, Artificial Sequence
  Description of Artificial Sequence: Synthetic oligonucleotide
uguguaacacaggagaaca

SEQ ID NO: 3060353 - RNA, 19 nt, Artificial Sequence
  Description of Artificial Sequence: Synthetic oligonucleotide
uauuuugguauguuucaug

SEQ ID NO: 3060354 - RNA, 19 nt, Artificial Sequence
  Description of Artificial Sequence: Synthetic oligonucleotide
gaguuauggaucuucccag

SEQ ID NO: 3060355 - RNA, 19 nt, Artificial Sequence
  Description of Artificial Sequence: Synthetic oligonucleotide
aauacauguucauccuuga

SEQ ID NO: 3060356 - RNA, 19 nt, Artificial Sequence
  Description of Artificial Sequence: Synthetic oligonucleotide
uugcaaaauacaaaauaau

SEQ ID NO: 3060357 - RNA, 19 nt, Artificial Sequence
  Description of Artificial Sequence: Synthetic oligonucleotide
uauugauuugcuacaacua

SEQ ID NO: 3060358 - RNA, 19 nt, Artificial Sequence
  Description of Artificial Sequence: Synthetic oligonucleotide
ucuucccagagcaaguggc

SEQ ID NO: 3060359 - RNA, 19 nt, Artificial Sequence
  Description of Artificial Sequence: Synthetic oligonucleotide
cuucucuacaguauuuaag

SEQ ID NO: 3060360 - RNA, 19 nt, Artificial Sequence
  Description of Artificial Sequence: Synthetic oligonucleotide
auucaacacaacuaagagu

SEQ ID NO: 3060361 - RNA, 19 nt, Artificial Sequence
  Description of Artificial Sequence: Synthetic oligonucleotide
uucuucaugagaucugugu

SEQ ID NO: 3060362 - RNA, 19 nt, Artificial Sequence
  Description of Artificial Sequence: Synthetic oligonucleotide
uacaguauuuaaguuaaac

SEQ ID NO: 3060363 - RNA, 19 nt, Artificial Sequence
  Description of Artificial Sequence: Synthetic oligonucleotide
guaucaauggcaccugaag

SEQ ID NO: 3060364 - RNA, 19 nt, Artificial Sequence
  Description of Artificial Sequence: Synthetic oligonucleotide
acacaacuaagaguuaugg

SEQ ID NO: 3060365 - RNA, 19 nt, Artificial Sequence
  Description of Artificial Sequence: Synthetic oligonucleotide
guauuaggcaguaucaaug

SEQ ID NO: 3060366 - RNA, 19 nt, Artificial Sequence
  Description of Artificial Sequence: Synthetic oligonucleotide
uguaacacaggagaacaug

SEQ ID NO: 3060367 - RNA, 19 nt, Artificial Sequence
  Description of Artificial Sequence: Synthetic oligonucleotide
caguauuuaaguuaaaccu

SEQ ID NO: 3060368 - RNA, 19 nt, Artificial Sequence
  Description of Artificial Sequence: Synthetic oligonucleotide
uuauggaucuucccagagc

SEQ ID NO: 3060369 - RNA, 19 nt, Artificial Sequence
  Description of Artificial Sequence: Synthetic oligonucleotide
acaagcuguucuuuaaaug

SEQ ID NO: 3060370 - RNA, 19 nt, Artificial Sequence
  Description of Artificial Sequence: Synthetic oligonucleotide
uugaaggacacuuauuauu

SEQ ID NO: 3060371 - RNA, 19 nt, Artificial Sequence
  Description of Artificial Sequence: Synthetic oligonucleotide
aaggacacuuauuauugau

SEQ ID NO: 3060372 - RNA, 19 nt, Artificial Sequence
  Description of Artificial Sequence: Synthetic oligonucleotide
caacuaagaguuauggauc

SEQ ID NO: 3060373 - RNA, 19 nt, Artificial Sequence
  Description of Artificial Sequence: Synthetic oligonucleotide
guuuugucauucuucauga

SEQ ID NO: 3060374 - RNA, 19 nt, Artificial Sequence
  Description of Artificial Sequence: Synthetic oligonucleotide
uguuucaugcaauaaugua

SEQ ID NO: 3060375 - RNA, 19 nt, Artificial Sequence
  Description of Artificial Sequence: Synthetic oligonucleotide
acauguccuacauucaaca

SEQ ID NO: 3060376 - RNA, 19 nt, Artificial Sequence
  Description of Artificial Sequence: Synthetic oligonucleotide
uaggcaguaucaauggcac

SEQ ID NO: 3060377 - RNA, 19 nt, Artificial Sequence
  Description of Artificial Sequence: Synthetic oligonucleotide
uaggugagguauuauuuug

SEQ ID NO: 3060378 - RNA, 19 nt, Artificial Sequence
  Description of Artificial Sequence: Synthetic oligonucleotide
gguuuugucauucuucaug

SEQ ID NO: 3060379 - RNA, 19 nt, Artificial Sequence
  Description of Artificial Sequence: Synthetic oligonucleotide
auguucauccuugaaggac

SEQ ID NO: 3060380 - RNA, 19 nt, Artificial Sequence
  Description of Artificial Sequence: Synthetic oligonucleotide
uguuaaguuuuacuugcaa

SEQ ID NO: 3060381 - RNA, 19 nt, Artificial Sequence
  Description of Artificial Sequence: Synthetic oligonucleotide
ugaagaggcaaacacuaua

SEQ ID NO: 3060382 - RNA, 19 nt, Artificial Sequence
  Description of Artificial Sequence: Synthetic oligonucleotide
uguauuaggcaguaucaau

SEQ ID NO: 3060383 - RNA, 19 nt, Artificial Sequence
  Description of Artificial Sequence: Synthetic oligonucleotide
ucuucaugagaucugugua

SEQ ID NO: 3060384 - RNA, 19 nt, Artificial Sequence
  Description of Artificial Sequence: Synthetic oligonucleotide
gcuacaacuacacaagcug

SEQ ID NO: 3060385 - RNA, 19 nt, Artificial Sequence
  Description of Artificial Sequence: Synthetic oligonucleotide
auguccuacauucaacaca

SEQ ID NO: 3060386 - RNA, 19 nt, Artificial Sequence
  Description of Artificial Sequence: Synthetic oligonucleotide
uuuaaaugcugguuuuguc

SEQ ID NO: 3060387 - RNA, 19 nt, Artificial Sequence
  Description of Artificial Sequence: Synthetic oligonucleotide
aauaauguacaaagcugca

SEQ ID NO: 3060388 - RNA, 19 nt, Artificial Sequence
  Description of Artificial Sequence: Synthetic oligonucleotide
ugcuacaacuacacaagcu

SEQ ID NO: 3060389 - RNA, 19 nt, Artificial Sequence
  Description of Artificial Sequence: Synthetic oligonucleotide
uaaaugcugguuuugucau

SEQ ID NO: 3060390 - RNA, 19 nt, Artificial Sequence
  Description of Artificial Sequence: Synthetic oligonucleotide
ucauucuucaugagaucug

SEQ ID NO: 3060391 - RNA, 19 nt, Artificial Sequence
  Description of Artificial Sequence: Synthetic oligonucleotide
caugagaucuguguaacac

SEQ ID NO: 3060392 - RNA, 19 nt, Artificial Sequence
  Description of Artificial Sequence: Synthetic oligonucleotide
aaguggcacuguauuaggc

SEQ ID NO: 3060393 - RNA, 19 nt, Artificial Sequence
  Description of Artificial Sequence: Synthetic oligonucleotide
ucuguguaacacaggagaa

SEQ ID NO: 3060394 - RNA, 19 nt, Artificial Sequence
  Description of Artificial Sequence: Synthetic oligonucleotide
cacuguauuaggcaguauc

SEQ ID NO: 3060395 - RNA, 19 nt, Artificial Sequence
  Description of Artificial Sequence: Synthetic oligonucleotide
guuaaguuuuacuugcaaa

SEQ ID NO: 3060396 - RNA, 19 nt, Artificial Sequence
  Description of Artificial Sequence: Synthetic oligonucleotide
ugcaauuaccaaagguaac

SEQ ID NO: 3060397 - RNA, 19 nt, Artificial Sequence
  Description of Artificial Sequence: Synthetic oligonucleotide
gacacuuauuauugauuug

SEQ ID NO: 3060398 - RNA, 19 nt, Artificial Sequence
  Description of Artificial Sequence: Synthetic oligonucleotide
aggcaaacacuauagccug

SEQ ID NO: 3060399 - RNA, 19 nt, Artificial Sequence
  Description of Artificial Sequence: Synthetic oligonucleotide
aguggcacuguauuaggca

SEQ ID NO: 3060400 - RNA, 19 nt, Artificial Sequence
  Description of Artificial Sequence: Synthetic oligonucleotide
uggaucuucccagagcaag

SEQ ID NO: 3060401 - RNA, 19 nt, Artificial Sequence
  Description of Artificial Sequence: Synthetic oligonucleotide
acauucaacacaacuaaga

SEQ ID NO: 3060402 - RNA, 19 nt, Artificial Sequence
  Description of Artificial Sequence: Synthetic oligonucleotide
uuaggugagguauuauuuu

SEQ ID NO: 3060403 - RNA, 19 nt, Artificial Sequence
  Description of Artificial Sequence: Synthetic oligonucleotide
augcaauaauguacaaagc

SEQ ID NO: 3060404 - RNA, 19 nt, Artificial Sequence
  Description of Artificial Sequence: Synthetic oligonucleotide
guuauggaucuucccagag

SEQ ID NO: 3060405 - RNA, 19 nt, Artificial Sequence
  Description of Artificial Sequence: Synthetic oligonucleotide
uugcuacaacuacacaagc

SEQ ID NO: 3060406 - RNA, 19 nt, Artificial Sequence
  Description of Artificial Sequence: Synthetic oligonucleotide
acaacuacacaagcuguuc

SEQ ID NO: 3060407 - RNA, 19 nt, Artificial Sequence
  Description of Artificial Sequence: Synthetic oligonucleotide
agcugcaauuaccaaaggu

SEQ ID NO: 3060408 - RNA, 19 nt, Artificial Sequence
  Description of Artificial Sequence: Synthetic oligonucleotide
aguuaaaccuuuaggugag

SEQ ID NO: 3060409 - RNA, 19 nt, Artificial Sequence
  Description of Artificial Sequence: Synthetic oligonucleotide
cuacauucaacacaacuaa

SEQ ID NO: 3060410 - RNA, 19 nt, Artificial Sequence
  Description of Artificial Sequence: Synthetic oligonucleotide
acuauagccugagaccuuc

SEQ ID NO: 3060411 - RNA, 19 nt, Artificial Sequence
  Description of Artificial Sequence: Synthetic oligonucleotide
uaaguuuuacuugcaaaau

SEQ ID NO: 3060412 - RNA, 19 nt, Artificial Sequence
  Description of Artificial Sequence: Synthetic oligonucleotide
guggcacuguauuaggcag

SEQ ID NO: 3060413 - RNA, 19 nt, Artificial Sequence
  Description of Artificial Sequence: Synthetic oligonucleotide
acacuauagccugagaccu

SEQ ID NO: 3060414 - RNA, 19 nt, Artificial Sequence
  Description of Artificial Sequence: Synthetic oligonucleotide
aguauuuaaguuaaaccuu

SEQ ID NO: 3060415 - RNA, 19 nt, Artificial Sequence
  Description of Artificial Sequence: Synthetic oligonucleotide
aacuacacaagcuguucuu

SEQ ID NO: 3060416 - RNA, 19 nt, Artificial Sequence
  Description of Artificial Sequence: Synthetic oligonucleotide
auagccugagaccuucucu

SEQ ID NO: 3060417 - RNA, 19 nt, Artificial Sequence
  Description of Artificial Sequence: Synthetic oligonucleotide
uauuauugauuugcuacaa

SEQ ID NO: 3060418 - RNA, 19 nt, Artificial Sequence
  Description of Artificial Sequence: Synthetic oligonucleotide
aacacaacuaagaguuaug

SEQ ID NO: 3060419 - RNA, 19 nt, Artificial Sequence
  Description of Artificial Sequence: Synthetic oligonucleotide
acuguauuaggcaguauca

SEQ ID NO: 3060420 - RNA, 19 nt, Artificial Sequence
  Description of Artificial Sequence: Synthetic oligonucleotide
gcaauaauguacaaagcug

SEQ ID NO: 3060421 - RNA, 19 nt, Artificial Sequence
  Description of Artificial Sequence: Synthetic oligonucleotide
uuuugucauucuucaugag

SEQ ID NO: 3060422 - RNA, 19 nt, Artificial Sequence
  Description of Artificial Sequence: Synthetic oligonucleotide
caaguggcacuguauuagg

SEQ ID NO: 3060423 - RNA, 19 nt, Artificial Sequence
  Description of Artificial Sequence: Synthetic oligonucleotide
caauggcaccugaagaggc

SEQ ID NO: 3060424 - RNA, 19 nt, Artificial Sequence
  Description of Artificial Sequence: Synthetic oligonucleotide
uguucuuuaaaugcugguu

SEQ ID NO: 3060425 - RNA, 19 nt, Artificial Sequence
  Description of Artificial Sequence: Synthetic oligonucleotide
augagaucuguguaacaca

SEQ ID NO: 3060426 - RNA, 19 nt, Artificial Sequence
  Description of Artificial Sequence: Synthetic oligonucleotide
uuaaaccuuuaggugaggu

SEQ ID NO: 3060427 - RNA, 19 nt, Artificial Sequence
  Description of Artificial Sequence: Synthetic oligonucleotide
cuaagaguuauggaucuuc

SEQ ID NO: 3060428 - RNA, 19 nt, Artificial Sequence
  Description of Artificial Sequence: Synthetic oligonucleotide
ucauccuugaaggacacuu

SEQ ID NO: 3060429 - RNA, 19 nt, Artificial Sequence
  Description of Artificial Sequence: Synthetic oligonucleotide
uucaugagaucuguguaac

SEQ ID NO: 3060430 - RNA, 19 nt, Artificial Sequence
  Description of Artificial Sequence: Synthetic oligonucleotide
caccugaagaggcaaacac

SEQ ID NO: 3060431 - RNA, 19 nt, Artificial Sequence
  Description of Artificial Sequence: Synthetic oligonucleotide
acuuauuauugauuugcua

SEQ ID NO: 3060432 - RNA, 19 nt, Artificial Sequence
  Description of Artificial Sequence: Synthetic oligonucleotide
uauuuaaguuaaaccuuua

SEQ ID NO: 3060433 - RNA, 19 nt, Artificial Sequence
  Description of Artificial Sequence: Synthetic oligonucleotide
aucuucccagagcaagugg

SEQ ID NO: 3060434 - RNA, 19 nt, Artificial Sequence
  Description of Artificial Sequence: Synthetic oligonucleotide
caaagcugcaauuaccaaa

SEQ ID NO: 3060435 - RNA, 19 nt, Artificial Sequence
  Description of Artificial Sequence: Synthetic oligonucleotide
uucuuuaaaugcugguuuu

SEQ ID NO: 3060436 - RNA, 19 nt, Artificial Sequence
  Description of Artificial Sequence: Synthetic oligonucleotide
uaacacaggagaacauguc

SEQ ID NO: 3060437 - RNA, 19 nt, Artificial Sequence
  Description of Artificial Sequence: Synthetic oligonucleotide
ucaugcaauaauguacaaa

SEQ ID NO: 3060438 - RNA, 19 nt, Artificial Sequence
  Description of Artificial Sequence: Synthetic oligonucleotide
uaaaccuuuaggugaggua

SEQ ID NO: 3060439 - RNA, 19 nt, Artificial Sequence
  Description of Artificial Sequence: Synthetic oligonucleotide
cugguuuugucauucuuca

SEQ ID NO: 3060440 - RNA, 19 nt, Artificial Sequence
  Description of Artificial Sequence: Synthetic oligonucleotide
uacacaagcuguucuuuaa

SEQ ID NO: 3060441 - RNA, 19 nt, Artificial Sequence
  Description of Artificial Sequence: Synthetic oligonucleotide
ugagaccuucucuacagua

SEQ ID NO: 3060442 - RNA, 19 nt, Artificial Sequence
  Description of Artificial Sequence: Synthetic oligonucleotide
uacaacuacacaagcuguu

SEQ ID NO: 3060443 - RNA, 19 nt, Artificial Sequence
  Description of Artificial Sequence: Synthetic oligonucleotide
cugcaauuaccaaagguaa

SEQ ID NO: 3060444 - RNA, 19 nt, Artificial Sequence
  Description of Artificial Sequence: Synthetic oligonucleotide
aguuauggaucuucccaga

SEQ ID NO: 3060445 - RNA, 19 nt, Artificial Sequence
  Description of Artificial Sequence: Synthetic oligonucleotide
acaggagaacauguccuac

SEQ ID NO: 3060446 - RNA, 19 nt, Artificial Sequence
  Description of Artificial Sequence: Synthetic oligonucleotide
uugguauguuucaugcaau

SEQ ID NO: 3060447 - RNA, 19 nt, Artificial Sequence
  Description of Artificial Sequence: Synthetic oligonucleotide
gaucuguguaacacaggag

SEQ ID NO: 3060448 - RNA, 19 nt, Artificial Sequence
  Description of Artificial Sequence: Synthetic oligonucleotide
gaggcaaacacuauagccu

SEQ ID NO: 3060449 - RNA, 19 nt, Artificial Sequence
  Description of Artificial Sequence: Synthetic oligonucleotide
cauguccuacauucaacac

SEQ ID NO: 3060450 - RNA, 19 nt, Artificial Sequence
  Description of Artificial Sequence: Synthetic oligonucleotide
aggcaguaucaauggcacc

SEQ ID NO: 3060451 - RNA, 19 nt, Artificial Sequence
  Description of Artificial Sequence: Synthetic oligonucleotide
gaaggacacuuauuauuga

SEQ ID NO: 3060452 - RNA, 19 nt, Artificial Sequence
  Description of Artificial Sequence: Synthetic oligonucleotide
ucucuacaguauuuaaguu

SEQ ID NO: 3060453 - RNA, 19 nt, Artificial Sequence
  Description of Artificial Sequence: Synthetic oligonucleotide
uuauuuugguauguuucau

SEQ ID NO: 3060454 - RNA, 19 nt, Artificial Sequence
  Description of Artificial Sequence: Synthetic oligonucleotide
ucaugagaucuguguaaca

SEQ ID NO: 3060455 - RNA, 19 nt, Artificial Sequence
  Description of Artificial Sequence: Synthetic oligonucleotide
uauagccugagaccuucuc

SEQ ID NO: 3060456 - RNA, 19 nt, Artificial Sequence
  Description of Artificial Sequence: Synthetic oligonucleotide
aggagaacauguccuacau

SEQ ID NO: 3060457 - RNA, 19 nt, Artificial Sequence
  Description of Artificial Sequence: Synthetic oligonucleotide
auaauguacaaagcugcaa

SEQ ID NO: 3060458 - RNA, 19 nt, Artificial Sequence
  Description of Artificial Sequence: Synthetic oligonucleotide
uagccugagaccuucucua

SEQ ID NO: 3060459 - RNA, 19 nt, Artificial Sequence
  Description of Artificial Sequence: Synthetic oligonucleotide
agccugagaccuucucuac

SEQ ID NO: 3060460 - RNA, 19 nt, Artificial Sequence
  Description of Artificial Sequence: Synthetic oligonucleotide
guauguuucaugcaauaau

SEQ ID NO: 3060461 - RNA, 19 nt, Artificial Sequence
  Description of Artificial Sequence: Synthetic oligonucleotide
ugguauguuucaugcaaua

SEQ ID NO: 3060462 - RNA, 19 nt, Artificial Sequence
  Description of Artificial Sequence: Synthetic oligonucleotide
auccuugaaggacacuuau

SEQ ID NO: 3060463 - RNA, 19 nt, Artificial Sequence
  Description of Artificial Sequence: Synthetic oligonucleotide
cuucaugagaucuguguaa

SEQ ID NO: 3060464 - RNA, 19 nt, Artificial Sequence
  Description of Artificial Sequence: Synthetic oligonucleotide
gaucuucccagagcaagug

SEQ ID NO: 3060465 - RNA, 19 nt, Artificial Sequence
  Description of Artificial Sequence: Synthetic oligonucleotide
gauuugcuacaacuacaca

SEQ ID NO: 3060466 - RNA, 19 nt, Artificial Sequence
  Description of Artificial Sequence: Synthetic oligonucleotide
auguuucaugcaauaaugu

SEQ ID NO: 3060467 - RNA, 19 nt, Artificial Sequence
  Description of Artificial Sequence: Synthetic oligonucleotide
guuuuacuugcaaaauaca

SEQ ID NO: 3060468 - RNA, 19 nt, Artificial Sequence
  Description of Artificial Sequence: Synthetic oligonucleotide
ugucauucuucaugagauc

SEQ ID NO: 3060469 - RNA, 19 nt, Artificial Sequence
  Description of Artificial Sequence: Synthetic oligonucleotide
gagaucuguguaacacagg

SEQ ID NO: 3060470 - RNA, 19 nt, Artificial Sequence
  Description of Artificial Sequence: Synthetic oligonucleotide
gcaaguggcacuguauuag

SEQ ID NO: 3060471 - RNA, 19 nt, Artificial Sequence
  Description of Artificial Sequence: Synthetic oligonucleotide
caaaauaauacauguucau

SEQ ID NO: 3060472 - RNA, 19 nt, Artificial Sequence
  Description of Artificial Sequence: Synthetic oligonucleotide
cacaacuaagaguuaugga

SEQ ID NO: 3060473 - RNA, 19 nt, Artificial Sequence
  Description of Artificial Sequence: Synthetic oligonucleotide
guucuuuaaaugcugguuu

SEQ ID NO: 3060474 - RNA, 19 nt, Artificial Sequence
  Description of Artificial Sequence: Synthetic oligonucleotide
cuguguaacacaggagaac

SEQ ID NO: 3060475 - RNA, 19 nt, Artificial Sequence
  Description of Artificial Sequence: Synthetic oligonucleotide
agaccuucucuacaguauu

SEQ ID NO: 3060476 - RNA, 19 nt, Artificial Sequence
  Description of Artificial Sequence: Synthetic oligonucleotide
acaaagcugcaauuaccaa

SEQ ID NO: 3060477 - RNA, 19 nt, Artificial Sequence
  Description of Artificial Sequence: Synthetic oligonucleotide
auguacaaagcugcaauua

SEQ ID NO: 3060478 - RNA, 19 nt, Artificial Sequence
  Description of Artificial Sequence: Synthetic oligonucleotide
acacaagcuguucuuuaaa

SEQ ID NO: 3060479 - RNA, 19 nt, Artificial Sequence
  Description of Artificial Sequence: Synthetic oligonucleotide
gcuguucuuuaaaugcugg

SEQ ID NO: 3060480 - RNA, 19 nt, Artificial Sequence
  Description of Artificial Sequence: Synthetic oligonucleotide
ccugagaccuucucuacag

SEQ ID NO: 3060481 - RNA, 19 nt, Artificial Sequence
  Description of Artificial Sequence: Synthetic oligonucleotide
auacauguucauccuugaa

SEQ ID NO: 3060482 - RNA, 19 nt, Artificial Sequence
  Description of Artificial Sequence: Synthetic oligonucleotide
agguauuauuuugguaugu

SEQ ID NO: 3060483 - RNA, 19 nt, Artificial Sequence
  Description of Artificial Sequence: Synthetic oligonucleotide
uggcacuguauuaggcagu

SEQ ID NO: 3060484 - RNA, 19 nt, Artificial Sequence
  Description of Artificial Sequence: Synthetic oligonucleotide
ucaacacaacuaagaguua

SEQ ID NO: 3060485 - RNA, 19 nt, Artificial Sequence
  Description of Artificial Sequence: Synthetic oligonucleotide
ucccagagcaaguggcacu

SEQ ID NO: 3060486 - RNA, 19 nt, Artificial Sequence
  Description of Artificial Sequence: Synthetic oligonucleotide
uccuugaaggacacuuauu

SEQ ID NO: 3060487 - RNA, 19 nt, Artificial Sequence
  Description of Artificial Sequence: Synthetic oligonucleotide
ccuacauucaacacaacua

SEQ ID NO: 3060488 - RNA, 19 nt, Artificial Sequence
  Description of Artificial Sequence: Synthetic oligonucleotide
gcugcaauuaccaaaggua

SEQ ID NO: 3060489 - RNA, 19 nt, Artificial Sequence
  Description of Artificial Sequence: Synthetic oligonucleotide
agcaaguggcacuguauua

SEQ ID NO: 3060490 - RNA, 19 nt, Artificial Sequence
  Description of Artificial Sequence: Synthetic oligonucleotide
accugaagaggcaaacacu

SEQ ID NO: 3060491 - RNA, 19 nt, Artificial Sequence
  Description of Artificial Sequence: Synthetic oligonucleotide
agaacauguccuacauuca

SEQ ID NO: 3060492 - RNA, 19 nt, Artificial Sequence
  Description of Artificial Sequence: Synthetic oligonucleotide
cauguucauccuugaagga

SEQ ID NO: 3060493 - RNA, 19 nt, Artificial Sequence
  Description of Artificial Sequence: Synthetic oligonucleotide
caggagaacauguccuaca

SEQ ID NO: 3060494 - RNA, 19 nt, Artificial Sequence
  Description of Artificial Sequence: Synthetic oligonucleotide
guauuuaaguuaaaccuuu

SEQ ID NO: 3060495 - RNA, 19 nt, Artificial Sequence
  Description of Artificial Sequence: Synthetic oligonucleotide
cuacaacuacacaagcugu

SEQ ID NO: 3060496 - RNA, 19 nt, Artificial Sequence
  Description of Artificial Sequence: Synthetic oligonucleotide
gcaaacacuauagccugag

SEQ ID NO: 3060497 - RNA, 19 nt, Artificial Sequence
  Description of Artificial Sequence: Synthetic oligonucleotide
ccuugaaggacacuuauua

SEQ ID NO: 3060498 - RNA, 19 nt, Artificial Sequence
  Description of Artificial Sequence: Synthetic oligonucleotide
cuuuaggugagguauuauu

SEQ ID NO: 3060499 - RNA, 19 nt, Artificial Sequence
  Description of Artificial Sequence: Synthetic oligonucleotide
uucccagagcaaguggcac

SEQ ID NO: 3060500 - RNA, 19 nt, Artificial Sequence
  Description of Artificial Sequence: Synthetic oligonucleotide
aguaucaauggcaccugaa

SEQ ID NO: 3060501 - RNA, 19 nt, Artificial Sequence
  Description of Artificial Sequence: Synthetic oligonucleotide
acuacacaagcuguucuuu

SEQ ID NO: 3060502 - RNA, 19 nt, Artificial Sequence
  Description of Artificial Sequence: Synthetic oligonucleotide
ggacacuuauuauugauuu

SEQ ID NO: 3060503 - RNA, 19 nt, Artificial Sequence
  Description of Artificial Sequence: Synthetic oligonucleotide
aggacacuuauuauugauu

SEQ ID NO: 3060504 - RNA, 19 nt, Artificial Sequence
  Description of Artificial Sequence: Synthetic oligonucleotide
ugguuuugucauucuucau

SEQ ID NO: 3060505 - RNA, 19 nt, Artificial Sequence
  Description of Artificial Sequence: Synthetic oligonucleotide
cuucccagagcaaguggca

SEQ ID NO: 3060506 - RNA, 19 nt, Artificial Sequence
  Description of Artificial Sequence: Synthetic oligonucleotide
ccugaagaggcaaacacua

SEQ ID NO: 3060507 - RNA, 19 nt, Artificial Sequence
  Description of Artificial Sequence: Synthetic oligonucleotide
auguuaaguuuuacuugca

SEQ ID NO: 3060508 - RNA, 19 nt, Artificial Sequence
  Description of Artificial Sequence: Synthetic oligonucleotide
auucuucaugagaucugug

SEQ ID NO: 3060509 - RNA, 19 nt, Artificial Sequence
  Description of Artificial Sequence: Synthetic oligonucleotide
cuugaaggacacuuauuau

SEQ ID NO: 3060510 - RNA, 19 nt, Artificial Sequence
  Description of Artificial Sequence: Synthetic oligonucleotide
agagcaaguggcacuguau

SEQ ID NO: 3060511 - RNA, 19 nt, Artificial Sequence
  Description of Artificial Sequence: Synthetic oligonucleotide
cuacacaagcuguucuuua

SEQ ID NO: 3060512 - RNA, 19 nt, Artificial Sequence
  Description of Artificial Sequence: Synthetic oligonucleotide
cacuuauuauugauuugcu

SEQ ID NO: 3060513 - RNA, 19 nt, Artificial Sequence
  Description of Artificial Sequence: Synthetic oligonucleotide
cuguauuaggcaguaucaa

SEQ ID NO: 3060514 - RNA, 19 nt, Artificial Sequence
  Description of Artificial Sequence: Synthetic oligonucleotide
gagcaaguggcacuguauu

SEQ ID NO: 3060515 - RNA, 19 nt, Artificial Sequence
  Description of Artificial Sequence: Synthetic oligonucleotide
ggcaguaucaauggcaccu

SEQ ID NO: 3060516 - RNA, 19 nt, Artificial Sequence
  Description of Artificial Sequence: Synthetic oligonucleotide
accuucucuacaguauuua

SEQ ID NO: 3060517 - RNA, 19 nt, Artificial Sequence
  Description of Artificial Sequence: Synthetic oligonucleotide
guucauccuugaaggacac

SEQ ID NO: 3060518 - RNA, 19 nt, Artificial Sequence
  Description of Artificial Sequence: Synthetic oligonucleotide
gguauguuucaugcaauaa

SEQ ID NO: 3060519 - RNA, 19 nt, Artificial Sequence
  Description of Artificial Sequence: Synthetic oligonucleotide
aaccuuuaggugagguauu

SEQ ID NO: 3060520 - RNA, 19 nt, Artificial Sequence
  Description of Artificial Sequence: Synthetic oligonucleotide
caaacacuauagccugaga

SEQ ID NO: 3060521 - RNA, 19 nt, Artificial Sequence
  Description of Artificial Sequence: Synthetic oligonucleotide
cauucuucaugagaucugu

SEQ ID NO: 3060522 - RNA, 19 nt, Artificial Sequence
  Description of Artificial Sequence: Synthetic oligonucleotide
caacuacacaagcuguucu

SEQ ID NO: 3060523 - RNA, 19 nt, Artificial Sequence
  Description of Artificial Sequence: Synthetic oligonucleotide
cacaggagaacauguccua

SEQ ID NO: 3060524 - RNA, 19 nt, Artificial Sequence
  Description of Artificial Sequence: Synthetic oligonucleotide
gagaccuucucuacaguau

SEQ ID NO: 3060525 - RNA, 19 nt, Artificial Sequence
  Description of Artificial Sequence: Synthetic oligonucleotide
cuguucuuuaaaugcuggu

SEQ ID NO: 3060526 - RNA, 19 nt, Artificial Sequence
  Description of Artificial Sequence: Synthetic oligonucleotide
accuuuaggugagguauua

SEQ ID NO: 3060527 - RNA, 19 nt, Artificial Sequence
  Description of Artificial Sequence: Synthetic oligonucleotide
uucauccuugaaggacacu

SEQ ID NO: 3060528 - RNA, 19 nt, Artificial Sequence
  Description of Artificial Sequence: Synthetic oligonucleotide
caguaucaauggcaccuga

SEQ ID NO: 3060529 - RNA, 19 nt, Artificial Sequence
  Description of Artificial Sequence: Synthetic oligonucleotide
caacacaacuaagaguuau

SEQ ID NO: 3060530 - RNA, 19 nt, Artificial Sequence
  Description of Artificial Sequence: Synthetic oligonucleotide
acuaagaguuauggaucuu

SEQ ID NO: 3060531 - RNA, 19 nt, Artificial Sequence
  Description of Artificial Sequence: Synthetic oligonucleotide
cuacaguauuuaaguuaaa

SEQ ID NO: 3060532 - RNA, 19 nt, Artificial Sequence
  Description of Artificial Sequence: Synthetic oligonucleotide
gcaguaucaauggcaccug

SEQ ID NO: 3060533 - RNA, 19 nt, Artificial Sequence
  Description of Artificial Sequence: Synthetic oligonucleotide
cagagcaaguggcacugua

SEQ ID NO: 3060534 - RNA, 19 nt, Artificial Sequence
  Description of Artificial Sequence: Synthetic oligonucleotide
ccuucucuacaguauuuaa

SEQ ID NO: 3060535 - RNA, 19 nt, Artificial Sequence
  Description of Artificial Sequence: Synthetic oligonucleotide
cugaagaggcaaacacuau

SEQ ID NO: 3060536 - RNA, 19 nt, Artificial Sequence
  Description of Artificial Sequence: Synthetic oligonucleotide
gccugagaccuucucuaca

SEQ ID NO: 3060537 - RNA, 19 nt, Artificial Sequence
  Description of Artificial Sequence: Synthetic oligonucleotide
cccagagcaaguggcacug

SEQ ID NO: 3060538 - RNA, 19 nt, Artificial Sequence
  Description of Artificial Sequence: Synthetic oligonucleotide
auggaucuucccagagcaa

SEQ ID NO: 3060539 - RNA, 19 nt, Artificial Sequence
  Description of Artificial Sequence: Synthetic oligonucleotide
ggcacuguauuaggcagua

SEQ ID NO: 3060540 - RNA, 19 nt, Artificial Sequence
  Description of Artificial Sequence: Synthetic oligonucleotide
gaccuucucuacaguauuu

SEQ ID NO: 3060541 - RNA, 19 nt, Artificial Sequence
  Description of Artificial Sequence: Synthetic oligonucleotide
cuauagccugagaccuucu

SEQ ID NO: 3060542 - RNA, 19 nt, Artificial Sequence
  Description of Artificial Sequence: Synthetic oligonucleotide
ggcaaacacuauagccuga

SEQ ID NO: 3060543 - RNA, 19 nt, Artificial Sequence
  Description of Artificial Sequence: Synthetic oligonucleotide
cugagaccuucucuacagu

SEQ ID NO: 3060544 - RNA, 19 nt, Artificial Sequence
  Description of Artificial Sequence: Synthetic oligonucleotide
guguaacacaggagaacau

SEQ ID NO: 3060545 - RNA, 19 nt, Artificial Sequence
  Description of Artificial Sequence: Synthetic oligonucleotide
guccuacauucaacacaac

SEQ ID NO: 3060546 - RNA, 19 nt, Artificial Sequence
  Description of Artificial Sequence: Synthetic oligonucleotide
ggagaacauguccuacauu

SEQ ID NO: 3060547 - RNA, 19 nt, Artificial Sequence
  Description of Artificial Sequence: Synthetic oligonucleotide
cacuauagccugagaccuu

SEQ ID NO: 3060548 - RNA, 19 nt, Artificial Sequence
  Description of Artificial Sequence: Synthetic oligonucleotide
ccuuuaggugagguauuau

SEQ ID NO: 3060549 - RNA, 19 nt, Artificial Sequence
  Description of Artificial Sequence: Synthetic oligonucleotide
gcacuguauuaggcaguau

SEQ ID NO: 3060550 - RNA, 19 nt, Artificial Sequence
  Description of Artificial Sequence: Synthetic oligonucleotide
ccagagcaaguggcacugu

SEQ ID NO: 3060551 - RNA, 19 nt, Artificial Sequence
  Description of Artificial Sequence: Synthetic oligonucleotide
auugccagagcacugaucc

SEQ ID NO: 3060552 - RNA, 19 nt, Artificial Sequence
  Description of Artificial Sequence: Synthetic oligonucleotide
aguggaaaggguuaagagc

SEQ ID NO: 3060553 - RNA, 19 nt, Artificial Sequence
  Description of Artificial Sequence: Synthetic oligonucleotide
agaacucuggacuggaucc

SEQ ID NO: 3060554 - RNA, 19 nt, Artificial Sequence
  Description of Artificial Sequence: Synthetic oligonucleotide
aaacccuucugaccaaucc

SEQ ID NO: 3060555 - RNA, 19 nt, Artificial Sequence
  Description of Artificial Sequence: Synthetic oligonucleotide
acugauccugaccugaugc

SEQ ID NO: 3060556 - RNA, 19 nt, Artificial Sequence
  Description of Artificial Sequence: Synthetic oligonucleotide
ugaaauggaaaguggaaag

SEQ ID NO: 3060557 - RNA, 19 nt, Artificial Sequence
  Description of Artificial Sequence: Synthetic oligonucleotide
agaggaaugacacccuugc

SEQ ID NO: 3060558 - RNA, 19 nt, Artificial Sequence
  Description of Artificial Sequence: Synthetic oligonucleotide
aguaaguccaggaagacac

SEQ ID NO: 3060559 - RNA, 19 nt, Artificial Sequence
  Description of Artificial Sequence: Synthetic oligonucleotide
aagcuuguggaucuauccc

SEQ ID NO: 3060560 - RNA, 19 nt, Artificial Sequence
  Description of Artificial Sequence: Synthetic oligonucleotide
aaauggaaaguggaaaggg

SEQ ID NO: 3060561 - RNA, 19 nt, Artificial Sequence
  Description of Artificial Sequence: Synthetic oligonucleotide
uuuugaaauggaaagugga

SEQ ID NO: 3060562 - RNA, 19 nt, Artificial Sequence
  Description of Artificial Sequence: Synthetic oligonucleotide
aacccuucugaccaauccc

SEQ ID NO: 3060563 - RNA, 19 nt, Artificial Sequence
  Description of Artificial Sequence: Synthetic oligonucleotide
aaggguuaagagcagggag

SEQ ID NO: 3060564 - RNA, 19 nt, Artificial Sequence
  Description of Artificial Sequence: Synthetic oligonucleotide
aggaccagcccucauaagc

SEQ ID NO: 3060565 - RNA, 19 nt, Artificial Sequence
  Description of Artificial Sequence: Synthetic oligonucleotide
aaguggaaaggguuaagag

SEQ ID NO: 3060566 - RNA, 19 nt, Artificial Sequence
  Description of Artificial Sequence: Synthetic oligonucleotide
cuagagaagggacauaagc

SEQ ID NO: 3060567 - RNA, 19 nt, Artificial Sequence
  Description of Artificial Sequence: Synthetic oligonucleotide
agcuuguggaucuaucccc

SEQ ID NO: 3060568 - RNA, 19 nt, Artificial Sequence
  Description of Artificial Sequence: Synthetic oligonucleotide
guuaagagcagggagagug

SEQ ID NO: 3060569 - RNA, 19 nt, Artificial Sequence
  Description of Artificial Sequence: Synthetic oligonucleotide
ugaccaaucccaaggaggc

SEQ ID NO: 3060570 - RNA, 19 nt, Artificial Sequence
  Description of Artificial Sequence: Synthetic oligonucleotide
ucauaagccucauugccag

SEQ ID NO: 3060571 - RNA, 19 nt, Artificial Sequence
  Description of Artificial Sequence: Synthetic oligonucleotide
uuugaaauggaaaguggaa

SEQ ID NO: 3060572 - RNA, 19 nt, Artificial Sequence
  Description of Artificial Sequence: Synthetic oligonucleotide
gagaccaguguccacagag

SEQ ID NO: 3060573 - RNA, 19 nt, Artificial Sequence
  Description of Artificial Sequence: Synthetic oligonucleotide
uaagcuuguggaucuaucc

SEQ ID NO: 3060574 - RNA, 19 nt, Artificial Sequence
  Description of Artificial Sequence: Synthetic oligonucleotide
gaaauggaaaguggaaagg

SEQ ID NO: 3060575 - RNA, 19 nt, Artificial Sequence
  Description of Artificial Sequence: Synthetic oligonucleotide
cuucugaccaaucccaagg

SEQ ID NO: 3060576 - RNA, 19 nt, Artificial Sequence
  Description of Artificial Sequence: Synthetic oligonucleotide
agagcacugauccugaccu

SEQ ID NO: 3060577 - RNA, 19 nt, Artificial Sequence
  Description of Artificial Sequence: Synthetic oligonucleotide
cugaccaaucccaaggagg

SEQ ID NO: 3060578 - RNA, 19 nt, Artificial Sequence
  Description of Artificial Sequence: Synthetic oligonucleotide
aacagcugccaacaguaag

SEQ ID NO: 3060579 - RNA, 19 nt, Artificial Sequence
  Description of Artificial Sequence: Synthetic oligonucleotide
aggaagacacccuagagaa

SEQ ID NO: 3060580 - RNA, 19 nt, Artificial Sequence
  Description of Artificial Sequence: Synthetic oligonucleotide
agggacauaagcuugugga

SEQ ID NO: 3060581 - RNA, 19 nt, Artificial Sequence
  Description of Artificial Sequence: Synthetic oligonucleotide
cuggacuggauccugagcc

SEQ ID NO: 3060582 - RNA, 19 nt, Artificial Sequence
  Description of Artificial Sequence: Synthetic oligonucleotide
uccccuagaacucuggacu

SEQ ID NO: 3060583 - RNA, 19 nt, Artificial Sequence
  Description of Artificial Sequence: Synthetic oligonucleotide
aagaaggggucccugugag

SEQ ID NO: 3060584 - RNA, 19 nt, Artificial Sequence
  Description of Artificial Sequence: Synthetic oligonucleotide
aagggacauaagcuugugg

SEQ ID NO: 3060585 - RNA, 19 nt, Artificial Sequence
  Description of Artificial Sequence: Synthetic oligonucleotide
uagaggaagguuaggggag

SEQ ID NO: 3060586 - RNA, 19 nt, Artificial Sequence
  Description of Artificial Sequence: Synthetic oligonucleotide
aaugacacccuugcuuugg

SEQ ID NO: 3060587 - RNA, 19 nt, Artificial Sequence
  Description of Artificial Sequence: Synthetic oligonucleotide
aagaacagcugccaacagu

SEQ ID NO: 3060588 - RNA, 19 nt, Artificial Sequence
  Description of Artificial Sequence: Synthetic oligonucleotide
caacaguaaguccaggaag

SEQ ID NO: 3060589 - RNA, 19 nt, Artificial Sequence
  Description of Artificial Sequence: Synthetic oligonucleotide
uuaggggagaccagugucc

SEQ ID NO: 3060590 - RNA, 19 nt, Artificial Sequence
  Description of Artificial Sequence: Synthetic oligonucleotide
aaaguggaaaggguuaaga

SEQ ID NO: 3060591 - RNA, 19 nt, Artificial Sequence
  Description of Artificial Sequence: Synthetic oligonucleotide
aaggaggcccaguugccac

SEQ ID NO: 3060592 - RNA, 19 nt, Artificial Sequence
  Description of Artificial Sequence: Synthetic oligonucleotide
agugguaagaagggguccc

SEQ ID NO: 3060593 - RNA, 19 nt, Artificial Sequence
  Description of Artificial Sequence: Synthetic oligonucleotide
agggagagugguaagaagg

SEQ ID NO: 3060594 - RNA, 19 nt, Artificial Sequence
  Description of Artificial Sequence: Synthetic oligonucleotide
accaaucccaaggaggccc

SEQ ID NO: 3060595 - RNA, 19 nt, Artificial Sequence
  Description of Artificial Sequence: Synthetic oligonucleotide
uugaaauggaaaguggaaa

SEQ ID NO: 3060596 - RNA, 19 nt, Artificial Sequence
  Description of Artificial Sequence: Synthetic oligonucleotide
ucugaccaaucccaaggag

SEQ ID NO: 3060597 - RNA, 19 nt, Artificial Sequence
  Description of Artificial Sequence: Synthetic oligonucleotide
guggaaaggguuaagagca

SEQ ID NO: 3060598 - RNA, 19 nt, Artificial Sequence
  Description of Artificial Sequence: Synthetic oligonucleotide
guagaggaagguuagggga

SEQ ID NO: 3060599 - RNA, 19 nt, Artificial Sequence
  Description of Artificial Sequence: Synthetic oligonucleotide
aauggaaaguggaaagggu

SEQ ID NO: 3060600 - RNA, 19 nt, Artificial Sequence
  Description of Artificial Sequence: Synthetic oligonucleotide
agagaagggacauaagcuu

SEQ ID NO: 3060601 - RNA, 19 nt, Artificial Sequence
  Description of Artificial Sequence: Synthetic oligonucleotide
ggaucuauccccuagaacu

SEQ ID NO: 3060602 - RNA, 19 nt, Artificial Sequence
  Description of Artificial Sequence: Synthetic oligonucleotide
uuguggaucuauccccuag

SEQ ID NO: 3060603 - RNA, 19 nt, Artificial Sequence
  Description of Artificial Sequence: Synthetic oligonucleotide
gguagaggaagguuagggg

SEQ ID NO: 3060604 - RNA, 19 nt, Artificial Sequence
  Description of Artificial Sequence: Synthetic oligonucleotide
auccccuagaacucuggac

SEQ ID NO: 3060605 - RNA, 19 nt, Artificial Sequence
  Description of Artificial Sequence: Synthetic oligonucleotide
aagccucauugccagagca

SEQ ID NO: 3060606 - RNA, 19 nt, Artificial Sequence
  Description of Artificial Sequence: Synthetic oligonucleotide
uagaacucuggacuggauc

SEQ ID NO: 3060607 - RNA, 19 nt, Artificial Sequence
  Description of Artificial Sequence: Synthetic oligonucleotide
uaagaaggggucccuguga

SEQ ID NO: 3060608 - RNA, 19 nt, Artificial Sequence
  Description of Artificial Sequence: Synthetic oligonucleotide
gauccugaccugaugcugg

SEQ ID NO: 3060609 - RNA, 19 nt, Artificial Sequence
  Description of Artificial Sequence: Synthetic oligonucleotide
uguggaucuauccccuaga

SEQ ID NO: 3060610 - RNA, 19 nt, Artificial Sequence
  Description of Artificial Sequence: Synthetic oligonucleotide
aggaaugacacccuugcuu

SEQ ID NO: 3060611 - RNA, 19 nt, Artificial Sequence
  Description of Artificial Sequence: Synthetic oligonucleotide
uggaaaguggaaaggguua

SEQ ID NO: 3060612 - RNA, 19 nt, Artificial Sequence
  Description of Artificial Sequence: Synthetic oligonucleotide
ugaggaccagcccucauaa

SEQ ID NO: 3060613 - RNA, 19 nt, Artificial Sequence
  Description of Artificial Sequence: Synthetic oligonucleotide
auaagccucauugccagag

SEQ ID NO: 3060614 - RNA, 19 nt, Artificial Sequence
  Description of Artificial Sequence: Synthetic oligonucleotide
uguccacagaggaaugaca

SEQ ID NO: 3060615 - RNA, 19 nt, Artificial Sequence
  Description of Artificial Sequence: Synthetic oligonucleotide
uccaggaagacacccuaga

SEQ ID NO: 3060616 - RNA, 19 nt, Artificial Sequence
  Description of Artificial Sequence: Synthetic oligonucleotide
uucugaccaaucccaagga

SEQ ID NO: 3060617 - RNA, 19 nt, Artificial Sequence
  Description of Artificial Sequence: Synthetic oligonucleotide
gagaagggacauaagcuug

SEQ ID NO: 3060618 - RNA, 19 nt, Artificial Sequence
  Description of Artificial Sequence: Synthetic oligonucleotide
ugaggaccagcccaggaaa

SEQ ID NO: 3060619 - RNA, 19 nt, Artificial Sequence
  Description of Artificial Sequence: Synthetic oligonucleotide
agcugccaacaguaagucc

SEQ ID NO: 3060620 - RNA, 19 nt, Artificial Sequence
  Description of Artificial Sequence: Synthetic oligonucleotide
agagugguaagaagggguc

SEQ ID NO: 3060621 - RNA, 19 nt, Artificial Sequence
  Description of Artificial Sequence: Synthetic oligonucleotide
aagguuaggggagaccagu

SEQ ID NO: 3060622 - RNA, 19 nt, Artificial Sequence
  Description of Artificial Sequence: Synthetic oligonucleotide
ucuggacuggauccugagc

SEQ ID NO: 3060623 - RNA, 19 nt, Artificial Sequence
  Description of Artificial Sequence: Synthetic oligonucleotide
uggaucuauccccuagaac

SEQ ID NO: 3060624 - RNA, 19 nt, Artificial Sequence
  Description of Artificial Sequence: Synthetic oligonucleotide
guuaggggagaccaguguc

SEQ ID NO: 3060625 - RNA, 19 nt, Artificial Sequence
  Description of Artificial Sequence: Synthetic oligonucleotide
ucuauccccuagaacucug

SEQ ID NO: 3060626 - RNA, 19 nt, Artificial Sequence
  Description of Artificial Sequence: Synthetic oligonucleotide
guaagaaggggucccugug

SEQ ID NO: 3060627 - RNA, 19 nt, Artificial Sequence
  Description of Artificial Sequence: Synthetic oligonucleotide
acaguaaguccaggaagac

SEQ ID NO: 3060628 - RNA, 19 nt, Artificial Sequence
  Description of Artificial Sequence: Synthetic oligonucleotide
uggaaaggguuaagagcag

SEQ ID NO: 3060629 - RNA, 19 nt, Artificial Sequence
  Description of Artificial Sequence: Synthetic oligonucleotide
gacauaagcuuguggaucu

SEQ ID NO: 3060630 - RNA, 19 nt, Artificial Sequence
  Description of Artificial Sequence: Synthetic oligonucleotide
gaaggggucccugugagga

SEQ ID NO: 3060631 - RNA, 19 nt, Artificial Sequence
  Description of Artificial Sequence: Synthetic oligonucleotide
auaagcuuguggaucuauc

SEQ ID NO: 3060632 - RNA, 19 nt, Artificial Sequence
  Description of Artificial Sequence: Synthetic oligonucleotide
cucauaagccucauugcca

SEQ ID NO: 3060633 - RNA, 19 nt, Artificial Sequence
  Description of Artificial Sequence: Synthetic oligonucleotide
gcccucauaagccucauug

SEQ ID NO: 3060634 - RNA, 19 nt, Artificial Sequence
  Description of Artificial Sequence: Synthetic oligonucleotide
ccaguugccacuucagucc

SEQ ID NO: 3060635 - RNA, 19 nt, Artificial Sequence
  Description of Artificial Sequence: Synthetic oligonucleotide
aaggggucccugugaggac

SEQ ID NO: 3060636 - RNA, 19 nt, Artificial Sequence
  Description of Artificial Sequence: Synthetic oligonucleotide
uauccccuagaacucugga

SEQ ID NO: 3060637 - RNA, 19 nt, Artificial Sequence
  Description of Artificial Sequence: Synthetic oligonucleotide
gaaaguggaaaggguuaag

SEQ ID NO: 3060638 - RNA, 19 nt, Artificial Sequence
  Description of Artificial Sequence: Synthetic oligonucleotide
ugccagagcacugauccug

SEQ ID NO: 3060639 - RNA, 19 nt, Artificial Sequence
  Description of Artificial Sequence: Synthetic oligonucleotide
uaagccucauugccagagc

SEQ ID NO: 3060640 - RNA, 19 nt, Artificial Sequence
  Description of Artificial Sequence: Synthetic oligonucleotide
ugugaggaccagcccagga

SEQ ID NO: 3060641 - RNA, 19 nt, Artificial Sequence
  Description of Artificial Sequence: Synthetic oligonucleotide
ugauccugaccugaugcug

SEQ ID NO: 3060642 - RNA, 19 nt, Artificial Sequence
  Description of Artificial Sequence: Synthetic oligonucleotide
aggaccagcccaggaaacc

SEQ ID NO: 3060643 - RNA, 19 nt, Artificial Sequence
  Description of Artificial Sequence: Synthetic oligonucleotide
gaccaguguccacagagga

SEQ ID NO: 3060644 - RNA, 19 nt, Artificial Sequence
  Description of Artificial Sequence: Synthetic oligonucleotide
cuauccccuagaacucugg

SEQ ID NO: 3060645 - RNA, 19 nt, Artificial Sequence
  Description of Artificial Sequence: Synthetic oligonucleotide
ugacacccuugcuuugggg

SEQ ID NO: 3060646 - RNA, 19 nt, Artificial Sequence
  Description of Artificial Sequence: Synthetic oligonucleotide
acagcugccaacaguaagu

SEQ ID NO: 3060647 - RNA, 19 nt, Artificial Sequence
  Description of Artificial Sequence: Synthetic oligonucleotide
ccucauaagccucauugcc

SEQ ID NO: 3060648 - RNA, 19 nt, Artificial Sequence
  Description of Artificial Sequence: Synthetic oligonucleotide
augacacccuugcuuuggg

SEQ ID NO: 3060649 - RNA, 19 nt, Artificial Sequence
  Description of Artificial Sequence: Synthetic oligonucleotide
guugccacuucaguccagg

SEQ ID NO: 3060650 - RNA, 19 nt, Artificial Sequence
  Description of Artificial Sequence: Synthetic oligonucleotide
gacacccuagagaagggac

SEQ ID NO: 3060651 - RNA, 19 nt, Artificial Sequence
  Description of Artificial Sequence: Synthetic oligonucleotide
aggaagguuaggggagacc

SEQ ID NO: 3060652 - RNA, 19 nt, Artificial Sequence
  Description of Artificial Sequence: Synthetic oligonucleotide
guccacagaggaaugacac

SEQ ID NO: 3060653 - RNA, 19 nt, Artificial Sequence
  Description of Artificial Sequence: Synthetic oligonucleotide
caggaagacacccuagaga

SEQ ID NO: 3060654 - RNA, 19 nt, Artificial Sequence
  Description of Artificial Sequence: Synthetic oligonucleotide
cagagcacugauccugacc

SEQ ID NO: 3060655 - RNA, 19 nt, Artificial Sequence
  Description of Artificial Sequence: Synthetic oligonucleotide
agaaggggucccugugagg

SEQ ID NO: 3060656 - RNA, 19 nt, Artificial Sequence
  Description of Artificial Sequence: Synthetic oligonucleotide
aggggucccugugaggacc

SEQ ID NO: 3060657 - RNA, 19 nt, Artificial Sequence
  Description of Artificial Sequence: Synthetic oligonucleotide
aggguuaagagcagggaga

SEQ ID NO: 3060658 - RNA, 19 nt, Artificial Sequence
  Description of Artificial Sequence: Synthetic oligonucleotide
agagcagggagagugguaa

SEQ ID NO: 3060659 - RNA, 19 nt, Artificial Sequence
  Description of Artificial Sequence: Synthetic oligonucleotide
gaucuauccccuagaacuc

SEQ ID NO: 3060660 - RNA, 19 nt, Artificial Sequence
  Description of Artificial Sequence: Synthetic oligonucleotide
uaagagcagggagaguggu

SEQ ID NO: 3060661 - RNA, 19 nt, Artificial Sequence
  Description of Artificial Sequence: Synthetic oligonucleotide
cagaggaaugacacccuug

SEQ ID NO: 3060662 - RNA, 19 nt, Artificial Sequence
  Description of Artificial Sequence: Synthetic oligonucleotide
cagggagagugguaagaag

SEQ ID NO: 3060663 - RNA, 19 nt, Artificial Sequence
  Description of Artificial Sequence: Synthetic oligonucleotide
ccacagaggaaugacaccc

SEQ ID NO: 3060664 - RNA, 19 nt, Artificial Sequence
  Description of Artificial Sequence: Synthetic oligonucleotide
uggacuggauccugagcca

SEQ ID NO: 3060665 - RNA, 19 nt, Artificial Sequence
  Description of Artificial Sequence: Synthetic oligonucleotide
auccugaccugaugcuggg

SEQ ID NO: 3060666 - RNA, 19 nt, Artificial Sequence
  Description of Artificial Sequence: Synthetic oligonucleotide
ggaagguuaggggagacca

SEQ ID NO: 3060667 - RNA, 19 nt, Artificial Sequence
  Description of Artificial Sequence: Synthetic oligonucleotide
gagugguaagaaggggucc

SEQ ID NO: 3060668 - RNA, 19 nt, Artificial Sequence
  Description of Artificial Sequence: Synthetic oligonucleotide
ggaaaggguuaagagcagg

SEQ ID NO: 3060669 - RNA, 19 nt, Artificial Sequence
  Description of Artificial Sequence: Synthetic oligonucleotide
gggagagugguaagaaggg

SEQ ID NO: 3060670 - RNA, 19 nt, Artificial Sequence
  Description of Artificial Sequence: Synthetic oligonucleotide
agaccaguguccacagagg

SEQ ID NO: 3060671 - RNA, 19 nt, Artificial Sequence
  Description of Artificial Sequence: Synthetic oligonucleotide
gaagguuaggggagaccag

SEQ ID NO: 3060672 - RNA, 19 nt, Artificial Sequence
  Description of Artificial Sequence: Synthetic oligonucleotide
auggaaaguggaaaggguu

SEQ ID NO: 3060673 - RNA, 19 nt, Artificial Sequence
  Description of Artificial Sequence: Synthetic oligonucleotide
aguccaggaagacacccua

SEQ ID NO: 3060674 - RNA, 19 nt, Artificial Sequence
  Description of Artificial Sequence: Synthetic oligonucleotide
ucccaaggaggcccaguug

SEQ ID NO: 3060675 - RNA, 19 nt, Artificial Sequence
  Description of Artificial Sequence: Synthetic oligonucleotide
cccaaggaggcccaguugc

SEQ ID NO: 3060676 - RNA, 19 nt, Artificial Sequence
  Description of Artificial Sequence: Synthetic oligonucleotide
agcacugauccugaccuga

SEQ ID NO: 3060677 - RNA, 19 nt, Artificial Sequence
  Description of Artificial Sequence: Synthetic oligonucleotide
ggagagugguaagaagggg

SEQ ID NO: 3060678 - RNA, 19 nt, Artificial Sequence
  Description of Artificial Sequence: Synthetic oligonucleotide
caagaacagcugccaacag

SEQ ID NO: 3060679 - RNA, 19 nt, Artificial Sequence
  Description of Artificial Sequence: Synthetic oligonucleotide
gagagugguaagaaggggu

SEQ ID NO: 3060680 - RNA, 19 nt, Artificial Sequence
  Description of Artificial Sequence: Synthetic oligonucleotide
ggcaagaacagcugccaac

SEQ ID NO: 3060681 - RNA, 19 nt, Artificial Sequence
  Description of Artificial Sequence: Synthetic oligonucleotide
cucuggacuggauccugag

SEQ ID NO: 3060682 - RNA, 19 nt, Artificial Sequence
  Description of Artificial Sequence: Synthetic oligonucleotide
agaagggacauaagcuugu

SEQ ID NO: 3060683 - RNA, 19 nt, Artificial Sequence
  Description of Artificial Sequence: Synthetic oligonucleotide
aaguccaggaagacacccu

SEQ ID NO: 3060684 - RNA, 19 nt, Artificial Sequence
  Description of Artificial Sequence: Synthetic oligonucleotide
gaagggacauaagcuugug

SEQ ID NO: 3060685 - RNA, 19 nt, Artificial Sequence
  Description of Artificial Sequence: Synthetic oligonucleotide
ccaggaaacccuucugacc

SEQ ID NO: 3060686 - RNA, 19 nt, Artificial Sequence
  Description of Artificial Sequence: Synthetic oligonucleotide
ggguuaagagcagggagag

SEQ ID NO: 3060687 - RNA, 19 nt, Artificial Sequence
  Description of Artificial Sequence: Synthetic oligonucleotide
uaggggagaccagugucca

SEQ ID NO: 3060688 - RNA, 19 nt, Artificial Sequence
  Description of Artificial Sequence: Synthetic oligonucleotide
agccucauugccagagcac

SEQ ID NO: 3060689 - RNA, 19 nt, Artificial Sequence
  Description of Artificial Sequence: Synthetic oligonucleotide
acagaggaaugacacccuu

SEQ ID NO: 3060690 - RNA, 19 nt, Artificial Sequence
  Description of Artificial Sequence: Synthetic oligonucleotide
ggacauaagcuuguggauc

SEQ ID NO: 3060691 - RNA, 19 nt, Artificial Sequence
  Description of Artificial Sequence: Synthetic oligonucleotide
aguguccacagaggaauga

SEQ ID NO: 3060692 - RNA, 19 nt, Artificial Sequence
  Description of Artificial Sequence: Synthetic oligonucleotide
cauugccagagcacugauc

SEQ ID NO: 3060693 - RNA, 19 nt, Artificial Sequence
  Description of Artificial Sequence: Synthetic oligonucleotide
aaucccaaggaggcccagu

SEQ ID NO: 3060694 - RNA, 19 nt, Artificial Sequence
  Description of Artificial Sequence: Synthetic oligonucleotide
ggaccagcccucauaagcc

SEQ ID NO: 3060695 - RNA, 19 nt, Artificial Sequence
  Description of Artificial Sequence: Synthetic oligonucleotide
acccuucugaccaauccca

SEQ ID NO: 3060696 - RNA, 19 nt, Artificial Sequence
  Description of Artificial Sequence: Synthetic oligonucleotide
gagcagggagagugguaag

SEQ ID NO: 3060697 - RNA, 19 nt, Artificial Sequence
  Description of Artificial Sequence: Synthetic oligonucleotide
uugccacuucaguccaggc

SEQ ID NO: 3060698 - RNA, 19 nt, Artificial Sequence
  Description of Artificial Sequence: Synthetic oligonucleotide
agcagggagagugguaaga

SEQ ID NO: 3060699 - RNA, 19 nt, Artificial Sequence
  Description of Artificial Sequence: Synthetic oligonucleotide
agcccaggaaacccuucug

SEQ ID NO: 3060700 - RNA, 19 nt, Artificial Sequence
  Description of Artificial Sequence: Synthetic oligonucleotide
aucuauccccuagaacucu

SEQ ID NO: 3060701 - RNA, 19 nt, Artificial Sequence
  Description of Artificial Sequence: Synthetic oligonucleotide
aucccaaggaggcccaguu

SEQ ID NO: 3060702 - RNA, 19 nt, Artificial Sequence
  Description of Artificial Sequence: Synthetic oligonucleotide
gaggaccagcccucauaag

SEQ ID NO: 3060703 - RNA, 19 nt, Artificial Sequence
  Description of Artificial Sequence: Synthetic oligonucleotide
gcaagaacagcugccaaca

SEQ ID NO: 3060704 - RNA, 19 nt, Artificial Sequence
  Description of Artificial Sequence: Synthetic oligonucleotide
ugccaacaguaaguccagg

SEQ ID NO: 3060705 - RNA, 19 nt, Artificial Sequence
  Description of Artificial Sequence: Synthetic oligonucleotide
gugaggaccagcccaggaa

SEQ ID NO: 3060706 - RNA, 19 nt, Artificial Sequence
  Description of Artificial Sequence: Synthetic oligonucleotide
aggggagaccaguguccac

SEQ ID NO: 3060707 - RNA, 19 nt, Artificial Sequence
  Description of Artificial Sequence: Synthetic oligonucleotide
acacccuagagaagggaca

SEQ ID NO: 3060708 - RNA, 19 nt, Artificial Sequence
  Description of Artificial Sequence: Synthetic oligonucleotide
guaaguccaggaagacacc

SEQ ID NO: 3060709 - RNA, 19 nt, Artificial Sequence
  Description of Artificial Sequence: Synthetic oligonucleotide
cccucauaagccucauugc

SEQ ID NO: 3060710 - RNA, 19 nt, Artificial Sequence
  Description of Artificial Sequence: Synthetic oligonucleotide
gccaacaguaaguccagga

SEQ ID NO: 3060711 - RNA, 19 nt, Artificial Sequence
  Description of Artificial Sequence: Synthetic oligonucleotide
cccaguugccacuucaguc

SEQ ID NO: 3060712 - RNA, 19 nt, Artificial Sequence
  Description of Artificial Sequence: Synthetic oligonucleotide
aggcccaguugccacuuca

SEQ ID NO: 3060713 - RNA, 19 nt, Artificial Sequence
  Description of Artificial Sequence: Synthetic oligonucleotide
agaggaagguuaggggaga

SEQ ID NO: 3060714 - RNA, 19 nt, Artificial Sequence
  Description of Artificial Sequence: Synthetic oligonucleotide
guggaucuauccccuagaa

SEQ ID NO: 3060715 - RNA, 19 nt, Artificial Sequence
  Description of Artificial Sequence: Synthetic oligonucleotide
ccaggaagacacccuagag

SEQ ID NO: 3060716 - RNA, 19 nt, Artificial Sequence
  Description of Artificial Sequence: Synthetic oligonucleotide
gaaacccuucugaccaauc

SEQ ID NO: 3060717 - RNA, 19 nt, Artificial Sequence
  Description of Artificial Sequence: Synthetic oligonucleotide
cacugauccugaccugaug

SEQ ID NO: 3060718 - RNA, 19 nt, Artificial Sequence
  Description of Artificial Sequence: Synthetic oligonucleotide
gagcacugauccugaccug

SEQ ID NO: 3060719 - RNA, 19 nt, Artificial Sequence
  Description of Artificial Sequence: Synthetic oligonucleotide
caguguccacagaggaaug

SEQ ID NO: 3060720 - RNA, 19 nt, Artificial Sequence
  Description of Artificial Sequence: Synthetic oligonucleotide
ggaaugacacccuugcuuu

SEQ ID NO: 3060721 - RNA, 19 nt, Artificial Sequence
  Description of Artificial Sequence: Synthetic oligonucleotide
gaccaaucccaaggaggcc

SEQ ID NO: 3060722 - RNA, 19 nt, Artificial Sequence
  Description of Artificial Sequence: Synthetic oligonucleotide
uugccagagcacugauccu

SEQ ID NO: 3060723 - RNA, 19 nt, Artificial Sequence
  Description of Artificial Sequence: Synthetic oligonucleotide
accagcccucauaagccuc

SEQ ID NO: 3060724 - RNA, 19 nt, Artificial Sequence
  Description of Artificial Sequence: Synthetic oligonucleotide
ccugugaggaccagcccag

SEQ ID NO: 3060725 - RNA, 19 nt, Artificial Sequence
  Description of Artificial Sequence: Synthetic oligonucleotide
ucugaggaccagcccucau

SEQ ID NO: 3060726 - RNA, 19 nt, Artificial Sequence
  Description of Artificial Sequence: Synthetic oligonucleotide
gaggaccagcccaggaaac

SEQ ID NO: 3060727 - RNA, 19 nt, Artificial Sequence
  Description of Artificial Sequence: Synthetic oligonucleotide
agguuaggggagaccagug

SEQ ID NO: 3060728 - RNA, 19 nt, Artificial Sequence
  Description of Artificial Sequence: Synthetic oligonucleotide
gaggaagguuaggggagac

SEQ ID NO: 3060729 - RNA, 19 nt, Artificial Sequence
  Description of Artificial Sequence: Synthetic oligonucleotide
caguaaguccaggaagaca

SEQ ID NO: 3060730 - RNA, 19 nt, Artificial Sequence
  Description of Artificial Sequence: Synthetic oligonucleotide
guccaggaagacacccuag

SEQ ID NO: 3060731 - RNA, 19 nt, Artificial Sequence
  Description of Artificial Sequence: Synthetic oligonucleotide
ccuagagaagggacauaag

SEQ ID NO: 3060732 - RNA, 19 nt, Artificial Sequence
  Description of Artificial Sequence: Synthetic oligonucleotide
acuggauccugagccauuu

SEQ ID NO: 3060733 - RNA, 19 nt, Artificial Sequence
  Description of Artificial Sequence: Synthetic oligonucleotide
ccuucugaccaaucccaag

SEQ ID NO: 3060734 - RNA, 19 nt, Artificial Sequence
  Description of Artificial Sequence: Synthetic oligonucleotide
aggaggcccaguugccacu

SEQ ID NO: 3060735 - RNA, 19 nt, Artificial Sequence
  Description of Artificial Sequence: Synthetic oligonucleotide
ggaccagcccaggaaaccc

SEQ ID NO: 3060736 - RNA, 19 nt, Artificial Sequence
  Description of Artificial Sequence: Synthetic oligonucleotide
cagcugccaacaguaaguc

SEQ ID NO: 3060737 - RNA, 19 nt, Artificial Sequence
  Description of Artificial Sequence: Synthetic oligonucleotide
ggaaaguggaaaggguuaa

SEQ ID NO: 3060738 - RNA, 19 nt, Artificial Sequence
  Description of Artificial Sequence: Synthetic oligonucleotide
ccaacaguaaguccaggaa

SEQ ID NO: 3060739 - RNA, 19 nt, Artificial Sequence
  Description of Artificial Sequence: Synthetic oligonucleotide
aggaaacccuucugaccaa

SEQ ID NO: 3060740 - RNA, 19 nt, Artificial Sequence
  Description of Artificial Sequence: Synthetic oligonucleotide
gaggaaugacacccuugcu

SEQ ID NO: 3060741 - RNA, 19 nt, Artificial Sequence
  Description of Artificial Sequence: Synthetic oligonucleotide
caguugccacuucagucca

SEQ ID NO: 3060742 - RNA, 19 nt, Artificial Sequence
  Description of Artificial Sequence: Synthetic oligonucleotide
gguaagaaggggucccugu

SEQ ID NO: 3060743 - RNA, 19 nt, Artificial Sequence
  Description of Artificial Sequence: Synthetic oligonucleotide
ggaagacacccuagagaag

SEQ ID NO: 3060744 - RNA, 19 nt, Artificial Sequence
  Description of Artificial Sequence: Synthetic oligonucleotide
ccaaggaggcccaguugcc

SEQ ID NO: 3060745 - RNA, 19 nt, Artificial Sequence
  Description of Artificial Sequence: Synthetic oligonucleotide
ggggagaccaguguccaca

SEQ ID NO: 3060746 - RNA, 19 nt, Artificial Sequence
  Description of Artificial Sequence: Synthetic oligonucleotide
cugaggaccagcccucaua

SEQ ID NO: 3060747 - RNA, 19 nt, Artificial Sequence
  Description of Artificial Sequence: Synthetic oligonucleotide
cauaagccucauugccaga

SEQ ID NO: 3060748 - RNA, 19 nt, Artificial Sequence
  Description of Artificial Sequence: Synthetic oligonucleotide
gcccaggaaacccuucuga

SEQ ID NO: 3060749 - RNA, 19 nt, Artificial Sequence
  Description of Artificial Sequence: Synthetic oligonucleotide
accaguguccacagaggaa

SEQ ID NO: 3060750 - RNA, 19 nt, Artificial Sequence
  Description of Artificial Sequence: Synthetic oligonucleotide
gaccagcccucauaagccu

SEQ ID NO: 3060751 - RNA, 19 nt, Artificial Sequence
  Description of Artificial Sequence: Synthetic oligonucleotide
cugauccugaccugaugcu

SEQ ID NO: 3060752 - RNA, 19 nt, Artificial Sequence
  Description of Artificial Sequence: Synthetic oligonucleotide
acucuggacuggauccuga

SEQ ID NO: 3060753 - RNA, 19 nt, Artificial Sequence
  Description of Artificial Sequence: Synthetic oligonucleotide
gaacagcugccaacaguaa

SEQ ID NO: 3060754 - RNA, 19 nt, Artificial Sequence
  Description of Artificial Sequence: Synthetic oligonucleotide
caaggaggcccaguugcca

SEQ ID NO: 3060755 - RNA, 19 nt, Artificial Sequence
  Description of Artificial Sequence: Synthetic oligonucleotide
cugugaggaccagcccagg

SEQ ID NO: 3060756 - RNA, 19 nt, Artificial Sequence
  Description of Artificial Sequence: Synthetic oligonucleotide
ccccuagaacucuggacug

SEQ ID NO: 3060757 - RNA, 19 nt, Artificial Sequence
  Description of Artificial Sequence: Synthetic oligonucleotide
aguugccacuucaguccag

SEQ ID NO: 3060758 - RNA, 19 nt, Artificial Sequence
  Description of Artificial Sequence: Synthetic oligonucleotide
gaacucuggacuggauccu

SEQ ID NO: 3060759 - RNA, 19 nt, Artificial Sequence
  Description of Artificial Sequence: Synthetic oligonucleotide
gguuaggggagaccagugu

SEQ ID NO: 3060760 - RNA, 19 nt, Artificial Sequence
  Description of Artificial Sequence: Synthetic oligonucleotide
ggggcaagaacagcugcca

SEQ ID NO: 3060761 - RNA, 19 nt, Artificial Sequence
  Description of Artificial Sequence: Synthetic oligonucleotide
gggacauaagcuuguggau

SEQ ID NO: 3060762 - RNA, 19 nt, Artificial Sequence
  Description of Artificial Sequence: Synthetic oligonucleotide
cccugugaggaccagccca

SEQ ID NO: 3060763 - RNA, 19 nt, Artificial Sequence
  Description of Artificial Sequence: Synthetic oligonucleotide
cccuagaacucuggacugg

SEQ ID NO: 3060764 - RNA, 19 nt, Artificial Sequence
  Description of Artificial Sequence: Synthetic oligonucleotide
cacagaggaaugacacccu

SEQ ID NO: 3060765 - RNA, 19 nt, Artificial Sequence
  Description of Artificial Sequence: Synthetic oligonucleotide
cuuguggaucuauccccua

SEQ ID NO: 3060766 - RNA, 19 nt, Artificial Sequence
  Description of Artificial Sequence: Synthetic oligonucleotide
cccuagagaagggacauaa

SEQ ID NO: 3060767 - RNA, 19 nt, Artificial Sequence
  Description of Artificial Sequence: Synthetic oligonucleotide
ggcccaguugccacuucag

SEQ ID NO: 3060768 - RNA, 19 nt, Artificial Sequence
  Description of Artificial Sequence: Synthetic oligonucleotide
caaucccaaggaggcccag

SEQ ID NO: 3060769 - RNA, 19 nt, Artificial Sequence
  Description of Artificial Sequence: Synthetic oligonucleotide
gcagggagagugguaagaa

SEQ ID NO: 3060770 - RNA, 19 nt, Artificial Sequence
  Description of Artificial Sequence: Synthetic oligonucleotide
acauaagcuuguggaucua

SEQ ID NO: 3060771 - RNA, 19 nt, Artificial Sequence
  Description of Artificial Sequence: Synthetic oligonucleotide
ggucccugugaggaccagc

SEQ ID NO: 3060772 - RNA, 19 nt, Artificial Sequence
  Description of Artificial Sequence: Synthetic oligonucleotide
cauaagcuuguggaucuau

SEQ ID NO: 3060773 - RNA, 19 nt, Artificial Sequence
  Description of Artificial Sequence: Synthetic oligonucleotide
agcccucauaagccucauu

SEQ ID NO: 3060774 - RNA, 19 nt, Artificial Sequence
  Description of Artificial Sequence: Synthetic oligonucleotide
cuagaacucuggacuggau

SEQ ID NO: 3060775 - RNA, 19 nt, Artificial Sequence
  Description of Artificial Sequence: Synthetic oligonucleotide
gaggcccaguugccacuuc

SEQ ID NO: 3060776 - RNA, 19 nt, Artificial Sequence
  Description of Artificial Sequence: Synthetic oligonucleotide
ccuagaacucuggacugga

SEQ ID NO: 3060777 - RNA, 19 nt, Artificial Sequence
  Description of Artificial Sequence: Synthetic oligonucleotide
gaccagcccaggaaacccu

SEQ ID NO: 3060778 - RNA, 19 nt, Artificial Sequence
  Description of Artificial Sequence: Synthetic oligonucleotide
gccucauugccagagcacu

SEQ ID NO: 3060779 - RNA, 19 nt, Artificial Sequence
  Description of Artificial Sequence: Synthetic oligonucleotide
cagcccaggaaacccuucu

SEQ ID NO: 3060780 - RNA, 19 nt, Artificial Sequence
  Description of Artificial Sequence: Synthetic oligonucleotide
ccagcccucauaagccuca

SEQ ID NO: 3060781 - RNA, 19 nt, Artificial Sequence
  Description of Artificial Sequence: Synthetic oligonucleotide
gggcaagaacagcugccaa

SEQ ID NO: 3060782 - RNA, 19 nt, Artificial Sequence
  Description of Artificial Sequence: Synthetic oligonucleotide
ccaguguccacagaggaau

SEQ ID NO: 3060783 - RNA, 19 nt, Artificial Sequence
  Description of Artificial Sequence: Synthetic oligonucleotide
accagcccaggaaacccuu

SEQ ID NO: 3060784 - RNA, 19 nt, Artificial Sequence
  Description of Artificial Sequence: Synthetic oligonucleotide
cacccuagagaagggacau

SEQ ID NO: 3060785 - RNA, 19 nt, Artificial Sequence
  Description of Artificial Sequence: Synthetic oligonucleotide
ccagagcacugauccugac

SEQ ID NO: 3060786 - RNA, 19 nt, Artificial Sequence
  Description of Artificial Sequence: Synthetic oligonucleotide
gcuuguggaucuauccccu

SEQ ID NO: 3060787 - RNA, 19 nt, Artificial Sequence
  Description of Artificial Sequence: Synthetic oligonucleotide
gugguaagaaggggucccu

SEQ ID NO: 3060788 - RNA, 19 nt, Artificial Sequence
  Description of Artificial Sequence: Synthetic oligonucleotide
ccaaucccaaggaggccca

SEQ ID NO: 3060789 - RNA, 19 nt, Artificial Sequence
  Description of Artificial Sequence: Synthetic oligonucleotide
gccagagcacugauccuga

SEQ ID NO: 3060790 - RNA, 19 nt, Artificial Sequence
  Description of Artificial Sequence: Synthetic oligonucleotide
ccagcccaggaaacccuuc

SEQ ID NO: 3060791 - RNA, 19 nt, Artificial Sequence
  Description of Artificial Sequence: Synthetic oligonucleotide
gcccaguugccacuucagu

SEQ ID NO: 3060792 - RNA, 19 nt, Artificial Sequence
  Description of Artificial Sequence: Synthetic oligonucleotide
cccuucugaccaaucccaa

SEQ ID NO: 3060793 - RNA, 19 nt, Artificial Sequence
  Description of Artificial Sequence: Synthetic oligonucleotide
gacuggauccugagccauu

SEQ ID NO: 3060794 - RNA, 19 nt, Artificial Sequence
  Description of Artificial Sequence: Synthetic oligonucleotide
ggaaacccuucugaccaau

SEQ ID NO: 3060795 - RNA, 19 nt, Artificial Sequence
  Description of Artificial Sequence: Synthetic oligonucleotide
gguuaagagcagggagagu

SEQ ID NO: 3060796 - RNA, 19 nt, Artificial Sequence
  Description of Artificial Sequence: Synthetic oligonucleotide
ggacuggauccugagccau

SEQ ID NO: 3060797 - RNA, 19 nt, Artificial Sequence
  Description of Artificial Sequence: Synthetic oligonucleotide
ggggucccugugaggacca

SEQ ID NO: 3060798 - RNA, 19 nt, Artificial Sequence
  Description of Artificial Sequence: Synthetic oligonucleotide
gggucccugugaggaccag

SEQ ID NO: 3060799 - RNA, 19 nt, Artificial Sequence
  Description of Artificial Sequence: Synthetic oligonucleotide
cuggauccugagccauuuu

SEQ ID NO: 3060800 - RNA, 19 nt, Artificial Sequence
  Description of Artificial Sequence: Synthetic oligonucleotide
gcacugauccugaccugau

SEQ ID NO: 3060801 - RNA, 19 nt, Artificial Sequence
  Description of Artificial Sequence: Synthetic oligonucleotide
ggaggcccaguugccacuu

SEQ ID NO: 3060802 - RNA, 19 nt, Artificial Sequence
  Description of Artificial Sequence: Synthetic oligonucleotide
uguuuaaccacuuucaacu

SEQ ID NO: 3060803 - RNA, 19 nt, Artificial Sequence
  Description of Artificial Sequence: Synthetic oligonucleotide
aguaacugcaacuuguaac

SEQ ID NO: 3060804 - RNA, 19 nt, Artificial Sequence
  Description of Artificial Sequence: Synthetic oligonucleotide
aauuugagggcuaugugcc

SEQ ID NO: 3060805 - RNA, 19 nt, Artificial Sequence
  Description of Artificial Sequence: Synthetic oligonucleotide
aguccaagcaucuugauug

SEQ ID NO: 3060806 - RNA, 19 nt, Artificial Sequence
  Description of Artificial Sequence: Synthetic oligonucleotide
aaugugucuaguuuaugag

SEQ ID NO: 3060807 - RNA, 19 nt, Artificial Sequence
  Description of Artificial Sequence: Synthetic oligonucleotide
uuuagauugccacuguacc

SEQ ID NO: 3060808 - RNA, 19 nt, Artificial Sequence
  Description of Artificial Sequence: Synthetic oligonucleotide
uaauuugagggcuaugugc

SEQ ID NO: 3060809 - RNA, 19 nt, Artificial Sequence
  Description of Artificial Sequence: Synthetic oligonucleotide
guaacugcaacuuguaacc

SEQ ID NO: 3060810 - RNA, 19 nt, Artificial Sequence
  Description of Artificial Sequence: Synthetic oligonucleotide
uauucuuugugacaaugug

SEQ ID NO: 3060811 - RNA, 19 nt, Artificial Sequence
  Description of Artificial Sequence: Synthetic oligonucleotide
acuuguaaccugcagcugg

SEQ ID NO: 3060812 - RNA, 19 nt, Artificial Sequence
  Description of Artificial Sequence: Synthetic oligonucleotide
uucuuugugacaauguguc

SEQ ID NO: 3060813 - RNA, 19 nt, Artificial Sequence
  Description of Artificial Sequence: Synthetic oligonucleotide
acaggcuuuagauugccac

SEQ ID NO: 3060814 - RNA, 19 nt, Artificial Sequence
  Description of Artificial Sequence: Synthetic oligonucleotide
uuuucguucacugaaggga

SEQ ID NO: 3060815 - RNA, 19 nt, Artificial Sequence
  Description of Artificial Sequence: Synthetic oligonucleotide
cacuguaccaccaauuccc

SEQ ID NO: 3060816 - RNA, 19 nt, Artificial Sequence
  Description of Artificial Sequence: Synthetic oligonucleotide
ucuuguguaauuugagggc

SEQ ID NO: 3060817 - RNA, 19 nt, Artificial Sequence
  Description of Artificial Sequence: Synthetic oligonucleotide
uguucuuguguaauuugag

SEQ ID NO: 3060818 - RNA, 19 nt, Artificial Sequence
  Description of Artificial Sequence: Synthetic oligonucleotide
uguaauuugagggcuaugu

SEQ ID NO: 3060819 - RNA, 19 nt, Artificial Sequence
  Description of Artificial Sequence: Synthetic oligonucleotide
accacuuucaacuuuucgu

SEQ ID NO: 3060820 - RNA, 19 nt, Artificial Sequence
  Description of Artificial Sequence: Synthetic oligonucleotide
aaccacuuucaacuuuucg

SEQ ID NO: 3060821 - RNA, 19 nt, Artificial Sequence
  Description of Artificial Sequence: Synthetic oligonucleotide
aaguccuuguggcagcuuc

SEQ ID NO: 3060822 - RNA, 19 nt, Artificial Sequence
  Description of Artificial Sequence: Synthetic oligonucleotide
augugucuaguuuaugagg

SEQ ID NO: 3060823 - RNA, 19 nt, Artificial Sequence
  Description of Artificial Sequence: Synthetic oligonucleotide
guaaccugcagcugggugg

SEQ ID NO: 3060824 - RNA, 19 nt, Artificial Sequence
  Description of Artificial Sequence: Synthetic oligonucleotide
uaucaaguguuuaaccacu

SEQ ID NO: 3060825 - RNA, 19 nt, Artificial Sequence
  Description of Artificial Sequence: Synthetic oligonucleotide
uguaguccaagcaucuuga

SEQ ID NO: 3060826 - RNA, 19 nt, Artificial Sequence
  Description of Artificial Sequence: Synthetic oligonucleotide
acuuuucguucacugaagg

SEQ ID NO: 3060827 - RNA, 19 nt, Artificial Sequence
  Description of Artificial Sequence: Synthetic oligonucleotide
gacauggucucuucugugg

SEQ ID NO: 3060828 - RNA, 19 nt, Artificial Sequence
  Description of Artificial Sequence: Synthetic oligonucleotide
uuauucuuugugacaaugu

SEQ ID NO: 3060829 - RNA, 19 nt, Artificial Sequence
  Description of Artificial Sequence: Synthetic oligonucleotide
ugugggaaguccuuguggc

SEQ ID NO: 3060830 - RNA, 19 nt, Artificial Sequence
  Description of Artificial Sequence: Synthetic oligonucleotide
uucacugaagggauguucu

SEQ ID NO: 3060831 - RNA, 19 nt, Artificial Sequence
  Description of Artificial Sequence: Synthetic oligonucleotide
cuuuagauugccacuguac

SEQ ID NO: 3060832 - RNA, 19 nt, Artificial Sequence
  Description of Artificial Sequence: Synthetic oligonucleotide
gauguucuuguguaauuug

SEQ ID NO: 3060833 - RNA, 19 nt, Artificial Sequence
  Description of Artificial Sequence: Synthetic oligonucleotide
acugcaacuuguaaccugc

SEQ ID NO: 3060834 - RNA, 19 nt, Artificial Sequence
  Description of Artificial Sequence: Synthetic oligonucleotide
uuagauugccacuguacca

SEQ ID NO: 3060835 - RNA, 19 nt, Artificial Sequence
  Description of Artificial Sequence: Synthetic oligonucleotide
accaauuccccauugcucu

SEQ ID NO: 3060836 - RNA, 19 nt, Artificial Sequence
  Description of Artificial Sequence: Synthetic oligonucleotide
cuccacaggcuuuagauug

SEQ ID NO: 3060837 - RNA, 19 nt, Artificial Sequence
  Description of Artificial Sequence: Synthetic oligonucleotide
ugaggcacgugcuagacau

SEQ ID NO: 3060838 - RNA, 19 nt, Artificial Sequence
  Description of Artificial Sequence: Synthetic oligonucleotide
aacugcaacuuguaaccug

SEQ ID NO: 3060839 - RNA, 19 nt, Artificial Sequence
  Description of Artificial Sequence: Synthetic oligonucleotide
caaguguuuaaccacuuuc

SEQ ID NO: 3060840 - RNA, 19 nt, Artificial Sequence
  Description of Artificial Sequence: Synthetic oligonucleotide
guaucaaguguuuaaccac

SEQ ID NO: 3060841 - RNA, 19 nt, Artificial Sequence
  Description of Artificial Sequence: Synthetic oligonucleotide
uugcucuugaggcacgugc

SEQ ID NO: 3060842 - RNA, 19 nt, Artificial Sequence
  Description of Artificial Sequence: Synthetic oligonucleotide
uuaaccacuuucaacuuuu

SEQ ID NO: 3060843 - RNA, 19 nt, Artificial Sequence
  Description of Artificial Sequence: Synthetic oligonucleotide
cuuuucguucacugaaggg

SEQ ID NO: 3060844 - RNA, 19 nt, Artificial Sequence
  Description of Artificial Sequence: Synthetic oligonucleotide
aaguguuuaaccacuuuca

SEQ ID NO: 3060845 - RNA, 19 nt, Artificial Sequence
  Description of Artificial Sequence: Synthetic oligonucleotide
acuuucaacuuuucguuca

SEQ ID NO: 3060846 - RNA, 19 nt, Artificial Sequence
  Description of Artificial Sequence: Synthetic oligonucleotide
agcuucaggggcuggauuc

SEQ ID NO: 3060847 - RNA, 19 nt, Artificial Sequence
  Description of Artificial Sequence: Synthetic oligonucleotide
ucguaucaaguguuuaacc

SEQ ID NO: 3060848 - RNA, 19 nt, Artificial Sequence
  Description of Artificial Sequence: Synthetic oligonucleotide
ucaacuuuucguucacuga

SEQ ID NO: 3060849 - RNA, 19 nt, Artificial Sequence
  Description of Artificial Sequence: Synthetic oligonucleotide
aagcaucuugauuguaucu

SEQ ID NO: 3060850 - RNA, 19 nt, Artificial Sequence
  Description of Artificial Sequence: Synthetic oligonucleotide
ugcaacuuguaaccugcag

SEQ ID NO: 3060851 - RNA, 19 nt, Artificial Sequence
  Description of Artificial Sequence: Synthetic oligonucleotide
ugacaaugugucuaguuua

SEQ ID NO: 3060852 - RNA, 19 nt, Artificial Sequence
  Description of Artificial Sequence: Synthetic oligonucleotide
cuagacauggucucuucug

SEQ ID NO: 3060853 - RNA, 19 nt, Artificial Sequence
  Description of Artificial Sequence: Synthetic oligonucleotide
accaccaauuccccauugc

SEQ ID NO: 3060854 - RNA, 19 nt, Artificial Sequence
  Description of Artificial Sequence: Synthetic oligonucleotide
acugaagggauguucuugu

SEQ ID NO: 3060855 - RNA, 19 nt, Artificial Sequence
  Description of Artificial Sequence: Synthetic oligonucleotide
uguaaccugcagcugggug

SEQ ID NO: 3060856 - RNA, 19 nt, Artificial Sequence
  Description of Artificial Sequence: Synthetic oligonucleotide
acauggucucuucuguggg

SEQ ID NO: 3060857 - RNA, 19 nt, Artificial Sequence
  Description of Artificial Sequence: Synthetic oligonucleotide
cuuguggcagcuucagggg

SEQ ID NO: 3060858 - RNA, 19 nt, Artificial Sequence
  Description of Artificial Sequence: Synthetic oligonucleotide
uuucguucacugaagggau

SEQ ID NO: 3060859 - RNA, 19 nt, Artificial Sequence
  Description of Artificial Sequence: Synthetic oligonucleotide
uagacauggucucuucugu

SEQ ID NO: 3060860 - RNA, 19 nt, Artificial Sequence
  Description of Artificial Sequence: Synthetic oligonucleotide
cuuguaaccugcagcuggg

SEQ ID NO: 3060861 - RNA, 19 nt, Artificial Sequence
  Description of Artificial Sequence: Synthetic oligonucleotide
caaugugucuaguuuauga

SEQ ID NO: 3060862 - RNA, 19 nt, Artificial Sequence
  Description of Artificial Sequence: Synthetic oligonucleotide
guaauuugagggcuaugug

SEQ ID NO: 3060863 - RNA, 19 nt, Artificial Sequence
  Description of Artificial Sequence: Synthetic oligonucleotide
auucguaucaaguguuuaa

SEQ ID NO: 3060864 - RNA, 19 nt, Artificial Sequence
  Description of Artificial Sequence: Synthetic oligonucleotide
uuucccaguauggacgucc

SEQ ID NO: 3060865 - RNA, 19 nt, Artificial Sequence
  Description of Artificial Sequence: Synthetic oligonucleotide
uagauugccacuguaccac

SEQ ID NO: 3060866 - RNA, 19 nt, Artificial Sequence
  Description of Artificial Sequence: Synthetic oligonucleotide
uucuguaguccaagcaucu

SEQ ID NO: 3060867 - RNA, 19 nt, Artificial Sequence
  Description of Artificial Sequence: Synthetic oligonucleotide
uuuaaccacuuucaacuuu

SEQ ID NO: 3060868 - RNA, 19 nt, Artificial Sequence
  Description of Artificial Sequence: Synthetic oligonucleotide
agauugccacuguaccacc

SEQ ID NO: 3060869 - RNA, 19 nt, Artificial Sequence
  Description of Artificial Sequence: Synthetic oligonucleotide
guguuuaaccacuuucaac

SEQ ID NO: 3060870 - RNA, 19 nt, Artificial Sequence
  Description of Artificial Sequence: Synthetic oligonucleotide
ccuuguggcagcuucaggg

SEQ ID NO: 3060871 - RNA, 19 nt, Artificial Sequence
  Description of Artificial Sequence: Synthetic oligonucleotide
uucguaucaaguguuuaac

SEQ ID NO: 3060872 - RNA, 19 nt, Artificial Sequence
  Description of Artificial Sequence: Synthetic oligonucleotide
gcaacuuguaaccugcagc

SEQ ID NO: 3060873 - RNA, 19 nt, Artificial Sequence
  Description of Artificial Sequence: Synthetic oligonucleotide
gaagggauguucuugugua

SEQ ID NO: 3060874 - RNA, 19 nt, Artificial Sequence
  Description of Artificial Sequence: Synthetic oligonucleotide
aacuuuucguucacugaag

SEQ ID NO: 3060875 - RNA, 19 nt, Artificial Sequence
  Description of Artificial Sequence: Synthetic oligonucleotide
cuucuguaguccaagcauc

SEQ ID NO: 3060876 - RNA, 19 nt, Artificial Sequence
  Description of Artificial Sequence: Synthetic oligonucleotide
ugggaaguccuuguggcag

SEQ ID NO: 3060877 - RNA, 19 nt, Artificial Sequence
  Description of Artificial Sequence: Synthetic oligonucleotide
aguguuuaaccacuuucaa

SEQ ID NO: 3060878 - RNA, 19 nt, Artificial Sequence
  Description of Artificial Sequence: Synthetic oligonucleotide
cuguaguccaagcaucuug

SEQ ID NO: 3060879 - RNA, 19 nt, Artificial Sequence
  Description of Artificial Sequence: Synthetic oligonucleotide
ucugugggaaguccuugug

SEQ ID NO: 3060880 - RNA, 19 nt, Artificial Sequence
  Description of Artificial Sequence: Synthetic oligonucleotide
ucaggacuuggcuuccugc

SEQ ID NO: 3060881 - RNA, 19 nt, Artificial Sequence
  Description of Artificial Sequence: Synthetic oligonucleotide
agggcuaugugccuucugu

SEQ ID NO: 3060882 - RNA, 19 nt, Artificial Sequence
  Description of Artificial Sequence: Synthetic oligonucleotide
uggauucguaucaaguguu

SEQ ID NO: 3060883 - RNA, 19 nt, Artificial Sequence
  Description of Artificial Sequence: Synthetic oligonucleotide
acgugcuagacauggucuc

SEQ ID NO: 3060884 - RNA, 19 nt, Artificial Sequence
  Description of Artificial Sequence: Synthetic oligonucleotide
caagcaucuugauuguauc

SEQ ID NO: 3060885 - RNA, 19 nt, Artificial Sequence
  Description of Artificial Sequence: Synthetic oligonucleotide
auucuuugugacaaugugu

SEQ ID NO: 3060886 - RNA, 19 nt, Artificial Sequence
  Description of Artificial Sequence: Synthetic oligonucleotide
ugugacaaugugucuaguu

SEQ ID NO: 3060887 - RNA, 19 nt, Artificial Sequence
  Description of Artificial Sequence: Synthetic oligonucleotide
cugugggaaguccuugugg

SEQ ID NO: 3060888 - RNA, 19 nt, Artificial Sequence
  Description of Artificial Sequence: Synthetic oligonucleotide
ucaguaacugcaacuugua

SEQ ID NO: 3060889 - RNA, 19 nt, Artificial Sequence
  Description of Artificial Sequence: Synthetic oligonucleotide
uggcaaucaggacuuggcu

SEQ ID NO: 3060890 - RNA, 19 nt, Artificial Sequence
  Description of Artificial Sequence: Synthetic oligonucleotide
cuaugugccuucuguaguc

SEQ ID NO: 3060891 - RNA, 19 nt, Artificial Sequence
  Description of Artificial Sequence: Synthetic oligonucleotide
gcuggauucguaucaagug

SEQ ID NO: 3060892 - RNA, 19 nt, Artificial Sequence
  Description of Artificial Sequence: Synthetic oligonucleotide
aauuccccauugcucuuga

SEQ ID NO: 3060893 - RNA, 19 nt, Artificial Sequence
  Description of Artificial Sequence: Synthetic oligonucleotide
aggcacgugcuagacaugg

SEQ ID NO: 3060894 - RNA, 19 nt, Artificial Sequence
  Description of Artificial Sequence: Synthetic oligonucleotide
uguggcagcuucaggggcu

SEQ ID NO: 3060895 - RNA, 19 nt, Artificial Sequence
  Description of Artificial Sequence: Synthetic oligonucleotide
ucuuugugacaaugugucu

SEQ ID NO: 3060896 - RNA, 19 nt, Artificial Sequence
  Description of Artificial Sequence: Synthetic oligonucleotide
uccacaggcuuuagauugc

SEQ ID NO: 3060897 - RNA, 19 nt, Artificial Sequence
  Description of Artificial Sequence: Synthetic oligonucleotide
caacuuuucguucacugaa

SEQ ID NO: 3060898 - RNA, 19 nt, Artificial Sequence
  Description of Artificial Sequence: Synthetic oligonucleotide
acuguaccaccaauucccc

SEQ ID NO: 3060899 - RNA, 19 nt, Artificial Sequence
  Description of Artificial Sequence: Synthetic oligonucleotide
agacauggucucuucugug

SEQ ID NO: 3060900 - RNA, 19 nt, Artificial Sequence
  Description of Artificial Sequence: Synthetic oligonucleotide
uccuuguggcagcuucagg

SEQ ID NO: 3060901 - RNA, 19 nt, Artificial Sequence
  Description of Artificial Sequence: Synthetic oligonucleotide
ucaaguguuuaaccacuuu

SEQ ID NO: 3060902 - RNA, 19 nt, Artificial Sequence
  Description of Artificial Sequence: Synthetic oligonucleotide
uaguccaagcaucuugauu

SEQ ID NO: 3060903 - RNA, 19 nt, Artificial Sequence
  Description of Artificial Sequence: Synthetic oligonucleotide
caccaauuccccauugcuc

SEQ ID NO: 3060904 - RNA, 19 nt, Artificial Sequence
  Description of Artificial Sequence: Synthetic oligonucleotide
uggguggcaaucaggacuu

SEQ ID NO: 3060905 - RNA, 19 nt, Artificial Sequence
  Description of Artificial Sequence: Synthetic oligonucleotide
ucuugaggcacgugcuaga

SEQ ID NO: 3060906 - RNA, 19 nt, Artificial Sequence
  Description of Artificial Sequence: Synthetic oligonucleotide
aggggcuggauucguauca

SEQ ID NO: 3060907 - RNA, 19 nt, Artificial Sequence
  Description of Artificial Sequence: Synthetic oligonucleotide
uucguucacugaagggaug

SEQ ID NO: 3060908 - RNA, 19 nt, Artificial Sequence
  Description of Artificial Sequence: Synthetic oligonucleotide
uucugugggaaguccuugu

SEQ ID NO: 3060909 - RNA, 19 nt, Artificial Sequence
  Description of Artificial Sequence: Synthetic oligonucleotide
ggcuaugugccuucuguag

SEQ ID NO: 3060910 - RNA, 19 nt, Artificial Sequence
  Description of Artificial Sequence: Synthetic oligonucleotide
aagggauguucuuguguaa

SEQ ID NO: 3060911 - RNA, 19 nt, Artificial Sequence
  Description of Artificial Sequence: Synthetic oligonucleotide
aggcuuuagauugccacug

SEQ ID NO: 3060912 - RNA, 19 nt, Artificial Sequence
  Description of Artificial Sequence: Synthetic oligonucleotide
auguucuuguguaauuuga

SEQ ID NO: 3060913 - RNA, 19 nt, Artificial Sequence
  Description of Artificial Sequence: Synthetic oligonucleotide
caacuuguaaccugcagcu

SEQ ID NO: 3060914 - RNA, 19 nt, Artificial Sequence
  Description of Artificial Sequence: Synthetic oligonucleotide
gcaaucaggacuuggcuuc

SEQ ID NO: 3060915 - RNA, 19 nt, Artificial Sequence
  Description of Artificial Sequence: Synthetic oligonucleotide
uaugugccuucuguagucc

SEQ ID NO: 3060916 - RNA, 19 nt, Artificial Sequence
  Description of Artificial Sequence: Synthetic oligonucleotide
ucguucacugaagggaugu

SEQ ID NO: 3060917 - RNA, 19 nt, Artificial Sequence
  Description of Artificial Sequence: Synthetic oligonucleotide
aacuuguaaccugcagcug

SEQ ID NO: 3060918 - RNA, 19 nt, Artificial Sequence
  Description of Artificial Sequence: Synthetic oligonucleotide
uguguaauuugagggcuau

SEQ ID NO: 3060919 - RNA, 19 nt, Artificial Sequence
  Description of Artificial Sequence: Synthetic oligonucleotide
ucucuucugugggaagucc

SEQ ID NO: 3060920 - RNA, 19 nt, Artificial Sequence
  Description of Artificial Sequence: Synthetic oligonucleotide
ugugccuucuguaguccaa

SEQ ID NO: 3060921 - RNA, 19 nt, Artificial Sequence
  Description of Artificial Sequence: Synthetic oligonucleotide
guggcaaucaggacuuggc

SEQ ID NO: 3060922 - RNA, 19 nt, Artificial Sequence
  Description of Artificial Sequence: Synthetic oligonucleotide
ucuucugugggaaguccuu

SEQ ID NO: 3060923 - RNA, 19 nt, Artificial Sequence
  Description of Artificial Sequence: Synthetic oligonucleotide
uugaggcacgugcuagaca

SEQ ID NO: 3060924 - RNA, 19 nt, Artificial Sequence
  Description of Artificial Sequence: Synthetic oligonucleotide
ucaggggcuggauucguau

SEQ ID NO: 3060925 - RNA, 19 nt, Artificial Sequence
  Description of Artificial Sequence: Synthetic oligonucleotide
agcaucuugauuguaucuu

SEQ ID NO: 3060926 - RNA, 19 nt, Artificial Sequence
  Description of Artificial Sequence: Synthetic oligonucleotide
cuuugugacaaugugucua

SEQ ID NO: 3060927 - RNA, 19 nt, Artificial Sequence
  Description of Artificial Sequence: Synthetic oligonucleotide
uaccaccaauuccccauug

SEQ ID NO: 3060928 - RNA, 19 nt, Artificial Sequence
  Description of Artificial Sequence: Synthetic oligonucleotide
uuguguaauuugagggcua

SEQ ID NO: 3060929 - RNA, 19 nt, Artificial Sequence
  Description of Artificial Sequence: Synthetic oligonucleotide
auuugagggcuaugugccu

SEQ ID NO: 3060930 - RNA, 19 nt, Artificial Sequence
  Description of Artificial Sequence: Synthetic oligonucleotide
cucuugaggcacgugcuag

SEQ ID NO: 3060931 - RNA, 19 nt, Artificial Sequence
  Description of Artificial Sequence: Synthetic oligonucleotide
cacugaagggauguucuug

SEQ ID NO: 3060932 - RNA, 19 nt, Artificial Sequence
  Description of Artificial Sequence: Synthetic oligonucleotide
ggacuuggcuuccugcucc

SEQ ID NO: 3060933 - RNA, 19 nt, Artificial Sequence
  Description of Artificial Sequence: Synthetic oligonucleotide
ugccuucuguaguccaagc

SEQ ID NO: 3060934 - RNA, 19 nt, Artificial Sequence
  Description of Artificial Sequence: Synthetic oligonucleotide
ugccacuguaccaccaauu

SEQ ID NO: 3060935 - RNA, 19 nt, Artificial Sequence
  Description of Artificial Sequence: Synthetic oligonucleotide
auugccacuguaccaccaa

SEQ ID NO: 3060936 - RNA, 19 nt, Artificial Sequence
  Description of Artificial Sequence: Synthetic oligonucleotide
uaacugcaacuuguaaccu

SEQ ID NO: 3060937 - RNA, 19 nt, Artificial Sequence
  Description of Artificial Sequence: Synthetic oligonucleotide
agcuggguggcaaucagga

SEQ ID NO: 3060938 - RNA, 19 nt, Artificial Sequence
  Description of Artificial Sequence: Synthetic oligonucleotide
guucacugaagggauguuc

SEQ ID NO: 3060939 - RNA, 19 nt, Artificial Sequence
  Description of Artificial Sequence: Synthetic oligonucleotide
uucccaguauggacguccu

SEQ ID NO: 3060940 - RNA, 19 nt, Artificial Sequence
  Description of Artificial Sequence: Synthetic oligonucleotide
uggucucuucugugggaag

SEQ ID NO: 3060941 - RNA, 19 nt, Artificial Sequence
  Description of Artificial Sequence: Synthetic oligonucleotide
acaaugugucuaguuuaug

SEQ ID NO: 3060942 - RNA, 19 nt, Artificial Sequence
  Description of Artificial Sequence: Synthetic oligonucleotide
cguaucaaguguuuaacca

SEQ ID NO: 3060943 - RNA, 19 nt, Artificial Sequence
  Description of Artificial Sequence: Synthetic oligonucleotide
cagcuggguggcaaucagg

SEQ ID NO: 3060944 - RNA, 19 nt, Artificial Sequence
  Description of Artificial Sequence: Synthetic oligonucleotide
cuugaggcacgugcuagac

SEQ ID NO: 3060945 - RNA, 19 nt, Artificial Sequence
  Description of Artificial Sequence: Synthetic oligonucleotide
cuggguggcaaucaggacu

SEQ ID NO: 3060946 - RNA, 19 nt, Artificial Sequence
  Description of Artificial Sequence: Synthetic oligonucleotide
cuggauucguaucaagugu

SEQ ID NO: 3060947 - RNA, 19 nt, Artificial Sequence
  Description of Artificial Sequence: Synthetic oligonucleotide
gugacaaugugucuaguuu

SEQ ID NO: 3060948 - RNA, 19 nt, Artificial Sequence
  Description of Artificial Sequence: Synthetic oligonucleotide
uuugagggcuaugugccuu

SEQ ID NO: 3060949 - RNA, 19 nt, Artificial Sequence
  Description of Artificial Sequence: Synthetic oligonucleotide
gauucguaucaaguguuua

SEQ ID NO: 3060950 - RNA, 19 nt, Artificial Sequence
  Description of Artificial Sequence: Synthetic oligonucleotide
ugcuagacauggucucuuc

SEQ ID NO: 3060951 - RNA, 19 nt, Artificial Sequence
  Description of Artificial Sequence: Synthetic oligonucleotide
cuuguguaauuugagggcu

SEQ ID NO: 3060952 - RNA, 19 nt, Artificial Sequence
  Description of Artificial Sequence: Synthetic oligonucleotide
uugccacuguaccaccaau

SEQ ID NO: 3060953 - RNA, 19 nt, Artificial Sequence
  Description of Artificial Sequence: Synthetic oligonucleotide
ugcagcuggguggcaauca

SEQ ID NO: 3060954 - RNA, 19 nt, Artificial Sequence
  Description of Artificial Sequence: Synthetic oligonucleotide
augugccuucuguagucca

SEQ ID NO: 3060955 - RNA, 19 nt, Artificial Sequence
  Description of Artificial Sequence: Synthetic oligonucleotide
cuucugugggaaguccuug

SEQ ID NO: 3060956 - RNA, 19 nt, Artificial Sequence
  Description of Artificial Sequence: Synthetic oligonucleotide
agggauguucuuguguaau

SEQ ID NO: 3060957 - RNA, 19 nt, Artificial Sequence
  Description of Artificial Sequence: Synthetic oligonucleotide
gguggcaaucaggacuugg

SEQ ID NO: 3060958 - RNA, 19 nt, Artificial Sequence
  Description of Artificial Sequence: Synthetic oligonucleotide
ggcuuccugcuccacaggc

SEQ ID NO: 3060959 - RNA, 19 nt, Artificial Sequence
  Description of Artificial Sequence: Synthetic oligonucleotide
gccacuguaccaccaauuc

SEQ ID NO: 3060960 - RNA, 19 nt, Artificial Sequence
  Description of Artificial Sequence: Synthetic oligonucleotide
ucacugaagggauguucuu

SEQ ID NO: 3060961 - RNA, 19 nt, Artificial Sequence
  Description of Artificial Sequence: Synthetic oligonucleotide
caaucaggacuuggcuucc

SEQ ID NO: 3060962 - RNA, 19 nt, Artificial Sequence
  Description of Artificial Sequence: Synthetic oligonucleotide
ccacuguaccaccaauucc

SEQ ID NO: 3060963 - RNA, 19 nt, Artificial Sequence
  Description of Artificial Sequence: Synthetic oligonucleotide
auuccccauugcucuugag

SEQ ID NO: 3060964 - RNA, 19 nt, Artificial Sequence
  Description of Artificial Sequence: Synthetic oligonucleotide
caauuccccauugcucuug

SEQ ID NO: 3060965 - RNA, 19 nt, Artificial Sequence
  Description of Artificial Sequence: Synthetic oligonucleotide
aaucaggacuuggcuuccu

SEQ ID NO: 3060966 - RNA, 19 nt, Artificial Sequence
  Description of Artificial Sequence: Synthetic oligonucleotide
gauugccacuguaccacca

SEQ ID NO: 3060967 - RNA, 19 nt, Artificial Sequence
  Description of Artificial Sequence: Synthetic oligonucleotide
gugccuucuguaguccaag

SEQ ID NO: 3060968 - RNA, 19 nt, Artificial Sequence
  Description of Artificial Sequence: Synthetic oligonucleotide
auggucucuucugugggaa

SEQ ID NO: 3060969 - RNA, 19 nt, Artificial Sequence
  Description of Artificial Sequence: Synthetic oligonucleotide
cauggucucuucuguggga

SEQ ID NO: 3060970 - RNA, 19 nt, Artificial Sequence
  Description of Artificial Sequence: Synthetic oligonucleotide
gacaaugugucuaguuuau

SEQ ID NO: 3060971 - RNA, 19 nt, Artificial Sequence
  Description of Artificial Sequence: Synthetic oligonucleotide
uucaggggcuggauucgua

SEQ ID NO: 3060972 - RNA, 19 nt, Artificial Sequence
  Description of Artificial Sequence: Synthetic oligonucleotide
guccuuguggcagcuucag

SEQ ID NO: 3060973 - RNA, 19 nt, Artificial Sequence
  Description of Artificial Sequence: Synthetic oligonucleotide
gcacgugcuagacaugguc

SEQ ID NO: 3060974 - RNA, 19 nt, Artificial Sequence
  Description of Artificial Sequence: Synthetic oligonucleotide
cacgugcuagacauggucu

SEQ ID NO: 3060975 - RNA, 19 nt, Artificial Sequence
  Description of Artificial Sequence: Synthetic oligonucleotide
ucuguaguccaagcaucuu

SEQ ID NO: 3060976 - RNA, 19 nt, Artificial Sequence
  Description of Artificial Sequence: Synthetic oligonucleotide
gugggaaguccuuguggca

SEQ ID NO: 3060977 - RNA, 19 nt, Artificial Sequence
  Description of Artificial Sequence: Synthetic oligonucleotide
uugugacaaugugucuagu

SEQ ID NO: 3060978 - RNA, 19 nt, Artificial Sequence
  Description of Artificial Sequence: Synthetic oligonucleotide
guguaauuugagggcuaug

SEQ ID NO: 3060979 - RNA, 19 nt, Artificial Sequence
  Description of Artificial Sequence: Synthetic oligonucleotide
auugcucuugaggcacgug

SEQ ID NO: 3060980 - RNA, 19 nt, Artificial Sequence
  Description of Artificial Sequence: Synthetic oligonucleotide
caguaacugcaacuuguaa

SEQ ID NO: 3060981 - RNA, 19 nt, Artificial Sequence
  Description of Artificial Sequence: Synthetic oligonucleotide
gggaaguccuuguggcagc

SEQ ID NO: 3060982 - RNA, 19 nt, Artificial Sequence
  Description of Artificial Sequence: Synthetic oligonucleotide
caggggcuggauucguauc

SEQ ID NO: 3060983 - RNA, 19 nt, Artificial Sequence
  Description of Artificial Sequence: Synthetic oligonucleotide
gcagcuggguggcaaucag

SEQ ID NO: 3060984 - RNA, 19 nt, Artificial Sequence
  Description of Artificial Sequence: Synthetic oligonucleotide
caggcuuuagauugccacu

SEQ ID NO: 3060985 - RNA, 19 nt, Artificial Sequence
  Description of Artificial Sequence: Synthetic oligonucleotide
uuguaaccugcagcugggu

SEQ ID NO: 3060986 - RNA, 19 nt, Artificial Sequence
  Description of Artificial Sequence: Synthetic oligonucleotide
guuuaaccacuuucaacuu

SEQ ID NO: 3060987 - RNA, 19 nt, Artificial Sequence
  Description of Artificial Sequence: Synthetic oligonucleotide
gcuucaggggcuggauucg

SEQ ID NO: 3060988 - RNA, 19 nt, Artificial Sequence
  Description of Artificial Sequence: Synthetic oligonucleotide
aucaaguguuuaaccacuu

SEQ ID NO: 3060989 - RNA, 19 nt, Artificial Sequence
  Description of Artificial Sequence: Synthetic oligonucleotide
aguccuuguggcagcuuca

SEQ ID NO: 3060990 - RNA, 19 nt, Artificial Sequence
  Description of Artificial Sequence: Synthetic oligonucleotide
uccaagcaucuugauugua

SEQ ID NO: 3060991 - RNA, 19 nt, Artificial Sequence
  Description of Artificial Sequence: Synthetic oligonucleotide
gucucuucugugggaaguc

SEQ ID NO: 3060992 - RNA, 19 nt, Artificial Sequence
  Description of Artificial Sequence: Synthetic oligonucleotide
cuguaccaccaauucccca

SEQ ID NO: 3060993 - RNA, 19 nt, Artificial Sequence
  Description of Artificial Sequence: Synthetic oligonucleotide
caggacuuggcuuccugcu

SEQ ID NO: 3060994 - RNA, 19 nt, Artificial Sequence
  Description of Artificial Sequence: Synthetic oligonucleotide
ccucaguaacugcaacuug

SEQ ID NO: 3060995 - RNA, 19 nt, Artificial Sequence
  Description of Artificial Sequence: Synthetic oligonucleotide
cccauugcucuugaggcac

SEQ ID NO: 3060996 - RNA, 19 nt, Artificial Sequence
  Description of Artificial Sequence: Synthetic oligonucleotide
ugagggcuaugugccuucu

SEQ ID NO: 3060997 - RNA, 19 nt, Artificial Sequence
  Description of Artificial Sequence: Synthetic oligonucleotide
gcuaugugccuucuguagu

SEQ ID NO: 3060998 - RNA, 19 nt, Artificial Sequence
  Description of Artificial Sequence: Synthetic oligonucleotide
cucuucugugggaaguccu

SEQ ID NO: 3060999 - RNA, 19 nt, Artificial Sequence
  Description of Artificial Sequence: Synthetic oligonucleotide
gggcuggauucguaucaag

SEQ ID NO: 3061000 - RNA, 19 nt, Artificial Sequence
  Description of Artificial Sequence: Synthetic oligonucleotide
cacaggcuuuagauugcca

SEQ ID NO: 3061001 - RNA, 19 nt, Artificial Sequence
  Description of Artificial Sequence: Synthetic oligonucleotide
uuuucccaguauggacguc

SEQ ID NO: 3061002 - RNA, 19 nt, Artificial Sequence
  Description of Artificial Sequence: Synthetic oligonucleotide
caucuugauuguaucuuuu

SEQ ID NO: 3061003 - RNA, 19 nt, Artificial Sequence
  Description of Artificial Sequence: Synthetic oligonucleotide
cugcaacuuguaaccugca

SEQ ID NO: 3061004 - RNA, 19 nt, Artificial Sequence
  Description of Artificial Sequence: Synthetic oligonucleotide
gcuuuagauugccacugua

SEQ ID NO: 3061005 - RNA, 19 nt, Artificial Sequence
  Description of Artificial Sequence: Synthetic oligonucleotide
ccauugcucuugaggcacg

SEQ ID NO: 3061006 - RNA, 19 nt, Artificial Sequence
  Description of Artificial Sequence: Synthetic oligonucleotide
ggcaaucaggacuuggcuu

SEQ ID NO: 3061007 - RNA, 19 nt, Artificial Sequence
  Description of Artificial Sequence: Synthetic oligonucleotide
gaggcacgugcuagacaug

SEQ ID NO: 3061008 - RNA, 19 nt, Artificial Sequence
  Description of Artificial Sequence: Synthetic oligonucleotide
guccaagcaucuugauugu

SEQ ID NO: 3061009 - RNA, 19 nt, Artificial Sequence
  Description of Artificial Sequence: Synthetic oligonucleotide
cuuccugcuccacaggcuu

SEQ ID NO: 3061010 - RNA, 19 nt, Artificial Sequence
  Description of Artificial Sequence: Synthetic oligonucleotide
ucccaguauggacguccuu

SEQ ID NO: 3061011 - RNA, 19 nt, Artificial Sequence
  Description of Artificial Sequence: Synthetic oligonucleotide
ccuucuguaguccaagcau

SEQ ID NO: 3061012 - RNA, 19 nt, Artificial Sequence
  Description of Artificial Sequence: Synthetic oligonucleotide
ggcuggauucguaucaagu

SEQ ID NO: 3061013 - RNA, 19 nt, Artificial Sequence
  Description of Artificial Sequence: Synthetic oligonucleotide
uggcagcuucaggggcugg

SEQ ID NO: 3061014 - RNA, 19 nt, Artificial Sequence
  Description of Artificial Sequence: Synthetic oligonucleotide
gcuagacauggucucuucu

SEQ ID NO: 3061015 - RNA, 19 nt, Artificial Sequence
  Description of Artificial Sequence: Synthetic oligonucleotide
guaguccaagcaucuugau

SEQ ID NO: 3061016 - RNA, 19 nt, Artificial Sequence
  Description of Artificial Sequence: Synthetic oligonucleotide
ccacuuucaacuuuucguu

SEQ ID NO: 3061017 - RNA, 19 nt, Artificial Sequence
  Description of Artificial Sequence: Synthetic oligonucleotide
ccaagcaucuugauuguau

SEQ ID NO: 3061018 - RNA, 19 nt, Artificial Sequence
  Description of Artificial Sequence: Synthetic oligonucleotide
ggauguucuuguguaauuu

SEQ ID NO: 3061019 - RNA, 19 nt, Artificial Sequence
  Description of Artificial Sequence: Synthetic oligonucleotide
gcaucuugauuguaucuuu

SEQ ID NO: 3061020 - RNA, 19 nt, Artificial Sequence
  Description of Artificial Sequence: Synthetic oligonucleotide
ccacaggcuuuagauugcc

SEQ ID NO: 3061021 - RNA, 19 nt, Artificial Sequence
  Description of Artificial Sequence: Synthetic oligonucleotide
gggcuaugugccuucugua

SEQ ID NO: 3061022 - RNA, 19 nt, Artificial Sequence
  Description of Artificial Sequence: Synthetic oligonucleotide
ggucucuucugugggaagu

SEQ ID NO: 3061023 - RNA, 19 nt, Artificial Sequence
  Description of Artificial Sequence: Synthetic oligonucleotide
ccaccaauuccccauugcu

SEQ ID NO: 3061024 - RNA, 19 nt, Artificial Sequence
  Description of Artificial Sequence: Synthetic oligonucleotide
guaccaccaauuccccauu

SEQ ID NO: 3061025 - RNA, 19 nt, Artificial Sequence
  Description of Artificial Sequence: Synthetic oligonucleotide
ggcuuuagauugccacugu

SEQ ID NO: 3061026 - RNA, 19 nt, Artificial Sequence
  Description of Artificial Sequence: Synthetic oligonucleotide
gcucuugaggcacgugcua

SEQ ID NO: 3061027 - RNA, 19 nt, Artificial Sequence
  Description of Artificial Sequence: Synthetic oligonucleotide
aaccugcagcuggguggca

SEQ ID NO: 3061028 - RNA, 19 nt, Artificial Sequence
  Description of Artificial Sequence: Synthetic oligonucleotide
cauugcucuugaggcacgu

SEQ ID NO: 3061029 - RNA, 19 nt, Artificial Sequence
  Description of Artificial Sequence: Synthetic oligonucleotide
gcuccacaggcuuuagauu

SEQ ID NO: 3061030 - RNA, 19 nt, Artificial Sequence
  Description of Artificial Sequence: Synthetic oligonucleotide
gugcuagacauggucucuu

SEQ ID NO: 3061031 - RNA, 19 nt, Artificial Sequence
  Description of Artificial Sequence: Synthetic oligonucleotide
ggauucguaucaaguguuu

SEQ ID NO: 3061032 - RNA, 19 nt, Artificial Sequence
  Description of Artificial Sequence: Synthetic oligonucleotide
ggggcuggauucguaucaa

SEQ ID NO: 3061033 - RNA, 19 nt, Artificial Sequence
  Description of Artificial Sequence: Synthetic oligonucleotide
cuucaggggcuggauucgu

SEQ ID NO: 3061034 - RNA, 19 nt, Artificial Sequence
  Description of Artificial Sequence: Synthetic oligonucleotide
ccaguauggacguccuuuu

SEQ ID NO: 3061035 - RNA, 19 nt, Artificial Sequence
  Description of Artificial Sequence: Synthetic oligonucleotide
cccaguauggacguccuuu

SEQ ID NO: 3061036 - RNA, 19 nt, Artificial Sequence
  Description of Artificial Sequence: Synthetic oligonucleotide
cagcuucaggggcuggauu

SEQ ID NO: 3061037 - RNA, 19 nt, Artificial Sequence
  Description of Artificial Sequence: Synthetic oligonucleotide
ggguggcaaucaggacuug

SEQ ID NO: 3061038 - RNA, 19 nt, Artificial Sequence
  Description of Artificial Sequence: Synthetic oligonucleotide
gcagcuucaggggcuggau

SEQ ID NO: 3061039 - RNA, 19 nt, Artificial Sequence
  Description of Artificial Sequence: Synthetic oligonucleotide
ggcacgugcuagacauggu

SEQ ID NO: 3061040 - RNA, 19 nt, Artificial Sequence
  Description of Artificial Sequence: Synthetic oligonucleotide
ccaauuccccauugcucuu

SEQ ID NO: 3061041 - RNA, 19 nt, Artificial Sequence
  Description of Artificial Sequence: Synthetic oligonucleotide
ccugcagcuggguggcaau

SEQ ID NO: 3061042 - RNA, 19 nt, Artificial Sequence
  Description of Artificial Sequence: Synthetic oligonucleotide
cgugcuagacauggucucu

SEQ ID NO: 3061043 - RNA, 19 nt, Artificial Sequence
  Description of Artificial Sequence: Synthetic oligonucleotide
cguucacugaagggauguu

SEQ ID NO: 3061044 - RNA, 19 nt, Artificial Sequence
  Description of Artificial Sequence: Synthetic oligonucleotide
gacacuuucuucuccaggg

SEQ ID NO: 3061045 - RNA, 19 nt, Artificial Sequence
  Description of Artificial Sequence: Synthetic oligonucleotide
ucgcuguucgccuugacgg

SEQ ID NO: 3061046 - RNA, 19 nt, Artificial Sequence
  Description of Artificial Sequence: Synthetic oligonucleotide
cuccagggaaucuugaagg

SEQ ID NO: 3061047 - RNA, 19 nt, Artificial Sequence
  Description of Artificial Sequence: Synthetic oligonucleotide
ucuccagggaaucuugaag

SEQ ID NO: 3061048 - RNA, 19 nt, Artificial Sequence
  Description of Artificial Sequence: Synthetic oligonucleotide
aaucuugaagggucaccac

SEQ ID NO: 3061049 - RNA, 19 nt, Artificial Sequence
  Description of Artificial Sequence: Synthetic oligonucleotide
uucgcuguucgccuugacg

SEQ ID NO: 3061050 - RNA, 19 nt, Artificial Sequence
  Description of Artificial Sequence: Synthetic oligonucleotide
aucugagacacuuucuucu

SEQ ID NO: 3061051 - RNA, 19 nt, Artificial Sequence
  Description of Artificial Sequence: Synthetic oligonucleotide
uguugcugcacucuuccug

SEQ ID NO: 3061052 - RNA, 19 nt, Artificial Sequence
  Description of Artificial Sequence: Synthetic oligonucleotide
aggcgagugguguugcugc

SEQ ID NO: 3061053 - RNA, 19 nt, Artificial Sequence
  Description of Artificial Sequence: Synthetic oligonucleotide
uccagggaaucuugaaggg

SEQ ID NO: 3061054 - RNA, 19 nt, Artificial Sequence
  Description of Artificial Sequence: Synthetic oligonucleotide
ugagacacuuucuucucca

SEQ ID NO: 3061055 - RNA, 19 nt, Artificial Sequence
  Description of Artificial Sequence: Synthetic oligonucleotide
agacacuuucuucuccagg

SEQ ID NO: 3061056 - RNA, 19 nt, Artificial Sequence
  Description of Artificial Sequence: Synthetic oligonucleotide
cuucuccuggaucugagac

SEQ ID NO: 3061057 - RNA, 19 nt, Artificial Sequence
  Description of Artificial Sequence: Synthetic oligonucleotide
gaaucuugaagggucacca

SEQ ID NO: 3061058 - RNA, 19 nt, Artificial Sequence
  Description of Artificial Sequence: Synthetic oligonucleotide
cagggaaucuugaaggguc

SEQ ID NO: 3061059 - RNA, 19 nt, Artificial Sequence
  Description of Artificial Sequence: Synthetic oligonucleotide
gaucagagccugcuucucc

SEQ ID NO: 3061060 - RNA, 19 nt, Artificial Sequence
  Description of Artificial Sequence: Synthetic oligonucleotide
gaagggucaccacgguccg

SEQ ID NO: 3061061 - RNA, 19 nt, Artificial Sequence
  Description of Artificial Sequence: Synthetic oligonucleotide
accacgguccgguugcagg

SEQ ID NO: 3061062 - RNA, 19 nt, Artificial Sequence
  Description of Artificial Sequence: Synthetic oligonucleotide
agccagguuguccugggag

SEQ ID NO: 3061063 - RNA, 19 nt, Artificial Sequence
  Description of Artificial Sequence: Synthetic oligonucleotide
ucugccugagccagguugu

SEQ ID NO: 3061064 - RNA, 19 nt, Artificial Sequence
  Description of Artificial Sequence: Synthetic oligonucleotide
uuccgcuccuggaucagag

SEQ ID NO: 3061065 - RNA, 19 nt, Artificial Sequence
  Description of Artificial Sequence: Synthetic oligonucleotide
cucugccugagccagguug

SEQ ID NO: 3061066 - RNA, 19 nt, Artificial Sequence
  Description of Artificial Sequence: Synthetic oligonucleotide
ucugagacacuuucuucuc

SEQ ID NO: 3061067 - RNA, 19 nt, Artificial Sequence
  Description of Artificial Sequence: Synthetic oligonucleotide
uugccugcgccucugccug

SEQ ID NO: 3061068 - RNA, 19 nt, Artificial Sequence
  Description of Artificial Sequence: Synthetic oligonucleotide
ugcuucuccuggaucugag

SEQ ID NO: 3061069 - RNA, 19 nt, Artificial Sequence
  Description of Artificial Sequence: Synthetic oligonucleotide
gucaccacgguccgguugc

SEQ ID NO: 3061070 - RNA, 19 nt, Artificial Sequence
  Description of Artificial Sequence: Synthetic oligonucleotide
gguguugcugcacucuucc

SEQ ID NO: 3061071 - RNA, 19 nt, Artificial Sequence
  Description of Artificial Sequence: Synthetic oligonucleotide
gagacacuuucuucuccag

SEQ ID NO: 3061072 - RNA, 19 nt, Artificial Sequence
  Description of Artificial Sequence: Synthetic oligonucleotide
ucuuccugcgcccgcaguc

SEQ ID NO: 3061073 - RNA, 19 nt, Artificial Sequence
  Description of Artificial Sequence: Synthetic oligonucleotide
cugagacacuuucuucucc

SEQ ID NO: 3061074 - RNA, 19 nt, Artificial Sequence
  Description of Artificial Sequence: Synthetic oligonucleotide
cugggagcgggugagcugg

SEQ ID NO: 3061075 - RNA, 19 nt, Artificial Sequence
  Description of Artificial Sequence: Synthetic oligonucleotide
acgguccgguugcaggugc

SEQ ID NO: 3061076 - RNA, 19 nt, Artificial Sequence
  Description of Artificial Sequence: Synthetic oligonucleotide
guugcaggugcuugccugc

SEQ ID NO: 3061077 - RNA, 19 nt, Artificial Sequence
  Description of Artificial Sequence: Synthetic oligonucleotide
uccgguugcaggugcuugc

SEQ ID NO: 3061078 - RNA, 19 nt, Artificial Sequence
  Description of Artificial Sequence: Synthetic oligonucleotide
uucuccagggaaucuugaa

SEQ ID NO: 3061079 - RNA, 19 nt, Artificial Sequence
  Description of Artificial Sequence: Synthetic oligonucleotide
gagcuggcgcugcagcagg

SEQ ID NO: 3061080 - RNA, 19 nt, Artificial Sequence
  Description of Artificial Sequence: Synthetic oligonucleotide
ugcacucuuccugcgcccg

SEQ ID NO: 3061081 - RNA, 19 nt, Artificial Sequence
  Description of Artificial Sequence: Synthetic oligonucleotide
uuguccugggagcggguga

SEQ ID NO: 3061082 - RNA, 19 nt, Artificial Sequence
  Description of Artificial Sequence: Synthetic oligonucleotide
gguugcaggugcuugccug

SEQ ID NO: 3061083 - RNA, 19 nt, Artificial Sequence
  Description of Artificial Sequence: Synthetic oligonucleotide
cagagccugcuucuccugg

SEQ ID NO: 3061084 - RNA, 19 nt, Artificial Sequence
  Description of Artificial Sequence: Synthetic oligonucleotide
uuccugcgcccgcaguccg

SEQ ID NO: 3061085 - RNA, 19 nt, Artificial Sequence
  Description of Artificial Sequence: Synthetic oligonucleotide
ugcagcaggcgaguggugu

SEQ ID NO: 3061086 - RNA, 19 nt, Artificial Sequence
  Description of Artificial Sequence: Synthetic oligonucleotide
uggcgcugcagcaggcgag

SEQ ID NO: 3061087 - RNA, 19 nt, Artificial Sequence
  Description of Artificial Sequence: Synthetic oligonucleotide
agguuguccugggagcggg

SEQ ID NO: 3061088 - RNA, 19 nt, Artificial Sequence
  Description of Artificial Sequence: Synthetic oligonucleotide
cugcgccucugccugagcc

SEQ ID NO: 3061089 - RNA, 19 nt, Artificial Sequence
  Description of Artificial Sequence: Synthetic oligonucleotide
ugguguugcugcacucuuc

SEQ ID NO: 3061090 - RNA, 19 nt, Artificial Sequence
  Description of Artificial Sequence: Synthetic oligonucleotide
uugcaggugcuugccugcg

SEQ ID NO: 3061091 - RNA, 19 nt, Artificial Sequence
  Description of Artificial Sequence: Synthetic oligonucleotide
uuuuccgcuccuggaucag

SEQ ID NO: 3061092 - RNA, 19 nt, Artificial Sequence
  Description of Artificial Sequence: Synthetic oligonucleotide
ugcgcccgcaguccguccc

SEQ ID NO: 3061093 - RNA, 19 nt, Artificial Sequence
  Description of Artificial Sequence: Synthetic oligonucleotide
ggaaucuugaagggucacc

SEQ ID NO: 3061094 - RNA, 19 nt, Artificial Sequence
  Description of Artificial Sequence: Synthetic oligonucleotide
ugcaggugcuugccugcgc

SEQ ID NO: 3061095 - RNA, 19 nt, Artificial Sequence
  Description of Artificial Sequence: Synthetic oligonucleotide
cugagccagguuguccugg

SEQ ID NO: 3061096 - RNA, 19 nt, Artificial Sequence
  Description of Artificial Sequence: Synthetic oligonucleotide
uccgcuccuggaucagagc

SEQ ID NO: 3061097 - RNA, 19 nt, Artificial Sequence
  Description of Artificial Sequence: Synthetic oligonucleotide
cuuccugcgcccgcagucc

SEQ ID NO: 3061098 - RNA, 19 nt, Artificial Sequence
  Description of Artificial Sequence: Synthetic oligonucleotide
aguccgucccugcaggcuu

SEQ ID NO: 3061099 - RNA, 19 nt, Artificial Sequence
  Description of Artificial Sequence: Synthetic oligonucleotide
agggucaccacgguccggu

SEQ ID NO: 3061100 - RNA, 19 nt, Artificial Sequence
  Description of Artificial Sequence: Synthetic oligonucleotide
cacuuucuucuccagggaa

SEQ ID NO: 3061101 - RNA, 19 nt, Artificial Sequence
  Description of Artificial Sequence: Synthetic oligonucleotide
uccugggagcgggugagcu

SEQ ID NO: 3061102 - RNA, 19 nt, Artificial Sequence
  Description of Artificial Sequence: Synthetic oligonucleotide
ccgcuccuggaucagagcc

SEQ ID NO: 3061103 - RNA, 19 nt, Artificial Sequence
  Description of Artificial Sequence: Synthetic oligonucleotide
aggugcuugccugcgccuc

SEQ ID NO: 3061104 - RNA, 19 nt, Artificial Sequence
  Description of Artificial Sequence: Synthetic oligonucleotide
cuucuccagggaaucuuga

SEQ ID NO: 3061105 - RNA, 19 nt, Artificial Sequence
  Description of Artificial Sequence: Synthetic oligonucleotide
gcaggugcuugccugcgcc

SEQ ID NO: 3061106 - RNA, 19 nt, Artificial Sequence
  Description of Artificial Sequence: Synthetic oligonucleotide
aagggucaccacgguccgg

SEQ ID NO: 3061107 - RNA, 19 nt, Artificial Sequence
  Description of Artificial Sequence: Synthetic oligonucleotide
gagugguguugcugcacuc

SEQ ID NO: 3061108 - RNA, 19 nt, Artificial Sequence
  Description of Artificial Sequence: Synthetic oligonucleotide
agggaaucuugaaggguca

SEQ ID NO: 3061109 - RNA, 19 nt, Artificial Sequence
  Description of Artificial Sequence: Synthetic oligonucleotide
ucccugcaggcuucgcugu

SEQ ID NO: 3061110 - RNA, 19 nt, Artificial Sequence
  Description of Artificial Sequence: Synthetic oligonucleotide
gcaggcuucgcuguucgcc

SEQ ID NO: 3061111 - RNA, 19 nt, Artificial Sequence
  Description of Artificial Sequence: Synthetic oligonucleotide
guuguccugggagcgggug

SEQ ID NO: 3061112 - RNA, 19 nt, Artificial Sequence
  Description of Artificial Sequence: Synthetic oligonucleotide
uuuccgcuccuggaucaga

SEQ ID NO: 3061113 - RNA, 19 nt, Artificial Sequence
  Description of Artificial Sequence: Synthetic oligonucleotide
gcuguucgccuugacggcg

SEQ ID NO: 3061114 - RNA, 19 nt, Artificial Sequence
  Description of Artificial Sequence: Synthetic oligonucleotide
ggagcgggugagcuggcgc

SEQ ID NO: 3061115 - RNA, 19 nt, Artificial Sequence
  Description of Artificial Sequence: Synthetic oligonucleotide
caggcgagugguguugcug

SEQ ID NO: 3061116 - RNA, 19 nt, Artificial Sequence
  Description of Artificial Sequence: Synthetic oligonucleotide
ugcuugccugcgccucugc

SEQ ID NO: 3061117 - RNA, 19 nt, Artificial Sequence
  Description of Artificial Sequence: Synthetic oligonucleotide
ugcaggcuucgcuguucgc

SEQ ID NO: 3061118 - RNA, 19 nt, Artificial Sequence
  Description of Artificial Sequence: Synthetic oligonucleotide
cagguuguccugggagcgg

SEQ ID NO: 3061119 - RNA, 19 nt, Artificial Sequence
  Description of Artificial Sequence: Synthetic oligonucleotide
ggucaccacgguccgguug

SEQ ID NO: 3061120 - RNA, 19 nt, Artificial Sequence
  Description of Artificial Sequence: Synthetic oligonucleotide
uguucgccuugacggcgaa

SEQ ID NO: 3061121 - RNA, 19 nt, Artificial Sequence
  Description of Artificial Sequence: Synthetic oligonucleotide
cuugccugcgccucugccu

SEQ ID NO: 3061122 - RNA, 19 nt, Artificial Sequence
  Description of Artificial Sequence: Synthetic oligonucleotide
guccgguugcaggugcuug

SEQ ID NO: 3061123 - RNA, 19 nt, Artificial Sequence
  Description of Artificial Sequence: Synthetic oligonucleotide
uccgucccugcaggcuucg

SEQ ID NO: 3061124 - RNA, 19 nt, Artificial Sequence
  Description of Artificial Sequence: Synthetic oligonucleotide
gagcgggugagcuggcgcu

SEQ ID NO: 3061125 - RNA, 19 nt, Artificial Sequence
  Description of Artificial Sequence: Synthetic oligonucleotide
cuguucgccuugacggcga

SEQ ID NO: 3061126 - RNA, 19 nt, Artificial Sequence
  Description of Artificial Sequence: Synthetic oligonucleotide
cagcaggcgagugguguug

SEQ ID NO: 3061127 - RNA, 19 nt, Artificial Sequence
  Description of Artificial Sequence: Synthetic oligonucleotide
cuccuggaucagagccugc

SEQ ID NO: 3061128 - RNA, 19 nt, Artificial Sequence
  Description of Artificial Sequence: Synthetic oligonucleotide
cuucgcuguucgccuugac

SEQ ID NO: 3061129 - RNA, 19 nt, Artificial Sequence
  Description of Artificial Sequence: Synthetic oligonucleotide
ugggagcgggugagcuggc

SEQ ID NO: 3061130 - RNA, 19 nt, Artificial Sequence
  Description of Artificial Sequence: Synthetic oligonucleotide
uccugcgcccgcaguccgu

SEQ ID NO: 3061131 - RNA, 19 nt, Artificial Sequence
  Description of Artificial Sequence: Synthetic oligonucleotide
gcuugccugcgccucugcc

SEQ ID NO: 3061132 - RNA, 19 nt, Artificial Sequence
  Description of Artificial Sequence: Synthetic oligonucleotide
caggcuucgcuguucgccu

SEQ ID NO: 3061133 - RNA, 19 nt, Artificial Sequence
  Description of Artificial Sequence: Synthetic oligonucleotide
cuggcgcugcagcaggcga

SEQ ID NO: 3061134 - RNA, 19 nt, Artificial Sequence
  Description of Artificial Sequence: Synthetic oligonucleotide
ggcuucgcuguucgccuug

SEQ ID NO: 3061135 - RNA, 19 nt, Artificial Sequence
  Description of Artificial Sequence: Synthetic oligonucleotide
guucgccuugacggcgaag

SEQ ID NO: 3061136 - RNA, 19 nt, Artificial Sequence
  Description of Artificial Sequence: Synthetic oligonucleotide
gggaaucuugaagggucac

SEQ ID NO: 3061137 - RNA, 19 nt, Artificial Sequence
  Description of Artificial Sequence: Synthetic oligonucleotide
agcgggugagcuggcgcug

SEQ ID NO: 3061138 - RNA, 19 nt, Artificial Sequence
  Description of Artificial Sequence: Synthetic oligonucleotide
gcuucuccuggaucugaga

SEQ ID NO: 3061139 - RNA, 19 nt, Artificial Sequence
  Description of Artificial Sequence: Synthetic oligonucleotide
cgcaguccgucccugcagg

SEQ ID NO: 3061140 - RNA, 19 nt, Artificial Sequence
  Description of Artificial Sequence: Synthetic oligonucleotide
cugcagcaggcgaguggug

SEQ ID NO: 3061141 - RNA, 19 nt, Artificial Sequence
  Description of Artificial Sequence: Synthetic oligonucleotide
gcuggcgcugcagcaggcg

SEQ ID NO: 3061142 - RNA, 19 nt, Artificial Sequence
  Description of Artificial Sequence: Synthetic oligonucleotide
cacgguccgguugcaggug

SEQ ID NO: 3061143 - RNA, 19 nt, Artificial Sequence
  Description of Artificial Sequence: Synthetic oligonucleotide
gcaguccgucccugcaggc

SEQ ID NO: 3061144 - RNA, 19 nt, Artificial Sequence
  Description of Artificial Sequence: Synthetic oligonucleotide
ucaccacgguccgguugca

SEQ ID NO: 3061145 - RNA, 19 nt, Artificial Sequence
  Description of Artificial Sequence: Synthetic oligonucleotide
ggaucagagccugcuucuc

SEQ ID NO: 3061146 - RNA, 19 nt, Artificial Sequence
  Description of Artificial Sequence: Synthetic oligonucleotide
gcugcagcaggcgaguggu

SEQ ID NO: 3061147 - RNA, 19 nt, Artificial Sequence
  Description of Artificial Sequence: Synthetic oligonucleotide
gcgccucugccugagccag

SEQ ID NO: 3061148 - RNA, 19 nt, Artificial Sequence
  Description of Artificial Sequence: Synthetic oligonucleotide
aggcuucgcuguucgccuu

SEQ ID NO: 3061149 - RNA, 19 nt, Artificial Sequence
  Description of Artificial Sequence: Synthetic oligonucleotide
cacucuuccugcgcccgca

SEQ ID NO: 3061150 - RNA, 19 nt, Artificial Sequence
  Description of Artificial Sequence: Synthetic oligonucleotide
cugcgcccgcaguccgucc

SEQ ID NO: 3061151 - RNA, 19 nt, Artificial Sequence
  Description of Artificial Sequence: Synthetic oligonucleotide
ugccugcgccucugccuga

SEQ ID NO: 3061152 - RNA, 19 nt, Artificial Sequence
  Description of Artificial Sequence: Synthetic oligonucleotide
gugguguugcugcacucuu

SEQ ID NO: 3061153 - RNA, 19 nt, Artificial Sequence
  Description of Artificial Sequence: Synthetic oligonucleotide
ccugggagcgggugagcug

SEQ ID NO: 3061154 - RNA, 19 nt, Artificial Sequence
  Description of Artificial Sequence: Synthetic oligonucleotide
gugcuugccugcgccucug

SEQ ID NO: 3061155 - RNA, 19 nt, Artificial Sequence
  Description of Artificial Sequence: Synthetic oligonucleotide
gagccugcuucuccuggau

SEQ ID NO: 3061156 - RNA, 19 nt, Artificial Sequence
  Description of Artificial Sequence: Synthetic oligonucleotide
caccacgguccgguugcag

SEQ ID NO: 3061157 - RNA, 19 nt, Artificial Sequence
  Description of Artificial Sequence: Synthetic oligonucleotide
cgcuguucgccuugacggc

SEQ ID NO: 3061158 - RNA, 19 nt, Artificial Sequence
  Description of Artificial Sequence: Synthetic oligonucleotide
ggcgagugguguugcugca

SEQ ID NO: 3061159 - RNA, 19 nt, Artificial Sequence
  Description of Artificial Sequence: Synthetic oligonucleotide
cgcugcagcaggcgagugg

SEQ ID NO: 3061160 - RNA, 19 nt, Artificial Sequence
  Description of Artificial Sequence: Synthetic oligonucleotide
gcacucuuccugcgcccgc

SEQ ID NO: 3061161 - RNA, 19 nt, Artificial Sequence
  Description of Artificial Sequence: Synthetic oligonucleotide
ccgguugcaggugcuugcc

SEQ ID NO: 3061162 - RNA, 19 nt, Artificial Sequence
  Description of Artificial Sequence: Synthetic oligonucleotide
gggagcgggugagcuggcg

SEQ ID NO: 3061163 - RNA, 19 nt, Artificial Sequence
  Description of Artificial Sequence: Synthetic oligonucleotide
ccgcaguccgucccugcag

SEQ ID NO: 3061164 - RNA, 19 nt, Artificial Sequence
  Description of Artificial Sequence: Synthetic oligonucleotide
guccugggagcgggugagc

SEQ ID NO: 3061165 - RNA, 19 nt, Artificial Sequence
  Description of Artificial Sequence: Synthetic oligonucleotide
gcgagugguguugcugcac

SEQ ID NO: 3061166 - RNA, 19 nt, Artificial Sequence
  Description of Artificial Sequence: Synthetic oligonucleotide
ggugcuugccugcgccucu

SEQ ID NO: 3061167 - RNA, 19 nt, Artificial Sequence
  Description of Artificial Sequence: Synthetic oligonucleotide
guccgucccugcaggcuuc

SEQ ID NO: 3061168 - RNA, 19 nt, Artificial Sequence
  Description of Artificial Sequence: Synthetic oligonucleotide
caggugcuugccugcgccu

SEQ ID NO: 3061169 - RNA, 19 nt, Artificial Sequence
  Description of Artificial Sequence: Synthetic oligonucleotide
gcgggugagcuggcgcugc

SEQ ID NO: 3061170 - RNA, 19 nt, Artificial Sequence
  Description of Artificial Sequence: Synthetic oligonucleotide
cucuuccugcgcccgcagu

SEQ ID NO: 3061171 - RNA, 19 nt, Artificial Sequence
  Description of Artificial Sequence: Synthetic oligonucleotide
gccugcgccucugccugag

SEQ ID NO: 3061172 - RNA, 19 nt, Artificial Sequence
  Description of Artificial Sequence: Synthetic oligonucleotide
gcccgcaguccgucccugc

SEQ ID NO: 3061173 - RNA, 19 nt, Artificial Sequence
  Description of Artificial Sequence: Synthetic oligonucleotide
caguccgucccugcaggcu

SEQ ID NO: 3061174 - RNA, 19 nt, Artificial Sequence
  Description of Artificial Sequence: Synthetic oligonucleotide
ccagggaaucuugaagggu

SEQ ID NO: 3061175 - RNA, 19 nt, Artificial Sequence
  Description of Artificial Sequence: Synthetic oligonucleotide
gcuucgcuguucgccuuga

SEQ ID NO: 3061176 - RNA, 19 nt, Artificial Sequence
  Description of Artificial Sequence: Synthetic oligonucleotide
cccgcaguccgucccugca

SEQ ID NO: 3061177 - RNA, 19 nt, Artificial Sequence
  Description of Artificial Sequence: Synthetic oligonucleotide
ccacgguccgguugcaggu

SEQ ID NO: 3061178 - RNA, 19 nt, Artificial Sequence
  Description of Artificial Sequence: Synthetic oligonucleotide
ccugcgcccgcaguccguc

SEQ ID NO: 3061179 - RNA, 19 nt, Artificial Sequence
  Description of Artificial Sequence: Synthetic oligonucleotide
gcagcaggcgagugguguu

SEQ ID NO: 3061180 - RNA, 19 nt, Artificial Sequence
  Description of Artificial Sequence: Synthetic oligonucleotide
cgagugguguugcugcacu

SEQ ID NO: 3061181 - RNA, 19 nt, Artificial Sequence
  Description of Artificial Sequence: Synthetic oligonucleotide
cuccuggaucugagacacu

SEQ ID NO: 3061182 - RNA, 19 nt, Artificial Sequence
  Description of Artificial Sequence: Synthetic oligonucleotide
ggcgcugcagcaggcgagu

SEQ ID NO: 3061183 - RNA, 19 nt, Artificial Sequence
  Description of Artificial Sequence: Synthetic oligonucleotide
gcaggcgagugguguugcu

SEQ ID NO: 3061184 - RNA, 19 nt, Artificial Sequence
  Description of Artificial Sequence: Synthetic oligonucleotide
ccuggaucugagacacuuu

SEQ ID NO: 3061185 - RNA, 19 nt, Artificial Sequence
  Description of Artificial Sequence: Synthetic oligonucleotide
gcgcugcagcaggcgagug

SEQ ID NO: 3061186 - RNA, 19 nt, Artificial Sequence
  Description of Artificial Sequence: Synthetic oligonucleotide
gguuguccugggagcgggu

SEQ ID NO: 3061187 - RNA, 19 nt, Artificial Sequence
  Description of Artificial Sequence: Synthetic oligonucleotide
cgucccugcaggcuucgcu

SEQ ID NO: 3061188 - RNA, 19 nt, Artificial Sequence
  Description of Artificial Sequence: Synthetic oligonucleotide
gguccgguugcaggugcuu

SEQ ID NO: 3061189 - RNA, 19 nt, Artificial Sequence
  Description of Artificial Sequence: Synthetic oligonucleotide
ccgucccugcaggcuucgc

SEQ ID NO: 3061190 - RNA, 19 nt, Artificial Sequence
  Description of Artificial Sequence: Synthetic oligonucleotide
gcgcccgcaguccgucccu

SEQ ID NO: 3061191 - RNA, 19 nt, Artificial Sequence
  Description of Artificial Sequence: Synthetic oligonucleotide
gggucaccacgguccgguu

SEQ ID NO: 3061192 - RNA, 19 nt, Artificial Sequence
  Description of Artificial Sequence: Synthetic oligonucleotide
cgggugagcuggcgcugca

SEQ ID NO: 3061193 - RNA, 19 nt, Artificial Sequence
  Description of Artificial Sequence: Synthetic oligonucleotide
cgguugcaggugcuugccu

SEQ ID NO: 3061194 - RNA, 19 nt, Artificial Sequence
  Description of Artificial Sequence: Synthetic oligonucleotide
cgcccgcaguccgucccug

SEQ ID NO: 3061195 - RNA, 19 nt, Artificial Sequence
  Description of Artificial Sequence: Synthetic oligonucleotide
cgguccgguugcaggugcu

SEQ ID NO: 3061196 - RNA, 19 nt, Artificial Sequence
  Description of Artificial Sequence: Synthetic oligonucleotide
cccugcaggcuucgcuguu

SEQ ID NO: 3061197 - RNA, 19 nt, Artificial Sequence
  Description of Artificial Sequence: Synthetic oligonucleotide
ccucugccugagccagguu

SEQ ID NO: 3061198 - RNA, 19 nt, Artificial Sequence
  Description of Artificial Sequence: Synthetic oligonucleotide
uuuuaguuuucuuaaagcg

SEQ ID NO: 3061199 - RNA, 19 nt, Artificial Sequence
  Description of Artificial Sequence: Synthetic oligonucleotide
aaauuugugcuuccaauac

SEQ ID NO: 3061200 - RNA, 19 nt, Artificial Sequence
  Description of Artificial Sequence: Synthetic oligonucleotide
aaugaugaagaagucauac

SEQ ID NO: 3061201 - RNA, 19 nt, Artificial Sequence
  Description of Artificial Sequence: Synthetic oligonucleotide
auugaauuucauuuucucc

SEQ ID NO: 3061202 - RNA, 19 nt, Artificial Sequence
  Description of Artificial Sequence: Synthetic oligonucleotide
acugucaauucuuuaaugc

SEQ ID NO: 3061203 - RNA, 19 nt, Artificial Sequence
  Description of Artificial Sequence: Synthetic oligonucleotide
aauuugugcuuccaauacc

SEQ ID NO: 3061204 - RNA, 19 nt, Artificial Sequence
  Description of Artificial Sequence: Synthetic oligonucleotide
uuaguuuucuuaaagcgug

SEQ ID NO: 3061205 - RNA, 19 nt, Artificial Sequence
  Description of Artificial Sequence: Synthetic oligonucleotide
uugaauuucauuuucucca

SEQ ID NO: 3061206 - RNA, 19 nt, Artificial Sequence
  Description of Artificial Sequence: Synthetic oligonucleotide
aauauugugguguuuguau

SEQ ID NO: 3061207 - RNA, 19 nt, Artificial Sequence
  Description of Artificial Sequence: Synthetic oligonucleotide
ugugcuuccaauaccaggc

SEQ ID NO: 3061208 - RNA, 19 nt, Artificial Sequence
  Description of Artificial Sequence: Synthetic oligonucleotide
ugaugaagaagucauacuc

SEQ ID NO: 3061209 - RNA, 19 nt, Artificial Sequence
  Description of Artificial Sequence: Synthetic oligonucleotide
ugugguguuuguauggacg

SEQ ID NO: 3061210 - RNA, 19 nt, Artificial Sequence
  Description of Artificial Sequence: Synthetic oligonucleotide
uuuaguuuucuuaaagcgu

SEQ ID NO: 3061211 - RNA, 19 nt, Artificial Sequence
  Description of Artificial Sequence: Synthetic oligonucleotide
uguggcagaaacaaugaug

SEQ ID NO: 3061212 - RNA, 19 nt, Artificial Sequence
  Description of Artificial Sequence: Synthetic oligonucleotide
gaaacaaugaugaagaagu

SEQ ID NO: 3061213 - RNA, 19 nt, Artificial Sequence
  Description of Artificial Sequence: Synthetic oligonucleotide
cacauugggaauauugugg

SEQ ID NO: 3061214 - RNA, 19 nt, Artificial Sequence
  Description of Artificial Sequence: Synthetic oligonucleotide
uuuucuuaaagcguguggc

SEQ ID NO: 3061215 - RNA, 19 nt, Artificial Sequence
  Description of Artificial Sequence: Synthetic oligonucleotide
uacucauugaauuucauuu

SEQ ID NO: 3061216 - RNA, 19 nt, Artificial Sequence
  Description of Artificial Sequence: Synthetic oligonucleotide
uauugugguguuuguaugg

SEQ ID NO: 3061217 - RNA, 19 nt, Artificial Sequence
  Description of Artificial Sequence: Synthetic oligonucleotide
caggcauugaugaagcugg

SEQ ID NO: 3061218 - RNA, 19 nt, Artificial Sequence
  Description of Artificial Sequence: Synthetic oligonucleotide
aauuucauuuucuccagau

SEQ ID NO: 3061219 - RNA, 19 nt, Artificial Sequence
  Description of Artificial Sequence: Synthetic oligonucleotide
uaaagcguguggcagaaac

SEQ ID NO: 3061220 - RNA, 19 nt, Artificial Sequence
  Description of Artificial Sequence: Synthetic oligonucleotide
agcuggauuucccugcucc

SEQ ID NO: 3061221 - RNA, 19 nt, Artificial Sequence
  Description of Artificial Sequence: Synthetic oligonucleotide
  modified_base (2)..(2): a, c, u, g, unknown or other
unucaggcauugaugaagc

SEQ ID NO: 3061222 - RNA, 19 nt, Artificial Sequence
  Description of Artificial Sequence: Synthetic oligonucleotide
ugaauuucauuuucuccag

SEQ ID NO: 3061223 - RNA, 19 nt, Artificial Sequence
  Description of Artificial Sequence: Synthetic oligonucleotide
aacaaugaugaagaaguca

SEQ ID NO: 3061224 - RNA, 19 nt, Artificial Sequence
  Description of Artificial Sequence: Synthetic oligonucleotide
uccagauagucuuugggug

SEQ ID NO: 3061225 - RNA, 19 nt, Artificial Sequence
  Description of Artificial Sequence: Synthetic oligonucleotide
uccggucacagcaacauug

SEQ ID NO: 3061226 - RNA, 19 nt, Artificial Sequence
  Description of Artificial Sequence: Synthetic oligonucleotide
uuuguauggacgucucucc

SEQ ID NO: 3061227 - RNA, 19 nt, Artificial Sequence
  Description of Artificial Sequence: Synthetic oligonucleotide
cacagcaacauugaguggg

SEQ ID NO: 3061228 - RNA, 19 nt, Artificial Sequence
  Description of Artificial Sequence: Synthetic oligonucleotide
uugggugggaaauuugugc

SEQ ID NO: 3061229 - RNA, 19 nt, Artificial Sequence
  Description of Artificial Sequence: Synthetic oligonucleotide
caaaucaccacauugggaa

SEQ ID NO: 3061230 - RNA, 19 nt, Artificial Sequence
  Description of Artificial Sequence: Synthetic oligonucleotide
uugugcuuccaauaccagg

SEQ ID NO: 3061231 - RNA, 19 nt, Artificial Sequence
  Description of Artificial Sequence: Synthetic oligonucleotide
  modified_base (13)..(13): a, c, u, g, unknown or other
ugcccaaccccunucaggc

SEQ ID NO: 3061232 - RNA, 19 nt, Artificial Sequence
  Description of Artificial Sequence: Synthetic oligonucleotide
ucauugaauuucauuuucu

SEQ ID NO: 3061233 - RNA, 19 nt, Artificial Sequence
  Description of Artificial Sequence: Synthetic oligonucleotide
ucauacucauugaauuuca

SEQ ID NO: 3061234 - RNA, 19 nt, Artificial Sequence
  Description of Artificial Sequence: Synthetic oligonucleotide
auugggaauauuguggugu

SEQ ID NO: 3061235 - RNA, 19 nt, Artificial Sequence
  Description of Artificial Sequence: Synthetic oligonucleotide
uucuuaaagcguguggcag

SEQ ID NO: 3061236 - RNA, 19 nt, Artificial Sequence
  Description of Artificial Sequence: Synthetic oligonucleotide
auauugugguguuuguaug

SEQ ID NO: 3061237 - RNA, 19 nt, Artificial Sequence
  Description of Artificial Sequence: Synthetic oligonucleotide
uuucuuaaagcguguggca

SEQ ID NO: 3061238 - RNA, 19 nt, Artificial Sequence
  Description of Artificial Sequence: Synthetic oligonucleotide
  modified_base (3)..(3): a, c, u, g, unknown or other
cunucaggcauugaugaag

SEQ ID NO: 3061239 - RNA, 19 nt, Artificial Sequence
  Description of Artificial Sequence: Synthetic oligonucleotide
acauugggaauauuguggu

SEQ ID NO: 3061240 - RNA, 19 nt, Artificial Sequence
  Description of Artificial Sequence: Synthetic oligonucleotide
uuugggugggaaauuugug

SEQ ID NO: 3061241 - RNA, 19 nt, Artificial Sequence
  Description of Artificial Sequence: Synthetic oligonucleotide
uuccucuucaugcccaacc

SEQ ID NO: 3061242 - RNA, 19 nt, Artificial Sequence
  Description of Artificial Sequence: Synthetic oligonucleotide
cauugaauuucauuuucuc

SEQ ID NO: 3061243 - RNA, 19 nt, Artificial Sequence
  Description of Artificial Sequence: Synthetic oligonucleotide
uucauuuucuccagauagu

SEQ ID NO: 3061244 - RNA, 19 nt, Artificial Sequence
  Description of Artificial Sequence: Synthetic oligonucleotide
uccauggucguuuccacca

SEQ ID NO: 3061245 - RNA, 19 nt, Artificial Sequence
  Description of Artificial Sequence: Synthetic oligonucleotide
acaaugaugaagaagucau

SEQ ID NO: 3061246 - RNA, 19 nt, Artificial Sequence
  Description of Artificial Sequence: Synthetic oligonucleotide
uacugucaauucuuuaaug

SEQ ID NO: 3061247 - RNA, 19 nt, Artificial Sequence
  Description of Artificial Sequence: Synthetic oligonucleotide
gaaauuugugcuuccaaua

SEQ ID NO: 3061248 - RNA, 19 nt, Artificial Sequence
  Description of Artificial Sequence: Synthetic oligonucleotide
auuucccugcuccagucuc

SEQ ID NO: 3061249 - RNA, 19 nt, Artificial Sequence
  Description of Artificial Sequence: Synthetic oligonucleotide
  modified_base (14)..(14): a, c, u, g, unknown or other
augcccaaccccunucagg

SEQ ID NO: 3061250 - RNA, 19 nt, Artificial Sequence
  Description of Artificial Sequence: Synthetic oligonucleotide
caccacauugggaauauug

SEQ ID NO: 3061251 - RNA, 19 nt, Artificial Sequence
  Description of Artificial Sequence: Synthetic oligonucleotide
ucaggcauugaugaagcug

SEQ ID NO: 3061252 - RNA, 19 nt, Artificial Sequence
  Description of Artificial Sequence: Synthetic oligonucleotide
gaugaagaagucauacuca

SEQ ID NO: 3061253 - RNA, 19 nt, Artificial Sequence
  Description of Artificial Sequence: Synthetic oligonucleotide
guggcagaaacaaugauga

SEQ ID NO: 3061254 - RNA, 19 nt, Artificial Sequence
  Description of Artificial Sequence: Synthetic oligonucleotide
  modified_base (16)..(16): a, c, u, g, unknown or other
ucaugcccaaccccunuca

SEQ ID NO: 3061255 - RNA, 19 nt, Artificial Sequence
  Description of Artificial Sequence: Synthetic oligonucleotide
cucauugaauuucauuuuc

SEQ ID NO: 3061256 - RNA, 19 nt, Artificial Sequence
  Description of Artificial Sequence: Synthetic oligonucleotide
ucuuaaagcguguggcaga

SEQ ID NO: 3061257 - RNA, 19 nt, Artificial Sequence
  Description of Artificial Sequence: Synthetic oligonucleotide
agugggguacugucaauuc

SEQ ID NO: 3061258 - RNA, 19 nt, Artificial Sequence
  Description of Artificial Sequence: Synthetic oligonucleotide
augaagaagucauacucau

SEQ ID NO: 3061259 - RNA, 19 nt, Artificial Sequence
  Description of Artificial Sequence: Synthetic oligonucleotide
gucccaaaucaccacauug

SEQ ID NO: 3061260 - RNA, 19 nt, Artificial Sequence
  Description of Artificial Sequence: Synthetic oligonucleotide
ugggugggaaauuugugcu

SEQ ID NO: 3061261 - RNA, 19 nt, Artificial Sequence
  Description of Artificial Sequence: Synthetic oligonucleotide
uccucuucaugcccaaccc

SEQ ID NO: 3061262 - RNA, 19 nt, Artificial Sequence
  Description of Artificial Sequence: Synthetic oligonucleotide
uuugugcuuccaauaccag

SEQ ID NO: 3061263 - RNA, 19 nt, Artificial Sequence
  Description of Artificial Sequence: Synthetic oligonucleotide
ggcagaaacaaugaugaag

SEQ ID NO: 3061264 - RNA, 19 nt, Artificial Sequence
  Description of Artificial Sequence: Synthetic oligonucleotide
augaugaagaagucauacu

SEQ ID NO: 3061265 - RNA, 19 nt, Artificial Sequence
  Description of Artificial Sequence: Synthetic oligonucleotide
uauggacgucucuccaugg

SEQ ID NO: 3061266 - RNA, 19 nt, Artificial Sequence
  Description of Artificial Sequence: Synthetic oligonucleotide
auuugugcuuccaauacca

SEQ ID NO: 3061267 - RNA, 19 nt, Artificial Sequence
  Description of Artificial Sequence: Synthetic oligonucleotide
ucuuugggugggaaauuug

SEQ ID NO: 3061268 - RNA, 19 nt, Artificial Sequence
  Description of Artificial Sequence: Synthetic oligonucleotide
uucuccagauagucuuugg

SEQ ID NO: 3061269 - RNA, 19 nt, Artificial Sequence
  Description of Artificial Sequence: Synthetic oligonucleotide
augaagcuggauuucccug

SEQ ID NO: 3061270 - RNA, 19 nt, Artificial Sequence
  Description of Artificial Sequence: Synthetic oligonucleotide
gcagaaacaaugaugaaga

SEQ ID NO: 3061271 - RNA, 19 nt, Artificial Sequence
  Description of Artificial Sequence: Synthetic oligonucleotide
uuguauggacgucucucca

SEQ ID NO: 3061272 - RNA, 19 nt, Artificial Sequence
  Description of Artificial Sequence: Synthetic oligonucleotide
aaaucaccacauugggaau

SEQ ID NO: 3061273 - RNA, 19 nt, Artificial Sequence
  Description of Artificial Sequence: Synthetic oligonucleotide
aagcguguggcagaaacaa

SEQ ID NO: 3061274 - RNA, 19 nt, Artificial Sequence
  Description of Artificial Sequence: Synthetic oligonucleotide
cauugagugggguacuguc

SEQ ID NO: 3061275 - RNA, 19 nt, Artificial Sequence
  Description of Artificial Sequence: Synthetic oligonucleotide
aguuucagcugcaccuucc

SEQ ID NO: 3061276 - RNA, 19 nt, Artificial Sequence
  Description of Artificial Sequence: Synthetic oligonucleotide
auacucauugaauuucauu

SEQ ID NO: 3061277 - RNA, 19 nt, Artificial Sequence
  Description of Artificial Sequence: Synthetic oligonucleotide
acucauugaauuucauuuu

SEQ ID NO: 3061278 - RNA, 19 nt, Artificial Sequence
  Description of Artificial Sequence: Synthetic oligonucleotide
uuuccaccacuccaguuuc

SEQ ID NO: 3061279 - RNA, 19 nt, Artificial Sequence
  Description of Artificial Sequence: Synthetic oligonucleotide
gguacugucaauucuuuaa

SEQ ID NO: 3061280 - RNA, 19 nt, Artificial Sequence
  Description of Artificial Sequence: Synthetic oligonucleotide
  modified_base (7)..(7): a, c, u, g, unknown or other
accccunucaggcauugau

SEQ ID NO: 3061281 - RNA, 19 nt, Artificial Sequence
  Description of Artificial Sequence: Synthetic oligonucleotide
guauggacgucucuccaug

SEQ ID NO: 3061282 - RNA, 19 nt, Artificial Sequence
  Description of Artificial Sequence: Synthetic oligonucleotide
guuuguauggacgucucuc

SEQ ID NO: 3061283 - RNA, 19 nt, Artificial Sequence
  Description of Artificial Sequence: Synthetic oligonucleotide
uguuuguauggacgucucu

SEQ ID NO: 3061284 - RNA, 19 nt, Artificial Sequence
  Description of Artificial Sequence: Synthetic oligonucleotide
ugggguacugucaauucuu

SEQ ID NO: 3061285 - RNA, 19 nt, Artificial Sequence
  Description of Artificial Sequence: Synthetic oligonucleotide
uagucuuugggugggaaau

SEQ ID NO: 3061286 - RNA, 19 nt, Artificial Sequence
  Description of Artificial Sequence: Synthetic oligonucleotide
uggauuucccugcuccagu

SEQ ID NO: 3061287 - RNA, 19 nt, Artificial Sequence
  Description of Artificial Sequence: Synthetic oligonucleotide
aacauugagugggguacug

SEQ ID NO: 3061288 - RNA, 19 nt, Artificial Sequence
  Description of Artificial Sequence: Synthetic oligonucleotide
ucacagcaacauugagugg

SEQ ID NO: 3061289 - RNA, 19 nt, Artificial Sequence
  Description of Artificial Sequence: Synthetic oligonucleotide
uguauggacgucucuccau

SEQ ID NO: 3061290 - RNA, 19 nt, Artificial Sequence
  Description of Artificial Sequence: Synthetic oligonucleotide
accacauugggaauauugu

SEQ ID NO: 3061291 - RNA, 19 nt, Artificial Sequence
  Description of Artificial Sequence: Synthetic oligonucleotide
uuucuccagauagucuuug

SEQ ID NO: 3061292 - RNA, 19 nt, Artificial Sequence
  Description of Artificial Sequence: Synthetic oligonucleotide
gggaauauugugguguuug

SEQ ID NO: 3061293 - RNA, 19 nt, Artificial Sequence
  Description of Artificial Sequence: Synthetic oligonucleotide
gucguuuccaccacuccag

SEQ ID NO: 3061294 - RNA, 19 nt, Artificial Sequence
  Description of Artificial Sequence: Synthetic oligonucleotide
gaauuucauuuucuccaga

SEQ ID NO: 3061295 - RNA, 19 nt, Artificial Sequence
  Description of Artificial Sequence: Synthetic oligonucleotide
aggcaggucccaaaucacc

SEQ ID NO: 3061296 - RNA, 19 nt, Artificial Sequence
  Description of Artificial Sequence: Synthetic oligonucleotide
aaagcguguggcagaaaca

SEQ ID NO: 3061297 - RNA, 19 nt, Artificial Sequence
  Description of Artificial Sequence: Synthetic oligonucleotide
ccagauagucuuugggugg

SEQ ID NO: 3061298 - RNA, 19 nt, Artificial Sequence
  Description of Artificial Sequence: Synthetic oligonucleotide
uggacgucucuccaugguc

SEQ ID NO: 3061299 - RNA, 19 nt, Artificial Sequence
  Description of Artificial Sequence: Synthetic oligonucleotide
aaucaccacauugggaaua

SEQ ID NO: 3061300 - RNA, 19 nt, Artificial Sequence
  Description of Artificial Sequence: Synthetic oligonucleotide
gaugaagcuggauuucccu

SEQ ID NO: 3061301 - RNA, 19 nt, Artificial Sequence
  Description of Artificial Sequence: Synthetic oligonucleotide
cagauagucuuuggguggg

SEQ ID NO: 3061302 - RNA, 19 nt, Artificial Sequence
  Description of Artificial Sequence: Synthetic oligonucleotide
auagucuuugggugggaaa

SEQ ID NO: 3061303 - RNA, 19 nt, Artificial Sequence
  Description of Artificial Sequence: Synthetic oligonucleotide
uuuucuccagauagucuuu

SEQ ID NO: 3061304 - RNA, 19 nt, Artificial Sequence
  Description of Artificial Sequence: Synthetic oligonucleotide
uggucguuuccaccacucc

SEQ ID NO: 3061305 - RNA, 19 nt, Artificial Sequence
  Description of Artificial Sequence: Synthetic oligonucleotide
agcaacauugaguggggua

SEQ ID NO: 3061306 - RNA, 19 nt, Artificial Sequence
  Description of Artificial Sequence: Synthetic oligonucleotide
auugugguguuuguaugga

SEQ ID NO: 3061307 - RNA, 19 nt, Artificial Sequence
  Description of Artificial Sequence: Synthetic oligonucleotide
cauugggaauauuguggug

SEQ ID NO: 3061308 - RNA, 19 nt, Artificial Sequence
  Description of Artificial Sequence: Synthetic oligonucleotide
accacuccaguuucagcug

SEQ ID NO: 3061309 - RNA, 19 nt, Artificial Sequence
  Description of Artificial Sequence: Synthetic oligonucleotide
cccaaaucaccacauuggg

SEQ ID NO: 3061310 - RNA, 19 nt, Artificial Sequence
  Description of Artificial Sequence: Synthetic oligonucleotide
gcuuccaauaccaggcagg

SEQ ID NO: 3061311 - RNA, 19 nt, Artificial Sequence
  Description of Artificial Sequence: Synthetic oligonucleotide
uugugguguuuguauggac

SEQ ID NO: 3061312 - RNA, 19 nt, Artificial Sequence
  Description of Artificial Sequence: Synthetic oligonucleotide
acagcaacauugagugggg

SEQ ID NO: 3061313 - RNA, 19 nt, Artificial Sequence
  Description of Artificial Sequence: Synthetic oligonucleotide
gcaacauugagugggguac

SEQ ID NO: 3061314 - RNA, 19 nt, Artificial Sequence
  Description of Artificial Sequence: Synthetic oligonucleotide
  modified_base (17)..(17): a, c, u, g, unknown or other
uucaugcccaaccccunuc

SEQ ID NO: 3061315 - RNA, 19 nt, Artificial Sequence
  Description of Artificial Sequence: Synthetic oligonucleotide
ggacgucucuccauggucg

SEQ ID NO: 3061316 - RNA, 19 nt, Artificial Sequence
  Description of Artificial Sequence: Synthetic oligonucleotide
ucuccggucacagcaacau

SEQ ID NO: 3061317 - RNA, 19 nt, Artificial Sequence
  Description of Artificial Sequence: Synthetic oligonucleotide
auugagugggguacuguca

SEQ ID NO: 3061318 - RNA, 19 nt, Artificial Sequence
  Description of Artificial Sequence: Synthetic oligonucleotide
uugggaauauugugguguu

SEQ ID NO: 3061319 - RNA, 19 nt, Artificial Sequence
  Description of Artificial Sequence: Synthetic oligonucleotide
gaagucauacucauugaau

SEQ ID NO: 3061320 - RNA, 19 nt, Artificial Sequence
  Description of Artificial Sequence: Synthetic oligonucleotide
  modified_base (19)..(19): a, c, u, g, unknown or other
ucuucaugcccaaccccun

SEQ ID NO: 3061321 - RNA, 19 nt, Artificial Sequence
  Description of Artificial Sequence: Synthetic oligonucleotide
ucucuccggucacagcaac

SEQ ID NO: 3061322 - RNA, 19 nt, Artificial Sequence
  Description of Artificial Sequence: Synthetic oligonucleotide
ugggaaauuugugcuucca

SEQ ID NO: 3061323 - RNA, 19 nt, Artificial Sequence
  Description of Artificial Sequence: Synthetic oligonucleotide
gaauauugugguguuugua

SEQ ID NO: 3061324 - RNA, 19 nt, Artificial Sequence
  Description of Artificial Sequence: Synthetic oligonucleotide
auggucguuuccaccacuc

SEQ ID NO: 3061325 - RNA, 19 nt, Artificial Sequence
  Description of Artificial Sequence: Synthetic oligonucleotide
cuuugggugggaaauuugu

SEQ ID NO: 3061326 - RNA, 19 nt, Artificial Sequence
  Description of Artificial Sequence: Synthetic oligonucleotide
caccacuccaguuucagcu

SEQ ID NO: 3061327 - RNA, 19 nt, Artificial Sequence
  Description of Artificial Sequence: Synthetic oligonucleotide
auggacgucucuccauggu

SEQ ID NO: 3061328 - RNA, 19 nt, Artificial Sequence
  Description of Artificial Sequence: Synthetic oligonucleotide
  modified_base (15)..(15): a, c, u, g, unknown or other
caugcccaaccccunucag

SEQ ID NO: 3061329 - RNA, 19 nt, Artificial Sequence
  Description of Artificial Sequence: Synthetic oligonucleotide
gugggaaauuugugcuucc

SEQ ID NO: 3061330 - RNA, 19 nt, Artificial Sequence
  Description of Artificial Sequence: Synthetic oligonucleotide
cuggauuucccugcuccag

SEQ ID NO: 3061331 - RNA, 19 nt, Artificial Sequence
  Description of Artificial Sequence: Synthetic oligonucleotide
ucguuuccaccacuccagu

SEQ ID NO: 3061332 - RNA, 19 nt, Artificial Sequence
  Description of Artificial Sequence: Synthetic oligonucleotide
cuccagauagucuuugggu

SEQ ID NO: 3061333 - RNA, 19 nt, Artificial Sequence
  Description of Artificial Sequence: Synthetic oligonucleotide
caggcaggucccaaaucac

SEQ ID NO: 3061334 - RNA, 19 nt, Artificial Sequence
  Description of Artificial Sequence: Synthetic oligonucleotide
gcguguggcagaaacaaug

SEQ ID NO: 3061335 - RNA, 19 nt, Artificial Sequence
  Description of Artificial Sequence: Synthetic oligonucleotide
ucucuccauggucguuucc

SEQ ID NO: 3061336 - RNA, 19 nt, Artificial Sequence
  Description of Artificial Sequence: Synthetic oligonucleotide
guuuccaccacuccaguuu

SEQ ID NO: 3061337 - RNA, 19 nt, Artificial Sequence
  Description of Artificial Sequence: Synthetic oligonucleotide
  modified_base (5)..(5): a, c, u, g, unknown or other
cccunucaggcauugauga

SEQ ID NO: 3061338 - RNA, 19 nt, Artificial Sequence
  Description of Artificial Sequence: Synthetic oligonucleotide
ggaaauuugugcuuccaau

SEQ ID NO: 3061339 - RNA, 19 nt, Artificial Sequence
  Description of Artificial Sequence: Synthetic oligonucleotide
ggucguuuccaccacucca

SEQ ID NO: 3061340 - RNA, 19 nt, Artificial Sequence
  Description of Artificial Sequence: Synthetic oligonucleotide
gugguguuuguauggacgu

SEQ ID NO: 3061341 - RNA, 19 nt, Artificial Sequence
  Description of Artificial Sequence: Synthetic oligonucleotide
gauagucuuugggugggaa

SEQ ID NO: 3061342 - RNA, 19 nt, Artificial Sequence
  Description of Artificial Sequence: Synthetic oligonucleotide
cucuucaugcccaaccccu

SEQ ID NO: 3061343 - RNA, 19 nt, Artificial Sequence
  Description of Artificial Sequence: Synthetic oligonucleotide
ggugggaaauuugugcuuc

SEQ ID NO: 3061344 - RNA, 19 nt, Artificial Sequence
  Description of Artificial Sequence: Synthetic oligonucleotide
cucuccauggucguuucca

SEQ ID NO: 3061345 - RNA, 19 nt, Artificial Sequence
  Description of Artificial Sequence: Synthetic oligonucleotide
uggcagaaacaaugaugaa

SEQ ID NO: 3061346 - RNA, 19 nt, Artificial Sequence
  Description of Artificial Sequence: Synthetic oligonucleotide
acauugagugggguacugu

SEQ ID NO: 3061347 - RNA, 19 nt, Artificial Sequence
  Description of Artificial Sequence: Synthetic oligonucleotide
cuuaaagcguguggcagaa

SEQ ID NO: 3061348 - RNA, 19 nt, Artificial Sequence
  Description of Artificial Sequence: Synthetic oligonucleotide
aucaccacauugggaauau

SEQ ID NO: 3061349 - RNA, 19 nt, Artificial Sequence
  Description of Artificial Sequence: Synthetic oligonucleotide
caaugaugaagaagucaua

SEQ ID NO: 3061350 - RNA, 19 nt, Artificial Sequence
  Description of Artificial Sequence: Synthetic oligonucleotide
ugcuccagucucuccgguc

SEQ ID NO: 3061351 - RNA, 19 nt, Artificial Sequence
  Description of Artificial Sequence: Synthetic oligonucleotide
cagaaacaaugaugaagaa

SEQ ID NO: 3061352 - RNA, 19 nt, Artificial Sequence
  Description of Artificial Sequence: Synthetic oligonucleotide
ccaggcaggucccaaauca

SEQ ID NO: 3061353 - RNA, 19 nt, Artificial Sequence
  Description of Artificial Sequence: Synthetic oligonucleotide
gggaaauuugugcuuccaa

SEQ ID NO: 3061354 - RNA, 19 nt, Artificial Sequence
  Description of Artificial Sequence: Synthetic oligonucleotide
ugagugggguacugucaau

SEQ ID NO: 3061355 - RNA, 19 nt, Artificial Sequence
  Description of Artificial Sequence: Synthetic oligonucleotide
ccaauaccaggcagguccc

SEQ ID NO: 3061356 - RNA, 19 nt, Artificial Sequence
  Description of Artificial Sequence: Synthetic oligonucleotide
gauuucccugcuccagucu

SEQ ID NO: 3061357 - RNA, 19 nt, Artificial Sequence
  Description of Artificial Sequence: Synthetic oligonucleotide
ggauuucccugcuccaguc

SEQ ID NO: 3061358 - RNA, 19 nt, Artificial Sequence
  Description of Artificial Sequence: Synthetic oligonucleotide
ugguguuuguauggacguc

SEQ ID NO: 3061359 - RNA, 19 nt, Artificial Sequence
  Description of Artificial Sequence: Synthetic oligonucleotide
gcauugaugaagcuggauu

SEQ ID NO: 3061360 - RNA, 19 nt, Artificial Sequence
  Description of Artificial Sequence: Synthetic oligonucleotide
gugcuuccaauaccaggca

SEQ ID NO: 3061361 - RNA, 19 nt, Artificial Sequence
  Description of Artificial Sequence: Synthetic oligonucleotide
  modified_base (6)..(6): a, c, u, g, unknown or other
ccccunucaggcauugaug

SEQ ID NO: 3061362 - RNA, 19 nt, Artificial Sequence
  Description of Artificial Sequence: Synthetic oligonucleotide
cagucucuccggucacagc

SEQ ID NO: 3061363 - RNA, 19 nt, Artificial Sequence
  Description of Artificial Sequence: Synthetic oligonucleotide
gugggguacugucaauucu

SEQ ID NO: 3061364 - RNA, 19 nt, Artificial Sequence
  Description of Artificial Sequence: Synthetic oligonucleotide
ccaaaucaccacauuggga

SEQ ID NO: 3061365 - RNA, 19 nt, Artificial Sequence
  Description of Artificial Sequence: Synthetic oligonucleotide
gguguuuguauggacgucu

SEQ ID NO: 3061366 - RNA, 19 nt, Artificial Sequence
  Description of Artificial Sequence: Synthetic oligonucleotide
guguuuguauggacgucuc

SEQ ID NO: 3061367 - RNA, 19 nt, Artificial Sequence
  Description of Artificial Sequence: Synthetic oligonucleotide
ccucuucaugcccaacccc

SEQ ID NO: 3061368 - RNA, 19 nt, Artificial Sequence
  Description of Artificial Sequence: Synthetic oligonucleotide
ggucacagcaacauugagu

SEQ ID NO: 3061369 - RNA, 19 nt, Artificial Sequence
  Description of Artificial Sequence: Synthetic oligonucleotide
guuucagcugcaccuuccu

SEQ ID NO: 3061370 - RNA, 19 nt, Artificial Sequence
  Description of Artificial Sequence: Synthetic oligonucleotide
uccagucucuccggucaca

SEQ ID NO: 3061371 - RNA, 19 nt, Artificial Sequence
  Description of Artificial Sequence: Synthetic oligonucleotide
  modified_base (9)..(9): a, c, u, g, unknown or other
caaccccunucaggcauug

SEQ ID NO: 3061372 - RNA, 19 nt, Artificial Sequence
  Description of Artificial Sequence: Synthetic oligonucleotide
ggcaggucccaaaucacca

SEQ ID NO: 3061373 - RNA, 19 nt, Artificial Sequence
  Description of Artificial Sequence: Synthetic oligonucleotide
ccacuccaguuucagcugc

SEQ ID NO: 3061374 - RNA, 19 nt, Artificial Sequence
  Description of Artificial Sequence: Synthetic oligonucleotide
gucucuccauggucguuuc

SEQ ID NO: 3061375 - RNA, 19 nt, Artificial Sequence
  Description of Artificial Sequence: Synthetic oligonucleotide
gcaggucccaaaucaccac

SEQ ID NO: 3061376 - RNA, 19 nt, Artificial Sequence
  Description of Artificial Sequence: Synthetic oligonucleotide
uuccaauaccaggcagguc

SEQ ID NO: 3061377 - RNA, 19 nt, Artificial Sequence
  Description of Artificial Sequence: Synthetic oligonucleotide
cuuccaauaccaggcaggu

SEQ ID NO: 3061378 - RNA, 19 nt, Artificial Sequence
  Description of Artificial Sequence: Synthetic oligonucleotide
uuaaagcguguggcagaaa

SEQ ID NO: 3061379 - RNA, 19 nt, Artificial Sequence
  Description of Artificial Sequence: Synthetic oligonucleotide
agucuuugggugggaaauu

SEQ ID NO: 3061380 - RNA, 19 nt, Artificial Sequence
  Description of Artificial Sequence: Synthetic oligonucleotide
ugggaauauugugguguuu

SEQ ID NO: 3061381 - RNA, 19 nt, Artificial Sequence
  Description of Artificial Sequence: Synthetic oligonucleotide
  modified_base (8)..(8): a, c, u, g, unknown or other
aaccccunucaggcauuga

SEQ ID NO: 3061382 - RNA, 19 nt, Artificial Sequence
  Description of Artificial Sequence: Synthetic oligonucleotide
cuccagucucuccggucac

SEQ ID NO: 3061383 - RNA, 19 nt, Artificial Sequence
  Description of Artificial Sequence: Synthetic oligonucleotide
cauacucauugaauuucau

SEQ ID NO: 3061384 - RNA, 19 nt, Artificial Sequence
  Description of Artificial Sequence: Synthetic oligonucleotide
agauagucuuuggguggga

SEQ ID NO: 3061385 - RNA, 19 nt, Artificial Sequence
  Description of Artificial Sequence: Synthetic oligonucleotide
cucuccggucacagcaaca

SEQ ID NO: 3061386 - RNA, 19 nt, Artificial Sequence
  Description of Artificial Sequence: Synthetic oligonucleotide
gacgucucuccauggucgu

SEQ ID NO: 3061387 - RNA, 19 nt, Artificial Sequence
  Description of Artificial Sequence: Synthetic oligonucleotide
gcuggauuucccugcucca

SEQ ID NO: 3061388 - RNA, 19 nt, Artificial Sequence
  Description of Artificial Sequence: Synthetic oligonucleotide
gagugggguacugucaauu

SEQ ID NO: 3061389 - RNA, 19 nt, Artificial Sequence
  Description of Artificial Sequence: Synthetic oligonucleotide
cguguggcagaaacaauga

SEQ ID NO: 3061390 - RNA, 19 nt, Artificial Sequence
  Description of Artificial Sequence: Synthetic oligonucleotide
ccaccacuccaguuucagc

SEQ ID NO: 3061391 - RNA, 19 nt, Artificial Sequence
  Description of Artificial Sequence: Synthetic oligonucleotide
guguggcagaaacaaugau

SEQ ID NO: 3061392 - RNA, 19 nt, Artificial Sequence
  Description of Artificial Sequence: Synthetic oligonucleotide
ccagucucuccggucacag

SEQ ID NO: 3061393 - RNA, 19 nt, Artificial Sequence
  Description of Artificial Sequence: Synthetic oligonucleotide
agcguguggcagaaacaau

SEQ ID NO: 3061394 - RNA, 19 nt, Artificial Sequence
  Description of Artificial Sequence: Synthetic oligonucleotide
  modified_base (4)..(4): a, c, u, g, unknown or other
ccunucaggcauugaugaa

SEQ ID NO: 3061395 - RNA, 19 nt, Artificial Sequence
  Description of Artificial Sequence: Synthetic oligonucleotide
gucuuugggugggaaauuu

SEQ ID NO: 3061396 - RNA, 19 nt, Artificial Sequence
  Description of Artificial Sequence: Synthetic oligonucleotide
  modified_base (18)..(18): a, c, u, g, unknown or other
cuucaugcccaaccccunu

SEQ ID NO: 3061397 - RNA, 19 nt, Artificial Sequence
  Description of Artificial Sequence: Synthetic oligonucleotide
cauggucguuuccaccacu

SEQ ID NO: 3061398 - RNA, 19 nt, Artificial Sequence
  Description of Artificial Sequence: Synthetic oligonucleotide
ccggucacagcaacauuga

SEQ ID NO: 3061399 - RNA, 19 nt, Artificial Sequence
  Description of Artificial Sequence: Synthetic oligonucleotide
ucaccacauugggaauauu

SEQ ID NO: 3061400 - RNA, 19 nt, Artificial Sequence
  Description of Artificial Sequence: Synthetic oligonucleotide
ccauggucguuuccaccac

SEQ ID NO: 3061401 - RNA, 19 nt, Artificial Sequence
  Description of Artificial Sequence: Synthetic oligonucleotide
gucucuccggucacagcaa

SEQ ID NO: 3061402 - RNA, 19 nt, Artificial Sequence
  Description of Artificial Sequence: Synthetic oligonucleotide
caauaccaggcagguccca

SEQ ID NO: 3061403 - RNA, 19 nt, Artificial Sequence
  Description of Artificial Sequence: Synthetic oligonucleotide
caacauugagugggguacu

SEQ ID NO: 3061404 - RNA, 19 nt, Artificial Sequence
  Description of Artificial Sequence: Synthetic oligonucleotide
cagcugcaccuuccucuuc

SEQ ID NO: 3061405 - RNA, 19 nt, Artificial Sequence
  Description of Artificial Sequence: Synthetic oligonucleotide
acgucucuccauggucguu

SEQ ID NO: 3061406 - RNA, 19 nt, Artificial Sequence
  Description of Artificial Sequence: Synthetic oligonucleotide
gggugggaaauuugugcuu

SEQ ID NO: 3061407 - RNA, 19 nt, Artificial Sequence
  Description of Artificial Sequence: Synthetic oligonucleotide
  modified_base (12)..(12): a, c, u, g, unknown or other
gcccaaccccunucaggca

SEQ ID NO: 3061408 - RNA, 19 nt, Artificial Sequence
  Description of Artificial Sequence: Synthetic oligonucleotide
ggucccaaaucaccacauu

SEQ ID NO: 3061409 - RNA, 19 nt, Artificial Sequence
  Description of Artificial Sequence: Synthetic oligonucleotide
cugcuccagucucuccggu

SEQ ID NO: 3061410 - RNA, 19 nt, Artificial Sequence
  Description of Artificial Sequence: Synthetic oligonucleotide
cagcaacauugaguggggu

SEQ ID NO: 3061411 - RNA, 19 nt, Artificial Sequence
  Description of Artificial Sequence: Synthetic oligonucleotide
  modified_base (11)..(11): a, c, u, g, unknown or other
cccaaccccunucaggcau

SEQ ID NO: 3061412 - RNA, 19 nt, Artificial Sequence
  Description of Artificial Sequence: Synthetic oligonucleotide
gggguacugucaauucuuu

SEQ ID NO: 3061413 - RNA, 19 nt, Artificial Sequence
  Description of Artificial Sequence: Synthetic oligonucleotide
cuccggucacagcaacauu

SEQ ID NO: 3061414 - RNA, 19 nt, Artificial Sequence
  Description of Artificial Sequence: Synthetic oligonucleotide
  modified_base (10)..(10): a, c, u, g, unknown or other
ccaaccccunucaggcauu

SEQ ID NO: 3061415 - RNA, 19 nt, Artificial Sequence
  Description of Artificial Sequence: Synthetic oligonucleotide
cguuuccaccacuccaguu

SEQ ID NO: 3061416 - RNA, 19 nt, Artificial Sequence
  Description of Artificial Sequence: Synthetic oligonucleotide
cgucucuccauggucguuu

SEQ ID NO: 3061417 - RNA, 19 nt, Artificial Sequence
  Description of Artificial Sequence: Synthetic oligonucleotide
  modified_base (1)..(1): a, c, u, g, unknown or other
nucaggcauugaugaagcu

SEQ ID NO: 3061418 - RNA, 19 nt, Artificial Sequence
  Description of Artificial Sequence: Synthetic oligonucleotide
aaaugcagcuguuaucggc

SEQ ID NO: 3061419 - RNA, 19 nt, Artificial Sequence
  Description of Artificial Sequence: Synthetic oligonucleotide
guaaaugcagcuguuaucg

SEQ ID NO: 3061420 - RNA, 19 nt, Artificial Sequence
  Description of Artificial Sequence: Synthetic oligonucleotide
aacacggccuccuuguggc

SEQ ID NO: 3061421 - RNA, 19 nt, Artificial Sequence
  Description of Artificial Sequence: Synthetic oligonucleotide
aaugcagcuguuaucggcc

SEQ ID NO: 3061422 - RNA, 19 nt, Artificial Sequence
  Description of Artificial Sequence: Synthetic oligonucleotide
ugggacuggaagaacacgg

SEQ ID NO: 3061423 - RNA, 19 nt, Artificial Sequence
  Description of Artificial Sequence: Synthetic oligonucleotide
ugugugaucuuguugacgu

SEQ ID NO: 3061424 - RNA, 19 nt, Artificial Sequence
  Description of Artificial Sequence: Synthetic oligonucleotide
ucugcgaugaucuggguca

SEQ ID NO: 3061425 - RNA, 19 nt, Artificial Sequence
  Description of Artificial Sequence: Synthetic oligonucleotide
cuuguugacguaaaugcag

SEQ ID NO: 3061426 - RNA, 19 nt, Artificial Sequence
  Description of Artificial Sequence: Synthetic oligonucleotide
uugacguaaaugcagcugu

SEQ ID NO: 3061427 - RNA, 19 nt, Artificial Sequence
  Description of Artificial Sequence: Synthetic oligonucleotide
aagaacacggccuccuugu

SEQ ID NO: 3061428 - RNA, 19 nt, Artificial Sequence
  Description of Artificial Sequence: Synthetic oligonucleotide
uuguugacguaaaugcagc

SEQ ID NO: 3061429 - RNA, 19 nt, Artificial Sequence
  Description of Artificial Sequence: Synthetic oligonucleotide
uugggguacagcauguugu

SEQ ID NO: 3061430 - RNA, 19 nt, Artificial Sequence
  Description of Artificial Sequence: Synthetic oligonucleotide
auaguacaggcgcauggcg

SEQ ID NO: 3061431 - RNA, 19 nt, Artificial Sequence
  Description of Artificial Sequence: Synthetic oligonucleotide
acuggaagaacacggccuc

SEQ ID NO: 3061432 - RNA, 19 nt, Artificial Sequence
  Description of Artificial Sequence: Synthetic oligonucleotide
gaucuuguugacguaaaug

SEQ ID NO: 3061433 - RNA, 19 nt, Artificial Sequence
  Description of Artificial Sequence: Synthetic oligonucleotide
guuaucggccuccugcugg

SEQ ID NO: 3061434 - RNA, 19 nt, Artificial Sequence
  Description of Artificial Sequence: Synthetic oligonucleotide
ugcacacauaguacaggcg

SEQ ID NO: 3061435 - RNA, 19 nt, Artificial Sequence
  Description of Artificial Sequence: Synthetic oligonucleotide
uccacuucgugugugaucu

SEQ ID NO: 3061436 - RNA, 19 nt, Artificial Sequence
  Description of Artificial Sequence: Synthetic oligonucleotide
uccuccuugggguacagca

SEQ ID NO: 3061437 - RNA, 19 nt, Artificial Sequence
  Description of Artificial Sequence: Synthetic oligonucleotide
aguuccggcaagcaggaug

SEQ ID NO: 3061438 - RNA, 19 nt, Artificial Sequence
  Description of Artificial Sequence: Synthetic oligonucleotide
aguacaggcgcauggcguc

SEQ ID NO: 3061439 - RNA, 19 nt, Artificial Sequence
  Description of Artificial Sequence: Synthetic oligonucleotide
gaugcgguucuccuugucc

SEQ ID NO: 3061440 - RNA, 19 nt, Artificial Sequence
  Description of Artificial Sequence: Synthetic oligonucleotide
uucgugugugaucuuguug

SEQ ID NO: 3061441 - RNA, 19 nt, Artificial Sequence
  Description of Artificial Sequence: Synthetic oligonucleotide
ugcugguaaucgcaguucc

SEQ ID NO: 3061442 - RNA, 19 nt, Artificial Sequence
  Description of Artificial Sequence: Synthetic oligonucleotide
aaucgcaguuccggcaagc

SEQ ID NO: 3061443 - RNA, 19 nt, Artificial Sequence
  Description of Artificial Sequence: Synthetic oligonucleotide
uggggcggugcacacauag

SEQ ID NO: 3061444 - RNA, 19 nt, Artificial Sequence
  Description of Artificial Sequence: Synthetic oligonucleotide
gaacacggccuccuugugg

SEQ ID NO: 3061445 - RNA, 19 nt, Artificial Sequence
  Description of Artificial Sequence: Synthetic oligonucleotide
cugguaaucgcaguuccgg

SEQ ID NO: 3061446 - RNA, 19 nt, Artificial Sequence
  Description of Artificial Sequence: Synthetic oligonucleotide
gugcacacauaguacaggc

SEQ ID NO: 3061447 - RNA, 19 nt, Artificial Sequence
  Description of Artificial Sequence: Synthetic oligonucleotide
agcucguccacuucgugug

SEQ ID NO: 3061448 - RNA, 19 nt, Artificial Sequence
  Description of Artificial Sequence: Synthetic oligonucleotide
uaguacaggcgcauggcgu

SEQ ID NO: 3061449 - RNA, 19 nt, Artificial Sequence
  Description of Artificial Sequence: Synthetic oligonucleotide
gcuguuaucggccuccugc

SEQ ID NO: 3061450 - RNA, 19 nt, Artificial Sequence
  Description of Artificial Sequence: Synthetic oligonucleotide
gcacacauaguacaggcgc

SEQ ID NO: 3061451 - RNA, 19 nt, Artificial Sequence
  Description of Artificial Sequence: Synthetic oligonucleotide
ugugggacuggaagaacac

SEQ ID NO: 3061452 - RNA, 19 nt, Artificial Sequence
  Description of Artificial Sequence: Synthetic oligonucleotide
ugugaucuuguugacguaa

SEQ ID NO: 3061453 - RNA, 19 nt, Artificial Sequence
  Description of Artificial Sequence: Synthetic oligonucleotide
uccgcucgggcacuguggg

SEQ ID NO: 3061454 - RNA, 19 nt, Artificial Sequence
  Description of Artificial Sequence: Synthetic oligonucleotide
acguaaaugcagcuguuau

SEQ ID NO: 3061455 - RNA, 19 nt, Artificial Sequence
  Description of Artificial Sequence: Synthetic oligonucleotide
ggcacugugggacuggaag

SEQ ID NO: 3061456 - RNA, 19 nt, Artificial Sequence
  Description of Artificial Sequence: Synthetic oligonucleotide
uguggccacacuucugggc

SEQ ID NO: 3061457 - RNA, 19 nt, Artificial Sequence
  Description of Artificial Sequence: Synthetic oligonucleotide
uguugacguaaaugcagcu

SEQ ID NO: 3061458 - RNA, 19 nt, Artificial Sequence
  Description of Artificial Sequence: Synthetic oligonucleotide
cauaguacaggcgcauggc

SEQ ID NO: 3061459 - RNA, 19 nt, Artificial Sequence
  Description of Artificial Sequence: Synthetic oligonucleotide
guugacguaaaugcagcug

SEQ ID NO: 3061460 - RNA, 19 nt, Artificial Sequence
  Description of Artificial Sequence: Synthetic oligonucleotide
ugguaaucgcaguuccggc

SEQ ID NO: 3061461 - RNA, 19 nt, Artificial Sequence
  Description of Artificial Sequence: Synthetic oligonucleotide
cuugggguacagcauguug

SEQ ID NO: 3061462 - RNA, 19 nt, Artificial Sequence
  Description of Artificial Sequence: Synthetic oligonucleotide
ugggacacgucugcgauga

SEQ ID NO: 3061463 - RNA, 19 nt, Artificial Sequence
  Description of Artificial Sequence: Synthetic oligonucleotide
guuccggcaagcaggaugc

SEQ ID NO: 3061464 - RNA, 19 nt, Artificial Sequence
  Description of Artificial Sequence: Synthetic oligonucleotide
uguggggcggugcacacau

SEQ ID NO: 3061465 - RNA, 19 nt, Artificial Sequence
  Description of Artificial Sequence: Synthetic oligonucleotide
uccuuguggccacacuucu

SEQ ID NO: 3061466 - RNA, 19 nt, Artificial Sequence
  Description of Artificial Sequence: Synthetic oligonucleotide
ucgcaguuccggcaagcag

SEQ ID NO: 3061467 - RNA, 19 nt, Artificial Sequence
  Description of Artificial Sequence: Synthetic oligonucleotide
ugaucuuguugacguaaau

SEQ ID NO: 3061468 - RNA, 19 nt, Artificial Sequence
  Description of Artificial Sequence: Synthetic oligonucleotide
ggguacagcauguuguuac

SEQ ID NO: 3061469 - RNA, 19 nt, Artificial Sequence
  Description of Artificial Sequence: Synthetic oligonucleotide
augcgguucuccuuguccu

SEQ ID NO: 3061470 - RNA, 19 nt, Artificial Sequence
  Description of Artificial Sequence: Synthetic oligonucleotide
acucuguccagcgguggcc

SEQ ID NO: 3061471 - RNA, 19 nt, Artificial Sequence
  Description of Artificial Sequence: Synthetic oligonucleotide
uguuaucggccuccugcug

SEQ ID NO: 3061472 - RNA, 19 nt, Artificial Sequence
  Description of Artificial Sequence: Synthetic oligonucleotide
cacgucugcgaugaucugg

SEQ ID NO: 3061473 - RNA, 19 nt, Artificial Sequence
  Description of Artificial Sequence: Synthetic oligonucleotide
ggucagcucguccacuucg

SEQ ID NO: 3061474 - RNA, 19 nt, Artificial Sequence
  Description of Artificial Sequence: Synthetic oligonucleotide
uuguggccacacuucuggg

SEQ ID NO: 3061475 - RNA, 19 nt, Artificial Sequence
  Description of Artificial Sequence: Synthetic oligonucleotide
uaaucgcaguuccggcaag

SEQ ID NO: 3061476 - RNA, 19 nt, Artificial Sequence
  Description of Artificial Sequence: Synthetic oligonucleotide
uacagcauguuguuaccuu

SEQ ID NO: 3061477 - RNA, 19 nt, Artificial Sequence
  Description of Artificial Sequence: Synthetic oligonucleotide
aguguggggcggugcacac

SEQ ID NO: 3061478 - RNA, 19 nt, Artificial Sequence
  Description of Artificial Sequence: Synthetic oligonucleotide
gugugugaucuuguugacg

SEQ ID NO: 3061479 - RNA, 19 nt, Artificial Sequence
  Description of Artificial Sequence: Synthetic oligonucleotide
gacacgucugcgaugaucu

SEQ ID NO: 3061480 - RNA, 19 nt, Artificial Sequence
  Description of Artificial Sequence: Synthetic oligonucleotide
uccggcaagcaggaugcgg

SEQ ID NO: 3061481 - RNA, 19 nt, Artificial Sequence
  Description of Artificial Sequence: Synthetic oligonucleotide
guggccacacuucugggca

SEQ ID NO: 3061482 - RNA, 19 nt, Artificial Sequence
  Description of Artificial Sequence: Synthetic oligonucleotide
guaaucgcaguuccggcaa

SEQ ID NO: 3061483 - RNA, 19 nt, Artificial Sequence
  Description of Artificial Sequence: Synthetic oligonucleotide
ucagcucguccacuucgug

SEQ ID NO: 3061484 - RNA, 19 nt, Artificial Sequence
  Description of Artificial Sequence: Synthetic oligonucleotide
acugugggacuggaagaac

SEQ ID NO: 3061485 - RNA, 19 nt, Artificial Sequence
  Description of Artificial Sequence: Synthetic oligonucleotide
gaucugggucagcucgucc

SEQ ID NO: 3061486 - RNA, 19 nt, Artificial Sequence
  Description of Artificial Sequence: Synthetic oligonucleotide
ggacuggaagaacacggcc

SEQ ID NO: 3061487 - RNA, 19 nt, Artificial Sequence
  Description of Artificial Sequence: Synthetic oligonucleotide
gguacagcauguuguuacc

SEQ ID NO: 3061488 - RNA, 19 nt, Artificial Sequence
  Description of Artificial Sequence: Synthetic oligonucleotide
cugugggacuggaagaaca

SEQ ID NO: 3061489 - RNA, 19 nt, Artificial Sequence
  Description of Artificial Sequence: Synthetic oligonucleotide
uuaucggccuccugcuggu

SEQ ID NO: 3061490 - RNA, 19 nt, Artificial Sequence
  Description of Artificial Sequence: Synthetic oligonucleotide
ucacucuguccagcggugg

SEQ ID NO: 3061491 - RNA, 19 nt, Artificial Sequence
  Description of Artificial Sequence: Synthetic oligonucleotide
ggugcacacauaguacagg

SEQ ID NO: 3061492 - RNA, 19 nt, Artificial Sequence
  Description of Artificial Sequence: Synthetic oligonucleotide
aggcgcauggcguccuccg

SEQ ID NO: 3061493 - RNA, 19 nt, Artificial Sequence
  Description of Artificial Sequence: Synthetic oligonucleotide
cuccuuguggccacacuuc

SEQ ID NO: 3061494 - RNA, 19 nt, Artificial Sequence
  Description of Artificial Sequence: Synthetic oligonucleotide
gugggacuggaagaacacg

SEQ ID NO: 3061495 - RNA, 19 nt, Artificial Sequence
  Description of Artificial Sequence: Synthetic oligonucleotide
cgcaguuccggcaagcagg

SEQ ID NO: 3061496 - RNA, 19 nt, Artificial Sequence
  Description of Artificial Sequence: Synthetic oligonucleotide
gucugcgaugaucuggguc

SEQ ID NO: 3061497 - RNA, 19 nt, Artificial Sequence
  Description of Artificial Sequence: Synthetic oligonucleotide
gguaaucgcaguuccggca

SEQ ID NO: 3061498 - RNA, 19 nt, Artificial Sequence
  Description of Artificial Sequence: Synthetic oligonucleotide
aggggugguccuccguccg

SEQ ID NO: 3061499 - RNA, 19 nt, Artificial Sequence
  Description of Artificial Sequence: Synthetic oligonucleotide
cuccugcugguaaucgcag

SEQ ID NO: 3061500 - RNA, 19 nt, Artificial Sequence
  Description of Artificial Sequence: Synthetic oligonucleotide
cacacauaguacaggcgca

SEQ ID NO: 3061501 - RNA, 19 nt, Artificial Sequence
  Description of Artificial Sequence: Synthetic oligonucleotide
ugacguaaaugcagcuguu

SEQ ID NO: 3061502 - RNA, 19 nt, Artificial Sequence
  Description of Artificial Sequence: Synthetic oligonucleotide
uccuccguccgcggcagcg

SEQ ID NO: 3061503 - RNA, 19 nt, Artificial Sequence
  Description of Artificial Sequence: Synthetic oligonucleotide
ugggguacagcauguuguu

SEQ ID NO: 3061504 - RNA, 19 nt, Artificial Sequence
  Description of Artificial Sequence: Synthetic oligonucleotide
cuccgcucgggcacugugg

SEQ ID NO: 3061505 - RNA, 19 nt, Artificial Sequence
  Description of Artificial Sequence: Synthetic oligonucleotide
ugguccuccguccgcggca

SEQ ID NO: 3061506 - RNA, 19 nt, Artificial Sequence
  Description of Artificial Sequence: Synthetic oligonucleotide
cacuucgugugugaucuug

SEQ ID NO: 3061507 - RNA, 19 nt, Artificial Sequence
  Description of Artificial Sequence: Synthetic oligonucleotide
uggccggcaguguggggcg

SEQ ID NO: 3061508 - RNA, 19 nt, Artificial Sequence
  Description of Artificial Sequence: Synthetic oligonucleotide
agaacacggccuccuugug

SEQ ID NO: 3061509 - RNA, 19 nt, Artificial Sequence
  Description of Artificial Sequence: Synthetic oligonucleotide
gacuggaagaacacggccu

SEQ ID NO: 3061510 - RNA, 19 nt, Artificial Sequence
  Description of Artificial Sequence: Synthetic oligonucleotide
cacucuguccagcgguggc

SEQ ID NO: 3061511 - RNA, 19 nt, Artificial Sequence
  Description of Artificial Sequence: Synthetic oligonucleotide
acggccuccuuguggccac

SEQ ID NO: 3061512 - RNA, 19 nt, Artificial Sequence
  Description of Artificial Sequence: Synthetic oligonucleotide
cucuguccagcgguggccg

SEQ ID NO: 3061513 - RNA, 19 nt, Artificial Sequence
  Description of Artificial Sequence: Synthetic oligonucleotide
agcgguggccggcagugug

SEQ ID NO: 3061514 - RNA, 19 nt, Artificial Sequence
  Description of Artificial Sequence: Synthetic oligonucleotide
ucguccacuucguguguga

SEQ ID NO: 3061515 - RNA, 19 nt, Artificial Sequence
  Description of Artificial Sequence: Synthetic oligonucleotide
cauggcguccuccgcucgg

SEQ ID NO: 3061516 - RNA, 19 nt, Artificial Sequence
  Description of Artificial Sequence: Synthetic oligonucleotide
ucuguccagcgguggccgg

SEQ ID NO: 3061517 - RNA, 19 nt, Artificial Sequence
  Description of Artificial Sequence: Synthetic oligonucleotide
guggccggcaguguggggc

SEQ ID NO: 3061518 - RNA, 19 nt, Artificial Sequence
  Description of Artificial Sequence: Synthetic oligonucleotide
acacggccuccuuguggcc

SEQ ID NO: 3061519 - RNA, 19 nt, Artificial Sequence
  Description of Artificial Sequence: Synthetic oligonucleotide
uccugcugguaaucgcagu

SEQ ID NO: 3061520 - RNA, 19 nt, Artificial Sequence
  Description of Artificial Sequence: Synthetic oligonucleotide
uccguccgcggcagcgugg

SEQ ID NO: 3061521 - RNA, 19 nt, Artificial Sequence
  Description of Artificial Sequence: Synthetic oligonucleotide
uggccacacuucugggcag

SEQ ID NO: 3061522 - RNA, 19 nt, Artificial Sequence
  Description of Artificial Sequence: Synthetic oligonucleotide
gguccugggacacgucugc

SEQ ID NO: 3061523 - RNA, 19 nt, Artificial Sequence
  Description of Artificial Sequence: Synthetic oligonucleotide
acacauaguacaggcgcau

SEQ ID NO: 3061524 - RNA, 19 nt, Artificial Sequence
  Description of Artificial Sequence: Synthetic oligonucleotide
augcagcuguuaucggccu

SEQ ID NO: 3061525 - RNA, 19 nt, Artificial Sequence
  Description of Artificial Sequence: Synthetic oligonucleotide
gacguaaaugcagcuguua

SEQ ID NO: 3061526 - RNA, 19 nt, Artificial Sequence
  Description of Artificial Sequence: Synthetic oligonucleotide
ugcagcuguuaucggccuc

SEQ ID NO: 3061527 - RNA, 19 nt, Artificial Sequence
  Description of Artificial Sequence: Synthetic oligonucleotide
acuucgugugugaucuugu

SEQ ID NO: 3061528 - RNA, 19 nt, Artificial Sequence
  Description of Artificial Sequence: Synthetic oligonucleotide
cuuguccuccuugggguac

SEQ ID NO: 3061529 - RNA, 19 nt, Artificial Sequence
  Description of Artificial Sequence: Synthetic oligonucleotide
cacauaguacaggcgcaug

SEQ ID NO: 3061530 - RNA, 19 nt, Artificial Sequence
  Description of Artificial Sequence: Synthetic oligonucleotide
ugggucagcucguccacuu

SEQ ID NO: 3061531 - RNA, 19 nt, Artificial Sequence
  Description of Artificial Sequence: Synthetic oligonucleotide
agcgugggguccugggaca

SEQ ID NO: 3061532 - RNA, 19 nt, Artificial Sequence
  Description of Artificial Sequence: Synthetic oligonucleotide
cacacuucugggcaggggu

SEQ ID NO: 3061533 - RNA, 19 nt, Artificial Sequence
  Description of Artificial Sequence: Synthetic oligonucleotide
ugcgguucuccuuguccuc

SEQ ID NO: 3061534 - RNA, 19 nt, Artificial Sequence
  Description of Artificial Sequence: Synthetic oligonucleotide
cguaaaugcagcuguuauc

SEQ ID NO: 3061535 - RNA, 19 nt, Artificial Sequence
  Description of Artificial Sequence: Synthetic oligonucleotide
cuggaagaacacggccucc

SEQ ID NO: 3061536 - RNA, 19 nt, Artificial Sequence
  Description of Artificial Sequence: Synthetic oligonucleotide
gcggugcacacauaguaca

SEQ ID NO: 3061537 - RNA, 19 nt, Artificial Sequence
  Description of Artificial Sequence: Synthetic oligonucleotide
cugcugguaaucgcaguuc

SEQ ID NO: 3061538 - RNA, 19 nt, Artificial Sequence
  Description of Artificial Sequence: Synthetic oligonucleotide
acacuucugggcaggggug

SEQ ID NO: 3061539 - RNA, 19 nt, Artificial Sequence
  Description of Artificial Sequence: Synthetic oligonucleotide
aucggccuccugcugguaa

SEQ ID NO: 3061540 - RNA, 19 nt, Artificial Sequence
  Description of Artificial Sequence: Synthetic oligonucleotide
guccacuucgugugugauc

SEQ ID NO: 3061541 - RNA, 19 nt, Artificial Sequence
  Description of Artificial Sequence: Synthetic oligonucleotide
gcugguaaucgcaguuccg

SEQ ID NO: 3061542 - RNA, 19 nt, Artificial Sequence
  Description of Artificial Sequence: Synthetic oligonucleotide
aucgcaguuccggcaagca

SEQ ID NO: 3061543 - RNA, 19 nt, Artificial Sequence
  Description of Artificial Sequence: Synthetic oligonucleotide
gcagcuguuaucggccucc

SEQ ID NO: 3061544 - RNA, 19 nt, Artificial Sequence
  Description of Artificial Sequence: Synthetic oligonucleotide
ucgggcacugugggacugg

SEQ ID NO: 3061545 - RNA, 19 nt, Artificial Sequence
  Description of Artificial Sequence: Synthetic oligonucleotide
auggcguccuccgcucggg

SEQ ID NO: 3061546 - RNA, 19 nt, Artificial Sequence
  Description of Artificial Sequence: Synthetic oligonucleotide
gggacuggaagaacacggc

SEQ ID NO: 3061547 - RNA, 19 nt, Artificial Sequence
  Description of Artificial Sequence: Synthetic oligonucleotide
acacgucugcgaugaucug

SEQ ID NO: 3061548 - RNA, 19 nt, Artificial Sequence
  Description of Artificial Sequence: Synthetic oligonucleotide
agcuguuaucggccuccug

SEQ ID NO: 3061549 - RNA, 19 nt, Artificial Sequence
  Description of Artificial Sequence: Synthetic oligonucleotide
uccagcgguggccggcagu

SEQ ID NO: 3061550 - RNA, 19 nt, Artificial Sequence
  Description of Artificial Sequence: Synthetic oligonucleotide
ugaucugggucagcucguc

SEQ ID NO: 3061551 - RNA, 19 nt, Artificial Sequence
  Description of Artificial Sequence: Synthetic oligonucleotide
ucggccuccugcugguaau

SEQ ID NO: 3061552 - RNA, 19 nt, Artificial Sequence
  Description of Artificial Sequence: Synthetic oligonucleotide
uccgcggcagcgugggguc

SEQ ID NO: 3061553 - RNA, 19 nt, Artificial Sequence
  Description of Artificial Sequence: Synthetic oligonucleotide
ucugggcaggggugguccu

SEQ ID NO: 3061554 - RNA, 19 nt, Artificial Sequence
  Description of Artificial Sequence: Synthetic oligonucleotide
uuguccuccuugggguaca

SEQ ID NO: 3061555 - RNA, 19 nt, Artificial Sequence
  Description of Artificial Sequence: Synthetic oligonucleotide
uguccagcgguggccggca

SEQ ID NO: 3061556 - RNA, 19 nt, Artificial Sequence
  Description of Artificial Sequence: Synthetic oligonucleotide
aggaugcgguucuccuugu

SEQ ID NO: 3061557 - RNA, 19 nt, Artificial Sequence
  Description of Artificial Sequence: Synthetic oligonucleotide
cuguuaucggccuccugcu

SEQ ID NO: 3061558 - RNA, 19 nt, Artificial Sequence
  Description of Artificial Sequence: Synthetic oligonucleotide
cucguccacuucgugugug

SEQ ID NO: 3061559 - RNA, 19 nt, Artificial Sequence
  Description of Artificial Sequence: Synthetic oligonucleotide
augaucugggucagcucgu

SEQ ID NO: 3061560 - RNA, 19 nt, Artificial Sequence
  Description of Artificial Sequence: Synthetic oligonucleotide
guacaggcgcauggcgucc

SEQ ID NO: 3061561 - RNA, 19 nt, Artificial Sequence
  Description of Artificial Sequence: Synthetic oligonucleotide
gugaucuuguugacguaaa

SEQ ID NO: 3061562 - RNA, 19 nt, Artificial Sequence
  Description of Artificial Sequence: Synthetic oligonucleotide
ggcggugcacacauaguac

SEQ ID NO: 3061563 - RNA, 19 nt, Artificial Sequence
  Description of Artificial Sequence: Synthetic oligonucleotide
uguccuccuugggguacag

SEQ ID NO: 3061564 - RNA, 19 nt, Artificial Sequence
  Description of Artificial Sequence: Synthetic oligonucleotide
gugguccuccguccgcggc

SEQ ID NO: 3061565 - RNA, 19 nt, Artificial Sequence
  Description of Artificial Sequence: Synthetic oligonucleotide
gggcggugcacacauagua

SEQ ID NO: 3061566 - RNA, 19 nt, Artificial Sequence
  Description of Artificial Sequence: Synthetic oligonucleotide
ugcgaugaucugggucagc

SEQ ID NO: 3061567 - RNA, 19 nt, Artificial Sequence
  Description of Artificial Sequence: Synthetic oligonucleotide
uuccggcaagcaggaugcg

SEQ ID NO: 3061568 - RNA, 19 nt, Artificial Sequence
  Description of Artificial Sequence: Synthetic oligonucleotide
uggcguccuccgcucgggc

SEQ ID NO: 3061569 - RNA, 19 nt, Artificial Sequence
  Description of Artificial Sequence: Synthetic oligonucleotide
uacaggcgcauggcguccu

SEQ ID NO: 3061570 - RNA, 19 nt, Artificial Sequence
  Description of Artificial Sequence: Synthetic oligonucleotide
cuguccagcgguggccggc

SEQ ID NO: 3061571 - RNA, 19 nt, Artificial Sequence
  Description of Artificial Sequence: Synthetic oligonucleotide
cugcgaugaucugggucag

SEQ ID NO: 3061572 - RNA, 19 nt, Artificial Sequence
  Description of Artificial Sequence: Synthetic oligonucleotide
ccuccugcugguaaucgca

SEQ ID NO: 3061573 - RNA, 19 nt, Artificial Sequence
  Description of Artificial Sequence: Synthetic oligonucleotide
gcaggggugguccuccguc

SEQ ID NO: 3061574 - RNA, 19 nt, Artificial Sequence
  Description of Artificial Sequence: Synthetic oligonucleotide
gccuccugcugguaaucgc

SEQ ID NO: 3061575 - RNA, 19 nt, Artificial Sequence
  Description of Artificial Sequence: Synthetic oligonucleotide
ggugguccuccguccgcgg

SEQ ID NO: 3061576 - RNA, 19 nt, Artificial Sequence
  Description of Artificial Sequence: Synthetic oligonucleotide
guacagcauguuguuaccu

SEQ ID NO: 3061577 - RNA, 19 nt, Artificial Sequence
  Description of Artificial Sequence: Synthetic oligonucleotide
gggugguccuccguccgcg

SEQ ID NO: 3061578 - RNA, 19 nt, Artificial Sequence
  Description of Artificial Sequence: Synthetic oligonucleotide
ggccuccugcugguaaucg

SEQ ID NO: 3061579 - RNA, 19 nt, Artificial Sequence
  Description of Artificial Sequence: Synthetic oligonucleotide
cagcucguccacuucgugu

SEQ ID NO: 3061580 - RNA, 19 nt, Artificial Sequence
  Description of Artificial Sequence: Synthetic oligonucleotide
cggugcacacauaguacag

SEQ ID NO: 3061581 - RNA, 19 nt, Artificial Sequence
  Description of Artificial Sequence: Synthetic oligonucleotide
cuccguccgcggcagcgug

SEQ ID NO: 3061582 - RNA, 19 nt, Artificial Sequence
  Description of Artificial Sequence: Synthetic oligonucleotide
caggcgcauggcguccucc

SEQ ID NO: 3061583 - RNA, 19 nt, Artificial Sequence
  Description of Artificial Sequence: Synthetic oligonucleotide
ggccacacuucugggcagg

SEQ ID NO: 3061584 - RNA, 19 nt, Artificial Sequence
  Description of Artificial Sequence: Synthetic oligonucleotide
gcauggcguccuccgcucg

SEQ ID NO: 3061585 - RNA, 19 nt, Artificial Sequence
  Description of Artificial Sequence: Synthetic oligonucleotide
caguguggggcggugcaca

SEQ ID NO: 3061586 - RNA, 19 nt, Artificial Sequence
  Description of Artificial Sequence: Synthetic oligonucleotide
gugugaucuuguugacgua

SEQ ID NO: 3061587 - RNA, 19 nt, Artificial Sequence
  Description of Artificial Sequence: Synthetic oligonucleotide
gcgguucuccuuguccucc

SEQ ID NO: 3061588 - RNA, 19 nt, Artificial Sequence
  Description of Artificial Sequence: Synthetic oligonucleotide
cucgggcacugugggacug

SEQ ID NO: 3061589 - RNA, 19 nt, Artificial Sequence
  Description of Artificial Sequence: Synthetic oligonucleotide
gcguccuccgcucgggcac

SEQ ID NO: 3061590 - RNA, 19 nt, Artificial Sequence
  Description of Artificial Sequence: Synthetic oligonucleotide
caagcaggaugcgguucuc

SEQ ID NO: 3061591 - RNA, 19 nt, Artificial Sequence
  Description of Artificial Sequence: Synthetic oligonucleotide
cuucugggcaggggugguc

SEQ ID NO: 3061592 - RNA, 19 nt, Artificial Sequence
  Description of Artificial Sequence: Synthetic oligonucleotide
ugggguccugggacacguc

SEQ ID NO: 3061593 - RNA, 19 nt, Artificial Sequence
  Description of Artificial Sequence: Synthetic oligonucleotide
ggguccugggacacgucug

SEQ ID NO: 3061594 - RNA, 19 nt, Artificial Sequence
  Description of Artificial Sequence: Synthetic oligonucleotide
cgugugugaucuuguugac

SEQ ID NO: 3061595 - RNA, 19 nt, Artificial Sequence
  Description of Artificial Sequence: Synthetic oligonucleotide
ggcgcauggcguccuccgc

SEQ ID NO: 3061596 - RNA, 19 nt, Artificial Sequence
  Description of Artificial Sequence: Synthetic oligonucleotide
gcaguuccggcaagcagga

SEQ ID NO: 3061597 - RNA, 19 nt, Artificial Sequence
  Description of Artificial Sequence: Synthetic oligonucleotide
ggcaagcaggaugcgguuc

SEQ ID NO: 3061598 - RNA, 19 nt, Artificial Sequence
  Description of Artificial Sequence: Synthetic oligonucleotide
cacggccuccuuguggcca

SEQ ID NO: 3061599 - RNA, 19 nt, Artificial Sequence
  Description of Artificial Sequence: Synthetic oligonucleotide
cagcauguuguuaccuuuu

SEQ ID NO: 3061600 - RNA, 19 nt, Artificial Sequence
  Description of Artificial Sequence: Synthetic oligonucleotide
gcgaugaucugggucagcu

SEQ ID NO: 3061601 - RNA, 19 nt, Artificial Sequence
  Description of Artificial Sequence: Synthetic oligonucleotide
cuucgugugugaucuuguu

SEQ ID NO: 3061602 - RNA, 19 nt, Artificial Sequence
  Description of Artificial Sequence: Synthetic oligonucleotide
gcgguggccggcagugugg

SEQ ID NO: 3061603 - RNA, 19 nt, Artificial Sequence
  Description of Artificial Sequence: Synthetic oligonucleotide
ggggugguccuccguccgc

SEQ ID NO: 3061604 - RNA, 19 nt, Artificial Sequence
  Description of Artificial Sequence: Synthetic oligonucleotide
gcagcgugggguccuggga

SEQ ID NO: 3061605 - RNA, 19 nt, Artificial Sequence
  Description of Artificial Sequence: Synthetic oligonucleotide
ccagcgguggccggcagug

SEQ ID NO: 3061606 - RNA, 19 nt, Artificial Sequence
  Description of Artificial Sequence: Synthetic oligonucleotide
gguccuccguccgcggcag

SEQ ID NO: 3061607 - RNA, 19 nt, Artificial Sequence
  Description of Artificial Sequence: Synthetic oligonucleotide
ggaugcgguucuccuuguc

SEQ ID NO: 3061608 - RNA, 19 nt, Artificial Sequence
  Description of Artificial Sequence: Synthetic oligonucleotide
gguggccggcagugugggg

SEQ ID NO: 3061609 - RNA, 19 nt, Artificial Sequence
  Description of Artificial Sequence: Synthetic oligonucleotide
guccuccuugggguacagc

SEQ ID NO: 3061610 - RNA, 19 nt, Artificial Sequence
  Description of Artificial Sequence: Synthetic oligonucleotide
ccacacuucugggcagggg

SEQ ID NO: 3061611 - RNA, 19 nt, Artificial Sequence
  Description of Artificial Sequence: Synthetic oligonucleotide
ggcguccuccgcucgggca

SEQ ID NO: 3061612 - RNA, 19 nt, Artificial Sequence
  Description of Artificial Sequence: Synthetic oligonucleotide
guccagcgguggccggcag

SEQ ID NO: 3061613 - RNA, 19 nt, Artificial Sequence
  Description of Artificial Sequence: Synthetic oligonucleotide
gggucagcucguccacuuc

SEQ ID NO: 3061614 - RNA, 19 nt, Artificial Sequence
  Description of Artificial Sequence: Synthetic oligonucleotide
gugggguccugggacacgu

SEQ ID NO: 3061615 - RNA, 19 nt, Artificial Sequence
  Description of Artificial Sequence: Synthetic oligonucleotide
ccggcaagcaggaugcggu

SEQ ID NO: 3061616 - RNA, 19 nt, Artificial Sequence
  Description of Artificial Sequence: Synthetic oligonucleotide
gucagcucguccacuucgu

SEQ ID NO: 3061617 - RNA, 19 nt, Artificial Sequence
  Description of Artificial Sequence: Synthetic oligonucleotide
gggcaggggugguccuccg

SEQ ID NO: 3061618 - RNA, 19 nt, Artificial Sequence
  Description of Artificial Sequence: Synthetic oligonucleotide
ccuccgcucgggcacugug

SEQ ID NO: 3061619 - RNA, 19 nt, Artificial Sequence
  Description of Artificial Sequence: Synthetic oligonucleotide
guccgcggcagcguggggu

SEQ ID NO: 3061620 - RNA, 19 nt, Artificial Sequence
  Description of Artificial Sequence: Synthetic oligonucleotide
uaucggccuccugcuggua

SEQ ID NO: 3061621 - RNA, 19 nt, Artificial Sequence
  Description of Artificial Sequence: Synthetic oligonucleotide
uccuccgcucgggcacugu

SEQ ID NO: 3061622 - RNA, 19 nt, Artificial Sequence
  Description of Artificial Sequence: Synthetic oligonucleotide
ccguccgcggcagcguggg

SEQ ID NO: 3061623 - RNA, 19 nt, Artificial Sequence
  Description of Artificial Sequence: Synthetic oligonucleotide
gcaguguggggcggugcac

SEQ ID NO: 3061624 - RNA, 19 nt, Artificial Sequence
  Description of Artificial Sequence: Synthetic oligonucleotide
ggaagaacacggccuccuu

SEQ ID NO: 3061625 - RNA, 19 nt, Artificial Sequence
  Description of Artificial Sequence: Synthetic oligonucleotide
ccugcugguaaucgcaguu

SEQ ID NO: 3061626 - RNA, 19 nt, Artificial Sequence
  Description of Artificial Sequence: Synthetic oligonucleotide
gggguacagcauguuguua

SEQ ID NO: 3061627 - RNA, 19 nt, Artificial Sequence
  Description of Artificial Sequence: Synthetic oligonucleotide
cgcauggcguccuccgcuc

SEQ ID NO: 3061628 - RNA, 19 nt, Artificial Sequence
  Description of Artificial Sequence: Synthetic oligonucleotide
gcgcauggcguccuccgcu

SEQ ID NO: 3061629 - RNA, 19 nt, Artificial Sequence
  Description of Artificial Sequence: Synthetic oligonucleotide
guccuccguccgcggcagc

SEQ ID NO: 3061630 - RNA, 19 nt, Artificial Sequence
  Description of Artificial Sequence: Synthetic oligonucleotide
ccuuguccuccuuggggua

SEQ ID NO: 3061631 - RNA, 19 nt, Artificial Sequence
  Description of Artificial Sequence: Synthetic oligonucleotide
guccuccgcucgggcacug

SEQ ID NO: 3061632 - RNA, 19 nt, Artificial Sequence
  Description of Artificial Sequence: Synthetic oligonucleotide
gcgugggguccugggacac

SEQ ID NO: 3061633 - RNA, 19 nt, Artificial Sequence
  Description of Artificial Sequence: Synthetic oligonucleotide
cugggucagcucguccacu

SEQ ID NO: 3061634 - RNA, 19 nt, Artificial Sequence
  Description of Artificial Sequence: Synthetic oligonucleotide
ggccuccuuguggccacac

SEQ ID NO: 3061635 - RNA, 19 nt, Artificial Sequence
  Description of Artificial Sequence: Synthetic oligonucleotide
ggccggcaguguggggcgg

SEQ ID NO: 3061636 - RNA, 19 nt, Artificial Sequence
  Description of Artificial Sequence: Synthetic oligonucleotide
gcucguccacuucgugugu

SEQ ID NO: 3061637 - RNA, 19 nt, Artificial Sequence
  Description of Artificial Sequence: Synthetic oligonucleotide
gcucgggcacugugggacu

SEQ ID NO: 3061638 - RNA, 19 nt, Artificial Sequence
  Description of Artificial Sequence: Synthetic oligonucleotide
gccuccuuguggccacacu

SEQ ID NO: 3061639 - RNA, 19 nt, Artificial Sequence
  Description of Artificial Sequence: Synthetic oligonucleotide
cagcuguuaucggccuccu

SEQ ID NO: 3061640 - RNA, 19 nt, Artificial Sequence
  Description of Artificial Sequence: Synthetic oligonucleotide
ggggcggugcacacauagu

SEQ ID NO: 3061641 - RNA, 19 nt, Artificial Sequence
  Description of Artificial Sequence: Synthetic oligonucleotide
ccggcaguguggggcggug

SEQ ID NO: 3061642 - RNA, 19 nt, Artificial Sequence
  Description of Artificial Sequence: Synthetic oligonucleotide
gggcacugugggacuggaa

SEQ ID NO: 3061643 - RNA, 19 nt, Artificial Sequence
  Description of Artificial Sequence: Synthetic oligonucleotide
cggcaguguggggcggugc

SEQ ID NO: 3061644 - RNA, 19 nt, Artificial Sequence
  Description of Artificial Sequence: Synthetic oligonucleotide
gcggcagcgugggguccug

SEQ ID NO: 3061645 - RNA, 19 nt, Artificial Sequence
  Description of Artificial Sequence: Synthetic oligonucleotide
ccgcucgggcacuguggga

SEQ ID NO: 3061646 - RNA, 19 nt, Artificial Sequence
  Description of Artificial Sequence: Synthetic oligonucleotide
guggggcggugcacacaua

SEQ ID NO: 3061647 - RNA, 19 nt, Artificial Sequence
  Description of Artificial Sequence: Synthetic oligonucleotide
cggccuccugcugguaauc

SEQ ID NO: 3061648 - RNA, 19 nt, Artificial Sequence
  Description of Artificial Sequence: Synthetic oligonucleotide
ccgcggcagcguggggucc

SEQ ID NO: 3061649 - RNA, 19 nt, Artificial Sequence
  Description of Artificial Sequence: Synthetic oligonucleotide
cguccgcggcagcgugggg

SEQ ID NO: 3061650 - RNA, 19 nt, Artificial Sequence
  Description of Artificial Sequence: Synthetic oligonucleotide
cagcgguggccggcagugu

SEQ ID NO: 3061651 - RNA, 19 nt, Artificial Sequence
  Description of Artificial Sequence: Synthetic oligonucleotide
cgguucuccuuguccuccu

SEQ ID NO: 3061652 - RNA, 19 nt, Artificial Sequence
  Description of Artificial Sequence: Synthetic oligonucleotide
caguuccggcaagcaggau

SEQ ID NO: 3061653 - RNA, 19 nt, Artificial Sequence
  Description of Artificial Sequence: Synthetic oligonucleotide
gggacacgucugcgaugau

SEQ ID NO: 3061654 - RNA, 19 nt, Artificial Sequence
  Description of Artificial Sequence: Synthetic oligonucleotide
gccggcaguguggggcggu

SEQ ID NO: 3061655 - RNA, 19 nt, Artificial Sequence
  Description of Artificial Sequence: Synthetic oligonucleotide
ccuccguccgcggcagcgu

SEQ ID NO: 3061656 - RNA, 19 nt, Artificial Sequence
  Description of Artificial Sequence: Synthetic oligonucleotide
cguccacuucgugugugau

SEQ ID NO: 3061657 - RNA, 19 nt, Artificial Sequence
  Description of Artificial Sequence: Synthetic oligonucleotide
cgucugcgaugaucugggu

SEQ ID NO: 3061658 - RNA, 19 nt, Artificial Sequence
  Description of Artificial Sequence: Synthetic oligonucleotide
cggcaagcaggaugcgguu

SEQ ID NO: 3061659 - RNA, 19 nt, Artificial Sequence
  Description of Artificial Sequence: Synthetic oligonucleotide
ccacuucgugugugaucuu

SEQ ID NO: 3061660 - RNA, 19 nt, Artificial Sequence
  Description of Artificial Sequence: Synthetic oligonucleotide
cgcggcagcgugggguccu

SEQ ID NO: 3061661 - RNA, 19 nt, Artificial Sequence
  Description of Artificial Sequence: Synthetic oligonucleotide
cggccuccuuguggccaca

SEQ ID NO: 3061662 - RNA, 19 nt, Artificial Sequence
  Description of Artificial Sequence: Synthetic oligonucleotide
uucauuaguggauuggugg

SEQ ID NO: 3061663 - RNA, 19 nt, Artificial Sequence
  Description of Artificial Sequence: Synthetic oligonucleotide
uuuccuagggcauugagag

SEQ ID NO: 3061664 - RNA, 19 nt, Artificial Sequence
  Description of Artificial Sequence: Synthetic oligonucleotide
ucugaaaucaaguuuggug

SEQ ID NO: 3061665 - RNA, 19 nt, Artificial Sequence
  Description of Artificial Sequence: Synthetic oligonucleotide
uuguuauuccaccugcugg

SEQ ID NO: 3061666 - RNA, 19 nt, Artificial Sequence
  Description of Artificial Sequence: Synthetic oligonucleotide
aauguuaccagaguucgag

SEQ ID NO: 3061667 - RNA, 19 nt, Artificial Sequence
  Description of Artificial Sequence: Synthetic oligonucleotide
auugagaguccucaucugc

SEQ ID NO: 3061668 - RNA, 19 nt, Artificial Sequence
  Description of Artificial Sequence: Synthetic oligonucleotide
ugcuggaauacucaugggg

SEQ ID NO: 3061669 - RNA, 19 nt, Artificial Sequence
  Description of Artificial Sequence: Synthetic oligonucleotide
guagguaucgugcugaggc

SEQ ID NO: 3061670 - RNA, 19 nt, Artificial Sequence
  Description of Artificial Sequence: Synthetic oligonucleotide
auacucaugggguuguuuc

SEQ ID NO: 3061671 - RNA, 19 nt, Artificial Sequence
  Description of Artificial Sequence: Synthetic oligonucleotide
uguuaccagaguucgagcc

SEQ ID NO: 3061672 - RNA, 19 nt, Artificial Sequence
  Description of Artificial Sequence: Synthetic oligonucleotide
uguuauuccaccugcugga

SEQ ID NO: 3061673 - RNA, 19 nt, Artificial Sequence
  Description of Artificial Sequence: Synthetic oligonucleotide
ucuguuguuauuccaccug

SEQ ID NO: 3061674 - RNA, 19 nt, Artificial Sequence
  Description of Artificial Sequence: Synthetic oligonucleotide
ugauucugaaaucaaguuu

SEQ ID NO: 3061675 - RNA, 19 nt, Artificial Sequence
  Description of Artificial Sequence: Synthetic oligonucleotide
ucauuaguggauugguggc

SEQ ID NO: 3061676 - RNA, 19 nt, Artificial Sequence
  Description of Artificial Sequence: Synthetic oligonucleotide
ugaucuguuguuauuccac

SEQ ID NO: 3061677 - RNA, 19 nt, Artificial Sequence
  Description of Artificial Sequence: Synthetic oligonucleotide
cuggccaggaaccugaggc

SEQ ID NO: 3061678 - RNA, 19 nt, Artificial Sequence
  Description of Artificial Sequence: Synthetic oligonucleotide
ugaaaucaaguuugguggc

SEQ ID NO: 3061679 - RNA, 19 nt, Artificial Sequence
  Description of Artificial Sequence: Synthetic oligonucleotide
ucauucauuaguggauugg

SEQ ID NO: 3061680 - RNA, 19 nt, Artificial Sequence
  Description of Artificial Sequence: Synthetic oligonucleotide
auuaguggauugguggccc

SEQ ID NO: 3061681 - RNA, 19 nt, Artificial Sequence
  Description of Artificial Sequence: Synthetic oligonucleotide
uccuagagcagcaguaggc

SEQ ID NO: 3061682 - RNA, 19 nt, Artificial Sequence
  Description of Artificial Sequence: Synthetic oligonucleotide
uccaauguuaccagaguuc

SEQ ID NO: 3061683 - RNA, 19 nt, Artificial Sequence
  Description of Artificial Sequence: Synthetic oligonucleotide
gaucuguuguuauuccacc

SEQ ID NO: 3061684 - RNA, 19 nt, Artificial Sequence
  Description of Artificial Sequence: Synthetic oligonucleotide
aggaaccugaggcugcagc

SEQ ID NO: 3061685 - RNA, 19 nt, Artificial Sequence
  Description of Artificial Sequence: Synthetic oligonucleotide
uguaggggaguccuagagc

SEQ ID NO: 3061686 - RNA, 19 nt, Artificial Sequence
  Description of Artificial Sequence: Synthetic oligonucleotide
auguuaccagaguucgagc

SEQ ID NO: 3061687 - RNA, 19 nt, Artificial Sequence
  Description of Artificial Sequence: Synthetic oligonucleotide
uguuggaagagcugauucu

SEQ ID NO: 3061688 - RNA, 19 nt, Artificial Sequence
  Description of Artificial Sequence: Synthetic oligonucleotide
uuucgaacaccggugcugg

SEQ ID NO: 3061689 - RNA, 19 nt, Artificial Sequence
  Description of Artificial Sequence: Synthetic oligonucleotide
aaaucaaguuugguggcug

SEQ ID NO: 3061690 - RNA, 19 nt, Artificial Sequence
  Description of Artificial Sequence: Synthetic oligonucleotide
uguuuccuagggcauugag

SEQ ID NO: 3061691 - RNA, 19 nt, Artificial Sequence
  Description of Artificial Sequence: Synthetic oligonucleotide
agagcugauucugaaauca

SEQ ID NO: 3061692 - RNA, 19 nt, Artificial Sequence
  Description of Artificial Sequence: Synthetic oligonucleotide
uuuucgaacaccggugcug

SEQ ID NO: 3061693 - RNA, 19 nt, Artificial Sequence
  Description of Artificial Sequence: Synthetic oligonucleotide
cuguuguuauuccaccugc

SEQ ID NO: 3061694 - RNA, 19 nt, Artificial Sequence
  Description of Artificial Sequence: Synthetic oligonucleotide
ccugcuggaauacucaugg

SEQ ID NO: 3061695 - RNA, 19 nt, Artificial Sequence
  Description of Artificial Sequence: Synthetic oligonucleotide
uauuccaccugcuggaaua

SEQ ID NO: 3061696 - RNA, 19 nt, Artificial Sequence
  Description of Artificial Sequence: Synthetic oligonucleotide
guuguuauuccaccugcug

SEQ ID NO: 3061697 - RNA, 19 nt, Artificial Sequence
  Description of Artificial Sequence: Synthetic oligonucleotide
auguaggggaguccuagag

SEQ ID NO: 3061698 - RNA, 19 nt, Artificial Sequence
  Description of Artificial Sequence: Synthetic oligonucleotide
agaguucgagccaucauuc

SEQ ID NO: 3061699 - RNA, 19 nt, Artificial Sequence
  Description of Artificial Sequence: Synthetic oligonucleotide
ucauguaggggaguccuag

SEQ ID NO: 3061700 - RNA, 19 nt, Artificial Sequence
  Description of Artificial Sequence: Synthetic oligonucleotide
uccuagggcauugagaguc

SEQ ID NO: 3061701 - RNA, 19 nt, Artificial Sequence
  Description of Artificial Sequence: Synthetic oligonucleotide
uuccaauguuaccagaguu

SEQ ID NO: 3061702 - RNA, 19 nt, Artificial Sequence
  Description of Artificial Sequence: Synthetic oligonucleotide
gaagagcugauucugaaau

SEQ ID NO: 3061703 - RNA, 19 nt, Artificial Sequence
  Description of Artificial Sequence: Synthetic oligonucleotide
uguuguuauuccaccugcu

SEQ ID NO: 3061704 - RNA, 19 nt, Artificial Sequence
  Description of Artificial Sequence: Synthetic oligonucleotide
guuggaagagcugauucug

SEQ ID NO: 3061705 - RNA, 19 nt, Artificial Sequence
  Description of Artificial Sequence: Synthetic oligonucleotide
agccaucauucauuagugg

SEQ ID NO: 3061706 - RNA, 19 nt, Artificial Sequence
  Description of Artificial Sequence: Synthetic oligonucleotide
aggggaguccuagagcagc

SEQ ID NO: 3061707 - RNA, 19 nt, Artificial Sequence
  Description of Artificial Sequence: Synthetic oligonucleotide
cuagagcagcaguaggccc

SEQ ID NO: 3061708 - RNA, 19 nt, Artificial Sequence
  Description of Artificial Sequence: Synthetic oligonucleotide
uacucaugggguuguuucc

SEQ ID NO: 3061709 - RNA, 19 nt, Artificial Sequence
  Description of Artificial Sequence: Synthetic oligonucleotide
uggaauacucaugggguug

SEQ ID NO: 3061710 - RNA, 19 nt, Artificial Sequence
  Description of Artificial Sequence: Synthetic oligonucleotide
caugggguuguuuccuagg

SEQ ID NO: 3061711 - RNA, 19 nt, Artificial Sequence
  Description of Artificial Sequence: Synthetic oligonucleotide
ugcugcaguagguaucgug

SEQ ID NO: 3061712 - RNA, 19 nt, Artificial Sequence
  Description of Artificial Sequence: Synthetic oligonucleotide
aggauguuggaagagcuga

SEQ ID NO: 3061713 - RNA, 19 nt, Artificial Sequence
  Description of Artificial Sequence: Synthetic oligonucleotide
aaccugaggcugcagcugu

SEQ ID NO: 3061714 - RNA, 19 nt, Artificial Sequence
  Description of Artificial Sequence: Synthetic oligonucleotide
ugcaguagguaucgugcug

SEQ ID NO: 3061715 - RNA, 19 nt, Artificial Sequence
  Description of Artificial Sequence: Synthetic oligonucleotide
gagccaucauucauuagug

SEQ ID NO: 3061716 - RNA, 19 nt, Artificial Sequence
  Description of Artificial Sequence: Synthetic oligonucleotide
ugugucuggggcugguuca

SEQ ID NO: 3061717 - RNA, 19 nt, Artificial Sequence
  Description of Artificial Sequence: Synthetic oligonucleotide
ucaucugcuggugggcugg

SEQ ID NO: 3061718 - RNA, 19 nt, Artificial Sequence
  Description of Artificial Sequence: Synthetic oligonucleotide
ucaugggguuguuuccuag

SEQ ID NO: 3061719 - RNA, 19 nt, Artificial Sequence
  Description of Artificial Sequence: Synthetic oligonucleotide
aucuguuguuauuccaccu

SEQ ID NO: 3061720 - RNA, 19 nt, Artificial Sequence
  Description of Artificial Sequence: Synthetic oligonucleotide
ugaggcuuccaauguuacc

SEQ ID NO: 3061721 - RNA, 19 nt, Artificial Sequence
  Description of Artificial Sequence: Synthetic oligonucleotide
cugguugcuggccaggaac

SEQ ID NO: 3061722 - RNA, 19 nt, Artificial Sequence
  Description of Artificial Sequence: Synthetic oligonucleotide
aguccucaucugcuggugg

SEQ ID NO: 3061723 - RNA, 19 nt, Artificial Sequence
  Description of Artificial Sequence: Synthetic oligonucleotide
  modified_base (16)..(16): a, c, u, g, unknown or other
gcagcaguaggcccgnugc

SEQ ID NO: 3061724 - RNA, 19 nt, Artificial Sequence
  Description of Artificial Sequence: Synthetic oligonucleotide
uggaaggaggugcugcagu

SEQ ID NO: 3061725 - RNA, 19 nt, Artificial Sequence
  Description of Artificial Sequence: Synthetic oligonucleotide
ugcugaucuguuguuauuc

SEQ ID NO: 3061726 - RNA, 19 nt, Artificial Sequence
  Description of Artificial Sequence: Synthetic oligonucleotide
ugggguuguuuccuagggc

SEQ ID NO: 3061727 - RNA, 19 nt, Artificial Sequence
  Description of Artificial Sequence: Synthetic oligonucleotide
aguucgagccaucauucau

SEQ ID NO: 3061728 - RNA, 19 nt, Artificial Sequence
  Description of Artificial Sequence: Synthetic oligonucleotide
ccaauguuaccagaguucg

SEQ ID NO: 3061729 - RNA, 19 nt, Artificial Sequence
  Description of Artificial Sequence: Synthetic oligonucleotide
auucugaaaucaaguuugg

SEQ ID NO: 3061730 - RNA, 19 nt, Artificial Sequence
  Description of Artificial Sequence: Synthetic oligonucleotide
gaacaccggugcuggaagg

SEQ ID NO: 3061731 - RNA, 19 nt, Artificial Sequence
  Description of Artificial Sequence: Synthetic oligonucleotide
uugcuggccaggaaccuga

SEQ ID NO: 3061732 - RNA, 19 nt, Artificial Sequence
  Description of Artificial Sequence: Synthetic oligonucleotide
cauuaguggauugguggcc

SEQ ID NO: 3061733 - RNA, 19 nt, Artificial Sequence
  Description of Artificial Sequence: Synthetic oligonucleotide
aguuugguggcugcugauc

SEQ ID NO: 3061734 - RNA, 19 nt, Artificial Sequence
  Description of Artificial Sequence: Synthetic oligonucleotide
  modified_base (12)..(12): a, c, u, g, unknown or other
caguaggcccgnugcaugg

SEQ ID NO: 3061735 - RNA, 19 nt, Artificial Sequence
  Description of Artificial Sequence: Synthetic oligonucleotide
guccuagagcagcaguagg

SEQ ID NO: 3061736 - RNA, 19 nt, Artificial Sequence
  Description of Artificial Sequence: Synthetic oligonucleotide
guccucaucugcugguggg

SEQ ID NO: 3061737 - RNA, 19 nt, Artificial Sequence
  Description of Artificial Sequence: Synthetic oligonucleotide
agcugauucugaaaucaag

SEQ ID NO: 3061738 - RNA, 19 nt, Artificial Sequence
  Description of Artificial Sequence: Synthetic oligonucleotide
aguccuagagcagcaguag

SEQ ID NO: 3061739 - RNA, 19 nt, Artificial Sequence
  Description of Artificial Sequence: Synthetic oligonucleotide
aaggauguuggaagagcug

SEQ ID NO: 3061740 - RNA, 19 nt, Artificial Sequence
  Description of Artificial Sequence: Synthetic oligonucleotide
uucgagccaucauucauua

SEQ ID NO: 3061741 - RNA, 19 nt, Artificial Sequence
  Description of Artificial Sequence: Synthetic oligonucleotide
guuaccagaguucgagcca

SEQ ID NO: 3061742 - RNA, 19 nt, Artificial Sequence
  Description of Artificial Sequence: Synthetic oligonucleotide
agggcauugagaguccuca

SEQ ID NO: 3061743 - RNA, 19 nt, Artificial Sequence
  Description of Artificial Sequence: Synthetic oligonucleotide
ggugcugcaguagguaucg

SEQ ID NO: 3061744 - RNA, 19 nt, Artificial Sequence
  Description of Artificial Sequence: Synthetic oligonucleotide
cauugagaguccucaucug

SEQ ID NO: 3061745 - RNA, 19 nt, Artificial Sequence
  Description of Artificial Sequence: Synthetic oligonucleotide
auuccaccugcuggaauac

SEQ ID NO: 3061746 - RNA, 19 nt, Artificial Sequence
  Description of Artificial Sequence: Synthetic oligonucleotide
ggcugguucauguagggga

SEQ ID NO: 3061747 - RNA, 19 nt, Artificial Sequence
  Description of Artificial Sequence: Synthetic oligonucleotide
gccaucauucauuagugga

SEQ ID NO: 3061748 - RNA, 19 nt, Artificial Sequence
  Description of Artificial Sequence: Synthetic oligonucleotide
uuauuccaccugcuggaau

SEQ ID NO: 3061749 - RNA, 19 nt, Artificial Sequence
  Description of Artificial Sequence: Synthetic oligonucleotide
aggcuuccaauguuaccag

SEQ ID NO: 3061750 - RNA, 19 nt, Artificial Sequence
  Description of Artificial Sequence: Synthetic oligonucleotide
aauacucaugggguuguuu

SEQ ID NO: 3061751 - RNA, 19 nt, Artificial Sequence
  Description of Artificial Sequence: Synthetic oligonucleotide
gaaggaggugcugcaguag

SEQ ID NO: 3061752 - RNA, 19 nt, Artificial Sequence
  Description of Artificial Sequence: Synthetic oligonucleotide
uuaguggauugguggcccc

SEQ ID NO: 3061753 - RNA, 19 nt, Artificial Sequence
  Description of Artificial Sequence: Synthetic oligonucleotide
cugaggcuuccaauguuac

SEQ ID NO: 3061754 - RNA, 19 nt, Artificial Sequence
  Description of Artificial Sequence: Synthetic oligonucleotide
agaguccucaucugcuggu

SEQ ID NO: 3061755 - RNA, 19 nt, Artificial Sequence
  Description of Artificial Sequence: Synthetic oligonucleotide
gggguuguuuccuagggca

SEQ ID NO: 3061756 - RNA, 19 nt, Artificial Sequence
  Description of Artificial Sequence: Synthetic oligonucleotide
aguagguaucgugcugagg

SEQ ID NO: 3061757 - RNA, 19 nt, Artificial Sequence
  Description of Artificial Sequence: Synthetic oligonucleotide
guuuccuagggcauugaga

SEQ ID NO: 3061758 - RNA, 19 nt, Artificial Sequence
  Description of Artificial Sequence: Synthetic oligonucleotide
uagguaucgugcugaggcu

SEQ ID NO: 3061759 - RNA, 19 nt, Artificial Sequence
  Description of Artificial Sequence: Synthetic oligonucleotide
uuaccagaguucgagccau

SEQ ID NO: 3061760 - RNA, 19 nt, Artificial Sequence
  Description of Artificial Sequence: Synthetic oligonucleotide
uaggggaguccuagagcag

SEQ ID NO: 3061761 - RNA, 19 nt, Artificial Sequence
  Description of Artificial Sequence: Synthetic oligonucleotide
gcuuccaauguuaccagag

SEQ ID NO: 3061762 - RNA, 19 nt, Artificial Sequence
  Description of Artificial Sequence: Synthetic oligonucleotide
aaguuugguggcugcugau

SEQ ID NO: 3061763 - RNA, 19 nt, Artificial Sequence
  Description of Artificial Sequence: Synthetic oligonucleotide
aacaccggugcuggaagga

SEQ ID NO: 3061764 - RNA, 19 nt, Artificial Sequence
  Description of Artificial Sequence: Synthetic oligonucleotide
gcugaucuguuguuauucc

SEQ ID NO: 3061765 - RNA, 19 nt, Artificial Sequence
  Description of Artificial Sequence: Synthetic oligonucleotide
cugaucuguuguuauucca

SEQ ID NO: 3061766 - RNA, 19 nt, Artificial Sequence
  Description of Artificial Sequence: Synthetic oligonucleotide
  modified_base (17)..(17): a, c, u, g, unknown or other
agcagcaguaggcccgnug

SEQ ID NO: 3061767 - RNA, 19 nt, Artificial Sequence
  Description of Artificial Sequence: Synthetic oligonucleotide
caccggugcuggaaggagg

SEQ ID NO: 3061768 - RNA, 19 nt, Artificial Sequence
  Description of Artificial Sequence: Synthetic oligonucleotide
caaguuugguggcugcuga

SEQ ID NO: 3061769 - RNA, 19 nt, Artificial Sequence
  Description of Artificial Sequence: Synthetic oligonucleotide
  modified_base (9)..(9): a, c, u, g, unknown or other
uaggcccgnugcauggaac

SEQ ID NO: 3061770 - RNA, 19 nt, Artificial Sequence
  Description of Artificial Sequence: Synthetic oligonucleotide
caaggauguuggaagagcu

SEQ ID NO: 3061771 - RNA, 19 nt, Artificial Sequence
  Description of Artificial Sequence: Synthetic oligonucleotide
cugcuggaauacucauggg

SEQ ID NO: 3061772 - RNA, 19 nt, Artificial Sequence
  Description of Artificial Sequence: Synthetic oligonucleotide
  modified_base (14)..(14): a, c, u, g, unknown or other
agcaguaggcccgnugcau

SEQ ID NO: 3061773 - RNA, 19 nt, Artificial Sequence
  Description of Artificial Sequence: Synthetic oligonucleotide
ugguucauguaggggaguc

SEQ ID NO: 3061774 - RNA, 19 nt, Artificial Sequence
  Description of Artificial Sequence: Synthetic oligonucleotide
acucaugggguuguuuccu

SEQ ID NO: 3061775 - RNA, 19 nt, Artificial Sequence
  Description of Artificial Sequence: Synthetic oligonucleotide
gaguucgagccaucauuca

SEQ ID NO: 3061776 - RNA, 19 nt, Artificial Sequence
  Description of Artificial Sequence: Synthetic oligonucleotide
ucgagccaucauucauuag

SEQ ID NO: 3061777 - RNA, 19 nt, Artificial Sequence
  Description of Artificial Sequence: Synthetic oligonucleotide
cugugucuggggcugguuc

SEQ ID NO: 3061778 - RNA, 19 nt, Artificial Sequence
  Description of Artificial Sequence: Synthetic oligonucleotide
ugcugaggcuuccaauguu

SEQ ID NO: 3061779 - RNA, 19 nt, Artificial Sequence
  Description of Artificial Sequence: Synthetic oligonucleotide
ugcgcugguugcuggccag

SEQ ID NO: 3061780 - RNA, 19 nt, Artificial Sequence
  Description of Artificial Sequence: Synthetic oligonucleotide
ucgaacaccggugcuggaa

SEQ ID NO: 3061781 - RNA, 19 nt, Artificial Sequence
  Description of Artificial Sequence: Synthetic oligonucleotide
uccucaucugcuggugggc

SEQ ID NO: 3061782 - RNA, 19 nt, Artificial Sequence
  Description of Artificial Sequence: Synthetic oligonucleotide
aggugcugcaguagguauc

SEQ ID NO: 3061783 - RNA, 19 nt, Artificial Sequence
  Description of Artificial Sequence: Synthetic oligonucleotide
gcauugagaguccucaucu

SEQ ID NO: 3061784 - RNA, 19 nt, Artificial Sequence
  Description of Artificial Sequence: Synthetic oligonucleotide
ugggcuggaggcugcgcug

SEQ ID NO: 3061785 - RNA, 19 nt, Artificial Sequence
  Description of Artificial Sequence: Synthetic oligonucleotide
ggggcugguucauguaggg

SEQ ID NO: 3061786 - RNA, 19 nt, Artificial Sequence
  Description of Artificial Sequence: Synthetic oligonucleotide
uggaggcugcgcugguugc

SEQ ID NO: 3061787 - RNA, 19 nt, Artificial Sequence
  Description of Artificial Sequence: Synthetic oligonucleotide
gaaaucaaguuugguggcu

SEQ ID NO: 3061788 - RNA, 19 nt, Artificial Sequence
  Description of Artificial Sequence: Synthetic oligonucleotide
uucauguaggggaguccua

SEQ ID NO: 3061789 - RNA, 19 nt, Artificial Sequence
  Description of Artificial Sequence: Synthetic oligonucleotide
aucaaguuugguggcugcu

SEQ ID NO: 3061790 - RNA, 19 nt, Artificial Sequence
  Description of Artificial Sequence: Synthetic oligonucleotide
uagggcauugagaguccuc

SEQ ID NO: 3061791 - RNA, 19 nt, Artificial Sequence
  Description of Artificial Sequence: Synthetic oligonucleotide
ucgugcugaggcuuccaau

SEQ ID NO: 3061792 - RNA, 19 nt, Artificial Sequence
  Description of Artificial Sequence: Synthetic oligonucleotide
cugauucugaaaucaaguu

SEQ ID NO: 3061793 - RNA, 19 nt, Artificial Sequence
  Description of Artificial Sequence: Synthetic oligonucleotide
ggcauugagaguccucauc

SEQ ID NO: 3061794 - RNA, 19 nt, Artificial Sequence
  Description of Artificial Sequence: Synthetic oligonucleotide
uuccuagggcauugagagu

SEQ ID NO: 3061795 - RNA, 19 nt, Artificial Sequence
  Description of Artificial Sequence: Synthetic oligonucleotide
ccuagagcagcaguaggcc

SEQ ID NO: 3061796 - RNA, 19 nt, Artificial Sequence
  Description of Artificial Sequence: Synthetic oligonucleotide
guggcugcugaucuguugu

SEQ ID NO: 3061797 - RNA, 19 nt, Artificial Sequence
  Description of Artificial Sequence: Synthetic oligonucleotide
accagaguucgagccauca

SEQ ID NO: 3061798 - RNA, 19 nt, Artificial Sequence
  Description of Artificial Sequence: Synthetic oligonucleotide
ccaaggauguuggaagagc

SEQ ID NO: 3061799 - RNA, 19 nt, Artificial Sequence
  Description of Artificial Sequence: Synthetic oligonucleotide
cgugcugaggcuuccaaug

SEQ ID NO: 3061800 - RNA, 19 nt, Artificial Sequence
  Description of Artificial Sequence: Synthetic oligonucleotide
gaguccuagagcagcagua

SEQ ID NO: 3061801 - RNA, 19 nt, Artificial Sequence
  Description of Artificial Sequence: Synthetic oligonucleotide
guugcuggccaggaaccug

SEQ ID NO: 3061802 - RNA, 19 nt, Artificial Sequence
  Description of Artificial Sequence: Synthetic oligonucleotide
gaguccucaucugcuggug

SEQ ID NO: 3061803 - RNA, 19 nt, Artificial Sequence
  Description of Artificial Sequence: Synthetic oligonucleotide
guucauguaggggaguccu

SEQ ID NO: 3061804 - RNA, 19 nt, Artificial Sequence
  Description of Artificial Sequence: Synthetic oligonucleotide
acaccggugcuggaaggag

SEQ ID NO: 3061805 - RNA, 19 nt, Artificial Sequence
  Description of Artificial Sequence: Synthetic oligonucleotide
  modified_base (10)..(10): a, c, u, g, unknown or other
guaggcccgnugcauggaa

SEQ ID NO: 3061806 - RNA, 19 nt, Artificial Sequence
  Description of Artificial Sequence: Synthetic oligonucleotide
cauucauuaguggauuggu

SEQ ID NO: 3061807 - RNA, 19 nt, Artificial Sequence
  Description of Artificial Sequence: Synthetic oligonucleotide
aucgugcugaggcuuccaa

SEQ ID NO: 3061808 - RNA, 19 nt, Artificial Sequence
  Description of Artificial Sequence: Synthetic oligonucleotide
ugcuggccaggaaccugag

SEQ ID NO: 3061809 - RNA, 19 nt, Artificial Sequence
  Description of Artificial Sequence: Synthetic oligonucleotide
ucuggggcugguucaugua

SEQ ID NO: 3061810 - RNA, 19 nt, Artificial Sequence
  Description of Artificial Sequence: Synthetic oligonucleotide
gcugguucauguaggggag

SEQ ID NO: 3061811 - RNA, 19 nt, Artificial Sequence
  Description of Artificial Sequence: Synthetic oligonucleotide
gcugauucugaaaucaagu

SEQ ID NO: 3061812 - RNA, 19 nt, Artificial Sequence
  Description of Artificial Sequence: Synthetic oligonucleotide
caauguuaccagaguucga

SEQ ID NO: 3061813 - RNA, 19 nt, Artificial Sequence
  Description of Artificial Sequence: Synthetic oligonucleotide
cauguaggggaguccuaga

SEQ ID NO: 3061814 - RNA, 19 nt, Artificial Sequence
  Description of Artificial Sequence: Synthetic oligonucleotide
cuggaaggaggugcugcag

SEQ ID NO: 3061815 - RNA, 19 nt, Artificial Sequence
  Description of Artificial Sequence: Synthetic oligonucleotide
gaggcugcgcugguugcug

SEQ ID NO: 3061816 - RNA, 19 nt, Artificial Sequence
  Description of Artificial Sequence: Synthetic oligonucleotide
uuguuuccuagggcauuga

SEQ ID NO: 3061817 - RNA, 19 nt, Artificial Sequence
  Description of Artificial Sequence: Synthetic oligonucleotide
gguggcugcugaucuguug

SEQ ID NO: 3061818 - RNA, 19 nt, Artificial Sequence
  Description of Artificial Sequence: Synthetic oligonucleotide
cuuccaauguuaccagagu

SEQ ID NO: 3061819 - RNA, 19 nt, Artificial Sequence
  Description of Artificial Sequence: Synthetic oligonucleotide
gcaguagguaucgugcuga

SEQ ID NO: 3061820 - RNA, 19 nt, Artificial Sequence
  Description of Artificial Sequence: Synthetic oligonucleotide
uaucgugcugaggcuucca

SEQ ID NO: 3061821 - RNA, 19 nt, Artificial Sequence
  Description of Artificial Sequence: Synthetic oligonucleotide
gcuggaauacucauggggu

SEQ ID NO: 3061822 - RNA, 19 nt, Artificial Sequence
  Description of Artificial Sequence: Synthetic oligonucleotide
accggugcuggaaggaggu

SEQ ID NO: 3061823 - RNA, 19 nt, Artificial Sequence
  Description of Artificial Sequence: Synthetic oligonucleotide
gguucauguaggggagucc

SEQ ID NO: 3061824 - RNA, 19 nt, Artificial Sequence
  Description of Artificial Sequence: Synthetic oligonucleotide
gagcugauucugaaaucaa

SEQ ID NO: 3061825 - RNA, 19 nt, Artificial Sequence
  Description of Artificial Sequence: Synthetic oligonucleotide
cagaguucgagccaucauu

SEQ ID NO: 3061826 - RNA, 19 nt, Artificial Sequence
  Description of Artificial Sequence: Synthetic oligonucleotide
gaggugcugcaguagguau

SEQ ID NO: 3061827 - RNA, 19 nt, Artificial Sequence
  Description of Artificial Sequence: Synthetic oligonucleotide
uucgaacaccggugcugga

SEQ ID NO: 3061828 - RNA, 19 nt, Artificial Sequence
  Description of Artificial Sequence: Synthetic oligonucleotide
guaucgugcugaggcuucc

SEQ ID NO: 3061829 - RNA, 19 nt, Artificial Sequence
  Description of Artificial Sequence: Synthetic oligonucleotide
cugaggcugcagcuguguc

SEQ ID NO: 3061830 - RNA, 19 nt, Artificial Sequence
  Description of Artificial Sequence: Synthetic oligonucleotide
agguaucgugcugaggcuu

SEQ ID NO: 3061831 - RNA, 19 nt, Artificial Sequence
  Description of Artificial Sequence: Synthetic oligonucleotide
guuauuccaccugcuggaa

SEQ ID NO: 3061832 - RNA, 19 nt, Artificial Sequence
  Description of Artificial Sequence: Synthetic oligonucleotide
  modified_base (11)..(11): a, c, u, g, unknown or other
aguaggcccgnugcaugga

SEQ ID NO: 3061833 - RNA, 19 nt, Artificial Sequence
  Description of Artificial Sequence: Synthetic oligonucleotide
gauguuggaagagcugauu

SEQ ID NO: 3061834 - RNA, 19 nt, Artificial Sequence
  Description of Artificial Sequence: Synthetic oligonucleotide
ccuagggcauugagagucc

SEQ ID NO: 3061835 - RNA, 19 nt, Artificial Sequence
  Description of Artificial Sequence: Synthetic oligonucleotide
uaccagaguucgagccauc

SEQ ID NO: 3061836 - RNA, 19 nt, Artificial Sequence
  Description of Artificial Sequence: Synthetic oligonucleotide
aggaggugcugcaguaggu

SEQ ID NO: 3061837 - RNA, 19 nt, Artificial Sequence
  Description of Artificial Sequence: Synthetic oligonucleotide
gcuggaaggaggugcugca

SEQ ID NO: 3061838 - RNA, 19 nt, Artificial Sequence
  Description of Artificial Sequence: Synthetic oligonucleotide
uuccaccugcuggaauacu

SEQ ID NO: 3061839 - RNA, 19 nt, Artificial Sequence
  Description of Artificial Sequence: Synthetic oligonucleotide
ggaaggaggugcugcagua

SEQ ID NO: 3061840 - RNA, 19 nt, Artificial Sequence
  Description of Artificial Sequence: Synthetic oligonucleotide
  modified_base (13)..(13): a, c, u, g, unknown or other
gcaguaggcccgnugcaug

SEQ ID NO: 3061841 - RNA, 19 nt, Artificial Sequence
  Description of Artificial Sequence: Synthetic oligonucleotide
gcagcugugucuggggcug

SEQ ID NO: 3061842 - RNA, 19 nt, Artificial Sequence
  Description of Artificial Sequence: Synthetic oligonucleotide
uggugggcuggaggcugcg

SEQ ID NO: 3061843 - RNA, 19 nt, Artificial Sequence
  Description of Artificial Sequence: Synthetic oligonucleotide
ugcuggugggcuggaggcu

SEQ ID NO: 3061844 - RNA, 19 nt, Artificial Sequence
  Description of Artificial Sequence: Synthetic oligonucleotide
uggcugcugaucuguuguu

SEQ ID NO: 3061845 - RNA, 19 nt, Artificial Sequence
  Description of Artificial Sequence: Synthetic oligonucleotide
cgaacaccggugcuggaag

SEQ ID NO: 3061846 - RNA, 19 nt, Artificial Sequence
  Description of Artificial Sequence: Synthetic oligonucleotide
gucuggggcugguucaugu

SEQ ID NO: 3061847 - RNA, 19 nt, Artificial Sequence
  Description of Artificial Sequence: Synthetic oligonucleotide
cgagccaucauucauuagu

SEQ ID NO: 3061848 - RNA, 19 nt, Artificial Sequence
  Description of Artificial Sequence: Synthetic oligonucleotide
gguaucgugcugaggcuuc

SEQ ID NO: 3061849 - RNA, 19 nt, Artificial Sequence
  Description of Artificial Sequence: Synthetic oligonucleotide
cugcaguagguaucgugcu

SEQ ID NO: 3061850 - RNA, 19 nt, Artificial Sequence
  Description of Artificial Sequence: Synthetic oligonucleotide
gugcugaggcuuccaaugu

SEQ ID NO: 3061851 - RNA, 19 nt, Artificial Sequence
  Description of Artificial Sequence: Synthetic oligonucleotide
caucauucauuaguggauu

SEQ ID NO: 3061852 - RNA, 19 nt, Artificial Sequence
  Description of Artificial Sequence: Synthetic oligonucleotide
cuggaauacucaugggguu

SEQ ID NO: 3061853 - RNA, 19 nt, Artificial Sequence
  Description of Artificial Sequence: Synthetic oligonucleotide
guucgagccaucauucauu

SEQ ID NO: 3061854 - RNA, 19 nt, Artificial Sequence
  Description of Artificial Sequence: Synthetic oligonucleotide
ggcuuccaauguuaccaga

SEQ ID NO: 3061855 - RNA, 19 nt, Artificial Sequence
  Description of Artificial Sequence: Synthetic oligonucleotide
cccaaggauguuggaagag

SEQ ID NO: 3061856 - RNA, 19 nt, Artificial Sequence
  Description of Artificial Sequence: Synthetic oligonucleotide
gugggcuggaggcugcgcu

SEQ ID NO: 3061857 - RNA, 19 nt, Artificial Sequence
  Description of Artificial Sequence: Synthetic oligonucleotide
  modified_base (15)..(15): a, c, u, g, unknown or other
cagcaguaggcccgnugca

SEQ ID NO: 3061858 - RNA, 19 nt, Artificial Sequence
  Description of Artificial Sequence: Synthetic oligonucleotide
ggaguccuagagcagcagu

SEQ ID NO: 3061859 - RNA, 19 nt, Artificial Sequence
  Description of Artificial Sequence: Synthetic oligonucleotide
cucaugggguuguuuccua

SEQ ID NO: 3061860 - RNA, 19 nt, Artificial Sequence
  Description of Artificial Sequence: Synthetic oligonucleotide
gggcuggaggcugcgcugg

SEQ ID NO: 3061861 - RNA, 19 nt, Artificial Sequence
  Description of Artificial Sequence: Synthetic oligonucleotide
gcugaggcuuccaauguua

SEQ ID NO: 3061862 - RNA, 19 nt, Artificial Sequence
  Description of Artificial Sequence: Synthetic oligonucleotide
gcugcugaucuguuguuau

SEQ ID NO: 3061863 - RNA, 19 nt, Artificial Sequence
  Description of Artificial Sequence: Synthetic oligonucleotide
gggaguccuagagcagcag

SEQ ID NO: 3061864 - RNA, 19 nt, Artificial Sequence
  Description of Artificial Sequence: Synthetic oligonucleotide
ggaauacucaugggguugu

SEQ ID NO: 3061865 - RNA, 19 nt, Artificial Sequence
  Description of Artificial Sequence: Synthetic oligonucleotide
cggugcuggaaggaggugc

SEQ ID NO: 3061866 - RNA, 19 nt, Artificial Sequence
  Description of Artificial Sequence: Synthetic oligonucleotide
cugcgcugguugcuggcca

SEQ ID NO: 3061867 - RNA, 19 nt, Artificial Sequence
  Description of Artificial Sequence: Synthetic oligonucleotide
ggcugcgcugguugcuggc

SEQ ID NO: 3061868 - RNA, 19 nt, Artificial Sequence
  Description of Artificial Sequence: Synthetic oligonucleotide
caggaaccugaggcugcag

SEQ ID NO: 3061869 - RNA, 19 nt, Artificial Sequence
  Description of Artificial Sequence: Synthetic oligonucleotide
ggaggugcugcaguaggua

SEQ ID NO: 3061870 - RNA, 19 nt, Artificial Sequence
  Description of Artificial Sequence: Synthetic oligonucleotide
agcugugucuggggcuggu

SEQ ID NO: 3061871 - RNA, 19 nt, Artificial Sequence
  Description of Artificial Sequence: Synthetic oligonucleotide
gcugcgcugguugcuggcc

SEQ ID NO: 3061872 - RNA, 19 nt, Artificial Sequence
  Description of Artificial Sequence: Synthetic oligonucleotide
gugcuggaaggaggugcug

SEQ ID NO: 3061873 - RNA, 19 nt, Artificial Sequence
  Description of Artificial Sequence: Synthetic oligonucleotide
ccccaaggauguuggaaga

SEQ ID NO: 3061874 - RNA, 19 nt, Artificial Sequence
  Description of Artificial Sequence: Synthetic oligonucleotide
ggugcuggaaggaggugcu

SEQ ID NO: 3061875 - RNA, 19 nt, Artificial Sequence
  Description of Artificial Sequence: Synthetic oligonucleotide
caccugcuggaauacucau

SEQ ID NO: 3061876 - RNA, 19 nt, Artificial Sequence
  Description of Artificial Sequence: Synthetic oligonucleotide
ggggaguccuagagcagca

SEQ ID NO: 3061877 - RNA, 19 nt, Artificial Sequence
  Description of Artificial Sequence: Synthetic oligonucleotide
cugcugaucuguuguuauu

SEQ ID NO: 3061878 - RNA, 19 nt, Artificial Sequence
  Description of Artificial Sequence: Synthetic oligonucleotide
cuagggcauugagaguccu

SEQ ID NO: 3061879 - RNA, 19 nt, Artificial Sequence
  Description of Artificial Sequence: Synthetic oligonucleotide
gcugguugcuggccaggaa

SEQ ID NO: 3061880 - RNA, 19 nt, Artificial Sequence
  Description of Artificial Sequence: Synthetic oligonucleotide
ggcugcugaucuguuguua

SEQ ID NO: 3061881 - RNA, 19 nt, Artificial Sequence
  Description of Artificial Sequence: Synthetic oligonucleotide
ggugggcuggaggcugcgc

SEQ ID NO: 3061882 - RNA, 19 nt, Artificial Sequence
  Description of Artificial Sequence: Synthetic oligonucleotide
gaauacucaugggguuguu

SEQ ID NO: 3061883 - RNA, 19 nt, Artificial Sequence
  Description of Artificial Sequence: Synthetic oligonucleotide
gcgcugguugcuggccagg

SEQ ID NO: 3061884 - RNA, 19 nt, Artificial Sequence
  Description of Artificial Sequence: Synthetic oligonucleotide
ggauguuggaagagcugau

SEQ ID NO: 3061885 - RNA, 19 nt, Artificial Sequence
  Description of Artificial Sequence: Synthetic oligonucleotide
gguuguuuccuagggcauu

SEQ ID NO: 3061886 - RNA, 19 nt, Artificial Sequence
  Description of Artificial Sequence: Synthetic oligonucleotide
cugguucauguaggggagu

SEQ ID NO: 3061887 - RNA, 19 nt, Artificial Sequence
  Description of Artificial Sequence: Synthetic oligonucleotide
gguugcuggccaggaaccu

SEQ ID NO: 3061888 - RNA, 19 nt, Artificial Sequence
  Description of Artificial Sequence: Synthetic oligonucleotide
caucugcuggugggcugga

SEQ ID NO: 3061889 - RNA, 19 nt, Artificial Sequence
  Description of Artificial Sequence: Synthetic oligonucleotide
ccaggaaccugaggcugca

SEQ ID NO: 3061890 - RNA, 19 nt, Artificial Sequence
  Description of Artificial Sequence: Synthetic oligonucleotide
ccagaguucgagccaucau

SEQ ID NO: 3061891 - RNA, 19 nt, Artificial Sequence
  Description of Artificial Sequence: Synthetic oligonucleotide
ccggugcuggaaggaggug

SEQ ID NO: 3061892 - RNA, 19 nt, Artificial Sequence
  Description of Artificial Sequence: Synthetic oligonucleotide
ccucaucugcuggugggcu

SEQ ID NO: 3061893 - RNA, 19 nt, Artificial Sequence
  Description of Artificial Sequence: Synthetic oligonucleotide
  modified_base (18)..(18): a, c, u, g, unknown or other
gagcagcaguaggcccgnu

SEQ ID NO: 3061894 - RNA, 19 nt, Artificial Sequence
  Description of Artificial Sequence: Synthetic oligonucleotide
gcugugucuggggcugguu

SEQ ID NO: 3061895 - RNA, 19 nt, Artificial Sequence
  Description of Artificial Sequence: Synthetic oligonucleotide
gcuggaggcugcgcugguu

SEQ ID NO: 3061896 - RNA, 19 nt, Artificial Sequence
  Description of Artificial Sequence: Synthetic oligonucleotide
aaauaauaaauguuaaaac

SEQ ID NO: 3061897 - RNA, 19 nt, Artificial Sequence
  Description of Artificial Sequence: Synthetic oligonucleotide
aauaauaaauguuaaaacu

SEQ ID NO: 3061898 - RNA, 19 nt, Artificial Sequence
  Description of Artificial Sequence: Synthetic oligonucleotide
aaauguuaaaacuugagca

SEQ ID NO: 3061899 - RNA, 19 nt, Artificial Sequence
  Description of Artificial Sequence: Synthetic oligonucleotide
aacuugagcauucagaagg

SEQ ID NO: 3061900 - RNA, 19 nt, Artificial Sequence
  Description of Artificial Sequence: Synthetic oligonucleotide
aaaaggauuugcuuaggcc

SEQ ID NO: 3061901 - RNA, 19 nt, Artificial Sequence
  Description of Artificial Sequence: Synthetic oligonucleotide
uuugcuuaggccaucagag

SEQ ID NO: 3061902 - RNA, 19 nt, Artificial Sequence
  Description of Artificial Sequence: Synthetic oligonucleotide
aaauacuccauacacauau

SEQ ID NO: 3061903 - RNA, 19 nt, Artificial Sequence
  Description of Artificial Sequence: Synthetic oligonucleotide
aaaggauuugcuuaggcca

SEQ ID NO: 3061904 - RNA, 19 nt, Artificial Sequence
  Description of Artificial Sequence: Synthetic oligonucleotide
uaauaaauguuaaaacuug

SEQ ID NO: 3061905 - RNA, 19 nt, Artificial Sequence
  Description of Artificial Sequence: Synthetic oligonucleotide
uucuaaacugcuuaugagg

SEQ ID NO: 3061906 - RNA, 19 nt, Artificial Sequence
  Description of Artificial Sequence: Synthetic oligonucleotide
aaaacuugagcauucagaa

SEQ ID NO: 3061907 - RNA, 19 nt, Artificial Sequence
  Description of Artificial Sequence: Synthetic oligonucleotide
ucuaaacugcuuaugaggc

SEQ ID NO: 3061908 - RNA, 19 nt, Artificial Sequence
  Description of Artificial Sequence: Synthetic oligonucleotide
aaucacagcacucgggagg

SEQ ID NO: 3061909 - RNA, 19 nt, Artificial Sequence
  Description of Artificial Sequence: Synthetic oligonucleotide
aauguuaaaacuugagcau

SEQ ID NO: 3061910 - RNA, 19 nt, Artificial Sequence
  Description of Artificial Sequence: Synthetic oligonucleotide
uuuagaaaugccaccauac

SEQ ID NO: 3061911 - RNA, 19 nt, Artificial Sequence
  Description of Artificial Sequence: Synthetic oligonucleotide
uacaguuuguaccaaaugu

SEQ ID NO: 3061912 - RNA, 19 nt, Artificial Sequence
  Description of Artificial Sequence: Synthetic oligonucleotide
acacauauaauucucucag

SEQ ID NO: 3061913 - RNA, 19 nt, Artificial Sequence
  Description of Artificial Sequence: Synthetic oligonucleotide
augugaauggcuucuaaac

SEQ ID NO: 3061914 - RNA, 19 nt, Artificial Sequence
  Description of Artificial Sequence: Synthetic oligonucleotide
auauaauucucucagaauu

SEQ ID NO: 3061915 - RNA, 19 nt, Artificial Sequence
  Description of Artificial Sequence: Synthetic oligonucleotide
uuuaaucacagcacucggg

SEQ ID NO: 3061916 - RNA, 19 nt, Artificial Sequence
  Description of Artificial Sequence: Synthetic oligonucleotide
guuaaaaggauuugcuuag

SEQ ID NO: 3061917 - RNA, 19 nt, Artificial Sequence
  Description of Artificial Sequence: Synthetic oligonucleotide
uuaaucacagcacucggga

SEQ ID NO: 3061918 - RNA, 19 nt, Artificial Sequence
  Description of Artificial Sequence: Synthetic oligonucleotide
auaauucucucagaauucc

SEQ ID NO: 3061919 - RNA, 19 nt, Artificial Sequence
  Description of Artificial Sequence: Synthetic oligonucleotide
auuccugugagguagggug

SEQ ID NO: 3061920 - RNA, 19 nt, Artificial Sequence
  Description of Artificial Sequence: Synthetic oligonucleotide
uuuguaccaaaugugaaug

SEQ ID NO: 3061921 - RNA, 19 nt, Artificial Sequence
  Description of Artificial Sequence: Synthetic oligonucleotide
uagcaaauacuccauacac

SEQ ID NO: 3061922 - RNA, 19 nt, Artificial Sequence
  Description of Artificial Sequence: Synthetic oligonucleotide
aguuaaaaggauuugcuua

SEQ ID NO: 3061923 - RNA, 19 nt, Artificial Sequence
  Description of Artificial Sequence: Synthetic oligonucleotide
uuaaaacuugagcauucag

SEQ ID NO: 3061924 - RNA, 19 nt, Artificial Sequence
  Description of Artificial Sequence: Synthetic oligonucleotide
ugagcuacaguuuguacca

SEQ ID NO: 3061925 - RNA, 19 nt, Artificial Sequence
  Description of Artificial Sequence: Synthetic oligonucleotide
auacacauauaauucucuc

SEQ ID NO: 3061926 - RNA, 19 nt, Artificial Sequence
  Description of Artificial Sequence: Synthetic oligonucleotide
uaaaaggauuugcuuaggc

SEQ ID NO: 3061927 - RNA, 19 nt, Artificial Sequence
  Description of Artificial Sequence: Synthetic oligonucleotide
uugagcauucagaaggcag

SEQ ID NO: 3061928 - RNA, 19 nt, Artificial Sequence
  Description of Artificial Sequence: Synthetic oligonucleotide
ugugaauggcuucuaaacu

SEQ ID NO: 3061929 - RNA, 19 nt, Artificial Sequence
  Description of Artificial Sequence: Synthetic oligonucleotide
uauaauucucucagaauuc

SEQ ID NO: 3061930 - RNA, 19 nt, Artificial Sequence
  Description of Artificial Sequence: Synthetic oligonucleotide
cauacugguaaagacaagc

SEQ ID NO: 3061931 - RNA, 19 nt, Artificial Sequence
  Description of Artificial Sequence: Synthetic oligonucleotide
uguagcaaauacuccauac

SEQ ID NO: 3061932 - RNA, 19 nt, Artificial Sequence
  Description of Artificial Sequence: Synthetic oligonucleotide
guaaagacaagcgaggcug

SEQ ID NO: 3061933 - RNA, 19 nt, Artificial Sequence
  Description of Artificial Sequence: Synthetic oligonucleotide
aaguggaguuuguuugagc

SEQ ID NO: 3061934 - RNA, 19 nt, Artificial Sequence
  Description of Artificial Sequence: Synthetic oligonucleotide
acauauaauucucucagaa

SEQ ID NO: 3061935 - RNA, 19 nt, Artificial Sequence
  Description of Artificial Sequence: Synthetic oligonucleotide
uuguuugagcuacaguuug

SEQ ID NO: 3061936 - RNA, 19 nt, Artificial Sequence
  Description of Artificial Sequence: Synthetic oligonucleotide
acuccauacacauauaauu

SEQ ID NO: 3061937 - RNA, 19 nt, Artificial Sequence
  Description of Artificial Sequence: Synthetic oligonucleotide
gaucuuugugaguuugagg

SEQ ID NO: 3061938 - RNA, 19 nt, Artificial Sequence
  Description of Artificial Sequence: Synthetic oligonucleotide
uacacauauaauucucuca

SEQ ID NO: 3061939 - RNA, 19 nt, Artificial Sequence
  Description of Artificial Sequence: Synthetic oligonucleotide
aaacuugagcauucagaag

SEQ ID NO: 3061940 - RNA, 19 nt, Artificial Sequence
  Description of Artificial Sequence: Synthetic oligonucleotide
aaugugaauggcuucuaaa

SEQ ID NO: 3061941 - RNA, 19 nt, Artificial Sequence
  Description of Artificial Sequence: Synthetic oligonucleotide
acugguaaagacaagcgag

SEQ ID NO: 3061942 - RNA, 19 nt, Artificial Sequence
  Description of Artificial Sequence: Synthetic oligonucleotide
auaauaaauguuaaaacuu

SEQ ID NO: 3061943 - RNA, 19 nt, Artificial Sequence
  Description of Artificial Sequence: Synthetic oligonucleotide
ugagguagggugcuuuuag

SEQ ID NO: 3061944 - RNA, 19 nt, Artificial Sequence
  Description of Artificial Sequence: Synthetic oligonucleotide
auaaauguuaaaacuugag

SEQ ID NO: 3061945 - RNA, 19 nt, Artificial Sequence
  Description of Artificial Sequence: Synthetic oligonucleotide
uugggcauguagcaaauac

SEQ ID NO: 3061946 - RNA, 19 nt, Artificial Sequence
  Description of Artificial Sequence: Synthetic oligonucleotide
uccauacacauauaauucu

SEQ ID NO: 3061947 - RNA, 19 nt, Artificial Sequence
  Description of Artificial Sequence: Synthetic oligonucleotide
uuagaaaugccaccauacu

SEQ ID NO: 3061948 - RNA, 19 nt, Artificial Sequence
  Description of Artificial Sequence: Synthetic oligonucleotide
uggauacacaccuuuaauc

SEQ ID NO: 3061949 - RNA, 19 nt, Artificial Sequence
  Description of Artificial Sequence: Synthetic oligonucleotide
caucagaguuucaaagugg

SEQ ID NO: 3061950 - RNA, 19 nt, Artificial Sequence
  Description of Artificial Sequence: Synthetic oligonucleotide
uguuaaaacuugagcauuc

SEQ ID NO: 3061951 - RNA, 19 nt, Artificial Sequence
  Description of Artificial Sequence: Synthetic oligonucleotide
ugagcauucagaaggcagu

SEQ ID NO: 3061952 - RNA, 19 nt, Artificial Sequence
  Description of Artificial Sequence: Synthetic oligonucleotide
aauucucucagaauuccug

SEQ ID NO: 3061953 - RNA, 19 nt, Artificial Sequence
  Description of Artificial Sequence: Synthetic oligonucleotide
cugguaaagacaagcgagg

SEQ ID NO: 3061954 - RNA, 19 nt, Artificial Sequence
  Description of Artificial Sequence: Synthetic oligonucleotide
cuccauacacauauaauuc

SEQ ID NO: 3061955 - RNA, 19 nt, Artificial Sequence
  Description of Artificial Sequence: Synthetic oligonucleotide
uacugguaaagacaagcga

SEQ ID NO: 3061956 - RNA, 19 nt, Artificial Sequence
  Description of Artificial Sequence: Synthetic oligonucleotide
cuucuaaacugcuuaugag

SEQ ID NO: 3061957 - RNA, 19 nt, Artificial Sequence
  Description of Artificial Sequence: Synthetic oligonucleotide
agcgaggcuggauacacac

SEQ ID NO: 3061958 - RNA, 19 nt, Artificial Sequence
  Description of Artificial Sequence: Synthetic oligonucleotide
aaggcaguucccauguugg

SEQ ID NO: 3061959 - RNA, 19 nt, Artificial Sequence
  Description of Artificial Sequence: Synthetic oligonucleotide
cuuuaaucacagcacucgg

SEQ ID NO: 3061960 - RNA, 19 nt, Artificial Sequence
  Description of Artificial Sequence: Synthetic oligonucleotide
uuguaccaaaugugaaugg

SEQ ID NO: 3061961 - RNA, 19 nt, Artificial Sequence
  Description of Artificial Sequence: Synthetic oligonucleotide
uguaccaaaugugaauggc

SEQ ID NO: 3061962 - RNA, 19 nt, Artificial Sequence
  Description of Artificial Sequence: Synthetic oligonucleotide
uaaagacaagcgaggcugg

SEQ ID NO: 3061963 - RNA, 19 nt, Artificial Sequence
  Description of Artificial Sequence: Synthetic oligonucleotide
uuuuagaaaugccaccaua

SEQ ID NO: 3061964 - RNA, 19 nt, Artificial Sequence
  Description of Artificial Sequence: Synthetic oligonucleotide
gauacacaccuuuaaucac

SEQ ID NO: 3061965 - RNA, 19 nt, Artificial Sequence
  Description of Artificial Sequence: Synthetic oligonucleotide
ucucucagaauuccuguga

SEQ ID NO: 3061966 - RNA, 19 nt, Artificial Sequence
  Description of Artificial Sequence: Synthetic oligonucleotide
ugcuuuuagaaaugccacc

SEQ ID NO: 3061967 - RNA, 19 nt, Artificial Sequence
  Description of Artificial Sequence: Synthetic oligonucleotide
auuugcuuaggccaucaga

SEQ ID NO: 3061968 - RNA, 19 nt, Artificial Sequence
  Description of Artificial Sequence: Synthetic oligonucleotide
agaguuucaaaguggaguu

SEQ ID NO: 3061969 - RNA, 19 nt, Artificial Sequence
  Description of Artificial Sequence: Synthetic oligonucleotide
ugcuuaugaggcuuuaaaa

SEQ ID NO: 3061970 - RNA, 19 nt, Artificial Sequence
  Description of Artificial Sequence: Synthetic oligonucleotide
cagaauuccugugagguag

SEQ ID NO: 3061971 - RNA, 19 nt, Artificial Sequence
  Description of Artificial Sequence: Synthetic oligonucleotide
gaaggcaguucccauguug

SEQ ID NO: 3061972 - RNA, 19 nt, Artificial Sequence
  Description of Artificial Sequence: Synthetic oligonucleotide
uuuguuugagcuacaguuu

SEQ ID NO: 3061973 - RNA, 19 nt, Artificial Sequence
  Description of Artificial Sequence: Synthetic oligonucleotide
guuuguuugagcuacaguu

SEQ ID NO: 3061974 - RNA, 19 nt, Artificial Sequence
  Description of Artificial Sequence: Synthetic oligonucleotide
uuaaaaggauuugcuuagg

SEQ ID NO: 3061975 - RNA, 19 nt, Artificial Sequence
  Description of Artificial Sequence: Synthetic oligonucleotide
uggaguuuguuugagcuac

SEQ ID NO: 3061976 - RNA, 19 nt, Artificial Sequence
  Description of Artificial Sequence: Synthetic oligonucleotide
aguuucaaaguggaguuug

SEQ ID NO: 3061977 - RNA, 19 nt, Artificial Sequence
  Description of Artificial Sequence: Synthetic oligonucleotide
ucccauguugggcauguag

SEQ ID NO: 3061978 - RNA, 19 nt, Artificial Sequence
  Description of Artificial Sequence: Synthetic oligonucleotide
ucucagaauuccugugagg

SEQ ID NO: 3061979 - RNA, 19 nt, Artificial Sequence
  Description of Artificial Sequence: Synthetic oligonucleotide
auacugguaaagacaagcg

SEQ ID NO: 3061980 - RNA, 19 nt, Artificial Sequence
  Description of Artificial Sequence: Synthetic oligonucleotide
ggauacacaccuuuaauca

SEQ ID NO: 3061981 - RNA, 19 nt, Artificial Sequence
  Description of Artificial Sequence: Synthetic oligonucleotide
aaaguggaguuuguuugag

SEQ ID NO: 3061982 - RNA, 19 nt, Artificial Sequence
  Description of Artificial Sequence: Synthetic oligonucleotide
ucuuugugaguuugaggcc

SEQ ID NO: 3061983 - RNA, 19 nt, Artificial Sequence
  Description of Artificial Sequence: Synthetic oligonucleotide
ugggcauguagcaaauacu

SEQ ID NO: 3061984 - RNA, 19 nt, Artificial Sequence
  Description of Artificial Sequence: Synthetic oligonucleotide
ucagaaggcaguucccaug

SEQ ID NO: 3061985 - RNA, 19 nt, Artificial Sequence
  Description of Artificial Sequence: Synthetic oligonucleotide
acaguuuguaccaaaugug

SEQ ID NO: 3061986 - RNA, 19 nt, Artificial Sequence
  Description of Artificial Sequence: Synthetic oligonucleotide
auucucucagaauuccugu

SEQ ID NO: 3061987 - RNA, 19 nt, Artificial Sequence
  Description of Artificial Sequence: Synthetic oligonucleotide
auacuccauacacauauaa

SEQ ID NO: 3061988 - RNA, 19 nt, Artificial Sequence
  Description of Artificial Sequence: Synthetic oligonucleotide
uaccaaaugugaauggcuu

SEQ ID NO: 3061989 - RNA, 19 nt, Artificial Sequence
  Description of Artificial Sequence: Synthetic oligonucleotide
uaaucacagcacucgggag

SEQ ID NO: 3061990 - RNA, 19 nt, Artificial Sequence
  Description of Artificial Sequence: Synthetic oligonucleotide
ugcuuaggccaucagaguu

SEQ ID NO: 3061991 - RNA, 19 nt, Artificial Sequence
  Description of Artificial Sequence: Synthetic oligonucleotide
uaauucucucagaauuccu

SEQ ID NO: 3061992 - RNA, 19 nt, Artificial Sequence
  Description of Artificial Sequence: Synthetic oligonucleotide
guagcaaauacuccauaca

SEQ ID NO: 3061993 - RNA, 19 nt, Artificial Sequence
  Description of Artificial Sequence: Synthetic oligonucleotide
uuugagcuacaguuuguac

SEQ ID NO: 3061994 - RNA, 19 nt, Artificial Sequence
  Description of Artificial Sequence: Synthetic oligonucleotide
uacuccauacacauauaau

SEQ ID NO: 3061995 - RNA, 19 nt, Artificial Sequence
  Description of Artificial Sequence: Synthetic oligonucleotide
acuugagcauucagaaggc

SEQ ID NO: 3061996 - RNA, 19 nt, Artificial Sequence
  Description of Artificial Sequence: Synthetic oligonucleotide
auggcuucuaaacugcuua

SEQ ID NO: 3061997 - RNA, 19 nt, Artificial Sequence
  Description of Artificial Sequence: Synthetic oligonucleotide
uucucucagaauuccugug

SEQ ID NO: 3061998 - RNA, 19 nt, Artificial Sequence
  Description of Artificial Sequence: Synthetic oligonucleotide
gcauucagaaggcaguucc

SEQ ID NO: 3061999 - RNA, 19 nt, Artificial Sequence
  Description of Artificial Sequence: Synthetic oligonucleotide
ugguaaagacaagcgaggc

SEQ ID NO: 3062000 - RNA, 19 nt, Artificial Sequence
  Description of Artificial Sequence: Synthetic oligonucleotide
cucucagaauuccugugag

SEQ ID NO: 3062001 - RNA, 19 nt, Artificial Sequence
  Description of Artificial Sequence: Synthetic oligonucleotide
cuacaguuuguaccaaaug

SEQ ID NO: 3062002 - RNA, 19 nt, Artificial Sequence
  Description of Artificial Sequence: Synthetic oligonucleotide
agggugcuuuuagaaaugc

SEQ ID NO: 3062003 - RNA, 19 nt, Artificial Sequence
  Description of Artificial Sequence: Synthetic oligonucleotide
uaaacugcuuaugaggcuu

SEQ ID NO: 3062004 - RNA, 19 nt, Artificial Sequence
  Description of Artificial Sequence: Synthetic oligonucleotide
aguuuguuugagcuacagu

SEQ ID NO: 3062005 - RNA, 19 nt, Artificial Sequence
  Description of Artificial Sequence: Synthetic oligonucleotide
caguuuguaccaaauguga

SEQ ID NO: 3062006 - RNA, 19 nt, Artificial Sequence
  Description of Artificial Sequence: Synthetic oligonucleotide
cauucagaaggcaguuccc

SEQ ID NO: 3062007 - RNA, 19 nt, Artificial Sequence
  Description of Artificial Sequence: Synthetic oligonucleotide
uagggugcuuuuagaaaug

SEQ ID NO: 3062008 - RNA, 19 nt, Artificial Sequence
  Description of Artificial Sequence: Synthetic oligonucleotide
gacaagcgaggcuggauac

SEQ ID NO: 3062009 - RNA, 19 nt, Artificial Sequence
  Description of Artificial Sequence: Synthetic oligonucleotide
uuccugugagguagggugc

SEQ ID NO: 3062010 - RNA, 19 nt, Artificial Sequence
  Description of Artificial Sequence: Synthetic oligonucleotide
ggccaucagaguuucaaag

SEQ ID NO: 3062011 - RNA, 19 nt, Artificial Sequence
  Description of Artificial Sequence: Synthetic oligonucleotide
ggugcuuuuagaaaugcca

SEQ ID NO: 3062012 - RNA, 19 nt, Artificial Sequence
  Description of Artificial Sequence: Synthetic oligonucleotide
aucagaguuucaaagugga

SEQ ID NO: 3062013 - RNA, 19 nt, Artificial Sequence
  Description of Artificial Sequence: Synthetic oligonucleotide
caccauacugguaaagaca

SEQ ID NO: 3062014 - RNA, 19 nt, Artificial Sequence
  Description of Artificial Sequence: Synthetic oligonucleotide
accauacugguaaagacaa

SEQ ID NO: 3062015 - RNA, 19 nt, Artificial Sequence
  Description of Artificial Sequence: Synthetic oligonucleotide
agguagggugcuuuuagaa

SEQ ID NO: 3062016 - RNA, 19 nt, Artificial Sequence
  Description of Artificial Sequence: Synthetic oligonucleotide
gaggaucuuugugaguuug

SEQ ID NO: 3062017 - RNA, 19 nt, Artificial Sequence
  Description of Artificial Sequence: Synthetic oligonucleotide
gaguuuguuugagcuacag

SEQ ID NO: 3062018 - RNA, 19 nt, Artificial Sequence
  Description of Artificial Sequence: Synthetic oligonucleotide
uaggccaucagaguuucaa

SEQ ID NO: 3062019 - RNA, 19 nt, Artificial Sequence
  Description of Artificial Sequence: Synthetic oligonucleotide
gcuucuaaacugcuuauga

SEQ ID NO: 3062020 - RNA, 19 nt, Artificial Sequence
  Description of Artificial Sequence: Synthetic oligonucleotide
gugcuuuuagaaaugccac

SEQ ID NO: 3062021 - RNA, 19 nt, Artificial Sequence
  Description of Artificial Sequence: Synthetic oligonucleotide
aauuccugugagguagggu

SEQ ID NO: 3062022 - RNA, 19 nt, Artificial Sequence
  Description of Artificial Sequence: Synthetic oligonucleotide
gauuugcuuaggccaucag

SEQ ID NO: 3062023 - RNA, 19 nt, Artificial Sequence
  Description of Artificial Sequence: Synthetic oligonucleotide
auucagaaggcaguuccca

SEQ ID NO: 3062024 - RNA, 19 nt, Artificial Sequence
  Description of Artificial Sequence: Synthetic oligonucleotide
gaauuccugugagguaggg

SEQ ID NO: 3062025 - RNA, 19 nt, Artificial Sequence
  Description of Artificial Sequence: Synthetic oligonucleotide
agacaagcgaggcuggaua

SEQ ID NO: 3062026 - RNA, 19 nt, Artificial Sequence
  Description of Artificial Sequence: Synthetic oligonucleotide
aaggauuugcuuaggccau

SEQ ID NO: 3062027 - RNA, 19 nt, Artificial Sequence
  Description of Artificial Sequence: Synthetic oligonucleotide
auguuaaaacuugagcauu

SEQ ID NO: 3062028 - RNA, 19 nt, Artificial Sequence
  Description of Artificial Sequence: Synthetic oligonucleotide
guagggugcuuuuagaaau

SEQ ID NO: 3062029 - RNA, 19 nt, Artificial Sequence
  Description of Artificial Sequence: Synthetic oligonucleotide
ucagaauuccugugaggua

SEQ ID NO: 3062030 - RNA, 19 nt, Artificial Sequence
  Description of Artificial Sequence: Synthetic oligonucleotide
uucagaaggcaguucccau

SEQ ID NO: 3062031 - RNA, 19 nt, Artificial Sequence
  Description of Artificial Sequence: Synthetic oligonucleotide
ccaucagaguuucaaagug

SEQ ID NO: 3062032 - RNA, 19 nt, Artificial Sequence
  Description of Artificial Sequence: Synthetic oligonucleotide
uguugggcauguagcaaau

SEQ ID NO: 3062033 - RNA, 19 nt, Artificial Sequence
  Description of Artificial Sequence: Synthetic oligonucleotide
caaaguggaguuuguuuga

SEQ ID NO: 3062034 - RNA, 19 nt, Artificial Sequence
  Description of Artificial Sequence: Synthetic oligonucleotide
uugcuuaggccaucagagu

SEQ ID NO: 3062035 - RNA, 19 nt, Artificial Sequence
  Description of Artificial Sequence: Synthetic oligonucleotide
aggcaguucccauguuggg

SEQ ID NO: 3062036 - RNA, 19 nt, Artificial Sequence
  Description of Artificial Sequence: Synthetic oligonucleotide
cccauguugggcauguagc

SEQ ID NO: 3062037 - RNA, 19 nt, Artificial Sequence
  Description of Artificial Sequence: Synthetic oligonucleotide
cauacacauauaauucucu

SEQ ID NO: 3062038 - RNA, 19 nt, Artificial Sequence
  Description of Artificial Sequence: Synthetic oligonucleotide
guuaaaacuugagcauuca

SEQ ID NO: 3062039 - RNA, 19 nt, Artificial Sequence
  Description of Artificial Sequence: Synthetic oligonucleotide
aguuuguaccaaaugugaa

SEQ ID NO: 3062040 - RNA, 19 nt, Artificial Sequence
  Description of Artificial Sequence: Synthetic oligonucleotide
aaagacaagcgaggcugga

SEQ ID NO: 3062041 - RNA, 19 nt, Artificial Sequence
  Description of Artificial Sequence: Synthetic oligonucleotide
agcauucagaaggcaguuc

SEQ ID NO: 3062042 - RNA, 19 nt, Artificial Sequence
  Description of Artificial Sequence: Synthetic oligonucleotide
ggaucuuugugaguuugag

SEQ ID NO: 3062043 - RNA, 19 nt, Artificial Sequence
  Description of Artificial Sequence: Synthetic oligonucleotide
ccauacacauauaauucuc

SEQ ID NO: 3062044 - RNA, 19 nt, Artificial Sequence
  Description of Artificial Sequence: Synthetic oligonucleotide
caagcgaggcuggauacac

SEQ ID NO: 3062045 - RNA, 19 nt, Artificial Sequence
  Description of Artificial Sequence: Synthetic oligonucleotide
cacauauaauucucucaga

SEQ ID NO: 3062046 - RNA, 19 nt, Artificial Sequence
  Description of Artificial Sequence: Synthetic oligonucleotide
uuucaaaguggaguuuguu

SEQ ID NO: 3062047 - RNA, 19 nt, Artificial Sequence
  Description of Artificial Sequence: Synthetic oligonucleotide
cagaguuucaaaguggagu

SEQ ID NO: 3062048 - RNA, 19 nt, Artificial Sequence
  Description of Artificial Sequence: Synthetic oligonucleotide
agaauuccugugagguagg

SEQ ID NO: 3062049 - RNA, 19 nt, Artificial Sequence
  Description of Artificial Sequence: Synthetic oligonucleotide
aauggcuucuaaacugcuu

SEQ ID NO: 3062050 - RNA, 19 nt, Artificial Sequence
  Description of Artificial Sequence: Synthetic oligonucleotide
gagguagggugcuuuuaga

SEQ ID NO: 3062051 - RNA, 19 nt, Artificial Sequence
  Description of Artificial Sequence: Synthetic oligonucleotide
aagacaagcgaggcuggau

SEQ ID NO: 3062052 - RNA, 19 nt, Artificial Sequence
  Description of Artificial Sequence: Synthetic oligonucleotide
gggcauguagcaaauacuc

SEQ ID NO: 3062053 - RNA, 19 nt, Artificial Sequence
  Description of Artificial Sequence: Synthetic oligonucleotide
cuuaggccaucagaguuuc

SEQ ID NO: 3062054 - RNA, 19 nt, Artificial Sequence
  Description of Artificial Sequence: Synthetic oligonucleotide
gaaaugccaccauacuggu

SEQ ID NO: 3062055 - RNA, 19 nt, Artificial Sequence
  Description of Artificial Sequence: Synthetic oligonucleotide
cauauaauucucucagaau

SEQ ID NO: 3062056 - RNA, 19 nt, Artificial Sequence
  Description of Artificial Sequence: Synthetic oligonucleotide
cugcuuaugaggcuuuaaa

SEQ ID NO: 3062057 - RNA, 19 nt, Artificial Sequence
  Description of Artificial Sequence: Synthetic oligonucleotide
agcuacaguuuguaccaaa

SEQ ID NO: 3062058 - RNA, 19 nt, Artificial Sequence
  Description of Artificial Sequence: Synthetic oligonucleotide
ccaccauacugguaaagac

SEQ ID NO: 3062059 - RNA, 19 nt, Artificial Sequence
  Description of Artificial Sequence: Synthetic oligonucleotide
uggcuucuaaacugcuuau

SEQ ID NO: 3062060 - RNA, 19 nt, Artificial Sequence
  Description of Artificial Sequence: Synthetic oligonucleotide
aauacuccauacacauaua

SEQ ID NO: 3062061 - RNA, 19 nt, Artificial Sequence
  Description of Artificial Sequence: Synthetic oligonucleotide
auguagcaaauacuccaua

SEQ ID NO: 3062062 - RNA, 19 nt, Artificial Sequence
  Description of Artificial Sequence: Synthetic oligonucleotide
ugugagguagggugcuuuu

SEQ ID NO: 3062063 - RNA, 19 nt, Artificial Sequence
  Description of Artificial Sequence: Synthetic oligonucleotide
gcaguucccauguugggca

SEQ ID NO: 3062064 - RNA, 19 nt, Artificial Sequence
  Description of Artificial Sequence: Synthetic oligonucleotide
gguagggugcuuuuagaaa

SEQ ID NO: 3062065 - RNA, 19 nt, Artificial Sequence
  Description of Artificial Sequence: Synthetic oligonucleotide
ugccaccauacugguaaag

SEQ ID NO: 3062066 - RNA, 19 nt, Artificial Sequence
  Description of Artificial Sequence: Synthetic oligonucleotide
ggcauguagcaaauacucc

SEQ ID NO: 3062067 - RNA, 19 nt, Artificial Sequence
  Description of Artificial Sequence: Synthetic oligonucleotide
aggcuggauacacaccuuu

SEQ ID NO: 3062068 - RNA, 19 nt, Artificial Sequence
  Description of Artificial Sequence: Synthetic oligonucleotide
cacagcacucgggaggcag

SEQ ID NO: 3062069 - RNA, 19 nt, Artificial Sequence
  Description of Artificial Sequence: Synthetic oligonucleotide
aggccaucagaguuucaaa

SEQ ID NO: 3062070 - RNA, 19 nt, Artificial Sequence
  Description of Artificial Sequence: Synthetic oligonucleotide
guaccaaaugugaauggcu

SEQ ID NO: 3062071 - RNA, 19 nt, Artificial Sequence
  Description of Artificial Sequence: Synthetic oligonucleotide
guuugagcuacaguuugua

SEQ ID NO: 3062072 - RNA, 19 nt, Artificial Sequence
  Description of Artificial Sequence: Synthetic oligonucleotide
ggcaguucccauguugggc

SEQ ID NO: 3062073 - RNA, 19 nt, Artificial Sequence
  Description of Artificial Sequence: Synthetic oligonucleotide
uccugugagguagggugcu

SEQ ID NO: 3062074 - RNA, 19 nt, Artificial Sequence
  Description of Artificial Sequence: Synthetic oligonucleotide
uuaggccaucagaguuuca

SEQ ID NO: 3062075 - RNA, 19 nt, Artificial Sequence
  Description of Artificial Sequence: Synthetic oligonucleotide
gcuggauacacaccuuuaa

SEQ ID NO: 3062076 - RNA, 19 nt, Artificial Sequence
  Description of Artificial Sequence: Synthetic oligonucleotide
cuaaacugcuuaugaggcu

SEQ ID NO: 3062077 - RNA, 19 nt, Artificial Sequence
  Description of Artificial Sequence: Synthetic oligonucleotide
gguaaagacaagcgaggcu

SEQ ID NO: 3062078 - RNA, 19 nt, Artificial Sequence
  Description of Artificial Sequence: Synthetic oligonucleotide
caaauacuccauacacaua

SEQ ID NO: 3062079 - RNA, 19 nt, Artificial Sequence
  Description of Artificial Sequence: Synthetic oligonucleotide
acaagcgaggcuggauaca

SEQ ID NO: 3062080 - RNA, 19 nt, Artificial Sequence
  Description of Artificial Sequence: Synthetic oligonucleotide
acugcuuaugaggcuuuaa

SEQ ID NO: 3062081 - RNA, 19 nt, Artificial Sequence
  Description of Artificial Sequence: Synthetic oligonucleotide
ggcuucuaaacugcuuaug

SEQ ID NO: 3062082 - RNA, 19 nt, Artificial Sequence
  Description of Artificial Sequence: Synthetic oligonucleotide
guggaguuuguuugagcua

SEQ ID NO: 3062083 - RNA, 19 nt, Artificial Sequence
  Description of Artificial Sequence: Synthetic oligonucleotide
cagaaggcaguucccaugu

SEQ ID NO: 3062084 - RNA, 19 nt, Artificial Sequence
  Description of Artificial Sequence: Synthetic oligonucleotide
aggaucuuugugaguuuga

SEQ ID NO: 3062085 - RNA, 19 nt, Artificial Sequence
  Description of Artificial Sequence: Synthetic oligonucleotide
cuugagcauucagaaggca

SEQ ID NO: 3062086 - RNA, 19 nt, Artificial Sequence
  Description of Artificial Sequence: Synthetic oligonucleotide
aacugcuuaugaggcuuua

SEQ ID NO: 3062087 - RNA, 19 nt, Artificial Sequence
  Description of Artificial Sequence: Synthetic oligonucleotide
ccauguugggcauguagca

SEQ ID NO: 3062088 - RNA, 19 nt, Artificial Sequence
  Description of Artificial Sequence: Synthetic oligonucleotide
cuggauacacaccuuuaau

SEQ ID NO: 3062089 - RNA, 19 nt, Artificial Sequence
  Description of Artificial Sequence: Synthetic oligonucleotide
gccaucagaguuucaaagu

SEQ ID NO: 3062090 - RNA, 19 nt, Artificial Sequence
  Description of Artificial Sequence: Synthetic oligonucleotide
aaaugccaccauacuggua

SEQ ID NO: 3062091 - RNA, 19 nt, Artificial Sequence
  Description of Artificial Sequence: Synthetic oligonucleotide
cauguugggcauguagcaa

SEQ ID NO: 3062092 - RNA, 19 nt, Artificial Sequence
  Description of Artificial Sequence: Synthetic oligonucleotide
aguucccauguugggcaug

SEQ ID NO: 3062093 - RNA, 19 nt, Artificial Sequence
  Description of Artificial Sequence: Synthetic oligonucleotide
cuuuuagaaaugccaccau

SEQ ID NO: 3062094 - RNA, 19 nt, Artificial Sequence
  Description of Artificial Sequence: Synthetic oligonucleotide
gccaccauacugguaaaga

SEQ ID NO: 3062095 - RNA, 19 nt, Artificial Sequence
  Description of Artificial Sequence: Synthetic oligonucleotide
aagcgaggcuggauacaca

SEQ ID NO: 3062096 - RNA, 19 nt, Artificial Sequence
  Description of Artificial Sequence: Synthetic oligonucleotide
gaauggcuucuaaacugcu

SEQ ID NO: 3062097 - RNA, 19 nt, Artificial Sequence
  Description of Artificial Sequence: Synthetic oligonucleotide
ccauacugguaaagacaag

SEQ ID NO: 3062098 - RNA, 19 nt, Artificial Sequence
  Description of Artificial Sequence: Synthetic oligonucleotide
ggauuugcuuaggccauca

SEQ ID NO: 3062099 - RNA, 19 nt, Artificial Sequence
  Description of Artificial Sequence: Synthetic oligonucleotide
agaaggcaguucccauguu

SEQ ID NO: 3062100 - RNA, 19 nt, Artificial Sequence
  Description of Artificial Sequence: Synthetic oligonucleotide
augccaccauacugguaaa

SEQ ID NO: 3062101 - RNA, 19 nt, Artificial Sequence
  Description of Artificial Sequence: Synthetic oligonucleotide
caaaugugaauggcuucua

SEQ ID NO: 3062102 - RNA, 19 nt, Artificial Sequence
  Description of Artificial Sequence: Synthetic oligonucleotide
guucccauguugggcaugu

SEQ ID NO: 3062103 - RNA, 19 nt, Artificial Sequence
  Description of Artificial Sequence: Synthetic oligonucleotide
gagcauucagaaggcaguu

SEQ ID NO: 3062104 - RNA, 19 nt, Artificial Sequence
  Description of Artificial Sequence: Synthetic oligonucleotide
ccaaaugugaauggcuucu

SEQ ID NO: 3062105 - RNA, 19 nt, Artificial Sequence
  Description of Artificial Sequence: Synthetic oligonucleotide
gcuacaguuuguaccaaau

SEQ ID NO: 3062106 - RNA, 19 nt, Artificial Sequence
  Description of Artificial Sequence: Synthetic oligonucleotide
gaguuucaaaguggaguuu

SEQ ID NO: 3062107 - RNA, 19 nt, Artificial Sequence
  Description of Artificial Sequence: Synthetic oligonucleotide
gagcuacaguuuguaccaa

SEQ ID NO: 3062108 - RNA, 19 nt, Artificial Sequence
  Description of Artificial Sequence: Synthetic oligonucleotide
gugagguagggugcuuuua

SEQ ID NO: 3062109 - RNA, 19 nt, Artificial Sequence
  Description of Artificial Sequence: Synthetic oligonucleotide
guugggcauguagcaaaua

SEQ ID NO: 3062110 - RNA, 19 nt, Artificial Sequence
  Description of Artificial Sequence: Synthetic oligonucleotide
cgaggcuggauacacaccu

SEQ ID NO: 3062111 - RNA, 19 nt, Artificial Sequence
  Description of Artificial Sequence: Synthetic oligonucleotide
ggaguuuguuugagcuaca

SEQ ID NO: 3062112 - RNA, 19 nt, Artificial Sequence
  Description of Artificial Sequence: Synthetic oligonucleotide
gcgaggcuggauacacacc

SEQ ID NO: 3062113 - RNA, 19 nt, Artificial Sequence
  Description of Artificial Sequence: Synthetic oligonucleotide
ggcuggauacacaccuuua

SEQ ID NO: 3062114 - RNA, 19 nt, Artificial Sequence
  Description of Artificial Sequence: Synthetic oligonucleotide
uucccauguugggcaugua

SEQ ID NO: 3062115 - RNA, 19 nt, Artificial Sequence
  Description of Artificial Sequence: Synthetic oligonucleotide
gcuuaggccaucagaguuu

SEQ ID NO: 3062116 - RNA, 19 nt, Artificial Sequence
  Description of Artificial Sequence: Synthetic oligonucleotide
gaggcuggauacacaccuu

SEQ ID NO: 3062117 - RNA, 19 nt, Artificial Sequence
  Description of Artificial Sequence: Synthetic oligonucleotide
cugugagguagggugcuuu

SEQ ID NO: 3062118 - RNA, 19 nt, Artificial Sequence
  Description of Artificial Sequence: Synthetic oligonucleotide
caguucccauguugggcau

SEQ ID NO: 3062119 - RNA, 19 nt, Artificial Sequence
  Description of Artificial Sequence: Synthetic oligonucleotide
ccugugagguagggugcuu

SEQ ID NO: 3062120 - RNA, 19 nt, Artificial Sequence
  Description of Artificial Sequence: Synthetic oligonucleotide
cauuauaggagccaucugg

SEQ ID NO: 3062121 - RNA, 19 nt, Artificial Sequence
  Description of Artificial Sequence: Synthetic oligonucleotide
uccaggaucauuauaggag

SEQ ID NO: 3062122 - RNA, 19 nt, Artificial Sequence
  Description of Artificial Sequence: Synthetic oligonucleotide
aucagcaggcuccaggauc

SEQ ID NO: 3062123 - RNA, 19 nt, Artificial Sequence
  Description of Artificial Sequence: Synthetic oligonucleotide
aucauuauaggagccaucu

SEQ ID NO: 3062124 - RNA, 19 nt, Artificial Sequence
  Description of Artificial Sequence: Synthetic oligonucleotide
augagcacuggcuggucgc

SEQ ID NO: 3062125 - RNA, 19 nt, Artificial Sequence
  Description of Artificial Sequence: Synthetic oligonucleotide
gaugagcacuggcuggucg

SEQ ID NO: 3062126 - RNA, 19 nt, Artificial Sequence
  Description of Artificial Sequence: Synthetic oligonucleotide
gaggcaaccaucagcaggc

SEQ ID NO: 3062127 - RNA, 19 nt, Artificial Sequence
  Description of Artificial Sequence: Synthetic oligonucleotide
ucauuauaggagccaucug

SEQ ID NO: 3062128 - RNA, 19 nt, Artificial Sequence
  Description of Artificial Sequence: Synthetic oligonucleotide
  modified_base (4)..(4): a, c, u, g, unknown or other
uucnccuucccaugggccu

SEQ ID NO: 3062129 - RNA, 19 nt, Artificial Sequence
  Description of Artificial Sequence: Synthetic oligonucleotide
gucauccuggcccagagca

SEQ ID NO: 3062130 - RNA, 19 nt, Artificial Sequence
  Description of Artificial Sequence: Synthetic oligonucleotide
ugcacggagaugagcacug

SEQ ID NO: 3062131 - RNA, 19 nt, Artificial Sequence
  Description of Artificial Sequence: Synthetic oligonucleotide
  modified_base (5)..(5): a, c, u, g, unknown or other
cuucnccuucccaugggcc

SEQ ID NO: 3062132 - RNA, 19 nt, Artificial Sequence
  Description of Artificial Sequence: Synthetic oligonucleotide
auuauaggagccaucuggu

SEQ ID NO: 3062133 - RNA, 19 nt, Artificial Sequence
  Description of Artificial Sequence: Synthetic oligonucleotide
ggcuccaggaucauuauag

SEQ ID NO: 3062134 - RNA, 19 nt, Artificial Sequence
  Description of Artificial Sequence: Synthetic oligonucleotide
caggaucauuauaggagcc

SEQ ID NO: 3062135 - RNA, 19 nt, Artificial Sequence
  Description of Artificial Sequence: Synthetic oligonucleotide
ccaggaucauuauaggagc

SEQ ID NO: 3062136 - RNA, 19 nt, Artificial Sequence
  Description of Artificial Sequence: Synthetic oligonucleotide
ggagaugagcacuggcugg

SEQ ID NO: 3062137 - RNA, 19 nt, Artificial Sequence
  Description of Artificial Sequence: Synthetic oligonucleotide
gcaaccaucagcaggcucc

SEQ ID NO: 3062138 - RNA, 19 nt, Artificial Sequence
  Description of Artificial Sequence: Synthetic oligonucleotide
aggaucauuauaggagcca

SEQ ID NO: 3062139 - RNA, 19 nt, Artificial Sequence
  Description of Artificial Sequence: Synthetic oligonucleotide
cuccaggaucauuauagga

SEQ ID NO: 3062140 - RNA, 19 nt, Artificial Sequence
  Description of Artificial Sequence: Synthetic oligonucleotide
cacggagaugagcacuggc

SEQ ID NO: 3062141 - RNA, 19 nt, Artificial Sequence
  Description of Artificial Sequence: Synthetic oligonucleotide
acggagaugagcacuggcu

SEQ ID NO: 3062142 - RNA, 19 nt, Artificial Sequence
  Description of Artificial Sequence: Synthetic oligonucleotide
gcuccaggaucauuauagg

SEQ ID NO: 3062143 - RNA, 19 nt, Artificial Sequence
  Description of Artificial Sequence: Synthetic oligonucleotide
gaucauuauaggagccauc

SEQ ID NO: 3062144 - RNA, 19 nt, Artificial Sequence
  Description of Artificial Sequence: Synthetic oligonucleotide
ucgcagaggcaaccaucag

SEQ ID NO: 3062145 - RNA, 19 nt, Artificial Sequence
  Description of Artificial Sequence: Synthetic oligonucleotide
gucgcagaggcaaccauca

SEQ ID NO: 3062146 - RNA, 19 nt, Artificial Sequence
  Description of Artificial Sequence: Synthetic oligonucleotide
uggcuggucgcagaggcaa

SEQ ID NO: 3062147 - RNA, 19 nt, Artificial Sequence
  Description of Artificial Sequence: Synthetic oligonucleotide
  modified_base (7)..(7): a, c, u, g, unknown or other
ggcuucnccuucccauggg

SEQ ID NO: 3062148 - RNA, 19 nt, Artificial Sequence
  Description of Artificial Sequence: Synthetic oligonucleotide
  modified_base (6)..(6): a, c, u, g, unknown or other
gcuucnccuucccaugggc

SEQ ID NO: 3062149 - RNA, 19 nt, Artificial Sequence
  Description of Artificial Sequence: Synthetic oligonucleotide
ugagcacuggcuggucgca

SEQ ID NO: 3062150 - RNA, 19 nt, Artificial Sequence
  Description of Artificial Sequence: Synthetic oligonucleotide
  modified_base (8)..(8): a, c, u, g, unknown or other
gggcuucnccuucccaugg

SEQ ID NO: 3062151 - RNA, 19 nt, Artificial Sequence
  Description of Artificial Sequence: Synthetic oligonucleotide
uggucgcagaggcaaccau

SEQ ID NO: 3062152 - RNA, 19 nt, Artificial Sequence
  Description of Artificial Sequence: Synthetic oligonucleotide
  modified_base (3)..(3): a, c, u, g, unknown or other
ucnccuucccaugggccuc

SEQ ID NO: 3062153 - RNA, 19 nt, Artificial Sequence
  Description of Artificial Sequence: Synthetic oligonucleotide
  modified_base (9)..(9): a, c, u, g, unknown or other
ggggcuucnccuucccaug

SEQ ID NO: 3062154 - RNA, 19 nt, Artificial Sequence
  Description of Artificial Sequence: Synthetic oligonucleotide
gucgccgcgguagcgcgcg

SEQ ID NO: 3062155 - RNA, 19 nt, Artificial Sequence
  Description of Artificial Sequence: Synthetic oligonucleotide
uguggucauccuggcccag

SEQ ID NO: 3062156 - RNA, 19 nt, Artificial Sequence
  Description of Artificial Sequence: Synthetic oligonucleotide
ccgugcacggagaugagca

SEQ ID NO: 3062157 - RNA, 19 nt, Artificial Sequence
  Description of Artificial Sequence: Synthetic oligonucleotide
gagcacuggcuggucgcag

SEQ ID NO: 3062158 - RNA, 19 nt, Artificial Sequence
  Description of Artificial Sequence: Synthetic oligonucleotide
aggcuccaggaucauuaua

SEQ ID NO: 3062159 - RNA, 19 nt, Artificial Sequence
  Description of Artificial Sequence: Synthetic oligonucleotide
cggagaugagcacuggcug

SEQ ID NO: 3062160 - RNA, 19 nt, Artificial Sequence
  Description of Artificial Sequence: Synthetic oligonucleotide
ggucauccuggcccagagc

SEQ ID NO: 3062161 - RNA, 19 nt, Artificial Sequence
  Description of Artificial Sequence: Synthetic oligonucleotide
ggucgcagaggcaaccauc

SEQ ID NO: 3062162 - RNA, 19 nt, Artificial Sequence
  Description of Artificial Sequence: Synthetic oligonucleotide
ggcaaccaucagcaggcuc

SEQ ID NO: 3062163 - RNA, 19 nt, Artificial Sequence
  Description of Artificial Sequence: Synthetic oligonucleotide
gcuggucgcagaggcaacc

SEQ ID NO: 3062164 - RNA, 19 nt, Artificial Sequence
  Description of Artificial Sequence: Synthetic oligonucleotide
gccgcgguagcgcgcgugg

SEQ ID NO: 3062165 - RNA, 19 nt, Artificial Sequence
  Description of Artificial Sequence: Synthetic oligonucleotide
ggaucauuauaggagccau

SEQ ID NO: 3062166 - RNA, 19 nt, Artificial Sequence
  Description of Artificial Sequence: Synthetic oligonucleotide
cuggucgcagaggcaacca

SEQ ID NO: 3062167 - RNA, 19 nt, Artificial Sequence
  Description of Artificial Sequence: Synthetic oligonucleotide
gugcacggagaugagcacu

SEQ ID NO: 3062168 - RNA, 19 nt, Artificial Sequence
  Description of Artificial Sequence: Synthetic oligonucleotide
cuggcccagagcagcccca

SEQ ID NO: 3062169 - RNA, 19 nt, Artificial Sequence
  Description of Artificial Sequence: Synthetic oligonucleotide
guggucauccuggcccaga

SEQ ID NO: 3062170 - RNA, 19 nt, Artificial Sequence
  Description of Artificial Sequence: Synthetic oligonucleotide
gcacggagaugagcacugg

SEQ ID NO: 3062171 - RNA, 19 nt, Artificial Sequence
  Description of Artificial Sequence: Synthetic oligonucleotide
ggcgucgccgcgguagcgc

SEQ ID NO: 3062172 - RNA, 19 nt, Artificial Sequence
  Description of Artificial Sequence: Synthetic oligonucleotide
aggcaaccaucagcaggcu

SEQ ID NO: 3062173 - RNA, 19 nt, Artificial Sequence
  Description of Artificial Sequence: Synthetic oligonucleotide
gccgugcacggagaugagc

SEQ ID NO: 3062174 - RNA, 19 nt, Artificial Sequence
  Description of Artificial Sequence: Synthetic oligonucleotide
agcaggcuccaggaucauu

SEQ ID NO: 3062175 - RNA, 19 nt, Artificial Sequence
  Description of Artificial Sequence: Synthetic oligonucleotide
cgugcacggagaugagcac

SEQ ID NO: 3062176 - RNA, 19 nt, Artificial Sequence
  Description of Artificial Sequence: Synthetic oligonucleotide
caggcuccaggaucauuau

SEQ ID NO: 3062177 - RNA, 19 nt, Artificial Sequence
  Description of Artificial Sequence: Synthetic oligonucleotide
caucagcaggcuccaggau

SEQ ID NO: 3062178 - RNA, 19 nt, Artificial Sequence
  Description of Artificial Sequence: Synthetic oligonucleotide
ggcuggucgcagaggcaac

SEQ ID NO: 3062179 - RNA, 19 nt, Artificial Sequence
  Description of Artificial Sequence: Synthetic oligonucleotide
gggcgucgccgcgguagcg

SEQ ID NO: 3062180 - RNA, 19 nt, Artificial Sequence
  Description of Artificial Sequence: Synthetic oligonucleotide
ucgccgcgguagcgcgcgu

SEQ ID NO: 3062181 - RNA, 19 nt, Artificial Sequence
  Description of Artificial Sequence: Synthetic oligonucleotide
  modified_base (2)..(2): a, c, u, g, unknown or other
cnccuucccaugggccucu

SEQ ID NO: 3062182 - RNA, 19 nt, Artificial Sequence
  Description of Artificial Sequence: Synthetic oligonucleotide
cgccgcgguagcgcgcgug

SEQ ID NO: 3062183 - RNA, 19 nt, Artificial Sequence
  Description of Artificial Sequence: Synthetic oligonucleotide
cagcaggcuccaggaucau

SEQ ID NO: 3062184 - RNA, 19 nt, Artificial Sequence
  Description of Artificial Sequence: Synthetic oligonucleotide
agaauuaaaguacuucugc

SEQ ID NO: 3062185 - RNA, 19 nt, Artificial Sequence
  Description of Artificial Sequence: Synthetic oligonucleotide
uuuguuuagaggaaugaag

SEQ ID NO: 3062186 - RNA, 19 nt, Artificial Sequence
  Description of Artificial Sequence: Synthetic oligonucleotide
aagauccagccucagagcc

SEQ ID NO: 3062187 - RNA, 19 nt, Artificial Sequence
  Description of Artificial Sequence: Synthetic oligonucleotide
aauuaaaguacuucugccu

SEQ ID NO: 3062188 - RNA, 19 nt, Artificial Sequence
  Description of Artificial Sequence: Synthetic oligonucleotide
agaggaaugaaguugaaga

SEQ ID NO: 3062189 - RNA, 19 nt, Artificial Sequence
  Description of Artificial Sequence: Synthetic oligonucleotide
auuaaaguacuucugccuc

SEQ ID NO: 3062190 - RNA, 19 nt, Artificial Sequence
  Description of Artificial Sequence: Synthetic oligonucleotide
uuuagaggaaugaaguuga

SEQ ID NO: 3062191 - RNA, 19 nt, Artificial Sequence
  Description of Artificial Sequence: Synthetic oligonucleotide
uacagcuggaacaacacag

SEQ ID NO: 3062192 - RNA, 19 nt, Artificial Sequence
  Description of Artificial Sequence: Synthetic oligonucleotide
agaucuaaugcccacagug

SEQ ID NO: 3062193 - RNA, 19 nt, Artificial Sequence
  Description of Artificial Sequence: Synthetic oligonucleotide
aacaacacagcuuucugcu

SEQ ID NO: 3062194 - RNA, 19 nt, Artificial Sequence
  Description of Artificial Sequence: Synthetic oligonucleotide
aaugaaguugaagacuggg

SEQ ID NO: 3062195 - RNA, 19 nt, Artificial Sequence
  Description of Artificial Sequence: Synthetic oligonucleotide
gaauuaaaguacuucugcc

SEQ ID NO: 3062196 - RNA, 19 nt, Artificial Sequence
  Description of Artificial Sequence: Synthetic oligonucleotide
aucuaaugcccacaguggc

SEQ ID NO: 3062197 - RNA, 19 nt, Artificial Sequence
  Description of Artificial Sequence: Synthetic oligonucleotide
uaugggaagcacuagagaa

SEQ ID NO: 3062198 - RNA, 19 nt, Artificial Sequence
  Description of Artificial Sequence: Synthetic oligonucleotide
acagggaagauccagccuc

SEQ ID NO: 3062199 - RNA, 19 nt, Artificial Sequence
  Description of Artificial Sequence: Synthetic oligonucleotide
uccaagaggaucucagugg

SEQ ID NO: 3062200 - RNA, 19 nt, Artificial Sequence
  Description of Artificial Sequence: Synthetic oligonucleotide
acagcuuucugcugggccc

SEQ ID NO: 3062201 - RNA, 19 nt, Artificial Sequence
  Description of Artificial Sequence: Synthetic oligonucleotide
cuagagaagugccacaccc

SEQ ID NO: 3062202 - RNA, 19 nt, Artificial Sequence
  Description of Artificial Sequence: Synthetic oligonucleotide
acaccccuagaucuaaugc

SEQ ID NO: 3062203 - RNA, 19 nt, Artificial Sequence
  Description of Artificial Sequence: Synthetic oligonucleotide
acucuugagaauuaaagua

SEQ ID NO: 3062204 - RNA, 19 nt, Artificial Sequence
  Description of Artificial Sequence: Synthetic oligonucleotide
ucuugagaauuaaaguacu

SEQ ID NO: 3062205 - RNA, 19 nt, Artificial Sequence
  Description of Artificial Sequence: Synthetic oligonucleotide
guuuagaggaaugaaguug

SEQ ID NO: 3062206 - RNA, 19 nt, Artificial Sequence
  Description of Artificial Sequence: Synthetic oligonucleotide
aaguacuucugccuccaag

SEQ ID NO: 3062207 - RNA, 19 nt, Artificial Sequence
  Description of Artificial Sequence: Synthetic oligonucleotide
aguacuucugccuccaaga

SEQ ID NO: 3062208 - RNA, 19 nt, Artificial Sequence
  Description of Artificial Sequence: Synthetic oligonucleotide
ggaagauccagccucagag

SEQ ID NO: 3062209 - RNA, 19 nt, Artificial Sequence
  Description of Artificial Sequence: Synthetic oligonucleotide
ucugccuccaagaggaucu

SEQ ID NO: 3062210 - RNA, 19 nt, Artificial Sequence
  Description of Artificial Sequence: Synthetic oligonucleotide
uuaaaguacuucugccucc

SEQ ID NO: 3062211 - RNA, 19 nt, Artificial Sequence
  Description of Artificial Sequence: Synthetic oligonucleotide
gaucuaaugcccacagugg

SEQ ID NO: 3062212 - RNA, 19 nt, Artificial Sequence
  Description of Artificial Sequence: Synthetic oligonucleotide
gaacaacacagcuuucugc

SEQ ID NO: 3062213 - RNA, 19 nt, Artificial Sequence
  Description of Artificial Sequence: Synthetic oligonucleotide
ucaguggggaccuggagcc

SEQ ID NO: 3062214 - RNA, 19 nt, Artificial Sequence
  Description of Artificial Sequence: Synthetic oligonucleotide
uacuucugccuccaagagg

SEQ ID NO: 3062215 - RNA, 19 nt, Artificial Sequence
  Description of Artificial Sequence: Synthetic oligonucleotide
gaggaaugaaguugaagac

SEQ ID NO: 3062216 - RNA, 19 nt, Artificial Sequence
  Description of Artificial Sequence: Synthetic oligonucleotide
aguggcuacagcuggaaca

SEQ ID NO: 3062217 - RNA, 19 nt, Artificial Sequence
  Description of Artificial Sequence: Synthetic oligonucleotide
agaagugccacaccccuag

SEQ ID NO: 3062218 - RNA, 19 nt, Artificial Sequence
  Description of Artificial Sequence: Synthetic oligonucleotide
uuaugggaagcacuagaga

SEQ ID NO: 3062219 - RNA, 19 nt, Artificial Sequence
  Description of Artificial Sequence: Synthetic oligonucleotide
acuagagaagugccacacc

SEQ ID NO: 3062220 - RNA, 19 nt, Artificial Sequence
  Description of Artificial Sequence: Synthetic oligonucleotide
agugccacaccccuagauc

SEQ ID NO: 3062221 - RNA, 19 nt, Artificial Sequence
  Description of Artificial Sequence: Synthetic oligonucleotide
uugagaauuaaaguacuuc

SEQ ID NO: 3062222 - RNA, 19 nt, Artificial Sequence
  Description of Artificial Sequence: Synthetic oligonucleotide
gagaauuaaaguacuucug

SEQ ID NO: 3062223 - RNA, 19 nt, Artificial Sequence
  Description of Artificial Sequence: Synthetic oligonucleotide
ugcauuaugggaagcacua

SEQ ID NO: 3062224 - RNA, 19 nt, Artificial Sequence
  Description of Artificial Sequence: Synthetic oligonucleotide
agcacuagagaagugccac

SEQ ID NO: 3062225 - RNA, 19 nt, Artificial Sequence
  Description of Artificial Sequence: Synthetic oligonucleotide
aacacagcuuucugcuggg

SEQ ID NO: 3062226 - RNA, 19 nt, Artificial Sequence
  Description of Artificial Sequence: Synthetic oligonucleotide
acuugcaggacucuugaga

SEQ ID NO: 3062227 - RNA, 19 nt, Artificial Sequence
  Description of Artificial Sequence: Synthetic oligonucleotide
caacacagcuuucugcugg

SEQ ID NO: 3062228 - RNA, 19 nt, Artificial Sequence
  Description of Artificial Sequence: Synthetic oligonucleotide
aagaggaucucagugggga

SEQ ID NO: 3062229 - RNA, 19 nt, Artificial Sequence
  Description of Artificial Sequence: Synthetic oligonucleotide
gacaaggugcauuauggga

SEQ ID NO: 3062230 - RNA, 19 nt, Artificial Sequence
  Description of Artificial Sequence: Synthetic oligonucleotide
auuaugggaagcacuagag

SEQ ID NO: 3062231 - RNA, 19 nt, Artificial Sequence
  Description of Artificial Sequence: Synthetic oligonucleotide
cuagaucuaaugcccacag

SEQ ID NO: 3062232 - RNA, 19 nt, Artificial Sequence
  Description of Artificial Sequence: Synthetic oligonucleotide
ucuaaugcccacaguggca

SEQ ID NO: 3062233 - RNA, 19 nt, Artificial Sequence
  Description of Artificial Sequence: Synthetic oligonucleotide
agccucagagcccaagugg

SEQ ID NO: 3062234 - RNA, 19 nt, Artificial Sequence
  Description of Artificial Sequence: Synthetic oligonucleotide
acuucugccuccaagagga

SEQ ID NO: 3062235 - RNA, 19 nt, Artificial Sequence
  Description of Artificial Sequence: Synthetic oligonucleotide
aaguggcuacagcuggaac

SEQ ID NO: 3062236 - RNA, 19 nt, Artificial Sequence
  Description of Artificial Sequence: Synthetic oligonucleotide
gaagcacuagagaagugcc

SEQ ID NO: 3062237 - RNA, 19 nt, Artificial Sequence
  Description of Artificial Sequence: Synthetic oligonucleotide
caccccuagaucuaaugcc

SEQ ID NO: 3062238 - RNA, 19 nt, Artificial Sequence
  Description of Artificial Sequence: Synthetic oligonucleotide
gaagauccagccucagagc

SEQ ID NO: 3062239 - RNA, 19 nt, Artificial Sequence
  Description of Artificial Sequence: Synthetic oligonucleotide
accccuagaucuaaugccc

SEQ ID NO: 3062240 - RNA, 19 nt, Artificial Sequence
  Description of Artificial Sequence: Synthetic oligonucleotide
agagaagugccacaccccu

SEQ ID NO: 3062241 - RNA, 19 nt, Artificial Sequence
  Description of Artificial Sequence: Synthetic oligonucleotide
ggaaugaaguugaagacug

SEQ ID NO: 3062242 - RNA, 19 nt, Artificial Sequence
  Description of Artificial Sequence: Synthetic oligonucleotide
uagaggaaugaaguugaag

SEQ ID NO: 3062243 - RNA, 19 nt, Artificial Sequence
  Description of Artificial Sequence: Synthetic oligonucleotide
cucaguggggaccuggagc

SEQ ID NO: 3062244 - RNA, 19 nt, Artificial Sequence
  Description of Artificial Sequence: Synthetic oligonucleotide
uagagaagugccacacccc

SEQ ID NO: 3062245 - RNA, 19 nt, Artificial Sequence
  Description of Artificial Sequence: Synthetic oligonucleotide
uguuuagaggaaugaaguu

SEQ ID NO: 3062246 - RNA, 19 nt, Artificial Sequence
  Description of Artificial Sequence: Synthetic oligonucleotide
aggaaugaaguugaagacu

SEQ ID NO: 3062247 - RNA, 19 nt, Artificial Sequence
  Description of Artificial Sequence: Synthetic oligonucleotide
gacucuugagaauuaaagu

SEQ ID NO: 3062248 - RNA, 19 nt, Artificial Sequence
  Description of Artificial Sequence: Synthetic oligonucleotide
ggacucuugagaauuaaag

SEQ ID NO: 3062249 - RNA, 19 nt, Artificial Sequence
  Description of Artificial Sequence: Synthetic oligonucleotide
cuccaagaggaucucagug

SEQ ID NO: 3062250 - RNA, 19 nt, Artificial Sequence
  Description of Artificial Sequence: Synthetic oligonucleotide
aaugcccacaguggcacag

SEQ ID NO: 3062251 - RNA, 19 nt, Artificial Sequence
  Description of Artificial Sequence: Synthetic oligonucleotide
uggaacaacacagcuuucu

SEQ ID NO: 3062252 - RNA, 19 nt, Artificial Sequence
  Description of Artificial Sequence: Synthetic oligonucleotide
ugggaagcacuagagaagu

SEQ ID NO: 3062253 - RNA, 19 nt, Artificial Sequence
  Description of Artificial Sequence: Synthetic oligonucleotide
aaggugcauuaugggaagc

SEQ ID NO: 3062254 - RNA, 19 nt, Artificial Sequence
  Description of Artificial Sequence: Synthetic oligonucleotide
gggacaaggugcauuaugg

SEQ ID NO: 3062255 - RNA, 19 nt, Artificial Sequence
  Description of Artificial Sequence: Synthetic oligonucleotide
agaggaucucaguggggac

SEQ ID NO: 3062256 - RNA, 19 nt, Artificial Sequence
  Description of Artificial Sequence: Synthetic oligonucleotide
caaggugcauuaugggaag

SEQ ID NO: 3062257 - RNA, 19 nt, Artificial Sequence
  Description of Artificial Sequence: Synthetic oligonucleotide
acuguccagacuugcagga

SEQ ID NO: 3062258 - RNA, 19 nt, Artificial Sequence
  Description of Artificial Sequence: Synthetic oligonucleotide
gaaugaaguugaagacugg

SEQ ID NO: 3062259 - RNA, 19 nt, Artificial Sequence
  Description of Artificial Sequence: Synthetic oligonucleotide
ggugguagagcgcuccugg

SEQ ID NO: 3062260 - RNA, 19 nt, Artificial Sequence
  Description of Artificial Sequence: Synthetic oligonucleotide
uaaaguacuucugccucca

SEQ ID NO: 3062261 - RNA, 19 nt, Artificial Sequence
  Description of Artificial Sequence: Synthetic oligonucleotide
ggaagcacuagagaagugc

SEQ ID NO: 3062262 - RNA, 19 nt, Artificial Sequence
  Description of Artificial Sequence: Synthetic oligonucleotide
cauuaugggaagcacuaga

SEQ ID NO: 3062263 - RNA, 19 nt, Artificial Sequence
  Description of Artificial Sequence: Synthetic oligonucleotide
ugguugcaggugaccaugg

SEQ ID NO: 3062264 - RNA, 19 nt, Artificial Sequence
  Description of Artificial Sequence: Synthetic oligonucleotide
augggccggugguugaagc

SEQ ID NO: 3062265 - RNA, 19 nt, Artificial Sequence
  Description of Artificial Sequence: Synthetic oligonucleotide
cuaaugcccacaguggcac

SEQ ID NO: 3062266 - RNA, 19 nt, Artificial Sequence
  Description of Artificial Sequence: Synthetic oligonucleotide
guacuucugccuccaagag

SEQ ID NO: 3062267 - RNA, 19 nt, Artificial Sequence
  Description of Artificial Sequence: Synthetic oligonucleotide
uugguugcaggugaccaug

SEQ ID NO: 3062268 - RNA, 19 nt, Artificial Sequence
  Description of Artificial Sequence: Synthetic oligonucleotide
gaucucaguggggaccugg

SEQ ID NO: 3062269 - RNA, 19 nt, Artificial Sequence
  Description of Artificial Sequence: Synthetic oligonucleotide
aagugccacaccccuagau

SEQ ID NO: 3062270 - RNA, 19 nt, Artificial Sequence
  Description of Artificial Sequence: Synthetic oligonucleotide
cacagcuuucugcugggcc

SEQ ID NO: 3062271 - RNA, 19 nt, Artificial Sequence
  Description of Artificial Sequence: Synthetic oligonucleotide
ugguagagcgcuccuggcu

SEQ ID NO: 3062272 - RNA, 19 nt, Artificial Sequence
  Description of Artificial Sequence: Synthetic oligonucleotide
ugcccacaguggcacaggg

SEQ ID NO: 3062273 - RNA, 19 nt, Artificial Sequence
  Description of Artificial Sequence: Synthetic oligonucleotide
gaggaucucaguggggacc

SEQ ID NO: 3062274 - RNA, 19 nt, Artificial Sequence
  Description of Artificial Sequence: Synthetic oligonucleotide
agcgcuccuggcuugguug

SEQ ID NO: 3062275 - RNA, 19 nt, Artificial Sequence
  Description of Artificial Sequence: Synthetic oligonucleotide
ugcaggacucuugagaauu

SEQ ID NO: 3062276 - RNA, 19 nt, Artificial Sequence
  Description of Artificial Sequence: Synthetic oligonucleotide
ggacaaggugcauuauggg

SEQ ID NO: 3062277 - RNA, 19 nt, Artificial Sequence
  Description of Artificial Sequence: Synthetic oligonucleotide
augggaagcacuagagaag

SEQ ID NO: 3062278 - RNA, 19 nt, Artificial Sequence
  Description of Artificial Sequence: Synthetic oligonucleotide
cagacuugcaggacucuug

SEQ ID NO: 3062279 - RNA, 19 nt, Artificial Sequence
  Description of Artificial Sequence: Synthetic oligonucleotide
ccaagaggaucucaguggg

SEQ ID NO: 3062280 - RNA, 19 nt, Artificial Sequence
  Description of Artificial Sequence: Synthetic oligonucleotide
acaacacagcuuucugcug

SEQ ID NO: 3062281 - RNA, 19 nt, Artificial Sequence
  Description of Artificial Sequence: Synthetic oligonucleotide
ggaacaacacagcuuucug

SEQ ID NO: 3062282 - RNA, 19 nt, Artificial Sequence
  Description of Artificial Sequence: Synthetic oligonucleotide
agauccagccucagagccc

SEQ ID NO: 3062283 - RNA, 19 nt, Artificial Sequence
  Description of Artificial Sequence: Synthetic oligonucleotide
gaggagggccgcugggugg

SEQ ID NO: 3062284 - RNA, 19 nt, Artificial Sequence
  Description of Artificial Sequence: Synthetic oligonucleotide
uagaucuaaugcccacagu

SEQ ID NO: 3062285 - RNA, 19 nt, Artificial Sequence
  Description of Artificial Sequence: Synthetic oligonucleotide
uuagaggaaugaaguugaa

SEQ ID NO: 3062286 - RNA, 19 nt, Artificial Sequence
  Description of Artificial Sequence: Synthetic oligonucleotide
cacuagagaagugccacac

SEQ ID NO: 3062287 - RNA, 19 nt, Artificial Sequence
  Description of Artificial Sequence: Synthetic oligonucleotide
auccacuguccagacuugc

SEQ ID NO: 3062288 - RNA, 19 nt, Artificial Sequence
  Description of Artificial Sequence: Synthetic oligonucleotide
gccgcugggugguagagcg

SEQ ID NO: 3062289 - RNA, 19 nt, Artificial Sequence
  Description of Artificial Sequence: Synthetic oligonucleotide
ucagagcccaaguggcuac

SEQ ID NO: 3062290 - RNA, 19 nt, Artificial Sequence
  Description of Artificial Sequence: Synthetic oligonucleotide
cacaccccuagaucuaaug

SEQ ID NO: 3062291 - RNA, 19 nt, Artificial Sequence
  Description of Artificial Sequence: Synthetic oligonucleotide
uggagcccgaggagggccg

SEQ ID NO: 3062292 - RNA, 19 nt, Artificial Sequence
  Description of Artificial Sequence: Synthetic oligonucleotide
aguggggaccuggagcccg

SEQ ID NO: 3062293 - RNA, 19 nt, Artificial Sequence
  Description of Artificial Sequence: Synthetic oligonucleotide
gauccagccucagagccca

SEQ ID NO: 3062294 - RNA, 19 nt, Artificial Sequence
  Description of Artificial Sequence: Synthetic oligonucleotide
aagcacuagagaagugcca

SEQ ID NO: 3062295 - RNA, 19 nt, Artificial Sequence
  Description of Artificial Sequence: Synthetic oligonucleotide
ugggccggugguugaagcc

SEQ ID NO: 3062296 - RNA, 19 nt, Artificial Sequence
  Description of Artificial Sequence: Synthetic oligonucleotide
ggggacaaggugcauuaug

SEQ ID NO: 3062297 - RNA, 19 nt, Artificial Sequence
  Description of Artificial Sequence: Synthetic oligonucleotide
gcacagggaagauccagcc

SEQ ID NO: 3062298 - RNA, 19 nt, Artificial Sequence
  Description of Artificial Sequence: Synthetic oligonucleotide
aggugcauuaugggaagca

SEQ ID NO: 3062299 - RNA, 19 nt, Artificial Sequence
  Description of Artificial Sequence: Synthetic oligonucleotide
gagcccaaguggcuacagc

SEQ ID NO: 3062300 - RNA, 19 nt, Artificial Sequence
  Description of Artificial Sequence: Synthetic oligonucleotide
cuccuggcuugguugcagg

SEQ ID NO: 3062301 - RNA, 19 nt, Artificial Sequence
  Description of Artificial Sequence: Synthetic oligonucleotide
cacaguggcacagggaaga

SEQ ID NO: 3062302 - RNA, 19 nt, Artificial Sequence
  Description of Artificial Sequence: Synthetic oligonucleotide
cuacagcuggaacaacaca

SEQ ID NO: 3062303 - RNA, 19 nt, Artificial Sequence
  Description of Artificial Sequence: Synthetic oligonucleotide
aggaucucaguggggaccu

SEQ ID NO: 3062304 - RNA, 19 nt, Artificial Sequence
  Description of Artificial Sequence: Synthetic oligonucleotide
gaccaugggccggugguug

SEQ ID NO: 3062305 - RNA, 19 nt, Artificial Sequence
  Description of Artificial Sequence: Synthetic oligonucleotide
guagagcgcuccuggcuug

SEQ ID NO: 3062306 - RNA, 19 nt, Artificial Sequence
  Description of Artificial Sequence: Synthetic oligonucleotide
uuucugcugggcccuggau

SEQ ID NO: 3062307 - RNA, 19 nt, Artificial Sequence
  Description of Artificial Sequence: Synthetic oligonucleotide
gugccacaccccuagaucu

SEQ ID NO: 3062308 - RNA, 19 nt, Artificial Sequence
  Description of Artificial Sequence: Synthetic oligonucleotide
cugggugguagagcgcucc

SEQ ID NO: 3062309 - RNA, 19 nt, Artificial Sequence
  Description of Artificial Sequence: Synthetic oligonucleotide
cagccucagagcccaagug

SEQ ID NO: 3062310 - RNA, 19 nt, Artificial Sequence
  Description of Artificial Sequence: Synthetic oligonucleotide
uucugccuccaagaggauc

SEQ ID NO: 3062311 - RNA, 19 nt, Artificial Sequence
  Description of Artificial Sequence: Synthetic oligonucleotide
uccuggcuugguugcaggu

SEQ ID NO: 3062312 - RNA, 19 nt, Artificial Sequence
  Description of Artificial Sequence: Synthetic oligonucleotide
gauccacuguccagacuug

SEQ ID NO: 3062313 - RNA, 19 nt, Artificial Sequence
  Description of Artificial Sequence: Synthetic oligonucleotide
gguugcaggugaccauggg

SEQ ID NO: 3062314 - RNA, 19 nt, Artificial Sequence
  Description of Artificial Sequence: Synthetic oligonucleotide
gugguagagcgcuccuggc

SEQ ID NO: 3062315 - RNA, 19 nt, Artificial Sequence
  Description of Artificial Sequence: Synthetic oligonucleotide
ggugcauuaugggaagcac

SEQ ID NO: 3062316 - RNA, 19 nt, Artificial Sequence
  Description of Artificial Sequence: Synthetic oligonucleotide
accuggagcccgaggaggg

SEQ ID NO: 3062317 - RNA, 19 nt, Artificial Sequence
  Description of Artificial Sequence: Synthetic oligonucleotide
uagagcgcuccuggcuugg

SEQ ID NO: 3062318 - RNA, 19 nt, Artificial Sequence
  Description of Artificial Sequence: Synthetic oligonucleotide
ggauccacuguccagacuu

SEQ ID NO: 3062319 - RNA, 19 nt, Artificial Sequence
  Description of Artificial Sequence: Synthetic oligonucleotide
uccagccucagagcccaag

SEQ ID NO: 3062320 - RNA, 19 nt, Artificial Sequence
  Description of Artificial Sequence: Synthetic oligonucleotide
uaaugcccacaguggcaca

SEQ ID NO: 3062321 - RNA, 19 nt, Artificial Sequence
  Description of Artificial Sequence: Synthetic oligonucleotide
uugcaggacucuugagaau

SEQ ID NO: 3062322 - RNA, 19 nt, Artificial Sequence
  Description of Artificial Sequence: Synthetic oligonucleotide
guggcuacagcuggaacaa

SEQ ID NO: 3062323 - RNA, 19 nt, Artificial Sequence
  Description of Artificial Sequence: Synthetic oligonucleotide
ugggcccuggauccacugu

SEQ ID NO: 3062324 - RNA, 19 nt, Artificial Sequence
  Description of Artificial Sequence: Synthetic oligonucleotide
ugggugguagagcgcuccu

SEQ ID NO: 3062325 - RNA, 19 nt, Artificial Sequence
  Description of Artificial Sequence: Synthetic oligonucleotide
cuggagcccgaggagggcc

SEQ ID NO: 3062326 - RNA, 19 nt, Artificial Sequence
  Description of Artificial Sequence: Synthetic oligonucleotide
gcuacagcuggaacaacac

SEQ ID NO: 3062327 - RNA, 19 nt, Artificial Sequence
  Description of Artificial Sequence: Synthetic oligonucleotide
ggugaccaugggccggugg

SEQ ID NO: 3062328 - RNA, 19 nt, Artificial Sequence
  Description of Artificial Sequence: Synthetic oligonucleotide
agagcccaaguggcuacag

SEQ ID NO: 3062329 - RNA, 19 nt, Artificial Sequence
  Description of Artificial Sequence: Synthetic oligonucleotide
uggcuugguugcaggugac

SEQ ID NO: 3062330 - RNA, 19 nt, Artificial Sequence
  Description of Artificial Sequence: Synthetic oligonucleotide
aggacucuugagaauuaaa

SEQ ID NO: 3062331 - RNA, 19 nt, Artificial Sequence
  Description of Artificial Sequence: Synthetic oligonucleotide
ugccacaccccuagaucua

SEQ ID NO: 3062332 - RNA, 19 nt, Artificial Sequence
  Description of Artificial Sequence: Synthetic oligonucleotide
gccucagagcccaaguggc

SEQ ID NO: 3062333 - RNA, 19 nt, Artificial Sequence
  Description of Artificial Sequence: Synthetic oligonucleotide
agcuggaacaacacagcuu

SEQ ID NO: 3062334 - RNA, 19 nt, Artificial Sequence
  Description of Artificial Sequence: Synthetic oligonucleotide
gccuccaagaggaucucag

SEQ ID NO: 3062335 - RNA, 19 nt, Artificial Sequence
  Description of Artificial Sequence: Synthetic oligonucleotide
ggcuacagcuggaacaaca

SEQ ID NO: 3062336 - RNA, 19 nt, Artificial Sequence
  Description of Artificial Sequence: Synthetic oligonucleotide
gugaccaugggccgguggu

SEQ ID NO: 3062337 - RNA, 19 nt, Artificial Sequence
  Description of Artificial Sequence: Synthetic oligonucleotide
gcauuaugggaagcacuag

SEQ ID NO: 3062338 - RNA, 19 nt, Artificial Sequence
  Description of Artificial Sequence: Synthetic oligonucleotide
cagggaagauccagccuca

SEQ ID NO: 3062339 - RNA, 19 nt, Artificial Sequence
  Description of Artificial Sequence: Synthetic oligonucleotide
augcccacaguggcacagg

SEQ ID NO: 3062340 - RNA, 19 nt, Artificial Sequence
  Description of Artificial Sequence: Synthetic oligonucleotide
uccagacuugcaggacucu

SEQ ID NO: 3062341 - RNA, 19 nt, Artificial Sequence
  Description of Artificial Sequence: Synthetic oligonucleotide
accaugggccggugguuga

SEQ ID NO: 3062342 - RNA, 19 nt, Artificial Sequence
  Description of Artificial Sequence: Synthetic oligonucleotide
cccacaguggcacagggaa

SEQ ID NO: 3062343 - RNA, 19 nt, Artificial Sequence
  Description of Artificial Sequence: Synthetic oligonucleotide
gcuugguugcaggugacca

SEQ ID NO: 3062344 - RNA, 19 nt, Artificial Sequence
  Description of Artificial Sequence: Synthetic oligonucleotide
guccagacuugcaggacuc

SEQ ID NO: 3062345 - RNA, 19 nt, Artificial Sequence
  Description of Artificial Sequence: Synthetic oligonucleotide
gaagugccacaccccuaga

SEQ ID NO: 3062346 - RNA, 19 nt, Artificial Sequence
  Description of Artificial Sequence: Synthetic oligonucleotide
cuguccagacuugcaggac

SEQ ID NO: 3062347 - RNA, 19 nt, Artificial Sequence
  Description of Artificial Sequence: Synthetic oligonucleotide
ugccuccaagaggaucuca

SEQ ID NO: 3062348 - RNA, 19 nt, Artificial Sequence
  Description of Artificial Sequence: Synthetic oligonucleotide
agggaagauccagccucag

SEQ ID NO: 3062349 - RNA, 19 nt, Artificial Sequence
  Description of Artificial Sequence: Synthetic oligonucleotide
gugcauuaugggaagcacu

SEQ ID NO: 3062350 - RNA, 19 nt, Artificial Sequence
  Description of Artificial Sequence: Synthetic oligonucleotide
cccuagaucuaaugcccac

SEQ ID NO: 3062351 - RNA, 19 nt, Artificial Sequence
  Description of Artificial Sequence: Synthetic oligonucleotide
gggaagauccagccucaga

SEQ ID NO: 3062352 - RNA, 19 nt, Artificial Sequence
  Description of Artificial Sequence: Synthetic oligonucleotide
cagcuggaacaacacagcu

SEQ ID NO: 3062353 - RNA, 19 nt, Artificial Sequence
  Description of Artificial Sequence: Synthetic oligonucleotide
aggagggccgcuggguggu

SEQ ID NO: 3062354 - RNA, 19 nt, Artificial Sequence
  Description of Artificial Sequence: Synthetic oligonucleotide
gagggccgcugggugguag

SEQ ID NO: 3062355 - RNA, 19 nt, Artificial Sequence
  Description of Artificial Sequence: Synthetic oligonucleotide
agggccgcugggugguaga

SEQ ID NO: 3062356 - RNA, 19 nt, Artificial Sequence
  Description of Artificial Sequence: Synthetic oligonucleotide
caaguggcuacagcuggaa

SEQ ID NO: 3062357 - RNA, 19 nt, Artificial Sequence
  Description of Artificial Sequence: Synthetic oligonucleotide
cucagagcccaaguggcua

SEQ ID NO: 3062358 - RNA, 19 nt, Artificial Sequence
  Description of Artificial Sequence: Synthetic oligonucleotide
gcacuagagaagugccaca

SEQ ID NO: 3062359 - RNA, 19 nt, Artificial Sequence
  Description of Artificial Sequence: Synthetic oligonucleotide
ccuggauccacuguccaga

SEQ ID NO: 3062360 - RNA, 19 nt, Artificial Sequence
  Description of Artificial Sequence: Synthetic oligonucleotide
ugaccaugggccggugguu

SEQ ID NO: 3062361 - RNA, 19 nt, Artificial Sequence
  Description of Artificial Sequence: Synthetic oligonucleotide
caguggcacagggaagauc

SEQ ID NO: 3062362 - RNA, 19 nt, Artificial Sequence
  Description of Artificial Sequence: Synthetic oligonucleotide
ugcugggcccuggauccac

SEQ ID NO: 3062363 - RNA, 19 nt, Artificial Sequence
  Description of Artificial Sequence: Synthetic oligonucleotide
ccacaguggcacagggaag

SEQ ID NO: 3062364 - RNA, 19 nt, Artificial Sequence
  Description of Artificial Sequence: Synthetic oligonucleotide
cuugguugcaggugaccau

SEQ ID NO: 3062365 - RNA, 19 nt, Artificial Sequence
  Description of Artificial Sequence: Synthetic oligonucleotide
cccuggauccacuguccag

SEQ ID NO: 3062366 - RNA, 19 nt, Artificial Sequence
  Description of Artificial Sequence: Synthetic oligonucleotide
gcccaaguggcuacagcug

SEQ ID NO: 3062367 - RNA, 19 nt, Artificial Sequence
  Description of Artificial Sequence: Synthetic oligonucleotide
acaguggcacagggaagau

SEQ ID NO: 3062368 - RNA, 19 nt, Artificial Sequence
  Description of Artificial Sequence: Synthetic oligonucleotide
gguagagcgcuccuggcuu

SEQ ID NO: 3062369 - RNA, 19 nt, Artificial Sequence
  Description of Artificial Sequence: Synthetic oligonucleotide
caggacucuugagaauuaa

SEQ ID NO: 3062370 - RNA, 19 nt, Artificial Sequence
  Description of Artificial Sequence: Synthetic oligonucleotide
gagaagugccacaccccua

SEQ ID NO: 3062371 - RNA, 19 nt, Artificial Sequence
  Description of Artificial Sequence: Synthetic oligonucleotide
uggcuacagcuggaacaac

SEQ ID NO: 3062372 - RNA, 19 nt, Artificial Sequence
  Description of Artificial Sequence: Synthetic oligonucleotide
ccuagaucuaaugcccaca

SEQ ID NO: 3062373 - RNA, 19 nt, Artificial Sequence
  Description of Artificial Sequence: Synthetic oligonucleotide
ggcuugguugcaggugacc

SEQ ID NO: 3062374 - RNA, 19 nt, Artificial Sequence
  Description of Artificial Sequence: Synthetic oligonucleotide
cacagggaagauccagccu

SEQ ID NO: 3062375 - RNA, 19 nt, Artificial Sequence
  Description of Artificial Sequence: Synthetic oligonucleotide
gcgcuccuggcuugguugc

SEQ ID NO: 3062376 - RNA, 19 nt, Artificial Sequence
  Description of Artificial Sequence: Synthetic oligonucleotide
ggcccuggauccacugucc

SEQ ID NO: 3062377 - RNA, 19 nt, Artificial Sequence
  Description of Artificial Sequence: Synthetic oligonucleotide
gggaagcacuagagaagug

SEQ ID NO: 3062378 - RNA, 19 nt, Artificial Sequence
  Description of Artificial Sequence: Synthetic oligonucleotide
caguggggaccuggagccc

SEQ ID NO: 3062379 - RNA, 19 nt, Artificial Sequence
  Description of Artificial Sequence: Synthetic oligonucleotide
gcuuucugcugggcccugg

SEQ ID NO: 3062380 - RNA, 19 nt, Artificial Sequence
  Description of Artificial Sequence: Synthetic oligonucleotide
gggugguagagcgcuccug

SEQ ID NO: 3062381 - RNA, 19 nt, Artificial Sequence
  Description of Artificial Sequence: Synthetic oligonucleotide
ccaaguggcuacagcugga

SEQ ID NO: 3062382 - RNA, 19 nt, Artificial Sequence
  Description of Artificial Sequence: Synthetic oligonucleotide
agcuuucugcugggcccug

SEQ ID NO: 3062383 - RNA, 19 nt, Artificial Sequence
  Description of Artificial Sequence: Synthetic oligonucleotide
cugccuccaagaggaucuc

SEQ ID NO: 3062384 - RNA, 19 nt, Artificial Sequence
  Description of Artificial Sequence: Synthetic oligonucleotide
ccccuagaucuaaugccca

SEQ ID NO: 3062385 - RNA, 19 nt, Artificial Sequence
  Description of Artificial Sequence: Synthetic oligonucleotide
agagcgcuccuggcuuggu

SEQ ID NO: 3062386 - RNA, 19 nt, Artificial Sequence
  Description of Artificial Sequence: Synthetic oligonucleotide
ggccggugguugaagccug

SEQ ID NO: 3062387 - RNA, 19 nt, Artificial Sequence
  Description of Artificial Sequence: Synthetic oligonucleotide
cccgaggagggccgcuggg

SEQ ID NO: 3062388 - RNA, 19 nt, Artificial Sequence
  Description of Artificial Sequence: Synthetic oligonucleotide
cgaggagggccgcugggug

SEQ ID NO: 3062389 - RNA, 19 nt, Artificial Sequence
  Description of Artificial Sequence: Synthetic oligonucleotide
cagagcccaaguggcuaca

SEQ ID NO: 3062390 - RNA, 19 nt, Artificial Sequence
  Description of Artificial Sequence: Synthetic oligonucleotide
gggccgcugggugguagag

SEQ ID NO: 3062391 - RNA, 19 nt, Artificial Sequence
  Description of Artificial Sequence: Synthetic oligonucleotide
ggccgcugggugguagagc

SEQ ID NO: 3062392 - RNA, 19 nt, Artificial Sequence
  Description of Artificial Sequence: Synthetic oligonucleotide
aggugaccaugggccggug

SEQ ID NO: 3062393 - RNA, 19 nt, Artificial Sequence
  Description of Artificial Sequence: Synthetic oligonucleotide
gagcgcuccuggcuugguu

SEQ ID NO: 3062394 - RNA, 19 nt, Artificial Sequence
  Description of Artificial Sequence: Synthetic oligonucleotide
cggugguugaagccuguca

SEQ ID NO: 3062395 - RNA, 19 nt, Artificial Sequence
  Description of Artificial Sequence: Synthetic oligonucleotide
ccuggagcccgaggagggc

SEQ ID NO: 3062396 - RNA, 19 nt, Artificial Sequence
  Description of Artificial Sequence: Synthetic oligonucleotide
gccacaccccuagaucuaa

SEQ ID NO: 3062397 - RNA, 19 nt, Artificial Sequence
  Description of Artificial Sequence: Synthetic oligonucleotide
cagcuuucugcugggcccu

SEQ ID NO: 3062398 - RNA, 19 nt, Artificial Sequence
  Description of Artificial Sequence: Synthetic oligonucleotide
ccuccaagaggaucucagu

SEQ ID NO: 3062399 - RNA, 19 nt, Artificial Sequence
  Description of Artificial Sequence: Synthetic oligonucleotide
gcaggacucuugagaauua

SEQ ID NO: 3062400 - RNA, 19 nt, Artificial Sequence
  Description of Artificial Sequence: Synthetic oligonucleotide
gggccggugguugaagccu

SEQ ID NO: 3062401 - RNA, 19 nt, Artificial Sequence
  Description of Artificial Sequence: Synthetic oligonucleotide
ggaucucaguggggaccug

SEQ ID NO: 3062402 - RNA, 19 nt, Artificial Sequence
  Description of Artificial Sequence: Synthetic oligonucleotide
ccgcugggugguagagcgc

SEQ ID NO: 3062403 - RNA, 19 nt, Artificial Sequence
  Description of Artificial Sequence: Synthetic oligonucleotide
caggugaccaugggccggu

SEQ ID NO: 3062404 - RNA, 19 nt, Artificial Sequence
  Description of Artificial Sequence: Synthetic oligonucleotide
ggagcccgaggagggccgc

SEQ ID NO: 3062405 - RNA, 19 nt, Artificial Sequence
  Description of Artificial Sequence: Synthetic oligonucleotide
ccagccucagagcccaagu

SEQ ID NO: 3062406 - RNA, 19 nt, Artificial Sequence
  Description of Artificial Sequence: Synthetic oligonucleotide
ccucagagcccaaguggcu

SEQ ID NO: 3062407 - RNA, 19 nt, Artificial Sequence
  Description of Artificial Sequence: Synthetic oligonucleotide
cuucugccuccaagaggau

SEQ ID NO: 3062408 - RNA, 19 nt, Artificial Sequence
  Description of Artificial Sequence: Synthetic oligonucleotide
gcugggugguagagcgcuc

SEQ ID NO: 3062409 - RNA, 19 nt, Artificial Sequence
  Description of Artificial Sequence: Synthetic oligonucleotide
ccggugguugaagccuguc

SEQ ID NO: 3062410 - RNA, 19 nt, Artificial Sequence
  Description of Artificial Sequence: Synthetic oligonucleotide
cugcugggcccuggaucca

SEQ ID NO: 3062411 - RNA, 19 nt, Artificial Sequence
  Description of Artificial Sequence: Synthetic oligonucleotide
gagcccgaggagggccgcu

SEQ ID NO: 3062412 - RNA, 19 nt, Artificial Sequence
  Description of Artificial Sequence: Synthetic oligonucleotide
ccagacuugcaggacucuu

SEQ ID NO: 3062413 - RNA, 19 nt, Artificial Sequence
  Description of Artificial Sequence: Synthetic oligonucleotide
cgcugggugguagagcgcu

SEQ ID NO: 3062414 - RNA, 19 nt, Artificial Sequence
  Description of Artificial Sequence: Synthetic oligonucleotide
auccagccucagagcccaa

SEQ ID NO: 3062415 - RNA, 19 nt, Artificial Sequence
  Description of Artificial Sequence: Synthetic oligonucleotide
ccaugggccggugguugaa

SEQ ID NO: 3062416 - RNA, 19 nt, Artificial Sequence
  Description of Artificial Sequence: Synthetic oligonucleotide
gcugggcccuggauccacu

SEQ ID NO: 3062417 - RNA, 19 nt, Artificial Sequence
  Description of Artificial Sequence: Synthetic oligonucleotide
ccacaccccuagaucuaau

SEQ ID NO: 3062418 - RNA, 19 nt, Artificial Sequence
  Description of Artificial Sequence: Synthetic oligonucleotide
ccgaggagggccgcugggu

SEQ ID NO: 3062419 - RNA, 19 nt, Artificial Sequence
  Description of Artificial Sequence: Synthetic oligonucleotide
gccggugguugaagccugu

SEQ ID NO: 3062420 - RNA, 19 nt, Artificial Sequence
  Description of Artificial Sequence: Synthetic oligonucleotide
ggagggccgcuggguggua

SEQ ID NO: 3062421 - RNA, 19 nt, Artificial Sequence
  Description of Artificial Sequence: Synthetic oligonucleotide
aucaaagaccaacagaacg

SEQ ID NO: 3062422 - RNA, 19 nt, Artificial Sequence
  Description of Artificial Sequence: Synthetic oligonucleotide
ucaaaggacucccuguugg

SEQ ID NO: 3062423 - RNA, 19 nt, Artificial Sequence
  Description of Artificial Sequence: Synthetic oligonucleotide
uuggucacaucaaagacca

SEQ ID NO: 3062424 - RNA, 19 nt, Artificial Sequence
  Description of Artificial Sequence: Synthetic oligonucleotide
cagagcugcagcuugaucc

SEQ ID NO: 3062425 - RNA, 19 nt, Artificial Sequence
  Description of Artificial Sequence: Synthetic oligonucleotide
cuugucagggcccugagag

SEQ ID NO: 3062426 - RNA, 19 nt, Artificial Sequence
  Description of Artificial Sequence: Synthetic oligonucleotide
accagguuccgguagaagg

SEQ ID NO: 3062427 - RNA, 19 nt, Artificial Sequence
  Description of Artificial Sequence: Synthetic oligonucleotide
aagaccaacagaacgccac

SEQ ID NO: 3062428 - RNA, 19 nt, Artificial Sequence
  Description of Artificial Sequence: Synthetic oligonucleotide
uguuggucacaucaaagac

SEQ ID NO: 3062429 - RNA, 19 nt, Artificial Sequence
  Description of Artificial Sequence: Synthetic oligonucleotide
agcgauccggaauugauag

SEQ ID NO: 3062430 - RNA, 19 nt, Artificial Sequence
  Description of Artificial Sequence: Synthetic oligonucleotide
agaggauacgaccuccugg

SEQ ID NO: 3062431 - RNA, 19 nt, Artificial Sequence
  Description of Artificial Sequence: Synthetic oligonucleotide
uagaacuccacgcccacag

SEQ ID NO: 3062432 - RNA, 19 nt, Artificial Sequence
  Description of Artificial Sequence: Synthetic oligonucleotide
auccggaauugauagcugc

SEQ ID NO: 3062433 - RNA, 19 nt, Artificial Sequence
  Description of Artificial Sequence: Synthetic oligonucleotide
acaucaaagaccaacagaa

SEQ ID NO: 3062434 - RNA, 19 nt, Artificial Sequence
  Description of Artificial Sequence: Synthetic oligonucleotide
ugcagcuugauccgcagcc

SEQ ID NO: 3062435 - RNA, 19 nt, Artificial Sequence
  Description of Artificial Sequence: Synthetic oligonucleotide
gauacgaccuccuggugcc

SEQ ID NO: 3062436 - RNA, 19 nt, Artificial Sequence
  Description of Artificial Sequence: Synthetic oligonucleotide
ucacaucaaagaccaacag

SEQ ID NO: 3062437 - RNA, 19 nt, Artificial Sequence
  Description of Artificial Sequence: Synthetic oligonucleotide
aaggacucccuguugguca

SEQ ID NO: 3062438 - RNA, 19 nt, Artificial Sequence
  Description of Artificial Sequence: Synthetic oligonucleotide
agaccaacagaacgccacc

SEQ ID NO: 3062439 - RNA, 19 nt, Artificial Sequence
  Description of Artificial Sequence: Synthetic oligonucleotide
cuggauguguucaaaggac

SEQ ID NO: 3062440 - RNA, 19 nt, Artificial Sequence
  Description of Artificial Sequence: Synthetic oligonucleotide
aacgccaccagguuccggu

SEQ ID NO: 3062441 - RNA, 19 nt, Artificial Sequence
  Description of Artificial Sequence: Synthetic oligonucleotide
acagaacgccaccagguuc

SEQ ID NO: 3062442 - RNA, 19 nt, Artificial Sequence
  Description of Artificial Sequence: Synthetic oligonucleotide
uggauguguucaaaggacu

SEQ ID NO: 3062443 - RNA, 19 nt, Artificial Sequence
  Description of Artificial Sequence: Synthetic oligonucleotide
gauguguucaaaggacucc

SEQ ID NO: 3062444 - RNA, 19 nt, Artificial Sequence
  Description of Artificial Sequence: Synthetic oligonucleotide
aaaggacucccuguugguc

SEQ ID NO: 3062445 - RNA, 19 nt, Artificial Sequence
  Description of Artificial Sequence: Synthetic oligonucleotide
accugaagcgcucgugacc

SEQ ID NO: 3062446 - RNA, 19 nt, Artificial Sequence
  Description of Artificial Sequence: Synthetic oligonucleotide
agcagugacgucuugccca

SEQ ID NO: 3062447 - RNA, 19 nt, Artificial Sequence
  Description of Artificial Sequence: Synthetic oligonucleotide
cagaacgccaccagguucc

SEQ ID NO: 3062448 - RNA, 19 nt, Artificial Sequence
  Description of Artificial Sequence: Synthetic oligonucleotide
aaggaucgggugaugcacc

SEQ ID NO: 3062449 - RNA, 19 nt, Artificial Sequence
  Description of Artificial Sequence: Synthetic oligonucleotide
gaacuccacgcccacagug

SEQ ID NO: 3062450 - RNA, 19 nt, Artificial Sequence
  Description of Artificial Sequence: Synthetic oligonucleotide
uccgguagaaggaucgggu

SEQ ID NO: 3062451 - RNA, 19 nt, Artificial Sequence
  Description of Artificial Sequence: Synthetic oligonucleotide
caaagaccaacagaacgcc

SEQ ID NO: 3062452 - RNA, 19 nt, Artificial Sequence
  Description of Artificial Sequence: Synthetic oligonucleotide
uccggaauugauagcugca

SEQ ID NO: 3062453 - RNA, 19 nt, Artificial Sequence
  Description of Artificial Sequence: Synthetic oligonucleotide
uagaaggaucgggugaugc

SEQ ID NO: 3062454 - RNA, 19 nt, Artificial Sequence
  Description of Artificial Sequence: Synthetic oligonucleotide
gggugaugcaccugaagcg

SEQ ID NO: 3062455 - RNA, 19 nt, Artificial Sequence
  Description of Artificial Sequence: Synthetic oligonucleotide
gaaggaucgggugaugcac

SEQ ID NO: 3062456 - RNA, 19 nt, Artificial Sequence
  Description of Artificial Sequence: Synthetic oligonucleotide
ugucagggcccugagagga

SEQ ID NO: 3062457 - RNA, 19 nt, Artificial Sequence
  Description of Artificial Sequence: Synthetic oligonucleotide
cuguuggucacaucaaaga

SEQ ID NO: 3062458 - RNA, 19 nt, Artificial Sequence
  Description of Artificial Sequence: Synthetic oligonucleotide
ucgggcuccggcuccaccg

SEQ ID NO: 3062459 - RNA, 19 nt, Artificial Sequence
  Description of Artificial Sequence: Synthetic oligonucleotide
accaacagaacgccaccag

SEQ ID NO: 3062460 - RNA, 19 nt, Artificial Sequence
  Description of Artificial Sequence: Synthetic oligonucleotide
aacagcucgcggcuguaga

SEQ ID NO: 3062461 - RNA, 19 nt, Artificial Sequence
  Description of Artificial Sequence: Synthetic oligonucleotide
caucaaagaccaacagaac

SEQ ID NO: 3062462 - RNA, 19 nt, Artificial Sequence
  Description of Artificial Sequence: Synthetic oligonucleotide
aacagaacgccaccagguu

SEQ ID NO: 3062463 - RNA, 19 nt, Artificial Sequence
  Description of Artificial Sequence: Synthetic oligonucleotide
agaaggaucgggugaugca

SEQ ID NO: 3062464 - RNA, 19 nt, Artificial Sequence
  Description of Artificial Sequence: Synthetic oligonucleotide
cacaucaaagaccaacaga

SEQ ID NO: 3062465 - RNA, 19 nt, Artificial Sequence
  Description of Artificial Sequence: Synthetic oligonucleotide
uuccgguagaaggaucggg

SEQ ID NO: 3062466 - RNA, 19 nt, Artificial Sequence
  Description of Artificial Sequence: Synthetic oligonucleotide
uguagaacuccacgcccac

SEQ ID NO: 3062467 - RNA, 19 nt, Artificial Sequence
  Description of Artificial Sequence: Synthetic oligonucleotide
uagcgcugcagcagugacg

SEQ ID NO: 3062468 - RNA, 19 nt, Artificial Sequence
  Description of Artificial Sequence: Synthetic oligonucleotide
cucccuguuggucacauca

SEQ ID NO: 3062469 - RNA, 19 nt, Artificial Sequence
  Description of Artificial Sequence: Synthetic oligonucleotide
uguguucaaaggacucccu

SEQ ID NO: 3062470 - RNA, 19 nt, Artificial Sequence
  Description of Artificial Sequence: Synthetic oligonucleotide
ugagaggauacgaccuccu

SEQ ID NO: 3062471 - RNA, 19 nt, Artificial Sequence
  Description of Artificial Sequence: Synthetic oligonucleotide
acuccacgcccacaguggg

SEQ ID NO: 3062472 - RNA, 19 nt, Artificial Sequence
  Description of Artificial Sequence: Synthetic oligonucleotide
agcagagcgauccggaauu

SEQ ID NO: 3062473 - RNA, 19 nt, Artificial Sequence
  Description of Artificial Sequence: Synthetic oligonucleotide
ggauacgaccuccuggugc

SEQ ID NO: 3062474 - RNA, 19 nt, Artificial Sequence
  Description of Artificial Sequence: Synthetic oligonucleotide
uugucagggcccugagagg

SEQ ID NO: 3062475 - RNA, 19 nt, Artificial Sequence
  Description of Artificial Sequence: Synthetic oligonucleotide
uccccgagcagagcgaucc

SEQ ID NO: 3062476 - RNA, 19 nt, Artificial Sequence
  Description of Artificial Sequence: Synthetic oligonucleotide
ucgggugaugcaccugaag

SEQ ID NO: 3062477 - RNA, 19 nt, Artificial Sequence
  Description of Artificial Sequence: Synthetic oligonucleotide
gguuccgguagaaggaucg

SEQ ID NO: 3062478 - RNA, 19 nt, Artificial Sequence
  Description of Artificial Sequence: Synthetic oligonucleotide
gaggauacgaccuccuggu

SEQ ID NO: 3062479 - RNA, 19 nt, Artificial Sequence
  Description of Artificial Sequence: Synthetic oligonucleotide
agugggcucgggcuccggc

SEQ ID NO: 3062480 - RNA, 19 nt, Artificial Sequence
  Description of Artificial Sequence: Synthetic oligonucleotide
gucacaucaaagaccaaca

SEQ ID NO: 3062481 - RNA, 19 nt, Artificial Sequence
  Description of Artificial Sequence: Synthetic oligonucleotide
gaugcaccugaagcgcucg

SEQ ID NO: 3062482 - RNA, 19 nt, Artificial Sequence
  Description of Artificial Sequence: Synthetic oligonucleotide
ggucacaucaaagaccaac

SEQ ID NO: 3062483 - RNA, 19 nt, Artificial Sequence
  Description of Artificial Sequence: Synthetic oligonucleotide
gagaggauacgaccuccug

SEQ ID NO: 3062484 - RNA, 19 nt, Artificial Sequence
  Description of Artificial Sequence: Synthetic oligonucleotide
ggcagcaacagcucgcggc

SEQ ID NO: 3062485 - RNA, 19 nt, Artificial Sequence
  Description of Artificial Sequence: Synthetic oligonucleotide
aaagaccaacagaacgcca

SEQ ID NO: 3062486 - RNA, 19 nt, Artificial Sequence
  Description of Artificial Sequence: Synthetic oligonucleotide
gcuguagaacuccacgccc

SEQ ID NO: 3062487 - RNA, 19 nt, Artificial Sequence
  Description of Artificial Sequence: Synthetic oligonucleotide
cugagaggauacgaccucc

SEQ ID NO: 3062488 - RNA, 19 nt, Artificial Sequence
  Description of Artificial Sequence: Synthetic oligonucleotide
ggcuguagaacuccacgcc

SEQ ID NO: 3062489 - RNA, 19 nt, Artificial Sequence
  Description of Artificial Sequence: Synthetic oligonucleotide
uggugccaagccuggaugu

SEQ ID NO: 3062490 - RNA, 19 nt, Artificial Sequence
  Description of Artificial Sequence: Synthetic oligonucleotide
cagcuugauccgcagcccg

SEQ ID NO: 3062491 - RNA, 19 nt, Artificial Sequence
  Description of Artificial Sequence: Synthetic oligonucleotide
gcggcuguagaacuccacg

SEQ ID NO: 3062492 - RNA, 19 nt, Artificial Sequence
  Description of Artificial Sequence: Synthetic oligonucleotide
ccuguuggucacaucaaag

SEQ ID NO: 3062493 - RNA, 19 nt, Artificial Sequence
  Description of Artificial Sequence: Synthetic oligonucleotide
aagcgcucgugacccgcgg

SEQ ID NO: 3062494 - RNA, 19 nt, Artificial Sequence
  Description of Artificial Sequence: Synthetic oligonucleotide
ggugaugcaccugaagcgc

SEQ ID NO: 3062495 - RNA, 19 nt, Artificial Sequence
  Description of Artificial Sequence: Synthetic oligonucleotide
cuggugccaagccuggaug

SEQ ID NO: 3062496 - RNA, 19 nt, Artificial Sequence
  Description of Artificial Sequence: Synthetic oligonucleotide
gagagcccgccacguagcg

SEQ ID NO: 3062497 - RNA, 19 nt, Artificial Sequence
  Description of Artificial Sequence: Synthetic oligonucleotide
uccacgcccacagugggcu

SEQ ID NO: 3062498 - RNA, 19 nt, Artificial Sequence
  Description of Artificial Sequence: Synthetic oligonucleotide
ugaugcaccugaagcgcuc

SEQ ID NO: 3062499 - RNA, 19 nt, Artificial Sequence
  Description of Artificial Sequence: Synthetic oligonucleotide
gcagcagugacgucuugcc

SEQ ID NO: 3062500 - RNA, 19 nt, Artificial Sequence
  Description of Artificial Sequence: Synthetic oligonucleotide
ccaacagaacgccaccagg

SEQ ID NO: 3062501 - RNA, 19 nt, Artificial Sequence
  Description of Artificial Sequence: Synthetic oligonucleotide
ggcguccccgagcagagcg

SEQ ID NO: 3062502 - RNA, 19 nt, Artificial Sequence
  Description of Artificial Sequence: Synthetic oligonucleotide
gauccggaauugauagcug

SEQ ID NO: 3062503 - RNA, 19 nt, Artificial Sequence
  Description of Artificial Sequence: Synthetic oligonucleotide
ugaagcgcucgugacccgc

SEQ ID NO: 3062504 - RNA, 19 nt, Artificial Sequence
  Description of Artificial Sequence: Synthetic oligonucleotide
agcucgcggcuguagaacu

SEQ ID NO: 3062505 - RNA, 19 nt, Artificial Sequence
  Description of Artificial Sequence: Synthetic oligonucleotide
cuugauccgcagcccgggg

SEQ ID NO: 3062506 - RNA, 19 nt, Artificial Sequence
  Description of Artificial Sequence: Synthetic oligonucleotide
accuccuggugccaagccu

SEQ ID NO: 3062507 - RNA, 19 nt, Artificial Sequence
  Description of Artificial Sequence: Synthetic oligonucleotide
ucccuguuggucacaucaa

SEQ ID NO: 3062508 - RNA, 19 nt, Artificial Sequence
  Description of Artificial Sequence: Synthetic oligonucleotide
ugcaccugaagcgcucgug

SEQ ID NO: 3062509 - RNA, 19 nt, Artificial Sequence
  Description of Artificial Sequence: Synthetic oligonucleotide
ccugaagcgcucgugaccc

SEQ ID NO: 3062510 - RNA, 19 nt, Artificial Sequence
  Description of Artificial Sequence: Synthetic oligonucleotide
gaagcgcucgugacccgcg

SEQ ID NO: 3062511 - RNA, 19 nt, Artificial Sequence
  Description of Artificial Sequence: Synthetic oligonucleotide
aggaucgggugaugcaccu

SEQ ID NO: 3062512 - RNA, 19 nt, Artificial Sequence
  Description of Artificial Sequence: Synthetic oligonucleotide
cucgcggcuguagaacucc

SEQ ID NO: 3062513 - RNA, 19 nt, Artificial Sequence
  Description of Artificial Sequence: Synthetic oligonucleotide
caacagaacgccaccaggu

SEQ ID NO: 3062514 - RNA, 19 nt, Artificial Sequence
  Description of Artificial Sequence: Synthetic oligonucleotide
gaccuccuggugccaagcc

SEQ ID NO: 3062515 - RNA, 19 nt, Artificial Sequence
  Description of Artificial Sequence: Synthetic oligonucleotide
cagcagugacgucuugccc

SEQ ID NO: 3062516 - RNA, 19 nt, Artificial Sequence
  Description of Artificial Sequence: Synthetic oligonucleotide
agagcgauccggaauugau

SEQ ID NO: 3062517 - RNA, 19 nt, Artificial Sequence
  Description of Artificial Sequence: Synthetic oligonucleotide
cgggugaugcaccugaagc

SEQ ID NO: 3062518 - RNA, 19 nt, Artificial Sequence
  Description of Artificial Sequence: Synthetic oligonucleotide
acagcucgcggcuguagaa

SEQ ID NO: 3062519 - RNA, 19 nt, Artificial Sequence
  Description of Artificial Sequence: Synthetic oligonucleotide
cuccuggugccaagccugg

SEQ ID NO: 3062520 - RNA, 19 nt, Artificial Sequence
  Description of Artificial Sequence: Synthetic oligonucleotide
accgcggcguccccgagca

SEQ ID NO: 3062521 - RNA, 19 nt, Artificial Sequence
  Description of Artificial Sequence: Synthetic oligonucleotide
guuccgguagaaggaucgg

SEQ ID NO: 3062522 - RNA, 19 nt, Artificial Sequence
  Description of Artificial Sequence: Synthetic oligonucleotide
caccugaagcgcucgugac

SEQ ID NO: 3062523 - RNA, 19 nt, Artificial Sequence
  Description of Artificial Sequence: Synthetic oligonucleotide
agaacuccacgcccacagu

SEQ ID NO: 3062524 - RNA, 19 nt, Artificial Sequence
  Description of Artificial Sequence: Synthetic oligonucleotide
agagcccgccacguagcgc

SEQ ID NO: 3062525 - RNA, 19 nt, Artificial Sequence
  Description of Artificial Sequence: Synthetic oligonucleotide
aggauacgaccuccuggug

SEQ ID NO: 3062526 - RNA, 19 nt, Artificial Sequence
  Description of Artificial Sequence: Synthetic oligonucleotide
agcuugauccgcagcccgg

SEQ ID NO: 3062527 - RNA, 19 nt, Artificial Sequence
  Description of Artificial Sequence: Synthetic oligonucleotide
gcccugagaggauacgacc

SEQ ID NO: 3062528 - RNA, 19 nt, Artificial Sequence
  Description of Artificial Sequence: Synthetic oligonucleotide
accuugucagggcccugag

SEQ ID NO: 3062529 - RNA, 19 nt, Artificial Sequence
  Description of Artificial Sequence: Synthetic oligonucleotide
ugccaagccuggauguguu

SEQ ID NO: 3062530 - RNA, 19 nt, Artificial Sequence
  Description of Artificial Sequence: Synthetic oligonucleotide
gaccaacagaacgccacca

SEQ ID NO: 3062531 - RNA, 19 nt, Artificial Sequence
  Description of Artificial Sequence: Synthetic oligonucleotide
acccgcggugucccagagc

SEQ ID NO: 3062532 - RNA, 19 nt, Artificial Sequence
  Description of Artificial Sequence: Synthetic oligonucleotide
ggauguguucaaaggacuc

SEQ ID NO: 3062533 - RNA, 19 nt, Artificial Sequence
  Description of Artificial Sequence: Synthetic oligonucleotide
acgaccuccuggugccaag

SEQ ID NO: 3062534 - RNA, 19 nt, Artificial Sequence
  Description of Artificial Sequence: Synthetic oligonucleotide
ccuccuggugccaagccug

SEQ ID NO: 3062535 - RNA, 19 nt, Artificial Sequence
  Description of Artificial Sequence: Synthetic oligonucleotide
aagccuggauguguucaaa

SEQ ID NO: 3062536 - RNA, 19 nt, Artificial Sequence
  Description of Artificial Sequence: Synthetic oligonucleotide
cacgcccacagugggcucg

SEQ ID NO: 3062537 - RNA, 19 nt, Artificial Sequence
  Description of Artificial Sequence: Synthetic oligonucleotide
agguuccgguagaaggauc

SEQ ID NO: 3062538 - RNA, 19 nt, Artificial Sequence
  Description of Artificial Sequence: Synthetic oligonucleotide
cuccacgcccacagugggc

SEQ ID NO: 3062539 - RNA, 19 nt, Artificial Sequence
  Description of Artificial Sequence: Synthetic oligonucleotide
uugcccaccgcggcguccc

SEQ ID NO: 3062540 - RNA, 19 nt, Artificial Sequence
  Description of Artificial Sequence: Synthetic oligonucleotide
cucgugacccgcggugucc

SEQ ID NO: 3062541 - RNA, 19 nt, Artificial Sequence
  Description of Artificial Sequence: Synthetic oligonucleotide
ucgugacccgcgguguccc

SEQ ID NO: 3062542 - RNA, 19 nt, Artificial Sequence
  Description of Artificial Sequence: Synthetic oligonucleotide
ugacccgcggugucccaga

SEQ ID NO: 3062543 - RNA, 19 nt, Artificial Sequence
  Description of Artificial Sequence: Synthetic oligonucleotide
cacagugggcucgggcucc

SEQ ID NO: 3062544 - RNA, 19 nt, Artificial Sequence
  Description of Artificial Sequence: Synthetic oligonucleotide
agaacgccaccagguuccg

SEQ ID NO: 3062545 - RNA, 19 nt, Artificial Sequence
  Description of Artificial Sequence: Synthetic oligonucleotide
cugaagcgcucgugacccg

SEQ ID NO: 3062546 - RNA, 19 nt, Artificial Sequence
  Description of Artificial Sequence: Synthetic oligonucleotide
ucgcggcuguagaacucca

SEQ ID NO: 3062547 - RNA, 19 nt, Artificial Sequence
  Description of Artificial Sequence: Synthetic oligonucleotide
ggggcagcaacagcucgcg

SEQ ID NO: 3062548 - RNA, 19 nt, Artificial Sequence
  Description of Artificial Sequence: Synthetic oligonucleotide
guagaaggaucgggugaug

SEQ ID NO: 3062549 - RNA, 19 nt, Artificial Sequence
  Description of Artificial Sequence: Synthetic oligonucleotide
cggaauugauagcugcagc

SEQ ID NO: 3062550 - RNA, 19 nt, Artificial Sequence
  Description of Artificial Sequence: Synthetic oligonucleotide
cagggcccugagaggauac

SEQ ID NO: 3062551 - RNA, 19 nt, Artificial Sequence
  Description of Artificial Sequence: Synthetic oligonucleotide
agggcccugagaggauacg

SEQ ID NO: 3062552 - RNA, 19 nt, Artificial Sequence
  Description of Artificial Sequence: Synthetic oligonucleotide
gcuugauccgcagcccggg

SEQ ID NO: 3062553 - RNA, 19 nt, Artificial Sequence
  Description of Artificial Sequence: Synthetic oligonucleotide
ccagguuccgguagaagga

SEQ ID NO: 3062554 - RNA, 19 nt, Artificial Sequence
  Description of Artificial Sequence: Synthetic oligonucleotide
gagcgauccggaauugaua

SEQ ID NO: 3062555 - RNA, 19 nt, Artificial Sequence
  Description of Artificial Sequence: Synthetic oligonucleotide
gacccgcggugucccagag

SEQ ID NO: 3062556 - RNA, 19 nt, Artificial Sequence
  Description of Artificial Sequence: Synthetic oligonucleotide
gcaccugaagcgcucguga

SEQ ID NO: 3062557 - RNA, 19 nt, Artificial Sequence
  Description of Artificial Sequence: Synthetic oligonucleotide
caagccuggauguguucaa

SEQ ID NO: 3062558 - RNA, 19 nt, Artificial Sequence
  Description of Artificial Sequence: Synthetic oligonucleotide
ccgagagcccgccacguag

SEQ ID NO: 3062559 - RNA, 19 nt, Artificial Sequence
  Description of Artificial Sequence: Synthetic oligonucleotide
gagcagagcgauccggaau

SEQ ID NO: 3062560 - RNA, 19 nt, Artificial Sequence
  Description of Artificial Sequence: Synthetic oligonucleotide
ucagggcccugagaggaua

SEQ ID NO: 3062561 - RNA, 19 nt, Artificial Sequence
  Description of Artificial Sequence: Synthetic oligonucleotide
gaacgccaccagguuccgg

SEQ ID NO: 3062562 - RNA, 19 nt, Artificial Sequence
  Description of Artificial Sequence: Synthetic oligonucleotide
cagcucgcggcuguagaac

SEQ ID NO: 3062563 - RNA, 19 nt, Artificial Sequence
  Description of Artificial Sequence: Synthetic oligonucleotide
ccgguagaaggaucgggug

SEQ ID NO: 3062564 - RNA, 19 nt, Artificial Sequence
  Description of Artificial Sequence: Synthetic oligonucleotide
cggcuguagaacuccacgc

SEQ ID NO: 3062565 - RNA, 19 nt, Artificial Sequence
  Description of Artificial Sequence: Synthetic oligonucleotide
caacagcucgcggcuguag

SEQ ID NO: 3062566 - RNA, 19 nt, Artificial Sequence
  Description of Artificial Sequence: Synthetic oligonucleotide
agcgcucgugacccgcggu

SEQ ID NO: 3062567 - RNA, 19 nt, Artificial Sequence
  Description of Artificial Sequence: Synthetic oligonucleotide
uacgaccuccuggugccaa

SEQ ID NO: 3062568 - RNA, 19 nt, Artificial Sequence
  Description of Artificial Sequence: Synthetic oligonucleotide
augcaccugaagcgcucgu

SEQ ID NO: 3062569 - RNA, 19 nt, Artificial Sequence
  Description of Artificial Sequence: Synthetic oligonucleotide
ccugagaggauacgaccuc

SEQ ID NO: 3062570 - RNA, 19 nt, Artificial Sequence
  Description of Artificial Sequence: Synthetic oligonucleotide
agcugcagcuugauccgca

SEQ ID NO: 3062571 - RNA, 19 nt, Artificial Sequence
  Description of Artificial Sequence: Synthetic oligonucleotide
caaaggacucccuguuggu

SEQ ID NO: 3062572 - RNA, 19 nt, Artificial Sequence
  Description of Artificial Sequence: Synthetic oligonucleotide
uggucacaucaaagaccaa

SEQ ID NO: 3062573 - RNA, 19 nt, Artificial Sequence
  Description of Artificial Sequence: Synthetic oligonucleotide
guagaacuccacgcccaca

SEQ ID NO: 3062574 - RNA, 19 nt, Artificial Sequence
  Description of Artificial Sequence: Synthetic oligonucleotide
gcgauccggaauugauagc

SEQ ID NO: 3062575 - RNA, 19 nt, Artificial Sequence
  Description of Artificial Sequence: Synthetic oligonucleotide
cucgggcuccggcuccacc

SEQ ID NO: 3062576 - RNA, 19 nt, Artificial Sequence
  Description of Artificial Sequence: Synthetic oligonucleotide
ggugccaagccuggaugug

SEQ ID NO: 3062577 - RNA, 19 nt, Artificial Sequence
  Description of Artificial Sequence: Synthetic oligonucleotide
gcagcuugauccgcagccc

SEQ ID NO: 3062578 - RNA, 19 nt, Artificial Sequence
  Description of Artificial Sequence: Synthetic oligonucleotide
gugacccgcggugucccag

SEQ ID NO: 3062579 - RNA, 19 nt, Artificial Sequence
  Description of Artificial Sequence: Synthetic oligonucleotide
acagugggcucgggcuccg

SEQ ID NO: 3062580 - RNA, 19 nt, Artificial Sequence
  Description of Artificial Sequence: Synthetic oligonucleotide
ggcccugagaggauacgac

SEQ ID NO: 3062581 - RNA, 19 nt, Artificial Sequence
  Description of Artificial Sequence: Synthetic oligonucleotide
gcagcaacagcucgcggcu

SEQ ID NO: 3062582 - RNA, 19 nt, Artificial Sequence
  Description of Artificial Sequence: Synthetic oligonucleotide
gguagaaggaucgggugau

SEQ ID NO: 3062583 - RNA, 19 nt, Artificial Sequence
  Description of Artificial Sequence: Synthetic oligonucleotide
caccgcggcguccccgagc

SEQ ID NO: 3062584 - RNA, 19 nt, Artificial Sequence
  Description of Artificial Sequence: Synthetic oligonucleotide
cgcggugucccagagcugc

SEQ ID NO: 3062585 - RNA, 19 nt, Artificial Sequence
  Description of Artificial Sequence: Synthetic oligonucleotide
uccuggugccaagccugga

SEQ ID NO: 3062586 - RNA, 19 nt, Artificial Sequence
  Description of Artificial Sequence: Synthetic oligonucleotide
acgcccacagugggcucgg

SEQ ID NO: 3062587 - RNA, 19 nt, Artificial Sequence
  Description of Artificial Sequence: Synthetic oligonucleotide
cacguagcgcugcagcagu

SEQ ID NO: 3062588 - RNA, 19 nt, Artificial Sequence
  Description of Artificial Sequence: Synthetic oligonucleotide
ccacguagcgcugcagcag

SEQ ID NO: 3062589 - RNA, 19 nt, Artificial Sequence
  Description of Artificial Sequence: Synthetic oligonucleotide
cagagcgauccggaauuga

SEQ ID NO: 3062590 - RNA, 19 nt, Artificial Sequence
  Description of Artificial Sequence: Synthetic oligonucleotide
ccaagccuggauguguuca

SEQ ID NO: 3062591 - RNA, 19 nt, Artificial Sequence
  Description of Artificial Sequence: Synthetic oligonucleotide
gcgcucgugacccgcggug

SEQ ID NO: 3062592 - RNA, 19 nt, Artificial Sequence
  Description of Artificial Sequence: Synthetic oligonucleotide
cccgagcagagcgauccgg

SEQ ID NO: 3062593 - RNA, 19 nt, Artificial Sequence
  Description of Artificial Sequence: Synthetic oligonucleotide
gcccacagugggcucgggc

SEQ ID NO: 3062594 - RNA, 19 nt, Artificial Sequence
  Description of Artificial Sequence: Synthetic oligonucleotide
gggcagcaacagcucgcgg

SEQ ID NO: 3062595 - RNA, 19 nt, Artificial Sequence
  Description of Artificial Sequence: Synthetic oligonucleotide
cgagagcccgccacguagc

SEQ ID NO: 3062596 - RNA, 19 nt, Artificial Sequence
  Description of Artificial Sequence: Synthetic oligonucleotide
gugaugcaccugaagcgcu

SEQ ID NO: 3062597 - RNA, 19 nt, Artificial Sequence
  Description of Artificial Sequence: Synthetic oligonucleotide
acguagcgcugcagcagug

SEQ ID NO: 3062598 - RNA, 19 nt, Artificial Sequence
  Description of Artificial Sequence: Synthetic oligonucleotide
acgccaccagguuccggua

SEQ ID NO: 3062599 - RNA, 19 nt, Artificial Sequence
  Description of Artificial Sequence: Synthetic oligonucleotide
cccugagaggauacgaccu

SEQ ID NO: 3062600 - RNA, 19 nt, Artificial Sequence
  Description of Artificial Sequence: Synthetic oligonucleotide
cagcaacagcucgcggcug

SEQ ID NO: 3062601 - RNA, 19 nt, Artificial Sequence
  Description of Artificial Sequence: Synthetic oligonucleotide
gugccaagccuggaugugu

SEQ ID NO: 3062602 - RNA, 19 nt, Artificial Sequence
  Description of Artificial Sequence: Synthetic oligonucleotide
auacgaccuccuggugcca

SEQ ID NO: 3062603 - RNA, 19 nt, Artificial Sequence
  Description of Artificial Sequence: Synthetic oligonucleotide
cgguagaaggaucggguga

SEQ ID NO: 3062604 - RNA, 19 nt, Artificial Sequence
  Description of Artificial Sequence: Synthetic oligonucleotide
cccgcggugucccagagcu

SEQ ID NO: 3062605 - RNA, 19 nt, Artificial Sequence
  Description of Artificial Sequence: Synthetic oligonucleotide
gcagagcgauccggaauug

SEQ ID NO: 3062606 - RNA, 19 nt, Artificial Sequence
  Description of Artificial Sequence: Synthetic oligonucleotide
ggaucgggugaugcaccug

SEQ ID NO: 3062607 - RNA, 19 nt, Artificial Sequence
  Description of Artificial Sequence: Synthetic oligonucleotide
gggcccugagaggauacga

SEQ ID NO: 3062608 - RNA, 19 nt, Artificial Sequence
  Description of Artificial Sequence: Synthetic oligonucleotide
ccagagcugcagcuugauc

SEQ ID NO: 3062609 - RNA, 19 nt, Artificial Sequence
  Description of Artificial Sequence: Synthetic oligonucleotide
ccgagcagagcgauccgga

SEQ ID NO: 3062610 - RNA, 19 nt, Artificial Sequence
  Description of Artificial Sequence: Synthetic oligonucleotide
gacucccuguuggucacau

SEQ ID NO: 3062611 - RNA, 19 nt, Artificial Sequence
  Description of Artificial Sequence: Synthetic oligonucleotide
cgauccggaauugauagcu

SEQ ID NO: 3062612 - RNA, 19 nt, Artificial Sequence
  Description of Artificial Sequence: Synthetic oligonucleotide
ugcccaccgcggcgucccc

SEQ ID NO: 3062613 - RNA, 19 nt, Artificial Sequence
  Description of Artificial Sequence: Synthetic oligonucleotide
gccaagccuggauguguuc

SEQ ID NO: 3062614 - RNA, 19 nt, Artificial Sequence
  Description of Artificial Sequence: Synthetic oligonucleotide
cccuguuggucacaucaaa

SEQ ID NO: 3062615 - RNA, 19 nt, Artificial Sequence
  Description of Artificial Sequence: Synthetic oligonucleotide
ggcuccggcuccaccggcc

SEQ ID NO: 3062616 - RNA, 19 nt, Artificial Sequence
  Description of Artificial Sequence: Synthetic oligonucleotide
gcggcguccccgagcagag

SEQ ID NO: 3062617 - RNA, 19 nt, Artificial Sequence
  Description of Artificial Sequence: Synthetic oligonucleotide
gcucgugacccgcgguguc

SEQ ID NO: 3062618 - RNA, 19 nt, Artificial Sequence
  Description of Artificial Sequence: Synthetic oligonucleotide
cagguuccgguagaaggau

SEQ ID NO: 3062619 - RNA, 19 nt, Artificial Sequence
  Description of Artificial Sequence: Synthetic oligonucleotide
ccuugucagggcccugaga

SEQ ID NO: 3062620 - RNA, 19 nt, Artificial Sequence
  Description of Artificial Sequence: Synthetic oligonucleotide
gggcuccggcuccaccggc

SEQ ID NO: 3062621 - RNA, 19 nt, Artificial Sequence
  Description of Artificial Sequence: Synthetic oligonucleotide
cagugggcucgggcuccgg

SEQ ID NO: 3062622 - RNA, 19 nt, Artificial Sequence
  Description of Artificial Sequence: Synthetic oligonucleotide
ccccgagcagagcgauccg

SEQ ID NO: 3062623 - RNA, 19 nt, Artificial Sequence
  Description of Artificial Sequence: Synthetic oligonucleotide
cgccaccagguuccgguag

SEQ ID NO: 3062624 - RNA, 19 nt, Artificial Sequence
  Description of Artificial Sequence: Synthetic oligonucleotide
cgcggcuguagaacuccac

SEQ ID NO: 3062625 - RNA, 19 nt, Artificial Sequence
  Description of Artificial Sequence: Synthetic oligonucleotide
gcucgcggcuguagaacuc

SEQ ID NO: 3062626 - RNA, 19 nt, Artificial Sequence
  Description of Artificial Sequence: Synthetic oligonucleotide
cgaccuccuggugccaagc

SEQ ID NO: 3062627 - RNA, 19 nt, Artificial Sequence
  Description of Artificial Sequence: Synthetic oligonucleotide
cgggcuccggcuccaccgg

SEQ ID NO: 3062628 - RNA, 19 nt, Artificial Sequence
  Description of Artificial Sequence: Synthetic oligonucleotide
ccuggugccaagccuggau

SEQ ID NO: 3062629 - RNA, 19 nt, Artificial Sequence
  Description of Artificial Sequence: Synthetic oligonucleotide
cgcugcagcagugacgucu

SEQ ID NO: 3062630 - RNA, 19 nt, Artificial Sequence
  Description of Artificial Sequence: Synthetic oligonucleotide
gucagggcccugagaggau

SEQ ID NO: 3062631 - RNA, 19 nt, Artificial Sequence
  Description of Artificial Sequence: Synthetic oligonucleotide
gcccgccacguagcgcugc

SEQ ID NO: 3062632 - RNA, 19 nt, Artificial Sequence
  Description of Artificial Sequence: Synthetic oligonucleotide
ggacucccuguuggucaca

SEQ ID NO: 3062633 - RNA, 19 nt, Artificial Sequence
  Description of Artificial Sequence: Synthetic oligonucleotide
gcguccccgagcagagcga

SEQ ID NO: 3062634 - RNA, 19 nt, Artificial Sequence
  Description of Artificial Sequence: Synthetic oligonucleotide
gcaacagcucgcggcugua

SEQ ID NO: 3062635 - RNA, 19 nt, Artificial Sequence
  Description of Artificial Sequence: Synthetic oligonucleotide
ccgcggugucccagagcug

SEQ ID NO: 3062636 - RNA, 19 nt, Artificial Sequence
  Description of Artificial Sequence: Synthetic oligonucleotide
ccacgcccacagugggcuc

SEQ ID NO: 3062637 - RNA, 19 nt, Artificial Sequence
  Description of Artificial Sequence: Synthetic oligonucleotide
cgcggcguccccgagcaga

SEQ ID NO: 3062638 - RNA, 19 nt, Artificial Sequence
  Description of Artificial Sequence: Synthetic oligonucleotide
gcggugucccagagcugca

SEQ ID NO: 3062639 - RNA, 19 nt, Artificial Sequence
  Description of Artificial Sequence: Synthetic oligonucleotide
ccaccgcggcguccccgag

SEQ ID NO: 3062640 - RNA, 19 nt, Artificial Sequence
  Description of Artificial Sequence: Synthetic oligonucleotide
gcgcugcagcagugacguc

SEQ ID NO: 3062641 - RNA, 19 nt, Artificial Sequence
  Description of Artificial Sequence: Synthetic oligonucleotide
cccgagagcccgccacgua

SEQ ID NO: 3062642 - RNA, 19 nt, Artificial Sequence
  Description of Artificial Sequence: Synthetic oligonucleotide
cgugacccgcgguguccca

SEQ ID NO: 3062643 - RNA, 19 nt, Artificial Sequence
  Description of Artificial Sequence: Synthetic oligonucleotide
ccgcggcguccccgagcag

SEQ ID NO: 3062644 - RNA, 19 nt, Artificial Sequence
  Description of Artificial Sequence: Synthetic oligonucleotide
cggcguccccgagcagagc

SEQ ID NO: 3062645 - RNA, 19 nt, Artificial Sequence
  Description of Artificial Sequence: Synthetic oligonucleotide
cgcccacagugggcucggg

SEQ ID NO: 3062646 - RNA, 19 nt, Artificial Sequence
  Description of Artificial Sequence: Synthetic oligonucleotide
ccccgagagcccgccacgu

SEQ ID NO: 3062647 - RNA, 19 nt, Artificial Sequence
  Description of Artificial Sequence: Synthetic oligonucleotide
cgcucgugacccgcggugu

SEQ ID NO: 3062648 - RNA, 19 nt, Artificial Sequence
  Description of Artificial Sequence: Synthetic oligonucleotide
cguccccgagcagagcgau

SEQ ID NO: 3062649 - RNA, 19 nt, Artificial Sequence
  Description of Artificial Sequence: Synthetic oligonucleotide
gauauaauuugucucaggg

SEQ ID NO: 3062650 - RNA, 19 nt, Artificial Sequence
  Description of Artificial Sequence: Synthetic oligonucleotide
aacagauauaauuugucuc

SEQ ID NO: 3062651 - RNA, 19 nt, Artificial Sequence
  Description of Artificial Sequence: Synthetic oligonucleotide
aaaauaucucuguccaugc

SEQ ID NO: 3062652 - RNA, 19 nt, Artificial Sequence
  Description of Artificial Sequence: Synthetic oligonucleotide
auuaaaaucuuccuuuggg

SEQ ID NO: 3062653 - RNA, 19 nt, Artificial Sequence
  Description of Artificial Sequence: Synthetic oligonucleotide
aaaaucuuccuuugggugg

SEQ ID NO: 3062654 - RNA, 19 nt, Artificial Sequence
  Description of Artificial Sequence: Synthetic oligonucleotide
acauccuugaaucuaaagg

SEQ ID NO: 3062655 - RNA, 19 nt, Artificial Sequence
  Description of Artificial Sequence: Synthetic oligonucleotide
uauaauuugucucagggau

SEQ ID NO: 3062656 - RNA, 19 nt, Artificial Sequence
  Description of Artificial Sequence: Synthetic oligonucleotide
aaauggaguuuccaggugg
